United States Patent Application Publication US 2005/0244851 A1 - sequence listing, part 85

SEQ ID NO: 3310345 - DNA, 25 bp, Homo sapien
cactctcggcatgatgtacagagta

SEQ ID NO: 3310346 - DNA, 25 bp, Homo sapien
ggaacgccacatcgctctcgacttg

SEQ ID NO: 3310347 - DNA, 25 bp, Homo sapien
gcaggagaatggaacgccacatcgc

SEQ ID NO: 3310348 - DNA, 25 bp, Homo sapien
catcgctctcgacttgcattggaat

SEQ ID NO: 3310349 - DNA, 25 bp, Homo sapien
agaatggaacgccacatcgctctcg

SEQ ID NO: 3310350 - DNA, 25 bp, Homo sapien
gtaaatatttaggttccaatcatca

SEQ ID NO: 3310351 - DNA, 25 bp, Homo sapien
ttaggttccaatcatcagctccaaa

SEQ ID NO: 3310352 - DNA, 25 bp, Homo sapien
tatttaggttccaatcatcagctcc

SEQ ID NO: 3310353 - DNA, 25 bp, Homo sapien
aaatatttaggttccaatcatcagc

SEQ ID NO: 3310354 - DNA, 25 bp, Homo sapien
gcttgggcacgtcattctagaagga

SEQ ID NO: 3310355 - DNA, 25 bp, Homo sapien
caactgatgagacctgtggtgttag

SEQ ID NO: 3310356 - DNA, 25 bp, Homo sapien
ttgttttatggagcgcagggagacc

SEQ ID NO: 3310357 - DNA, 25 bp, Homo sapien
tatgggtgggctaactatagcttac

SEQ ID NO: 3310358 - DNA, 25 bp, Homo sapien
caatgtcatcccgatatgctctgat

SEQ ID NO: 3310359 - DNA, 25 bp, Homo sapien
ggtctttgatccagtctttgaaaac

SEQ ID NO: 3310360 - DNA, 25 bp, Homo sapien
aaaacaaatgctagaactccggcag

SEQ ID NO: 3310361 - DNA, 25 bp, Homo sapien
tgaagtctatgaggttttgcaaatc

SEQ ID NO: 3310362 - DNA, 25 bp, Homo sapien
tggtaactgcccgtaactctggaga

SEQ ID NO: 3310363 - DNA, 25 bp, Homo sapien
tagagcctcggtcaaccaagaaggt

SEQ ID NO: 3310364 - DNA, 25 bp, Homo sapien
gggagacttccgcttaatgtagaca

SEQ ID NO: 3310365 - DNA, 25 bp, Homo sapien
cagtgtaaataacgccctgccctgt

SEQ ID NO: 3310366 - DNA, 25 bp, Homo sapien
tctcataccttctgttcgaagatta

SEQ ID NO: 3310367 - DNA, 25 bp, Homo sapien
cttctgttcgaagattattccaggc

SEQ ID NO: 3310368 - DNA, 25 bp, Homo sapien
taccttctgttcgaagattattcca

SEQ ID NO: 3310369 - DNA, 25 bp, Homo sapien
ttcgaagattattccaggcaagttt

SEQ ID NO: 3310370 - DNA, 25 bp, Homo sapien
gcaacagatgagtatgaccaggacc

SEQ ID NO: 3310371 - DNA, 25 bp, Homo sapien
tgagatgcctcaagccaagaagact

SEQ ID NO: 3310372 - DNA, 25 bp, Homo sapien
aaatacaattcagaggatcccagcc

SEQ ID NO: 3310373 - DNA, 25 bp, Homo sapien
caatcaggctacaggaaagctggca

SEQ ID NO: 3310374 - DNA, 25 bp, Homo sapien
taagatacataaacggcacatgcca

SEQ ID NO: 3310375 - DNA, 25 bp, Homo sapien
tatagagagctatgattcagacgcc

SEQ ID NO: 3310376 - DNA, 25 bp, Homo sapien
gaaacgagtctccaacgcaaaggct

SEQ ID NO: 3310377 - DNA, 25 bp, Homo sapien
catgctgacaggcacatttggctac

SEQ ID NO: 3310378 - DNA, 25 bp, Homo sapien
atgacctgggccctactttggccag

SEQ ID NO: 3310379 - DNA, 25 bp, Homo sapien
tgcctgtagatagggtgacctcctg

SEQ ID NO: 3310380 - DNA, 25 bp, Homo sapien
ggaatcagggctagagagctctctc

SEQ ID NO: 3310381 - DNA, 25 bp, Homo sapien
tggccagtgcctttggtacagctca

SEQ ID NO: 3310382 - DNA, 25 bp, Homo sapien
caaagccgccgagatcggtgatgga

SEQ ID NO: 3310383 - DNA, 25 bp, Homo sapien
aagtgttttcccgtagcgctccaat

SEQ ID NO: 3310384 - DNA, 25 bp, Homo sapien
tagcgctccaatgcaccctgcaaat

SEQ ID NO: 3310385 - DNA, 25 bp, Homo sapien
gagccaaactgggtcaaagccgccg

SEQ ID NO: 3310386 - DNA, 25 bp, Homo sapien
tttcagtgtctgcaaatataagagg

SEQ ID NO: 3310387 - DNA, 25 bp, Homo sapien
ttcagtgtctgcaaatataagaggt

SEQ ID NO: 3310388 - DNA, 25 bp, Homo sapien
tttggtttcagtgtctgcaaatata

SEQ ID NO: 3310389 - DNA, 25 bp, Homo sapien
ggtttcagtgtctgcaaatataaga

SEQ ID NO: 3310390 - DNA, 25 bp, Homo sapien
tcaactgtttccacggaaacaacaa

SEQ ID NO: 3310391 - DNA, 25 bp, Homo sapien
gagccttcaactgtttccacggaaa

SEQ ID NO: 3310392 - DNA, 25 bp, Homo sapien
taattgagagccttcaactgtttcc

SEQ ID NO: 3310393 - DNA, 25 bp, Homo sapien
tcagaggcagttttaattgagagcc

SEQ ID NO: 3310394 - DNA, 25 bp, Homo sapien
taagggagcaagagcagcttagttc

SEQ ID NO: 3310395 - DNA, 25 bp, Homo sapien
cagaggccagagtgacgactaggaa

SEQ ID NO: 3310396 - DNA, 25 bp, Homo sapien
tatgaaatgtgtacccaaagctggg

SEQ ID NO: 3310397 - DNA, 25 bp, Homo sapien
tccaactgctggataagaaagagag

SEQ ID NO: 3310398 - DNA, 25 bp, Homo sapien
ccgccgacaaaggacatctttcttt

SEQ ID NO: 3310399 - DNA, 25 bp, Homo sapien
atctttcttttgtgcgcctcggtga

SEQ ID NO: 3310400 - DNA, 25 bp, Homo sapien
tctttcttttgtgcgcctcggtgaa

SEQ ID NO: 3310401 - DNA, 25 bp, Homo sapien
accaccgccgacaaaggacatcttt

SEQ ID NO: 3310402 - DNA, 25 bp, Homo sapien
gaaaacacggggacagcacggaaga

SEQ ID NO: 3310403 - DNA, 25 bp, Homo sapien
gaggtggcctgaggtcatcctggac

SEQ ID NO: 3310404 - DNA, 25 bp, Homo sapien
ctggagaaaacacggggacagcacg

SEQ ID NO: 3310405 - DNA, 25 bp, Homo sapien
aggtggcctgaggtcatcctggacg

SEQ ID NO: 3310406 - DNA, 25 bp, Homo sapien
ctagagaacccagcgtagtgagtgc

SEQ ID NO: 3310407 - DNA, 25 bp, Homo sapien
gaaactggcctgtactgctatgaca

SEQ ID NO: 3310408 - DNA, 25 bp, Homo sapien
cagacagtgggctgggaaaaaccct

SEQ ID NO: 3310409 - DNA, 25 bp, Homo sapien
tgtaaagccccaagtctagatgaga

SEQ ID NO: 3310410 - DNA, 25 bp, Homo sapien
gcacaagccctgcccatgctatgtg

SEQ ID NO: 3310411 - DNA, 25 bp, Homo sapien
cacaagccctgcccatgctatgtgc

SEQ ID NO: 3310412 - DNA, 25 bp, Homo sapien
acaagccctgcccatgctatgtgct

SEQ ID NO: 3310413 - DNA, 25 bp, Homo sapien
acagcctatggtcatgtgtccaggg

SEQ ID NO: 3310414 - DNA, 25 bp, Homo sapien
ctttgtgctcttgccccatattaag

SEQ ID NO: 3310415 - DNA, 25 bp, Homo sapien
gccccatattaagagtggacagcct

SEQ ID NO: 3310416 - DNA, 25 bp, Homo sapien
taagagtggacagcctatggtcatg

SEQ ID NO: 3310417 - DNA, 25 bp, Homo sapien
tccatgcccacagtccaattccaag

SEQ ID NO: 3310418 - DNA, 25 bp, Homo sapien
ttccatgcccacagtccaattccaa

SEQ ID NO: 3310419 - DNA, 25 bp, Homo sapien
tccctcctgctgctgatggtgtgga

SEQ ID NO: 3310420 - DNA, 25 bp, Homo sapien
cctcctgctgctgatggtgtggaca

SEQ ID NO: 3310421 - DNA, 25 bp, Homo sapien
ctcctgctgctgatggtgtggacat

SEQ ID NO: 3310422 - DNA, 25 bp, Homo sapien
tgtccctcctgctgctgatggtgtg

SEQ ID NO: 3310423 - DNA, 25 bp, Homo sapien
tgaacagactcaaaataacagcaca

SEQ ID NO: 3310424 - DNA, 25 bp, Homo sapien
tcttaaattgacactttcaatcctc

SEQ ID NO: 3310425 - DNA, 25 bp, Homo sapien
catctgcccaggatcctgtgaacag

SEQ ID NO: 3310426 - DNA, 25 bp, Homo sapien
aaaacatagcaattacattgatggc

SEQ ID NO: 3310427 - DNA, 25 bp, Homo sapien
tgccaggacccttcttaatagctat

SEQ ID NO: 3310428 - DNA, 25 bp, Homo sapien
gctatcatagaagttatacctccga

SEQ ID NO: 3310429 - DNA, 25 bp, Homo sapien
tcaagtccacgctgaaacaggaagt

SEQ ID NO: 3310430 - DNA, 25 bp, Homo sapien
ggccttttgaaataaacgctccatc

SEQ ID NO: 3310431 - DNA, 25 bp, Homo sapien
ggtgtaatctatgaagtgcacaggg

SEQ ID NO: 3310432 - DNA, 25 bp, Homo sapien
gaggactaacggtgtaatctatgaa

SEQ ID NO: 3310433 - DNA, 25 bp, Homo sapien
aaagcccggatgtcatcactagagg

SEQ ID NO: 3310434 - DNA, 25 bp, Homo sapien
ctccgggaacaactgtgaggactaa

SEQ ID NO: 3310435 - DNA, 25 bp, Homo sapien
gagagaacatgccaacagtcgactg

SEQ ID NO: 3310436 - DNA, 25 bp, Homo sapien
tgagagaacatgccaacagtcgact

SEQ ID NO: 3310437 - DNA, 25 bp, Homo sapien
ctgagagaacatgccaacagtcgac

SEQ ID NO: 3310438 - DNA, 25 bp, Homo sapien
cacagattgacagtggtagagccag

SEQ ID NO: 3310439 - DNA, 25 bp, Homo sapien
gacagactgggatgattagacctca

SEQ ID NO: 3310440 - DNA, 25 bp, Homo sapien
tcagccatacttaacccaggtgtca

SEQ ID NO: 3310441 - DNA, 25 bp, Homo sapien
tgtacaagggctagctagacctgcc

SEQ ID NO: 3310442 - DNA, 25 bp, Homo sapien
tgcttctacagggtaaaaaactgcc

SEQ ID NO: 3310443 - DNA, 25 bp, Homo sapien
gttgctacctacctagtgactggga

SEQ ID NO: 3310444 - DNA, 25 bp, Homo sapien
tcctcactgcgtctcagaacttggg

SEQ ID NO: 3310445 - DNA, 25 bp, Homo sapien
tacgagacattaagtagcctggact

SEQ ID NO: 3310446 - DNA, 25 bp, Homo sapien
ttcagactctgagttccttgatgta

SEQ ID NO: 3310447 - DNA, 25 bp, Homo sapien
ttgatgtaggtgttgtatcttggac

SEQ ID NO: 3310448 - DNA, 25 bp, Homo sapien
cagccttgacttcagactctgagtt

SEQ ID NO: 3310449 - DNA, 25 bp, Homo sapien
aggtgttgtatcttggacatggcac

SEQ ID NO: 3310450 - DNA, 25 bp, Homo sapien
gtgattttcattctttagcatttgc

SEQ ID NO: 3310451 - DNA, 25 bp, Homo sapien
attttagaataagtgtgatgagttg

SEQ ID NO: 3310452 - DNA, 25 bp, Homo sapien
gacagactgtttgttgtgattttca

SEQ ID NO: 3310453 - DNA, 25 bp, Homo sapien
agaataagtgtgatgagttgctgag

SEQ ID NO: 3310454 - DNA, 25 bp, Homo sapien
tggcaaggtcatcctggttttgctc

SEQ ID NO: 3310455 - DNA, 25 bp, Homo sapien
ctgcctgctcctcactcttggccat

SEQ ID NO: 3310456 - DNA, 25 bp, Homo sapien
tttgtggctgttctgcctgctcctc

SEQ ID NO: 3310457 - DNA, 25 bp, Homo sapien
tggctgttctgcctgctcctcactc

SEQ ID NO: 3310458 - DNA, 25 bp, Homo sapien
tgtggctgttctgcctgctcctcac

SEQ ID NO: 3310459 - DNA, 25 bp, Homo sapien
cattgactctttgagctaactggcc

SEQ ID NO: 3310460 - DNA, 25 bp, Homo sapien
ttatcagtcttgatttagtttggca

SEQ ID NO: 3310461 - DNA, 25 bp, Homo sapien
gagcctgtgttctcgcatcgtggat

SEQ ID NO: 3310462 - DNA, 25 bp, Homo sapien
acagcgtttcaactctgcatgagcc

SEQ ID NO: 3310463 - DNA, 25 bp, Homo sapien
ttttctatatgtgaacttcacgaca

SEQ ID NO: 3310464 - DNA, 25 bp, Homo sapien
gaacttcacgacatttgatttatcc

SEQ ID NO: 3310465 - DNA, 25 bp, Homo sapien
tatgtgaacttcacgacatttgatt

SEQ ID NO: 3310466 - DNA, 25 bp, Homo sapien
tctatatgtgaacttcacgacattt

SEQ ID NO: 3310467 - DNA, 25 bp, Homo sapien
ggtgagaacttccagtgccatgttg

SEQ ID NO: 3310468 - DNA, 25 bp, Homo sapien
ttgactttttgatttggtcctcggc

SEQ ID NO: 3310469 - DNA, 25 bp, Homo sapien
ggtcctcggctagatcattactgta

SEQ ID NO: 3310470 - DNA, 25 bp, Homo sapien
gagtcatgaaagtgggcatgcttct

SEQ ID NO: 3310471 - DNA, 25 bp, Homo sapien
gatcttatatttccatgatcagttg

SEQ ID NO: 3310472 - DNA, 25 bp, Homo sapien
tggtctctagttcatgtagttttgc

SEQ ID NO: 3310473 - DNA, 25 bp, Homo sapien
tcaatttcactactcatcattggtc

SEQ ID NO: 3310474 - DNA, 25 bp, Homo sapien
cttcaatctcaggaggttgtgtccc

SEQ ID NO: 3310475 - DNA, 25 bp, Homo sapien
gcatcaaactaaatctccaagagga

SEQ ID NO: 3310476 - DNA, 25 bp, Homo sapien
cctaatttgctgtctaaaagtgttg

SEQ ID NO: 3310477 - DNA, 25 bp, Homo sapien
taaaaactactgtctctatgtggtg

SEQ ID NO: 3310478 - DNA, 25 bp, Homo sapien
agttcaaggctaaaactctaaattg

SEQ ID NO: 3310479 - DNA, 25 bp, Homo sapien
tcagaatgtttcttaggatcaccag

SEQ ID NO: 3310480 - DNA, 25 bp, Homo sapien
ggatcaccagatcagaaggccacaa

SEQ ID NO: 3310481 - DNA, 25 bp, Homo sapien
acttcgtaagaatgggctccctcca

SEQ ID NO: 3310482 - DNA, 25 bp, Homo sapien
agatttcagctaattgtaccccaga

SEQ ID NO: 3310483 - DNA, 25 bp, Homo sapien
aaatttggttaaatgcctttgcacg

SEQ ID NO: 3310484 - DNA, 25 bp, Homo sapien
tcacagcgtgaaccattatggagaa

SEQ ID NO: 3310485 - DNA, 25 bp, Homo sapien
gattccaaagccctgcaatgattta

SEQ ID NO: 3310486 - DNA, 25 bp, Homo sapien
aaatccataatctaacgcgctaatc

SEQ ID NO: 3310487 - DNA, 25 bp, Homo sapien
ccttctgtggattgagataggccat

SEQ ID NO: 3310488 - DNA, 25 bp, Homo sapien
gactactgggctgggtcttttgaag

SEQ ID NO: 3310489 - DNA, 25 bp, Homo sapien
gtcaattccatccttcctgtagaag

SEQ ID NO: 3310490 - DNA, 25 bp, Homo sapien
catagcttatacgtacctggcaggg

SEQ ID NO: 3310491 - DNA, 25 bp, Homo sapien
catgagagcttttgagcaaattttc

SEQ ID NO: 3310492 - DNA, 25 bp, Homo sapien
gatattcttgtggatgtgacaccac

SEQ ID NO: 3310493 - DNA, 25 bp, Homo sapien
gtagaccacgcatttactgattgac

SEQ ID NO: 3310494 - DNA, 25 bp, Homo sapien
ccattgctctgtattaaatttggac

SEQ ID NO: 3310495 - DNA, 25 bp, Homo sapien
tgtgagccatgttatgccaaagcct

SEQ ID NO: 3310496 - DNA, 25 bp, Homo sapien
tcagtggcctagagtacatgcttca

SEQ ID NO: 3310497 - DNA, 25 bp, Homo sapien
tgccaatggtcagtccaggtgcctg

SEQ ID NO: 3310498 - DNA, 25 bp, Homo sapien
gatgctgctgcaacaaagtggtcca

SEQ ID NO: 3310499 - DNA, 25 bp, Homo sapien
ggcaggcttgttttctcccgcctga

SEQ ID NO: 3310500 - DNA, 25 bp, Homo sapien
agataccatacagaggagaagcagg

SEQ ID NO: 3310501 - DNA, 25 bp, Homo sapien
ttctcccgcctgatgttgtaagagg

SEQ ID NO: 3310502 - DNA, 25 bp, Homo sapien
caccacaagcggcaggcttgttttc

SEQ ID NO: 3310503 - DNA, 25 bp, Homo sapien
ggcacatctaaccatttacaaagaa

SEQ ID NO: 3310504 - DNA, 25 bp, Homo sapien
ttttcagtggttcggagatgtggct

SEQ ID NO: 3310505 - DNA, 25 bp, Homo sapien
gaatccagaaatcccaggatccagc

SEQ ID NO: 3310506 - DNA, 25 bp, Homo sapien
cagcacggttgggatgtaatcgcag

SEQ ID NO: 3310507 - DNA, 25 bp, Homo sapien
tgactggagtttctatctctgggac

SEQ ID NO: 3310508 - DNA, 25 bp, Homo sapien
gactggttgggaccatgataggacc

SEQ ID NO: 3310509 - DNA, 25 bp, Homo sapien
gataggaccatattcattagattgc

SEQ ID NO: 3310510 - DNA, 25 bp, Homo sapien
gaaaatttgctgaacctggatgtga

SEQ ID NO: 3310511 - DNA, 25 bp, Homo sapien
gcgtggaccctgaagtccgtggcca

SEQ ID NO: 3310512 - DNA, 25 bp, Homo sapien
tcacataaagggcggtgtgaagaac

SEQ ID NO: 3310513 - DNA, 25 bp, Homo sapien
agtccgtggccactcatggagggca

SEQ ID NO: 3310514 - DNA, 25 bp, Homo sapien
cggtgtgaagaaccgcgtggaccct

SEQ ID NO: 3310515 - DNA, 25 bp, Homo sapien
tatgtactaccagacattgtggata

SEQ ID NO: 3310516 - DNA, 25 bp, Homo sapien
caatgatattacagtccggtggtgg

SEQ ID NO: 3310517 - DNA, 25 bp, Homo sapien
ccagggcagtgaccatttcctttgg

SEQ ID NO: 3310518 - DNA, 25 bp, Homo sapien
tgttcacacgttcaagaaacaagta

SEQ ID NO: 3310519 - DNA, 25 bp, Homo sapien
tccaagggccctatcaaggtttctc

SEQ ID NO: 3310520 - DNA, 25 bp, Homo sapien
tagcataagctgcagtgcttcatcc

SEQ ID NO: 3310521 - DNA, 25 bp, Homo sapien
cttatggcactaggtcttacaatga

SEQ ID NO: 3310522 - DNA, 25 bp, Homo sapien
gtttccagtctaacagggccttgat

SEQ ID NO: 3310523 - DNA, 25 bp, Homo sapien
gacctgatccccaacagacacatgg

SEQ ID NO: 3310524 - DNA, 25 bp, Homo sapien
gcctggtgaagtctgctttttgtaa

SEQ ID NO: 3310525 - DNA, 25 bp, Homo sapien
aagaagttagaggccgctctgcctg

SEQ ID NO: 3310526 - DNA, 25 bp, Homo sapien
taaaagcacgaagggtgcctagcga

SEQ ID NO: 3310527 - DNA, 25 bp, Homo sapien
gcttctatagggtaacaatgatcta

SEQ ID NO: 3310528 - DNA, 25 bp, Homo sapien
tacatatgacacctccctaaagcac

SEQ ID NO: 3310529 - DNA, 25 bp, Homo sapien
catgccaactgaaagcttctatagg

SEQ ID NO: 3310530 - DNA, 25 bp, Homo sapien
ctttcctctaagttacatatgacac

SEQ ID NO: 3310531 - DNA, 25 bp, Homo sapien
gagaaacaatactcaccctccacaa

SEQ ID NO: 3310532 - DNA, 25 bp, Homo sapien
cttcctttatcaggaatgccatcaa

SEQ ID NO: 3310533 - DNA, 25 bp, Homo sapien
tccacaaacctatgcccaagtgcag

SEQ ID NO: 3310534 - DNA, 25 bp, Homo sapien
gaatgccatcaatcttcatcacagg

SEQ ID NO: 3310535 - DNA, 25 bp, Homo sapien
ttaataacagcacgcaaaaacctga

SEQ ID NO: 3310536 - DNA, 25 bp, Homo sapien
ttcaataagttgcagaatataccag

SEQ ID NO: 3310537 - DNA, 25 bp, Homo sapien
taggtaggaagttctaaagtgtcaa

SEQ ID NO: 3310538 - DNA, 25 bp, Homo sapien
tataccaggccaatacgcaaaattc

SEQ ID NO: 3310539 - DNA, 25 bp, Homo sapien
taacacacaatccagaggctattta

SEQ ID NO: 3310540 - DNA, 25 bp, Homo sapien
cagtaaaatttacaagaagcaccac

SEQ ID NO: 3310541 - DNA, 25 bp, Homo sapien
taggtaagactacgtgcacatgcca

SEQ ID NO: 3310542 - DNA, 25 bp, Homo sapien
gtcaaatctaaagaaacaaggtcat

SEQ ID NO: 3310543 - DNA, 25 bp, Homo sapien
cctttagcacatcgtaatctttttg

SEQ ID NO: 3310544 - DNA, 25 bp, Homo sapien
tgactgatgacggtggtggcgctga

SEQ ID NO: 3310545 - DNA, 25 bp, Homo sapien
tgatgacggtggtggcgctgaaggt

SEQ ID NO: 3310546 - DNA, 25 bp, Homo sapien
catttaagcctttagcacatcgtaa

SEQ ID NO: 3310547 - DNA, 25 bp, Homo sapien
taagtttgccttcttacatgggcgt

SEQ ID NO: 3310548 - DNA, 25 bp, Homo sapien
tgggcgtggttcatgtcacaccaaa

SEQ ID NO: 3310549 - DNA, 25 bp, Homo sapien
tatggaatgtcgtgagaattaccaa

SEQ ID NO: 3310550 - DNA, 25 bp, Homo sapien
cttggctaatggtttggcccaagtt

SEQ ID NO: 3310551 - DNA, 25 bp, Homo sapien
tatgcagactctaagacagcccgat

SEQ ID NO: 3310552 - DNA, 25 bp, Homo sapien
cagatgctcatctccttcacaatgg

SEQ ID NO: 3310553 - DNA, 25 bp, Homo sapien
taatcacttccgagttatgcagact

SEQ ID NO: 3310554 - DNA, 25 bp, Homo sapien
aaataaaattggtgcccacttcagc

SEQ ID NO: 3310555 - DNA, 25 bp, Homo sapien
gaacgaccgctctattggactgcca

SEQ ID NO: 3310556 - DNA, 25 bp, Homo sapien
gctctattggactgccatttccttt

SEQ ID NO: 3310557 - DNA, 25 bp, Homo sapien
ttggtcattttgaacgaccgctcta

SEQ ID NO: 3310558 - DNA, 25 bp, Homo sapien
tggacacttgagaaacaactacttt

SEQ ID NO: 3310559 - DNA, 25 bp, Homo sapien
ctggagtgtatgaaaacaggctgaa

SEQ ID NO: 3310560 - DNA, 25 bp, Homo sapien
gaggtcttggcactctgtgatctcg

SEQ ID NO: 3310561 - DNA, 25 bp, Homo sapien
gatctcgtagtactgcagcacccag

SEQ ID NO: 3310562 - DNA, 25 bp, Homo sapien
gtcatttcaatcacgcagcactgca

SEQ ID NO: 3310563 - DNA, 25 bp, Homo sapien
gtaaactcattatcatcactccggg

SEQ ID NO: 3310564 - DNA, 25 bp, Homo sapien
tggcatctgtatgcacacggcacat

SEQ ID NO: 3310565 - DNA, 25 bp, Homo sapien
tccaaaagggacactgaacacttgt

SEQ ID NO: 3310566 - DNA, 25 bp, Homo sapien
tgtttgaattcacaggattctagac

SEQ ID NO: 3310567 - DNA, 25 bp, Homo sapien
taacacgctagacataagctgcggg

SEQ ID NO: 3310568 - DNA, 25 bp, Homo sapien
gagtgtgaacgaacaaagtatctgt

SEQ ID NO: 3310569 - DNA, 25 bp, Homo sapien
gaaccctattcgttatagcataaca

SEQ ID NO: 3310570 - DNA, 25 bp, Homo sapien
tcaccacggagaggaacagtcttct

SEQ ID NO: 3310571 - DNA, 25 bp, Homo sapien
ccccagaaaaggatgtgtaccctca

SEQ ID NO: 3310572 - DNA, 25 bp, Homo sapien
cactggagtcaatcacatggagtcc

SEQ ID NO: 3310573 - DNA, 25 bp, Homo sapien
tgtgtaccctcacacaatgtttgac

SEQ ID NO: 3310574 - DNA, 25 bp, Homo sapien
cattaaaactaataacacaccaggg

SEQ ID NO: 3310575 - DNA, 25 bp, Homo sapien
tcttcccaggcaagaatgtgcgacc

SEQ ID NO: 3310576 - DNA, 25 bp, Homo sapien
gctgcctcgtctgtgaagtggacca

SEQ ID NO: 3310577 - DNA, 25 bp, Homo sapien
gaaaatatgccagatgcttaccaac

SEQ ID NO: 3310578 - DNA, 25 bp, Homo sapien
tctgcgaaatgtcagggcacgtggc

SEQ ID NO: 3310579 - DNA, 25 bp, Homo sapien
tatctctcggtggtggttacagcat

SEQ ID NO: 3310580 - DNA, 25 bp, Homo sapien
tacacaaccttggagagaacccagg

SEQ ID NO: 3310581 - DNA, 25 bp, Homo sapien
cagtgctgccttggatcgggaacca

SEQ ID NO: 3310582 - DNA, 25 bp, Homo sapien
tctcctcgtggcaggtaacactagt

SEQ ID NO: 3310583 - DNA, 25 bp, Homo sapien
tcatcaatgctccaaaaaagggtac

SEQ ID NO: 3310584 - DNA, 25 bp, Homo sapien
tgaagcattgtaagagagagcaacc

SEQ ID NO: 3310585 - DNA, 25 bp, Homo sapien
cagctgggtatgagtgatcctgaac

SEQ ID NO: 3310586 - DNA, 25 bp, Homo sapien
gcatgcagcagaacatttgtgtgta

SEQ ID NO: 3310587 - DNA, 25 bp, Homo sapien
catgaaaaactttgggcctgtatca

SEQ ID NO: 3310588 - DNA, 25 bp, Homo sapien
aaatctttggactggactgctgttg

SEQ ID NO: 3310589 - DNA, 25 bp, Homo sapien
tggcttagagtcagccaaatacggt

SEQ ID NO: 3310590 - DNA, 25 bp, Homo sapien
ggacatgtctagatacagtggaccc

SEQ ID NO: 3310591 - DNA, 25 bp, Homo sapien
ttttgaaggacatgtctagatacag

SEQ ID NO: 3310592 - DNA, 25 bp, Homo sapien
catgtctagatacagtggacccaaa

SEQ ID NO: 3310593 - DNA, 25 bp, Homo sapien
gaaggacatgtctagatacagtgga

SEQ ID NO: 3310594 - DNA, 25 bp, Homo sapien
tgcctggtccttctaagcataggaa

SEQ ID NO: 3310595 - DNA, 25 bp, Homo sapien
gaagcattgctgacccctttaccac

SEQ ID NO: 3310596 - DNA, 25 bp, Homo sapien
tactactcaacttgctgatatatca

SEQ ID NO: 3310597 - DNA, 25 bp, Homo sapien
tctgcaacaccagcttttaaaacaa

SEQ ID NO: 3310598 - DNA, 25 bp, Homo sapien
aaatcttaacatatgcactgactgc

SEQ ID NO: 3310599 - DNA, 25 bp, Homo sapien
gactgttgctattcacaaaggtaca

SEQ ID NO: 3310600 - DNA, 25 bp, Homo sapien
tcaaatgggttatttgctgctgacc

SEQ ID NO: 3310601 - DNA, 25 bp, Homo sapien
tatggtcagccactctaagaggtac

SEQ ID NO: 3310602 - DNA, 25 bp, Homo sapien
tcgactggcaaaacgtccacaaggc

SEQ ID NO: 3310603 - DNA, 25 bp, Homo sapien
tactttgctgaatcgctcgactggc

SEQ ID NO: 3310604 - DNA, 25 bp, Homo sapien
taatgctctggtagctctgagaccc

SEQ ID NO: 3310605 - DNA, 25 bp, Homo sapien
tgaggataacttgccactggtgctt

SEQ ID NO: 3310606 - DNA, 25 bp, Homo sapien
gcagggccaacatgaagggagccac

SEQ ID NO: 3310607 - DNA, 25 bp, Homo sapien
cagactagtggtgtcataaaaaccc

SEQ ID NO: 3310608 - DNA, 25 bp, Homo sapien
gcctgggcctccacgagtcttagat

SEQ ID NO: 3310609 - DNA, 25 bp, Homo sapien
tccaactgctgctaggaagccaggc

SEQ ID NO: 3310610 - DNA, 25 bp, Homo sapien
tatccttcgctcaatatggtgaccc

SEQ ID NO: 3310611 - DNA, 25 bp, Homo sapien
ggatcagacagaattccacttgaca

SEQ ID NO: 3310612 - DNA, 25 bp, Homo sapien
gactagtagataggacagaagctgg

SEQ ID NO: 3310613 - DNA, 25 bp, Homo sapien
tgtaggattccccacaagcatatcc

SEQ ID NO: 3310614 - DNA, 25 bp, Homo sapien
tgacggaataactgtggtcccataa

SEQ ID NO: 3310615 - DNA, 25 bp, Homo sapien
gatcctgtataggtctaggctaatg

SEQ ID NO: 3310616 - DNA, 25 bp, Homo sapien
gtcccacactacataacgacatttt

SEQ ID NO: 3310617 - DNA, 25 bp, Homo sapien
ttcctattgtctagtgatgtattga

SEQ ID NO: 3310618 - DNA, 25 bp, Homo sapien
tatacaagtttgtggtccaggagca

SEQ ID NO: 3310619 - DNA, 25 bp, Homo sapien
tgtagtaggctacacaccgtctatg

SEQ ID NO: 3310620 - DNA, 25 bp, Homo sapien
taaaaagtccaaggatatagatcag

SEQ ID NO: 3310621 - DNA, 25 bp, Homo sapien
ggagcaacaggttatgccatacagc

SEQ ID NO: 3310622 - DNA, 25 bp, Homo sapien
taaaagccactaatgtaagagcaca

SEQ ID NO: 3310623 - DNA, 25 bp, Homo sapien
cactaatgtaagagcacatttttcc

SEQ ID NO: 3310624 - DNA, 25 bp, Homo sapien
aggtttgctaaattcaaggcctcat

SEQ ID NO: 3310625 - DNA, 25 bp, Homo sapien
tgctaaattcaaggcctcataggga

SEQ ID NO: 3310626 - DNA, 25 bp, Homo sapien
gcattatgtaaatagactcattcca

SEQ ID NO: 3310627 - DNA, 25 bp, Homo sapien
cactaactcgtcattgaacaatgaa

SEQ ID NO: 3310628 - DNA, 25 bp, Homo sapien
ttccaaagctgaccataagcaatac

SEQ ID NO: 3310629 - DNA, 25 bp, Homo sapien
tgttctcggagcacctgacgaagag

SEQ ID NO: 3310630 - DNA, 25 bp, Homo sapien
gacctaactcctgatcctcgctgaa

SEQ ID NO: 3310631 - DNA, 25 bp, Homo sapien
aatggctgaactttgggactcgctg

SEQ ID NO: 3310632 - DNA, 25 bp, Homo sapien
ggagtcacaacccatctgaggacca

SEQ ID NO: 3310633 - DNA, 25 bp, Homo sapien
tcgtgtttacgcaacagggagtcac

SEQ ID NO: 3310634 - DNA, 25 bp, Homo sapien
tgctcttcggatggttagaaaagcc

SEQ ID NO: 3310635 - DNA, 25 bp, Homo sapien
tcaattccagacagtagcagaggct

SEQ ID NO: 3310636 - DNA, 25 bp, Homo sapien
caaagtgttcgttggctgccaggga

SEQ ID NO: 3310637 - DNA, 25 bp, Homo sapien
gaaagcaagtgcagtttagcctggg

SEQ ID NO: 3310638 - DNA, 25 bp, Homo sapien
ttgaagcccttataatccagtggag

SEQ ID NO: 3310639 - DNA, 25 bp, Homo sapien
caagaatgctgtctacaatactcca

SEQ ID NO: 3310640 - DNA, 25 bp, Homo sapien
tactgtgtttcagacaatgcgcaag

SEQ ID NO: 3310641 - DNA, 25 bp, Homo sapien
gacactgggcttatgaaagtgagac

SEQ ID NO: 3310642 - DNA, 25 bp, Homo sapien
cagggactacctattactgtggaca

SEQ ID NO: 3310643 - DNA, 25 bp, Homo sapien
cacttggcttcatttcaatctgcgg

SEQ ID NO: 3310644 - DNA, 25 bp, Homo sapien
caatctgcggagtatatcaagtgag

SEQ ID NO: 3310645 - DNA, 25 bp, Homo sapien
ggagtggccacactaagcaagccta

SEQ ID NO: 3310646 - DNA, 25 bp, Homo sapien
tcataattgtatgggagtagcaccg

SEQ ID NO: 3310647 - DNA, 25 bp, Homo sapien
taactgatgaagagccaaactgctg

SEQ ID NO: 3310648 - DNA, 25 bp, Homo sapien
cagtgtatgtcaaatgtagtctagc

SEQ ID NO: 3310649 - DNA, 25 bp, Homo sapien
gaaaagaaccaagctctcagtgctg

SEQ ID NO: 3310650 - DNA, 25 bp, Homo sapien
ggagagcgtgcaggaaacgttattt

SEQ ID NO: 3310651 - DNA, 25 bp, Homo sapien
catataccacggcatctgcatccta

SEQ ID NO: 3310652 - DNA, 25 bp, Homo sapien
ttatttacgtgcaattacaggacca

SEQ ID NO: 3310653 - DNA, 25 bp, Homo sapien
gcaattacaggaccatataccacgg

SEQ ID NO: 3310654 - DNA, 25 bp, Homo sapien
tgaagtatttgatgcaacaactgac

SEQ ID NO: 3310655 - DNA, 25 bp, Homo sapien
atgaagtatttgatgcaacaactga

SEQ ID NO: 3310656 - DNA, 25 bp, Homo sapien
ggacccttgtagtgcttcccggaca

SEQ ID NO: 3310657 - DNA, 25 bp, Homo sapien
gacccttgtagtgcttcccggacat

SEQ ID NO: 3310658 - DNA, 25 bp, Homo sapien
ttcaggacccttgtagtgcttcccg

SEQ ID NO: 3310659 - DNA, 25 bp, Homo sapien
caggacccttgtagtgcttcccgga

SEQ ID NO: 3310660 - DNA, 25 bp, Homo sapien
aagcaccgttgctcggagcagcccg

SEQ ID NO: 3310661 - DNA, 25 bp, Homo sapien
acgctagccccgaacacaaagcgag

SEQ ID NO: 3310662 - DNA, 25 bp, Homo sapien
acttgccccggcagcccgagtttgg

SEQ ID NO: 3310663 - DNA, 25 bp, Homo sapien
gaagccgcgcgctgcaagctcaagc

SEQ ID NO: 3310664 - DNA, 25 bp, Homo sapien
cttgctcgcccgcccgttcgcgcgc

SEQ ID NO: 3310665 - DNA, 25 bp, Homo sapien
gctcgcccgcccgttcgcgcgcgcc

SEQ ID NO: 3310666 - DNA, 25 bp, Homo sapien
ctcgcccgcccgttcgcgcgcgccc

SEQ ID NO: 3310667 - DNA, 25 bp, Homo sapien
ttgctcgcccgcccgttcgcgcgcg

SEQ ID NO: 3310668 - DNA, 25 bp, Homo sapien
ctgggggtgggtccgcatttccagg

SEQ ID NO: 3310669 - DNA, 25 bp, Homo sapien
tgggggtgggtccgcatttccagga

SEQ ID NO: 3310670 - DNA, 25 bp, Homo sapien
gctgggggtgggtccgcatttccag

SEQ ID NO: 3310671 - DNA, 25 bp, Homo sapien
tcacagccataaccaatataatttt

SEQ ID NO: 3310672 - DNA, 25 bp, Homo sapien
cacagccataaccaatataattttc

SEQ ID NO: 3310673 - DNA, 25 bp, Homo sapien
aaatccaacatcttcacatcactag

SEQ ID NO: 3310674 - DNA, 25 bp, Homo sapien
tcttcacatcactagattcacagcc

SEQ ID NO: 3310675 - DNA, 25 bp, Homo sapien
tgctgagttgtatagccccagaaat

SEQ ID NO: 3310676 - DNA, 25 bp, Homo sapien
gccgctttactctagctggtccatc

SEQ ID NO: 3310677 - DNA, 25 bp, Homo sapien
ctacctgccgctttactctagctgg

SEQ ID NO: 3310678 - DNA, 25 bp, Homo sapien
cttcctggttgcagtttccataact

SEQ ID NO: 3310679 - DNA, 25 bp, Homo sapien
ggtgagcctcttctcaatacacaga

SEQ ID NO: 3310680 - DNA, 25 bp, Homo sapien
agcacagtctgggtgagcctcttct

SEQ ID NO: 3310681 - DNA, 25 bp, Homo sapien
tctgggtgagcctcttctcaataca

SEQ ID NO: 3310682 - DNA, 25 bp, Homo sapien
tctcaatacacagagctaagtgact

SEQ ID NO: 3310683 - DNA, 25 bp, Homo sapien
taaatgagatccctgtagataaacc

SEQ ID NO: 3310684 - DNA, 25 bp, Homo sapien
gaaataaatgagatccctgtagata

SEQ ID NO: 3310685 - DNA, 25 bp, Homo sapien
gagatccctgtagataaaccacata

SEQ ID NO: 3310686 - DNA, 25 bp, Homo sapien
cagaaataaatgagatccctgtaga

SEQ ID NO: 3310687 - DNA, 25 bp, Homo sapien
tattctaaggggctagtggatcccc

SEQ ID NO: 3310688 - DNA, 25 bp, Homo sapien
ttgcagcgatgggaatgtggaaacc

SEQ ID NO: 3310689 - DNA, 25 bp, Homo sapien
tcttcagccttaaagcagattgcag

SEQ ID NO: 3310690 - DNA, 25 bp, Homo sapien
aaatttgcgcttatgtgaattgagc

SEQ ID NO: 3310691 - DNA, 25 bp, Homo sapien
cttctataccctggaatacatcctg

SEQ ID NO: 3310692 - DNA, 25 bp, Homo sapien
gaccagatgccccatgaaacatgaa

SEQ ID NO: 3310693 - DNA, 25 bp, Homo sapien
gcttctataccctggaatacatcct

SEQ ID NO: 3310694 - DNA, 25 bp, Homo sapien
gaaacatgaagagatccaaggcaga

SEQ ID NO: 3310695 - DNA, 25 bp, Homo sapien
cccatgttcctagtggcttccaagt

SEQ ID NO: 3310696 - DNA, 25 bp, Homo sapien
agtgccccagaagattttgcaggta

SEQ ID NO: 3310697 - DNA, 25 bp, Homo sapien
tttggagaaggccaacaggaaaatg

SEQ ID NO: 3310698 - DNA, 25 bp, Homo sapien
ctaaccaccagagggccaatagctg

SEQ ID NO: 3310699 - DNA, 25 bp, Homo sapien
taggagacctggattacgagacttg

SEQ ID NO: 3310700 - DNA, 25 bp, Homo sapien
gggtcaaagtgaagatccaagaagt

SEQ ID NO: 3310701 - DNA, 25 bp, Homo sapien
tacgagacttgtgtcagtgatggga

SEQ ID NO: 3310702 - DNA, 25 bp, Homo sapien
agaaagttgcggctgcagtcttgga

SEQ ID NO: 3310703 - DNA, 25 bp, Homo sapien
ttcagtgggattttccataagcctc

SEQ ID NO: 3310704 - DNA, 25 bp, Homo sapien
cataagcctccaggagtttaggata

SEQ ID NO: 3310705 - DNA, 25 bp, Homo sapien
tgtgataggagaccagagtggaccc

SEQ ID NO: 3310706 - DNA, 25 bp, Homo sapien
atgggctgtgcgcaccaagaacaag

SEQ ID NO: 3310707 - DNA, 25 bp, Homo sapien
gctgttcagccagtaactcccatta

SEQ ID NO: 3310708 - DNA, 25 bp, Homo sapien
gggtgacaaacttgctgttcagcca

SEQ ID NO: 3310709 - DNA, 25 bp, Homo sapien
caaggccctgtgcttgtggaaagcc

SEQ ID NO: 3310710 - DNA, 25 bp, Homo sapien
tgccagaaaagcgtagcagagccac

SEQ ID NO: 3310711 - DNA, 25 bp, Homo sapien
cctgagtcacagggttgtctggcat

SEQ ID NO: 3310712 - DNA, 25 bp, Homo sapien
ccctgtgccctaggggaaacacctg

SEQ ID NO: 3310713 - DNA, 25 bp, Homo sapien
tgagtcacagggttgtctggcattg

SEQ ID NO: 3310714 - DNA, 25 bp, Homo sapien
agggttgtctggcattggccctgtg

SEQ ID NO: 3310715 - DNA, 25 bp, Homo sapien
gtcctctgggctttttggatcatcc

SEQ ID NO: 3310716 - DNA, 25 bp, Homo sapien
gtccacccagaaatgtcctctgggc

SEQ ID NO: 3310717 - DNA, 25 bp, Homo sapien
ggaatgtccacccagaaatgtcctc

SEQ ID NO: 3310718 - DNA, 25 bp, Homo sapien
cctctgggctttttggatcatccat

SEQ ID NO: 3310719 - DNA, 25 bp, Homo sapien
tccaaatgtgacaggacttccttgc

SEQ ID NO: 3310720 - DNA, 25 bp, Homo sapien
caaatgtgacaggacttccttgcca

SEQ ID NO: 3310721 - DNA, 25 bp, Homo sapien
aatgtgacaggacttccttgccaca

SEQ ID NO: 3310722 - DNA, 25 bp, Homo sapien
ttccaaatgtgacaggacttccttg

SEQ ID NO: 3310723 - DNA, 25 bp, Homo sapien
gacacgaggagctcagacacttgtt

SEQ ID NO: 3310724 - DNA, 25 bp, Homo sapien
gacacttgttgtttggtgcaatgga

SEQ ID NO: 3310725 - DNA, 25 bp, Homo sapien
ctcagacacttgttgtttggtgcaa

SEQ ID NO: 3310726 - DNA, 25 bp, Homo sapien
cagctggaagacacgaggagctcag

SEQ ID NO: 3310727 - DNA, 25 bp, Homo sapien
tctcgatggggctgagaaatatctg

SEQ ID NO: 3310728 - DNA, 25 bp, Homo sapien
tcgatggggctgagaaatatctgct

SEQ ID NO: 3310729 - DNA, 25 bp, Homo sapien
ctggcttctcgatggggctgagaaa

SEQ ID NO: 3310730 - DNA, 25 bp, Homo sapien
atggggctgagaaatatctgctctc

SEQ ID NO: 3310731 - DNA, 25 bp, Homo sapien
ccatgcttaaacatgattggagagc

SEQ ID NO: 3310732 - DNA, 25 bp, Homo sapien
gattggagagcaaaaagtctgtttg

SEQ ID NO: 3310733 - DNA, 25 bp, Homo sapien
ccatgtgagggccactcttgtccat

SEQ ID NO: 3310734 - DNA, 25 bp, Homo sapien
gagggccactcttgtccatgcttaa

SEQ ID NO: 3310735 - DNA, 25 bp, Homo sapien
ccctcatcaatcatataactcatta

SEQ ID NO: 3310736 - DNA, 25 bp, Homo sapien
aggaagggcacgaaataactaagct

SEQ ID NO: 3310737 - DNA, 25 bp, Homo sapien
gcttcgtgcaccaatttttctgcca

SEQ ID NO: 3310738 - DNA, 25 bp, Homo sapien
tctgccaccctcatcaatcatataa

SEQ ID NO: 3310739 - DNA, 25 bp, Homo sapien
ccctcattttagcaactggtacctt

SEQ ID NO: 3310740 - DNA, 25 bp, Homo sapien
gcaactggtacctttctgcacatga

SEQ ID NO: 3310741 - DNA, 25 bp, Homo sapien
gaatattatggaccctcattttagc

SEQ ID NO: 3310742 - DNA, 25 bp, Homo sapien
ccaaaatgaatattatggaccctca

SEQ ID NO: 3310743 - DNA, 25 bp, Homo sapien
aaactgacaggtagattggatccct

SEQ ID NO: 3310744 - DNA, 25 bp, Homo sapien
tgacaggtagattggatccctgctg

SEQ ID NO: 3310745 - DNA, 25 bp, Homo sapien
gaaaactgacaggtagattggatcc

SEQ ID NO: 3310746 - DNA, 25 bp, Homo sapien
cttggggacctgtggaaaactgaca

SEQ ID NO: 3310747 - DNA, 25 bp, Homo sapien
aatagagcattgtcagcagtgaata

SEQ ID NO: 3310748 - DNA, 25 bp, Homo sapien
agtcaagggaatagagcattgtcag

SEQ ID NO: 3310749 - DNA, 25 bp, Homo sapien
gcattgtcagcagtgaataaacacc

SEQ ID NO: 3310750 - DNA, 25 bp, Homo sapien
gaagtcaagggaatagagcattgtc

SEQ ID NO: 3310751 - DNA, 25 bp, Homo sapien
actacatgctgctttaggtaatgca

SEQ ID NO: 3310752 - DNA, 25 bp, Homo sapien
ccacactacatgctgctttaggtaa

SEQ ID NO: 3310753 - DNA, 25 bp, Homo sapien
acatgctgctttaggtaatgcatga

SEQ ID NO: 3310754 - DNA, 25 bp, Homo sapien
cactacatgctgctttaggtaatgc

SEQ ID NO: 3310755 - DNA, 25 bp, Homo sapien
caaaacaccaactatcattatgata

SEQ ID NO: 3310756 - DNA, 25 bp, Homo sapien
ggatgatttagaaaccacctggaat

SEQ ID NO: 3310757 - DNA, 25 bp, Homo sapien
tccactttgagagaaccctggtttc

SEQ ID NO: 3310758 - DNA, 25 bp, Homo sapien
tgataacagtacataagttccagta

SEQ ID NO: 3310759 - DNA, 25 bp, Homo sapien
cacctaacagggagatagatcaaca

SEQ ID NO: 3310760 - DNA, 25 bp, Homo sapien
tgaacacttattcaccgttggtggg

SEQ ID NO: 3310761 - DNA, 25 bp, Homo sapien
aatgagcacatttgagggcataggc

SEQ ID NO: 3310762 - DNA, 25 bp, Homo sapien
gaagtagagccatgcaaaccaagct

SEQ ID NO: 3310763 - DNA, 25 bp, Homo sapien
cagtagaaatggaagatgcgaacat

SEQ ID NO: 3310764 - DNA, 25 bp, Homo sapien
gaagacaaccttcataaaagtacta

SEQ ID NO: 3310765 - DNA, 25 bp, Homo sapien
cacaaaatgacaggatggataaccc

SEQ ID NO: 3310766 - DNA, 25 bp, Homo sapien
caactagtgcatactaggcttaaca

SEQ ID NO: 3310767 - DNA, 25 bp, Homo sapien
tgaggaccaaaactgcataactcgc

SEQ ID NO: 3310768 - DNA, 25 bp, Homo sapien
taaatcaaatgccaagggaaactgg

SEQ ID NO: 3310769 - DNA, 25 bp, Homo sapien
cacaataacgaaacagatgatggtc

SEQ ID NO: 3310770 - DNA, 25 bp, Homo sapien
tctttgggaaagagtacaatctagc

SEQ ID NO: 3310771 - DNA, 25 bp, Homo sapien
cgcctggctaatttttttttcatat

SEQ ID NO: 3310772 - DNA, 25 bp, Homo sapien
tggggctacagctgcgcaccaccac

SEQ ID NO: 3310773 - DNA, 25 bp, Homo sapien
tccgcccacctcagcctcccgaagt

SEQ ID NO: 3310774 - DNA, 25 bp, Homo sapien
gaatgcaatggtgcaatatgctcac

SEQ ID NO: 3310775 - DNA, 25 bp, Homo sapien
catatattggacatctttttttttt

SEQ ID NO: 3310776 - DNA, 25 bp, Homo sapien
atggagtctggctcagctgcgcagg

SEQ ID NO: 3310777 - DNA, 25 bp, Homo sapien
agatggagtctggctcagctgcgca

SEQ ID NO: 3310778 - DNA, 25 bp, Homo sapien
ggagtctggctcagctgcgcaggct

SEQ ID NO: 3310779 - DNA, 25 bp, Homo sapien
gaccttgagtgatatgctgaagttt

SEQ ID NO: 3310780 - DNA, 25 bp, Homo sapien
ggtgcatagccttgtcactaacttt

SEQ ID NO: 3310781 - DNA, 25 bp, Homo sapien
tataacactgctttgtcacaacgcc

SEQ ID NO: 3310782 - DNA, 25 bp, Homo sapien
gaatctcaatgcctatcagtttgaa

SEQ ID NO: 3310783 - DNA, 25 bp, Homo sapien
tactgaacaagaggtgtttgtggca

SEQ ID NO: 3310784 - DNA, 25 bp, Homo sapien
tgtactatttaagtggcaactgcca

SEQ ID NO: 3310785 - DNA, 25 bp, Homo sapien
gcattgagagtactgtgataacctg

SEQ ID NO: 3310786 - DNA, 25 bp, Homo sapien
cctttgcacctaaaagctgatgctt

SEQ ID NO: 3310787 - DNA, 25 bp, Homo sapien
cagtttggcttatcctttggtctga

SEQ ID NO: 3310788 - DNA, 25 bp, Homo sapien
gatacctacaaagagtagatcaagt

SEQ ID NO: 3310789 - DNA, 25 bp, Homo sapien
catctcacaggactatacaagtatg

SEQ ID NO: 3310790 - DNA, 25 bp, Homo sapien
ggtctgatagccatacttcatctca

SEQ ID NO: 3310791 - DNA, 25 bp, Homo sapien
tcaaatggtgatgcatcagatccca

SEQ ID NO: 3310792 - DNA, 25 bp, Homo sapien
ccaagttttacaaccactgttgcta

SEQ ID NO: 3310793 - DNA, 25 bp, Homo sapien
tagaaacaactcaattcagcaacca

SEQ ID NO: 3310794 - DNA, 25 bp, Homo sapien
ttacctaagactgaatgactgtgcc

SEQ ID NO: 3310795 - DNA, 25 bp, Homo sapien
tccaaacttatgctgttcacatgga

SEQ ID NO: 3310796 - DNA, 25 bp, Homo sapien
aatatagagactgccttgcaataag

SEQ ID NO: 3310797 - DNA, 25 bp, Homo sapien
aacataataatcaaactagtgctcc

SEQ ID NO: 3310798 - DNA, 25 bp, Homo sapien
aaagaagacataatatagagactgc

SEQ ID NO: 3310799 - DNA, 25 bp, Homo sapien
cacacaaacatagatcactgatttg

SEQ ID NO: 3310800 - DNA, 25 bp, Homo sapien
caattatgtttaggaaatcacacaa

SEQ ID NO: 3310801 - DNA, 25 bp, Homo sapien
cagacatactaattctagttaggaa

SEQ ID NO: 3310802 - DNA, 25 bp, Homo sapien
gaaatgcataaatttgtagcaaagc

SEQ ID NO: 3310803 - DNA, 25 bp, Homo sapien
ctattacagagtgggccaggaacac

SEQ ID NO: 3310804 - DNA, 25 bp, Homo sapien
tcctggatccttcaccaatgttaca

SEQ ID NO: 3310805 - DNA, 25 bp, Homo sapien
taaattaaaatctagcagccatcag

SEQ ID NO: 3310806 - DNA, 25 bp, Homo sapien
gactattgtggataggtaaaatctg

SEQ ID NO: 3310807 - DNA, 25 bp, Homo sapien
gacgcagtctcctatgagaatactc

SEQ ID NO: 3310808 - DNA, 25 bp, Homo sapien
ctcgattgcttgacgcagtctccta

SEQ ID NO: 3310809 - DNA, 25 bp, Homo sapien
gattgcttgacgcagtctcctatga

SEQ ID NO: 3310810 - DNA, 25 bp, Homo sapien
tgcttgacgcagtctcctatgagaa

SEQ ID NO: 3310811 - DNA, 25 bp, Homo sapien
ttttagtggtggagccgctcttagt

SEQ ID NO: 3310812 - DNA, 25 bp, Homo sapien
tggtggagccgctcttagtagctgt

SEQ ID NO: 3310813 - DNA, 25 bp, Homo sapien
taacaacagcgccacatacatcatc

SEQ ID NO: 3310814 - DNA, 25 bp, Homo sapien
tatcacaacatgtaggtcaaatggt

SEQ ID NO: 3310815 - DNA, 25 bp, Homo sapien
caaaccccgctcctataagcttggg

SEQ ID NO: 3310816 - DNA, 25 bp, Homo sapien
tgctaactataaaccaggcacggtt

SEQ ID NO: 3310817 - DNA, 25 bp, Homo sapien
cacggtttcaagtgctagggataca

SEQ ID NO: 3310818 - DNA, 25 bp, Homo sapien
tgtctctagccaaaagcgatcgagg

SEQ ID NO: 3310819 - DNA, 25 bp, Homo sapien
gcgatcgaggtcacttcgtctctgc

SEQ ID NO: 3310820 - DNA, 25 bp, Homo sapien
tagccaaaagcgatcgaggtcactt

SEQ ID NO: 3310821 - DNA, 25 bp, Homo sapien
caaaagcgatcgaggtcacttcgtc

SEQ ID NO: 3310822 - DNA, 25 bp, Homo sapien
aaattactagacaactggatatggt

SEQ ID NO: 3310823 - DNA, 25 bp, Homo sapien
agacaactggatatggttgtacaga

SEQ ID NO: 3310824 - DNA, 25 bp, Homo sapien
aattactagacaactggatatggtt

SEQ ID NO: 3310825 - DNA, 25 bp, Homo sapien
tactagacaactggatatggttgta

SEQ ID NO: 3310826 - DNA, 25 bp, Homo sapien
tatgttagttaactcagtgcataca

SEQ ID NO: 3310827 - DNA, 25 bp, Homo sapien
tattttatgttagttaactcagtgc

SEQ ID NO: 3310828 - DNA, 25 bp, Homo sapien
aaaaaaacttctagtgactgctctg

SEQ ID NO: 3310829 - DNA, 25 bp, Homo sapien
gatcttaaaagcagttaaataatca

SEQ ID NO: 3310830 - DNA, 25 bp, Homo sapien
caaactgtcactggttagtcaacat

SEQ ID NO: 3310831 - DNA, 25 bp, Homo sapien
tccaagagtagaatagatcaacggt

SEQ ID NO: 3310832 - DNA, 25 bp, Homo sapien
tagatcaacggttcccaaacaccac

SEQ ID NO: 3310833 - DNA, 25 bp, Homo sapien
ttgcatgactgaaacagtcattatc

SEQ ID NO: 3310834 - DNA, 25 bp, Homo sapien
gacttagttgcttgcctgaaggtag

SEQ ID NO: 3310835 - DNA, 25 bp, Homo sapien
gcttgtctccaatattagatggcag

SEQ ID NO: 3310836 - DNA, 25 bp, Homo sapien
tagttacaagccctacatcttggga

SEQ ID NO: 3310837 - DNA, 25 bp, Homo sapien
tataagatggaaccctgcagtctgt

SEQ ID NO: 3310838 - DNA, 25 bp, Homo sapien
ctaggaatatttcaggtaaagattt

SEQ ID NO: 3310839 - DNA, 25 bp, Homo sapien
ttaaccccatctaggaatatttcag

SEQ ID NO: 3310840 - DNA, 25 bp, Homo sapien
tctaggaatatttcaggtaaagatt

SEQ ID NO: 3310841 - DNA, 25 bp, Homo sapien
accccatctaggaatatttcaggta

SEQ ID NO: 3310842 - DNA, 25 bp, Homo sapien
caaaggtctctcaagtaagtccatc

SEQ ID NO: 3310843 - DNA, 25 bp, Homo sapien
tgagacaacctaagaccacataagg

SEQ ID NO: 3310844 - DNA, 25 bp, Homo sapien
ggaagtggcccacacatttatagaa

SEQ ID NO: 3310845 - DNA, 25 bp, Homo sapien
taactgaagcatggagaactgttct

SEQ ID NO: 3310846 - DNA, 25 bp, Homo sapien
tatcaaacttggagatcagccgcag

SEQ ID NO: 3310847 - DNA, 25 bp, Homo sapien
acagtatcaaacttggagatcagcc

SEQ ID NO: 3310848 - DNA, 25 bp, Homo sapien
gtcttcaacagtatcaaacttggag

SEQ ID NO: 3310849 - DNA, 25 bp, Homo sapien
caaacttggagatcagccgcaggtt

SEQ ID NO: 3310850 - DNA, 25 bp, Homo sapien
gggaagctaaggacattaagtgaat

SEQ ID NO: 3310851 - DNA, 25 bp, Homo sapien
ggtagctgcatacccatgttaaaag

SEQ ID NO: 3310852 - DNA, 25 bp, Homo sapien
tcagtgtcaaaaaatggtagctgca

SEQ ID NO: 3310853 - DNA, 25 bp, Homo sapien
tactaaaaagccctgatgaaggaaa

SEQ ID NO: 3310854 - DNA, 25 bp, Homo sapien
tctgacagagataagcaagcacagt

SEQ ID NO: 3310855 - DNA, 25 bp, Homo sapien
aacagattccctgctatacctagag

SEQ ID NO: 3310856 - DNA, 25 bp, Homo sapien
gacaactacagtgtgctaagtgctc

SEQ ID NO: 3310857 - DNA, 25 bp, Homo sapien
catcactcaacggaattcacagaaa

SEQ ID NO: 3310858 - DNA, 25 bp, Homo sapien
gttccagatcatcataataaagtga

SEQ ID NO: 3310859 - DNA, 25 bp, Homo sapien
tattatatatagaggcataccttgg

SEQ ID NO: 3310860 - DNA, 25 bp, Homo sapien
cataccttggatatattgtgagtcc

SEQ ID NO: 3310861 - DNA, 25 bp, Homo sapien
ctatctttaaggagagtcacacaaa

SEQ ID NO: 3310862 - DNA, 25 bp, Homo sapien
aagagtggtaatcttgctgatggag

SEQ ID NO: 3310863 - DNA, 25 bp, Homo sapien
catctgagcctacaaagagtggtaa

SEQ ID NO: 3310864 - DNA, 25 bp, Homo sapien
cctacaaagagtggtaatcttgctg

SEQ ID NO: 3310865 - DNA, 25 bp, Homo sapien
gagcctacaaagagtggtaatcttg

SEQ ID NO: 3310866 - DNA, 25 bp, Homo sapien
caattacctcagctagatctggaga

SEQ ID NO: 3310867 - DNA, 25 bp, Homo sapien
tataaatcgatgcactgtcatccag

SEQ ID NO: 3310868 - DNA, 25 bp, Homo sapien
taaagtcattggctgcaagatcccc

SEQ ID NO: 3310869 - DNA, 25 bp, Homo sapien
tcaacttttattctgcagcatcccc

SEQ ID NO: 3310870 - DNA, 25 bp, Homo sapien
cagaactgcttgacacaggatttcc

SEQ ID NO: 3310871 - DNA, 25 bp, Homo sapien
catgccattggaaacatggcatcaa

SEQ ID NO: 3310872 - DNA, 25 bp, Homo sapien
catcaacagaactgcttgacacagg

SEQ ID NO: 3310873 - DNA, 25 bp, Homo sapien
cacatgccattggaaacatggcatc

SEQ ID NO: 3310874 - DNA, 25 bp, Homo sapien
aaaaaaaacaccttagctagccatg

SEQ ID NO: 3310875 - DNA, 25 bp, Homo sapien
cctgtggacctagctacttagaaag

SEQ ID NO: 3310876 - DNA, 25 bp, Homo sapien
gacctagctacttagaaagctgatg

SEQ ID NO: 3310877 - DNA, 25 bp, Homo sapien
aaaaacaccttagctagccatggtg

SEQ ID NO: 3310878 - DNA, 25 bp, Homo sapien
gactccattcaagctgtgagggata

SEQ ID NO: 3310879 - DNA, 25 bp, Homo sapien
tacttctccccacaataaaagtgac

SEQ ID NO: 3310880 - DNA, 25 bp, Homo sapien
ttaggttaaactatataagactgcc

SEQ ID NO: 3310881 - DNA, 25 bp, Homo sapien
cagacagctagaagatatacagttt

SEQ ID NO: 3310882 - DNA, 25 bp, Homo sapien
gctggtcatgggtcatccaagtgaa

SEQ ID NO: 3310883 - DNA, 25 bp, Homo sapien
cagaaaacctaggtgttagaaagct

SEQ ID NO: 3310884 - DNA, 25 bp, Homo sapien
gtctcataatctaactttcccttca

SEQ ID NO: 3310885 - DNA, 25 bp, Homo sapien
cttgccccattcacaatttaccttg

SEQ ID NO: 3310886 - DNA, 25 bp, Homo sapien
taatatagtgttctgggttagcaac

SEQ ID NO: 3310887 - DNA, 25 bp, Homo sapien
atagtgttctgggttagcaacctcc

SEQ ID NO: 3310888 - DNA, 25 bp, Homo sapien
agtgttctgggttagcaacctcctg

SEQ ID NO: 3310889 - DNA, 25 bp, Homo sapien
atatagtgttctgggttagcaacct

SEQ ID NO: 3310890 - DNA, 25 bp, Homo sapien
taggaggattaataggaggattgct

SEQ ID NO: 3310891 - DNA, 25 bp, Homo sapien
tattaagatactgcatatggtactg

SEQ ID NO: 3310892 - DNA, 25 bp, Homo sapien
actgtggtgcgtctctacaatccca

SEQ ID NO: 3310893 - DNA, 25 bp, Homo sapien
acaactgtatcactgggcactgtgg

SEQ ID NO: 3310894 - DNA, 25 bp, Homo sapien
aaagtgccgtgtgggttttcatcaa

SEQ ID NO: 3310895 - DNA, 25 bp, Homo sapien
taaacgtgttcggtcaatgctacag

SEQ ID NO: 3310896 - DNA, 25 bp, Homo sapien
taactgtcggctaccatgagcaatc

SEQ ID NO: 3310897 - DNA, 25 bp, Homo sapien
cactgaagtgatccataactgtcgg

SEQ ID NO: 3310898 - DNA, 25 bp, Homo sapien
agtatatgcagcttccaacctgtgc

SEQ ID NO: 3310899 - DNA, 25 bp, Homo sapien
cactgaatccagtactaaatgttct

SEQ ID NO: 3310900 - DNA, 25 bp, Homo sapien
ttcactttctaaaatctgccaaaga

SEQ ID NO: 3310901 - DNA, 25 bp, Homo sapien
tgtgctggcaaacaaggcttatcac

SEQ ID NO: 3310902 - DNA, 25 bp, Homo sapien
ctgggattctcgcagactttctgcc

SEQ ID NO: 3310903 - DNA, 25 bp, Homo sapien
gggattctcgcagactttctgcctg

SEQ ID NO: 3310904 - DNA, 25 bp, Homo sapien
tgggattctcgcagactttctgcct

SEQ ID NO: 3310905 - DNA, 25 bp, Homo sapien
ggattctcgcagactttctgcctgc

SEQ ID NO: 3310906 - DNA, 25 bp, Homo sapien
tccttcttgttttgcttctttttca

SEQ ID NO: 3310907 - DNA, 25 bp, Homo sapien
ccttcttgttttgcttctttttcat

SEQ ID NO: 3310908 - DNA, 25 bp, Homo sapien
tcaggacaggatcagccatggtccc

SEQ ID NO: 3310909 - DNA, 25 bp, Homo sapien
caggagtcttaatttgtctcaggac

SEQ ID NO: 3310910 - DNA, 25 bp, Homo sapien
cactttttctcgaccaactgcttca

SEQ ID NO: 3310911 - DNA, 25 bp, Homo sapien
gacagagagccagggtaatcatgga

SEQ ID NO: 3310912 - DNA, 25 bp, Homo sapien
ctgtatgattctaactctgtgacac

SEQ ID NO: 3310913 - DNA, 25 bp, Homo sapien
gggagggtataaacaagcagaacag

SEQ ID NO: 3310914 - DNA, 25 bp, Homo sapien
aacattgctgaatgctaaaataaaa

SEQ ID NO: 3310915 - DNA, 25 bp, Homo sapien
tctaactctgtgacactctggaaaa

SEQ ID NO: 3310916 - DNA, 25 bp, Homo sapien
tttctggagacatgattagggactt

SEQ ID NO: 3310917 - DNA, 25 bp, Homo sapien
gacttttgaaggaacactagtgatt

SEQ ID NO: 3310918 - DNA, 25 bp, Homo sapien
ctggagacatgattagggacttttg

SEQ ID NO: 3310919 - DNA, 25 bp, Homo sapien
agggacttttgaaggaacactagtg

SEQ ID NO: 3310920 - DNA, 25 bp, Homo sapien
ccccagagccaaatttacgtggatt

SEQ ID NO: 3310921 - DNA, 25 bp, Homo sapien
tacgtggattatcgaggaactctga

SEQ ID NO: 3310922 - DNA, 25 bp, Homo sapien
aactctgatatagtgggttctttca

SEQ ID NO: 3310923 - DNA, 25 bp, Homo sapien
cacttatgaaattagcgtggtttca

SEQ ID NO: 3310924 - DNA, 25 bp, Homo sapien
cgcctgtaacccaacatattgagag

SEQ ID NO: 3310925 - DNA, 25 bp, Homo sapien
tatggaagctcacaaactagctgaa

SEQ ID NO: 3310926 - DNA, 25 bp, Homo sapien
taacatcagagtaccgtttgcccta

SEQ ID NO: 3310927 - DNA, 25 bp, Homo sapien
tacctatgcatgatgggataagcag

SEQ ID NO: 3310928 - DNA, 25 bp, Homo sapien
aactagcctgtgcacaagggtatat

SEQ ID NO: 3310929 - DNA, 25 bp, Homo sapien
gtgcacaagggtatattaaaagtac

SEQ ID NO: 3310930 - DNA, 25 bp, Homo sapien
gcctgtgcacaagggtatattaaaa

SEQ ID NO: 3310931 - DNA, 25 bp, Homo sapien
agagcaagatcctgcacccctacac

SEQ ID NO: 3310932 - DNA, 25 bp, Homo sapien
aagaacacttggtacaacaccctgg

SEQ ID NO: 3310933 - DNA, 25 bp, Homo sapien
cactttgcagttccgctctgtgctg

SEQ ID NO: 3310934 - DNA, 25 bp, Homo sapien
tatagtttacagtctcgtagccttg

SEQ ID NO: 3310935 - DNA, 25 bp, Homo sapien
ctcaagggacctaaatgtgacagaa

SEQ ID NO: 3310936 - DNA, 25 bp, Homo sapien
gtctaaggaagacgtgcgcgcgccc

SEQ ID NO: 3310937 - DNA, 25 bp, Homo sapien
caccggtctaaggaagacgtgcgcg

SEQ ID NO: 3310938 - DNA, 25 bp, Homo sapien
ccagtccaccggtctaaggaagacg

SEQ ID NO: 3310939 - DNA, 25 bp, Homo sapien
agctccccagtccaccggtctaagg

SEQ ID NO: 3310940 - DNA, 25 bp, Homo sapien
gacagtcgccatcttagatcgatct

SEQ ID NO: 3310941 - DNA, 25 bp, Homo sapien
gatcgatctgatcgcacaaccgctc

SEQ ID NO: 3310942 - DNA, 25 bp, Homo sapien
agcttctggccacgtgacggatatg

SEQ ID NO: 3310943 - DNA, 25 bp, Homo sapien
aaatgagattcaaaccggattggcc

SEQ ID NO: 3310944 - DNA, 25 bp, Homo sapien
gcctggatagctgcggtcacactta

SEQ ID NO: 3310945 - DNA, 25 bp, Homo sapien
taaaaaggactggtcacgtggccga

SEQ ID NO: 3310946 - DNA, 25 bp, Homo sapien
ctgcgtgagtaacgagaggcttctg

SEQ ID NO: 3310947 - DNA, 25 bp, Homo sapien
acgcggcggacactcgcttgctgga

SEQ ID NO: 3310948 - DNA, 25 bp, Homo sapien
tgccaggcaagcctactgtgccctt

SEQ ID NO: 3310949 - DNA, 25 bp, Homo sapien
cggcgatgcagagtcgtttaggcaa

SEQ ID NO: 3310950 - DNA, 25 bp, Homo sapien
taatgctggtggtcattcgttgcca

SEQ ID NO: 3310951 - DNA, 25 bp, Homo sapien
ccaggacaagttgcctgtgtgttta

SEQ ID NO: 3310952 - DNA, 25 bp, Homo sapien
caatattccgcttttacgtgcacgg

SEQ ID NO: 3310953 - DNA, 25 bp, Homo sapien
tcagggctaaatcttgcgtggcggt

SEQ ID NO: 3310954 - DNA, 25 bp, Homo sapien
gaagttctgtgcaaccgttccaata

SEQ ID NO: 3310955 - DNA, 25 bp, Homo sapien
ggagggacgacagcttttactgtcc

SEQ ID NO: 3310956 - DNA, 25 bp, Homo sapien
gattcataataagcaactgcgtgcc

SEQ ID NO: 3310957 - DNA, 25 bp, Homo sapien
tgtaaccggctttgaaaatgcatcg

SEQ ID NO: 3310958 - DNA, 25 bp, Homo sapien
gctgactaagccctggactgatggt

SEQ ID NO: 3310959 - DNA, 25 bp, Homo sapien
gagtgacttaatcgctcggcgtctc

SEQ ID NO: 3310960 - DNA, 25 bp, Homo sapien
gaagaaatctagtagactcctaagg

SEQ ID NO: 3310961 - DNA, 25 bp, Homo sapien
ccaggaaaaggagtgtatgcaggct

SEQ ID NO: 3310962 - DNA, 25 bp, Homo sapien
tgctgtcatttctcaagaccgtgtt

SEQ ID NO: 3310963 - DNA, 25 bp, Homo sapien
gcacagtttggctactaataacaac

SEQ ID NO: 3310964 - DNA, 25 bp, Homo sapien
tgttacctccttgatgccctggcac

SEQ ID NO: 3310965 - DNA, 25 bp, Homo sapien
taagattccagaaccacgaacagcc

SEQ ID NO: 3310966 - DNA, 25 bp, Homo sapien
tgccctggcactgcataagattcca

SEQ ID NO: 3310967 - DNA, 25 bp, Homo sapien
gtgggcctttctgttacctccttga

SEQ ID NO: 3310968 - DNA, 25 bp, Homo sapien
gggtgtagtggcattctcaaaaggc

SEQ ID NO: 3310969 - DNA, 25 bp, Homo sapien
atctgggtgtagtggcattctcaaa

SEQ ID NO: 3310970 - DNA, 25 bp, Homo sapien
ctgggtgtagtggcattctcaaaag

SEQ ID NO: 3310971 - DNA, 25 bp, Homo sapien
gtgtagtggcattctcaaaaggcat

SEQ ID NO: 3310972 - DNA, 25 bp, Homo sapien
ccttgccgaattggtgacgtggaga

SEQ ID NO: 3310973 - DNA, 25 bp, Homo sapien
cgtggagaggtatattacccttcct

SEQ ID NO: 3310974 - DNA, 25 bp, Homo sapien
ggatggtactcacacgtctgattgt

SEQ ID NO: 3310975 - DNA, 25 bp, Homo sapien
tcagggcctagtatccccttgccga

SEQ ID NO: 3310976 - DNA, 25 bp, Homo sapien
cccatggcattgagcaggaatcttg

SEQ ID NO: 3310977 - DNA, 25 bp, Homo sapien
ttttcaaacccatggcattgagcag

SEQ ID NO: 3310978 - DNA, 25 bp, Homo sapien
aaacccatggcattgagcaggaatc

SEQ ID NO: 3310979 - DNA, 25 bp, Homo sapien
ctttttcaaacccatggcattgagc

SEQ ID NO: 3310980 - DNA, 25 bp, Homo sapien
actgcagagacatctgcacatcatt

SEQ ID NO: 3310981 - DNA, 25 bp, Homo sapien
gaggctctgacatcctactccaggc

SEQ ID NO: 3310982 - DNA, 25 bp, Homo sapien
gcacatcattgttctgaggctctga

SEQ ID NO: 3310983 - DNA, 25 bp, Homo sapien
tgaggctctgacatcctactccagg

SEQ ID NO: 3310984 - DNA, 25 bp, Homo sapien
tactagcactatcggttttgaaggg

SEQ ID NO: 3310985 - DNA, 25 bp, Homo sapien
tgagttacaacacaaccgacctgga

SEQ ID NO: 3310986 - DNA, 25 bp, Homo sapien
aagattgaagcaacaggttcgcagg

SEQ ID NO: 3310987 - DNA, 25 bp, Homo sapien
tactgctgaagcaatcaactgggat

SEQ ID NO: 3310988 - DNA, 25 bp, Homo sapien
caacctactggaacaagctggagca

SEQ ID NO: 3310989 - DNA, 25 bp, Homo sapien
gggatgggacctcacactctaaact

SEQ ID NO: 3310990 - DNA, 25 bp, Homo sapien
tgcaatcccctatggctgtgtcccg

SEQ ID NO: 3310991 - DNA, 25 bp, Homo sapien
ggagcagccttggaatacacacatc

SEQ ID NO: 3310992 - DNA, 25 bp, Homo sapien
tccccgcatggcatcactagacaag

SEQ ID NO: 3310993 - DNA, 25 bp, Homo sapien
gcctttggttatgtaggtccccgca

SEQ ID NO: 3310994 - DNA, 25 bp, Homo sapien
gatgcgattgtactgggaattccaa

SEQ ID NO: 3310995 - DNA, 25 bp, Homo sapien
gaactgcggtttcgatggtcaataa

SEQ ID NO: 3310996 - DNA, 25 bp, Homo sapien
tattcctcttactgggtgagccctg

SEQ ID NO: 3310997 - DNA, 25 bp, Homo sapien
catacgagccacaaaattgatgggc

SEQ ID NO: 3310998 - DNA, 25 bp, Homo sapien
tccccacaagagagggccaaggact

SEQ ID NO: 3310999 - DNA, 25 bp, Homo sapien
tggctcatgcacgaggtctcctggt

SEQ ID NO: 3311000 - DNA, 25 bp, Homo sapien
agcaagaaagcattgtccccattcc

SEQ ID NO: 3311001 - DNA, 25 bp, Homo sapien
tgagcccattcacaccctactggct

SEQ ID NO: 3311002 - DNA, 25 bp, Homo sapien
aggtgagcccattcacaccctactg

SEQ ID NO: 3311003 - DNA, 25 bp, Homo sapien
acagcaagaaagcattgtccccatt

SEQ ID NO: 3311004 - DNA, 25 bp, Homo sapien
ccaggtgaaatggtgcaagtacttg

SEQ ID NO: 3311005 - DNA, 25 bp, Homo sapien
gcgtgttgtgtagactggccgccac

SEQ ID NO: 3311006 - DNA, 25 bp, Homo sapien
gctatgcgcttgtcacggaactcca

SEQ ID NO: 3311007 - DNA, 25 bp, Homo sapien
acccataggcgtgttgtgtagactg

SEQ ID NO: 3311008 - DNA, 25 bp, Homo sapien
cttggctatgcgcttgtcacggaac

SEQ ID NO: 3311009 - DNA, 25 bp, Homo sapien
gatatggcccaggtacacaatacct

SEQ ID NO: 3311010 - DNA, 25 bp, Homo sapien
gggatatggcccaggtacacaatac

SEQ ID NO: 3311011 - DNA, 25 bp, Homo sapien
tatggcccaggtacacaatacctgg

SEQ ID NO: 3311012 - DNA, 25 bp, Homo sapien
tggcccaggtacacaatacctggca

SEQ ID NO: 3311013 - DNA, 25 bp, Homo sapien
cttccagcgcctttgctctgttgcg

SEQ ID NO: 3311014 - DNA, 25 bp, Homo sapien
tcctccacatctagtgtctggtctg

SEQ ID NO: 3311015 - DNA, 25 bp, Homo sapien
tccacatctagtgtctggtctgtcc

SEQ ID NO: 3311016 - DNA, 25 bp, Homo sapien
gcctttgctctgttgcggccttctc

SEQ ID NO: 3311017 - DNA, 25 bp, Homo sapien
ttagttaccaggtgactactcagca

SEQ ID NO: 3311018 - DNA, 25 bp, Homo sapien
cttttagttaccaggtgactactca

SEQ ID NO: 3311019 - DNA, 25 bp, Homo sapien
tagttaccaggtgactactcagcat

SEQ ID NO: 3311020 - DNA, 25 bp, Homo sapien
tttagttaccaggtgactactcagc

SEQ ID NO: 3311021 - DNA, 25 bp, Homo sapien
ttgtgcagttaccagtaaactggtt

SEQ ID NO: 3311022 - DNA, 25 bp, Homo sapien
taagacttgttatggagagcagacc

SEQ ID NO: 3311023 - DNA, 25 bp, Homo sapien
tgagtgtcctgtcggtgttcagaaa

SEQ ID NO: 3311024 - DNA, 25 bp, Homo sapien
catagtgatataggcttgtttcaac

SEQ ID NO: 3311025 - DNA, 25 bp, Homo sapien
gatgtgtgtcctcaagaacttgtct

SEQ ID NO: 3311026 - DNA, 25 bp, Homo sapien
gatggcacatctcagtaccttctta

SEQ ID NO: 3311027 - DNA, 25 bp, Homo sapien
gaaaggactacagcatttgatgtgt

SEQ ID NO: 3311028 - DNA, 25 bp, Homo sapien
ggcgacttgacagtgcacggcctca

SEQ ID NO: 3311029 - DNA, 25 bp, Homo sapien
gagtgtacttgattactgggcatcc

SEQ ID NO: 3311030 - DNA, 25 bp, Homo sapien
gactgaatctggtatagactttggg

SEQ ID NO: 3311031 - DNA, 25 bp, Homo sapien
ccagagtgcctcagaccttattgct

SEQ ID NO: 3311032 - DNA, 25 bp, Homo sapien
taaactcagtagagtgccagcagca

SEQ ID NO: 3311033 - DNA, 25 bp, Homo sapien
ctggctacgtgtttgctgcttttca

SEQ ID NO: 3311034 - DNA, 25 bp, Homo sapien
aggtggccctggctacgtgtttgct

SEQ ID NO: 3311035 - DNA, 25 bp, Homo sapien
atgaagcaggaataaggtggccctg

SEQ ID NO: 3311036 - DNA, 25 bp, Homo sapien
gtggccctggctacgtgtttgctgc

SEQ ID NO: 3311037 - DNA, 25 bp, Homo sapien
tgtcaccataatgttccaccgaagg

SEQ ID NO: 3311038 - DNA, 25 bp, Homo sapien
ttggtagccgagcagaaaagttctg

SEQ ID NO: 3311039 - DNA, 25 bp, Homo sapien
tgtacacatgttgactggctccact

SEQ ID NO: 3311040 - DNA, 25 bp, Homo sapien
gccagttagtcaacaaggtgtccct

SEQ ID NO: 3311041 - DNA, 25 bp, Homo sapien
gaacttgtgcctatcagacatgcct

SEQ ID NO: 3311042 - DNA, 25 bp, Homo sapien
ccaatttgggacaaccagggtagat

SEQ ID NO: 3311043 - DNA, 25 bp, Homo sapien
ggtaggttacatagcagaatagcca

SEQ ID NO: 3311044 - DNA, 25 bp, Homo sapien
gacggactgtctccagcgagtatca

SEQ ID NO: 3311045 - DNA, 25 bp, Homo sapien
ttgaacttcggaggccaagtgatcc

SEQ ID NO: 3311046 - DNA, 25 bp, Homo sapien
gataacagttgtggcccctttgggc

SEQ ID NO: 3311047 - DNA, 25 bp, Homo sapien
caagacctttaggagttactggctc

SEQ ID NO: 3311048 - DNA, 25 bp, Homo sapien
tccagccctctaggtaaaacaggag

SEQ ID NO: 3311049 - DNA, 25 bp, Homo sapien
caatacaaagttgagcacaggatat

SEQ ID NO: 3311050 - DNA, 25 bp, Homo sapien
gaaaagtcacaagatagactagaag

SEQ ID NO: 3311051 - DNA, 25 bp, Homo sapien
gaatgaaggatttaacgagaattga

SEQ ID NO: 3311052 - DNA, 25 bp, Homo sapien
taacgagaattgaggaaaatgcaaa

SEQ ID NO: 3311053 - DNA, 25 bp, Homo sapien
tgagcccaatgcagaagaatgttcc

SEQ ID NO: 3311054 - DNA, 25 bp, Homo sapien
tcttaggtaacacgcagtgagccca

SEQ ID NO: 3311055 - DNA, 25 bp, Homo sapien
cagacaaaccgtgacaatgatgaca

SEQ ID NO: 3311056 - DNA, 25 bp, Homo sapien
ggcaatgtgatctcgaagtggcaaa

SEQ ID NO: 3311057 - DNA, 25 bp, Homo sapien
gaatgacacacataaccctattttc

SEQ ID NO: 3311058 - DNA, 25 bp, Homo sapien
tgaatgacacacataaccctatttt

SEQ ID NO: 3311059 - DNA, 25 bp, Homo sapien
atgaatgacacacataaccctattt

SEQ ID NO: 3311060 - DNA, 25 bp, Homo sapien
atgacacacataaccctattttctg

SEQ ID NO: 3311061 - DNA, 25 bp, Homo sapien
ttaaatctttacaacagttcgaatg

SEQ ID NO: 3311062 - DNA, 25 bp, Homo sapien
aattgtgtttttcgactctccatcc

SEQ ID NO: 3311063 - DNA, 25 bp, Homo sapien
ttgtgtttttcgactctccatcccc

SEQ ID NO: 3311064 - DNA, 25 bp, Homo sapien
tgtgtttttcgactctccatcccct

SEQ ID NO: 3311065 - DNA, 25 bp, Homo sapien
gtgtttttcgactctccatcccctc

SEQ ID NO: 3311066 - DNA, 25 bp, Homo sapien
tttttggacatatattcagacacca

SEQ ID NO: 3311067 - DNA, 25 bp, Homo sapien
tcagacaccaactttgggacacttt

SEQ ID NO: 3311068 - DNA, 25 bp, Homo sapien
cagacaccaactttgggacactttc

SEQ ID NO: 3311069 - DNA, 25 bp, Homo sapien
tggacatatattcagacaccaactt

SEQ ID NO: 3311070 - DNA, 25 bp, Homo sapien
ggatagcatatcagaacagaaaact

SEQ ID NO: 3311071 - DNA, 25 bp, Homo sapien
tgttacttagctgaggacaaaaggc

SEQ ID NO: 3311072 - DNA, 25 bp, Homo sapien
gagtaatgagaaactccaaaatagc

SEQ ID NO: 3311073 - DNA, 25 bp, Homo sapien
caacaacaagcttatttaggtccac

SEQ ID NO: 3311074 - DNA, 25 bp, Homo sapien
tcctctcttatattctccactaatt

SEQ ID NO: 3311075 - DNA, 25 bp, Homo sapien
cttctaaggatgctttcaacgatat

SEQ ID NO: 3311076 - DNA, 25 bp, Homo sapien
tatattctccactaattattctttc

SEQ ID NO: 3311077 - DNA, 25 bp, Homo sapien
ggatgctttcaacgatatttcaaac

SEQ ID NO: 3311078 - DNA, 25 bp, Homo sapien
ttaccagctggaatggacgagtggc

SEQ ID NO: 3311079 - DNA, 25 bp, Homo sapien
agcagctactccaaccacgacgctg

SEQ ID NO: 3311080 - DNA, 25 bp, Homo sapien
gacgagtggcaatttcttcacctga

SEQ ID NO: 3311081 - DNA, 25 bp, Homo sapien
gctgacgccccagcccttgtgacat

SEQ ID NO: 3311082 - DNA, 25 bp, Homo sapien
agatatgaccaaatcacagaagtca

SEQ ID NO: 3311083 - DNA, 25 bp, Homo sapien
ctgagaacaactgctggcgaaactt

SEQ ID NO: 3311084 - DNA, 25 bp, Homo sapien
gagatatgaccaaatcacagaagtc

SEQ ID NO: 3311085 - DNA, 25 bp, Homo sapien
tcctgagaacaactgctggcgaaac

SEQ ID NO: 3311086 - DNA, 25 bp, Homo sapien
ttcatgagacatgcacttagcaggc

SEQ ID NO: 3311087 - DNA, 25 bp, Homo sapien
ttcctaatctgaaatgccccaatga

SEQ ID NO: 3311088 - DNA, 25 bp, Homo sapien
aagcaggcagcagaattaatagtaa

SEQ ID NO: 3311089 - DNA, 25 bp, Homo sapien
ttggattagggatagatgttcaacc

SEQ ID NO: 3311090 - DNA, 25 bp, Homo sapien
ctccatcggtcatctcaatgagcac

SEQ ID NO: 3311091 - DNA, 25 bp, Homo sapien
cctccatcggtcatctcaatgagca

SEQ ID NO: 3311092 - DNA, 25 bp, Homo sapien
tccatcggtcatctcaatgagcact

SEQ ID NO: 3311093 - DNA, 25 bp, Homo sapien
tggcattaatcctttcccttgagtg

SEQ ID NO: 3311094 - DNA, 25 bp, Homo sapien
ccataaccggttgaaatgccacaac

SEQ ID NO: 3311095 - DNA, 25 bp, Homo sapien
ctggttcccatgtaatgcaaaattg

SEQ ID NO: 3311096 - DNA, 25 bp, Homo sapien
tcacagcagcaccataaccggttga

SEQ ID NO: 3311097 - DNA, 25 bp, Homo sapien
tctcagaagcacgtctttccttact

SEQ ID NO: 3311098 - DNA, 25 bp, Homo sapien
gtgatactgggcacacccctttagt

SEQ ID NO: 3311099 - DNA, 25 bp, Homo sapien
cttactacatggtttggcaaattta

SEQ ID NO: 3311100 - DNA, 25 bp, Homo sapien
cctgctgttatgtgaagagaatggg

SEQ ID NO: 3311101 - DNA, 25 bp, Homo sapien
caagttacatccggatgacaatgtc

SEQ ID NO: 3311102 - DNA, 25 bp, Homo sapien
ggcccagggtccagtcgcctttgtg

SEQ ID NO: 3311103 - DNA, 25 bp, Homo sapien
attaatacaatggtacacagtactg

SEQ ID NO: 3311104 - DNA, 25 bp, Homo sapien
tttccagattatgacaaaccattct

SEQ ID NO: 3311105 - DNA, 25 bp, Homo sapien
tttagacaaaatttgcattctccac

SEQ ID NO: 3311106 - DNA, 25 bp, Homo sapien
taggatttagacaaaatttgcattc

SEQ ID NO: 3311107 - DNA, 25 bp, Homo sapien
gatttagacaaaatttgcattctcc

SEQ ID NO: 3311108 - DNA, 25 bp, Homo sapien
cttatcttctggcaaaggttagttt

SEQ ID NO: 3311109 - DNA, 25 bp, Homo sapien
gatgtaaagtgggatgacagtgtca

SEQ ID NO: 3311110 - DNA, 25 bp, Homo sapien
tgggatgtaaagtgggatgacagtg

SEQ ID NO: 3311111 - DNA, 25 bp, Homo sapien
atgtaaagtgggatgacagtgtcac

SEQ ID NO: 3311112 - DNA, 25 bp, Homo sapien
ctgtgggatgtaaagtgggatgaca

SEQ ID NO: 3311113 - DNA, 25 bp, Homo sapien
cgccttcagcttagtaactccctca

SEQ ID NO: 3311114 - DNA, 25 bp, Homo sapien
ccgccttcagcttagtaactccctc

SEQ ID NO: 3311115 - DNA, 25 bp, Homo sapien
gccttcagcttagtaactccctcac

SEQ ID NO: 3311116 - DNA, 25 bp, Homo sapien
catcggtgtggcaaaccgcagtggc

SEQ ID NO: 3311117 - DNA, 25 bp, Homo sapien
aggcatcggtgtggcaaaccgcagt

SEQ ID NO: 3311118 - DNA, 25 bp, Homo sapien
tataggcatcggtgtggcaaaccgc

SEQ ID NO: 3311119 - DNA, 25 bp, Homo sapien
gtataggcatcggtgtggcaaaccg

SEQ ID NO: 3311120 - DNA, 25 bp, Homo sapien
ggactgcaggcgcgtaccaccaggc

SEQ ID NO: 3311121 - DNA, 25 bp, Homo sapien
actgcaggcgcgtaccaccaggcct

SEQ ID NO: 3311122 - DNA, 25 bp, Homo sapien
gaactcctcacctcattatctgcct

SEQ ID NO: 3311123 - DNA, 25 bp, Homo sapien
tgggactgcaggcgcgtaccaccag

SEQ ID NO: 3311124 - DNA, 25 bp, Homo sapien
aatctttgctacctgtctgcagttt

SEQ ID NO: 3311125 - DNA, 25 bp, Homo sapien
gccacctctatctcctctatggaga

SEQ ID NO: 3311126 - DNA, 25 bp, Homo sapien
agagaggctttccagcctcccaagc

SEQ ID NO: 3311127 - DNA, 25 bp, Homo sapien
ttgattcgaacttcatgagcctttg

SEQ ID NO: 3311128 - DNA, 25 bp, Homo sapien
ctcccaagcaactgcagccttgcac

SEQ ID NO: 3311129 - DNA, 25 bp, Homo sapien
ccgttccgactgtcccagaagcagc

SEQ ID NO: 3311130 - DNA, 25 bp, Homo sapien
aagagccgagacaaagcttccttct

SEQ ID NO: 3311131 - DNA, 25 bp, Homo sapien
caccccgttccgactgtcccagaag

SEQ ID NO: 3311132 - DNA, 25 bp, Homo sapien
tcccaactgaagagccgagacaaag

SEQ ID NO: 3311133 - DNA, 25 bp, Homo sapien
gtgggccgcgcagcgacggaggcat

SEQ ID NO: 3311134 - DNA, 25 bp, Homo sapien
cgacggaggcatgggcgtggcgagc

SEQ ID NO: 3311135 - DNA, 25 bp, Homo sapien
cacggattctggtcggcgcgggggg

SEQ ID NO: 3311136 - DNA, 25 bp, Homo sapien
ctgacatccggggtgggccgcgcag

SEQ ID NO: 3311137 - DNA, 25 bp, Homo sapien
cggggcgtggggggggcttgcaatg

SEQ ID NO: 3311138 - DNA, 25 bp, Homo sapien
ggggggggcttgcaatggctccaac

SEQ ID NO: 3311139 - DNA, 25 bp, Homo sapien
gcgtggggggggcttgcaatggctc

SEQ ID NO: 3311140 - DNA, 25 bp, Homo sapien
gtggggggggcttgcaatggctcca

SEQ ID NO: 3311141 - DNA, 25 bp, Homo sapien
gctaaaatccgacggacttgttgca

SEQ ID NO: 3311142 - DNA, 25 bp, Homo sapien
ggcttccccgtgtaactttacagca

SEQ ID NO: 3311143 - DNA, 25 bp, Homo sapien
tgcgttccagggtgcactcgccggc

SEQ ID NO: 3311144 - DNA, 25 bp, Homo sapien
tgcacggcgccggtttcattgctaa

SEQ ID NO: 3311145 - DNA, 25 bp, Homo sapien
tagtgccaattgcagatcattaagc

SEQ ID NO: 3311146 - DNA, 25 bp, Homo sapien
agctcaacattatgtgttgtaaaaa

SEQ ID NO: 3311147 - DNA, 25 bp, Homo sapien
gatcaatagtattaattagtgccaa

SEQ ID NO: 3311148 - DNA, 25 bp, Homo sapien
ttagtgccagttacagatcaatagt

SEQ ID NO: 3311149 - DNA, 25 bp, Homo sapien
aaagtagcttgtggcttattggaac

SEQ ID NO: 3311150 - DNA, 25 bp, Homo sapien
ccatgtgattgcagttaatgataga

SEQ ID NO: 3311151 - DNA, 25 bp, Homo sapien
tgctgttgactatagtctccctgtt

SEQ ID NO: 3311152 - DNA, 25 bp, Homo sapien
gaaagggcagttattttacagagat

SEQ ID NO: 3311153 - DNA, 25 bp, Homo sapien
tctgccgactccctgccctcaacag

SEQ ID NO: 3311154 - DNA, 25 bp, Homo sapien
ttcaacatagacaaaagtggagaga

SEQ ID NO: 3311155 - DNA, 25 bp, Homo sapien
aattttcaacatagacaaaagtgga

SEQ ID NO: 3311156 - DNA, 25 bp, Homo sapien
catttagctcccagaaaattttcaa

SEQ ID NO: 3311157 - DNA, 25 bp, Homo sapien
gctttccttggttcatcaaatcagg

SEQ ID NO: 3311158 - DNA, 25 bp, Homo sapien
caggtacaaagtctataatatttaa

SEQ ID NO: 3311159 - DNA, 25 bp, Homo sapien
caaatcaggtaataaattaaccagg

SEQ ID NO: 3311160 - DNA, 25 bp, Homo sapien
cactttcaacttcccagaactaatt

SEQ ID NO: 3311161 - DNA, 25 bp, Homo sapien
tcaatcagatagtattctgaattgc

SEQ ID NO: 3311162 - DNA, 25 bp, Homo sapien
caatcagatagtattctgaattgct

SEQ ID NO: 3311163 - DNA, 25 bp, Homo sapien
gtattctgaattgctcctggcatct

SEQ ID NO: 3311164 - DNA, 25 bp, Homo sapien
atagtattctgaattgctcctggca

SEQ ID NO: 3311165 - DNA, 25 bp, Homo sapien
tcaaaagatgaggattgttcggacg

SEQ ID NO: 3311166 - DNA, 25 bp, Homo sapien
taggcagcgtccttgttactcagtg

SEQ ID NO: 3311167 - DNA, 25 bp, Homo sapien
caaagttggtgtgttgggatgctac

SEQ ID NO: 3311168 - DNA, 25 bp, Homo sapien
gaggacccttactcaccttaggcag

SEQ ID NO: 3311169 - DNA, 25 bp, Homo sapien
tcggatctcctatagctgagggcaa

SEQ ID NO: 3311170 - DNA, 25 bp, Homo sapien
ggtatgggtcaccagtgcatccaga

SEQ ID NO: 3311171 - DNA, 25 bp, Homo sapien
taggtcaaatgcctcactgattttg

SEQ ID NO: 3311172 - DNA, 25 bp, Homo sapien
tcttattcttatagtcagtgaccag

SEQ ID NO: 3311173 - DNA, 25 bp, Homo sapien
cagctttgggatagaatctacactt

SEQ ID NO: 3311174 - DNA, 25 bp, Homo sapien
cccagcctgcggttgtacagtccag

SEQ ID NO: 3311175 - DNA, 25 bp, Homo sapien
atgaaagtacatgatccccagcctg

SEQ ID NO: 3311176 - DNA, 25 bp, Homo sapien
gaatgttccatttatagtacggccg

SEQ ID NO: 3311177 - DNA, 25 bp, Homo sapien
tacggccgattattagctcctctgg

SEQ ID NO: 3311178 - DNA, 25 bp, Homo sapien
gacacattcatgggcattgaaggaa

SEQ ID NO: 3311179 - DNA, 25 bp, Homo sapien
cattcatgggcattgaaggaaatgg

SEQ ID NO: 3311180 - DNA, 25 bp, Homo sapien
tgggcattgaaggaaatggagtata

SEQ ID NO: 3311181 - DNA, 25 bp, Homo sapien
catgggcattgaaggaaatggagta

SEQ ID NO: 3311182 - DNA, 25 bp, Homo sapien
ttacaacccattacagcagaaagac

SEQ ID NO: 3311183 - DNA, 25 bp, Homo sapien
cagtcaagggcaaaatccacacctc

SEQ ID NO: 3311184 - DNA, 25 bp, Homo sapien
caaagacagcacaagtcgaaccagg

SEQ ID NO: 3311185 - DNA, 25 bp, Homo sapien
tcctggatcggtttatgtaagtctc

SEQ ID NO: 3311186 - DNA, 25 bp, Homo sapien
gttgatcactagcaggacttttgag

SEQ ID NO: 3311187 - DNA, 25 bp, Homo sapien
cattgttgattgcagccccatagcc

SEQ ID NO: 3311188 - DNA, 25 bp, Homo sapien
tagccagttgaaaacccacatccaa

SEQ ID NO: 3311189 - DNA, 25 bp, Homo sapien
gcaagattgatatctgacaccacag

SEQ ID NO: 3311190 - DNA, 25 bp, Homo sapien
ctcagacaaaacttgcattttctac

SEQ ID NO: 3311191 - DNA, 25 bp, Homo sapien
tttcccacacaaatttgtgagtgga

SEQ ID NO: 3311192 - DNA, 25 bp, Homo sapien
tacatagaggtgcataaagtggaat

SEQ ID NO: 3311193 - DNA, 25 bp, Homo sapien
tttctacatagaggtgcataaagtg

SEQ ID NO: 3311194 - DNA, 25 bp, Homo sapien
gcctcatggccaacgatcactggga

SEQ ID NO: 3311195 - DNA, 25 bp, Homo sapien
gacgttggtcactcctggcccaata

SEQ ID NO: 3311196 - DNA, 25 bp, Homo sapien
cactgggaaagctaggccctcaaat

SEQ ID NO: 3311197 - DNA, 25 bp, Homo sapien
gcatcagtatggcacagagaggtag

SEQ ID NO: 3311198 - DNA, 25 bp, Homo sapien
tggggggagctacttcaacctcttc

SEQ ID NO: 3311199 - DNA, 25 bp, Homo sapien
tgcaaaggggcttgcctgcttccca

SEQ ID NO: 3311200 - DNA, 25 bp, Homo sapien
ttgcctgcttcccaggcgatggctg

SEQ ID NO: 3311201 - DNA, 25 bp, Homo sapien
aacttcatgagccttggggggagct

SEQ ID NO: 3311202 - DNA, 25 bp, Homo sapien
cttgatataatgtctcaagtttttc

SEQ ID NO: 3311203 - DNA, 25 bp, Homo sapien
tgatataatgtctcaagtttttccc

SEQ ID NO: 3311204 - DNA, 25 bp, Homo sapien
ttgatataatgtctcaagtttttcc

SEQ ID NO: 3311205 - DNA, 25 bp, Homo sapien
ctgagtcagataattgctggagaat

SEQ ID NO: 3311206 - DNA, 25 bp, Homo sapien
tggtcctcggacaagcatttattca

SEQ ID NO: 3311207 - DNA, 25 bp, Homo sapien
catctctgcaactcgaagtgtggtc

SEQ ID NO: 3311208 - DNA, 25 bp, Homo sapien
aagccctgcctcaaatccactaaat

SEQ ID NO: 3311209 - DNA, 25 bp, Homo sapien
agaaagcttcaaactcctacccagg

SEQ ID NO: 3311210 - DNA, 25 bp, Homo sapien
tgcaaacctcattgctcccagtgag

SEQ ID NO: 3311211 - DNA, 25 bp, Homo sapien
gagttccgtgtcctataatgagctg

SEQ ID NO: 3311212 - DNA, 25 bp, Homo sapien
tactattggacttcagctgcaaacc

SEQ ID NO: 3311213 - DNA, 25 bp, Homo sapien
cttctgtgctgcactttgataaact

SEQ ID NO: 3311214 - DNA, 25 bp, Homo sapien
tgaatgcttgatatctgtcttttct

SEQ ID NO: 3311215 - DNA, 25 bp, Homo sapien
tgataaacttctttgaaggtaaaga

SEQ ID NO: 3311216 - DNA, 25 bp, Homo sapien
tttctgaatgcttgatatctgtctt

SEQ ID NO: 3311217 - DNA, 25 bp, Homo sapien
tcctttttgcactctgcttagcctt

SEQ ID NO: 3311218 - DNA, 25 bp, Homo sapien
cttttcctttttgcactctgcttag

SEQ ID NO: 3311219 - DNA, 25 bp, Homo sapien
tctgcttagccttctgaacccaaga

SEQ ID NO: 3311220 - DNA, 25 bp, Homo sapien
tgcactctgcttagccttctgaacc

SEQ ID NO: 3311221 - DNA, 25 bp, Homo sapien
gatcctttgggccacgtctgctgag

SEQ ID NO: 3311222 - DNA, 25 bp, Homo sapien
tgttggatcctttgggccacgtctg

SEQ ID NO: 3311223 - DNA, 25 bp, Homo sapien
ttgggccacgtctgctgaggagcct

SEQ ID NO: 3311224 - DNA, 25 bp, Homo sapien
tccctggttgttggatcctttgggc

SEQ ID NO: 3311225 - DNA, 25 bp, Homo sapien
tgcttgcatgccctgaagttaatag

SEQ ID NO: 3311226 - DNA, 25 bp, Homo sapien
gtctgtgcctcactagtgatggatg

SEQ ID NO: 3311227 - DNA, 25 bp, Homo sapien
tggatgtcgacctatgcttgcatgc

SEQ ID NO: 3311228 - DNA, 25 bp, Homo sapien
ttctgttgcatacttgctgtctgtg

SEQ ID NO: 3311229 - DNA, 25 bp, Homo sapien
taatgagaccagatttgactttgga

SEQ ID NO: 3311230 - DNA, 25 bp, Homo sapien
tgccaatgtgctatagtagtttctt

SEQ ID NO: 3311231 - DNA, 25 bp, Homo sapien
aagtaaagcagatatctctctaggt

SEQ ID NO: 3311232 - DNA, 25 bp, Homo sapien
tagagtcaagatcccttttataacc

SEQ ID NO: 3311233 - DNA, 25 bp, Homo sapien
tccatatccggcaatcttatactct

SEQ ID NO: 3311234 - DNA, 25 bp, Homo sapien
taaatgttccatatccggcaatctt

SEQ ID NO: 3311235 - DNA, 25 bp, Homo sapien
taatactttaaatgttccatatccg

SEQ ID NO: 3311236 - DNA, 25 bp, Homo sapien
tccggcaatcttatactctacagca

SEQ ID NO: 3311237 - DNA, 25 bp, Homo sapien
gagagagtggagtgcctgttataaa

SEQ ID NO: 3311238 - DNA, 25 bp, Homo sapien
gctgaactggcccattcatcattat

SEQ ID NO: 3311239 - DNA, 25 bp, Homo sapien
aaagttagctgaactggcccattca

SEQ ID NO: 3311240 - DNA, 25 bp, Homo sapien
attcatcattatggcaacagcctcc

SEQ ID NO: 3311241 - DNA, 25 bp, Homo sapien
caaattcactagaatgcatctttat

SEQ ID NO: 3311242 - DNA, 25 bp, Homo sapien
aattatagcagactctccaatatga

SEQ ID NO: 3311243 - DNA, 25 bp, Homo sapien
tagcagactctccaatatgactgag

SEQ ID NO: 3311244 - DNA, 25 bp, Homo sapien
cagactctccaatatgactgagatc

SEQ ID NO: 3311245 - DNA, 25 bp, Homo sapien
cagtctaaaagttctcttgatttag

SEQ ID NO: 3311246 - DNA, 25 bp, Homo sapien
aattcacagtctaaaagttctcttg

SEQ ID NO: 3311247 - DNA, 25 bp, Homo sapien
tctagcaccaagagatccatagtac

SEQ ID NO: 3311248 - DNA, 25 bp, Homo sapien
ttcacagtctaaaagttctcttgat

SEQ ID NO: 3311249 - DNA, 25 bp, Homo sapien
cttcagccctccatgtagtgatgtc

SEQ ID NO: 3311250 - DNA, 25 bp, Homo sapien
cacagtggtatgtgttgaagccctg

SEQ ID NO: 3311251 - DNA, 25 bp, Homo sapien
tgtggtcacagtggtatgtgttgaa

SEQ ID NO: 3311252 - DNA, 25 bp, Homo sapien
gtcacagtggtatgtgttgaagccc

SEQ ID NO: 3311253 - DNA, 25 bp, Homo sapien
ctaggttgtggtcacagtggtatgt

SEQ ID NO: 3311254 - DNA, 25 bp, Homo sapien
ctgcactaaggaaatgtgtgatact

SEQ ID NO: 3311255 - DNA, 25 bp, Homo sapien
ctgtgtaggttcacctgcttgaact

SEQ ID NO: 3311256 - DNA, 25 bp, Homo sapien
gctgtgtaggttcacctgcttgaac

SEQ ID NO: 3311257 - DNA, 25 bp, Homo sapien
ttcattcagttctgcactgatcatt

SEQ ID NO: 3311258 - DNA, 25 bp, Homo sapien
cattcagttctgcactgatcattgt

SEQ ID NO: 3311259 - DNA, 25 bp, Homo sapien
gtgcccagccaattatgtttgtctt

SEQ ID NO: 3311260 - DNA, 25 bp, Homo sapien
tgcccagccaattatgtttgtcttt

SEQ ID NO: 3311261 - DNA, 25 bp, Homo sapien
gcttctcaattgtgccttaacgcac

SEQ ID NO: 3311262 - DNA, 25 bp, Homo sapien
cttcatactatcctccacagtgctg

SEQ ID NO: 3311263 - DNA, 25 bp, Homo sapien
ggagagcagtagcataatcctggca

SEQ ID NO: 3311264 - DNA, 25 bp, Homo sapien
gtgccttaacgcacagcttgtcaat

SEQ ID NO: 3311265 - DNA, 25 bp, Homo sapien
gctcgcaatattctttctccacttg

SEQ ID NO: 3311266 - DNA, 25 bp, Homo sapien
tacataggctcgcaatattctttct

SEQ ID NO: 3311267 - DNA, 25 bp, Homo sapien
tttctcatgctattacataggctcg

SEQ ID NO: 3311268 - DNA, 25 bp, Homo sapien
catgctattacataggctcgcaata

SEQ ID NO: 3311269 - DNA, 25 bp, Homo sapien
aaggaaccgagctttattggagcaa

SEQ ID NO: 3311270 - DNA, 25 bp, Homo sapien
agagtgtggacactgtttacaacaa

SEQ ID NO: 3311271 - DNA, 25 bp, Homo sapien
ctttattggagcaaagagtgtggac

SEQ ID NO: 3311272 - DNA, 25 bp, Homo sapien
caagacccgaagactcctccaagtt

SEQ ID NO: 3311273 - DNA, 25 bp, Homo sapien
ttagtaaggtcaatttgggggcaga

SEQ ID NO: 3311274 - DNA, 25 bp, Homo sapien
ggaacatgccttagctgctgtcagg

SEQ ID NO: 3311275 - DNA, 25 bp, Homo sapien
gaagatggagaagagccatcccaag

SEQ ID NO: 3311276 - DNA, 25 bp, Homo sapien
acaggaacatgccttagctgctgtc

SEQ ID NO: 3311277 - DNA, 25 bp, Homo sapien
aaggaagtcatatcccaagagggca

SEQ ID NO: 3311278 - DNA, 25 bp, Homo sapien
caaagtttactgacatgcagggacc

SEQ ID NO: 3311279 - DNA, 25 bp, Homo sapien
tgcccaactcataagaatcagactg

SEQ ID NO: 3311280 - DNA, 25 bp, Homo sapien
ttggatgccacaaagcattactggg

SEQ ID NO: 3311281 - DNA, 25 bp, Homo sapien
tgaagatgggtactatgaactgctg

SEQ ID NO: 3311282 - DNA, 25 bp, Homo sapien
ccactgcggagtgaatcagaagtca

SEQ ID NO: 3311283 - DNA, 25 bp, Homo sapien
taggtcagaagccagatataggtcc

SEQ ID NO: 3311284 - DNA, 25 bp, Homo sapien
taatctagctctgaaaaggaggctg

SEQ ID NO: 3311285 - DNA, 25 bp, Homo sapien
aacaatggcctatttgtgaactacc

SEQ ID NO: 3311286 - DNA, 25 bp, Homo sapien
tgctaatggcaaaagtaacggtagg

SEQ ID NO: 3311287 - DNA, 25 bp, Homo sapien
gtaagcaagcttatactcgtgtggg

SEQ ID NO: 3311288 - DNA, 25 bp, Homo sapien
aatgacatgaaactccaagggtaaa

SEQ ID NO: 3311289 - DNA, 25 bp, Homo sapien
caagccaatacaccctttctcttgg

SEQ ID NO: 3311290 - DNA, 25 bp, Homo sapien
agcctcttcaattatcagtatacag

SEQ ID NO: 3311291 - DNA, 25 bp, Homo sapien
ttctgcagcagggacgacccttctt

SEQ ID NO: 3311292 - DNA, 25 bp, Homo sapien
aatacaccctttctcttggtctcaa

SEQ ID NO: 3311293 - DNA, 25 bp, Homo sapien
tcagagtatgagtaattagtggatc

SEQ ID NO: 3311294 - DNA, 25 bp, Homo sapien
gagtatgagtaattagtggatctag

SEQ ID NO: 3311295 - DNA, 25 bp, Homo sapien
caagattcagagtatgagtaattag

SEQ ID NO: 3311296 - DNA, 25 bp, Homo sapien
ttttatcaagattcagagtatgagt

SEQ ID NO: 3311297 - DNA, 25 bp, Homo sapien
taatcagcaaccagtttagggatgt

SEQ ID NO: 3311298 - DNA, 25 bp, Homo sapien
cagtttagggatgtgctgtctgctc

SEQ ID NO: 3311299 - DNA, 25 bp, Homo sapien
gcaaccagtttagggatgtgctgtc

SEQ ID NO: 3311300 - DNA, 25 bp, Homo sapien
tcagcaaccagtttagggatgtgct

SEQ ID NO: 3311301 - DNA, 25 bp, Homo sapien
aacatgctgccatagcttacttggg

SEQ ID NO: 3311302 - DNA, 25 bp, Homo sapien
tcacttgtgcaagtaattcaggcac

SEQ ID NO: 3311303 - DNA, 25 bp, Homo sapien
gggactacagacagctcacttgtgc

SEQ ID NO: 3311304 - DNA, 25 bp, Homo sapien
attcagattgcccagagtttctgga

SEQ ID NO: 3311305 - DNA, 25 bp, Homo sapien
gaacaactggccactgattttgagt

SEQ ID NO: 3311306 - DNA, 25 bp, Homo sapien
gaacccttcaaagaacgtcctgaga

SEQ ID NO: 3311307 - DNA, 25 bp, Homo sapien
gattttgagttgaacactggcaggc

SEQ ID NO: 3311308 - DNA, 25 bp, Homo sapien
catagctctcattgcaggaggcgag

SEQ ID NO: 3311309 - DNA, 25 bp, Homo sapien
tgtaagagtacacagacggcaccag

SEQ ID NO: 3311310 - DNA, 25 bp, Homo sapien
caactataatctaaacgatgactgg

SEQ ID NO: 3311311 - DNA, 25 bp, Homo sapien
gatgtcatggaacacaaggaaaatt

SEQ ID NO: 3311312 - DNA, 25 bp, Homo sapien
ttggtaattttcactccagaggatt

SEQ ID NO: 3311313 - DNA, 25 bp, Homo sapien
tgagggttgaggcactcagtagcac

SEQ ID NO: 3311314 - DNA, 25 bp, Homo sapien
cttgaatgggtttctttaagtcctg

SEQ ID NO: 3311315 - DNA, 25 bp, Homo sapien
caaagcagaagtctataccagcatc

SEQ ID NO: 3311316 - DNA, 25 bp, Homo sapien
cagaacgtccagatttccaatggcc

SEQ ID NO: 3311317 - DNA, 25 bp, Homo sapien
ttcccttccaaatgggtataaatgc

SEQ ID NO: 3311318 - DNA, 25 bp, Homo sapien
ctttcaactccatatcccaataatt

SEQ ID NO: 3311319 - DNA, 25 bp, Homo sapien
catatcccaataattcccttccaaa

SEQ ID NO: 3311320 - DNA, 25 bp, Homo sapien
attcccttccaaatgggtataaatg

SEQ ID NO: 3311321 - DNA, 25 bp, Homo sapien
cacagctaattaggcatactttctc

SEQ ID NO: 3311322 - DNA, 25 bp, Homo sapien
cttggcagtattgattgcagcacca

SEQ ID NO: 3311323 - DNA, 25 bp, Homo sapien
tactttctctagaggagcgactgca

SEQ ID NO: 3311324 - DNA, 25 bp, Homo sapien
gattgcagcaccaaacccagtggaa

SEQ ID NO: 3311325 - DNA, 25 bp, Homo sapien
ccatcagacatcagttgggtttttg

SEQ ID NO: 3311326 - DNA, 25 bp, Homo sapien
ctgctggtaccatcagacatcagtt

SEQ ID NO: 3311327 - DNA, 25 bp, Homo sapien
catcagacatcagttgggtttttga

SEQ ID NO: 3311328 - DNA, 25 bp, Homo sapien
cagacatcagttgggtttttgactg

SEQ ID NO: 3311329 - DNA, 25 bp, Homo sapien
cagaaagagtgtgataactttgtca

SEQ ID NO: 3311330 - DNA, 25 bp, Homo sapien
gcagaaagagtgtgataactttgtc

SEQ ID NO: 3311331 - DNA, 25 bp, Homo sapien
agaaagagtgtgataactttgtcac

SEQ ID NO: 3311332 - DNA, 25 bp, Homo sapien
ttgtatacaaaaattgccctcagaa

SEQ ID NO: 3311333 - DNA, 25 bp, Homo sapien
tcaggattttgacagcaaggcaccc

SEQ ID NO: 3311334 - DNA, 25 bp, Homo sapien
gtggctgaatcttgaggaactggcc

SEQ ID NO: 3311335 - DNA, 25 bp, Homo sapien
tatggataccacatactaacagagt

SEQ ID NO: 3311336 - DNA, 25 bp, Homo sapien
tcctctctcagggattgaatttaaa

SEQ ID NO: 3311337 - DNA, 25 bp, Homo sapien
tatcattttctcgagttggttccaa

SEQ ID NO: 3311338 - DNA, 25 bp, Homo sapien
gtccagtttcagtgcattctacttc

SEQ ID NO: 3311339 - DNA, 25 bp, Homo sapien
ttctaagaagttggaaacatttcac

SEQ ID NO: 3311340 - DNA, 25 bp, Homo sapien
gctgtttcctattaccaggtgctaa

SEQ ID NO: 3311341 - DNA, 25 bp, Homo sapien
tctccaatactctcaacgattccag

SEQ ID NO: 3311342 - DNA, 25 bp, Homo sapien
tccttctccaatactctcaacgatt

SEQ ID NO: 3311343 - DNA, 25 bp, Homo sapien
ccaatactctcaacgattccagccc

SEQ ID NO: 3311344 - DNA, 25 bp, Homo sapien
cttctccaatactctcaacgattcc

SEQ ID NO: 3311345 - DNA, 25 bp, Homo sapien
tgtaccacacagtccggtggccaca

SEQ ID NO: 3311346 - DNA, 25 bp, Homo sapien
cttcatggcccaagatggtgggata

SEQ ID NO: 3311347 - DNA, 25 bp, Homo sapien
ttcatctctgtaccacacagtccgg

SEQ ID NO: 3311348 - DNA, 25 bp, Homo sapien
tacaagaggtccaagtgtttactcc

SEQ ID NO: 3311349 - DNA, 25 bp, Homo sapien
ggaaggcaaagggtactgcagttcc

SEQ ID NO: 3311350 - DNA, 25 bp, Homo sapien
tatggaaggcaaagggtactgcagt

SEQ ID NO: 3311351 - DNA, 25 bp, Homo sapien
ctgtatggaaggcaaagggtactgc

SEQ ID NO: 3311352 - DNA, 25 bp, Homo sapien
tgtatggaaggcaaagggtactgca

SEQ ID NO: 3311353 - DNA, 25 bp, Homo sapien
tgtaaggctttttgctagtttgata

SEQ ID NO: 3311354 - DNA, 25 bp, Homo sapien
taatggtgttttagagttgttgact

SEQ ID NO: 3311355 - DNA, 25 bp, Homo sapien
aaggctttttgctagtttgatattc

SEQ ID NO: 3311356 - DNA, 25 bp, Homo sapien
taattctagggaagggtcaataata

SEQ ID NO: 3311357 - DNA, 25 bp, Homo sapien
gataatggttgaatgtctttgagtg

SEQ ID NO: 3311358 - DNA, 25 bp, Homo sapien
gcttgtctgataatggttgaatgtc

SEQ ID NO: 3311359 - DNA, 25 bp, Homo sapien
gacattcagatgtgtagcttgtctg

SEQ ID NO: 3311360 - DNA, 25 bp, Homo sapien
gagtgagggtccaaacctggttgca

SEQ ID NO: 3311361 - DNA, 25 bp, Homo sapien
tcaatagaaaatggtgcaccaggct

SEQ ID NO: 3311362 - DNA, 25 bp, Homo sapien
cttccagagtatggctgctttgcat

SEQ ID NO: 3311363 - DNA, 25 bp, Homo sapien
gcaccaggcttccagagtatggctg

SEQ ID NO: 3311364 - DNA, 25 bp, Homo sapien
ctttatgcgaacttcctttgccttt

SEQ ID NO: 3311365 - DNA, 25 bp, Homo sapien
tctccaccgcagatgaatttattga

SEQ ID NO: 3311366 - DNA, 25 bp, Homo sapien
gagatcctgtagcaactttcactgt

SEQ ID NO: 3311367 - DNA, 25 bp, Homo sapien
gaaagtacaaaggtacacaggcgac

SEQ ID NO: 3311368 - DNA, 25 bp, Homo sapien
ttcactgtagaaagtacaaaggtac

SEQ ID NO: 3311369 - DNA, 25 bp, Homo sapien
gatgatgctggcctactttctatac

SEQ ID NO: 3311370 - DNA, 25 bp, Homo sapien
ttctatactatttctatatggctgt

SEQ ID NO: 3311371 - DNA, 25 bp, Homo sapien
tctatatggctgtaacatttaaaat

SEQ ID NO: 3311372 - DNA, 25 bp, Homo sapien
ggatgatgctggcctactttctata

SEQ ID NO: 3311373 - DNA, 25 bp, Homo sapien
aagagaactggctgcctggcatgtg

SEQ ID NO: 3311374 - DNA, 25 bp, Homo sapien
aactggctgcctggcatgtggttgt

SEQ ID NO: 3311375 - DNA, 25 bp, Homo sapien
tgaaagagaactggctgcctggcat

SEQ ID NO: 3311376 - DNA, 25 bp, Homo sapien
agaactggctgcctggcatgtggtt

SEQ ID NO: 3311377 - DNA, 25 bp, Homo sapien
gtacccacgtgcctactcttgcaat

SEQ ID NO: 3311378 - DNA, 25 bp, Homo sapien
ctgaggagactgactgttacttgaa

SEQ ID NO: 3311379 - DNA, 25 bp, Homo sapien
gatgaatacccaacagcctgaggag

SEQ ID NO: 3311380 - DNA, 25 bp, Homo sapien
tcttgtttgaacgatcctgctcaga

SEQ ID NO: 3311381 - DNA, 25 bp, Homo sapien
aacccaacatgaataaccttggtat

SEQ ID NO: 3311382 - DNA, 25 bp, Homo sapien
tgcttccaagttacaaaaacctagc

SEQ ID NO: 3311383 - DNA, 25 bp, Homo sapien
tatccatgggctcttgcttccaagt

SEQ ID NO: 3311384 - DNA, 25 bp, Homo sapien
gggctcttgcttccaagttacaaaa

SEQ ID NO: 3311385 - DNA, 25 bp, Homo sapien
ggaagagtttgacagctactatggc

SEQ ID NO: 3311386 - DNA, 25 bp, Homo sapien
gtttgacagctactatggcagtcat

SEQ ID NO: 3311387 - DNA, 25 bp, Homo sapien
ttgggaagagtttgacagctactat

SEQ ID NO: 3311388 - DNA, 25 bp, Homo sapien
agagtttgacagctactatggcagt

SEQ ID NO: 3311389 - DNA, 25 bp, Homo sapien
aaatgaagcctcaacattgcctggc

SEQ ID NO: 3311390 - DNA, 25 bp, Homo sapien
tgtccaattcattaagaagccctgc

SEQ ID NO: 3311391 - DNA, 25 bp, Homo sapien
tcaccctctagagaaaagtctttcc

SEQ ID NO: 3311392 - DNA, 25 bp, Homo sapien
gcttaatgtctaaatgccttctcta

SEQ ID NO: 3311393 - DNA, 25 bp, Homo sapien
gaattaatgatatttcccagctgtt

SEQ ID NO: 3311394 - DNA, 25 bp, Homo sapien
gccacaagggaaaacatctgtattg

SEQ ID NO: 3311395 - DNA, 25 bp, Homo sapien
aaatctgtgatgagcagaattaatg

SEQ ID NO: 3311396 - DNA, 25 bp, Homo sapien
aggctgaagactgccacaagggaaa

SEQ ID NO: 3311397 - DNA, 25 bp, Homo sapien
tcaaaacatcagaatggtacggata

SEQ ID NO: 3311398 - DNA, 25 bp, Homo sapien
aacttctcttacaagctctccatgt

SEQ ID NO: 3311399 - DNA, 25 bp, Homo sapien
tggaagaaccaaggcactctaattt

SEQ ID NO: 3311400 - DNA, 25 bp, Homo sapien
tcagcacaataggaaatgcaaagca

SEQ ID NO: 3311401 - DNA, 25 bp, Homo sapien
agtgtctctgatcattcggatttgc

SEQ ID NO: 3311402 - DNA, 25 bp, Homo sapien
accttttcattttctgctagacaat

SEQ ID NO: 3311403 - DNA, 25 bp, Homo sapien
ttttcattttctgctagacaatccc

SEQ ID NO: 3311404 - DNA, 25 bp, Homo sapien
tcatccttccaccttttcattttct

SEQ ID NO: 3311405 - DNA, 25 bp, Homo sapien
catccttccaccttttcattttctg

SEQ ID NO: 3311406 - DNA, 25 bp, Homo sapien
gccataaaatcagccacaagttttg

SEQ ID NO: 3311407 - DNA, 25 bp, Homo sapien
agccataaaatcagccacaagtttt

SEQ ID NO: 3311408 - DNA, 25 bp, Homo sapien
gatggtatcattgttagattcaacc

SEQ ID NO: 3311409 - DNA, 25 bp, Homo sapien
aagaagatggtatcattgttagatt

SEQ ID NO: 3311410 - DNA, 25 bp, Homo sapien
tcattgttagattcaaccagggtaa

SEQ ID NO: 3311411 - DNA, 25 bp, Homo sapien
ggtatcattgttagattcaaccagg

SEQ ID NO: 3311412 - DNA, 25 bp, Homo sapien
gactttgttaatggtggcatcagaa

SEQ ID NO: 3311413 - DNA, 25 bp, Homo sapien
gaacagactttgttaatggtggcat

SEQ ID NO: 3311414 - DNA, 25 bp, Homo sapien
taatggtggcatcagaaatgtcgat

SEQ ID NO: 3311415 - DNA, 25 bp, Homo sapien
agaggaacagactttgttaatggtg

SEQ ID NO: 3311416 - DNA, 25 bp, Homo sapien
cagtcagtagcagcatagggttcat

SEQ ID NO: 3311417 - DNA, 25 bp, Homo sapien
agtagcagcatagggttcattgaga

SEQ ID NO: 3311418 - DNA, 25 bp, Homo sapien
tcagtagcagcatagggttcattga

SEQ ID NO: 3311419 - DNA, 25 bp, Homo sapien
tccagtcagtagcagcatagggttc

SEQ ID NO: 3311420 - DNA, 25 bp, Homo sapien
tgctgtggatttaggaaatgcccag

SEQ ID NO: 3311421 - DNA, 25 bp, Homo sapien
ggatgaataaattggagtgcactta

SEQ ID NO: 3311422 - DNA, 25 bp, Homo sapien
taagtccagttccttatataagcat

SEQ ID NO: 3311423 - DNA, 25 bp, Homo sapien
tttttgcacgggatagtgctgtgga

SEQ ID NO: 3311424 - DNA, 25 bp, Homo sapien
tatttggtatcttgagataaggtac

SEQ ID NO: 3311425 - DNA, 25 bp, Homo sapien
tggctgtcagatatttggtatcttg

SEQ ID NO: 3311426 - DNA, 25 bp, Homo sapien
tcctcagaacatgtggctgtcagat

SEQ ID NO: 3311427 - DNA, 25 bp, Homo sapien
cctcagaacatgtggctgtcagata

SEQ ID NO: 3311428 - DNA, 25 bp, Homo sapien
gacttgagacacgtttgcatagttg

SEQ ID NO: 3311429 - DNA, 25 bp, Homo sapien
aaatatgacttgagacacgtttgca

SEQ ID NO: 3311430 - DNA, 25 bp, Homo sapien
gaggaaatatgacttgagacacgtt

SEQ ID NO: 3311431 - DNA, 25 bp, Homo sapien
gacacgtttgcatagttgatagaat

SEQ ID NO: 3311432 - DNA, 25 bp, Homo sapien
aagccgaccgatgacttcaaatgaa

SEQ ID NO: 3311433 - DNA, 25 bp, Homo sapien
tacactagtgaataacacagtaatg

SEQ ID NO: 3311434 - DNA, 25 bp, Homo sapien
aaaccctcagtaatgaactccttgg

SEQ ID NO: 3311435 - DNA, 25 bp, Homo sapien
tcagtagtcatgaccagtatatccc

SEQ ID NO: 3311436 - DNA, 25 bp, Homo sapien
cagtaatgaaacattagtctatatt

SEQ ID NO: 3311437 - DNA, 25 bp, Homo sapien
gactgcagacccataaccagttgaa

SEQ ID NO: 3311438 - DNA, 25 bp, Homo sapien
ctgatgccaaggaagtggtggatgg

SEQ ID NO: 3311439 - DNA, 25 bp, Homo sapien
ggtggatgggcttcctcctgcaggt

SEQ ID NO: 3311440 - DNA, 25 bp, Homo sapien
tggatgggcttcctcctgcaggtga

SEQ ID NO: 3311441 - DNA, 25 bp, Homo sapien
aagtggtggatgggcttcctcctgc

SEQ ID NO: 3311442 - DNA, 25 bp, Homo sapien
cagggtcccctgaggattgcttaca

SEQ ID NO: 3311443 - DNA, 25 bp, Homo sapien
ctgcagggtcccctgaggattgctt

SEQ ID NO: 3311444 - DNA, 25 bp, Homo sapien
tggtgccatcctgcagggtcccctg

SEQ ID NO: 3311445 - DNA, 25 bp, Homo sapien
ctggtgccatcctgcagggtcccct

SEQ ID NO: 3311446 - DNA, 25 bp, Homo sapien
tggacagtgcaatacaaagacacac

SEQ ID NO: 3311447 - DNA, 25 bp, Homo sapien
acacaaaggcatgagacaggaccat

SEQ ID NO: 3311448 - DNA, 25 bp, Homo sapien
gacacacaaaggcatgagacaggac

SEQ ID NO: 3311449 - DNA, 25 bp, Homo sapien
ctggacagtgcaatacaaagacaca

SEQ ID NO: 3311450 - DNA, 25 bp, Homo sapien
gcagtagttgctctccgggttttta

SEQ ID NO: 3311451 - DNA, 25 bp, Homo sapien
tttcaagcagtagttgctctccggg

SEQ ID NO: 3311452 - DNA, 25 bp, Homo sapien
tcaagcagtagttgctctccgggtt

SEQ ID NO: 3311453 - DNA, 25 bp, Homo sapien
caagcagtagttgctctccgggttt

SEQ ID NO: 3311454 - DNA, 25 bp, Homo sapien
gtgaccttggtcaagccctttcgtc

SEQ ID NO: 3311455 - DNA, 25 bp, Homo sapien
tgaccttggtcaagccctttcgtcc

SEQ ID NO: 3311456 - DNA, 25 bp, Homo sapien
tcaggctgggaaatcttaggatggt

SEQ ID NO: 3311457 - DNA, 25 bp, Homo sapien
ggatggtgaaccatcatgtttcctg

SEQ ID NO: 3311458 - DNA, 25 bp, Homo sapien
actgtagtcaccccttctccaacac

SEQ ID NO: 3311459 - DNA, 25 bp, Homo sapien
tgactgtagtcaccccttctccaac

SEQ ID NO: 3311460 - DNA, 25 bp, Homo sapien
gactgtagtcaccccttctccaaca

SEQ ID NO: 3311461 - DNA, 25 bp, Homo sapien
tgccggctgcctcatggcctaaaat

SEQ ID NO: 3311462 - DNA, 25 bp, Homo sapien
acgatgccggctgcctcatggccta

SEQ ID NO: 3311463 - DNA, 25 bp, Homo sapien
ccggctgcctcatggcctaaaatca

SEQ ID NO: 3311464 - DNA, 25 bp, Homo sapien
tgcctcatggcctaaaatcacagga

SEQ ID NO: 3311465 - DNA, 25 bp, Homo sapien
gtgccacagattcctacagccacca

SEQ ID NO: 3311466 - DNA, 25 bp, Homo sapien
atctgtgccacagattcctacagcc

SEQ ID NO: 3311467 - DNA, 25 bp, Homo sapien
tctgtgccacagattcctacagcca

SEQ ID NO: 3311468 - DNA, 25 bp, Homo sapien
cactaaccacgtggtcatctgtgcc

SEQ ID NO: 3311469 - DNA, 25 bp, Homo sapien
cttaaatacaaatggaaaaatgtat

SEQ ID NO: 3311470 - DNA, 25 bp, Homo sapien
atacaaatggaaaaatgtatttcac

SEQ ID NO: 3311471 - DNA, 25 bp, Homo sapien
aatacaaatggaaaaatgtatttca

SEQ ID NO: 3311472 - DNA, 25 bp, Homo sapien
ggtttctttaactcccatagcacag

SEQ ID NO: 3311473 - DNA, 25 bp, Homo sapien
gtttctttaactcccatagcacagc

SEQ ID NO: 3311474 - DNA, 25 bp, Homo sapien
agactggtgagtccttgtggatttc

SEQ ID NO: 3311475 - DNA, 25 bp, Homo sapien
accaggagactggtgagtccttgtg

SEQ ID NO: 3311476 - DNA, 25 bp, Homo sapien
gagactggtgagtccttgtggattt

SEQ ID NO: 3311477 - DNA, 25 bp, Homo sapien
cagaccaggagactggtgagtcctt

SEQ ID NO: 3311478 - DNA, 25 bp, Homo sapien
cataaagcaggtgtattgcataggt

SEQ ID NO: 3311479 - DNA, 25 bp, Homo sapien
agtgcataaagcaggtgtattgcat

SEQ ID NO: 3311480 - DNA, 25 bp, Homo sapien
ataaagcaggtgtattgcataggta

SEQ ID NO: 3311481 - DNA, 25 bp, Homo sapien
tgcataaagcaggtgtattgcatag

SEQ ID NO: 3311482 - DNA, 25 bp, Homo sapien
taccatctggcaactactctgtgct

SEQ ID NO: 3311483 - DNA, 25 bp, Homo sapien
catctggcaactactctgtgcttac

SEQ ID NO: 3311484 - DNA, 25 bp, Homo sapien
ttaataccatctggcaactactctg

SEQ ID NO: 3311485 - DNA, 25 bp, Homo sapien
aataccatctggcaactactctgtg

SEQ ID NO: 3311486 - DNA, 25 bp, Homo sapien
tctaaacgtttagatgggcaggtgg

SEQ ID NO: 3311487 - DNA, 25 bp, Homo sapien
tagcaggccctctggagcaacatct

SEQ ID NO: 3311488 - DNA, 25 bp, Homo sapien
tctagtatcagagggccatagcagg

SEQ ID NO: 3311489 - DNA, 25 bp, Homo sapien
cagttgccacattattgaaagccag

SEQ ID NO: 3311490 - DNA, 25 bp, Homo sapien
ccaagatgtcgagggagcggaaata

SEQ ID NO: 3311491 - DNA, 25 bp, Homo sapien
tgcttacattcctcctgtgaaggga

SEQ ID NO: 3311492 - DNA, 25 bp, Homo sapien
cattttgattttggtactgaagccc

SEQ ID NO: 3311493 - DNA, 25 bp, Homo sapien
gcatccctgcaagagatccaactgt

SEQ ID NO: 3311494 - DNA, 25 bp, Homo sapien
catagtgcatgatgcagaaggctcc

SEQ ID NO: 3311495 - DNA, 25 bp, Homo sapien
catggaggacttgccactctatgac

SEQ ID NO: 3311496 - DNA, 25 bp, Homo sapien
tatatgaaccacttgccccatagtg

SEQ ID NO: 3311497 - DNA, 25 bp, Homo sapien
ggaatacttgattacagacccagcc

SEQ ID NO: 3311498 - DNA, 25 bp, Homo sapien
tacatggcccttcttaattggcgaa

SEQ ID NO: 3311499 - DNA, 25 bp, Homo sapien
gagagcctgagagacttactgaaga

SEQ ID NO: 3311500 - DNA, 25 bp, Homo sapien
gcatcagtgtaaaagccgcagagca

SEQ ID NO: 3311501 - DNA, 25 bp, Homo sapien
tgtcagcttctgtgtcactagcagg

SEQ ID NO: 3311502 - DNA, 25 bp, Homo sapien
gagtgggaaaagcattaacaaagca

SEQ ID NO: 3311503 - DNA, 25 bp, Homo sapien
aatgcaaatccttcccctgagagtg

SEQ ID NO: 3311504 - DNA, 25 bp, Homo sapien
catttttggagacagctacctcctt

SEQ ID NO: 3311505 - DNA, 25 bp, Homo sapien
tatattgcttaaggtgtttgtgcca

SEQ ID NO: 3311506 - DNA, 25 bp, Homo sapien
tgagttcctaagaaatttcctgtat

SEQ ID NO: 3311507 - DNA, 25 bp, Homo sapien
ggaccttcactacttgtaaatgtga

SEQ ID NO: 3311508 - DNA, 25 bp, Homo sapien
ttcctgtatttagaactcttggacc

SEQ ID NO: 3311509 - DNA, 25 bp, Homo sapien
tgtaaatgtgagtctatcctttacc

SEQ ID NO: 3311510 - DNA, 25 bp, Homo sapien
gcatgtgtatgttcagggcaagtaa

SEQ ID NO: 3311511 - DNA, 25 bp, Homo sapien
acttcaatcacaatggcccagcatg

SEQ ID NO: 3311512 - DNA, 25 bp, Homo sapien
cctcaatggcaaaggtgacacagta

SEQ ID NO: 3311513 - DNA, 25 bp, Homo sapien
cctccactgggattcgatgactaaa

SEQ ID NO: 3311514 - DNA, 25 bp, Homo sapien
gaattaatgatatttcctagctgtt

SEQ ID NO: 3311515 - DNA, 25 bp, Homo sapien
taatgatatttcctagctgttgctc

SEQ ID NO: 3311516 - DNA, 25 bp, Homo sapien
tatttcctagctgttgctccagatc

SEQ ID NO: 3311517 - DNA, 25 bp, Homo sapien
aaataatttcccatcaatttccatt

SEQ ID NO: 3311518 - DNA, 25 bp, Homo sapien
tcaaaacgtcaggacggtacggata

SEQ ID NO: 3311519 - DNA, 25 bp, Homo sapien
tgcccacgttcctggtataataagg

SEQ ID NO: 3311520 - DNA, 25 bp, Homo sapien
ggtaggttcccatattatgtccatt

SEQ ID NO: 3311521 - DNA, 25 bp, Homo sapien
gatttgtaacttgctctggtagcac

SEQ ID NO: 3311522 - DNA, 25 bp, Homo sapien
caacatcctgagtatgcctgtcatt

SEQ ID NO: 3311523 - DNA, 25 bp, Homo sapien
taaaacatgggttattaacgcatcc

SEQ ID NO: 3311524 - DNA, 25 bp, Homo sapien
aaaacatgggttattaacgcatcca

SEQ ID NO: 3311525 - DNA, 25 bp, Homo sapien
gaagacagtatcattgttggattca

SEQ ID NO: 3311526 - DNA, 25 bp, Homo sapien
gaaaagaagacagtatcattgttgg

SEQ ID NO: 3311527 - DNA, 25 bp, Homo sapien
tgaaaagaagacagtatcattgttg

SEQ ID NO: 3311528 - DNA, 25 bp, Homo sapien
aaagaagacagtatcattgttggat

SEQ ID NO: 3311529 - DNA, 25 bp, Homo sapien
cattccagactgctataactgagga

SEQ ID NO: 3311530 - DNA, 25 bp, Homo sapien
tctatattgggaccttctgtctgca

SEQ ID NO: 3311531 - DNA, 25 bp, Homo sapien
tacagaagtttatgcccaaggtaga

SEQ ID NO: 3311532 - DNA, 25 bp, Homo sapien
tcaaagtttagaaaaggtgctccat

SEQ ID NO: 3311533 - DNA, 25 bp, Homo sapien
tccagtcagtagcagcatagggttt

SEQ ID NO: 3311534 - DNA, 25 bp, Homo sapien
gtgcgtccagtcagtagcagcatag

SEQ ID NO: 3311535 - DNA, 25 bp, Homo sapien
cgtccagtcagtagcagcatagggt

SEQ ID NO: 3311536 - DNA, 25 bp, Homo sapien
gtcagtagcagcatagggtttattg

SEQ ID NO: 3311537 - DNA, 25 bp, Homo sapien
cacatgcctcatgacaacataacag

SEQ ID NO: 3311538 - DNA, 25 bp, Homo sapien
cctcatgacaacataacagggaagc

SEQ ID NO: 3311539 - DNA, 25 bp, Homo sapien
tgcctcatgacaacataacagggaa

SEQ ID NO: 3311540 - DNA, 25 bp, Homo sapien
catgcctcatgacaacataacaggg

SEQ ID NO: 3311541 - DNA, 25 bp, Homo sapien
tcctcagaacatgtggctgtcagac

SEQ ID NO: 3311542 - DNA, 25 bp, Homo sapien
aatacactgatcatttgggaacctc

SEQ ID NO: 3311543 - DNA, 25 bp, Homo sapien
tggattctgacctttgggagaccag

SEQ ID NO: 3311544 - DNA, 25 bp, Homo sapien
tgggaacctcaagaaacagttcaga

SEQ ID NO: 3311545 - DNA, 25 bp, Homo sapien
acatatattttgctgcctaaatgca

SEQ ID NO: 3311546 - DNA, 25 bp, Homo sapien
acaggtttgggtaattgatggaaga

SEQ ID NO: 3311547 - DNA, 25 bp, Homo sapien
aaatctcagggcatgtcatggtaca

SEQ ID NO: 3311548 - DNA, 25 bp, Homo sapien
gaggaaatatgacttgagacaggtt

SEQ ID NO: 3311549 - DNA, 25 bp, Homo sapien
tcctttagcacttcctgaatgggtt

SEQ ID NO: 3311550 - DNA, 25 bp, Homo sapien
tggtgtcaagccgaccgatgacttc

SEQ ID NO: 3311551 - DNA, 25 bp, Homo sapien
tgagggttgatgcattcagtggcac

SEQ ID NO: 3311552 - DNA, 25 bp, Homo sapien
tgatgtccaccgcaatgattctggc

SEQ ID NO: 3311553 - DNA, 25 bp, Homo sapien
cagataggccgacccctcccaggcc

SEQ ID NO: 3311554 - DNA, 25 bp, Homo sapien
gcagataggccgacccctcccaggc

SEQ ID NO: 3311555 - DNA, 25 bp, Homo sapien
agcagataggccgacccctcccagg

SEQ ID NO: 3311556 - DNA, 25 bp, Homo sapien
tctcagcactgaggctttgggcaaa

SEQ ID NO: 3311557 - DNA, 25 bp, Homo sapien
tagcagaacctatggtgcctgaggc

SEQ ID NO: 3311558 - DNA, 25 bp, Homo sapien
tagatggtcctcaagggcaaacgct

SEQ ID NO: 3311559 - DNA, 25 bp, Homo sapien
tccgtctaagaatccacagagtggg

SEQ ID NO: 3311560 - DNA, 25 bp, Homo sapien
ttttggtttccgacagtctgcatgt

SEQ ID NO: 3311561 - DNA, 25 bp, Homo sapien
cccttttggtttccgacagtctgca

SEQ ID NO: 3311562 - DNA, 25 bp, Homo sapien
gttttatcacccattgtcattctca

SEQ ID NO: 3311563 - DNA, 25 bp, Homo sapien
tttccgacagtctgcatgtaagcag

SEQ ID NO: 3311564 - DNA, 25 bp, Homo sapien
ccaccaccgtgtactgggagaaggt

SEQ ID NO: 3311565 - DNA, 25 bp, Homo sapien
cttggcaacgttaactgcagaccca

SEQ ID NO: 3311566 - DNA, 25 bp, Homo sapien
tgcagacccataaccagtcgagaat

SEQ ID NO: 3311567 - DNA, 25 bp, Homo sapien
gccactgcattctcatccaccaccg

SEQ ID NO: 3311568 - DNA, 25 bp, Homo sapien
ctggtgccaaggaagtggtgaatgg

SEQ ID NO: 3311569 - DNA, 25 bp, Homo sapien
ggtgaatgggcttccccctgcaggt

SEQ ID NO: 3311570 - DNA, 25 bp, Homo sapien
tgccaaggaagtggtgaatgggctt

SEQ ID NO: 3311571 - DNA, 25 bp, Homo sapien
caaggaagtggtgaatgggcttccc

SEQ ID NO: 3311572 - DNA, 25 bp, Homo sapien
taagtaatgtgcaaactcaaagtct

SEQ ID NO: 3311573 - DNA, 25 bp, Homo sapien
tgagacaggagcataagtaatgtgc

SEQ ID NO: 3311574 - DNA, 25 bp, Homo sapien
ggagcataagtaatgtgcaaactca

SEQ ID NO: 3311575 - DNA, 25 bp, Homo sapien
gtaatgtgcaaactcaaagtctgtg

SEQ ID NO: 3311576 - DNA, 25 bp, Homo sapien
tctccgggtttttacaaactctgca

SEQ ID NO: 3311577 - DNA, 25 bp, Homo sapien
ctccgggtttttacaaactctgcat

SEQ ID NO: 3311578 - DNA, 25 bp, Homo sapien
gagtttataagtgcctgaggattcc

SEQ ID NO: 3311579 - DNA, 25 bp, Homo sapien
agaaatcgcaaatgtgggagaccac

SEQ ID NO: 3311580 - DNA, 25 bp, Homo sapien
tgaggattcctactgagaaatcgca

SEQ ID NO: 3311581 - DNA, 25 bp, Homo sapien
ttcagctcttcacaacaagttaggc

SEQ ID NO: 3311582 - DNA, 25 bp, Homo sapien
gaattactggactatgaatgccaca

SEQ ID NO: 3311583 - DNA, 25 bp, Homo sapien
cagggtgaatctacaggctaaagca

SEQ ID NO: 3311584 - DNA, 25 bp, Homo sapien
tgaaggagctgcataggtcacctaa

SEQ ID NO: 3311585 - DNA, 25 bp, Homo sapien
tgggccctgacagaagacagtgttc

SEQ ID NO: 3311586 - DNA, 25 bp, Homo sapien
gtgttccctgagtgtgaatcctgta

SEQ ID NO: 3311587 - DNA, 25 bp, Homo sapien
tgttccctgagtgtgaatcctgtac

SEQ ID NO: 3311588 - DNA, 25 bp, Homo sapien
tgcctcatggcctaaaatcacagga

SEQ ID NO: 3311589 - DNA, 25 bp, Homo sapien
ccttctccaacactctccacgatgc

SEQ ID NO: 3311590 - DNA, 25 bp, Homo sapien
acgatgccggctgcctcatggccta

SEQ ID NO: 3311591 - DNA, 25 bp, Homo sapien
ccggctgcctcatggcctaaaatca

SEQ ID NO: 3311592 - DNA, 25 bp, Homo sapien
atctgtgtgacagattcctacagcc

SEQ ID NO: 3311593 - DNA, 25 bp, Homo sapien
tgtgtgacagattcctacagccacc

SEQ ID NO: 3311594 - DNA, 25 bp, Homo sapien
gtgtgacagattcctacagccacca

SEQ ID NO: 3311595 - DNA, 25 bp, Homo sapien
cacgtggtcatctgtgtgacagatt

SEQ ID NO: 3311596 - DNA, 25 bp, Homo sapien
taagtcttatgtaagaatgcacgct

SEQ ID NO: 3311597 - DNA, 25 bp, Homo sapien
taaagagaagctgttcagattcaga

SEQ ID NO: 3311598 - DNA, 25 bp, Homo sapien
tcagtttatccccaaggttattcag

SEQ ID NO: 3311599 - DNA, 25 bp, Homo sapien
ggttattcagtctaaagcccttctc

SEQ ID NO: 3311600 - DNA, 25 bp, Homo sapien
cataagccttaggaggtgcaacctc

SEQ ID NO: 3311601 - DNA, 25 bp, Homo sapien
cacatcctcaatggaaaagggtttc

SEQ ID NO: 3311602 - DNA, 25 bp, Homo sapien
ttctttacctcccatagcacagctg

SEQ ID NO: 3311603 - DNA, 25 bp, Homo sapien
cttaatgcgaacttcataagcctta

SEQ ID NO: 3311604 - DNA, 25 bp, Homo sapien
taaagcatgtataattcgcagagcc

SEQ ID NO: 3311605 - DNA, 25 bp, Homo sapien
taatgccgtcctgaaaatgctcgtc

SEQ ID NO: 3311606 - DNA, 25 bp, Homo sapien
tgtaatattgcgtcccatgtctggt

SEQ ID NO: 3311607 - DNA, 25 bp, Homo sapien
tgtatacactcagacccacgcatgt

SEQ ID NO: 3311608 - DNA, 25 bp, Homo sapien
cctctcatcaaacttctgtcagaca

SEQ ID NO: 3311609 - DNA, 25 bp, Homo sapien
tgatgattctaatgctgtgaaatca

SEQ ID NO: 3311610 - DNA, 25 bp, Homo sapien
cttgatgattctaatgctgtgaaat

SEQ ID NO: 3311611 - DNA, 25 bp, Homo sapien
ttgatgattctaatgctgtgaaatc

SEQ ID NO: 3311612 - DNA, 25 bp, Homo sapien
cagtcatgattagcttggaataaac

SEQ ID NO: 3311613 - DNA, 25 bp, Homo sapien
tatttccactgcagttcagtataca

SEQ ID NO: 3311614 - DNA, 25 bp, Homo sapien
gatgagaatatattaccaacagtaa

SEQ ID NO: 3311615 - DNA, 25 bp, Homo sapien
tagacacaggttctatacattcctg

SEQ ID NO: 3311616 - DNA, 25 bp, Homo sapien
ccaccagcagactgtgagtctttgt

SEQ ID NO: 3311617 - DNA, 25 bp, Homo sapien
caccagcagactgtgagtctttgtg

SEQ ID NO: 3311618 - DNA, 25 bp, Homo sapien
cacataggtcgttctgccttgtatt

SEQ ID NO: 3311619 - DNA, 25 bp, Homo sapien
tctttcaatcccacataggtcgttc

SEQ ID NO: 3311620 - DNA, 25 bp, Homo sapien
tcaatcccacataggtcgttctgcc

SEQ ID NO: 3311621 - DNA, 25 bp, Homo sapien
atcccacataggtcgttctgccttg

SEQ ID NO: 3311622 - DNA, 25 bp, Homo sapien
aatacagggcctatgctctttagaa

SEQ ID NO: 3311623 - DNA, 25 bp, Homo sapien
tgtggtcctccaaagaggaatccat

SEQ ID NO: 3311624 - DNA, 25 bp, Homo sapien
gcccttgtggagatatgttaacgcc

SEQ ID NO: 3311625 - DNA, 25 bp, Homo sapien
tgagatctaggacaaggtcgccctt

SEQ ID NO: 3311626 - DNA, 25 bp, Homo sapien
cagtgcccacctaatgccctcaact

SEQ ID NO: 3311627 - DNA, 25 bp, Homo sapien
ggactgtgccactctataacaacac

SEQ ID NO: 3311628 - DNA, 25 bp, Homo sapien
gaggactgtgccactctataacaac

SEQ ID NO: 3311629 - DNA, 25 bp, Homo sapien
tgtgccactctataacaacactggc

SEQ ID NO: 3311630 - DNA, 25 bp, Homo sapien
tacaagggaaggcatctgtattgtt

SEQ ID NO: 3311631 - DNA, 25 bp, Homo sapien
tggcttcaattccccagttgatgtt

SEQ ID NO: 3311632 - DNA, 25 bp, Homo sapien
tcaaaacgtcaggacggtacggata

SEQ ID NO: 3311633 - DNA, 25 bp, Homo sapien
ctttccagagcgaagcaggtcaaat

SEQ ID NO: 3311634 - DNA, 25 bp, Homo sapien
agtttggggacagattctttactct

SEQ ID NO: 3311635 - DNA, 25 bp, Homo sapien
tgaaaacttcttagccataaagtca

SEQ ID NO: 3311636 - DNA, 25 bp, Homo sapien
ttggggacagattctttactcttaa

SEQ ID NO: 3311637 - DNA, 25 bp, Homo sapien
aaaatagctcctttccacgtgcgtc

SEQ ID NO: 3311638 - DNA, 25 bp, Homo sapien
tagctcctttccacgtgcgtccagt

SEQ ID NO: 3311639 - DNA, 25 bp, Homo sapien
tcctttccacgtgcgtccagtcagt

SEQ ID NO: 3311640 - DNA, 25 bp, Homo sapien
aatagctcctttccacgtgcgtcca

SEQ ID NO: 3311641 - DNA, 25 bp, Homo sapien
cctcatgacaacataacagggaagc

SEQ ID NO: 3311642 - DNA, 25 bp, Homo sapien
atgacacttgtgccacatgcctcat

SEQ ID NO: 3311643 - DNA, 25 bp, Homo sapien
catgcctcatgacaacataacaggg

SEQ ID NO: 3311644 - DNA, 25 bp, Homo sapien
cacatgcctcatgacaacataacag

SEQ ID NO: 3311645 - DNA, 25 bp, Homo sapien
catggtgtcaagccgaccgatgact

SEQ ID NO: 3311646 - DNA, 25 bp, Homo sapien
aagccgaccgatgacttcaaacgaa

SEQ ID NO: 3311647 - DNA, 25 bp, Homo sapien
gatgacttcaaacgaaaaatccaca

SEQ ID NO: 3311648 - DNA, 25 bp, Homo sapien
tggtgtcaagccgaccgatgacttc

SEQ ID NO: 3311649 - DNA, 25 bp, Homo sapien
cagtggcacccaactctttagcctt

SEQ ID NO: 3311650 - DNA, 25 bp, Homo sapien
gtccttgttgatgtccacagcaatg

SEQ ID NO: 3311651 - DNA, 25 bp, Homo sapien
tccttgttgatgtccacagcaatga

SEQ ID NO: 3311652 - DNA, 25 bp, Homo sapien
agtggcacccaactctttagccttt

SEQ ID NO: 3311653 - DNA, 25 bp, Homo sapien
caggccaaacacagcacaggtagac

SEQ ID NO: 3311654 - DNA, 25 bp, Homo sapien
ccaaacacagcacaggtagaccctg

SEQ ID NO: 3311655 - DNA, 25 bp, Homo sapien
acaacagataggccgacccctccca

SEQ ID NO: 3311656 - DNA, 25 bp, Homo sapien
acagataggccgacccctcccaggc

SEQ ID NO: 3311657 - DNA, 25 bp, Homo sapien
cttgcaagaaattgcttcccttttg

SEQ ID NO: 3311658 - DNA, 25 bp, Homo sapien
tgcaagaaattgcttcccttttggt

SEQ ID NO: 3311659 - DNA, 25 bp, Homo sapien
ctgcgtgtaaccggttttatcatcc

SEQ ID NO: 3311660 - DNA, 25 bp, Homo sapien
gcgtgtaaccggttttatcatccat

SEQ ID NO: 3311661 - DNA, 25 bp, Homo sapien
cgtgtaaccggttttatcatccatt

SEQ ID NO: 3311662 - DNA, 25 bp, Homo sapien
agtctgcgtgtaaccggttttatca

SEQ ID NO: 3311663 - DNA, 25 bp, Homo sapien
actgcagacccataaccagtcgaaa

SEQ ID NO: 3311664 - DNA, 25 bp, Homo sapien
gcagacccataaccagtcgaaaatc

SEQ ID NO: 3311665 - DNA, 25 bp, Homo sapien
tgctgacgccgacgaagtggtggat

SEQ ID NO: 3311666 - DNA, 25 bp, Homo sapien
gggagaaggtgctgacgccgacgaa

SEQ ID NO: 3311667 - DNA, 25 bp, Homo sapien
cagggtcccccgaggattgcctaga

SEQ ID NO: 3311668 - DNA, 25 bp, Homo sapien
ctggtgccatcctgcagggtccccc

SEQ ID NO: 3311669 - DNA, 25 bp, Homo sapien
gcagggtcccccgaggattgcctag

SEQ ID NO: 3311670 - DNA, 25 bp, Homo sapien
gtgccatcctgcagggtcccccgag

SEQ ID NO: 3311671 - DNA, 25 bp, Homo sapien
gacacacaaaggcatgagacaggac

SEQ ID NO: 3311672 - DNA, 25 bp, Homo sapien
acacaaaggcatgagacaggaccat

SEQ ID NO: 3311673 - DNA, 25 bp, Homo sapien
ctgggcagtgcaatacaaagacaca

SEQ ID NO: 3311674 - DNA, 25 bp, Homo sapien
tgggcagtgcaatacaaagacacac

SEQ ID NO: 3311675 - DNA, 25 bp, Homo sapien
caagcagtagttgctttctgggttt

SEQ ID NO: 3311676 - DNA, 25 bp, Homo sapien
tttcaagcagtagttgctttctggg

SEQ ID NO: 3311677 - DNA, 25 bp, Homo sapien
catttttcaagcagtagttgctttc

SEQ ID NO: 3311678 - DNA, 25 bp, Homo sapien
ttctgggtttttacaaattctgcat

SEQ ID NO: 3311679 - DNA, 25 bp, Homo sapien
gtaaagagcgggatgactttatcac

SEQ ID NO: 3311680 - DNA, 25 bp, Homo sapien
agtaaagagcgggatgactttatca

SEQ ID NO: 3311681 - DNA, 25 bp, Homo sapien
ggagtaaagagcgggatgactttat

SEQ ID NO: 3311682 - DNA, 25 bp, Homo sapien
tgaggagtaaagagcgggatgactt

SEQ ID NO: 3311683 - DNA, 25 bp, Homo sapien
gactgtagtcaccccttctcaaaca

SEQ ID NO: 3311684 - DNA, 25 bp, Homo sapien
tgactgtagtcaccccttctcaaac

SEQ ID NO: 3311685 - DNA, 25 bp, Homo sapien
actgtagtcaccccttctcaaacac

SEQ ID NO: 3311686 - DNA, 25 bp, Homo sapien
tgcctcatggcctaaaatcacagga

SEQ ID NO: 3311687 - DNA, 25 bp, Homo sapien
tgccggctgcctcatggcctaaaat

SEQ ID NO: 3311688 - DNA, 25 bp, Homo sapien
ccggctgcctcatggcctaaaatca

SEQ ID NO: 3311689 - DNA, 25 bp, Homo sapien
acgatgccggctgcctcatggccta

SEQ ID NO: 3311690 - DNA, 25 bp, Homo sapien
atgctcatctgaacgacagattcct

SEQ ID NO: 3311691 - DNA, 25 bp, Homo sapien
catgctcatctgaacgacagattcc

SEQ ID NO: 3311692 - DNA, 25 bp, Homo sapien
tgctcatctgaacgacagattcctg

SEQ ID NO: 3311693 - DNA, 25 bp, Homo sapien
cacatgctcatctgaacgacagatt

SEQ ID NO: 3311694 - DNA, 25 bp, Homo sapien
gtttctttaactcccatagcacagc

SEQ ID NO: 3311695 - DNA, 25 bp, Homo sapien
ggtttctttaactcccatagcacag

SEQ ID NO: 3311696 - DNA, 25 bp, Homo sapien
cctgggcaatagaaagatactccat

SEQ ID NO: 3311697 - DNA, 25 bp, Homo sapien
ctccaacctgggcaatagaaagata

SEQ ID NO: 3311698 - DNA, 25 bp, Homo sapien
ccaacctgggcaatagaaagatact

SEQ ID NO: 3311699 - DNA, 25 bp, Homo sapien
aacctgggcaatagaaagatactcc

SEQ ID NO: 3311700 - DNA, 25 bp, Homo sapien
aggctggtgagtacttgtggatttc

SEQ ID NO: 3311701 - DNA, 25 bp, Homo sapien
caggaggctggtgagtacttgtgga

SEQ ID NO: 3311702 - DNA, 25 bp, Homo sapien
ggtgagtacttgtggatttcttctc

SEQ ID NO: 3311703 - DNA, 25 bp, Homo sapien
cttctctgcagaccaggaggctggt

SEQ ID NO: 3311704 - DNA, 25 bp, Homo sapien
ttatcatcatacagcaagccctggc

SEQ ID NO: 3311705 - DNA, 25 bp, Homo sapien
cagtcacaggcagaagggataggtg

SEQ ID NO: 3311706 - DNA, 25 bp, Homo sapien
tcttatcatcatacagcaagccctg

SEQ ID NO: 3311707 - DNA, 25 bp, Homo sapien
ctcttcttatcatcatacagcaagc

SEQ ID NO: 3311708 - DNA, 25 bp, Homo sapien
cattgtgtcagaaatctgagtcttc

SEQ ID NO: 3311709 - DNA, 25 bp, Homo sapien
tgtcagaaatctgagtcttcttcag

SEQ ID NO: 3311710 - DNA, 25 bp, Homo sapien
gtcagaaatctgagtcttcttcagc

SEQ ID NO: 3311711 - DNA, 25 bp, Homo sapien
tgtgtcagaaatctgagtcttcttc

SEQ ID NO: 3311712 - DNA, 25 bp, Homo sapien
tggaaagacccaaaggaccaagcca

SEQ ID NO: 3311713 - DNA, 25 bp, Homo sapien
ccttttcgagatggaaatctccttt

SEQ ID NO: 3311714 - DNA, 25 bp, Homo sapien
cagtaatttgccttttcgagatgga

SEQ ID NO: 3311715 - DNA, 25 bp, Homo sapien
tttgccttttcgagatggaaatctc

SEQ ID NO: 3311716 - DNA, 25 bp, Homo sapien
ttcccagtaatttgccttttcgaga

SEQ ID NO: 3311717 - DNA, 25 bp, Homo sapien
tcagaggagacttgcagtgggtcac

SEQ ID NO: 3311718 - DNA, 25 bp, Homo sapien
gaggagctgccatcactactagacc

SEQ ID NO: 3311719 - DNA, 25 bp, Homo sapien
cgaagagtgttcagttcctagcaga

SEQ ID NO: 3311720 - DNA, 25 bp, Homo sapien
tactagaccatatgctccaaaggac

SEQ ID NO: 3311721 - DNA, 25 bp, Homo sapien
agggacttgcaattctactgtatca

SEQ ID NO: 3311722 - DNA, 25 bp, Homo sapien
taaatggagtcactactaagcacag

SEQ ID NO: 3311723 - DNA, 25 bp, Homo sapien
gcacagtgaatagggacttagggac

SEQ ID NO: 3311724 - DNA, 25 bp, Homo sapien
tattatactaattcccaggtgctca

SEQ ID NO: 3311725 - DNA, 25 bp, Homo sapien
tcaaaacgtcaggaccgttcgaatg

SEQ ID NO: 3311726 - DNA, 25 bp, Homo sapien
tcaactggtccaggtcaaatttctt

SEQ ID NO: 3311727 - DNA, 25 bp, Homo sapien
tggtaaaacatgagttatcaactgg

SEQ ID NO: 3311728 - DNA, 25 bp, Homo sapien
gtcactagttttgggacatcatctc

SEQ ID NO: 3311729 - DNA, 25 bp, Homo sapien
ttgccaggaactcagtcactagttt

SEQ ID NO: 3311730 - DNA, 25 bp, Homo sapien
taagctgtatttgtcccagcataag

SEQ ID NO: 3311731 - DNA, 25 bp, Homo sapien
ttcctgcactatgactttccctgtg

SEQ ID NO: 3311732 - DNA, 25 bp, Homo sapien
agcagtgtacaaataagctgtattt

SEQ ID NO: 3311733 - DNA, 25 bp, Homo sapien
ctgtgttagatcattcccagcagtg

SEQ ID NO: 3311734 - DNA, 25 bp, Homo sapien
tagtcaaagcaaggaggttcaactt

SEQ ID NO: 3311735 - DNA, 25 bp, Homo sapien
caaagcaaggaggttcaacttctta

SEQ ID NO: 3311736 - DNA, 25 bp, Homo sapien
aaggaggttcaacttcttatatctc

SEQ ID NO: 3311737 - DNA, 25 bp, Homo sapien
aatagtcaaagcaaggaggttcaac

SEQ ID NO: 3311738 - DNA, 25 bp, Homo sapien
tgaaaagccttctctataaaacctc

SEQ ID NO: 3311739 - DNA, 25 bp, Homo sapien
gaaaagccttctctataaaacctca

SEQ ID NO: 3311740 - DNA, 25 bp, Homo sapien
aaaagccttctctataaaacctcat

SEQ ID NO: 3311741 - DNA, 25 bp, Homo sapien
ctgaaaagccttctctataaaacct

SEQ ID NO: 3311742 - DNA, 25 bp, Homo sapien
ttgccaagcaccagagtgaaagcca

SEQ ID NO: 3311743 - DNA, 25 bp, Homo sapien
cacttcatactcattcttggaagaa

SEQ ID NO: 3311744 - DNA, 25 bp, Homo sapien
cagagtgaaagccatcactccccat

SEQ ID NO: 3311745 - DNA, 25 bp, Homo sapien
cccacttgccaagcaccagagtgaa

SEQ ID NO: 3311746 - DNA, 25 bp, Homo sapien
ccatagttcatgtggcaggatgcca

SEQ ID NO: 3311747 - DNA, 25 bp, Homo sapien
aggaactcctacaaccacgctggtc

SEQ ID NO: 3311748 - DNA, 25 bp, Homo sapien
catcccttccatgtgcgtccagtga

SEQ ID NO: 3311749 - DNA, 25 bp, Homo sapien
caacatcgggtcataggtgagcatc

SEQ ID NO: 3311750 - DNA, 25 bp, Homo sapien
caatgatcctagatgcaccagctga

SEQ ID NO: 3311751 - DNA, 25 bp, Homo sapien
gagtccttgggactgatacactcag

SEQ ID NO: 3311752 - DNA, 25 bp, Homo sapien
aaaggtgtatcccacgttgttgcct

SEQ ID NO: 3311753 - DNA, 25 bp, Homo sapien
aaagacgacgcaagtggaaccaggt

SEQ ID NO: 3311754 - DNA, 25 bp, Homo sapien
gcatgtaaatctggtggtgccatca

SEQ ID NO: 3311755 - DNA, 25 bp, Homo sapien
tactggtgttcatgaagtggtggac

SEQ ID NO: 3311756 - DNA, 25 bp, Homo sapien
cagcagcgccatatccagtggaaaa

SEQ ID NO: 3311757 - DNA, 25 bp, Homo sapien
cagccagtactccacgaccagtaat

SEQ ID NO: 3311758 - DNA, 25 bp, Homo sapien
gttgccatctgggttgcgacaagca

SEQ ID NO: 3311759 - DNA, 25 bp, Homo sapien
ttgcgacaagcattgcattctctac

SEQ ID NO: 3311760 - DNA, 25 bp, Homo sapien
ctgggttgcgacaagcattgcattc

SEQ ID NO: 3311761 - DNA, 25 bp, Homo sapien
catctgggttgcgacaagcattgca

SEQ ID NO: 3311762 - DNA, 25 bp, Homo sapien
catctgtgcgacagattcctgtggc

SEQ ID NO: 3311763 - DNA, 25 bp, Homo sapien
gttccttttatcacatggtcatctg

SEQ ID NO: 3311764 - DNA, 25 bp, Homo sapien
tctacaatcccagttgcctcatgtc

SEQ ID NO: 3311765 - DNA, 25 bp, Homo sapien
caatcactggaaacttggacaccat

SEQ ID NO: 3311766 - DNA, 25 bp, Homo sapien
tcctcaatggagaagggttgcttct

SEQ ID NO: 3311767 - DNA, 25 bp, Homo sapien
ttcctcaatggagaagggttgcttc

SEQ ID NO: 3311768 - DNA, 25 bp, Homo sapien
ttggtggggcaacttctatttcctc

SEQ ID NO: 3311769 - DNA, 25 bp, Homo sapien
ttagtctttggtggggcaacttcta

SEQ ID NO: 3311770 - DNA, 25 bp, Homo sapien
cacttacatcctgggagatacatag

SEQ ID NO: 3311771 - DNA, 25 bp, Homo sapien
atttacagaggaagtgttaacaact

SEQ ID NO: 3311772 - DNA, 25 bp, Homo sapien
tagcaggcaaaggacctatggaaaa

SEQ ID NO: 3311773 - DNA, 25 bp, Homo sapien
agtgttaacaacttcactcctaaca

SEQ ID NO: 3311774 - DNA, 25 bp, Homo sapien
catagactttttctgactgatgctc

SEQ ID NO: 3311775 - DNA, 25 bp, Homo sapien
tttgcaatggtctgcaagccctacc

SEQ ID NO: 3311776 - DNA, 25 bp, Homo sapien
cagagttccaccttcagcaatatga

SEQ ID NO: 3311777 - DNA, 25 bp, Homo sapien
gcaatatgactcacagccgtcacaa

SEQ ID NO: 3311778 - DNA, 25 bp, Homo sapien
agtgaaccgggtatttctgcttttg

SEQ ID NO: 3311779 - DNA, 25 bp, Homo sapien
tctgcttttgttctccacccaggtg

SEQ ID NO: 3311780 - DNA, 25 bp, Homo sapien
tgcttttgttctccacccaggtgcc

SEQ ID NO: 3311781 - DNA, 25 bp, Homo sapien
tttctgcttttgttctccacccagg

SEQ ID NO: 3311782 - DNA, 25 bp, Homo sapien
aaggtggttaagggcagatccagga

SEQ ID NO: 3311783 - DNA, 25 bp, Homo sapien
ttaaggtggttaagggcagatccag

SEQ ID NO: 3311784 - DNA, 25 bp, Homo sapien
tttaaggtggttaagggcagatcca

SEQ ID NO: 3311785 - DNA, 25 bp, Homo sapien
ggtggttaagggcagatccaggatg

SEQ ID NO: 3311786 - DNA, 25 bp, Homo sapien
taactgcttgactagtcctccagtg

SEQ ID NO: 3311787 - DNA, 25 bp, Homo sapien
tagtcctccagtgtgaaggatcaca

SEQ ID NO: 3311788 - DNA, 25 bp, Homo sapien
caatgggatcaagaaggcttggctg

SEQ ID NO: 3311789 - DNA, 25 bp, Homo sapien
gaaggatcacaatgggatcaagaag

SEQ ID NO: 3311790 - DNA, 25 bp, Homo sapien
cacagcctactgtccagccataaga

SEQ ID NO: 3311791 - DNA, 25 bp, Homo sapien
gacttctgcacatggtctgttaaca

SEQ ID NO: 3311792 - DNA, 25 bp, Homo sapien
cctgtcactgactggagattctttg

SEQ ID NO: 3311793 - DNA, 25 bp, Homo sapien
tcagagggaaactctcaaactgctg

SEQ ID NO: 3311794 - DNA, 25 bp, Homo sapien
tagtttagggaggtaaatggccaca

SEQ ID NO: 3311795 - DNA, 25 bp, Homo sapien
caccgtgaagtctgtgcctggtgtg

SEQ ID NO: 3311796 - DNA, 25 bp, Homo sapien
tcttccctagctgactgggcaccgt

SEQ ID NO: 3311797 - DNA, 25 bp, Homo sapien
tcttgcctccaatcttgtgttccac

SEQ ID NO: 3311798 - DNA, 25 bp, Homo sapien
gaagcaccagtagctttgcaaccca

SEQ ID NO: 3311799 - DNA, 25 bp, Homo sapien
tgtttctgttgatgtcaataccaat

SEQ ID NO: 3311800 - DNA, 25 bp, Homo sapien
caataccaatgatcctggaagcacc

SEQ ID NO: 3311801 - DNA, 25 bp, Homo sapien
gcagctcccagagatatggccttct

SEQ ID NO: 3311802 - DNA, 25 bp, Homo sapien
ccaggccaaacacagtacaagttag

SEQ ID NO: 3311803 - DNA, 25 bp, Homo sapien
agagaccaacttcacccaggccaaa

SEQ ID NO: 3311804 - DNA, 25 bp, Homo sapien
taataaagagaccaacttcacccag

SEQ ID NO: 3311805 - DNA, 25 bp, Homo sapien
cagtacaagttagaaagaatttgac

SEQ ID NO: 3311806 - DNA, 25 bp, Homo sapien
tgccttgagctttttaaacaggatg

SEQ ID NO: 3311807 - DNA, 25 bp, Homo sapien
gccttgagctttttaaacaggatgg

SEQ ID NO: 3311808 - DNA, 25 bp, Homo sapien
ccttgagctttttaaacaggatggc

SEQ ID NO: 3311809 - DNA, 25 bp, Homo sapien
tgcactttctcttaacactgtgtat

SEQ ID NO: 3311810 - DNA, 25 bp, Homo sapien
tttttctagtggagcatcaggatca

SEQ ID NO: 3311811 - DNA, 25 bp, Homo sapien
tgtgtattcagtgaaggtgcttgtg

SEQ ID NO: 3311812 - DNA, 25 bp, Homo sapien
gcttgtgttagggagttggtagatt

SEQ ID NO: 3311813 - DNA, 25 bp, Homo sapien
caatactctctacaattccagctgc

SEQ ID NO: 3311814 - DNA, 25 bp, Homo sapien
tgccacaaaagctgatggccagaat

SEQ ID NO: 3311815 - DNA, 25 bp, Homo sapien
ttccattaattgcacagtcgtctgt

SEQ ID NO: 3311816 - DNA, 25 bp, Homo sapien
tgcttcgtgtcctagaagaaatgga

SEQ ID NO: 3311817 - DNA, 25 bp, Homo sapien
gagcagttcctagcttccctgtttg

SEQ ID NO: 3311818 - DNA, 25 bp, Homo sapien
cctgttctctcaagatctacttcga

SEQ ID NO: 3311819 - DNA, 25 bp, Homo sapien
ctgtcctggtgttcaaggagcagtt

SEQ ID NO: 3311820 - DNA, 25 bp, Homo sapien
tcttcctacattgtcaaactccgtt

SEQ ID NO: 3311821 - DNA, 25 bp, Homo sapien
tttcctgcttggagtacagatttga

SEQ ID NO: 3311822 - DNA, 25 bp, Homo sapien
cagatttgatatgtgcaaatatagc

SEQ ID NO: 3311823 - DNA, 25 bp, Homo sapien
cctgcttggagtacagatttgatat

SEQ ID NO: 3311824 - DNA, 25 bp, Homo sapien
tgatatgtgcaaatatagcagccat

SEQ ID NO: 3311825 - DNA, 25 bp, Homo sapien
gaactgagagccatacatgatgagg

SEQ ID NO: 3311826 - DNA, 25 bp, Homo sapien
tgctggtctccctagaaaaagagtt

SEQ ID NO: 3311827 - DNA, 25 bp, Homo sapien
taaaagctgcaaatagagggtaacc

SEQ ID NO: 3311828 - DNA, 25 bp, Homo sapien
tatgcgctccatagtccaaaagaaa

SEQ ID NO: 3311829 - DNA, 25 bp, Homo sapien
atttcaatattctatatagcacctc

SEQ ID NO: 3311830 - DNA, 25 bp, Homo sapien
tcaatattctatatagcacctcact

SEQ ID NO: 3311831 - DNA, 25 bp, Homo sapien
tattctatatagcacctcactttct

SEQ ID NO: 3311832 - DNA, 25 bp, Homo sapien
ttctatatagcacctcactttctcc

SEQ ID NO: 3311833 - DNA, 25 bp, Homo sapien
gactgattgtcatgagaagcacttt

SEQ ID NO: 3311834 - DNA, 25 bp, Homo sapien
tcctccatcctgacagactgattgt

SEQ ID NO: 3311835 - DNA, 25 bp, Homo sapien
tggaatcactgtccgatccaccttc

SEQ ID NO: 3311836 - DNA, 25 bp, Homo sapien
tagtgtggcagagagttcactgtag

SEQ ID NO: 3311837 - DNA, 25 bp, Homo sapien
caggtattccagaataatttcaaac

SEQ ID NO: 3311838 - DNA, 25 bp, Homo sapien
cgttggggcaagatagtaaaaaatg

SEQ ID NO: 3311839 - DNA, 25 bp, Homo sapien
gatagtaaaaaatgcttcttgccag

SEQ ID NO: 3311840 - DNA, 25 bp, Homo sapien
taaaaaatgcttcttgccagtctct

SEQ ID NO: 3311841 - DNA, 25 bp, Homo sapien
gattccataatctgacgcttgttta

SEQ ID NO: 3311842 - DNA, 25 bp, Homo sapien
tgccaaaacttttcgactattcatc

SEQ ID NO: 3311843 - DNA, 25 bp, Homo sapien
atttccaagtgggagctgtgcatga

SEQ ID NO: 3311844 - DNA, 25 bp, Homo sapien
gagctgtgcatgattgattccataa

SEQ ID NO: 3311845 - DNA, 25 bp, Homo sapien
gatggttgtgatctactaatcctcc

SEQ ID NO: 3311846 - DNA, 25 bp, Homo sapien
aatcctccaatcacataggcctttg

SEQ ID NO: 3311847 - DNA, 25 bp, Homo sapien
tctgacgtaaggtaaatcaggtctt

SEQ ID NO: 3311848 - DNA, 25 bp, Homo sapien
agtgctctggtttgatatggatatc

SEQ ID NO: 3311849 - DNA, 25 bp, Homo sapien
tctttttcagctggcctccgtggct

SEQ ID NO: 3311850 - DNA, 25 bp, Homo sapien
cttccagttgacccatcctttgtca

SEQ ID NO: 3311851 - DNA, 25 bp, Homo sapien
ctttttcagctggcctccgtggctt

SEQ ID NO: 3311852 - DNA, 25 bp, Homo sapien
ttctttttcagctggcctccgtggc

SEQ ID NO: 3311853 - DNA, 25 bp, Homo sapien
cgtaacatcgttgaatctgcttatg

SEQ ID NO: 3311854 - DNA, 25 bp, Homo sapien
tgcacaggatgcagtgcccgtcggt

SEQ ID NO: 3311855 - DNA, 25 bp, Homo sapien
cagtgcccgtcggttttctgcgtaa

SEQ ID NO: 3311856 - DNA, 25 bp, Homo sapien
cggttttctgcgtaacatcgttgaa

SEQ ID NO: 3311857 - DNA, 25 bp, Homo sapien
gtctatggccattctatgatcttaa

SEQ ID NO: 3311858 - DNA, 25 bp, Homo sapien
atgatcttaaaggaatggaataagc

SEQ ID NO: 3311859 - DNA, 25 bp, Homo sapien
taaaattgtctatggccattctatg

SEQ ID NO: 3311860 - DNA, 25 bp, Homo sapien
tggccattctatgatcttaaaggaa

SEQ ID NO: 3311861 - DNA, 25 bp, Homo sapien
gattcgacctaattcacatacaaga

SEQ ID NO: 3311862 - DNA, 25 bp, Homo sapien
tgtcatctagactacaaagtgtgtg

SEQ ID NO: 3311863 - DNA, 25 bp, Homo sapien
tcctgtctgcacacatactgacaca

SEQ ID NO: 3311864 - DNA, 25 bp, Homo sapien
tcatgttttaccaacaacactggta

SEQ ID NO: 3311865 - DNA, 25 bp, Homo sapien
ggtgctatgaacaacatctcttcga

SEQ ID NO: 3311866 - DNA, 25 bp, Homo sapien
ctttaataccatcaagtgatcaaaa

SEQ ID NO: 3311867 - DNA, 25 bp, Homo sapien
tacagtcaataataaggcgaagggt

SEQ ID NO: 3311868 - DNA, 25 bp, Homo sapien
ggttccatttgacattgtcgctcta

SEQ ID NO: 3311869 - DNA, 25 bp, Homo sapien
atttgtcgtttagatattggttcac

SEQ ID NO: 3311870 - DNA, 25 bp, Homo sapien
tgtcgtttagatattggttcacacc

SEQ ID NO: 3311871 - DNA, 25 bp, Homo sapien
tcatttgtcgtttagatattggttc

SEQ ID NO: 3311872 - DNA, 25 bp, Homo sapien
ttttcatttgtcgtttagatattgg

SEQ ID NO: 3311873 - DNA, 25 bp, Homo sapien
aagtttcaataaatgctggcaacat

SEQ ID NO: 3311874 - DNA, 25 bp, Homo sapien
agtttcaataaatgctggcaacatt

SEQ ID NO: 3311875 - DNA, 25 bp, Homo sapien
agaagtttcaataaatgctggcaac

SEQ ID NO: 3311876 - DNA, 25 bp, Homo sapien
gaagtttcaataaatgctggcaaca

SEQ ID NO: 3311877 - DNA, 25 bp, Homo sapien
tgtcaagccttttgggcagagggtt

SEQ ID NO: 3311878 - DNA, 25 bp, Homo sapien
caagtaacacttcgatctttataaa

SEQ ID NO: 3311879 - DNA, 25 bp, Homo sapien
cacttcagttgtcaagccttttggg

SEQ ID NO: 3311880 - DNA, 25 bp, Homo sapien
gacaagtaatgtgttgccatcctct

SEQ ID NO: 3311881 - DNA, 25 bp, Homo sapien
catttcagagagttcagcgacgtca

SEQ ID NO: 3311882 - DNA, 25 bp, Homo sapien
cagctttaaagaggtaaagcccacg

SEQ ID NO: 3311883 - DNA, 25 bp, Homo sapien
gctttccggccctttagagtacaga

SEQ ID NO: 3311884 - DNA, 25 bp, Homo sapien
gtggcagggccataacacgctttcc

SEQ ID NO: 3311885 - DNA, 25 bp, Homo sapien
gcaaacgcatttcagagacgggatt

SEQ ID NO: 3311886 - DNA, 25 bp, Homo sapien
ccaaaacacacgccgacggaaagcg

SEQ ID NO: 3311887 - DNA, 25 bp, Homo sapien
ttttcacatactacgggccgatggc

SEQ ID NO: 3311888 - DNA, 25 bp, Homo sapien
ttaagctgtctctggcgaaccaggg

SEQ ID NO: 3311889 - DNA, 25 bp, Homo sapien
gaaacttcaattcccagaggcaggg

SEQ ID NO: 3311890 - DNA, 25 bp, Homo sapien
tagttacgcagtggaggctacggcg

SEQ ID NO: 3311891 - DNA, 25 bp, Homo sapien
tggttacggctcacgcttccttcca

SEQ ID NO: 3311892 - DNA, 25 bp, Homo sapien
tctgggttggcctggttacggctca

SEQ ID NO: 3311893 - DNA, 25 bp, Homo sapien
tcttatgtagtagctcaaggctccg

SEQ ID NO: 3311894 - DNA, 25 bp, Homo sapien
gctatgtaacaaccccagatttagt

SEQ ID NO: 3311895 - DNA, 25 bp, Homo sapien
tatcaggcctatgagatttccattg

SEQ ID NO: 3311896 - DNA, 25 bp, Homo sapien
tgcatgggctggaaagactcaaaca

SEQ ID NO: 3311897 - DNA, 25 bp, Homo sapien
tctggcggtccaccaggaaatacct

SEQ ID NO: 3311898 - DNA, 25 bp, Homo sapien
tgctttcgcttcagacacaagggac

SEQ ID NO: 3311899 - DNA, 25 bp, Homo sapien
gccgtgaaatgacctatatacccag

SEQ ID NO: 3311900 - DNA, 25 bp, Homo sapien
gttcacagagtggatggaagtccca

SEQ ID NO: 3311901 - DNA, 25 bp, Homo sapien
taaagccagtctcacccaagtcttc

SEQ ID NO: 3311902 - DNA, 25 bp, Homo sapien
aaagaggacaccaggatgtatctgc

SEQ ID NO: 3311903 - DNA, 25 bp, Homo sapien
cctgggaggacttgaaaaagcagag

SEQ ID NO: 3311904 - DNA, 25 bp, Homo sapien
gaagctaagaagttaatcctgggag

SEQ ID NO: 3311905 - DNA, 25 bp, Homo sapien
ggacatcctcattttatctcacctt

SEQ ID NO: 3311906 - DNA, 25 bp, Homo sapien
aatatggtacactgtcctctaaggg

SEQ ID NO: 3311907 - DNA, 25 bp, Homo sapien
ttggacctagcacagaggaatcagg

SEQ ID NO: 3311908 - DNA, 25 bp, Homo sapien
tctgctgaccattttagtgaggttg

SEQ ID NO: 3311909 - DNA, 25 bp, Homo sapien
gaaaacgaggaagctctgatgccat

SEQ ID NO: 3311910 - DNA, 25 bp, Homo sapien
taaacaatccatgagagacacgagt

SEQ ID NO: 3311911 - DNA, 25 bp, Homo sapien
gaggacccgagtctgcaattctgat

SEQ ID NO: 3311912 - DNA, 25 bp, Homo sapien
ccaagattcctacgttgagagcagt

SEQ ID NO: 3311913 - DNA, 25 bp, Homo sapien
cagtttttcattccgcttcctggtg

SEQ ID NO: 3311914 - DNA, 25 bp, Homo sapien
tttttcattccgcttcctggtggct

SEQ ID NO: 3311915 - DNA, 25 bp, Homo sapien
cagcagtttttcattccgcttcctg

SEQ ID NO: 3311916 - DNA, 25 bp, Homo sapien
tttcattccgcttcctggtggctgc

SEQ ID NO: 3311917 - DNA, 25 bp, Homo sapien
tgtctcagggtcaaacagtctccgg

SEQ ID NO: 3311918 - DNA, 25 bp, Homo sapien
catgggctgtactggtgtgtccacc

SEQ ID NO: 3311919 - DNA, 25 bp, Homo sapien
gatgccctgtgaaccaagactgtcc

SEQ ID NO: 3311920 - DNA, 25 bp, Homo sapien
tcactggcaatgagcgacagcacgt

SEQ ID NO: 3311921 - DNA, 25 bp, Homo sapien
cactactatcccctgaccctttaat

SEQ ID NO: 3311922 - DNA, 25 bp, Homo sapien
tgctctggggtaacactgcccttgt

SEQ ID NO: 3311923 - DNA, 25 bp, Homo sapien
cagggatccagatccgccagctgct

SEQ ID NO: 3311924 - DNA, 25 bp, Homo sapien
ggtaacactgcccttgtcactacta

SEQ ID NO: 3311925 - DNA, 25 bp, Homo sapien
tcttgatttcgggagccttgggtct

SEQ ID NO: 3311926 - DNA, 25 bp, Homo sapien
ccttgggtctgatcaccgctgtgga

SEQ ID NO: 3311927 - DNA, 25 bp, Homo sapien
cagcttgggcgtgagcaacttggca

SEQ ID NO: 3311928 - DNA, 25 bp, Homo sapien
ttgtccccgcggaagagtttctgct

SEQ ID NO: 3311929 - DNA, 25 bp, Homo sapien
gcagggtacttggtggcctgcttcc

SEQ ID NO: 3311930 - DNA, 25 bp, Homo sapien
ctgcttcctcggctgcttgtccttg

SEQ ID NO: 3311931 - DNA, 25 bp, Homo sapien
gatgttggggacaaagaggcgagac

SEQ ID NO: 3311932 - DNA, 25 bp, Homo sapien
cctcggctgcttgtccttgggtgtc

SEQ ID NO: 3311933 - DNA, 25 bp, Homo sapien
aacgcactgttctgactacggagga

SEQ ID NO: 3311934 - DNA, 25 bp, Homo sapien
tgcagccgggttttgcttcagcgaa

SEQ ID NO: 3311935 - DNA, 25 bp, Homo sapien
catttttgagcagactggaggcgaa

SEQ ID NO: 3311936 - DNA, 25 bp, Homo sapien
catcggtgaaattccggccagggcc

SEQ ID NO: 3311937 - DNA, 25 bp, Homo sapien
tccccctcctcctgatattttctct

SEQ ID NO: 3311938 - DNA, 25 bp, Homo sapien
cccctcctcctgatattttctctcc

SEQ ID NO: 3311939 - DNA, 25 bp, Homo sapien
ctccccctcctcctgatattttctc

SEQ ID NO: 3311940 - DNA, 25 bp, Homo sapien
ccccctcctcctgatattttctctc

SEQ ID NO: 3311941 - DNA, 25 bp, Homo sapien
tctcgaagcctaaggatgaagagga

SEQ ID NO: 3311942 - DNA, 25 bp, Homo sapien
gccccagggtaagtttcatggtctg

SEQ ID NO: 3311943 - DNA, 25 bp, Homo sapien
ctgtggatgtggtggagtcctccat

SEQ ID NO: 3311944 - DNA, 25 bp, Homo sapien
tccattttggaaaggccatcctctt

SEQ ID NO: 3311945 - DNA, 25 bp, Homo sapien
cacatatttcgcttctcgctgggag

SEQ ID NO: 3311946 - DNA, 25 bp, Homo sapien
tgctttcgaattcagctcaggaggg

SEQ ID NO: 3311947 - DNA, 25 bp, Homo sapien
tgcccaggtttcagcgacaggaaga

SEQ ID NO: 3311948 - DNA, 25 bp, Homo sapien
gaagcagggtcccacgtatctggac

SEQ ID NO: 3311949 - DNA, 25 bp, Homo sapien
gaaggctcctggatgaggcggtgga

SEQ ID NO: 3311950 - DNA, 25 bp, Homo sapien
gctcctggatgaggcggtggaggtg

SEQ ID NO: 3311951 - DNA, 25 bp, Homo sapien
agggaggtgggaaggctcctggatg

SEQ ID NO: 3311952 - DNA, 25 bp, Homo sapien
aggtgggaaggctcctggatgaggc

SEQ ID NO: 3311953 - DNA, 25 bp, Homo sapien
tgctccggccgagactgtggccagt

SEQ ID NO: 3311954 - DNA, 25 bp, Homo sapien
aagcagcatctgtaggttgaccccg

SEQ ID NO: 3311955 - DNA, 25 bp, Homo sapien
gaggagtctgaatgccatcggccac

SEQ ID NO: 3311956 - DNA, 25 bp, Homo sapien
ttgtttgcctggcaccgtcggcagc

SEQ ID NO: 3311957 - DNA, 25 bp, Homo sapien
cattccgtagtcatatcgaaaccac

SEQ ID NO: 3311958 - DNA, 25 bp, Homo sapien
agtgtccattccgtagtcatatcga

SEQ ID NO: 3311959 - DNA, 25 bp, Homo sapien
tatttttagtgtccattccgtagtc

SEQ ID NO: 3311960 - DNA, 25 bp, Homo sapien
ttttagtgtccattccgtagtcata

SEQ ID NO: 3311961 - DNA, 25 bp, Homo sapien
aatgtgacccactggcatgccccat

SEQ ID NO: 3311962 - DNA, 25 bp, Homo sapien
ccttcaagagtacagtgcggcttgg

SEQ ID NO: 3311963 - DNA, 25 bp, Homo sapien
ttcaagagtacagtgcggcttggag

SEQ ID NO: 3311964 - DNA, 25 bp, Homo sapien
ggaaatgtgacccactggcatgccc

SEQ ID NO: 3311965 - DNA, 25 bp, Homo sapien
tgtagccagcacctgatccttggac

SEQ ID NO: 3311966 - DNA, 25 bp, Homo sapien
cagctacctcagagcctgttgccat

SEQ ID NO: 3311967 - DNA, 25 bp, Homo sapien
ctacctcagagcctgttgccatcgg

SEQ ID NO: 3311968 - DNA, 25 bp, Homo sapien
cctcagagcctgttgccatcggcat

SEQ ID NO: 3311969 - DNA, 25 bp, Homo sapien
tcttatggggtccttccccagctac

SEQ ID NO: 3311970 - DNA, 25 bp, Homo sapien
aatgccaccctcctgtgacttaaag

SEQ ID NO: 3311971 - DNA, 25 bp, Homo sapien
cagccaggttgacatgatctctctt

SEQ ID NO: 3311972 - DNA, 25 bp, Homo sapien
tgtcaaatggcgatggaatcctctt

SEQ ID NO: 3311973 - DNA, 25 bp, Homo sapien
gatctctctttgatcgggttgagga

SEQ ID NO: 3311974 - DNA, 25 bp, Homo sapien
agcagatggtgttggcaatgccaca

SEQ ID NO: 3311975 - DNA, 25 bp, Homo sapien
tggcagctgcttttgcctattaagt

SEQ ID NO: 3311976 - DNA, 25 bp, Homo sapien
tagtctttctgctctagagcagatg

SEQ ID NO: 3311977 - DNA, 25 bp, Homo sapien
tgttggcaatgccacataagtcagc

SEQ ID NO: 3311978 - DNA, 25 bp, Homo sapien
ttcctttgagtgtgtgtacatctat

SEQ ID NO: 3311979 - DNA, 25 bp, Homo sapien
atttcctttgagtgtgtgtacatct

SEQ ID NO: 3311980 - DNA, 25 bp, Homo sapien
acatttagaagttgactttgacttt

SEQ ID NO: 3311981 - DNA, 25 bp, Homo sapien
cacatttagaagttgactttgactt

SEQ ID NO: 3311982 - DNA, 25 bp, Homo sapien
tctgaccctggtgttggagtaagcc

SEQ ID NO: 3311983 - DNA, 25 bp, Homo sapien
tcttcaggagggctactgagtttct

SEQ ID NO: 3311984 - DNA, 25 bp, Homo sapien
tgaaacttggtgtctggcaatgcct

SEQ ID NO: 3311985 - DNA, 25 bp, Homo sapien
tagagaggtggtaactcttcaggag

SEQ ID NO: 3311986 - DNA, 25 bp, Homo sapien
tccgatacagtttgcttcacgccgt

SEQ ID NO: 3311987 - DNA, 25 bp, Homo sapien
tgatgtagagctgcatcttccgata

SEQ ID NO: 3311988 - DNA, 25 bp, Homo sapien
gctgaggctaagacatgatgtagag

SEQ ID NO: 3311989 - DNA, 25 bp, Homo sapien
ctactgttctgctgaggctaagaca

SEQ ID NO: 3311990 - DNA, 25 bp, Homo sapien
tattccaagatctgcgctatctggg

SEQ ID NO: 3311991 - DNA, 25 bp, Homo sapien
gagtgttgacccatctggctctcat

SEQ ID NO: 3311992 - DNA, 25 bp, Homo sapien
ggctctcatagcagaatgccacagc

SEQ ID NO: 3311993 - DNA, 25 bp, Homo sapien
ggtcttccttggataaactcacaat

SEQ ID NO: 3311994 - DNA, 25 bp, Homo sapien
cacagtgtgggtgttggttataagg

SEQ ID NO: 3311995 - DNA, 25 bp, Homo sapien
acagtgtgggtgttggttataaggg

SEQ ID NO: 3311996 - DNA, 25 bp, Homo sapien
cagtgtgggtgttggttataaggga

SEQ ID NO: 3311997 - DNA, 25 bp, Homo sapien
ctaatgaatccttttggagcttgca

SEQ ID NO: 3311998 - DNA, 25 bp, Homo sapien
aatgaatccttttggagcttgcatt

SEQ ID NO: 3311999 - DNA, 25 bp, Homo sapien
taatgaatccttttggagcttgcat

SEQ ID NO: 3312000 - DNA, 25 bp, Homo sapien
taggcaagttggtgtaaaggcctga

SEQ ID NO: 3312001 - DNA, 25 bp, Homo sapien
tgggagctggcaatgcttcccagag

SEQ ID NO: 3312002 - DNA, 25 bp, Homo sapien
gatagaaaatctttccaattaggca

SEQ ID NO: 3312003 - DNA, 25 bp, Homo sapien
gtgggagctggcaatgcttcccaga

SEQ ID NO: 3312004 - DNA, 25 bp, Homo sapien
ggacagcgctgtatacaaccgaggc

SEQ ID NO: 3312005 - DNA, 25 bp, Homo sapien
cgaggcctttagtcacagatgtggg

SEQ ID NO: 3312006 - DNA, 25 bp, Homo sapien
gagttcacgctgaatgcaaggacag

SEQ ID NO: 3312007 - DNA, 25 bp, Homo sapien
tcgaatggtagcctgagttcacgct

SEQ ID NO: 3312008 - DNA, 25 bp, Homo sapien
gggaactgcaatcaggagacagcaa

SEQ ID NO: 3312009 - DNA, 25 bp, Homo sapien
cagctttgcagtagggaatgtattt

SEQ ID NO: 3312010 - DNA, 25 bp, Homo sapien
tgcagtagggaatgtatttgcacat

SEQ ID NO: 3312011 - DNA, 25 bp, Homo sapien
agcaaaccgtcaagcccctcagaag

SEQ ID NO: 3312012 - DNA, 25 bp, Homo sapien
caaccacccaaatagtaagaggaca

SEQ ID NO: 3312013 - DNA, 25 bp, Homo sapien
cagtctccaaccacccaaatagtaa

SEQ ID NO: 3312014 - DNA, 25 bp, Homo sapien
ttcagttctctgaggcgttaatgct

SEQ ID NO: 3312015 - DNA, 25 bp, Homo sapien
ggcgttaatgctgctgcatcacagt

SEQ ID NO: 3312016 - DNA, 25 bp, Homo sapien
gattggccacagcatgtgagatagg

SEQ ID NO: 3312017 - DNA, 25 bp, Homo sapien
aacccaacaggctgaggtgacttgg

SEQ ID NO: 3312018 - DNA, 25 bp, Homo sapien
gattgtcagatcactggattggcca

SEQ ID NO: 3312019 - DNA, 25 bp, Homo sapien
taacactactgagcatcatcatgcc

SEQ ID NO: 3312020 - DNA, 25 bp, Homo sapien
gggtctcaccgatcccgggtgaaca

SEQ ID NO: 3312021 - DNA, 25 bp, Homo sapien
gaaggatagaaccattgcacagcag

SEQ ID NO: 3312022 - DNA, 25 bp, Homo sapien
ggcaaccagtgttacccgggtctca

SEQ ID NO: 3312023 - DNA, 25 bp, Homo sapien
gacactcaggaacttcccactggca

SEQ ID NO: 3312024 - DNA, 25 bp, Homo sapien
gaaaccagttttcgagtatatgcac

SEQ ID NO: 3312025 - DNA, 25 bp, Homo sapien
ggtattagcttctatgcacagagac

SEQ ID NO: 3312026 - DNA, 25 bp, Homo sapien
agttaataatgtctcccatagggag

SEQ ID NO: 3312027 - DNA, 25 bp, Homo sapien
gaaactcccctatgagaccgggtgc

SEQ ID NO: 3312028 - DNA, 25 bp, Homo sapien
gaattagttgtatagggttggccca

SEQ ID NO: 3312029 - DNA, 25 bp, Homo sapien
tgatgtccacagttcattggcagaa

SEQ ID NO: 3312030 - DNA, 25 bp, Homo sapien
tgagagctagatgtcctatgggcaa

SEQ ID NO: 3312031 - DNA, 25 bp, Homo sapien
gaaaaatctcgcattgctccctaag

SEQ ID NO: 3312032 - DNA, 25 bp, Homo sapien
gtgggtaatattgtgttttactatg

SEQ ID NO: 3312033 - DNA, 25 bp, Homo sapien
gaatactcacggatatgtatagttt

SEQ ID NO: 3312034 - DNA, 25 bp, Homo sapien
tgggtaatattgtgttttactatgt

SEQ ID NO: 3312035 - DNA, 25 bp, Homo sapien
aatgaatactcacggatatgtatag

SEQ ID NO: 3312036 - DNA, 25 bp, Homo sapien
tatatgctgttgaacaaatggtgcc

SEQ ID NO: 3312037 - DNA, 25 bp, Homo sapien
tgccaatagacttgctcaactcagg

SEQ ID NO: 3312038 - DNA, 25 bp, Homo sapien
ggatgtggtttatcgcaccccaaaa

SEQ ID NO: 3312039 - DNA, 25 bp, Homo sapien
gcctgggtagatgaacttagctatt

SEQ ID NO: 3312040 - DNA, 25 bp, Homo sapien
gctattatcaaaggaaaggccaagt

SEQ ID NO: 3312041 - DNA, 25 bp, Homo sapien
gtagaactgcctccatctggaagat

SEQ ID NO: 3312042 - DNA, 25 bp, Homo sapien
gcaactgacagaaccccaacattgg

SEQ ID NO: 3312043 - DNA, 25 bp, Homo sapien
gacttagaggttagtgccaccatca

SEQ ID NO: 3312044 - DNA, 25 bp, Homo sapien
catgttagaagtacaacctagtctt

SEQ ID NO: 3312045 - DNA, 25 bp, Homo sapien
gcatcctcttctgaggaaacctcct

SEQ ID NO: 3312046 - DNA, 25 bp, Homo sapien
tatggtttaagatgcatacaggcca

SEQ ID NO: 3312047 - DNA, 25 bp, Homo sapien
cctccaggaaatatttgtcgttgta

SEQ ID NO: 3312048 - DNA, 25 bp, Homo sapien
gagacaactttcttccccaaatatc

SEQ ID NO: 3312049 - DNA, 25 bp, Homo sapien
tgccaagtgcgatggtgtaagcctg

SEQ ID NO: 3312050 - DNA, 25 bp, Homo sapien
tatgtgaaaggcaactcccagagca

SEQ ID NO: 3312051 - DNA, 25 bp, Homo sapien
tgatagctcggctgactggcacaca

SEQ ID NO: 3312052 - DNA, 25 bp, Homo sapien
aaaaagtagcacatggcccggtgca

SEQ ID NO: 3312053 - DNA, 25 bp, Homo sapien
catactaccgtaaaacaatctccaa

SEQ ID NO: 3312054 - DNA, 25 bp, Homo sapien
gttcatactaccgtaaaacaatctc

SEQ ID NO: 3312055 - DNA, 25 bp, Homo sapien
taacagttcatactaccgtaaaaca

SEQ ID NO: 3312056 - DNA, 25 bp, Homo sapien
cagttcatactaccgtaaaacaatc

SEQ ID NO: 3312057 - DNA, 25 bp, Homo sapien
acaaaaaaaggacctatacagtgct

SEQ ID NO: 3312058 - DNA, 25 bp, Homo sapien
aaaaggacctatacagtgctcaaac

SEQ ID NO: 3312059 - DNA, 25 bp, Homo sapien
acaagaaacactcattatttattca

SEQ ID NO: 3312060 - DNA, 25 bp, Homo sapien
aaaaaaggacctatacagtgctcaa

SEQ ID NO: 3312061 - DNA, 25 bp, Homo sapien
tactaacattggaaacagaataacg

SEQ ID NO: 3312062 - DNA, 25 bp, Homo sapien
tcattaaagagcagcaccctctgag

SEQ ID NO: 3312063 - DNA, 25 bp, Homo sapien
tagtaatattcatctatactgcaaa

SEQ ID NO: 3312064 - DNA, 25 bp, Homo sapien
ggctgtactatcatgtttacataca

SEQ ID NO: 3312065 - DNA, 25 bp, Homo sapien
tgtacaattggcagcacttaacggc

SEQ ID NO: 3312066 - DNA, 25 bp, Homo sapien
taacggctcaagtggatcaatgtac

SEQ ID NO: 3312067 - DNA, 25 bp, Homo sapien
tgaccagactaactccatgggagct

SEQ ID NO: 3312068 - DNA, 25 bp, Homo sapien
catgggagctgtgatagactgaacc

SEQ ID NO: 3312069 - DNA, 25 bp, Homo sapien
gttcttcaaacaatggagcaagttc

SEQ ID NO: 3312070 - DNA, 25 bp, Homo sapien
tccttttctaggctgacaattagtc

SEQ ID NO: 3312071 - DNA, 25 bp, Homo sapien
caaacaatggagcaagttccttttc

SEQ ID NO: 3312072 - DNA, 25 bp, Homo sapien
tcttcaaacaatggagcaagttcct

SEQ ID NO: 3312073 - DNA, 25 bp, Homo sapien
ataaagagattaagaaaattacatg

SEQ ID NO: 3312074 - DNA, 25 bp, Homo sapien
gagattaagaaaattacatgttaga

SEQ ID NO: 3312075 - DNA, 25 bp, Homo sapien
taaagagattaagaaaattacatgt

SEQ ID NO: 3312076 - DNA, 25 bp, Homo sapien
aagagattaagaaaattacatgtta

SEQ ID NO: 3312077 - DNA, 25 bp, Homo sapien
gacagtgaaactgggccacaagttc

SEQ ID NO: 3312078 - DNA, 25 bp, Homo sapien
aatgcgttttgttgggttatcttca

SEQ ID NO: 3312079 - DNA, 25 bp, Homo sapien
gtaactcatcgatcattttaatgcg

SEQ ID NO: 3312080 - DNA, 25 bp, Homo sapien
gggagcaagatgtagcactcagata

SEQ ID NO: 3312081 - DNA, 25 bp, Homo sapien
taaagtgatatttaaggtcattaaa

SEQ ID NO: 3312082 - DNA, 25 bp, Homo sapien
ggctatgaaactcaccaccaaaggt

SEQ ID NO: 3312083 - DNA, 25 bp, Homo sapien
gctatgaaactcaccaccaaaggta

SEQ ID NO: 3312084 - DNA, 25 bp, Homo sapien
aataagagccaaataatatgttgca

SEQ ID NO: 3312085 - DNA, 25 bp, Homo sapien
aaataagagccaaataatatgttgc

SEQ ID NO: 3312086 - DNA, 25 bp, Homo sapien
ataagagccaaataatatgttgcat

SEQ ID NO: 3312087 - DNA, 25 bp, Homo sapien
aaaataagagccaaataatatgttg

SEQ ID NO: 3312088 - DNA, 25 bp, Homo sapien
tactggaggtaacagtgacctgaca

SEQ ID NO: 3312089 - DNA, 25 bp, Homo sapien
aaatcacttaattacttttccatag

SEQ ID NO: 3312090 - DNA, 25 bp, Homo sapien
tttagctaacggcaccatctactgg

SEQ ID NO: 3312091 - DNA, 25 bp, Homo sapien
tgagaactataacacaaactatttt

SEQ ID NO: 3312092 - DNA, 25 bp, Homo sapien
tggataagaaaccaggtcgcaaagc

SEQ ID NO: 3312093 - DNA, 25 bp, Homo sapien
ggataagaaaccaggtcgcaaagca

SEQ ID NO: 3312094 - DNA, 25 bp, Homo sapien
taactggttatctgaggactaggct

SEQ ID NO: 3312095 - DNA, 25 bp, Homo sapien
tctcatcactaatcaggaaaaactg

SEQ ID NO: 3312096 - DNA, 25 bp, Homo sapien
tatggtagagagatttacagccctt

SEQ ID NO: 3312097 - DNA, 25 bp, Homo sapien
tgctcaatcaaaagttcactgatca

SEQ ID NO: 3312098 - DNA, 25 bp, Homo sapien
aaatccctcattacggaattaagag

SEQ ID NO: 3312099 - DNA, 25 bp, Homo sapien
ccacacatcaggagattatgggttc

SEQ ID NO: 3312100 - DNA, 25 bp, Homo sapien
gactcatgtccgactttggacggca

SEQ ID NO: 3312101 - DNA, 25 bp, Homo sapien
ttagaaagcacactggaccacacat

SEQ ID NO: 3312102 - DNA, 25 bp, Homo sapien
cactttatcaccttcacttataaaa

SEQ ID NO: 3312103 - DNA, 25 bp, Homo sapien
tctttgcactttatcaccttcactt

SEQ ID NO: 3312104 - DNA, 25 bp, Homo sapien
ctttatcaccttcacttataaaatg

SEQ ID NO: 3312105 - DNA, 25 bp, Homo sapien
ttgcactttatcaccttcacttata

SEQ ID NO: 3312106 - DNA, 25 bp, Homo sapien
tccatctctatctgacacaacaatg

SEQ ID NO: 3312107 - DNA, 25 bp, Homo sapien
catctctatctgacacaacaatggc

SEQ ID NO: 3312108 - DNA, 25 bp, Homo sapien
tctctatctgacacaacaatggcat

SEQ ID NO: 3312109 - DNA, 25 bp, Homo sapien
ctatctgacacaacaatggcatgga

SEQ ID NO: 3312110 - DNA, 25 bp, Homo sapien
ctttttatacaagaatcgctttagg

SEQ ID NO: 3312111 - DNA, 25 bp, Homo sapien
tggtaactttttatacaagaatcgc

SEQ ID NO: 3312112 - DNA, 25 bp, Homo sapien
actttttatacaagaatcgctttag

SEQ ID NO: 3312113 - DNA, 25 bp, Homo sapien
ttttatacaagaatcgctttaggtc

SEQ ID NO: 3312114 - DNA, 25 bp, Homo sapien
ccccttctctcgcaggatcaatctc

SEQ ID NO: 3312115 - DNA, 25 bp, Homo sapien
cccttctctcgcaggatcaatctcc

SEQ ID NO: 3312116 - DNA, 25 bp, Homo sapien
tgaacccccttctctcgcaggatca

SEQ ID NO: 3312117 - DNA, 25 bp, Homo sapien
acccccttctctcgcaggatcaatc

SEQ ID NO: 3312118 - DNA, 25 bp, Homo sapien
ttctgtttaatctcaccacccgcgc

SEQ ID NO: 3312119 - DNA, 25 bp, Homo sapien
taaagacaggttcctcctcaagcca

SEQ ID NO: 3312120 - DNA, 25 bp, Homo sapien
cgccgtcgccctacgatacgggatt

SEQ ID NO: 3312121 - DNA, 25 bp, Homo sapien
catgattcatgacctcgtctgcgct

SEQ ID NO: 3312122 - DNA, 25 bp, Homo sapien
caggaagcactttctaagccgccgt

SEQ ID NO: 3312123 - DNA, 25 bp, Homo sapien
gacatcttggcaactagtcatccca

SEQ ID NO: 3312124 - DNA, 25 bp, Homo sapien
tgcttaactggcaagatggctcact

SEQ ID NO: 3312125 - DNA, 25 bp, Homo sapien
tacccctatgtatttccagatggct

SEQ ID NO: 3312126 - DNA, 25 bp, Homo sapien
cctgctctgtgcaaacatagtgtgg

SEQ ID NO: 3312127 - DNA, 25 bp, Homo sapien
tgttagaataccagttagaggagct

SEQ ID NO: 3312128 - DNA, 25 bp, Homo sapien
gaatgagccgatgaaattgcgaagt

SEQ ID NO: 3312129 - DNA, 25 bp, Homo sapien
taaattgtcaggcactcagtctgtc

SEQ ID NO: 3312130 - DNA, 25 bp, Homo sapien
tacagatgactaaatgactagcacc

SEQ ID NO: 3312131 - DNA, 25 bp, Homo sapien
tatgttccattaaccgagtatgaag

SEQ ID NO: 3312132 - DNA, 25 bp, Homo sapien
agaacaaagccaccctatctagcat

SEQ ID NO: 3312133 - DNA, 25 bp, Homo sapien
tttcatatccagtatacaggcatca

SEQ ID NO: 3312134 - DNA, 25 bp, Homo sapien
tagcagttttattcaacagatgcca

SEQ ID NO: 3312135 - DNA, 25 bp, Homo sapien
ccatcaatttaaactgaagtgtctc

SEQ ID NO: 3312136 - DNA, 25 bp, Homo sapien
tgtgtcatataacatttattccatc

SEQ ID NO: 3312137 - DNA, 25 bp, Homo sapien
gagccagtaggtcataaacagtcca

SEQ ID NO: 3312138 - DNA, 25 bp, Homo sapien
gctacaggtgtgataatcctttctc

SEQ ID NO: 3312139 - DNA, 25 bp, Homo sapien
ggtaagccgctctaattctttacag

SEQ ID NO: 3312140 - DNA, 25 bp, Homo sapien
cttttgctgcatactgcatatctgt

SEQ ID NO: 3312141 - DNA, 25 bp, Homo sapien
tttgctgcatactgcatatctgttt

SEQ ID NO: 3312142 - DNA, 25 bp, Homo sapien
ttttgctgcatactgcatatctgtt

SEQ ID NO: 3312143 - DNA, 25 bp, Homo sapien
tcaactggactaggattaacaactc

SEQ ID NO: 3312144 - DNA, 25 bp, Homo sapien
ttcacactgctaacgaatggcagag

SEQ ID NO: 3312145 - DNA, 25 bp, Homo sapien
caagtactgcttgggctggataatt

SEQ ID NO: 3312146 - DNA, 25 bp, Homo sapien
gacttagataaaccgaagttcacac

SEQ ID NO: 3312147 - DNA, 25 bp, Homo sapien
ccagcagttatttcgaatattagtc

SEQ ID NO: 3312148 - DNA, 25 bp, Homo sapien
tatttcgaatattagtcacataatc

SEQ ID NO: 3312149 - DNA, 25 bp, Homo sapien
gcagttatttcgaatattagtcaca

SEQ ID NO: 3312150 - DNA, 25 bp, Homo sapien
tttccagcagttatttcgaatatta

SEQ ID NO: 3312151 - DNA, 25 bp, Homo sapien
gatctgggatataaggaataaggag

SEQ ID NO: 3312152 - DNA, 25 bp, Homo sapien
tctgggatataaggaataaggagga

SEQ ID NO: 3312153 - DNA, 25 bp, Homo sapien
atctgggatataaggaataaggagg

SEQ ID NO: 3312154 - DNA, 25 bp, Homo sapien
ttaataatgacacgaggatcaatac

SEQ ID NO: 3312155 - DNA, 25 bp, Homo sapien
atgacacgaggatcaatacaattat

SEQ ID NO: 3312156 - DNA, 25 bp, Homo sapien
gcttaataatgacacgaggatcaat

SEQ ID NO: 3312157 - DNA, 25 bp, Homo sapien
taatgacacgaggatcaatacaatt

SEQ ID NO: 3312158 - DNA, 25 bp, Homo sapien
ctgatgttgttggctataaccagct

SEQ ID NO: 3312159 - DNA, 25 bp, Homo sapien
tgatgttgttggctataaccagctc

SEQ ID NO: 3312160 - DNA, 25 bp, Homo sapien
gctgatgttgttggctataaccagc

SEQ ID NO: 3312161 - DNA, 25 bp, Homo sapien
tgttgttggctataaccagctcttc

SEQ ID NO: 3312162 - DNA, 25 bp, Homo sapien
tatatcagcttcacaacctctatgg

SEQ ID NO: 3312163 - DNA, 25 bp, Homo sapien
tattaatatataggcaacccaattc

SEQ ID NO: 3312164 - DNA, 25 bp, Homo sapien
tctataaactaaaagggctatccca

SEQ ID NO: 3312165 - DNA, 25 bp, Homo sapien
aagaagcatatctatcaatctctgc

SEQ ID NO: 3312166 - DNA, 25 bp, Homo sapien
cactgatatagtcaggatatagaac

SEQ ID NO: 3312167 - DNA, 25 bp, Homo sapien
tatagctttcagtatataaatgtga

SEQ ID NO: 3312168 - DNA, 25 bp, Homo sapien
gtgcccagccgacttgacatcttta

SEQ ID NO: 3312169 - DNA, 25 bp, Homo sapien
catccatgaacatgatatttcagtc

SEQ ID NO: 3312170 - DNA, 25 bp, Homo sapien
aatcaatattgtatagctttcagta

SEQ ID NO: 3312171 - DNA, 25 bp, Homo sapien
tcttcaataagagcatctgagcctg

SEQ ID NO: 3312172 - DNA, 25 bp, Homo sapien
aatacctgagactagcttatggttc

SEQ ID NO: 3312173 - DNA, 25 bp, Homo sapien
tcccttatgggaacatcaggcctcc

SEQ ID NO: 3312174 - DNA, 25 bp, Homo sapien
gaggtgaaagtccacatgatctcca

SEQ ID NO: 3312175 - DNA, 25 bp, Homo sapien
gaatgagcacccttttattgccagg

SEQ ID NO: 3312176 - DNA, 25 bp, Homo sapien
tacctatgatactaccctagcaggg

SEQ ID NO: 3312177 - DNA, 25 bp, Homo sapien
cagagcaatcaatccatactttagc

SEQ ID NO: 3312178 - DNA, 25 bp, Homo sapien
taatgagaagatcctgtgtgctaaa

SEQ ID NO: 3312179 - DNA, 25 bp, Homo sapien
tggcttagtattccaaaaacagact

SEQ ID NO: 3312180 - DNA, 25 bp, Homo sapien
ctttgctcagagataaatggcttag

SEQ ID NO: 3312181 - DNA, 25 bp, Homo sapien
gactgcatacattaggctcaagcta

SEQ ID NO: 3312182 - DNA, 25 bp, Homo sapien
taatggcactattttctggatacat

SEQ ID NO: 3312183 - DNA, 25 bp, Homo sapien
aacctaagtgctattatctgtgttt

SEQ ID NO: 3312184 - DNA, 25 bp, Homo sapien
tcacttagcagatcacaaacataca

SEQ ID NO: 3312185 - DNA, 25 bp, Homo sapien
ccgtaaagtgaattctaaagacagc

SEQ ID NO: 3312186 - DNA, 25 bp, Homo sapien
tgcatatgtgcctagaaaagttact

SEQ ID NO: 3312187 - DNA, 25 bp, Homo sapien
ccagatgacaatacgctagaagctc

SEQ ID NO: 3312188 - DNA, 25 bp, Homo sapien
gaacttaatattctgaaacgccgta

SEQ ID NO: 3312189 - DNA, 25 bp, Homo sapien
tcaaagcaagctttctataagcttt

SEQ ID NO: 3312190 - DNA, 25 bp, Homo sapien
tctgttgctccaggtgcatggtttt

SEQ ID NO: 3312191 - DNA, 25 bp, Homo sapien
tcgtaactccaagtacttcatagta

SEQ ID NO: 3312192 - DNA, 25 bp, Homo sapien
ggtgcatggtttttgtctggatgaa

SEQ ID NO: 3312193 - DNA, 25 bp, Homo sapien
tcaaaatctaatgaaggcttatccc

SEQ ID NO: 3312194 - DNA, 25 bp, Homo sapien
ggccatccccgttatgccaaagata

SEQ ID NO: 3312195 - DNA, 25 bp, Homo sapien
tcctcaaaagtatgtcacagctaag

SEQ ID NO: 3312196 - DNA, 25 bp, Homo sapien
ttagtacacgcaaaacaacagcagt

SEQ ID NO: 3312197 - DNA, 25 bp, Homo sapien
gtgcttggcacacaaaaggatctca

SEQ ID NO: 3312198 - DNA, 25 bp, Homo sapien
gaatactaactatgcccagacagtg

SEQ ID NO: 3312199 - DNA, 25 bp, Homo sapien
acctattagttatcacagtgcttgg

SEQ ID NO: 3312200 - DNA, 25 bp, Homo sapien
gaatgatcccacctgtgtagagact

SEQ ID NO: 3312201 - DNA, 25 bp, Homo sapien
ggtacaggtccaccatcccatatca

SEQ ID NO: 3312202 - DNA, 25 bp, Homo sapien
tcctcaggactaggtttgctgcccc

SEQ ID NO: 3312203 - DNA, 25 bp, Homo sapien
tactatttgttatggactgctgccc

SEQ ID NO: 3312204 - DNA, 25 bp, Homo sapien
attactgagcacaaaagcctggtca

SEQ ID NO: 3312205 - DNA, 25 bp, Homo sapien
gaacccatagatgtggagagccgac

SEQ ID NO: 3312206 - DNA, 25 bp, Homo sapien
gcataatcgtgctaaccaacaagat

SEQ ID NO: 3312207 - DNA, 25 bp, Homo sapien
gacttctccccattgagccaaattg

SEQ ID NO: 3312208 - DNA, 25 bp, Homo sapien
caatggatgcagtattattgcaaga

SEQ ID NO: 3312209 - DNA, 25 bp, Homo sapien
tgtcactgagcaacttgtttgcata

SEQ ID NO: 3312210 - DNA, 25 bp, Homo sapien
taatgagattattgaccagaggacc

SEQ ID NO: 3312211 - DNA, 25 bp, Homo sapien
tatgtctctggccacatacagagtg

SEQ ID NO: 3312212 - DNA, 25 bp, Homo sapien
aaggtgtctccttgcctacagccag

SEQ ID NO: 3312213 - DNA, 25 bp, Homo sapien
tggtgatctgtaccctcactaaagc

SEQ ID NO: 3312214 - DNA, 25 bp, Homo sapien
ccacaccttggactactcttctttt

SEQ ID NO: 3312215 - DNA, 25 bp, Homo sapien
gctacctctgacacagtactataag

SEQ ID NO: 3312216 - DNA, 25 bp, Homo sapien
tactaatcaaatactctaccatggc

SEQ ID NO: 3312217 - DNA, 25 bp, Homo sapien
tcaactctaacatttctgcgaaagg

SEQ ID NO: 3312218 - DNA, 25 bp, Homo sapien
gccagatacccaaaacccagtgtat

SEQ ID NO: 3312219 - DNA, 25 bp, Homo sapien
caattaggcttgctttgatcgccac

SEQ ID NO: 3312220 - DNA, 25 bp, Homo sapien
gttttcggcaatgagggctatttcc

SEQ ID NO: 3312221 - DNA, 25 bp, Homo sapien
tcaccactaccagatgtgctgtcct

SEQ ID NO: 3312222 - DNA, 25 bp, Homo sapien
gatcgccactacctgatggttttcg

SEQ ID NO: 3312223 - DNA, 25 bp, Homo sapien
tcaaaggctataatcaacagaatgg

SEQ ID NO: 3312224 - DNA, 25 bp, Homo sapien
ttaactcggaatggatcatgaatct

SEQ ID NO: 3312225 - DNA, 25 bp, Homo sapien
tccaaaagatgaacaatagcaaatg

SEQ ID NO: 3312226 - DNA, 25 bp, Homo sapien
tggtaccctaataagtttctagtga

SEQ ID NO: 3312227 - DNA, 25 bp, Homo sapien
gagacagtcacaaccaaaaacatgg

SEQ ID NO: 3312228 - DNA, 25 bp, Homo sapien
gagatggctggaatgaatcctgtgg

SEQ ID NO: 3312229 - DNA, 25 bp, Homo sapien
ctaacagagaacagaatcacaaaca

SEQ ID NO: 3312230 - DNA, 25 bp, Homo sapien
ggaccaatgggcttttatgtactaa

SEQ ID NO: 3312231 - DNA, 25 bp, Homo sapien
gatttcataaacttgatggttacgc

SEQ ID NO: 3312232 - DNA, 25 bp, Homo sapien
tgggagatcatgtctacagctactg

SEQ ID NO: 3312233 - DNA, 25 bp, Homo sapien
gaatgtgagtaaggtgaaagcactg

SEQ ID NO: 3312234 - DNA, 25 bp, Homo sapien
gattatctaagagagtgtccttgtc

SEQ ID NO: 3312235 - DNA, 25 bp, Homo sapien
tgtcttagctatcacatgggatctc

SEQ ID NO: 3312236 - DNA, 25 bp, Homo sapien
tgagctcatactacacagtctttgg

SEQ ID NO: 3312237 - DNA, 25 bp, Homo sapien
tacttctgggcctcaaaatctagct

SEQ ID NO: 3312238 - DNA, 25 bp, Homo sapien
acagtagctgtgtgcatacatgagc

SEQ ID NO: 3312239 - DNA, 25 bp, Homo sapien
taaacctggtcaaatgaatcctgca

SEQ ID NO: 3312240 - DNA, 25 bp, Homo sapien
ctggaaatactaatggcaaggcaac

SEQ ID NO: 3312241 - DNA, 25 bp, Homo sapien
gcacagggcttcaacgacgtagaga

SEQ ID NO: 3312242 - DNA, 25 bp, Homo sapien
cagaaagtctgtttccacgtgggta

SEQ ID NO: 3312243 - DNA, 25 bp, Homo sapien
tcccgggcgatctcgacacatttct

SEQ ID NO: 3312244 - DNA, 25 bp, Homo sapien
ggcctcccgggcgatctcgacacat

SEQ ID NO: 3312245 - DNA, 25 bp, Homo sapien
gggcgatctcgacacatttctcagc

SEQ ID NO: 3312246 - DNA, 25 bp, Homo sapien
gcggttgccggcgttcagggcctcc

SEQ ID NO: 3312247 - DNA, 25 bp, Homo sapien
tccttcttccgtttcctccggcagc

SEQ ID NO: 3312248 - DNA, 25 bp, Homo sapien
ttcttccgtttcctccggcagcgca

SEQ ID NO: 3312249 - DNA, 25 bp, Homo sapien
tcttccgtttcctccggcagcgcag

SEQ ID NO: 3312250 - DNA, 25 bp, Homo sapien
ccttcttccgtttcctccggcagcg

SEQ ID NO: 3312251 - DNA, 25 bp, Homo sapien
gcggaggaggcgaggcgggaccggc

SEQ ID NO: 3312252 - DNA, 25 bp, Homo sapien
ccgccgcggaggaggcgaggcggga

SEQ ID NO: 3312253 - DNA, 25 bp, Homo sapien
aggaggcgaggcgggaccggctggg

SEQ ID NO: 3312254 - DNA, 25 bp, Homo sapien
ctaagaagggcggaagccgccgccg

SEQ ID NO: 3312255 - DNA, 25 bp, Homo sapien
cgagctgactcggtggtccgcgcac

SEQ ID NO: 3312256 - DNA, 25 bp, Homo sapien
gccggggcgtccgagctgactcggt

SEQ ID NO: 3312257 - DNA, 25 bp, Homo sapien
cgtccgagctgactcggtggtccgc

SEQ ID NO: 3312258 - DNA, 25 bp, Homo sapien
gggcgtccgagctgactcggtggtc

SEQ ID NO: 3312259 - DNA, 25 bp, Homo sapien
cggacgatagcagccgggctgccca

SEQ ID NO: 3312260 - DNA, 25 bp, Homo sapien
cgggacccgattgccggcattggta

SEQ ID NO: 3312261 - DNA, 25 bp, Homo sapien
gacctgcccgggaggcggacgatag

SEQ ID NO: 3312262 - DNA, 25 bp, Homo sapien
agcaggctcgaagcggacctgcccg

SEQ ID NO: 3312263 - DNA, 25 bp, Homo sapien
tacaaccaagcaaatttaatacaca

SEQ ID NO: 3312264 - DNA, 25 bp, Homo sapien
gacagttcagtcacaaagaaatgtg

SEQ ID NO: 3312265 - DNA, 25 bp, Homo sapien
aacaagttcctattacaaccaagca

SEQ ID NO: 3312266 - DNA, 25 bp, Homo sapien
tgctgctagatgagatactcaaaac

SEQ ID NO: 3312267 - DNA, 25 bp, Homo sapien
taaacttccaacttgctcaaataga

SEQ ID NO: 3312268 - DNA, 25 bp, Homo sapien
tttattgaacttatccaccagagtg

SEQ ID NO: 3312269 - DNA, 25 bp, Homo sapien
gatacagtccactggaatcaccaac

SEQ ID NO: 3312270 - DNA, 25 bp, Homo sapien
taagactcgaatgcagaaatttggt

SEQ ID NO: 3312271 - DNA, 25 bp, Homo sapien
ctgagataacaaggaatccaggcat

SEQ ID NO: 3312272 - DNA, 25 bp, Homo sapien
gagataacaaggaatccaggcatcc

SEQ ID NO: 3312273 - DNA, 25 bp, Homo sapien
agataacaaggaatccaggcatcct

SEQ ID NO: 3312274 - DNA, 25 bp, Homo sapien
tgagataacaaggaatccaggcatc

SEQ ID NO: 3312275 - DNA, 25 bp, Homo sapien
tcccaatcagagatttgtggatgtg

SEQ ID NO: 3312276 - DNA, 25 bp, Homo sapien
tttcttcccaatcagagatttgtgg

SEQ ID NO: 3312277 - DNA, 25 bp, Homo sapien
ttagacagtcttctgttgtcctttc

SEQ ID NO: 3312278 - DNA, 25 bp, Homo sapien
agatttgtggatgtgtggaatgaca

SEQ ID NO: 3312279 - DNA, 25 bp, Homo sapien
tgttcaacttgaaaggtatctttaa

SEQ ID NO: 3312280 - DNA, 25 bp, Homo sapien
taaaaacatgcagctcaagtatgaa

SEQ ID NO: 3312281 - DNA, 25 bp, Homo sapien
accaagaaagtgtatactgttcaac

SEQ ID NO: 3312282 - DNA, 25 bp, Homo sapien
ggagagtgacaggaattaattctac

SEQ ID NO: 3312283 - DNA, 25 bp, Homo sapien
gagagaatccaattcttcatctcca

SEQ ID NO: 3312284 - DNA, 25 bp, Homo sapien
tgcaagtgacgaggggtaatacgct

SEQ ID NO: 3312285 - DNA, 25 bp, Homo sapien
agttgcaagtgacgaggggtaatac

SEQ ID NO: 3312286 - DNA, 25 bp, Homo sapien
aattgtagccttgatgagagaatcc

SEQ ID NO: 3312287 - DNA, 25 bp, Homo sapien
ggaatcgttcctcactatctgactg

SEQ ID NO: 3312288 - DNA, 25 bp, Homo sapien
taaaaggcagaatctgtcagttgcc

SEQ ID NO: 3312289 - DNA, 25 bp, Homo sapien
tagcgttctcttaggcctctcgccg

SEQ ID NO: 3312290 - DNA, 25 bp, Homo sapien
aaaaccctcacaaacgcagatctac

SEQ ID NO: 3312291 - DNA, 25 bp, Homo sapien
gattttaggtgtcgatgaatacggc

SEQ ID NO: 3312292 - DNA, 25 bp, Homo sapien
agattttaggtgtcgatgaatacgg

SEQ ID NO: 3312293 - DNA, 25 bp, Homo sapien
taaattttaagcatacacaaacata

SEQ ID NO: 3312294 - DNA, 25 bp, Homo sapien
attttaagcatacacaaacataaat

SEQ ID NO: 3312295 - DNA, 25 bp, Homo sapien
cttaaattttaagcatacacaaaca

SEQ ID NO: 3312296 - DNA, 25 bp, Homo sapien
tttaagcatacacaaacataaatgc

SEQ ID NO: 3312297 - DNA, 25 bp, Homo sapien
gcatacacaaaacgcccatcgagag

SEQ ID NO: 3312298 - DNA, 25 bp, Homo sapien
gggaaattatatgcgcgccaaagca

SEQ ID NO: 3312299 - DNA, 25 bp, Homo sapien
gcgtcccgacatcgaaacacgtgat

SEQ ID NO: 3312300 - DNA, 25 bp, Homo sapien
catatttatcgtatgggcagcccaa

SEQ ID NO: 3312301 - DNA, 25 bp, Homo sapien
cggctctctgcgagcgggaaaccgc

SEQ ID NO: 3312302 - DNA, 25 bp, Homo sapien
tggcctttccggagtcctttccagc

SEQ ID NO: 3312303 - DNA, 25 bp, Homo sapien
ctgcaagccggctctctgcgagcgg

SEQ ID NO: 3312304 - DNA, 25 bp, Homo sapien
gagtcctttccagccttaccgccag

SEQ ID NO: 3312305 - DNA, 25 bp, Homo sapien
tgctccgctagcagccgacaaaaca

SEQ ID NO: 3312306 - DNA, 25 bp, Homo sapien
cgcgagatccgaggctgctccgcta

SEQ ID NO: 3312307 - DNA, 25 bp, Homo sapien
atatagaattaccaaggcggcgcgc

SEQ ID NO: 3312308 - DNA, 25 bp, Homo sapien
cgagcggaggaggaacggagaatat

SEQ ID NO: 3312309 - DNA, 25 bp, Homo sapien
gcggagtcatcgagcgtctctgcga

SEQ ID NO: 3312310 - DNA, 25 bp, Homo sapien
caaaaacccgcggagtcatcgagcg

SEQ ID NO: 3312311 - DNA, 25 bp, Homo sapien
tctgtgtaacgggtttttctctcgc

SEQ ID NO: 3312312 - DNA, 25 bp, Homo sapien
catcgagcgtctctgcgaagtttac

SEQ ID NO: 3312313 - DNA, 25 bp, Homo sapien
agagaaaaggctaatcggacccacg

SEQ ID NO: 3312314 - DNA, 25 bp, Homo sapien
aaaggctaatcggacccacggtgag

SEQ ID NO: 3312315 - DNA, 25 bp, Homo sapien
tcgtcgcaccgcgattcaaactgcg

SEQ ID NO: 3312316 - DNA, 25 bp, Homo sapien
tcatccgggaactcggattgctcat

SEQ ID NO: 3312317 - DNA, 25 bp, Homo sapien
gattgctcatcccaccaatggctgc

SEQ ID NO: 3312318 - DNA, 25 bp, Homo sapien
cctgctccctttatactgcagaatg

SEQ ID NO: 3312319 - DNA, 25 bp, Homo sapien
gtctcctcggtatgtagcacgccgc

SEQ ID NO: 3312320 - DNA, 25 bp, Homo sapien
gaagtctcctcggtatgtagcacgc

SEQ ID NO: 3312321 - DNA, 25 bp, Homo sapien
gaccacgtgaagtctcctcggtatg

SEQ ID NO: 3312322 - DNA, 25 bp, Homo sapien
cgtgaagtctcctcggtatgtagca

SEQ ID NO: 3312323 - DNA, 25 bp, Homo sapien
cagcgcctctcgggcggagacctgc

SEQ ID NO: 3312324 - DNA, 25 bp, Homo sapien
gcgcctctcgggcggagacctgcga

SEQ ID NO: 3312325 - DNA, 25 bp, Homo sapien
gcctctcgggcggagacctgcgacc

SEQ ID NO: 3312326 - DNA, 25 bp, Homo sapien
ctctcgggcggagacctgcgacccg

SEQ ID NO: 3312327 - DNA, 25 bp, Homo sapien
tccacagccttagtagagattccgt

SEQ ID NO: 3312328 - DNA, 25 bp, Homo sapien
cactacttatgaaatcctccacgga

SEQ ID NO: 3312329 - DNA, 25 bp, Homo sapien
tgtttcttccgtctaggcgagtccc

SEQ ID NO: 3312330 - DNA, 25 bp, Homo sapien
cgaacgcgtccagtgagaggagtct

SEQ ID NO: 3312331 - DNA, 25 bp, Homo sapien
tgaagccaagtcacctcactggtca

SEQ ID NO: 3312332 - DNA, 25 bp, Homo sapien
ctatacttagggagcttctggcgag

SEQ ID NO: 3312333 - DNA, 25 bp, Homo sapien
tgtgacagcaaacggtgaagccaag

SEQ ID NO: 3312334 - DNA, 25 bp, Homo sapien
ctggcgaggcagtattctttaatca

SEQ ID NO: 3312335 - DNA, 25 bp, Homo sapien
aattactgcagtttggcacctgggt

SEQ ID NO: 3312336 - DNA, 25 bp, Homo sapien
acttcattgataaaaattactgcag

SEQ ID NO: 3312337 - DNA, 25 bp, Homo sapien
aaaattactgcagtttggcacctgg

SEQ ID NO: 3312338 - DNA, 25 bp, Homo sapien
tcattgataaaaattactgcagttt

SEQ ID NO: 3312339 - DNA, 25 bp, Homo sapien
ttaagctggcggatgagctgattga

SEQ ID NO: 3312340 - DNA, 25 bp, Homo sapien
tagttaagctggcggatgagctgat

SEQ ID NO: 3312341 - DNA, 25 bp, Homo sapien
ctagttaagctggcggatgagctga

SEQ ID NO: 3312342 - DNA, 25 bp, Homo sapien
tgcgttcaccccgatagccaggtgt

SEQ ID NO: 3312343 - DNA, 25 bp, Homo sapien
ggcgcaagaaccatgagctctcctg

SEQ ID NO: 3312344 - DNA, 25 bp, Homo sapien
tctagttttggtagcatgacgggcc

SEQ ID NO: 3312345 - DNA, 25 bp, Homo sapien
gaaagggcgcaagaaccatgagctc

SEQ ID NO: 3312346 - DNA, 25 bp, Homo sapien
ctgagaagtggaaagggcgcaagaa

SEQ ID NO: 3312347 - DNA, 25 bp, Homo sapien
tccactacacgcagcacttttaggt

SEQ ID NO: 3312348 - DNA, 25 bp, Homo sapien
tcttccaagccaatgacgccaaacg

SEQ ID NO: 3312349 - DNA, 25 bp, Homo sapien
caagccaatgacgccaaacgtcccc

SEQ ID NO: 3312350 - DNA, 25 bp, Homo sapien
caatgacgccaaacgtccccaggtg

SEQ ID NO: 3312351 - DNA, 25 bp, Homo sapien
ttctttaggcgaagtcttgcaatgg

SEQ ID NO: 3312352 - DNA, 25 bp, Homo sapien
tttaggcgaagtcttgcaatggttc

SEQ ID NO: 3312353 - DNA, 25 bp, Homo sapien
gcgaagtcttgcaatggttctctgc

SEQ ID NO: 3312354 - DNA, 25 bp, Homo sapien
taggcgaagtcttgcaatggttctc

SEQ ID NO: 3312355 - DNA, 25 bp, Homo sapien
aggccatcggtcctttcgatgcgta

SEQ ID NO: 3312356 - DNA, 25 bp, Homo sapien
taaactcaggccatcggtcctttcg

SEQ ID NO: 3312357 - DNA, 25 bp, Homo sapien
tgtctggcagttccaatgcatgagg

SEQ ID NO: 3312358 - DNA, 25 bp, Homo sapien
cagtaaactcaggccatcggtcctt

SEQ ID NO: 3312359 - DNA, 25 bp, Homo sapien
ttataggtgtctgcgggattatagg

SEQ ID NO: 3312360 - DNA, 25 bp, Homo sapien
attataggtgtctgcgggattatag

SEQ ID NO: 3312361 - DNA, 25 bp, Homo sapien
taggtgtctgcgggattataggtgc

SEQ ID NO: 3312362 - DNA, 25 bp, Homo sapien
tataggtgtctgcgggattataggt

SEQ ID NO: 3312363 - DNA, 25 bp, Homo sapien
gcttctcatgatgggaaaagagggc

SEQ ID NO: 3312364 - DNA, 25 bp, Homo sapien
gtctctggaaatgctaatgcccatg

SEQ ID NO: 3312365 - DNA, 25 bp, Homo sapien
aatgcccatgctgattaggttggac

SEQ ID NO: 3312366 - DNA, 25 bp, Homo sapien
tcaacttgttctgggcatcaatcca

SEQ ID NO: 3312367 - DNA, 25 bp, Homo sapien
taatgcttcatgcaaaaccagaaaa

SEQ ID NO: 3312368 - DNA, 25 bp, Homo sapien
cagtccatcagggttgaaaaataat

SEQ ID NO: 3312369 - DNA, 25 bp, Homo sapien
tgatggatgaggattcccctgaatc

SEQ ID NO: 3312370 - DNA, 25 bp, Homo sapien
tgaatccaaagctctgcttctactt

SEQ ID NO: 3312371 - DNA, 25 bp, Homo sapien
tcaaactgcttctcgatatgggctg

SEQ ID NO: 3312372 - DNA, 25 bp, Homo sapien
tatgttctccaatgcctgcgtagct

SEQ ID NO: 3312373 - DNA, 25 bp, Homo sapien
gatgcatctcttccaacgtgactgc

SEQ ID NO: 3312374 - DNA, 25 bp, Homo sapien
tagctcacaccactaagccctgatg

SEQ ID NO: 3312375 - DNA, 25 bp, Homo sapien
tttgtggttatctttggctgtgatt

SEQ ID NO: 3312376 - DNA, 25 bp, Homo sapien
taccatgaaactgagaaacctgcat

SEQ ID NO: 3312377 - DNA, 25 bp, Homo sapien
tctgatgtaccatgaaactgagaaa

SEQ ID NO: 3312378 - DNA, 25 bp, Homo sapien
ttggctgtgatttctgatgtaccat

SEQ ID NO: 3312379 - DNA, 25 bp, Homo sapien
atgtacttggatattgatgtttcct

SEQ ID NO: 3312380 - DNA, 25 bp, Homo sapien
acttggatattgatgtttccttggc

SEQ ID NO: 3312381 - DNA, 25 bp, Homo sapien
cttgaatgtacttggatattgatgt

SEQ ID NO: 3312382 - DNA, 25 bp, Homo sapien
gaatgtacttggatattgatgtttc

SEQ ID NO: 3312383 - DNA, 25 bp, Homo sapien
tagtgtccttgtttggagtttgacg

SEQ ID NO: 3312384 - DNA, 25 bp, Homo sapien
ggagatagcgggcaatagtgtcctt

SEQ ID NO: 3312385 - DNA, 25 bp, Homo sapien
cgggcaatagtgtccttgtttggag

SEQ ID NO: 3312386 - DNA, 25 bp, Homo sapien
ccttgtttggagtttgacgtagcct

SEQ ID NO: 3312387 - DNA, 25 bp, Homo sapien
tcaatcccagcttccaccagctctc

SEQ ID NO: 3312388 - DNA, 25 bp, Homo sapien
aatcccagcttccaccagctctcca

SEQ ID NO: 3312389 - DNA, 25 bp, Homo sapien
ggtcaatcccagcttccaccagctc

SEQ ID NO: 3312390 - DNA, 25 bp, Homo sapien
atcccagcttccaccagctctccat

SEQ ID NO: 3312391 - DNA, 25 bp, Homo sapien
gaggatacacaggagactggtggtt

SEQ ID NO: 3312392 - DNA, 25 bp, Homo sapien
ctccaagtggtacatccttgtgcag

SEQ ID NO: 3312393 - DNA, 25 bp, Homo sapien
tccaagtggtacatccttgtgcagt

SEQ ID NO: 3312394 - DNA, 25 bp, Homo sapien
gcagattgtggccatcttgcaaata

SEQ ID NO: 3312395 - DNA, 25 bp, Homo sapien
gacatgtagagattatatgcagatg

SEQ ID NO: 3312396 - DNA, 25 bp, Homo sapien
ctaacagatgatagagttgtcactc

SEQ ID NO: 3312397 - DNA, 25 bp, Homo sapien
tggtgtatgttatcgacatgtagag

SEQ ID NO: 3312398 - DNA, 25 bp, Homo sapien
ttgttgagttccaaggtcttaaggc

SEQ ID NO: 3312399 - DNA, 25 bp, Homo sapien
aatggaatagtccagcagatgcttg

SEQ ID NO: 3312400 - DNA, 25 bp, Homo sapien
tcatgtggcgttcccttgaatacta

SEQ ID NO: 3312401 - DNA, 25 bp, Homo sapien
gacaggccactggaatgcatcaatg

SEQ ID NO: 3312402 - DNA, 25 bp, Homo sapien
attctagaatttccaggcaaggctc

SEQ ID NO: 3312403 - DNA, 25 bp, Homo sapien
tctccacttgtacaatcaagcacga

SEQ ID NO: 3312404 - DNA, 25 bp, Homo sapien
caaggcactgccaactctgtcaatt

SEQ ID NO: 3312405 - DNA, 25 bp, Homo sapien
tgtgaactaggcatccacaaggcac

SEQ ID NO: 3312406 - DNA, 25 bp, Homo sapien
caagtcctatgatgaactgacttct

SEQ ID NO: 3312407 - DNA, 25 bp, Homo sapien
gtcctatgatgaactgacttctgtg

SEQ ID NO: 3312408 - DNA, 25 bp, Homo sapien
cctatgatgaactgacttctgtgtg

SEQ ID NO: 3312409 - DNA, 25 bp, Homo sapien
agtcctatgatgaactgacttctgt

SEQ ID NO: 3312410 - DNA, 25 bp, Homo sapien
caatgccagtctagcaggtgctccc

SEQ ID NO: 3312411 - DNA, 25 bp, Homo sapien
tgtctaggcggaacgcagcaatgcc

SEQ ID NO: 3312412 - DNA, 25 bp, Homo sapien
tagggttaggctacacaggtccaga

SEQ ID NO: 3312413 - DNA, 25 bp, Homo sapien
caagtttgtaggcttccattcgacc

SEQ ID NO: 3312414 - DNA, 25 bp, Homo sapien
tgaatacatctgtccctacgccggt

SEQ ID NO: 3312415 - DNA, 25 bp, Homo sapien
catgcatggttatctggacggtgag

SEQ ID NO: 3312416 - DNA, 25 bp, Homo sapien
caacaccgtggttactgaaatggca

SEQ ID NO: 3312417 - DNA, 25 bp, Homo sapien
aatgcagacttcgtaaattgacccg

SEQ ID NO: 3312418 - DNA, 25 bp, Homo sapien
gaagctagtccatgagcagttctcc

SEQ ID NO: 3312419 - DNA, 25 bp, Homo sapien
aacaagtcgaaatcctgagctgagg

SEQ ID NO: 3312420 - DNA, 25 bp, Homo sapien
cacaagtgtaagctcaaaagtaggt

SEQ ID NO: 3312421 - DNA, 25 bp, Homo sapien
taggtacgacgctagaatcacacac

SEQ ID NO: 3312422 - DNA, 25 bp, Homo sapien
gatttggacagacagttctccagca

SEQ ID NO: 3312423 - DNA, 25 bp, Homo sapien
gccgcaggacatcttgagcaattct

SEQ ID NO: 3312424 - DNA, 25 bp, Homo sapien
aagccgcagggctccgttgaggaaa

SEQ ID NO: 3312425 - DNA, 25 bp, Homo sapien
ggacaaggacctttgagcaaccaag

SEQ ID NO: 3312426 - DNA, 25 bp, Homo sapien
ctacatagaggtaggggaggaagtc

SEQ ID NO: 3312427 - DNA, 25 bp, Homo sapien
catagaggtaggggaggaagtcgaa

SEQ ID NO: 3312428 - DNA, 25 bp, Homo sapien
tacatagaggtaggggaggaagtcg

SEQ ID NO: 3312429 - DNA, 25 bp, Homo sapien
cctacatagaggtaggggaggaagt

SEQ ID NO: 3312430 - DNA, 25 bp, Homo sapien
tagcaggctctctgggtgatagcca

SEQ ID NO: 3312431 - DNA, 25 bp, Homo sapien
cacttagcaggctctctgggtgata

SEQ ID NO: 3312432 - DNA, 25 bp, Homo sapien
ggctctctgggtgatagccacagtc

SEQ ID NO: 3312433 - DNA, 25 bp, Homo sapien
gaaatgctggccgggttcttgctgc

SEQ ID NO: 3312434 - DNA, 25 bp, Homo sapien
ttcgcgaggcgcaacggcctttcct

SEQ ID NO: 3312435 - DNA, 25 bp, Homo sapien
ggtcaacggctctgtttccttcgcg

SEQ ID NO: 3312436 - DNA, 25 bp, Homo sapien
gctctgtttccttcgcgaggcgcaa

SEQ ID NO: 3312437 - DNA, 25 bp, Homo sapien
tgtttccttcgcgaggcgcaacggc

SEQ ID NO: 3312438 - DNA, 25 bp, Homo sapien
gaagagacggatttgcaaaagcagg

SEQ ID NO: 3312439 - DNA, 25 bp, Homo sapien
tggaaccggcctctgcaactcaatt

SEQ ID NO: 3312440 - DNA, 25 bp, Homo sapien
tagcggaggaactcctttgccaaag

SEQ ID NO: 3312441 - DNA, 25 bp, Homo sapien
ggcgagtcgtgcagaggctcctaaa

SEQ ID NO: 3312442 - DNA, 25 bp, Homo sapien
ggagcggagccgcaacctgaaacta

SEQ ID NO: 3312443 - DNA, 25 bp, Homo sapien
taactcaacagttcgcaaaacttgg

SEQ ID NO: 3312444 - DNA, 25 bp, Homo sapien
gccgcaacctgaaactaactcaaca

SEQ ID NO: 3312445 - DNA, 25 bp, Homo sapien
ttggaagcgacctgccccgcggagc

SEQ ID NO: 3312446 - DNA, 25 bp, Homo sapien
aggagttcgcgggggcctgcgcgct

SEQ ID NO: 3312447 - DNA, 25 bp, Homo sapien
ccaggagttcgcgggggcctgcgcg

SEQ ID NO: 3312448 - DNA, 25 bp, Homo sapien
ctgccaggagttcgcgggggcctgc

SEQ ID NO: 3312449 - DNA, 25 bp, Homo sapien
gagttcgcgggggcctgcgcgctcg

SEQ ID NO: 3312450 - DNA, 25 bp, Homo sapien
ctgccgggtaaacacaggcaggtgg

SEQ ID NO: 3312451 - DNA, 25 bp, Homo sapien
tctcctggggactcggtgacctgca

SEQ ID NO: 3312452 - DNA, 25 bp, Homo sapien
gagaactttataggtccagtcccca

SEQ ID NO: 3312453 - DNA, 25 bp, Homo sapien
tcctcgcagtagcatagcctccggg

SEQ ID NO: 3312454 - DNA, 25 bp, Homo sapien
aacctgattgttcagtgcgacccct

SEQ ID NO: 3312455 - DNA, 25 bp, Homo sapien
cccggcagcgggaagctttaagcga

SEQ ID NO: 3312456 - DNA, 25 bp, Homo sapien
aattccgggtgcacgactcgtcaaa

SEQ ID NO: 3312457 - DNA, 25 bp, Homo sapien
ttccagggtagatctcgggccactg

SEQ ID NO: 3312458 - DNA, 25 bp, Homo sapien
gcctctcaaactccaatgagggata

SEQ ID NO: 3312459 - DNA, 25 bp, Homo sapien
tctcaaactccaatgagggatacat

SEQ ID NO: 3312460 - DNA, 25 bp, Homo sapien
tcaaactccaatgagggatacattt

SEQ ID NO: 3312461 - DNA, 25 bp, Homo sapien
tgcctctcaaactccaatgagggat

SEQ ID NO: 3312462 - DNA, 25 bp, Homo sapien
ccaggtatatttcctcagtattcca

SEQ ID NO: 3312463 - DNA, 25 bp, Homo sapien
atctataaagtccaggtatatttcc

SEQ ID NO: 3312464 - DNA, 25 bp, Homo sapien
atattgatgttttccagttgtctac

SEQ ID NO: 3312465 - DNA, 25 bp, Homo sapien
tccagttgtctacatctataaagtc

SEQ ID NO: 3312466 - DNA, 25 bp, Homo sapien
tatctgctcttccaagatctgcttc

SEQ ID NO: 3312467 - DNA, 25 bp, Homo sapien
ttatctgctcttccaagatctgctt

SEQ ID NO: 3312468 - DNA, 25 bp, Homo sapien
tctggtgcaagggacaactgtggca

SEQ ID NO: 3312469 - DNA, 25 bp, Homo sapien
tgcttctggtgcaagggacaactgt

SEQ ID NO: 3312470 - DNA, 25 bp, Homo sapien
ttaaccctagagagctcaaacactg

SEQ ID NO: 3312471 - DNA, 25 bp, Homo sapien
tttaaccctagagagctcaaacact

SEQ ID NO: 3312472 - DNA, 25 bp, Homo sapien
aggctccttccctatagtggcatcc

SEQ ID NO: 3312473 - DNA, 25 bp, Homo sapien
ccttccctatagtggcatcccacat

SEQ ID NO: 3312474 - DNA, 25 bp, Homo sapien
tcctttgttaggagcccagcatcct

SEQ ID NO: 3312475 - DNA, 25 bp, Homo sapien
tcaggctccttccctatagtggcat

SEQ ID NO: 3312476 - DNA, 25 bp, Homo sapien
gacttcctattgtcagagccccaga

SEQ ID NO: 3312477 - DNA, 25 bp, Homo sapien
tcagtctcacatctaaacattcagg

SEQ ID NO: 3312478 - DNA, 25 bp, Homo sapien
tctttgaccgttccactagactgct

SEQ ID NO: 3312479 - DNA, 25 bp, Homo sapien
tatcagcagcagttgacacagttca

SEQ ID NO: 3312480 - DNA, 25 bp, Homo sapien
tacggcttgctgtcctgatgcacct

SEQ ID NO: 3312481 - DNA, 25 bp, Homo sapien
tccgttgactacttgcatgaagagt

SEQ ID NO: 3312482 - DNA, 25 bp, Homo sapien
gatgcaccttgtgcctatgtctagc

SEQ ID NO: 3312483 - DNA, 25 bp, Homo sapien
tatgtctagccctgttggctctggc

SEQ ID NO: 3312484 - DNA, 25 bp, Homo sapien
tttctgcaaatccagctgactggca

SEQ ID NO: 3312485 - DNA, 25 bp, Homo sapien
catagaaatggtgggattcagcagg

SEQ ID NO: 3312486 - DNA, 25 bp, Homo sapien
tctctgagacaacgccatagaaatg

SEQ ID NO: 3312487 - DNA, 25 bp, Homo sapien
ggtgggattcagcaggctctttctg

SEQ ID NO: 3312488 - DNA, 25 bp, Homo sapien
gagtggcagctgaccaagttctgtt

SEQ ID NO: 3312489 - DNA, 25 bp, Homo sapien
attacatctgctagacgtgcagggc

SEQ ID NO: 3312490 - DNA, 25 bp, Homo sapien
tctgctagacgtgcagggccactgg

SEQ ID NO: 3312491 - DNA, 25 bp, Homo sapien
gggccactgggctttgtcttatcct

SEQ ID NO: 3312492 - DNA, 25 bp, Homo sapien
gaattccatctgattgcttctcaga

SEQ ID NO: 3312493 - DNA, 25 bp, Homo sapien
ttttctagccaatctcttctccctg

SEQ ID NO: 3312494 - DNA, 25 bp, Homo sapien
tccttcttaacatagcatgcaaagc

SEQ ID NO: 3312495 - DNA, 25 bp, Homo sapien
cttcctccttcttaacatagcatgc

SEQ ID NO: 3312496 - DNA, 25 bp, Homo sapien
tttctagccaatctcttctccctgg

SEQ ID NO: 3312497 - DNA, 25 bp, Homo sapien
catggtcgtggcaaacattctaagt

SEQ ID NO: 3312498 - DNA, 25 bp, Homo sapien
tttcttaacagaggacatggtcgtg

SEQ ID NO: 3312499 - DNA, 25 bp, Homo sapien
tataaagcatatggccacatgcctc

SEQ ID NO: 3312500 - DNA, 25 bp, Homo sapien
gggcagggtcacatgtataaagcat

SEQ ID NO: 3312501 - DNA, 25 bp, Homo sapien
tggatatagagactggtatgatgtc

SEQ ID NO: 3312502 - DNA, 25 bp, Homo sapien
ctgagcactgcagtctctttgtgga

SEQ ID NO: 3312503 - DNA, 25 bp, Homo sapien
tgcagtctctttgtggatatagaga

SEQ ID NO: 3312504 - DNA, 25 bp, Homo sapien
tctggccagttgttttctgagcact

SEQ ID NO: 3312505 - DNA, 25 bp, Homo sapien
ctttggaggtttcttgcaggttctt

SEQ ID NO: 3312506 - DNA, 25 bp, Homo sapien
ttctttgggattttgtaacagagaa

SEQ ID NO: 3312507 - DNA, 25 bp, Homo sapien
caggttctttgggattttgtaacag

SEQ ID NO: 3312508 - DNA, 25 bp, Homo sapien
tggaggtttcttgcaggttctttgg

SEQ ID NO: 3312509 - DNA, 25 bp, Homo sapien
tctatcactaaggactggttctgaa

SEQ ID NO: 3312510 - DNA, 25 bp, Homo sapien
tgctgttcaatgtggtagccgttaa

SEQ ID NO: 3312511 - DNA, 25 bp, Homo sapien
tggagttactaaatcccaggattgg

SEQ ID NO: 3312512 - DNA, 25 bp, Homo sapien
gattggagtccctacagtacctaga

SEQ ID NO: 3312513 - DNA, 25 bp, Homo sapien
tacacagtggctaataactccctgc

SEQ ID NO: 3312514 - DNA, 25 bp, Homo sapien
actccctgctgtgaacaaaaaatag

SEQ ID NO: 3312515 - DNA, 25 bp, Homo sapien
cttgccaagcctaaactaaactgag

SEQ ID NO: 3312516 - DNA, 25 bp, Homo sapien
gctcctgaatgctagccagagataa

SEQ ID NO: 3312517 - DNA, 25 bp, Homo sapien
tgttgtcaggtgtgaaccttttagg

SEQ ID NO: 3312518 - DNA, 25 bp, Homo sapien
aaacatatctctaaacaccagtgat

SEQ ID NO: 3312519 - DNA, 25 bp, Homo sapien
aaatacctaatcataggtgtggcat

SEQ ID NO: 3312520 - DNA, 25 bp, Homo sapien
gcatggacgattgacttatcaaaac

SEQ ID NO: 3312521 - DNA, 25 bp, Homo sapien
aaaagatcaggggataatccatcca

SEQ ID NO: 3312522 - DNA, 25 bp, Homo sapien
caggggataatccatccattaagaa

SEQ ID NO: 3312523 - DNA, 25 bp, Homo sapien
cagagtacacccatttattggaaaa

SEQ ID NO: 3312524 - DNA, 25 bp, Homo sapien
attggggcagagtacacccatttat

SEQ ID NO: 3312525 - DNA, 25 bp, Homo sapien
tacaggcacttctttgttgcaatga

SEQ ID NO: 3312526 - DNA, 25 bp, Homo sapien
gctgagcctgtatgtcagccaacaa

SEQ ID NO: 3312527 - DNA, 25 bp, Homo sapien
tgacaacagtgccagttaattagct

SEQ ID NO: 3312528 - DNA, 25 bp, Homo sapien
catcgaaggtttgactatgtcctcg

SEQ ID NO: 3312529 - DNA, 25 bp, Homo sapien
gattgatataaaatgccgtggacat

SEQ ID NO: 3312530 - DNA, 25 bp, Homo sapien
ttgagattgatataaaatgccgtgg

SEQ ID NO: 3312531 - DNA, 25 bp, Homo sapien
ctttgagattgatataaaatgccgt

SEQ ID NO: 3312532 - DNA, 25 bp, Homo sapien
gagattgatataaaatgccgtggac

SEQ ID NO: 3312533 - DNA, 25 bp, Homo sapien
gcgattcacgttcctcaggctccag

SEQ ID NO: 3312534 - DNA, 25 bp, Homo sapien
catgggctcaacagttctaaagtga

SEQ ID NO: 3312535 - DNA, 25 bp, Homo sapien
taatcatacgttacaaagctgccac

SEQ ID NO: 3312536 - DNA, 25 bp, Homo sapien
aaacatacatagtggagatccctgc

SEQ ID NO: 3312537 - DNA, 25 bp, Homo sapien
aaagtcatgcctatcagcgagccca

SEQ ID NO: 3312538 - DNA, 25 bp, Homo sapien
tcgggattgattctgcaggactttc

SEQ ID NO: 3312539 - DNA, 25 bp, Homo sapien
ggacatcactttactgggacagacg

SEQ ID NO: 3312540 - DNA, 25 bp, Homo sapien
tcaaattattgcatgtcagctggac

SEQ ID NO: 3312541 - DNA, 25 bp, Homo sapien
aagaaatttgccactaaacttcacg

SEQ ID NO: 3312542 - DNA, 25 bp, Homo sapien
tgacaagccctccttatatctggga

SEQ ID NO: 3312543 - DNA, 25 bp, Homo sapien
cctccatagatgagttttcaagtga

SEQ ID NO: 3312544 - DNA, 25 bp, Homo sapien
tcaagagtttgtagcatagttcaac

SEQ ID NO: 3312545 - DNA, 25 bp, Homo sapien
gcagaaggcaaggtttatagctcat

SEQ ID NO: 3312546 - DNA, 25 bp, Homo sapien
gtctgccctgccgaatcacattaaa

SEQ ID NO: 3312547 - DNA, 25 bp, Homo sapien
tatatgatttcatgctcccacgaag

SEQ ID NO: 3312548 - DNA, 25 bp, Homo sapien
tgtttcaaaattcctgtctgccctg

SEQ ID NO: 3312549 - DNA, 25 bp, Homo sapien
gctagggctggacaacgtctctcat

SEQ ID NO: 3312550 - DNA, 25 bp, Homo sapien
actagccactgggttgcaaagcaac

SEQ ID NO: 3312551 - DNA, 25 bp, Homo sapien
ggtttccatatatcagctagggctg

SEQ ID NO: 3312552 - DNA, 25 bp, Homo sapien
tacatgggcattgcacgtcataggg

SEQ ID NO: 3312553 - DNA, 25 bp, Homo sapien
agctaggagcctttgggaagagact

SEQ ID NO: 3312554 - DNA, 25 bp, Homo sapien
ggctatgactcccaataccatgtga

SEQ ID NO: 3312555 - DNA, 25 bp, Homo sapien
tcatgaagactgatgcacagaatgg

SEQ ID NO: 3312556 - DNA, 25 bp, Homo sapien
ccatgtgaatatgagtggtgagact

SEQ ID NO: 3312557 - DNA, 25 bp, Homo sapien
gagtggacttttctgtagatgcatg

SEQ ID NO: 3312558 - DNA, 25 bp, Homo sapien
tgtcaaatgtaggtcccagatgtct

SEQ ID NO: 3312559 - DNA, 25 bp, Homo sapien
catgcatggatgagaaggatttata

SEQ ID NO: 3312560 - DNA, 25 bp, Homo sapien
tccaggtgctgtagtattgggtgca

SEQ ID NO: 3312561 - DNA, 25 bp, Homo sapien
cattctgttgttacctggcgttacg

SEQ ID NO: 3312562 - DNA, 25 bp, Homo sapien
tgtttagcccactaccattcaaggt

SEQ ID NO: 3312563 - DNA, 25 bp, Homo sapien
tcatttccatattcagcactcccta

SEQ ID NO: 3312564 - DNA, 25 bp, Homo sapien
tactctgagcctataggtgtccttg

SEQ ID NO: 3312565 - DNA, 25 bp, Homo sapien
cctaggtgtggagagaattcctcaa

SEQ ID NO: 3312566 - DNA, 25 bp, Homo sapien
tgcctaggtgtggagagaattcctc

SEQ ID NO: 3312567 - DNA, 25 bp, Homo sapien
attattgcctaggtgtggagagaat

SEQ ID NO: 3312568 - DNA, 25 bp, Homo sapien
ggtgtggagagaattcctcaagctg

SEQ ID NO: 3312569 - DNA, 25 bp, Homo sapien
tcttggtttttccttgtgcagagtg

SEQ ID NO: 3312570 - DNA, 25 bp, Homo sapien
gtttttccttgtgcagagtgctcac

SEQ ID NO: 3312571 - DNA, 25 bp, Homo sapien
tggtttttccttgtgcagagtgctc

SEQ ID NO: 3312572 - DNA, 25 bp, Homo sapien
cttggtttttccttgtgcagagtgc

SEQ ID NO: 3312573 - DNA, 25 bp, Homo sapien
tgcttgcaagccacgggcagattct

SEQ ID NO: 3312574 - DNA, 25 bp, Homo sapien
ggatctctcatgtgcttactcagga

SEQ ID NO: 3312575 - DNA, 25 bp, Homo sapien
cacttggagagccaacatgactgca

SEQ ID NO: 3312576 - DNA, 25 bp, Homo sapien
gtgtagtcacacttaggatctctca

SEQ ID NO: 3312577 - DNA, 25 bp, Homo sapien
gaaaactgtgagtggcttctaacca

SEQ ID NO: 3312578 - DNA, 25 bp, Homo sapien
ctgacctggtaaaataggcctggct

SEQ ID NO: 3312579 - DNA, 25 bp, Homo sapien
tagtaaaggctggtgaatagccagg

SEQ ID NO: 3312580 - DNA, 25 bp, Homo sapien
taaccactctatgggtacactttgc

SEQ ID NO: 3312581 - DNA, 25 bp, Homo sapien
ggtaagaagcttcacgctctcttta

SEQ ID NO: 3312582 - DNA, 25 bp, Homo sapien
gaagcttcacgctctctttatcaga

SEQ ID NO: 3312583 - DNA, 25 bp, Homo sapien
tcttaacggtaagaagcttcacgct

SEQ ID NO: 3312584 - DNA, 25 bp, Homo sapien
attgtcttaacggtaagaagcttca

SEQ ID NO: 3312585 - DNA, 25 bp, Homo sapien
tgatcatttccattttctggtgtgc

SEQ ID NO: 3312586 - DNA, 25 bp, Homo sapien
caatcaaagcaataaccaccggcaa

SEQ ID NO: 3312587 - DNA, 25 bp, Homo sapien
gcacattcggtacaaacccaccaga

SEQ ID NO: 3312588 - DNA, 25 bp, Homo sapien
aatactgaaagtgttattacaatca

SEQ ID NO: 3312589 - DNA, 25 bp, Homo sapien
gccttccagcacattcggtacaaac

SEQ ID NO: 3312590 - DNA, 25 bp, Homo sapien
catctgtaggatggtttacacttcc

SEQ ID NO: 3312591 - DNA, 25 bp, Homo sapien
tgtaggatggtttacacttccattg

SEQ ID NO: 3312592 - DNA, 25 bp, Homo sapien
tctgtaggatggtttacacttccat

SEQ ID NO: 3312593 - DNA, 25 bp, Homo sapien
tcatctgtaggatggtttacacttc

SEQ ID NO: 3312594 - DNA, 25 bp, Homo sapien
caggcagcagttagatgggattgta

SEQ ID NO: 3312595 - DNA, 25 bp, Homo sapien
ttgtgggaaattttcagagcaggca

SEQ ID NO: 3312596 - DNA, 25 bp, Homo sapien
aaaaggctgcccataatctgattcc

SEQ ID NO: 3312597 - DNA, 25 bp, Homo sapien
cattctgcatatctactgccatgaa

SEQ ID NO: 3312598 - DNA, 25 bp, Homo sapien
tggaataagaccggctggttgctga

SEQ ID NO: 3312599 - DNA, 25 bp, Homo sapien
tctggaattgtaactggtattgagg

SEQ ID NO: 3312600 - DNA, 25 bp, Homo sapien
taactggtattgaggttaatgtacc

SEQ ID NO: 3312601 - DNA, 25 bp, Homo sapien
ttaatgtaccagttttagaaggtga

SEQ ID NO: 3312602 - DNA, 25 bp, Homo sapien
tagaaggtgatgcatctggttgtag

SEQ ID NO: 3312603 - DNA, 25 bp, Homo sapien
ggagaacatgaggtctactctgggc

SEQ ID NO: 3312604 - DNA, 25 bp, Homo sapien
tacgtattttcacacacaatggtgc

SEQ ID NO: 3312605 - DNA, 25 bp, Homo sapien
ggatgatgcaaattaattcccgctc

SEQ ID NO: 3312606 - DNA, 25 bp, Homo sapien
tctgacctggttgcactcttatagc

SEQ ID NO: 3312607 - DNA, 25 bp, Homo sapien
agggaataaacagcccttcatcact

SEQ ID NO: 3312608 - DNA, 25 bp, Homo sapien
taatctcctcattaggtctgaactt

SEQ ID NO: 3312609 - DNA, 25 bp, Homo sapien
gaataaacagcccttcatcactttt

SEQ ID NO: 3312610 - DNA, 25 bp, Homo sapien
gtcttttaatctcctcattaggtct

SEQ ID NO: 3312611 - DNA, 25 bp, Homo sapien
gacatgatcctgtacctagaaaact

SEQ ID NO: 3312612 - DNA, 25 bp, Homo sapien
aagcctgggactggatggatttaca

SEQ ID NO: 3312613 - DNA, 25 bp, Homo sapien
caacagcatgcaagcatagagccaa

SEQ ID NO: 3312614 - DNA, 25 bp, Homo sapien
taatggctgcaccagtatgcgtttc

SEQ ID NO: 3312615 - DNA, 25 bp, Homo sapien
gaactgacaatttggctgcttccca

SEQ ID NO: 3312616 - DNA, 25 bp, Homo sapien
gatagtcaatctgtgaagcagaggg

SEQ ID NO: 3312617 - DNA, 25 bp, Homo sapien
agtccctccttaaagagaactgaca

SEQ ID NO: 3312618 - DNA, 25 bp, Homo sapien
tcctctagtgcctgccaatttttag

SEQ ID NO: 3312619 - DNA, 25 bp, Homo sapien
tcttgagattttacccatgaaaata

SEQ ID NO: 3312620 - DNA, 25 bp, Homo sapien
ttattcttgagattttacccatgaa

SEQ ID NO: 3312621 - DNA, 25 bp, Homo sapien
attcttgagattttacccatgaaaa

SEQ ID NO: 3312622 - DNA, 25 bp, Homo sapien
tattcttgagattttacccatgaaa

SEQ ID NO: 3312623 - DNA, 25 bp, Homo sapien
gttttaattgaactctgagtttcag

SEQ ID NO: 3312624 - DNA, 25 bp, Homo sapien
tgttgttttaattgaactctgagtt

SEQ ID NO: 3312625 - DNA, 25 bp, Homo sapien
tttctgttgttttaattgaactctg

SEQ ID NO: 3312626 - DNA, 25 bp, Homo sapien
tctgttgttttaattgaactctgag

SEQ ID NO: 3312627 - DNA, 25 bp, Homo sapien
tcattgttttctggcatgcattgtt

SEQ ID NO: 3312628 - DNA, 25 bp, Homo sapien
gttttctggcatgcattgttcctga

SEQ ID NO: 3312629 - DNA, 25 bp, Homo sapien
ttctctttatctccggttttccatg

SEQ ID NO: 3312630 - DNA, 25 bp, Homo sapien
gcatgcattgttcctgatgagtctc

SEQ ID NO: 3312631 - DNA, 25 bp, Homo sapien
cactgttgagttagagaagcaggca

SEQ ID NO: 3312632 - DNA, 25 bp, Homo sapien
tagctggagccattgccctcagatg

SEQ ID NO: 3312633 - DNA, 25 bp, Homo sapien
caagggcctagtgaaatctttgaga

SEQ ID NO: 3312634 - DNA, 25 bp, Homo sapien
taagttggacaactcctcctagctg

SEQ ID NO: 3312635 - DNA, 25 bp, Homo sapien
ctctctcatctctagagagagagac

SEQ ID NO: 3312636 - DNA, 25 bp, Homo sapien
cagagaggttgttttcagtattttc

SEQ ID NO: 3312637 - DNA, 25 bp, Homo sapien
agagacagagaggttgttttcagta

SEQ ID NO: 3312638 - DNA, 25 bp, Homo sapien
tctctcatctctagagagagagaca

SEQ ID NO: 3312639 - DNA, 25 bp, Homo sapien
tggaagtgtaacacttgttactgtt

SEQ ID NO: 3312640 - DNA, 25 bp, Homo sapien
gagtcattcttcctgacatcagtgg

SEQ ID NO: 3312641 - DNA, 25 bp, Homo sapien
gttactgttacgtttgaaatgatgg

SEQ ID NO: 3312642 - DNA, 25 bp, Homo sapien
tttgtaatgttgaaacagcatttgg

SEQ ID NO: 3312643 - DNA, 25 bp, Homo sapien
ggaaaatctcgctaagtgggtgcct

SEQ ID NO: 3312644 - DNA, 25 bp, Homo sapien
gtcgtaaaagaagcgcagacaactc

SEQ ID NO: 3312645 - DNA, 25 bp, Homo sapien
tcaggaattgctaacgaacatacag

SEQ ID NO: 3312646 - DNA, 25 bp, Homo sapien
catagtggccagacatcggaagtcc

SEQ ID NO: 3312647 - DNA, 25 bp, Homo sapien
aaaagtagctgttgacatcagagac

SEQ ID NO: 3312648 - DNA, 25 bp, Homo sapien
tacttgttaaaaaagtagctgttga

SEQ ID NO: 3312649 - DNA, 25 bp, Homo sapien
aaaaaagtagctgttgacatcagag

SEQ ID NO: 3312650 - DNA, 25 bp, Homo sapien
cttgttaaaaaagtagctgttgaca

SEQ ID NO: 3312651 - DNA, 25 bp, Homo sapien
agtaacaacaagtgaattattagct

SEQ ID NO: 3312652 - DNA, 25 bp, Homo sapien
ttgttccagttgttggtgtgacaac

SEQ ID NO: 3312653 - DNA, 25 bp, Homo sapien
ccagttgttggtgtgacaacatttt

SEQ ID NO: 3312654 - DNA, 25 bp, Homo sapien
gttccagttgttggtgtgacaacat

SEQ ID NO: 3312655 - DNA, 25 bp, Homo sapien
aagaattatttcctctaactaccat

SEQ ID NO: 3312656 - DNA, 25 bp, Homo sapien
tggtggaaaagaattatttcctcta

SEQ ID NO: 3312657 - DNA, 25 bp, Homo sapien
tgtggtggaaaagaattatttcctc

SEQ ID NO: 3312658 - DNA, 25 bp, Homo sapien
catgtggtggaaaagaattatttcc

SEQ ID NO: 3312659 - DNA, 25 bp, Homo sapien
gagattggacaggtgtctcagccac

SEQ ID NO: 3312660 - DNA, 25 bp, Homo sapien
caggctctgagattggacaggtgtc

SEQ ID NO: 3312661 - DNA, 25 bp, Homo sapien
gctctgagattggacaggtgtctca

SEQ ID NO: 3312662 - DNA, 25 bp, Homo sapien
ggcaggctctgagattggacaggtg

SEQ ID NO: 3312663 - DNA, 25 bp, Homo sapien
aagacagcattccagtggtgagttt

SEQ ID NO: 3312664 - DNA, 25 bp, Homo sapien
cagtggtgagtttgttaaacagaaa

SEQ ID NO: 3312665 - DNA, 25 bp, Homo sapien
tccagtggtgagtttgttaaacaga

SEQ ID NO: 3312666 - DNA, 25 bp, Homo sapien
cagcattccagtggtgagtttgtta

SEQ ID NO: 3312667 - DNA, 25 bp, Homo sapien
gatggaggtgtacaaggtaaattgc

SEQ ID NO: 3312668 - DNA, 25 bp, Homo sapien
aatggacccaagaacctgagatgtc

SEQ ID NO: 3312669 - DNA, 25 bp, Homo sapien
tacaaggtaaattgcctacactcac

SEQ ID NO: 3312670 - DNA, 25 bp, Homo sapien
agatgtcctggctgacaaatggatg

SEQ ID NO: 3312671 - DNA, 25 bp, Homo sapien
aagtacggggccatgcagttatttt

SEQ ID NO: 3312672 - DNA, 25 bp, Homo sapien
tgttcaaaagtacggggccatgcag

SEQ ID NO: 3312673 - DNA, 25 bp, Homo sapien
cggggccatgcagttatttttcctt

SEQ ID NO: 3312674 - DNA, 25 bp, Homo sapien
cttgttcaaaagtacggggccatgc

SEQ ID NO: 3312675 - DNA, 25 bp, Homo sapien
ccctctaccacatgggatttgcaga

SEQ ID NO: 3312676 - DNA, 25 bp, Homo sapien
tgagcgtgagaacttaatcctccct

SEQ ID NO: 3312677 - DNA, 25 bp, Homo sapien
gcattactgtgatataaacctccca

SEQ ID NO: 3312678 - DNA, 25 bp, Homo sapien
taaagggtggcaatacctagatgat

SEQ ID NO: 3312679 - DNA, 25 bp, Homo sapien
agaaaaagaatggtcacttgaagca

SEQ ID NO: 3312680 - DNA, 25 bp, Homo sapien
aaaagaatggtcacttgaagcagtt

SEQ ID NO: 3312681 - DNA, 25 bp, Homo sapien
gaaaaagaatggtcacttgaagcag

SEQ ID NO: 3312682 - DNA, 25 bp, Homo sapien
aaaaagaatggtcacttgaagcagt

SEQ ID NO: 3312683 - DNA, 25 bp, Homo sapien
ggaaaaggtgtagtgaatgtgaata

SEQ ID NO: 3312684 - DNA, 25 bp, Homo sapien
cagggacaattccctcccagcctgg

SEQ ID NO: 3312685 - DNA, 25 bp, Homo sapien
ggtgtagtgaatgtgaatagccact

SEQ ID NO: 3312686 - DNA, 25 bp, Homo sapien
tgcccgtagatggtgtcaatatctt

SEQ ID NO: 3312687 - DNA, 25 bp, Homo sapien
tcatgtccaagagttctgctcgatg

SEQ ID NO: 3312688 - DNA, 25 bp, Homo sapien
tgtccaagagttctgctcgatgtcc

SEQ ID NO: 3312689 - DNA, 25 bp, Homo sapien
ccaagagttctgctcgatgtcccat

SEQ ID NO: 3312690 - DNA, 25 bp, Homo sapien
cttcatgtccaagagttctgctcga

SEQ ID NO: 3312691 - DNA, 25 bp, Homo sapien
ttttgtggtgctctctctatttcct

SEQ ID NO: 3312692 - DNA, 25 bp, Homo sapien
tttttgtggtgctctctctatttcc

SEQ ID NO: 3312693 - DNA, 25 bp, Homo sapien
gatcccaatggactttgacaatgca

SEQ ID NO: 3312694 - DNA, 25 bp, Homo sapien
gaatgcgtagtgcactgaagacctt

SEQ ID NO: 3312695 - DNA, 25 bp, Homo sapien
gacacgtctctatcctcaggcttgc

SEQ ID NO: 3312696 - DNA, 25 bp, Homo sapien
tgtgttatctgaaagctgatcccaa

SEQ ID NO: 3312697 - DNA, 25 bp, Homo sapien
agcactttgcatagctggcagccct

SEQ ID NO: 3312698 - DNA, 25 bp, Homo sapien
ctgaaagagttaagagctcctgaac

SEQ ID NO: 3312699 - DNA, 25 bp, Homo sapien
gaaagagttaagagctcctgaacag

SEQ ID NO: 3312700 - DNA, 25 bp, Homo sapien
ttgctttcatccgtttccagcactt

SEQ ID NO: 3312701 - DNA, 25 bp, Homo sapien
gaaagtgtcgtagcaccagcacaaa

SEQ ID NO: 3312702 - DNA, 25 bp, Homo sapien
aaagtgtcgtagcaccagcacaaac

SEQ ID NO: 3312703 - DNA, 25 bp, Homo sapien
ttgttctgcatgtaggccagaaagt

SEQ ID NO: 3312704 - DNA, 25 bp, Homo sapien
gtgtcgtagcaccagcacaaactgt

SEQ ID NO: 3312705 - DNA, 25 bp, Homo sapien
gtagctgccactatgaaagtcctga

SEQ ID NO: 3312706 - DNA, 25 bp, Homo sapien
tgccactatgaaagtcctgagcatt

SEQ ID NO: 3312707 - DNA, 25 bp, Homo sapien
tgaaaggacatcatgggtagctgcc

SEQ ID NO: 3312708 - DNA, 25 bp, Homo sapien
ctgtgaaaggacatcatgggtagct

SEQ ID NO: 3312709 - DNA, 25 bp, Homo sapien
catgatattgtgagcattgcatcca

SEQ ID NO: 3312710 - DNA, 25 bp, Homo sapien
caaacgccaggacaaattcaaagga

SEQ ID NO: 3312711 - DNA, 25 bp, Homo sapien
taaacttgtatcgacttagtgctgg

SEQ ID NO: 3312712 - DNA, 25 bp, Homo sapien
cactgattagcgcttgacccttgca

SEQ ID NO: 3312713 - DNA, 25 bp, Homo sapien
taagagtttatatgacataacgtcc

SEQ ID NO: 3312714 - DNA, 25 bp, Homo sapien
gaaattgacgcacaactgaaaaaga

SEQ ID NO: 3312715 - DNA, 25 bp, Homo sapien
taacgtccatttagttcatcaatta

SEQ ID NO: 3312716 - DNA, 25 bp, Homo sapien
caacatactgaaattgacgcacaac

SEQ ID NO: 3312717 - DNA, 25 bp, Homo sapien
tcacagctctcgagaccgaaaagca

SEQ ID NO: 3312718 - DNA, 25 bp, Homo sapien
ccgaaaagcacaagatcaaggtacc

SEQ ID NO: 3312719 - DNA, 25 bp, Homo sapien
tcttggtcagctcagactgccgtaa

SEQ ID NO: 3312720 - DNA, 25 bp, Homo sapien
taccataggctggacaatttgaaca

SEQ ID NO: 3312721 - DNA, 25 bp, Homo sapien
agcagattttaaggaagccatattt

SEQ ID NO: 3312722 - DNA, 25 bp, Homo sapien
tttctcacagagtgtctgaaagaca

SEQ ID NO: 3312723 - DNA, 25 bp, Homo sapien
gactcctgggctgcaactccacgat

SEQ ID NO: 3312724 - DNA, 25 bp, Homo sapien
ggctgcaactccacgattcggagtc

SEQ ID NO: 3312725 - DNA, 25 bp, Homo sapien
gttgcctagtttctcacagagtgtc

SEQ ID NO: 3312726 - DNA, 25 bp, Homo sapien
tagagaagcgggtcctaggatttgc

SEQ ID NO: 3312727 - DNA, 25 bp, Homo sapien
gattcttgagagctattacttcctg

SEQ ID NO: 3312728 - DNA, 25 bp, Homo sapien
tagaaagtgctcttaatggtgtctg

SEQ ID NO: 3312729 - DNA, 25 bp, Homo sapien
taatggtgtctgtcccattccttca

SEQ ID NO: 3312730 - DNA, 25 bp, Homo sapien
ctggtgattcttgagagctattact

SEQ ID NO: 3312731 - DNA, 25 bp, Homo sapien
cttctctgatagatcaagggcagaa

SEQ ID NO: 3312732 - DNA, 25 bp, Homo sapien
tctgatagatcaagggcagaatgtc

SEQ ID NO: 3312733 - DNA, 25 bp, Homo sapien
atagatcaagggcagaatgtcggta

SEQ ID NO: 3312734 - DNA, 25 bp, Homo sapien
gatcaagggcagaatgtcggtagtc

SEQ ID NO: 3312735 - DNA, 25 bp, Homo sapien
ttggatcctcttggtgtaagaaagc

SEQ ID NO: 3312736 - DNA, 25 bp, Homo sapien
cataagatactgaaagccctcttgg

SEQ ID NO: 3312737 - DNA, 25 bp, Homo sapien
gactaaaggataccttggaagcaag

SEQ ID NO: 3312738 - DNA, 25 bp, Homo sapien
tagcagtgtttagtgaaggcctcaa

SEQ ID NO: 3312739 - DNA, 25 bp, Homo sapien
ctttccaggtcttttgaacacatcc

SEQ ID NO: 3312740 - DNA, 25 bp, Homo sapien
gcaaccctccaagaatttctttcca

SEQ ID NO: 3312741 - DNA, 25 bp, Homo sapien
tcttcaaattgctgaatctcttgac

SEQ ID NO: 3312742 - DNA, 25 bp, Homo sapien
ttgtgatgtgtcataggaagaaagg

SEQ ID NO: 3312743 - DNA, 25 bp, Homo sapien
ggctttggttccttataagtccata

SEQ ID NO: 3312744 - DNA, 25 bp, Homo sapien
tgtgtgcttgctacgagttctctcc

SEQ ID NO: 3312745 - DNA, 25 bp, Homo sapien
ggcagcctggctgaatttatgattc

SEQ ID NO: 3312746 - DNA, 25 bp, Homo sapien
taacctttagtccatctcctgcctg

SEQ ID NO: 3312747 - DNA, 25 bp, Homo sapien
ctgagccaaatgcagtgcttctgtg

SEQ ID NO: 3312748 - DNA, 25 bp, Homo sapien
ccaaatgcagtgcttctgtgagaag

SEQ ID NO: 3312749 - DNA, 25 bp, Homo sapien
gaaggctgagcacaccggtgacatc

SEQ ID NO: 3312750 - DNA, 25 bp, Homo sapien
aggctgagcacaccggtgacatcca

SEQ ID NO: 3312751 - DNA, 25 bp, Homo sapien
ccaaccttcaggacatagcccatct

SEQ ID NO: 3312752 - DNA, 25 bp, Homo sapien
tccaaccttcaggacatagcccatc

SEQ ID NO: 3312753 - DNA, 25 bp, Homo sapien
ctccaaccttcaggacatagcccat

SEQ ID NO: 3312754 - DNA, 25 bp, Homo sapien
caaccttcaggacatagcccatctg

SEQ ID NO: 3312755 - DNA, 25 bp, Homo sapien
ccacagcaagatccattaggtttac

SEQ ID NO: 3312756 - DNA, 25 bp, Homo sapien
cctctcacactgtcattgatgtttc

SEQ ID NO: 3312757 - DNA, 25 bp, Homo sapien
ttttctctccttgatgcattctctt

SEQ ID NO: 3312758 - DNA, 25 bp, Homo sapien
tctctccttgatgcattctcttctc

SEQ ID NO: 3312759 - DNA, 25 bp, Homo sapien
ttttcatgccctctcacactgtcat

SEQ ID NO: 3312760 - DNA, 25 bp, Homo sapien
tgtttatttctatgccatagttgcc

SEQ ID NO: 3312761 - DNA, 25 bp, Homo sapien
gtttatttctatgccatagttgcct

SEQ ID NO: 3312762 - DNA, 25 bp, Homo sapien
aatgtcaaatgtttatttctatgcc

SEQ ID NO: 3312763 - DNA, 25 bp, Homo sapien
aaatgtttatttctatgccatagtt

SEQ ID NO: 3312764 - DNA, 25 bp, Homo sapien
taaatcccttcagcggactcagtgg

SEQ ID NO: 3312765 - DNA, 25 bp, Homo sapien
catggtggttgtgcacataaatccc

SEQ ID NO: 3312766 - DNA, 25 bp, Homo sapien
tgggccagcacctagaagacacatg

SEQ ID NO: 3312767 - DNA, 25 bp, Homo sapien
gctttagcagatagatagggcatcc

SEQ ID NO: 3312768 - DNA, 25 bp, Homo sapien
caagtgcatgctttgattgccaaca

SEQ ID NO: 3312769 - DNA, 25 bp, Homo sapien
tgtcagaagtcaaattacaaaggca

SEQ ID NO: 3312770 - DNA, 25 bp, Homo sapien
taggctgtagtgaattacttgggca

SEQ ID NO: 3312771 - DNA, 25 bp, Homo sapien
tcagaatgaaccagttgtaacccgt

SEQ ID NO: 3312772 - DNA, 25 bp, Homo sapien
gaggcaagaacatccaactgctgat

SEQ ID NO: 3312773 - DNA, 25 bp, Homo sapien
tctagaagtccccaatgcagtagga

SEQ ID NO: 3312774 - DNA, 25 bp, Homo sapien
tgtccagtaacagaataaaaggcct

SEQ ID NO: 3312775 - DNA, 25 bp, Homo sapien
tagtgctgcgactgtaaacgtacaa

SEQ ID NO: 3312776 - DNA, 25 bp, Homo sapien
tccgtgccgttagtctctgaggtga

SEQ ID NO: 3312777 - DNA, 25 bp, Homo sapien
gcatggcatctctgcgaggcggcat

SEQ ID NO: 3312778 - DNA, 25 bp, Homo sapien
gctattactgccattgctgtccgtg

SEQ ID NO: 3312779 - DNA, 25 bp, Homo sapien
cattaattcggtctaagcccttggc

SEQ ID NO: 3312780 - DNA, 25 bp, Homo sapien
ttgaaaacagccaatgtctcttgcc

SEQ ID NO: 3312781 - DNA, 25 bp, Homo sapien
tcttgccaaccaaaatgtcctcttg

SEQ ID NO: 3312782 - DNA, 25 bp, Homo sapien
aaagtggacacataaagaggaaagc

SEQ ID NO: 3312783 - DNA, 25 bp, Homo sapien
cctgtcttcatgaaagtttagctca

SEQ ID NO: 3312784 - DNA, 25 bp, Homo sapien
cagtgaacaggtcaaactgatgttc

SEQ ID NO: 3312785 - DNA, 25 bp, Homo sapien
gaaatgtatcgtctgcccttcagca

SEQ ID NO: 3312786 - DNA, 25 bp, Homo sapien
ggtagaaatgtatcgtctgcccttc

SEQ ID NO: 3312787 - DNA, 25 bp, Homo sapien
tagaaatgtatcgtctgcccttcag

SEQ ID NO: 3312788 - DNA, 25 bp, Homo sapien
cactctgtacaagctacagcaaaaa

SEQ ID NO: 3312789 - DNA, 25 bp, Homo sapien
cagcagagcccttatctgttgcagg

SEQ ID NO: 3312790 - DNA, 25 bp, Homo sapien
aaaaaatgaatacacccagcagagc

SEQ ID NO: 3312791 - DNA, 25 bp, Homo sapien
gagcccttatctgttgcaggtacaa

SEQ ID NO: 3312792 - DNA, 25 bp, Homo sapien
tcatcagcctcaatagcctcaacag

SEQ ID NO: 3312793 - DNA, 25 bp, Homo sapien
cttcatcagcctcaatagcctcaac

SEQ ID NO: 3312794 - DNA, 25 bp, Homo sapien
tcagcctcaatagcctcaacagtag

SEQ ID NO: 3312795 - DNA, 25 bp, Homo sapien
catcagcctcaatagcctcaacagt

SEQ ID NO: 3312796 - DNA, 25 bp, Homo sapien
aaaatgagcagaggattttttaact

SEQ ID NO: 3312797 - DNA, 25 bp, Homo sapien
ggacttcgttttccagcaagcccaa

SEQ ID NO: 3312798 - DNA, 25 bp, Homo sapien
ggcagaatttgaagcagtgccacaa

SEQ ID NO: 3312799 - DNA, 25 bp, Homo sapien
caaatcaagtggtaacgtgccagta

SEQ ID NO: 3312800 - DNA, 25 bp, Homo sapien
taaaagtcagggtgtctaaggagat

SEQ ID NO: 3312801 - DNA, 25 bp, Homo sapien
gacactgattcggaatatattcatc

SEQ ID NO: 3312802 - DNA, 25 bp, Homo sapien
ggaaaataagcaagaggccgagaat

SEQ ID NO: 3312803 - DNA, 25 bp, Homo sapien
aatactatgtatcttcctaccttca

SEQ ID NO: 3312804 - DNA, 25 bp, Homo sapien
gcagccatgatgtgatcattcagca

SEQ ID NO: 3312805 - DNA, 25 bp, Homo sapien
aaatgtggttctattcagtctcttg

SEQ ID NO: 3312806 - DNA, 25 bp, Homo sapien
tctgctggacggcacaggtctaagg

SEQ ID NO: 3312807 - DNA, 25 bp, Homo sapien
ccaatttccattcaagaggataatg

SEQ ID NO: 3312808 - DNA, 25 bp, Homo sapien
ctgtattataaaggaaatgttactc

SEQ ID NO: 3312809 - DNA, 25 bp, Homo sapien
taatgacacagctgactgcgatgcc

SEQ ID NO: 3312810 - DNA, 25 bp, Homo sapien
gaagaagaaccgaagaccaagacag

SEQ ID NO: 3312811 - DNA, 25 bp, Homo sapien
gagtggctcaaagtagtcaaaccta

SEQ ID NO: 3312812 - DNA, 25 bp, Homo sapien
ttgtttttgacaacggagtggctca

SEQ ID NO: 3312813 - DNA, 25 bp, Homo sapien
tactccgctggggagcatgccagtt

SEQ ID NO: 3312814 - DNA, 25 bp, Homo sapien
gagcatgccagttggggtcaagcct

SEQ ID NO: 3312815 - DNA, 25 bp, Homo sapien
tcaagcctttcagcgtcagcacact

SEQ ID NO: 3312816 - DNA, 25 bp, Homo sapien
tccagaaagtactccgctggggagc

SEQ ID NO: 3312817 - DNA, 25 bp, Homo sapien
cgtgctttctaatatgtaggcccca

SEQ ID NO: 3312818 - DNA, 25 bp, Homo sapien
catgactagtcgaattaagatgtgc

SEQ ID NO: 3312819 - DNA, 25 bp, Homo sapien
gctatcctttagcaagaccatcagc

SEQ ID NO: 3312820 - DNA, 25 bp, Homo sapien
gacatcttttcagttcctaggctga

SEQ ID NO: 3312821 - DNA, 25 bp, Homo sapien
aatggcatagactggaacccctgta

SEQ ID NO: 3312822 - DNA, 25 bp, Homo sapien
taagtgcctctacataaatgctctg

SEQ ID NO: 3312823 - DNA, 25 bp, Homo sapien
tagacaatggcatcctatcaatggc

SEQ ID NO: 3312824 - DNA, 25 bp, Homo sapien
cagtgcatcctactcttcccgataa

SEQ ID NO: 3312825 - DNA, 25 bp, Homo sapien
gaactgggcttcgatgctctgtagc

SEQ ID NO: 3312826 - DNA, 25 bp, Homo sapien
tattagagagctcacagatccagag

SEQ ID NO: 3312827 - DNA, 25 bp, Homo sapien
ggtgggctccatgaaaggcttgcca

SEQ ID NO: 3312828 - DNA, 25 bp, Homo sapien
ctgatgttcacagccaatgccagag

SEQ ID NO: 3312829 - DNA, 25 bp, Homo sapien
tctggttcccttataaggttgcaca

SEQ ID NO: 3312830 - DNA, 25 bp, Homo sapien
aaacatgggttagagcatgcctcta

SEQ ID NO: 3312831 - DNA, 25 bp, Homo sapien
tgggcaagtatacctgacaaatttg

SEQ ID NO: 3312832 - DNA, 25 bp, Homo sapien
tatccatacgtcaccttgctagcca

SEQ ID NO: 3312833 - DNA, 25 bp, Homo sapien
gcctaattcagtgcatggtatacag

SEQ ID NO: 3312834 - DNA, 25 bp, Homo sapien
gatctctctatattctgcatatgtg

SEQ ID NO: 3312835 - DNA, 25 bp, Homo sapien
tatcacgggatagtcatggaaattc

SEQ ID NO: 3312836 - DNA, 25 bp, Homo sapien
tgggttcaaatagtccatttatcac

SEQ ID NO: 3312837 - DNA, 25 bp, Homo sapien
cctcattcaataacggaagggagca

SEQ ID NO: 3312838 - DNA, 25 bp, Homo sapien
tattttccgcttgaacatggctggt

SEQ ID NO: 3312839 - DNA, 25 bp, Homo sapien
gctggtcgtgaatgtgctggctacc

SEQ ID NO: 3312840 - DNA, 25 bp, Homo sapien
gagccagtgtcgatactctatgaga

SEQ ID NO: 3312841 - DNA, 25 bp, Homo sapien
aaaaacagagtacgaatgcacccac

SEQ ID NO: 3312842 - DNA, 25 bp, Homo sapien
aagtatttattaggtgacacataat

SEQ ID NO: 3312843 - DNA, 25 bp, Homo sapien
aacaaaaacagagtacgaatgcacc

SEQ ID NO: 3312844 - DNA, 25 bp, Homo sapien
tatttattaggtgacacataataca

SEQ ID NO: 3312845 - DNA, 25 bp, Homo sapien
ccttatcacctctttccgggctgca

SEQ ID NO: 3312846 - DNA, 25 bp, Homo sapien
tctggccattttgcctattgctcgg

SEQ ID NO: 3312847 - DNA, 25 bp, Homo sapien
gaacactctggccattttgcctatt

SEQ ID NO: 3312848 - DNA, 25 bp, Homo sapien
ttgcctattgctcggatcttgttcc

SEQ ID NO: 3312849 - DNA, 25 bp, Homo sapien
caaacagagttcagtggtcagtaat

SEQ ID NO: 3312850 - DNA, 25 bp, Homo sapien
tgtgatttttgagaggtccccatag

SEQ ID NO: 3312851 - DNA, 25 bp, Homo sapien
atttaagcttttggccaccaatact

SEQ ID NO: 3312852 - DNA, 25 bp, Homo sapien
aagaaaaactttcgagatatccaga

SEQ ID NO: 3312853 - DNA, 25 bp, Homo sapien
tctcataggtgcatgggtgttcccc

SEQ ID NO: 3312854 - DNA, 25 bp, Homo sapien
tctttgcctgggtgggtaatctttc

SEQ ID NO: 3312855 - DNA, 25 bp, Homo sapien
taacacaaacccatctcataggtgc

SEQ ID NO: 3312856 - DNA, 25 bp, Homo sapien
tcagaggtgatgctaacacaaaccc

SEQ ID NO: 3312857 - DNA, 25 bp, Homo sapien
tgaagagagattcttaccacctggg

SEQ ID NO: 3312858 - DNA, 25 bp, Homo sapien
gaaaaaggcatttgcaccacagata

SEQ ID NO: 3312859 - DNA, 25 bp, Homo sapien
taccactgtggagctactactgtga

SEQ ID NO: 3312860 - DNA, 25 bp, Homo sapien
taagtgactgttgcaacgccacagg

SEQ ID NO: 3312861 - DNA, 25 bp, Homo sapien
taaggagacttcctagacactaagt

SEQ ID NO: 3312862 - DNA, 25 bp, Homo sapien
gaggtgatgggtcctaagtgttcaa

SEQ ID NO: 3312863 - DNA, 25 bp, Homo sapien
gacctgtgcctttctgttaaaatgg

SEQ ID NO: 3312864 - DNA, 25 bp, Homo sapien
gactatgtctaaggagacctgtgcc

SEQ ID NO: 3312865 - DNA, 25 bp, Homo sapien
tagcacaaaggctcaagcctcttac

SEQ ID NO: 3312866 - DNA, 25 bp, Homo sapien
ttagcacaaaggctcaagcctctta

SEQ ID NO: 3312867 - DNA, 25 bp, Homo sapien
ttctgaccctagttcatcatctgag

SEQ ID NO: 3312868 - DNA, 25 bp, Homo sapien
cttctgaccctagttcatcatctga

SEQ ID NO: 3312869 - DNA, 25 bp, Homo sapien
tctgaccctagttcatcatctgagc

SEQ ID NO: 3312870 - DNA, 25 bp, Homo sapien
aatccgtgtatcactgttaggcctc

SEQ ID NO: 3312871 - DNA, 25 bp, Homo sapien
tatgagaagatacatgagaatcaat

SEQ ID NO: 3312872 - DNA, 25 bp, Homo sapien
tctcatggaaagtatgagaagatac

SEQ ID NO: 3312873 - DNA, 25 bp, Homo sapien
catgagaatcaatccgtgtatcact

SEQ ID NO: 3312874 - DNA, 25 bp, Homo sapien
aagccagtatggatgaggagaacag

SEQ ID NO: 3312875 - DNA, 25 bp, Homo sapien
cagtatggatgaggagaacagttga

SEQ ID NO: 3312876 - DNA, 25 bp, Homo sapien
ttgttctcatacttcaatactgcag

SEQ ID NO: 3312877 - DNA, 25 bp, Homo sapien
gaattgcctgatattcataacattg

SEQ ID NO: 3312878 - DNA, 25 bp, Homo sapien
ggtccttctctcgtgcaagattgag

SEQ ID NO: 3312879 - DNA, 25 bp, Homo sapien
tccttctctcgtgcaagattgagaa

SEQ ID NO: 3312880 - DNA, 25 bp, Homo sapien
gcaggtatctcagggtccttctctc

SEQ ID NO: 3312881 - DNA, 25 bp, Homo sapien
agggtccttctctcgtgcaagattg

SEQ ID NO: 3312882 - DNA, 25 bp, Homo sapien
acatgctgcctatataatatccaga

SEQ ID NO: 3312883 - DNA, 25 bp, Homo sapien
gtgatccatttctcttaatctcaga

SEQ ID NO: 3312884 - DNA, 25 bp, Homo sapien
cagaaagccacactcggacatgctg

SEQ ID NO: 3312885 - DNA, 25 bp, Homo sapien
cttcgtgatccatttctcttaatct

SEQ ID NO: 3312886 - DNA, 25 bp, Homo sapien
gagaagggaagcctgttgtttggct

SEQ ID NO: 3312887 - DNA, 25 bp, Homo sapien
agaagggaagcctgttgtttggctt

SEQ ID NO: 3312888 - DNA, 25 bp, Homo sapien
gtatagataacaagttattgtgctg

SEQ ID NO: 3312889 - DNA, 25 bp, Homo sapien
ggctcggagtatagataacaagtta

SEQ ID NO: 3312890 - DNA, 25 bp, Homo sapien
ctgcatcttgggcttcgtgggctcg

SEQ ID NO: 3312891 - DNA, 25 bp, Homo sapien
gcttcgtgggctcggagtatagata

SEQ ID NO: 3312892 - DNA, 25 bp, Homo sapien
gaagaccctgcctgattgttcaact

SEQ ID NO: 3312893 - DNA, 25 bp, Homo sapien
cctgccaatacacaaggaggaagcc

SEQ ID NO: 3312894 - DNA, 25 bp, Homo sapien
tcttccagatccagtaatagggaag

SEQ ID NO: 3312895 - DNA, 25 bp, Homo sapien
tatgctcaattgctgaagtagcttc

SEQ ID NO: 3312896 - DNA, 25 bp, Homo sapien
gcttgcttgtgcccatctagatcca

SEQ ID NO: 3312897 - DNA, 25 bp, Homo sapien
tggtaattgccactaaggttctcta

SEQ ID NO: 3312898 - DNA, 25 bp, Homo sapien
tccactttataaaccataatcccag

SEQ ID NO: 3312899 - DNA, 25 bp, Homo sapien
taattgccactaaggttctctacca

SEQ ID NO: 3312900 - DNA, 25 bp, Homo sapien
caggtggttctttgaatcggtctaa

SEQ ID NO: 3312901 - DNA, 25 bp, Homo sapien
gggtctgaccacaggatatcacaca

SEQ ID NO: 3312902 - DNA, 25 bp, Homo sapien
tatcacacataggtccatatgcagg

SEQ ID NO: 3312903 - DNA, 25 bp, Homo sapien
tagaagtatgaacaccccctgactg

SEQ ID NO: 3312904 - DNA, 25 bp, Homo sapien
acaggaactgttggttcatcagggc

SEQ ID NO: 3312905 - DNA, 25 bp, Homo sapien
ggcagtcaaaggcatccatacaggc

SEQ ID NO: 3312906 - DNA, 25 bp, Homo sapien
tggagacaaaccaccatgcacacac

SEQ ID NO: 3312907 - DNA, 25 bp, Homo sapien
catctaaagtgttaatctctggaga

SEQ ID NO: 3312908 - DNA, 25 bp, Homo sapien
tctacattcatgatttccacgaagt

SEQ ID NO: 3312909 - DNA, 25 bp, Homo sapien
actctgttagatgtctacattcatg

SEQ ID NO: 3312910 - DNA, 25 bp, Homo sapien
gtgaaatactctgttagatgtctac

SEQ ID NO: 3312911 - DNA, 25 bp, Homo sapien
acattcatgatttccacgaagtaaa

SEQ ID NO: 3312912 - DNA, 25 bp, Homo sapien
gagatgaattgagatccttttgaag

SEQ ID NO: 3312913 - DNA, 25 bp, Homo sapien
ctaaagcagatgcagatgggaggct

SEQ ID NO: 3312914 - DNA, 25 bp, Homo sapien
ttggcaggagatcccccgacttcaa

SEQ ID NO: 3312915 - DNA, 25 bp, Homo sapien
gaagaggtagcgagtgttggcagga

SEQ ID NO: 3312916 - DNA, 25 bp, Homo sapien
tctgtcaacatagtcccctaagaag

SEQ ID NO: 3312917 - DNA, 25 bp, Homo sapien
caatactgaagtaccctctgtcaac

SEQ ID NO: 3312918 - DNA, 25 bp, Homo sapien
tctaggaccctgaaagatggactgt

SEQ ID NO: 3312919 - DNA, 25 bp, Homo sapien
ggtttcagattaactccctctagga

SEQ ID NO: 3312920 - DNA, 25 bp, Homo sapien
gagtgaccctggagaatcagctaat

SEQ ID NO: 3312921 - DNA, 25 bp, Homo sapien
gaactaagactacgatgccagactg

SEQ ID NO: 3312922 - DNA, 25 bp, Homo sapien
aatggctttggtgatactaccagtc

SEQ ID NO: 3312923 - DNA, 25 bp, Homo sapien
tgtggccatgagtaaactacacaaa

SEQ ID NO: 3312924 - DNA, 25 bp, Homo sapien
taaacatctgtaatcaatgtggcca

SEQ ID NO: 3312925 - DNA, 25 bp, Homo sapien
tagactaggtctcatactccacaat

SEQ ID NO: 3312926 - DNA, 25 bp, Homo sapien
tttccacagttgtcattaatatggt

SEQ ID NO: 3312927 - DNA, 25 bp, Homo sapien
tgtcattaatatggtattcacaaaa

SEQ ID NO: 3312928 - DNA, 25 bp, Homo sapien
gggatgatctaatcttcgttgattc

SEQ ID NO: 3312929 - DNA, 25 bp, Homo sapien
tcaaattcctgtaaggattagaaaa

SEQ ID NO: 3312930 - DNA, 25 bp, Homo sapien
agctactacatctctgatgtacata

SEQ ID NO: 3312931 - DNA, 25 bp, Homo sapien
cataagcccctgagtctttatggaa

SEQ ID NO: 3312932 - DNA, 25 bp, Homo sapien
catctctgatgtacatataggactt

SEQ ID NO: 3312933 - DNA, 25 bp, Homo sapien
tataggactttctgccatcataagc

SEQ ID NO: 3312934 - DNA, 25 bp, Homo sapien
tattgtatatttactatctaccagg

SEQ ID NO: 3312935 - DNA, 25 bp, Homo sapien
tatttactatctaccaggcactgtt

SEQ ID NO: 3312936 - DNA, 25 bp, Homo sapien
ttgacatacagtacagattgaatat

SEQ ID NO: 3312937 - DNA, 25 bp, Homo sapien
gacatacagtacagattgaatatcc

SEQ ID NO: 3312938 - DNA, 25 bp, Homo sapien
gacagggacccttacatgcatttag

SEQ ID NO: 3312939 - DNA, 25 bp, Homo sapien
gacaaaataggcaggaaataccacg

SEQ ID NO: 3312940 - DNA, 25 bp, Homo sapien
gaaactatgcctatggtcaagagct

SEQ ID NO: 3312941 - DNA, 25 bp, Homo sapien
cccagaaggcataaagagagacaca

SEQ ID NO: 3312942 - DNA, 25 bp, Homo sapien
agatcacaaatggaagcctggtggg

SEQ ID NO: 3312943 - DNA, 25 bp, Homo sapien
tgttttgcacgagaagctttcagaa

SEQ ID NO: 3312944 - DNA, 25 bp, Homo sapien
tctgtattccccacgggaagcagca

SEQ ID NO: 3312945 - DNA, 25 bp, Homo sapien
ccagaaacccgagaattcagagaga

SEQ ID NO: 3312946 - DNA, 25 bp, Homo sapien
ggttatgctctatggaatctgcgat

SEQ ID NO: 3312947 - DNA, 25 bp, Homo sapien
tagtctatccagtacaggaatccct

SEQ ID NO: 3312948 - DNA, 25 bp, Homo sapien
gattaaacaaaacggcagcagctgc

SEQ ID NO: 3312949 - DNA, 25 bp, Homo sapien
tctaccagagataaagggctgccaa

SEQ ID NO: 3312950 - DNA, 25 bp, Homo sapien
tgagacgctcacttttgcacaaggg

SEQ ID NO: 3312951 - DNA, 25 bp, Homo sapien
tcatgtttgcaagtggcccaccctg

SEQ ID NO: 3312952 - DNA, 25 bp, Homo sapien
gagtgtcaacttctcaggaggtcca

SEQ ID NO: 3312953 - DNA, 25 bp, Homo sapien
catgagagcagtgcaacgcaccgtt

SEQ ID NO: 3312954 - DNA, 25 bp, Homo sapien
ttgggtggttgtcagtagtttacat

SEQ ID NO: 3312955 - DNA, 25 bp, Homo sapien
tttgggtggttgtcagtagtttaca

SEQ ID NO: 3312956 - DNA, 25 bp, Homo sapien
catccgtttttaccttggtgtgtga

SEQ ID NO: 3312957 - DNA, 25 bp, Homo sapien
catgagcactaggaagcctatcgaa

SEQ ID NO: 3312958 - DNA, 25 bp, Homo sapien
gacttacatatagggtgagacaggc

SEQ ID NO: 3312959 - DNA, 25 bp, Homo sapien
gacaggctaaacagcacaattaggg

SEQ ID NO: 3312960 - DNA, 25 bp, Homo sapien
gaatttgccatgagaggcacacaaa

SEQ ID NO: 3312961 - DNA, 25 bp, Homo sapien
aagacacagagctaacaccacagga

SEQ ID NO: 3312962 - DNA, 25 bp, Homo sapien
cacagagctaacaccacaggatcaa

SEQ ID NO: 3312963 - DNA, 25 bp, Homo sapien
gacacagagctaacaccacaggatc

SEQ ID NO: 3312964 - DNA, 25 bp, Homo sapien
caaagacacagagctaacaccacag

SEQ ID NO: 3312965 - DNA, 25 bp, Homo sapien
tgggtctcaccccaggtactgtgat

SEQ ID NO: 3312966 - DNA, 25 bp, Homo sapien
cacagagggctggataagacacaga

SEQ ID NO: 3312967 - DNA, 25 bp, Homo sapien
gactcactggtaactaggacttttg

SEQ ID NO: 3312968 - DNA, 25 bp, Homo sapien
tgtgtatacaagtgggcaacctccc

SEQ ID NO: 3312969 - DNA, 25 bp, Homo sapien
taagatatccacacgaggttttcca

SEQ ID NO: 3312970 - DNA, 25 bp, Homo sapien
tcttttgctgtaagccggtgacttg

SEQ ID NO: 3312971 - DNA, 25 bp, Homo sapien
tttcctgtcgaagaattgatgcacc

SEQ ID NO: 3312972 - DNA, 25 bp, Homo sapien
cagtgactggcgcatcaatatccag

SEQ ID NO: 3312973 - DNA, 25 bp, Homo sapien
actcccccaaattccccaggctgca

SEQ ID NO: 3312974 - DNA, 25 bp, Homo sapien
agatgccgccagccagtgaaaagtt

SEQ ID NO: 3312975 - DNA, 25 bp, Homo sapien
tgatgccaaagactgaacacagaga

SEQ ID NO: 3312976 - DNA, 25 bp, Homo sapien
gagatgccgccagccagtgaaaagt

SEQ ID NO: 3312977 - DNA, 25 bp, Homo sapien
tcttcattcaactctatgggccaac

SEQ ID NO: 3312978 - DNA, 25 bp, Homo sapien
ttcattcaactctatgggccaacac

SEQ ID NO: 3312979 - DNA, 25 bp, Homo sapien
ttcttcattcaactctatgggccaa

SEQ ID NO: 3312980 - DNA, 25 bp, Homo sapien
cattcaactctatgggccaacacat

SEQ ID NO: 3312981 - DNA, 25 bp, Homo sapien
ctgcaattcctaatttttgggccaa

SEQ ID NO: 3312982 - DNA, 25 bp, Homo sapien
ttttcacagactttatatcattaat

SEQ ID NO: 3312983 - DNA, 25 bp, Homo sapien
tttcacagactttatatcattaatt

SEQ ID NO: 3312984 - DNA, 25 bp, Homo sapien
gcaattcctaatttttgggccaaca

SEQ ID NO: 3312985 - DNA, 25 bp, Homo sapien
tacataagaggagatggtatggtac

SEQ ID NO: 3312986 - DNA, 25 bp, Homo sapien
aagagaagtgacctaggctttcatt

SEQ ID NO: 3312987 - DNA, 25 bp, Homo sapien
gagatggtatggtacagtgaaaaga

SEQ ID NO: 3312988 - DNA, 25 bp, Homo sapien
gaaaagagaagtgacctaggctttc

SEQ ID NO: 3312989 - DNA, 25 bp, Homo sapien
aacatattgcccattctgaaccacg

SEQ ID NO: 3312990 - DNA, 25 bp, Homo sapien
tgaaccacgtataaaagcattaggc

SEQ ID NO: 3312991 - DNA, 25 bp, Homo sapien
catatacaccgtttgtgtgcacaca

SEQ ID NO: 3312992 - DNA, 25 bp, Homo sapien
acagttgactctccatatctctggg

SEQ ID NO: 3312993 - DNA, 25 bp, Homo sapien
tcctattaacccattgtcactcatt

SEQ ID NO: 3312994 - DNA, 25 bp, Homo sapien
tattaacccattgtcactcatttct

SEQ ID NO: 3312995 - DNA, 25 bp, Homo sapien
taacccattgtcactcatttctttc

SEQ ID NO: 3312996 - DNA, 25 bp, Homo sapien
aacccattgtcactcatttctttcc

SEQ ID NO: 3312997 - DNA, 25 bp, Homo sapien
cactgagtagaagagtatactccct

SEQ ID NO: 3312998 - DNA, 25 bp, Homo sapien
tgcctaacagagatgtggtaatgtc

SEQ ID NO: 3312999 - DNA, 25 bp, Homo sapien
tctgagccaattgacttaaccttga

SEQ ID NO: 3313000 - DNA, 25 bp, Homo sapien
cacacagtgtgtacctacgtatata

SEQ ID NO: 3313001 - DNA, 25 bp, Homo sapien
tcatttctatatttaccatgagcaa

SEQ ID NO: 3313002 - DNA, 25 bp, Homo sapien
atgtcccattatactattctgcatt

SEQ ID NO: 3313003 - DNA, 25 bp, Homo sapien
gcttattatgttttccctatacata

SEQ ID NO: 3313004 - DNA, 25 bp, Homo sapien
tatgtcccattatactattctgcat

SEQ ID NO: 3313005 - DNA, 25 bp, Homo sapien
ttaactgctcctaaatggtaacgga

SEQ ID NO: 3313006 - DNA, 25 bp, Homo sapien
taaacaatgtcccaagagagtaggt

SEQ ID NO: 3313007 - DNA, 25 bp, Homo sapien
gacaaaaattctagtctggccacta

SEQ ID NO: 3313008 - DNA, 25 bp, Homo sapien
cttcagagaaagtcagctacatcac

SEQ ID NO: 3313009 - DNA, 25 bp, Homo sapien
ctgtgtgaaaggtgtcaagcttacc

SEQ ID NO: 3313010 - DNA, 25 bp, Homo sapien
gatgaggtacctcttcattcatgaa

SEQ ID NO: 3313011 - DNA, 25 bp, Homo sapien
catgtagcatgctctataaagtgct

SEQ ID NO: 3313012 - DNA, 25 bp, Homo sapien
tgtttataggctgtgttaacctcac

SEQ ID NO: 3313013 - DNA, 25 bp, Homo sapien
ggagaaatggtaagcctggctcttc

SEQ ID NO: 3313014 - DNA, 25 bp, Homo sapien
aggtcttcctgctactaaagggagc

SEQ ID NO: 3313015 - DNA, 25 bp, Homo sapien
ctctcaagcttgacaatgaagtcca

SEQ ID NO: 3313016 - DNA, 25 bp, Homo sapien
tacctgaagagcttgagacttcctt

SEQ ID NO: 3313017 - DNA, 25 bp, Homo sapien
gtatcagtgatctcattgcaaagca

SEQ ID NO: 3313018 - DNA, 25 bp, Homo sapien
gaggtctggctaactaaatcatttg

SEQ ID NO: 3313019 - DNA, 25 bp, Homo sapien
taaaactgcatcaggtaggtaccat

SEQ ID NO: 3313020 - DNA, 25 bp, Homo sapien
gaaggcaacatatctagcactgagc

SEQ ID NO: 3313021 - DNA, 25 bp, Homo sapien
gaccaccttactcccatagttagtg

SEQ ID NO: 3313022 - DNA, 25 bp, Homo sapien
catggttaaccctgtggcccttgta

SEQ ID NO: 3313023 - DNA, 25 bp, Homo sapien
taagctttacacacatggttaaccc

SEQ ID NO: 3313024 - DNA, 25 bp, Homo sapien
aagtttgtattaagctttacacaca

SEQ ID NO: 3313025 - DNA, 25 bp, Homo sapien
gatcactcttctcactttaccaggt

SEQ ID NO: 3313026 - DNA, 25 bp, Homo sapien
gccgtgctgaccactagaagcatct

SEQ ID NO: 3313027 - DNA, 25 bp, Homo sapien
cacaaagaccagagtgccgtgctga

SEQ ID NO: 3313028 - DNA, 25 bp, Homo sapien
gaagcatctctccagactgacaggg

SEQ ID NO: 3313029 - DNA, 25 bp, Homo sapien
ggataactaaacatgaatcacttgg

SEQ ID NO: 3313030 - DNA, 25 bp, Homo sapien
tagtaaattgacctgaatcccaaag

SEQ ID NO: 3313031 - DNA, 25 bp, Homo sapien
tcacttggaaacatgaataaataca

SEQ ID NO: 3313032 - DNA, 25 bp, Homo sapien
gagaagataggcataaagaagacca

SEQ ID NO: 3313033 - DNA, 25 bp, Homo sapien
ttcatttatcatgtctaattgtacc

SEQ ID NO: 3313034 - DNA, 25 bp, Homo sapien
aaaattacagaagagcagatataaa

SEQ ID NO: 3313035 - DNA, 25 bp, Homo sapien
cagctgcccaaagtttataaactat

SEQ ID NO: 3313036 - DNA, 25 bp, Homo sapien
tataaactatttgttcagcccagga

SEQ ID NO: 3313037 - DNA, 25 bp, Homo sapien
tgactccaagcttctgcagtaatta

SEQ ID NO: 3313038 - DNA, 25 bp, Homo sapien
tgcagcctagaactcgagatcccaa

SEQ ID NO: 3313039 - DNA, 25 bp, Homo sapien
ccttaagaaacacggttgccagtat

SEQ ID NO: 3313040 - DNA, 25 bp, Homo sapien
tacacgaggcttatctgagaaaaac

SEQ ID NO: 3313041 - DNA, 25 bp, Homo sapien
gaagtagaactaagctccgtgaaca

SEQ ID NO: 3313042 - DNA, 25 bp, Homo sapien
tcaggaagtagaactaagctccgtg

SEQ ID NO: 3313043 - DNA, 25 bp, Homo sapien
agtagaactaagctccgtgaacaga

SEQ ID NO: 3313044 - DNA, 25 bp, Homo sapien
ggaagtagaactaagctccgtgaac

SEQ ID NO: 3313045 - DNA, 25 bp, Homo sapien
taggtcctgaattccactggcctgt

SEQ ID NO: 3313046 - DNA, 25 bp, Homo sapien
gataggtcctgaattccactggcct

SEQ ID NO: 3313047 - DNA, 25 bp, Homo sapien
aggtcctgaattccactggcctgtt

SEQ ID NO: 3313048 - DNA, 25 bp, Homo sapien
ctgataggtcctgaattccactggc

SEQ ID NO: 3313049 - DNA, 25 bp, Homo sapien
tcccaagatggtcaagcacgaccca

SEQ ID NO: 3313050 - DNA, 25 bp, Homo sapien
gatgttggctactcctatctcaggg

SEQ ID NO: 3313051 - DNA, 25 bp, Homo sapien
tgccagggaccgttttcgtgtaaga

SEQ ID NO: 3313052 - DNA, 25 bp, Homo sapien
gtgaatcaccacaaagccggtccag

SEQ ID NO: 3313053 - DNA, 25 bp, Homo sapien
caggacagggaataagacacgctca

SEQ ID NO: 3313054 - DNA, 25 bp, Homo sapien
cacgctcaggaactcttgattcttc

SEQ ID NO: 3313055 - DNA, 25 bp, Homo sapien
caatcacaggtaataatattatccc

SEQ ID NO: 3313056 - DNA, 25 bp, Homo sapien
ctgactgcctagtggccaggacagg

SEQ ID NO: 3313057 - DNA, 25 bp, Homo sapien
gcttgacggtggtatcaacttgtcc

SEQ ID NO: 3313058 - DNA, 25 bp, Homo sapien
ctccactaggcttgacggtggtatc

SEQ ID NO: 3313059 - DNA, 25 bp, Homo sapien
tataacacacatgggccagtccctc

SEQ ID NO: 3313060 - DNA, 25 bp, Homo sapien
caacttgtcctataacacacatggg

SEQ ID NO: 3313061 - DNA, 25 bp, Homo sapien
aagatgctcctgttccccacctgca

SEQ ID NO: 3313062 - DNA, 25 bp, Homo sapien
gtagaagatgctcctgttccccacc

SEQ ID NO: 3313063 - DNA, 25 bp, Homo sapien
agatgctcctgttccccacctgcat

SEQ ID NO: 3313064 - DNA, 25 bp, Homo sapien
agaagatgctcctgttccccacctg

SEQ ID NO: 3313065 - DNA, 25 bp, Homo sapien
gaagaggaacccactagatgaccat

SEQ ID NO: 3313066 - DNA, 25 bp, Homo sapien
ttaaatgaagaacctgacacatggg

SEQ ID NO: 3313067 - DNA, 25 bp, Homo sapien
tggccaattgtacctgcgatgtcag

SEQ ID NO: 3313068 - DNA, 25 bp, Homo sapien
catatagtttgaccatgcagagggc

SEQ ID NO: 3313069 - DNA, 25 bp, Homo sapien
tagtcctgcagtccttgttctgaga

SEQ ID NO: 3313070 - DNA, 25 bp, Homo sapien
gatgcaaggcttgaggaccccatta

SEQ ID NO: 3313071 - DNA, 25 bp, Homo sapien
tagagtgttccaggctacagatgca

SEQ ID NO: 3313072 - DNA, 25 bp, Homo sapien
gggtctgtcactaactgaatcatcg

SEQ ID NO: 3313073 - DNA, 25 bp, Homo sapien
cctgcagtttcagctgctcgagaag

SEQ ID NO: 3313074 - DNA, 25 bp, Homo sapien
agtttcagctgctcgagaagctggg

SEQ ID NO: 3313075 - DNA, 25 bp, Homo sapien
cagtttcagctgctcgagaagctgg

SEQ ID NO: 3313076 - DNA, 25 bp, Homo sapien
tgcagtttcagctgctcgagaagct

SEQ ID NO: 3313077 - DNA, 25 bp, Homo sapien
tctgagttctctccatacaaaaaaa

SEQ ID NO: 3313078 - DNA, 25 bp, Homo sapien
cactgacatacaaactagcattcat

SEQ ID NO: 3313079 - DNA, 25 bp, Homo sapien
gtataaatattctggtagacaccaa

SEQ ID NO: 3313080 - DNA, 25 bp, Homo sapien
gaagtcaccatcattcaccacaaat

SEQ ID NO: 3313081 - DNA, 25 bp, Homo sapien
catgatttcatttaaggccaggcta

SEQ ID NO: 3313082 - DNA, 25 bp, Homo sapien
tatacgagactaactaaacaggcca

SEQ ID NO: 3313083 - DNA, 25 bp, Homo sapien
catttccgtgccaatagagacctac

SEQ ID NO: 3313084 - DNA, 25 bp, Homo sapien
tactatctttggtgagagccacgcc

SEQ ID NO: 3313085 - DNA, 25 bp, Homo sapien
gtactttgatagcaaggcctttgtc

SEQ ID NO: 3313086 - DNA, 25 bp, Homo sapien
tctgtcatcccttttctgtactttg

SEQ ID NO: 3313087 - DNA, 25 bp, Homo sapien
catcccttttctgtactttgatagc

SEQ ID NO: 3313088 - DNA, 25 bp, Homo sapien
ttttctgtactttgatagcaaggcc

SEQ ID NO: 3313089 - DNA, 25 bp, Homo sapien
gtatagctgacctctgcaaacatgg

SEQ ID NO: 3313090 - DNA, 25 bp, Homo sapien
tgcacagctgtcaactcaggagtcc

SEQ ID NO: 3313091 - DNA, 25 bp, Homo sapien
taatccctgagacatatcagtgagg

SEQ ID NO: 3313092 - DNA, 25 bp, Homo sapien
gcctctttggcaacaagtgggaaga

SEQ ID NO: 3313093 - DNA, 25 bp, Homo sapien
cagatgtgcactaaacacccggcta

SEQ ID NO: 3313094 - DNA, 25 bp, Homo sapien
cttggcctctacttacatcttgatc

SEQ ID NO: 3313095 - DNA, 25 bp, Homo sapien
catcttgatctaaagatgcagcctt

SEQ ID NO: 3313096 - DNA, 25 bp, Homo sapien
gcctttgcatcctcaggaactatga

SEQ ID NO: 3313097 - DNA, 25 bp, Homo sapien
tctcattagagcactaaaatcttca

SEQ ID NO: 3313098 - DNA, 25 bp, Homo sapien
tttcctccatgcctgaactgaacac

SEQ ID NO: 3313099 - DNA, 25 bp, Homo sapien
agtaaaaatagagcatgtatttctc

SEQ ID NO: 3313100 - DNA, 25 bp, Homo sapien
aatgcactgggctaacatgtagtct

SEQ ID NO: 3313101 - DNA, 25 bp, Homo sapien
taagggtagcctacagacaaacacc

SEQ ID NO: 3313102 - DNA, 25 bp, Homo sapien
gacaaacaccacttctagctgctat

SEQ ID NO: 3313103 - DNA, 25 bp, Homo sapien
gctatactattctctggtctacaag

SEQ ID NO: 3313104 - DNA, 25 bp, Homo sapien
gaagtctccaaaatgccgtgtcctg

SEQ ID NO: 3313105 - DNA, 25 bp, Homo sapien
agacttattgacactgaatttccga

SEQ ID NO: 3313106 - DNA, 25 bp, Homo sapien
gatgtcttgtatagcgctaggcaca

SEQ ID NO: 3313107 - DNA, 25 bp, Homo sapien
acttattgacactgaatttccgatg

SEQ ID NO: 3313108 - DNA, 25 bp, Homo sapien
atttccgatgtcttgtatagcgcta

SEQ ID NO: 3313109 - DNA, 25 bp, Homo sapien
aaaaaggctcctgaataacaggatt

SEQ ID NO: 3313110 - DNA, 25 bp, Homo sapien
tttcaaagaggcatgggatatggat

SEQ ID NO: 3313111 - DNA, 25 bp, Homo sapien
gcccaacccccgagtgacaatttca

SEQ ID NO: 3313112 - DNA, 25 bp, Homo sapien
tttcctagattcaacattacccaaa

SEQ ID NO: 3313113 - DNA, 25 bp, Homo sapien
taaaggtagactcctaggatggagg

SEQ ID NO: 3313114 - DNA, 25 bp, Homo sapien
gaggacctagaaactggccgggcat

SEQ ID NO: 3313115 - DNA, 25 bp, Homo sapien
tcaagggactccaatagactgacct

SEQ ID NO: 3313116 - DNA, 25 bp, Homo sapien
gagcacaagatgctggaggttccat

SEQ ID NO: 3313117 - DNA, 25 bp, Homo sapien
ttcggtcctcacaagttgacagtgg

SEQ ID NO: 3313118 - DNA, 25 bp, Homo sapien
tgaatcgccattaccaggcagtgga

SEQ ID NO: 3313119 - DNA, 25 bp, Homo sapien
tgtgttagcagtgactgaatcgcca

SEQ ID NO: 3313120 - DNA, 25 bp, Homo sapien
tcataagctactcttgacccaaggc

SEQ ID NO: 3313121 - DNA, 25 bp, Homo sapien
gctaaaaggagagtgagtatctgca

SEQ ID NO: 3313122 - DNA, 25 bp, Homo sapien
taactggatgtcttaagataaactg

SEQ ID NO: 3313123 - DNA, 25 bp, Homo sapien
taaggaaaagcatgagaggccaatt

SEQ ID NO: 3313124 - DNA, 25 bp, Homo sapien
tgaggtcaccctaaatggattcttt

SEQ ID NO: 3313125 - DNA, 25 bp, Homo sapien
gatagattcccgtgcgacagagtga

SEQ ID NO: 3313126 - DNA, 25 bp, Homo sapien
ctttaagagcaatgacaggtcggcg

SEQ ID NO: 3313127 - DNA, 25 bp, Homo sapien
ggtatatgaatcctgcaccgaagct

SEQ ID NO: 3313128 - DNA, 25 bp, Homo sapien
tatcatcccgtaggcggcgaagagg

SEQ ID NO: 3313129 - DNA, 25 bp, Homo sapien
tcggtcgtcgacaacttgggatcaa

SEQ ID NO: 3313130 - DNA, 25 bp, Homo sapien
gacaacttgggatcaattgccttgg

SEQ ID NO: 3313131 - DNA, 25 bp, Homo sapien
caccctgtcggtcgtcgacaacttg

SEQ ID NO: 3313132 - DNA, 25 bp, Homo sapien
gatcaattgccttgggctcggacat

SEQ ID NO: 3313133 - DNA, 25 bp, Homo sapien
agcgacgcgctgctcgtccgtccga

SEQ ID NO: 3313134 - DNA, 25 bp, Homo sapien
cgcgctgctcgtccgtccgactgca

SEQ ID NO: 3313135 - DNA, 25 bp, Homo sapien
gacgcgctgctcgtccgtccgactg

SEQ ID NO: 3313136 - DNA, 25 bp, Homo sapien
ctgctcgtccgtccgactgcacacc

SEQ ID NO: 3313137 - DNA, 25 bp, Homo sapien
ccgccgcgctgcaaaccgctcggct

SEQ ID NO: 3313138 - DNA, 25 bp, Homo sapien
cgctgcaaaccgctcggctggaggt

SEQ ID NO: 3313139 - DNA, 25 bp, Homo sapien
ggaccggcgggccagacactcaacg

SEQ ID NO: 3313140 - DNA, 25 bp, Homo sapien
cgcgctgcaaaccgctcggctggag

SEQ ID NO: 3313141 - DNA, 25 bp, Homo sapien
aagttgctgccttttccgcgcgtcc

SEQ ID NO: 3313142 - DNA, 25 bp, Homo sapien
ctaggctctgagctggctttaaagt

SEQ ID NO: 3313143 - DNA, 25 bp, Homo sapien
gctttaaagttgctgccttttccgc

SEQ ID NO: 3313144 - DNA, 25 bp, Homo sapien
gctctgagctggctttaaagttgct

SEQ ID NO: 3313145 - DNA, 25 bp, Homo sapien
aggagaagcgcacacacgagcaccc

SEQ ID NO: 3313146 - DNA, 25 bp, Homo sapien
tatttattttctgagcacgcctccc

SEQ ID NO: 3313147 - DNA, 25 bp, Homo sapien
gcgcacacacggccaggattaagac

SEQ ID NO: 3313148 - DNA, 25 bp, Homo sapien
cggagacccagcaccgcggaatgga

SEQ ID NO: 3313149 - DNA, 25 bp, Homo sapien
gccgggacagttgacacccatcttc

SEQ ID NO: 3313150 - DNA, 25 bp, Homo sapien
ccagtcattctacacccgcttggtg

SEQ ID NO: 3313151 - DNA, 25 bp, Homo sapien
cacacttgtccctacggtcggaagg

SEQ ID NO: 3313152 - DNA, 25 bp, Homo sapien
gagggtggccttttccctgttcaca

SEQ ID NO: 3313153 - DNA, 25 bp, Homo sapien
tggtacttgtgactaggttccttct

SEQ ID NO: 3313154 - DNA, 25 bp, Homo sapien
gtacttgtgactaggttccttcttg

SEQ ID NO: 3313155 - DNA, 25 bp, Homo sapien
ctggtacttgtgactaggttccttc

SEQ ID NO: 3313156 - DNA, 25 bp, Homo sapien
acttgtgactaggttccttcttgat

SEQ ID NO: 3313157 - DNA, 25 bp, Homo sapien
gccaagagtgtagcgtgaaccctgt

SEQ ID NO: 3313158 - DNA, 25 bp, Homo sapien
cgtgaaccctgtctttagtcaccat

SEQ ID NO: 3313159 - DNA, 25 bp, Homo sapien
tggcgtatcatactgggccaagagt

SEQ ID NO: 3313160 - DNA, 25 bp, Homo sapien
catactgggccaagagtgtagcgtg

SEQ ID NO: 3313161 - DNA, 25 bp, Homo sapien
tagtcagtcagtaactaagcaattc

SEQ ID NO: 3313162 - DNA, 25 bp, Homo sapien
gactggttgacgttattggccaatt

SEQ ID NO: 3313163 - DNA, 25 bp, Homo sapien
attcacctctattcttccacttgca

SEQ ID NO: 3313164 - DNA, 25 bp, Homo sapien
ttggccaattataataacactgaca

SEQ ID NO: 3313165 - DNA, 25 bp, Homo sapien
tatttcaacatcttttacagcaaca

SEQ ID NO: 3313166 - DNA, 25 bp, Homo sapien
tctggatttgtcttctaaaggcaaa

SEQ ID NO: 3313167 - DNA, 25 bp, Homo sapien
tacagcaacatcaggagtagtactg

SEQ ID NO: 3313168 - DNA, 25 bp, Homo sapien
aagctgagtggctttcaccaactgc

SEQ ID NO: 3313169 - DNA, 25 bp, Homo sapien
ggaagtgtgaggatttcatggaagc

SEQ ID NO: 3313170 - DNA, 25 bp, Homo sapien
ggaagccaccaataatgattttagt

SEQ ID NO: 3313171 - DNA, 25 bp, Homo sapien
ataatgattttagttgccagcagag

SEQ ID NO: 3313172 - DNA, 25 bp, Homo sapien
gatcagaaaggcctcttccaagaaa

SEQ ID NO: 3313173 - DNA, 25 bp, Homo sapien
ttccgatagcttgggtcattgaagc

SEQ ID NO: 3313174 - DNA, 25 bp, Homo sapien
ctaaatattccgatagcttgggtca

SEQ ID NO: 3313175 - DNA, 25 bp, Homo sapien
tattccgatagcttgggtcattgaa

SEQ ID NO: 3313176 - DNA, 25 bp, Homo sapien
aatattccgatagcttgggtcattg

SEQ ID NO: 3313177 - DNA, 25 bp, Homo sapien
ttctctgaatcctgtgtaatcttcc

SEQ ID NO: 3313178 - DNA, 25 bp, Homo sapien
tttctctgaatcctgtgtaatcttc

SEQ ID NO: 3313179 - DNA, 25 bp, Homo sapien
ttggaattttgacactccatggcca

SEQ ID NO: 3313180 - DNA, 25 bp, Homo sapien
ttttggaattttgacactccatggc

SEQ ID NO: 3313181 - DNA, 25 bp, Homo sapien
tggaattttgacactccatggccat

SEQ ID NO: 3313182 - DNA, 25 bp, Homo sapien
tttggaattttgacactccatggcc

SEQ ID NO: 3313183 - DNA, 25 bp, Homo sapien
tcggattcgagctgcaagctccgtg

SEQ ID NO: 3313184 - DNA, 25 bp, Homo sapien
tatatagactgaaggggtgtcggcc

SEQ ID NO: 3313185 - DNA, 25 bp, Homo sapien
ttagtctggactcgcagctctcgga

SEQ ID NO: 3313186 - DNA, 25 bp, Homo sapien
tacacataagctgagttagtctgga

SEQ ID NO: 3313187 - DNA, 25 bp, Homo sapien
agaagccctatgcagatatttccaa

SEQ ID NO: 3313188 - DNA, 25 bp, Homo sapien
ctgttctggtacaaaactgtatctg

SEQ ID NO: 3313189 - DNA, 25 bp, Homo sapien
tctctgttctggtacaaaactgtat

SEQ ID NO: 3313190 - DNA, 25 bp, Homo sapien
tctttgcctttcaagcatctctctg

SEQ ID NO: 3313191 - DNA, 25 bp, Homo sapien
gctgcatgtaaggaatacacatttt

SEQ ID NO: 3313192 - DNA, 25 bp, Homo sapien
gtttggtagcaggaactgtgtatgc

SEQ ID NO: 3313193 - DNA, 25 bp, Homo sapien
tggtagcaggaactgtgtatgcata

SEQ ID NO: 3313194 - DNA, 25 bp, Homo sapien
gggtgagtttggtagcaggaactgt

SEQ ID NO: 3313195 - DNA, 25 bp, Homo sapien
tggaaagtactttatacctcaccat

SEQ ID NO: 3313196 - DNA, 25 bp, Homo sapien
tattgagaaacatatcatagatgtt

SEQ ID NO: 3313197 - DNA, 25 bp, Homo sapien
ccaatggaaagtactttatacctca

SEQ ID NO: 3313198 - DNA, 25 bp, Homo sapien
tcttccaatggaaagtactttatac

SEQ ID NO: 3313199 - DNA, 25 bp, Homo sapien
taaaagcagttaaaatctccagcca

SEQ ID NO: 3313200 - DNA, 25 bp, Homo sapien
atgtaaaagcagttaaaatctccag

SEQ ID NO: 3313201 - DNA, 25 bp, Homo sapien
aaaagcagttaaaatctccagccat

SEQ ID NO: 3313202 - DNA, 25 bp, Homo sapien
gtgtctcatgtaaaagcagttaaaa

SEQ ID NO: 3313203 - DNA, 25 bp, Homo sapien
cattaactttcatcaacttatcatc

SEQ ID NO: 3313204 - DNA, 25 bp, Homo sapien
gtaatcattaactttcatcaactta

SEQ ID NO: 3313205 - DNA, 25 bp, Homo sapien
aactttcatcaacttatcatcattg

SEQ ID NO: 3313206 - DNA, 25 bp, Homo sapien
tcaaagtaatcattaactttcatca

SEQ ID NO: 3313207 - DNA, 25 bp, Homo sapien
ctgggccaaaggccgtagaagaaat

SEQ ID NO: 3313208 - DNA, 25 bp, Homo sapien
tgggccaaaggccgtagaagaaata

SEQ ID NO: 3313209 - DNA, 25 bp, Homo sapien
ggaaatttaatgtgttttggagctc

SEQ ID NO: 3313210 - DNA, 25 bp, Homo sapien
ttagtggagaaggttacataactcc

SEQ ID NO: 3313211 - DNA, 25 bp, Homo sapien
cctgaattgaggaagcaagacagca

SEQ ID NO: 3313212 - DNA, 25 bp, Homo sapien
gaaggttacataactcctgaaatgt

SEQ ID NO: 3313213 - DNA, 25 bp, Homo sapien
tgaaatgtcttttcctcagtagaag

SEQ ID NO: 3313214 - DNA, 25 bp, Homo sapien
caagtggagtactttgtatttcttt

SEQ ID NO: 3313215 - DNA, 25 bp, Homo sapien
gtactttgtatttcttttaagctca

SEQ ID NO: 3313216 - DNA, 25 bp, Homo sapien
tactttgtatttcttttaagctcac

SEQ ID NO: 3313217 - DNA, 25 bp, Homo sapien
tttcaagtggagtactttgtatttc

SEQ ID NO: 3313218 - DNA, 25 bp, Homo sapien
ctcttcacattccaactgtgagaaa

SEQ ID NO: 3313219 - DNA, 25 bp, Homo sapien
ttcacattccaactgtgagaaaaag

SEQ ID NO: 3313220 - DNA, 25 bp, Homo sapien
tctgaatctcaactcttcacattcc

SEQ ID NO: 3313221 - DNA, 25 bp, Homo sapien
tcacattccaactgtgagaaaaagc

SEQ ID NO: 3313222 - DNA, 25 bp, Homo sapien
aaaatttccaaccaacatcggcgtg

SEQ ID NO: 3313223 - DNA, 25 bp, Homo sapien
catcggcgtgagataaccaaaagaa

SEQ ID NO: 3313224 - DNA, 25 bp, Homo sapien
tacctatcaggtcccacgtaattgg

SEQ ID NO: 3313225 - DNA, 25 bp, Homo sapien
gatctcttgctcgagtctagcctaa

SEQ ID NO: 3313226 - DNA, 25 bp, Homo sapien
tcgattgtcccctttattggtatta

SEQ ID NO: 3313227 - DNA, 25 bp, Homo sapien
cttgatcgattgtcccctttattgg

SEQ ID NO: 3313228 - DNA, 25 bp, Homo sapien
aaattcttgatcgattgtccccttt

SEQ ID NO: 3313229 - DNA, 25 bp, Homo sapien
tgtcccctttattggtattatgaaa

SEQ ID NO: 3313230 - DNA, 25 bp, Homo sapien
cttcccttggggaaccttcattgtg

SEQ ID NO: 3313231 - DNA, 25 bp, Homo sapien
ctgatgcagaacagtgatggtttcg

SEQ ID NO: 3313232 - DNA, 25 bp, Homo sapien
gatgcagaacagtgatggtttcgaa

SEQ ID NO: 3313233 - DNA, 25 bp, Homo sapien
tgttcctgttcctgtacctgatgca

SEQ ID NO: 3313234 - DNA, 25 bp, Homo sapien
tgcagaacagtgatggtttcgaaga

SEQ ID NO: 3313235 - DNA, 25 bp, Homo sapien
gatggggtggctcttcaggacagag

SEQ ID NO: 3313236 - DNA, 25 bp, Homo sapien
gctcttcaggacagagtgaatatgt

SEQ ID NO: 3313237 - DNA, 25 bp, Homo sapien
ctgaacatttggctggatggggtgg

SEQ ID NO: 3313238 - DNA, 25 bp, Homo sapien
gtggctcttcaggacagagtgaata

SEQ ID NO: 3313239 - DNA, 25 bp, Homo sapien
ctttggtactgaataatgaccaatt

SEQ ID NO: 3313240 - DNA, 25 bp, Homo sapien
ttggtactgaataatgaccaattct

SEQ ID NO: 3313241 - DNA, 25 bp, Homo sapien
cactttggtactgaataatgaccaa

SEQ ID NO: 3313242 - DNA, 25 bp, Homo sapien
ccactttggtactgaataatgacca

SEQ ID NO: 3313243 - DNA, 25 bp, Homo sapien
tattcatggtcaaatgctgggtacc

SEQ ID NO: 3313244 - DNA, 25 bp, Homo sapien
tagcctcaatgttaaccacctggtg

SEQ ID NO: 3313245 - DNA, 25 bp, Homo sapien
taggtgcagttacgagttacattgg

SEQ ID NO: 3313246 - DNA, 25 bp, Homo sapien
tgaaatcgtcactcccagatagagc

SEQ ID NO: 3313247 - DNA, 25 bp, Homo sapien
cagtcttctaactatggtttcatgg

SEQ ID NO: 3313248 - DNA, 25 bp, Homo sapien
ctcccagtcttctaactatggtttc

SEQ ID NO: 3313249 - DNA, 25 bp, Homo sapien
tcaactcccagtcttctaactatgg

SEQ ID NO: 3313250 - DNA, 25 bp, Homo sapien
caactcccagtcttctaactatggt

SEQ ID NO: 3313251 - DNA, 25 bp, Homo sapien
tcaaatgaagtccttcctttttgca

SEQ ID NO: 3313252 - DNA, 25 bp, Homo sapien
cctagaactagtcagtgagatgttg

SEQ ID NO: 3313253 - DNA, 25 bp, Homo sapien
aggtatggctccagcatgggtgtcc

SEQ ID NO: 3313254 - DNA, 25 bp, Homo sapien
cctttttgcatggtctttcagctct

SEQ ID NO: 3313255 - DNA, 25 bp, Homo sapien
acactcagatctgcaaataatacat

SEQ ID NO: 3313256 - DNA, 25 bp, Homo sapien
tgacactcagatctgcaaataatac

SEQ ID NO: 3313257 - DNA, 25 bp, Homo sapien
attgacactcagatctgcaaataat

SEQ ID NO: 3313258 - DNA, 25 bp, Homo sapien
gacactcagatctgcaaataataca

SEQ ID NO: 3313259 - DNA, 25 bp, Homo sapien
tttgccgacatctgcaccaatagag

SEQ ID NO: 3313260 - DNA, 25 bp, Homo sapien
gggcttttgccgacatctgcaccaa

SEQ ID NO: 3313261 - DNA, 25 bp, Homo sapien
gacatctgcaccaatagaggacacc

SEQ ID NO: 3313262 - DNA, 25 bp, Homo sapien
tgccgacatctgcaccaatagagga

SEQ ID NO: 3313263 - DNA, 25 bp, Homo sapien
tatgtagatgaccccaaatattcat

SEQ ID NO: 3313264 - DNA, 25 bp, Homo sapien
ttatgtagatgaccccaaatattca

SEQ ID NO: 3313265 - DNA, 25 bp, Homo sapien
tttatgtagatgaccccaaatattc

SEQ ID NO: 3313266 - DNA, 25 bp, Homo sapien
tctttatgtagatgaccccaaatat

SEQ ID NO: 3313267 - DNA, 25 bp, Homo sapien
ctgtttagcaggattctaaacatac

SEQ ID NO: 3313268 - DNA, 25 bp, Homo sapien
tctgtttagcaggattctaaacata

SEQ ID NO: 3313269 - DNA, 25 bp, Homo sapien
aattttctgtttagcaggattctaa

SEQ ID NO: 3313270 - DNA, 25 bp, Homo sapien
tttctgtttagcaggattctaaaca

SEQ ID NO: 3313271 - DNA, 25 bp, Homo sapien
tggcccgttgtttgtcacacttgtg

SEQ ID NO: 3313272 - DNA, 25 bp, Homo sapien
cgtgtaatgaggcttcacagatgtg

SEQ ID NO: 3313273 - DNA, 25 bp, Homo sapien
cacacttgtgtcatagcgtgcaggc

SEQ ID NO: 3313274 - DNA, 25 bp, Homo sapien
agtaactggcccgttgtttgtcaca

SEQ ID NO: 3313275 - DNA, 25 bp, Homo sapien
catccagattttgtgcatctaatta

SEQ ID NO: 3313276 - DNA, 25 bp, Homo sapien
ttaagtctgatgcatgtagtcaggg

SEQ ID NO: 3313277 - DNA, 25 bp, Homo sapien
tagtcagggatgaagaaagtccctg

SEQ ID NO: 3313278 - DNA, 25 bp, Homo sapien
agatgctgtttcagtcaggataggc

SEQ ID NO: 3313279 - DNA, 25 bp, Homo sapien
cattcttccactttattggctatta

SEQ ID NO: 3313280 - DNA, 25 bp, Homo sapien
tcaagatattcctgtgatgtggccc

SEQ ID NO: 3313281 - DNA, 25 bp, Homo sapien
acttaattggagcatcaggaccaca

SEQ ID NO: 3313282 - DNA, 25 bp, Homo sapien
tattaaatcaagatattcctgtgat

SEQ ID NO: 3313283 - DNA, 25 bp, Homo sapien
tagttccagatctatagagcttttc

SEQ ID NO: 3313284 - DNA, 25 bp, Homo sapien
ttccagatctatagagcttttcaag

SEQ ID NO: 3313285 - DNA, 25 bp, Homo sapien
cagatctatagagcttttcaagaca

SEQ ID NO: 3313286 - DNA, 25 bp, Homo sapien
agatctatagagcttttcaagacac

SEQ ID NO: 3313287 - DNA, 25 bp, Homo sapien
cacagaacaagcattgtcatttgca

SEQ ID NO: 3313288 - DNA, 25 bp, Homo sapien
gcaaactgttttgacatgtgaaaga

SEQ ID NO: 3313289 - DNA, 25 bp, Homo sapien
gaattgtcatttgcaaactgttttg

SEQ ID NO: 3313290 - DNA, 25 bp, Homo sapien
gtcacgttaaaacttattgctattg

SEQ ID NO: 3313291 - DNA, 25 bp, Homo sapien
tgtggtaaagcaaggaagatctata

SEQ ID NO: 3313292 - DNA, 25 bp, Homo sapien
caaggaagatctatatccaaaaatc

SEQ ID NO: 3313293 - DNA, 25 bp, Homo sapien
tggtaaagcaaggaagatctatatc

SEQ ID NO: 3313294 - DNA, 25 bp, Homo sapien
aaagcaaggaagatctatatccaaa

SEQ ID NO: 3313295 - DNA, 25 bp, Homo sapien
aaagtttgcttaaggcattcacagg

SEQ ID NO: 3313296 - DNA, 25 bp, Homo sapien
gatactccctgatttcgatttgacc

SEQ ID NO: 3313297 - DNA, 25 bp, Homo sapien
acaggagttgcttctaaattaaaat

SEQ ID NO: 3313298 - DNA, 25 bp, Homo sapien
tcgatttgaccagtcctgatttctt

SEQ ID NO: 3313299 - DNA, 25 bp, Homo sapien
tctttgccatttgcatatggcctgc

SEQ ID NO: 3313300 - DNA, 25 bp, Homo sapien
tgattgggtaactttgctctttgcc

SEQ ID NO: 3313301 - DNA, 25 bp, Homo sapien
ttgcatatggcctgctcaactttgc

SEQ ID NO: 3313302 - DNA, 25 bp, Homo sapien
ctgcttctttgattgggtaactttg

SEQ ID NO: 3313303 - DNA, 25 bp, Homo sapien
ctccaccaactcatgtactgtctgt

SEQ ID NO: 3313304 - DNA, 25 bp, Homo sapien
cctcctccaccaactcatgtactgt

SEQ ID NO: 3313305 - DNA, 25 bp, Homo sapien
ccaccaactcatgtactgtctgttc

SEQ ID NO: 3313306 - DNA, 25 bp, Homo sapien
tcctccaccaactcatgtactgtct

SEQ ID NO: 3313307 - DNA, 25 bp, Homo sapien
tagttaacagagtatttagcagata

SEQ ID NO: 3313308 - DNA, 25 bp, Homo sapien
taattctctatttcacctctaagga

SEQ ID NO: 3313309 - DNA, 25 bp, Homo sapien
tagcagatagtaggcctacaaaaat

SEQ ID NO: 3313310 - DNA, 25 bp, Homo sapien
ctgagtttgttgttgtgaaataaat

SEQ ID NO: 3313311 - DNA, 25 bp, Homo sapien
aggacaagaatggaatcccatgttg

SEQ ID NO: 3313312 - DNA, 25 bp, Homo sapien
cctagggagtttctcaggacaagaa

SEQ ID NO: 3313313 - DNA, 25 bp, Homo sapien
ccttctattgatggtcatattcttg

SEQ ID NO: 3313314 - DNA, 25 bp, Homo sapien
tgttgtgttcgtctaccgtttggcc

SEQ ID NO: 3313315 - DNA, 25 bp, Homo sapien
tccattgaagagaagcaagtcagct

SEQ ID NO: 3313316 - DNA, 25 bp, Homo sapien
tagaacatcatgatcccctggcttc

SEQ ID NO: 3313317 - DNA, 25 bp, Homo sapien
ctgttagcatgttgacgtaatgacg

SEQ ID NO: 3313318 - DNA, 25 bp, Homo sapien
gtaacccaggtgttcttgtttgctc

SEQ ID NO: 3313319 - DNA, 25 bp, Homo sapien
gctttgttcagattgcctttttgcc

SEQ ID NO: 3313320 - DNA, 25 bp, Homo sapien
tgctttgttcagattgcctttttgc

SEQ ID NO: 3313321 - DNA, 25 bp, Homo sapien
tgtttctgcaagaatataggatgaa

SEQ ID NO: 3313322 - DNA, 25 bp, Homo sapien
tcttaaattagagttggccatgaca

SEQ ID NO: 3313323 - DNA, 25 bp, Homo sapien
gatttagcaactggatagaaacagc

SEQ ID NO: 3313324 - DNA, 25 bp, Homo sapien
acacatttatcacggcatctgggcc

SEQ ID NO: 3313325 - DNA, 25 bp, Homo sapien
tctctctctttcttctgaagtgcca

SEQ ID NO: 3313326 - DNA, 25 bp, Homo sapien
ctctctctttcttctgaagtgccat

SEQ ID NO: 3313327 - DNA, 25 bp, Homo sapien
gactcctcagcagagcatgtaaagg

SEQ ID NO: 3313328 - DNA, 25 bp, Homo sapien
tcttcttgatgtagaccccgctggt

SEQ ID NO: 3313329 - DNA, 25 bp, Homo sapien
aggaaaatcttccttgacctcaagg

SEQ ID NO: 3313330 - DNA, 25 bp, Homo sapien
caaaggccacctgatagccaggaaa

SEQ ID NO: 3313331 - DNA, 25 bp, Homo sapien
ttggagcacccaagatgtcttcttt

SEQ ID NO: 3313332 - DNA, 25 bp, Homo sapien
ttattttggagcacccaagatgtct

SEQ ID NO: 3313333 - DNA, 25 bp, Homo sapien
ggagcacccaagatgtcttcttttt

SEQ ID NO: 3313334 - DNA, 25 bp, Homo sapien
ttttggagcacccaagatgtcttct

SEQ ID NO: 3313335 - DNA, 25 bp, Homo sapien
caggaagtttcagagggccaggttc

SEQ ID NO: 3313336 - DNA, 25 bp, Homo sapien
tctatactggttgcacaaaggacag

SEQ ID NO: 3313337 - DNA, 25 bp, Homo sapien
caaggatgcagtgagagtcaatcgc

SEQ ID NO: 3313338 - DNA, 25 bp, Homo sapien
gcaagggcaactcacattagcagct

SEQ ID NO: 3313339 - DNA, 25 bp, Homo sapien
gaactagagcataggccagaacctg

SEQ ID NO: 3313340 - DNA, 25 bp, Homo sapien
cacggccaggcttgacttctaatga

SEQ ID NO: 3313341 - DNA, 25 bp, Homo sapien
aaaatgtcataacgggagtcacggc

SEQ ID NO: 3313342 - DNA, 25 bp, Homo sapien
tcaattcagtggctaaggatgtcct

SEQ ID NO: 3313343 - DNA, 25 bp, Homo sapien
cagtcatactagatcaggaacccac

SEQ ID NO: 3313344 - DNA, 25 bp, Homo sapien
cacacacagcatcacgtctcaatgg

SEQ ID NO: 3313345 - DNA, 25 bp, Homo sapien
tatgccaacctctaaccaatcactg

SEQ ID NO: 3313346 - DNA, 25 bp, Homo sapien
tagggctgcgagagagaattcattc

SEQ ID NO: 3313347 - DNA, 25 bp, Homo sapien
cagggaaaccacaggtgatgctaca

SEQ ID NO: 3313348 - DNA, 25 bp, Homo sapien
gggtggaacgtctcagcaatacagt

SEQ ID NO: 3313349 - DNA, 25 bp, Homo sapien
gatgctacatgaacgcagggctgaa

SEQ ID NO: 3313350 - DNA, 25 bp, Homo sapien
gcaatacagtcacaagcagcagtcc

SEQ ID NO: 3313351 - DNA, 25 bp, Homo sapien
aatgaagttgagatttgatgtcatc

SEQ ID NO: 3313352 - DNA, 25 bp, Homo sapien
taaatgaagttgagatttgatgtca

SEQ ID NO: 3313353 - DNA, 25 bp, Homo sapien
aagtaaatgaagttgagatttgatg

SEQ ID NO: 3313354 - DNA, 25 bp, Homo sapien
gaagttgagatttgatgtcatcagt

SEQ ID NO: 3313355 - DNA, 25 bp, Homo sapien
tatataccaggcatctcagactgac

SEQ ID NO: 3313356 - DNA, 25 bp, Homo sapien
gcaaacacatggtgcactgaaaccg

SEQ ID NO: 3313357 - DNA, 25 bp, Homo sapien
gcgataagcctctaagcctgaactt

SEQ ID NO: 3313358 - DNA, 25 bp, Homo sapien
gaatggctctcgatcacacataagg

SEQ ID NO: 3313359 - DNA, 25 bp, Homo sapien
ttctcctgcatacaaggtaatgagt

SEQ ID NO: 3313360 - DNA, 25 bp, Homo sapien
atccagttaacattccagcattctg

SEQ ID NO: 3313361 - DNA, 25 bp, Homo sapien
tacaaggtaatgagtagaatggctg

SEQ ID NO: 3313362 - DNA, 25 bp, Homo sapien
agaatggctgtgaatccagttaaca

SEQ ID NO: 3313363 - DNA, 25 bp, Homo sapien
atattgttagataactgttgccatc

SEQ ID NO: 3313364 - DNA, 25 bp, Homo sapien
tattgttagataactgttgccatct

SEQ ID NO: 3313365 - DNA, 25 bp, Homo sapien
atatattgttagataactgttgcca

SEQ ID NO: 3313366 - DNA, 25 bp, Homo sapien
attgttagataactgttgccatctt

SEQ ID NO: 3313367 - DNA, 25 bp, Homo sapien
tcaatcagtgggatggaatttacct

SEQ ID NO: 3313368 - DNA, 25 bp, Homo sapien
tacaaagtgcatcaaagcaatgtgc

SEQ ID NO: 3313369 - DNA, 25 bp, Homo sapien
caaggtgctcctgtaatagaatgct

SEQ ID NO: 3313370 - DNA, 25 bp, Homo sapien
gagacaggaaataagcccatgctat

SEQ ID NO: 3313371 - DNA, 25 bp, Homo sapien
gcccaacatagcaggaacatgcaga

SEQ ID NO: 3313372 - DNA, 25 bp, Homo sapien
gcattgagtaggatcacaaagtctc

SEQ ID NO: 3313373 - DNA, 25 bp, Homo sapien
ggcttgtcgagtgctcatccctgca

SEQ ID NO: 3313374 - DNA, 25 bp, Homo sapien
tatttggagcgaaattgttgcccac

SEQ ID NO: 3313375 - DNA, 25 bp, Homo sapien
tggagggcatcgcagagcgttatca

SEQ ID NO: 3313376 - DNA, 25 bp, Homo sapien
ggtgcaggaagccccaatcgccagg

SEQ ID NO: 3313377 - DNA, 25 bp, Homo sapien
taggattgctatggaagtactgagt

SEQ ID NO: 3313378 - DNA, 25 bp, Homo sapien
gccatcgatgaaattgtggagggca

SEQ ID NO: 3313379 - DNA, 25 bp, Homo sapien
tctgacagtttgggccccttcaaac

SEQ ID NO: 3313380 - DNA, 25 bp, Homo sapien
ctatttctgacagtttgggcccctt

SEQ ID NO: 3313381 - DNA, 25 bp, Homo sapien
ctgacagtttgggccccttcaaaca

SEQ ID NO: 3313382 - DNA, 25 bp, Homo sapien
tgacagtttgggccccttcaaacag

SEQ ID NO: 3313383 - DNA, 25 bp, Homo sapien
attcgcaaggagacttccccacctc

SEQ ID NO: 3313384 - DNA, 25 bp, Homo sapien
acctctcagaaaactcttctgaacg

SEQ ID NO: 3313385 - DNA, 25 bp, Homo sapien
aaggagacttccccacctctcagaa

SEQ ID NO: 3313386 - DNA, 25 bp, Homo sapien
cgcaaggagacttccccacctctca

SEQ ID NO: 3313387 - DNA, 25 bp, Homo sapien
aaacctcgcaagttgtttcctgtct

SEQ ID NO: 3313388 - DNA, 25 bp, Homo sapien
tagaaacctcgcaagttgtttcctg

SEQ ID NO: 3313389 - DNA, 25 bp, Homo sapien
gaaacctcgcaagttgtttcctgtc

SEQ ID NO: 3313390 - DNA, 25 bp, Homo sapien
ttctagaaacctcgcaagttgtttc

SEQ ID NO: 3313391 - DNA, 25 bp, Homo sapien
ggaaagtcaggatttgtgcccagac

SEQ ID NO: 3313392 - DNA, 25 bp, Homo sapien
gcaataagaggtcaagatactgctc

SEQ ID NO: 3313393 - DNA, 25 bp, Homo sapien
cattttatacaagcatccactgtgc

SEQ ID NO: 3313394 - DNA, 25 bp, Homo sapien
gactcctaagcctatgcaataagag

SEQ ID NO: 3313395 - DNA, 25 bp, Homo sapien
cagaggccggaatgtcttatggaac

SEQ ID NO: 3313396 - DNA, 25 bp, Homo sapien
tggaaccctccaatgtaatctctat

SEQ ID NO: 3313397 - DNA, 25 bp, Homo sapien
tagaaagcataagaccagaggccgg

SEQ ID NO: 3313398 - DNA, 25 bp, Homo sapien
tcactaagttggtataaaggttcga

SEQ ID NO: 3313399 - DNA, 25 bp, Homo sapien
gccattcactagctgagtaaacctg

SEQ ID NO: 3313400 - DNA, 25 bp, Homo sapien
cccacttatggaaaagatagcctac

SEQ ID NO: 3313401 - DNA, 25 bp, Homo sapien
cctcaggaactgctagtggctatgt

SEQ ID NO: 3313402 - DNA, 25 bp, Homo sapien
gggcccagccctctaagcacttaga

SEQ ID NO: 3313403 - DNA, 25 bp, Homo sapien
catgtcacaccattgatggcaggta

SEQ ID NO: 3313404 - DNA, 25 bp, Homo sapien
tgtagagataccacactgacattat

SEQ ID NO: 3313405 - DNA, 25 bp, Homo sapien
tatgtccattagcttctgtgacagc

SEQ ID NO: 3313406 - DNA, 25 bp, Homo sapien
gcaggatttgcatagcatgtcacac

SEQ ID NO: 3313407 - DNA, 25 bp, Homo sapien
aaacacagcaactgccttctcaaca

SEQ ID NO: 3313408 - DNA, 25 bp, Homo sapien
ccaaacacagcaactgccttctcaa

SEQ ID NO: 3313409 - DNA, 25 bp, Homo sapien
caaacacagcaactgccttctcaac

SEQ ID NO: 3313410 - DNA, 25 bp, Homo sapien
accaaacacagcaactgccttctca

SEQ ID NO: 3313411 - DNA, 25 bp, Homo sapien
taaagagtcaagatgttcctaacag

SEQ ID NO: 3313412 - DNA, 25 bp, Homo sapien
tatggcaggccacttggattactgt

SEQ ID NO: 3313413 - DNA, 25 bp, Homo sapien
ggagagactaatgggtgaaaagcca

SEQ ID NO: 3313414 - DNA, 25 bp, Homo sapien
gtaaataaatcaaggcctaggccca

SEQ ID NO: 3313415 - DNA, 25 bp, Homo sapien
cagattaataatcgtcactgacagg

SEQ ID NO: 3313416 - DNA, 25 bp, Homo sapien
tccgaggagagatgccagattaata

SEQ ID NO: 3313417 - DNA, 25 bp, Homo sapien
tggagtcaaaatcaatccgaggaga

SEQ ID NO: 3313418 - DNA, 25 bp, Homo sapien
tgaaaaaagagtcccaatagccagc

SEQ ID NO: 3313419 - DNA, 25 bp, Homo sapien
tcaattgctgtaagactgctggaca

SEQ ID NO: 3313420 - DNA, 25 bp, Homo sapien
tgtgcttgggccgatcctcacatgg

SEQ ID NO: 3313421 - DNA, 25 bp, Homo sapien
gaaaagatctcttcagcagttaaac

SEQ ID NO: 3313422 - DNA, 25 bp, Homo sapien
tttgggtagcatttgaaaagccatg

SEQ ID NO: 3313423 - DNA, 25 bp, Homo sapien
accacttcgactgctgttaggcact

SEQ ID NO: 3313424 - DNA, 25 bp, Homo sapien
taggcactggttttttaacaatatc

SEQ ID NO: 3313425 - DNA, 25 bp, Homo sapien
tcgactgctgttaggcactggtttt

SEQ ID NO: 3313426 - DNA, 25 bp, Homo sapien
taacaatatcaagtatagtagccat

SEQ ID NO: 3313427 - DNA, 25 bp, Homo sapien
aaaagagccagtatataagcccgag

SEQ ID NO: 3313428 - DNA, 25 bp, Homo sapien
taacagacctccttactgccatggg

SEQ ID NO: 3313429 - DNA, 25 bp, Homo sapien
tttggtaagcataggagcagtctgg

SEQ ID NO: 3313430 - DNA, 25 bp, Homo sapien
caacactgtgattagggaacctagg

SEQ ID NO: 3313431 - DNA, 25 bp, Homo sapien
caccagagtgagaattttaggtata

SEQ ID NO: 3313432 - DNA, 25 bp, Homo sapien
tagtttgcagctatgaacttaaacc

SEQ ID NO: 3313433 - DNA, 25 bp, Homo sapien
tcagccaacttttctcaccagagtg

SEQ ID NO: 3313434 - DNA, 25 bp, Homo sapien
ggtatacttcgctttctgcacttca

SEQ ID NO: 3313435 - DNA, 25 bp, Homo sapien
agcacgagtgactgaggaaattgct

SEQ ID NO: 3313436 - DNA, 25 bp, Homo sapien
gcacgagtgactgaggaaattgctt

SEQ ID NO: 3313437 - DNA, 25 bp, Homo sapien
gcagagagagcccttatgtaccact

SEQ ID NO: 3313438 - DNA, 25 bp, Homo sapien
taatcgtatccaatacccttctcat

SEQ ID NO: 3313439 - DNA, 25 bp, Homo sapien
taccacttcactgaggagctaggag

SEQ ID NO: 3313440 - DNA, 25 bp, Homo sapien
gagcttctaacctaatcgtatccaa

SEQ ID NO: 3313441 - DNA, 25 bp, Homo sapien
ctaggttgatgtctagatcatctgc

SEQ ID NO: 3313442 - DNA, 25 bp, Homo sapien
tgaatatcgcctaaatgtcagacat

SEQ ID NO: 3313443 - DNA, 25 bp, Homo sapien
gttatgggcatagcggaggctttcc

SEQ ID NO: 3313444 - DNA, 25 bp, Homo sapien
cagcagaatagagagttcatgtgtc

SEQ ID NO: 3313445 - DNA, 25 bp, Homo sapien
cacttggatgacacaagaggcactt

SEQ ID NO: 3313446 - DNA, 25 bp, Homo sapien
ttggatgacacaagaggcacttggc

SEQ ID NO: 3313447 - DNA, 25 bp, Homo sapien
tggatgacacaagaggcacttggct

SEQ ID NO: 3313448 - DNA, 25 bp, Homo sapien
tctgctcctgaagaaaactgtagag

SEQ ID NO: 3313449 - DNA, 25 bp, Homo sapien
ggaactctgctcctgaagaaaactg

SEQ ID NO: 3313450 - DNA, 25 bp, Homo sapien
gctcctgaagaaaactgtagagcat

SEQ ID NO: 3313451 - DNA, 25 bp, Homo sapien
gttctggggaactctgctcctgaag

SEQ ID NO: 3313452 - DNA, 25 bp, Homo sapien
cactacactagtctctagagagagg

SEQ ID NO: 3313453 - DNA, 25 bp, Homo sapien
gcatatgtcatgtctcctccaatag

SEQ ID NO: 3313454 - DNA, 25 bp, Homo sapien
gagaggagtcagaccatgcccttca

SEQ ID NO: 3313455 - DNA, 25 bp, Homo sapien
aatgggttagttccttaatcaggca

SEQ ID NO: 3313456 - DNA, 25 bp, Homo sapien
taccgtattctaccctccaatatca

SEQ ID NO: 3313457 - DNA, 25 bp, Homo sapien
tttccaagagcagagtataatatgc

SEQ ID NO: 3313458 - DNA, 25 bp, Homo sapien
caaactaacatcgtccaaaaatgac

SEQ ID NO: 3313459 - DNA, 25 bp, Homo sapien
aacttcttgtaacaaactaacatcg

SEQ ID NO: 3313460 - DNA, 25 bp, Homo sapien
acaggctcagattcgcgccgaacac

SEQ ID NO: 3313461 - DNA, 25 bp, Homo sapien
ctccagcaagtgctggagctgcgcc

SEQ ID NO: 3313462 - DNA, 25 bp, Homo sapien
acgcgggaggcggctcccatctgct

SEQ ID NO: 3313463 - DNA, 25 bp, Homo sapien
atcctcgctgaaggctagccctggc

SEQ ID NO: 3313464 - DNA, 25 bp, Homo sapien
agaacagcagctcgcgacctgcggg

SEQ ID NO: 3313465 - DNA, 25 bp, Homo sapien
tccttgcccaagggcgggagcgtca

SEQ ID NO: 3313466 - DNA, 25 bp, Homo sapien
tgctcggcgctgctccgagtcagag

SEQ ID NO: 3313467 - DNA, 25 bp, Homo sapien
cctggttctccgacgccttcgaaag

SEQ ID NO: 3313468 - DNA, 25 bp, Homo sapien
tgcgtacatatgctcctcccggata

SEQ ID NO: 3313469 - DNA, 25 bp, Homo sapien
gaaacgctgcgtggcagtagccctc

SEQ ID NO: 3313470 - DNA, 25 bp, Homo sapien
gcaaacgccccaggatttgcgtaca

SEQ ID NO: 3313471 - DNA, 25 bp, Homo sapien
gacagagataaaggccaccagggca

SEQ ID NO: 3313472 - DNA, 25 bp, Homo sapien
gctttattctctccgccgcaaactt

SEQ ID NO: 3313473 - DNA, 25 bp, Homo sapien
ttattctctccgccgcaaacttaga

SEQ ID NO: 3313474 - DNA, 25 bp, Homo sapien
ttctctccgccgcaaacttagaagt

SEQ ID NO: 3313475 - DNA, 25 bp, Homo sapien
tctctccgccgcaaacttagaagtg

SEQ ID NO: 3313476 - DNA, 25 bp, Homo sapien
tctgcgtgtcaacgtaagactcggt

SEQ ID NO: 3313477 - DNA, 25 bp, Homo sapien
tcaacgtaagactcggtctctggat

SEQ ID NO: 3313478 - DNA, 25 bp, Homo sapien
ttctctctgcgtgtcaacgtaagac

SEQ ID NO: 3313479 - DNA, 25 bp, Homo sapien
gcgtgtcaacgtaagactcggtctc

SEQ ID NO: 3313480 - DNA, 25 bp, Homo sapien
ctccgcgggcgctgctcattcccag

SEQ ID NO: 3313481 - DNA, 25 bp, Homo sapien
tcgtgatcttgatgaaaccaacttg

SEQ ID NO: 3313482 - DNA, 25 bp, Homo sapien
gacccttgcattgtctacataatta

SEQ ID NO: 3313483 - DNA, 25 bp, Homo sapien
gggacgcatgcatcttttcgtgatc

SEQ ID NO: 3313484 - DNA, 25 bp, Homo sapien
ttgctgaaatggagcctggagaccc

SEQ ID NO: 3313485 - DNA, 25 bp, Homo sapien
tagtgactggcacagcccactacat

SEQ ID NO: 3313486 - DNA, 25 bp, Homo sapien
ctattgaccaccacggagttttgac

SEQ ID NO: 3313487 - DNA, 25 bp, Homo sapien
tgttgctcaagctaggacgcagtgg

SEQ ID NO: 3313488 - DNA, 25 bp, Homo sapien
ttgacctactccattcagacctgag

SEQ ID NO: 3313489 - DNA, 25 bp, Homo sapien
caaacaggaagaccccatgctgcgt

SEQ ID NO: 3313490 - DNA, 25 bp, Homo sapien
gcaaacaggaagaccccatgctgcg

SEQ ID NO: 3313491 - DNA, 25 bp, Homo sapien
ggaagaccccatgctgcgtggctgg

SEQ ID NO: 3313492 - DNA, 25 bp, Homo sapien
aggaagaccccatgctgcgtggctg

SEQ ID NO: 3313493 - DNA, 25 bp, Homo sapien
actttgttggatgcaaacaaataca

SEQ ID NO: 3313494 - DNA, 25 bp, Homo sapien
taagagtctcaccaggatttcctgg

SEQ ID NO: 3313495 - DNA, 25 bp, Homo sapien
agtatgttattactgacactcccta

SEQ ID NO: 3313496 - DNA, 25 bp, Homo sapien
ccacacaccttggtgaatgtaagag

SEQ ID NO: 3313497 - DNA, 25 bp, Homo sapien
cccatcactgtccacataggtcaga

SEQ ID NO: 3313498 - DNA, 25 bp, Homo sapien
tgtccacataggtcagattattcat

SEQ ID NO: 3313499 - DNA, 25 bp, Homo sapien
tcactaacatgcatccctgcttttc

SEQ ID NO: 3313500 - DNA, 25 bp, Homo sapien
aacttcactaacatgcatccctgct

SEQ ID NO: 3313501 - DNA, 25 bp, Homo sapien
cttgcccatgtgcttcaccagacat

SEQ ID NO: 3313502 - DNA, 25 bp, Homo sapien
cacatgaacgtttgagcagctacgg

SEQ ID NO: 3313503 - DNA, 25 bp, Homo sapien
caacatggttgacctagaaatggaa

SEQ ID NO: 3313504 - DNA, 25 bp, Homo sapien
gagttagttacatggacactgtgac

SEQ ID NO: 3313505 - DNA, 25 bp, Homo sapien
aagtccacattccagtcagcgggaa

SEQ ID NO: 3313506 - DNA, 25 bp, Homo sapien
ctcatgttcactgtgaggagaggag

SEQ ID NO: 3313507 - DNA, 25 bp, Homo sapien
gaggagaggaggatctttatctcat

SEQ ID NO: 3313508 - DNA, 25 bp, Homo sapien
gaggaggatctttatctcatttgaa

SEQ ID NO: 3313509 - DNA, 25 bp, Homo sapien
gtgaggagaggaggatctttatctc

SEQ ID NO: 3313510 - DNA, 25 bp, Homo sapien
gtgtctgagcaacaacgggttccct

SEQ ID NO: 3313511 - DNA, 25 bp, Homo sapien
ttccacatcgggtgtctgagcaaca

SEQ ID NO: 3313512 - DNA, 25 bp, Homo sapien
agaaaaatttccacatcgggtgtct

SEQ ID NO: 3313513 - DNA, 25 bp, Homo sapien
aaatttccacatcgggtgtctgagc

SEQ ID NO: 3313514 - DNA, 25 bp, Homo sapien
taaacagactgcctagaagtggagc

SEQ ID NO: 3313515 - DNA, 25 bp, Homo sapien
ctccttgagggaaaagactgtgtct

SEQ ID NO: 3313516 - DNA, 25 bp, Homo sapien
gacccagctgcctaactcagtgatt

SEQ ID NO: 3313517 - DNA, 25 bp, Homo sapien
ccttactaggctatgagctccttga

SEQ ID NO: 3313518 - DNA, 25 bp, Homo sapien
ttatgttttcagacagtgatttgct

SEQ ID NO: 3313519 - DNA, 25 bp, Homo sapien
atgttttcagacagtgatttgcttt

SEQ ID NO: 3313520 - DNA, 25 bp, Homo sapien
tgttttcagacagtgatttgcttta

SEQ ID NO: 3313521 - DNA, 25 bp, Homo sapien
tatgttttcagacagtgatttgctt

SEQ ID NO: 3313522 - DNA, 25 bp, Homo sapien
ctagctactccggacgctgagggag

SEQ ID NO: 3313523 - DNA, 25 bp, Homo sapien
agctactccggacgctgagggaggc

SEQ ID NO: 3313524 - DNA, 25 bp, Homo sapien
tcctagctactccggacgctgaggg

SEQ ID NO: 3313525 - DNA, 25 bp, Homo sapien
ctactccggacgctgagggaggctg

SEQ ID NO: 3313526 - DNA, 25 bp, Homo sapien
agtaagttcttacgagatctggtta

SEQ ID NO: 3313527 - DNA, 25 bp, Homo sapien
cgactttgtgataatgagtaagttc

SEQ ID NO: 3313528 - DNA, 25 bp, Homo sapien
tgatgtgcttgcaaagctccctgag

SEQ ID NO: 3313529 - DNA, 25 bp, Homo sapien
atccatcatgtcttggtgtcgactt

SEQ ID NO: 3313530 - DNA, 25 bp, Homo sapien
gtgtgagtttactcattaaagcaca

SEQ ID NO: 3313531 - DNA, 25 bp, Homo sapien
gttgcagctgtgtgagtttactcat

SEQ ID NO: 3313532 - DNA, 25 bp, Homo sapien
aggtggcagcatttgttgcagctgt

SEQ ID NO: 3313533 - DNA, 25 bp, Homo sapien
gcagctgtgtgagtttactcattaa

SEQ ID NO: 3313534 - DNA, 25 bp, Homo sapien
gagggttatactttactgggcacaa

SEQ ID NO: 3313535 - DNA, 25 bp, Homo sapien
tagatgaacattctgagtaactgct

SEQ ID NO: 3313536 - DNA, 25 bp, Homo sapien
aaccaggagatttaagaccgcacca

SEQ ID NO: 3313537 - DNA, 25 bp, Homo sapien
ctgggcacaagtcgtttatgataac

SEQ ID NO: 3313538 - DNA, 25 bp, Homo sapien
ctggcatgcttggatccatgccgac

SEQ ID NO: 3313539 - DNA, 25 bp, Homo sapien
gcatgcttggatccatgccgaccct

SEQ ID NO: 3313540 - DNA, 25 bp, Homo sapien
cccttaggggctatggaccgcatga

SEQ ID NO: 3313541 - DNA, 25 bp, Homo sapien
catgactctatcagcggcactgcca

SEQ ID NO: 3313542 - DNA, 25 bp, Homo sapien
ctgggggcttccctaccggctccag

SEQ ID NO: 3313543 - DNA, 25 bp, Homo sapien
gattgggcccggcaggcgcttcctg

SEQ ID NO: 3313544 - DNA, 25 bp, Homo sapien
tgattgggcccggcaggcgcttcct

SEQ ID NO: 3313545 - DNA, 25 bp, Homo sapien
attgggcccggcaggcgcttcctgg

SEQ ID NO: 3313546 - DNA, 25 bp, Homo sapien
cgcacagcgcccctagaagtgcggg

SEQ ID NO: 3313547 - DNA, 25 bp, Homo sapien
tgtctgtatgctctctcgacgtcag

SEQ ID NO: 3313548 - DNA, 25 bp, Homo sapien
gagccgaggcgagcggcaaggccgg

SEQ ID NO: 3313549 - DNA, 25 bp, Homo sapien
tgtccgtctgtctgtatgctctctc

SEQ ID NO: 3313550 - DNA, 25 bp, Homo sapien
gctataggacttgattctgatcctc

SEQ ID NO: 3313551 - DNA, 25 bp, Homo sapien
ctgctataggacttgattctgatcc

SEQ ID NO: 3313552 - DNA, 25 bp, Homo sapien
tgctataggacttgattctgatcct

SEQ ID NO: 3313553 - DNA, 25 bp, Homo sapien
ctataggacttgattctgatcctcc

SEQ ID NO: 3313554 - DNA, 25 bp, Homo sapien
aaatcctccacaccgactttcagtt

SEQ ID NO: 3313555 - DNA, 25 bp, Homo sapien
tgttccccaaccatcccctaatctc

SEQ ID NO: 3313556 - DNA, 25 bp, Homo sapien
tccctgtatgagaagtgccttttct

SEQ ID NO: 3313557 - DNA, 25 bp, Homo sapien
gaatgcctttgcttatgccctccct

SEQ ID NO: 3313558 - DNA, 25 bp, Homo sapien
cacagttgctctctataaacttaat

SEQ ID NO: 3313559 - DNA, 25 bp, Homo sapien
gacacagttgctctctataaactta

SEQ ID NO: 3313560 - DNA, 25 bp, Homo sapien
acagacacagttgctctctataaac

SEQ ID NO: 3313561 - DNA, 25 bp, Homo sapien
caaaggaaccactattcaaagaagt

SEQ ID NO: 3313562 - DNA, 25 bp, Homo sapien
ttaagctttatcagagagaccagag

SEQ ID NO: 3313563 - DNA, 25 bp, Homo sapien
tcctcaacctcagagattgccaggc

SEQ ID NO: 3313564 - DNA, 25 bp, Homo sapien
tattccagccccatatgtgttacaa

SEQ ID NO: 3313565 - DNA, 25 bp, Homo sapien
taatttgacatcattgctaaggcag

SEQ ID NO: 3313566 - DNA, 25 bp, Homo sapien
cagaaatgttcgtactcactgaagg

SEQ ID NO: 3313567 - DNA, 25 bp, Homo sapien
tcactgaaggcacacagaagttagt

SEQ ID NO: 3313568 - DNA, 25 bp, Homo sapien
ggataactcccacactaaagaatgt

SEQ ID NO: 3313569 - DNA, 25 bp, Homo sapien
gaatgtgagtcgacaacacgtcttt

SEQ ID NO: 3313570 - DNA, 25 bp, Homo sapien
aatagcctgccatgtttgctgctgc

SEQ ID NO: 3313571 - DNA, 25 bp, Homo sapien
tgggtcttcaaagcagaacaataga

SEQ ID NO: 3313572 - DNA, 25 bp, Homo sapien
gccatcttgtgagttagccatccca

SEQ ID NO: 3313573 - DNA, 25 bp, Homo sapien
gcttggactctaggtctgaatgcca

SEQ ID NO: 3313574 - DNA, 25 bp, Homo sapien
tcattaaaggtatcacggtcgccac

SEQ ID NO: 3313575 - DNA, 25 bp, Homo sapien
taaaatgagagtcacttgatgtgcc

SEQ ID NO: 3313576 - DNA, 25 bp, Homo sapien
gcttactaagctttgccagctgctg

SEQ ID NO: 3313577 - DNA, 25 bp, Homo sapien
tatctagcaatcacaacactggctg

SEQ ID NO: 3313578 - DNA, 25 bp, Homo sapien
aataagccacagatgaaatatcaag

SEQ ID NO: 3313579 - DNA, 25 bp, Homo sapien
gaacggttaaataagccacagatga

SEQ ID NO: 3313580 - DNA, 25 bp, Homo sapien
ttaaataagccacagatgaaatatc

SEQ ID NO: 3313581 - DNA, 25 bp, Homo sapien
tagaacggttaaataagccacagat

SEQ ID NO: 3313582 - DNA, 25 bp, Homo sapien
tgtaacatttcaatcgccattccct

SEQ ID NO: 3313583 - DNA, 25 bp, Homo sapien
caaagctagctgtgaaagacctaca

SEQ ID NO: 3313584 - DNA, 25 bp, Homo sapien
tttacccaaatagctaccaccaaga

SEQ ID NO: 3313585 - DNA, 25 bp, Homo sapien
gtattccgtattccccaaagctagc

SEQ ID NO: 3313586 - DNA, 25 bp, Homo sapien
gagcaatcgctcaaatgcgtggcag

SEQ ID NO: 3313587 - DNA, 25 bp, Homo sapien
tgcagggccatcttgttataactgg

SEQ ID NO: 3313588 - DNA, 25 bp, Homo sapien
acaccccggcacaggcttgtttgag

SEQ ID NO: 3313589 - DNA, 25 bp, Homo sapien
tcatgtcctgctaaagctgagaggt

SEQ ID NO: 3313590 - DNA, 25 bp, Homo sapien
cactgaaaatacaacctagattcct

SEQ ID NO: 3313591 - DNA, 25 bp, Homo sapien
ccactgaaaatacaacctagattcc

SEQ ID NO: 3313592 - DNA, 25 bp, Homo sapien
tgaggtctccaggtcaaaaacaaat

SEQ ID NO: 3313593 - DNA, 25 bp, Homo sapien
tagttcgtgtcttctcagtcatgag

SEQ ID NO: 3313594 - DNA, 25 bp, Homo sapien
accaaacaaagggagcgacagctga

SEQ ID NO: 3313595 - DNA, 25 bp, Homo sapien
tatgtcaccttgctgagagatgatg

SEQ ID NO: 3313596 - DNA, 25 bp, Homo sapien
tcagagtatcatcaagagagcaaca

SEQ ID NO: 3313597 - DNA, 25 bp, Homo sapien
catttttacatacagcctgggtggt

SEQ ID NO: 3313598 - DNA, 25 bp, Homo sapien
tatctggacctagctacagagccca

SEQ ID NO: 3313599 - DNA, 25 bp, Homo sapien
ttatgtgggcttaacaaggagtcca

SEQ ID NO: 3313600 - DNA, 25 bp, Homo sapien
taatgaaggcctaactcaggaaaga

SEQ ID NO: 3313601 - DNA, 25 bp, Homo sapien
ggacaagtctcactgaaatcaaaat

SEQ ID NO: 3313602 - DNA, 25 bp, Homo sapien
gcctgggattcaagcttgcaccctg

SEQ ID NO: 3313603 - DNA, 25 bp, Homo sapien
tacctagtctatattagccccgaat

SEQ ID NO: 3313604 - DNA, 25 bp, Homo sapien
gacaaacgagtagtggtcaccagca

SEQ ID NO: 3313605 - DNA, 25 bp, Homo sapien
aatgcagatgataatgcctggagct

SEQ ID NO: 3313606 - DNA, 25 bp, Homo sapien
tcagagactatgaggtgaagcacct

SEQ ID NO: 3313607 - DNA, 25 bp, Homo sapien
ctggaacctagtgggcatgcaggca

SEQ ID NO: 3313608 - DNA, 25 bp, Homo sapien
cacatgcaaatctcaggatgcaagg

SEQ ID NO: 3313609 - DNA, 25 bp, Homo sapien
gggacacatgcaaatctcaggatgc

SEQ ID NO: 3313610 - DNA, 25 bp, Homo sapien
tgcaaatctcaggatgcaaggagct

SEQ ID NO: 3313611 - DNA, 25 bp, Homo sapien
aaatctcaggatgcaaggagctggc

SEQ ID NO: 3313612 - DNA, 25 bp, Homo sapien
gctttcccgtgtgcaattcccacat

SEQ ID NO: 3313613 - DNA, 25 bp, Homo sapien
ccacggcctccttcggtgaggacaa

SEQ ID NO: 3313614 - DNA, 25 bp, Homo sapien
tagttggtcgggctcaggagttcat

SEQ ID NO: 3313615 - DNA, 25 bp, Homo sapien
tcatggtcagctgaaaggtaaaagg

SEQ ID NO: 3313616 - DNA, 25 bp, Homo sapien
caaaacgttcagtcacacgagagca

SEQ ID NO: 3313617 - DNA, 25 bp, Homo sapien
acacgagagcacacgggctccaggg

SEQ ID NO: 3313618 - DNA, 25 bp, Homo sapien
cagggagctccatgtatggactctc

SEQ ID NO: 3313619 - DNA, 25 bp, Homo sapien
tctcctcctttcatcacaaaacgtt

SEQ ID NO: 3313620 - DNA, 25 bp, Homo sapien
tcatcgaataatccgagtgaagatc

SEQ ID NO: 3313621 - DNA, 25 bp, Homo sapien
ccgagtgaagatctgacacaccata

SEQ ID NO: 3313622 - DNA, 25 bp, Homo sapien
actgagtgtcatcgaataatccgag

SEQ ID NO: 3313623 - DNA, 25 bp, Homo sapien
accatagatatagaacgtgttttca

SEQ ID NO: 3313624 - DNA, 25 bp, Homo sapien
ggcaacagtggagcaaagaaattct

SEQ ID NO: 3313625 - DNA, 25 bp, Homo sapien
tggcaacagtggagcaaagaaattc

SEQ ID NO: 3313626 - DNA, 25 bp, Homo sapien
acagtggagcaaagaaattctgagc

SEQ ID NO: 3313627 - DNA, 25 bp, Homo sapien
caacagtggagcaaagaaattctga

SEQ ID NO: 3313628 - DNA, 25 bp, Homo sapien
tgtcaggagacggcaaggtcaagta

SEQ ID NO: 3313629 - DNA, 25 bp, Homo sapien
gtcaggagacggcaaggtcaagtag

SEQ ID NO: 3313630 - DNA, 25 bp, Homo sapien
caggagacggcaaggtcaagtagtc

SEQ ID NO: 3313631 - DNA, 25 bp, Homo sapien
tcaggagacggcaaggtcaagtagt

SEQ ID NO: 3313632 - DNA, 25 bp, Homo sapien
agtttctgttttgacacactgggcc

SEQ ID NO: 3313633 - DNA, 25 bp, Homo sapien
catcgtgtgcccttgctgatccact

SEQ ID NO: 3313634 - DNA, 25 bp, Homo sapien
tatctcgctgcgactacggcggtag

SEQ ID NO: 3313635 - DNA, 25 bp, Homo sapien
tgccaataaagtgcccccatcgtgt

SEQ ID NO: 3313636 - DNA, 25 bp, Homo sapien
catgagagaagctgttgtctgtaac

SEQ ID NO: 3313637 - DNA, 25 bp, Homo sapien
tgtaactagccccttagcatgagag

SEQ ID NO: 3313638 - DNA, 25 bp, Homo sapien
acacaggacccttgattaccgacac

SEQ ID NO: 3313639 - DNA, 25 bp, Homo sapien
tctctgctaatgatagtgtaggccg

SEQ ID NO: 3313640 - DNA, 25 bp, Homo sapien
gtatgaggtagtggtctgaatttat

SEQ ID NO: 3313641 - DNA, 25 bp, Homo sapien
gctattacatatagatctttgatcc

SEQ ID NO: 3313642 - DNA, 25 bp, Homo sapien
aactgttgcctaaccaaaagccata

SEQ ID NO: 3313643 - DNA, 25 bp, Homo sapien
gttgaaaacatgattcttcctccca

SEQ ID NO: 3313644 - DNA, 25 bp, Homo sapien
tccattggtggacatatgaactcat

SEQ ID NO: 3313645 - DNA, 25 bp, Homo sapien
cctcaccagcagttgttattatcaa

SEQ ID NO: 3313646 - DNA, 25 bp, Homo sapien
tagcttaggtagaaactgccataaa

SEQ ID NO: 3313647 - DNA, 25 bp, Homo sapien
tttcctagtgcatagctaggagcag

SEQ ID NO: 3313648 - DNA, 25 bp, Homo sapien
tttctcgaagctttattgtagtacc

SEQ ID NO: 3313649 - DNA, 25 bp, Homo sapien
gtacctttcacatttgagtcttcag

SEQ ID NO: 3313650 - DNA, 25 bp, Homo sapien
tctcacctatcccaaaatcatgaag

SEQ ID NO: 3313651 - DNA, 25 bp, Homo sapien
gaagctattccatgttttctcgaag

SEQ ID NO: 3313652 - DNA, 25 bp, Homo sapien
tcttacattaattgcaggaacctgt

SEQ ID NO: 3313653 - DNA, 25 bp, Homo sapien
ttttcccataaaggtatccacgtga

SEQ ID NO: 3313654 - DNA, 25 bp, Homo sapien
ccttaaccagtggaatgaaaacctg

SEQ ID NO: 3313655 - DNA, 25 bp, Homo sapien
cagccataaatcaggtgtccatatt

SEQ ID NO: 3313656 - DNA, 25 bp, Homo sapien
ctgagtaaggtagatggtatcttta

SEQ ID NO: 3313657 - DNA, 25 bp, Homo sapien
gaagtccagcctgataaagcatttg

SEQ ID NO: 3313658 - DNA, 25 bp, Homo sapien
taaatgtgcgtaatggatctgtgct

SEQ ID NO: 3313659 - DNA, 25 bp, Homo sapien
taccaccttcgtgatgttgtcgatg

SEQ ID NO: 3313660 - DNA, 25 bp, Homo sapien
gaaaaggttatccttcaggaactga

SEQ ID NO: 3313661 - DNA, 25 bp, Homo sapien
gacaattgctggctacatctgaaaa

SEQ ID NO: 3313662 - DNA, 25 bp, Homo sapien
gatgctttagcacttacactgttca

SEQ ID NO: 3313663 - DNA, 25 bp, Homo sapien
cagtaatcaagcaacacatgggccc

SEQ ID NO: 3313664 - DNA, 25 bp, Homo sapien
tctaatgtactgaaggacggccagg

SEQ ID NO: 3313665 - DNA, 25 bp, Homo sapien
taataaaaggacgactcttgtctcc

SEQ ID NO: 3313666 - DNA, 25 bp, Homo sapien
gccccatttgtaggactggacgtaa

SEQ ID NO: 3313667 - DNA, 25 bp, Homo sapien
gacggccaggactgatatccatatt

SEQ ID NO: 3313668 - DNA, 25 bp, Homo sapien
agaggagtctactgtgctacccagc

SEQ ID NO: 3313669 - DNA, 25 bp, Homo sapien
tcagggaaatgcatctggttcaaaa

SEQ ID NO: 3313670 - DNA, 25 bp, Homo sapien
gtaattcactacaacgatgacacgc

SEQ ID NO: 3313671 - DNA, 25 bp, Homo sapien
ggaatgccccacaaacgttaatgtg

SEQ ID NO: 3313672 - DNA, 25 bp, Homo sapien
actttttgggatccacggatggact

SEQ ID NO: 3313673 - DNA, 25 bp, Homo sapien
gactccaaggagcatgtgacaacct

SEQ ID NO: 3313674 - DNA, 25 bp, Homo sapien
tcaaacgatactgttgaagacagcc

SEQ ID NO: 3313675 - DNA, 25 bp, Homo sapien
tgacaacctagcattgtaagcactg

SEQ ID NO: 3313676 - DNA, 25 bp, Homo sapien
gtttttcacatagagtgtcacatag

SEQ ID NO: 3313677 - DNA, 25 bp, Homo sapien
catagtccttgatgtagattggccg

SEQ ID NO: 3313678 - DNA, 25 bp, Homo sapien
tgccagtacgagctctctgatgttt

SEQ ID NO: 3313679 - DNA, 25 bp, Homo sapien
tcagtgaaactgatatgataccaat

SEQ ID NO: 3313680 - DNA, 25 bp, Homo sapien
cgtgttacacacaaccctcaagctg

SEQ ID NO: 3313681 - DNA, 25 bp, Homo sapien
tgacatatttatgccactgatgaaa

SEQ ID NO: 3313682 - DNA, 25 bp, Homo sapien
gaaatgcttgcaacctgtgtaacta

SEQ ID NO: 3313683 - DNA, 25 bp, Homo sapien
aaagcttcagtagcaccgtgttaca

SEQ ID NO: 3313684 - DNA, 25 bp, Homo sapien
tacatctgcagacactataatatga

SEQ ID NO: 3313685 - DNA, 25 bp, Homo sapien
cataaggcaatcacccttgtagcca

SEQ ID NO: 3313686 - DNA, 25 bp, Homo sapien
gaactctagattttaacacacttga

SEQ ID NO: 3313687 - DNA, 25 bp, Homo sapien
tcatagtgtaatagaaatcgcttcc

SEQ ID NO: 3313688 - DNA, 25 bp, Homo sapien
cacaggcaaacataaaatcctgcca

SEQ ID NO: 3313689 - DNA, 25 bp, Homo sapien
gatcagttggataaagggcacaggc

SEQ ID NO: 3313690 - DNA, 25 bp, Homo sapien
gcaacttctgctgtcactgaatcca

SEQ ID NO: 3313691 - DNA, 25 bp, Homo sapien
gaagccctgatcagttggataaagg

SEQ ID NO: 3313692 - DNA, 25 bp, Homo sapien
tattcatattagcatccacaacaga

SEQ ID NO: 3313693 - DNA, 25 bp, Homo sapien
gagttcatagaattcatcctgctca

SEQ ID NO: 3313694 - DNA, 25 bp, Homo sapien
tccccaaacccgaagagtattcata

SEQ ID NO: 3313695 - DNA, 25 bp, Homo sapien
tcctagttcatcacagagttcatag

SEQ ID NO: 3313696 - DNA, 25 bp, Homo sapien
caggagacccttttataggctcttc

SEQ ID NO: 3313697 - DNA, 25 bp, Homo sapien
tgaatctgctgggatccagtttgag

SEQ ID NO: 3313698 - DNA, 25 bp, Homo sapien
aactcagaggttactcggtcctgga

SEQ ID NO: 3313699 - DNA, 25 bp, Homo sapien
taggctcttctataagttccactgt

SEQ ID NO: 3313700 - DNA, 25 bp, Homo sapien
gaaaggctcccgcttctatgataag

SEQ ID NO: 3313701 - DNA, 25 bp, Homo sapien
ctaaaaaatgtgtaagtcgggcagt

SEQ ID NO: 3313702 - DNA, 25 bp, Homo sapien
agtaattttccacgtcctctggcag

SEQ ID NO: 3313703 - DNA, 25 bp, Homo sapien
tgaagtagtaattaccagccacctt

SEQ ID NO: 3313704 - DNA, 25 bp, Homo sapien
tccagatgaggccagagatatgcaa

SEQ ID NO: 3313705 - DNA, 25 bp, Homo sapien
tacatgttcaacaaagggtatagcc

SEQ ID NO: 3313706 - DNA, 25 bp, Homo sapien
gggtatagccagctcttttgattta

SEQ ID NO: 3313707 - DNA, 25 bp, Homo sapien
gatcttctttggacatacatgttca

SEQ ID NO: 3313708 - DNA, 25 bp, Homo sapien
ggccaccaagtttctacagtaatat

SEQ ID NO: 3313709 - DNA, 25 bp, Homo sapien
atgaggccaccaagtttctacagta

SEQ ID NO: 3313710 - DNA, 25 bp, Homo sapien
ggtttccatgtccatgaggccacca

SEQ ID NO: 3313711 - DNA, 25 bp, Homo sapien
aacagtcatgttgtacccagtctgg

SEQ ID NO: 3313712 - DNA, 25 bp, Homo sapien
cttttcccaggttgaagttcaatgc

SEQ ID NO: 3313713 - DNA, 25 bp, Homo sapien
caacttagggatggctacgatcact

SEQ ID NO: 3313714 - DNA, 25 bp, Homo sapien
gttcacaaatagctcaacaatcctt

SEQ ID NO: 3313715 - DNA, 25 bp, Homo sapien
tacgatcacttgaccaccaactggc

SEQ ID NO: 3313716 - DNA, 25 bp, Homo sapien
atatatatatataatatgctaagca

SEQ ID NO: 3313717 - DNA, 25 bp, Homo sapien
tatatatatataatatgctaagcat

SEQ ID NO: 3313718 - DNA, 25 bp, Homo sapien
tatatatatatataatatgctaagc

SEQ ID NO: 3313719 - DNA, 25 bp, Homo sapien
cagagaagcatgtgaaggcccatga

SEQ ID NO: 3313720 - DNA, 25 bp, Homo sapien
aagtggtatctagctgagaccagaa

SEQ ID NO: 3313721 - DNA, 25 bp, Homo sapien
tgttgccccgggagtcacacaatca

SEQ ID NO: 3313722 - DNA, 25 bp, Homo sapien
gaaggatgcctcagctaagtacaga

SEQ ID NO: 3313723 - DNA, 25 bp, Homo sapien
taactctggtgctctcgactttcca

SEQ ID NO: 3313724 - DNA, 25 bp, Homo sapien
ggtgctctcgactttccatgagcct

SEQ ID NO: 3313725 - DNA, 25 bp, Homo sapien
tccaggtttcctaactctggtgctc

SEQ ID NO: 3313726 - DNA, 25 bp, Homo sapien
ttccatgagcctctcgcagcgatgc

SEQ ID NO: 3313727 - DNA, 25 bp, Homo sapien
ccactgcgctcagctcagaccactt

SEQ ID NO: 3313728 - DNA, 25 bp, Homo sapien
cacttctcacaccagattctgttat

SEQ ID NO: 3313729 - DNA, 25 bp, Homo sapien
gaaaacgtatgggtggtagcatggg

SEQ ID NO: 3313730 - DNA, 25 bp, Homo sapien
ctcacaccagattctgttatttata

SEQ ID NO: 3313731 - DNA, 25 bp, Homo sapien
ggccctcagagtagtgctccgggtt

SEQ ID NO: 3313732 - DNA, 25 bp, Homo sapien
aagccagtctaacggtgtgagcaaa

SEQ ID NO: 3313733 - DNA, 25 bp, Homo sapien
gacagaaagccagtctaacggtgtg

SEQ ID NO: 3313734 - DNA, 25 bp, Homo sapien
gtagtgctccgggttatgaagaaaa

SEQ ID NO: 3313735 - DNA, 25 bp, Homo sapien
gaaaatgtgaagtagttcaggtgac

SEQ ID NO: 3313736 - DNA, 25 bp, Homo sapien
tccagattccctgggtaggaaagga

SEQ ID NO: 3313737 - DNA, 25 bp, Homo sapien
ggtgacaaatattataggcttcaat

SEQ ID NO: 3313738 - DNA, 25 bp, Homo sapien
cagtcccaactaaaggaacattgct

SEQ ID NO: 3313739 - DNA, 25 bp, Homo sapien
acctcaggtatgaattcagaagtcc

SEQ ID NO: 3313740 - DNA, 25 bp, Homo sapien
tctggctaaacttgccaacctcagg

SEQ ID NO: 3313741 - DNA, 25 bp, Homo sapien
caaaagcaatcagttcgatctttag

SEQ ID NO: 3313742 - DNA, 25 bp, Homo sapien
tctgaacgtgaagcccaaaagcaat

SEQ ID NO: 3313743 - DNA, 25 bp, Homo sapien
gaacggccagagatgtaaacggaaa

SEQ ID NO: 3313744 - DNA, 25 bp, Homo sapien
taaagagacttacaaggaacggcca

SEQ ID NO: 3313745 - DNA, 25 bp, Homo sapien
catcaaacactggtaagagggtagc

SEQ ID NO: 3313746 - DNA, 25 bp, Homo sapien
cttaggttgctacagggaaagtgga

SEQ ID NO: 3313747 - DNA, 25 bp, Homo sapien
gaacctggtagcgagtgtgagcttt

SEQ ID NO: 3313748 - DNA, 25 bp, Homo sapien
gaaacgcagctcaatggagttcacg

SEQ ID NO: 3313749 - DNA, 25 bp, Homo sapien
tgctgtgctgcatacaacaccgctg

SEQ ID NO: 3313750 - DNA, 25 bp, Homo sapien
cacgtccctgaccacgttggtaata

SEQ ID NO: 3313751 - DNA, 25 bp, Homo sapien
ccaatagtgacttcattgaacagga

SEQ ID NO: 3313752 - DNA, 25 bp, Homo sapien
aaaccgtatccactccctcaagaat

SEQ ID NO: 3313753 - DNA, 25 bp, Homo sapien
tcattgaacaggatttttgaaaccg

SEQ ID NO: 3313754 - DNA, 25 bp, Homo sapien
tattgtctgtttccccaatagtgac

SEQ ID NO: 3313755 - DNA, 25 bp, Homo sapien
gagacccatctgtagttaaggtcat

SEQ ID NO: 3313756 - DNA, 25 bp, Homo sapien
gacccatctgtagttaaggtcatta

SEQ ID NO: 3313757 - DNA, 25 bp, Homo sapien
gttaaggtcattaaatctgtagtaa

SEQ ID NO: 3313758 - DNA, 25 bp, Homo sapien
tctgtagttaaggtcattaaatctg

SEQ ID NO: 3313759 - DNA, 25 bp, Homo sapien
catgtccggcctacagtttatcttg

SEQ ID NO: 3313760 - DNA, 25 bp, Homo sapien
tgtcacggctgaagttacatggcca

SEQ ID NO: 3313761 - DNA, 25 bp, Homo sapien
taagattggcttccccttggagaca

SEQ ID NO: 3313762 - DNA, 25 bp, Homo sapien
tacatggccaagacaaactatggtc

SEQ ID NO: 3313763 - DNA, 25 bp, Homo sapien
ttgctctgggcttccgtgctctcat

SEQ ID NO: 3313764 - DNA, 25 bp, Homo sapien
gccttggacatctttacttcttgct

SEQ ID NO: 3313765 - DNA, 25 bp, Homo sapien
gctctcattgatatagttctcagtt

SEQ ID NO: 3313766 - DNA, 25 bp, Homo sapien
ctgccttggacatctttacttcttg

SEQ ID NO: 3313767 - DNA, 25 bp, Homo sapien
gatgagcttggtataggccaattgc

SEQ ID NO: 3313768 - DNA, 25 bp, Homo sapien
tgagcttggtataggccaattgcac

SEQ ID NO: 3313769 - DNA, 25 bp, Homo sapien
atgagcttggtataggccaattgca

SEQ ID NO: 3313770 - DNA, 25 bp, Homo sapien
tgagtcttctcacatcattattggg

SEQ ID NO: 3313771 - DNA, 25 bp, Homo sapien
gaaatgagtcttctcacatcattat

SEQ ID NO: 3313772 - DNA, 25 bp, Homo sapien
tgagaaatgagtcttctcacatcat

SEQ ID NO: 3313773 - DNA, 25 bp, Homo sapien
ggccgtagctgctggtttagctgaa

SEQ ID NO: 3313774 - DNA, 25 bp, Homo sapien
agcttttgggctcgggagacaggcc

SEQ ID NO: 3313775 - DNA, 25 bp, Homo sapien
gctcgggagacaggccagtgcccat

SEQ ID NO: 3313776 - DNA, 25 bp, Homo sapien
taattgaagcttttgggctcgggag

SEQ ID NO: 3313777 - DNA, 25 bp, Homo sapien
ctggggacgagagcaatgggtaatt

SEQ ID NO: 3313778 - DNA, 25 bp, Homo sapien
aatgggtaagtctttcaatctgttt

SEQ ID NO: 3313779 - DNA, 25 bp, Homo sapien
gggtaagtctttcaatctgtttctg

SEQ ID NO: 3313780 - DNA, 25 bp, Homo sapien
aaaatgggtaagtctttcaatctgt

SEQ ID NO: 3313781 - DNA, 25 bp, Homo sapien
ccaaaatgggtaagtctttcaatct

SEQ ID NO: 3313782 - DNA, 25 bp, Homo sapien
ggtatagatggcgtttcctgctaac

SEQ ID NO: 3313783 - DNA, 25 bp, Homo sapien
taacttctcatgcccctgctctatg

SEQ ID NO: 3313784 - DNA, 25 bp, Homo sapien
gttccttcctgttgctctgctttcc

SEQ ID NO: 3313785 - DNA, 25 bp, Homo sapien
gggtggagatagaaggcacgcccat

SEQ ID NO: 3313786 - DNA, 25 bp, Homo sapien
aagagagggactctttgtatggttt

SEQ ID NO: 3313787 - DNA, 25 bp, Homo sapien
agagagggactctttgtatggtttt

SEQ ID NO: 3313788 - DNA, 25 bp, Homo sapien
taggacaccagcctcccatcatggg

SEQ ID NO: 3313789 - DNA, 25 bp, Homo sapien
caaccactgccctggtggtgctggt

SEQ ID NO: 3313790 - DNA, 25 bp, Homo sapien
gcctcccatcatgggtctcgatctt

SEQ ID NO: 3313791 - DNA, 25 bp, Homo sapien
cagagccaaagctggggcttgggag

SEQ ID NO: 3313792 - DNA, 25 bp, Homo sapien
ttcctggtactcaagcagttgccat

SEQ ID NO: 3313793 - DNA, 25 bp, Homo sapien
gttcctggtactcaagcagttgcca

SEQ ID NO: 3313794 - DNA, 25 bp, Homo sapien
cttaacagccagccccctgtgctgc

SEQ ID NO: 3313795 - DNA, 25 bp, Homo sapien
taacagccagccccctgtgctgcag

SEQ ID NO: 3313796 - DNA, 25 bp, Homo sapien
ttaacagccagccccctgtgctgca

SEQ ID NO: 3313797 - DNA, 25 bp, Homo sapien
acagccagccccctgtgctgcagac

SEQ ID NO: 3313798 - DNA, 25 bp, Homo sapien
tacactgcaggtcatcctcgtgctt

SEQ ID NO: 3313799 - DNA, 25 bp, Homo sapien
tcagaaatctcagtctttgtacact

SEQ ID NO: 3313800 - DNA, 25 bp, Homo sapien
ttgtacactgcaggtcatcctcgtg

SEQ ID NO: 3313801 - DNA, 25 bp, Homo sapien
aatctcagtctttgtacactgcagg

SEQ ID NO: 3313802 - DNA, 25 bp, Homo sapien
gcgatctcctcgtatggtgccttga

SEQ ID NO: 3313803 - DNA, 25 bp, Homo sapien
ggcgatctcctcgtatggtgccttg

SEQ ID NO: 3313804 - DNA, 25 bp, Homo sapien
agttggcgatctcctcgtatggtgc

SEQ ID NO: 3313805 - DNA, 25 bp, Homo sapien
ttggcgatctcctcgtatggtgcct

SEQ ID NO: 3313806 - DNA, 25 bp, Homo sapien
gtgagactccagctctaccttgttc

SEQ ID NO: 3313807 - DNA, 25 bp, Homo sapien
atctcgtcagtcagcccttccaggt

SEQ ID NO: 3313808 - DNA, 25 bp, Homo sapien
tcgtcagtcagcccttccaggtgag

SEQ ID NO: 3313809 - DNA, 25 bp, Homo sapien
ctgcttgaggaaattgatctcgtca

SEQ ID NO: 3313810 - DNA, 25 bp, Homo sapien
cttcatccacatcctcttgatgagg

SEQ ID NO: 3313811 - DNA, 25 bp, Homo sapien
tcatccacatcctcttgatgaggac

SEQ ID NO: 3313812 - DNA, 25 bp, Homo sapien
ttcatccacatcctcttgatgagga

SEQ ID NO: 3313813 - DNA, 25 bp, Homo sapien
ttcagctgctgcctaaggttgttga

SEQ ID NO: 3313814 - DNA, 25 bp, Homo sapien
tcattctccacctctgtacacttat

SEQ ID NO: 3313815 - DNA, 25 bp, Homo sapien
ttcattctccacctctgtacactta

SEQ ID NO: 3313816 - DNA, 25 bp, Homo sapien
ctggcccagagtcttcagctgctgc

SEQ ID NO: 3313817 - DNA, 25 bp, Homo sapien
ttgtccatgttgctctgagccatct

SEQ ID NO: 3313818 - DNA, 25 bp, Homo sapien
gtccatgttgctctgagccatcttc

SEQ ID NO: 3313819 - DNA, 25 bp, Homo sapien
catgttgctctgagccatcttctgc

SEQ ID NO: 3313820 - DNA, 25 bp, Homo sapien
tgttgctctgagccatcttctgctg

SEQ ID NO: 3313821 - DNA, 25 bp, Homo sapien
aggaggctccacttagtctccagca

SEQ ID NO: 3313822 - DNA, 25 bp, Homo sapien
ggaggctccacttagtctccagcat

SEQ ID NO: 3313823 - DNA, 25 bp, Homo sapien
gcaggaggctccacttagtctccag

SEQ ID NO: 3313824 - DNA, 25 bp, Homo sapien
ctgcaggaggctccacttagtctcc

SEQ ID NO: 3313825 - DNA, 25 bp, Homo sapien
tctgctgcttctcctgggtgcgcac

SEQ ID NO: 3313826 - DNA, 25 bp, Homo sapien
gctgcttctcctgggtgcgcacagc

SEQ ID NO: 3313827 - DNA, 25 bp, Homo sapien
tgctgcttctcctgggtgcgcacag

SEQ ID NO: 3313828 - DNA, 25 bp, Homo sapien
tgcttctcctgggtgcgcacagcct

SEQ ID NO: 3313829 - DNA, 25 bp, Homo sapien
tccgcccagacaaccttggaagctg

SEQ ID NO: 3313830 - DNA, 25 bp, Homo sapien
gtggtgatgccacccacgctgctgc

SEQ ID NO: 3313831 - DNA, 25 bp, Homo sapien
atagcctccgcccagacaaccttgg

SEQ ID NO: 3313832 - DNA, 25 bp, Homo sapien
gatggtggtgatgccacccacgctg

SEQ ID NO: 3313833 - DNA, 25 bp, Homo sapien
tgaggagcttatctggacactgggc

SEQ ID NO: 3313834 - DNA, 25 bp, Homo sapien
gaagcctgaggagcttatctggaca

SEQ ID NO: 3313835 - DNA, 25 bp, Homo sapien
gagaagcctgaggagcttatctgga

SEQ ID NO: 3313836 - DNA, 25 bp, Homo sapien
gcctgaggagcttatctggacactg

SEQ ID NO: 3313837 - DNA, 25 bp, Homo sapien
cagtgctcgtgtgcttcttccgggc

SEQ ID NO: 3313838 - DNA, 25 bp, Homo sapien
cattgctgtctgaggccgcctccag

SEQ ID NO: 3313839 - DNA, 25 bp, Homo sapien
ccgcctccagctcagtagtcagctc

SEQ ID NO: 3313840 - DNA, 25 bp, Homo sapien
ctcagtgctcgtgtgcttcttccgg

SEQ ID NO: 3313841 - DNA, 25 bp, Homo sapien
tcttgttcttccttgcgcctagtta

SEQ ID NO: 3313842 - DNA, 25 bp, Homo sapien
gatgcttcttcaactgtcaggtaag

SEQ ID NO: 3313843 - DNA, 25 bp, Homo sapien
tttgtcctcaaactcaactatcttg

SEQ ID NO: 3313844 - DNA, 25 bp, Homo sapien
tagttaccataaacagcctacccgc

SEQ ID NO: 3313845 - DNA, 25 bp, Homo sapien
catggccccatgaaagtgctcactg

SEQ ID NO: 3313846 - DNA, 25 bp, Homo sapien
tccatggccccatgaaagtgctcac

SEQ ID NO: 3313847 - DNA, 25 bp, Homo sapien
ctcaaaatccttagctctagcaatc

SEQ ID NO: 3313848 - DNA, 25 bp, Homo sapien
ggccccatgaaagtgctcactgtat

SEQ ID NO: 3313849 - DNA, 25 bp, Homo sapien
tggaggtgcctgagcccactttcct

SEQ ID NO: 3313850 - DNA, 25 bp, Homo sapien
ctctggaggtgcctgagcccacttt

SEQ ID NO: 3313851 - DNA, 25 bp, Homo sapien
aggtgcctgagcccactttcctgga

SEQ ID NO: 3313852 - DNA, 25 bp, Homo sapien
tctggaggtgcctgagcccactttc

SEQ ID NO: 3313853 - DNA, 25 bp, Homo sapien
aatcttcacaaactatgcagccgac

SEQ ID NO: 3313854 - DNA, 25 bp, Homo sapien
aaatgtttaacatcactatcaggga

SEQ ID NO: 3313855 - DNA, 25 bp, Homo sapien
gagatactcctttactcctgcaaga

SEQ ID NO: 3313856 - DNA, 25 bp, Homo sapien
gatatacaaatagcagaaaaaattt

SEQ ID NO: 3313857 - DNA, 25 bp, Homo sapien
cacggtgagaccatgagaatcgctt

SEQ ID NO: 3313858 - DNA, 25 bp, Homo sapien
taaatctatattaaagaggccaccc

SEQ ID NO: 3313859 - DNA, 25 bp, Homo sapien
tgagcaagatgatgccacttcactc

SEQ ID NO: 3313860 - DNA, 25 bp, Homo sapien
caaatcatgagttataggcaaccaa

SEQ ID NO: 3313861 - DNA, 25 bp, Homo sapien
gcctcccaaagctctcacgtaccag

SEQ ID NO: 3313862 - DNA, 25 bp, Homo sapien
acctcggcctcatagactctttcta

SEQ ID NO: 3313863 - DNA, 25 bp, Homo sapien
cctcatagactctttctatgttggc

SEQ ID NO: 3313864 - DNA, 25 bp, Homo sapien
cgtaccagcacccattggcttaatt

SEQ ID NO: 3313865 - DNA, 25 bp, Homo sapien
taccaggtcagaaatttggcacaac

SEQ ID NO: 3313866 - DNA, 25 bp, Homo sapien
ggtgctcctgaaagtcagccacagt

SEQ ID NO: 3313867 - DNA, 25 bp, Homo sapien
ggcacaaccctagatgaccaccttg

SEQ ID NO: 3313868 - DNA, 25 bp, Homo sapien
tctaaaaatacatcggacaatggtc

SEQ ID NO: 3313869 - DNA, 25 bp, Homo sapien
atttccccccgcagatcacaagatg

SEQ ID NO: 3313870 - DNA, 25 bp, Homo sapien
gatgcaaaggggaagttactaccaa

SEQ ID NO: 3313871 - DNA, 25 bp, Homo sapien
aagcccgtaccccatagcttgggca

SEQ ID NO: 3313872 - DNA, 25 bp, Homo sapien
taccaaaccgacgagaatggcccag

SEQ ID NO: 3313873 - DNA, 25 bp, Homo sapien
aagctgtaactgagctccgcggcgg

SEQ ID NO: 3313874 - DNA, 25 bp, Homo sapien
ccagcgagccgttcccattgcagat

SEQ ID NO: 3313875 - DNA, 25 bp, Homo sapien
gatgctccagttgccacgcaagctg

SEQ ID NO: 3313876 - DNA, 25 bp, Homo sapien
tggaacaaggcgctgtgcacgcagc

SEQ ID NO: 3313877 - DNA, 25 bp, Homo sapien
tcccgcgccaccgagatgtggagag

SEQ ID NO: 3313878 - DNA, 25 bp, Homo sapien
agcgctgcaagggaccggcggtgaa

SEQ ID NO: 3313879 - DNA, 25 bp, Homo sapien
aagggaccggcggtgaagccactca

SEQ ID NO: 3313880 - DNA, 25 bp, Homo sapien
gagagatcgaaaggcagcgctgcaa

SEQ ID NO: 3313881 - DNA, 25 bp, Homo sapien
ggttggtacttttcggtctcatgga

SEQ ID NO: 3313882 - DNA, 25 bp, Homo sapien
tattcatttgcttaacggtgtctct

SEQ ID NO: 3313883 - DNA, 25 bp, Homo sapien
ccatcccctagatacacatcctttg

SEQ ID NO: 3313884 - DNA, 25 bp, Homo sapien
attttgattaaacccaatgtgttag

SEQ ID NO: 3313885 - DNA, 25 bp, Homo sapien
taatcacaagaagggttagtacagt

SEQ ID NO: 3313886 - DNA, 25 bp, Homo sapien
cccaaggataatgaggaactacttt

SEQ ID NO: 3313887 - DNA, 25 bp, Homo sapien
ctgtggtttcaattatctactaggg

SEQ ID NO: 3313888 - DNA, 25 bp, Homo sapien
catagtgtatagtgggtttagttct

SEQ ID NO: 3313889 - DNA, 25 bp, Homo sapien
tactcagttgggtcctatacatggc

SEQ ID NO: 3313890 - DNA, 25 bp, Homo sapien
taccctgaaggagccgttttaagca

SEQ ID NO: 3313891 - DNA, 25 bp, Homo sapien
gaaagccagttagggatccaccgtg

SEQ ID NO: 3313892 - DNA, 25 bp, Homo sapien
tcattggaaaaactgcgtagctggt

SEQ ID NO: 3313893 - DNA, 25 bp, Homo sapien
tacagaagttaaatcagtggcacag

SEQ ID NO: 3313894 - DNA, 25 bp, Homo sapien
cacatgtgtgtgcagacaaggaata

SEQ ID NO: 3313895 - DNA, 25 bp, Homo sapien
ggcacagatagcacttgtcaaacaa

SEQ ID NO: 3313896 - DNA, 25 bp, Homo sapien
ggtaatgcccttgttactacagaag

SEQ ID NO: 3313897 - DNA, 25 bp, Homo sapien
tattcattcatgttaagtcacctga

SEQ ID NO: 3313898 - DNA, 25 bp, Homo sapien
agtcacctgaaatgatatctgttgc

SEQ ID NO: 3313899 - DNA, 25 bp, Homo sapien
tttcaatggatactcaatatcccac

SEQ ID NO: 3313900 - DNA, 25 bp, Homo sapien
gataagtcacttcaacacagcctca

SEQ ID NO: 3313901 - DNA, 25 bp, Homo sapien
cattaaagctacactatccaaatag

SEQ ID NO: 3313902 - DNA, 25 bp, Homo sapien
aagattgtttcccatactgattaat

SEQ ID NO: 3313903 - DNA, 25 bp, Homo sapien
gattgtttcccatactgattaatcc

SEQ ID NO: 3313904 - DNA, 25 bp, Homo sapien
gcagcacattaaagctacactatcc

SEQ ID NO: 3313905 - DNA, 25 bp, Homo sapien
aaacagtgtattggaagatagatta

SEQ ID NO: 3313906 - DNA, 25 bp, Homo sapien
gaatacaaagggtgtttgacttcca

SEQ ID NO: 3313907 - DNA, 25 bp, Homo sapien
ggaagatagattaactaatagctcc

SEQ ID NO: 3313908 - DNA, 25 bp, Homo sapien
atcactcatccattgacaacttgca

SEQ ID NO: 3313909 - DNA, 25 bp, Homo sapien
gaggaatggttttagtctcataacc

SEQ ID NO: 3313910 - DNA, 25 bp, Homo sapien
gtatcctttgatgtgacaactgagc

SEQ ID NO: 3313911 - DNA, 25 bp, Homo sapien
tgttctcttgtaactactttacagt

SEQ ID NO: 3313912 - DNA, 25 bp, Homo sapien
caggtcattcctttattgacatgca

SEQ ID NO: 3313913 - DNA, 25 bp, Homo sapien
tgaggtctgataggggagcagccgg

SEQ ID NO: 3313914 - DNA, 25 bp, Homo sapien
aggggagcagccggataagaaaatc

SEQ ID NO: 3313915 - DNA, 25 bp, Homo sapien
aagtttattccagctataatgcagg

SEQ ID NO: 3313916 - DNA, 25 bp, Homo sapien
tttaaagtttattccagctataatg

SEQ ID NO: 3313917 - DNA, 25 bp, Homo sapien
taaagtttattccagctataatgca

SEQ ID NO: 3313918 - DNA, 25 bp, Homo sapien
gtttattccagctataatgcaggtt

SEQ ID NO: 3313919 - DNA, 25 bp, Homo sapien
tcacatggcatacttctgagtccat

SEQ ID NO: 3313920 - DNA, 25 bp, Homo sapien
ccattcccgagatattctgttgtac

SEQ ID NO: 3313921 - DNA, 25 bp, Homo sapien
gagtccattcccgagatattctgtt

SEQ ID NO: 3313922 - DNA, 25 bp, Homo sapien
acttctgagtccattcccgagatat

SEQ ID NO: 3313923 - DNA, 25 bp, Homo sapien
tggtactcaaagcaatgtgggaaat

SEQ ID NO: 3313924 - DNA, 25 bp, Homo sapien
gcactggtactcaaagcaatgtggg

SEQ ID NO: 3313925 - DNA, 25 bp, Homo sapien
aatagcactggtactcaaagcaatg

SEQ ID NO: 3313926 - DNA, 25 bp, Homo sapien
ctcatcatgaagtcatctctaatga

SEQ ID NO: 3313927 - DNA, 25 bp, Homo sapien
ctacaacatagcgtatttctctgtc

SEQ ID NO: 3313928 - DNA, 25 bp, Homo sapien
acaacatagcgtatttctctgtcca

SEQ ID NO: 3313929 - DNA, 25 bp, Homo sapien
tacaacatagcgtatttctctgtcc

SEQ ID NO: 3313930 - DNA, 25 bp, Homo sapien
caacatagcgtatttctctgtccac

SEQ ID NO: 3313931 - DNA, 25 bp, Homo sapien
tgttttatagatccgtgcaatctct

SEQ ID NO: 3313932 - DNA, 25 bp, Homo sapien
atccgtgcaatctctggcactaggg

SEQ ID NO: 3313933 - DNA, 25 bp, Homo sapien
ttttatagatccgtgcaatctctgg

SEQ ID NO: 3313934 - DNA, 25 bp, Homo sapien
tatagatccgtgcaatctctggcac

SEQ ID NO: 3313935 - DNA, 25 bp, Homo sapien
tttggatcacatagcagtgaacaaa

SEQ ID NO: 3313936 - DNA, 25 bp, Homo sapien
gatcacatagcagtgaacaaatgga

SEQ ID NO: 3313937 - DNA, 25 bp, Homo sapien
tggatcacatagcagtgaacaaatg

SEQ ID NO: 3313938 - DNA, 25 bp, Homo sapien
ctgggtttggatcacatagcagtga

SEQ ID NO: 3313939 - DNA, 25 bp, Homo sapien
gctcctggtaagtaagaagtgctaa

SEQ ID NO: 3313940 - DNA, 25 bp, Homo sapien
acagggttttgtggcatgaaattca

SEQ ID NO: 3313941 - DNA, 25 bp, Homo sapien
tgaaattcactgcagactagccata

SEQ ID NO: 3313942 - DNA, 25 bp, Homo sapien
gtttctaagataggcaactgatgcc

SEQ ID NO: 3313943 - DNA, 25 bp, Homo sapien
ttgagtgccggtatgtgccagcaac

SEQ ID NO: 3313944 - DNA, 25 bp, Homo sapien
gacttggctatacaataactcacag

SEQ ID NO: 3313945 - DNA, 25 bp, Homo sapien
aaaaggtagcttcagttgtgactgc

SEQ ID NO: 3313946 - DNA, 25 bp, Homo sapien
aaatgctctgaaaggttctgaccgg

SEQ ID NO: 3313947 - DNA, 25 bp, Homo sapien
ctgtgatcttagaatatcgagacaa

SEQ ID NO: 3313948 - DNA, 25 bp, Homo sapien
attgttaaagcaggcgaccactgtg

SEQ ID NO: 3313949 - DNA, 25 bp, Homo sapien
ttagaaattgttaaagcaggcgacc

SEQ ID NO: 3313950 - DNA, 25 bp, Homo sapien
gaatatcgagacaaatgctgccatt

SEQ ID NO: 3313951 - DNA, 25 bp, Homo sapien
tataaaccagtgcactaagcaactc

SEQ ID NO: 3313952 - DNA, 25 bp, Homo sapien
taatacagatgagggcggaagcttc

SEQ ID NO: 3313953 - DNA, 25 bp, Homo sapien
tatatatacagcctacacagaaccc

SEQ ID NO: 3313954 - DNA, 25 bp, Homo sapien
taaaggttactgtggccctaccata

SEQ ID NO: 3313955 - DNA, 25 bp, Homo sapien
caccgccttgatatgggctgtcatt

SEQ ID NO: 3313956 - DNA, 25 bp, Homo sapien
agaatacaccgccttgatatgggct

SEQ ID NO: 3313957 - DNA, 25 bp, Homo sapien
tcaaaaagaatacaccgccttgata

SEQ ID NO: 3313958 - DNA, 25 bp, Homo sapien
tacaccgccttgatatgggctgtca

SEQ ID NO: 3313959 - DNA, 25 bp, Homo sapien
agaaaagtatgcttaactcaaattt

SEQ ID NO: 3313960 - DNA, 25 bp, Homo sapien
gaaaagtatgcttaactcaaattta

SEQ ID NO: 3313961 - DNA, 25 bp, Homo sapien
gaagaatcaggttcaaagaaatata

SEQ ID NO: 3313962 - DNA, 25 bp, Homo sapien
caagggacacgagttcaaagaagaa

SEQ ID NO: 3313963 - DNA, 25 bp, Homo sapien
gcaatgaaatgttataggtatcatg

SEQ ID NO: 3313964 - DNA, 25 bp, Homo sapien
ctgatagacatgtaaagtaactgca

SEQ ID NO: 3313965 - DNA, 25 bp, Homo sapien
ccttctccatctcccaagtcttccc

SEQ ID NO: 3313966 - DNA, 25 bp, Homo sapien
ctccatctcccaagtcttccccctt

SEQ ID NO: 3313967 - DNA, 25 bp, Homo sapien
ggtcacttagaatgtgacctgagtt

SEQ ID NO: 3313968 - DNA, 25 bp, Homo sapien
gcttcaaatagcatatactttcacc

SEQ ID NO: 3313969 - DNA, 25 bp, Homo sapien
cctgagtttattagattaacatgtc

SEQ ID NO: 3313970 - DNA, 25 bp, Homo sapien
gcatatactttcacctgatccaata

SEQ ID NO: 3313971 - DNA, 25 bp, Homo sapien
tggcactggcaccactttaagggac

SEQ ID NO: 3313972 - DNA, 25 bp, Homo sapien
taatagcaagccataactgaaagcc

SEQ ID NO: 3313973 - DNA, 25 bp, Homo sapien
tcagtaacctacgtgggaaatgaca

SEQ ID NO: 3313974 - DNA, 25 bp, Homo sapien
tgcaaagttgctccctcacagtgcc

SEQ ID NO: 3313975 - DNA, 25 bp, Homo sapien
acaaatccttaagcgccttagcaag

SEQ ID NO: 3313976 - DNA, 25 bp, Homo sapien
taagttccctataagatcgacaggg

SEQ ID NO: 3313977 - DNA, 25 bp, Homo sapien
gactcatctactaactctaagagca

SEQ ID NO: 3313978 - DNA, 25 bp, Homo sapien
tgtatccttattacctggcacacag

SEQ ID NO: 3313979 - DNA, 25 bp, Homo sapien
ttttagtgcgctctaattctctgaa

SEQ ID NO: 3313980 - DNA, 25 bp, Homo sapien
tctgaaattcttagatggtatccat

SEQ ID NO: 3313981 - DNA, 25 bp, Homo sapien
cccaggatgttttagtgcgctctaa

SEQ ID NO: 3313982 - DNA, 25 bp, Homo sapien
aattctgaatattcaattatccagc

SEQ ID NO: 3313983 - DNA, 25 bp, Homo sapien
cacagggatagacacaaagtacacg

SEQ ID NO: 3313984 - DNA, 25 bp, Homo sapien
tgacaatgctttacacagtgctatg

SEQ ID NO: 3313985 - DNA, 25 bp, Homo sapien
taacacaacgcatggcagatcagag

SEQ ID NO: 3313986 - DNA, 25 bp, Homo sapien
tatactctagaacgtgaacacaggg

SEQ ID NO: 3313987 - DNA, 25 bp, Homo sapien
ggtcccataattgtggcttgccaat

SEQ ID NO: 3313988 - DNA, 25 bp, Homo sapien
ataattgtggcttgccaatgaaaca

SEQ ID NO: 3313989 - DNA, 25 bp, Homo sapien
cccataattgtggcttgccaatgaa

SEQ ID NO: 3313990 - DNA, 25 bp, Homo sapien
aggtcccataattgtggcttgccaa

SEQ ID NO: 3313991 - DNA, 25 bp, Homo sapien
caactggacctgcagaacattgtgc

SEQ ID NO: 3313992 - DNA, 25 bp, Homo sapien
actggacctgcagaacattgtgctg

SEQ ID NO: 3313993 - DNA, 25 bp, Homo sapien
tggacctgcagaacattgtgctgga

SEQ ID NO: 3313994 - DNA, 25 bp, Homo sapien
aactggacctgcagaacattgtgct

SEQ ID NO: 3313995 - DNA, 25 bp, Homo sapien
aaaaagctagactgggcacattggc

SEQ ID NO: 3313996 - DNA, 25 bp, Homo sapien
taagacaccttagctcccagagggc

SEQ ID NO: 3313997 - DNA, 25 bp, Homo sapien
catttgaacagcagaagaccactag

SEQ ID NO: 3313998 - DNA, 25 bp, Homo sapien
taagggtcccactatggcactgact

SEQ ID NO: 3313999 - DNA, 25 bp, Homo sapien
cacacaccctttatatgcttgtctg

SEQ ID NO: 3314000 - DNA, 25 bp, Homo sapien
atcacacaccctttatatgcttgtc

SEQ ID NO: 3314001 - DNA, 25 bp, Homo sapien
tatatgcttgtctgtatagatatac

SEQ ID NO: 3314002 - DNA, 25 bp, Homo sapien
acaccctttatatgcttgtctgtat

SEQ ID NO: 3314003 - DNA, 25 bp, Homo sapien
catcctgaaccaagattcctgggca

SEQ ID NO: 3314004 - DNA, 25 bp, Homo sapien
tgggcaaggctcttaattcatctgt

SEQ ID NO: 3314005 - DNA, 25 bp, Homo sapien
caagcagaccatgtgtagaccaccc

SEQ ID NO: 3314006 - DNA, 25 bp, Homo sapien
cacataatggactggtacttaacaa

SEQ ID NO: 3314007 - DNA, 25 bp, Homo sapien
tataccagacagagtacactaggag

SEQ ID NO: 3314008 - DNA, 25 bp, Homo sapien
cactttacggaaatagagctcatct

SEQ ID NO: 3314009 - DNA, 25 bp, Homo sapien
caggcatttaccaacaacaaggagt

SEQ ID NO: 3314010 - DNA, 25 bp, Homo sapien
tactagcagtcgtacaccacaagtg

SEQ ID NO: 3314011 - DNA, 25 bp, Homo sapien
cactatgggatatgggatttaacag

SEQ ID NO: 3314012 - DNA, 25 bp, Homo sapien
cctgaaaggatgctaggagaaacat

SEQ ID NO: 3314013 - DNA, 25 bp, Homo sapien
tacaaagaacagtaggccaaggtat

SEQ ID NO: 3314014 - DNA, 25 bp, Homo sapien
gacctttactgtagtcactatggga

SEQ ID NO: 3314015 - DNA, 25 bp, Homo sapien
tggttgcagtaagccgcagttgcgc

SEQ ID NO: 3314016 - DNA, 25 bp, Homo sapien
acggtggttgcagtaagccgcagtt

SEQ ID NO: 3314017 - DNA, 25 bp, Homo sapien
gagacggtggttgcagtaagccgca

SEQ ID NO: 3314018 - DNA, 25 bp, Homo sapien
ggcagctgaccaagactccgcctca

SEQ ID NO: 3314019 - DNA, 25 bp, Homo sapien
ggtcatacagaggacagaacgcagt

SEQ ID NO: 3314020 - DNA, 25 bp, Homo sapien
tgtcaaccctattaaagcgtaacgc

SEQ ID NO: 3314021 - DNA, 25 bp, Homo sapien
tttgcacgtcatcacacaaaggtca

SEQ ID NO: 3314022 - DNA, 25 bp, Homo sapien
caaaagcctatatagtggcaaggcc

SEQ ID NO: 3314023 - DNA, 25 bp, Homo sapien
caagcatgcgtgttcattacacaag

SEQ ID NO: 3314024 - DNA, 25 bp, Homo sapien
tacacaaggtactaagaatggattg

SEQ ID NO: 3314025 - DNA, 25 bp, Homo sapien
ttttctttcgatcaccactgaaggt

SEQ ID NO: 3314026 - DNA, 25 bp, Homo sapien
cactgaaggtaaagtcacttaacat

SEQ ID NO: 3314027 - DNA, 25 bp, Homo sapien
taacactgctatggtagcaagctca

SEQ ID NO: 3314028 - DNA, 25 bp, Homo sapien
tttaaatacgacaaattcagctatg

SEQ ID NO: 3314029 - DNA, 25 bp, Homo sapien
gaaactgggcagtaagatatttggt

SEQ ID NO: 3314030 - DNA, 25 bp, Homo sapien
cataacaaggttgaggatacaattc

SEQ ID NO: 3314031 - DNA, 25 bp, Homo sapien
gctcgatcaaatggactaaaggtta

SEQ ID NO: 3314032 - DNA, 25 bp, Homo sapien
tcgaaataggtacgtaacacaagca

SEQ ID NO: 3314033 - DNA, 25 bp, Homo sapien
taaaccgaagagcattccagttcag

SEQ ID NO: 3314034 - DNA, 25 bp, Homo sapien
tctagaagaggtgcctaaaccgaag

SEQ ID NO: 3314035 - DNA, 25 bp, Homo sapien
gagatgccggaaagagcctgaacca

SEQ ID NO: 3314036 - DNA, 25 bp, Homo sapien
aaggagatgccggaaagagcctgaa

SEQ ID NO: 3314037 - DNA, 25 bp, Homo sapien
atgccggaaagagcctgaaccagtt

SEQ ID NO: 3314038 - DNA, 25 bp, Homo sapien
gccggaaagagcctgaaccagttaa

SEQ ID NO: 3314039 - DNA, 25 bp, Homo sapien
tgccttttacatcagttcccggtgt

SEQ ID NO: 3314040 - DNA, 25 bp, Homo sapien
aatagcttcgggtgaaaagctgcaa

SEQ ID NO: 3314041 - DNA, 25 bp, Homo sapien
tcagttcccggtgtccctcggataa

SEQ ID NO: 3314042 - DNA, 25 bp, Homo sapien
cctcggataaatagcttcgggtgaa

SEQ ID NO: 3314043 - DNA, 25 bp, Homo sapien
cacaagtgttctccgtttcctagct

SEQ ID NO: 3314044 - DNA, 25 bp, Homo sapien
caagaagtatatctgcgttctccat

SEQ ID NO: 3314045 - DNA, 25 bp, Homo sapien
ttgccacaagtgttctccgtttcct

SEQ ID NO: 3314046 - DNA, 25 bp, Homo sapien
ttcttcaagaagtatatctgcgttc

SEQ ID NO: 3314047 - DNA, 25 bp, Homo sapien
gggcaggattgtctcgtctcacacc

SEQ ID NO: 3314048 - DNA, 25 bp, Homo sapien
gattgtctcgtctcacaccagctct

SEQ ID NO: 3314049 - DNA, 25 bp, Homo sapien
aggattgtctcgtctcacaccagct

SEQ ID NO: 3314050 - DNA, 25 bp, Homo sapien
gcaggattgtctcgtctcacaccag

SEQ ID NO: 3314051 - DNA, 25 bp, Homo sapien
aaaacggagcagatcagcactcgca

SEQ ID NO: 3314052 - DNA, 25 bp, Homo sapien
cccgaagagcccctgatgaatccag

SEQ ID NO: 3314053 - DNA, 25 bp, Homo sapien
tcccttaagacagccgcgatccggg

SEQ ID NO: 3314054 - DNA, 25 bp, Homo sapien
cttttgcaaaaacggagcagatcag

SEQ ID NO: 3314055 - DNA, 25 bp, Homo sapien
tgctttcggcccgaagtgggggcga

SEQ ID NO: 3314056 - DNA, 25 bp, Homo sapien
gacgccgggctgctttcggtttctg

SEQ ID NO: 3314057 - DNA, 25 bp, Homo sapien
gctataccggcgtcactagggcaaa

SEQ ID NO: 3314058 - DNA, 25 bp, Homo sapien
ggaagcataagactccggacggacg

SEQ ID NO: 3314059 - DNA, 25 bp, Homo sapien
gatgtgtattgctatcctcgcagcg

SEQ ID NO: 3314060 - DNA, 25 bp, Homo sapien
cggcttaggcgcgaggacgcgccca

SEQ ID NO: 3314061 - DNA, 25 bp, Homo sapien
gtccctgaggctccggcttaggcgc

SEQ ID NO: 3314062 - DNA, 25 bp, Homo sapien
ttaggcgcgaggacgcgcccattcc

SEQ ID NO: 3314063 - DNA, 25 bp, Homo sapien
tgtccctgaggctccggcttaggcg

SEQ ID NO: 3314064 - DNA, 25 bp, Homo sapien
cacagccacaagatgtccgctctga

SEQ ID NO: 3314065 - DNA, 25 bp, Homo sapien
gctctgacggaactactgccagctg

SEQ ID NO: 3314066 - DNA, 25 bp, Homo sapien
gccacaagatgtccgctctgacgga

SEQ ID NO: 3314067 - DNA, 25 bp, Homo sapien
gatgtccgctctgacggaactactg

SEQ ID NO: 3314068 - DNA, 25 bp, Homo sapien
aagccagacggcttgcttcccacgt

SEQ ID NO: 3314069 - DNA, 25 bp, Homo sapien
gccgagtgaatacgtgtcaagccct

SEQ ID NO: 3314070 - DNA, 25 bp, Homo sapien
cccgagcacaggaccgatgtgaggc

SEQ ID NO: 3314071 - DNA, 25 bp, Homo sapien
atgtgaggccgaagccagacggctt

SEQ ID NO: 3314072 - DNA, 25 bp, Homo sapien
catcgagaaccggaaggagaccatg

SEQ ID NO: 3314073 - DNA, 25 bp, Homo sapien
aaggtaaaggaagcagccgctgcgc

SEQ ID NO: 3314074 - DNA, 25 bp, Homo sapien
taaacagatcggagattggaccagg

SEQ ID NO: 3314075 - DNA, 25 bp, Homo sapien
cgagtggcggaaacccttaggctca

SEQ ID NO: 3314076 - DNA, 25 bp, Homo sapien
taagttctcgcgagacgcagtaagg

SEQ ID NO: 3314077 - DNA, 25 bp, Homo sapien
cgagaacttcgtggctggctaaccg

SEQ ID NO: 3314078 - DNA, 25 bp, Homo sapien
gggttccgcctccaaaatgcataag

SEQ ID NO: 3314079 - DNA, 25 bp, Homo sapien
taaccgaagcggtagctctgcaatg

SEQ ID NO: 3314080 - DNA, 25 bp, Homo sapien
caggagcagtgcactacatatggga

SEQ ID NO: 3314081 - DNA, 25 bp, Homo sapien
tcataatgagttccctctgaccagt

SEQ ID NO: 3314082 - DNA, 25 bp, Homo sapien
gaagagatgtaacacctgaccatgg

SEQ ID NO: 3314083 - DNA, 25 bp, Homo sapien
tatgggactggaaccatgaatgagc

SEQ ID NO: 3314084 - DNA, 25 bp, Homo sapien
tcagttccactacagggtttaccac

SEQ ID NO: 3314085 - DNA, 25 bp, Homo sapien
catcatctctcgcaaacaaagacag

SEQ ID NO: 3314086 - DNA, 25 bp, Homo sapien
taggattctaatgttcccactaaga

SEQ ID NO: 3314087 - DNA, 25 bp, Homo sapien
gcaaacaaagacagccacttcagag

SEQ ID NO: 3314088 - DNA, 25 bp, Homo sapien
cccttaacccacgtatgcctagcgt

SEQ ID NO: 3314089 - DNA, 25 bp, Homo sapien
catgccccttaacccacgtatgcct

SEQ ID NO: 3314090 - DNA, 25 bp, Homo sapien
aataggggactacaggtattagcca

SEQ ID NO: 3314091 - DNA, 25 bp, Homo sapien
cttaacccacgtatgcctagcgttc

SEQ ID NO: 3314092 - DNA, 25 bp, Homo sapien
atgtgtctcagtgaaaaaattttca

SEQ ID NO: 3314093 - DNA, 25 bp, Homo sapien
tcaaattcttcgtcattaacttttg

SEQ ID NO: 3314094 - DNA, 25 bp, Homo sapien
ggtttgctgaaaaacctgctgaaag

SEQ ID NO: 3314095 - DNA, 25 bp, Homo sapien
gaaagtcttataggagctcccttgt

SEQ ID NO: 3314096 - DNA, 25 bp, Homo sapien
gtaatgtgccagtgttttggcaagg

SEQ ID NO: 3314097 - DNA, 25 bp, Homo sapien
taatgtgccagtgttttggcaaggt

SEQ ID NO: 3314098 - DNA, 25 bp, Homo sapien
ggaattgtggatctggatgttcatt

SEQ ID NO: 3314099 - DNA, 25 bp, Homo sapien
tcaacctacatggaattctttggga

SEQ ID NO: 3314100 - DNA, 25 bp, Homo sapien
attctttgggaattgtggatctgga

SEQ ID NO: 3314101 - DNA, 25 bp, Homo sapien
gttcaacctacatggaattctttgg

SEQ ID NO: 3314102 - DNA, 25 bp, Homo sapien
tgaaaggcactttcggttagaaagc

SEQ ID NO: 3314103 - DNA, 25 bp, Homo sapien
aaaggcactttcggttagaaagcat

SEQ ID NO: 3314104 - DNA, 25 bp, Homo sapien
ccttcacacgagattccgaggaggg

SEQ ID NO: 3314105 - DNA, 25 bp, Homo sapien
tatctcatcgcacacagtatccttt

SEQ ID NO: 3314106 - DNA, 25 bp, Homo sapien
tggtctccagcatctacagacgtta

SEQ ID NO: 3314107 - DNA, 25 bp, Homo sapien
tacagacgttaaaggcccaagagga

SEQ ID NO: 3314108 - DNA, 25 bp, Homo sapien
ctcgcccgccgccaatcggcgcccg

SEQ ID NO: 3314109 - DNA, 25 bp, Homo sapien
cactcgcccgccgccaatcggcgcc

SEQ ID NO: 3314110 - DNA, 25 bp, Homo sapien
actcgcccgccgccaatcggcgccc

SEQ ID NO: 3314111 - DNA, 25 bp, Homo sapien
tcgcccgccgccaatcggcgcccgg

SEQ ID NO: 3314112 - DNA, 25 bp, Homo sapien
cttttcttgaggatccctagtgtca

SEQ ID NO: 3314113 - DNA, 25 bp, Homo sapien
tagtttcgattctctgtaaatcaag

SEQ ID NO: 3314114 - DNA, 25 bp, Homo sapien
aagtcccattacagtgtggctatag

SEQ ID NO: 3314115 - DNA, 25 bp, Homo sapien
caggccaaaacggtatgatcatatt

SEQ ID NO: 3314116 - DNA, 25 bp, Homo sapien
tagatataaataagacagctactgt

SEQ ID NO: 3314117 - DNA, 25 bp, Homo sapien
tgcaaattactaagcactggttaca

SEQ ID NO: 3314118 - DNA, 25 bp, Homo sapien
ttactgaagtcctgttatgtgcaaa

SEQ ID NO: 3314119 - DNA, 25 bp, Homo sapien
actgctataaaggtaactactcaag

SEQ ID NO: 3314120 - DNA, 25 bp, Homo sapien
gagaccacgtcagcctggatgttat

SEQ ID NO: 3314121 - DNA, 25 bp, Homo sapien
agctgagaccacgtcagcctggatg

SEQ ID NO: 3314122 - DNA, 25 bp, Homo sapien
gaccacgtcagcctggatgttattg

SEQ ID NO: 3314123 - DNA, 25 bp, Homo sapien
ccacgtcagcctggatgttattgtc

SEQ ID NO: 3314124 - DNA, 25 bp, Homo sapien
ttcagaatggcttcggttattgcct

SEQ ID NO: 3314125 - DNA, 25 bp, Homo sapien
tggtgtactcgcacttcttggctac

SEQ ID NO: 3314126 - DNA, 25 bp, Homo sapien
tcttggctaccttgcagttcgtcca

SEQ ID NO: 3314127 - DNA, 25 bp, Homo sapien
gctcaaggatgaaacgacatgctat

SEQ ID NO: 3314128 - DNA, 25 bp, Homo sapien
ctcccgaagaagaaacaacagaagg

SEQ ID NO: 3314129 - DNA, 25 bp, Homo sapien
acaacagaaggatagcttgattaat

SEQ ID NO: 3314130 - DNA, 25 bp, Homo sapien
gaagaaacaacagaaggatagcttg

SEQ ID NO: 3314131 - DNA, 25 bp, Homo sapien
gaaacaacagaaggatagcttgatt

SEQ ID NO: 3314132 - DNA, 25 bp, Homo sapien
ggaaaatccgaaagtagtgaatgaa

SEQ ID NO: 3314133 - DNA, 25 bp, Homo sapien
aggaaaatccgaaagtagtgaatga

SEQ ID NO: 3314134 - DNA, 25 bp, Homo sapien
cttgtatacgctagggactggttcc

SEQ ID NO: 3314135 - DNA, 25 bp, Homo sapien
tatgtagaaaagttggccctccagt

SEQ ID NO: 3314136 - DNA, 25 bp, Homo sapien
aaaagtatgcgcgtaagtgtaccca

SEQ ID NO: 3314137 - DNA, 25 bp, Homo sapien
taatagctatccttagccaggtgcc

SEQ ID NO: 3314138 - DNA, 25 bp, Homo sapien
gggcctcactgtcagattaaccaat

SEQ ID NO: 3314139 - DNA, 25 bp, Homo sapien
cacacatgttctagtggttcccata

SEQ ID NO: 3314140 - DNA, 25 bp, Homo sapien
cagttggtcaccagactttggaaaa

SEQ ID NO: 3314141 - DNA, 25 bp, Homo sapien
tgaccagcagcatgtattttagagt

SEQ ID NO: 3314142 - DNA, 25 bp, Homo sapien
ggtggagtacttgatctcaggagta

SEQ ID NO: 3314143 - DNA, 25 bp, Homo sapien
atctcaggagtaccataccagcttg

SEQ ID NO: 3314144 - DNA, 25 bp, Homo sapien
cttgatctcaggagtaccataccag

SEQ ID NO: 3314145 - DNA, 25 bp, Homo sapien
ctgaggtgggtggagtacttgatct

SEQ ID NO: 3314146 - DNA, 25 bp, Homo sapien
catacacatggttaactggttgtaa

SEQ ID NO: 3314147 - DNA, 25 bp, Homo sapien
taaatactataaacactaatatcat

SEQ ID NO: 3314148 - DNA, 25 bp, Homo sapien
ataaacactaatatcatacacatgg

SEQ ID NO: 3314149 - DNA, 25 bp, Homo sapien
tatcatacacatggttaactggttg

SEQ ID NO: 3314150 - DNA, 25 bp, Homo sapien
aaagtccaagaaaagccctgtactg

SEQ ID NO: 3314151 - DNA, 25 bp, Homo sapien
cataagtagagctccatttggagct

SEQ ID NO: 3314152 - DNA, 25 bp, Homo sapien
gaatgcccataagtagagctccatt

SEQ ID NO: 3314153 - DNA, 25 bp, Homo sapien
cagaatgcccataagtagagctcca

SEQ ID NO: 3314154 - DNA, 25 bp, Homo sapien
gcccataagtagagctccatttgga

SEQ ID NO: 3314155 - DNA, 25 bp, Homo sapien
ctagagccagaggacctaacacagc

SEQ ID NO: 3314156 - DNA, 25 bp, Homo sapien
ttgggcatccatgctaaagcaataa

SEQ ID NO: 3314157 - DNA, 25 bp, Homo sapien
gatatgtggttaaaattcgaacaca

SEQ ID NO: 3314158 - DNA, 25 bp, Homo sapien
taaaattcgaacacataatgccaaa

SEQ ID NO: 3314159 - DNA, 25 bp, Homo sapien
tttgggcatccatgctaaagcaata

SEQ ID NO: 3314160 - DNA, 25 bp, Homo sapien
aaaatatgacactgtatcaacatgt

SEQ ID NO: 3314161 - DNA, 25 bp, Homo sapien
tcgttgtagccaaagatatattgta

SEQ ID NO: 3314162 - DNA, 25 bp, Homo sapien
tgtgtttctgaagaaggtcgttgta

SEQ ID NO: 3314163 - DNA, 25 bp, Homo sapien
gataactcagggaatatattcaggg

SEQ ID NO: 3314164 - DNA, 25 bp, Homo sapien
atacttctgctccaactaaaccaaa

SEQ ID NO: 3314165 - DNA, 25 bp, Homo sapien
tacttctgctccaactaaaccaaaa

SEQ ID NO: 3314166 - DNA, 25 bp, Homo sapien
taatcctccagatccatgtaaacca

SEQ ID NO: 3314167 - DNA, 25 bp, Homo sapien
tcctccagatccatgtaaaccaata

SEQ ID NO: 3314168 - DNA, 25 bp, Homo sapien
tgtgcataatcctccagatccatgt

SEQ ID NO: 3314169 - DNA, 25 bp, Homo sapien
gcataatcctccagatccatgtaaa

SEQ ID NO: 3314170 - DNA, 25 bp, Homo sapien
agtcaaaacaaggaatcctctcttc

SEQ ID NO: 3314171 - DNA, 25 bp, Homo sapien
atagaggctatggcgttattaagta

SEQ ID NO: 3314172 - DNA, 25 bp, Homo sapien
gctatggcgttattaagtataccac

SEQ ID NO: 3314173 - DNA, 25 bp, Homo sapien
ggctatggcgttattaagtatacca

SEQ ID NO: 3314174 - DNA, 25 bp, Homo sapien
gaggctatggcgttattaagtatac

SEQ ID NO: 3314175 - DNA, 25 bp, Homo sapien
gcctgggtgaaagacggaggccaca

SEQ ID NO: 3314176 - DNA, 25 bp, Homo sapien
cctgggtgaaagacggaggccacac

SEQ ID NO: 3314177 - DNA, 25 bp, Homo sapien
attgtgtgacactgataacaaagtg

SEQ ID NO: 3314178 - DNA, 25 bp, Homo sapien
tgacactgataacaaagtgagaagg

SEQ ID NO: 3314179 - DNA, 25 bp, Homo sapien
tgtgtgacactgataacaaagtgag

SEQ ID NO: 3314180 - DNA, 25 bp, Homo sapien
gtgtgacactgataacaaagtgaga

SEQ ID NO: 3314181 - DNA, 25 bp, Homo sapien
tcttgcccttgcacatcaaactcta

SEQ ID NO: 3314182 - DNA, 25 bp, Homo sapien
cttgcacatcaaactctaggttctt

SEQ ID NO: 3314183 - DNA, 25 bp, Homo sapien
tctcttccagagcagtatgcctttt

SEQ ID NO: 3314184 - DNA, 25 bp, Homo sapien
tcactggcttccttgggagccatgc

SEQ ID NO: 3314185 - DNA, 25 bp, Homo sapien
ctgaggaaaagactatgctcaagca

SEQ ID NO: 3314186 - DNA, 25 bp, Homo sapien
tgaggaaaagactatgctcaagcat

SEQ ID NO: 3314187 - DNA, 25 bp, Homo sapien
tcatccatactgctagcagccatta

SEQ ID NO: 3314188 - DNA, 25 bp, Homo sapien
tgtcatccatactgctagcagccat

SEQ ID NO: 3314189 - DNA, 25 bp, Homo sapien
gtcatccatactgctagcagccatt

SEQ ID NO: 3314190 - DNA, 25 bp, Homo sapien
aagggacaacaacagcaggagagac

SEQ ID NO: 3314191 - DNA, 25 bp, Homo sapien
gacaacaacagcaggagagacagca

SEQ ID NO: 3314192 - DNA, 25 bp, Homo sapien
gtaagggacaacaacagcaggagag

SEQ ID NO: 3314193 - DNA, 25 bp, Homo sapien
agggacaacaacagcaggagagaca

SEQ ID NO: 3314194 - DNA, 25 bp, Homo sapien
agtggcacatgagtgcaccccacag

SEQ ID NO: 3314195 - DNA, 25 bp, Homo sapien
gaagatgctgccactctgtccccag

SEQ ID NO: 3314196 - DNA, 25 bp, Homo sapien
ctctgtccccagtggcacatgagtg

SEQ ID NO: 3314197 - DNA, 25 bp, Homo sapien
agcaccattgccctggctgacccat

SEQ ID NO: 3314198 - DNA, 25 bp, Homo sapien
cagccaatctgaaacaaacgacctt

SEQ ID NO: 3314199 - DNA, 25 bp, Homo sapien
cctaatagaaatgcccattgccagg

SEQ ID NO: 3314200 - DNA, 25 bp, Homo sapien
taaggcatggacctacagccaatct

SEQ ID NO: 3314201 - DNA, 25 bp, Homo sapien
ttcataatgaagtgtgaaaaaacag

SEQ ID NO: 3314202 - DNA, 25 bp, Homo sapien
agcccagctcttattagaataatgg

SEQ ID NO: 3314203 - DNA, 25 bp, Homo sapien
gctcttattagaataatggtaaggg

SEQ ID NO: 3314204 - DNA, 25 bp, Homo sapien
gtggatcgagtccaagcccagctct

SEQ ID NO: 3314205 - DNA, 25 bp, Homo sapien
gaataatggtaagggcaatgcttct

SEQ ID NO: 3314206 - DNA, 25 bp, Homo sapien
cattcctaatcgtaaaaccagccag

SEQ ID NO: 3314207 - DNA, 25 bp, Homo sapien
tgttaggaacatggacatgttcatt

SEQ ID NO: 3314208 - DNA, 25 bp, Homo sapien
gtgttaggaacatggacatgttcat

SEQ ID NO: 3314209 - DNA, 25 bp, Homo sapien
ttgatgaatggaacattcctaatcg

SEQ ID NO: 3314210 - DNA, 25 bp, Homo sapien
ctaaaggtattctaatgagttgtaa

SEQ ID NO: 3314211 - DNA, 25 bp, Homo sapien
tcccccaataatggcactataaaaa

SEQ ID NO: 3314212 - DNA, 25 bp, Homo sapien
ttttcccccaataatggcactataa

SEQ ID NO: 3314213 - DNA, 25 bp, Homo sapien
ggcactaaaggtattctaatgagtt

SEQ ID NO: 3314214 - DNA, 25 bp, Homo sapien
aagattgaccaggtcatacaccata

SEQ ID NO: 3314215 - DNA, 25 bp, Homo sapien
gaccaggtcatacaccatatcacaa

SEQ ID NO: 3314216 - DNA, 25 bp, Homo sapien
gattgaccaggtcatacaccatatc

SEQ ID NO: 3314217 - DNA, 25 bp, Homo sapien
caccatatcacaaacagtataactc

SEQ ID NO: 3314218 - DNA, 25 bp, Homo sapien
ctcccagttgtagaaggttatgtaa

SEQ ID NO: 3314219 - DNA, 25 bp, Homo sapien
cccagttgtagaaggttatgtaatt

SEQ ID NO: 3314220 - DNA, 25 bp, Homo sapien
gttctcccagttgtagaaggttatg

SEQ ID NO: 3314221 - DNA, 25 bp, Homo sapien
gattgtaggtgatactgtgtatttc

SEQ ID NO: 3314222 - DNA, 25 bp, Homo sapien
gtaatgtcttagtgtctgccttgaa

SEQ ID NO: 3314223 - DNA, 25 bp, Homo sapien
gaaggactatgaagaatatggcccc

SEQ ID NO: 3314224 - DNA, 25 bp, Homo sapien
agaaggactatgaagaatatggccc

SEQ ID NO: 3314225 - DNA, 25 bp, Homo sapien
ttggagtaatgtcttagtgtctgcc

SEQ ID NO: 3314226 - DNA, 25 bp, Homo sapien
tcctgagcaaactgtagtccacact

SEQ ID NO: 3314227 - DNA, 25 bp, Homo sapien
caattagttcctgagcaaactgtag

SEQ ID NO: 3314228 - DNA, 25 bp, Homo sapien
tagaactcctcaattagttcctgag

SEQ ID NO: 3314229 - DNA, 25 bp, Homo sapien
ctgtagtccacactcagtgaataat

SEQ ID NO: 3314230 - DNA, 25 bp, Homo sapien
attacattcaatactcctcttagag

SEQ ID NO: 3314231 - DNA, 25 bp, Homo sapien
tgtaataattacattcaatactcct

SEQ ID NO: 3314232 - DNA, 25 bp, Homo sapien
cagtattattaggatcaatgagact

SEQ ID NO: 3314233 - DNA, 25 bp, Homo sapien
tgtgcagtattattaggatcaatga

SEQ ID NO: 3314234 - DNA, 25 bp, Homo sapien
ctgaggagttgtagatgtttggaag

SEQ ID NO: 3314235 - DNA, 25 bp, Homo sapien
tgaggagttgtagatgtttggaagt

SEQ ID NO: 3314236 - DNA, 25 bp, Homo sapien
gaggagttgtagatgtttggaagtt

SEQ ID NO: 3314237 - DNA, 25 bp, Homo sapien
gaagcacgtttaggatgtgagagaa

SEQ ID NO: 3314238 - DNA, 25 bp, Homo sapien
aatatagagtattgtagaagcacgt

SEQ ID NO: 3314239 - DNA, 25 bp, Homo sapien
tcattgagagcccattatattacag

SEQ ID NO: 3314240 - DNA, 25 bp, Homo sapien
gccaatactttctacccagcaactt

SEQ ID NO: 3314241 - DNA, 25 bp, Homo sapien
taggtatatgtccttcgtcaagacc

SEQ ID NO: 3314242 - DNA, 25 bp, Homo sapien
tatgtccttcgtcaagacccttaac

SEQ ID NO: 3314243 - DNA, 25 bp, Homo sapien
ggtatatgtccttcgtcaagaccct

SEQ ID NO: 3314244 - DNA, 25 bp, Homo sapien
tatatgtccttcgtcaagaccctta

SEQ ID NO: 3314245 - DNA, 25 bp, Homo sapien
gagagacaatgtctgtggctgttcc

SEQ ID NO: 3314246 - DNA, 25 bp, Homo sapien
ggcctaccgcaaggaaacgatcgcg

SEQ ID NO: 3314247 - DNA, 25 bp, Homo sapien
aaggtttatttgcagggatccaccg

SEQ ID NO: 3314248 - DNA, 25 bp, Homo sapien
gaagagcccaagaatcccattgaac

SEQ ID NO: 3314249 - DNA, 25 bp, Homo sapien
caagacggcctgagcttaaactgca

SEQ ID NO: 3314250 - DNA, 25 bp, Homo sapien
tgcaatggtagaagagcacggtctc

SEQ ID NO: 3314251 - DNA, 25 bp, Homo sapien
catcgggttgtagaaatccagggac

SEQ ID NO: 3314252 - DNA, 25 bp, Homo sapien
cattttagccaaaaagcagtgctcg

SEQ ID NO: 3314253 - DNA, 25 bp, Homo sapien
tttccagtaatagaatccgcgcttc

SEQ ID NO: 3314254 - DNA, 25 bp, Homo sapien
agctgcgttgatggtgggcccagaa

SEQ ID NO: 3314255 - DNA, 25 bp, Homo sapien
tatgtggaaagttgtatgtgaaaga

SEQ ID NO: 3314256 - DNA, 25 bp, Homo sapien
gaaatgaaagcggagctgcgttgat

SEQ ID NO: 3314257 - DNA, 25 bp, Homo sapien
cacccaacaaattcagttgatgata

SEQ ID NO: 3314258 - DNA, 25 bp, Homo sapien
catgaaggcttagcattcattatat

SEQ ID NO: 3314259 - DNA, 25 bp, Homo sapien
tacttatgttgcctttcacccaaca

SEQ ID NO: 3314260 - DNA, 25 bp, Homo sapien
gaaatacttatgttgcctttcaccc

SEQ ID NO: 3314261 - DNA, 25 bp, Homo sapien
taagatccgaactgtcgtgtggcaa

SEQ ID NO: 3314262 - DNA, 25 bp, Homo sapien
aaggttcctacccatagggagctga

SEQ ID NO: 3314263 - DNA, 25 bp, Homo sapien
tcatgctgtgattagagtaccctta

SEQ ID NO: 3314264 - DNA, 25 bp, Homo sapien
tactgtgttccatgccctgtgaaaa

SEQ ID NO: 3314265 - DNA, 25 bp, Homo sapien
gaactttgaattctaggtcgaggag

SEQ ID NO: 3314266 - DNA, 25 bp, Homo sapien
tctgctggcaagtcacaatttctga

SEQ ID NO: 3314267 - DNA, 25 bp, Homo sapien
cagcttggtgggattaggatattca

SEQ ID NO: 3314268 - DNA, 25 bp, Homo sapien
cagagatggcctgttacaaagtagg

SEQ ID NO: 3314269 - DNA, 25 bp, Homo sapien
tcagagcctgggcaaatatgaatca

SEQ ID NO: 3314270 - DNA, 25 bp, Homo sapien
gaaggtagactcacatgggccactg

SEQ ID NO: 3314271 - DNA, 25 bp, Homo sapien
tatagatcattaccacccacatgga

SEQ ID NO: 3314272 - DNA, 25 bp, Homo sapien
tggtgggaccaatcagttacagtaa

SEQ ID NO: 3314273 - DNA, 25 bp, Homo sapien
tgccactgtcaacacatccattcca

SEQ ID NO: 3314274 - DNA, 25 bp, Homo sapien
gggcccagtaaaccaataagcagac

SEQ ID NO: 3314275 - DNA, 25 bp, Homo sapien
gatgttcaactttctgcagaagcct

SEQ ID NO: 3314276 - DNA, 25 bp, Homo sapien
agtcttctaattgtttctctccatg

SEQ ID NO: 3314277 - DNA, 25 bp, Homo sapien
aatcatgataagataagcacatata

SEQ ID NO: 3314278 - DNA, 25 bp, Homo sapien
gagttttttattgtttgcaaaagca

SEQ ID NO: 3314279 - DNA, 25 bp, Homo sapien
aaaatggaatcatgataagataagc

SEQ ID NO: 3314280 - DNA, 25 bp, Homo sapien
ttttattgtttgcaaaagcaaattg

SEQ ID NO: 3314281 - DNA, 25 bp, Homo sapien
acattgctgtccagagaccttttta

SEQ ID NO: 3314282 - DNA, 25 bp, Homo sapien
tggttatcccttattccacagagaa

SEQ ID NO: 3314283 - DNA, 25 bp, Homo sapien
cctggagtttggctggtcacattgc

SEQ ID NO: 3314284 - DNA, 25 bp, Homo sapien
gcaatattatcagtgcagatgggaa

SEQ ID NO: 3314285 - DNA, 25 bp, Homo sapien
aatctaggaaatcaataaagtgctt

SEQ ID NO: 3314286 - DNA, 25 bp, Homo sapien
tagatattctaacaaatgcatggtc

SEQ ID NO: 3314287 - DNA, 25 bp, Homo sapien
gttaagtgattgagacatttgccag

SEQ ID NO: 3314288 - DNA, 25 bp, Homo sapien
gaatgcacaaattttcggttaagtg

SEQ ID NO: 3314289 - DNA, 25 bp, Homo sapien
tttcaaggtgtcatgcagaaatagc

SEQ ID NO: 3314290 - DNA, 25 bp, Homo sapien
caaggtgtcatgcagaaatagcagt

SEQ ID NO: 3314291 - DNA, 25 bp, Homo sapien
caatatttcaaggtgtcatgcagaa

SEQ ID NO: 3314292 - DNA, 25 bp, Homo sapien
gtcatgcagaaatagcagttaaaat

SEQ ID NO: 3314293 - DNA, 25 bp, Homo sapien
cgtatcaatactgcaatgcctacgg

SEQ ID NO: 3314294 - DNA, 25 bp, Homo sapien
aatgcctacggtggcaacacaaagg

SEQ ID NO: 3314295 - DNA, 25 bp, Homo sapien
gaaatgtagtcaaaattcgtatcaa

SEQ ID NO: 3314296 - DNA, 25 bp, Homo sapien
tagtcaaaattcgtatcaatactgc

SEQ ID NO: 3314297 - DNA, 25 bp, Homo sapien
gatacctctgctccaattagtccaa

SEQ ID NO: 3314298 - DNA, 25 bp, Homo sapien
caatagatacctctgctccaattag

SEQ ID NO: 3314299 - DNA, 25 bp, Homo sapien
tgctccaattagtccaaaaagaagg

SEQ ID NO: 3314300 - DNA, 25 bp, Homo sapien
gatgcaatagatacctctgctccaa

SEQ ID NO: 3314301 - DNA, 25 bp, Homo sapien
ggtgagtgcatctgaatacaacaaa

SEQ ID NO: 3314302 - DNA, 25 bp, Homo sapien
tgtgttgtcccttgaaaattaaggc

SEQ ID NO: 3314303 - DNA, 25 bp, Homo sapien
gataagcccagggtaatgaagactg

SEQ ID NO: 3314304 - DNA, 25 bp, Homo sapien
gaagcagcactagatttgacaacag

SEQ ID NO: 3314305 - DNA, 25 bp, Homo sapien
tacagagccatacagcgtagcaaca

SEQ ID NO: 3314306 - DNA, 25 bp, Homo sapien
tcagaaatttgtagtagggcccaga

SEQ ID NO: 3314307 - DNA, 25 bp, Homo sapien
cacttgcaggaggtatcagtctctc

SEQ ID NO: 3314308 - DNA, 25 bp, Homo sapien
tgtctatggaagatccccacagaga

SEQ ID NO: 3314309 - DNA, 25 bp, Homo sapien
cagacaaccccaacacaaggaatgt

SEQ ID NO: 3314310 - DNA, 25 bp, Homo sapien
ggaaagccatgaccaacgtgcacag

SEQ ID NO: 3314311 - DNA, 25 bp, Homo sapien
acgtgcacagtcctcctgatccagg

SEQ ID NO: 3314312 - DNA, 25 bp, Homo sapien
gctgaacacagctagcacagacaac

SEQ ID NO: 3314313 - DNA, 25 bp, Homo sapien
ccatatctaggatttagaaagaaaa

SEQ ID NO: 3314314 - DNA, 25 bp, Homo sapien
acaagtgcactacataacatttact

SEQ ID NO: 3314315 - DNA, 25 bp, Homo sapien
tttgctcaattatttcaaatccctg

SEQ ID NO: 3314316 - DNA, 25 bp, Homo sapien
gcagagttagcacactgcaatggtg

SEQ ID NO: 3314317 - DNA, 25 bp, Homo sapien
gtgaattacctgagttcattcccag

SEQ ID NO: 3314318 - DNA, 25 bp, Homo sapien
tattttgtcggttgtactagagcag

SEQ ID NO: 3314319 - DNA, 25 bp, Homo sapien
tgtatctgctatagccacgtgtagc

SEQ ID NO: 3314320 - DNA, 25 bp, Homo sapien
tgtactgaacaaagtggcactagat

SEQ ID NO: 3314321 - DNA, 25 bp, Homo sapien
aactcctctgaggacattaaagaca

SEQ ID NO: 3314322 - DNA, 25 bp, Homo sapien
ctggtcacggcttggaaagtactga

SEQ ID NO: 3314323 - DNA, 25 bp, Homo sapien
agaacagatccagttgccacaccaa

SEQ ID NO: 3314324 - DNA, 25 bp, Homo sapien
gatccagttgccacaccaattacca

SEQ ID NO: 3314325 - DNA, 25 bp, Homo sapien
tatgcccaagcatgtgttgaagcca

SEQ ID NO: 3314326 - DNA, 25 bp, Homo sapien
agaatgtcatcgaagctgccagctg

SEQ ID NO: 3314327 - DNA, 25 bp, Homo sapien
ggttgggacacccttctcaacacca

SEQ ID NO: 3314328 - DNA, 25 bp, Homo sapien
ccagctgccatgagcaaggttggga

SEQ ID NO: 3314329 - DNA, 25 bp, Homo sapien
aaaggagcattgaaggcaccacaac

SEQ ID NO: 3314330 - DNA, 25 bp, Homo sapien
agcattgaaggcaccacaacagctg

SEQ ID NO: 3314331 - DNA, 25 bp, Homo sapien
aaaaggagcattgaaggcaccacaa

SEQ ID NO: 3314332 - DNA, 25 bp, Homo sapien
cattgaaggcaccacaacagctgga

SEQ ID NO: 3314333 - DNA, 25 bp, Homo sapien
tgcagacgttaggtggaatccggta

SEQ ID NO: 3314334 - DNA, 25 bp, Homo sapien
tggaacgaagagacagcagaactgc

SEQ ID NO: 3314335 - DNA, 25 bp, Homo sapien
gaatccggtatctctttaacaggca

SEQ ID NO: 3314336 - DNA, 25 bp, Homo sapien
tttggaacccagtgatgctaggcct

SEQ ID NO: 3314337 - DNA, 25 bp, Homo sapien
aacccagcaggtaatgggcaagaag

SEQ ID NO: 3314338 - DNA, 25 bp, Homo sapien
agtataaatccccattgccatggta

SEQ ID NO: 3314339 - DNA, 25 bp, Homo sapien
tgtgcacgcctccacaatacaggga

SEQ ID NO: 3314340 - DNA, 25 bp, Homo sapien
tacagggacccatggacagtcttac

SEQ ID NO: 3314341 - DNA, 25 bp, Homo sapien
caaggccagcacgaaccagaatgat

SEQ ID NO: 3314342 - DNA, 25 bp, Homo sapien
gacagggctatgcttctcaaagagg

SEQ ID NO: 3314343 - DNA, 25 bp, Homo sapien
tgcacattatcgttgatgactggga

SEQ ID NO: 3314344 - DNA, 25 bp, Homo sapien
gaagaccacttgtgcttgatctgca

SEQ ID NO: 3314345 - DNA, 25 bp, Homo sapien
gaccacctgattttgatttggcaca

SEQ ID NO: 3314346 - DNA, 25 bp, Homo sapien
gccactgctctctcttggcctgaga

SEQ ID NO: 3314347 - DNA, 25 bp, Homo sapien
tgaaatgaacgtgacagcagcttcc

SEQ ID NO: 3314348 - DNA, 25 bp, Homo sapien
ctttgctagtggtctggttgatgta

SEQ ID NO: 3314349 - DNA, 25 bp, Homo sapien
cgttctcagcaaactattgcaagga

SEQ ID NO: 3314350 - DNA, 25 bp, Homo sapien
caattcattttaggcgatcattaaa

SEQ ID NO: 3314351 - DNA, 25 bp, Homo sapien
gatgagttcgtgtcctttacaggga

SEQ ID NO: 3314352 - DNA, 25 bp, Homo sapien
aagtcaggaaacaacaagtgctgga

SEQ ID NO: 3314353 - DNA, 25 bp, Homo sapien
agaaggcagtggaggcaatgtaggt

SEQ ID NO: 3314354 - DNA, 25 bp, Homo sapien
cagtggaggcaatgtaggtaactta

SEQ ID NO: 3314355 - DNA, 25 bp, Homo sapien
aggcagtggaggcaatgtaggtaac

SEQ ID NO: 3314356 - DNA, 25 bp, Homo sapien
gcagtggaggcaatgtaggtaactt

SEQ ID NO: 3314357 - DNA, 25 bp, Homo sapien
caccaatgatggcacaatagaatag

SEQ ID NO: 3314358 - DNA, 25 bp, Homo sapien
caggaagacattcactgccagtaat

SEQ ID NO: 3314359 - DNA, 25 bp, Homo sapien
cacaatagaataggattataattcc

SEQ ID NO: 3314360 - DNA, 25 bp, Homo sapien
cattcactgccagtaattgaccaaa

SEQ ID NO: 3314361 - DNA, 25 bp, Homo sapien
gcccacagaagaacaatgatggtaa

SEQ ID NO: 3314362 - DNA, 25 bp, Homo sapien
cagcccacagaagaacaatgatggt

SEQ ID NO: 3314363 - DNA, 25 bp, Homo sapien
tacagcccacagaagaacaatgatg

SEQ ID NO: 3314364 - DNA, 25 bp, Homo sapien
ctacagcccacagaagaacaatgat

SEQ ID NO: 3314365 - DNA, 25 bp, Homo sapien
gggcataaatcaatctgaacttcca

SEQ ID NO: 3314366 - DNA, 25 bp, Homo sapien
aacctaatttgcctttatagataat

SEQ ID NO: 3314367 - DNA, 25 bp, Homo sapien
ttatcaaattgatggcagaataacc

SEQ ID NO: 3314368 - DNA, 25 bp, Homo sapien
caaaacatcatgttgcacatggtaa

SEQ ID NO: 3314369 - DNA, 25 bp, Homo sapien
gagggcaagccagcatttgtctcag

SEQ ID NO: 3314370 - DNA, 25 bp, Homo sapien
cctgtccagtaaaccatgtggaggg

SEQ ID NO: 3314371 - DNA, 25 bp, Homo sapien
cagtctttgtacgtgatttgcttca

SEQ ID NO: 3314372 - DNA, 25 bp, Homo sapien
gttcatttgcatctatacctttgag

SEQ ID NO: 3314373 - DNA, 25 bp, Homo sapien
tcttgatgcatggagggcgtgtaat

SEQ ID NO: 3314374 - DNA, 25 bp, Homo sapien
ttgatgcatggagggcgtgtaattc

SEQ ID NO: 3314375 - DNA, 25 bp, Homo sapien
gatgcatggagggcgtgtaattcat

SEQ ID NO: 3314376 - DNA, 25 bp, Homo sapien
ttcttgatgcatggagggcgtgtaa

SEQ ID NO: 3314377 - DNA, 25 bp, Homo sapien
cctgtggatggttctgaatcttcat

SEQ ID NO: 3314378 - DNA, 25 bp, Homo sapien
tcctgtggatggttctgaatcttca

SEQ ID NO: 3314379 - DNA, 25 bp, Homo sapien
tataattaagaagatgacacaggga

SEQ ID NO: 3314380 - DNA, 25 bp, Homo sapien
aattaagaagatgacacagggaaga

SEQ ID NO: 3314381 - DNA, 25 bp, Homo sapien
tttataattaagaagatgacacagg

SEQ ID NO: 3314382 - DNA, 25 bp, Homo sapien
taattaagaagatgacacagggaag

SEQ ID NO: 3314383 - DNA, 25 bp, Homo sapien
tcttaaggactcatgcagagcccat

SEQ ID NO: 3314384 - DNA, 25 bp, Homo sapien
gcagagcccattaacccttattttg

SEQ ID NO: 3314385 - DNA, 25 bp, Homo sapien
aagtttattctccttactcatagag

SEQ ID NO: 3314386 - DNA, 25 bp, Homo sapien
ctccttactcatagagaggctctta

SEQ ID NO: 3314387 - DNA, 25 bp, Homo sapien
gcagcattagtgactgatgacagtg

SEQ ID NO: 3314388 - DNA, 25 bp, Homo sapien
aagaattgtccttaagagatcaaga

SEQ ID NO: 3314389 - DNA, 25 bp, Homo sapien
tatgtacctgttaagaaggaaacag

SEQ ID NO: 3314390 - DNA, 25 bp, Homo sapien
gacagcaatctaagagtcatttata

SEQ ID NO: 3314391 - DNA, 25 bp, Homo sapien
tgaagagggattgcaatggcacgat

SEQ ID NO: 3314392 - DNA, 25 bp, Homo sapien
ggctgaagagggattgcaatggcac

SEQ ID NO: 3314393 - DNA, 25 bp, Homo sapien
gaagagggattgcaatggcacgatc

SEQ ID NO: 3314394 - DNA, 25 bp, Homo sapien
ctgaagagggattgcaatggcacga

SEQ ID NO: 3314395 - DNA, 25 bp, Homo sapien
aattagtgccaaggttttcactgcc

SEQ ID NO: 3314396 - DNA, 25 bp, Homo sapien
gacaatgaatgatcagaacactgcc

SEQ ID NO: 3314397 - DNA, 25 bp, Homo sapien
gattttgttgcagaaccatccctga

SEQ ID NO: 3314398 - DNA, 25 bp, Homo sapien
atatcactactattgctgcctggag

SEQ ID NO: 3314399 - DNA, 25 bp, Homo sapien
gcagtctccggcgaagtcgaccagg

SEQ ID NO: 3314400 - DNA, 25 bp, Homo sapien
gtctccggcgaagtcgaccaggctc

SEQ ID NO: 3314401 - DNA, 25 bp, Homo sapien
ctggcagtctccggcgaagtcgacc

SEQ ID NO: 3314402 - DNA, 25 bp, Homo sapien
tccggcgaagtcgaccaggctccgt

SEQ ID NO: 3314403 - DNA, 25 bp, Homo sapien
tgcagataaacggtctcagggcgcg

SEQ ID NO: 3314404 - DNA, 25 bp, Homo sapien
gagtcttcccggagatgacgagaca

SEQ ID NO: 3314405 - DNA, 25 bp, Homo sapien
tacaggctccggagtaagcatgggt

SEQ ID NO: 3314406 - DNA, 25 bp, Homo sapien
taaggtgaccaattaaatggccgga

SEQ ID NO: 3314407 - DNA, 25 bp, Homo sapien
tgcccggtccaaaacctcatagata

SEQ ID NO: 3314408 - DNA, 25 bp, Homo sapien
cataattcggtagtgtagtgcccgg

SEQ ID NO: 3314409 - DNA, 25 bp, Homo sapien
cactagagaagttacagcattttga

SEQ ID NO: 3314410 - DNA, 25 bp, Homo sapien
tatgatacacgaaaagaaacccaag

SEQ ID NO: 3314411 - DNA, 25 bp, Homo sapien
ttgccctgacaatgttacagaatta

SEQ ID NO: 3314412 - DNA, 25 bp, Homo sapien
cagtgtgcatcataccatttggtca

SEQ ID NO: 3314413 - DNA, 25 bp, Homo sapien
ctttgccctgacaatgttacagaat

SEQ ID NO: 3314414 - DNA, 25 bp, Homo sapien
agtatctcagtgtgcatcataccat

SEQ ID NO: 3314415 - DNA, 25 bp, Homo sapien
tgtaagctattgaagccaaactcct

SEQ ID NO: 3314416 - DNA, 25 bp, Homo sapien
caatatcgttttgaggctgaactcc

SEQ ID NO: 3314417 - DNA, 25 bp, Homo sapien
tcttaggcccatgtcaaatatcatt

SEQ ID NO: 3314418 - DNA, 25 bp, Homo sapien
ggatggcatccgttaagtataaaca

SEQ ID NO: 3314419 - DNA, 25 bp, Homo sapien
aaccagaaactatatctgctggcac

SEQ ID NO: 3314420 - DNA, 25 bp, Homo sapien
taatcaggtcataagggtagtgccc

SEQ ID NO: 3314421 - DNA, 25 bp, Homo sapien
gcctatttgtatcaccccagagtca

SEQ ID NO: 3314422 - DNA, 25 bp, Homo sapien
caagaagaggaccatctgcaaacca

SEQ ID NO: 3314423 - DNA, 25 bp, Homo sapien
atcagactcttgcaaacagtgacat

SEQ ID NO: 3314424 - DNA, 25 bp, Homo sapien
gaatcagactcttgcaaacagtgac

SEQ ID NO: 3314425 - DNA, 25 bp, Homo sapien
agaatcagactcttgcaaacagtga

SEQ ID NO: 3314426 - DNA, 25 bp, Homo sapien
aatcagactcttgcaaacagtgaca

SEQ ID NO: 3314427 - DNA, 25 bp, Homo sapien
cagggttaccagttacataagcaga

SEQ ID NO: 3314428 - DNA, 25 bp, Homo sapien
aatgatgacagggttaccagttaca

SEQ ID NO: 3314429 - DNA, 25 bp, Homo sapien
ccatcaatgatgacagggttaccag

SEQ ID NO: 3314430 - DNA, 25 bp, Homo sapien
gatgacagggttaccagttacataa

SEQ ID NO: 3314431 - DNA, 25 bp, Homo sapien
cctgtgactaggataactaaacaat

SEQ ID NO: 3314432 - DNA, 25 bp, Homo sapien
tgatttagaactgctgagtgtcctg

SEQ ID NO: 3314433 - DNA, 25 bp, Homo sapien
taaccaggtttgatacaggctgtat

SEQ ID NO: 3314434 - DNA, 25 bp, Homo sapien
tgcagtgataaacacaaggagacag

SEQ ID NO: 3314435 - DNA, 25 bp, Homo sapien
tcagcagtacccaaatcaaatgagc

SEQ ID NO: 3314436 - DNA, 25 bp, Homo sapien
gcagtacccaaatcaaatgagctat

SEQ ID NO: 3314437 - DNA, 25 bp, Homo sapien
agcttatcagcagtacccaaatcaa

SEQ ID NO: 3314438 - DNA, 25 bp, Homo sapien
gggtaatttagcttatcagcagtac

SEQ ID NO: 3314439 - DNA, 25 bp, Homo sapien
tccttccctcttctcacacattaca

SEQ ID NO: 3314440 - DNA, 25 bp, Homo sapien
ttccctcttctcacacattacagtt

SEQ ID NO: 3314441 - DNA, 25 bp, Homo sapien
ctcttctcacacattacagttcctt

SEQ ID NO: 3314442 - DNA, 25 bp, Homo sapien
tctcacacattacagttccttgttc

SEQ ID NO: 3314443 - DNA, 25 bp, Homo sapien
tgcagttgcgaatcttcccgtcttt

SEQ ID NO: 3314444 - DNA, 25 bp, Homo sapien
gcgaatcttcccgtcttttgtctct

SEQ ID NO: 3314445 - DNA, 25 bp, Homo sapien
gttgcgaatcttcccgtcttttgtc

SEQ ID NO: 3314446 - DNA, 25 bp, Homo sapien
tcttctgcagttgcgaatcttcccg

SEQ ID NO: 3314447 - DNA, 25 bp, Homo sapien
ctcttcaggatttcctctggcttgt

SEQ ID NO: 3314448 - DNA, 25 bp, Homo sapien
tggcttgtattctttcttgtagaga

SEQ ID NO: 3314449 - DNA, 25 bp, Homo sapien
tgtagagatggcgtatcaactgttc

SEQ ID NO: 3314450 - DNA, 25 bp, Homo sapien
tcttgtagagatggcgtatcaactg

SEQ ID NO: 3314451 - DNA, 25 bp, Homo sapien
tgtgattggttcactgagtcacagc

SEQ ID NO: 3314452 - DNA, 25 bp, Homo sapien
cactgagtcacagctagttccttgt

SEQ ID NO: 3314453 - DNA, 25 bp, Homo sapien
tcttctgtgattggttcactgagtc

SEQ ID NO: 3314454 - DNA, 25 bp, Homo sapien
ggttcactgagtcacagctagttcc

SEQ ID NO: 3314455 - DNA, 25 bp, Homo sapien
ctgtacacacatctgttcacaactc

SEQ ID NO: 3314456 - DNA, 25 bp, Homo sapien
cagccacagattttgtgaggccaat

SEQ ID NO: 3314457 - DNA, 25 bp, Homo sapien
tgctggatgaaatctgcagccacag

SEQ ID NO: 3314458 - DNA, 25 bp, Homo sapien
gccaatcacggctgccttggttgtg

SEQ ID NO: 3314459 - DNA, 25 bp, Homo sapien
gacttaattgaaatgctgaacttac

SEQ ID NO: 3314460 - DNA, 25 bp, Homo sapien
ggtggaggaaaggttcaacaattga

SEQ ID NO: 3314461 - DNA, 25 bp, Homo sapien
gaaataatatcagtataggcacaac

SEQ ID NO: 3314462 - DNA, 25 bp, Homo sapien
tagagtcagtttctggatctaggga

SEQ ID NO: 3314463 - DNA, 25 bp, Homo sapien
ttaacattggtagtcttagtttctc

SEQ ID NO: 3314464 - DNA, 25 bp, Homo sapien
ggtagtcttagtttctcatcatcag

SEQ ID NO: 3314465 - DNA, 25 bp, Homo sapien
cattggtagtcttagtttctcatca

SEQ ID NO: 3314466 - DNA, 25 bp, Homo sapien
taacattggtagtcttagtttctca

SEQ ID NO: 3314467 - DNA, 25 bp, Homo sapien
ggctcagatcaactgtctttgtgaa

SEQ ID NO: 3314468 - DNA, 25 bp, Homo sapien
cagatccaactatgccagattgtga

SEQ ID NO: 3314469 - DNA, 25 bp, Homo sapien
ggaggcctaggcacttctttacatt

SEQ ID NO: 3314470 - DNA, 25 bp, Homo sapien
tatgtgtatccttgcaaagagaaga

SEQ ID NO: 3314471 - DNA, 25 bp, Homo sapien
aagatctgtggttaaggaacttaat

SEQ ID NO: 3314472 - DNA, 25 bp, Homo sapien
tctgtggttaaggaacttaatacca

SEQ ID NO: 3314473 - DNA, 25 bp, Homo sapien
caaaagatctgtggttaaggaactt

SEQ ID NO: 3314474 - DNA, 25 bp, Homo sapien
gatctgtggttaaggaacttaatac

SEQ ID NO: 3314475 - DNA, 25 bp, Homo sapien
cagagctcttaatgatgtgcgtgta

SEQ ID NO: 3314476 - DNA, 25 bp, Homo sapien
tcgcagtcctcggaaggagacagac

SEQ ID NO: 3314477 - DNA, 25 bp, Homo sapien
tctgctatgcctgttcccaaacgca

SEQ ID NO: 3314478 - DNA, 25 bp, Homo sapien
gtgcgtgtatgagcatcgcagtcct

SEQ ID NO: 3314479 - DNA, 25 bp, Homo sapien
tgttgataatattgccagatttctg

SEQ ID NO: 3314480 - DNA, 25 bp, Homo sapien
agccacagaagacatgttgataata

SEQ ID NO: 3314481 - DNA, 25 bp, Homo sapien
tattgccagatttctgagcaagcat

SEQ ID NO: 3314482 - DNA, 25 bp, Homo sapien
gaagacatgttgataatattgccag

SEQ ID NO: 3314483 - DNA, 25 bp, Homo sapien
tcccagtccaggtcaggagctgtcg

SEQ ID NO: 3314484 - DNA, 25 bp, Homo sapien
agtccaggtcaggagctgtcgtcat

SEQ ID NO: 3314485 - DNA, 25 bp, Homo sapien
ttcccagtccaggtcaggagctgtc

SEQ ID NO: 3314486 - DNA, 25 bp, Homo sapien
ccagtccaggtcaggagctgtcgtc

SEQ ID NO: 3314487 - DNA, 25 bp, Homo sapien
ctggctccccatgcaatagccttct

SEQ ID NO: 3314488 - DNA, 25 bp, Homo sapien
tggctccccatgcaatagccttctc

SEQ ID NO: 3314489 - DNA, 25 bp, Homo sapien
ccccatgcaatagccttctctggca

SEQ ID NO: 3314490 - DNA, 25 bp, Homo sapien
ccatgcaatagccttctctggcagg

SEQ ID NO: 3314491 - DNA, 25 bp, Homo sapien
gaaggaatgccttgatcatcaggta

SEQ ID NO: 3314492 - DNA, 25 bp, Homo sapien
agtctttctcctcacaatccaggac

SEQ ID NO: 3314493 - DNA, 25 bp, Homo sapien
ttaggaaggaatgccttgatcatca

SEQ ID NO: 3314494 - DNA, 25 bp, Homo sapien
attgagattcatcgagaagtcccag

SEQ ID NO: 3314495 - DNA, 25 bp, Homo sapien
cattaaagagaacatcaagtctctc

SEQ ID NO: 3314496 - DNA, 25 bp, Homo sapien
cttctttgtgacatcaaggacacga

SEQ ID NO: 3314497 - DNA, 25 bp, Homo sapien
tctttgtgacatcaaggacacgagt

SEQ ID NO: 3314498 - DNA, 25 bp, Homo sapien
ttgtgacatcaaggacacgagtttg

SEQ ID NO: 3314499 - DNA, 25 bp, Homo sapien
cattaatgtctgtggctatgacttt

SEQ ID NO: 3314500 - DNA, 25 bp, Homo sapien
tctgtggctatgactttggcacctt

SEQ ID NO: 3314501 - DNA, 25 bp, Homo sapien
tgtctgtggctatgactttggcacc

SEQ ID NO: 3314502 - DNA, 25 bp, Homo sapien
taatgtctgtggctatgactttggc

SEQ ID NO: 3314503 - DNA, 25 bp, Homo sapien
cagcggccgtcaggatgatgacttt

SEQ ID NO: 3314504 - DNA, 25 bp, Homo sapien
aatcccctgagcagcggccgtcagg

SEQ ID NO: 3314505 - DNA, 25 bp, Homo sapien
tgatgactttcccatcaagtcgacc

SEQ ID NO: 3314506 - DNA, 25 bp, Homo sapien
tgactttcccatcaagtcgacccat

SEQ ID NO: 3314507 - DNA, 25 bp, Homo sapien
catgatcttgagcaggcagtaacat

SEQ ID NO: 3314508 - DNA, 25 bp, Homo sapien
ttaatgggttatactgtagaacatg

SEQ ID NO: 3314509 - DNA, 25 bp, Homo sapien
ctaaagacatgtgtgtttaatgggt

SEQ ID NO: 3314510 - DNA, 25 bp, Homo sapien
tactgtagaacatgatcttgagcag

SEQ ID NO: 3314511 - DNA, 25 bp, Homo sapien
catagagccagtcaatgggaaagcc

SEQ ID NO: 3314512 - DNA, 25 bp, Homo sapien
gcagtagtaacacattaacaggcat

SEQ ID NO: 3314513 - DNA, 25 bp, Homo sapien
caatgctgccgatcctcttataaag

SEQ ID NO: 3314514 - DNA, 25 bp, Homo sapien
gacttccagactcttgctatgtgaa

SEQ ID NO: 3314515 - DNA, 25 bp, Homo sapien
ggtgtatggccctgtaaagcctcca

SEQ ID NO: 3314516 - DNA, 25 bp, Homo sapien
cagtgcctgacctactttgatgcaa

SEQ ID NO: 3314517 - DNA, 25 bp, Homo sapien
atcgaggtctgatggctctcacagc

SEQ ID NO: 3314518 - DNA, 25 bp, Homo sapien
tgctaggaatctttgccaaccgaag

SEQ ID NO: 3314519 - DNA, 25 bp, Homo sapien
gagcaacaaacttgagacaaccttt

SEQ ID NO: 3314520 - DNA, 25 bp, Homo sapien
tttgagcaacaaacttgagacaacc

SEQ ID NO: 3314521 - DNA, 25 bp, Homo sapien
aagtcaagcgcttaataatgcatgc

SEQ ID NO: 3314522 - DNA, 25 bp, Homo sapien
ctttgtctggaagcaagtcaagcgc

SEQ ID NO: 3314523 - DNA, 25 bp, Homo sapien
gctgagactatggccataagccacc

SEQ ID NO: 3314524 - DNA, 25 bp, Homo sapien
cactacaacgttgacttccagggct

SEQ ID NO: 3314525 - DNA, 25 bp, Homo sapien
agctgagactatggccataagccac

SEQ ID NO: 3314526 - DNA, 25 bp, Homo sapien
gaatatgctaagtcatgtagataac

SEQ ID NO: 3314527 - DNA, 25 bp, Homo sapien
ttattgaatgtgtaaggtattaaaa

SEQ ID NO: 3314528 - DNA, 25 bp, Homo sapien
acatttattgaatgtgtaaggtatt

SEQ ID NO: 3314529 - DNA, 25 bp, Homo sapien
gaagaaggtattgctatcaccattc

SEQ ID NO: 3314530 - DNA, 25 bp, Homo sapien
tattgctatcaccattctaaattac

SEQ ID NO: 3314531 - DNA, 25 bp, Homo sapien
aagaagaaggtattgctatcaccat

SEQ ID NO: 3314532 - DNA, 25 bp, Homo sapien
gaaggtattgctatcaccattctaa

SEQ ID NO: 3314533 - DNA, 25 bp, Homo sapien
tgcattcatttcctgttcccttatc

SEQ ID NO: 3314534 - DNA, 25 bp, Homo sapien
ttcatttcctgttcccttatctttc

SEQ ID NO: 3314535 - DNA, 25 bp, Homo sapien
cattcatttcctgttcccttatctt

SEQ ID NO: 3314536 - DNA, 25 bp, Homo sapien
cacaatgcattcatttcctgttccc

SEQ ID NO: 3314537 - DNA, 25 bp, Homo sapien
aataaggaatgctggatctccagag

SEQ ID NO: 3314538 - DNA, 25 bp, Homo sapien
gctggatctccagagaagtgacaaa

SEQ ID NO: 3314539 - DNA, 25 bp, Homo sapien
gactgaattgaaattaagctgcact

SEQ ID NO: 3314540 - DNA, 25 bp, Homo sapien
tgcactacaacatcattaccaggga

SEQ ID NO: 3314541 - DNA, 25 bp, Homo sapien
gagttttgcactcaggcacatcctt

SEQ ID NO: 3314542 - DNA, 25 bp, Homo sapien
gcacatccttgcctgaggaggcgtg

SEQ ID NO: 3314543 - DNA, 25 bp, Homo sapien
ggacctggctgagaatccacactct

SEQ ID NO: 3314544 - DNA, 25 bp, Homo sapien
tccttgcctgaggaggcgtgccaag

SEQ ID NO: 3314545 - DNA, 25 bp, Homo sapien
aaacaacattcatcctattacaaaa

SEQ ID NO: 3314546 - DNA, 25 bp, Homo sapien
aaaacaacattcatcctattacaaa

SEQ ID NO: 3314547 - DNA, 25 bp, Homo sapien
tctctctttggacgaaactaaaggc

SEQ ID NO: 3314548 - DNA, 25 bp, Homo sapien
catgagaattaagctctatgaaggc

SEQ ID NO: 3314549 - DNA, 25 bp, Homo sapien
ttttgcttatcaatgtgccaccagg

SEQ ID NO: 3314550 - DNA, 25 bp, Homo sapien
agggtagactaaagacttcacttgg

SEQ ID NO: 3314551 - DNA, 25 bp, Homo sapien
tggtaaagactttgatcggctatca

SEQ ID NO: 3314552 - DNA, 25 bp, Homo sapien
tatcaaaatagcgaactggatgagg

SEQ ID NO: 3314553 - DNA, 25 bp, Homo sapien
tggacaaaggcctaaacttgagtta

SEQ ID NO: 3314554 - DNA, 25 bp, Homo sapien
tgtaaattccgttccttgcattgag

SEQ ID NO: 3314555 - DNA, 25 bp, Homo sapien
ccttccaagttttgacctcattgga

SEQ ID NO: 3314556 - DNA, 25 bp, Homo sapien
ctttaggagactttggagaattctc

SEQ ID NO: 3314557 - DNA, 25 bp, Homo sapien
caagttacttgtttgtgagcctctc

SEQ ID NO: 3314558 - DNA, 25 bp, Homo sapien
gacctcattggaaagatgctgatta

SEQ ID NO: 3314559 - DNA, 25 bp, Homo sapien
tttgtgttttgtacaatgccgctgc

SEQ ID NO: 3314560 - DNA, 25 bp, Homo sapien
gttttgtacaatgccgctgccacct

SEQ ID NO: 3314561 - DNA, 25 bp, Homo sapien
ctttttctagccttatatgttcact

SEQ ID NO: 3314562 - DNA, 25 bp, Homo sapien
ttctagccttatatgttcacttttc

SEQ ID NO: 3314563 - DNA, 25 bp, Homo sapien
tctcaatagccttataacttccttt

SEQ ID NO: 3314564 - DNA, 25 bp, Homo sapien
gatattctacagtggcttttgtagc

SEQ ID NO: 3314565 - DNA, 25 bp, Homo sapien
ttttctctcaatagccttataactt

SEQ ID NO: 3314566 - DNA, 25 bp, Homo sapien
cttccttttgatattctacagtggc

SEQ ID NO: 3314567 - DNA, 25 bp, Homo sapien
taaaaatatgtaaaaagctcagcaa

SEQ ID NO: 3314568 - DNA, 25 bp, Homo sapien
ataaaaatatgtaaaaagctcagca

SEQ ID NO: 3314569 - DNA, 25 bp, Homo sapien
aataaaaatatgtaaaaagctcagc

SEQ ID NO: 3314570 - DNA, 25 bp, Homo sapien
acaataaaaatatgtaaaaagctca

SEQ ID NO: 3314571 - DNA, 25 bp, Homo sapien
caggagaataaacagaactgctgtg

SEQ ID NO: 3314572 - DNA, 25 bp, Homo sapien
tttacaggagaataaacagaactgc

SEQ ID NO: 3314573 - DNA, 25 bp, Homo sapien
taaacagaactgctgtgaaggattt

SEQ ID NO: 3314574 - DNA, 25 bp, Homo sapien
ctgattttttacaggagaataaaca

SEQ ID NO: 3314575 - DNA, 25 bp, Homo sapien
tttaaaatctatggatgtgtacatt

SEQ ID NO: 3314576 - DNA, 25 bp, Homo sapien
atgaaaagtatatgtagtttaggaa

SEQ ID NO: 3314577 - DNA, 25 bp, Homo sapien
gaaaagtatatgtagtttaggaaga

SEQ ID NO: 3314578 - DNA, 25 bp, Homo sapien
cacattaaattaagacaaatacgta

SEQ ID NO: 3314579 - DNA, 25 bp, Homo sapien
tttctctaggtctattttcacaagc

SEQ ID NO: 3314580 - DNA, 25 bp, Homo sapien
tttcattttctctaggtctattttc

SEQ ID NO: 3314581 - DNA, 25 bp, Homo sapien
cattttctctaggtctattttcaca

SEQ ID NO: 3314582 - DNA, 25 bp, Homo sapien
ttttctctaggtctattttcacaag

SEQ ID NO: 3314583 - DNA, 25 bp, Homo sapien
atttcttctttatatggcttagctc

SEQ ID NO: 3314584 - DNA, 25 bp, Homo sapien
cagtgaattttccagctctcgaatt

SEQ ID NO: 3314585 - DNA, 25 bp, Homo sapien
taatcttgctttccttatgcatagc

SEQ ID NO: 3314586 - DNA, 25 bp, Homo sapien
tgaagtacttgaattgtctcttttg

SEQ ID NO: 3314587 - DNA, 25 bp, Homo sapien
gctattatgtcattagtcacctcaa

SEQ ID NO: 3314588 - DNA, 25 bp, Homo sapien
taattgggtatatttctgaaccctc

SEQ ID NO: 3314589 - DNA, 25 bp, Homo sapien
tttcccactgaattgaatgttactg

SEQ ID NO: 3314590 - DNA, 25 bp, Homo sapien
catacacctgtactaaattctcata

SEQ ID NO: 3314591 - DNA, 25 bp, Homo sapien
gaatgttactgttatcatacacctg

SEQ ID NO: 3314592 - DNA, 25 bp, Homo sapien
caccagatgccaaggaagtcttcaa

SEQ ID NO: 3314593 - DNA, 25 bp, Homo sapien
gattcttattgtcttgtgtggtagg

SEQ ID NO: 3314594 - DNA, 25 bp, Homo sapien
gtgtagctcttgatgtaacatgagg

SEQ ID NO: 3314595 - DNA, 25 bp, Homo sapien
taggattaacctgggcaccagatgc

SEQ ID NO: 3314596 - DNA, 25 bp, Homo sapien
actctgttgattcattcattatggc

SEQ ID NO: 3314597 - DNA, 25 bp, Homo sapien
ttctttcctcaaactctgttgattc

SEQ ID NO: 3314598 - DNA, 25 bp, Homo sapien
tcctcaaactctgttgattcattca

SEQ ID NO: 3314599 - DNA, 25 bp, Homo sapien
aactctgttgattcattcattatgg

SEQ ID NO: 3314600 - DNA, 25 bp, Homo sapien
ttacttagtacttgttgaaattcag

SEQ ID NO: 3314601 - DNA, 25 bp, Homo sapien
tatgctagggaactcactttctgag

SEQ ID NO: 3314602 - DNA, 25 bp, Homo sapien
tctgttattaaagaagttattcact

SEQ ID NO: 3314603 - DNA, 25 bp, Homo sapien
tatcaaaacgagtatttaaccactc

SEQ ID NO: 3314604 - DNA, 25 bp, Homo sapien
agatcccttaattctctggatggta

SEQ ID NO: 3314605 - DNA, 25 bp, Homo sapien
catcacaatcttgttgaaggtgctg

SEQ ID NO: 3314606 - DNA, 25 bp, Homo sapien
gaaggtgctgtattttaattagcaa

SEQ ID NO: 3314607 - DNA, 25 bp, Homo sapien
tattctggttcaatttgagatccct

SEQ ID NO: 3314608 - DNA, 25 bp, Homo sapien
ttcagtttcttcatgattctgtgga

SEQ ID NO: 3314609 - DNA, 25 bp, Homo sapien
tcagtttcttcatgattctgtggaa

SEQ ID NO: 3314610 - DNA, 25 bp, Homo sapien
cttcagtttcttcatgattctgtgg

SEQ ID NO: 3314611 - DNA, 25 bp, Homo sapien
caatgtgtttggtttgtaaataggg

SEQ ID NO: 3314612 - DNA, 25 bp, Homo sapien
taaatagggaagtgagaggtttgct

SEQ ID NO: 3314613 - DNA, 25 bp, Homo sapien
ttccatggagcatctctggtttgca

SEQ ID NO: 3314614 - DNA, 25 bp, Homo sapien
atctctggtttgcagtaaaaagttt

SEQ ID NO: 3314615 - DNA, 25 bp, Homo sapien
gcactcataatgatcatccatctct

SEQ ID NO: 3314616 - DNA, 25 bp, Homo sapien
gtcaagagacaatctattcaagcac

SEQ ID NO: 3314617 - DNA, 25 bp, Homo sapien
gatcatccatctctgagtatctctt

SEQ ID NO: 3314618 - DNA, 25 bp, Homo sapien
caatctattcaagcactcataatga

SEQ ID NO: 3314619 - DNA, 25 bp, Homo sapien
tgttgtccatcacttagtaaccttt

SEQ ID NO: 3314620 - DNA, 25 bp, Homo sapien
catcacttagtaaccttttttcagg

SEQ ID NO: 3314621 - DNA, 25 bp, Homo sapien
ttattctagagcacttttctctcag

SEQ ID NO: 3314622 - DNA, 25 bp, Homo sapien
ttttattctagagcacttttctctc

SEQ ID NO: 3314623 - DNA, 25 bp, Homo sapien
ggaagttatccattctcacactttg

SEQ ID NO: 3314624 - DNA, 25 bp, Homo sapien
catgaagtttcttagtcaactggaa

SEQ ID NO: 3314625 - DNA, 25 bp, Homo sapien
tcccttaaggttgctatgaattggt

SEQ ID NO: 3314626 - DNA, 25 bp, Homo sapien
tcactctaagcagttgaagttcttt

SEQ ID NO: 3314627 - DNA, 25 bp, Homo sapien
gagcagtttttagttcctgttgtat

SEQ ID NO: 3314628 - DNA, 25 bp, Homo sapien
tgatagcatacgagcagtttttagt

SEQ ID NO: 3314629 - DNA, 25 bp, Homo sapien
catacgagcagtttttagttcctgt

SEQ ID NO: 3314630 - DNA, 25 bp, Homo sapien
cttttgatagcatacgagcagtttt

SEQ ID NO: 3314631 - DNA, 25 bp, Homo sapien
gtttcttgcaggctttccttgagtt

SEQ ID NO: 3314632 - DNA, 25 bp, Homo sapien
gcaggctttccttgagttggtctct

SEQ ID NO: 3314633 - DNA, 25 bp, Homo sapien
tctaatttactcagagttaagcttt

SEQ ID NO: 3314634 - DNA, 25 bp, Homo sapien
cttgcaggctttccttgagttggtc

SEQ ID NO: 3314635 - DNA, 25 bp, Homo sapien
tttaacgtaataagttgatgttcat

SEQ ID NO: 3314636 - DNA, 25 bp, Homo sapien
ttttaacgtaataagttgatgttca

SEQ ID NO: 3314637 - DNA, 25 bp, Homo sapien
agttgatgttcatttgccttaagtt

SEQ ID NO: 3314638 - DNA, 25 bp, Homo sapien
ttaacgtaataagttgatgttcatt

SEQ ID NO: 3314639 - DNA, 25 bp, Homo sapien
tgcatgtgagcaattcttagttcct

SEQ ID NO: 3314640 - DNA, 25 bp, Homo sapien
cagatgcatgtgagcaattcttagt

SEQ ID NO: 3314641 - DNA, 25 bp, Homo sapien
gatgcatgtgagcaattcttagttc

SEQ ID NO: 3314642 - DNA, 25 bp, Homo sapien
catgtgagcaattcttagttcctct

SEQ ID NO: 3314643 - DNA, 25 bp, Homo sapien
aggccttccctaagttggtcttgct

SEQ ID NO: 3314644 - DNA, 25 bp, Homo sapien
taaagatttcctctactcctcttag

SEQ ID NO: 3314645 - DNA, 25 bp, Homo sapien
ggccatcattttccttagtaacaaa

SEQ ID NO: 3314646 - DNA, 25 bp, Homo sapien
tttagcttctatttctctaaggcct

SEQ ID NO: 3314647 - DNA, 25 bp, Homo sapien
tacactttccagagttacattccag

SEQ ID NO: 3314648 - DNA, 25 bp, Homo sapien
gagttacattccaggcctctaactg

SEQ ID NO: 3314649 - DNA, 25 bp, Homo sapien
tgacctgtttgatacatagtttccc

SEQ ID NO: 3314650 - DNA, 25 bp, Homo sapien
caatcttaatttctgcgtttctaca

SEQ ID NO: 3314651 - DNA, 25 bp, Homo sapien
gttctttctcctgaagttcttggat

SEQ ID NO: 3314652 - DNA, 25 bp, Homo sapien
tgttctttctcctgaagttcttgga

SEQ ID NO: 3314653 - DNA, 25 bp, Homo sapien
acaatccctcttagtttatcaatag

SEQ ID NO: 3314654 - DNA, 25 bp, Homo sapien
tccttcagatgcatgtgaacaattt

SEQ ID NO: 3314655 - DNA, 25 bp, Homo sapien
tcaatagtttcttggtgctccttca

SEQ ID NO: 3314656 - DNA, 25 bp, Homo sapien
cagatgcatgtgaacaatttttagc

SEQ ID NO: 3314657 - DNA, 25 bp, Homo sapien
agaggtgtagagagatggtaactca

SEQ ID NO: 3314658 - DNA, 25 bp, Homo sapien
tagaggtgtagagagatggtaactc

SEQ ID NO: 3314659 - DNA, 25 bp, Homo sapien
gaggtgtagagagatggtaactcac

SEQ ID NO: 3314660 - DNA, 25 bp, Homo sapien
caaggttttcatgtagtatctgagt

SEQ ID NO: 3314661 - DNA, 25 bp, Homo sapien
ggtcatctctttcttttgttacaga

SEQ ID NO: 3314662 - DNA, 25 bp, Homo sapien
gagtcaaccttatattctccgtttc

SEQ ID NO: 3314663 - DNA, 25 bp, Homo sapien
taaggtcatctctttcttttgttac

SEQ ID NO: 3314664 - DNA, 25 bp, Homo sapien
ggtctcaaattgctccttcaagtgt

SEQ ID NO: 3314665 - DNA, 25 bp, Homo sapien
ctgggtctcaaattgctccttcaag

SEQ ID NO: 3314666 - DNA, 25 bp, Homo sapien
gacagctgtcatcttaagaaactga

SEQ ID NO: 3314667 - DNA, 25 bp, Homo sapien
attttctcctgagtctcattgacag

SEQ ID NO: 3314668 - DNA, 25 bp, Homo sapien
aagtctgttggtcaactcgagcatc

SEQ ID NO: 3314669 - DNA, 25 bp, Homo sapien
tagtgctgaatccttggctttgcga

SEQ ID NO: 3314670 - DNA, 25 bp, Homo sapien
ggctttgcgatgctccttgaattgt

SEQ ID NO: 3314671 - DNA, 25 bp, Homo sapien
ggtctctctctatctgaagggcctc

SEQ ID NO: 3314672 - DNA, 25 bp, Homo sapien
tgaatggttgatatttcagtttcct

SEQ ID NO: 3314673 - DNA, 25 bp, Homo sapien
agattcactcttaactcattaatag

SEQ ID NO: 3314674 - DNA, 25 bp, Homo sapien
tcctcttgttctttcaggcaacaat

SEQ ID NO: 3314675 - DNA, 25 bp, Homo sapien
gcaacaatgagcaactttaagttcc

SEQ ID NO: 3314676 - DNA, 25 bp, Homo sapien
ttccaataaatttatagaaacatta

SEQ ID NO: 3314677 - DNA, 25 bp, Homo sapien
tatagaaacattataactattttgt

SEQ ID NO: 3314678 - DNA, 25 bp, Homo sapien
ctttattattagaggaaattccaat

SEQ ID NO: 3314679 - DNA, 25 bp, Homo sapien
gaaacattataactattttgttgta

SEQ ID NO: 3314680 - DNA, 25 bp, Homo sapien
tgctccatctcactcacgattttgg

SEQ ID NO: 3314681 - DNA, 25 bp, Homo sapien
gcagcctctgtaggtcatctttctc

SEQ ID NO: 3314682 - DNA, 25 bp, Homo sapien
tccttagtagtgctgaatctttggg

SEQ ID NO: 3314683 - DNA, 25 bp, Homo sapien
tcttttggacaatccgagcatttct

SEQ ID NO: 3314684 - DNA, 25 bp, Homo sapien
cattcattgtttcctgagtctcact

SEQ ID NO: 3314685 - DNA, 25 bp, Homo sapien
tcttgttcctcatgaagcactggga

SEQ ID NO: 3314686 - DNA, 25 bp, Homo sapien
gctggtcatgtttaacttcaagggc

SEQ ID NO: 3314687 - DNA, 25 bp, Homo sapien
cacattaggcagtaactcttgttcc

SEQ ID NO: 3314688 - DNA, 25 bp, Homo sapien
ttttctaagtcctgagtatttatta

SEQ ID NO: 3314689 - DNA, 25 bp, Homo sapien
gaatatgagcaatttttagttcttc

SEQ ID NO: 3314690 - DNA, 25 bp, Homo sapien
ctcttcttgtaatttggtatgggat

SEQ ID NO: 3314691 - DNA, 25 bp, Homo sapien
tctcagatacgcttcttcttagttc

SEQ ID NO: 3314692 - DNA, 25 bp, Homo sapien
tgtttcaaatgacttctgtaattcc

SEQ ID NO: 3314693 - DNA, 25 bp, Homo sapien
catatgttccaatgtcaattctttg

SEQ ID NO: 3314694 - DNA, 25 bp, Homo sapien
ttctgagccaactcaagcctctctg

SEQ ID NO: 3314695 - DNA, 25 bp, Homo sapien
cttgtacattaagaagttgttgctg

SEQ ID NO: 3314696 - DNA, 25 bp, Homo sapien
acaaaatcattaacagccttgcctc

SEQ ID NO: 3314697 - DNA, 25 bp, Homo sapien
tacacaaaatcattaacagccttgc

SEQ ID NO: 3314698 - DNA, 25 bp, Homo sapien
tacttatattctcaaaattcttaca

SEQ ID NO: 3314699 - DNA, 25 bp, Homo sapien
tcaaaattcttacacaaaatcatta

SEQ ID NO: 3314700 - DNA, 25 bp, Homo sapien
tcttgtgcaactatctcttgttgct

SEQ ID NO: 3314701 - DNA, 25 bp, Homo sapien
aggtcctagaaagctctccttcttt

SEQ ID NO: 3314702 - DNA, 25 bp, Homo sapien
tgtgcaactatctcttgttgctttt

SEQ ID NO: 3314703 - DNA, 25 bp, Homo sapien
tctgccagtctgtcacaggtcctag

SEQ ID NO: 3314704 - DNA, 25 bp, Homo sapien
tttctgctataacactctctaacat

SEQ ID NO: 3314705 - DNA, 25 bp, Homo sapien
cttttctgctataacactctctaac

SEQ ID NO: 3314706 - DNA, 25 bp, Homo sapien
ctttaggtcagtcttcaattgttcc

SEQ ID NO: 3314707 - DNA, 25 bp, Homo sapien
tttcctttaggtcagtcttcaattg

SEQ ID NO: 3314708 - DNA, 25 bp, Homo sapien
taacatctgcagttagtgtttgggt

SEQ ID NO: 3314709 - DNA, 25 bp, Homo sapien
ttaacatctgcagttagtgtttggg

SEQ ID NO: 3314710 - DNA, 25 bp, Homo sapien
ttatctcattatccttaacatctgc

SEQ ID NO: 3314711 - DNA, 25 bp, Homo sapien
catctgcagttagtgtttgggtatt

SEQ ID NO: 3314712 - DNA, 25 bp, Homo sapien
gagcatttcgtaattgttcttgagt

SEQ ID NO: 3314713 - DNA, 25 bp, Homo sapien
ttcctccatatgcaaattcctggaa

SEQ ID NO: 3314714 - DNA, 25 bp, Homo sapien
tggaaacttcctcagaaattttcga

SEQ ID NO: 3314715 - DNA, 25 bp, Homo sapien
gtttcagagactcaagagcatttcg

SEQ ID NO: 3314716 - DNA, 25 bp, Homo sapien
catgttaacagtatcgtgaatatca

SEQ ID NO: 3314717 - DNA, 25 bp, Homo sapien
tctcaatttgcaagctttcttggag

SEQ ID NO: 3314718 - DNA, 25 bp, Homo sapien
ttttgagttggtccctctcaatttg

SEQ ID NO: 3314719 - DNA, 25 bp, Homo sapien
cagtttctcagtaatcagtgttttc

SEQ ID NO: 3314720 - DNA, 25 bp, Homo sapien
ctacagtttgcagcgtagaatctct

SEQ ID NO: 3314721 - DNA, 25 bp, Homo sapien
acagtttgcagcgtagaatctctat

SEQ ID NO: 3314722 - DNA, 25 bp, Homo sapien
tttgcagcgtagaatctctattttc

SEQ ID NO: 3314723 - DNA, 25 bp, Homo sapien
agtttgcagcgtagaatctctattt

SEQ ID NO: 3314724 - DNA, 25 bp, Homo sapien
gatgttattatatggagctcttcag

SEQ ID NO: 3314725 - DNA, 25 bp, Homo sapien
ggtcttcaaagcacccaaactcgaa

SEQ ID NO: 3314726 - DNA, 25 bp, Homo sapien
gagagattaactatttcctgattca

SEQ ID NO: 3314727 - DNA, 25 bp, Homo sapien
tcgactgtgtagttgctaggtcatc

SEQ ID NO: 3314728 - DNA, 25 bp, Homo sapien
ctttctgaagatcagtaatctttcc

SEQ ID NO: 3314729 - DNA, 25 bp, Homo sapien
tagttctttctgaagatcagtaatc

SEQ ID NO: 3314730 - DNA, 25 bp, Homo sapien
gacttcttcccgcaaagcttcattt

SEQ ID NO: 3314731 - DNA, 25 bp, Homo sapien
aaaatgacttcttcccgcaaagctt

SEQ ID NO: 3314732 - DNA, 25 bp, Homo sapien
ctcattaaaagcagattgtaattct

SEQ ID NO: 3314733 - DNA, 25 bp, Homo sapien
ccatctataagggaggtgagttttg

SEQ ID NO: 3314734 - DNA, 25 bp, Homo sapien
tttgcttgtatgtagttgcaagttc

SEQ ID NO: 3314735 - DNA, 25 bp, Homo sapien
gcagattgtaattctttctccagat

SEQ ID NO: 3314736 - DNA, 25 bp, Homo sapien
gtttcagcatcaaacagagtctgct

SEQ ID NO: 3314737 - DNA, 25 bp, Homo sapien
cagcatcaaacagagtctgcttcat

SEQ ID NO: 3314738 - DNA, 25 bp, Homo sapien
ttcagcatcaaacagagtctgcttc

SEQ ID NO: 3314739 - DNA, 25 bp, Homo sapien
cagtttcagcatcaaacagagtctg

SEQ ID NO: 3314740 - DNA, 25 bp, Homo sapien
tctctaagcagctctacttttgaac

SEQ ID NO: 3314741 - DNA, 25 bp, Homo sapien
tgagagtctatgtattcctgtagct

SEQ ID NO: 3314742 - DNA, 25 bp, Homo sapien
cagctctacttttgaactgagttca

SEQ ID NO: 3314743 - DNA, 25 bp, Homo sapien
caatgagtatgacaagtccattttt

SEQ ID NO: 3314744 - DNA, 25 bp, Homo sapien
tatatacttctgcatgcttaactaa

SEQ ID NO: 3314745 - DNA, 25 bp, Homo sapien
tgcatgcttaactaaattctttaag

SEQ ID NO: 3314746 - DNA, 25 bp, Homo sapien
gattatatacttctgcatgcttaac

SEQ ID NO: 3314747 - DNA, 25 bp, Homo sapien
tacttctgcatgcttaactaaattc

SEQ ID NO: 3314748 - DNA, 25 bp, Homo sapien
taagttctcttaacgtgtagcctaa

SEQ ID NO: 3314749 - DNA, 25 bp, Homo sapien
tgagtccctaaagtctgatggtttc

SEQ ID NO: 3314750 - DNA, 25 bp, Homo sapien
tcactttgcaagtctgataacaact

SEQ ID NO: 3314751 - DNA, 25 bp, Homo sapien
catctgtggcctctaggttaaggac

SEQ ID NO: 3314752 - DNA, 25 bp, Homo sapien
gccagtaatgagaaaggagacttga

SEQ ID NO: 3314753 - DNA, 25 bp, Homo sapien
cccaggaatataagaatggttcatc

SEQ ID NO: 3314754 - DNA, 25 bp, Homo sapien
tctaccacattacctaccaggactg

SEQ ID NO: 3314755 - DNA, 25 bp, Homo sapien
gaacagacagaaaaaccctgaacaa

SEQ ID NO: 3314756 - DNA, 25 bp, Homo sapien
tgagttcaactcactttctatattc

SEQ ID NO: 3314757 - DNA, 25 bp, Homo sapien
ttctttctagagcctcaaattcatc

SEQ ID NO: 3314758 - DNA, 25 bp, Homo sapien
tttctagagcctcaaattcatccaa

SEQ ID NO: 3314759 - DNA, 25 bp, Homo sapien
tcagcacgaagtgagttcaactcac

SEQ ID NO: 3314760 - DNA, 25 bp, Homo sapien
ggattccattctatctcacttaatg

SEQ ID NO: 3314761 - DNA, 25 bp, Homo sapien
ttactgaaaacatcagactctgaac

SEQ ID NO: 3314762 - DNA, 25 bp, Homo sapien
acttaatgtatcaagagtgttactg

SEQ ID NO: 3314763 - DNA, 25 bp, Homo sapien
taatgtatcaagagtgttactgaaa

SEQ ID NO: 3314764 - DNA, 25 bp, Homo sapien
ttaaattgatctgcatagtttgagt

SEQ ID NO: 3314765 - DNA, 25 bp, Homo sapien
tcatcaatttctcgtaataaattta

SEQ ID NO: 3314766 - DNA, 25 bp, Homo sapien
aaatttatagaaagcttatgtgttt

SEQ ID NO: 3314767 - DNA, 25 bp, Homo sapien
aattgatctgcatagtttgagttct

SEQ ID NO: 3314768 - DNA, 25 bp, Homo sapien
taattcctgttgcaacgtgagggaa

SEQ ID NO: 3314769 - DNA, 25 bp, Homo sapien
tgcctgagcccgcgtctctaaagaa

SEQ ID NO: 3314770 - DNA, 25 bp, Homo sapien
tgagggaagaagaggtcaccagcat

SEQ ID NO: 3314771 - DNA, 25 bp, Homo sapien
caccagcatccgtgttaagttttca

SEQ ID NO: 3314772 - DNA, 25 bp, Homo sapien
ttcatatatttagcagtactggcaa

SEQ ID NO: 3314773 - DNA, 25 bp, Homo sapien
ttgatacctcattaacataaggagt

SEQ ID NO: 3314774 - DNA, 25 bp, Homo sapien
tcatatatttagcagtactggcaaa

SEQ ID NO: 3314775 - DNA, 25 bp, Homo sapien
agttgatacctcattaacataagga

SEQ ID NO: 3314776 - DNA, 25 bp, Homo sapien
tacgaaagtgctaagtgttcaacac

SEQ ID NO: 3314777 - DNA, 25 bp, Homo sapien
tgaacaaagggaacattctatgtcc

SEQ ID NO: 3314778 - DNA, 25 bp, Homo sapien
cttatcctgggtgatagtcttcggg

SEQ ID NO: 3314779 - DNA, 25 bp, Homo sapien
tgctaacgcctcctctactctgaag

SEQ ID NO: 3314780 - DNA, 25 bp, Homo sapien
tattaagctgagataaaaatcaaac

SEQ ID NO: 3314781 - DNA, 25 bp, Homo sapien
aagctgagataaaaatcaaactcac

SEQ ID NO: 3314782 - DNA, 25 bp, Homo sapien
ctatattaagctgagataaaaatca

SEQ ID NO: 3314783 - DNA, 25 bp, Homo sapien
ttaagctgagataaaaatcaaactc

SEQ ID NO: 3314784 - DNA, 25 bp, Homo sapien
catttcctcccaaggaattctggag

SEQ ID NO: 3314785 - DNA, 25 bp, Homo sapien
tctggagaattcgtgttaacttgct

SEQ ID NO: 3314786 - DNA, 25 bp, Homo sapien
gtaattgtgcagataatacgtgtct

SEQ ID NO: 3314787 - DNA, 25 bp, Homo sapien
gagagcagtaagtgtttcatcaaaa

SEQ ID NO: 3314788 - DNA, 25 bp, Homo sapien
gaaagtaaattcagtagattataat

SEQ ID NO: 3314789 - DNA, 25 bp, Homo sapien
tcagccagagtttcaaaaattagtt

SEQ ID NO: 3314790 - DNA, 25 bp, Homo sapien
gaaaaagattgagaacgtttatata

SEQ ID NO: 3314791 - DNA, 25 bp, Homo sapien
tatatgaggcagattaaaactacta

SEQ ID NO: 3314792 - DNA, 25 bp, Homo sapien
aataagcttcgatttatattacagc

SEQ ID NO: 3314793 - DNA, 25 bp, Homo sapien
ccaacttgtccatcactaagtttct

SEQ ID NO: 3314794 - DNA, 25 bp, Homo sapien
taagcttcgatttatattacagcct

SEQ ID NO: 3314795 - DNA, 25 bp, Homo sapien
ttcttgatcacttgtcccaaaataa

SEQ ID NO: 3314796 - DNA, 25 bp, Homo sapien
tctttcactgcctgcaagatcaacc

SEQ ID NO: 3314797 - DNA, 25 bp, Homo sapien
cactgcctgcaagatcaaccaaatt

SEQ ID NO: 3314798 - DNA, 25 bp, Homo sapien
tgcagcgcctgtttgagcagctctt

SEQ ID NO: 3314799 - DNA, 25 bp, Homo sapien
ctgtttgagcagctctttcactgcc

SEQ ID NO: 3314800 - DNA, 25 bp, Homo sapien
cacttgcactgctccaactttgtat

SEQ ID NO: 3314801 - DNA, 25 bp, Homo sapien
ttataagctggcacttgcactgctc

SEQ ID NO: 3314802 - DNA, 25 bp, Homo sapien
ttgcactgctccaactttgtattta

SEQ ID NO: 3314803 - DNA, 25 bp, Homo sapien
gctggcacttgcactgctccaactt

SEQ ID NO: 3314804 - DNA, 25 bp, Homo sapien
caaatgggataccttaacagatcct

SEQ ID NO: 3314805 - DNA, 25 bp, Homo sapien
ggataccttaacagatccttcacaa

SEQ ID NO: 3314806 - DNA, 25 bp, Homo sapien
taccttaacagatccttcacaatta

SEQ ID NO: 3314807 - DNA, 25 bp, Homo sapien
ccttaacagatccttcacaattaga

SEQ ID NO: 3314808 - DNA, 25 bp, Homo sapien
gaaaaggcaagctgtagaaaaatta

SEQ ID NO: 3314809 - DNA, 25 bp, Homo sapien
tgtagaaaaattagtgcattcttac

SEQ ID NO: 3314810 - DNA, 25 bp, Homo sapien
gaaaaattagtgcattcttacttgg

SEQ ID NO: 3314811 - DNA, 25 bp, Homo sapien
gtagaaaaattagtgcattcttact

SEQ ID NO: 3314812 - DNA, 25 bp, Homo sapien
catcctaaagatggtatgagaacga

SEQ ID NO: 3314813 - DNA, 25 bp, Homo sapien
taaagatggtatgagaacgactgct

SEQ ID NO: 3314814 - DNA, 25 bp, Homo sapien
tatgagaacgactgcttctttgatt

SEQ ID NO: 3314815 - DNA, 25 bp, Homo sapien
tttttgtttctccataatgcctgct

SEQ ID NO: 3314816 - DNA, 25 bp, Homo sapien
aaagccatttctgatgtatatacaa

SEQ ID NO: 3314817 - DNA, 25 bp, Homo sapien
tgatgtatatacaacttcttctgtg

SEQ ID NO: 3314818 - DNA, 25 bp, Homo sapien
tttctgatgtatatacaacttcttc

SEQ ID NO: 3314819 - DNA, 25 bp, Homo sapien
tctgatgtatatacaacttcttctg

SEQ ID NO: 3314820 - DNA, 25 bp, Homo sapien
cgtaagagaaattccctatcaggaa

SEQ ID NO: 3314821 - DNA, 25 bp, Homo sapien
tgacatcttctcgaataattaaagg

SEQ ID NO: 3314822 - DNA, 25 bp, Homo sapien
tcttctcgaataattaaaggtttca

SEQ ID NO: 3314823 - DNA, 25 bp, Homo sapien
tttccatgtaagatacacgtaagag

SEQ ID NO: 3314824 - DNA, 25 bp, Homo sapien
gaattgccctgggtataactcccaa

SEQ ID NO: 3314825 - DNA, 25 bp, Homo sapien
tataactcccaaatgatcttctgaa

SEQ ID NO: 3314826 - DNA, 25 bp, Homo sapien
tcccaaatgatcttctgaacccatc

SEQ ID NO: 3314827 - DNA, 25 bp, Homo sapien
atgtcatgaattgccctgggtataa

SEQ ID NO: 3314828 - DNA, 25 bp, Homo sapien
tgtttttcctgaagcagtctgtcca

SEQ ID NO: 3314829 - DNA, 25 bp, Homo sapien
aagcagtctgtccataggcaaatat

SEQ ID NO: 3314830 - DNA, 25 bp, Homo sapien
agtctgtccataggcaaatatagta

SEQ ID NO: 3314831 - DNA, 25 bp, Homo sapien
gcagtctgtccataggcaaatatag

SEQ ID NO: 3314832 - DNA, 25 bp, Homo sapien
gtagccttgtatggcagaatcgatg

SEQ ID NO: 3314833 - DNA, 25 bp, Homo sapien
tgtagccttgtatggcagaatcgat

SEQ ID NO: 3314834 - DNA, 25 bp, Homo sapien
ttgtagccttgtatggcagaatcga

SEQ ID NO: 3314835 - DNA, 25 bp, Homo sapien
taaatgacattattgtcagttttcc

SEQ ID NO: 3314836 - DNA, 25 bp, Homo sapien
tacttccatcaacttgataaatgac

SEQ ID NO: 3314837 - DNA, 25 bp, Homo sapien
tttacttccatcaacttgataaatg

SEQ ID NO: 3314838 - DNA, 25 bp, Homo sapien
ggatttacttccatcaacttgataa

SEQ ID NO: 3314839 - DNA, 25 bp, Homo sapien
gccgcactcgcacgcagacggccac

SEQ ID NO: 3314840 - DNA, 25 bp, Homo sapien
ctgctgttcagcggccgcactcgca

SEQ ID NO: 3314841 - DNA, 25 bp, Homo sapien
gctgttcagcggccgcactcgcacg

SEQ ID NO: 3314842 - DNA, 25 bp, Homo sapien
actcgcacgcagacggccacggctc

SEQ ID NO: 3314843 - DNA, 25 bp, Homo sapien
aggaaaatggccaggaccctccgcg

SEQ ID NO: 3314844 - DNA, 25 bp, Homo sapien
ctcacaggccgccccgcctttaaat

SEQ ID NO: 3314845 - DNA, 25 bp, Homo sapien
ctccgcggccggcacttcagggctc

SEQ ID NO: 3314846 - DNA, 25 bp, Homo sapien
gcggccggcacttcagggctcacag

SEQ ID NO: 3314847 - DNA, 25 bp, Homo sapien
tccagataaaccagaggaggtctcc

SEQ ID NO: 3314848 - DNA, 25 bp, Homo sapien
cagtggtatttatctggttatccag

SEQ ID NO: 3314849 - DNA, 25 bp, Homo sapien
gctctggtttgtcatcagtggtatt

SEQ ID NO: 3314850 - DNA, 25 bp, Homo sapien
agaggaggtctccatgtagagtaaa

SEQ ID NO: 3314851 - DNA, 25 bp, Homo sapien
aaatgttacatactattggccaggc

SEQ ID NO: 3314852 - DNA, 25 bp, Homo sapien
taggccgaacgagaaaagccaatct

SEQ ID NO: 3314853 - DNA, 25 bp, Homo sapien
tgtatcttaaggtaattaggccgaa

SEQ ID NO: 3314854 - DNA, 25 bp, Homo sapien
actgtgttccatccataccattcaa

SEQ ID NO: 3314855 - DNA, 25 bp, Homo sapien
gcctatgtcctctatgtcctgaatg

SEQ ID NO: 3314856 - DNA, 25 bp, Homo sapien
atgaaagctattttagaaatgtctg

SEQ ID NO: 3314857 - DNA, 25 bp, Homo sapien
tcattgattctcagttgacttcctg

SEQ ID NO: 3314858 - DNA, 25 bp, Homo sapien
tcatcgagttttggctacagctgag

SEQ ID NO: 3314859 - DNA, 25 bp, Homo sapien
tagacatttcccacaaatgtggtac

SEQ ID NO: 3314860 - DNA, 25 bp, Homo sapien
agccctgagtgtcataagatgtggt

SEQ ID NO: 3314861 - DNA, 25 bp, Homo sapien
tggtgtagttgatcctacttccata

SEQ ID NO: 3314862 - DNA, 25 bp, Homo sapien
cataagatgtggtgtagttgatcct

SEQ ID NO: 3314863 - DNA, 25 bp, Homo sapien
cctgagtgtcataagatgtggtgta

SEQ ID NO: 3314864 - DNA, 25 bp, Homo sapien
gatgtggtgaagagtggagcaaaaa

SEQ ID NO: 3314865 - DNA, 25 bp, Homo sapien
ctggaaaaaagatgtggtgaagagt

SEQ ID NO: 3314866 - DNA, 25 bp, Homo sapien
aaaaaagatgtggtgaagagtggag

SEQ ID NO: 3314867 - DNA, 25 bp, Homo sapien
tgtggtgaagagtggagcaaaaatt

SEQ ID NO: 3314868 - DNA, 25 bp, Homo sapien
caatgaatgacgagttactaccaat

SEQ ID NO: 3314869 - DNA, 25 bp, Homo sapien
agtttctggaatgtactgaatgcag

SEQ ID NO: 3314870 - DNA, 25 bp, Homo sapien
taccaatgggcagagcagtttctgg

SEQ ID NO: 3314871 - DNA, 25 bp, Homo sapien
aatgcaggtggttgtctgagtgcca

SEQ ID NO: 3314872 - DNA, 25 bp, Homo sapien
agagaccaatcccagagtgacagag

SEQ ID NO: 3314873 - DNA, 25 bp, Homo sapien
ggcgcaaacaaacccagactgtgaa

SEQ ID NO: 3314874 - DNA, 25 bp, Homo sapien
tccacaagcagcaagaccatctagg

SEQ ID NO: 3314875 - DNA, 25 bp, Homo sapien
taatacttggaaggccttctcaagg

SEQ ID NO: 3314876 - DNA, 25 bp, Homo sapien
agtgttgcctaactctactgagggc

SEQ ID NO: 3314877 - DNA, 25 bp, Homo sapien
catacagactctacaccagaagttc

SEQ ID NO: 3314878 - DNA, 25 bp, Homo sapien
gactccaagttaggaaagtctactc

SEQ ID NO: 3314879 - DNA, 25 bp, Homo sapien
gggaaatctagagccttcagtgttg

SEQ ID NO: 3314880 - DNA, 25 bp, Homo sapien
tgaaggacttagctcatagatgtct

SEQ ID NO: 3314881 - DNA, 25 bp, Homo sapien
taaaacctcagcaggagattggagt

SEQ ID NO: 3314882 - DNA, 25 bp, Homo sapien
ggaagaaatactttcgtttgtcata

SEQ ID NO: 3314883 - DNA, 25 bp, Homo sapien
agcaatccagcctgaaggacttagc

SEQ ID NO: 3314884 - DNA, 25 bp, Homo sapien
gtggcaaacaaaactaggatgatga

SEQ ID NO: 3314885 - DNA, 25 bp, Homo sapien
aaacaaaactaggatgatgagcttc

SEQ ID NO: 3314886 - DNA, 25 bp, Homo sapien
gcaaacaaaactaggatgatgagct

SEQ ID NO: 3314887 - DNA, 25 bp, Homo sapien
ctgtggcaaacaaaactaggatgat

SEQ ID NO: 3314888 - DNA, 25 bp, Homo sapien
cgtgatctggcatcactctgccatc

SEQ ID NO: 3314889 - DNA, 25 bp, Homo sapien
catgaagttggtctatgaatgtgtc

SEQ ID NO: 3314890 - DNA, 25 bp, Homo sapien
ctggatgtaaaaagttctccgtgat

SEQ ID NO: 3314891 - DNA, 25 bp, Homo sapien
cactgctgagctcatgaagttggtc

SEQ ID NO: 3314892 - DNA, 25 bp, Homo sapien
tctatcatgtttgaaggctcctgcc

SEQ ID NO: 3314893 - DNA, 25 bp, Homo sapien
catggtcacggtcactgcttttgct

SEQ ID NO: 3314894 - DNA, 25 bp, Homo sapien
tgctggttctagtccaacaccatgg

SEQ ID NO: 3314895 - DNA, 25 bp, Homo sapien
ccatcatgatcatgggcagacccag

SEQ ID NO: 3314896 - DNA, 25 bp, Homo sapien
tgaagtgtagcttgtgatggtatgg

SEQ ID NO: 3314897 - DNA, 25 bp, Homo sapien
atgaagtgtagcttgtgatggtatg

SEQ ID NO: 3314898 - DNA, 25 bp, Homo sapien
catgaagtgtagcttgtgatggtat

SEQ ID NO: 3314899 - DNA, 25 bp, Homo sapien
tgccactttcgctctcttgtacttc

SEQ ID NO: 3314900 - DNA, 25 bp, Homo sapien
agtcccattgccactttcgctctct

SEQ ID NO: 3314901 - DNA, 25 bp, Homo sapien
cattgccactttcgctctcttgtac

SEQ ID NO: 3314902 - DNA, 25 bp, Homo sapien
tcccattgccactttcgctctcttg

SEQ ID NO: 3314903 - DNA, 25 bp, Homo sapien
tgcactgtaaccaatgtgtctggct

SEQ ID NO: 3314904 - DNA, 25 bp, Homo sapien
aatgcactgtaaccaatgtgtctgg

SEQ ID NO: 3314905 - DNA, 25 bp, Homo sapien
tgaaggctattaactgggttgcatc

SEQ ID NO: 3314906 - DNA, 25 bp, Homo sapien
gaaggctattaactgggttgcatca

SEQ ID NO: 3314907 - DNA, 25 bp, Homo sapien
gattattgtatcaattggtctccac

SEQ ID NO: 3314908 - DNA, 25 bp, Homo sapien
attattgtatcaattggtctccact

SEQ ID NO: 3314909 - DNA, 25 bp, Homo sapien
agattattgtatcaattggtctcca

SEQ ID NO: 3314910 - DNA, 25 bp, Homo sapien
tgatccaaaattgggcccttgtaaa

SEQ ID NO: 3314911 - DNA, 25 bp, Homo sapien
tgtagcataatgatccaaaattggg

SEQ ID NO: 3314912 - DNA, 25 bp, Homo sapien
gcataatgatccaaaattgggccct

SEQ ID NO: 3314913 - DNA, 25 bp, Homo sapien
taatgatccaaaattgggcccttgt

SEQ ID NO: 3314914 - DNA, 25 bp, Homo sapien
ggtggaagtcgtgccctatgtgcct

SEQ ID NO: 3314915 - DNA, 25 bp, Homo sapien
tatgtgcctagtgtctcccttatgc

SEQ ID NO: 3314916 - DNA, 25 bp, Homo sapien
tgatttgagtatcatggtgaccatg

SEQ ID NO: 3314917 - DNA, 25 bp, Homo sapien
ggtgaccatggcaccacagctcagt

SEQ ID NO: 3314918 - DNA, 25 bp, Homo sapien
agttgtccattagcttcaattagga

SEQ ID NO: 3314919 - DNA, 25 bp, Homo sapien
ttgtccattagcttcaattaggaga

SEQ ID NO: 3314920 - DNA, 25 bp, Homo sapien
tgtccattagcttcaattaggagac

SEQ ID NO: 3314921 - DNA, 25 bp, Homo sapien
ttgggcttgtattcaagaggaaagc

SEQ ID NO: 3314922 - DNA, 25 bp, Homo sapien
agagaggacatcatggtcttgggct

SEQ ID NO: 3314923 - DNA, 25 bp, Homo sapien
tgtattcaagaggaaagcttacagc

SEQ ID NO: 3314924 - DNA, 25 bp, Homo sapien
catcatggtcttgggcttgtattca

SEQ ID NO: 3314925 - DNA, 25 bp, Homo sapien
cctgatttaacgtgacaaagaccag

SEQ ID NO: 3314926 - DNA, 25 bp, Homo sapien
tcatggatggcctcagtcccgtgtc

SEQ ID NO: 3314927 - DNA, 25 bp, Homo sapien
gctgctgagcagttctattctaggc

SEQ ID NO: 3314928 - DNA, 25 bp, Homo sapien
tggtctcaggcttactcatgcatct

SEQ ID NO: 3314929 - DNA, 25 bp, Homo sapien
tcccatcaggttaagttaggagact

SEQ ID NO: 3314930 - DNA, 25 bp, Homo sapien
tcaaatttctatcaagtggcatgcc

SEQ ID NO: 3314931 - DNA, 25 bp, Homo sapien
gtggcatgcccaaactccatgatca

SEQ ID NO: 3314932 - DNA, 25 bp, Homo sapien
tcaaaggctggataaacggactctc

SEQ ID NO: 3314933 - DNA, 25 bp, Homo sapien
gcctgggttgcagaacaagactctg

SEQ ID NO: 3314934 - DNA, 25 bp, Homo sapien
tccagcctgggttgcagaacaagac

SEQ ID NO: 3314935 - DNA, 25 bp, Homo sapien
cagcctgggttgcagaacaagactc

SEQ ID NO: 3314936 - DNA, 25 bp, Homo sapien
agatcacaccactgccctccactcc

SEQ ID NO: 3314937 - DNA, 25 bp, Homo sapien
ctctctccagaatgacatggcggcc

SEQ ID NO: 3314938 - DNA, 25 bp, Homo sapien
acatggcggccatgccctcttcatg

SEQ ID NO: 3314939 - DNA, 25 bp, Homo sapien
catgatctcttgttgtgatctatca

SEQ ID NO: 3314940 - DNA, 25 bp, Homo sapien
ggcggccatgccctcttcatgatct

SEQ ID NO: 3314941 - DNA, 25 bp, Homo sapien
agtcaggaaggtcagactctgattc

SEQ ID NO: 3314942 - DNA, 25 bp, Homo sapien
tgtattttcactcgagtccgtgtga

SEQ ID NO: 3314943 - DNA, 25 bp, Homo sapien
tactatgcatgaccacaatagcaca

SEQ ID NO: 3314944 - DNA, 25 bp, Homo sapien
taaatacctgtatgacagtgaaaac

SEQ ID NO: 3314945 - DNA, 25 bp, Homo sapien
accaaatttcactcgagtcagtgtg

SEQ ID NO: 3314946 - DNA, 25 bp, Homo sapien
agtcagtgtgaagagaccagcaaac

SEQ ID NO: 3314947 - DNA, 25 bp, Homo sapien
acagagcaaagtgtaggaggacggg

SEQ ID NO: 3314948 - DNA, 25 bp, Homo sapien
tcgagtcagtgtgaagagaccagca

SEQ ID NO: 3314949 - DNA, 25 bp, Homo sapien
tctattcctgcttggccctaaggga

SEQ ID NO: 3314950 - DNA, 25 bp, Homo sapien
ggttcactctgaaattgctcagttc

SEQ ID NO: 3314951 - DNA, 25 bp, Homo sapien
tgtccagatgcaaaatagtaagcaa

SEQ ID NO: 3314952 - DNA, 25 bp, Homo sapien
taaccatctgcctagtagtctgagc

SEQ ID NO: 3314953 - DNA, 25 bp, Homo sapien
cactgaggcctggatgttacttttt

SEQ ID NO: 3314954 - DNA, 25 bp, Homo sapien
taatatcggtggaggcacaacagta

SEQ ID NO: 3314955 - DNA, 25 bp, Homo sapien
gaaggatgtgtgttaaactcaccct

SEQ ID NO: 3314956 - DNA, 25 bp, Homo sapien
ggcaatgctgtaatgaccacttatc

SEQ ID NO: 3314957 - DNA, 25 bp, Homo sapien
gattttcagttcctacttcttgagg

SEQ ID NO: 3314958 - DNA, 25 bp, Homo sapien
tttgtaaatgagatagactggcgag

SEQ ID NO: 3314959 - DNA, 25 bp, Homo sapien
tctcaatttgaccatagctgcctaa

SEQ ID NO: 3314960 - DNA, 25 bp, Homo sapien
tctagagggtatataggacaggact

SEQ ID NO: 3314961 - DNA, 25 bp, Homo sapien
catccacagaggtatagggtgagct

SEQ ID NO: 3314962 - DNA, 25 bp, Homo sapien
cagcgaaatgctctcttgaagccag

SEQ ID NO: 3314963 - DNA, 25 bp, Homo sapien
actgctttgccggtttggatgaaac

SEQ ID NO: 3314964 - DNA, 25 bp, Homo sapien
gaattcctgcgagagcagccattga

SEQ ID NO: 3314965 - DNA, 25 bp, Homo sapien
tgccagccaaaagctagccaggtag

SEQ ID NO: 3314966 - DNA, 25 bp, Homo sapien
gcagtgagaatgaagtaaatatgat

SEQ ID NO: 3314967 - DNA, 25 bp, Homo sapien
gcagccagcagatagcaaatgtcat

SEQ ID NO: 3314968 - DNA, 25 bp, Homo sapien
atttagttgttgatagattgcagtg

SEQ ID NO: 3314969 - DNA, 25 bp, Homo sapien
tgatgaaataatgaagcagaaataa

SEQ ID NO: 3314970 - DNA, 25 bp, Homo sapien
tgaagcagaaataatctgaagataa

SEQ ID NO: 3314971 - DNA, 25 bp, Homo sapien
agcagaaataatctgaagataatac

SEQ ID NO: 3314972 - DNA, 25 bp, Homo sapien
tggagaatgatgaaataatgaagca

SEQ ID NO: 3314973 - DNA, 25 bp, Homo sapien
acttcttcaacaattgctggatttt

SEQ ID NO: 3314974 - DNA, 25 bp, Homo sapien
caacaattgctggattttcgcacag

SEQ ID NO: 3314975 - DNA, 25 bp, Homo sapien
tattttctgtcaatagcgtcctcat

SEQ ID NO: 3314976 - DNA, 25 bp, Homo sapien
gctggattttcgcacagaaatttgt

SEQ ID NO: 3314977 - DNA, 25 bp, Homo sapien
agctctcctcgctttaggattcgtt

SEQ ID NO: 3314978 - DNA, 25 bp, Homo sapien
tgtaagagggccatgtttttgaagc

SEQ ID NO: 3314979 - DNA, 25 bp, Homo sapien
tcctcgctttaggattcgtttgtag

SEQ ID NO: 3314980 - DNA, 25 bp, Homo sapien
ggtgccagaggccatttggttgttt

SEQ ID NO: 3314981 - DNA, 25 bp, Homo sapien
ctatacaaatgctaggtaaacaaca

SEQ ID NO: 3314982 - DNA, 25 bp, Homo sapien
aatgctaggtaaacaacatggacca

SEQ ID NO: 3314983 - DNA, 25 bp, Homo sapien
tgctaggtaaacaacatggaccagt

SEQ ID NO: 3314984 - DNA, 25 bp, Homo sapien
atacaaatgctaggtaaacaacatg

SEQ ID NO: 3314985 - DNA, 25 bp, Homo sapien
ctttagctgctcatgatacttgtca

SEQ ID NO: 3314986 - DNA, 25 bp, Homo sapien
gctcatgatacttgtcacaggtatc

SEQ ID NO: 3314987 - DNA, 25 bp, Homo sapien
tccaacaatggtgtatgtaataccc

SEQ ID NO: 3314988 - DNA, 25 bp, Homo sapien
aattccaacaatggtgtatgtaata

SEQ ID NO: 3314989 - DNA, 25 bp, Homo sapien
gaaacagtacaccagtataatgacg

SEQ ID NO: 3314990 - DNA, 25 bp, Homo sapien
aacagtacaccagtataatgacgat

SEQ ID NO: 3314991 - DNA, 25 bp, Homo sapien
cagtacaccagtataatgacgataa

SEQ ID NO: 3314992 - DNA, 25 bp, Homo sapien
gggaaacagtacaccagtataatga

SEQ ID NO: 3314993 - DNA, 25 bp, Homo sapien
aatgttgtttgggaccttctggcca

SEQ ID NO: 3314994 - DNA, 25 bp, Homo sapien
aagcagagagtacggcctggcatga

SEQ ID NO: 3314995 - DNA, 25 bp, Homo sapien
tctggccattgcacaaagcagagag

SEQ ID NO: 3314996 - DNA, 25 bp, Homo sapien
gtttcaagggatcaataatagccat

SEQ ID NO: 3314997 - DNA, 25 bp, Homo sapien
tgaattcatactgcctcatgaacat

SEQ ID NO: 3314998 - DNA, 25 bp, Homo sapien
attgaattcatactgcctcatgaac

SEQ ID NO: 3314999 - DNA, 25 bp, Homo sapien
aattcatactgcctcatgaacatct

SEQ ID NO: 3315000 - DNA, 25 bp, Homo sapien
ttcatactgcctcatgaacatcttc

SEQ ID NO: 3315001 - DNA, 25 bp, Homo sapien
gcaataattaattgcctaccaaaca

SEQ ID NO: 3315002 - DNA, 25 bp, Homo sapien
ttatgaaactattccaaccagtaga

SEQ ID NO: 3315003 - DNA, 25 bp, Homo sapien
cttatgaaactattccaaccagtag

SEQ ID NO: 3315004 - DNA, 25 bp, Homo sapien
ttccttatgaaactattccaaccag

SEQ ID NO: 3315005 - DNA, 25 bp, Homo sapien
gaccaacgtgttgaaggcggccatg

SEQ ID NO: 3315006 - DNA, 25 bp, Homo sapien
tatgaagcgcgtagatgaaattgac

SEQ ID NO: 3315007 - DNA, 25 bp, Homo sapien
gagaggttgccagcttggtccagca

SEQ ID NO: 3315008 - DNA, 25 bp, Homo sapien
tagttggcgccaaagtaccactcgc

SEQ ID NO: 3315009 - DNA, 25 bp, Homo sapien
atcacacgtagggagggtgccagct

SEQ ID NO: 3315010 - DNA, 25 bp, Homo sapien
ccgagattaagggttatcgagtcac

SEQ ID NO: 3315011 - DNA, 25 bp, Homo sapien
tgcactttctcagaggcgcttgcgg

SEQ ID NO: 3315012 - DNA, 25 bp, Homo sapien
gcccaagacgagactcctctgaagt

SEQ ID NO: 3315013 - DNA, 25 bp, Homo sapien
ctgagtgtgggcaacatctgcatgt

SEQ ID NO: 3315014 - DNA, 25 bp, Homo sapien
ccacagattctctcaaagttcacac

SEQ ID NO: 3315015 - DNA, 25 bp, Homo sapien
tgccacagattctctcaaagttcac

SEQ ID NO: 3315016 - DNA, 25 bp, Homo sapien
gctgccacagattctctcaaagttc

SEQ ID NO: 3315017 - DNA, 25 bp, Homo sapien
aacgctggtctccaatgagatacag

SEQ ID NO: 3315018 - DNA, 25 bp, Homo sapien
tataacgctggtctccaatgagata

SEQ ID NO: 3315019 - DNA, 25 bp, Homo sapien
taacgctggtctccaatgagataca

SEQ ID NO: 3315020 - DNA, 25 bp, Homo sapien
cgctggtctccaatgagatacagat

SEQ ID NO: 3315021 - DNA, 25 bp, Homo sapien
gaggagtcactaggatgtggaagaa

SEQ ID NO: 3315022 - DNA, 25 bp, Homo sapien
gagaggagtcactaggatgtggaag

SEQ ID NO: 3315023 - DNA, 25 bp, Homo sapien
gtagtgctggagaggagtcactagg

SEQ ID NO: 3315024 - DNA, 25 bp, Homo sapien
ggagtcactaggatgtggaagaaca

SEQ ID NO: 3315025 - DNA, 25 bp, Homo sapien
tgtggaggctcccttaggtggaact

SEQ ID NO: 3315026 - DNA, 25 bp, Homo sapien
tatcttctatcagcaactttccctg

SEQ ID NO: 3315027 - DNA, 25 bp, Homo sapien
tgattcccagtgatacagaaaatgc

SEQ ID NO: 3315028 - DNA, 25 bp, Homo sapien
tacactaggtgtttagggccctctg

SEQ ID NO: 3315029 - DNA, 25 bp, Homo sapien
ttgtctaagtcaaaagagacaagct

SEQ ID NO: 3315030 - DNA, 25 bp, Homo sapien
ttcttgtctaagtcaaaagagacaa

SEQ ID NO: 3315031 - DNA, 25 bp, Homo sapien
tgtctaagtcaaaagagacaagctt

SEQ ID NO: 3315032 - DNA, 25 bp, Homo sapien
tctaagtcaaaagagacaagcttac

SEQ ID NO: 3315033 - DNA, 25 bp, Homo sapien
ttacatcagctacaatattcagctg

SEQ ID NO: 3315034 - DNA, 25 bp, Homo sapien
ccgttacatcagctacaatattcag

SEQ ID NO: 3315035 - DNA, 25 bp, Homo sapien
acatcagctacaatattcagctgaa

SEQ ID NO: 3315036 - DNA, 25 bp, Homo sapien
cgttacatcagctacaatattcagc

SEQ ID NO: 3315037 - DNA, 25 bp, Homo sapien
ccacttcatgccaaatagacatgga

SEQ ID NO: 3315038 - DNA, 25 bp, Homo sapien
tagacatggaactagagtaacagag

SEQ ID NO: 3315039 - DNA, 25 bp, Homo sapien
tagtcaaagctttgaatatccactt

SEQ ID NO: 3315040 - DNA, 25 bp, Homo sapien
gaggcagagtctgtattaatcttgg

SEQ ID NO: 3315041 - DNA, 25 bp, Homo sapien
gaataaccgtgtatatttaccctga

SEQ ID NO: 3315042 - DNA, 25 bp, Homo sapien
caaatgtattggctgatactttccg

SEQ ID NO: 3315043 - DNA, 25 bp, Homo sapien
gatactttccgattgaataaccgtg

SEQ ID NO: 3315044 - DNA, 25 bp, Homo sapien
aatgttggtccaaatgtattggctg

SEQ ID NO: 3315045 - DNA, 25 bp, Homo sapien
aaattcaacggaagatgtttctgac

SEQ ID NO: 3315046 - DNA, 25 bp, Homo sapien
gaccatgaagacagcctttaaattc

SEQ ID NO: 3315047 - DNA, 25 bp, Homo sapien
tcacatgaccatgaagacagccttt

SEQ ID NO: 3315048 - DNA, 25 bp, Homo sapien
cagcctttaaattcaacggaagatg

SEQ ID NO: 3315049 - DNA, 25 bp, Homo sapien
tatttctgtgcatagctcttactgc

SEQ ID NO: 3315050 - DNA, 25 bp, Homo sapien
actgcactgaaaatacttatctgat

SEQ ID NO: 3315051 - DNA, 25 bp, Homo sapien
caacctggtatttctgtgcatagct

SEQ ID NO: 3315052 - DNA, 25 bp, Homo sapien
ctctcgttgcacaacctggtatttc

SEQ ID NO: 3315053 - DNA, 25 bp, Homo sapien
tgtctgaatccttataggcaatgta

SEQ ID NO: 3315054 - DNA, 25 bp, Homo sapien
agaataggtgggctgcatgtagtct

SEQ ID NO: 3315055 - DNA, 25 bp, Homo sapien
cctgtgccttggacaagctaggaga

SEQ ID NO: 3315056 - DNA, 25 bp, Homo sapien
gtagtctgcaaggatggttgtctga

SEQ ID NO: 3315057 - DNA, 25 bp, Homo sapien
agaaaagtaggctcttctgttccca

SEQ ID NO: 3315058 - DNA, 25 bp, Homo sapien
tgaaagaagaaaagtaggctcttct

SEQ ID NO: 3315059 - DNA, 25 bp, Homo sapien
gaaaagtaggctcttctgttcccat

SEQ ID NO: 3315060 - DNA, 25 bp, Homo sapien
agaagaaaagtaggctcttctgttc

SEQ ID NO: 3315061 - DNA, 25 bp, Homo sapien
aaggtctggcggcttgtttttgcct

SEQ ID NO: 3315062 - DNA, 25 bp, Homo sapien
taggcgttttcaaatcattctcaga

SEQ ID NO: 3315063 - DNA, 25 bp, Homo sapien
aaatactactgcaagctctttcctg

SEQ ID NO: 3315064 - DNA, 25 bp, Homo sapien
gcctttccactatccttcctaaata

SEQ ID NO: 3315065 - DNA, 25 bp, Homo sapien
ggtgtgctcagataattaatcatga

SEQ ID NO: 3315066 - DNA, 25 bp, Homo sapien
taaaaagtgacatgggtgtgctcag

SEQ ID NO: 3315067 - DNA, 25 bp, Homo sapien
ttccaaataggagatatatcgtgac

SEQ ID NO: 3315068 - DNA, 25 bp, Homo sapien
tatttgtctcatagaatattgtcaa

SEQ ID NO: 3315069 - DNA, 25 bp, Homo sapien
ttctttagaagaccaacaagatctt

SEQ ID NO: 3315070 - DNA, 25 bp, Homo sapien
attatcagctcagcatgggttgctc

SEQ ID NO: 3315071 - DNA, 25 bp, Homo sapien
ctttcattatcagctcagcatgggt

SEQ ID NO: 3315072 - DNA, 25 bp, Homo sapien
ttttctttagaagaccaacaagatc

SEQ ID NO: 3315073 - DNA, 25 bp, Homo sapien
ttcacttgagtataggagggtggca

SEQ ID NO: 3315074 - DNA, 25 bp, Homo sapien
ggtgcccctcaccaacgatgatgag

SEQ ID NO: 3315075 - DNA, 25 bp, Homo sapien
gatgagtaatgcactaatcgttccc

SEQ ID NO: 3315076 - DNA, 25 bp, Homo sapien
cttacatgttcaaagttcacttgag

SEQ ID NO: 3315077 - DNA, 25 bp, Homo sapien
tgtactcctgcaataagtatagcat

SEQ ID NO: 3315078 - DNA, 25 bp, Homo sapien
ttctgtactcctgcaataagtatag

SEQ ID NO: 3315079 - DNA, 25 bp, Homo sapien
tttaaaattctgtactcctgcaata

SEQ ID NO: 3315080 - DNA, 25 bp, Homo sapien
aaaattctgtactcctgcaataagt

SEQ ID NO: 3315081 - DNA, 25 bp, Homo sapien
ccttcttttaggactgaacatgtgg

SEQ ID NO: 3315082 - DNA, 25 bp, Homo sapien
tttccttcttttaggactgaacatg

SEQ ID NO: 3315083 - DNA, 25 bp, Homo sapien
ttcttttaggactgaacatgtggcc

SEQ ID NO: 3315084 - DNA, 25 bp, Homo sapien
tttaggactgaacatgtggcctgca

SEQ ID NO: 3315085 - DNA, 25 bp, Homo sapien
atggattccctgttacgtctccctg

SEQ ID NO: 3315086 - DNA, 25 bp, Homo sapien
gatggattccctgttacgtctccct

SEQ ID NO: 3315087 - DNA, 25 bp, Homo sapien
tggattccctgttacgtctccctgc

SEQ ID NO: 3315088 - DNA, 25 bp, Homo sapien
agatggattccctgttacgtctccc

SEQ ID NO: 3315089 - DNA, 25 bp, Homo sapien
gatttctttatgtgggctcatttat

SEQ ID NO: 3315090 - DNA, 25 bp, Homo sapien
cacattgatgcctcaatgcttttga

SEQ ID NO: 3315091 - DNA, 25 bp, Homo sapien
gataatcacccaattgatttgtaaa

SEQ ID NO: 3315092 - DNA, 25 bp, Homo sapien
tgtatctcctccttaatgtgtcctg

SEQ ID NO: 3315093 - DNA, 25 bp, Homo sapien
tatacaccacaagtctatcataggc

SEQ ID NO: 3315094 - DNA, 25 bp, Homo sapien
taagccaattttcatagtcgagaca

SEQ ID NO: 3315095 - DNA, 25 bp, Homo sapien
tgaggaaacgtttgcttattaagcc

SEQ ID NO: 3315096 - DNA, 25 bp, Homo sapien
caatgaggatatttggatgcccagg

SEQ ID NO: 3315097 - DNA, 25 bp, Homo sapien
aatctgaacatgtcgcatcttttcc

SEQ ID NO: 3315098 - DNA, 25 bp, Homo sapien
tgccaatgggtaatttgcagtttgc

SEQ ID NO: 3315099 - DNA, 25 bp, Homo sapien
tcagaatctgaacatgtcgcatctt

SEQ ID NO: 3315100 - DNA, 25 bp, Homo sapien
ctgaacatgtcgcatcttttcctca

SEQ ID NO: 3315101 - DNA, 25 bp, Homo sapien
tcactgatttaaagagcatagttgc

SEQ ID NO: 3315102 - DNA, 25 bp, Homo sapien
tagctggtaagctccatcagggtat

SEQ ID NO: 3315103 - DNA, 25 bp, Homo sapien
cctttactggagtggtaggataact

SEQ ID NO: 3315104 - DNA, 25 bp, Homo sapien
gcatagttgctgaaggattgtatct

SEQ ID NO: 3315105 - DNA, 25 bp, Homo sapien
aaacctttcaccttagttgctccat

SEQ ID NO: 3315106 - DNA, 25 bp, Homo sapien
gacaactggaagtcacacccaactt

SEQ ID NO: 3315107 - DNA, 25 bp, Homo sapien
tgcattcgatatctccccaaatgga

SEQ ID NO: 3315108 - DNA, 25 bp, Homo sapien
tcagaaatgtcacagggccactatc

SEQ ID NO: 3315109 - DNA, 25 bp, Homo sapien
gagttctacccagcaatatgagcag

SEQ ID NO: 3315110 - DNA, 25 bp, Homo sapien
gcttaaaggttttctgcccacataa

SEQ ID NO: 3315111 - DNA, 25 bp, Homo sapien
tatgattgactgaaactcagctgcc

SEQ ID NO: 3315112 - DNA, 25 bp, Homo sapien
ccaggcgacgttcagagagttctac

SEQ ID NO: 3315113 - DNA, 25 bp, Homo sapien
actgggaaagctattctccaccttt

SEQ ID NO: 3315114 - DNA, 25 bp, Homo sapien
taacattcttgattgagcacatagg

SEQ ID NO: 3315115 - DNA, 25 bp, Homo sapien
ctgatgtgagagtatgaggtttaaa

SEQ ID NO: 3315116 - DNA, 25 bp, Homo sapien
cacataggttatgggcttaagggct

SEQ ID NO: 3315117 - DNA, 25 bp, Homo sapien
gaagaagatattgggcgggcacatt

SEQ ID NO: 3315118 - DNA, 25 bp, Homo sapien
ggtagccctgtagatctctttctga

SEQ ID NO: 3315119 - DNA, 25 bp, Homo sapien
gcgtcatgttgataccaggtagccc

SEQ ID NO: 3315120 - DNA, 25 bp, Homo sapien
tctctggccctccttagcgtcatgt

SEQ ID NO: 3315121 - DNA, 25 bp, Homo sapien
aaagacttgtatcccttggctccca

SEQ ID NO: 3315122 - DNA, 25 bp, Homo sapien
tcagggctcctgttgagtccccagc

SEQ ID NO: 3315123 - DNA, 25 bp, Homo sapien
tctcctggacaattaaagtgatctt

SEQ ID NO: 3315124 - DNA, 25 bp, Homo sapien
ctcttttcataactggctaggctaa

SEQ ID NO: 3315125 - DNA, 25 bp, Homo sapien
gcattcaaagccctcaaaaatctag

SEQ ID NO: 3315126 - DNA, 25 bp, Homo sapien
tttccagctgtaaagaacaccgcct

SEQ ID NO: 3315127 - DNA, 25 bp, Homo sapien
gaaccatttgttatactctcaggac

SEQ ID NO: 3315128 - DNA, 25 bp, Homo sapien
taaaatcttgaagcctactggtgca

SEQ ID NO: 3315129 - DNA, 25 bp, Homo sapien
caggacagattaacgcaatttgaac

SEQ ID NO: 3315130 - DNA, 25 bp, Homo sapien
gcacattttcgttggcaggacagat

SEQ ID NO: 3315131 - DNA, 25 bp, Homo sapien
taagtgccatgtgcaagtaggaaga

SEQ ID NO: 3315132 - DNA, 25 bp, Homo sapien
tgtcttatggccaactgtgtagtca

SEQ ID NO: 3315133 - DNA, 25 bp, Homo sapien
tgttctgtcttatactgtctgtggg

SEQ ID NO: 3315134 - DNA, 25 bp, Homo sapien
tgagttcaggtcctaagtatccttg

SEQ ID NO: 3315135 - DNA, 25 bp, Homo sapien
tatggctactctttctgtgggtgga

SEQ ID NO: 3315136 - DNA, 25 bp, Homo sapien
ggctactctttctgtgggtggagct

SEQ ID NO: 3315137 - DNA, 25 bp, Homo sapien
tactctttctgtgggtggagctgat

SEQ ID NO: 3315138 - DNA, 25 bp, Homo sapien
atttctatggctactctttctgtgg

SEQ ID NO: 3315139 - DNA, 25 bp, Homo sapien
tgcgaagctatatacaggaattaag

SEQ ID NO: 3315140 - DNA, 25 bp, Homo sapien
aagagaagtgcgaagctatatacag

SEQ ID NO: 3315141 - DNA, 25 bp, Homo sapien
gaagtgcgaagctatatacaggaat

SEQ ID NO: 3315142 - DNA, 25 bp, Homo sapien
tagcaaagagaagtgcgaagctata

SEQ ID NO: 3315143 - DNA, 25 bp, Homo sapien
gcttcttcacctcgtatattggatt

SEQ ID NO: 3315144 - DNA, 25 bp, Homo sapien
cttgttcctctacttgctttcctcc

SEQ ID NO: 3315145 - DNA, 25 bp, Homo sapien
ccttgttcctctacttgctttcctc

SEQ ID NO: 3315146 - DNA, 25 bp, Homo sapien
cagagctgaaatgctggacaacagt

SEQ ID NO: 3315147 - DNA, 25 bp, Homo sapien
taaaagtacgaagatctacagcaga

SEQ ID NO: 3315148 - DNA, 25 bp, Homo sapien
caacagtgcattctgaataatgcat

SEQ ID NO: 3315149 - DNA, 25 bp, Homo sapien
ctacagcagagctgaaatgctggac

SEQ ID NO: 3315150 - DNA, 25 bp, Homo sapien
acccctcaccattataaatctctgc

SEQ ID NO: 3315151 - DNA, 25 bp, Homo sapien
tgatcctttgcattctcacccctca

SEQ ID NO: 3315152 - DNA, 25 bp, Homo sapien
ccctcaccattataaatctctgcat

SEQ ID NO: 3315153 - DNA, 25 bp, Homo sapien
ttgatcctttgcattctcacccctc

SEQ ID NO: 3315154 - DNA, 25 bp, Homo sapien
gaaatattagcctttgtgagccctt

SEQ ID NO: 3315155 - DNA, 25 bp, Homo sapien
tgagccctttaacatcctcctgtgt

SEQ ID NO: 3315156 - DNA, 25 bp, Homo sapien
caaaaaatccttgttcagaaagagc

SEQ ID NO: 3315157 - DNA, 25 bp, Homo sapien
caatgcaggacatgaggaataagac

SEQ ID NO: 3315158 - DNA, 25 bp, Homo sapien
gaaagggtagttatcctgaagagcc

SEQ ID NO: 3315159 - DNA, 25 bp, Homo sapien
ttggaataaaaggaatctgagatga

SEQ ID NO: 3315160 - DNA, 25 bp, Homo sapien
caagactcttgaaagggtagttatc

SEQ ID NO: 3315161 - DNA, 25 bp, Homo sapien
tgagatgatgaagccaagatgatga

SEQ ID NO: 3315162 - DNA, 25 bp, Homo sapien
aacacgtgagttaatccctggtatc

SEQ ID NO: 3315163 - DNA, 25 bp, Homo sapien
actggttcaagctctaacctttgac

SEQ ID NO: 3315164 - DNA, 25 bp, Homo sapien
gatcatccatcatgtactctatcat

SEQ ID NO: 3315165 - DNA, 25 bp, Homo sapien
gaaacatttgaccaaacacgtgagt

SEQ ID NO: 3315166 - DNA, 25 bp, Homo sapien
tggcatctctccagtctccaaaatg

SEQ ID NO: 3315167 - DNA, 25 bp, Homo sapien
gctggcatctctccagtctccaaaa

SEQ ID NO: 3315168 - DNA, 25 bp, Homo sapien
catctctccagtctccaaaatgcat

SEQ ID NO: 3315169 - DNA, 25 bp, Homo sapien
ctttcctttcgctctgctggcatct

SEQ ID NO: 3315170 - DNA, 25 bp, Homo sapien
ggttcaaatccctgcatggtgtggc

SEQ ID NO: 3315171 - DNA, 25 bp, Homo sapien
gaacagggaggtagtctgtgaccca

SEQ ID NO: 3315172 - DNA, 25 bp, Homo sapien
ggtgcagcaccccaaaaaagtagca

SEQ ID NO: 3315173 - DNA, 25 bp, Homo sapien
cagggagcacagcatcagtctggat

SEQ ID NO: 3315174 - DNA, 25 bp, Homo sapien
tgagagcctcggaatagcatgtctg

SEQ ID NO: 3315175 - DNA, 25 bp, Homo sapien
aaatgagatatctgcagaaggaatc

SEQ ID NO: 3315176 - DNA, 25 bp, Homo sapien
caaaactcataacaactgtgagagc

SEQ ID NO: 3315177 - DNA, 25 bp, Homo sapien
ggaatctgtaaatcgcccacaaaac

SEQ ID NO: 3315178 - DNA, 25 bp, Homo sapien
tagttacaacctgcttcaagacctc

SEQ ID NO: 3315179 - DNA, 25 bp, Homo sapien
ttacaacctgcttcaagacctccat

SEQ ID NO: 3315180 - DNA, 25 bp, Homo sapien
cttagttacaacctgcttcaagacc

SEQ ID NO: 3315181 - DNA, 25 bp, Homo sapien
gttacaacctgcttcaagacctcca

SEQ ID NO: 3315182 - DNA, 25 bp, Homo sapien
ctgggatgaataatgtagttgaccc

SEQ ID NO: 3315183 - DNA, 25 bp, Homo sapien
atgtagttgacccacttaggtgact

SEQ ID NO: 3315184 - DNA, 25 bp, Homo sapien
gaataatgtagttgacccacttagg

SEQ ID NO: 3315185 - DNA, 25 bp, Homo sapien
ggatgaataatgtagttgacccact

SEQ ID NO: 3315186 - DNA, 25 bp, Homo sapien
aaatgttgaaatcgaagagcttcac

SEQ ID NO: 3315187 - DNA, 25 bp, Homo sapien
tgaaatcgaagagcttcactgtact

SEQ ID NO: 3315188 - DNA, 25 bp, Homo sapien
tactgttttctaccactccaccaca

SEQ ID NO: 3315189 - DNA, 25 bp, Homo sapien
tggaaaatgttgaaatcgaagagct

SEQ ID NO: 3315190 - DNA, 25 bp, Homo sapien
gacaagatcctgtgtgcgtagacca

SEQ ID NO: 3315191 - DNA, 25 bp, Homo sapien
taaccatgatcaaagacccgctacg

SEQ ID NO: 3315192 - DNA, 25 bp, Homo sapien
gatgggacggccttaagaaccctga

SEQ ID NO: 3315193 - DNA, 25 bp, Homo sapien
caatggagcattttactgaaggacc

SEQ ID NO: 3315194 - DNA, 25 bp, Homo sapien
aagaaccatcggaatgcttcagcgc

SEQ ID NO: 3315195 - DNA, 25 bp, Homo sapien
accatcggaatgcttcagcgctggg

SEQ ID NO: 3315196 - DNA, 25 bp, Homo sapien
aaccatcggaatgcttcagcgctgg

SEQ ID NO: 3315197 - DNA, 25 bp, Homo sapien
gaaccatcggaatgcttcagcgctg

SEQ ID NO: 3315198 - DNA, 25 bp, Homo sapien
ttctcctttacacttcagcaatatt

SEQ ID NO: 3315199 - DNA, 25 bp, Homo sapien
ttgaatttaatgctaacttgctgaa

SEQ ID NO: 3315200 - DNA, 25 bp, Homo sapien
gaaatgctcaatcttagaacatgac

SEQ ID NO: 3315201 - DNA, 25 bp, Homo sapien
taagctttctttctatgccaatata

SEQ ID NO: 3315202 - DNA, 25 bp, Homo sapien
gatattactgtgcatcgtgatttta

SEQ ID NO: 3315203 - DNA, 25 bp, Homo sapien
gaccagtatgcatccccagatgtaa

SEQ ID NO: 3315204 - DNA, 25 bp, Homo sapien
gcatcgtgattttactatgcataca

SEQ ID NO: 3315205 - DNA, 25 bp, Homo sapien
tatggacagtttattgcaggagaag

SEQ ID NO: 3315206 - DNA, 25 bp, Homo sapien
tctggatctcagtgatgcttgcagg

SEQ ID NO: 3315207 - DNA, 25 bp, Homo sapien
ctggatctcagtgatgcttgcaggg

SEQ ID NO: 3315208 - DNA, 25 bp, Homo sapien
tggatctcagtgatgcttgcagggg

SEQ ID NO: 3315209 - DNA, 25 bp, Homo sapien
tgagtgacaggaaagccagattccc

SEQ ID NO: 3315210 - DNA, 25 bp, Homo sapien
ctgagtgacaggaaagccagattcc

SEQ ID NO: 3315211 - DNA, 25 bp, Homo sapien
tcctgagtgacaggaaagccagatt

SEQ ID NO: 3315212 - DNA, 25 bp, Homo sapien
ttatcctgagtgacaggaaagccag

SEQ ID NO: 3315213 - DNA, 25 bp, Homo sapien
gacaaacagccgtcttgctcccagg

SEQ ID NO: 3315214 - DNA, 25 bp, Homo sapien
agccttcactgttcatgcaggtgca

SEQ ID NO: 3315215 - DNA, 25 bp, Homo sapien
aagaatagaattgagttgatcggca

SEQ ID NO: 3315216 - DNA, 25 bp, Homo sapien
cggcattgtttaaggcagccttcac

SEQ ID NO: 3315217 - DNA, 25 bp, Homo sapien
caagtctaaaggagtcttctgtttc

SEQ ID NO: 3315218 - DNA, 25 bp, Homo sapien
cactatcttcaagtctaaaggagtc

SEQ ID NO: 3315219 - DNA, 25 bp, Homo sapien
ccaggtacaacactatcttcaagtc

SEQ ID NO: 3315220 - DNA, 25 bp, Homo sapien
agaattcacccctacacaaaccagg

SEQ ID NO: 3315221 - DNA, 25 bp, Homo sapien
ggcactaagtcaagtccatatggtg

SEQ ID NO: 3315222 - DNA, 25 bp, Homo sapien
gattaacaccacgattcacactggt

SEQ ID NO: 3315223 - DNA, 25 bp, Homo sapien
ggtaaacctagctaacttctgcaaa

SEQ ID NO: 3315224 - DNA, 25 bp, Homo sapien
gacatttgtgaccaagatttctccg

SEQ ID NO: 3315225 - DNA, 25 bp, Homo sapien
tagttacatttagcctccatcagca

SEQ ID NO: 3315226 - DNA, 25 bp, Homo sapien
cagcatagcattaggtgagttcatt

SEQ ID NO: 3315227 - DNA, 25 bp, Homo sapien
ttttaaagcagtcagtgaaaccgta

SEQ ID NO: 3315228 - DNA, 25 bp, Homo sapien
aaaacaatgagcagcctttcccaga

SEQ ID NO: 3315229 - DNA, 25 bp, Homo sapien
tatctatcttctgtggcatttgcca

SEQ ID NO: 3315230 - DNA, 25 bp, Homo sapien
gattcaccaacactagttctcgcca

SEQ ID NO: 3315231 - DNA, 25 bp, Homo sapien
tcttttagtctttgggcaagaagca

SEQ ID NO: 3315232 - DNA, 25 bp, Homo sapien
cattgccaatagagaagttattccc

SEQ ID NO: 3315233 - DNA, 25 bp, Homo sapien
tagaagactttcttaaaagcacact

SEQ ID NO: 3315234 - DNA, 25 bp, Homo sapien
tattcagacaatctgaccagttgag

SEQ ID NO: 3315235 - DNA, 25 bp, Homo sapien
acactttcaacctatgcctgagaga

SEQ ID NO: 3315236 - DNA, 25 bp, Homo sapien
cagcagtaaattctgagagcaccaa

SEQ ID NO: 3315237 - DNA, 25 bp, Homo sapien
gttacattctaatgttaatatacta

SEQ ID NO: 3315238 - DNA, 25 bp, Homo sapien
cattacagatggtgctttgtccaga

SEQ ID NO: 3315239 - DNA, 25 bp, Homo sapien
tactgttggcctgtacattcggcag

SEQ ID NO: 3315240 - DNA, 25 bp, Homo sapien
tagaaactcaacctaacttgtggaa

SEQ ID NO: 3315241 - DNA, 25 bp, Homo sapien
gctcttagtttgagtgacacaccta

SEQ ID NO: 3315242 - DNA, 25 bp, Homo sapien
ttcactataacctgctctctctagt

SEQ ID NO: 3315243 - DNA, 25 bp, Homo sapien
ctcaatgtcttcactataacctgct

SEQ ID NO: 3315244 - DNA, 25 bp, Homo sapien
cttcactataacctgctctctctag

SEQ ID NO: 3315245 - DNA, 25 bp, Homo sapien
aaaaatctggatgagagtcccaaca

SEQ ID NO: 3315246 - DNA, 25 bp, Homo sapien
ggttatgcaaatacacagtgcacag

SEQ ID NO: 3315247 - DNA, 25 bp, Homo sapien
caagtcaaagggaagagtggcacat

SEQ ID NO: 3315248 - DNA, 25 bp, Homo sapien
gctatggagtttacatctggaaccc

SEQ ID NO: 3315249 - DNA, 25 bp, Homo sapien
tcccagatgaggatggaccaaattt

SEQ ID NO: 3315250 - DNA, 25 bp, Homo sapien
agccaggaacccatccaatctctaa

SEQ ID NO: 3315251 - DNA, 25 bp, Homo sapien
agagaaaccaggtcagcagggggac

SEQ ID NO: 3315252 - DNA, 25 bp, Homo sapien
gaggatggaccaaatttaagagaga

SEQ ID NO: 3315253 - DNA, 25 bp, Homo sapien
tgtcactctgacatgtgctcagctg

SEQ ID NO: 3315254 - DNA, 25 bp, Homo sapien
agctttggttcagtcatgtaagccc

SEQ ID NO: 3315255 - DNA, 25 bp, Homo sapien
ggttcagtcatgtaagccctgtcac

SEQ ID NO: 3315256 - DNA, 25 bp, Homo sapien
ggtttcctacaaccataactgtgta

SEQ ID NO: 3315257 - DNA, 25 bp, Homo sapien
taaattgggatgcaagtagtgccac

SEQ ID NO: 3315258 - DNA, 25 bp, Homo sapien
tctctatcagaagggcggtgtcacg

SEQ ID NO: 3315259 - DNA, 25 bp, Homo sapien
gtactcatatcaaacccctgcaggg

SEQ ID NO: 3315260 - DNA, 25 bp, Homo sapien
caaaactgtgcttggtgtatacacc

SEQ ID NO: 3315261 - DNA, 25 bp, Homo sapien
gaaggggtactgcatcttgaagcca

SEQ ID NO: 3315262 - DNA, 25 bp, Homo sapien
gaagcttctgagaaggggtactgca

SEQ ID NO: 3315263 - DNA, 25 bp, Homo sapien
tctgagaaggggtactgcatcttga

SEQ ID NO: 3315264 - DNA, 25 bp, Homo sapien
ggggtactgcatcttgaagccagac

SEQ ID NO: 3315265 - DNA, 25 bp, Homo sapien
gggagactgggaaacaagaaatcat

SEQ ID NO: 3315266 - DNA, 25 bp, Homo sapien
gaaacaagaaatcatctcctctgac

SEQ ID NO: 3315267 - DNA, 25 bp, Homo sapien
ctgggaaacaagaaatcatctcctc

SEQ ID NO: 3315268 - DNA, 25 bp, Homo sapien
ggagactgggaaacaagaaatcatc

SEQ ID NO: 3315269 - DNA, 25 bp, Homo sapien
gcagcgccgcatttgagcttgttca

SEQ ID NO: 3315270 - DNA, 25 bp, Homo sapien
cagatctggtgtcccgttttgcggt

SEQ ID NO: 3315271 - DNA, 25 bp, Homo sapien
tgaaacgcactgtctgtgacggctg

SEQ ID NO: 3315272 - DNA, 25 bp, Homo sapien
gtcatgacgatgacccctggaggta

SEQ ID NO: 3315273 - DNA, 25 bp, Homo sapien
ggataaggtggagaggaaattagta

SEQ ID NO: 3315274 - DNA, 25 bp, Homo sapien
catttgcaacgacggctctggcggg

SEQ ID NO: 3315275 - DNA, 25 bp, Homo sapien
tctgggagtcgtttcggtggtgcat

SEQ ID NO: 3315276 - DNA, 25 bp, Homo sapien
atttgccatttgcaacgacggctct

SEQ ID NO: 3315277 - DNA, 25 bp, Homo sapien
gcggtagcgctccatttccgagttg

SEQ ID NO: 3315278 - DNA, 25 bp, Homo sapien
tccgagttgtaatccacaaggctgt

SEQ ID NO: 3315279 - DNA, 25 bp, Homo sapien
ccgggctccacgcagacattggtgt

SEQ ID NO: 3315280 - DNA, 25 bp, Homo sapien
aagtggctttccttgggcaagcccg

SEQ ID NO: 3315281 - DNA, 25 bp, Homo sapien
ttgcattatcctccaactgttacaa

SEQ ID NO: 3315282 - DNA, 25 bp, Homo sapien
caggcagcgtcttcctttgcattat

SEQ ID NO: 3315283 - DNA, 25 bp, Homo sapien
tccacagacggtgaattcccaggca

SEQ ID NO: 3315284 - DNA, 25 bp, Homo sapien
tggggctcatttccacagacggtga

SEQ ID NO: 3315285 - DNA, 25 bp, Homo sapien
ttcttccatcaggtcgtttgcataa

SEQ ID NO: 3315286 - DNA, 25 bp, Homo sapien
gacaccgaaagctcccacattcttc

SEQ ID NO: 3315287 - DNA, 25 bp, Homo sapien
taagaatcatcaagacgtgaccccc

SEQ ID NO: 3315288 - DNA, 25 bp, Homo sapien
tcaggtcgtttgcataagaatcatc

SEQ ID NO: 3315289 - DNA, 25 bp, Homo sapien
gaaagagtcgagtgtgagtgtatgt

SEQ ID NO: 3315290 - DNA, 25 bp, Homo sapien
gcgggtctgttgtcggtggtctctc

SEQ ID NO: 3315291 - DNA, 25 bp, Homo sapien
tctcctctcccagcgcgttgctctc

SEQ ID NO: 3315292 - DNA, 25 bp, Homo sapien
gcgttgctctccgtccgtctccagt

SEQ ID NO: 3315293 - DNA, 25 bp, Homo sapien
tgggataaatcgctcacacaaaggt

SEQ ID NO: 3315294 - DNA, 25 bp, Homo sapien
cacaaaggtaacgaggctgcattca

SEQ ID NO: 3315295 - DNA, 25 bp, Homo sapien
tcattgcctgggaaagtgctttgca

SEQ ID NO: 3315296 - DNA, 25 bp, Homo sapien
ttgtaaaatgtgaatgccttgccgg

SEQ ID NO: 3315297 - DNA, 25 bp, Homo sapien
ggtcataaggtgttggcaatgagtt

SEQ ID NO: 3315298 - DNA, 25 bp, Homo sapien
ttttcagacatgtttcagaaagctg

SEQ ID NO: 3315299 - DNA, 25 bp, Homo sapien
taaagctgccactctatttatccta

SEQ ID NO: 3315300 - DNA, 25 bp, Homo sapien
tgaagctcagggtctttatatgctg

SEQ ID NO: 3315301 - DNA, 25 bp, Homo sapien
ctgtagaactgctcccaggttcttg

SEQ ID NO: 3315302 - DNA, 25 bp, Homo sapien
tagatgggctcactcagtcatacac

SEQ ID NO: 3315303 - DNA, 25 bp, Homo sapien
cagcctagcccaagctcaaggagga

SEQ ID NO: 3315304 - DNA, 25 bp, Homo sapien
agtcatacacctgtggtcagctgca

SEQ ID NO: 3315305 - DNA, 25 bp, Homo sapien
cagctgcagattaagtaggtacctc

SEQ ID NO: 3315306 - DNA, 25 bp, Homo sapien
ggtcaggaatttagacaaaaatgca

SEQ ID NO: 3315307 - DNA, 25 bp, Homo sapien
tttactggtttcaggaagacttgaa

SEQ ID NO: 3315308 - DNA, 25 bp, Homo sapien
cttgaagcttaggagtagcttggca

SEQ ID NO: 3315309 - DNA, 25 bp, Homo sapien
aaatgcagtggctgtcctttactgg

SEQ ID NO: 3315310 - DNA, 25 bp, Homo sapien
tatagcagaaaccaattttcgattg

SEQ ID NO: 3315311 - DNA, 25 bp, Homo sapien
gcatatagcagaaaccaattttcga

SEQ ID NO: 3315312 - DNA, 25 bp, Homo sapien
cagaaaccaattttcgattgcaggt

SEQ ID NO: 3315313 - DNA, 25 bp, Homo sapien
tagcagaaaccaattttcgattgca

SEQ ID NO: 3315314 - DNA, 25 bp, Homo sapien
gggaaattggttctgcagcatatat

SEQ ID NO: 3315315 - DNA, 25 bp, Homo sapien
gcgcttgagagtttcactatctgtt

SEQ ID NO: 3315316 - DNA, 25 bp, Homo sapien
tgcagcatatatcgtagcttcccag

SEQ ID NO: 3315317 - DNA, 25 bp, Homo sapien
gagagtttcactatctgttcagtcc

SEQ ID NO: 3315318 - DNA, 25 bp, Homo sapien
gggagagcccagattgtaaacatct

SEQ ID NO: 3315319 - DNA, 25 bp, Homo sapien
gcagatgaaaagctcctagaggtgg

SEQ ID NO: 3315320 - DNA, 25 bp, Homo sapien
ggcactgggtcttgtagttctatca

SEQ ID NO: 3315321 - DNA, 25 bp, Homo sapien
ctcttgcctgttgcctagaagcagt

SEQ ID NO: 3315322 - DNA, 25 bp, Homo sapien
ggtatatactccttttaatgtggca

SEQ ID NO: 3315323 - DNA, 25 bp, Homo sapien
gataatgctggtcccatgaaaggag

SEQ ID NO: 3315324 - DNA, 25 bp, Homo sapien
cgttctgttaatgtggagaatgaca

SEQ ID NO: 3315325 - DNA, 25 bp, Homo sapien
tctgtctttggtgtaaggataatgc

SEQ ID NO: 3315326 - DNA, 25 bp, Homo sapien
ttgataatcatagagaagcctcggt

SEQ ID NO: 3315327 - DNA, 25 bp, Homo sapien
aaggattaagtaccccaccagagca

SEQ ID NO: 3315328 - DNA, 25 bp, Homo sapien
gagaagcctcggttttactctacta

SEQ ID NO: 3315329 - DNA, 25 bp, Homo sapien
ctaaggattaagtaccccaccagag

SEQ ID NO: 3315330 - DNA, 25 bp, Homo sapien
tcatttctctggctttagattccca

SEQ ID NO: 3315331 - DNA, 25 bp, Homo sapien
ttttcatttctctggctttagattc

SEQ ID NO: 3315332 - DNA, 25 bp, Homo sapien
tttctctggctttagattcccacat

SEQ ID NO: 3315333 - DNA, 25 bp, Homo sapien
catttctctggctttagattcccac

SEQ ID NO: 3315334 - DNA, 25 bp, Homo sapien
cagtcaccactgtttctgtccaagg

SEQ ID NO: 3315335 - DNA, 25 bp, Homo sapien
tgtctgctaaatacaactacttggc

SEQ ID NO: 3315336 - DNA, 25 bp, Homo sapien
tacttacacctaaaatccaatgagc

SEQ ID NO: 3315337 - DNA, 25 bp, Homo sapien
cattgcctatgtcccagttcaggtc

SEQ ID NO: 3315338 - DNA, 25 bp, Homo sapien
attcaacattgcagtgaaggtcata

SEQ ID NO: 3315339 - DNA, 25 bp, Homo sapien
ttcaacattgcagtgaaggtcatag

SEQ ID NO: 3315340 - DNA, 25 bp, Homo sapien
ccattcaacattgcagtgaaggtca

SEQ ID NO: 3315341 - DNA, 25 bp, Homo sapien
cattcaacattgcagtgaaggtcat

SEQ ID NO: 3315342 - DNA, 25 bp, Homo sapien
tgtcatattgcctcccatcacttgc

SEQ ID NO: 3315343 - DNA, 25 bp, Homo sapien
tggcctgtgatgcagtgatgatctc

SEQ ID NO: 3315344 - DNA, 25 bp, Homo sapien
gatctcagttctgtgtattagtctg

SEQ ID NO: 3315345 - DNA, 25 bp, Homo sapien
tcttaaagactctgtcatattgcct

SEQ ID NO: 3315346 - DNA, 25 bp, Homo sapien
tcacactacaacacttagaggttta

SEQ ID NO: 3315347 - DNA, 25 bp, Homo sapien
tgatcctcatatgctttgacagaaa

SEQ ID NO: 3315348 - DNA, 25 bp, Homo sapien
aaagactatccattttcgtctggaa

SEQ ID NO: 3315349 - DNA, 25 bp, Homo sapien
ttttaccaacctgtatgttaggcag

SEQ ID NO: 3315350 - DNA, 25 bp, Homo sapien
gcaacagctttttcacagcaaagtc

SEQ ID NO: 3315351 - DNA, 25 bp, Homo sapien
ctgcaacagctttttcacagcaaag

SEQ ID NO: 3315352 - DNA, 25 bp, Homo sapien
tgcaacagctttttcacagcaaagt

SEQ ID NO: 3315353 - DNA, 25 bp, Homo sapien
ttcgcttttattactccatgcagaa

SEQ ID NO: 3315354 - DNA, 25 bp, Homo sapien
tattgtcttattgtgtgaatgagca

SEQ ID NO: 3315355 - DNA, 25 bp, Homo sapien
tatatttcgcttttattactccatg

SEQ ID NO: 3315356 - DNA, 25 bp, Homo sapien
tactccatgcagaatattgtcttat

SEQ ID NO: 3315357 - DNA, 25 bp, Homo sapien
gccaatacccaatacaaaccaaatc

SEQ ID NO: 3315358 - DNA, 25 bp, Homo sapien
tacagggacatttccacaggtggtg

SEQ ID NO: 3315359 - DNA, 25 bp, Homo sapien
tgattctgtctgctgtacagggaca

SEQ ID NO: 3315360 - DNA, 25 bp, Homo sapien
tgctgtacagggacatttccacagg

SEQ ID NO: 3315361 - DNA, 25 bp, Homo sapien
ctgtcataatcctctgaggttttat

SEQ ID NO: 3315362 - DNA, 25 bp, Homo sapien
gaaaagcttttcattctgtgcactt

SEQ ID NO: 3315363 - DNA, 25 bp, Homo sapien
tcagcagggaccttctggaaaagct

SEQ ID NO: 3315364 - DNA, 25 bp, Homo sapien
ttgttctgtgcctgatctgtcataa

SEQ ID NO: 3315365 - DNA, 25 bp, Homo sapien
atgtgatccttgagtactatgttgt

SEQ ID NO: 3315366 - DNA, 25 bp, Homo sapien
cttgagtactatgttgttgaacttc

SEQ ID NO: 3315367 - DNA, 25 bp, Homo sapien
tccttgagtactatgttgttgaact

SEQ ID NO: 3315368 - DNA, 25 bp, Homo sapien
tgatccttgagtactatgttgttga

SEQ ID NO: 3315369 - DNA, 25 bp, Homo sapien
gctcttgaatggtaactggcctaca

SEQ ID NO: 3315370 - DNA, 25 bp, Homo sapien
tgctgcagatggaggctcttgaatg

SEQ ID NO: 3315371 - DNA, 25 bp, Homo sapien
tcctgagtgtgaacaagtattccac

SEQ ID NO: 3315372 - DNA, 25 bp, Homo sapien
tcatcacgcacgatcacaaatccag

SEQ ID NO: 3315373 - DNA, 25 bp, Homo sapien
tttatccacattaggatggaagctg

SEQ ID NO: 3315374 - DNA, 25 bp, Homo sapien
ttttatccacattaggatggaagct

SEQ ID NO: 3315375 - DNA, 25 bp, Homo sapien
caaatatagcagctctttatatctc

SEQ ID NO: 3315376 - DNA, 25 bp, Homo sapien
ccaaatatagcagctctttatatct

SEQ ID NO: 3315377 - DNA, 25 bp, Homo sapien
tttgtgtgaaagtttctctctacgc

SEQ ID NO: 3315378 - DNA, 25 bp, Homo sapien
ttactcagcaacaccaactttactg

SEQ ID NO: 3315379 - DNA, 25 bp, Homo sapien
tctacgctgacggaaggacttccaa

SEQ ID NO: 3315380 - DNA, 25 bp, Homo sapien
cccatcagtaacatctaaggcagtt

SEQ ID NO: 3315381 - DNA, 25 bp, Homo sapien
ggtactctttgtctacaggaccact

SEQ ID NO: 3315382 - DNA, 25 bp, Homo sapien
gacgaaaatctcaagaatggttaag

SEQ ID NO: 3315383 - DNA, 25 bp, Homo sapien
ttccacattcagtacgctgttgacg

SEQ ID NO: 3315384 - DNA, 25 bp, Homo sapien
ggatcactcttgctacaggcacagg

SEQ ID NO: 3315385 - DNA, 25 bp, Homo sapien
tctcagaaaaagatagacaggacag

SEQ ID NO: 3315386 - DNA, 25 bp, Homo sapien
gcaaagctgttgcataatctcagaa

SEQ ID NO: 3315387 - DNA, 25 bp, Homo sapien
gttgcataatctcagaaaaagatag

SEQ ID NO: 3315388 - DNA, 25 bp, Homo sapien
gatagacaggacagaccttacaaat

SEQ ID NO: 3315389 - DNA, 25 bp, Homo sapien
atgaggacgatgcttttattggtgg

SEQ ID NO: 3315390 - DNA, 25 bp, Homo sapien
cacaagctggcaaaagtagtaggca

SEQ ID NO: 3315391 - DNA, 25 bp, Homo sapien
tcttccataggtaaccacaagctgg

SEQ ID NO: 3315392 - DNA, 25 bp, Homo sapien
tagtaggcaagtgttggaagttaga

SEQ ID NO: 3315393 - DNA, 25 bp, Homo sapien
gaacatcccataccaagaacctcaa

SEQ ID NO: 3315394 - DNA, 25 bp, Homo sapien
gggaactaagtagaacatcccatac

SEQ ID NO: 3315395 - DNA, 25 bp, Homo sapien
taagtagaacatcccataccaagaa

SEQ ID NO: 3315396 - DNA, 25 bp, Homo sapien
acacagataagaattttaactcatt

SEQ ID NO: 3315397 - DNA, 25 bp, Homo sapien
tttgtggcttctttttcttgatcca

SEQ ID NO: 3315398 - DNA, 25 bp, Homo sapien
tttttgtggcttctttttcttgatc

SEQ ID NO: 3315399 - DNA, 25 bp, Homo sapien
ttgtggcttctttttcttgatccat

SEQ ID NO: 3315400 - DNA, 25 bp, Homo sapien
ttttgtggcttctttttcttgatcc

SEQ ID NO: 3315401 - DNA, 25 bp, Homo sapien
tgttccctgaatatcactggctggc

SEQ ID NO: 3315402 - DNA, 25 bp, Homo sapien
ttgactcagagaactcaagcttctg

SEQ ID NO: 3315403 - DNA, 25 bp, Homo sapien
caagcttctgcacgacagtgtgagt

SEQ ID NO: 3315404 - DNA, 25 bp, Homo sapien
cagtgtgagtctccagcaaacgcca

SEQ ID NO: 3315405 - DNA, 25 bp, Homo sapien
tgctttttctccaattatttcttta

SEQ ID NO: 3315406 - DNA, 25 bp, Homo sapien
ctaacttgctttttctccaattatt

SEQ ID NO: 3315407 - DNA, 25 bp, Homo sapien
cttgctttttctccaattatttctt

SEQ ID NO: 3315408 - DNA, 25 bp, Homo sapien
acttgctttttctccaattatttct

SEQ ID NO: 3315409 - DNA, 25 bp, Homo sapien
ggtcatttacgtattgtttggcaag

SEQ ID NO: 3315410 - DNA, 25 bp, Homo sapien
attgtttggcaagtactatttcatg

SEQ ID NO: 3315411 - DNA, 25 bp, Homo sapien
tggcaagtactatttcatgtgtatg

SEQ ID NO: 3315412 - DNA, 25 bp, Homo sapien
tatagttactatggtcatttacgta

SEQ ID NO: 3315413 - DNA, 25 bp, Homo sapien
aaaatcaggaaaattaccagagtca

SEQ ID NO: 3315414 - DNA, 25 bp, Homo sapien
aaattaccagagtcactttggacca

SEQ ID NO: 3315415 - DNA, 25 bp, Homo sapien
tcaggaaaattaccagagtcacttt

SEQ ID NO: 3315416 - DNA, 25 bp, Homo sapien
ggaaaattaccagagtcactttgga

SEQ ID NO: 3315417 - DNA, 25 bp, Homo sapien
aatgaagatatcagttttgacaccc

SEQ ID NO: 3315418 - DNA, 25 bp, Homo sapien
cctcagtgtacagtgaagaccaact

SEQ ID NO: 3315419 - DNA, 25 bp, Homo sapien
tgtacagtgaagaccaactcattcc

SEQ ID NO: 3315420 - DNA, 25 bp, Homo sapien
cagtgaagaccaactcattcccatt

SEQ ID NO: 3315421 - DNA, 25 bp, Homo sapien
ggctgcttgccaactggagctgcct

SEQ ID NO: 3315422 - DNA, 25 bp, Homo sapien
cgaaggtgccaatggctttaattaa

SEQ ID NO: 3315423 - DNA, 25 bp, Homo sapien
tcatgtgctctatgaagctgcccac

SEQ ID NO: 3315424 - DNA, 25 bp, Homo sapien
tatcctggagtttgacttttggctc

SEQ ID NO: 3315425 - DNA, 25 bp, Homo sapien
tagtctaagtgttcattctgactgt

SEQ ID NO: 3315426 - DNA, 25 bp, Homo sapien
ggtccacgctggcatagtctaagtg

SEQ ID NO: 3315427 - DNA, 25 bp, Homo sapien
ggcatagtctaagtgttcattctga

SEQ ID NO: 3315428 - DNA, 25 bp, Homo sapien
cacgctggcatagtctaagtgttca

SEQ ID NO: 3315429 - DNA, 25 bp, Homo sapien
acttcttgttcatggccttttggga

SEQ ID NO: 3315430 - DNA, 25 bp, Homo sapien
ccttttgggaatacatggcagacca

SEQ ID NO: 3315431 - DNA, 25 bp, Homo sapien
agcttatcaactttttcgtctgcca

SEQ ID NO: 3315432 - DNA, 25 bp, Homo sapien
tcctccttagtatccagcttatcaa

SEQ ID NO: 3315433 - DNA, 25 bp, Homo sapien
catggagcatggttacaaaaggtgt

SEQ ID NO: 3315434 - DNA, 25 bp, Homo sapien
gctgacctggtttaactatgtgtaa

SEQ ID NO: 3315435 - DNA, 25 bp, Homo sapien
taactatgtgtaaatctattatgat

SEQ ID NO: 3315436 - DNA, 25 bp, Homo sapien
aatgttgttatctttcaggatagca

SEQ ID NO: 3315437 - DNA, 25 bp, Homo sapien
aacttcacagttaacaggttggaag

SEQ ID NO: 3315438 - DNA, 25 bp, Homo sapien
caagaaaacttcacagttaacaggt

SEQ ID NO: 3315439 - DNA, 25 bp, Homo sapien
cacagttaacaggttggaagtccat

SEQ ID NO: 3315440 - DNA, 25 bp, Homo sapien
agaaaacttcacagttaacaggttg

SEQ ID NO: 3315441 - DNA, 25 bp, Homo sapien
ttcttaaacgttgattggctttcta

SEQ ID NO: 3315442 - DNA, 25 bp, Homo sapien
agaatttcttaaacgttgattggct

SEQ ID NO: 3315443 - DNA, 25 bp, Homo sapien
cagaatttcttaaacgttgattggc

SEQ ID NO: 3315444 - DNA, 25 bp, Homo sapien
tcagaatttcttaaacgttgattgg

SEQ ID NO: 3315445 - DNA, 25 bp, Homo sapien
acttaactgctggttaccaatatta

SEQ ID NO: 3315446 - DNA, 25 bp, Homo sapien
ctgctggttaccaatattatcaata

SEQ ID NO: 3315447 - DNA, 25 bp, Homo sapien
caaaacttaactgctggttaccaat

SEQ ID NO: 3315448 - DNA, 25 bp, Homo sapien
taactgctggttaccaatattatca

SEQ ID NO: 3315449 - DNA, 25 bp, Homo sapien
agagaatctcataactaatgttatt

SEQ ID NO: 3315450 - DNA, 25 bp, Homo sapien
tagagaatctcataactaatgttat

SEQ ID NO: 3315451 - DNA, 25 bp, Homo sapien
gagaatctcataactaatgttattt

SEQ ID NO: 3315452 - DNA, 25 bp, Homo sapien
ttagagaatctcataactaatgtta

SEQ ID NO: 3315453 - DNA, 25 bp, Homo sapien
tacagttcacattcattattccagg

SEQ ID NO: 3315454 - DNA, 25 bp, Homo sapien
gaattcctaatccaagactctctcg

SEQ ID NO: 3315455 - DNA, 25 bp, Homo sapien
tcagcatcccctagcacattatgaa

SEQ ID NO: 3315456 - DNA, 25 bp, Homo sapien
gactctctcgtctataagcaatgtg

SEQ ID NO: 3315457 - DNA, 25 bp, Homo sapien
cccagtagtaagcagattctttgca

SEQ ID NO: 3315458 - DNA, 25 bp, Homo sapien
acctccatccccagtagtaagcaga

SEQ ID NO: 3315459 - DNA, 25 bp, Homo sapien
gtagtaagcagattctttgcagagt

SEQ ID NO: 3315460 - DNA, 25 bp, Homo sapien
catccccagtagtaagcagattctt

SEQ ID NO: 3315461 - DNA, 25 bp, Homo sapien
aggaaaaccacttgagcataggagt

SEQ ID NO: 3315462 - DNA, 25 bp, Homo sapien
aggcaggaaaaccacttgagcatag

SEQ ID NO: 3315463 - DNA, 25 bp, Homo sapien
cctgcttaggtgacagagttagact

SEQ ID NO: 3315464 - DNA, 25 bp, Homo sapien
gtactcctgcttaggtgacagagtt

SEQ ID NO: 3315465 - DNA, 25 bp, Homo sapien
tgtttccagagctcttccactggag

SEQ ID NO: 3315466 - DNA, 25 bp, Homo sapien
gtttccagagctcttccactggagc

SEQ ID NO: 3315467 - DNA, 25 bp, Homo sapien
cagagctcttccactggagcaccat

SEQ ID NO: 3315468 - DNA, 25 bp, Homo sapien
ttccagagctcttccactggagcac

SEQ ID NO: 3315469 - DNA, 25 bp, Homo sapien
gatgcacaagtagaatgatcattca

SEQ ID NO: 3315470 - DNA, 25 bp, Homo sapien
agtagaatgatcattcagagtatcc

SEQ ID NO: 3315471 - DNA, 25 bp, Homo sapien
tcattcagagtatcctttagttgaa

SEQ ID NO: 3315472 - DNA, 25 bp, Homo sapien
cagatgcacaagtagaatgatcatt

SEQ ID NO: 3315473 - DNA, 25 bp, Homo sapien
cacggaaggttaaagaaatactgag

SEQ ID NO: 3315474 - DNA, 25 bp, Homo sapien
tgtgcacttccagtgtatcaggcag

SEQ ID NO: 3315475 - DNA, 25 bp, Homo sapien
ttccagtgtatcaggcagttcatcc

SEQ ID NO: 3315476 - DNA, 25 bp, Homo sapien
gaaactagaagtcttctagtcccac

SEQ ID NO: 3315477 - DNA, 25 bp, Homo sapien
ctcttccaaaccgccaaactctctt

SEQ ID NO: 3315478 - DNA, 25 bp, Homo sapien
agctcttccaaaccgccaaactctc

SEQ ID NO: 3315479 - DNA, 25 bp, Homo sapien
gctcttccaaaccgccaaactctct

SEQ ID NO: 3315480 - DNA, 25 bp, Homo sapien
cagctcttccaaaccgccaaactct

SEQ ID NO: 3315481 - DNA, 25 bp, Homo sapien
aaaagcagctccactggtgggttag

SEQ ID NO: 3315482 - DNA, 25 bp, Homo sapien
atgttcatcctggcaatcacacctg

SEQ ID NO: 3315483 - DNA, 25 bp, Homo sapien
ccactggtgggttagatatgtttgt

SEQ ID NO: 3315484 - DNA, 25 bp, Homo sapien
tgatgacaacacgaacatcatctgg

SEQ ID NO: 3315485 - DNA, 25 bp, Homo sapien
tctgaggtaagtttggagctgaata

SEQ ID NO: 3315486 - DNA, 25 bp, Homo sapien
ctgaggtaagtttggagctgaataa

SEQ ID NO: 3315487 - DNA, 25 bp, Homo sapien
ctctgaggtaagtttggagctgaat

SEQ ID NO: 3315488 - DNA, 25 bp, Homo sapien
taaaagaaactataacaacactcat

SEQ ID NO: 3315489 - DNA, 25 bp, Homo sapien
agacatcaaaagagggctggcttca

SEQ ID NO: 3315490 - DNA, 25 bp, Homo sapien
gagagattgatggaccaagacagac

SEQ ID NO: 3315491 - DNA, 25 bp, Homo sapien
tcagggtccccttctagagcttttg

SEQ ID NO: 3315492 - DNA, 25 bp, Homo sapien
ttggcagagcccagagatagaagag

SEQ ID NO: 3315493 - DNA, 25 bp, Homo sapien
cagcatccctccagagctaagctgc

SEQ ID NO: 3315494 - DNA, 25 bp, Homo sapien
tggcagcatccctccagagctaagc

SEQ ID NO: 3315495 - DNA, 25 bp, Homo sapien
ggcagcatccctccagagctaagct

SEQ ID NO: 3315496 - DNA, 25 bp, Homo sapien
gcagcatccctccagagctaagctg

SEQ ID NO: 3315497 - DNA, 25 bp, Homo sapien
tgggcatagagaagcaccttcatat

SEQ ID NO: 3315498 - DNA, 25 bp, Homo sapien
ctgggcatagagaagcaccttcata

SEQ ID NO: 3315499 - DNA, 25 bp, Homo sapien
tggaagcaccactgttgccaggcaa

SEQ ID NO: 3315500 - DNA, 25 bp, Homo sapien
cactgttgccaggcaatgaagtccc

SEQ ID NO: 3315501 - DNA, 25 bp, Homo sapien
tgttgccaggcaatgaagtcccaac

SEQ ID NO: 3315502 - DNA, 25 bp, Homo sapien
accactgttgccaggcaatgaagtc

SEQ ID NO: 3315503 - DNA, 25 bp, Homo sapien
tcatggtcatggtccttgatgctga

SEQ ID NO: 3315504 - DNA, 25 bp, Homo sapien
ctgatgctggtgtctgtagcctggc

SEQ ID NO: 3315505 - DNA, 25 bp, Homo sapien
cagctccttgtcatggtcatggtcc

SEQ ID NO: 3315506 - DNA, 25 bp, Homo sapien
ggtcatggtccttgatgctgatgct

SEQ ID NO: 3315507 - DNA, 25 bp, Homo sapien
tccttcttgaggcaactctagtgct

SEQ ID NO: 3315508 - DNA, 25 bp, Homo sapien
ccacacagggaaccgtctgagtctc

SEQ ID NO: 3315509 - DNA, 25 bp, Homo sapien
gagtctccaagtactcctatttcct

SEQ ID NO: 3315510 - DNA, 25 bp, Homo sapien
gaggcaactctagtgcttccacaag

SEQ ID NO: 3315511 - DNA, 25 bp, Homo sapien
tacgtgacacttcaggttgttgaga

SEQ ID NO: 3315512 - DNA, 25 bp, Homo sapien
tttacctgtgggctggctcctacgt

SEQ ID NO: 3315513 - DNA, 25 bp, Homo sapien
ggctcctacgtgacacttcaggttg

SEQ ID NO: 3315514 - DNA, 25 bp, Homo sapien
tgggctggctcctacgtgacacttc

SEQ ID NO: 3315515 - DNA, 25 bp, Homo sapien
cctggcaactcctgcatcatctgct

SEQ ID NO: 3315516 - DNA, 25 bp, Homo sapien
atctgctgtttcccgcatttgctgc

SEQ ID NO: 3315517 - DNA, 25 bp, Homo sapien
ccccactcctcgagcttctgcagct

SEQ ID NO: 3315518 - DNA, 25 bp, Homo sapien
tgctgtttcccgcatttgctgcccc

SEQ ID NO: 3315519 - DNA, 25 bp, Homo sapien
agagcaatcctctcccaatcgagtg

SEQ ID NO: 3315520 - DNA, 25 bp, Homo sapien
tatgctgcactatgattccagaggg

SEQ ID NO: 3315521 - DNA, 25 bp, Homo sapien
gcagtgaagaaaatcgctgcccttc

SEQ ID NO: 3315522 - DNA, 25 bp, Homo sapien
gtggagtcagtaccccagagcaatc

SEQ ID NO: 3315523 - DNA, 25 bp, Homo sapien
gccttgctttctcgttggatggtct

SEQ ID NO: 3315524 - DNA, 25 bp, Homo sapien
taaaacaactctttttagatgccgc

SEQ ID NO: 3315525 - DNA, 25 bp, Homo sapien
ctagtttagccagtctcagaaagcc

SEQ ID NO: 3315526 - DNA, 25 bp, Homo sapien
gtttagccagtctcagaaagcccct

SEQ ID NO: 3315527 - DNA, 25 bp, Homo sapien
cttcactgctgcctcgtagactttc

SEQ ID NO: 3315528 - DNA, 25 bp, Homo sapien
tgcctcgtagactttccctcgcttc

SEQ ID NO: 3315529 - DNA, 25 bp, Homo sapien
ttcactgctgcctcgtagactttcc

SEQ ID NO: 3315530 - DNA, 25 bp, Homo sapien
tagactttccctcgcttcctctccc

SEQ ID NO: 3315531 - DNA, 25 bp, Homo sapien
cataatgtttcagctaaactatgtg

SEQ ID NO: 3315532 - DNA, 25 bp, Homo sapien
ctttccataatgtttcagctaaact

SEQ ID NO: 3315533 - DNA, 25 bp, Homo sapien
tccataatgtttcagctaaactatg

SEQ ID NO: 3315534 - DNA, 25 bp, Homo sapien
atgtttcagctaaactatgtgttaa

SEQ ID NO: 3315535 - DNA, 25 bp, Homo sapien
tatctgcaactctttgtccatatgc

SEQ ID NO: 3315536 - DNA, 25 bp, Homo sapien
ttacatctaattgttaccctcatct

SEQ ID NO: 3315537 - DNA, 25 bp, Homo sapien
tgtccatatgcacatttcgcctctt

SEQ ID NO: 3315538 - DNA, 25 bp, Homo sapien
catttcgcctctttagtaatttaca

SEQ ID NO: 3315539 - DNA, 25 bp, Homo sapien
tcccttcagccattcctttggcaat

SEQ ID NO: 3315540 - DNA, 25 bp, Homo sapien
cacagtcaagatactgactcttcaa

SEQ ID NO: 3315541 - DNA, 25 bp, Homo sapien
tggcaatgaaatagcagtaatcaca

SEQ ID NO: 3315542 - DNA, 25 bp, Homo sapien
cttcagccattcctttggcaatgaa

SEQ ID NO: 3315543 - DNA, 25 bp, Homo sapien
tggctgatctgtctctgctccttca

SEQ ID NO: 3315544 - DNA, 25 bp, Homo sapien
ctgtctggctgatctgtctctgctc

SEQ ID NO: 3315545 - DNA, 25 bp, Homo sapien
gtctggctgatctgtctctgctcct

SEQ ID NO: 3315546 - DNA, 25 bp, Homo sapien
tgctccttcagaagcttccctcctt

SEQ ID NO: 3315547 - DNA, 25 bp, Homo sapien
tgtggtcttcaagtgccccagagga

SEQ ID NO: 3315548 - DNA, 25 bp, Homo sapien
catagaccgcagtgaaacataattt

SEQ ID NO: 3315549 - DNA, 25 bp, Homo sapien
gagcccatagtgaacatctctgtgg

SEQ ID NO: 3315550 - DNA, 25 bp, Homo sapien
tccccattgtcctaagagcccatag

SEQ ID NO: 3315551 - DNA, 25 bp, Homo sapien
aacagcagcttttacatccaggaag

SEQ ID NO: 3315552 - DNA, 25 bp, Homo sapien
gaaggagggaaaccagaggaacagc

SEQ ID NO: 3315553 - DNA, 25 bp, Homo sapien
aaggagggaaaccagaggaacagca

SEQ ID NO: 3315554 - DNA, 25 bp, Homo sapien
aggaacagcagcttttacatccagg

SEQ ID NO: 3315555 - DNA, 25 bp, Homo sapien
ggtcttgaggcaaattccttggtca

SEQ ID NO: 3315556 - DNA, 25 bp, Homo sapien
gctctgtcttttgggatgccgttgt

SEQ ID NO: 3315557 - DNA, 25 bp, Homo sapien
tcagtccttcagtctgctcttggct

SEQ ID NO: 3315558 - DNA, 25 bp, Homo sapien
tgtcttttgggatgccgttgttgct

SEQ ID NO: 3315559 - DNA, 25 bp, Homo sapien
tccatatagggtgtctgtcggaaag

SEQ ID NO: 3315560 - DNA, 25 bp, Homo sapien
gcagagcttcgcaggaaactactta

SEQ ID NO: 3315561 - DNA, 25 bp, Homo sapien
cactaactgttagcatgatgccaga

SEQ ID NO: 3315562 - DNA, 25 bp, Homo sapien
taaacagaggttggtagtgcagagc

SEQ ID NO: 3315563 - DNA, 25 bp, Homo sapien
caactgagttagatagcaggtgcgc

SEQ ID NO: 3315564 - DNA, 25 bp, Homo sapien
tgcgcaggccaatcaagtcaatttt

SEQ ID NO: 3315565 - DNA, 25 bp, Homo sapien
gacttaaagactgagcaactgagtt

SEQ ID NO: 3315566 - DNA, 25 bp, Homo sapien
gaagaatgcacctattatttttgtg

SEQ ID NO: 3315567 - DNA, 25 bp, Homo sapien
caaagtccttattgggcactggtct

SEQ ID NO: 3315568 - DNA, 25 bp, Homo sapien
tcttcaaaagttacggatgctagac

SEQ ID NO: 3315569 - DNA, 25 bp, Homo sapien
ctgcccaaagtctgagtaggtaaat

SEQ ID NO: 3315570 - DNA, 25 bp, Homo sapien
gattcataggcacacctcacagaaa

SEQ ID NO: 3315571 - DNA, 25 bp, Homo sapien
caggctatggcaattgccctataaa

SEQ ID NO: 3315572 - DNA, 25 bp, Homo sapien
gatgtggcctactaatcttattcag

SEQ ID NO: 3315573 - DNA, 25 bp, Homo sapien
cagatgtcctcagtttaacttgtac

SEQ ID NO: 3315574 - DNA, 25 bp, Homo sapien
cagagagattccacgtatacttgct

SEQ ID NO: 3315575 - DNA, 25 bp, Homo sapien
tgggttaagtaccatgctaagcact

SEQ ID NO: 3315576 - DNA, 25 bp, Homo sapien
agtcagttgcctcaaatagcgtaac

SEQ ID NO: 3315577 - DNA, 25 bp, Homo sapien
ctttagagactcagtaaccccattc

SEQ ID NO: 3315578 - DNA, 25 bp, Homo sapien
gcttataagacattgccacctggat

SEQ ID NO: 3315579 - DNA, 25 bp, Homo sapien
cagagttggcatagctttctcagta

SEQ ID NO: 3315580 - DNA, 25 bp, Homo sapien
gaataggcgccagagttggcatagc

SEQ ID NO: 3315581 - DNA, 25 bp, Homo sapien
gaattcccagttgcctgaataggcg

SEQ ID NO: 3315582 - DNA, 25 bp, Homo sapien
tcaaaaggtgtgaattcccagttgc

SEQ ID NO: 3315583 - DNA, 25 bp, Homo sapien
atttttcttccaagtatagagaact

SEQ ID NO: 3315584 - DNA, 25 bp, Homo sapien
ggtccctgctgccagtgtaatgttt

SEQ ID NO: 3315585 - DNA, 25 bp, Homo sapien
tgagctacaactgcctcttgataaa

SEQ ID NO: 3315586 - DNA, 25 bp, Homo sapien
tcttgataaaggatgctggtccctg

SEQ ID NO: 3315587 - DNA, 25 bp, Homo sapien
taaattctgtattgatgctaccaag

SEQ ID NO: 3315588 - DNA, 25 bp, Homo sapien
catataagcagtccatgcagttcaa

SEQ ID NO: 3315589 - DNA, 25 bp, Homo sapien
cttcaccttgagtatgctgaagaag

SEQ ID NO: 3315590 - DNA, 25 bp, Homo sapien
ttgttgtcttcaccttgagtatgct

SEQ ID NO: 3315591 - DNA, 25 bp, Homo sapien
tcacatataagcagtccatgcagtt

SEQ ID NO: 3315592 - DNA, 25 bp, Homo sapien
agtcagaacactgatgaaaccaagt

SEQ ID NO: 3315593 - DNA, 25 bp, Homo sapien
tcagaacactgatgaaaccaagtgc

SEQ ID NO: 3315594 - DNA, 25 bp, Homo sapien
acactgatgaaaccaagtgctggtg

SEQ ID NO: 3315595 - DNA, 25 bp, Homo sapien
gaacactgatgaaaccaagtgctgg

SEQ ID NO: 3315596 - DNA, 25 bp, Homo sapien
caaaactctttagattctgtttcaa

SEQ ID NO: 3315597 - DNA, 25 bp, Homo sapien
tctgtttcaaatcggtctttccaaa

SEQ ID NO: 3315598 - DNA, 25 bp, Homo sapien
tcctttgtagacactcttcagtcag

SEQ ID NO: 3315599 - DNA, 25 bp, Homo sapien
gtgcctcaaaacaacgctttctccc

SEQ ID NO: 3315600 - DNA, 25 bp, Homo sapien
ggaacagctctatcccactgggacc

SEQ ID NO: 3315601 - DNA, 25 bp, Homo sapien
cctttggctgctttgtgattaagta

SEQ ID NO: 3315602 - DNA, 25 bp, Homo sapien
cccagcttcgctgcctttggctgct

SEQ ID NO: 3315603 - DNA, 25 bp, Homo sapien
tcctcatgagtgacgccagggtcct

SEQ ID NO: 3315604 - DNA, 25 bp, Homo sapien
aagcctccttcgcctttagtccttg

SEQ ID NO: 3315605 - DNA, 25 bp, Homo sapien
tgggaagacagcttccttatgtcag

SEQ ID NO: 3315606 - DNA, 25 bp, Homo sapien
acagcttccttatgtcagggtgagc

SEQ ID NO: 3315607 - DNA, 25 bp, Homo sapien
agcctccttcgcctttagtccttga

SEQ ID NO: 3315608 - DNA, 25 bp, Homo sapien
ggaaattgagtttgaggataaagta

SEQ ID NO: 3315609 - DNA, 25 bp, Homo sapien
ttggtagcttcaagggaaattgagt

SEQ ID NO: 3315610 - DNA, 25 bp, Homo sapien
gtagcttcaagggaaattgagtttg

SEQ ID NO: 3315611 - DNA, 25 bp, Homo sapien
tggtagcttcaagggaaattgagtt

SEQ ID NO: 3315612 - DNA, 25 bp, Homo sapien
tgtgtgcctggccactatattagta

SEQ ID NO: 3315613 - DNA, 25 bp, Homo sapien
gccattaattaggagcagtcagagt

SEQ ID NO: 3315614 - DNA, 25 bp, Homo sapien
tcagagtgtctgtaaccacatggcc

SEQ ID NO: 3315615 - DNA, 25 bp, Homo sapien
tacaagtgacggctcctgtgtgcct

SEQ ID NO: 3315616 - DNA, 25 bp, Homo sapien
ggtggagctggagtcttactatatt

SEQ ID NO: 3315617 - DNA, 25 bp, Homo sapien
ttggtggagctggagtcttactata

SEQ ID NO: 3315618 - DNA, 25 bp, Homo sapien
tggagctggagtcttactatattac

SEQ ID NO: 3315619 - DNA, 25 bp, Homo sapien
tggtggagctggagtcttactatat

SEQ ID NO: 3315620 - DNA, 25 bp, Homo sapien
aagattcacagtgcaaaagagcctg

SEQ ID NO: 3315621 - DNA, 25 bp, Homo sapien
tagcactctcatgataggttggcac

SEQ ID NO: 3315622 - DNA, 25 bp, Homo sapien
tgttgacaagcacatgagaatcatg

SEQ ID NO: 3315623 - DNA, 25 bp, Homo sapien
tctcatgttgaggagcagaacactg

SEQ ID NO: 3315624 - DNA, 25 bp, Homo sapien
ctaagctttgacaacttgaacaatg

SEQ ID NO: 3315625 - DNA, 25 bp, Homo sapien
gctttgacaacttgaacaatgctaa

SEQ ID NO: 3315626 - DNA, 25 bp, Homo sapien
tgacaacttgaacaatgctaaggta

SEQ ID NO: 3315627 - DNA, 25 bp, Homo sapien
taagctttgacaacttgaacaatgc

SEQ ID NO: 3315628 - DNA, 25 bp, Homo sapien
cctacaggtatggtgtgcaacagat

SEQ ID NO: 3315629 - DNA, 25 bp, Homo sapien
ctgaaggtacatactccatgtggac

SEQ ID NO: 3315630 - DNA, 25 bp, Homo sapien
tgtggacttcccttaaacaggcaaa

SEQ ID NO: 3315631 - DNA, 25 bp, Homo sapien
aaaattgtaaggcaggagtttggca

SEQ ID NO: 3315632 - DNA, 25 bp, Homo sapien
taattcatttgtccgatctaagagt

SEQ ID NO: 3315633 - DNA, 25 bp, Homo sapien
caacttttgccaattgggtatgatg

SEQ ID NO: 3315634 - DNA, 25 bp, Homo sapien
tgtccagtttgagttttcatcatga

SEQ ID NO: 3315635 - DNA, 25 bp, Homo sapien
gatcatcccattagcaaagaagaac

SEQ ID NO: 3315636 - DNA, 25 bp, Homo sapien
tggatggtcttcgaatacagcctct

SEQ ID NO: 3315637 - DNA, 25 bp, Homo sapien
aaccattttcaattgtagcatgcac

SEQ ID NO: 3315638 - DNA, 25 bp, Homo sapien
tcttcgaatacagcctctgtaggca

SEQ ID NO: 3315639 - DNA, 25 bp, Homo sapien
gcaggctgcttacaatactcctcct

SEQ ID NO: 3315640 - DNA, 25 bp, Homo sapien
gcagtgaacagccagcctgtcattg

SEQ ID NO: 3315641 - DNA, 25 bp, Homo sapien
gaacagccagcctgtcattgcatgt

SEQ ID NO: 3315642 - DNA, 25 bp, Homo sapien
gccagcctgtcattgcatgtacagg

SEQ ID NO: 3315643 - DNA, 25 bp, Homo sapien
caggactgtaattgggcatgccaca

SEQ ID NO: 3315644 - DNA, 25 bp, Homo sapien
cctggaactaaaagtcttgatgact

SEQ ID NO: 3315645 - DNA, 25 bp, Homo sapien
aaaagtcttgatgacttctgaatcc

SEQ ID NO: 3315646 - DNA, 25 bp, Homo sapien
ggaactaaaagtcttgatgacttct

SEQ ID NO: 3315647 - DNA, 25 bp, Homo sapien
actaaaagtcttgatgacttctgaa

SEQ ID NO: 3315648 - DNA, 25 bp, Homo sapien
tggattaaagacttaaatgttagac

SEQ ID NO: 3315649 - DNA, 25 bp, Homo sapien
actaccatcagagtgaacaggcaac

SEQ ID NO: 3315650 - DNA, 25 bp, Homo sapien
tacacctcataaaaaaattaattca

SEQ ID NO: 3315651 - DNA, 25 bp, Homo sapien
agatggattaaagacttaaatgtta

SEQ ID NO: 3315652 - DNA, 25 bp, Homo sapien
ctgagggagaagatcacctgagttc

SEQ ID NO: 3315653 - DNA, 25 bp, Homo sapien
cagtctgggtggcaggagtgagacc

SEQ ID NO: 3315654 - DNA, 25 bp, Homo sapien
ctgagttcaggaagccgaggctgca

SEQ ID NO: 3315655 - DNA, 25 bp, Homo sapien
acctgagttcaggaagccgaggctg

SEQ ID NO: 3315656 - DNA, 25 bp, Homo sapien
taaccgtttaacaggagcacttctg

SEQ ID NO: 3315657 - DNA, 25 bp, Homo sapien
gagggccctctaggtacagtcttat

SEQ ID NO: 3315658 - DNA, 25 bp, Homo sapien
tcctccagtatctgcagtaaagcca

SEQ ID NO: 3315659 - DNA, 25 bp, Homo sapien
gatgcatccaccatgaaaccatagt

SEQ ID NO: 3315660 - DNA, 25 bp, Homo sapien
taaatctaagctagaggctttatga

SEQ ID NO: 3315661 - DNA, 25 bp, Homo sapien
taaagctgtctaaatctaagctaga

SEQ ID NO: 3315662 - DNA, 25 bp, Homo sapien
gctgtctaaatctaagctagaggct

SEQ ID NO: 3315663 - DNA, 25 bp, Homo sapien
ttgttaaagctgtctaaatctaagc

SEQ ID NO: 3315664 - DNA, 25 bp, Homo sapien
tgcaatttgctactgtgttactcag

SEQ ID NO: 3315665 - DNA, 25 bp, Homo sapien
gtttccaaaagccacaatctactca

SEQ ID NO: 3315666 - DNA, 25 bp, Homo sapien
cagggggattctctcttaagtcagg

SEQ ID NO: 3315667 - DNA, 25 bp, Homo sapien
ggttgcagtgtttaaaacgctatgc

SEQ ID NO: 3315668 - DNA, 25 bp, Homo sapien
gagcctaccaagagttctaaaatct

SEQ ID NO: 3315669 - DNA, 25 bp, Homo sapien
catccaggtggattacgtttttctc

SEQ ID NO: 3315670 - DNA, 25 bp, Homo sapien
tcatgagagtgtatcaactgaacta

SEQ ID NO: 3315671 - DNA, 25 bp, Homo sapien
gaaattatggtttgagagcctacca

SEQ ID NO: 3315672 - DNA, 25 bp, Homo sapien
ttttataccgtaagatttatgagaa

SEQ ID NO: 3315673 - DNA, 25 bp, Homo sapien
tttttataccgtaagatttatgaga

SEQ ID NO: 3315674 - DNA, 25 bp, Homo sapien
ctttttataccgtaagatttatgag

SEQ ID NO: 3315675 - DNA, 25 bp, Homo sapien
cattgagtggagtgctgctataaag

SEQ ID NO: 3315676 - DNA, 25 bp, Homo sapien
taatatagtacattgagtggagtgc

SEQ ID NO: 3315677 - DNA, 25 bp, Homo sapien
cacgcccggtcggcagttctttata

SEQ ID NO: 3315678 - DNA, 25 bp, Homo sapien
gagtgctgctataaagagacccaaa

SEQ ID NO: 3315679 - DNA, 25 bp, Homo sapien
tgagacatcgggtctaaggagatca

SEQ ID NO: 3315680 - DNA, 25 bp, Homo sapien
tagatccacctacagtttgcaaccg

SEQ ID NO: 3315681 - DNA, 25 bp, Homo sapien
gccttgggacatggtaccctgcatc

SEQ ID NO: 3315682 - DNA, 25 bp, Homo sapien
caaggtccagttaggccatggcttc

SEQ ID NO: 3315683 - DNA, 25 bp, Homo sapien
tgatttttacatccaatctacagaa

SEQ ID NO: 3315684 - DNA, 25 bp, Homo sapien
ggttccttcaggtatagaaactaga

SEQ ID NO: 3315685 - DNA, 25 bp, Homo sapien
gcctctaaatttgtgctatgaaatg

SEQ ID NO: 3315686 - DNA, 25 bp, Homo sapien
gaaatggtcaactcaatgcctctaa

SEQ ID NO: 3315687 - DNA, 25 bp, Homo sapien
cctggccaaaatcttctttttatat

SEQ ID NO: 3315688 - DNA, 25 bp, Homo sapien
tttttatatcaataaatgtccaaag

SEQ ID NO: 3315689 - DNA, 25 bp, Homo sapien
ctggccaaaatcttctttttatatc

SEQ ID NO: 3315690 - DNA, 25 bp, Homo sapien
tatatcaataaatgtccaaaggaga

SEQ ID NO: 3315691 - DNA, 25 bp, Homo sapien
gaagtcagtaaatgctcatagaccc

SEQ ID NO: 3315692 - DNA, 25 bp, Homo sapien
caggaagtcagtaaatgctcataga

SEQ ID NO: 3315693 - DNA, 25 bp, Homo sapien
ccccttgtctctagcacttggagtc

SEQ ID NO: 3315694 - DNA, 25 bp, Homo sapien
cttggagtccttagagatgggaatc

SEQ ID NO: 3315695 - DNA, 25 bp, Homo sapien
cacttgccaaggaagtgccacactt

SEQ ID NO: 3315696 - DNA, 25 bp, Homo sapien
acttgccaaggaagtgccacacttg

SEQ ID NO: 3315697 - DNA, 25 bp, Homo sapien
ttgccaaggaagtgccacacttgct

SEQ ID NO: 3315698 - DNA, 25 bp, Homo sapien
tcacttgccaaggaagtgccacact

SEQ ID NO: 3315699 - DNA, 25 bp, Homo sapien
cagtcataagctatctaaagttgca

SEQ ID NO: 3315700 - DNA, 25 bp, Homo sapien
gccccaaatgggatagtatcgcaaa

SEQ ID NO: 3315701 - DNA, 25 bp, Homo sapien
gacttttaggaagtatttaggcaga

SEQ ID NO: 3315702 - DNA, 25 bp, Homo sapien
caagttctctcatttggcccaagcc

SEQ ID NO: 3315703 - DNA, 25 bp, Homo sapien
cattactttctttatttggtgaaga

SEQ ID NO: 3315704 - DNA, 25 bp, Homo sapien
tcttcattactttctttatttggtg

SEQ ID NO: 3315705 - DNA, 25 bp, Homo sapien
tactttctttatttggtgaagatga

SEQ ID NO: 3315706 - DNA, 25 bp, Homo sapien
ctttctttatttggtgaagatgata

SEQ ID NO: 3315707 - DNA, 25 bp, Homo sapien
aaaatgctacttccacggctgggtg

SEQ ID NO: 3315708 - DNA, 25 bp, Homo sapien
gaatgtggacatcctctactcaccc

SEQ ID NO: 3315709 - DNA, 25 bp, Homo sapien
tctcaaataactctaccaggtccct

SEQ ID NO: 3315710 - DNA, 25 bp, Homo sapien
tgtgcccagccggacattgtctttc

SEQ ID NO: 3315711 - DNA, 25 bp, Homo sapien
aaatattgtagtgtgatcttactag

SEQ ID NO: 3315712 - DNA, 25 bp, Homo sapien
cataaatattgtagtgtgatcttac

SEQ ID NO: 3315713 - DNA, 25 bp, Homo sapien
tgtagtgtgatcttactagaaaatt

SEQ ID NO: 3315714 - DNA, 25 bp, Homo sapien
tgacataaatattgtagtgtgatct

SEQ ID NO: 3315715 - DNA, 25 bp, Homo sapien
cagatgccagggaatgccttctcct

SEQ ID NO: 3315716 - DNA, 25 bp, Homo sapien
gagctgactcagtttcaataaccag

SEQ ID NO: 3315717 - DNA, 25 bp, Homo sapien
ccttgtggaccatgcaaggaagctg

SEQ ID NO: 3315718 - DNA, 25 bp, Homo sapien
gctgttactgtcatgttatcaggaa

SEQ ID NO: 3315719 - DNA, 25 bp, Homo sapien
aagaacagattgtgcctttggtgtc

SEQ ID NO: 3315720 - DNA, 25 bp, Homo sapien
tattggaatttgatggacattggac

SEQ ID NO: 3315721 - DNA, 25 bp, Homo sapien
gtccaaatatatgtaggtctgtgtc

SEQ ID NO: 3315722 - DNA, 25 bp, Homo sapien
ctaggatccattttagacaattaca

SEQ ID NO: 3315723 - DNA, 25 bp, Homo sapien
tctgtcaatttcatgcaagctgtca

SEQ ID NO: 3315724 - DNA, 25 bp, Homo sapien
caatagtagtagaagccaactgggc

SEQ ID NO: 3315725 - DNA, 25 bp, Homo sapien
tatggagacattcatgccccttccc

SEQ ID NO: 3315726 - DNA, 25 bp, Homo sapien
tggccaccgtgctgaaattgacgtt

SEQ ID NO: 3315727 - DNA, 25 bp, Homo sapien
tatgtcttatgcctgtagttatgtc

SEQ ID NO: 3315728 - DNA, 25 bp, Homo sapien
tgaaaacctcattgggattctgatg

SEQ ID NO: 3315729 - DNA, 25 bp, Homo sapien
tacattttagaatcaccctgtgagg

SEQ ID NO: 3315730 - DNA, 25 bp, Homo sapien
ccctgtgaggttcagtgaaaacctc

SEQ ID NO: 3315731 - DNA, 25 bp, Homo sapien
tgaatgctcttccttcgcttgacct

SEQ ID NO: 3315732 - DNA, 25 bp, Homo sapien
aattcttggcacatatgtcagccct

SEQ ID NO: 3315733 - DNA, 25 bp, Homo sapien
tagcctgcacagagtcttccataat

SEQ ID NO: 3315734 - DNA, 25 bp, Homo sapien
gaccttaccttctacaattcttggc

SEQ ID NO: 3315735 - DNA, 25 bp, Homo sapien
gatgtcttggatgtttgccccttac

SEQ ID NO: 3315736 - DNA, 25 bp, Homo sapien
gattaaaggatgtcttggatgtttg

SEQ ID NO: 3315737 - DNA, 25 bp, Homo sapien
ttataagattaaaggatgtcttgga

SEQ ID NO: 3315738 - DNA, 25 bp, Homo sapien
aaaggatgtcttggatgtttgcccc

SEQ ID NO: 3315739 - DNA, 25 bp, Homo sapien
gcttcctcttgagtgcaacggaaag

SEQ ID NO: 3315740 - DNA, 25 bp, Homo sapien
ctcttgagtgcaacggaaagggcta

SEQ ID NO: 3315741 - DNA, 25 bp, Homo sapien
cgattcaactaatgatcttgcttcc

SEQ ID NO: 3315742 - DNA, 25 bp, Homo sapien
tcaactaatgatcttgcttcctctt

SEQ ID NO: 3315743 - DNA, 25 bp, Homo sapien
aaaaatgtatgagcggttgggtgca

SEQ ID NO: 3315744 - DNA, 25 bp, Homo sapien
gacaagtaaccagtagtggatatct

SEQ ID NO: 3315745 - DNA, 25 bp, Homo sapien
cttctatcagctaaaaacagtgcca

SEQ ID NO: 3315746 - DNA, 25 bp, Homo sapien
taagataaaccgatacataggatga

SEQ ID NO: 3315747 - DNA, 25 bp, Homo sapien
ttatagctcctccattacacttctt

SEQ ID NO: 3315748 - DNA, 25 bp, Homo sapien
cattacacttcttcataagcaatgc

SEQ ID NO: 3315749 - DNA, 25 bp, Homo sapien
cctccattacacttcttcataagca

SEQ ID NO: 3315750 - DNA, 25 bp, Homo sapien
cacttcttcataagcaatgctttcc

SEQ ID NO: 3315751 - DNA, 25 bp, Homo sapien
gatttaataacttcaagagcaaaag

SEQ ID NO: 3315752 - DNA, 25 bp, Homo sapien
atttaataacttcaagagcaaaagc

SEQ ID NO: 3315753 - DNA, 25 bp, Homo sapien
aaaaagacgtatttaatatcagtca

SEQ ID NO: 3315754 - DNA, 25 bp, Homo sapien
aaaagacgtatttaatatcagtcac

SEQ ID NO: 3315755 - DNA, 25 bp, Homo sapien
aattctggcttccttatttgtcagc

SEQ ID NO: 3315756 - DNA, 25 bp, Homo sapien
tccagagtcaggcaaagcttggtat

SEQ ID NO: 3315757 - DNA, 25 bp, Homo sapien
gaactatgggtaaaatccagtctgc

SEQ ID NO: 3315758 - DNA, 25 bp, Homo sapien
gggcaggttacttaagcttgctaag

SEQ ID NO: 3315759 - DNA, 25 bp, Homo sapien
caatacttgtttaaaggagtggcaa

SEQ ID NO: 3315760 - DNA, 25 bp, Homo sapien
tcttgagttataccctgctatggtt

SEQ ID NO: 3315761 - DNA, 25 bp, Homo sapien
caaatttgatccgcagtgttggaag

SEQ ID NO: 3315762 - DNA, 25 bp, Homo sapien
ggcttggtgcctcctcagagtaatg

SEQ ID NO: 3315763 - DNA, 25 bp, Homo sapien
tcattttccaagacgtaggagctat

SEQ ID NO: 3315764 - DNA, 25 bp, Homo sapien
taggagctatagacacatagatgga

SEQ ID NO: 3315765 - DNA, 25 bp, Homo sapien
gagggagtcccctatggatttacat

SEQ ID NO: 3315766 - DNA, 25 bp, Homo sapien
cattaagggtgagtaactttctcct

SEQ ID NO: 3315767 - DNA, 25 bp, Homo sapien
ggttttccatctggtaccttatata

SEQ ID NO: 3315768 - DNA, 25 bp, Homo sapien
tttccatctggtaccttatataatc

SEQ ID NO: 3315769 - DNA, 25 bp, Homo sapien
tatataatctaaaccaattaagagt

SEQ ID NO: 3315770 - DNA, 25 bp, Homo sapien
taatctaaaccaattaagagtagct

SEQ ID NO: 3315771 - DNA, 25 bp, Homo sapien
gccagtcactgaggatcatatacac

SEQ ID NO: 3315772 - DNA, 25 bp, Homo sapien
aattgattgtgatacctagagcagc

SEQ ID NO: 3315773 - DNA, 25 bp, Homo sapien
acagcaatctccctttatccacggt

SEQ ID NO: 3315774 - DNA, 25 bp, Homo sapien
ccctttagtggcagagcattggact

SEQ ID NO: 3315775 - DNA, 25 bp, Homo sapien
cggcgagtgtctagaaatgcaattt

SEQ ID NO: 3315776 - DNA, 25 bp, Homo sapien
taatattgagttccttgaacgaacg

SEQ ID NO: 3315777 - DNA, 25 bp, Homo sapien
tgaacgaacggttttcttattcaga

SEQ ID NO: 3315778 - DNA, 25 bp, Homo sapien
aaaatcttttagtctactgacggcg

SEQ ID NO: 3315779 - DNA, 25 bp, Homo sapien
gactgattagtaaagactctacttt

SEQ ID NO: 3315780 - DNA, 25 bp, Homo sapien
ggactgattagtaaagactctactt

SEQ ID NO: 3315781 - DNA, 25 bp, Homo sapien
ctgattagtaaagactctacttttg

SEQ ID NO: 3315782 - DNA, 25 bp, Homo sapien
tggactgattagtaaagactctact

SEQ ID NO: 3315783 - DNA, 25 bp, Homo sapien
gacttcaatattacccacacttcag

SEQ ID NO: 3315784 - DNA, 25 bp, Homo sapien
tctaatcacatgagtttgccaagac

SEQ ID NO: 3315785 - DNA, 25 bp, Homo sapien
aaaaacacactctgttgcaccaggg

SEQ ID NO: 3315786 - DNA, 25 bp, Homo sapien
tgaacacagccaaagttacacttac

SEQ ID NO: 3315787 - DNA, 25 bp, Homo sapien
gtttggctcctgtcaagtgaaggca

SEQ ID NO: 3315788 - DNA, 25 bp, Homo sapien
tacaaaacaacatgtagggctgcat

SEQ ID NO: 3315789 - DNA, 25 bp, Homo sapien
caggaatcctgatgtgcaggcaggt

SEQ ID NO: 3315790 - DNA, 25 bp, Homo sapien
gtttcaatgtactccctcaggctaa

SEQ ID NO: 3315791 - DNA, 25 bp, Homo sapien
tggtcacaatgcacgaacatatgga

SEQ ID NO: 3315792 - DNA, 25 bp, Homo sapien
tatttagtctcagaacgcaggtaag

SEQ ID NO: 3315793 - DNA, 25 bp, Homo sapien
caaagctcagtatatcctaagcaga

SEQ ID NO: 3315794 - DNA, 25 bp, Homo sapien
taacagcagaacgtggatatggcag

SEQ ID NO: 3315795 - DNA, 25 bp, Homo sapien
gcatagtgaaagtccttgaactgaa

SEQ ID NO: 3315796 - DNA, 25 bp, Homo sapien
gaaaattcgccaccagcaggagtgc

SEQ ID NO: 3315797 - DNA, 25 bp, Homo sapien
ctgaaagagaatgacaccaggtgga

SEQ ID NO: 3315798 - DNA, 25 bp, Homo sapien
caggagtgcactacaagcatagtga

SEQ ID NO: 3315799 - DNA, 25 bp, Homo sapien
cttaaaccaacacggatcaaaagag

SEQ ID NO: 3315800 - DNA, 25 bp, Homo sapien
aacagtaaacaaatcaattcaacaa

SEQ ID NO: 3315801 - DNA, 25 bp, Homo sapien
aaggccattacataacagtaaacaa

SEQ ID NO: 3315802 - DNA, 25 bp, Homo sapien
ataacagtaaacaaatcaattcaac

SEQ ID NO: 3315803 - DNA, 25 bp, Homo sapien
ccaattattctacatccaggactag

SEQ ID NO: 3315804 - DNA, 25 bp, Homo sapien
ttacccagggagctttatcaaacta

SEQ ID NO: 3315805 - DNA, 25 bp, Homo sapien
tccatccgctttcacaaattgaggg

SEQ ID NO: 3315806 - DNA, 25 bp, Homo sapien
aattgagggctacatatacttccac

SEQ ID NO: 3315807 - DNA, 25 bp, Homo sapien
gtatcacaaatagaggtccctgcaa

SEQ ID NO: 3315808 - DNA, 25 bp, Homo sapien
ctctgtgggaagcaagaacatgtgt

SEQ ID NO: 3315809 - DNA, 25 bp, Homo sapien
tagtaccctctaaagaaactctgtg

SEQ ID NO: 3315810 - DNA, 25 bp, Homo sapien
tatgcactgtagcagaaaaacctct

SEQ ID NO: 3315811 - DNA, 25 bp, Homo sapien
aggtgatagctatgcaggaggttca

SEQ ID NO: 3315812 - DNA, 25 bp, Homo sapien
gcattgaaaagaaacccgcaggtga

SEQ ID NO: 3315813 - DNA, 25 bp, Homo sapien
gctctaagttctacactgggcagtt

SEQ ID NO: 3315814 - DNA, 25 bp, Homo sapien
taagtagaactaaccaagcattgaa

SEQ ID NO: 3315815 - DNA, 25 bp, Homo sapien
cagtttagaatcgaggtttacaagt

SEQ ID NO: 3315816 - DNA, 25 bp, Homo sapien
atatcttccagtttagaatcgaggt

SEQ ID NO: 3315817 - DNA, 25 bp, Homo sapien
cttagaaatggtaatatcttccagt

SEQ ID NO: 3315818 - DNA, 25 bp, Homo sapien
tcttccagtttagaatcgaggttta

SEQ ID NO: 3315819 - DNA, 25 bp, Homo sapien
caggatcattcgcattgatagcaat

SEQ ID NO: 3315820 - DNA, 25 bp, Homo sapien
cgcattgatagcaattaatttccaa

SEQ ID NO: 3315821 - DNA, 25 bp, Homo sapien
cttcatcaataagagccaaaattcc

SEQ ID NO: 3315822 - DNA, 25 bp, Homo sapien
ttcaccttcatcaataagagccaaa

SEQ ID NO: 3315823 - DNA, 25 bp, Homo sapien
cattctaacatgggcattaacagag

SEQ ID NO: 3315824 - DNA, 25 bp, Homo sapien
ctaacatgggcattaacagagatga

SEQ ID NO: 3315825 - DNA, 25 bp, Homo sapien
taacatgggcattaacagagatgat

SEQ ID NO: 3315826 - DNA, 25 bp, Homo sapien
tccattctaacatgggcattaacag

SEQ ID NO: 3315827 - DNA, 25 bp, Homo sapien
tatacatgcacgcaacatcagagca

SEQ ID NO: 3315828 - DNA, 25 bp, Homo sapien
gaacctgagaaatacactagtggga

SEQ ID NO: 3315829 - DNA, 25 bp, Homo sapien
agaaaggagcatacccctaaccgag

SEQ ID NO: 3315830 - DNA, 25 bp, Homo sapien
gagaacacttgagagatgctatgca

SEQ ID NO: 3315831 - DNA, 25 bp, Homo sapien
gcagttcgtgctcttatctttttca

SEQ ID NO: 3315832 - DNA, 25 bp, Homo sapien
tatttcgcaaacatcaataggatca

SEQ ID NO: 3315833 - DNA, 25 bp, Homo sapien
ctttgagcctatttcgcaaacatca

SEQ ID NO: 3315834 - DNA, 25 bp, Homo sapien
tccaaagcagttcgtgctcttatct

SEQ ID NO: 3315835 - DNA, 25 bp, Homo sapien
caggccagtatgtccctaaggatca

SEQ ID NO: 3315836 - DNA, 25 bp, Homo sapien
tttccgctgactgcctcaactgtgg

SEQ ID NO: 3315837 - DNA, 25 bp, Homo sapien
ctttgacccggtaacagcacatgga

SEQ ID NO: 3315838 - DNA, 25 bp, Homo sapien
tcagaaattacataggcccaaggcc

SEQ ID NO: 3315839 - DNA, 25 bp, Homo sapien
ctgcgccggccaataagaggatctt

SEQ ID NO: 3315840 - DNA, 25 bp, Homo sapien
aaatgctgagattgttagtgctcat

SEQ ID NO: 3315841 - DNA, 25 bp, Homo sapien
gaggatctttagacacattctagcc

SEQ ID NO: 3315842 - DNA, 25 bp, Homo sapien
tctgcatgaatgctaccagtgaaca

SEQ ID NO: 3315843 - DNA, 25 bp, Homo sapien
tcactcaatgagatgtaacactgaa

SEQ ID NO: 3315844 - DNA, 25 bp, Homo sapien
taatttggagcaaaagcctctacca

SEQ ID NO: 3315845 - DNA, 25 bp, Homo sapien
aacaggcctagagagatttagtcac

SEQ ID NO: 3315846 - DNA, 25 bp, Homo sapien
gggccaaacacctctgatcaactca

SEQ ID NO: 3315847 - DNA, 25 bp, Homo sapien
taaggaagccatgtgcatacctgga

SEQ ID NO: 3315848 - DNA, 25 bp, Homo sapien
tccatggcaggcattaagctgggta

SEQ ID NO: 3315849 - DNA, 25 bp, Homo sapien
tatacagcaggttacaatttggcag

SEQ ID NO: 3315850 - DNA, 25 bp, Homo sapien
gacatcagtgtgctttgagcaccag

SEQ ID NO: 3315851 - DNA, 25 bp, Homo sapien
gaaatccagacacatccagaggagc

SEQ ID NO: 3315852 - DNA, 25 bp, Homo sapien
tcttttaagcaacaggagaccatta

SEQ ID NO: 3315853 - DNA, 25 bp, Homo sapien
ccagaggagcacagaagtttggcag

SEQ ID NO: 3315854 - DNA, 25 bp, Homo sapien
gtagaagaactaccgtacctgccag

SEQ ID NO: 3315855 - DNA, 25 bp, Homo sapien
ccatgtgggtgatctaactgaatca

SEQ ID NO: 3315856 - DNA, 25 bp, Homo sapien
tagaagtgcccattttaaccaagaa

SEQ ID NO: 3315857 - DNA, 25 bp, Homo sapien
gaatgtttattctacacgggcagct

SEQ ID NO: 3315858 - DNA, 25 bp, Homo sapien
ggctgcatcccctaagctttacaga

SEQ ID NO: 3315859 - DNA, 25 bp, Homo sapien
aaataatctggaagagttacctctt

SEQ ID NO: 3315860 - DNA, 25 bp, Homo sapien
taaataatctggaagagttacctct

SEQ ID NO: 3315861 - DNA, 25 bp, Homo sapien
aataatctggaagagttacctcttc

SEQ ID NO: 3315862 - DNA, 25 bp, Homo sapien
aatttattgatatactaaaactcca

SEQ ID NO: 3315863 - DNA, 25 bp, Homo sapien
accaatttaaattcagtagttcaca

SEQ ID NO: 3315864 - DNA, 25 bp, Homo sapien
gatatactaaaactccatccacgtt

SEQ ID NO: 3315865 - DNA, 25 bp, Homo sapien
ccaatttaaattcagtagttcacag

SEQ ID NO: 3315866 - DNA, 25 bp, Homo sapien
tgtttaatgggattcattggctcct

SEQ ID NO: 3315867 - DNA, 25 bp, Homo sapien
cccttgtaagggaagatattcgcca

SEQ ID NO: 3315868 - DNA, 25 bp, Homo sapien
gccacatagcgtagctttccatcct

SEQ ID NO: 3315869 - DNA, 25 bp, Homo sapien
ccatatataacccttgtaagggaag

SEQ ID NO: 3315870 - DNA, 25 bp, Homo sapien
cattcatatttcaacttaatgatca

SEQ ID NO: 3315871 - DNA, 25 bp, Homo sapien
aattaattctatgtccaaatagtac

SEQ ID NO: 3315872 - DNA, 25 bp, Homo sapien
aaaatctgctattttcagactaaac

SEQ ID NO: 3315873 - DNA, 25 bp, Homo sapien
taattctatgtccaaatagtacttt

SEQ ID NO: 3315874 - DNA, 25 bp, Homo sapien
gaaactggagaacattatggcaagt

SEQ ID NO: 3315875 - DNA, 25 bp, Homo sapien
agagtggaattatagttacagaggc

SEQ ID NO: 3315876 - DNA, 25 bp, Homo sapien
tagacaactctagagactccatcaa

SEQ ID NO: 3315877 - DNA, 25 bp, Homo sapien
cagaacattctgtcatttgtggcaa

SEQ ID NO: 3315878 - DNA, 25 bp, Homo sapien
tttgtccaccgaggtatttctacaa

SEQ ID NO: 3315879 - DNA, 25 bp, Homo sapien
tgtccaccgaggtatttctacaatc

SEQ ID NO: 3315880 - DNA, 25 bp, Homo sapien
catttgtccaccgaggtatttctac

SEQ ID NO: 3315881 - DNA, 25 bp, Homo sapien
tagcatttgtccaccgaggtatttc

SEQ ID NO: 3315882 - DNA, 25 bp, Homo sapien
tgccaacacttttctaacgattcat

SEQ ID NO: 3315883 - DNA, 25 bp, Homo sapien
tattttcgatcatgccacacatcaa

SEQ ID NO: 3315884 - DNA, 25 bp, Homo sapien
acacatcaataccacctcaccagct

SEQ ID NO: 3315885 - DNA, 25 bp, Homo sapien
ctaacgattcatgttgattgcattt

SEQ ID NO: 3315886 - DNA, 25 bp, Homo sapien
tcatttcgtgctttcttcataggaa

SEQ ID NO: 3315887 - DNA, 25 bp, Homo sapien
cgtgctttcttcataggaatgccat

SEQ ID NO: 3315888 - DNA, 25 bp, Homo sapien
tttcgtgctttcttcataggaatgc

SEQ ID NO: 3315889 - DNA, 25 bp, Homo sapien
gctttcttcataggaatgccatttt

SEQ ID NO: 3315890 - DNA, 25 bp, Homo sapien
tgctcaaccagcatatgtaacgttt

SEQ ID NO: 3315891 - DNA, 25 bp, Homo sapien
acgtttatacaccaaaatgactact

SEQ ID NO: 3315892 - DNA, 25 bp, Homo sapien
tcacaaatgctcaaccagcatatgt

SEQ ID NO: 3315893 - DNA, 25 bp, Homo sapien
cagcatatgtaacgtttatacacca

SEQ ID NO: 3315894 - DNA, 25 bp, Homo sapien
agtctataaaaatgccttgagcctc

SEQ ID NO: 3315895 - DNA, 25 bp, Homo sapien
cagatcttagacaagtctataaaaa

SEQ ID NO: 3315896 - DNA, 25 bp, Homo sapien
tataaaaatgccttgagcctcagtg

SEQ ID NO: 3315897 - DNA, 25 bp, Homo sapien
gatcttagacaagtctataaaaatg

SEQ ID NO: 3315898 - DNA, 25 bp, Homo sapien
cagaggaatatcatgaaagggggaa

SEQ ID NO: 3315899 - DNA, 25 bp, Homo sapien
gggggaaatgtagtgaccagttaca

SEQ ID NO: 3315900 - DNA, 25 bp, Homo sapien
ttcagaggaatatcatgaaaggggg

SEQ ID NO: 3315901 - DNA, 25 bp, Homo sapien
gaaatgtagtgaccagttacattct

SEQ ID NO: 3315902 - DNA, 25 bp, Homo sapien
aagtgcagtcactggttggttgcca

SEQ ID NO: 3315903 - DNA, 25 bp, Homo sapien
tcaagcgaaagaagctcaactcagt

SEQ ID NO: 3315904 - DNA, 25 bp, Homo sapien
agacctgttctgtactttgtgatgc

SEQ ID NO: 3315905 - DNA, 25 bp, Homo sapien
gctgaaagacaactaggaggaggtt

SEQ ID NO: 3315906 - DNA, 25 bp, Homo sapien
ttatttgctaaagaggtcttggtct

SEQ ID NO: 3315907 - DNA, 25 bp, Homo sapien
tatttgctaaagaggtcttggtctt

SEQ ID NO: 3315908 - DNA, 25 bp, Homo sapien
tactggagttgtacgcgtgttcact

SEQ ID NO: 3315909 - DNA, 25 bp, Homo sapien
taggaggtcacataccaaactctgc

SEQ ID NO: 3315910 - DNA, 25 bp, Homo sapien
gaaaagacaaatgcacggtttgacc

SEQ ID NO: 3315911 - DNA, 25 bp, Homo sapien
gggaccatgtgcaacgtgtttactg

SEQ ID NO: 3315912 - DNA, 25 bp, Homo sapien
cacagcactgatatagaaaacgttt

SEQ ID NO: 3315913 - DNA, 25 bp, Homo sapien
acaaattttgtggattattcacggg

SEQ ID NO: 3315914 - DNA, 25 bp, Homo sapien
gattacacacgactacaaaaccact

SEQ ID NO: 3315915 - DNA, 25 bp, Homo sapien
cagttgaagttctatgatataggcc

SEQ ID NO: 3315916 - DNA, 25 bp, Homo sapien
tttaagacctaggaagccgggcaca

SEQ ID NO: 3315917 - DNA, 25 bp, Homo sapien
taagggatgcctctggttaattcag

SEQ ID NO: 3315918 - DNA, 25 bp, Homo sapien
tatcaaaggaatactggcatgcagc

SEQ ID NO: 3315919 - DNA, 25 bp, Homo sapien
ggagaaactgagctaccggatgtca

SEQ ID NO: 3315920 - DNA, 25 bp, Homo sapien
gaagtgagacattagtccaccctag

SEQ ID NO: 3315921 - DNA, 25 bp, Homo sapien
cccaatgcactagtatttcagagac

SEQ ID NO: 3315922 - DNA, 25 bp, Homo sapien
agtactgcatacagacacactgagt

SEQ ID NO: 3315923 - DNA, 25 bp, Homo sapien
gaaaatgttctacctcccaatgcac

SEQ ID NO: 3315924 - DNA, 25 bp, Homo sapien
caatgagtcacgaagacctgggtcc

SEQ ID NO: 3315925 - DNA, 25 bp, Homo sapien
ggagcgataatgcaaggcccacttt

SEQ ID NO: 3315926 - DNA, 25 bp, Homo sapien
taccagtgctgagaaggaccttgag

SEQ ID NO: 3315927 - DNA, 25 bp, Homo sapien
ttaagacgtgaagaactcgagggcc

SEQ ID NO: 3315928 - DNA, 25 bp, Homo sapien
gaaagaaccttcatcagagtccctc

SEQ ID NO: 3315929 - DNA, 25 bp, Homo sapien
aaagaagacgcgctggattaggcat

SEQ ID NO: 3315930 - DNA, 25 bp, Homo sapien
ccgcagtaggaggtttcttacgcct

SEQ ID NO: 3315931 - DNA, 25 bp, Homo sapien
taggcatccgcaaagttccgcctgc

SEQ ID NO: 3315932 - DNA, 25 bp, Homo sapien
cggggtggccgcttgcactctgcct

SEQ ID NO: 3315933 - DNA, 25 bp, Homo sapien
gccgggccggctaatggctgcaggc

SEQ ID NO: 3315934 - DNA, 25 bp, Homo sapien
tgagttgtgtgaaccgggaacggcg

SEQ ID NO: 3315935 - DNA, 25 bp, Homo sapien
gggtggccgcttgcactctgcctac

SEQ ID NO: 3315936 - DNA, 25 bp, Homo sapien
gtaaggtggcctggaccgcgcggct

SEQ ID NO: 3315937 - DNA, 25 bp, Homo sapien
ctcgctggcagttctcgtgactcgg

SEQ ID NO: 3315938 - DNA, 25 bp, Homo sapien
ctcccgcgggaagtaaggtggcctg

SEQ ID NO: 3315939 - DNA, 25 bp, Homo sapien
gctttggggtcttgatccgccgcct

SEQ ID NO: 3315940 - DNA, 25 bp, Homo sapien
cggtgcgccgctcggcgaacctccg

SEQ ID NO: 3315941 - DNA, 25 bp, Homo sapien
aagagagaagggagaccgcgcgggg

SEQ ID NO: 3315942 - DNA, 25 bp, Homo sapien
ggtttctccggtgcgccgctcggcg

SEQ ID NO: 3315943 - DNA, 25 bp, Homo sapien
gcgtcccaagtgtcccccattccat

SEQ ID NO: 3315944 - DNA, 25 bp, Homo sapien
gctggccgcgctcctcagtgtggta

SEQ ID NO: 3315945 - DNA, 25 bp, Homo sapien
gtaattctgcgagcagggctggccg

SEQ ID NO: 3315946 - DNA, 25 bp, Homo sapien
aaagaagaggcggtaattctgcgag

SEQ ID NO: 3315947 - DNA, 25 bp, Homo sapien
gctcctcagtgtggtacagggccat

SEQ ID NO: 3315948 - DNA, 25 bp, Homo sapien
ggtccccaaccgcaggcacgcagcg

SEQ ID NO: 3315949 - DNA, 25 bp, Homo sapien
ctggggcacccgtgcgcagcagccg

SEQ ID NO: 3315950 - DNA, 25 bp, Homo sapien
gcgcgacccggtccctgcactggtc

SEQ ID NO: 3315951 - DNA, 25 bp, Homo sapien
cggcgcgacccggtccctgcactgg

SEQ ID NO: 3315952 - DNA, 25 bp, Homo sapien
tacccctacctataagccagaacga

SEQ ID NO: 3315953 - DNA, 25 bp, Homo sapien
agactcatatcaacactgtgatcat

SEQ ID NO: 3315954 - DNA, 25 bp, Homo sapien
ctacctataagccagaacgagaaag

SEQ ID NO: 3315955 - DNA, 25 bp, Homo sapien
tgtgatcatcggacacgtagattcg

SEQ ID NO: 3315956 - DNA, 25 bp, Homo sapien
gcggtgggtgtcatcaaagcagtgg

SEQ ID NO: 3315957 - DNA, 25 bp, Homo sapien
ttgcggtgggtgtcatcaaagcagt

SEQ ID NO: 3315958 - DNA, 25 bp, Homo sapien
cggtgggtgtcatcaaagcagtgga

SEQ ID NO: 3315959 - DNA, 25 bp, Homo sapien
gtgggtgtcatcaaagcagtggaca

SEQ ID NO: 3315960 - DNA, 25 bp, Homo sapien
cccggctaatgatgttttttgtttg

SEQ ID NO: 3315961 - DNA, 25 bp, Homo sapien
ctggagtgcagcgatctcgctcacc

SEQ ID NO: 3315962 - DNA, 25 bp, Homo sapien
cacacccggctaatgatgttttttg

SEQ ID NO: 3315963 - DNA, 25 bp, Homo sapien
agtgcagcgatctcgctcaccgcaa

SEQ ID NO: 3315964 - DNA, 25 bp, Homo sapien
tccttccagaaacagcgtagatgcc

SEQ ID NO: 3315965 - DNA, 25 bp, Homo sapien
cgtagatgccaaaatctaattatgc

SEQ ID NO: 3315966 - DNA, 25 bp, Homo sapien
cacgcccagcacaacattatacata

SEQ ID NO: 3315967 - DNA, 25 bp, Homo sapien
agttgtccctcaagatccacagagg

SEQ ID NO: 3315968 - DNA, 25 bp, Homo sapien
taataataataatttagcataaatg

SEQ ID NO: 3315969 - DNA, 25 bp, Homo sapien
ctggaaaactagaaggaacaattgt

SEQ ID NO: 3315970 - DNA, 25 bp, Homo sapien
tggaaaactagaaggaacaattgtc

SEQ ID NO: 3315971 - DNA, 25 bp, Homo sapien
cctggaaaactagaaggaacaattg

SEQ ID NO: 3315972 - DNA, 25 bp, Homo sapien
caggcagtcactgatgggtccagat

SEQ ID NO: 3315973 - DNA, 25 bp, Homo sapien
aagctcattggaagcacagacatcc

SEQ ID NO: 3315974 - DNA, 25 bp, Homo sapien
tcaggtccttgttagcatggcccag

SEQ ID NO: 3315975 - DNA, 25 bp, Homo sapien
acatccttgggtatgaagcctcggt

SEQ ID NO: 3315976 - DNA, 25 bp, Homo sapien
tgaagcctcggtggtcagacaggtc

SEQ ID NO: 3315977 - DNA, 25 bp, Homo sapien
ggtgaatgagagagacggtcatgtc

SEQ ID NO: 3315978 - DNA, 25 bp, Homo sapien
ttcctccgtggtgaatgagagagac

SEQ ID NO: 3315979 - DNA, 25 bp, Homo sapien
atgagagagacggtcatgtcatcac

SEQ ID NO: 3315980 - DNA, 25 bp, Homo sapien
tcctccgtggtgaatgagagagacg

SEQ ID NO: 3315981 - DNA, 25 bp, Homo sapien
ggagatgctgagttcccgcccccga

SEQ ID NO: 3315982 - DNA, 25 bp, Homo sapien
ccccgacgtccctcggtcactgtca

SEQ ID NO: 3315983 - DNA, 25 bp, Homo sapien
gacgtccctcggtcactgtcagact

SEQ ID NO: 3315984 - DNA, 25 bp, Homo sapien
cgacgtccctcggtcactgtcagac

SEQ ID NO: 3315985 - DNA, 25 bp, Homo sapien
gcctatggggcagagaggcggtgat

SEQ ID NO: 3315986 - DNA, 25 bp, Homo sapien
gcagcctcccgcctcgacaacctta

SEQ ID NO: 3315987 - DNA, 25 bp, Homo sapien
ggtgggcaggtgagcctatggggca

SEQ ID NO: 3315988 - DNA, 25 bp, Homo sapien
agcctcccgcctcgacaaccttact

SEQ ID NO: 3315989 - DNA, 25 bp, Homo sapien
agacagccgggtgctctcatggctc

SEQ ID NO: 3315990 - DNA, 25 bp, Homo sapien
caggctgtgagttggtgatccactg

SEQ ID NO: 3315991 - DNA, 25 bp, Homo sapien
agccgggtgctctcatggctcaggc

SEQ ID NO: 3315992 - DNA, 25 bp, Homo sapien
gagttggtgatccactgccctctgt

SEQ ID NO: 3315993 - DNA, 25 bp, Homo sapien
gtctgcttagggaactcagggcccc

SEQ ID NO: 3315994 - DNA, 25 bp, Homo sapien
cctcctttggagctgtctgcttagg

SEQ ID NO: 3315995 - DNA, 25 bp, Homo sapien
ttagggaactcagggccccggcaga

SEQ ID NO: 3315996 - DNA, 25 bp, Homo sapien
gctgtctgcttagggaactcagggc

SEQ ID NO: 3315997 - DNA, 25 bp, Homo sapien
tgtgactgctccgtgcattacccct

SEQ ID NO: 3315998 - DNA, 25 bp, Homo sapien
actgctccgtgcattacccctgtga

SEQ ID NO: 3315999 - DNA, 25 bp, Homo sapien
ctgctccgtgcattacccctgtgat

SEQ ID NO: 3316000 - DNA, 25 bp, Homo sapien
tgactgctccgtgcattacccctgt

SEQ ID NO: 3316001 - DNA, 25 bp, Homo sapien
catctggtgtaataaatttcccccg

SEQ ID NO: 3316002 - DNA, 25 bp, Homo sapien
attatgtgagataacacgtggcccc

SEQ ID NO: 3316003 - DNA, 25 bp, Homo sapien
gtggccccatgaccactggagcaca

SEQ ID NO: 3316004 - DNA, 25 bp, Homo sapien
gcctacaactctgcatggccgtctt

SEQ ID NO: 3316005 - DNA, 25 bp, Homo sapien
tggagcacatgggttaatggagtta

SEQ ID NO: 3316006 - DNA, 25 bp, Homo sapien
caagatctgatccaataaaagctgg

SEQ ID NO: 3316007 - DNA, 25 bp, Homo sapien
agatctgatccaataaaagctggag

SEQ ID NO: 3316008 - DNA, 25 bp, Homo sapien
aagatctgatccaataaaagctgga

SEQ ID NO: 3316009 - DNA, 25 bp, Homo sapien
tttgtcgactctctctacctgacca

SEQ ID NO: 3316010 - DNA, 25 bp, Homo sapien
gccgactttcctgagcaactgcttt

SEQ ID NO: 3316011 - DNA, 25 bp, Homo sapien
caattgccagatcgacaacctgact

SEQ ID NO: 3316012 - DNA, 25 bp, Homo sapien
taccatcttgccgactttcctgagc

SEQ ID NO: 3316013 - DNA, 25 bp, Homo sapien
tgcagccaatgcatctatcgcccct

SEQ ID NO: 3316014 - DNA, 25 bp, Homo sapien
ccaatgcatctatcgcccctttctc

SEQ ID NO: 3316015 - DNA, 25 bp, Homo sapien
tgcatctatcgcccctttctcttct

SEQ ID NO: 3316016 - DNA, 25 bp, Homo sapien
gcagccaatgcatctatcgcccctt

SEQ ID NO: 3316017 - DNA, 25 bp, Homo sapien
ccacgcatccagagagatggatata

SEQ ID NO: 3316018 - DNA, 25 bp, Homo sapien
cgcatccagagagatggatatagga

SEQ ID NO: 3316019 - DNA, 25 bp, Homo sapien
ggatataggactcaatatcctgagg

SEQ ID NO: 3316020 - DNA, 25 bp, Homo sapien
gatataggactcaatatcctgagga

SEQ ID NO: 3316021 - DNA, 25 bp, Homo sapien
gtgcattctgttttgtgcggattca

SEQ ID NO: 3316022 - DNA, 25 bp, Homo sapien
cagtgcattctgttttgtgcggatt

SEQ ID NO: 3316023 - DNA, 25 bp, Homo sapien
agtgcattctgttttgtgcggattc

SEQ ID NO: 3316024 - DNA, 25 bp, Homo sapien
acagtgcattctgttttgtgcggat

SEQ ID NO: 3316025 - DNA, 25 bp, Homo sapien
cattggcaatgtaggaaaagtgagc

SEQ ID NO: 3316026 - DNA, 25 bp, Homo sapien
atttattacgtactatgtgcatgta

SEQ ID NO: 3316027 - DNA, 25 bp, Homo sapien
caggagagttcacaatttattggaa

SEQ ID NO: 3316028 - DNA, 25 bp, Homo sapien
gtattaagcaccaggagagttcaca

SEQ ID NO: 3316029 - DNA, 25 bp, Homo sapien
agaaaactatgttgggtcgtccctg

SEQ ID NO: 3316030 - DNA, 25 bp, Homo sapien
gtcagttgaaatggggctagcacag

SEQ ID NO: 3316031 - DNA, 25 bp, Homo sapien
tgggtcgtccctgccgccacataag

SEQ ID NO: 3316032 - DNA, 25 bp, Homo sapien
cagaaaatgaacacccagaatacgg

SEQ ID NO: 3316033 - DNA, 25 bp, Homo sapien
tcacacactatggaaatcattagaa

SEQ ID NO: 3316034 - DNA, 25 bp, Homo sapien
cattctaatcattgttttcacacac

SEQ ID NO: 3316035 - DNA, 25 bp, Homo sapien
cttaaattcacagatgctttcaatc

SEQ ID NO: 3316036 - DNA, 25 bp, Homo sapien
gatctcattgagaaccagtcattct

SEQ ID NO: 3316037 - DNA, 25 bp, Homo sapien
ggctaatatgatacaaaaacctact

SEQ ID NO: 3316038 - DNA, 25 bp, Homo sapien
catctttaggctaatatgatacaaa

SEQ ID NO: 3316039 - DNA, 25 bp, Homo sapien
aaattacagtgtattacagattata

SEQ ID NO: 3316040 - DNA, 25 bp, Homo sapien
gcctttcatctttaggctaatatga

SEQ ID NO: 3316041 - DNA, 25 bp, Homo sapien
tgagtttcttttgggcagctttctt

SEQ ID NO: 3316042 - DNA, 25 bp, Homo sapien
ttcttgagtttcttttgggcagctt

SEQ ID NO: 3316043 - DNA, 25 bp, Homo sapien
tacttcttgagtttcttttgggcag

SEQ ID NO: 3316044 - DNA, 25 bp, Homo sapien
ttcttcttgaccatctgtaatcgct

SEQ ID NO: 3316045 - DNA, 25 bp, Homo sapien
tagttactgacgaggaaacgctggc

SEQ ID NO: 3316046 - DNA, 25 bp, Homo sapien
cacaactaactgagcgactaaggcc

SEQ ID NO: 3316047 - DNA, 25 bp, Homo sapien
tagctgacgaagtagcaggtttccc

SEQ ID NO: 3316048 - DNA, 25 bp, Homo sapien
aaaagctgcccatccagttaagcca

SEQ ID NO: 3316049 - DNA, 25 bp, Homo sapien
gaatttcctgaaataactgtggatg

SEQ ID NO: 3316050 - DNA, 25 bp, Homo sapien
aatttcctgaaataactgtggatgt

SEQ ID NO: 3316051 - DNA, 25 bp, Homo sapien
ctagaagaatttcctgaaataactg

SEQ ID NO: 3316052 - DNA, 25 bp, Homo sapien
gaagaatttcctgaaataactgtgg

SEQ ID NO: 3316053 - DNA, 25 bp, Homo sapien
tcagtacctgtataaacatcccaag

SEQ ID NO: 3316054 - DNA, 25 bp, Homo sapien
ccaaattaggttcttatgaagctga

SEQ ID NO: 3316055 - DNA, 25 bp, Homo sapien
tattcaggagaacatatccaagatg

SEQ ID NO: 3316056 - DNA, 25 bp, Homo sapien
tagagccaagtttaatcagtacctg

SEQ ID NO: 3316057 - DNA, 25 bp, Homo sapien
taaccaatggatctttgacagctgg

SEQ ID NO: 3316058 - DNA, 25 bp, Homo sapien
tctcttaaacgctagaaaagttgtc

SEQ ID NO: 3316059 - DNA, 25 bp, Homo sapien
gggctggtttctgcggtggtttctg

SEQ ID NO: 3316060 - DNA, 25 bp, Homo sapien
tttctggtttcttaaccaatggatc

SEQ ID NO: 3316061 - DNA, 25 bp, Homo sapien
attattatcatattaatggtcttac

SEQ ID NO: 3316062 - DNA, 25 bp, Homo sapien
tatcatattaatggtcttacagatt

SEQ ID NO: 3316063 - DNA, 25 bp, Homo sapien
caaaaatcagtggattaaatcagat

SEQ ID NO: 3316064 - DNA, 25 bp, Homo sapien
ctgcaaaaatcagtggattaaatca

SEQ ID NO: 3316065 - DNA, 25 bp, Homo sapien
ttttctaggtagataattataactg

SEQ ID NO: 3316066 - DNA, 25 bp, Homo sapien
ttctaggtagataattataactgtt

SEQ ID NO: 3316067 - DNA, 25 bp, Homo sapien
tacaaatttctatgttatgaaagaa

SEQ ID NO: 3316068 - DNA, 25 bp, Homo sapien
agtgttttctaggtagataattata

SEQ ID NO: 3316069 - DNA, 25 bp, Homo sapien
tactggtactagcaggaaagcagag

SEQ ID NO: 3316070 - DNA, 25 bp, Homo sapien
aagactaattatgatgaagccccag

SEQ ID NO: 3316071 - DNA, 25 bp, Homo sapien
cacatctagcactcctgaggttaga

SEQ ID NO: 3316072 - DNA, 25 bp, Homo sapien
tgaggttagactctgaggacccacc

SEQ ID NO: 3316073 - DNA, 25 bp, Homo sapien
ctgaagctggggaaaaactccacta

SEQ ID NO: 3316074 - DNA, 25 bp, Homo sapien
tctactaattgattgccagatgcca

SEQ ID NO: 3316075 - DNA, 25 bp, Homo sapien
gggtttatgacaatctcggtggtag

SEQ ID NO: 3316076 - DNA, 25 bp, Homo sapien
gggtcattcgcttccttgtctgtca

SEQ ID NO: 3316077 - DNA, 25 bp, Homo sapien
aataccacaccaggcgagggtcatt

SEQ ID NO: 3316078 - DNA, 25 bp, Homo sapien
ggtaaatccttgctactttggacag

SEQ ID NO: 3316079 - DNA, 25 bp, Homo sapien
gcactggtctcctcaaaactggaaa

SEQ ID NO: 3316080 - DNA, 25 bp, Homo sapien
ctttggacagtaatgggagatgact

SEQ ID NO: 3316081 - DNA, 25 bp, Homo sapien
catggcaaaatcatcagcactggtc

SEQ ID NO: 3316082 - DNA, 25 bp, Homo sapien
taccttttcagttgtgaggaccttg

SEQ ID NO: 3316083 - DNA, 25 bp, Homo sapien
ttattattaccagaaggaagactgg

SEQ ID NO: 3316084 - DNA, 25 bp, Homo sapien
ccattattattaccagaaggaagac

SEQ ID NO: 3316085 - DNA, 25 bp, Homo sapien
cattattattaccagaaggaagact

SEQ ID NO: 3316086 - DNA, 25 bp, Homo sapien
tgccccgagccaaagattcatcaag

SEQ ID NO: 3316087 - DNA, 25 bp, Homo sapien
tcaagcagtgcttttagcttttcag

SEQ ID NO: 3316088 - DNA, 25 bp, Homo sapien
cttttgagatggacggtaactggaa

SEQ ID NO: 3316089 - DNA, 25 bp, Homo sapien
gaatctttactctttgaatgcaaga

SEQ ID NO: 3316090 - DNA, 25 bp, Homo sapien
taaaagatacacttcgcagtttcag

SEQ ID NO: 3316091 - DNA, 25 bp, Homo sapien
tgatgggtttacgtcaagtttactc

SEQ ID NO: 3316092 - DNA, 25 bp, Homo sapien
gacaggcattatctagttccttccc

SEQ ID NO: 3316093 - DNA, 25 bp, Homo sapien
tatcgatggtaacgttttaaatcca

SEQ ID NO: 3316094 - DNA, 25 bp, Homo sapien
caatgctatcatgtggttctgcttc

SEQ ID NO: 3316095 - DNA, 25 bp, Homo sapien
cacacacagagcctatgatgctttg

SEQ ID NO: 3316096 - DNA, 25 bp, Homo sapien
tattgtattaatgcagcacacttgc

SEQ ID NO: 3316097 - DNA, 25 bp, Homo sapien
actttttcaaagacctctccaggca

SEQ ID NO: 3316098 - DNA, 25 bp, Homo sapien
tcccaggaaggtattagttatctac

SEQ ID NO: 3316099 - DNA, 25 bp, Homo sapien
actgtcgaattctgtactgtactaa

SEQ ID NO: 3316100 - DNA, 25 bp, Homo sapien
gaatccaaaggccagtactataatg

SEQ ID NO: 3316101 - DNA, 25 bp, Homo sapien
tcatctgaatcacccatggaaagga

SEQ ID NO: 3316102 - DNA, 25 bp, Homo sapien
tggccctttgacccagtggtcccca

SEQ ID NO: 3316103 - DNA, 25 bp, Homo sapien
ttctctaatctctgttacttttcct

SEQ ID NO: 3316104 - DNA, 25 bp, Homo sapien
ttctgttgccttctctaatctctgt

SEQ ID NO: 3316105 - DNA, 25 bp, Homo sapien
ccttctctaatctctgttacttttc

SEQ ID NO: 3316106 - DNA, 25 bp, Homo sapien
ctaatctctgttacttttccttcct

SEQ ID NO: 3316107 - DNA, 25 bp, Homo sapien
caaatatccatatagtgaaagaagt

SEQ ID NO: 3316108 - DNA, 25 bp, Homo sapien
cggcaaatatccatatagtgaaaga

SEQ ID NO: 3316109 - DNA, 25 bp, Homo sapien
tatccatatagtgaaagaagtttac

SEQ ID NO: 3316110 - DNA, 25 bp, Homo sapien
tccatatagtgaaagaagtttactt

SEQ ID NO: 3316111 - DNA, 25 bp, Homo sapien
gaggtcagcaacttggtgtaactgt

SEQ ID NO: 3316112 - DNA, 25 bp, Homo sapien
agaggtcagcaacttggtgtaactg

SEQ ID NO: 3316113 - DNA, 25 bp, Homo sapien
ggtcagcaacttggtgtaactgtgt

SEQ ID NO: 3316114 - DNA, 25 bp, Homo sapien
aagaggtcagcaacttggtgtaact

SEQ ID NO: 3316115 - DNA, 25 bp, Homo sapien
ccccactttctgcaaagatcagtta

SEQ ID NO: 3316116 - DNA, 25 bp, Homo sapien
ccattctcagcttggcgttcagtac

SEQ ID NO: 3316117 - DNA, 25 bp, Homo sapien
tctgcaaagatcagttatacttcct

SEQ ID NO: 3316118 - DNA, 25 bp, Homo sapien
gtacaacttggcaattctctcatcc

SEQ ID NO: 3316119 - DNA, 25 bp, Homo sapien
agcctttgtcccactattccatgaa

SEQ ID NO: 3316120 - DNA, 25 bp, Homo sapien
cattcgccgcctcagtcaggtaaac

SEQ ID NO: 3316121 - DNA, 25 bp, Homo sapien
taatacatacgattgtccctcctac

SEQ ID NO: 3316122 - DNA, 25 bp, Homo sapien
aatgctctcatgagtcattcgccgc

SEQ ID NO: 3316123 - DNA, 25 bp, Homo sapien
attgcccaagccagtaacccagaag

SEQ ID NO: 3316124 - DNA, 25 bp, Homo sapien
tggtgcctcctatgcaacgtgtctc

SEQ ID NO: 3316125 - DNA, 25 bp, Homo sapien
acttctcacaatccaaaggttcaag

SEQ ID NO: 3316126 - DNA, 25 bp, Homo sapien
aaagcttaatcagtctcccacaatc

SEQ ID NO: 3316127 - DNA, 25 bp, Homo sapien
aaagttgatcatatgcacgtgcccc

SEQ ID NO: 3316128 - DNA, 25 bp, Homo sapien
gagttcttggttctggataacactg

SEQ ID NO: 3316129 - DNA, 25 bp, Homo sapien
tcttcatgacttcgcaagctcttgc

SEQ ID NO: 3316130 - DNA, 25 bp, Homo sapien
cagaaactgttcacatagagtgcag

SEQ ID NO: 3316131 - DNA, 25 bp, Homo sapien
caaaccaatcaagtggctgaaagct

SEQ ID NO: 3316132 - DNA, 25 bp, Homo sapien
caggagaaaaggctccgattccaaa

SEQ ID NO: 3316133 - DNA, 25 bp, Homo sapien
tcacacatcgaagtcctagaatggg

SEQ ID NO: 3316134 - DNA, 25 bp, Homo sapien
gagccaaaagatgagagacaatgag

SEQ ID NO: 3316135 - DNA, 25 bp, Homo sapien
tccctagacctagaaatatgctcgg

SEQ ID NO: 3316136 - DNA, 25 bp, Homo sapien
tagagaagtcactaaaaccctccga

SEQ ID NO: 3316137 - DNA, 25 bp, Homo sapien
gacaaagtccgaggcaggattccaa

SEQ ID NO: 3316138 - DNA, 25 bp, Homo sapien
gcaactccctcggaggaagcacagt

SEQ ID NO: 3316139 - DNA, 25 bp, Homo sapien
gcaaccgcccgtaaattatgattcc

SEQ ID NO: 3316140 - DNA, 25 bp, Homo sapien
aactaataccccacgtagctactct

SEQ ID NO: 3316141 - DNA, 25 bp, Homo sapien
agcagtcagtctagggcacgcaacc

SEQ ID NO: 3316142 - DNA, 25 bp, Homo sapien
ttatgattccccttgaggagcgagg

SEQ ID NO: 3316143 - DNA, 25 bp, Homo sapien
tccggtccgccggattatgaatgac

SEQ ID NO: 3316144 - DNA, 25 bp, Homo sapien
cagtgcgacagtaggaagtgacgtt

SEQ ID NO: 3316145 - DNA, 25 bp, Homo sapien
cataaggtggctgtcgtttttctcc

SEQ ID NO: 3316146 - DNA, 25 bp, Homo sapien
ggccggcgcgagtattttccacata

SEQ ID NO: 3316147 - DNA, 25 bp, Homo sapien
gcccaggtcgccgacacgctcacgc

SEQ ID NO: 3316148 - DNA, 25 bp, Homo sapien
ccgacacgctcacgcaccctccctg

SEQ ID NO: 3316149 - DNA, 25 bp, Homo sapien
aggtcgccgacacgctcacgcaccc

SEQ ID NO: 3316150 - DNA, 25 bp, Homo sapien
gcggcccaggtcgccgacacgctca

SEQ ID NO: 3316151 - DNA, 25 bp, Homo sapien
ctgcgaccaggtaaagagggcgctc

SEQ ID NO: 3316152 - DNA, 25 bp, Homo sapien
gcgaccaggtaaagagggcgctcgg

SEQ ID NO: 3316153 - DNA, 25 bp, Homo sapien
agcctccgcgaccccctaagaactg

SEQ ID NO: 3316154 - DNA, 25 bp, Homo sapien
gaccaggtaaagagggcgctcgggc

SEQ ID NO: 3316155 - DNA, 25 bp, Homo sapien
tgggcttctcggtagtacgcgtttc

SEQ ID NO: 3316156 - DNA, 25 bp, Homo sapien
cttctcggtagtacgcgtttcccag

SEQ ID NO: 3316157 - DNA, 25 bp, Homo sapien
gctctgggcttctcggtagtacgcg

SEQ ID NO: 3316158 - DNA, 25 bp, Homo sapien
ctgaaggtgcgggttgagggctctg

SEQ ID NO: 3316159 - DNA, 25 bp, Homo sapien
catcatcaaggtgtacattctcatc

SEQ ID NO: 3316160 - DNA, 25 bp, Homo sapien
tgggtcaagtgtatatacttctcag

SEQ ID NO: 3316161 - DNA, 25 bp, Homo sapien
cctgtgggtcaagtgtatatacttc

SEQ ID NO: 3316162 - DNA, 25 bp, Homo sapien
ctatttattaggtggaaatggctca

SEQ ID NO: 3316163 - DNA, 25 bp, Homo sapien
tctagaaggctttaaagctagcaga

SEQ ID NO: 3316164 - DNA, 25 bp, Homo sapien
aatgcaagagttttatcagaaggag

SEQ ID NO: 3316165 - DNA, 25 bp, Homo sapien
taaaggcttatccttatgaggatca

SEQ ID NO: 3316166 - DNA, 25 bp, Homo sapien
ggcagattatcctcttagtagcaag

SEQ ID NO: 3316167 - DNA, 25 bp, Homo sapien
catccagaagcaatgagggacagga

SEQ ID NO: 3316168 - DNA, 25 bp, Homo sapien
gtcatccagaagcaatgagggacag

SEQ ID NO: 3316169 - DNA, 25 bp, Homo sapien
tgttgagagtcatccagaagcaatg

SEQ ID NO: 3316170 - DNA, 25 bp, Homo sapien
tgagagtcatccagaagcaatgagg

SEQ ID NO: 3316171 - DNA, 25 bp, Homo sapien
tagtagcaggtgttgatatttttcc

SEQ ID NO: 3316172 - DNA, 25 bp, Homo sapien
gtgtctgacctattactacttcaag

SEQ ID NO: 3316173 - DNA, 25 bp, Homo sapien
tacttcaaggaatgtagtagcaggt

SEQ ID NO: 3316174 - DNA, 25 bp, Homo sapien
tctgacctattactacttcaaggaa

SEQ ID NO: 3316175 - DNA, 25 bp, Homo sapien
cctgggtggtggactagaatgaact

SEQ ID NO: 3316176 - DNA, 25 bp, Homo sapien
gccctgtagcctgggtggtggacta

SEQ ID NO: 3316177 - DNA, 25 bp, Homo sapien
gaatgaactatattgaaagatccct

SEQ ID NO: 3316178 - DNA, 25 bp, Homo sapien
ccatttcctaaaccagcctgactgg

SEQ ID NO: 3316179 - DNA, 25 bp, Homo sapien
catgaaagaattctagttttttgcc

SEQ ID NO: 3316180 - DNA, 25 bp, Homo sapien
cattctcctgctcagagtagctggg

SEQ ID NO: 3316181 - DNA, 25 bp, Homo sapien
aaatattttgagaagaaatagtgta

SEQ ID NO: 3316182 - DNA, 25 bp, Homo sapien
tattttgagaagaaatagtgtaaaa

SEQ ID NO: 3316183 - DNA, 25 bp, Homo sapien
cccaaactctaacaggccctggagt

SEQ ID NO: 3316184 - DNA, 25 bp, Homo sapien
tctattcccccaaactctaacaggc

SEQ ID NO: 3316185 - DNA, 25 bp, Homo sapien
aacaggccctggagtatgatattcc

SEQ ID NO: 3316186 - DNA, 25 bp, Homo sapien
gctatccctcctctattcccccaaa

SEQ ID NO: 3316187 - DNA, 25 bp, Homo sapien
ctcaaggttgaggtttgtggcaaat

SEQ ID NO: 3316188 - DNA, 25 bp, Homo sapien
aagcatcattggaaccttcagcaag

SEQ ID NO: 3316189 - DNA, 25 bp, Homo sapien
tcagttccatactaccacaatgaag

SEQ ID NO: 3316190 - DNA, 25 bp, Homo sapien
tgtgttcatataccagcataccttg

SEQ ID NO: 3316191 - DNA, 25 bp, Homo sapien
cgcaaaatacttcaacgtgtgtctc

SEQ ID NO: 3316192 - DNA, 25 bp, Homo sapien
tccctctttatctgacatacacatt

SEQ ID NO: 3316193 - DNA, 25 bp, Homo sapien
caaccatttgagagttccttgcaga

SEQ ID NO: 3316194 - DNA, 25 bp, Homo sapien
gacatcataacatttcaccgcaaaa

SEQ ID NO: 3316195 - DNA, 25 bp, Homo sapien
ggaggcttgacatcttaaagcatat

SEQ ID NO: 3316196 - DNA, 25 bp, Homo sapien
ggaaagcttgtctgttctccataca

SEQ ID NO: 3316197 - DNA, 25 bp, Homo sapien
gcagtttggttagggcttgatggga

SEQ ID NO: 3316198 - DNA, 25 bp, Homo sapien
tgggaaagcttgtctgttctccata

SEQ ID NO: 3316199 - DNA, 25 bp, Homo sapien
gttgaatatatttgagatcctgctc

SEQ ID NO: 3316200 - DNA, 25 bp, Homo sapien
ttgagatcctgctcatatttcctgg

SEQ ID NO: 3316201 - DNA, 25 bp, Homo sapien
cctggagcttcgtaatatttataaa

SEQ ID NO: 3316202 - DNA, 25 bp, Homo sapien
atttcctggagcttcgtaatattta

SEQ ID NO: 3316203 - DNA, 25 bp, Homo sapien
aaagagcctcaaagtactcttcttt

SEQ ID NO: 3316204 - DNA, 25 bp, Homo sapien
tactctaggtctccaaagagcctca

SEQ ID NO: 3316205 - DNA, 25 bp, Homo sapien
catggtggctccatttaatggcagt

SEQ ID NO: 3316206 - DNA, 25 bp, Homo sapien
tcatggtggctccatttaatggcag

SEQ ID NO: 3316207 - DNA, 25 bp, Homo sapien
gaaataaactttcaagactcagaat

SEQ ID NO: 3316208 - DNA, 25 bp, Homo sapien
gctttaactttacataaatgttgag

SEQ ID NO: 3316209 - DNA, 25 bp, Homo sapien
ctttaactttacataaatgttgagg

SEQ ID NO: 3316210 - DNA, 25 bp, Homo sapien
gttttcaacccctgtgtaacatgta

SEQ ID NO: 3316211 - DNA, 25 bp, Homo sapien
gaatactacaatgtgttgtcacagg

SEQ ID NO: 3316212 - DNA, 25 bp, Homo sapien
cacaggatttgttattcagatgtca

SEQ ID NO: 3316213 - DNA, 25 bp, Homo sapien
tgcagaatatggaagcttacctaaa

SEQ ID NO: 3316214 - DNA, 25 bp, Homo sapien
tctgagggcgcggtttagccaccta

SEQ ID NO: 3316215 - DNA, 25 bp, Homo sapien
cacactcactgtcttgggtcacttt

SEQ ID NO: 3316216 - DNA, 25 bp, Homo sapien
ccccggctcgggaattaggactgag

SEQ ID NO: 3316217 - DNA, 25 bp, Homo sapien
aggtgacgcgcgaaacatcccttac

SEQ ID NO: 3316218 - DNA, 25 bp, Homo sapien
tgtgccaaccacgatgcaaacatgg

SEQ ID NO: 3316219 - DNA, 25 bp, Homo sapien
taaactagtgcacgacatcaatgct

SEQ ID NO: 3316220 - DNA, 25 bp, Homo sapien
catggtgaatgtatcgggccaaaca

SEQ ID NO: 3316221 - DNA, 25 bp, Homo sapien
caagtgtcatcctggttatgctgga

SEQ ID NO: 3316222 - DNA, 25 bp, Homo sapien
aaataagtgatgctcttattatctc

SEQ ID NO: 3316223 - DNA, 25 bp, Homo sapien
gtgatgctcttattatctcagtttg

SEQ ID NO: 3316224 - DNA, 25 bp, Homo sapien
taagtgatgctcttattatctcagt

SEQ ID NO: 3316225 - DNA, 25 bp, Homo sapien
tgctcttattatctcagtttgctcc

SEQ ID NO: 3316226 - DNA, 25 bp, Homo sapien
cttcttcctggtgtgaagacgagca

SEQ ID NO: 3316227 - DNA, 25 bp, Homo sapien
tgaacagcctcttttccaacccctg

SEQ ID NO: 3316228 - DNA, 25 bp, Homo sapien
cctggatcaccaagccacaagtttg

SEQ ID NO: 3316229 - DNA, 25 bp, Homo sapien
tcttgaccaaggcagtgaacagcct

SEQ ID NO: 3316230 - DNA, 25 bp, Homo sapien
tgtagagtgggcacgtaatccctcc

SEQ ID NO: 3316231 - DNA, 25 bp, Homo sapien
cagactctagttgcaaggtaaaggg

SEQ ID NO: 3316232 - DNA, 25 bp, Homo sapien
catgaccttatattggcagcagtag

SEQ ID NO: 3316233 - DNA, 25 bp, Homo sapien
gaacgggatttacacacactggagg

SEQ ID NO: 3316234 - DNA, 25 bp, Homo sapien
tatcaattggactctcccaggttcc

SEQ ID NO: 3316235 - DNA, 25 bp, Homo sapien
tctctctgcttcgtgtgtgacaagt

SEQ ID NO: 3316236 - DNA, 25 bp, Homo sapien
gattttcatcgggtgcattctctct

SEQ ID NO: 3316237 - DNA, 25 bp, Homo sapien
tcattaagcctttgagtaacggcag

SEQ ID NO: 3316238 - DNA, 25 bp, Homo sapien
agggttgaactcactgtcaaattat

SEQ ID NO: 3316239 - DNA, 25 bp, Homo sapien
cacctgcaggtatgaggttcaacat

SEQ ID NO: 3316240 - DNA, 25 bp, Homo sapien
cagcacctgcaggtatgaggttcaa

SEQ ID NO: 3316241 - DNA, 25 bp, Homo sapien
agcacctgcaggtatgaggttcaac

SEQ ID NO: 3316242 - DNA, 25 bp, Homo sapien
gcacctgcaggtatgaggttcaaca

SEQ ID NO: 3316243 - DNA, 25 bp, Homo sapien
ctaataacgagcatcgagctggctc

SEQ ID NO: 3316244 - DNA, 25 bp, Homo sapien
aataacgagcatcgagctggctctc

SEQ ID NO: 3316245 - DNA, 25 bp, Homo sapien
taacgagcatcgagctggctctcct

SEQ ID NO: 3316246 - DNA, 25 bp, Homo sapien
aacgagcatcgagctggctctcctc

SEQ ID NO: 3316247 - DNA, 25 bp, Homo sapien
acagtgtcatctcgagcagcggccg

SEQ ID NO: 3316248 - DNA, 25 bp, Homo sapien
tctgtgaggccactataagctccca

SEQ ID NO: 3316249 - DNA, 25 bp, Homo sapien
tgactctgcctgatggtacctcatc

SEQ ID NO: 3316250 - DNA, 25 bp, Homo sapien
tctctggtccagtccgttcttctgt

SEQ ID NO: 3316251 - DNA, 25 bp, Homo sapien
caactggagacaaggtgtagttctc

SEQ ID NO: 3316252 - DNA, 25 bp, Homo sapien
tcagacacaggttactgtacacagg

SEQ ID NO: 3316253 - DNA, 25 bp, Homo sapien
acatggagttgagcggagcagcaca

SEQ ID NO: 3316254 - DNA, 25 bp, Homo sapien
ttccagatcaaatcagcctgcagag

SEQ ID NO: 3316255 - DNA, 25 bp, Homo sapien
tcctgcctcccgaactataagaaaa

SEQ ID NO: 3316256 - DNA, 25 bp, Homo sapien
taagagtgggatcctaatctgacag

SEQ ID NO: 3316257 - DNA, 25 bp, Homo sapien
gaaggttgcatctgccagccaaaaa

SEQ ID NO: 3316258 - DNA, 25 bp, Homo sapien
ccttataagaagaagaggagctcta

SEQ ID NO: 3316259 - DNA, 25 bp, Homo sapien
gcattgtctcctgaatggcaattgt

SEQ ID NO: 3316260 - DNA, 25 bp, Homo sapien
tgtctcctgaatggcaattgtgttc

SEQ ID NO: 3316261 - DNA, 25 bp, Homo sapien
tctcctgaatggcaattgtgttctc

SEQ ID NO: 3316262 - DNA, 25 bp, Homo sapien
tcctgaatggcaattgtgttctctg

SEQ ID NO: 3316263 - DNA, 25 bp, Homo sapien
agtgtttgtgttatctccctttgcc

SEQ ID NO: 3316264 - DNA, 25 bp, Homo sapien
tgaggtcactgcactttaatctctg

SEQ ID NO: 3316265 - DNA, 25 bp, Homo sapien
cactcttggacttgaggtcactgca

SEQ ID NO: 3316266 - DNA, 25 bp, Homo sapien
tctggtggctttttcggcactcttg

SEQ ID NO: 3316267 - DNA, 25 bp, Homo sapien
gtcttgtgaacagggctctaagcag

SEQ ID NO: 3316268 - DNA, 25 bp, Homo sapien
ggttctctgacaggtcttgtgaaca

SEQ ID NO: 3316269 - DNA, 25 bp, Homo sapien
ctctgacaggtcttgtgaacagggc

SEQ ID NO: 3316270 - DNA, 25 bp, Homo sapien
gacaggtcttgtgaacagggctcta

SEQ ID NO: 3316271 - DNA, 25 bp, Homo sapien
ttatgctctcctgataagggtttca

SEQ ID NO: 3316272 - DNA, 25 bp, Homo sapien
gctccatcaaagtctcacccagtgt

SEQ ID NO: 3316273 - DNA, 25 bp, Homo sapien
tctagtgggatctcgtgtgacctca

SEQ ID NO: 3316274 - DNA, 25 bp, Homo sapien
cagtgttggatactctctagtggga

SEQ ID NO: 3316275 - DNA, 25 bp, Homo sapien
gtattcttgagagtctaaatgtcca

SEQ ID NO: 3316276 - DNA, 25 bp, Homo sapien
gagtctaaatgtccatgccaaggaa

SEQ ID NO: 3316277 - DNA, 25 bp, Homo sapien
tcagtggtattcttgagagtctaaa

SEQ ID NO: 3316278 - DNA, 25 bp, Homo sapien
tcttgagagtctaaatgtccatgcc

SEQ ID NO: 3316279 - DNA, 25 bp, Homo sapien
tcccttaaatgctgaagaatgatca

SEQ ID NO: 3316280 - DNA, 25 bp, Homo sapien
gatcatttgtgtggtcttctccctc

SEQ ID NO: 3316281 - DNA, 25 bp, Homo sapien
tttggtgcactagtaaagcaactga

SEQ ID NO: 3316282 - DNA, 25 bp, Homo sapien
taggtatgaattactgaccaacacc

SEQ ID NO: 3316283 - DNA, 25 bp, Homo sapien
aaataagacgggctactggcttcag

SEQ ID NO: 3316284 - DNA, 25 bp, Homo sapien
tatgaaagtgctagctcctgacaac

SEQ ID NO: 3316285 - DNA, 25 bp, Homo sapien
aagagaccgccaaccacaaagtggt

SEQ ID NO: 3316286 - DNA, 25 bp, Homo sapien
tatgcccgtaggtcttaaagtctcc

SEQ ID NO: 3316287 - DNA, 25 bp, Homo sapien
tcctcaaagacattgctggcatctt

SEQ ID NO: 3316288 - DNA, 25 bp, Homo sapien
tcttgagttcctcaaagacattgct

SEQ ID NO: 3316289 - DNA, 25 bp, Homo sapien
ttctgtgcctgttcttgagttcctc

SEQ ID NO: 3316290 - DNA, 25 bp, Homo sapien
aaagacattgctggcatcttctcca

SEQ ID NO: 3316291 - DNA, 25 bp, Homo sapien
tttccttgcatttcctagcccatcc

SEQ ID NO: 3316292 - DNA, 25 bp, Homo sapien
aggaatttacctctattagccaaga

SEQ ID NO: 3316293 - DNA, 25 bp, Homo sapien
tttacctctattagccaagaaatgc

SEQ ID NO: 3316294 - DNA, 25 bp, Homo sapien
tgcatctcacttgccaatttcacca

SEQ ID NO: 3316295 - DNA, 25 bp, Homo sapien
gaatttacctctattagccaagaaa

SEQ ID NO: 3316296 - DNA, 25 bp, Homo sapien
gaatccaacaaaaatctggcaccac

SEQ ID NO: 3316297 - DNA, 25 bp, Homo sapien
tctaaatcaggaacttaccccagac

SEQ ID NO: 3316298 - DNA, 25 bp, Homo sapien
tcttttgagatgctatagaatcctt

SEQ ID NO: 3316299 - DNA, 25 bp, Homo sapien
ttttaaagtgcactaaagcctgttc

SEQ ID NO: 3316300 - DNA, 25 bp, Homo sapien
ctggtggtggtacttatggcattcc

SEQ ID NO: 3316301 - DNA, 25 bp, Homo sapien
cagtgctgatagtcatcgtgtagga

SEQ ID NO: 3316302 - DNA, 25 bp, Homo sapien
catggcagtgatagtgtgctcttac

SEQ ID NO: 3316303 - DNA, 25 bp, Homo sapien
tctcagtaaggcagagttaagactc

SEQ ID NO: 3316304 - DNA, 25 bp, Homo sapien
tatgcaagaatgaacctggacccct

SEQ ID NO: 3316305 - DNA, 25 bp, Homo sapien
tctggataatactgattgcacaact

SEQ ID NO: 3316306 - DNA, 25 bp, Homo sapien
ccttgtaaactaggtaaggatcaca

SEQ ID NO: 3316307 - DNA, 25 bp, Homo sapien
ggaatacctgctgatcaggtagaca

SEQ ID NO: 3316308 - DNA, 25 bp, Homo sapien
gcagaggttgttagctgtacctcaa

SEQ ID NO: 3316309 - DNA, 25 bp, Homo sapien
tttttagctggggaaatgatcaacc

SEQ ID NO: 3316310 - DNA, 25 bp, Homo sapien
tgtggtacctaaaattgtgagatgt

SEQ ID NO: 3316311 - DNA, 25 bp, Homo sapien
gacaaagtgtcacaattcatttggc

SEQ ID NO: 3316312 - DNA, 25 bp, Homo sapien
tgctacaggaactgaccaaatattc

SEQ ID NO: 3316313 - DNA, 25 bp, Homo sapien
taagccattcgtctttgctacagga

SEQ ID NO: 3316314 - DNA, 25 bp, Homo sapien
gactagccctggactgactgtacag

SEQ ID NO: 3316315 - DNA, 25 bp, Homo sapien
tcttccttctagatagcagatgtga

SEQ ID NO: 3316316 - DNA, 25 bp, Homo sapien
gatgatgatttcagcccacattcag

SEQ ID NO: 3316317 - DNA, 25 bp, Homo sapien
tgttcagtacaatggaggacagctt

SEQ ID NO: 3316318 - DNA, 25 bp, Homo sapien
gacagctttttcagggcaaatggga

SEQ ID NO: 3316319 - DNA, 25 bp, Homo sapien
tttacggaaatgcaacaatctggac

SEQ ID NO: 3316320 - DNA, 25 bp, Homo sapien
ggtgaggaggcctgttggctttatt

SEQ ID NO: 3316321 - DNA, 25 bp, Homo sapien
tattttattaatgccaccatctaga

SEQ ID NO: 3316322 - DNA, 25 bp, Homo sapien
ttttattaatgccaccatctagaat

SEQ ID NO: 3316323 - DNA, 25 bp, Homo sapien
tgaggaggcctgttggctttatttt

SEQ ID NO: 3316324 - DNA, 25 bp, Homo sapien
tttaattagttacaaagctgtgtca

SEQ ID NO: 3316325 - DNA, 25 bp, Homo sapien
tatatctgtctctaagtatctctct

SEQ ID NO: 3316326 - DNA, 25 bp, Homo sapien
cacatatattttaaacctcctttgt

SEQ ID NO: 3316327 - DNA, 25 bp, Homo sapien
agatagatgtggatagatatacaca

SEQ ID NO: 3316328 - DNA, 25 bp, Homo sapien
tgccatatttgcctcattgggttgg

SEQ ID NO: 3316329 - DNA, 25 bp, Homo sapien
tattgccatatttgcctcattgggt

SEQ ID NO: 3316330 - DNA, 25 bp, Homo sapien
aaattgtgtgatgcattttattgcc

SEQ ID NO: 3316331 - DNA, 25 bp, Homo sapien
ccatatttgcctcattgggttggtc

SEQ ID NO: 3316332 - DNA, 25 bp, Homo sapien
gagctcccgactggttaacaactgg

SEQ ID NO: 3316333 - DNA, 25 bp, Homo sapien
gagggacaagccaacctgacataat

SEQ ID NO: 3316334 - DNA, 25 bp, Homo sapien
gaagtgttacccttcaacagaggga

SEQ ID NO: 3316335 - DNA, 25 bp, Homo sapien
tgagtgctcactagtatcaggctct

SEQ ID NO: 3316336 - DNA, 25 bp, Homo sapien
ttggattgaagcatactagctgagc

SEQ ID NO: 3316337 - DNA, 25 bp, Homo sapien
taggcctacagatctgtacagcaga

SEQ ID NO: 3316338 - DNA, 25 bp, Homo sapien
gaatagtcatgcttcgagattgcct

SEQ ID NO: 3316339 - DNA, 25 bp, Homo sapien
taagtatgcctgagtatggaggacg

SEQ ID NO: 3316340 - DNA, 25 bp, Homo sapien
tcacacactgggagaacactgtgat

SEQ ID NO: 3316341 - DNA, 25 bp, Homo sapien
cacacactgggagaacactgtgatc

SEQ ID NO: 3316342 - DNA, 25 bp, Homo sapien
agcattcacactcaaaagccttcgg

SEQ ID NO: 3316343 - DNA, 25 bp, Homo sapien
actggtgtttcaatcctggctctga

SEQ ID NO: 3316344 - DNA, 25 bp, Homo sapien
aagggtgtgatttatagagtcatac

SEQ ID NO: 3316345 - DNA, 25 bp, Homo sapien
actcaaaagccttcggagctcactg

SEQ ID NO: 3316346 - DNA, 25 bp, Homo sapien
gaagtgtatggcatccatgactggg

SEQ ID NO: 3316347 - DNA, 25 bp, Homo sapien
cagcagcagtattgtggtagcagta

SEQ ID NO: 3316348 - DNA, 25 bp, Homo sapien
ctatggctttagtgagaggttgtca

SEQ ID NO: 3316349 - DNA, 25 bp, Homo sapien
tatgtaagacaaccatccccaagac

SEQ ID NO: 3316350 - DNA, 25 bp, Homo sapien
tacagttgcattaagaggaagattc

SEQ ID NO: 3316351 - DNA, 25 bp, Homo sapien
gcactaaactcctacgtgaagaagt

SEQ ID NO: 3316352 - DNA, 25 bp, Homo sapien
cagtttgggacacagttacagttgc

SEQ ID NO: 3316353 - DNA, 25 bp, Homo sapien
cacattctcagaccacagcatagta

SEQ ID NO: 3316354 - DNA, 25 bp, Homo sapien
gcagcactgaatggaatgttgatgc

SEQ ID NO: 3316355 - DNA, 25 bp, Homo sapien
ccctttgaagttctggagcatagca

SEQ ID NO: 3316356 - DNA, 25 bp, Homo sapien
catagcagtgtaagggccctgggta

SEQ ID NO: 3316357 - DNA, 25 bp, Homo sapien
ggccctgggtaagctccccttctgc

SEQ ID NO: 3316358 - DNA, 25 bp, Homo sapien
attttctagtcagctgctgcttcat

SEQ ID NO: 3316359 - DNA, 25 bp, Homo sapien
aatttaaattttctagtcagctgct

SEQ ID NO: 3316360 - DNA, 25 bp, Homo sapien
taaattttctagtcagctgctgctt

SEQ ID NO: 3316361 - DNA, 25 bp, Homo sapien
tttaaattttctagtcagctgctgc

SEQ ID NO: 3316362 - DNA, 25 bp, Homo sapien
gatggttctcacagcaaatcggagc

SEQ ID NO: 3316363 - DNA, 25 bp, Homo sapien
actgtatggcactctaggaactggg

SEQ ID NO: 3316364 - DNA, 25 bp, Homo sapien
tccagacatgaagacattgctcagc

SEQ ID NO: 3316365 - DNA, 25 bp, Homo sapien
tgaacctaagcccaaatgagatgaa

SEQ ID NO: 3316366 - DNA, 25 bp, Homo sapien
ttaaaacagcatatgcaaaggatac

SEQ ID NO: 3316367 - DNA, 25 bp, Homo sapien
gaaatccgtggtgatacttctgact

SEQ ID NO: 3316368 - DNA, 25 bp, Homo sapien
tgctgaaatccgtggtgatacttct

SEQ ID NO: 3316369 - DNA, 25 bp, Homo sapien
tattccggatgtcaaccaccaggag

SEQ ID NO: 3316370 - DNA, 25 bp, Homo sapien
gaagtggcctgtcactgtgagctca

SEQ ID NO: 3316371 - DNA, 25 bp, Homo sapien
cttggaatgatcagcatagaaattg

SEQ ID NO: 3316372 - DNA, 25 bp, Homo sapien
gaaattgcagtttaggttatgagaa

SEQ ID NO: 3316373 - DNA, 25 bp, Homo sapien
caggagttaaaggtcaaggatgagt

SEQ ID NO: 3316374 - DNA, 25 bp, Homo sapien
ggaagaagtcatggttagaatatca

SEQ ID NO: 3316375 - DNA, 25 bp, Homo sapien
catctgatgtggagtttgaaataac

SEQ ID NO: 3316376 - DNA, 25 bp, Homo sapien
tggcacagactatcactctcaaagg

SEQ ID NO: 3316377 - DNA, 25 bp, Homo sapien
taactatcatactctgaaagctgca

SEQ ID NO: 3316378 - DNA, 25 bp, Homo sapien
gaaagctgcatagtatagctctcac

SEQ ID NO: 3316379 - DNA, 25 bp, Homo sapien
cataaatttgaatggttcctttcta

SEQ ID NO: 3316380 - DNA, 25 bp, Homo sapien
aaataaaagcatctcaggggtaagc

SEQ ID NO: 3316381 - DNA, 25 bp, Homo sapien
catatattatggaatatgaactcat

SEQ ID NO: 3316382 - DNA, 25 bp, Homo sapien
taacattaaattggttggtacacat

SEQ ID NO: 3316383 - DNA, 25 bp, Homo sapien
taatccattcaaccattctatatct

SEQ ID NO: 3316384 - DNA, 25 bp, Homo sapien
ctcatgacctgtgaggtttccactg

SEQ ID NO: 3316385 - DNA, 25 bp, Homo sapien
ggtaataactttctatccctatctg

SEQ ID NO: 3316386 - DNA, 25 bp, Homo sapien
gaccctataggtatgcttcattgtt

SEQ ID NO: 3316387 - DNA, 25 bp, Homo sapien
tctgctgccggacatataagagttc

SEQ ID NO: 3316388 - DNA, 25 bp, Homo sapien
gaatttcgagtctaaaaggtcacat

SEQ ID NO: 3316389 - DNA, 25 bp, Homo sapien
aaacagctagtttgaatttcgagtc

SEQ ID NO: 3316390 - DNA, 25 bp, Homo sapien
cctggatgatcttaatgtgtgtgga

SEQ ID NO: 3316391 - DNA, 25 bp, Homo sapien
gccaattgcactttttcaagtatag

SEQ ID NO: 3316392 - DNA, 25 bp, Homo sapien
tgggagttctgacccaacatttccc

SEQ ID NO: 3316393 - DNA, 25 bp, Homo sapien
gctttgcaagatatagccccacttt

SEQ ID NO: 3316394 - DNA, 25 bp, Homo sapien
aaagcagtctcttctacctacgaga

SEQ ID NO: 3316395 - DNA, 25 bp, Homo sapien
cataggatggtgttgactgtctgca

SEQ ID NO: 3316396 - DNA, 25 bp, Homo sapien
gctgccagggtttctagtcttcatc

SEQ ID NO: 3316397 - DNA, 25 bp, Homo sapien
ttacccctacatgtagctgccaggg

SEQ ID NO: 3316398 - DNA, 25 bp, Homo sapien
tacttaacttctagagggctgatac

SEQ ID NO: 3316399 - DNA, 25 bp, Homo sapien
aaaccatatcaatctctgtctggga

SEQ ID NO: 3316400 - DNA, 25 bp, Homo sapien
taaactagaggttctgtccaaagca

SEQ ID NO: 3316401 - DNA, 25 bp, Homo sapien
caattggttgaattcgctacaagct

SEQ ID NO: 3316402 - DNA, 25 bp, Homo sapien
agcattttcattaaactcgggaaca

SEQ ID NO: 3316403 - DNA, 25 bp, Homo sapien
tataatcttaagaccaaagcctgac

SEQ ID NO: 3316404 - DNA, 25 bp, Homo sapien
cctggaggagtacgtcaaaataatc

SEQ ID NO: 3316405 - DNA, 25 bp, Homo sapien
tttgtaaactaaatccgcaaataca

SEQ ID NO: 3316406 - DNA, 25 bp, Homo sapien
aagcaaaacttgctacctggaggag

SEQ ID NO: 3316407 - DNA, 25 bp, Homo sapien
tcttcctaactctataaccaaatag

SEQ ID NO: 3316408 - DNA, 25 bp, Homo sapien
taagtagcacttttaggagtccaac

SEQ ID NO: 3316409 - DNA, 25 bp, Homo sapien
aataaggtgccgaacttctgcctcc

SEQ ID NO: 3316410 - DNA, 25 bp, Homo sapien
tgagcatgctgtctgtaagtagcac

SEQ ID NO: 3316411 - DNA, 25 bp, Homo sapien
gatagattctctcacacagcgttca

SEQ ID NO: 3316412 - DNA, 25 bp, Homo sapien
gaatttagattgctcttttaatgta

SEQ ID NO: 3316413 - DNA, 25 bp, Homo sapien
atttagattgctcttttaatgtaat

SEQ ID NO: 3316414 - DNA, 25 bp, Homo sapien
tagaatttagattgctcttttaatg

SEQ ID NO: 3316415 - DNA, 25 bp, Homo sapien
atagaatttagattgctcttttaat

SEQ ID NO: 3316416 - DNA, 25 bp, Homo sapien
tacagacatgatcatagactatgac

SEQ ID NO: 3316417 - DNA, 25 bp, Homo sapien
gactatgacctacgacaagcctgaa

SEQ ID NO: 3316418 - DNA, 25 bp, Homo sapien
cacagcatcctgaatacttgggact

SEQ ID NO: 3316419 - DNA, 25 bp, Homo sapien
tgtactctggctactaatcctttgt

SEQ ID NO: 3316420 - DNA, 25 bp, Homo sapien
gggtccgtcacaaatagctcttatt

SEQ ID NO: 3316421 - DNA, 25 bp, Homo sapien
tgtgggtccgtcacaaatagctctt

SEQ ID NO: 3316422 - DNA, 25 bp, Homo sapien
tattggctgtgggtccgtcacaaat

SEQ ID NO: 3316423 - DNA, 25 bp, Homo sapien
ctgccctggccagaaagtccaaaac

SEQ ID NO: 3316424 - DNA, 25 bp, Homo sapien
gcttcaccagtgtttaacaggagca

SEQ ID NO: 3316425 - DNA, 25 bp, Homo sapien
ctttggcaagctggaaatgacaaga

SEQ ID NO: 3316426 - DNA, 25 bp, Homo sapien
cagacaagcagagttgccactaatc

SEQ ID NO: 3316427 - DNA, 25 bp, Homo sapien
gtcagtcgaccataaaatacacagt

SEQ ID NO: 3316428 - DNA, 25 bp, Homo sapien
tattatcagcagtaacttgggcctg

SEQ ID NO: 3316429 - DNA, 25 bp, Homo sapien
gggcctgcctgaaaatatggagaac

SEQ ID NO: 3316430 - DNA, 25 bp, Homo sapien
ggatgctgtcaataaagtactgtga

SEQ ID NO: 3316431 - DNA, 25 bp, Homo sapien
tcctgcattgcatgacatagatgat

SEQ ID NO: 3316432 - DNA, 25 bp, Homo sapien
ttaatggctccatttatttagatct

SEQ ID NO: 3316433 - DNA, 25 bp, Homo sapien
tggctccatttatttagatctatac

SEQ ID NO: 3316434 - DNA, 25 bp, Homo sapien
taatggctccatttatttagatcta

SEQ ID NO: 3316435 - DNA, 25 bp, Homo sapien
aatggctccatttatttagatctat

SEQ ID NO: 3316436 - DNA, 25 bp, Homo sapien
cagctgctgaagaattgctactcca

SEQ ID NO: 3316437 - DNA, 25 bp, Homo sapien
taaatcggagaagagaagaatacac

SEQ ID NO: 3316438 - DNA, 25 bp, Homo sapien
cattagccaaaagccggtcccgcag

SEQ ID NO: 3316439 - DNA, 25 bp, Homo sapien
caagtagtaaggtatcccagaggtg

SEQ ID NO: 3316440 - DNA, 25 bp, Homo sapien
taagaaaccaagggatggcatagag

SEQ ID NO: 3316441 - DNA, 25 bp, Homo sapien
ggtaagaaaccaagggatggcatag

SEQ ID NO: 3316442 - DNA, 25 bp, Homo sapien
gtaagaaaccaagggatggcataga

SEQ ID NO: 3316443 - DNA, 25 bp, Homo sapien
tgccactgtgaaattggtcggttcc

SEQ ID NO: 3316444 - DNA, 25 bp, Homo sapien
gagagcttttaggcgaagattaaaa

SEQ ID NO: 3316445 - DNA, 25 bp, Homo sapien
aaaatgagagcttttaggcgaagat

SEQ ID NO: 3316446 - DNA, 25 bp, Homo sapien
atgagagcttttaggcgaagattaa

SEQ ID NO: 3316447 - DNA, 25 bp, Homo sapien
caacttcaggtaagggtgctgtcca

SEQ ID NO: 3316448 - DNA, 25 bp, Homo sapien
tggacatgggaaaagaactcaggac

SEQ ID NO: 3316449 - DNA, 25 bp, Homo sapien
gcacaaccttattcttggacatggg

SEQ ID NO: 3316450 - DNA, 25 bp, Homo sapien
gagcatataaaagccccaggctcag

SEQ ID NO: 3316451 - DNA, 25 bp, Homo sapien
aatatcactaatgttgttctggtta

SEQ ID NO: 3316452 - DNA, 25 bp, Homo sapien
acatagttactcaatcaggaccatc

SEQ ID NO: 3316453 - DNA, 25 bp, Homo sapien
caaattctatacagggatgggtctg

SEQ ID NO: 3316454 - DNA, 25 bp, Homo sapien
ggtcatctctgtcatatatcaccaa

SEQ ID NO: 3316455 - DNA, 25 bp, Homo sapien
cacgctacagctaacgtttgatttt

SEQ ID NO: 3316456 - DNA, 25 bp, Homo sapien
aacaatttcctttgcacccacgcta

SEQ ID NO: 3316457 - DNA, 25 bp, Homo sapien
gaggtcaggtgccttcagcttaact

SEQ ID NO: 3316458 - DNA, 25 bp, Homo sapien
aaaaacaggctaagtcacgctacag

SEQ ID NO: 3316459 - DNA, 25 bp, Homo sapien
ctcagctctggatcatgaaatgcaa

SEQ ID NO: 3316460 - DNA, 25 bp, Homo sapien
tcagctctggatcatgaaatgcaat

SEQ ID NO: 3316461 - DNA, 25 bp, Homo sapien
gaatgaaaccaatctcattgagatg

SEQ ID NO: 3316462 - DNA, 25 bp, Homo sapien
ctggaatgaaaccaatctcattgag

SEQ ID NO: 3316463 - DNA, 25 bp, Homo sapien
atactgcgcttttccgacgggctta

SEQ ID NO: 3316464 - DNA, 25 bp, Homo sapien
gcttaaaaaacggcacaccacgaga

SEQ ID NO: 3316465 - DNA, 25 bp, Homo sapien
tactgcgcttttccgacgggcttaa

SEQ ID NO: 3316466 - DNA, 25 bp, Homo sapien
cggcacaccacgagattatatcctg

SEQ ID NO: 3316467 - DNA, 25 bp, Homo sapien
ggaggggggagggatagcactggga

SEQ ID NO: 3316468 - DNA, 25 bp, Homo sapien
gtttattgtggcattattcacgata

SEQ ID NO: 3316469 - DNA, 25 bp, Homo sapien
tagcaaagacttggaaccaacccaa

SEQ ID NO: 3316470 - DNA, 25 bp, Homo sapien
atgtctaacaatgatagactggatt

SEQ ID NO: 3316471 - DNA, 25 bp, Homo sapien
agtttttcagctttgactcttttag

SEQ ID NO: 3316472 - DNA, 25 bp, Homo sapien
cgaaaagtttttcagctttgactct

SEQ ID NO: 3316473 - DNA, 25 bp, Homo sapien
ataccaattcaagatttcaaatgca

SEQ ID NO: 3316474 - DNA, 25 bp, Homo sapien
caagcaatcaataattgttgagagg

SEQ ID NO: 3316475 - DNA, 25 bp, Homo sapien
ggtcttttaattataatattggatg

SEQ ID NO: 3316476 - DNA, 25 bp, Homo sapien
ttaaagaacatttatggtggcttta

SEQ ID NO: 3316477 - DNA, 25 bp, Homo sapien
cttgtattacatgtgagttgtcttt

SEQ ID NO: 3316478 - DNA, 25 bp, Homo sapien
gcagacatacatgcataagccaagg

SEQ ID NO: 3316479 - DNA, 25 bp, Homo sapien
gaagaagttatacaggtatttggga

SEQ ID NO: 3316480 - DNA, 25 bp, Homo sapien
ttgggaataaaagcagacatacatg

SEQ ID NO: 3316481 - DNA, 25 bp, Homo sapien
taggaatggagcacaaagtgagtca

SEQ ID NO: 3316482 - DNA, 25 bp, Homo sapien
tgaagtttagatataggaatggagc

SEQ ID NO: 3316483 - DNA, 25 bp, Homo sapien
tagatataggaatggagcacaaagt

SEQ ID NO: 3316484 - DNA, 25 bp, Homo sapien
cattattgaagtttagatataggaa

SEQ ID NO: 3316485 - DNA, 25 bp, Homo sapien
tgatgacagcgaggaatatccactt

SEQ ID NO: 3316486 - DNA, 25 bp, Homo sapien
gatcaggatgagacactacccaggc

SEQ ID NO: 3316487 - DNA, 25 bp, Homo sapien
cgcctaaattttgcatgaccttctg

SEQ ID NO: 3316488 - DNA, 25 bp, Homo sapien
tgaccttctggtgatgataacagtt

SEQ ID NO: 3316489 - DNA, 25 bp, Homo sapien
ttgtctatctgtaggaattggagtg

SEQ ID NO: 3316490 - DNA, 25 bp, Homo sapien
tctatctgtaggaattggagtgtct

SEQ ID NO: 3316491 - DNA, 25 bp, Homo sapien
catcgtacttggcatgaatagctcc

SEQ ID NO: 3316492 - DNA, 25 bp, Homo sapien
tctttatcaattgcatcgtacttgg

SEQ ID NO: 3316493 - DNA, 25 bp, Homo sapien
gcagcccaggttaaacctctcataa

SEQ ID NO: 3316494 - DNA, 25 bp, Homo sapien
cagcccaggttaaacctctcataag

SEQ ID NO: 3316495 - DNA, 25 bp, Homo sapien
ataagaggaggaatgtcaactcttg

SEQ ID NO: 3316496 - DNA, 25 bp, Homo sapien
cagcctgtcgaagagaataattcta

SEQ ID NO: 3316497 - DNA, 25 bp, Homo sapien
tctatttagttggtactctgtatcc

SEQ ID NO: 3316498 - DNA, 25 bp, Homo sapien
tctgatgattaaagggagcgtggca

SEQ ID NO: 3316499 - DNA, 25 bp, Homo sapien
gcagctgcagacaactcattattgc

SEQ ID NO: 3316500 - DNA, 25 bp, Homo sapien
catcttcaagtaatgggtaaaatgc

SEQ ID NO: 3316501 - DNA, 25 bp, Homo sapien
atcttcaagtaatgggtaaaatgct

SEQ ID NO: 3316502 - DNA, 25 bp, Homo sapien
tctgctgttcaacttccaacttgaa

SEQ ID NO: 3316503 - DNA, 25 bp, Homo sapien
tgctgttcaacttccaacttgaagg

SEQ ID NO: 3316504 - DNA, 25 bp, Homo sapien
gctctgctgttcaacttccaacttg

SEQ ID NO: 3316505 - DNA, 25 bp, Homo sapien
tgctgctctgctgttcaacttccaa

SEQ ID NO: 3316506 - DNA, 25 bp, Homo sapien
taaaaccaggcctagagagaaagta

SEQ ID NO: 3316507 - DNA, 25 bp, Homo sapien
tgttgctggcattatggcagacaag

SEQ ID NO: 3316508 - DNA, 25 bp, Homo sapien
gggaacctacataacagaccttcag

SEQ ID NO: 3316509 - DNA, 25 bp, Homo sapien
gagaagacccttctaaagccacgta

SEQ ID NO: 3316510 - DNA, 25 bp, Homo sapien
tttcagctttggctatgaatggtta

SEQ ID NO: 3316511 - DNA, 25 bp, Homo sapien
atttcagctttggctatgaatggtt

SEQ ID NO: 3316512 - DNA, 25 bp, Homo sapien
ttcagctttggctatgaatggttaa

SEQ ID NO: 3316513 - DNA, 25 bp, Homo sapien
tcagctttggctatgaatggttaaa

SEQ ID NO: 3316514 - DNA, 25 bp, Homo sapien
gcttctatctcgaccttgtccaaag

SEQ ID NO: 3316515 - DNA, 25 bp, Homo sapien
ctggcataacgacaatgtcacagtg

SEQ ID NO: 3316516 - DNA, 25 bp, Homo sapien
tcttagctggcataacgacaatgtc

SEQ ID NO: 3316517 - DNA, 25 bp, Homo sapien
cacagtggtatcatctaaaagcgag

SEQ ID NO: 3316518 - DNA, 25 bp, Homo sapien
cagccaaacaccaaaggtaatacac

SEQ ID NO: 3316519 - DNA, 25 bp, Homo sapien
agtgtgcagataggtggtttggatc

SEQ ID NO: 3316520 - DNA, 25 bp, Homo sapien
ggtttggatcgaatgatttccttgt

SEQ ID NO: 3316521 - DNA, 25 bp, Homo sapien
cttcaatagatctttctgccaggta

SEQ ID NO: 3316522 - DNA, 25 bp, Homo sapien
gatacctcactgaatactttgtcct

SEQ ID NO: 3316523 - DNA, 25 bp, Homo sapien
gaaaacagactggcaggtttggtaa

SEQ ID NO: 3316524 - DNA, 25 bp, Homo sapien
ctttacacaactgactgatatcctc

SEQ ID NO: 3316525 - DNA, 25 bp, Homo sapien
agagttaaatcagcacatctcagag

SEQ ID NO: 3316526 - DNA, 25 bp, Homo sapien
tttaccctgactagcattcacctgc

SEQ ID NO: 3316527 - DNA, 25 bp, Homo sapien
tagtagtgacatcatcaagtcaaag

SEQ ID NO: 3316528 - DNA, 25 bp, Homo sapien
ggatagctgtatgactagtagtgac

SEQ ID NO: 3316529 - DNA, 25 bp, Homo sapien
tcttcctgtcctttaatgtggtaca

SEQ ID NO: 3316530 - DNA, 25 bp, Homo sapien
tagtttatcacaccactgatccaag

SEQ ID NO: 3316531 - DNA, 25 bp, Homo sapien
tcacaccactgatccaagttcattg

SEQ ID NO: 3316532 - DNA, 25 bp, Homo sapien
ccactgatccaagttcattgctata

SEQ ID NO: 3316533 - DNA, 25 bp, Homo sapien
caattgttagtttatcacaccactg

SEQ ID NO: 3316534 - DNA, 25 bp, Homo sapien
gcgtaaaggatctcaatgtaatccc

SEQ ID NO: 3316535 - DNA, 25 bp, Homo sapien
aaaccaattgcttatgcgtaaagga

SEQ ID NO: 3316536 - DNA, 25 bp, Homo sapien
ttagtgtatgtcagttttctgaccg

SEQ ID NO: 3316537 - DNA, 25 bp, Homo sapien
tattattgggtctaggaatacctac

SEQ ID NO: 3316538 - DNA, 25 bp, Homo sapien
ggtaaggcacttattcaaaagatct

SEQ ID NO: 3316539 - DNA, 25 bp, Homo sapien
agaaggatggaaggtaaggcactta

SEQ ID NO: 3316540 - DNA, 25 bp, Homo sapien
gatggaaggtaaggcacttattcaa

SEQ ID NO: 3316541 - DNA, 25 bp, Homo sapien
gaaggtaaggcacttattcaaaaga

SEQ ID NO: 3316542 - DNA, 25 bp, Homo sapien
gaactattaaagtgtcatctacaca

SEQ ID NO: 3316543 - DNA, 25 bp, Homo sapien
tgtccaaacaaccatgctcttcagc

SEQ ID NO: 3316544 - DNA, 25 bp, Homo sapien
gccagaactattaaagtgtcatcta

SEQ ID NO: 3316545 - DNA, 25 bp, Homo sapien
atgtccaaacaaccatgctcttcag

SEQ ID NO: 3316546 - DNA, 25 bp, Homo sapien
taagcaaaaattttagtctttcaga

SEQ ID NO: 3316547 - DNA, 25 bp, Homo sapien
tgattccaagagaccatacatctga

SEQ ID NO: 3316548 - DNA, 25 bp, Homo sapien
aaatgattccaagagaccatacatc

SEQ ID NO: 3316549 - DNA, 25 bp, Homo sapien
caagagaccatacatctgatttggg

SEQ ID NO: 3316550 - DNA, 25 bp, Homo sapien
tacatctgatttggggccagaaggc

SEQ ID NO: 3316551 - DNA, 25 bp, Homo sapien
tgatcagtggttttgaaaattccct

SEQ ID NO: 3316552 - DNA, 25 bp, Homo sapien
tggcatgtgatcagtggttttgaaa

SEQ ID NO: 3316553 - DNA, 25 bp, Homo sapien
ttggcatgtgatcagtggttttgaa

SEQ ID NO: 3316554 - DNA, 25 bp, Homo sapien
ctcaggggccaagtacgagggatac

SEQ ID NO: 3316555 - DNA, 25 bp, Homo sapien
tctgcctggcatgtacaaaaattca

SEQ ID NO: 3316556 - DNA, 25 bp, Homo sapien
tagcctcagcagttaggcatccatg

SEQ ID NO: 3316557 - DNA, 25 bp, Homo sapien
tacaagcacagtaaactagcctcag

SEQ ID NO: 3316558 - DNA, 25 bp, Homo sapien
caagggcaaacattgctagcaggac

SEQ ID NO: 3316559 - DNA, 25 bp, Homo sapien
tctttgggaaaatgcaggctctttg

SEQ ID NO: 3316560 - DNA, 25 bp, Homo sapien
tgccaagtatcttctctttcacata

SEQ ID NO: 3316561 - DNA, 25 bp, Homo sapien
ctctttgggaaaatgcaggctcttt

SEQ ID NO: 3316562 - DNA, 25 bp, Homo sapien
ttgccaagtatcttctctttcacat

SEQ ID NO: 3316563 - DNA, 25 bp, Homo sapien
tagacatttccgagcctacagctgc

SEQ ID NO: 3316564 - DNA, 25 bp, Homo sapien
taggctccgtgaagtgacagcccca

SEQ ID NO: 3316565 - DNA, 25 bp, Homo sapien
ttaggcagctgcaactgtgcccggg

SEQ ID NO: 3316566 - DNA, 25 bp, Homo sapien
tggtgtccgaagtccacagggagtc

SEQ ID NO: 3316567 - DNA, 25 bp, Homo sapien
catgagctgtcatgtgataaagtcc

SEQ ID NO: 3316568 - DNA, 25 bp, Homo sapien
cctattgggaaatcaacatcatcac

SEQ ID NO: 3316569 - DNA, 25 bp, Homo sapien
tcaccatgagctgtcatgtgataaa

SEQ ID NO: 3316570 - DNA, 25 bp, Homo sapien
tccaaatttagccaatttaatatgt

SEQ ID NO: 3316571 - DNA, 25 bp, Homo sapien
tgccctgtgtactataccatgtttg

SEQ ID NO: 3316572 - DNA, 25 bp, Homo sapien
ggatattatgaggagacaatgccct

SEQ ID NO: 3316573 - DNA, 25 bp, Homo sapien
accatgtttgttcatatactgcaag

SEQ ID NO: 3316574 - DNA, 25 bp, Homo sapien
ctttcggtccaacaggatattatga

SEQ ID NO: 3316575 - DNA, 25 bp, Homo sapien
catgagttccaataaacaggtgaga

SEQ ID NO: 3316576 - DNA, 25 bp, Homo sapien
gctcttgacgcctttggtaaaaatg

SEQ ID NO: 3316577 - DNA, 25 bp, Homo sapien
ccagactgatgtcctagtagagagt

SEQ ID NO: 3316578 - DNA, 25 bp, Homo sapien
caacaaatatgggagtgaagatacc

SEQ ID NO: 3316579 - DNA, 25 bp, Homo sapien
gagttttgcatcaatgattttcagg

SEQ ID NO: 3316580 - DNA, 25 bp, Homo sapien
gtttttcaccatgaagggttgtgga

SEQ ID NO: 3316581 - DNA, 25 bp, Homo sapien
cttatctaattgttctagctaggac

SEQ ID NO: 3316582 - DNA, 25 bp, Homo sapien
atgctattaatagctgtgggcctgt

SEQ ID NO: 3316583 - DNA, 25 bp, Homo sapien
aaacatacaatcttggcagagggaa

SEQ ID NO: 3316584 - DNA, 25 bp, Homo sapien
cccttttaatactgctttggctgta

SEQ ID NO: 3316585 - DNA, 25 bp, Homo sapien
acatacaatcttggcagagggaatc

SEQ ID NO: 3316586 - DNA, 25 bp, Homo sapien
atacaatcttggcagagggaatctc

SEQ ID NO: 3316587 - DNA, 25 bp, Homo sapien
catcaaagtcttcacgtataacttc

SEQ ID NO: 3316588 - DNA, 25 bp, Homo sapien
gcttcccatcaaagtcttcacgtat

SEQ ID NO: 3316589 - DNA, 25 bp, Homo sapien
cccatcaaagtcttcacgtataact

SEQ ID NO: 3316590 - DNA, 25 bp, Homo sapien
ttcccatcaaagtcttcacgtataa

SEQ ID NO: 3316591 - DNA, 25 bp, Homo sapien
aaagatgaacactggactatgttaa

SEQ ID NO: 3316592 - DNA, 25 bp, Homo sapien
ttttctcaagtgaaaatttgcacct

SEQ ID NO: 3316593 - DNA, 25 bp, Homo sapien
ttctcaagtgaaaatttgcacctac

SEQ ID NO: 3316594 - DNA, 25 bp, Homo sapien
ctggactatgttaatgttgaattca

SEQ ID NO: 3316595 - DNA, 25 bp, Homo sapien
taattgttctgatactatacagtac

SEQ ID NO: 3316596 - DNA, 25 bp, Homo sapien
tttaattgttctgatactatacagt

SEQ ID NO: 3316597 - DNA, 25 bp, Homo sapien
ttaattgttctgatactatacagta

SEQ ID NO: 3316598 - DNA, 25 bp, Homo sapien
catttaattgttctgatactataca

SEQ ID NO: 3316599 - DNA, 25 bp, Homo sapien
gttcacaatgttcagccacgaccac

SEQ ID NO: 3316600 - DNA, 25 bp, Homo sapien
agtcttccagactacgttcacaatg

SEQ ID NO: 3316601 - DNA, 25 bp, Homo sapien
caagtcttccagactacgttcacaa

SEQ ID NO: 3316602 - DNA, 25 bp, Homo sapien
tgttcagccacgaccactagtcgtt

SEQ ID NO: 3316603 - DNA, 25 bp, Homo sapien
tacatacgtcaggaaaaataggtgg

SEQ ID NO: 3316604 - DNA, 25 bp, Homo sapien
caaagcaaacccatgttatatttta

SEQ ID NO: 3316605 - DNA, 25 bp, Homo sapien
tctggttttaaacacagacctttga

SEQ ID NO: 3316606 - DNA, 25 bp, Homo sapien
ggtacagattgcttgacactctggt

SEQ ID NO: 3316607 - DNA, 25 bp, Homo sapien
tttctgtctaagcagaacataaatc

SEQ ID NO: 3316608 - DNA, 25 bp, Homo sapien
gagtgaaggcaattagctctcttct

SEQ ID NO: 3316609 - DNA, 25 bp, Homo sapien
tttgagtgaaggcaattagctctct

SEQ ID NO: 3316610 - DNA, 25 bp, Homo sapien
ggattttgagtgaaggcaattagct

SEQ ID NO: 3316611 - DNA, 25 bp, Homo sapien
cattgctctgtggtctaaagtcctt

SEQ ID NO: 3316612 - DNA, 25 bp, Homo sapien
gattcctgggacctaccattaagca

SEQ ID NO: 3316613 - DNA, 25 bp, Homo sapien
ccattaagcatcagagagtagagaa

SEQ ID NO: 3316614 - DNA, 25 bp, Homo sapien
tgtcaacaataaaaggccaacatct

SEQ ID NO: 3316615 - DNA, 25 bp, Homo sapien
tgaaagcgccctaaaattttgatgg

SEQ ID NO: 3316616 - DNA, 25 bp, Homo sapien
tctgggatgggtgatggttttaagg

SEQ ID NO: 3316617 - DNA, 25 bp, Homo sapien
cacaaacatcatgtggcagagccga

SEQ ID NO: 3316618 - DNA, 25 bp, Homo sapien
tggtgtgagaggaagtccattgctt

SEQ ID NO: 3316619 - DNA, 25 bp, Homo sapien
ttttggagtcctaggtcttctaaga

SEQ ID NO: 3316620 - DNA, 25 bp, Homo sapien
ggagtcctaggtcttctaagataat

SEQ ID NO: 3316621 - DNA, 25 bp, Homo sapien
tggagtcctaggtcttctaagataa

SEQ ID NO: 3316622 - DNA, 25 bp, Homo sapien
ttggagtcctaggtcttctaagata

SEQ ID NO: 3316623 - DNA, 25 bp, Homo sapien
ctcccgagtagaggcacccacgacc

SEQ ID NO: 3316624 - DNA, 25 bp, Homo sapien
ccgcgcactgcaacctctgcctccc

SEQ ID NO: 3316625 - DNA, 25 bp, Homo sapien
cagcctcccgagtagaggcacccac

SEQ ID NO: 3316626 - DNA, 25 bp, Homo sapien
gcctcccgagtagaggcacccacga

SEQ ID NO: 3316627 - DNA, 25 bp, Homo sapien
tttacccatggacctcactaagaag

SEQ ID NO: 3316628 - DNA, 25 bp, Homo sapien
gacattctactggtaaagccctgca

SEQ ID NO: 3316629 - DNA, 25 bp, Homo sapien
tccatgtgtatagcatgaggcgtcc

SEQ ID NO: 3316630 - DNA, 25 bp, Homo sapien
ccaaagttgcgtaaagtagtagcct

SEQ ID NO: 3316631 - DNA, 25 bp, Homo sapien
cccaggataggagcaatacaaaagg

SEQ ID NO: 3316632 - DNA, 25 bp, Homo sapien
taatctccttagtatggcacaggga

SEQ ID NO: 3316633 - DNA, 25 bp, Homo sapien
acagaggaatggaagcttgcttcta

SEQ ID NO: 3316634 - DNA, 25 bp, Homo sapien
aatataaagcatgctcaactacagc

SEQ ID NO: 3316635 - DNA, 25 bp, Homo sapien
gagacagtacctatcagcaagcggc

SEQ ID NO: 3316636 - DNA, 25 bp, Homo sapien
tacggttcccaaacgactcaggtga

SEQ ID NO: 3316637 - DNA, 25 bp, Homo sapien
ttgacgactgactaaacctcgaggg

SEQ ID NO: 3316638 - DNA, 25 bp, Homo sapien
gcaaaattctgcctccaaggtgagt

SEQ ID NO: 3316639 - DNA, 25 bp, Homo sapien
ttcaggtgctcctacaaaagaggcc

SEQ ID NO: 3316640 - DNA, 25 bp, Homo sapien
tgcaccagacgctgcatttcaggtg

SEQ ID NO: 3316641 - DNA, 25 bp, Homo sapien
cgagccaagtcagccaaggttaacc

SEQ ID NO: 3316642 - DNA, 25 bp, Homo sapien
tgccgctacggcttagtgcaccaga

SEQ ID NO: 3316643 - DNA, 25 bp, Homo sapien
cgcttcatgtgagtgacgtcgtggc

SEQ ID NO: 3316644 - DNA, 25 bp, Homo sapien
acccgtggtcctccgcttcatgtga

SEQ ID NO: 3316645 - DNA, 25 bp, Homo sapien
agtgacgtcgtggcgggtcactcac

SEQ ID NO: 3316646 - DNA, 25 bp, Homo sapien
gtggctgtctcggaacccgtggtcc

SEQ ID NO: 3316647 - DNA, 25 bp, Homo sapien
gggtagtccgttcgcagcaggacca

SEQ ID NO: 3316648 - DNA, 25 bp, Homo sapien
ctggcctgcgctgctaatgggtagt

SEQ ID NO: 3316649 - DNA, 25 bp, Homo sapien
ggagagaggacctggcctgcgctgc

SEQ ID NO: 3316650 - DNA, 25 bp, Homo sapien
ccgattgcgatcgtaggggtcttcc

SEQ ID NO: 3316651 - DNA, 25 bp, Homo sapien
ttatgtttgattcccaatgttgtca

SEQ ID NO: 3316652 - DNA, 25 bp, Homo sapien
tatgtttgattcccaatgttgtcat

SEQ ID NO: 3316653 - DNA, 25 bp, Homo sapien
cctttagagaaattatagctagagc

SEQ ID NO: 3316654 - DNA, 25 bp, Homo sapien
taaaagagctaactgcagcatcaga

SEQ ID NO: 3316655 - DNA, 25 bp, Homo sapien
aaagcatttagccagccatagcgca

SEQ ID NO: 3316656 - DNA, 25 bp, Homo sapien
tccagagacttaaactagcatttcc

SEQ ID NO: 3316657 - DNA, 25 bp, Homo sapien
ttgggagcagatccagcctgatctt

SEQ ID NO: 3316658 - DNA, 25 bp, Homo sapien
cactaatgatgagtgtgtggctaca

SEQ ID NO: 3316659 - DNA, 25 bp, Homo sapien
tacaaaggagttccctttgaggtga

SEQ ID NO: 3316660 - DNA, 25 bp, Homo sapien
tgtagggctcaaaccatgagcaaca

SEQ ID NO: 3316661 - DNA, 25 bp, Homo sapien
taatactgataatgaccaactgctc

SEQ ID NO: 3316662 - DNA, 25 bp, Homo sapien
aaactgagatttcctactggcttga

SEQ ID NO: 3316663 - DNA, 25 bp, Homo sapien
cataaaagctaggagaagtggcatc

SEQ ID NO: 3316664 - DNA, 25 bp, Homo sapien
gctttgctgccagagtaaccctgac

SEQ ID NO: 3316665 - DNA, 25 bp, Homo sapien
tgttgcaaattgctgtctcatggag

SEQ ID NO: 3316666 - DNA, 25 bp, Homo sapien
cttataactgggcattaaaatggcc

SEQ ID NO: 3316667 - DNA, 25 bp, Homo sapien
ggcaaattagtatgctcaacaggca

SEQ ID NO: 3316668 - DNA, 25 bp, Homo sapien
cctgattctaagtgctatccagcag

SEQ ID NO: 3316669 - DNA, 25 bp, Homo sapien
gaatagtgcgctgttattgagggca

SEQ ID NO: 3316670 - DNA, 25 bp, Homo sapien
gtgtaatgacagtccatcccaaaag

SEQ ID NO: 3316671 - DNA, 25 bp, Homo sapien
tgctggtagcagttgcctttttgaa

SEQ ID NO: 3316672 - DNA, 25 bp, Homo sapien
tagatgtcactaagttccatacaga

SEQ ID NO: 3316673 - DNA, 25 bp, Homo sapien
tgtgtaattcatccaagcatgtcca

SEQ ID NO: 3316674 - DNA, 25 bp, Homo sapien
tctgcatgggtaaaaagaatggctg

SEQ ID NO: 3316675 - DNA, 25 bp, Homo sapien
tttgtactggaaaacgtatttgtgc

SEQ ID NO: 3316676 - DNA, 25 bp, Homo sapien
tttagcagcgttttcagggtatcag

SEQ ID NO: 3316677 - DNA, 25 bp, Homo sapien
tatttgaaagtagtgttgcttgctg

SEQ ID NO: 3316678 - DNA, 25 bp, Homo sapien
taagtcgattttggccagaaaatag

SEQ ID NO: 3316679 - DNA, 25 bp, Homo sapien
tgaattactgccaaaaacagaagag

SEQ ID NO: 3316680 - DNA, 25 bp, Homo sapien
tagtcatcacgttagtggccaaaca

SEQ ID NO: 3316681 - DNA, 25 bp, Homo sapien
gctctgaattagcttttccgagctt

SEQ ID NO: 3316682 - DNA, 25 bp, Homo sapien
gctttttgtaaacacattcgtctgc

SEQ ID NO: 3316683 - DNA, 25 bp, Homo sapien
tctgcaacatcaacagctcggttgt

SEQ ID NO: 3316684 - DNA, 25 bp, Homo sapien
cagctcggttgttgatgatgaaata

SEQ ID NO: 3316685 - DNA, 25 bp, Homo sapien
taacctggagtgtccaacacctgga

SEQ ID NO: 3316686 - DNA, 25 bp, Homo sapien
gagtcatgccaaagagggccaagtt

SEQ ID NO: 3316687 - DNA, 25 bp, Homo sapien
tgcggcccaggctacaacatgtggt

SEQ ID NO: 3316688 - DNA, 25 bp, Homo sapien
cccttgcccgaagtgatgtgccaga

SEQ ID NO: 3316689 - DNA, 25 bp, Homo sapien
gctttctccacaaagacgtctctcg

SEQ ID NO: 3316690 - DNA, 25 bp, Homo sapien
atgctttctccacaaagacgtctct

SEQ ID NO: 3316691 - DNA, 25 bp, Homo sapien
aaagacgtctctcgccctggcacag

SEQ ID NO: 3316692 - DNA, 25 bp, Homo sapien
cacaaagacgtctctcgccctggca

SEQ ID NO: 3316693 - DNA, 25 bp, Homo sapien
ctccacggggatttagtatgctctt

SEQ ID NO: 3316694 - DNA, 25 bp, Homo sapien
gggatttagtatgctctttgcccgc

SEQ ID NO: 3316695 - DNA, 25 bp, Homo sapien
tagtatgctctttgcccgcagcatg

SEQ ID NO: 3316696 - DNA, 25 bp, Homo sapien
gatttagtatgctctttgcccgcag

SEQ ID NO: 3316697 - DNA, 25 bp, Homo sapien
gatagcctagatcagctgacagcca

SEQ ID NO: 3316698 - DNA, 25 bp, Homo sapien
gttgcctcaagctaggatagcctag

SEQ ID NO: 3316699 - DNA, 25 bp, Homo sapien
tatatgtctgtcattgccgtgagaa

SEQ ID NO: 3316700 - DNA, 25 bp, Homo sapien
gaagatcgtgatgaagtgtagtctc

SEQ ID NO: 3316701 - DNA, 25 bp, Homo sapien
ctgagaggtgccttggaagtttcca

SEQ ID NO: 3316702 - DNA, 25 bp, Homo sapien
tttccggaaattctgagaggtgcct

SEQ ID NO: 3316703 - DNA, 25 bp, Homo sapien
ttctgagaggtgccttggaagtttc

SEQ ID NO: 3316704 - DNA, 25 bp, Homo sapien
tccggaaattctgagaggtgccttg

SEQ ID NO: 3316705 - DNA, 25 bp, Homo sapien
gaatttctgttttccatctgctttt

SEQ ID NO: 3316706 - DNA, 25 bp, Homo sapien
ttctgttttccatctgcttttggca

SEQ ID NO: 3316707 - DNA, 25 bp, Homo sapien
atttctgttttccatctgcttttgg

SEQ ID NO: 3316708 - DNA, 25 bp, Homo sapien
ctgttttccatctgcttttggcaaa

SEQ ID NO: 3316709 - DNA, 25 bp, Homo sapien
caggcttactggtacaacactgagt

SEQ ID NO: 3316710 - DNA, 25 bp, Homo sapien
ccacaatcagttccagagttttgaa

SEQ ID NO: 3316711 - DNA, 25 bp, Homo sapien
caagagctggactttccacaatcag

SEQ ID NO: 3316712 - DNA, 25 bp, Homo sapien
gcttggttgaattgtcaggcttact

SEQ ID NO: 3316713 - DNA, 25 bp, Homo sapien
tggaccaaatcgtttctttctgtat

SEQ ID NO: 3316714 - DNA, 25 bp, Homo sapien
ggaccaaatcgtttctttctgtatc

SEQ ID NO: 3316715 - DNA, 25 bp, Homo sapien
tctggaccaaatcgtttctttctgt

SEQ ID NO: 3316716 - DNA, 25 bp, Homo sapien
ctggaccaaatcgtttctttctgta

SEQ ID NO: 3316717 - DNA, 25 bp, Homo sapien
caatgatgtctgatgaaggtacttg

SEQ ID NO: 3316718 - DNA, 25 bp, Homo sapien
gctccagggaggatatatccttggt

SEQ ID NO: 3316719 - DNA, 25 bp, Homo sapien
tggctccagggaggatatatccttg

SEQ ID NO: 3316720 - DNA, 25 bp, Homo sapien
atgatgtctgatgaaggtacttgtg

SEQ ID NO: 3316721 - DNA, 25 bp, Homo sapien
tcctaaggttcttattcagatgacc

SEQ ID NO: 3316722 - DNA, 25 bp, Homo sapien
gttcttattcagatgaccaatttca

SEQ ID NO: 3316723 - DNA, 25 bp, Homo sapien
cgtcagagcttttgggggcctaagt

SEQ ID NO: 3316724 - DNA, 25 bp, Homo sapien
aaaacctccccaggcgtcagagctt

SEQ ID NO: 3316725 - DNA, 25 bp, Homo sapien
tgaatcatggccaacaatctcaact

SEQ ID NO: 3316726 - DNA, 25 bp, Homo sapien
cttgagaattgtcttcataatgaag

SEQ ID NO: 3316727 - DNA, 25 bp, Homo sapien
gagagctgcttatgggatttaccta

SEQ ID NO: 3316728 - DNA, 25 bp, Homo sapien
cataatgaagattttgtctacttga

SEQ ID NO: 3316729 - DNA, 25 bp, Homo sapien
ttccagtgttttggcctgaactcaa

SEQ ID NO: 3316730 - DNA, 25 bp, Homo sapien
agtgatgaaaagtgaaggtttcacc

SEQ ID NO: 3316731 - DNA, 25 bp, Homo sapien
aaacactgtaaggtagtacataggc

SEQ ID NO: 3316732 - DNA, 25 bp, Homo sapien
tcttattatctaactctttcatttc

SEQ ID NO: 3316733 - DNA, 25 bp, Homo sapien
tgctcacactctcagtcggacttac

SEQ ID NO: 3316734 - DNA, 25 bp, Homo sapien
taagagggtccttacactcgcttgg

SEQ ID NO: 3316735 - DNA, 25 bp, Homo sapien
agcctgacgggtgtgacggaattca

SEQ ID NO: 3316736 - DNA, 25 bp, Homo sapien
gagacccggcacttgcacttctgag

SEQ ID NO: 3316737 - DNA, 25 bp, Homo sapien
ctgaaggcccataggtctgagatcc

SEQ ID NO: 3316738 - DNA, 25 bp, Homo sapien
ggacatttagaaagaccttgactat

SEQ ID NO: 3316739 - DNA, 25 bp, Homo sapien
gaggacatttagaaagaccttgact

SEQ ID NO: 3316740 - DNA, 25 bp, Homo sapien
gaaagaccttgactattctcttctg

SEQ ID NO: 3316741 - DNA, 25 bp, Homo sapien
tttagaaagaccttgactattctct

SEQ ID NO: 3316742 - DNA, 25 bp, Homo sapien
actgtattgctgcagactccctcac

SEQ ID NO: 3316743 - DNA, 25 bp, Homo sapien
taagccactgtattgctgcagactc

SEQ ID NO: 3316744 - DNA, 25 bp, Homo sapien
gccactgtattgctgcagactccct

SEQ ID NO: 3316745 - DNA, 25 bp, Homo sapien
tgtaagccactgtattgctgcagac

SEQ ID NO: 3316746 - DNA, 25 bp, Homo sapien
accacgtggcatggggcagacccga

SEQ ID NO: 3316747 - DNA, 25 bp, Homo sapien
tcaggatggttaccacgtggcatgg

SEQ ID NO: 3316748 - DNA, 25 bp, Homo sapien
cagacccgaaggctaaggccccttg

SEQ ID NO: 3316749 - DNA, 25 bp, Homo sapien
gctaaggccccttggttagatggct

SEQ ID NO: 3316750 - DNA, 25 bp, Homo sapien
ttttcaaaactctgacaactctgaa

SEQ ID NO: 3316751 - DNA, 25 bp, Homo sapien
gctcattttcaaaactctgacaact

SEQ ID NO: 3316752 - DNA, 25 bp, Homo sapien
aaaactctgacaactctgaaattta

SEQ ID NO: 3316753 - DNA, 25 bp, Homo sapien
actctgacaactctgaaatttaaac

SEQ ID NO: 3316754 - DNA, 25 bp, Homo sapien
ccctcagacaaatcggagaagcagg

SEQ ID NO: 3316755 - DNA, 25 bp, Homo sapien
caactttcccatacaatcccaggta

SEQ ID NO: 3316756 - DNA, 25 bp, Homo sapien
gaaggagaaagctatttgtctgagg

SEQ ID NO: 3316757 - DNA, 25 bp, Homo sapien
tctcaagcaggaatcccgtgtgacc

SEQ ID NO: 3316758 - DNA, 25 bp, Homo sapien
ttcttgctttttgtaaatatggtgg

SEQ ID NO: 3316759 - DNA, 25 bp, Homo sapien
catacactctcatttattcttgctt

SEQ ID NO: 3316760 - DNA, 25 bp, Homo sapien
tgtaaatatggtggttcctttccca

SEQ ID NO: 3316761 - DNA, 25 bp, Homo sapien
tgctttttgtaaatatggtggttcc

SEQ ID NO: 3316762 - DNA, 25 bp, Homo sapien
catgaaaaccataaggagatacctc

SEQ ID NO: 3316763 - DNA, 25 bp, Homo sapien
tctttacaaccacagaatgctaaaa

SEQ ID NO: 3316764 - DNA, 25 bp, Homo sapien
caaatcagttaaaaagtaggcagat

SEQ ID NO: 3316765 - DNA, 25 bp, Homo sapien
tacataacaaagtaaggatgatgaa

SEQ ID NO: 3316766 - DNA, 25 bp, Homo sapien
ggacccacattaaattcagtactgg

SEQ ID NO: 3316767 - DNA, 25 bp, Homo sapien
tcttggacccacattaaattcagta

SEQ ID NO: 3316768 - DNA, 25 bp, Homo sapien
gtgccaacttcttggacccacatta

SEQ ID NO: 3316769 - DNA, 25 bp, Homo sapien
cacattaaattcagtactggtttct

SEQ ID NO: 3316770 - DNA, 25 bp, Homo sapien
ggagtcacaacagctaaattgaaag

SEQ ID NO: 3316771 - DNA, 25 bp, Homo sapien
agcacatttacattgatgccggaag

SEQ ID NO: 3316772 - DNA, 25 bp, Homo sapien
cattgatgccggaagactggagtca

SEQ ID NO: 3316773 - DNA, 25 bp, Homo sapien
gactggagtcacaacagctaaattg

SEQ ID NO: 3316774 - DNA, 25 bp, Homo sapien
gacagcatatctctaggggtagaag

SEQ ID NO: 3316775 - DNA, 25 bp, Homo sapien
aggacagcatatctctaggggtaga

SEQ ID NO: 3316776 - DNA, 25 bp, Homo sapien
ctgggaggacagcatatctctaggg

SEQ ID NO: 3316777 - DNA, 25 bp, Homo sapien
cagcatatctctaggggtagaagat

SEQ ID NO: 3316778 - DNA, 25 bp, Homo sapien
cctcttgtttctggctcttcaaaac

SEQ ID NO: 3316779 - DNA, 25 bp, Homo sapien
tcttgtttctggctcttcaaaaccc

SEQ ID NO: 3316780 - DNA, 25 bp, Homo sapien
ttgtttctggctcttcaaaacccat

SEQ ID NO: 3316781 - DNA, 25 bp, Homo sapien
ttagtaattcctcctcttgtttctg

SEQ ID NO: 3316782 - DNA, 25 bp, Homo sapien
tctgactttagaagtggaacgtcct

SEQ ID NO: 3316783 - DNA, 25 bp, Homo sapien
ttctgactttagaagtggaacgtcc

SEQ ID NO: 3316784 - DNA, 25 bp, Homo sapien
cagaggcttgtatttcaggttggct

SEQ ID NO: 3316785 - DNA, 25 bp, Homo sapien
tctgcctcagaattaggccatccct

SEQ ID NO: 3316786 - DNA, 25 bp, Homo sapien
tgagtaatccgggaagttttccatc

SEQ ID NO: 3316787 - DNA, 25 bp, Homo sapien
ttaggccatccctcacgtagttcca

SEQ ID NO: 3316788 - DNA, 25 bp, Homo sapien
gcatccacagctttaccactattat

SEQ ID NO: 3316789 - DNA, 25 bp, Homo sapien
tcaggacgagggcagagaatcattt

SEQ ID NO: 3316790 - DNA, 25 bp, Homo sapien
tctggtcaagagaagaactgccaag

SEQ ID NO: 3316791 - DNA, 25 bp, Homo sapien
caactgagcccatattcaggacgag

SEQ ID NO: 3316792 - DNA, 25 bp, Homo sapien
caagaatagacaattgcacgagcct

SEQ ID NO: 3316793 - DNA, 25 bp, Homo sapien
caaaaaggtcactaactgaaacagc

SEQ ID NO: 3316794 - DNA, 25 bp, Homo sapien
gaaacagctatgaagggttctttgt

SEQ ID NO: 3316795 - DNA, 25 bp, Homo sapien
gaagggttctttgttcagctgaagc

SEQ ID NO: 3316796 - DNA, 25 bp, Homo sapien
catggtctatatggtcaaagccttg

SEQ ID NO: 3316797 - DNA, 25 bp, Homo sapien
tcattcttctttatgacacttaatt

SEQ ID NO: 3316798 - DNA, 25 bp, Homo sapien
cattcttctttatgacacttaattc

SEQ ID NO: 3316799 - DNA, 25 bp, Homo sapien
ttcaacttttcagcattaggactgc

SEQ ID NO: 3316800 - DNA, 25 bp, Homo sapien
tcacatactgaacgcagactttcaa

SEQ ID NO: 3316801 - DNA, 25 bp, Homo sapien
tataaagaaagatctatctggattc

SEQ ID NO: 3316802 - DNA, 25 bp, Homo sapien
tgcctgggctacatgaataatcaca

SEQ ID NO: 3316803 - DNA, 25 bp, Homo sapien
atgtgataatgctggacctaggaag

SEQ ID NO: 3316804 - DNA, 25 bp, Homo sapien
taatttgtggtctatataatcctga

SEQ ID NO: 3316805 - DNA, 25 bp, Homo sapien
agataatttgtggtctatataatcc

SEQ ID NO: 3316806 - DNA, 25 bp, Homo sapien
ataatgtgataatgctggacctagg

SEQ ID NO: 3316807 - DNA, 25 bp, Homo sapien
ccaggacaccaatgcaggctttcct

SEQ ID NO: 3316808 - DNA, 25 bp, Homo sapien
caatagctcagtactaatctggtcg

SEQ ID NO: 3316809 - DNA, 25 bp, Homo sapien
gctgtgccacgaagactctcactgc

SEQ ID NO: 3316810 - DNA, 25 bp, Homo sapien
tctggtcgatgagcatttcttcccc

SEQ ID NO: 3316811 - DNA, 25 bp, Homo sapien
tcattgttgatatggtacttgtcca

SEQ ID NO: 3316812 - DNA, 25 bp, Homo sapien
gcttctgatgtggaatacaaacatg

SEQ ID NO: 3316813 - DNA, 25 bp, Homo sapien
gatcatcaacaattaaaaccgtcag

SEQ ID NO: 3316814 - DNA, 25 bp, Homo sapien
aaaaccgtcagtgcataatcagtgg

SEQ ID NO: 3316815 - DNA, 25 bp, Homo sapien
tgtgatcctggcagttcctgtaggc

SEQ ID NO: 3316816 - DNA, 25 bp, Homo sapien
gtgatcctggcagttcctgtaggca

SEQ ID NO: 3316817 - DNA, 25 bp, Homo sapien
tgatcctggcagttcctgtaggcat

SEQ ID NO: 3316818 - DNA, 25 bp, Homo sapien
cccactccttgcaccagcttcctcg

SEQ ID NO: 3316819 - DNA, 25 bp, Homo sapien
ccactccttgcaccagcttcctcgc

SEQ ID NO: 3316820 - DNA, 25 bp, Homo sapien
tcccactccttgcaccagcttcctc

SEQ ID NO: 3316821 - DNA, 25 bp, Homo sapien
cactccttgcaccagcttcctcgcc

SEQ ID NO: 3316822 - DNA, 25 bp, Homo sapien
gaaaatgtgaccagtaagatggcta

SEQ ID NO: 3316823 - DNA, 25 bp, Homo sapien
taaaggacttactctcaggaatagt

SEQ ID NO: 3316824 - DNA, 25 bp, Homo sapien
gaaacatcatattccgtcagagtga

SEQ ID NO: 3316825 - DNA, 25 bp, Homo sapien
cagtcaagacgtttattcagagagc

SEQ ID NO: 3316826 - DNA, 25 bp, Homo sapien
catgcatttacaagtcagtgaaatg

SEQ ID NO: 3316827 - DNA, 25 bp, Homo sapien
aatgatgggatgctgaagcattgat

SEQ ID NO: 3316828 - DNA, 25 bp, Homo sapien
gaagcattgataaacaggctcctct

SEQ ID NO: 3316829 - DNA, 25 bp, Homo sapien
gataaacaggctcctctatctcact

SEQ ID NO: 3316830 - DNA, 25 bp, Homo sapien
gaaggatgtcaacttttgataatag

SEQ ID NO: 3316831 - DNA, 25 bp, Homo sapien
gtcaacttttgataatagcctagtc

SEQ ID NO: 3316832 - DNA, 25 bp, Homo sapien
cttggataaagaaggatgtcaactt

SEQ ID NO: 3316833 - DNA, 25 bp, Homo sapien
gatgtcaacttttgataatagccta

SEQ ID NO: 3316834 - DNA, 25 bp, Homo sapien
tgatgttgagatccttcttacacat

SEQ ID NO: 3316835 - DNA, 25 bp, Homo sapien
tgccttgatgttgagatccttctta

SEQ ID NO: 3316836 - DNA, 25 bp, Homo sapien
ccttgatgttgagatccttcttaca

SEQ ID NO: 3316837 - DNA, 25 bp, Homo sapien
ctgccttgatgttgagatccttctt

SEQ ID NO: 3316838 - DNA, 25 bp, Homo sapien
ctgtggtaattcagcatgccagaag

SEQ ID NO: 3316839 - DNA, 25 bp, Homo sapien
atatgtcctaaagccactctgtggt

SEQ ID NO: 3316840 - DNA, 25 bp, Homo sapien
ggcccaagaattcaattccactagt

SEQ ID NO: 3316841 - DNA, 25 bp, Homo sapien
cactagtctctccatatgtcctaaa

SEQ ID NO: 3316842 - DNA, 25 bp, Homo sapien
aacccagtggttcagggcctattgt

SEQ ID NO: 3316843 - DNA, 25 bp, Homo sapien
tagatccatgttcactagggagctc

SEQ ID NO: 3316844 - DNA, 25 bp, Homo sapien
tgaggacagaagttaaacaggcatc

SEQ ID NO: 3316845 - DNA, 25 bp, Homo sapien
gagctcttgatcagctagcagcagg

SEQ ID NO: 3316846 - DNA, 25 bp, Homo sapien
cacatggatgccctcttaaccacag

SEQ ID NO: 3316847 - DNA, 25 bp, Homo sapien
ccccacatggatgccctcttaacca

SEQ ID NO: 3316848 - DNA, 25 bp, Homo sapien
catggatgccctcttaaccacagtt

SEQ ID NO: 3316849 - DNA, 25 bp, Homo sapien
tggatgccctcttaaccacagttgg

SEQ ID NO: 3316850 - DNA, 25 bp, Homo sapien
aactttttaccatcacatcatcaga

SEQ ID NO: 3316851 - DNA, 25 bp, Homo sapien
tttcagtccctctggtcaatattgg

SEQ ID NO: 3316852 - DNA, 25 bp, Homo sapien
gagtttcagtccctctggtcaatat

SEQ ID NO: 3316853 - DNA, 25 bp, Homo sapien
ttttaccatcacatcatcagaatga

SEQ ID NO: 3316854 - DNA, 25 bp, Homo sapien
ttgaggatagtacggacacaggacc

SEQ ID NO: 3316855 - DNA, 25 bp, Homo sapien
tagactgtgcatcccctggtttcaa

SEQ ID NO: 3316856 - DNA, 25 bp, Homo sapien
ggctcaaactcaatctctactggga

SEQ ID NO: 3316857 - DNA, 25 bp, Homo sapien
gatgaacagccaacttgtgcctcag

SEQ ID NO: 3316858 - DNA, 25 bp, Homo sapien
tcaatgcagtctgatgatcgtaggc

SEQ ID NO: 3316859 - DNA, 25 bp, Homo sapien
cccctgatggagcactggtttgcag

SEQ ID NO: 3316860 - DNA, 25 bp, Homo sapien
tgagaacccttcttgcgttgtttgg

SEQ ID NO: 3316861 - DNA, 25 bp, Homo sapien
catactttgcaagacaggcccttcg

SEQ ID NO: 3316862 - DNA, 25 bp, Homo sapien
tagatgttaccctgacacttcagaa

SEQ ID NO: 3316863 - DNA, 25 bp, Homo sapien
cagagatgatgaccaatagatgtta

SEQ ID NO: 3316864 - DNA, 25 bp, Homo sapien
taacaagtttaatgactagctagga

SEQ ID NO: 3316865 - DNA, 25 bp, Homo sapien
tggttgataccaattggctctgcct

SEQ ID NO: 3316866 - DNA, 25 bp, Homo sapien
accccagaactacagatatccctac

SEQ ID NO: 3316867 - DNA, 25 bp, Homo sapien
aaaccccagaactacagatatccct

SEQ ID NO: 3316868 - DNA, 25 bp, Homo sapien
aaccccagaactacagatatcccta

SEQ ID NO: 3316869 - DNA, 25 bp, Homo sapien
cgagtaccatccagagccgggatgt

SEQ ID NO: 3316870 - DNA, 25 bp, Homo sapien
gtttcgatctctgtgccgagtacca

SEQ ID NO: 3316871 - DNA, 25 bp, Homo sapien
gacatcttagtgtgtggtcttccta

SEQ ID NO: 3316872 - DNA, 25 bp, Homo sapien
gccatcccaagtcatggtttgagta

SEQ ID NO: 3316873 - DNA, 25 bp, Homo sapien
catgcaggccgatgatccttggtgg

SEQ ID NO: 3316874 - DNA, 25 bp, Homo sapien
tttttctccgacacaccatgcaggc

SEQ ID NO: 3316875 - DNA, 25 bp, Homo sapien
ccatctcggtggcagcgcttctttt

SEQ ID NO: 3316876 - DNA, 25 bp, Homo sapien
ggactgtggcaatacctcccaactt

SEQ ID NO: 3316877 - DNA, 25 bp, Homo sapien
cctttgtccctacaagcactgtttg

SEQ ID NO: 3316878 - DNA, 25 bp, Homo sapien
ggatggccacccatctggattcttg

SEQ ID NO: 3316879 - DNA, 25 bp, Homo sapien
tggattcttgcaagaccgtcctcgt

SEQ ID NO: 3316880 - DNA, 25 bp, Homo sapien
tgtttgtaacaatctcggaagcttt

SEQ ID NO: 3316881 - DNA, 25 bp, Homo sapien
ctaggggataagggtgtactggatg

SEQ ID NO: 3316882 - DNA, 25 bp, Homo sapien
ctctaggggataagggtgtactgga

SEQ ID NO: 3316883 - DNA, 25 bp, Homo sapien
tctaggggataagggtgtactggat

SEQ ID NO: 3316884 - DNA, 25 bp, Homo sapien
ctggctcttgattgtttttgtttgt

SEQ ID NO: 3316885 - DNA, 25 bp, Homo sapien
tggctcttgattgtttttgtttgtt

SEQ ID NO: 3316886 - DNA, 25 bp, Homo sapien
aaagtctcctcctgctaacagacgc

SEQ ID NO: 3316887 - DNA, 25 bp, Homo sapien
gccaaaagtctcctcctgctaacag

SEQ ID NO: 3316888 - DNA, 25 bp, Homo sapien
cagccaaaagtctcctcctgctaac

SEQ ID NO: 3316889 - DNA, 25 bp, Homo sapien
aaaagtctcctcctgctaacagacg

SEQ ID NO: 3316890 - DNA, 25 bp, Homo sapien
aagtgaagtccagtgcaatgagtgc

SEQ ID NO: 3316891 - DNA, 25 bp, Homo sapien
aaacaacactgtctaatgggccaag

SEQ ID NO: 3316892 - DNA, 25 bp, Homo sapien
taagtctccaatccaagggtcaacg

SEQ ID NO: 3316893 - DNA, 25 bp, Homo sapien
taagtcacagtcagatgcaggagga

SEQ ID NO: 3316894 - DNA, 25 bp, Homo sapien
tcatatttggcctacaccatcagct

SEQ ID NO: 3316895 - DNA, 25 bp, Homo sapien
gattccctgatcattttgcacctgg

SEQ ID NO: 3316896 - DNA, 25 bp, Homo sapien
tccatactccgaactccagtgacag

SEQ ID NO: 3316897 - DNA, 25 bp, Homo sapien
tattctgtcttttgcgtcactcctt

SEQ ID NO: 3316898 - DNA, 25 bp, Homo sapien
gtctctggaataggaacacttcttc

SEQ ID NO: 3316899 - DNA, 25 bp, Homo sapien
ggtctctggaataggaacacttctt

SEQ ID NO: 3316900 - DNA, 25 bp, Homo sapien
tctctggaataggaacacttcttca

SEQ ID NO: 3316901 - DNA, 25 bp, Homo sapien
ctctggaataggaacacttcttcat

SEQ ID NO: 3316902 - DNA, 25 bp, Homo sapien
gattgctgacagattgaattgctgg

SEQ ID NO: 3316903 - DNA, 25 bp, Homo sapien
caatttccattacaactaacaggta

SEQ ID NO: 3316904 - DNA, 25 bp, Homo sapien
tacgttggctacttggattgctgac

SEQ ID NO: 3316905 - DNA, 25 bp, Homo sapien
tcattgccataatatccacgaagac

SEQ ID NO: 3316906 - DNA, 25 bp, Homo sapien
ttttggttagaaaggatatgactac

SEQ ID NO: 3316907 - DNA, 25 bp, Homo sapien
tttttggttagaaaggatatgacta

SEQ ID NO: 3316908 - DNA, 25 bp, Homo sapien
tttggttagaaaggatatgactaca

SEQ ID NO: 3316909 - DNA, 25 bp, Homo sapien
tttggtatataatgacttttccatc

SEQ ID NO: 3316910 - DNA, 25 bp, Homo sapien
aagaaatcttcaatttcaaaaccat

SEQ ID NO: 3316911 - DNA, 25 bp, Homo sapien
aattttttgcactttggtatataat

SEQ ID NO: 3316912 - DNA, 25 bp, Homo sapien
gcactttggtatataatgacttttc

SEQ ID NO: 3316913 - DNA, 25 bp, Homo sapien
tggtctctaatttgcaccccagaag

SEQ ID NO: 3316914 - DNA, 25 bp, Homo sapien
cacttgcaggaaaccaactactaga

SEQ ID NO: 3316915 - DNA, 25 bp, Homo sapien
tggatgctctggacaagactggtct

SEQ ID NO: 3316916 - DNA, 25 bp, Homo sapien
tgtgtgtgccaactatactgaggaa

SEQ ID NO: 3316917 - DNA, 25 bp, Homo sapien
aattccacagatggtagttgtgccc

SEQ ID NO: 3316918 - DNA, 25 bp, Homo sapien
gagcaagattaccacggcagcaaca

SEQ ID NO: 3316919 - DNA, 25 bp, Homo sapien
tatacaccagatgtctgaacttgca

SEQ ID NO: 3316920 - DNA, 25 bp, Homo sapien
gggtccagcgtcatcacatcacata

SEQ ID NO: 3316921 - DNA, 25 bp, Homo sapien
ctgtagtaagttcttgtccacttta

SEQ ID NO: 3316922 - DNA, 25 bp, Homo sapien
ttcttgtccactttactgacatctc

SEQ ID NO: 3316923 - DNA, 25 bp, Homo sapien
tagtaagttcttgtccactttactg

SEQ ID NO: 3316924 - DNA, 25 bp, Homo sapien
taagttcttgtccactttactgaca

SEQ ID NO: 3316925 - DNA, 25 bp, Homo sapien
aaagagtgagcccttgtgtatgggt

SEQ ID NO: 3316926 - DNA, 25 bp, Homo sapien
caaaacctatagaatgcacaacaca

SEQ ID NO: 3316927 - DNA, 25 bp, Homo sapien
tacaactgcatgacatcctggatga

SEQ ID NO: 3316928 - DNA, 25 bp, Homo sapien
tcctggatgagacaaaactagatac

SEQ ID NO: 3316929 - DNA, 25 bp, Homo sapien
aatacatgttagagtagcaattctg

SEQ ID NO: 3316930 - DNA, 25 bp, Homo sapien
caggggttgtggaatacatgttaga

SEQ ID NO: 3316931 - DNA, 25 bp, Homo sapien
tctgttgtgcagattcaggggttgt

SEQ ID NO: 3316932 - DNA, 25 bp, Homo sapien
atctaaactattattcaggttccca

SEQ ID NO: 3316933 - DNA, 25 bp, Homo sapien
ttgacacttgtgttgtgcgaggtgc

SEQ ID NO: 3316934 - DNA, 25 bp, Homo sapien
cgagagcgcgcaaaacagcagcatc

SEQ ID NO: 3316935 - DNA, 25 bp, Homo sapien
cgaggtgcgtgtgccattggtaaaa

SEQ ID NO: 3316936 - DNA, 25 bp, Homo sapien
cagcagcatcagtcggttccaagga

SEQ ID NO: 3316937 - DNA, 25 bp, Homo sapien
gcctcttctgtctgaagaatgtgtt

SEQ ID NO: 3316938 - DNA, 25 bp, Homo sapien
cttctgtctgaagaatgtgtttggg

SEQ ID NO: 3316939 - DNA, 25 bp, Homo sapien
ctagcccaagagagctggcccctgc

SEQ ID NO: 3316940 - DNA, 25 bp, Homo sapien
agagagctggcccctgcctcttctg

SEQ ID NO: 3316941 - DNA, 25 bp, Homo sapien
aatgccagtccttggtacatgcccg

SEQ ID NO: 3316942 - DNA, 25 bp, Homo sapien
ttggcccgcgaactgccgatctgtg

SEQ ID NO: 3316943 - DNA, 25 bp, Homo sapien
cttgatggagttgagtttggcccgc

SEQ ID NO: 3316944 - DNA, 25 bp, Homo sapien
tacatgcccgcagatcgattggcgg

SEQ ID NO: 3316945 - DNA, 25 bp, Homo sapien
gactcacaagagacagcgaatcgct

SEQ ID NO: 3316946 - DNA, 25 bp, Homo sapien
tcaggacagaaattagcggaaccca

SEQ ID NO: 3316947 - DNA, 25 bp, Homo sapien
tcttaattgatcaggaggcccgcat

SEQ ID NO: 3316948 - DNA, 25 bp, Homo sapien
tggaagcaatcaaatgcgaggcgct

SEQ ID NO: 3316949 - DNA, 25 bp, Homo sapien
caactgagtctgactgtgattgtca

SEQ ID NO: 3316950 - DNA, 25 bp, Homo sapien
aatcagccaactgagtctgactgtg

SEQ ID NO: 3316951 - DNA, 25 bp, Homo sapien
tctgactgtgattgtcaatattcca

SEQ ID NO: 3316952 - DNA, 25 bp, Homo sapien
ctgtgattgtcaatattccactggg

SEQ ID NO: 3316953 - DNA, 25 bp, Homo sapien
gacatttctgcattacagtttaaaa

SEQ ID NO: 3316954 - DNA, 25 bp, Homo sapien
tcttcaagcccacatgtaacaaata

SEQ ID NO: 3316955 - DNA, 25 bp, Homo sapien
agagtaatgttccagttcctgtagg

SEQ ID NO: 3316956 - DNA, 25 bp, Homo sapien
tgtgtgacttctatatgctgtgctg

SEQ ID NO: 3316957 - DNA, 25 bp, Homo sapien
cttggccacatggagccatcagctc

SEQ ID NO: 3316958 - DNA, 25 bp, Homo sapien
ttggccacatggagccatcagctca

SEQ ID NO: 3316959 - DNA, 25 bp, Homo sapien
tggccacatggagccatcagctcat

SEQ ID NO: 3316960 - DNA, 25 bp, Homo sapien
tggaattcaggggagttgcacacag

SEQ ID NO: 3316961 - DNA, 25 bp, Homo sapien
caggggagttgcacacagaggacct

SEQ ID NO: 3316962 - DNA, 25 bp, Homo sapien
cagaggacctgctccatagagaggc

SEQ ID NO: 3316963 - DNA, 25 bp, Homo sapien
tctaacacatgaaccttggctggaa

SEQ ID NO: 3316964 - DNA, 25 bp, Homo sapien
agacaccaaccaggaggccttgaca

SEQ ID NO: 3316965 - DNA, 25 bp, Homo sapien
cattgtatttggatgatattgaggc

SEQ ID NO: 3316966 - DNA, 25 bp, Homo sapien
ttggcattgtatttggatgatattg

SEQ ID NO: 3316967 - DNA, 25 bp, Homo sapien
aggaagagacaccaaccaggaggcc

SEQ ID NO: 3316968 - DNA, 25 bp, Homo sapien
atggacaagctgtgtttgagaaatc

SEQ ID NO: 3316969 - DNA, 25 bp, Homo sapien
ctgtgtttgagaaatccgtattcac

SEQ ID NO: 3316970 - DNA, 25 bp, Homo sapien
agctgtgtttgagaaatccgtattc

SEQ ID NO: 3316971 - DNA, 25 bp, Homo sapien
caagctgtgtttgagaaatccgtat

SEQ ID NO: 3316972 - DNA, 25 bp, Homo sapien
tgctgatcccccaaacggcttattt

SEQ ID NO: 3316973 - DNA, 25 bp, Homo sapien
tttgatgtgctcatgctgatccccc

SEQ ID NO: 3316974 - DNA, 25 bp, Homo sapien
atgctgatcccccaaacggcttatt

SEQ ID NO: 3316975 - DNA, 25 bp, Homo sapien
gtgctcatgctgatcccccaaacgg

SEQ ID NO: 3316976 - DNA, 25 bp, Homo sapien
tgttcagggttcatgctctgcgcca

SEQ ID NO: 3316977 - DNA, 25 bp, Homo sapien
agggttcatgctctgcgccagaagc

SEQ ID NO: 3316978 - DNA, 25 bp, Homo sapien
tctgttcagggttcatgctctgcgc

SEQ ID NO: 3316979 - DNA, 25 bp, Homo sapien
ggttcatgctctgcgccagaagctt

SEQ ID NO: 3316980 - DNA, 25 bp, Homo sapien
caagcggcaggtccaatatattact

SEQ ID NO: 3316981 - DNA, 25 bp, Homo sapien
cttgaatccggagctgcccaaagca

SEQ ID NO: 3316982 - DNA, 25 bp, Homo sapien
cctagatcctctcttgaatccggag

SEQ ID NO: 3316983 - DNA, 25 bp, Homo sapien
taagactgacgtttctcctagatcc

SEQ ID NO: 3316984 - DNA, 25 bp, Homo sapien
tttctgggactcatagtgatggtct

SEQ ID NO: 3316985 - DNA, 25 bp, Homo sapien
tgggactcatagtgatggtctggaa

SEQ ID NO: 3316986 - DNA, 25 bp, Homo sapien
actcatagtgatggtctggaagaca

SEQ ID NO: 3316987 - DNA, 25 bp, Homo sapien
tggaatttctgggactcatagtgat

SEQ ID NO: 3316988 - DNA, 25 bp, Homo sapien
tgtccttgctacttgatgcaacaac

SEQ ID NO: 3316989 - DNA, 25 bp, Homo sapien
cagggaatcaggaataacacatgtt

SEQ ID NO: 3316990 - DNA, 25 bp, Homo sapien
caacatagggcaactccagggaatc

SEQ ID NO: 3316991 - DNA, 25 bp, Homo sapien
aacatttataaccagcattgccatg

SEQ ID NO: 3316992 - DNA, 25 bp, Homo sapien
gatttctgggtcactaacatccaca

SEQ ID NO: 3316993 - DNA, 25 bp, Homo sapien
ggtatgtcaactgcacccactctga

SEQ ID NO: 3316994 - DNA, 25 bp, Homo sapien
caaggctctggtctagtgaaaatcc

SEQ ID NO: 3316995 - DNA, 25 bp, Homo sapien
gaaaatgatgctctttggccatgat

SEQ ID NO: 3316996 - DNA, 25 bp, Homo sapien
ttattgtctcaaaaggatacttggt

SEQ ID NO: 3316997 - DNA, 25 bp, Homo sapien
cctcaaggtcatgctaggtgatata

SEQ ID NO: 3316998 - DNA, 25 bp, Homo sapien
gctaggtgatatattcacacgtgga

SEQ ID NO: 3316999 - DNA, 25 bp, Homo sapien
cacagcctggttatacattatttcc

SEQ ID NO: 3317000 - DNA, 25 bp, Homo sapien
gcagaggactgcttggatctctttg

SEQ ID NO: 3317001 - DNA, 25 bp, Homo sapien
ttctcagtcgtgtctgtatcatccc

SEQ ID NO: 3317002 - DNA, 25 bp, Homo sapien
gtttctcagtcgtgtctgtatcatc

SEQ ID NO: 3317003 - DNA, 25 bp, Homo sapien
tttctcagtcgtgtctgtatcatcc

SEQ ID NO: 3317004 - DNA, 25 bp, Homo sapien
cagtttctcagtcgtgtctgtatca

SEQ ID NO: 3317005 - DNA, 25 bp, Homo sapien
tccaggaaatgcattggttgtgtaa

SEQ ID NO: 3317006 - DNA, 25 bp, Homo sapien
ctaccacaacattggcagaataatt

SEQ ID NO: 3317007 - DNA, 25 bp, Homo sapien
gaataattgtcaaagacagtaggga

SEQ ID NO: 3317008 - DNA, 25 bp, Homo sapien
tagggatatattctccaggaaatgc

SEQ ID NO: 3317009 - DNA, 25 bp, Homo sapien
gtaggaagtttcacctacagctccg

SEQ ID NO: 3317010 - DNA, 25 bp, Homo sapien
gatcagtaggaagtttcacctacag

SEQ ID NO: 3317011 - DNA, 25 bp, Homo sapien
cagtaggaagtttcacctacagctc

SEQ ID NO: 3317012 - DNA, 25 bp, Homo sapien
aggaagtttcacctacagctccgtc

SEQ ID NO: 3317013 - DNA, 25 bp, Homo sapien
catgtatgtccctgagtacagatgg

SEQ ID NO: 3317014 - DNA, 25 bp, Homo sapien
atcactggtcatgtatgtccctgag

SEQ ID NO: 3317015 - DNA, 25 bp, Homo sapien
tggtcatgtatgtccctgagtacag

SEQ ID NO: 3317016 - DNA, 25 bp, Homo sapien
gtatgtccctgagtacagatggagc

SEQ ID NO: 3317017 - DNA, 25 bp, Homo sapien
caacagtagttgtttcgaggagtcg

SEQ ID NO: 3317018 - DNA, 25 bp, Homo sapien
ggacagttgtcgtctgctgggaaga

SEQ ID NO: 3317019 - DNA, 25 bp, Homo sapien
cgatgcggccgcttgctgtttactc

SEQ ID NO: 3317020 - DNA, 25 bp, Homo sapien
tattatcaaagtgacgaaaacagaa

SEQ ID NO: 3317021 - DNA, 25 bp, Homo sapien
tcattgtaatattactaggcctaac

SEQ ID NO: 3317022 - DNA, 25 bp, Homo sapien
cattgtaatattactaggcctaact

SEQ ID NO: 3317023 - DNA, 25 bp, Homo sapien
tattccaagactcggtcaacttaag

SEQ ID NO: 3317024 - DNA, 25 bp, Homo sapien
tgacttattccaagactcggtcaac

SEQ ID NO: 3317025 - DNA, 25 bp, Homo sapien
ctcaatttctctagtattggtttga

SEQ ID NO: 3317026 - DNA, 25 bp, Homo sapien
agactcggtcaacttaagcacagaa

SEQ ID NO: 3317027 - DNA, 25 bp, Homo sapien
cttgaaagtttaccaggtctcagtg

SEQ ID NO: 3317028 - DNA, 25 bp, Homo sapien
taccaggtctcagtgagcaggtctg

SEQ ID NO: 3317029 - DNA, 25 bp, Homo sapien
aagtttaccaggtctcagtgagcag

SEQ ID NO: 3317030 - DNA, 25 bp, Homo sapien
tcagtgagcaggtctggggagttaa

SEQ ID NO: 3317031 - DNA, 25 bp, Homo sapien
ggtctctgtgaccacttcccacata

SEQ ID NO: 3317032 - DNA, 25 bp, Homo sapien
tctctgtgaccacttcccacatatt

SEQ ID NO: 3317033 - DNA, 25 bp, Homo sapien
ctgtgaccacttcccacatatttta

SEQ ID NO: 3317034 - DNA, 25 bp, Homo sapien
caggatcctcaggtctctgtgacca

SEQ ID NO: 3317035 - DNA, 25 bp, Homo sapien
ctccttttgtcttttgtcataatta

SEQ ID NO: 3317036 - DNA, 25 bp, Homo sapien
tccttttgtcttttgtcataattat

SEQ ID NO: 3317037 - DNA, 25 bp, Homo sapien
attgaataaatttctccacactcct

SEQ ID NO: 3317038 - DNA, 25 bp, Homo sapien
gatattgaataaatttctccacact

SEQ ID NO: 3317039 - DNA, 25 bp, Homo sapien
tattgaataaatttctccacactcc

SEQ ID NO: 3317040 - DNA, 25 bp, Homo sapien
tttcagattcaattgcaattgatat

SEQ ID NO: 3317041 - DNA, 25 bp, Homo sapien
ctgctcctgggtgccaattacactc

SEQ ID NO: 3317042 - DNA, 25 bp, Homo sapien
gctcctgggtgccaattacactctg

SEQ ID NO: 3317043 - DNA, 25 bp, Homo sapien
gcttgaaggtctccctcgagcagct

SEQ ID NO: 3317044 - DNA, 25 bp, Homo sapien
tcagggaacatgcaatagaggctta

SEQ ID NO: 3317045 - DNA, 25 bp, Homo sapien
cacttgtttcaggctcagtgactag

SEQ ID NO: 3317046 - DNA, 25 bp, Homo sapien
catagattactatgggaacgttttt

SEQ ID NO: 3317047 - DNA, 25 bp, Homo sapien
cacagtgggtaccataaagtcatgg

SEQ ID NO: 3317048 - DNA, 25 bp, Homo sapien
tagctgcactgtgggcatagattac

SEQ ID NO: 3317049 - DNA, 25 bp, Homo sapien
tgggtaccataaagtcatggccatg

SEQ ID NO: 3317050 - DNA, 25 bp, Homo sapien
aatgtatccgcagtttccgactggg

SEQ ID NO: 3317051 - DNA, 25 bp, Homo sapien
ggtttttctattgggatccagccag

SEQ ID NO: 3317052 - DNA, 25 bp, Homo sapien
caggaactaatgctaaaatgaaatg

SEQ ID NO: 3317053 - DNA, 25 bp, Homo sapien
tcaacaacatcagtaccagcatcag

SEQ ID NO: 3317054 - DNA, 25 bp, Homo sapien
accaaacgcaggatctccaggtgtt

SEQ ID NO: 3317055 - DNA, 25 bp, Homo sapien
aacgcaggatctccaggtgttttct

SEQ ID NO: 3317056 - DNA, 25 bp, Homo sapien
accaccaaacgcaggatctccaggt

SEQ ID NO: 3317057 - DNA, 25 bp, Homo sapien
caaacgcaggatctccaggtgtttt

SEQ ID NO: 3317058 - DNA, 25 bp, Homo sapien
ggatgtcaagaacctgactgaactc

SEQ ID NO: 3317059 - DNA, 25 bp, Homo sapien
caggatgtcaagaacctgactgaac

SEQ ID NO: 3317060 - DNA, 25 bp, Homo sapien
ctatgtgtgtcattcttcccatctg

SEQ ID NO: 3317061 - DNA, 25 bp, Homo sapien
tgaattccagagctatgtgtgtcat

SEQ ID NO: 3317062 - DNA, 25 bp, Homo sapien
ctgctaaatgaaccccttcagttag

SEQ ID NO: 3317063 - DNA, 25 bp, Homo sapien
ggtgtacatctgctaaatgaacccc

SEQ ID NO: 3317064 - DNA, 25 bp, Homo sapien
ctgtctcactgcttgccaggtgtac

SEQ ID NO: 3317065 - DNA, 25 bp, Homo sapien
cctttgtcacacaatgtactacttt

SEQ ID NO: 3317066 - DNA, 25 bp, Homo sapien
tttactgaatgacttcagtctgaat

SEQ ID NO: 3317067 - DNA, 25 bp, Homo sapien
tatttcctgaatttactgaatgact

SEQ ID NO: 3317068 - DNA, 25 bp, Homo sapien
tcctgaatttactgaatgacttcag

SEQ ID NO: 3317069 - DNA, 25 bp, Homo sapien
tagtttacatagatatttcctgaat

SEQ ID NO: 3317070 - DNA, 25 bp, Homo sapien
cagtattgagcatattgagattccc

SEQ ID NO: 3317071 - DNA, 25 bp, Homo sapien
gattccctatgatctgccaagccaa

SEQ ID NO: 3317072 - DNA, 25 bp, Homo sapien
gggcccaagccaaagattgattata

SEQ ID NO: 3317073 - DNA, 25 bp, Homo sapien
tcccaaatggtagaaccacagtgtc

SEQ ID NO: 3317074 - DNA, 25 bp, Homo sapien
cagtgaatggcctttggattgacat

SEQ ID NO: 3317075 - DNA, 25 bp, Homo sapien
tgagagggatctgctttcctattcc

SEQ ID NO: 3317076 - DNA, 25 bp, Homo sapien
gaattaagacatgaactgcagggaa

SEQ ID NO: 3317077 - DNA, 25 bp, Homo sapien
tccaagttagtggtgtattgagagg

SEQ ID NO: 3317078 - DNA, 25 bp, Homo sapien
taaatatcaaactaagagggcagag

SEQ ID NO: 3317079 - DNA, 25 bp, Homo sapien
tcaagtgggtcctaaaggattcctc

SEQ ID NO: 3317080 - DNA, 25 bp, Homo sapien
gaactaatctactaggaagggacta

SEQ ID NO: 3317081 - DNA, 25 bp, Homo sapien
gaagggactacatgctaaggctagg

SEQ ID NO: 3317082 - DNA, 25 bp, Homo sapien
gctaatttggactcctcttcgggta

SEQ ID NO: 3317083 - DNA, 25 bp, Homo sapien
ctcttttagactactccagtaaggt

SEQ ID NO: 3317084 - DNA, 25 bp, Homo sapien
tactccagtaaggtacttgaagtag

SEQ ID NO: 3317085 - DNA, 25 bp, Homo sapien
ctggctaatttggactcctcttcgg

SEQ ID NO: 3317086 - DNA, 25 bp, Homo sapien
ccaacgccatatggaaagcatctga

SEQ ID NO: 3317087 - DNA, 25 bp, Homo sapien
gaaagcatctgaatttgtaagacaa

SEQ ID NO: 3317088 - DNA, 25 bp, Homo sapien
tgaccttcataaatcactctaggct

SEQ ID NO: 3317089 - DNA, 25 bp, Homo sapien
gctccaactccaaattatgtcttgt

SEQ ID NO: 3317090 - DNA, 25 bp, Homo sapien
ctccaaaacagaagatgctccatga

SEQ ID NO: 3317091 - DNA, 25 bp, Homo sapien
cctgagtagacccaaacaaggccac

SEQ ID NO: 3317092 - DNA, 25 bp, Homo sapien
ctcgtgctccctgagtagacccaaa

SEQ ID NO: 3317093 - DNA, 25 bp, Homo sapien
gactgtccgaaagactttcccagga

SEQ ID NO: 3317094 - DNA, 25 bp, Homo sapien
aggactgtccgaaagactttcccag

SEQ ID NO: 3317095 - DNA, 25 bp, Homo sapien
gctctgcatggcgagctgttccaca

SEQ ID NO: 3317096 - DNA, 25 bp, Homo sapien
tcccaggagtggaatgttggtgagg

SEQ ID NO: 3317097 - DNA, 25 bp, Homo sapien
ctcccaggagtggaatgttggtgag

SEQ ID NO: 3317098 - DNA, 25 bp, Homo sapien
ctctgcatggcgagctgttccacag

SEQ ID NO: 3317099 - DNA, 25 bp, Homo sapien
cagtggaaatactttcctatggaac

SEQ ID NO: 3317100 - DNA, 25 bp, Homo sapien
gaataacgagttctttcgaatgcag

SEQ ID NO: 3317101 - DNA, 25 bp, Homo sapien
ctgggcattgaataacgagttcttt

SEQ ID NO: 3317102 - DNA, 25 bp, Homo sapien
cgagttctttcgaatgcagtggaaa

SEQ ID NO: 3317103 - DNA, 25 bp, Homo sapien
tgacctccagtgttacattcagact

SEQ ID NO: 3317104 - DNA, 25 bp, Homo sapien
ctgaggatgatcactcccattccag

SEQ ID NO: 3317105 - DNA, 25 bp, Homo sapien
gccaatgaccagagcagtagcgatg

SEQ ID NO: 3317106 - DNA, 25 bp, Homo sapien
ggcagaactaacacggaatttgcag

SEQ ID NO: 3317107 - DNA, 25 bp, Homo sapien
aagcctagtttattcaaatgaacta

SEQ ID NO: 3317108 - DNA, 25 bp, Homo sapien
tgttatttcaccaaagcctagttta

SEQ ID NO: 3317109 - DNA, 25 bp, Homo sapien
gtttattcaaatgaactactgtctg

SEQ ID NO: 3317110 - DNA, 25 bp, Homo sapien
tattcaaatgaactactgtctggat

SEQ ID NO: 3317111 - DNA, 25 bp, Homo sapien
agtaaaccatacaggctctgccctt

SEQ ID NO: 3317112 - DNA, 25 bp, Homo sapien
cccttgtgggtgggattaatggcat

SEQ ID NO: 3317113 - DNA, 25 bp, Homo sapien
tcttcaagaggtgagtaaaccatac

SEQ ID NO: 3317114 - DNA, 25 bp, Homo sapien
aaagtattaagagctgagatcttca

SEQ ID NO: 3317115 - DNA, 25 bp, Homo sapien
ccatgctgttgtaaagttggatttg

SEQ ID NO: 3317116 - DNA, 25 bp, Homo sapien
taaagttggatttgagtcagcaagc

SEQ ID NO: 3317117 - DNA, 25 bp, Homo sapien
gttggatttgagtcagcaagcataa

SEQ ID NO: 3317118 - DNA, 25 bp, Homo sapien
gttgtaaagttggatttgagtcagc

SEQ ID NO: 3317119 - DNA, 25 bp, Homo sapien
tcctaatggcaatcatatcattcca

SEQ ID NO: 3317120 - DNA, 25 bp, Homo sapien
tcccaagaacactctcctaatggca

SEQ ID NO: 3317121 - DNA, 25 bp, Homo sapien
agggttctacatcagctggggaaga

SEQ ID NO: 3317122 - DNA, 25 bp, Homo sapien
cactctcctaatggcaatcatatca

SEQ ID NO: 3317123 - DNA, 25 bp, Homo sapien
ccagttgtagatccccaccccctgg

SEQ ID NO: 3317124 - DNA, 25 bp, Homo sapien
ccctggggtagcaagtgaggattaa

SEQ ID NO: 3317125 - DNA, 25 bp, Homo sapien
gggttgaggatgagggatggagtga

SEQ ID NO: 3317126 - DNA, 25 bp, Homo sapien
ggattaagtggtggtctggaatgaa

SEQ ID NO: 3317127 - DNA, 25 bp, Homo sapien
aaacacctgcagttggaggctccca

SEQ ID NO: 3317128 - DNA, 25 bp, Homo sapien
gaaacacctgcagttggaggctccc

SEQ ID NO: 3317129 - DNA, 25 bp, Homo sapien
tggctgctgggacgggtgtggacca

SEQ ID NO: 3317130 - DNA, 25 bp, Homo sapien
gtggctgctgggacgggtgtggacc

SEQ ID NO: 3317131 - DNA, 25 bp, Homo sapien
cattcagagcttacacagatcataa

SEQ ID NO: 3317132 - DNA, 25 bp, Homo sapien
tttattgagtaaagaagttcattca

SEQ ID NO: 3317133 - DNA, 25 bp, Homo sapien
agaagttcattcagagcttacacag

SEQ ID NO: 3317134 - DNA, 25 bp, Homo sapien
ttgagtaaagaagttcattcagagc

SEQ ID NO: 3317135 - DNA, 25 bp, Homo sapien
ctggaaagaccaatagctgactgga

SEQ ID NO: 3317136 - DNA, 25 bp, Homo sapien
aaatctaatcgctacaaaggtcttg

SEQ ID NO: 3317137 - DNA, 25 bp, Homo sapien
cctcaaaacaaggtctagccaagtt

SEQ ID NO: 3317138 - DNA, 25 bp, Homo sapien
gctacaaaggtcttgtaaaatcctc

SEQ ID NO: 3317139 - DNA, 25 bp, Homo sapien
agaaatgccaacagagactatgtgg

SEQ ID NO: 3317140 - DNA, 25 bp, Homo sapien
taaggcagaccaaaactgatgcaag

SEQ ID NO: 3317141 - DNA, 25 bp, Homo sapien
taatgtgaatactactggttacaac

SEQ ID NO: 3317142 - DNA, 25 bp, Homo sapien
taatgtgtcaaaggtggagtgactg

SEQ ID NO: 3317143 - DNA, 25 bp, Homo sapien
gtttctggccttctcgagcaagttt

SEQ ID NO: 3317144 - DNA, 25 bp, Homo sapien
tccaaggatttgtagtattctgtca

SEQ ID NO: 3317145 - DNA, 25 bp, Homo sapien
aagtttgcgcattcgtgttcctgaa

SEQ ID NO: 3317146 - DNA, 25 bp, Homo sapien
gtcagcacggtccaagccttgggag

SEQ ID NO: 3317147 - DNA, 25 bp, Homo sapien
gaaacaatctaccaatcttactcag

SEQ ID NO: 3317148 - DNA, 25 bp, Homo sapien
aaaattatagcatatcacagccagg

SEQ ID NO: 3317149 - DNA, 25 bp, Homo sapien
ttattgagaccattgtagagtcaca

SEQ ID NO: 3317150 - DNA, 25 bp, Homo sapien
tagccagtcaccattgtacccttta

SEQ ID NO: 3317151 - DNA, 25 bp, Homo sapien
caaaccagtaagcacagagcacgta

SEQ ID NO: 3317152 - DNA, 25 bp, Homo sapien
tctggaacagcaagtagcaataatc

SEQ ID NO: 3317153 - DNA, 25 bp, Homo sapien
cttaattgacaagacacaacagagg

SEQ ID NO: 3317154 - DNA, 25 bp, Homo sapien
acagaggtagtgttgatagtttttc

SEQ ID NO: 3317155 - DNA, 25 bp, Homo sapien
cacgagcctgtttacttctagttgg

SEQ ID NO: 3317156 - DNA, 25 bp, Homo sapien
tagacttaacctgaaaacctggtgc

SEQ ID NO: 3317157 - DNA, 25 bp, Homo sapien
caagcattcagagtcgctcaggtca

SEQ ID NO: 3317158 - DNA, 25 bp, Homo sapien
tctctcaaacatgggaaccaaccta

SEQ ID NO: 3317159 - DNA, 25 bp, Homo sapien
tctttcctctacataaggacacagc

SEQ ID NO: 3317160 - DNA, 25 bp, Homo sapien
taaatgtttgtcatctaagccttcc

SEQ ID NO: 3317161 - DNA, 25 bp, Homo sapien
ggccccctatgatgggattaatccc

SEQ ID NO: 3317162 - DNA, 25 bp, Homo sapien
cctatgatgggattaatccccttat

SEQ ID NO: 3317163 - DNA, 25 bp, Homo sapien
ataaagaaatatgccctatgtagtc

SEQ ID NO: 3317164 - DNA, 25 bp, Homo sapien
agaaatatgccctatgtagtcattg

SEQ ID NO: 3317165 - DNA, 25 bp, Homo sapien
acataaagaaatatgccctatgtag

SEQ ID NO: 3317166 - DNA, 25 bp, Homo sapien
tatgccctatgtagtcattgttggg

SEQ ID NO: 3317167 - DNA, 25 bp, Homo sapien
tacatctgaatggtgctagggacac

SEQ ID NO: 3317168 - DNA, 25 bp, Homo sapien
taataagtgactttatactgtggca

SEQ ID NO: 3317169 - DNA, 25 bp, Homo sapien
caaagtgatcattctggcctcataa

SEQ ID NO: 3317170 - DNA, 25 bp, Homo sapien
gtttattatctaactaggagctcag

SEQ ID NO: 3317171 - DNA, 25 bp, Homo sapien
ggcagagggtcataagacaaaaaac

SEQ ID NO: 3317172 - DNA, 25 bp, Homo sapien
acactagtcagctttccaccatctt

SEQ ID NO: 3317173 - DNA, 25 bp, Homo sapien
cactgagtctagctatgagcttgtg

SEQ ID NO: 3317174 - DNA, 25 bp, Homo sapien
ctaacatgcattaagatgggatagg

SEQ ID NO: 3317175 - DNA, 25 bp, Homo sapien
gttagctccaattctggcctttcca

SEQ ID NO: 3317176 - DNA, 25 bp, Homo sapien
tcagatatgtgacatcctcccctag

SEQ ID NO: 3317177 - DNA, 25 bp, Homo sapien
cacagggtttatatgagtcttcggc

SEQ ID NO: 3317178 - DNA, 25 bp, Homo sapien
cctcttagattcactgttagctcca

SEQ ID NO: 3317179 - DNA, 25 bp, Homo sapien
ggacaagacttagcaagcagagcct

SEQ ID NO: 3317180 - DNA, 25 bp, Homo sapien
tcaataaagatgtcaggttgccttc

SEQ ID NO: 3317181 - DNA, 25 bp, Homo sapien
gaggtccacttattggctccctaaa

SEQ ID NO: 3317182 - DNA, 25 bp, Homo sapien
cctagacaggaagctaagggagttg

SEQ ID NO: 3317183 - DNA, 25 bp, Homo sapien
tccaccctggctacggaaaacacat

SEQ ID NO: 3317184 - DNA, 25 bp, Homo sapien
cagcagcttgctagatgactctgtc

SEQ ID NO: 3317185 - DNA, 25 bp, Homo sapien
tgggtacctcttgtcctgaagctat

SEQ ID NO: 3317186 - DNA, 25 bp, Homo sapien
catcacacggaatgggagtttccac

SEQ ID NO: 3317187 - DNA, 25 bp, Homo sapien
taggcaacaagcaattcagagaagc

SEQ ID NO: 3317188 - DNA, 25 bp, Homo sapien
gccatcagagccaccattacaagtt

SEQ ID NO: 3317189 - DNA, 25 bp, Homo sapien
tctaacttgaaagcgggttacatca

SEQ ID NO: 3317190 - DNA, 25 bp, Homo sapien
gaaggttcatattcgattagaccag

SEQ ID NO: 3317191 - DNA, 25 bp, Homo sapien
tcttagggggcacttactccattta

SEQ ID NO: 3317192 - DNA, 25 bp, Homo sapien
agaatgcatcaaaatcagggcaccc

SEQ ID NO: 3317193 - DNA, 25 bp, Homo sapien
caattggttgacctcttagggggca

SEQ ID NO: 3317194 - DNA, 25 bp, Homo sapien
gcaccctagttagccacaaagaaga

SEQ ID NO: 3317195 - DNA, 25 bp, Homo sapien
gaggcctgcctacttaagaaccaca

SEQ ID NO: 3317196 - DNA, 25 bp, Homo sapien
gtctcaactgaatgggagtgtctcc

SEQ ID NO: 3317197 - DNA, 25 bp, Homo sapien
taagtcgagacctaggacactgatg

SEQ ID NO: 3317198 - DNA, 25 bp, Homo sapien
taagtctggcccatttgagcagagc

SEQ ID NO: 3317199 - DNA, 25 bp, Homo sapien
taccaaaggcttaccagcacatcag

SEQ ID NO: 3317200 - DNA, 25 bp, Homo sapien
ctttggaaaatcttaagagaactga

SEQ ID NO: 3317201 - DNA, 25 bp, Homo sapien
tgagccactcatgcaactaatatag

SEQ ID NO: 3317202 - DNA, 25 bp, Homo sapien
gagacttaaagcaatactacacagt

SEQ ID NO: 3317203 - DNA, 25 bp, Homo sapien
gacaataagctaaatccctgggagc

SEQ ID NO: 3317204 - DNA, 25 bp, Homo sapien
tgggagcagctagaccacgaagtac

SEQ ID NO: 3317205 - DNA, 25 bp, Homo sapien
taagctatagcagacacagtaggca

SEQ ID NO: 3317206 - DNA, 25 bp, Homo sapien
gagtaccacaaaacctgtcatcagt

SEQ ID NO: 3317207 - DNA, 25 bp, Homo sapien
gggccatcgtcagcactttggcacc

SEQ ID NO: 3317208 - DNA, 25 bp, Homo sapien
ttttcttgttgtaagctgcaactcg

SEQ ID NO: 3317209 - DNA, 25 bp, Homo sapien
ttcagagtcatagtagtccatacgc

SEQ ID NO: 3317210 - DNA, 25 bp, Homo sapien
ttggctcataaagatccttccctgt

SEQ ID NO: 3317211 - DNA, 25 bp, Homo sapien
gccagcagggtctcgtccaacaatg

SEQ ID NO: 3317212 - DNA, 25 bp, Homo sapien
aacaatgtaaaagttggctcctgca

SEQ ID NO: 3317213 - DNA, 25 bp, Homo sapien
agggtctcgtccaacaatgtaaaag

SEQ ID NO: 3317214 - DNA, 25 bp, Homo sapien
tgtaaaagttggctcctgcaaccat

SEQ ID NO: 3317215 - DNA, 25 bp, Homo sapien
cagaacccaaactgtgcctggactc

SEQ ID NO: 3317216 - DNA, 25 bp, Homo sapien
aaccgtcttgtattatttccactag

SEQ ID NO: 3317217 - DNA, 25 bp, Homo sapien
agctggtggcaacccagaacccaaa

SEQ ID NO: 3317218 - DNA, 25 bp, Homo sapien
tttccactagaccatgctctttcgg

SEQ ID NO: 3317219 - DNA, 25 bp, Homo sapien
taacagggcatgtccattgtgcact

SEQ ID NO: 3317220 - DNA, 25 bp, Homo sapien
tagaagttgcttatgggtatcctgc

SEQ ID NO: 3317221 - DNA, 25 bp, Homo sapien
cagttggtccagcatacatcatggg

SEQ ID NO: 3317222 - DNA, 25 bp, Homo sapien
gatggccaccactgtcgtctcagga

SEQ ID NO: 3317223 - DNA, 25 bp, Homo sapien
tctgtagttgcttggaacgagggcc

SEQ ID NO: 3317224 - DNA, 25 bp, Homo sapien
tcaccgacactaagacaaacacaaa

SEQ ID NO: 3317225 - DNA, 25 bp, Homo sapien
caggagcattctggagttcaccgac

SEQ ID NO: 3317226 - DNA, 25 bp, Homo sapien
gaacgagggcctctggttcacaaac

SEQ ID NO: 3317227 - DNA, 25 bp, Homo sapien
ttacatattccactgctatatttac

SEQ ID NO: 3317228 - DNA, 25 bp, Homo sapien
ctttctttacatattccactgctat

SEQ ID NO: 3317229 - DNA, 25 bp, Homo sapien
ctttacatattccactgctatattt

SEQ ID NO: 3317230 - DNA, 25 bp, Homo sapien
ttctttacatattccactgctatat

SEQ ID NO: 3317231 - DNA, 25 bp, Homo sapien
cactggaaaaaatcgtctagaactt

SEQ ID NO: 3317232 - DNA, 25 bp, Homo sapien
atcgttttacattttcgtaagcact

SEQ ID NO: 3317233 - DNA, 25 bp, Homo sapien
tacattttcgtaagcactggaaaaa

SEQ ID NO: 3317234 - DNA, 25 bp, Homo sapien
gcactggaaaaaatcgtctagaact

SEQ ID NO: 3317235 - DNA, 25 bp, Homo sapien
tagctcagtaggagtaagacgatac

SEQ ID NO: 3317236 - DNA, 25 bp, Homo sapien
caataaactcgatccaagacttgaa

SEQ ID NO: 3317237 - DNA, 25 bp, Homo sapien
atcagccaatctccttgttccatca

SEQ ID NO: 3317238 - DNA, 25 bp, Homo sapien
tactgatcaagaccatcattccaat

SEQ ID NO: 3317239 - DNA, 25 bp, Homo sapien
tatcttcatgagtcgcagtcagaac

SEQ ID NO: 3317240 - DNA, 25 bp, Homo sapien
gagcaaatgctgtacagccgtccag

SEQ ID NO: 3317241 - DNA, 25 bp, Homo sapien
ggcggccctcatacatcagagcaaa

SEQ ID NO: 3317242 - DNA, 25 bp, Homo sapien
aaactctggattgcgaagaatggcc

SEQ ID NO: 3317243 - DNA, 25 bp, Homo sapien
ggcactgcaagtactccctctctct

SEQ ID NO: 3317244 - DNA, 25 bp, Homo sapien
ttcaatggggttgcccaaccttctg

SEQ ID NO: 3317245 - DNA, 25 bp, Homo sapien
aaccttctgccaaaacctgcaccca

SEQ ID NO: 3317246 - DNA, 25 bp, Homo sapien
tcataaagccattcaatggggttgc

SEQ ID NO: 3317247 - DNA, 25 bp, Homo sapien
tttcagtgctggtaatgtttccgca

SEQ ID NO: 3317248 - DNA, 25 bp, Homo sapien
tgtttccgcatctgtttttgccaaa

SEQ ID NO: 3317249 - DNA, 25 bp, Homo sapien
tttctggcacatatagttcttttac

SEQ ID NO: 3317250 - DNA, 25 bp, Homo sapien
tcataagatgcatccacaggtacaa

SEQ ID NO: 3317251 - DNA, 25 bp, Homo sapien
cacagtcatttacatcacaggagtc

SEQ ID NO: 3317252 - DNA, 25 bp, Homo sapien
tattcagaatcgatcccagtgaaac

SEQ ID NO: 3317253 - DNA, 25 bp, Homo sapien
gtcatttacatcacaggagtctgtt

SEQ ID NO: 3317254 - DNA, 25 bp, Homo sapien
ctctggcttttcatattcagaatcg

SEQ ID NO: 3317255 - DNA, 25 bp, Homo sapien
tctcctgcccgggcttttttgtaga

SEQ ID NO: 3317256 - DNA, 25 bp, Homo sapien
ttttgtagagtcctttgacatccct

SEQ ID NO: 3317257 - DNA, 25 bp, Homo sapien
ggcttttttgtagagtcctttgaca

SEQ ID NO: 3317258 - DNA, 25 bp, Homo sapien
cttttttgtagagtcctttgacatc

SEQ ID NO: 3317259 - DNA, 25 bp, Homo sapien
aaacatgcagaggagcatcaacaaa

SEQ ID NO: 3317260 - DNA, 25 bp, Homo sapien
tgcagaggagcatcaacaaatactt

SEQ ID NO: 3317261 - DNA, 25 bp, Homo sapien
gtaaacttgcaccttcatgaatttg

SEQ ID NO: 3317262 - DNA, 25 bp, Homo sapien
aaaacggtaaacttgcaccttcatg

SEQ ID NO: 3317263 - DNA, 25 bp, Homo sapien
tttagcaacttctgcgatgcgtcga

SEQ ID NO: 3317264 - DNA, 25 bp, Homo sapien
cctccaaggccatgctcacagtagt

SEQ ID NO: 3317265 - DNA, 25 bp, Homo sapien
tccagagtgtagcatggaataccat

SEQ ID NO: 3317266 - DNA, 25 bp, Homo sapien
tcacagtagtctttcccgctccaga

SEQ ID NO: 3317267 - DNA, 25 bp, Homo sapien
tgtgcaaccacgaaagccacctctg

SEQ ID NO: 3317268 - DNA, 25 bp, Homo sapien
aactgtgcaaccacgaaagccacct

SEQ ID NO: 3317269 - DNA, 25 bp, Homo sapien
aaactgtgcaaccacgaaagccacc

SEQ ID NO: 3317270 - DNA, 25 bp, Homo sapien
tgcaaccacgaaagccacctctggt

SEQ ID NO: 3317271 - DNA, 25 bp, Homo sapien
ggtaggtgacattggttgctctctg

SEQ ID NO: 3317272 - DNA, 25 bp, Homo sapien
gcttggtaggtgacattggttgctc

SEQ ID NO: 3317273 - DNA, 25 bp, Homo sapien
aggtgacattggttgctctctgcat

SEQ ID NO: 3317274 - DNA, 25 bp, Homo sapien
catgatgggcttggtaggtgacatt

SEQ ID NO: 3317275 - DNA, 25 bp, Homo sapien
tatacatgtaatcttcttctacttc

SEQ ID NO: 3317276 - DNA, 25 bp, Homo sapien
gccacttatacatgtaatcttcttc

SEQ ID NO: 3317277 - DNA, 25 bp, Homo sapien
cttatacatgtaatcttcttctact

SEQ ID NO: 3317278 - DNA, 25 bp, Homo sapien
cacttatacatgtaatcttcttcta

SEQ ID NO: 3317279 - DNA, 25 bp, Homo sapien
ggcagtcaaacaagtttcgtcaatg

SEQ ID NO: 3317280 - DNA, 25 bp, Homo sapien
gcagtcaaacaagtttcgtcaatgt

SEQ ID NO: 3317281 - DNA, 25 bp, Homo sapien
cagtcaaacaagtttcgtcaatgtt

SEQ ID NO: 3317282 - DNA, 25 bp, Homo sapien
agtcaaacaagtttcgtcaatgttt

SEQ ID NO: 3317283 - DNA, 25 bp, Homo sapien
gcaacgttatgaggacacagcactt

SEQ ID NO: 3317284 - DNA, 25 bp, Homo sapien
tccagactccaaagatgggcccttc

SEQ ID NO: 3317285 - DNA, 25 bp, Homo sapien
ggactggtcccatacctgactgtca

SEQ ID NO: 3317286 - DNA, 25 bp, Homo sapien
aagtaacgttttgggagacattgca

SEQ ID NO: 3317287 - DNA, 25 bp, Homo sapien
ggaccgcacgctgcgccaagctagg

SEQ ID NO: 3317288 - DNA, 25 bp, Homo sapien
aagctagggcgagatccccaccctg

SEQ ID NO: 3317289 - DNA, 25 bp, Homo sapien
gcgttcttcccacgaacggtggctc

SEQ ID NO: 3317290 - DNA, 25 bp, Homo sapien
acgctgcgccaagctagggcgagat

SEQ ID NO: 3317291 - DNA, 25 bp, Homo sapien
ccgctcctcgccgtctcgccttcgt

SEQ ID NO: 3317292 - DNA, 25 bp, Homo sapien
aggatggatgcggaggaggcgggag

SEQ ID NO: 3317293 - DNA, 25 bp, Homo sapien
cgtctcgccttcgtccccagcttac

SEQ ID NO: 3317294 - DNA, 25 bp, Homo sapien
gctccggaacgagctgctcccacag

SEQ ID NO: 3317295 - DNA, 25 bp, Homo sapien
tctgcgcgttattgctcagtttgac

SEQ ID NO: 3317296 - DNA, 25 bp, Homo sapien
ccagttctgcgcgttattgctcagt

SEQ ID NO: 3317297 - DNA, 25 bp, Homo sapien
ttgactttcttgcacaggctcccgg

SEQ ID NO: 3317298 - DNA, 25 bp, Homo sapien
agtttgactttcttgcacaggctcc

SEQ ID NO: 3317299 - DNA, 25 bp, Homo sapien
ggggcctcctcgcgtcggagcgggc

SEQ ID NO: 3317300 - DNA, 25 bp, Homo sapien
gagcagccggggttctctgcgccgg

SEQ ID NO: 3317301 - DNA, 25 bp, Homo sapien
gggcaggccagcgagcggggcgggg

SEQ ID NO: 3317302 - DNA, 25 bp, Homo sapien
tgcgccgggagggtagcaagaggag

SEQ ID NO: 3317303 - DNA, 25 bp, Homo sapien
gtgagtttgcattctggaactgctc

SEQ ID NO: 3317304 - DNA, 25 bp, Homo sapien
ctctgtgagtttgcattctggaact

SEQ ID NO: 3317305 - DNA, 25 bp, Homo sapien
tgtgagtttgcattctggaactgct

SEQ ID NO: 3317306 - DNA, 25 bp, Homo sapien
ctgtgagtttgcattctggaactgc

SEQ ID NO: 3317307 - DNA, 25 bp, Homo sapien
ggagaaatcgggctttgtccatcaa

SEQ ID NO: 3317308 - DNA, 25 bp, Homo sapien
ctggatgcttccacttagagatcta

SEQ ID NO: 3317309 - DNA, 25 bp, Homo sapien
gagatctagggagaaatcgggcttt

SEQ ID NO: 3317310 - DNA, 25 bp, Homo sapien
ctgaagatgttcaggcactcagcac

SEQ ID NO: 3317311 - DNA, 25 bp, Homo sapien
tatgtgaacctgctagaacagggca

SEQ ID NO: 3317312 - DNA, 25 bp, Homo sapien
tgaaacctggaatatatgccacaaa

SEQ ID NO: 3317313 - DNA, 25 bp, Homo sapien
gaatgaagactatcaggttgggtgt

SEQ ID NO: 3317314 - DNA, 25 bp, Homo sapien
gatattaattactgaatgcggacta

SEQ ID NO: 3317315 - DNA, 25 bp, Homo sapien
actgcccagcaggtgtatgaatagc

SEQ ID NO: 3317316 - DNA, 25 bp, Homo sapien
cctagttagagtccttgaggctgcc

SEQ ID NO: 3317317 - DNA, 25 bp, Homo sapien
tggaagcacccataaaccagcgcaa

SEQ ID NO: 3317318 - DNA, 25 bp, Homo sapien
gaggctgccatcgtttactttgaaa

SEQ ID NO: 3317319 - DNA, 25 bp, Homo sapien
ggtttttcgagctccactctgcgcc

SEQ ID NO: 3317320 - DNA, 25 bp, Homo sapien
tgccaccgggccgacgggtgagtca

SEQ ID NO: 3317321 - DNA, 25 bp, Homo sapien
taagaagtcgcgcaggtttttcgag

SEQ ID NO: 3317322 - DNA, 25 bp, Homo sapien
ggagagccacggcagcaggaacggg

SEQ ID NO: 3317323 - DNA, 25 bp, Homo sapien
gaggagagatgtgtgccttagtctc

SEQ ID NO: 3317324 - DNA, 25 bp, Homo sapien
tctcattcatttgcaacccatttcg

SEQ ID NO: 3317325 - DNA, 25 bp, Homo sapien
tcatttgcaacccatttcgggtacc

SEQ ID NO: 3317326 - DNA, 25 bp, Homo sapien
tgcttcctcgattttgtggtctgga

SEQ ID NO: 3317327 - DNA, 25 bp, Homo sapien
gctgctccctttacggaagggaaga

SEQ ID NO: 3317328 - DNA, 25 bp, Homo sapien
gcggggaacccctgtcaacatccat

SEQ ID NO: 3317329 - DNA, 25 bp, Homo sapien
ccttcaacgtgtggcattccagagc

SEQ ID NO: 3317330 - DNA, 25 bp, Homo sapien
cttggtttctcagcgaaaataaggg

SEQ ID NO: 3317331 - DNA, 25 bp, Homo sapien
aatagtttgctttgtcgtgccagta

SEQ ID NO: 3317332 - DNA, 25 bp, Homo sapien
agaagggtatctgttccatctccca

SEQ ID NO: 3317333 - DNA, 25 bp, Homo sapien
gccagtatctccataacagaatggg

SEQ ID NO: 3317334 - DNA, 25 bp, Homo sapien
gaaagcttcactagtaccagaaggg

SEQ ID NO: 3317335 - DNA, 25 bp, Homo sapien
tctttgcccagaattacatcactcc

SEQ ID NO: 3317336 - DNA, 25 bp, Homo sapien
aatcaatctgctaacctcttcctgc

SEQ ID NO: 3317337 - DNA, 25 bp, Homo sapien
gtatttcctagcatggtgccacttc

SEQ ID NO: 3317338 - DNA, 25 bp, Homo sapien
tgttctcttaggcagaagcaaatga

SEQ ID NO: 3317339 - DNA, 25 bp, Homo sapien
tgcaacaccccaattatgctagttg

SEQ ID NO: 3317340 - DNA, 25 bp, Homo sapien
gttattttgctaccagggctgtgtg

SEQ ID NO: 3317341 - DNA, 25 bp, Homo sapien
ctgctccaccccaacggtagttatt

SEQ ID NO: 3317342 - DNA, 25 bp, Homo sapien
ctatttgcctggtaatagttgacca

SEQ ID NO: 3317343 - DNA, 25 bp, Homo sapien
agtctggatttggtactggaagcag

SEQ ID NO: 3317344 - DNA, 25 bp, Homo sapien
ggaaacaagaaagagtgatcatcat

SEQ ID NO: 3317345 - DNA, 25 bp, Homo sapien
tgagaacagtctggatttggtactg

SEQ ID NO: 3317346 - DNA, 25 bp, Homo sapien
gaaacaagaaagagtgatcatcata

SEQ ID NO: 3317347 - DNA, 25 bp, Homo sapien
agttgcaaaaccttctacgagtgta

SEQ ID NO: 3317348 - DNA, 25 bp, Homo sapien
gttgcaaaaccttctacgagtgtac

SEQ ID NO: 3317349 - DNA, 25 bp, Homo sapien
cagttgcaaaaccttctacgagtgt

SEQ ID NO: 3317350 - DNA, 25 bp, Homo sapien
tcagttgcaaaaccttctacgagtg

SEQ ID NO: 3317351 - DNA, 25 bp, Homo sapien
tctcttgctccagtgattcctggta

SEQ ID NO: 3317352 - DNA, 25 bp, Homo sapien
acaccaccaaataactccttagcat

SEQ ID NO: 3317353 - DNA, 25 bp, Homo sapien
tactctctttcatatggacaccacc

SEQ ID NO: 3317354 - DNA, 25 bp, Homo sapien
ctccttagcatcctgaatatttaat

SEQ ID NO: 3317355 - DNA, 25 bp, Homo sapien
tctgttcacagcatttcagatattc

SEQ ID NO: 3317356 - DNA, 25 bp, Homo sapien
tgtggccctataacactcttctcca

SEQ ID NO: 3317357 - DNA, 25 bp, Homo sapien
taccatctggaaacagtaggtttgg

SEQ ID NO: 3317358 - DNA, 25 bp, Homo sapien
tcttcccctagagctgcatcctgtg

SEQ ID NO: 3317359 - DNA, 25 bp, Homo sapien
catctggaaacagtaggtttggtgc

SEQ ID NO: 3317360 - DNA, 25 bp, Homo sapien
cttcccttctctggttaagacattc

SEQ ID NO: 3317361 - DNA, 25 bp, Homo sapien
tctctggttaagacattcataaatg

SEQ ID NO: 3317362 - DNA, 25 bp, Homo sapien
gaaggttggctgtctatcagttgtc

SEQ ID NO: 3317363 - DNA, 25 bp, Homo sapien
ctgaaggttggctgtctatcagttg

SEQ ID NO: 3317364 - DNA, 25 bp, Homo sapien
gacctcagggttatgcagcggaaag

SEQ ID NO: 3317365 - DNA, 25 bp, Homo sapien
tcaactgctattctagggctgggct

SEQ ID NO: 3317366 - DNA, 25 bp, Homo sapien
gatagccctgtgttaagcagtgagc

SEQ ID NO: 3317367 - DNA, 25 bp, Homo sapien
tcataaccagcagaggagatagccc

SEQ ID NO: 3317368 - DNA, 25 bp, Homo sapien
ttcttctgacatagcagggctgtgc

SEQ ID NO: 3317369 - DNA, 25 bp, Homo sapien
cagggctttgtcatggcactatcag

SEQ ID NO: 3317370 - DNA, 25 bp, Homo sapien
gtagaacagcctgccgagtcagagc

SEQ ID NO: 3317371 - DNA, 25 bp, Homo sapien
gaagctgtgtgctcatttgcgacgc

SEQ ID NO: 3317372 - DNA, 25 bp, Homo sapien
tgtattacccttgtgcgggggccat

SEQ ID NO: 3317373 - DNA, 25 bp, Homo sapien
tgtgtattacccttgtgcgggggcc

SEQ ID NO: 3317374 - DNA, 25 bp, Homo sapien
gtattacccttgtgcgggggccatg

SEQ ID NO: 3317375 - DNA, 25 bp, Homo sapien
atttgtgtattacccttgtgcgggg

SEQ ID NO: 3317376 - DNA, 25 bp, Homo sapien
agtagatatcacagcagaagttctt

SEQ ID NO: 3317377 - DNA, 25 bp, Homo sapien
gttttctcagggtttagatttctga

SEQ ID NO: 3317378 - DNA, 25 bp, Homo sapien
aagtagatatcacagcagaagttct

SEQ ID NO: 3317379 - DNA, 25 bp, Homo sapien
gaagtagatatcacagcagaagttc

SEQ ID NO: 3317380 - DNA, 25 bp, Homo sapien
ggacagcttggatacattggaacta

SEQ ID NO: 3317381 - DNA, 25 bp, Homo sapien
accttccgaagggacagcttggata

SEQ ID NO: 3317382 - DNA, 25 bp, Homo sapien
ctctcttctgatcaccttccgaagg

SEQ ID NO: 3317383 - DNA, 25 bp, Homo sapien
cttggatacattggaactaaatttc

SEQ ID NO: 3317384 - DNA, 25 bp, Homo sapien
tcaatgagcttcagatctgaactgc

SEQ ID NO: 3317385 - DNA, 25 bp, Homo sapien
cctttttctgtagccataagtatcg

SEQ ID NO: 3317386 - DNA, 25 bp, Homo sapien
gccataagtatcgatcacatggcct

SEQ ID NO: 3317387 - DNA, 25 bp, Homo sapien
tgcagctgccgtcaatgagcttcag

SEQ ID NO: 3317388 - DNA, 25 bp, Homo sapien
gttcttactcccaggggcacaaagc

SEQ ID NO: 3317389 - DNA, 25 bp, Homo sapien
cattctcatagcagtcccatgaggt

SEQ ID NO: 3317390 - DNA, 25 bp, Homo sapien
gtgttcttactcccaggggcacaaa

SEQ ID NO: 3317391 - DNA, 25 bp, Homo sapien
tcatagcagtcccatgaggtgggtg

SEQ ID NO: 3317392 - DNA, 25 bp, Homo sapien
aaatggctgtgttagtgcttcggac

SEQ ID NO: 3317393 - DNA, 25 bp, Homo sapien
tgtgttctagaaccgagtagctacc

SEQ ID NO: 3317394 - DNA, 25 bp, Homo sapien
cacatgaacataagactaggagcac

SEQ ID NO: 3317395 - DNA, 25 bp, Homo sapien
tcggacctccgttagaagtagcagt

SEQ ID NO: 3317396 - DNA, 25 bp, Homo sapien
cctgtcaaagcctgggatgtcaaag

SEQ ID NO: 3317397 - DNA, 25 bp, Homo sapien
acattgtgccaagacactgtcaagc

SEQ ID NO: 3317398 - DNA, 25 bp, Homo sapien
gaggcacctcttcattgtgcttatt

SEQ ID NO: 3317399 - DNA, 25 bp, Homo sapien
gatgtcaaaggcctgggtctttctc

SEQ ID NO: 3317400 - DNA, 25 bp, Homo sapien
gttttagctgcccagtaggtctcat

SEQ ID NO: 3317401 - DNA, 25 bp, Homo sapien
tcatggaccattttgccaataccga

SEQ ID NO: 3317402 - DNA, 25 bp, Homo sapien
gttcacattatacaaaatccttggg

SEQ ID NO: 3317403 - DNA, 25 bp, Homo sapien
gctttcataggagtcttcatggacc

SEQ ID NO: 3317404 - DNA, 25 bp, Homo sapien
aattattgcccctttgattacctgg

SEQ ID NO: 3317405 - DNA, 25 bp, Homo sapien
tctgctttgagggtaagatgacaag

SEQ ID NO: 3317406 - DNA, 25 bp, Homo sapien
tctctgtagtagatgaagtcaagtc

SEQ ID NO: 3317407 - DNA, 25 bp, Homo sapien
caagggttatcttcagtggtgcaga

SEQ ID NO: 3317408 - DNA, 25 bp, Homo sapien
cagacgagaaaatgagaacgaagca

SEQ ID NO: 3317409 - DNA, 25 bp, Homo sapien
catttcagagtgaaggcactgtagg

SEQ ID NO: 3317410 - DNA, 25 bp, Homo sapien
tccatgagtatgctatgtaagatca

SEQ ID NO: 3317411 - DNA, 25 bp, Homo sapien
ggacactgccaaacctcataaacaa

SEQ ID NO: 3317412 - DNA, 25 bp, Homo sapien
tgggaccaacagagcaacggctagt

SEQ ID NO: 3317413 - DNA, 25 bp, Homo sapien
gaatgatacctgatttggtatttca

SEQ ID NO: 3317414 - DNA, 25 bp, Homo sapien
tgccatttgggaccaacagagcaac

SEQ ID NO: 3317415 - DNA, 25 bp, Homo sapien
cggctagttttaccaagagattata

SEQ ID NO: 3317416 - DNA, 25 bp, Homo sapien
caagctgctagagatgaactctggt

SEQ ID NO: 3317417 - DNA, 25 bp, Homo sapien
cagctagtaagtagaatgaactttt

SEQ ID NO: 3317418 - DNA, 25 bp, Homo sapien
taaaccagtgagtgccacagttgtc

SEQ ID NO: 3317419 - DNA, 25 bp, Homo sapien
cacagttgtctcttacagctagtaa

SEQ ID NO: 3317420 - DNA, 25 bp, Homo sapien
cagtggacccttttcatgtcgtggg

SEQ ID NO: 3317421 - DNA, 25 bp, Homo sapien
tgaatgactattacgcccgctgcca

SEQ ID NO: 3317422 - DNA, 25 bp, Homo sapien
caacacgactgttttggtggtacca

SEQ ID NO: 3317423 - DNA, 25 bp, Homo sapien
gagccagtatgcagcaattccagca

SEQ ID NO: 3317424 - DNA, 25 bp, Homo sapien
acttaaagagctagctcaaatgcca

SEQ ID NO: 3317425 - DNA, 25 bp, Homo sapien
cgtgcccagccgatagcagctattg

SEQ ID NO: 3317426 - DNA, 25 bp, Homo sapien
caggaagctgtctctaactcttgct

SEQ ID NO: 3317427 - DNA, 25 bp, Homo sapien
tgcagctgggtaagacataatcctg

SEQ ID NO: 3317428 - DNA, 25 bp, Homo sapien
tcatggtagagttagggaaaggaca

SEQ ID NO: 3317429 - DNA, 25 bp, Homo sapien
tgcttggcccctagatttgatcact

SEQ ID NO: 3317430 - DNA, 25 bp, Homo sapien
cattcttactggaattgcaggcaga

SEQ ID NO: 3317431 - DNA, 25 bp, Homo sapien
gaagaaattgcatgagccacaaagg

SEQ ID NO: 3317432 - DNA, 25 bp, Homo sapien
cacgggttcagaagattggtgaaga

SEQ ID NO: 3317433 - DNA, 25 bp, Homo sapien
tatctcgagcatggtggttccccat

SEQ ID NO: 3317434 - DNA, 25 bp, Homo sapien
catgcaaaaagtattcacgggttca

SEQ ID NO: 3317435 - DNA, 25 bp, Homo sapien
gcctcctggctgcttcaaatcatca

SEQ ID NO: 3317436 - DNA, 25 bp, Homo sapien
gatggtttctgctaatgagtggccc

SEQ ID NO: 3317437 - DNA, 25 bp, Homo sapien
gggcagtcaactcttctagcacagg

SEQ ID NO: 3317438 - DNA, 25 bp, Homo sapien
caggctgaaaacacgtgtgtgtcaa

SEQ ID NO: 3317439 - DNA, 25 bp, Homo sapien
agtatttgacacaccccacagattt

SEQ ID NO: 3317440 - DNA, 25 bp, Homo sapien
tccttggcaggctttgaagcacaca

SEQ ID NO: 3317441 - DNA, 25 bp, Homo sapien
taagttcctgttgcccgattgtaaa

SEQ ID NO: 3317442 - DNA, 25 bp, Homo sapien
gattttgctctcctaacactggtgt

SEQ ID NO: 3317443 - DNA, 25 bp, Homo sapien
tgtgcaagaacaaggtattctgctt

SEQ ID NO: 3317444 - DNA, 25 bp, Homo sapien
agccaatcttaatgcactagcctct

SEQ ID NO: 3317445 - DNA, 25 bp, Homo sapien
taactcctttgactcagttgctgaa

SEQ ID NO: 3317446 - DNA, 25 bp, Homo sapien
catgtcaatgttacccaaagataag

SEQ ID NO: 3317447 - DNA, 25 bp, Homo sapien
tattacaaggtttcagaggtagcca

SEQ ID NO: 3317448 - DNA, 25 bp, Homo sapien
tctgcccacccaaaagatctcttag

SEQ ID NO: 3317449 - DNA, 25 bp, Homo sapien
aataagtactcagctattttggata

SEQ ID NO: 3317450 - DNA, 25 bp, Homo sapien
tatactgtgaccaacaattccggcc

SEQ ID NO: 3317451 - DNA, 25 bp, Homo sapien
catgtcgaacaaggatataggtagg

SEQ ID NO: 3317452 - DNA, 25 bp, Homo sapien
agcccgcgtgtacggcagcatcttc

SEQ ID NO: 3317453 - DNA, 25 bp, Homo sapien
cagcgacttccacagcgtgcgcgag

SEQ ID NO: 3317454 - DNA, 25 bp, Homo sapien
aggtcttcagcgaccgcccgcgggt

SEQ ID NO: 3317455 - DNA, 25 bp, Homo sapien
ggtggtggtcctcagcgacttccac

SEQ ID NO: 3317456 - DNA, 25 bp, Homo sapien
tgtccatcattctgattgattcttt

SEQ ID NO: 3317457 - DNA, 25 bp, Homo sapien
aaactacagtaaactagataggcca

SEQ ID NO: 3317458 - DNA, 25 bp, Homo sapien
cttcttaagcccataaaaactacag

SEQ ID NO: 3317459 - DNA, 25 bp, Homo sapien
ttcatgattagacaaggtggtcttc

SEQ ID NO: 3317460 - DNA, 25 bp, Homo sapien
cttgccagatgccagtgctatcctc

SEQ ID NO: 3317461 - DNA, 25 bp, Homo sapien
cagatgccagtgctatcctcttgga

SEQ ID NO: 3317462 - DNA, 25 bp, Homo sapien
gccagatgccagtgctatcctcttg

SEQ ID NO: 3317463 - DNA, 25 bp, Homo sapien
agatgccagtgctatcctcttggac

SEQ ID NO: 3317464 - DNA, 25 bp, Homo sapien
taactgtggttgaacggcagatgcc

SEQ ID NO: 3317465 - DNA, 25 bp, Homo sapien
taagttgagggacatactgaccaaa

SEQ ID NO: 3317466 - DNA, 25 bp, Homo sapien
ggtatcaccgcaggacaccttactg

SEQ ID NO: 3317467 - DNA, 25 bp, Homo sapien
taactggcctgtttgatgaactagc

SEQ ID NO: 3317468 - DNA, 25 bp, Homo sapien
catgcagaatctcaaaacgggttag

SEQ ID NO: 3317469 - DNA, 25 bp, Homo sapien
gactacacttaagcatctacagagg

SEQ ID NO: 3317470 - DNA, 25 bp, Homo sapien
taagatcaggtccttatcactgccc

SEQ ID NO: 3317471 - DNA, 25 bp, Homo sapien
tagatgatctagagagccttggctg

SEQ ID NO: 3317472 - DNA, 25 bp, Homo sapien
catcatgaaccgctgtgttccagtt

SEQ ID NO: 3317473 - DNA, 25 bp, Homo sapien
gagggcattcatgataaatggatcc

SEQ ID NO: 3317474 - DNA, 25 bp, Homo sapien
gtttgccaaccactcaactagactt

SEQ ID NO: 3317475 - DNA, 25 bp, Homo sapien
ctctggctgtacaaaggcggcagga

SEQ ID NO: 3317476 - DNA, 25 bp, Homo sapien
tggcccacccctatataggaaatgt

SEQ ID NO: 3317477 - DNA, 25 bp, Homo sapien
tgagcacagtgataaacgcatagac

SEQ ID NO: 3317478 - DNA, 25 bp, Homo sapien
actgtctgcacctcagcaaatgcct

SEQ ID NO: 3317479 - DNA, 25 bp, Homo sapien
tagaaagcctgtaaactggcccacc

SEQ ID NO: 3317480 - DNA, 25 bp, Homo sapien
cctaatgtttgtgagcctaatgcag

SEQ ID NO: 3317481 - DNA, 25 bp, Homo sapien
tctgatctcatttttagggaagcgg

SEQ ID NO: 3317482 - DNA, 25 bp, Homo sapien
tcctcagcaggatacttcagccatt

SEQ ID NO: 3317483 - DNA, 25 bp, Homo sapien
taagaagcccctcctgactggaaga

SEQ ID NO: 3317484 - DNA, 25 bp, Homo sapien
ggactctgtcgtgtatattgaggaa

SEQ ID NO: 3317485 - DNA, 25 bp, Homo sapien
tactacaactacaggaacagtgagc

SEQ ID NO: 3317486 - DNA, 25 bp, Homo sapien
tacttaaggcctgaatggtgagcat

SEQ ID NO: 3317487 - DNA, 25 bp, Homo sapien
tctttgggcttgttctgtcactatc

SEQ ID NO: 3317488 - DNA, 25 bp, Homo sapien
tgccttggtcttagtggatgcccag

SEQ ID NO: 3317489 - DNA, 25 bp, Homo sapien
taattacaagtcatgtttttgttgc

SEQ ID NO: 3317490 - DNA, 25 bp, Homo sapien
gttgcttaaaggtgataaatcagtg

SEQ ID NO: 3317491 - DNA, 25 bp, Homo sapien
cagttgtcttgtgaatgacttttaa

SEQ ID NO: 3317492 - DNA, 25 bp, Homo sapien
tgggaatggcattccagggcaattg

SEQ ID NO: 3317493 - DNA, 25 bp, Homo sapien
ccatactctgtgtagttagatctca

SEQ ID NO: 3317494 - DNA, 25 bp, Homo sapien
gacttctgccgttagccatactctg

SEQ ID NO: 3317495 - DNA, 25 bp, Homo sapien
tgaacatgaggctagatttttcctt

SEQ ID NO: 3317496 - DNA, 25 bp, Homo sapien
tgatatgctagagtttaattacaga

SEQ ID NO: 3317497 - DNA, 25 bp, Homo sapien
ttatctaatttagtctcctagtaga

SEQ ID NO: 3317498 - DNA, 25 bp, Homo sapien
ctaaaagggagtttagagattatct

SEQ ID NO: 3317499 - DNA, 25 bp, Homo sapien
taatttagtctcctagtagatgaac

SEQ ID NO: 3317500 - DNA, 25 bp, Homo sapien
caactccaataatagggtgagggtg

SEQ ID NO: 3317501 - DNA, 25 bp, Homo sapien
ttgctgtctctgagttggtttggtg

SEQ ID NO: 3317502 - DNA, 25 bp, Homo sapien
tgtctctgagttggtttggtgacca

SEQ ID NO: 3317503 - DNA, 25 bp, Homo sapien
caataatagggtgagggtgcaagtc

SEQ ID NO: 3317504 - DNA, 25 bp, Homo sapien
gactcctgttaaggtgtgtacctca

SEQ ID NO: 3317505 - DNA, 25 bp, Homo sapien
gatgtgttgttgtcccctcgagagt

SEQ ID NO: 3317506 - DNA, 25 bp, Homo sapien
tattgctatactccttctcgtggcc

SEQ ID NO: 3317507 - DNA, 25 bp, Homo sapien
ttctggtcaatctcgtaaaactgag

SEQ ID NO: 3317508 - DNA, 25 bp, Homo sapien
cactgcactgatagacgtccaacgt

SEQ ID NO: 3317509 - DNA, 25 bp, Homo sapien
ccaacggtgcacattttgggtccat

SEQ ID NO: 3317510 - DNA, 25 bp, Homo sapien
tgggtccattaccaacacagccaag

SEQ ID NO: 3317511 - DNA, 25 bp, Homo sapien
gaagattggccaagctgctatccag

SEQ ID NO: 3317512 - DNA, 25 bp, Homo sapien
cgcctcccgggtgtagttgaaatat

SEQ ID NO: 3317513 - DNA, 25 bp, Homo sapien
ggcctcggccaagaagataatcgtc

SEQ ID NO: 3317514 - DNA, 25 bp, Homo sapien
gaaatatctcgcgtctgggcctgtg

SEQ ID NO: 3317515 - DNA, 25 bp, Homo sapien
cgtgtatacccgctcaacgctggga

SEQ ID NO: 3317516 - DNA, 25 bp, Homo sapien
aagaattgtatgtgcacaaggttca

SEQ ID NO: 3317517 - DNA, 25 bp, Homo sapien
gaaagaattgtatgtgcacaaggtt

SEQ ID NO: 3317518 - DNA, 25 bp, Homo sapien
gaagcgggccgtgcaagagaagaaa

SEQ ID NO: 3317519 - DNA, 25 bp, Homo sapien
ggaagcgggccgtgcaagagaagaa

SEQ ID NO: 3317520 - DNA, 25 bp, Homo sapien
cctgctcggctcaaacgggagtttg

SEQ ID NO: 3317521 - DNA, 25 bp, Homo sapien
tgcttattgagtgccagagacgaat

SEQ ID NO: 3317522 - DNA, 25 bp, Homo sapien
ttaaataggtggaccagggagtgcc

SEQ ID NO: 3317523 - DNA, 25 bp, Homo sapien
taatgctagtactggcctcgtaggg

SEQ ID NO: 3317524 - DNA, 25 bp, Homo sapien
agtggacgaccataagaaacagttc

SEQ ID NO: 3317525 - DNA, 25 bp, Homo sapien
agcatattagttattggactctggg

SEQ ID NO: 3317526 - DNA, 25 bp, Homo sapien
tagttattggactctgggtgaggtt

SEQ ID NO: 3317527 - DNA, 25 bp, Homo sapien
ggtactgggatgtagaaccaccctc

SEQ ID NO: 3317528 - DNA, 25 bp, Homo sapien
gaaccaccctctattagcatattag

SEQ ID NO: 3317529 - DNA, 25 bp, Homo sapien
aaatcttcttgatacatttacaaag

SEQ ID NO: 3317530 - DNA, 25 bp, Homo sapien
aagctgcttcaaatcttcttgatac

SEQ ID NO: 3317531 - DNA, 25 bp, Homo sapien
ttgtgcttcggagaaagctgcttca

SEQ ID NO: 3317532 - DNA, 25 bp, Homo sapien
cactcaagttgtgcttcggagaaag

SEQ ID NO: 3317533 - DNA, 25 bp, Homo sapien
cagcctcaggtgattaaggaggatc

SEQ ID NO: 3317534 - DNA, 25 bp, Homo sapien
caactataggcttgtttctccacat

SEQ ID NO: 3317535 - DNA, 25 bp, Homo sapien
caccatgccaccaagtaatttaaag

SEQ ID NO: 3317536 - DNA, 25 bp, Homo sapien
ttttatatggagcaggatcccagcc

SEQ ID NO: 3317537 - DNA, 25 bp, Homo sapien
tagtgttggtagaccagacagagga

SEQ ID NO: 3317538 - DNA, 25 bp, Homo sapien
tgcagcaactggtcacacagtagtg

SEQ ID NO: 3317539 - DNA, 25 bp, Homo sapien
agaggacatcctggcaaaatccaaa

SEQ ID NO: 3317540 - DNA, 25 bp, Homo sapien
catcctggcaaaatccaaaaaggga

SEQ ID NO: 3317541 - DNA, 25 bp, Homo sapien
cggatgcagcctccgttgtccacag

SEQ ID NO: 3317542 - DNA, 25 bp, Homo sapien
tggtggaagccatcgtggagaatct

SEQ ID NO: 3317543 - DNA, 25 bp, Homo sapien
accatagcgaccagcacggatgcag

SEQ ID NO: 3317544 - DNA, 25 bp, Homo sapien
aatctgaaggtgaaaaacgagctct

SEQ ID NO: 3317545 - DNA, 25 bp, Homo sapien
ttacaagcatagctaatgccaccac

SEQ ID NO: 3317546 - DNA, 25 bp, Homo sapien
accaccagacaagaccgattcgctg

SEQ ID NO: 3317547 - DNA, 25 bp, Homo sapien
acttcctccttgcagattacaagca

SEQ ID NO: 3317548 - DNA, 25 bp, Homo sapien
gaccgattcgctggcctccatttct

SEQ ID NO: 3317549 - DNA, 25 bp, Homo sapien
ttaaaacaccaatgaccagccagaa

SEQ ID NO: 3317550 - DNA, 25 bp, Homo sapien
gcaaagccctaggaaagcatcctgt

SEQ ID NO: 3317551 - DNA, 25 bp, Homo sapien
caaagccctaggaaagcatcctgtt

SEQ ID NO: 3317552 - DNA, 25 bp, Homo sapien
tagcaaagccctaggaaagcatcct

SEQ ID NO: 3317553 - DNA, 25 bp, Homo sapien
tttgtcggagcacgtgccctcaagt

SEQ ID NO: 3317554 - DNA, 25 bp, Homo sapien
gaccattcaaggtggagtgtgacgt

SEQ ID NO: 3317555 - DNA, 25 bp, Homo sapien
cctgagaagttgctgagtagccgag

SEQ ID NO: 3317556 - DNA, 25 bp, Homo sapien
ccactgcagtgtgcgctggaacctg

SEQ ID NO: 3317557 - DNA, 25 bp, Homo sapien
gcctcctggttccatacctcatgga

SEQ ID NO: 3317558 - DNA, 25 bp, Homo sapien
gaagcaatcaggctgtatgaacgag

SEQ ID NO: 3317559 - DNA, 25 bp, Homo sapien
tccatacctcatggaagcaatcagg

SEQ ID NO: 3317560 - DNA, 25 bp, Homo sapien
attgtgaaccgcctcctggttccat

SEQ ID NO: 3317561 - DNA, 25 bp, Homo sapien
gcttctagattatgtcggactggat

SEQ ID NO: 3317562 - DNA, 25 bp, Homo sapien
gctatgaaattaggagccggttacc

SEQ ID NO: 3317563 - DNA, 25 bp, Homo sapien
cccatgggcccatttgagcttctag

SEQ ID NO: 3317564 - DNA, 25 bp, Homo sapien
tgacgcatccaaagaagacattgac

SEQ ID NO: 3317565 - DNA, 25 bp, Homo sapien
ggtagcagagaacaagttcggcaag

SEQ ID NO: 3317566 - DNA, 25 bp, Homo sapien
agagaacccattacatcagcccagc

SEQ ID NO: 3317567 - DNA, 25 bp, Homo sapien
cagcccatccttaaataagctggta

SEQ ID NO: 3317568 - DNA, 25 bp, Homo sapien
acaagttcggcaagaagactggaga

SEQ ID NO: 3317569 - DNA, 25 bp, Homo sapien
taaacagctttacacccttggtgcc

SEQ ID NO: 3317570 - DNA, 25 bp, Homo sapien
tgggagagtcacaagccactggcaa

SEQ ID NO: 3317571 - DNA, 25 bp, Homo sapien
tagattccttctctcatcaacggga

SEQ ID NO: 3317572 - DNA, 25 bp, Homo sapien
cttcctctgagagtgcgagtgcacc

SEQ ID NO: 3317573 - DNA, 25 bp, Homo sapien
gtagtttgcagtgcctgccccttcc

SEQ ID NO: 3317574 - DNA, 25 bp, Homo sapien
tcattcacgtgatttgtagtttgca

SEQ ID NO: 3317575 - DNA, 25 bp, Homo sapien
tgccccttcccaattaaccatggcc

SEQ ID NO: 3317576 - DNA, 25 bp, Homo sapien
cttcccaattaaccatggcctcctt

SEQ ID NO: 3317577 - DNA, 25 bp, Homo sapien
tccctatctctagggggactgttga

SEQ ID NO: 3317578 - DNA, 25 bp, Homo sapien
caaatcccttcaagatcaaacaaac

SEQ ID NO: 3317579 - DNA, 25 bp, Homo sapien
tccccgcagacacctgctttgatcc

SEQ ID NO: 3317580 - DNA, 25 bp, Homo sapien
gggactgttgactctcccccagaac

SEQ ID NO: 3317581 - DNA, 25 bp, Homo sapien
tagctcaagggatagaaaaccatcg

SEQ ID NO: 3317582 - DNA, 25 bp, Homo sapien
cagcagagaggtttaagttggacca

SEQ ID NO: 3317583 - DNA, 25 bp, Homo sapien
gttccccagctgcaccgaaggttag

SEQ ID NO: 3317584 - DNA, 25 bp, Homo sapien
catcgtggaagaccatgacatattc

SEQ ID NO: 3317585 - DNA, 25 bp, Homo sapien
tcaatgagcacgacaaccagatggt

SEQ ID NO: 3317586 - DNA, 25 bp, Homo sapien
cccacaatgtggaagcccagtttga

SEQ ID NO: 3317587 - DNA, 25 bp, Homo sapien
agctatgaagagaggcggtacctgt

SEQ ID NO: 3317588 - DNA, 25 bp, Homo sapien
tgaataccaatgagctatgaagaga

SEQ ID NO: 3317589 - DNA, 25 bp, Homo sapien
catacaagtacttttgaggactgca

SEQ ID NO: 3317590 - DNA, 25 bp, Homo sapien
tgaccctgtttcataccacctggaa

SEQ ID NO: 3317591 - DNA, 25 bp, Homo sapien
gggagaggcccaagccatacaagta

SEQ ID NO: 3317592 - DNA, 25 bp, Homo sapien
gcaaggtgcccatttacagccggtt

SEQ ID NO: 3317593 - DNA, 25 bp, Homo sapien
ctggaatgacaaacgttaggatgac

SEQ ID NO: 3317594 - DNA, 25 bp, Homo sapien
gtaataacaattcaagtgctgggct

SEQ ID NO: 3317595 - DNA, 25 bp, Homo sapien
caaaccagtctgctgaacgcatctg

SEQ ID NO: 3317596 - DNA, 25 bp, Homo sapien
tagggctgccaattgctaccaacag

SEQ ID NO: 3317597 - DNA, 25 bp, Homo sapien
ccttggctttgcacgttgggaatga

SEQ ID NO: 3317598 - DNA, 25 bp, Homo sapien
cttacaagggcggagaagccactat

SEQ ID NO: 3317599 - DNA, 25 bp, Homo sapien
tatggatcagcgtctctagcagtga

SEQ ID NO: 3317600 - DNA, 25 bp, Homo sapien
ggaacttggctcttgcagtagacga

SEQ ID NO: 3317601 - DNA, 25 bp, Homo sapien
caaacatgaatagggaaggcgggca

SEQ ID NO: 3317602 - DNA, 25 bp, Homo sapien
taaaagcatggcaaagttccgttcc

SEQ ID NO: 3317603 - DNA, 25 bp, Homo sapien
ggatctctaatgatagcctcggaaa

SEQ ID NO: 3317604 - DNA, 25 bp, Homo sapien
ccaatgcggcccctaaagatgatca

SEQ ID NO: 3317605 - DNA, 25 bp, Homo sapien
tacatatgttcagacttgggctccc

SEQ ID NO: 3317606 - DNA, 25 bp, Homo sapien
tttcaagaaaccacaggcatgaggc

SEQ ID NO: 3317607 - DNA, 25 bp, Homo sapien
tgaagtctgcgcaatcaaagccagc

SEQ ID NO: 3317608 - DNA, 25 bp, Homo sapien
agcaattactgctctccggctgcgg

SEQ ID NO: 3317609 - DNA, 25 bp, Homo sapien
caatgcttcgaatatcccaggacac

SEQ ID NO: 3317610 - DNA, 25 bp, Homo sapien
tcaaaccctcaaactagaggcaatg

SEQ ID NO: 3317611 - DNA, 25 bp, Homo sapien
tcaaactagaggcaatgcttcgaat

SEQ ID NO: 3317612 - DNA, 25 bp, Homo sapien
tagaggcaatgcttcgaatatccca

SEQ ID NO: 3317613 - DNA, 25 bp, Homo sapien
tatgaaggtggatctgagctcctct

SEQ ID NO: 3317614 - DNA, 25 bp, Homo sapien
ggtctccaaactcggatggtgtgca

SEQ ID NO: 3317615 - DNA, 25 bp, Homo sapien
tacaggaagctcaaccaactggagc

SEQ ID NO: 3317616 - DNA, 25 bp, Homo sapien
caaaggctgcatgactgatccggga

SEQ ID NO: 3317617 - DNA, 25 bp, Homo sapien
agaagtgaggtaaatcgagtgccag

SEQ ID NO: 3317618 - DNA, 25 bp, Homo sapien
tcgactaccaaactctgaaatacag

SEQ ID NO: 3317619 - DNA, 25 bp, Homo sapien
aggtaaatcgagtgccagcccttgg

SEQ ID NO: 3317620 - DNA, 25 bp, Homo sapien
tcttgaagaacaccaaatcgactac

SEQ ID NO: 3317621 - DNA, 25 bp, Homo sapien
cagtcctctgtagaggaaatgggct

SEQ ID NO: 3317622 - DNA, 25 bp, Homo sapien
agcatgtgcggtgccctcttgccat

SEQ ID NO: 3317623 - DNA, 25 bp, Homo sapien
gaaatgggctttcgaagcccaggga

SEQ ID NO: 3317624 - DNA, 25 bp, Homo sapien
tttgtttggactgatcataggactc

SEQ ID NO: 3317625 - DNA, 25 bp, Homo sapien
gatgtaggcagctgtcattcttgga

SEQ ID NO: 3317626 - DNA, 25 bp, Homo sapien
atgtaggcagctgtcattcttggac

SEQ ID NO: 3317627 - DNA, 25 bp, Homo sapien
tcagatgtaggcagctgtcattctt

SEQ ID NO: 3317628 - DNA, 25 bp, Homo sapien
cagatgtaggcagctgtcattcttg

SEQ ID NO: 3317629 - DNA, 25 bp, Homo sapien
gattcctgtagtttctctctcttcc

SEQ ID NO: 3317630 - DNA, 25 bp, Homo sapien
gatgcagattcctgtagtttctctc

SEQ ID NO: 3317631 - DNA, 25 bp, Homo sapien
tgcagattcctgtagtttctctctc

SEQ ID NO: 3317632 - DNA, 25 bp, Homo sapien
agattcctgtagtttctctctcttc

SEQ ID NO: 3317633 - DNA, 25 bp, Homo sapien
gcattcattagcacccatagcaaaa

SEQ ID NO: 3317634 - DNA, 25 bp, Homo sapien
gtagtaccagcattatatacaccta

SEQ ID NO: 3317635 - DNA, 25 bp, Homo sapien
tagctcgaagctttcataatgcaat

SEQ ID NO: 3317636 - DNA, 25 bp, Homo sapien
ccttcttgaacgcaaaagagcgaat

SEQ ID NO: 3317637 - DNA, 25 bp, Homo sapien
gcctggataaagctgcatatgtagc

SEQ ID NO: 3317638 - DNA, 25 bp, Homo sapien
taattgtctcttgcagaccagcctg

SEQ ID NO: 3317639 - DNA, 25 bp, Homo sapien
gtagctgtctttctttccgtgctaa

SEQ ID NO: 3317640 - DNA, 25 bp, Homo sapien
taatatttagcctgctcttcacggg

SEQ ID NO: 3317641 - DNA, 25 bp, Homo sapien
cactgtccatgagggtatgacacag

SEQ ID NO: 3317642 - DNA, 25 bp, Homo sapien
actttccagggagaaccatctggga

SEQ ID NO: 3317643 - DNA, 25 bp, Homo sapien
gggagaaccactgtccatgagggta

SEQ ID NO: 3317644 - DNA, 25 bp, Homo sapien
cccaacttccccaatgccaggatct

SEQ ID NO: 3317645 - DNA, 25 bp, Homo sapien
ccccaactctcaggtgtggagcttc

SEQ ID NO: 3317646 - DNA, 25 bp, Homo sapien
cccattgcaggctatgagattcttt

SEQ ID NO: 3317647 - DNA, 25 bp, Homo sapien
tggaggaaggatagagtgagagagg

SEQ ID NO: 3317648 - DNA, 25 bp, Homo sapien
catggctgccctgcatattaatttt

SEQ ID NO: 3317649 - DNA, 25 bp, Homo sapien
caccagaagggtaacagagtccgtt

SEQ ID NO: 3317650 - DNA, 25 bp, Homo sapien
tgctgaagaggatagatgatttatt

SEQ ID NO: 3317651 - DNA, 25 bp, Homo sapien
ttccaaccaccagtgcgagaagcag

SEQ ID NO: 3317652 - DNA, 25 bp, Homo sapien
ccttaaaagtcaggcagtctgtgct

SEQ ID NO: 3317653 - DNA, 25 bp, Homo sapien
gaacactgacctagtattacagacc

SEQ ID NO: 3317654 - DNA, 25 bp, Homo sapien
ggcttgccctgagcctaaagcaaat

SEQ ID NO: 3317655 - DNA, 25 bp, Homo sapien
caaatcgagcctgagaagaatctgt

SEQ ID NO: 3317656 - DNA, 25 bp, Homo sapien
agcaactgacagctttttaaacctg

SEQ ID NO: 3317657 - DNA, 25 bp, Homo sapien
tttagagtacactcagcaacgacat

SEQ ID NO: 3317658 - DNA, 25 bp, Homo sapien
tctggttgatagctgcactttcttt

SEQ ID NO: 3317659 - DNA, 25 bp, Homo sapien
acgacattcgctctcatttctttca

SEQ ID NO: 3317660 - DNA, 25 bp, Homo sapien
gccaagaatctggttgatagctgca

SEQ ID NO: 3317661 - DNA, 25 bp, Homo sapien
cttcttaatgtgaggtctttttggc

SEQ ID NO: 3317662 - DNA, 25 bp, Homo sapien
gaggcttcttaatgtgaggtctttt

SEQ ID NO: 3317663 - DNA, 25 bp, Homo sapien
ggcttcttaatgtgaggtctttttg

SEQ ID NO: 3317664 - DNA, 25 bp, Homo sapien
gcttcttaatgtgaggtctttttgg

SEQ ID NO: 3317665 - DNA, 25 bp, Homo sapien
gggttgaaggaatgaggaagggatg

SEQ ID NO: 3317666 - DNA, 25 bp, Homo sapien
gaagggatgggggaggagaaaagca

SEQ ID NO: 3317667 - DNA, 25 bp, Homo sapien
atgggggaggagaaaagcagagcac

SEQ ID NO: 3317668 - DNA, 25 bp, Homo sapien
gggatgggggaggagaaaagcagag

SEQ ID NO: 3317669 - DNA, 25 bp, Homo sapien
gaccaggaggaccgggaatcatatg

SEQ ID NO: 3317670 - DNA, 25 bp, Homo sapien
tcctgtttgacctgaggtgttacaa

SEQ ID NO: 3317671 - DNA, 25 bp, Homo sapien
tggggatgttcctgtttgacctgag

SEQ ID NO: 3317672 - DNA, 25 bp, Homo sapien
ggaccgggaatcatatgatgggaaa

SEQ ID NO: 3317673 - DNA, 25 bp, Homo sapien
tcaggcggccatgaatttgtttgga

SEQ ID NO: 3317674 - DNA, 25 bp, Homo sapien
catcgcccgatggtgtggctggtcc

SEQ ID NO: 3317675 - DNA, 25 bp, Homo sapien
ggaggcaacgctttccaaggaggct

SEQ ID NO: 3317676 - DNA, 25 bp, Homo sapien
taatgtccgctttccggacagttcc

SEQ ID NO: 3317677 - DNA, 25 bp, Homo sapien
cgtgatgggatatacaggctgacct

SEQ ID NO: 3317678 - DNA, 25 bp, Homo sapien
gtagggttgcctgaatccacccgtg

SEQ ID NO: 3317679 - DNA, 25 bp, Homo sapien
tccacccgtgatgggatatacaggc

SEQ ID NO: 3317680 - DNA, 25 bp, Homo sapien
catggaagtgtcgactgacagtgag

SEQ ID NO: 3317681 - DNA, 25 bp, Homo sapien
agtaaaggtagatattcaatgcgtc

SEQ ID NO: 3317682 - DNA, 25 bp, Homo sapien
gcccacttacaagtaaaggtagata

SEQ ID NO: 3317683 - DNA, 25 bp, Homo sapien
tagatattcaatgcgtctaaattca

SEQ ID NO: 3317684 - DNA, 25 bp, Homo sapien
tcacttgcccacttacaagtaaagg

SEQ ID NO: 3317685 - DNA, 25 bp, Homo sapien
caagggataaaaagtagggatatca

SEQ ID NO: 3317686 - DNA, 25 bp, Homo sapien
caggagctggaggatgtctggacat

SEQ ID NO: 3317687 - DNA, 25 bp, Homo sapien
aaaagtagggatatcaggagctgga

SEQ ID NO: 3317688 - DNA, 25 bp, Homo sapien
atctgtccaacaccacccggagaca

SEQ ID NO: 3317689 - DNA, 25 bp, Homo sapien
tgacatggagcactggcatctggaa

SEQ ID NO: 3317690 - DNA, 25 bp, Homo sapien
ttcattcattgtggccctgctatgc

SEQ ID NO: 3317691 - DNA, 25 bp, Homo sapien
cattctgatccacccagtgacatgg

SEQ ID NO: 3317692 - DNA, 25 bp, Homo sapien
tatttgcacaatctattggtttaca

SEQ ID NO: 3317693 - DNA, 25 bp, Homo sapien
tgtttggagttgacatctgatggga

SEQ ID NO: 3317694 - DNA, 25 bp, Homo sapien
tgctcgtcactgtaagtgatgaggg

SEQ ID NO: 3317695 - DNA, 25 bp, Homo sapien
ggatggctgcaccacgggcacttta

SEQ ID NO: 3317696 - DNA, 25 bp, Homo sapien
gatcctggagaaaagtgctcgtcac

SEQ ID NO: 3317697 - DNA, 25 bp, Homo sapien
cataactctatgttgtacatcttta

SEQ ID NO: 3317698 - DNA, 25 bp, Homo sapien
gagttcataactctatgttgtacat

SEQ ID NO: 3317699 - DNA, 25 bp, Homo sapien
tctatgttgtacatctttaagaacc

SEQ ID NO: 3317700 - DNA, 25 bp, Homo sapien
agagttcataactctatgttgtaca

SEQ ID NO: 3317701 - DNA, 25 bp, Homo sapien
tcctctgatttcacaagttactgcc

SEQ ID NO: 3317702 - DNA, 25 bp, Homo sapien
tttcacaagttactgccccttgaca

SEQ ID NO: 3317703 - DNA, 25 bp, Homo sapien
tctgatttcacaagttactgcccct

SEQ ID NO: 3317704 - DNA, 25 bp, Homo sapien
ctgcggatatgtggcacatcatcat

SEQ ID NO: 3317705 - DNA, 25 bp, Homo sapien
ctaagcactttatcctcacaacagc

SEQ ID NO: 3317706 - DNA, 25 bp, Homo sapien
ctctttggcatcacagccaataaaa

SEQ ID NO: 3317707 - DNA, 25 bp, Homo sapien
tttggcatcacagccaataaaaccc

SEQ ID NO: 3317708 - DNA, 25 bp, Homo sapien
atcacagccaataaaacccatacct

SEQ ID NO: 3317709 - DNA, 25 bp, Homo sapien
gcatcacagccaataaaacccatac

SEQ ID NO: 3317710 - DNA, 25 bp, Homo sapien
cattcccagaaatgacccactcacc

SEQ ID NO: 3317711 - DNA, 25 bp, Homo sapien
agtgggtgccacttagggatcctga

SEQ ID NO: 3317712 - DNA, 25 bp, Homo sapien
cacttagggatcctgagagccaccc

SEQ ID NO: 3317713 - DNA, 25 bp, Homo sapien
ctgtggacacgaagtgggtgccact

SEQ ID NO: 3317714 - DNA, 25 bp, Homo sapien
gcttcaggtctgatgtggctttcaa

SEQ ID NO: 3317715 - DNA, 25 bp, Homo sapien
atgtggctttcaaatgtaagacccc

SEQ ID NO: 3317716 - DNA, 25 bp, Homo sapien
ctgcttcaggtctgatgtggctttc

SEQ ID NO: 3317717 - DNA, 25 bp, Homo sapien
tggctttcaaatgtaagacccccta

SEQ ID NO: 3317718 - DNA, 25 bp, Homo sapien
aagaacgaggccccaggatcttaag

SEQ ID NO: 3317719 - DNA, 25 bp, Homo sapien
ggatcttaagattcaaacggtccat

SEQ ID NO: 3317720 - DNA, 25 bp, Homo sapien
gaacgaggccccaggatcttaagat

SEQ ID NO: 3317721 - DNA, 25 bp, Homo sapien
aggatcttaagattcaaacggtcca

SEQ ID NO: 3317722 - DNA, 25 bp, Homo sapien
tactgatcttctagatgcttacagc

SEQ ID NO: 3317723 - DNA, 25 bp, Homo sapien
cagctaggagatccccagaaagcac

SEQ ID NO: 3317724 - DNA, 25 bp, Homo sapien
catgaagatgcttatactgatcttc

SEQ ID NO: 3317725 - DNA, 25 bp, Homo sapien
caattcaattcagagtcagacatcc

SEQ ID NO: 3317726 - DNA, 25 bp, Homo sapien
cccagccaatgaactgcatcattga

SEQ ID NO: 3317727 - DNA, 25 bp, Homo sapien
tgaactgcatcattgactaagtcac

SEQ ID NO: 3317728 - DNA, 25 bp, Homo sapien
gggacccagccaatgaactgcatca

SEQ ID NO: 3317729 - DNA, 25 bp, Homo sapien
caatgaactgcatcattgactaagt

SEQ ID NO: 3317730 - DNA, 25 bp, Homo sapien
taaacccaagtctgcatctagtgct

SEQ ID NO: 3317731 - DNA, 25 bp, Homo sapien
caactacaaatctgctcttcgaaga

SEQ ID NO: 3317732 - DNA, 25 bp, Homo sapien
tcgaagaattcaacaggacctccct

SEQ ID NO: 3317733 - DNA, 25 bp, Homo sapien
tttttgccgcagatcacagcaccct

SEQ ID NO: 3317734 - DNA, 25 bp, Homo sapien
tccaggaatgtctgacctttcccag

SEQ ID NO: 3317735 - DNA, 25 bp, Homo sapien
tacaaggttctgtaagggcagctct

SEQ ID NO: 3317736 - DNA, 25 bp, Homo sapien
tcttgcagccggctgagtgtcacca

SEQ ID NO: 3317737 - DNA, 25 bp, Homo sapien
cctttcccagggctttgatcaaacg

SEQ ID NO: 3317738 - DNA, 25 bp, Homo sapien
acttggaaggtggcaaagaattcat

SEQ ID NO: 3317739 - DNA, 25 bp, Homo sapien
gctaacttggaaggtggcaaagaat

SEQ ID NO: 3317740 - DNA, 25 bp, Homo sapien
taacttggaaggtggcaaagaattc

SEQ ID NO: 3317741 - DNA, 25 bp, Homo sapien
tgctaacttggaaggtggcaaagaa

SEQ ID NO: 3317742 - DNA, 25 bp, Homo sapien
tatgaactaagactgcaaacctgca

SEQ ID NO: 3317743 - DNA, 25 bp, Homo sapien
ccttcggtcacccttgataatatga

SEQ ID NO: 3317744 - DNA, 25 bp, Homo sapien
tcagtgacagcacttgagacaagaa

SEQ ID NO: 3317745 - DNA, 25 bp, Homo sapien
aagccagctgcagttataattctca

SEQ ID NO: 3317746 - DNA, 25 bp, Homo sapien
acctattagtctactttttatcctg

SEQ ID NO: 3317747 - DNA, 25 bp, Homo sapien
tgctttctgagtacccttaactttc

SEQ ID NO: 3317748 - DNA, 25 bp, Homo sapien
gaagcctggttcatcacattctaca

SEQ ID NO: 3317749 - DNA, 25 bp, Homo sapien
gtacccttaactttcagtccgctca

SEQ ID NO: 3317750 - DNA, 25 bp, Homo sapien
aacagccagctttaatggtccattt

SEQ ID NO: 3317751 - DNA, 25 bp, Homo sapien
ttagtttacttcagcagatgttgct

SEQ ID NO: 3317752 - DNA, 25 bp, Homo sapien
taagatgcctaatatcagctttaaa

SEQ ID NO: 3317753 - DNA, 25 bp, Homo sapien
tagggtatcacatctaccataatgc

SEQ ID NO: 3317754 - DNA, 25 bp, Homo sapien
gtgtatgcatgtttgtgagtatgta

SEQ ID NO: 3317755 - DNA, 25 bp, Homo sapien
tccttcagcaaggaatactatccca

SEQ ID NO: 3317756 - DNA, 25 bp, Homo sapien
tgttagtattgtattcccactgaca

SEQ ID NO: 3317757 - DNA, 25 bp, Homo sapien
tagtccggctgataggagctctccc

SEQ ID NO: 3317758 - DNA, 25 bp, Homo sapien
gacattctggagacgattctgttcc

SEQ ID NO: 3317759 - DNA, 25 bp, Homo sapien
ccactgggttagatcaaccttatta

SEQ ID NO: 3317760 - DNA, 25 bp, Homo sapien
tgtgacagtgactatgtaatcatgg

SEQ ID NO: 3317761 - DNA, 25 bp, Homo sapien
caggtgatgccgatgtggctgatct

SEQ ID NO: 3317762 - DNA, 25 bp, Homo sapien
taaatgagagtttatcatgtaactt

SEQ ID NO: 3317763 - DNA, 25 bp, Homo sapien
gggtcatttgcccttcagtaaggtg

SEQ ID NO: 3317764 - DNA, 25 bp, Homo sapien
aaaattctgagaggttgtctggtca

SEQ ID NO: 3317765 - DNA, 25 bp, Homo sapien
ggtgcctctccctaaataagtattg

SEQ ID NO: 3317766 - DNA, 25 bp, Homo sapien
cagacctagagttacgattcacaca

SEQ ID NO: 3317767 - DNA, 25 bp, Homo sapien
gattatgcagcctttaggatgaccc

SEQ ID NO: 3317768 - DNA, 25 bp, Homo sapien
cctgttaccattccaaatgctaatg

SEQ ID NO: 3317769 - DNA, 25 bp, Homo sapien
tgtcctatagaatatatcaacccaa

SEQ ID NO: 3317770 - DNA, 25 bp, Homo sapien
gaattgcacactcatagactctgta

SEQ ID NO: 3317771 - DNA, 25 bp, Homo sapien
tcattgaagccaacgctccaggcag

SEQ ID NO: 3317772 - DNA, 25 bp, Homo sapien
tagcaaagtgcgaggttactcctac

SEQ ID NO: 3317773 - DNA, 25 bp, Homo sapien
cacccggagtcaggttagctagcaa

SEQ ID NO: 3317774 - DNA, 25 bp, Homo sapien
tatctttcgataactgcacccaggg

SEQ ID NO: 3317775 - DNA, 25 bp, Homo sapien
gatgtggcatgtcagcgggactcca

SEQ ID NO: 3317776 - DNA, 25 bp, Homo sapien
ttttcaatgcaagcgagtggcagcc

SEQ ID NO: 3317777 - DNA, 25 bp, Homo sapien
cacaagagttttgagggtctgttcc

SEQ ID NO: 3317778 - DNA, 25 bp, Homo sapien
ttctgcctgaatagagacctctgcc

SEQ ID NO: 3317779 - DNA, 25 bp, Homo sapien
gggaagttgtaaatgcatgattcca

SEQ ID NO: 3317780 - DNA, 25 bp, Homo sapien
acaggatcacgtcttgacaagtgaa

SEQ ID NO: 3317781 - DNA, 25 bp, Homo sapien
caaaacctaatgccaccaaaagagg

SEQ ID NO: 3317782 - DNA, 25 bp, Homo sapien
cacaaatcagtatgacaggatcacg

SEQ ID NO: 3317783 - DNA, 25 bp, Homo sapien
tccacgtagcgaccttgtgacttta

SEQ ID NO: 3317784 - DNA, 25 bp, Homo sapien
tttgtccacgtagcgaccttgtgac

SEQ ID NO: 3317785 - DNA, 25 bp, Homo sapien
ctcatgaaaaggagtatctggatga

SEQ ID NO: 3317786 - DNA, 25 bp, Homo sapien
aaacactaaatgtttgctcatgaaa

SEQ ID NO: 3317787 - DNA, 25 bp, Homo sapien
tactatgccctaagaactcacgctg

SEQ ID NO: 3317788 - DNA, 25 bp, Homo sapien
gataggtgctttcttcttagaccca

SEQ ID NO: 3317789 - DNA, 25 bp, Homo sapien
tctgtgaagaagaccaactcaagcc

SEQ ID NO: 3317790 - DNA, 25 bp, Homo sapien
gatttctggtatagacacattcaca

SEQ ID NO: 3317791 - DNA, 25 bp, Homo sapien
caataacatctaaattgcagtgctc

SEQ ID NO: 3317792 - DNA, 25 bp, Homo sapien
tcaagattagaaccccaagatctcc

SEQ ID NO: 3317793 - DNA, 25 bp, Homo sapien
tgataactgttgattttgagccact

SEQ ID NO: 3317794 - DNA, 25 bp, Homo sapien
tactcttcccagatgtttgtgactg

SEQ ID NO: 3317795 - DNA, 25 bp, Homo sapien
gagactggaaccctaatccccgaga

SEQ ID NO: 3317796 - DNA, 25 bp, Homo sapien
gagacccatagacatgtgtttttca

SEQ ID NO: 3317797 - DNA, 25 bp, Homo sapien
caatctgagatttgacctccagggc

SEQ ID NO: 3317798 - DNA, 25 bp, Homo sapien
ccattttacaatctgagatttgacc

SEQ ID NO: 3317799 - DNA, 25 bp, Homo sapien
catctacatactacacaagttacca

SEQ ID NO: 3317800 - DNA, 25 bp, Homo sapien
tttacatctacatactacacaagtt

SEQ ID NO: 3317801 - DNA, 25 bp, Homo sapien
cacattttacatctacatactacac

SEQ ID NO: 3317802 - DNA, 25 bp, Homo sapien
gcataatgcagttataataccactg

SEQ ID NO: 3317803 - DNA, 25 bp, Homo sapien
taacagctcttatttagcaacgact

SEQ ID NO: 3317804 - DNA, 25 bp, Homo sapien
ggcaagacatcaaaggtagcactgt

SEQ ID NO: 3317805 - DNA, 25 bp, Homo sapien
tctgattctagaaagcttgtgggca

SEQ ID NO: 3317806 - DNA, 25 bp, Homo sapien
cgatcctaaggaaacattggccgat

SEQ ID NO: 3317807 - DNA, 25 bp, Homo sapien
atttggcatcattatgtacccggaa

SEQ ID NO: 3317808 - DNA, 25 bp, Homo sapien
gaaagagatccatttgacatgtatg

SEQ ID NO: 3317809 - DNA, 25 bp, Homo sapien
tatgggtcgttattcatatttggca

SEQ ID NO: 3317810 - DNA, 25 bp, Homo sapien
ataactcgagtaggagggtcccttg

SEQ ID NO: 3317811 - DNA, 25 bp, Homo sapien
ttctctggccttgtcgtggtagggc

SEQ ID NO: 3317812 - DNA, 25 bp, Homo sapien
cgtcatcggggtgttctctggcctt

SEQ ID NO: 3317813 - DNA, 25 bp, Homo sapien
gtgttctctggccttgtcgtggtag

SEQ ID NO: 3317814 - DNA, 25 bp, Homo sapien
tctctggccttgtcgtggtagggct

SEQ ID NO: 3317815 - DNA, 25 bp, Homo sapien
tgagaggtttgtgcttgtctggcca

SEQ ID NO: 3317816 - DNA, 25 bp, Homo sapien
gagaggtttgtgcttgtctggccac

SEQ ID NO: 3317817 - DNA, 25 bp, Homo sapien
ctgagaggtttgtgcttgtctggcc

SEQ ID NO: 3317818 - DNA, 25 bp, Homo sapien
tctatcgcccgcagcgggccagaag

SEQ ID NO: 3317819 - DNA, 25 bp, Homo sapien
gccagaagacccgataaagcgcctt

SEQ ID NO: 3317820 - DNA, 25 bp, Homo sapien
gcgtagatttaaggcctgatccggt

SEQ ID NO: 3317821 - DNA, 25 bp, Homo sapien
accctgcaggactagtgcccggctt

SEQ ID NO: 3317822 - DNA, 25 bp, Homo sapien
ggaactggggcagcggcccgctcac

SEQ ID NO: 3317823 - DNA, 25 bp, Homo sapien
ccgccacgcctctcggaactggggc

SEQ ID NO: 3317824 - DNA, 25 bp, Homo sapien
cacgcctctcggaactggggcagcg

SEQ ID NO: 3317825 - DNA, 25 bp, Homo sapien
gccacgcctctcggaactggggcag

SEQ ID NO: 3317826 - DNA, 25 bp, Homo sapien
tcggcgaagatcttttccttctgag

SEQ ID NO: 3317827 - DNA, 25 bp, Homo sapien
tcgggatgactgatctcggcgaaga

SEQ ID NO: 3317828 - DNA, 25 bp, Homo sapien
gccgggatgatttcagactcgttca

SEQ ID NO: 3317829 - DNA, 25 bp, Homo sapien
agctaaatcgccttcctcttcggga

SEQ ID NO: 3317830 - DNA, 25 bp, Homo sapien
cggcggctctgtaatctccgctccg

SEQ ID NO: 3317831 - DNA, 25 bp, Homo sapien
ccggcggctctgtaatctccgctcc

SEQ ID NO: 3317832 - DNA, 25 bp, Homo sapien
cccggcggctctgtaatctccgctc

SEQ ID NO: 3317833 - DNA, 25 bp, Homo sapien
tttgttcccggctcgagtttctcag

SEQ ID NO: 3317834 - DNA, 25 bp, Homo sapien
aataaagtttttgccggcaagcgcg

SEQ ID NO: 3317835 - DNA, 25 bp, Homo sapien
tccactgtagttaccccggatgccg

SEQ ID NO: 3317836 - DNA, 25 bp, Homo sapien
aagcaaagagctgcgccccttgagt

SEQ ID NO: 3317837 - DNA, 25 bp, Homo sapien
cgcctctagctctccttggctgccc

SEQ ID NO: 3317838 - DNA, 25 bp, Homo sapien
gcctctagctctccttggctgcccg

SEQ ID NO: 3317839 - DNA, 25 bp, Homo sapien
cctcccccgcctctagctctccttg

SEQ ID NO: 3317840 - DNA, 25 bp, Homo sapien
ccccgcctctagctctccttggctg

SEQ ID NO: 3317841 - DNA, 25 bp, Homo sapien
gctttgcccgcgtgaaactgacaag

SEQ ID NO: 3317842 - DNA, 25 bp, Homo sapien
ggcgctgcttataacccaccgaaag

SEQ ID NO: 3317843 - DNA, 25 bp, Homo sapien
gaaacattgccgcagtggcttgact

SEQ ID NO: 3317844 - DNA, 25 bp, Homo sapien
gctgccgctgtgatggacaccacat

SEQ ID NO: 3317845 - DNA, 25 bp, Homo sapien
tctgttctcaccacgggatgtacgg

SEQ ID NO: 3317846 - DNA, 25 bp, Homo sapien
tggactgcgaactgaaagggaccct

SEQ ID NO: 3317847 - DNA, 25 bp, Homo sapien
cagtgtgtgggaacctcatcgagaa

SEQ ID NO: 3317848 - DNA, 25 bp, Homo sapien
gttttcagagacacacaccgcagtg

SEQ ID NO: 3317849 - DNA, 25 bp, Homo sapien
tgtaaatcttctgatgagcagcact

SEQ ID NO: 3317850 - DNA, 25 bp, Homo sapien
ctaaagcttcgtttgggagagaggt

SEQ ID NO: 3317851 - DNA, 25 bp, Homo sapien
tctaacgaaatcacccagcaccttg

SEQ ID NO: 3317852 - DNA, 25 bp, Homo sapien
gagaccccgtccattgaaaacattg

SEQ ID NO: 3317853 - DNA, 25 bp, Homo sapien
ccttcactcggatgttagaggcaag

SEQ ID NO: 3317854 - DNA, 25 bp, Homo sapien
gatattaacataagcagccgcctct

SEQ ID NO: 3317855 - DNA, 25 bp, Homo sapien
tgaactcgagcgaacgactggaggt

SEQ ID NO: 3317856 - DNA, 25 bp, Homo sapien
agcaattctgtcaccgggcggtctt

SEQ ID NO: 3317857 - DNA, 25 bp, Homo sapien
cctagaacggagctagaatggaggt

SEQ ID NO: 3317858 - DNA, 25 bp, Homo sapien
tcatttcgtgggcaggacgtgacat

SEQ ID NO: 3317859 - DNA, 25 bp, Homo sapien
gctggagtcattttgcgggccacag

SEQ ID NO: 3317860 - DNA, 25 bp, Homo sapien
cgagggcacacgtcctaaggctgcc

SEQ ID NO: 3317861 - DNA, 25 bp, Homo sapien
caggaaaaccagtttggctattaag

SEQ ID NO: 3317862 - DNA, 25 bp, Homo sapien
tgcactgctttctttttcttcttct

SEQ ID NO: 3317863 - DNA, 25 bp, Homo sapien
atttcttgcactgctttctttttct

SEQ ID NO: 3317864 - DNA, 25 bp, Homo sapien
tcttccaggaaaaccagtttggcta

SEQ ID NO: 3317865 - DNA, 25 bp, Homo sapien
gagaggctggagatccctttttatc

SEQ ID NO: 3317866 - DNA, 25 bp, Homo sapien
tagaatggtcagctgggtcgagtct

SEQ ID NO: 3317867 - DNA, 25 bp, Homo sapien
ggtcgagtcttgagtgcggtgagaa

SEQ ID NO: 3317868 - DNA, 25 bp, Homo sapien
ggacaggtgcatagtgagagaggct

SEQ ID NO: 3317869 - DNA, 25 bp, Homo sapien
agatatctaaaatgggaattctgat

SEQ ID NO: 3317870 - DNA, 25 bp, Homo sapien
ttctagctgcaaagatatctaaaat

SEQ ID NO: 3317871 - DNA, 25 bp, Homo sapien
aagatatctaaaatgggaattctga

SEQ ID NO: 3317872 - DNA, 25 bp, Homo sapien
tcactgtgttgactggaatgccccg

SEQ ID NO: 3317873 - DNA, 25 bp, Homo sapien
taggcagacagtgtctgcatcacct

SEQ ID NO: 3317874 - DNA, 25 bp, Homo sapien
ctttcttaggactgctcagctgagg

SEQ ID NO: 3317875 - DNA, 25 bp, Homo sapien
ctgaggaacggtccttaggcagatg

SEQ ID NO: 3317876 - DNA, 25 bp, Homo sapien
taaactactgtgagtagtctttctt

SEQ ID NO: 3317877 - DNA, 25 bp, Homo sapien
tgtgagtagtctttcttcatcatga

SEQ ID NO: 3317878 - DNA, 25 bp, Homo sapien
agtagtctttcttcatcatgatcaa

SEQ ID NO: 3317879 - DNA, 25 bp, Homo sapien
ctgtcccataaactactgtgagtag

SEQ ID NO: 3317880 - DNA, 25 bp, Homo sapien
tgggatggataaggtatggaaagcg

SEQ ID NO: 3317881 - DNA, 25 bp, Homo sapien
ctggggaagttgaaagagctatatc

SEQ ID NO: 3317882 - DNA, 25 bp, Homo sapien
tgatagctgatagggatgctcaagg

SEQ ID NO: 3317883 - DNA, 25 bp, Homo sapien
gctatatcttgacctgaggcaaggt

SEQ ID NO: 3317884 - DNA, 25 bp, Homo sapien
ttttgaagggcagtagcagtttttc

SEQ ID NO: 3317885 - DNA, 25 bp, Homo sapien
cagttatctcgaatgcaaattaaaa

SEQ ID NO: 3317886 - DNA, 25 bp, Homo sapien
agagaatattctctcctattgaaaa

SEQ ID NO: 3317887 - DNA, 25 bp, Homo sapien
ttctcctattatcatggctctgttc

SEQ ID NO: 3317888 - DNA, 25 bp, Homo sapien
tgtagaagatttaagagattggctt

SEQ ID NO: 3317889 - DNA, 25 bp, Homo sapien
gatttaagagattggcttaaacata

SEQ ID NO: 3317890 - DNA, 25 bp, Homo sapien
gaagatttaagagattggcttaaac

SEQ ID NO: 3317891 - DNA, 25 bp, Homo sapien
ctgtagaagatttaagagattggct

SEQ ID NO: 3317892 - DNA, 25 bp, Homo sapien
ttgctgggttctggttaaagtgcta

SEQ ID NO: 3317893 - DNA, 25 bp, Homo sapien
gtttaaatctctctcacaaaagtgg

SEQ ID NO: 3317894 - DNA, 25 bp, Homo sapien
ggtctccatgaatcacttaaagttt

SEQ ID NO: 3317895 - DNA, 25 bp, Homo sapien
aagtgctaagatgtttaaagactcc

SEQ ID NO: 3317896 - DNA, 25 bp, Homo sapien
gatgcagctaattcctcagtactgg

SEQ ID NO: 3317897 - DNA, 25 bp, Homo sapien
ttccttggatgcagctaattcctca

SEQ ID NO: 3317898 - DNA, 25 bp, Homo sapien
taattcctcagtactggattttggg

SEQ ID NO: 3317899 - DNA, 25 bp, Homo sapien
cttttccttggatgcagctaattcc

SEQ ID NO: 3317900 - DNA, 25 bp, Homo sapien
tatgaactgagagtcctgcccatta

SEQ ID NO: 3317901 - DNA, 25 bp, Homo sapien
atcttttgagcaggccacatgtcta

SEQ ID NO: 3317902 - DNA, 25 bp, Homo sapien
agctgtgttggccatacaggcaatt

SEQ ID NO: 3317903 - DNA, 25 bp, Homo sapien
ggcaatttggataacatctgttctg

SEQ ID NO: 3317904 - DNA, 25 bp, Homo sapien
tttaagtctcgaattttcctgccca

SEQ ID NO: 3317905 - DNA, 25 bp, Homo sapien
tgctcttctctacccttggaatgct

SEQ ID NO: 3317906 - DNA, 25 bp, Homo sapien
gcatcttgcgatacagggactctgt

SEQ ID NO: 3317907 - DNA, 25 bp, Homo sapien
caagaattttatggctcctcttcca

SEQ ID NO: 3317908 - DNA, 25 bp, Homo sapien
gacattctgatcaaagtccttacca

SEQ ID NO: 3317909 - DNA, 25 bp, Homo sapien
tgattatttcttgtggtgttgaggg

SEQ ID NO: 3317910 - DNA, 25 bp, Homo sapien
tgagggatccgtagacacctccaac

SEQ ID NO: 3317911 - DNA, 25 bp, Homo sapien
aactgtatcaacatctgattatttc

SEQ ID NO: 3317912 - DNA, 25 bp, Homo sapien
aatgaaagcatgcttcacaaaactc

SEQ ID NO: 3317913 - DNA, 25 bp, Homo sapien
aaagcatgcttcacaaaactcacat

SEQ ID NO: 3317914 - DNA, 25 bp, Homo sapien
gaaagcatgcttcacaaaactcaca

SEQ ID NO: 3317915 - DNA, 25 bp, Homo sapien
tgaaagcatgcttcacaaaactcac

SEQ ID NO: 3317916 - DNA, 25 bp, Homo sapien
taaacatgacaatttgtcgctttta

SEQ ID NO: 3317917 - DNA, 25 bp, Homo sapien
tttcttagtctatttgccttcttat

SEQ ID NO: 3317918 - DNA, 25 bp, Homo sapien
gaactgacgttttatattgtaaaga

SEQ ID NO: 3317919 - DNA, 25 bp, Homo sapien
gacaatttgtcgcttttactgattt

SEQ ID NO: 3317920 - DNA, 25 bp, Homo sapien
cctggccaggcttctgatgggactt

SEQ ID NO: 3317921 - DNA, 25 bp, Homo sapien
ttctcttcttcataaagggacaggg

SEQ ID NO: 3317922 - DNA, 25 bp, Homo sapien
acagtggggcatgaagaggttctct

SEQ ID NO: 3317923 - DNA, 25 bp, Homo sapien
ttttacttggccacaaatgaaatca

SEQ ID NO: 3317924 - DNA, 25 bp, Homo sapien
taactctgtggtgtattttgtctct

SEQ ID NO: 3317925 - DNA, 25 bp, Homo sapien
tcttttcttttgcaagccaccgaaa

SEQ ID NO: 3317926 - DNA, 25 bp, Homo sapien
gccaccgaaagtcatgtgttagtct

SEQ ID NO: 3317927 - DNA, 25 bp, Homo sapien
tccttgtgatctttgaaatatcctc

SEQ ID NO: 3317928 - DNA, 25 bp, Homo sapien
ttcagaatagttcattgtgaagaat

SEQ ID NO: 3317929 - DNA, 25 bp, Homo sapien
tggcatttcatacccttcaagttct

SEQ ID NO: 3317930 - DNA, 25 bp, Homo sapien
cccttcaagttctacatcatacagc

SEQ ID NO: 3317931 - DNA, 25 bp, Homo sapien
gaattccactggcatttcataccct

SEQ ID NO: 3317932 - DNA, 25 bp, Homo sapien
taggatttaagccaatctgcatctg

SEQ ID NO: 3317933 - DNA, 25 bp, Homo sapien
caaatacggcagcaataagaggtca

SEQ ID NO: 3317934 - DNA, 25 bp, Homo sapien
tctgcatctgaatgctatttcccaa

SEQ ID NO: 3317935 - DNA, 25 bp, Homo sapien
cacatggttgaatggattgatagga

SEQ ID NO: 3317936 - DNA, 25 bp, Homo sapien
gccccaagataattactgtcctgaa

SEQ ID NO: 3317937 - DNA, 25 bp, Homo sapien
tactgtcctgaatttgagttttaac

SEQ ID NO: 3317938 - DNA, 25 bp, Homo sapien
ccttctgccccaagataattactgt

SEQ ID NO: 3317939 - DNA, 25 bp, Homo sapien
ctgtcctgaatttgagttttaacaa

SEQ ID NO: 3317940 - DNA, 25 bp, Homo sapien
tcttcactgaagaaaccactcgaga

SEQ ID NO: 3317941 - DNA, 25 bp, Homo sapien
tgttcttttcgaggttgcccacatc

SEQ ID NO: 3317942 - DNA, 25 bp, Homo sapien
caggagccacgctctgtgccaggtg

SEQ ID NO: 3317943 - DNA, 25 bp, Homo sapien
aaccactcgagatggcttggcagga

SEQ ID NO: 3317944 - DNA, 25 bp, Homo sapien
gaatttcagagtatatttatcaggt

SEQ ID NO: 3317945 - DNA, 25 bp, Homo sapien
catcctgcacggaattgaaatcttc

SEQ ID NO: 3317946 - DNA, 25 bp, Homo sapien
tgcatcctgcacggaattgaaatct

SEQ ID NO: 3317947 - DNA, 25 bp, Homo sapien
cagagtatatttatcaggtgaatga

SEQ ID NO: 3317948 - DNA, 25 bp, Homo sapien
tgtgagggaagccagaatagaacaa

SEQ ID NO: 3317949 - DNA, 25 bp, Homo sapien
caaagtgtggtgttcccatgaaatc

SEQ ID NO: 3317950 - DNA, 25 bp, Homo sapien
ccatttaagccagcatgcgtttgaa

SEQ ID NO: 3317951 - DNA, 25 bp, Homo sapien
gcttgataagagtgtgagtctgcac

SEQ ID NO: 3317952 - DNA, 25 bp, Homo sapien
tccttgttcagagcacagttgagac

SEQ ID NO: 3317953 - DNA, 25 bp, Homo sapien
cccaaatcttcacgctgctgtcgaa

SEQ ID NO: 3317954 - DNA, 25 bp, Homo sapien
ttcacgctgctgtcgaacatatgtt

SEQ ID NO: 3317955 - DNA, 25 bp, Homo sapien
tcagagcacagttgagaccccaaat

SEQ ID NO: 3317956 - DNA, 25 bp, Homo sapien
atatgataccacacatggagaactg

SEQ ID NO: 3317957 - DNA, 25 bp, Homo sapien
tctgttgctgcaaatatgataccac

SEQ ID NO: 3317958 - DNA, 25 bp, Homo sapien
caaacatcccgtcaaaagcttcttc

SEQ ID NO: 3317959 - DNA, 25 bp, Homo sapien
gaactggcgcttggcctctgagagc

SEQ ID NO: 3317960 - DNA, 25 bp, Homo sapien
tgagctgcccttgcggctgacttca

SEQ ID NO: 3317961 - DNA, 25 bp, Homo sapien
cccttgcggctgacttcacagagaa

SEQ ID NO: 3317962 - DNA, 25 bp, Homo sapien
gcttggtgagctgcccttgcggctg

SEQ ID NO: 3317963 - DNA, 25 bp, Homo sapien
ctgcccttgcggctgacttcacaga

SEQ ID NO: 3317964 - DNA, 25 bp, Homo sapien
tcatagtcttggtaaaagtagcccc

SEQ ID NO: 3317965 - DNA, 25 bp, Homo sapien
ctacaaggtgtgtcatagtcttggt

SEQ ID NO: 3317966 - DNA, 25 bp, Homo sapien
gggaccctcttgctacaaggtgtgt

SEQ ID NO: 3317967 - DNA, 25 bp, Homo sapien
tctgggaccctcttgctacaaggtg

SEQ ID NO: 3317968 - DNA, 25 bp, Homo sapien
aatgagtagtcagatttgccagcaa

SEQ ID NO: 3317969 - DNA, 25 bp, Homo sapien
tagaacaaggtccagatttactttc

SEQ ID NO: 3317970 - DNA, 25 bp, Homo sapien
tgtctgtaatcctaaatccatcact

SEQ ID NO: 3317971 - DNA, 25 bp, Homo sapien
tccatcactttagtggtgctcatag

SEQ ID NO: 3317972 - DNA, 25 bp, Homo sapien
tccaaatattagcagttcatgaagc

SEQ ID NO: 3317973 - DNA, 25 bp, Homo sapien
gattgcatgagtccacacaaggaga

SEQ ID NO: 3317974 - DNA, 25 bp, Homo sapien
caaggagaagacttatgggcttttg

SEQ ID NO: 3317975 - DNA, 25 bp, Homo sapien
taaatccaaatattagcagttcatg

SEQ ID NO: 3317976 - DNA, 25 bp, Homo sapien
gaagacagatctttccttgagctcc

SEQ ID NO: 3317977 - DNA, 25 bp, Homo sapien
caacagctgatatgccagaagaaga

SEQ ID NO: 3317978 - DNA, 25 bp, Homo sapien
tgctggctgaaatataggagctgcc

SEQ ID NO: 3317979 - DNA, 25 bp, Homo sapien
gaagcatccttctcctacctcttag

SEQ ID NO: 3317980 - DNA, 25 bp, Homo sapien
agcacatgcgaaaaccaggagtgac

SEQ ID NO: 3317981 - DNA, 25 bp, Homo sapien
acagcattgccaaaggcatgcaggg

SEQ ID NO: 3317982 - DNA, 25 bp, Homo sapien
gcatgcaggggaacactgcacagca

SEQ ID NO: 3317983 - DNA, 25 bp, Homo sapien
cgaaaaccaggagtgaccttgtggg

SEQ ID NO: 3317984 - DNA, 25 bp, Homo sapien
ccattgtaactgtatccgttcagca

SEQ ID NO: 3317985 - DNA, 25 bp, Homo sapien
gatcttcgttttaactggtggtgcc

SEQ ID NO: 3317986 - DNA, 25 bp, Homo sapien
catttacctccgacactctctgtgg

SEQ ID NO: 3317987 - DNA, 25 bp, Homo sapien
tctcaggttgatccaagaatggcag

SEQ ID NO: 3317988 - DNA, 25 bp, Homo sapien
tgtgacaggatctcctaccattcgc

SEQ ID NO: 3317989 - DNA, 25 bp, Homo sapien
gaaccattatcaatccagcaatccg

SEQ ID NO: 3317990 - DNA, 25 bp, Homo sapien
tgaagcttcccgtgttagaccctgg

SEQ ID NO: 3317991 - DNA, 25 bp, Homo sapien
gagatagtccttccgtcattgcaga

SEQ ID NO: 3317992 - DNA, 25 bp, Homo sapien
caaatctggaaggtgtgacgcgctt

SEQ ID NO: 3317993 - DNA, 25 bp, Homo sapien
tgtaatgcctgagtctggaacgcgc

SEQ ID NO: 3317994 - DNA, 25 bp, Homo sapien
agcattcacctggagtgtgtcacga

SEQ ID NO: 3317995 - DNA, 25 bp, Homo sapien
tcaggcggacagagaagaattcttc

SEQ ID NO: 3317996 - DNA, 25 bp, Homo sapien
tcctgagggcgtatatgtactatgc

SEQ ID NO: 3317997 - DNA, 25 bp, Homo sapien
aaactcaggaaatacgtggtccaag

SEQ ID NO: 3317998 - DNA, 25 bp, Homo sapien
attgctgaatgtagcctcccaagaa

SEQ ID NO: 3317999 - DNA, 25 bp, Homo sapien
tagggtgggctgaatgctcctgctt

SEQ ID NO: 3318000 - DNA, 25 bp, Homo sapien
tgctcttcctcagtgccacagagat

SEQ ID NO: 3318001 - DNA, 25 bp, Homo sapien
tcagtgccacagagattgtgctgct

SEQ ID NO: 3318002 - DNA, 25 bp, Homo sapien
gggctatgagcagccccagactagt

SEQ ID NO: 3318003 - DNA, 25 bp, Homo sapien
gcctggggcaactttggggctatga

SEQ ID NO: 3318004 - DNA, 25 bp, Homo sapien
ctgctccatgtgtatatgtacttct

SEQ ID NO: 3318005 - DNA, 25 bp, Homo sapien
gagaggccccataggtttccttgac

SEQ ID NO: 3318006 - DNA, 25 bp, Homo sapien
gaggccccataggtttccttgacaa

SEQ ID NO: 3318007 - DNA, 25 bp, Homo sapien
ttgtgccgagaggccccataggttt

SEQ ID NO: 3318008 - DNA, 25 bp, Homo sapien
ccgagaggccccataggtttccttg

SEQ ID NO: 3318009 - DNA, 25 bp, Homo sapien
ttcaaggccatcattgaagcccttg

SEQ ID NO: 3318010 - DNA, 25 bp, Homo sapien
tcattgaagcccttgaaacactcct

SEQ ID NO: 3318011 - DNA, 25 bp, Homo sapien
gaaacactccttgatcatctgctgc

SEQ ID NO: 3318012 - DNA, 25 bp, Homo sapien
gaagcccttgaaacactccttgatc

SEQ ID NO: 3318013 - DNA, 25 bp, Homo sapien
gttgggtcctcatataccttggact

SEQ ID NO: 3318014 - DNA, 25 bp, Homo sapien
tcagagttgggtcctcatatacctt

SEQ ID NO: 3318015 - DNA, 25 bp, Homo sapien
agagttgggtcctcatataccttgg

SEQ ID NO: 3318016 - DNA, 25 bp, Homo sapien
gagttgggtcctcatataccttgga

SEQ ID NO: 3318017 - DNA, 25 bp, Homo sapien
tagcagtcacttgctgaacttggaa

SEQ ID NO: 3318018 - DNA, 25 bp, Homo sapien
acttgctgaacttggaaccatggct

SEQ ID NO: 3318019 - DNA, 25 bp, Homo sapien
gaaccatggctgtggctgaagaact

SEQ ID NO: 3318020 - DNA, 25 bp, Homo sapien
ggctgaagaactggcctcctgggaa

SEQ ID NO: 3318021 - DNA, 25 bp, Homo sapien
ttgggcatgttgcattcattgtcga

SEQ ID NO: 3318022 - DNA, 25 bp, Homo sapien
gaggatgacgttgcttgtgagcatg

SEQ ID NO: 3318023 - DNA, 25 bp, Homo sapien
cctccagtgctttggctccaataga

SEQ ID NO: 3318024 - DNA, 25 bp, Homo sapien
cattgtcgaggtcatttttgatgtt

SEQ ID NO: 3318025 - DNA, 25 bp, Homo sapien
gatgatgaggccaggtgatttgttc

SEQ ID NO: 3318026 - DNA, 25 bp, Homo sapien
gtgatttgttcttgctgatggcggc

SEQ ID NO: 3318027 - DNA, 25 bp, Homo sapien
gatgaggccaggtgatttgttcttg

SEQ ID NO: 3318028 - DNA, 25 bp, Homo sapien
atttgttcttgctgatggcggccat

SEQ ID NO: 3318029 - DNA, 25 bp, Homo sapien
atagaagggcagtagggaattccag

SEQ ID NO: 3318030 - DNA, 25 bp, Homo sapien
gatagaagggcagtagggaattcca

SEQ ID NO: 3318031 - DNA, 25 bp, Homo sapien
gggatagaagggcagtagggaattc

SEQ ID NO: 3318032 - DNA, 25 bp, Homo sapien
tggggatagaagggcagtagggaat

SEQ ID NO: 3318033 - DNA, 25 bp, Homo sapien
gctggctggagcaaatcttgtagta

SEQ ID NO: 3318034 - DNA, 25 bp, Homo sapien
ccagctggctggagcaaatcttgta

SEQ ID NO: 3318035 - DNA, 25 bp, Homo sapien
cagctggctggagcaaatcttgtag

SEQ ID NO: 3318036 - DNA, 25 bp, Homo sapien
agctggctggagcaaatcttgtagt

SEQ ID NO: 3318037 - DNA, 25 bp, Homo sapien
caggcgatgcagattacatcctgga

SEQ ID NO: 3318038 - DNA, 25 bp, Homo sapien
caaacttattgtgcctggtcatcag

SEQ ID NO: 3318039 - DNA, 25 bp, Homo sapien
tggatcacactcttgggcaggtgct

SEQ ID NO: 3318040 - DNA, 25 bp, Homo sapien
ggacataatctcctgtacctccaga

SEQ ID NO: 3318041 - DNA, 25 bp, Homo sapien
gctgtctgggctattgtcctggaaa

SEQ ID NO: 3318042 - DNA, 25 bp, Homo sapien
cctggaaatactccacagccttctg

SEQ ID NO: 3318043 - DNA, 25 bp, Homo sapien
ctgcagagctcagatgtgtgttctg

SEQ ID NO: 3318044 - DNA, 25 bp, Homo sapien
ccacagccttctgaatcttagccat

SEQ ID NO: 3318045 - DNA, 25 bp, Homo sapien
tgatgacaggatagacatcatgttc

SEQ ID NO: 3318046 - DNA, 25 bp, Homo sapien
gaatataggacagcacctcctcctc

SEQ ID NO: 3318047 - DNA, 25 bp, Homo sapien
ggatagcgtcttctcaaaattgtct

SEQ ID NO: 3318048 - DNA, 25 bp, Homo sapien
tatggtagctctcatatgatgacag

SEQ ID NO: 3318049 - DNA, 25 bp, Homo sapien
ggtgaatgcctccagtggaaggatc

SEQ ID NO: 3318050 - DNA, 25 bp, Homo sapien
tctggcagccaggtgaatgcctcca

SEQ ID NO: 3318051 - DNA, 25 bp, Homo sapien
cagccaggtgaatgcctccagtgga

SEQ ID NO: 3318052 - DNA, 25 bp, Homo sapien
tctcttcaatctctggcagccaggt

SEQ ID NO: 3318053 - DNA, 25 bp, Homo sapien
cccagggccatcttgtatgcttgtc

SEQ ID NO: 3318054 - DNA, 25 bp, Homo sapien
ggccatcttgtatgcttgtcctcct

SEQ ID NO: 3318055 - DNA, 25 bp, Homo sapien
ctacacatagagttgattactaact

SEQ ID NO: 3318056 - DNA, 25 bp, Homo sapien
gattactaactcgtaaagattctat

SEQ ID NO: 3318057 - DNA, 25 bp, Homo sapien
tgccaaaaggttatctgtgaggaac

SEQ ID NO: 3318058 - DNA, 25 bp, Homo sapien
tgttgacagcttttcgccattgaag

SEQ ID NO: 3318059 - DNA, 25 bp, Homo sapien
tttgccagccaagtgaaaggaggaa

SEQ ID NO: 3318060 - DNA, 25 bp, Homo sapien
ggccagagtgcttgaccaaggaacc

SEQ ID NO: 3318061 - DNA, 25 bp, Homo sapien
tagctccttccaaaaactgaccttg

SEQ ID NO: 3318062 - DNA, 25 bp, Homo sapien
tcccacagctcagcatatagctcag

SEQ ID NO: 3318063 - DNA, 25 bp, Homo sapien
ccttgtgccttcctcgttgtctggg

SEQ ID NO: 3318064 - DNA, 25 bp, Homo sapien
tagctcagactctctataaatacgt

SEQ ID NO: 3318065 - DNA, 25 bp, Homo sapien
ctattacattgtctggagaattggg

SEQ ID NO: 3318066 - DNA, 25 bp, Homo sapien
tcctttagggtatgacaaactatta

SEQ ID NO: 3318067 - DNA, 25 bp, Homo sapien
tcatttcttttaagttagtgaggac

SEQ ID NO: 3318068 - DNA, 25 bp, Homo sapien
ttttcatattaaattgcttgatcat

SEQ ID NO: 3318069 - DNA, 25 bp, Homo sapien
aaaaagctttgtgagtctgctgaaa

SEQ ID NO: 3318070 - DNA, 25 bp, Homo sapien
gctttgtgagtctgctgaaaagaaa

SEQ ID NO: 3318071 - DNA, 25 bp, Homo sapien
aaataggaggttgttctttgcttag

SEQ ID NO: 3318072 - DNA, 25 bp, Homo sapien
aataggaggttgttctttgcttagg

SEQ ID NO: 3318073 - DNA, 25 bp, Homo sapien
gccaggccattttagcaactaccag

SEQ ID NO: 3318074 - DNA, 25 bp, Homo sapien
tggaaccaataagtccagtcagtag

SEQ ID NO: 3318075 - DNA, 25 bp, Homo sapien
cagacctccagtttgatgactggca

SEQ ID NO: 3318076 - DNA, 25 bp, Homo sapien
ctgtccagttgaaacaaggactgct

SEQ ID NO: 3318077 - DNA, 25 bp, Homo sapien
tctctcccaggagccaaccgtctct

SEQ ID NO: 3318078 - DNA, 25 bp, Homo sapien
gaggagtcggtcagtgctttcagcc

SEQ ID NO: 3318079 - DNA, 25 bp, Homo sapien
tggtggagagcagctgtagttgctt

SEQ ID NO: 3318080 - DNA, 25 bp, Homo sapien
ttctgccatgctccaaacacgggct

SEQ ID NO: 3318081 - DNA, 25 bp, Homo sapien
ctagtaaggcagaaagacctctctt

SEQ ID NO: 3318082 - DNA, 25 bp, Homo sapien
tagtaaggcagaaagacctctcttc

SEQ ID NO: 3318083 - DNA, 25 bp, Homo sapien
ctctcttcccagcctacattttcag

SEQ ID NO: 3318084 - DNA, 25 bp, Homo sapien
gacctctcttcccagcctacatttt

SEQ ID NO: 3318085 - DNA, 25 bp, Homo sapien
tttatgaataatgtcttgtgacagc

SEQ ID NO: 3318086 - DNA, 25 bp, Homo sapien
tttaagtcacattccaggccccctg

SEQ ID NO: 3318087 - DNA, 25 bp, Homo sapien
cctgtatcacctcgataatcacaca

SEQ ID NO: 3318088 - DNA, 25 bp, Homo sapien
acttgaagtagttaatatgtttatg

SEQ ID NO: 3318089 - DNA, 25 bp, Homo sapien
gatggtaaaggatgcctcagggtct

SEQ ID NO: 3318090 - DNA, 25 bp, Homo sapien
ggatattattagcagttgcaggagg

SEQ ID NO: 3318091 - DNA, 25 bp, Homo sapien
cccaacctgtggctgaggagggcaa

SEQ ID NO: 3318092 - DNA, 25 bp, Homo sapien
cagccctgctgggtaatagctggat

SEQ ID NO: 3318093 - DNA, 25 bp, Homo sapien
cagacggttctgagaactacacttt

SEQ ID NO: 3318094 - DNA, 25 bp, Homo sapien
tgttaaatcacagacggttctgaga

SEQ ID NO: 3318095 - DNA, 25 bp, Homo sapien
aatcacagacggttctgagaactac

SEQ ID NO: 3318096 - DNA, 25 bp, Homo sapien
tcatgttaaatcacagacggttctg

SEQ ID NO: 3318097 - DNA, 25 bp, Homo sapien
gacacagcgggttatccgagaggtt

SEQ ID NO: 3318098 - DNA, 25 bp, Homo sapien
ctgtcctggacacagcgggttatcc

SEQ ID NO: 3318099 - DNA, 25 bp, Homo sapien
ccactgtatcaatgatgtccatttc

SEQ ID NO: 3318100 - DNA, 25 bp, Homo sapien
cacagcgggttatccgagaggtttt

SEQ ID NO: 3318101 - DNA, 25 bp, Homo sapien
taattaaacccaagaatctgaagga

SEQ ID NO: 3318102 - DNA, 25 bp, Homo sapien
ccttggtaacttctacatcggataa

SEQ ID NO: 3318103 - DNA, 25 bp, Homo sapien
ttccaagtgtggtgcttgggtgtcc

SEQ ID NO: 3318104 - DNA, 25 bp, Homo sapien
cattgtgagccgttcaactttataa

SEQ ID NO: 3318105 - DNA, 25 bp, Homo sapien
gaaagtaggaactcagatatgttga

SEQ ID NO: 3318106 - DNA, 25 bp, Homo sapien
aatatgcagagacttgcggaggcga

SEQ ID NO: 3318107 - DNA, 25 bp, Homo sapien
cagatatgttgatgataaaacaatg

SEQ ID NO: 3318108 - DNA, 25 bp, Homo sapien
gagaagaaatatgcagagacttgcg

SEQ ID NO: 3318109 - DNA, 25 bp, Homo sapien
gtgaccataaacctcaatgttttat

SEQ ID NO: 3318110 - DNA, 25 bp, Homo sapien
cctgtaatttatgagcgatatttaa

SEQ ID NO: 3318111 - DNA, 25 bp, Homo sapien
ttagcatacctttgatgtgctgccc

SEQ ID NO: 3318112 - DNA, 25 bp, Homo sapien
gatgtgctgcccagcactacacaat

SEQ ID NO: 3318113 - DNA, 25 bp, Homo sapien
aatcgaggtcatccggtgagaattc

SEQ ID NO: 3318114 - DNA, 25 bp, Homo sapien
cactgaagaaatcgaggtcatccgg

SEQ ID NO: 3318115 - DNA, 25 bp, Homo sapien
ggtcatccggtgagaattcctccaa

SEQ ID NO: 3318116 - DNA, 25 bp, Homo sapien
gaagaaatcgaggtcatccggtgag

SEQ ID NO: 3318117 - DNA, 25 bp, Homo sapien
tccttcaatatggagaccatattct

SEQ ID NO: 3318118 - DNA, 25 bp, Homo sapien
tcatctaaatgtgctattaactcct

SEQ ID NO: 3318119 - DNA, 25 bp, Homo sapien
tcacttattcttacaccaactacag

SEQ ID NO: 3318120 - DNA, 25 bp, Homo sapien
tacagaacctattaaaaacagtaga

SEQ ID NO: 3318121 - DNA, 25 bp, Homo sapien
gcctcaggccacataagaactttct

SEQ ID NO: 3318122 - DNA, 25 bp, Homo sapien
gaagcctcaggccacataagaactt

SEQ ID NO: 3318123 - DNA, 25 bp, Homo sapien
tcttcttcgcattgccctccaggaa

SEQ ID NO: 3318124 - DNA, 25 bp, Homo sapien
cctgccagtccttgcgcttttgatc

SEQ ID NO: 3318125 - DNA, 25 bp, Homo sapien
acaggcaggctctcagatgtgtatc

SEQ ID NO: 3318126 - DNA, 25 bp, Homo sapien
caggctctcagatgtgtatctactc

SEQ ID NO: 3318127 - DNA, 25 bp, Homo sapien
ggcaggctctcagatgtgtatctac

SEQ ID NO: 3318128 - DNA, 25 bp, Homo sapien
ggctctcagatgtgtatctactcac

SEQ ID NO: 3318129 - DNA, 25 bp, Homo sapien
ctactgaaggactaagaataagctt

SEQ ID NO: 3318130 - DNA, 25 bp, Homo sapien
tgtacttgaagacactaatttggtt

SEQ ID NO: 3318131 - DNA, 25 bp, Homo sapien
acttaaccaatgtacttgaagacac

SEQ ID NO: 3318132 - DNA, 25 bp, Homo sapien
tactgaaggactaagaataagcttt

SEQ ID NO: 3318133 - DNA, 25 bp, Homo sapien
gaatctttatagaagcaatcccatg

SEQ ID NO: 3318134 - DNA, 25 bp, Homo sapien
atctttatagaagcaatcccatggc

SEQ ID NO: 3318135 - DNA, 25 bp, Homo sapien
tcagtgtgaactgccccatctagtc

SEQ ID NO: 3318136 - DNA, 25 bp, Homo sapien
aggagtctagttccaagtcctcagt

SEQ ID NO: 3318137 - DNA, 25 bp, Homo sapien
gcttctgatacctcctccagagggt

SEQ ID NO: 3318138 - DNA, 25 bp, Homo sapien
tcaccaagactctccgggactgggg

SEQ ID NO: 3318139 - DNA, 25 bp, Homo sapien
caggtcctttgtaaaattgtctggc

SEQ ID NO: 3318140 - DNA, 25 bp, Homo sapien
gggtgttgataagacagttcaccaa

SEQ ID NO: 3318141 - DNA, 25 bp, Homo sapien
tccgcatctgtttcgtgatgctgga

SEQ ID NO: 3318142 - DNA, 25 bp, Homo sapien
catctgtttcgtgatgctggaaagt

SEQ ID NO: 3318143 - DNA, 25 bp, Homo sapien
cttttaagccatttactgacctctt

SEQ ID NO: 3318144 - DNA, 25 bp, Homo sapien
ctcttccgcatctgtttcgtgatgc

SEQ ID NO: 3318145 - DNA, 25 bp, Homo sapien
ctgccagggtggtgctgcttggaga

SEQ ID NO: 3318146 - DNA, 25 bp, Homo sapien
tgctgcttggagacagggacattgc

SEQ ID NO: 3318147 - DNA, 25 bp, Homo sapien
gccagggtggtgctgcttggagaca

SEQ ID NO: 3318148 - DNA, 25 bp, Homo sapien
tgctgccagggtggtgctgcttgga

SEQ ID NO: 3318149 - DNA, 25 bp, Homo sapien
atctcactcatgtgggtgacctggg

SEQ ID NO: 3318150 - DNA, 25 bp, Homo sapien
tgtgagcagttgagctgaatcctgg

SEQ ID NO: 3318151 - DNA, 25 bp, Homo sapien
cacagatgggccttaagatctcact

SEQ ID NO: 3318152 - DNA, 25 bp, Homo sapien
ggcttgtgagcagttgagctgaatc

SEQ ID NO: 3318153 - DNA, 25 bp, Homo sapien
gtgctcccggcagttctggtctctc

SEQ ID NO: 3318154 - DNA, 25 bp, Homo sapien
tctgtggtataagttattaactgca

SEQ ID NO: 3318155 - DNA, 25 bp, Homo sapien
gccttagcagatggccctctatttc

SEQ ID NO: 3318156 - DNA, 25 bp, Homo sapien
gtgccttagcagatggccctctatt

SEQ ID NO: 3318157 - DNA, 25 bp, Homo sapien
ggtataagttattaactgcattcaa

SEQ ID NO: 3318158 - DNA, 25 bp, Homo sapien
tcatctgccgatggtgaactgcccc

SEQ ID NO: 3318159 - DNA, 25 bp, Homo sapien
tgccgatggtgaactgccccagcag

SEQ ID NO: 3318160 - DNA, 25 bp, Homo sapien
gctcagagccatttatgagggtgct

SEQ ID NO: 3318161 - DNA, 25 bp, Homo sapien
gagccatttatgagggtgctgcatg

SEQ ID NO: 3318162 - DNA, 25 bp, Homo sapien
tcagaacatcaagcaccgagcagag

SEQ ID NO: 3318163 - DNA, 25 bp, Homo sapien
gacgttcctgaacaatcgctctcag

SEQ ID NO: 3318164 - DNA, 25 bp, Homo sapien
ttgttatcgttagacgttcctgaac

SEQ ID NO: 3318165 - DNA, 25 bp, Homo sapien
tgaaagaggttttgttatcgttaga

SEQ ID NO: 3318166 - DNA, 25 bp, Homo sapien
taaactgaaacgcaaggacctatgt

SEQ ID NO: 3318167 - DNA, 25 bp, Homo sapien
tgtatctaaaaagcctaacgcaagg

SEQ ID NO: 3318168 - DNA, 25 bp, Homo sapien
taagcacgctatgcaggacaggaat

SEQ ID NO: 3318169 - DNA, 25 bp, Homo sapien
taggaagttactccccagtgcataa

SEQ ID NO: 3318170 - DNA, 25 bp, Homo sapien
gctggtctgacagtaaggaggctaa

SEQ ID NO: 3318171 - DNA, 25 bp, Homo sapien
tggctggtctgacagtaaggaggct

SEQ ID NO: 3318172 - DNA, 25 bp, Homo sapien
ggtctgacagtaaggaggctaattc

SEQ ID NO: 3318173 - DNA, 25 bp, Homo sapien
ctggtctgacagtaaggaggctaat

SEQ ID NO: 3318174 - DNA, 25 bp, Homo sapien
gttttcagagcaggatccgatgtgt

SEQ ID NO: 3318175 - DNA, 25 bp, Homo sapien
tgtgaatgcacccaacaatgaagac

SEQ ID NO: 3318176 - DNA, 25 bp, Homo sapien
ggtgggagttctgcaagcttgccaa

SEQ ID NO: 3318177 - DNA, 25 bp, Homo sapien
caatgaagacgagcttttagttccc

SEQ ID NO: 3318178 - DNA, 25 bp, Homo sapien
aaggagagaatccacggaacccagg

SEQ ID NO: 3318179 - DNA, 25 bp, Homo sapien
ggcacagcgactagagactcacaat

SEQ ID NO: 3318180 - DNA, 25 bp, Homo sapien
cacaatatgtttagggcccatggac

SEQ ID NO: 3318181 - DNA, 25 bp, Homo sapien
gaatctctcagtggcagaattccag

SEQ ID NO: 3318182 - DNA, 25 bp, Homo sapien
ttgatcacctagaggtagagtggaa

SEQ ID NO: 3318183 - DNA, 25 bp, Homo sapien
gataaatattgtatgtacttactta

SEQ ID NO: 3318184 - DNA, 25 bp, Homo sapien
cagcaacatgaatgatcattatatt

SEQ ID NO: 3318185 - DNA, 25 bp, Homo sapien
aaaaaatttgatcacctagaggtag

SEQ ID NO: 3318186 - DNA, 25 bp, Homo sapien
tgagtattaagtttccagcacataa

SEQ ID NO: 3318187 - DNA, 25 bp, Homo sapien
ggagttatatgcacttcctcatgag

SEQ ID NO: 3318188 - DNA, 25 bp, Homo sapien
cgatgcagggtttgggtattctctc

SEQ ID NO: 3318189 - DNA, 25 bp, Homo sapien
cagcacataaacttcggaggacaca

SEQ ID NO: 3318190 - DNA, 25 bp, Homo sapien
ccaaaatccacagtggtcttacact

SEQ ID NO: 3318191 - DNA, 25 bp, Homo sapien
gatagggaaatgagacttaacccca

SEQ ID NO: 3318192 - DNA, 25 bp, Homo sapien
caaatatcaaaaaccaggatcaaaa

SEQ ID NO: 3318193 - DNA, 25 bp, Homo sapien
tacactttaccaagacacagggtac

SEQ ID NO: 3318194 - DNA, 25 bp, Homo sapien
tgagcaccaaaagttttatgtctgg

SEQ ID NO: 3318195 - DNA, 25 bp, Homo sapien
tattcaacagtacctccagaccagt

SEQ ID NO: 3318196 - DNA, 25 bp, Homo sapien
tcttgagacatcaacgggcccttgg

SEQ ID NO: 3318197 - DNA, 25 bp, Homo sapien
ttgttccaagttcctcaaacagtgg

SEQ ID NO: 3318198 - DNA, 25 bp, Homo sapien
tgtggccactatgcgaaaatatcag

SEQ ID NO: 3318199 - DNA, 25 bp, Homo sapien
gggcctaaaatatctgtggccacta

SEQ ID NO: 3318200 - DNA, 25 bp, Homo sapien
ggtattcattttcattgatggcttc

SEQ ID NO: 3318201 - DNA, 25 bp, Homo sapien
aatatcaggtcagaccacccaagat

SEQ ID NO: 3318202 - DNA, 25 bp, Homo sapien
gagaggagacgggccagtgagcagc

SEQ ID NO: 3318203 - DNA, 25 bp, Homo sapien
ctgaagattctgcaaggacccgtgc

SEQ ID NO: 3318204 - DNA, 25 bp, Homo sapien
aaggacccgtgcatcagtattccca

SEQ ID NO: 3318205 - DNA, 25 bp, Homo sapien
gctttggccactctttcccatactg

SEQ ID NO: 3318206 - DNA, 25 bp, Homo sapien
cgtgcatcagtattcccacaaggag

SEQ ID NO: 3318207 - DNA, 25 bp, Homo sapien
gcatccgttacttggccaggatcct

SEQ ID NO: 3318208 - DNA, 25 bp, Homo sapien
ggaaataaaccagacagcccgaatg

SEQ ID NO: 3318209 - DNA, 25 bp, Homo sapien
cacatcaaagtgtccctccttgggc

SEQ ID NO: 3318210 - DNA, 25 bp, Homo sapien
ccgaatgacgacagagtgggatgaa

SEQ ID NO: 3318211 - DNA, 25 bp, Homo sapien
tgattttctgagcatctctaatgag

SEQ ID NO: 3318212 - DNA, 25 bp, Homo sapien
ttctgagcatctctaatgagctgca

SEQ ID NO: 3318213 - DNA, 25 bp, Homo sapien
attttctgagcatctctaatgagct

SEQ ID NO: 3318214 - DNA, 25 bp, Homo sapien
tttctgagcatctctaatgagctgc

SEQ ID NO: 3318215 - DNA, 25 bp, Homo sapien
catttgccatgcagataccagactg

SEQ ID NO: 3318216 - DNA, 25 bp, Homo sapien
catgcagataccagactgtgagttg

SEQ ID NO: 3318217 - DNA, 25 bp, Homo sapien
aaagcaatttccagtggaagcaaag

SEQ ID NO: 3318218 - DNA, 25 bp, Homo sapien
tgtgagttgaaagtctgtacaaagc

SEQ ID NO: 3318219 - DNA, 25 bp, Homo sapien
aacccagagaatgcctcaacagaac

SEQ ID NO: 3318220 - DNA, 25 bp, Homo sapien
tatgaacccttgttaattaccaagc

SEQ ID NO: 3318221 - DNA, 25 bp, Homo sapien
gagaatgcctcaacagaacatccaa

SEQ ID NO: 3318222 - DNA, 25 bp, Homo sapien
gaacatccaatagtctctggattgc

SEQ ID NO: 3318223 - DNA, 25 bp, Homo sapien
gctggtatccgaagcagacattcag

SEQ ID NO: 3318224 - DNA, 25 bp, Homo sapien
aattgataggcgatgttgagaagag

SEQ ID NO: 3318225 - DNA, 25 bp, Homo sapien
gaggcaagtatccagaaaactcagg

SEQ ID NO: 3318226 - DNA, 25 bp, Homo sapien
tatcagaaccctagagcaaaacagc

SEQ ID NO: 3318227 - DNA, 25 bp, Homo sapien
caaaaatactttggacaatctctgc

SEQ ID NO: 3318228 - DNA, 25 bp, Homo sapien
atactttggacaatctctgctgatc

SEQ ID NO: 3318229 - DNA, 25 bp, Homo sapien
taataaacatctacatcagcgaata

SEQ ID NO: 3318230 - DNA, 25 bp, Homo sapien
tcagcgaataggtcaccaaactctt

SEQ ID NO: 3318231 - DNA, 25 bp, Homo sapien
tcagaggactacaaagagcttacat

SEQ ID NO: 3318232 - DNA, 25 bp, Homo sapien
taaaaatcagaggactacaaagagc

SEQ ID NO: 3318233 - DNA, 25 bp, Homo sapien
taaatgtatgttagaaatgagacat

SEQ ID NO: 3318234 - DNA, 25 bp, Homo sapien
tataaaaatcagaggactacaaaga

SEQ ID NO: 3318235 - DNA, 25 bp, Homo sapien
taacaagtaactaagtctgcagatt

SEQ ID NO: 3318236 - DNA, 25 bp, Homo sapien
tcagagctgttattaacaagtaact

SEQ ID NO: 3318237 - DNA, 25 bp, Homo sapien
gcatgtagacggatagatgggttca

SEQ ID NO: 3318238 - DNA, 25 bp, Homo sapien
tctctacccttcactgcatgtagac

SEQ ID NO: 3318239 - DNA, 25 bp, Homo sapien
ctgcagtgggcaagacacaaaaatg

SEQ ID NO: 3318240 - DNA, 25 bp, Homo sapien
agtgggcaagacacaaaaatgtaca

SEQ ID NO: 3318241 - DNA, 25 bp, Homo sapien
cacaaaaatgtacacagacaactga

SEQ ID NO: 3318242 - DNA, 25 bp, Homo sapien
tgcagtgggcaagacacaaaaatgt

SEQ ID NO: 3318243 - DNA, 25 bp, Homo sapien
ctttcacagtgtaaaaaccatgcat

SEQ ID NO: 3318244 - DNA, 25 bp, Homo sapien
tgaaatttccccctttcacagtgta

SEQ ID NO: 3318245 - DNA, 25 bp, Homo sapien
ctgccttcttggttctgaaatttcc

SEQ ID NO: 3318246 - DNA, 25 bp, Homo sapien
tgccttcttggttctgaaatttccc

SEQ ID NO: 3318247 - DNA, 25 bp, Homo sapien
cagcttttgagcaacagtgaatgtt

SEQ ID NO: 3318248 - DNA, 25 bp, Homo sapien
gagtttaaacgcaaactgcatggct

SEQ ID NO: 3318249 - DNA, 25 bp, Homo sapien
cagcttgcgggagtggtataaatac

SEQ ID NO: 3318250 - DNA, 25 bp, Homo sapien
gaagttgtaagcttaattccctgct

SEQ ID NO: 3318251 - DNA, 25 bp, Homo sapien
tgtctctgggtatttacactgactg

SEQ ID NO: 3318252 - DNA, 25 bp, Homo sapien
tgactgttctgtgacttagatctgg

SEQ ID NO: 3318253 - DNA, 25 bp, Homo sapien
cattacagctaatcatgatgtggac

SEQ ID NO: 3318254 - DNA, 25 bp, Homo sapien
cagggtgaccgttcaaactgttggg

SEQ ID NO: 3318255 - DNA, 25 bp, Homo sapien
agctccaagggccaagtttgctcag

SEQ ID NO: 3318256 - DNA, 25 bp, Homo sapien
gaggtctgttctttaagcaaccagc

SEQ ID NO: 3318257 - DNA, 25 bp, Homo sapien
ctatcatttctgacctaggagaggt

SEQ ID NO: 3318258 - DNA, 25 bp, Homo sapien
tagaaaactcctttgggtcagctcc

SEQ ID NO: 3318259 - DNA, 25 bp, Homo sapien
caaacagatcctaagaaaacccaga

SEQ ID NO: 3318260 - DNA, 25 bp, Homo sapien
actgggagacaggtcagaagcatgt

SEQ ID NO: 3318261 - DNA, 25 bp, Homo sapien
gatgggtttaacagcacattagaca

SEQ ID NO: 3318262 - DNA, 25 bp, Homo sapien
tgaaattacaaactcgagggatggg

SEQ ID NO: 3318263 - DNA, 25 bp, Homo sapien
aaacccaggtctaacgccagagctg

SEQ ID NO: 3318264 - DNA, 25 bp, Homo sapien
tagaattgtcttttacagcccaggc

SEQ ID NO: 3318265 - DNA, 25 bp, Homo sapien
caaggtgatgaaagccagggaccct

SEQ ID NO: 3318266 - DNA, 25 bp, Homo sapien
cataacatggcacggtagttcctaa

SEQ ID NO: 3318267 - DNA, 25 bp, Homo sapien
tccacagcgatttccaatagatttc

SEQ ID NO: 3318268 - DNA, 25 bp, Homo sapien
tttctgcgtggccttgacacagaca

SEQ ID NO: 3318269 - DNA, 25 bp, Homo sapien
atagatttctgcgtggccttgacac

SEQ ID NO: 3318270 - DNA, 25 bp, Homo sapien
tgcgtttgtttccacagcgatttcc

SEQ ID NO: 3318271 - DNA, 25 bp, Homo sapien
tcccatgctttagagggcgctgctc

SEQ ID NO: 3318272 - DNA, 25 bp, Homo sapien
gctttccagcagagaatagtccgga

SEQ ID NO: 3318273 - DNA, 25 bp, Homo sapien
gaaatgaggttagggagttctccag

SEQ ID NO: 3318274 - DNA, 25 bp, Homo sapien
gggacatcgaagcaaagacctgaag

SEQ ID NO: 3318275 - DNA, 25 bp, Homo sapien
tcctaatgcaacactcactctcact

SEQ ID NO: 3318276 - DNA, 25 bp, Homo sapien
ttcacagaggacagctcccaactct

SEQ ID NO: 3318277 - DNA, 25 bp, Homo sapien
ttacctctcttcctaatgcaacact

SEQ ID NO: 3318278 - DNA, 25 bp, Homo sapien
ctcactctcagcagccttataatat

SEQ ID NO: 3318279 - DNA, 25 bp, Homo sapien
cagctcttggacacagctgtagtgt

SEQ ID NO: 3318280 - DNA, 25 bp, Homo sapien
tactgctctatcctggccattttcc

SEQ ID NO: 3318281 - DNA, 25 bp, Homo sapien
ttccctggtccagctcttggacaca

SEQ ID NO: 3318282 - DNA, 25 bp, Homo sapien
tctttctctggttccaggaaaagcc

SEQ ID NO: 3318283 - DNA, 25 bp, Homo sapien
gccattgttacacaattcactttca

SEQ ID NO: 3318284 - DNA, 25 bp, Homo sapien
ctggagccattgttacacaattcac

SEQ ID NO: 3318285 - DNA, 25 bp, Homo sapien
gagccattgttacacaattcacttt

SEQ ID NO: 3318286 - DNA, 25 bp, Homo sapien
tggagccattgttacacaattcact

SEQ ID NO: 3318287 - DNA, 25 bp, Homo sapien
catgtgcttctcaggcagttctgcc

SEQ ID NO: 3318288 - DNA, 25 bp, Homo sapien
taatcactatttcctcaggtctctc

SEQ ID NO: 3318289 - DNA, 25 bp, Homo sapien
aggtctctcaaagcccaattggccc

SEQ ID NO: 3318290 - DNA, 25 bp, Homo sapien
ttggcccaaacctccaataggcatg

SEQ ID NO: 3318291 - DNA, 25 bp, Homo sapien
aggtctaagccactaacagtcctgg

SEQ ID NO: 3318292 - DNA, 25 bp, Homo sapien
tcttgcctgttggagtgacctaaac

SEQ ID NO: 3318293 - DNA, 25 bp, Homo sapien
gataaatctgcctagcccataaagt

SEQ ID NO: 3318294 - DNA, 25 bp, Homo sapien
tatgggattactaaggcatctcagg

SEQ ID NO: 3318295 - DNA, 25 bp, Homo sapien
aagccgccctggttgcacatgccgt

SEQ ID NO: 3318296 - DNA, 25 bp, Homo sapien
tgccgtcggccatgactgtgtatgc

SEQ ID NO: 3318297 - DNA, 25 bp, Homo sapien
ctggttgcacatgccgtcggccatg

SEQ ID NO: 3318298 - DNA, 25 bp, Homo sapien
gtggtggtgtcttacttcctcatca

SEQ ID NO: 3318299 - DNA, 25 bp, Homo sapien
attgttgaacctccaagtgtcggtt

SEQ ID NO: 3318300 - DNA, 25 bp, Homo sapien
ccaagtgtcggttctatgactgatg

SEQ ID NO: 3318301 - DNA, 25 bp, Homo sapien
gaacctccaagtgtcggttctatga

SEQ ID NO: 3318302 - DNA, 25 bp, Homo sapien
ctccaagtgtcggttctatgactga

SEQ ID NO: 3318303 - DNA, 25 bp, Homo sapien
tattcatgagaatgaaactgccgta

SEQ ID NO: 3318304 - DNA, 25 bp, Homo sapien
tatggaaggacttgcatccagcttc

SEQ ID NO: 3318305 - DNA, 25 bp, Homo sapien
ccgtaagttatttgtgtaatcagca

SEQ ID NO: 3318306 - DNA, 25 bp, Homo sapien
ggtttcataatcctggaccgatcga

SEQ ID NO: 3318307 - DNA, 25 bp, Homo sapien
gtacatgatgatcccacaatcatca

SEQ ID NO: 3318308 - DNA, 25 bp, Homo sapien
tgggcaaaagtacatgatgatccca

SEQ ID NO: 3318309 - DNA, 25 bp, Homo sapien
atgggcaaaagtacatgatgatccc

SEQ ID NO: 3318310 - DNA, 25 bp, Homo sapien
caaaagtacatgatgatcccacaat

SEQ ID NO: 3318311 - DNA, 25 bp, Homo sapien
cctatggtgctttgcctttaactag

SEQ ID NO: 3318312 - DNA, 25 bp, Homo sapien
caataagatgtatgaacggagcaga

SEQ ID NO: 3318313 - DNA, 25 bp, Homo sapien
tccagaagcaagattccgtaagctg

SEQ ID NO: 3318314 - DNA, 25 bp, Homo sapien
agttgatcagctttacctatggtgc

SEQ ID NO: 3318315 - DNA, 25 bp, Homo sapien
gaagatttgattaaagttacaataa

SEQ ID NO: 3318316 - DNA, 25 bp, Homo sapien
gcttaatcttttgggtcatggatga

SEQ ID NO: 3318317 - DNA, 25 bp, Homo sapien
gggtcatggatgaattgaagatttg

SEQ ID NO: 3318318 - DNA, 25 bp, Homo sapien
tcttctaagagtgatgcttaatctt

SEQ ID NO: 3318319 - DNA, 25 bp, Homo sapien
aactttaataaggatattgcctagg

SEQ ID NO: 3318320 - DNA, 25 bp, Homo sapien
aaccaacctgtctcagtgaaaacct

SEQ ID NO: 3318321 - DNA, 25 bp, Homo sapien
tgcctagggaagattagttgttttc

SEQ ID NO: 3318322 - DNA, 25 bp, Homo sapien
caacctgtctcagtgaaaacctggt

SEQ ID NO: 3318323 - DNA, 25 bp, Homo sapien
tcattcaagttcattctggacctct

SEQ ID NO: 3318324 - DNA, 25 bp, Homo sapien
tcttcctctgagctgttaatcagtg

SEQ ID NO: 3318325 - DNA, 25 bp, Homo sapien
tcctctgagctgttaatcagtgttg

SEQ ID NO: 3318326 - DNA, 25 bp, Homo sapien
aagttcattctggacctcttcctct

SEQ ID NO: 3318327 - DNA, 25 bp, Homo sapien
gctttgttgttcaaggaaatatggg

SEQ ID NO: 3318328 - DNA, 25 bp, Homo sapien
tgaaaagctttgttgttcaaggaaa

SEQ ID NO: 3318329 - DNA, 25 bp, Homo sapien
ttgtgaaaagctttgttgttcaagg

SEQ ID NO: 3318330 - DNA, 25 bp, Homo sapien
tgttgttcaaggaaatatgggtaat

SEQ ID NO: 3318331 - DNA, 25 bp, Homo sapien
caaaaggcctttatttgtgcaatag

SEQ ID NO: 3318332 - DNA, 25 bp, Homo sapien
gtcaaaaggcctttatttgtgcaat

SEQ ID NO: 3318333 - DNA, 25 bp, Homo sapien
aaaaggcctttatttgtgcaatagt

SEQ ID NO: 3318334 - DNA, 25 bp, Homo sapien
tgtcaaaaggcctttatttgtgcaa

SEQ ID NO: 3318335 - DNA, 25 bp, Homo sapien
tgggcaacccctgtgaaggatcatc

SEQ ID NO: 3318336 - DNA, 25 bp, Homo sapien
tggtatttcatcacttttgctgagg

SEQ ID NO: 3318337 - DNA, 25 bp, Homo sapien
tgacaatggccccttaccaggtatg

SEQ ID NO: 3318338 - DNA, 25 bp, Homo sapien
tatgtttttggatatagtgattgcc

SEQ ID NO: 3318339 - DNA, 25 bp, Homo sapien
gccatggaggacaacggtgaagcat

SEQ ID NO: 3318340 - DNA, 25 bp, Homo sapien
gctgctggtgatcataaatagcatt

SEQ ID NO: 3318341 - DNA, 25 bp, Homo sapien
ctgggcagtcccatatgccaagagg

SEQ ID NO: 3318342 - DNA, 25 bp, Homo sapien
gcttctgattcgaataagcagagtg

SEQ ID NO: 3318343 - DNA, 25 bp, Homo sapien
cacttcttcgtacagggatctgggg

SEQ ID NO: 3318344 - DNA, 25 bp, Homo sapien
cttcttcgtacagggatctggggtc

SEQ ID NO: 3318345 - DNA, 25 bp, Homo sapien
acttcttcgtacagggatctggggt

SEQ ID NO: 3318346 - DNA, 25 bp, Homo sapien
tcacttcttcgtacagggatctggg

SEQ ID NO: 3318347 - DNA, 25 bp, Homo sapien
cgctatcagatgagggagagctttc

SEQ ID NO: 3318348 - DNA, 25 bp, Homo sapien
gacccttgtccgagggctcagatac

SEQ ID NO: 3318349 - DNA, 25 bp, Homo sapien
ccattttctcaaacaacgctatcag

SEQ ID NO: 3318350 - DNA, 25 bp, Homo sapien
gagagctttcatggaaggaagaccc

SEQ ID NO: 3318351 - DNA, 25 bp, Homo sapien
ctgagtatatttgttgatggtctgc

SEQ ID NO: 3318352 - DNA, 25 bp, Homo sapien
tgctcatttgtaacacgtttcttat

SEQ ID NO: 3318353 - DNA, 25 bp, Homo sapien
tgttgatggtctgctcatttgtaac

SEQ ID NO: 3318354 - DNA, 25 bp, Homo sapien
ggtctgctcatttgtaacacgtttc

SEQ ID NO: 3318355 - DNA, 25 bp, Homo sapien
gatgcttgttggagcataaattggc

SEQ ID NO: 3318356 - DNA, 25 bp, Homo sapien
ttggagcataaattggctgttgagg

SEQ ID NO: 3318357 - DNA, 25 bp, Homo sapien
cctgatgcctcctgttagtgatagc

SEQ ID NO: 3318358 - DNA, 25 bp, Homo sapien
cttccattttcgttgtctggtccca

SEQ ID NO: 3318359 - DNA, 25 bp, Homo sapien
gactccttatgtctagggagcagca

SEQ ID NO: 3318360 - DNA, 25 bp, Homo sapien
catttttggtgtccttcgtgcccct

SEQ ID NO: 3318361 - DNA, 25 bp, Homo sapien
aggtaggtaaggctgctgttccaca

SEQ ID NO: 3318362 - DNA, 25 bp, Homo sapien
gcagggttaattgaccatgatcagc

SEQ ID NO: 3318363 - DNA, 25 bp, Homo sapien
aaacagctgtagcaaaattattatc

SEQ ID NO: 3318364 - DNA, 25 bp, Homo sapien
tttaataattattagaaaggcaata

SEQ ID NO: 3318365 - DNA, 25 bp, Homo sapien
taattattagaaaggcaatagagag

SEQ ID NO: 3318366 - DNA, 25 bp, Homo sapien
aattattagaaaggcaatagagaga

SEQ ID NO: 3318367 - DNA, 25 bp, Homo sapien
aataattattagaaaggcaatagag

SEQ ID NO: 3318368 - DNA, 25 bp, Homo sapien
ggcataagtgatgataaacttgatg

SEQ ID NO: 3318369 - DNA, 25 bp, Homo sapien
gggcataagtgatgataaacttgat

SEQ ID NO: 3318370 - DNA, 25 bp, Homo sapien
gcataagtgatgataaacttgatgg

SEQ ID NO: 3318371 - DNA, 25 bp, Homo sapien
ccaagttccttgctagaggcctgaa

SEQ ID NO: 3318372 - DNA, 25 bp, Homo sapien
gaatgccctgcttcagctactgctg

SEQ ID NO: 3318373 - DNA, 25 bp, Homo sapien
ccccacgggatggtgattaaccaag

SEQ ID NO: 3318374 - DNA, 25 bp, Homo sapien
tacaatccgtgaatagacaaagcag

SEQ ID NO: 3318375 - DNA, 25 bp, Homo sapien
caaaagtgaaggcacctgttatact

SEQ ID NO: 3318376 - DNA, 25 bp, Homo sapien
aggcactaagtctcaaaagtgaagg

SEQ ID NO: 3318377 - DNA, 25 bp, Homo sapien
tatatgaaatcattatagaatacat

SEQ ID NO: 3318378 - DNA, 25 bp, Homo sapien
atactttgctctctaatttgacaca

SEQ ID NO: 3318379 - DNA, 25 bp, Homo sapien
tagagctattaaccgatgagacaca

SEQ ID NO: 3318380 - DNA, 25 bp, Homo sapien
gtaactctggacatcgcatcttgct

SEQ ID NO: 3318381 - DNA, 25 bp, Homo sapien
aaaattaacaggctagagtctgaac

SEQ ID NO: 3318382 - DNA, 25 bp, Homo sapien
caggtagcttcagaaatcaactaag

SEQ ID NO: 3318383 - DNA, 25 bp, Homo sapien
gaatgtgtatccgtgcacattccat

SEQ ID NO: 3318384 - DNA, 25 bp, Homo sapien
tgtgtatccgtgcacattccatttc

SEQ ID NO: 3318385 - DNA, 25 bp, Homo sapien
aatgtgtatccgtgcacattccatt

SEQ ID NO: 3318386 - DNA, 25 bp, Homo sapien
atgtgtatccgtgcacattccattt

SEQ ID NO: 3318387 - DNA, 25 bp, Homo sapien
aggcacacaaagctccagtgggcat

SEQ ID NO: 3318388 - DNA, 25 bp, Homo sapien
ccacaggactgacttaacaagtcca

SEQ ID NO: 3318389 - DNA, 25 bp, Homo sapien
cacaggactgacttaacaagtccac

SEQ ID NO: 3318390 - DNA, 25 bp, Homo sapien
tgggcatccacctctaatccagcct

SEQ ID NO: 3318391 - DNA, 25 bp, Homo sapien
cagaggtcacactttcggttttggt

SEQ ID NO: 3318392 - DNA, 25 bp, Homo sapien
ctttgttttgcatggagtattctca

SEQ ID NO: 3318393 - DNA, 25 bp, Homo sapien
catggagtattctcagaggtcacac

SEQ ID NO: 3318394 - DNA, 25 bp, Homo sapien
ctcagaggtcacactttcggttttg

SEQ ID NO: 3318395 - DNA, 25 bp, Homo sapien
gaatcctatcaagttggtccaccat

SEQ ID NO: 3318396 - DNA, 25 bp, Homo sapien
tcggcactgagaagcactcgttttt

SEQ ID NO: 3318397 - DNA, 25 bp, Homo sapien
ttttaagtacatttctatgaggtcc

SEQ ID NO: 3318398 - DNA, 25 bp, Homo sapien
tatcaagttggtccaccatgaactt

SEQ ID NO: 3318399 - DNA, 25 bp, Homo sapien
ggtccttcactaaatcaattccaat

SEQ ID NO: 3318400 - DNA, 25 bp, Homo sapien
cttttcagatggtccttcactaaat

SEQ ID NO: 3318401 - DNA, 25 bp, Homo sapien
gatggtccttcactaaatcaattcc

SEQ ID NO: 3318402 - DNA, 25 bp, Homo sapien
tcagatggtccttcactaaatcaat

SEQ ID NO: 3318403 - DNA, 25 bp, Homo sapien
cccagcctataaactattattattt

SEQ ID NO: 3318404 - DNA, 25 bp, Homo sapien
aggacagccaaaccaacagcacaag

SEQ ID NO: 3318405 - DNA, 25 bp, Homo sapien
cagcacaagatactggatttcctcc

SEQ ID NO: 3318406 - DNA, 25 bp, Homo sapien
ctaatatctcctatcaaagtgtgtt

SEQ ID NO: 3318407 - DNA, 25 bp, Homo sapien
gataattccctactctcttggcatt

SEQ ID NO: 3318408 - DNA, 25 bp, Homo sapien
ggttttcccattgtgacgatgtctg

SEQ ID NO: 3318409 - DNA, 25 bp, Homo sapien
atgccaccgggtggccgttgcccat

SEQ ID NO: 3318410 - DNA, 25 bp, Homo sapien
gaacttcatcagctataaacacacc

SEQ ID NO: 3318411 - DNA, 25 bp, Homo sapien
aaagtcttcaccatacatctggaag

SEQ ID NO: 3318412 - DNA, 25 bp, Homo sapien
gtgctctcagtttgaccaaggaggc

SEQ ID NO: 3318413 - DNA, 25 bp, Homo sapien
tgctctcagtttgaccaaggaggcc

SEQ ID NO: 3318414 - DNA, 25 bp, Homo sapien
gctctcagtttgaccaaggaggccc

SEQ ID NO: 3318415 - DNA, 25 bp, Homo sapien
ccgccacaactctgcatggattcag

SEQ ID NO: 3318416 - DNA, 25 bp, Homo sapien
ggaggaattatttgtccgccacaac

SEQ ID NO: 3318417 - DNA, 25 bp, Homo sapien
cactttctggaagtagcctgctgga

SEQ ID NO: 3318418 - DNA, 25 bp, Homo sapien
tctggaagtagcctgctggaggaat

SEQ ID NO: 3318419 - DNA, 25 bp, Homo sapien
tattttcctctgtaagtatctggag

SEQ ID NO: 3318420 - DNA, 25 bp, Homo sapien
ctctgtaagtatctggagttggtgc

SEQ ID NO: 3318421 - DNA, 25 bp, Homo sapien
tcatctgcataagcactggctgagt

SEQ ID NO: 3318422 - DNA, 25 bp, Homo sapien
tgcataagcactggctgagtctgca

SEQ ID NO: 3318423 - DNA, 25 bp, Homo sapien
tgaaacttatatgggctaatctcaa

SEQ ID NO: 3318424 - DNA, 25 bp, Homo sapien
tctgaaacttatatgggctaatctc

SEQ ID NO: 3318425 - DNA, 25 bp, Homo sapien
gctaatctcaattaaggatgatagg

SEQ ID NO: 3318426 - DNA, 25 bp, Homo sapien
tatatgggctaatctcaattaagga

SEQ ID NO: 3318427 - DNA, 25 bp, Homo sapien
aaataattccaagagagatattttc

SEQ ID NO: 3318428 - DNA, 25 bp, Homo sapien
atcaaaataattccaagagagatat

SEQ ID NO: 3318429 - DNA, 25 bp, Homo sapien
taattccaagagagatattttcaag

SEQ ID NO: 3318430 - DNA, 25 bp, Homo sapien
caaaataattccaagagagatattt

SEQ ID NO: 3318431 - DNA, 25 bp, Homo sapien
tatggataggatcaatacaattttg

SEQ ID NO: 3318432 - DNA, 25 bp, Homo sapien
gtatggataggatcaatacaatttt

SEQ ID NO: 3318433 - DNA, 25 bp, Homo sapien
tggataggatcaatacaattttgtc

SEQ ID NO: 3318434 - DNA, 25 bp, Homo sapien
ggataggatcaatacaattttgtct

SEQ ID NO: 3318435 - DNA, 25 bp, Homo sapien
gccgagccaggcgtaaggctaagtc

SEQ ID NO: 3318436 - DNA, 25 bp, Homo sapien
ctctgaactgccgagccaggcgtaa

SEQ ID NO: 3318437 - DNA, 25 bp, Homo sapien
taaggctaagtcgttggcttcggat

SEQ ID NO: 3318438 - DNA, 25 bp, Homo sapien
caggcgtaaggctaagtcgttggct

SEQ ID NO: 3318439 - DNA, 25 bp, Homo sapien
tattaagataacatagagagagagg

SEQ ID NO: 3318440 - DNA, 25 bp, Homo sapien
aaataataagttgaaatcctctcct

SEQ ID NO: 3318441 - DNA, 25 bp, Homo sapien
ccttctaatataaggttccttagat

SEQ ID NO: 3318442 - DNA, 25 bp, Homo sapien
ttagagaccagattaggcaacccgt

SEQ ID NO: 3318443 - DNA, 25 bp, Homo sapien
cgagaatttgtatttagcagttcca

SEQ ID NO: 3318444 - DNA, 25 bp, Homo sapien
gctgaaaggcgtttggcatactcaa

SEQ ID NO: 3318445 - DNA, 25 bp, Homo sapien
caacaatgttgtcgtggaggaatcg

SEQ ID NO: 3318446 - DNA, 25 bp, Homo sapien
caaacagagagtttctccggcagag

SEQ ID NO: 3318447 - DNA, 25 bp, Homo sapien
gggcaacattgttgatgcagtccaa

SEQ ID NO: 3318448 - DNA, 25 bp, Homo sapien
gtccaagtactgttcaccgttctca

SEQ ID NO: 3318449 - DNA, 25 bp, Homo sapien
gatgcagtccaagtactgttcaccg

SEQ ID NO: 3318450 - DNA, 25 bp, Homo sapien
ctgttcaccgttctcatcaaacatg

SEQ ID NO: 3318451 - DNA, 25 bp, Homo sapien
cactattttgatgggatccgatgca

SEQ ID NO: 3318452 - DNA, 25 bp, Homo sapien
ctctcactattttgatgggatccga

SEQ ID NO: 3318453 - DNA, 25 bp, Homo sapien
ttttgatgggatccgatgcaaagaa

SEQ ID NO: 3318454 - DNA, 25 bp, Homo sapien
tattttgatgggatccgatgcaaag

SEQ ID NO: 3318455 - DNA, 25 bp, Homo sapien
agccccagagtgtcccgcttactgt

SEQ ID NO: 3318456 - DNA, 25 bp, Homo sapien
gccccagagtgtcccgcttactgta

SEQ ID NO: 3318457 - DNA, 25 bp, Homo sapien
tgtcccgcttactgtacagctcgca

SEQ ID NO: 3318458 - DNA, 25 bp, Homo sapien
cagagtgtcccgcttactgtacagc

SEQ ID NO: 3318459 - DNA, 25 bp, Homo sapien
cgcctcctacgcgagcctgggactg

SEQ ID NO: 3318460 - DNA, 25 bp, Homo sapien
cttcctcccgttatccctcctggcg

SEQ ID NO: 3318461 - DNA, 25 bp, Homo sapien
gttatccctcctggcgttctcttgc

SEQ ID NO: 3318462 - DNA, 25 bp, Homo sapien
gcaaggtgcaaggtctgcgcgcctc

SEQ ID NO: 3318463 - DNA, 25 bp, Homo sapien
gtctcagcaataggacggcccgtga

SEQ ID NO: 3318464 - DNA, 25 bp, Homo sapien
caagctcgggcatgggcacttgaca

SEQ ID NO: 3318465 - DNA, 25 bp, Homo sapien
cgtcttgcacaaggctggtatggaa

SEQ ID NO: 3318466 - DNA, 25 bp, Homo sapien
tggcaagtgcgcatgacaaggctcg

SEQ ID NO: 3318467 - DNA, 25 bp, Homo sapien
caccatcacctgattttcatttgga

SEQ ID NO: 3318468 - DNA, 25 bp, Homo sapien
atggttccaccatcacctgattttc

SEQ ID NO: 3318469 - DNA, 25 bp, Homo sapien
ccaagtccccatggttccaccatca

SEQ ID NO: 3318470 - DNA, 25 bp, Homo sapien
ccatggttccaccatcacctgattt

SEQ ID NO: 3318471 - DNA, 25 bp, Homo sapien
cccaccaggaggaacacggcagatt

SEQ ID NO: 3318472 - DNA, 25 bp, Homo sapien
gcataaatggctaaacacagacccc

SEQ ID NO: 3318473 - DNA, 25 bp, Homo sapien
aataggcataaatggctaaacacag

SEQ ID NO: 3318474 - DNA, 25 bp, Homo sapien
ctaaaataggcataaatggctaaac

SEQ ID NO: 3318475 - DNA, 25 bp, Homo sapien
cgggaagggagtgtcacggatgctt

SEQ ID NO: 3318476 - DNA, 25 bp, Homo sapien
caccggcctcggctgatgtgcaaga

SEQ ID NO: 3318477 - DNA, 25 bp, Homo sapien
accggcctcggctgatgtgcaagaa

SEQ ID NO: 3318478 - DNA, 25 bp, Homo sapien
gacaccggcctcggctgatgtgcaa

SEQ ID NO: 3318479 - DNA, 25 bp, Homo sapien
attctggcagtttcttgatcttctc

SEQ ID NO: 3318480 - DNA, 25 bp, Homo sapien
cagagggttggggggttgtattctg

SEQ ID NO: 3318481 - DNA, 25 bp, Homo sapien
tgtattctggcagtttcttgatctt

SEQ ID NO: 3318482 - DNA, 25 bp, Homo sapien
tggggggttgtattctggcagtttc

SEQ ID NO: 3318483 - DNA, 25 bp, Homo sapien
gtgagtagcccttggcgacctgctc

SEQ ID NO: 3318484 - DNA, 25 bp, Homo sapien
tgagtagcccttggcgacctgctct

SEQ ID NO: 3318485 - DNA, 25 bp, Homo sapien
cctgctctgagaaaatgctatccag

SEQ ID NO: 3318486 - DNA, 25 bp, Homo sapien
cgacctgctctgagaaaatgctatc

SEQ ID NO: 3318487 - DNA, 25 bp, Homo sapien
ttgtggtccccatagccgtgttccc

SEQ ID NO: 3318488 - DNA, 25 bp, Homo sapien
gggcttgtggtccccatagccgtgt

SEQ ID NO: 3318489 - DNA, 25 bp, Homo sapien
cgaaggtcggcgacgggccccagct

SEQ ID NO: 3318490 - DNA, 25 bp, Homo sapien
ccatagccgtgttccccgaaggtcg

SEQ ID NO: 3318491 - DNA, 25 bp, Homo sapien
ggacaccccacgtccagaaaagtca

SEQ ID NO: 3318492 - DNA, 25 bp, Homo sapien
ctgggacaccccacgtccagaaaag

SEQ ID NO: 3318493 - DNA, 25 bp, Homo sapien
agatctgggacaccccacgtccaga

SEQ ID NO: 3318494 - DNA, 25 bp, Homo sapien
gacaccccacgtccagaaaagtcaa

SEQ ID NO: 3318495 - DNA, 25 bp, Homo sapien
ctggagccccagagaagacttgctt

SEQ ID NO: 3318496 - DNA, 25 bp, Homo sapien
gccagccatagccactggagcccca

SEQ ID NO: 3318497 - DNA, 25 bp, Homo sapien
atggcccagccagccatagccactg

SEQ ID NO: 3318498 - DNA, 25 bp, Homo sapien
catagccactggagccccagagaag

SEQ ID NO: 3318499 - DNA, 25 bp, Homo sapien
agtccagaaccagagtgtggttggt

SEQ ID NO: 3318500 - DNA, 25 bp, Homo sapien
cagaaccagagtgtggttggtgcca

SEQ ID NO: 3318501 - DNA, 25 bp, Homo sapien
aaccagagtgtggttggtgccactg

SEQ ID NO: 3318502 - DNA, 25 bp, Homo sapien
ctgggagtccagaaccagagtgtgg

SEQ ID NO: 3318503 - DNA, 25 bp, Homo sapien
ttttggtcttctcgatgaagatggc

SEQ ID NO: 3318504 - DNA, 25 bp, Homo sapien
tcaatttttggtcttctcgatgaag

SEQ ID NO: 3318505 - DNA, 25 bp, Homo sapien
ctgtcaatttttggtcttctcgatg

SEQ ID NO: 3318506 - DNA, 25 bp, Homo sapien
caatttttggtcttctcgatgaaga

SEQ ID NO: 3318507 - DNA, 25 bp, Homo sapien
acttcccatccgagttgtgtcccag

SEQ ID NO: 3318508 - DNA, 25 bp, Homo sapien
tgaacttcccatccgagttgtgtcc

SEQ ID NO: 3318509 - DNA, 25 bp, Homo sapien
atgaacttcccatccgagttgtgtc

SEQ ID NO: 3318510 - DNA, 25 bp, Homo sapien
ctgtggccaggcaatgaacttccca

SEQ ID NO: 3318511 - DNA, 25 bp, Homo sapien
aacagaggtttcctctgcagtctat

SEQ ID NO: 3318512 - DNA, 25 bp, Homo sapien
tgaccatattcagggcacccaaagg

SEQ ID NO: 3318513 - DNA, 25 bp, Homo sapien
ggaacagaggtttcctctgcagtct

SEQ ID NO: 3318514 - DNA, 25 bp, Homo sapien
cagaggtttcctctgcagtctatta

SEQ ID NO: 3318515 - DNA, 25 bp, Homo sapien
caggccattttggtaattggctggc

SEQ ID NO: 3318516 - DNA, 25 bp, Homo sapien
cagcccccacaggccattttggtaa

SEQ ID NO: 3318517 - DNA, 25 bp, Homo sapien
aattcagcccccacaggccattttg

SEQ ID NO: 3318518 - DNA, 25 bp, Homo sapien
gccattttggtaattggctggccat

SEQ ID NO: 3318519 - DNA, 25 bp, Homo sapien
atgctgcagatacgatcactttgtg

SEQ ID NO: 3318520 - DNA, 25 bp, Homo sapien
tgctgcagatacgatcactttgtgg

SEQ ID NO: 3318521 - DNA, 25 bp, Homo sapien
gctgcagatacgatcactttgtggc

SEQ ID NO: 3318522 - DNA, 25 bp, Homo sapien
tgcagatacgatcactttgtggctg

SEQ ID NO: 3318523 - DNA, 25 bp, Homo sapien
aatgtattttgtgccatttcctgct

SEQ ID NO: 3318524 - DNA, 25 bp, Homo sapien
gtattttgtgccatttcctgctgtt

SEQ ID NO: 3318525 - DNA, 25 bp, Homo sapien
catgttttctaatgtattttgtgcc

SEQ ID NO: 3318526 - DNA, 25 bp, Homo sapien
tgttttctaatgtattttgtgccat

SEQ ID NO: 3318527 - DNA, 25 bp, Homo sapien
gcaagttttgactgaattggagcaa

SEQ ID NO: 3318528 - DNA, 25 bp, Homo sapien
ctgaattggagcaaacaccgctgcc

SEQ ID NO: 3318529 - DNA, 25 bp, Homo sapien
agcaaacaccgctgccggacagcat

SEQ ID NO: 3318530 - DNA, 25 bp, Homo sapien
ctcgggtatggcaagttttgactga

SEQ ID NO: 3318531 - DNA, 25 bp, Homo sapien
tctatgaaagatatatcctttatcc

SEQ ID NO: 3318532 - DNA, 25 bp, Homo sapien
attgtgtctatgaaagatatatcct

SEQ ID NO: 3318533 - DNA, 25 bp, Homo sapien
gtgtctatgaaagatatatccttta

SEQ ID NO: 3318534 - DNA, 25 bp, Homo sapien
ttgtgtctatgaaagatatatcctt

SEQ ID NO: 3318535 - DNA, 25 bp, Homo sapien
caagcttgttaattccactagggat

SEQ ID NO: 3318536 - DNA, 25 bp, Homo sapien
taatcaattgtatgagactggccca

SEQ ID NO: 3318537 - DNA, 25 bp, Homo sapien
caaagtatagccctactctgggtaa

SEQ ID NO: 3318538 - DNA, 25 bp, Homo sapien
tgctgtcccatcagaacatcgtatg

SEQ ID NO: 3318539 - DNA, 25 bp, Homo sapien
taatgggctgaaagggtgcctactc

SEQ ID NO: 3318540 - DNA, 25 bp, Homo sapien
ggtggtgacacctatgcatgaaact

SEQ ID NO: 3318541 - DNA, 25 bp, Homo sapien
tgaggtatcgtctcctgaagctgtg

SEQ ID NO: 3318542 - DNA, 25 bp, Homo sapien
ccactgaacaaggaggagtatttcc

SEQ ID NO: 3318543 - DNA, 25 bp, Homo sapien
ttaccaaatgtgacaaaatcttggc

SEQ ID NO: 3318544 - DNA, 25 bp, Homo sapien
tgattagactgaaagtggagcttct

SEQ ID NO: 3318545 - DNA, 25 bp, Homo sapien
gactactggagccaaattattatga

SEQ ID NO: 3318546 - DNA, 25 bp, Homo sapien
ctgataatctccatgtacgttacat

SEQ ID NO: 3318547 - DNA, 25 bp, Homo sapien
gattgtcccagtaagctctcctata

SEQ ID NO: 3318548 - DNA, 25 bp, Homo sapien
tttcaaccaaagtggccacatgagc

SEQ ID NO: 3318549 - DNA, 25 bp, Homo sapien
tggcaataagccatggtgtaacccc

SEQ ID NO: 3318550 - DNA, 25 bp, Homo sapien
tatcatcgggagaggcgattttggc

SEQ ID NO: 3318551 - DNA, 25 bp, Homo sapien
gcacagcaagcaggtttggcacaca

SEQ ID NO: 3318552 - DNA, 25 bp, Homo sapien
tcaacgccgacatgaaaggtgaatg

SEQ ID NO: 3318553 - DNA, 25 bp, Homo sapien
aatggacatgtatactactgccagc

SEQ ID NO: 3318554 - DNA, 25 bp, Homo sapien
tggtgtaggtatgagtcaacgccga

SEQ ID NO: 3318555 - DNA, 25 bp, Homo sapien
caggcatgggtaagccatctggccc

SEQ ID NO: 3318556 - DNA, 25 bp, Homo sapien
agccaggcatgggtaagccatctgg

SEQ ID NO: 3318557 - DNA, 25 bp, Homo sapien
acagccaggcatgggtaagccatct

SEQ ID NO: 3318558 - DNA, 25 bp, Homo sapien
ccaggcatgggtaagccatctggcc

SEQ ID NO: 3318559 - DNA, 25 bp, Homo sapien
cagaaggagcctgttcatgcacatg

SEQ ID NO: 3318560 - DNA, 25 bp, Homo sapien
ttgcattcattgatagaaacgcgtg

SEQ ID NO: 3318561 - DNA, 25 bp, Homo sapien
gaaacgcgtgcttgctctctgactc

SEQ ID NO: 3318562 - DNA, 25 bp, Homo sapien
tatcatgtaaagcttgcccagaaag

SEQ ID NO: 3318563 - DNA, 25 bp, Homo sapien
caattggcaaggggcatccagccca

SEQ ID NO: 3318564 - DNA, 25 bp, Homo sapien
aaggggcatccagcccatccaggcc

SEQ ID NO: 3318565 - DNA, 25 bp, Homo sapien
tggcaaggggcatccagcccatcca

SEQ ID NO: 3318566 - DNA, 25 bp, Homo sapien
attggcaaggggcatccagcccatc

SEQ ID NO: 3318567 - DNA, 25 bp, Homo sapien
caacgggcagggtgcatctaatcca

SEQ ID NO: 3318568 - DNA, 25 bp, Homo sapien
gcatctaatccaggagcaccctgtt

SEQ ID NO: 3318569 - DNA, 25 bp, Homo sapien
tctaatccaggagcaccctgttctc

SEQ ID NO: 3318570 - DNA, 25 bp, Homo sapien
taatccaggagcaccctgttctcct

SEQ ID NO: 3318571 - DNA, 25 bp, Homo sapien
ccaaaaagattgcatcagaaggctc

SEQ ID NO: 3318572 - DNA, 25 bp, Homo sapien
gagcctcaagctttatgggaaagaa

SEQ ID NO: 3318573 - DNA, 25 bp, Homo sapien
catatgaatgttactgtgccaggct

SEQ ID NO: 3318574 - DNA, 25 bp, Homo sapien
aaagggcagtggactcttcttcaca

SEQ ID NO: 3318575 - DNA, 25 bp, Homo sapien
aaactgtagctagaatatctggtga

SEQ ID NO: 3318576 - DNA, 25 bp, Homo sapien
tctatgccaggcagtgcccttatat

SEQ ID NO: 3318577 - DNA, 25 bp, Homo sapien
tatctggcagtacagccttcttcat

SEQ ID NO: 3318578 - DNA, 25 bp, Homo sapien
ttccttaaatcaggcatcagtatgt

SEQ ID NO: 3318579 - DNA, 25 bp, Homo sapien
aacaaggtacatgctgggatggaga

SEQ ID NO: 3318580 - DNA, 25 bp, Homo sapien
gaagaatcaaacaaggtacatgctg

SEQ ID NO: 3318581 - DNA, 25 bp, Homo sapien
aatggaatcacacaagctgaacagc

SEQ ID NO: 3318582 - DNA, 25 bp, Homo sapien
gaatcacacaagctgaacagcaaag

SEQ ID NO: 3318583 - DNA, 25 bp, Homo sapien
ttctcctagatcacccttctcaccc

SEQ ID NO: 3318584 - DNA, 25 bp, Homo sapien
ttttctcctagatcacccttctcac

SEQ ID NO: 3318585 - DNA, 25 bp, Homo sapien
cttttctcctagatcacccttctca

SEQ ID NO: 3318586 - DNA, 25 bp, Homo sapien
ccttttctcctagatcacccttctc

SEQ ID NO: 3318587 - DNA, 25 bp, Homo sapien
caagaccaggctctccatctttccc

SEQ ID NO: 3318588 - DNA, 25 bp, Homo sapien
atcaagaccaggctctccatctttc

SEQ ID NO: 3318589 - DNA, 25 bp, Homo sapien
tcaagaccaggctctccatctttcc

SEQ ID NO: 3318590 - DNA, 25 bp, Homo sapien
ccatagggccctcttggtccaggct

SEQ ID NO: 3318591 - DNA, 25 bp, Homo sapien
gagccacctgatatgcctgtgtttc

SEQ ID NO: 3318592 - DNA, 25 bp, Homo sapien
tgaggggtcagtggaactaattaac

SEQ ID NO: 3318593 - DNA, 25 bp, Homo sapien
gctgataacagtgcctgcagagcca

SEQ ID NO: 3318594 - DNA, 25 bp, Homo sapien
ccagattcccgtgtgagcaaatttc

SEQ ID NO: 3318595 - DNA, 25 bp, Homo sapien
gtagcagctgatttaccacacggta

SEQ ID NO: 3318596 - DNA, 25 bp, Homo sapien
ttgtggagctatcggaagtagcagc

SEQ ID NO: 3318597 - DNA, 25 bp, Homo sapien
taccacacggtaaaccctcttgagc

SEQ ID NO: 3318598 - DNA, 25 bp, Homo sapien
gagctatcggaagtagcagctgatt

SEQ ID NO: 3318599 - DNA, 25 bp, Homo sapien
tcctttgggacctgcagggccatgg

SEQ ID NO: 3318600 - DNA, 25 bp, Homo sapien
gggccatggggtcccataggaccat

SEQ ID NO: 3318601 - DNA, 25 bp, Homo sapien
tctttctcctttgggacctgcaggg

SEQ ID NO: 3318602 - DNA, 25 bp, Homo sapien
tggggtcccataggaccatctgtac

SEQ ID NO: 3318603 - DNA, 25 bp, Homo sapien
tatttcaggccagcggttttcaaga

SEQ ID NO: 3318604 - DNA, 25 bp, Homo sapien
tgtttcaatgaaaggcacacacgaa

SEQ ID NO: 3318605 - DNA, 25 bp, Homo sapien
ggtgcctaagaatatcagtaagaca

SEQ ID NO: 3318606 - DNA, 25 bp, Homo sapien
cacaagggctgcaagaatagcagtt

SEQ ID NO: 3318607 - DNA, 25 bp, Homo sapien
ggctttccgtctaagccagatgctc

SEQ ID NO: 3318608 - DNA, 25 bp, Homo sapien
cctggctttccgtctaagccagatg

SEQ ID NO: 3318609 - DNA, 25 bp, Homo sapien
ccgggatcctggctttccgtctaag

SEQ ID NO: 3318610 - DNA, 25 bp, Homo sapien
ggatcctggctttccgtctaagcca

SEQ ID NO: 3318611 - DNA, 25 bp, Homo sapien
acagctgttagctaaatgttgcata

SEQ ID NO: 3318612 - DNA, 25 bp, Homo sapien
cggccttacatacgtcttttgttag

SEQ ID NO: 3318613 - DNA, 25 bp, Homo sapien
tgtttaaggctagcataggtacagc

SEQ ID NO: 3318614 - DNA, 25 bp, Homo sapien
tacatacgtcttttgttagcaataa

SEQ ID NO: 3318615 - DNA, 25 bp, Homo sapien
tcacccttcaatcctttaacaccat

SEQ ID NO: 3318616 - DNA, 25 bp, Homo sapien
ttcacccttcaatcctttaacacca

SEQ ID NO: 3318617 - DNA, 25 bp, Homo sapien
cacccttcaatcctttaacaccatt

SEQ ID NO: 3318618 - DNA, 25 bp, Homo sapien
ctttggtccaggaagtccatgaggt

SEQ ID NO: 3318619 - DNA, 25 bp, Homo sapien
tttggtccaggaagtccatgaggtc

SEQ ID NO: 3318620 - DNA, 25 bp, Homo sapien
ttggtccaggaagtccatgaggtcc

SEQ ID NO: 3318621 - DNA, 25 bp, Homo sapien
ttcattaatagcaattctgtctgct

SEQ ID NO: 3318622 - DNA, 25 bp, Homo sapien
tgctctgtaataggaaattcattaa

SEQ ID NO: 3318623 - DNA, 25 bp, Homo sapien
taatagcaattctgtctgctaatac

SEQ ID NO: 3318624 - DNA, 25 bp, Homo sapien
tggattgctctgtaataggaaattc

SEQ ID NO: 3318625 - DNA, 25 bp, Homo sapien
caggtgggccatggggacctggtgg

SEQ ID NO: 3318626 - DNA, 25 bp, Homo sapien
gccaggtgggccatggggacctggt

SEQ ID NO: 3318627 - DNA, 25 bp, Homo sapien
ggtgggccatggggacctggtgggc

SEQ ID NO: 3318628 - DNA, 25 bp, Homo sapien
catggggccaggtgggccatgggga

SEQ ID NO: 3318629 - DNA, 25 bp, Homo sapien
agaaggaccctgtggacccggcatt

SEQ ID NO: 3318630 - DNA, 25 bp, Homo sapien
ggaccctgtggacccggcattccag

SEQ ID NO: 3318631 - DNA, 25 bp, Homo sapien
gaaggaccctgtggacccggcattc

SEQ ID NO: 3318632 - DNA, 25 bp, Homo sapien
gtaatccaggaagtccaattcctcc

SEQ ID NO: 3318633 - DNA, 25 bp, Homo sapien
cggtaatccaggaagtccaattcct

SEQ ID NO: 3318634 - DNA, 25 bp, Homo sapien
ggtaatccaggaagtccaattcctc

SEQ ID NO: 3318635 - DNA, 25 bp, Homo sapien
ccccatgtctccctttgagcctttg

SEQ ID NO: 3318636 - DNA, 25 bp, Homo sapien
ctgggtcccccatgtctccctttga

SEQ ID NO: 3318637 - DNA, 25 bp, Homo sapien
catgtctccctttgagcctttgagt

SEQ ID NO: 3318638 - DNA, 25 bp, Homo sapien
tgtctccctttgagcctttgagtcc

SEQ ID NO: 3318639 - DNA, 25 bp, Homo sapien
tgggattcctggagatccctgctct

SEQ ID NO: 3318640 - DNA, 25 bp, Homo sapien
cctgggattcctggagatccctgct

SEQ ID NO: 3318641 - DNA, 25 bp, Homo sapien
ctgctctccatccattcctgggatt

SEQ ID NO: 3318642 - DNA, 25 bp, Homo sapien
tctccatccattcctgggattcctg

SEQ ID NO: 3318643 - DNA, 25 bp, Homo sapien
gatttccaacggagctgacctgagg

SEQ ID NO: 3318644 - DNA, 25 bp, Homo sapien
tacgccagaaagttaatcgaacagc

SEQ ID NO: 3318645 - DNA, 25 bp, Homo sapien
cactgtgggtccaataatgatggct

SEQ ID NO: 3318646 - DNA, 25 bp, Homo sapien
ggtaagcgagaatgactcaaccctc

SEQ ID NO: 3318647 - DNA, 25 bp, Homo sapien
tgcctctttgggtcaaagaatgggt

SEQ ID NO: 3318648 - DNA, 25 bp, Homo sapien
tgatacagattttttacctaggagg

SEQ ID NO: 3318649 - DNA, 25 bp, Homo sapien
gcttctctaggcctttggactgtag

SEQ ID NO: 3318650 - DNA, 25 bp, Homo sapien
tctggagtcttagtcaagcgaggag

SEQ ID NO: 3318651 - DNA, 25 bp, Homo sapien
gatccaggcagtgttgctcaccaag

SEQ ID NO: 3318652 - DNA, 25 bp, Homo sapien
aaattgcagatttccttctaggata

SEQ ID NO: 3318653 - DNA, 25 bp, Homo sapien
gtgttgctcaccaagaataaagatt

SEQ ID NO: 3318654 - DNA, 25 bp, Homo sapien
tagtccagctcaccaagatattatt

SEQ ID NO: 3318655 - DNA, 25 bp, Homo sapien
tgaggtccaggaggtccagggggac

SEQ ID NO: 3318656 - DNA, 25 bp, Homo sapien
tggcccttgtagtccttgaggtcca

SEQ ID NO: 3318657 - DNA, 25 bp, Homo sapien
ggcccttgtagtccttgaggtccag

SEQ ID NO: 3318658 - DNA, 25 bp, Homo sapien
ctttggcccttgtagtccttgaggt

SEQ ID NO: 3318659 - DNA, 25 bp, Homo sapien
cacagaaagcatgcaataggagtta

SEQ ID NO: 3318660 - DNA, 25 bp, Homo sapien
acagaaagcatgcaataggagttac

SEQ ID NO: 3318661 - DNA, 25 bp, Homo sapien
ttgccgttgtagtctatgatctcag

SEQ ID NO: 3318662 - DNA, 25 bp, Homo sapien
gaggttgccgttgtagtctatgatc

SEQ ID NO: 3318663 - DNA, 25 bp, Homo sapien
gtctatgatctcagtggctccttga

SEQ ID NO: 3318664 - DNA, 25 bp, Homo sapien
tggaggttgccgttgtagtctatga

SEQ ID NO: 3318665 - DNA, 25 bp, Homo sapien
gagctccagagtcccctttttctcc

SEQ ID NO: 3318666 - DNA, 25 bp, Homo sapien
ttggtccctgagctccagagtcccc

SEQ ID NO: 3318667 - DNA, 25 bp, Homo sapien
cctgagctccagagtcccctttttc

SEQ ID NO: 3318668 - DNA, 25 bp, Homo sapien
cagagtcccctttttctccacgatc

SEQ ID NO: 3318669 - DNA, 25 bp, Homo sapien
agagccaacaattgtttttcctctg

SEQ ID NO: 3318670 - DNA, 25 bp, Homo sapien
aaaagtgtagatagttgggacagga

SEQ ID NO: 3318671 - DNA, 25 bp, Homo sapien
agaaaagtgtagatagttgggacag

SEQ ID NO: 3318672 - DNA, 25 bp, Homo sapien
gaagaaaagtgtagatagttgggac

SEQ ID NO: 3318673 - DNA, 25 bp, Homo sapien
tggcattacctcaactgtagagcag

SEQ ID NO: 3318674 - DNA, 25 bp, Homo sapien
aagtttcattgatggtggcattacc

SEQ ID NO: 3318675 - DNA, 25 bp, Homo sapien
ttttaacactcagtgctgaagtgga

SEQ ID NO: 3318676 - DNA, 25 bp, Homo sapien
gaaaagttcatctgtaggtataggc

SEQ ID NO: 3318677 - DNA, 25 bp, Homo sapien
ccctttgggcctctagttcctgatt

SEQ ID NO: 3318678 - DNA, 25 bp, Homo sapien
tagttcctgattcaccttgtttccc

SEQ ID NO: 3318679 - DNA, 25 bp, Homo sapien
cccctttgggcctctagttcctgat

SEQ ID NO: 3318680 - DNA, 25 bp, Homo sapien
ctctagttcctgattcaccttgttt

SEQ ID NO: 3318681 - DNA, 25 bp, Homo sapien
ggctccaggttcccctcgctcacct

SEQ ID NO: 3318682 - DNA, 25 bp, Homo sapien
ccaggttcccctcgctcacctcttc

SEQ ID NO: 3318683 - DNA, 25 bp, Homo sapien
gggggctccaggttcccctcgctca

SEQ ID NO: 3318684 - DNA, 25 bp, Homo sapien
tcacctcttccaggaggccctgctt

SEQ ID NO: 3318685 - DNA, 25 bp, Homo sapien
cctggtaagcctggttctccttgag

SEQ ID NO: 3318686 - DNA, 25 bp, Homo sapien
tgaggaccaatgaaacctggttctc

SEQ ID NO: 3318687 - DNA, 25 bp, Homo sapien
ccttgaggaccaatgaaacctggtt

SEQ ID NO: 3318688 - DNA, 25 bp, Homo sapien
tctccttgaggaccaatgaaacctg

SEQ ID NO: 3318689 - DNA, 25 bp, Homo sapien
tctgaataggctaaccttcccctgt

SEQ ID NO: 3318690 - DNA, 25 bp, Homo sapien
cagttgccttctattaagtcaggca

SEQ ID NO: 3318691 - DNA, 25 bp, Homo sapien
tacttcaacgaaaacaacaaactga

SEQ ID NO: 3318692 - DNA, 25 bp, Homo sapien
ggttccagattccacgttgcaccta

SEQ ID NO: 3318693 - DNA, 25 bp, Homo sapien
tatccccggaagtccaggaagccca

SEQ ID NO: 3318694 - DNA, 25 bp, Homo sapien
atccccggaagtccaggaagcccag

SEQ ID NO: 3318695 - DNA, 25 bp, Homo sapien
gaagcccaggaagccctggttcacc

SEQ ID NO: 3318696 - DNA, 25 bp, Homo sapien
caggaagcccaggaagccctggttc

SEQ ID NO: 3318697 - DNA, 25 bp, Homo sapien
cttttgccctggacgaccagattcc

SEQ ID NO: 3318698 - DNA, 25 bp, Homo sapien
ttttgccctggacgaccagattccc

SEQ ID NO: 3318699 - DNA, 25 bp, Homo sapien
ttgccctggacgaccagattcccca

SEQ ID NO: 3318700 - DNA, 25 bp, Homo sapien
ccctggacgaccagattccccaggt

SEQ ID NO: 3318701 - DNA, 25 bp, Homo sapien
cttaattcctgcagcagatgatcca

SEQ ID NO: 3318702 - DNA, 25 bp, Homo sapien
aattcctgcagcagatgatccaggg

SEQ ID NO: 3318703 - DNA, 25 bp, Homo sapien
tcctgcagcagatgatccagggtca

SEQ ID NO: 3318704 - DNA, 25 bp, Homo sapien
ctgcagcagatgatccagggtcacc

SEQ ID NO: 3318705 - DNA, 25 bp, Homo sapien
ccttggggccgttctctccagcgtc

SEQ ID NO: 3318706 - DNA, 25 bp, Homo sapien
cccttggggccgttctctccagcgt

SEQ ID NO: 3318707 - DNA, 25 bp, Homo sapien
acccttggggccgttctctccagcg

SEQ ID NO: 3318708 - DNA, 25 bp, Homo sapien
cttttcaccttgttctccaggttct

SEQ ID NO: 3318709 - DNA, 25 bp, Homo sapien
ttttcaccttgttctccaggttctc

SEQ ID NO: 3318710 - DNA, 25 bp, Homo sapien
tttcaccttgttctccaggttctcc

SEQ ID NO: 3318711 - DNA, 25 bp, Homo sapien
actgctccaggcaacccgggctcac

SEQ ID NO: 3318712 - DNA, 25 bp, Homo sapien
tactgctccaggcaacccgggctca

SEQ ID NO: 3318713 - DNA, 25 bp, Homo sapien
gtcctactgctccaggcaacccggg

SEQ ID NO: 3318714 - DNA, 25 bp, Homo sapien
cctactgctccaggcaacccgggct

SEQ ID NO: 3318715 - DNA, 25 bp, Homo sapien
tctctaagtgacctgctgtttcagt

SEQ ID NO: 3318716 - DNA, 25 bp, Homo sapien
tgtgaaatcatttcgtttccctggg

SEQ ID NO: 3318717 - DNA, 25 bp, Homo sapien
taggttcaattctctgaaggaggga

SEQ ID NO: 3318718 - DNA, 25 bp, Homo sapien
gaagttccatacacaaagctttagg

SEQ ID NO: 3318719 - DNA, 25 bp, Homo sapien
cctccatgatctgcaatattctaaa

SEQ ID NO: 3318720 - DNA, 25 bp, Homo sapien
gatttgtgaagcaaatggatatgca

SEQ ID NO: 3318721 - DNA, 25 bp, Homo sapien
tctaaatgttatcttgagttatata

SEQ ID NO: 3318722 - DNA, 25 bp, Homo sapien
ttaatcttaggcatacaagttttgt

SEQ ID NO: 3318723 - DNA, 25 bp, Homo sapien
tgctggcgagtgtgcggtgtttggt

SEQ ID NO: 3318724 - DNA, 25 bp, Homo sapien
tggaaaatgtagctgcgacatgggc

SEQ ID NO: 3318725 - DNA, 25 bp, Homo sapien
catgggcggttaactgctggcgagt

SEQ ID NO: 3318726 - DNA, 25 bp, Homo sapien
tagctgcgacatgggcggttaactg

SEQ ID NO: 3318727 - DNA, 25 bp, Homo sapien
ttcctggtttctgtgaaggttccag

SEQ ID NO: 3318728 - DNA, 25 bp, Homo sapien
tttcctggtttctgtgaaggttcca

SEQ ID NO: 3318729 - DNA, 25 bp, Homo sapien
tcctggtttctgtgaaggttccaga

SEQ ID NO: 3318730 - DNA, 25 bp, Homo sapien
ctgccacagtggctttcctggtttc

SEQ ID NO: 3318731 - DNA, 25 bp, Homo sapien
cctggaattccaggtgctccaatag

SEQ ID NO: 3318732 - DNA, 25 bp, Homo sapien
cttttgcccattcatccctggaatt

SEQ ID NO: 3318733 - DNA, 25 bp, Homo sapien
gaattccaggtgctccaatagaacc

SEQ ID NO: 3318734 - DNA, 25 bp, Homo sapien
ttgcccattcatccctggaattcca

SEQ ID NO: 3318735 - DNA, 25 bp, Homo sapien
gggcccatgtcgcaaactcaaattt

SEQ ID NO: 3318736 - DNA, 25 bp, Homo sapien
catttgttccgcagttaaataaggg

SEQ ID NO: 3318737 - DNA, 25 bp, Homo sapien
cctaccagtagcagtaacacttgca

SEQ ID NO: 3318738 - DNA, 25 bp, Homo sapien
tcatacctatcagagggccacatgg

SEQ ID NO: 3318739 - DNA, 25 bp, Homo sapien
cctatgatgttttcatagaattttc

SEQ ID NO: 3318740 - DNA, 25 bp, Homo sapien
gcacccctatgatgttttcatagaa

SEQ ID NO: 3318741 - DNA, 25 bp, Homo sapien
aaagcacccctatgatgttttcata

SEQ ID NO: 3318742 - DNA, 25 bp, Homo sapien
cccctatgatgttttcatagaattt

SEQ ID NO: 3318743 - DNA, 25 bp, Homo sapien
taaggtccctaatgcacttcagaaa

SEQ ID NO: 3318744 - DNA, 25 bp, Homo sapien
tgagtggaggaattcaggtcatgac

SEQ ID NO: 3318745 - DNA, 25 bp, Homo sapien
tagtgtctcaacacagaaatggcag

SEQ ID NO: 3318746 - DNA, 25 bp, Homo sapien
gattagctctaattgcaagcgtgag

SEQ ID NO: 3318747 - DNA, 25 bp, Homo sapien
gccttgttctcctggctttcctggt

SEQ ID NO: 3318748 - DNA, 25 bp, Homo sapien
atcaagccttgttctcctggctttc

SEQ ID NO: 3318749 - DNA, 25 bp, Homo sapien
catcaagccttgttctcctggcttt

SEQ ID NO: 3318750 - DNA, 25 bp, Homo sapien
tgttctcctggctttcctggttcac

SEQ ID NO: 3318751 - DNA, 25 bp, Homo sapien
ataagtgatccaaaaagcgactcac

SEQ ID NO: 3318752 - DNA, 25 bp, Homo sapien
ctcctggcattccacgggggccatc

SEQ ID NO: 3318753 - DNA, 25 bp, Homo sapien
aatcaggcggcgtttaatgagctgc

SEQ ID NO: 3318754 - DNA, 25 bp, Homo sapien
taatcaggcggcgtttaatgagctg

SEQ ID NO: 3318755 - DNA, 25 bp, Homo sapien
cttaatcaggcggcgtttaatgagc

SEQ ID NO: 3318756 - DNA, 25 bp, Homo sapien
atcaggcggcgtttaatgagctgct

SEQ ID NO: 3318757 - DNA, 25 bp, Homo sapien
gattactgtgcagggcagcaactgt

SEQ ID NO: 3318758 - DNA, 25 bp, Homo sapien
acggtgaggatctgattactgtgca

SEQ ID NO: 3318759 - DNA, 25 bp, Homo sapien
cttgacggtgaggatctgattactg

SEQ ID NO: 3318760 - DNA, 25 bp, Homo sapien
ctgattactgtgcagggcagcaact

SEQ ID NO: 3318761 - DNA, 25 bp, Homo sapien
tctacacggtgtaaagagtttgcta

SEQ ID NO: 3318762 - DNA, 25 bp, Homo sapien
gacactgttacgaaaaccacactgt

SEQ ID NO: 3318763 - DNA, 25 bp, Homo sapien
tacaatgggatctgtgtctacacgg

SEQ ID NO: 3318764 - DNA, 25 bp, Homo sapien
tacaactcaggacatacaatacgtg

SEQ ID NO: 3318765 - DNA, 25 bp, Homo sapien
tacgccaagtacagcgaaagaagct

SEQ ID NO: 3318766 - DNA, 25 bp, Homo sapien
ttttatacaacgaaggtgccatgcc

SEQ ID NO: 3318767 - DNA, 25 bp, Homo sapien
tctggttagaggagcaggcagtact

SEQ ID NO: 3318768 - DNA, 25 bp, Homo sapien
gattaggaccctggcattgcagtga

SEQ ID NO: 3318769 - DNA, 25 bp, Homo sapien
tggtttgattacagggtgtctcagg

SEQ ID NO: 3318770 - DNA, 25 bp, Homo sapien
tcaggcccctaagggtgtcagacaa

SEQ ID NO: 3318771 - DNA, 25 bp, Homo sapien
taagaagggattgtgagcctagttc

SEQ ID NO: 3318772 - DNA, 25 bp, Homo sapien
gacaaagagctctttagcagaacta

SEQ ID NO: 3318773 - DNA, 25 bp, Homo sapien
gaagtaataccacagaccagtatag

SEQ ID NO: 3318774 - DNA, 25 bp, Homo sapien
tcaacattgtactggtgacatagca

SEQ ID NO: 3318775 - DNA, 25 bp, Homo sapien
gaccagtatagagttacagcactaa

SEQ ID NO: 3318776 - DNA, 25 bp, Homo sapien
gaagtacatggctccaaagtggaag

SEQ ID NO: 3318777 - DNA, 25 bp, Homo sapien
gattcgtgctaaattcacaagctta

SEQ ID NO: 3318778 - DNA, 25 bp, Homo sapien
gactcttgtcaaccagattcgtgct

SEQ ID NO: 3318779 - DNA, 25 bp, Homo sapien
catgataagaatgcccggaagttct

SEQ ID NO: 3318780 - DNA, 25 bp, Homo sapien
ctatgtaaccagttctttgatggtt

SEQ ID NO: 3318781 - DNA, 25 bp, Homo sapien
aactgttctccctgaacatcatctg

SEQ ID NO: 3318782 - DNA, 25 bp, Homo sapien
actgttctccctgaacatcatctgt

SEQ ID NO: 3318783 - DNA, 25 bp, Homo sapien
gttctccctgaacatcatctgtcaa

SEQ ID NO: 3318784 - DNA, 25 bp, Homo sapien
tgttctccctgaacatcatctgtca

SEQ ID NO: 3318785 - DNA, 25 bp, Homo sapien
aatgctgtgaaacataatcagtatt

SEQ ID NO: 3318786 - DNA, 25 bp, Homo sapien
cagagtaactgccacgagaaacaaa

SEQ ID NO: 3318787 - DNA, 25 bp, Homo sapien
aactgccacgagaaacaaaatgctg

SEQ ID NO: 3318788 - DNA, 25 bp, Homo sapien
tcatcagccagagtaactgccacga

SEQ ID NO: 3318789 - DNA, 25 bp, Homo sapien
cctaggtccctgatcaccttgttct

SEQ ID NO: 3318790 - DNA, 25 bp, Homo sapien
ctaggtccctgatcaccttgttctc

SEQ ID NO: 3318791 - DNA, 25 bp, Homo sapien
taggtccctgatcaccttgttctcc

SEQ ID NO: 3318792 - DNA, 25 bp, Homo sapien
cttatcgccttttggaccaggaggg

SEQ ID NO: 3318793 - DNA, 25 bp, Homo sapien
ttatcgccttttggaccaggagggc

SEQ ID NO: 3318794 - DNA, 25 bp, Homo sapien
tatcgccttttggaccaggagggcc

SEQ ID NO: 3318795 - DNA, 25 bp, Homo sapien
ccggccccgacttgtgcacttggat

SEQ ID NO: 3318796 - DNA, 25 bp, Homo sapien
ctcttccttccgaattggaccctct

SEQ ID NO: 3318797 - DNA, 25 bp, Homo sapien
cacttggattaacagcaggtgtttt

SEQ ID NO: 3318798 - DNA, 25 bp, Homo sapien
agaagcaaagccgaggtcaacctcc

SEQ ID NO: 3318799 - DNA, 25 bp, Homo sapien
caagggactatatgtgcccatgatc

SEQ ID NO: 3318800 - DNA, 25 bp, Homo sapien
aaatcaaaagcagctgccataagga

SEQ ID NO: 3318801 - DNA, 25 bp, Homo sapien
gtgggtctagcactaaagaacattt

SEQ ID NO: 3318802 - DNA, 25 bp, Homo sapien
cataaggaagcaattagtgggtcta

SEQ ID NO: 3318803 - DNA, 25 bp, Homo sapien
gatgacaagctgtcttccttaacta

SEQ ID NO: 3318804 - DNA, 25 bp, Homo sapien
atgacaagctgtcttccttaactag

SEQ ID NO: 3318805 - DNA, 25 bp, Homo sapien
agatgacaagctgtcttccttaact

SEQ ID NO: 3318806 - DNA, 25 bp, Homo sapien
tcatccacggttctcctggtcctgt

SEQ ID NO: 3318807 - DNA, 25 bp, Homo sapien
tacagttactctctttagtatctta

SEQ ID NO: 3318808 - DNA, 25 bp, Homo sapien
taactgtggctgtatactcaagatt

SEQ ID NO: 3318809 - DNA, 25 bp, Homo sapien
tattaactactatgcatttaatgct

SEQ ID NO: 3318810 - DNA, 25 bp, Homo sapien
attccaggactgcctataccacgtc

SEQ ID NO: 3318811 - DNA, 25 bp, Homo sapien
ggactgcctataccacgtcctctca

SEQ ID NO: 3318812 - DNA, 25 bp, Homo sapien
tccaggactgcctataccacgtcct

SEQ ID NO: 3318813 - DNA, 25 bp, Homo sapien
tgcctataccacgtcctctcactca

SEQ ID NO: 3318814 - DNA, 25 bp, Homo sapien
gcaaaaagacagtccggcagcgccg

SEQ ID NO: 3318815 - DNA, 25 bp, Homo sapien
taggatgtaacaatcgacacctaaa

SEQ ID NO: 3318816 - DNA, 25 bp, Homo sapien
tcttgcagtcgtcctaatagagcca

SEQ ID NO: 3318817 - DNA, 25 bp, Homo sapien
taacaatcgacacctaaaatatctg

SEQ ID NO: 3318818 - DNA, 25 bp, Homo sapien
cagaggagaggtttctggtgatatg

SEQ ID NO: 3318819 - DNA, 25 bp, Homo sapien
tggtgatatggtaatggtatctgct

SEQ ID NO: 3318820 - DNA, 25 bp, Homo sapien
ttctggtgatatggtaatggtatct

SEQ ID NO: 3318821 - DNA, 25 bp, Homo sapien
gagaggtttctggtgatatggtaat

SEQ ID NO: 3318822 - DNA, 25 bp, Homo sapien
gcctgaactgtatgccaactggttg

SEQ ID NO: 3318823 - DNA, 25 bp, Homo sapien
tgccaactggttgttaataatgctc

SEQ ID NO: 3318824 - DNA, 25 bp, Homo sapien
gagcaagttgaagttgttccccaaa

SEQ ID NO: 3318825 - DNA, 25 bp, Homo sapien
taatgctctctggaagggagcaagt

SEQ ID NO: 3318826 - DNA, 25 bp, Homo sapien
cggcctctcttacctcgtttccctg

SEQ ID NO: 3318827 - DNA, 25 bp, Homo sapien
tcttcggcctctcttacctcgtttc

SEQ ID NO: 3318828 - DNA, 25 bp, Homo sapien
gcctctcttacctcgtttccctgga

SEQ ID NO: 3318829 - DNA, 25 bp, Homo sapien
caaaatgagttcatggctttcagaa

SEQ ID NO: 3318830 - DNA, 25 bp, Homo sapien
ttggcaaaatgagttcatggctttc

SEQ ID NO: 3318831 - DNA, 25 bp, Homo sapien
gaatttgggctgtcatgacacaatt

SEQ ID NO: 3318832 - DNA, 25 bp, Homo sapien
tcagaatttgggctgtcatgacaca

SEQ ID NO: 3318833 - DNA, 25 bp, Homo sapien
tcatgaatttgtgagagatgcaagg

SEQ ID NO: 3318834 - DNA, 25 bp, Homo sapien
catgaatttgtgagagatgcaaggc

SEQ ID NO: 3318835 - DNA, 25 bp, Homo sapien
tcagataaaattattctcattctta

SEQ ID NO: 3318836 - DNA, 25 bp, Homo sapien
cagataaaattattctcattcttac

SEQ ID NO: 3318837 - DNA, 25 bp, Homo sapien
cactgtcctctggaagcataataag

SEQ ID NO: 3318838 - DNA, 25 bp, Homo sapien
ttcatatagacacatgtggccttca

SEQ ID NO: 3318839 - DNA, 25 bp, Homo sapien
tcttttgagttagttgtgcttcgtg

SEQ ID NO: 3318840 - DNA, 25 bp, Homo sapien
atggtgaactaacggtcccaagagg

SEQ ID NO: 3318841 - DNA, 25 bp, Homo sapien
aaggctctgagatgacaacaccatg

SEQ ID NO: 3318842 - DNA, 25 bp, Homo sapien
tctgagatgacaacaccatgaccac

SEQ ID NO: 3318843 - DNA, 25 bp, Homo sapien
ctgagatgacaacaccatgaccact

SEQ ID NO: 3318844 - DNA, 25 bp, Homo sapien
ggctctgagatgacaacaccatgac

SEQ ID NO: 3318845 - DNA, 25 bp, Homo sapien
cagggtgctgaacacccgatttctt

SEQ ID NO: 3318846 - DNA, 25 bp, Homo sapien
gaacacccgatttctttcaatgagt

SEQ ID NO: 3318847 - DNA, 25 bp, Homo sapien
tgtgtgctaaatacagctggcaggg

SEQ ID NO: 3318848 - DNA, 25 bp, Homo sapien
tcacactgaaccagctctgaatgaa

SEQ ID NO: 3318849 - DNA, 25 bp, Homo sapien
gaatctatggcctattgccactgaa

SEQ ID NO: 3318850 - DNA, 25 bp, Homo sapien
gaacaaactggatactggcacaact

SEQ ID NO: 3318851 - DNA, 25 bp, Homo sapien
tgtaatggtgatcaattttcaacac

SEQ ID NO: 3318852 - DNA, 25 bp, Homo sapien
tggctgagaagaactagcagttgat

SEQ ID NO: 3318853 - DNA, 25 bp, Homo sapien
agaaaccccgcagtgccaagaagga

SEQ ID NO: 3318854 - DNA, 25 bp, Homo sapien
catgcgctgttgctggacgatgtca

SEQ ID NO: 3318855 - DNA, 25 bp, Homo sapien
tggcagtgcattgtgagaaaccccg

SEQ ID NO: 3318856 - DNA, 25 bp, Homo sapien
gccaagaaggataagcatgcgctgt

SEQ ID NO: 3318857 - DNA, 25 bp, Homo sapien
catcctttttcatcactgcatagta

SEQ ID NO: 3318858 - DNA, 25 bp, Homo sapien
actcatcctttttcatcactgcata

SEQ ID NO: 3318859 - DNA, 25 bp, Homo sapien
tcatcctttttcatcactgcatagt

SEQ ID NO: 3318860 - DNA, 25 bp, Homo sapien
gaactcatcctttttcatcactgca

SEQ ID NO: 3318861 - DNA, 25 bp, Homo sapien
caccagttcctggattaactgattt

SEQ ID NO: 3318862 - DNA, 25 bp, Homo sapien
gctatgatatccattttttgcattt

SEQ ID NO: 3318863 - DNA, 25 bp, Homo sapien
ctgctatgatatccattttttgcat

SEQ ID NO: 3318864 - DNA, 25 bp, Homo sapien
tgctatgatatccattttttgcatt

SEQ ID NO: 3318865 - DNA, 25 bp, Homo sapien
tcctctctctatcttgcaaattttc

SEQ ID NO: 3318866 - DNA, 25 bp, Homo sapien
tggaatcttcttcctacccacttcc

SEQ ID NO: 3318867 - DNA, 25 bp, Homo sapien
agcttggctagtgcttctcactgtt

SEQ ID NO: 3318868 - DNA, 25 bp, Homo sapien
ttggaatcttcttcctacccacttc

SEQ ID NO: 3318869 - DNA, 25 bp, Homo sapien
tttgggacaagtctgacccagtgtg

SEQ ID NO: 3318870 - DNA, 25 bp, Homo sapien
tgagctgatgctgtcaactgccggt

SEQ ID NO: 3318871 - DNA, 25 bp, Homo sapien
gagctctaatttgacctcctgagaa

SEQ ID NO: 3318872 - DNA, 25 bp, Homo sapien
catttagacatggtgctttgggaca

SEQ ID NO: 3318873 - DNA, 25 bp, Homo sapien
gcactgaccccaagggatggccagt

SEQ ID NO: 3318874 - DNA, 25 bp, Homo sapien
acgcactgaccccaagggatggcca

SEQ ID NO: 3318875 - DNA, 25 bp, Homo sapien
accccaagggatggccagtgacctg

SEQ ID NO: 3318876 - DNA, 25 bp, Homo sapien
ctgaccccaagggatggccagtgac

SEQ ID NO: 3318877 - DNA, 25 bp, Homo sapien
tctagtgaatcattcggcagcgcac

SEQ ID NO: 3318878 - DNA, 25 bp, Homo sapien
actccaaatctcaggcaacaggtaa

SEQ ID NO: 3318879 - DNA, 25 bp, Homo sapien
ttcggcagcgcactgaactttcctg

SEQ ID NO: 3318880 - DNA, 25 bp, Homo sapien
taaggtatgaagaagtagttcactc

SEQ ID NO: 3318881 - DNA, 25 bp, Homo sapien
gaatgtctagagtcaacgagagcac

SEQ ID NO: 3318882 - DNA, 25 bp, Homo sapien
cactttaaaatgaggtggatagtat

SEQ ID NO: 3318883 - DNA, 25 bp, Homo sapien
taactacaatgcaagttccatgcac

SEQ ID NO: 3318884 - DNA, 25 bp, Homo sapien
gcttttgttggtctccctaactaca

SEQ ID NO: 3318885 - DNA, 25 bp, Homo sapien
caaggtttagagatgtgtacagtgt

SEQ ID NO: 3318886 - DNA, 25 bp, Homo sapien
ggcacaggctttacgttgccagttc

SEQ ID NO: 3318887 - DNA, 25 bp, Homo sapien
gatacaatggcctttgctgcagcca

SEQ ID NO: 3318888 - DNA, 25 bp, Homo sapien
acagtgttactaagtgggtggcaca

SEQ ID NO: 3318889 - DNA, 25 bp, Homo sapien
tgtgcagagttttttggcctatatg

SEQ ID NO: 3318890 - DNA, 25 bp, Homo sapien
gtgcagagttttttggcctatatga

SEQ ID NO: 3318891 - DNA, 25 bp, Homo sapien
gagaatatgcaaggtgggacatgaa

SEQ ID NO: 3318892 - DNA, 25 bp, Homo sapien
aatatgcaaggtgggacatgaagga

SEQ ID NO: 3318893 - DNA, 25 bp, Homo sapien
tagagaatatgcaaggtgggacatg

SEQ ID NO: 3318894 - DNA, 25 bp, Homo sapien
ctagagaatatgcaaggtgggacat

SEQ ID NO: 3318895 - DNA, 25 bp, Homo sapien
ctgttgcaatgcaccaaagagtcat

SEQ ID NO: 3318896 - DNA, 25 bp, Homo sapien
tctgatctgttgcaatgcaccaaag

SEQ ID NO: 3318897 - DNA, 25 bp, Homo sapien
tgatctgttgcaatgcaccaaagag

SEQ ID NO: 3318898 - DNA, 25 bp, Homo sapien
ggttctgatctgttgcaatgcacca

SEQ ID NO: 3318899 - DNA, 25 bp, Homo sapien
aggctgaggacaaactatctgatct

SEQ ID NO: 3318900 - DNA, 25 bp, Homo sapien
ccttttaacctgaacattggagagt

SEQ ID NO: 3318901 - DNA, 25 bp, Homo sapien
gcacttgaactaaatgtggagccaa

SEQ ID NO: 3318902 - DNA, 25 bp, Homo sapien
ggatttattaagtatgggcccatac

SEQ ID NO: 3318903 - DNA, 25 bp, Homo sapien
aaggtgacggtcaccacctgtgttc

SEQ ID NO: 3318904 - DNA, 25 bp, Homo sapien
gagcttcaaggtgacggtcaccacc

SEQ ID NO: 3318905 - DNA, 25 bp, Homo sapien
tccactctattaaatcaacatctct

SEQ ID NO: 3318906 - DNA, 25 bp, Homo sapien
gcttcaaggtgacggtcaccacctg

SEQ ID NO: 3318907 - DNA, 25 bp, Homo sapien
gttcaactatgcatgtccatcccat

SEQ ID NO: 3318908 - DNA, 25 bp, Homo sapien
tgtaccgttcaactatgcatgtcca

SEQ ID NO: 3318909 - DNA, 25 bp, Homo sapien
gatttcaaagccctgtaccgttcaa

SEQ ID NO: 3318910 - DNA, 25 bp, Homo sapien
caaagccctgtaccgttcaactatg

SEQ ID NO: 3318911 - DNA, 25 bp, Homo sapien
tccagggcctaacgaagtgttagac

SEQ ID NO: 3318912 - DNA, 25 bp, Homo sapien
accaaggtaagacgcaagccggctg

SEQ ID NO: 3318913 - DNA, 25 bp, Homo sapien
cactggctcctagtgtcggatacac

SEQ ID NO: 3318914 - DNA, 25 bp, Homo sapien
taacaaaaggatcatgtccagggcc

SEQ ID NO: 3318915 - DNA, 25 bp, Homo sapien
ctaggacttaaggcacagtctgaaa

SEQ ID NO: 3318916 - DNA, 25 bp, Homo sapien
taggacttaaggcacagtctgaaag

SEQ ID NO: 3318917 - DNA, 25 bp, Homo sapien
aggacttaaggcacagtctgaaaga

SEQ ID NO: 3318918 - DNA, 25 bp, Homo sapien
ggacttaaggcacagtctgaaagaa

SEQ ID NO: 3318919 - DNA, 25 bp, Homo sapien
gattgagggcttagcagcccactgt

SEQ ID NO: 3318920 - DNA, 25 bp, Homo sapien
agccacgttccctgaaagcctttca

SEQ ID NO: 3318921 - DNA, 25 bp, Homo sapien
ctctcctgttttccataaggagtgc

SEQ ID NO: 3318922 - DNA, 25 bp, Homo sapien
gatttggtacttgtcgcccacaaga

SEQ ID NO: 3318923 - DNA, 25 bp, Homo sapien
ttatgatatctagaggaataaacca

SEQ ID NO: 3318924 - DNA, 25 bp, Homo sapien
caacttgagcctttatgatatctag

SEQ ID NO: 3318925 - DNA, 25 bp, Homo sapien
ttaggatactgcataatcaacttga

SEQ ID NO: 3318926 - DNA, 25 bp, Homo sapien
gatactgcataatcaacttgagcct

SEQ ID NO: 3318927 - DNA, 25 bp, Homo sapien
caaacccacatgcatccaccaagaa

SEQ ID NO: 3318928 - DNA, 25 bp, Homo sapien
aacccacatgcatccaccaagaagc

SEQ ID NO: 3318929 - DNA, 25 bp, Homo sapien
tattttcaaacccacatgcatccac

SEQ ID NO: 3318930 - DNA, 25 bp, Homo sapien
ccacatgcatccaccaagaagcagt

SEQ ID NO: 3318931 - DNA, 25 bp, Homo sapien
tacaaacactatggttagctctcct

SEQ ID NO: 3318932 - DNA, 25 bp, Homo sapien
aattgcatttctgaaaacggcactg

SEQ ID NO: 3318933 - DNA, 25 bp, Homo sapien
catttggtcaacgaagtcacttggg

SEQ ID NO: 3318934 - DNA, 25 bp, Homo sapien
ccttcctagcatgggttaggattgt

SEQ ID NO: 3318935 - DNA, 25 bp, Homo sapien
tgacaacacttttcgattaattagg

SEQ ID NO: 3318936 - DNA, 25 bp, Homo sapien
aattaggggtaggtccagatgctgc

SEQ ID NO: 3318937 - DNA, 25 bp, Homo sapien
tttccagggatttgctgaacagccc

SEQ ID NO: 3318938 - DNA, 25 bp, Homo sapien
gagaggtcattacccacaacaaact

SEQ ID NO: 3318939 - DNA, 25 bp, Homo sapien
tgtcatcagtgggcatcccattcta

SEQ ID NO: 3318940 - DNA, 25 bp, Homo sapien
tcagtgggcatcccattctatgaac

SEQ ID NO: 3318941 - DNA, 25 bp, Homo sapien
cacctggccagcagctaatgctagc

SEQ ID NO: 3318942 - DNA, 25 bp, Homo sapien
cagctaatgctagctatcagctaag

SEQ ID NO: 3318943 - DNA, 25 bp, Homo sapien
agctaatgctagctatcagctaagt

SEQ ID NO: 3318944 - DNA, 25 bp, Homo sapien
gctggcatagcgctaacgagacaga

SEQ ID NO: 3318945 - DNA, 25 bp, Homo sapien
gctaacgagacagagcttgacaggt

SEQ ID NO: 3318946 - DNA, 25 bp, Homo sapien
tagcgctaacgagacagagcttgac

SEQ ID NO: 3318947 - DNA, 25 bp, Homo sapien
acgagacagagcttgacaggtttca

SEQ ID NO: 3318948 - DNA, 25 bp, Homo sapien
tctatccaaacccaggacaatccag

SEQ ID NO: 3318949 - DNA, 25 bp, Homo sapien
tttatgccagaaaccacgagtctcc

SEQ ID NO: 3318950 - DNA, 25 bp, Homo sapien
cagcctctgtttagatgtgcctcca

SEQ ID NO: 3318951 - DNA, 25 bp, Homo sapien
aatttgtcactctgccatgtccttg

SEQ ID NO: 3318952 - DNA, 25 bp, Homo sapien
ccattttgggctcaagattaagcaa

SEQ ID NO: 3318953 - DNA, 25 bp, Homo sapien
gaaaccagacatattcccaaaggag

SEQ ID NO: 3318954 - DNA, 25 bp, Homo sapien
tgttgtctttacagctagaaaccag

SEQ ID NO: 3318955 - DNA, 25 bp, Homo sapien
gaatcacagaagctgatcctctcgc

SEQ ID NO: 3318956 - DNA, 25 bp, Homo sapien
aatcacctggtagccacttaatggg

SEQ ID NO: 3318957 - DNA, 25 bp, Homo sapien
gtcatatatacaccagggagggtgg

SEQ ID NO: 3318958 - DNA, 25 bp, Homo sapien
gaatacaccctcattaaatcacctg

SEQ ID NO: 3318959 - DNA, 25 bp, Homo sapien
tgggctacagaatctctaaggtgtc

SEQ ID NO: 3318960 - DNA, 25 bp, Homo sapien
atattaatggttgatgggcttcacc

SEQ ID NO: 3318961 - DNA, 25 bp, Homo sapien
tattaatggttgatgggcttcacct

SEQ ID NO: 3318962 - DNA, 25 bp, Homo sapien
ccccgcttcacatcatgtgtttcag

SEQ ID NO: 3318963 - DNA, 25 bp, Homo sapien
tctacaaacgctctaatagctgctg

SEQ ID NO: 3318964 - DNA, 25 bp, Homo sapien
cagaaacagtcaattccactaacaa

SEQ ID NO: 3318965 - DNA, 25 bp, Homo sapien
cattagtgtcccgaggctttgtaaa

SEQ ID NO: 3318966 - DNA, 25 bp, Homo sapien
gcactagtacttcgcagctgccaga

SEQ ID NO: 3318967 - DNA, 25 bp, Homo sapien
cagtaaagccaagccaaagcactag

SEQ ID NO: 3318968 - DNA, 25 bp, Homo sapien
gggatcaagtttgtcagacatcagt

SEQ ID NO: 3318969 - DNA, 25 bp, Homo sapien
tcagacatcagtccagctctccggt

SEQ ID NO: 3318970 - DNA, 25 bp, Homo sapien
gagctttcccacaggtttggcctgc

SEQ ID NO: 3318971 - DNA, 25 bp, Homo sapien
agctttcccacaggtttggcctgca

SEQ ID NO: 3318972 - DNA, 25 bp, Homo sapien
ggagctttcccacaggtttggcctg

SEQ ID NO: 3318973 - DNA, 25 bp, Homo sapien
ctttcccacaggtttggcctgcact

SEQ ID NO: 3318974 - DNA, 25 bp, Homo sapien
tccaagttgcctcagccaaaaggtg

SEQ ID NO: 3318975 - DNA, 25 bp, Homo sapien
tctgccagaatccaagttgcctcag

SEQ ID NO: 3318976 - DNA, 25 bp, Homo sapien
agaatgtataggcaaggccatcatc

SEQ ID NO: 3318977 - DNA, 25 bp, Homo sapien
cagaatccaagttgcctcagccaaa

SEQ ID NO: 3318978 - DNA, 25 bp, Homo sapien
tttcagatcttcatcataaacatct

SEQ ID NO: 3318979 - DNA, 25 bp, Homo sapien
agatcttcatcataaacatcttgct

SEQ ID NO: 3318980 - DNA, 25 bp, Homo sapien
tcttcatcataaacatcttgctgtt

SEQ ID NO: 3318981 - DNA, 25 bp, Homo sapien
ttttcagatcttcatcataaacatc

SEQ ID NO: 3318982 - DNA, 25 bp, Homo sapien
ttacagagaactttctatagagagc

SEQ ID NO: 3318983 - DNA, 25 bp, Homo sapien
tacagagaactttctatagagagct

SEQ ID NO: 3318984 - DNA, 25 bp, Homo sapien
acagagaactttctatagagagctc

SEQ ID NO: 3318985 - DNA, 25 bp, Homo sapien
caatccggaattatccaggtccaaa

SEQ ID NO: 3318986 - DNA, 25 bp, Homo sapien
taaattagagagtacatcccctgcc

SEQ ID NO: 3318987 - DNA, 25 bp, Homo sapien
gctaatacttcagtcagggtcattg

SEQ ID NO: 3318988 - DNA, 25 bp, Homo sapien
tctctattccttggtagactgggct

SEQ ID NO: 3318989 - DNA, 25 bp, Homo sapien
tagcagtttgtcagcaagaaacctg

SEQ ID NO: 3318990 - DNA, 25 bp, Homo sapien
tcctcaagcaaaagggagtatttcc

SEQ ID NO: 3318991 - DNA, 25 bp, Homo sapien
ctcttagtcactgcaaaccagggct

SEQ ID NO: 3318992 - DNA, 25 bp, Homo sapien
taagacaactcctcactggccgtat

SEQ ID NO: 3318993 - DNA, 25 bp, Homo sapien
gtaaaaactgatgtaatgtggagct

SEQ ID NO: 3318994 - DNA, 25 bp, Homo sapien
aggtaaaaactgatgtaatgtggag

SEQ ID NO: 3318995 - DNA, 25 bp, Homo sapien
tggaagctgccaggtaaaaactgat

SEQ ID NO: 3318996 - DNA, 25 bp, Homo sapien
ggtaaaaactgatgtaatgtggagc

SEQ ID NO: 3318997 - DNA, 25 bp, Homo sapien
tattacgttcacatgctaagatgaa

SEQ ID NO: 3318998 - DNA, 25 bp, Homo sapien
aagcagctattagtgggagccaaca

SEQ ID NO: 3318999 - DNA, 25 bp, Homo sapien
gcaagttagacttcagtagctagcc

SEQ ID NO: 3319000 - DNA, 25 bp, Homo sapien
aaaatggtccaaaataatctaagat

SEQ ID NO: 3319001 - DNA, 25 bp, Homo sapien
ttttagccatatgttcataggattt

SEQ ID NO: 3319002 - DNA, 25 bp, Homo sapien
attttagccatatgttcataggatt

SEQ ID NO: 3319003 - DNA, 25 bp, Homo sapien
tagtcttgaggtgatccagggtatc

SEQ ID NO: 3319004 - DNA, 25 bp, Homo sapien
cccctttggcggattcgagagcggc

SEQ ID NO: 3319005 - DNA, 25 bp, Homo sapien
catggtccgggcacaatgctgttcg

SEQ ID NO: 3319006 - DNA, 25 bp, Homo sapien
gcctggaggtcgttggttttcacac

SEQ ID NO: 3319007 - DNA, 25 bp, Homo sapien
tcccaccctctacacctcaaataat

SEQ ID NO: 3319008 - DNA, 25 bp, Homo sapien
gcttcccaccctctacacctcaaat

SEQ ID NO: 3319009 - DNA, 25 bp, Homo sapien
cttcgcttcccaccctctacacctc

SEQ ID NO: 3319010 - DNA, 25 bp, Homo sapien
tcgcttcccaccctctacacctcaa

SEQ ID NO: 3319011 - DNA, 25 bp, Homo sapien
gtcaagcccacgagcggatacggac

SEQ ID NO: 3319012 - DNA, 25 bp, Homo sapien
aaaggtcgattcctccaaagttcag

SEQ ID NO: 3319013 - DNA, 25 bp, Homo sapien
tggagtcaagcccacgagcggatac

SEQ ID NO: 3319014 - DNA, 25 bp, Homo sapien
ccaaagttcagtccctgtggctgca

SEQ ID NO: 3319015 - DNA, 25 bp, Homo sapien
cgcaggcgtgcaccatccccgcttt

SEQ ID NO: 3319016 - DNA, 25 bp, Homo sapien
agctggaagtgaaaagcaccctccg

SEQ ID NO: 3319017 - DNA, 25 bp, Homo sapien
tggaagtgaaaagcaccctccgtcc

SEQ ID NO: 3319018 - DNA, 25 bp, Homo sapien
tcagcgtccagacccgcaggcgtgc

SEQ ID NO: 3319019 - DNA, 25 bp, Homo sapien
tactcggtgtctttcggcacgccga

SEQ ID NO: 3319020 - DNA, 25 bp, Homo sapien
aatgctactcgcgaagccgaagtcg

SEQ ID NO: 3319021 - DNA, 25 bp, Homo sapien
cacctgcattcagttcaaggcaaaa

SEQ ID NO: 3319022 - DNA, 25 bp, Homo sapien
gacctgttgcgcctctgtgagtttg

SEQ ID NO: 3319023 - DNA, 25 bp, Homo sapien
ttcctagcattgagaaggctcctgc

SEQ ID NO: 3319024 - DNA, 25 bp, Homo sapien
caggaggaatagaaactcatctgca

SEQ ID NO: 3319025 - DNA, 25 bp, Homo sapien
ggaaaatttgtagtctagctcagag

SEQ ID NO: 3319026 - DNA, 25 bp, Homo sapien
tgcagcttcagctaactggtgaaat

SEQ ID NO: 3319027 - DNA, 25 bp, Homo sapien
gtgctccaccgcctgaattgccgtg

SEQ ID NO: 3319028 - DNA, 25 bp, Homo sapien
tccaccgcctgaattgccgtgggaa

SEQ ID NO: 3319029 - DNA, 25 bp, Homo sapien
cgaccacgaccacttgattagagat

SEQ ID NO: 3319030 - DNA, 25 bp, Homo sapien
aactgctataatcatcgcttccacc

SEQ ID NO: 3319031 - DNA, 25 bp, Homo sapien
cgtgaactgctataatcatcgcttc

SEQ ID NO: 3319032 - DNA, 25 bp, Homo sapien
gtcacgtgaactgctataatcatcg

SEQ ID NO: 3319033 - DNA, 25 bp, Homo sapien
tgatcactattatatccatctctat

SEQ ID NO: 3319034 - DNA, 25 bp, Homo sapien
gatcactattatatccatctctatc

SEQ ID NO: 3319035 - DNA, 25 bp, Homo sapien
tgaaatgaccataatcacggtaagt

SEQ ID NO: 3319036 - DNA, 25 bp, Homo sapien
aaatgaccataatcacggtaagtac

SEQ ID NO: 3319037 - DNA, 25 bp, Homo sapien
tgaccataatcacggtaagtacaat

SEQ ID NO: 3319038 - DNA, 25 bp, Homo sapien
ctgaaatgaccataatcacggtaag

SEQ ID NO: 3319039 - DNA, 25 bp, Homo sapien
tgcataacctcttgtatcacgagaa

SEQ ID NO: 3319040 - DNA, 25 bp, Homo sapien
ggtggtgcataacctcttgtatcac

SEQ ID NO: 3319041 - DNA, 25 bp, Homo sapien
tggtgcataacctcttgtatcacga

SEQ ID NO: 3319042 - DNA, 25 bp, Homo sapien
ggtgcataacctcttgtatcacgag

SEQ ID NO: 3319043 - DNA, 25 bp, Homo sapien
agtatccactgtcatccatgtgtct

SEQ ID NO: 3319044 - DNA, 25 bp, Homo sapien
gtatccactgtcatccatgtgtctt

SEQ ID NO: 3319045 - DNA, 25 bp, Homo sapien
caaatgatggtttggtggcttgttc

SEQ ID NO: 3319046 - DNA, 25 bp, Homo sapien
tcctcttgatttgttggtttcatgc

SEQ ID NO: 3319047 - DNA, 25 bp, Homo sapien
gatttgttggtttcatgctctttca

SEQ ID NO: 3319048 - DNA, 25 bp, Homo sapien
gctgcatccttagcatctgctgggc

SEQ ID NO: 3319049 - DNA, 25 bp, Homo sapien
tagccaaatactgcttcaagagctt

SEQ ID NO: 3319050 - DNA, 25 bp, Homo sapien
ttcgtccatattagccaaatactgc

SEQ ID NO: 3319051 - DNA, 25 bp, Homo sapien
caagagtgcttccactattcgtcca

SEQ ID NO: 3319052 - DNA, 25 bp, Homo sapien
agagtgcttccactattcgtccata

SEQ ID NO: 3319053 - DNA, 25 bp, Homo sapien
agctccaacgagcttgccgacaggg

SEQ ID NO: 3319054 - DNA, 25 bp, Homo sapien
agtggattcaagctccaacgagctt

SEQ ID NO: 3319055 - DNA, 25 bp, Homo sapien
ggtgacagtggattcaagctccaac

SEQ ID NO: 3319056 - DNA, 25 bp, Homo sapien
gattcaagctccaacgagcttgccg

SEQ ID NO: 3319057 - DNA, 25 bp, Homo sapien
cgcaaagccgctagcgctactgtgc

SEQ ID NO: 3319058 - DNA, 25 bp, Homo sapien
ggtctgaggaccaaaccgcaaagcc

SEQ ID NO: 3319059 - DNA, 25 bp, Homo sapien
tgcaaccgtgaattgttaaactctt

SEQ ID NO: 3319060 - DNA, 25 bp, Homo sapien
tgtgcaaccgtgaattgttaaactc

SEQ ID NO: 3319061 - DNA, 25 bp, Homo sapien
ttttctctgattcctcactatttcc

SEQ ID NO: 3319062 - DNA, 25 bp, Homo sapien
ttctctgattcctcactatttccag

SEQ ID NO: 3319063 - DNA, 25 bp, Homo sapien
tctctgattcctcactatttccagc

SEQ ID NO: 3319064 - DNA, 25 bp, Homo sapien
tttctctgattcctcactatttcca

SEQ ID NO: 3319065 - DNA, 25 bp, Homo sapien
ctggcaggagggtatggagcacttt

SEQ ID NO: 3319066 - DNA, 25 bp, Homo sapien
tggcaggagggtatggagcacttta

SEQ ID NO: 3319067 - DNA, 25 bp, Homo sapien
aggagggtatggagcactttaggtg

SEQ ID NO: 3319068 - DNA, 25 bp, Homo sapien
gcaggagggtatggagcactttagg

SEQ ID NO: 3319069 - DNA, 25 bp, Homo sapien
gtcagcattcccgacccttccaaag

SEQ ID NO: 3319070 - DNA, 25 bp, Homo sapien
tccttgtcagcattcccgacccttc

SEQ ID NO: 3319071 - DNA, 25 bp, Homo sapien
cttgtcagcattcccgacccttcca

SEQ ID NO: 3319072 - DNA, 25 bp, Homo sapien
atccttgtcagcattcccgaccctt

SEQ ID NO: 3319073 - DNA, 25 bp, Homo sapien
agtatcattaaaccaagcatcctca

SEQ ID NO: 3319074 - DNA, 25 bp, Homo sapien
gaaggtatgtctcgcccttttggtc

SEQ ID NO: 3319075 - DNA, 25 bp, Homo sapien
tggtcttctcaattgcaggtcagta

SEQ ID NO: 3319076 - DNA, 25 bp, Homo sapien
aaaactcatgcatcctcgccttgcg

SEQ ID NO: 3319077 - DNA, 25 bp, Homo sapien
gaatcgtgtacaacctgtgcaggac

SEQ ID NO: 3319078 - DNA, 25 bp, Homo sapien
catgtagcatgtcctgacgaggcaa

SEQ ID NO: 3319079 - DNA, 25 bp, Homo sapien
accgtggtgactgggcagatactga

SEQ ID NO: 3319080 - DNA, 25 bp, Homo sapien
tggagcctcagccaaaactgtgatg

SEQ ID NO: 3319081 - DNA, 25 bp, Homo sapien
gctgtgggttggaaaacttcactta

SEQ ID NO: 3319082 - DNA, 25 bp, Homo sapien
gtcaccaagttggagccaatatcca

SEQ ID NO: 3319083 - DNA, 25 bp, Homo sapien
cctgtcgtaagaatgcagctgaggt

SEQ ID NO: 3319084 - DNA, 25 bp, Homo sapien
tgaggttgaaaacttgtcaccaagt

SEQ ID NO: 3319085 - DNA, 25 bp, Homo sapien
tcattaagcatgaggagccagctag

SEQ ID NO: 3319086 - DNA, 25 bp, Homo sapien
ttccttggcttcatctgaatctttt

SEQ ID NO: 3319087 - DNA, 25 bp, Homo sapien
cgttccttggcttcatctgaatctt

SEQ ID NO: 3319088 - DNA, 25 bp, Homo sapien
gcttcatctgaatcttttttgaaga

SEQ ID NO: 3319089 - DNA, 25 bp, Homo sapien
ttcgttccttggcttcatctgaatc

SEQ ID NO: 3319090 - DNA, 25 bp, Homo sapien
tcttggtgcaagatacctagatttt

SEQ ID NO: 3319091 - DNA, 25 bp, Homo sapien
ctcttattttatagacagccaatac

SEQ ID NO: 3319092 - DNA, 25 bp, Homo sapien
ttcttggtgcaagatacctagattt

SEQ ID NO: 3319093 - DNA, 25 bp, Homo sapien
tattttatagacagccaatacaaac

SEQ ID NO: 3319094 - DNA, 25 bp, Homo sapien
tcaacattctaaagcttccaacatc

SEQ ID NO: 3319095 - DNA, 25 bp, Homo sapien
ctttacacaataactgtgacgacta

SEQ ID NO: 3319096 - DNA, 25 bp, Homo sapien
aacttgagtcttgggtatcatcata

SEQ ID NO: 3319097 - DNA, 25 bp, Homo sapien
tagcaggcatgatcttattgcttcc

SEQ ID NO: 3319098 - DNA, 25 bp, Homo sapien
ggtacagcagcaccacatagtggac

SEQ ID NO: 3319099 - DNA, 25 bp, Homo sapien
agtgtactgttttaccctccttgtg

SEQ ID NO: 3319100 - DNA, 25 bp, Homo sapien
tgtaattcagggtacagtgtactgt

SEQ ID NO: 3319101 - DNA, 25 bp, Homo sapien
tgtaattaagggtacagtgtacttc

SEQ ID NO: 3319102 - DNA, 25 bp, Homo sapien
ggatattgctgatgattatctctct

SEQ ID NO: 3319103 - DNA, 25 bp, Homo sapien
agcaattggtttgctttaaggaatg

SEQ ID NO: 3319104 - DNA, 25 bp, Homo sapien
gctctggtgagccaacatgtgaagt

SEQ ID NO: 3319105 - DNA, 25 bp, Homo sapien
tctcttaatattgctctggtgagcc

SEQ ID NO: 3319106 - DNA, 25 bp, Homo sapien
ttgaggagctattctgggagccttc

SEQ ID NO: 3319107 - DNA, 25 bp, Homo sapien
tttgaatcatctttgagcctacagg

SEQ ID NO: 3319108 - DNA, 25 bp, Homo sapien
ctggtcaaattgtcaacagcatgct

SEQ ID NO: 3319109 - DNA, 25 bp, Homo sapien
caccaatgtgcctttgaatcccaag

SEQ ID NO: 3319110 - DNA, 25 bp, Homo sapien
gctgtgtttcgatttctcctgtaag

SEQ ID NO: 3319111 - DNA, 25 bp, Homo sapien
agctgtgtttcgatttctcctgtaa

SEQ ID NO: 3319112 - DNA, 25 bp, Homo sapien
gtagcagctgtgtttcgatttctcc

SEQ ID NO: 3319113 - DNA, 25 bp, Homo sapien
agatgtcggaaacattatgagactg

SEQ ID NO: 3319114 - DNA, 25 bp, Homo sapien
cagatgtcggaaacattatgagact

SEQ ID NO: 3319115 - DNA, 25 bp, Homo sapien
atgtcggaaacattatgagactggc

SEQ ID NO: 3319116 - DNA, 25 bp, Homo sapien
gatgtcggaaacattatgagactgg

SEQ ID NO: 3319117 - DNA, 25 bp, Homo sapien
gagtcagacacttgtccgtgcacag

SEQ ID NO: 3319118 - DNA, 25 bp, Homo sapien
cagagtcagacacttgtccgtgcac

SEQ ID NO: 3319119 - DNA, 25 bp, Homo sapien
tcatgaagcttcgttgtggtctggg

SEQ ID NO: 3319120 - DNA, 25 bp, Homo sapien
agcttcgttgtggtctgggaccata

SEQ ID NO: 3319121 - DNA, 25 bp, Homo sapien
tttttggcagagacaaggtcccagg

SEQ ID NO: 3319122 - DNA, 25 bp, Homo sapien
ttttggcagagacaaggtcccaggc

SEQ ID NO: 3319123 - DNA, 25 bp, Homo sapien
ggcagagacaaggtcccaggcttgt

SEQ ID NO: 3319124 - DNA, 25 bp, Homo sapien
ttggcagagacaaggtcccaggctt

SEQ ID NO: 3319125 - DNA, 25 bp, Homo sapien
tatcagaaggcatgcaagaatcttg

SEQ ID NO: 3319126 - DNA, 25 bp, Homo sapien
gaaactctatcaagttacagattga

SEQ ID NO: 3319127 - DNA, 25 bp, Homo sapien
tttcaatagaaaggagggagcattt

SEQ ID NO: 3319128 - DNA, 25 bp, Homo sapien
tggctgcgggaaacagaaactctat

SEQ ID NO: 3319129 - DNA, 25 bp, Homo sapien
tataaggagtaggagtacagccgag

SEQ ID NO: 3319130 - DNA, 25 bp, Homo sapien
gatggacccctgcagctcaagaatt

SEQ ID NO: 3319131 - DNA, 25 bp, Homo sapien
tacagccgagactctggaatgggct

SEQ ID NO: 3319132 - DNA, 25 bp, Homo sapien
cactggcagcagtactctttgtcac

SEQ ID NO: 3319133 - DNA, 25 bp, Homo sapien
gataatgcgtggtgaaactcaactg

SEQ ID NO: 3319134 - DNA, 25 bp, Homo sapien
gccaggctacgataaagaattgaca

SEQ ID NO: 3319135 - DNA, 25 bp, Homo sapien
tcttcatattgggagatggacacct

SEQ ID NO: 3319136 - DNA, 25 bp, Homo sapien
gagtgatctacaaacgccaaatgtg

SEQ ID NO: 3319137 - DNA, 25 bp, Homo sapien
tagagataggcgttcagttgtccaa

SEQ ID NO: 3319138 - DNA, 25 bp, Homo sapien
gctcccacttctgttatagagaata

SEQ ID NO: 3319139 - DNA, 25 bp, Homo sapien
gacatttcttgagctagagataggc

SEQ ID NO: 3319140 - DNA, 25 bp, Homo sapien
cacttctgttatagagaatagagtc

SEQ ID NO: 3319141 - DNA, 25 bp, Homo sapien
tctgaatcagtatacggtccagggt

SEQ ID NO: 3319142 - DNA, 25 bp, Homo sapien
tccttggtttgaccgctggttctgc

SEQ ID NO: 3319143 - DNA, 25 bp, Homo sapien
gagagcttgctgtagggccctatct

SEQ ID NO: 3319144 - DNA, 25 bp, Homo sapien
cagtgcctagtagatggttcaatcc

SEQ ID NO: 3319145 - DNA, 25 bp, Homo sapien
gcgacagcacaaggcccgtgcgtct

SEQ ID NO: 3319146 - DNA, 25 bp, Homo sapien
tgccacggcagcgacagcacaaggc

SEQ ID NO: 3319147 - DNA, 25 bp, Homo sapien
gggtgccacggcagcgacagcacaa

SEQ ID NO: 3319148 - DNA, 25 bp, Homo sapien
acggcagcgacagcacaaggcccgt

SEQ ID NO: 3319149 - DNA, 25 bp, Homo sapien
cgcggtcccgggtgacaccctcagt

SEQ ID NO: 3319150 - DNA, 25 bp, Homo sapien
gcggtcccgggtgacaccctcagtg

SEQ ID NO: 3319151 - DNA, 25 bp, Homo sapien
tgcggctgctgctcaagcttttgga

SEQ ID NO: 3319152 - DNA, 25 bp, Homo sapien
tcaagaactgtcattgccgctgcgg

SEQ ID NO: 3319153 - DNA, 25 bp, Homo sapien
aaagggagcagatgtaaacggattt

SEQ ID NO: 3319154 - DNA, 25 bp, Homo sapien
catctttagatctgggtgtttttcc

SEQ ID NO: 3319155 - DNA, 25 bp, Homo sapien
atgaaaaaacgtgccagagttggcc

SEQ ID NO: 3319156 - DNA, 25 bp, Homo sapien
tcagagatgaaaaaacgtgccagag

SEQ ID NO: 3319157 - DNA, 25 bp, Homo sapien
gaggcagggccttcatacaggcagc

SEQ ID NO: 3319158 - DNA, 25 bp, Homo sapien
aggcagggccttcatacaggcagca

SEQ ID NO: 3319159 - DNA, 25 bp, Homo sapien
tacatgctgtactctcagtagtcat

SEQ ID NO: 3319160 - DNA, 25 bp, Homo sapien
aagactgactaaagtaatagcctgg

SEQ ID NO: 3319161 - DNA, 25 bp, Homo sapien
gactaaagtaatagcctggtaatga

SEQ ID NO: 3319162 - DNA, 25 bp, Homo sapien
agctgagtcctcaaacgtaggaaga

SEQ ID NO: 3319163 - DNA, 25 bp, Homo sapien
tcaaacgtaggaagactgactaaag

SEQ ID NO: 3319164 - DNA, 25 bp, Homo sapien
gaaagtgcagtacccttcagtcagc

SEQ ID NO: 3319165 - DNA, 25 bp, Homo sapien
cactctggctacgtttggtgtgtca

SEQ ID NO: 3319166 - DNA, 25 bp, Homo sapien
cattagaaggcatcaaaccagggag

SEQ ID NO: 3319167 - DNA, 25 bp, Homo sapien
cagggagtaacaatatcagatctgc

SEQ ID NO: 3319168 - DNA, 25 bp, Homo sapien
agccagagtcttcctcttgctcagg

SEQ ID NO: 3319169 - DNA, 25 bp, Homo sapien
gcatgggaattttgatttccttaat

SEQ ID NO: 3319170 - DNA, 25 bp, Homo sapien
taatttcctatttctgccagttcac

SEQ ID NO: 3319171 - DNA, 25 bp, Homo sapien
ttacaaatatttgccacagcaccag

SEQ ID NO: 3319172 - DNA, 25 bp, Homo sapien
gtctgtcccttaccattaagtatgg

SEQ ID NO: 3319173 - DNA, 25 bp, Homo sapien
tgttaggacgaaagcagtctgtctg

SEQ ID NO: 3319174 - DNA, 25 bp, Homo sapien
tcatgaatggatgccaagttttatc

SEQ ID NO: 3319175 - DNA, 25 bp, Homo sapien
gagaggacatcttgccttccatgta

SEQ ID NO: 3319176 - DNA, 25 bp, Homo sapien
gggtacaccattcttggaggtacta

SEQ ID NO: 3319177 - DNA, 25 bp, Homo sapien
tgtgctccagaaatccatttactct

SEQ ID NO: 3319178 - DNA, 25 bp, Homo sapien
catttactctattagccttgtatgg

SEQ ID NO: 3319179 - DNA, 25 bp, Homo sapien
gctcctattccgtcactgtgctcca

SEQ ID NO: 3319180 - DNA, 25 bp, Homo sapien
gaaggctggcctagcttattgttag

SEQ ID NO: 3319181 - DNA, 25 bp, Homo sapien
gaatgtatgctaaccaataccaagg

SEQ ID NO: 3319182 - DNA, 25 bp, Homo sapien
taatccttattacaatctgtcattg

SEQ ID NO: 3319183 - DNA, 25 bp, Homo sapien
tgacagataatccaagagttcattg

SEQ ID NO: 3319184 - DNA, 25 bp, Homo sapien
tataatattagaatgggtaacgcct

SEQ ID NO: 3319185 - DNA, 25 bp, Homo sapien
tgaaaagggctaacttctctataaa

SEQ ID NO: 3319186 - DNA, 25 bp, Homo sapien
taacgcctttgtaagtcggtgattc

SEQ ID NO: 3319187 - DNA, 25 bp, Homo sapien
tgtaactcataagactgaaaagggc

SEQ ID NO: 3319188 - DNA, 25 bp, Homo sapien
agtaatatatatgaatcaggccagg

SEQ ID NO: 3319189 - DNA, 25 bp, Homo sapien
aaaactatttcgcttgacagtatgg

SEQ ID NO: 3319190 - DNA, 25 bp, Homo sapien
gaattgcttaaactgtgctgcattg

SEQ ID NO: 3319191 - DNA, 25 bp, Homo sapien
tgctgcattgttggatgacaactct

SEQ ID NO: 3319192 - DNA, 25 bp, Homo sapien
tcaagccctgtttggcacatgaaac

SEQ ID NO: 3319193 - DNA, 25 bp, Homo sapien
tttatggcactcttttgggtcataa

SEQ ID NO: 3319194 - DNA, 25 bp, Homo sapien
atttatggcactcttttgggtcata

SEQ ID NO: 3319195 - DNA, 25 bp, Homo sapien
ttatggcactcttttgggtcataat

SEQ ID NO: 3319196 - DNA, 25 bp, Homo sapien
ttgttcactaggtgaacaagcttcc

SEQ ID NO: 3319197 - DNA, 25 bp, Homo sapien
tccccttcttcatcagtgtcttcta

SEQ ID NO: 3319198 - DNA, 25 bp, Homo sapien
cctcctcattatcatcttctccttc

SEQ ID NO: 3319199 - DNA, 25 bp, Homo sapien
ttcatccccttcttcatcagtgtct

SEQ ID NO: 3319200 - DNA, 25 bp, Homo sapien
ttcttcatcagtgtcttctaatcct

SEQ ID NO: 3319201 - DNA, 25 bp, Homo sapien
tctcctaagtcatcggcccctgcat

SEQ ID NO: 3319202 - DNA, 25 bp, Homo sapien
ctctcctaagtcatcggcccctgca

SEQ ID NO: 3319203 - DNA, 25 bp, Homo sapien
gatgtcctctcctaagtcatcggcc

SEQ ID NO: 3319204 - DNA, 25 bp, Homo sapien
tttgatgtcctctcctaagtcatcg

SEQ ID NO: 3319205 - DNA, 25 bp, Homo sapien
taaaaatctactctgtaacctgatt

SEQ ID NO: 3319206 - DNA, 25 bp, Homo sapien
aaatctactctgtaacctgatttaa

SEQ ID NO: 3319207 - DNA, 25 bp, Homo sapien
ataaaaatctactctgtaacctgat

SEQ ID NO: 3319208 - DNA, 25 bp, Homo sapien
atctactctgtaacctgatttaata

SEQ ID NO: 3319209 - DNA, 25 bp, Homo sapien
agtgcagacacttgtaaatgattgc

SEQ ID NO: 3319210 - DNA, 25 bp, Homo sapien
gcagacacttgtaaatgattgccaa

SEQ ID NO: 3319211 - DNA, 25 bp, Homo sapien
ataatgcaatgtctcttcgttttcc

SEQ ID NO: 3319212 - DNA, 25 bp, Homo sapien
aataatgcaatgtctcttcgttttc

SEQ ID NO: 3319213 - DNA, 25 bp, Homo sapien
cttctttcgagacaggagggaagac

SEQ ID NO: 3319214 - DNA, 25 bp, Homo sapien
ttggtgtcttctttcgagacaggag

SEQ ID NO: 3319215 - DNA, 25 bp, Homo sapien
ctacagaggccgaagtctcctctgg

SEQ ID NO: 3319216 - DNA, 25 bp, Homo sapien
ttggcaagcctacagaggccgaagt

SEQ ID NO: 3319217 - DNA, 25 bp, Homo sapien
gctggaagcctatgctgctatgaac

SEQ ID NO: 3319218 - DNA, 25 bp, Homo sapien
gctgtcaagtatatggacggtcctg

SEQ ID NO: 3319219 - DNA, 25 bp, Homo sapien
ggcccacaacctgaaggctgtcaag

SEQ ID NO: 3319220 - DNA, 25 bp, Homo sapien
cacacagcaagatctaaagaatgga

SEQ ID NO: 3319221 - DNA, 25 bp, Homo sapien
cacctttgaaatgcaacaagtggat

SEQ ID NO: 3319222 - DNA, 25 bp, Homo sapien
gaaggacggattgactccatattcg

SEQ ID NO: 3319223 - DNA, 25 bp, Homo sapien
gtgggtgaaaattctcttgcccctg

SEQ ID NO: 3319224 - DNA, 25 bp, Homo sapien
tctgggatgcactaaatatgtgact

SEQ ID NO: 3319225 - DNA, 25 bp, Homo sapien
cacctttcagaacctagctcatgag

SEQ ID NO: 3319226 - DNA, 25 bp, Homo sapien
cacttggagcactagctaataggag

SEQ ID NO: 3319227 - DNA, 25 bp, Homo sapien
gattaccgccaggagtgatttgcca

SEQ ID NO: 3319228 - DNA, 25 bp, Homo sapien
gaaagacatgctagttaacacaggt

SEQ ID NO: 3319229 - DNA, 25 bp, Homo sapien
tcatgcagatttcatagatgatttc

SEQ ID NO: 3319230 - DNA, 25 bp, Homo sapien
cctgatctacaatacttgtagtgaa

SEQ ID NO: 3319231 - DNA, 25 bp, Homo sapien
caaacctgatctacaatacttgtag

SEQ ID NO: 3319232 - DNA, 25 bp, Homo sapien
tgcagatttcatagatgatttctca

SEQ ID NO: 3319233 - DNA, 25 bp, Homo sapien
actctgcatggtactgtatgtgttc

SEQ ID NO: 3319234 - DNA, 25 bp, Homo sapien
ctgactctgcatggtactgtatgtg

SEQ ID NO: 3319235 - DNA, 25 bp, Homo sapien
tttctgactctgcatggtactgtat

SEQ ID NO: 3319236 - DNA, 25 bp, Homo sapien
tctgactctgcatggtactgtatgt

SEQ ID NO: 3319237 - DNA, 25 bp, Homo sapien
tcagcaatctgtggtcggaactgtt

SEQ ID NO: 3319238 - DNA, 25 bp, Homo sapien
tcattcgaccatacattatagttag

SEQ ID NO: 3319239 - DNA, 25 bp, Homo sapien
ttctcagcaatctgtggtcggaact

SEQ ID NO: 3319240 - DNA, 25 bp, Homo sapien
tgtgcttgtaagactttcccacctg

SEQ ID NO: 3319241 - DNA, 25 bp, Homo sapien
tggctgctcttttgaatagtggagt

SEQ ID NO: 3319242 - DNA, 25 bp, Homo sapien
gctgctcttttgaatagtggagttg

SEQ ID NO: 3319243 - DNA, 25 bp, Homo sapien
gctggctgctcttttgaatagtgga

SEQ ID NO: 3319244 - DNA, 25 bp, Homo sapien
ctggctgctcttttgaatagtggag

SEQ ID NO: 3319245 - DNA, 25 bp, Homo sapien
ataacattcgttttacttgccatcc

SEQ ID NO: 3319246 - DNA, 25 bp, Homo sapien
aataacattcgttttacttgccatc

SEQ ID NO: 3319247 - DNA, 25 bp, Homo sapien
taaataacattcgttttacttgcca

SEQ ID NO: 3319248 - DNA, 25 bp, Homo sapien
aaataacattcgttttacttgccat

SEQ ID NO: 3319249 - DNA, 25 bp, Homo sapien
agtacttgtcaccttgacttgttcc

SEQ ID NO: 3319250 - DNA, 25 bp, Homo sapien
ccaagggtaatgttagcactctaga

SEQ ID NO: 3319251 - DNA, 25 bp, Homo sapien
tattggcaaagggttactcagtctc

SEQ ID NO: 3319252 - DNA, 25 bp, Homo sapien
taatgttagcactctagaagtactt

SEQ ID NO: 3319253 - DNA, 25 bp, Homo sapien
tctagtgggtcctgcacaccagttc

SEQ ID NO: 3319254 - DNA, 25 bp, Homo sapien
gctcaaagggctctagtgggtcctg

SEQ ID NO: 3319255 - DNA, 25 bp, Homo sapien
tgccaatcccttccaatagtgttct

SEQ ID NO: 3319256 - DNA, 25 bp, Homo sapien
cagttccaagaattgccaatccctt

SEQ ID NO: 3319257 - DNA, 25 bp, Homo sapien
ccacgcctggtccatagttattatt

SEQ ID NO: 3319258 - DNA, 25 bp, Homo sapien
aatagtctacaccacacaattatag

SEQ ID NO: 3319259 - DNA, 25 bp, Homo sapien
tagtctttgtgcctaagataagaat

SEQ ID NO: 3319260 - DNA, 25 bp, Homo sapien
ttttgtgtacttattactggtgagt

SEQ ID NO: 3319261 - DNA, 25 bp, Homo sapien
ctagcatgttgccacgaagcctggg

SEQ ID NO: 3319262 - DNA, 25 bp, Homo sapien
taaaggcagtaacgcttgaccaggc

SEQ ID NO: 3319263 - DNA, 25 bp, Homo sapien
ggctaaagcccagcttctcacagtg

SEQ ID NO: 3319264 - DNA, 25 bp, Homo sapien
tcttctggttgtcatgtgggtgcct

SEQ ID NO: 3319265 - DNA, 25 bp, Homo sapien
tggaaatgtgaaatactaccagtca

SEQ ID NO: 3319266 - DNA, 25 bp, Homo sapien
tatagtaccgtggtgccacctgatg

SEQ ID NO: 3319267 - DNA, 25 bp, Homo sapien
gaaatactaccagtcacaccattat

SEQ ID NO: 3319268 - DNA, 25 bp, Homo sapien
cagtcacaccattatagtaccgtgg

SEQ ID NO: 3319269 - DNA, 25 bp, Homo sapien
tatttatagacatggccttcccttg

SEQ ID NO: 3319270 - DNA, 25 bp, Homo sapien
ccttcaggacctacaaaatgaagat

SEQ ID NO: 3319271 - DNA, 25 bp, Homo sapien
ccttgccatctagaaaagaacgttg

SEQ ID NO: 3319272 - DNA, 25 bp, Homo sapien
gaacgttgtcaattcgtagtcaaac

SEQ ID NO: 3319273 - DNA, 25 bp, Homo sapien
ttcagcttctaccttgatggatatt

SEQ ID NO: 3319274 - DNA, 25 bp, Homo sapien
tagcatatgatgtgcagtgtccaaa

SEQ ID NO: 3319275 - DNA, 25 bp, Homo sapien
aaaatagcatatgatgtgcagtgtc

SEQ ID NO: 3319276 - DNA, 25 bp, Homo sapien
ccttgatggatattttgctaatgaa

SEQ ID NO: 3319277 - DNA, 25 bp, Homo sapien
tccagagggagcaaagtttatgtta

SEQ ID NO: 3319278 - DNA, 25 bp, Homo sapien
gagggagcaaagtttatgttaagaa

SEQ ID NO: 3319279 - DNA, 25 bp, Homo sapien
tcacttttacctttagctgtgaggt

SEQ ID NO: 3319280 - DNA, 25 bp, Homo sapien
cacttttacctttagctgtgaggtt

SEQ ID NO: 3319281 - DNA, 25 bp, Homo sapien
tatgtattcaatcctatagattccc

SEQ ID NO: 3319282 - DNA, 25 bp, Homo sapien
tgggatctgtagttaaatcctctca

SEQ ID NO: 3319283 - DNA, 25 bp, Homo sapien
tcccctctgagcattgctttcactg

SEQ ID NO: 3319284 - DNA, 25 bp, Homo sapien
taggtataggcttatgtagattgtg

SEQ ID NO: 3319285 - DNA, 25 bp, Homo sapien
gactctcaccttgactaaacttcag

SEQ ID NO: 3319286 - DNA, 25 bp, Homo sapien
cagataaacatttcgtgccacttga

SEQ ID NO: 3319287 - DNA, 25 bp, Homo sapien
caagggcattcattgttgaactcag

SEQ ID NO: 3319288 - DNA, 25 bp, Homo sapien
tctcaactaggcgttaaccatggcc

SEQ ID NO: 3319289 - DNA, 25 bp, Homo sapien
ctttctggtagagagtgttaccggg

SEQ ID NO: 3319290 - DNA, 25 bp, Homo sapien
tgtctctggcgatctacctttgttc

SEQ ID NO: 3319291 - DNA, 25 bp, Homo sapien
tagacacatgggaggtatccaagga

SEQ ID NO: 3319292 - DNA, 25 bp, Homo sapien
tgcagtctccaagctgaaaagggtc

SEQ ID NO: 3319293 - DNA, 25 bp, Homo sapien
gagagagcaccatttactggagaaa

SEQ ID NO: 3319294 - DNA, 25 bp, Homo sapien
cacatgaaatctttggttcacagac

SEQ ID NO: 3319295 - DNA, 25 bp, Homo sapien
caggttaggaagcatcacggttgag

SEQ ID NO: 3319296 - DNA, 25 bp, Homo sapien
ccctgcgggaacaatgtggtgactg

SEQ ID NO: 3319297 - DNA, 25 bp, Homo sapien
gctcattcggaagccaaaaccagtg

SEQ ID NO: 3319298 - DNA, 25 bp, Homo sapien
tggctcacgtggtgggtgtactcct

SEQ ID NO: 3319299 - DNA, 25 bp, Homo sapien
tatcatggagccagttacatacttc

SEQ ID NO: 3319300 - DNA, 25 bp, Homo sapien
aaagctggaatagaagctcattcgg

SEQ ID NO: 3319301 - DNA, 25 bp, Homo sapien
gcagcaatacaacaagttaaaagaa

SEQ ID NO: 3319302 - DNA, 25 bp, Homo sapien
tttaaggattatacttactcagctg

SEQ ID NO: 3319303 - DNA, 25 bp, Homo sapien
cttactcagctgttaagagtaggca

SEQ ID NO: 3319304 - DNA, 25 bp, Homo sapien
gctgttaagagtaggcaatttcttc

SEQ ID NO: 3319305 - DNA, 25 bp, Homo sapien
attaatcttacagttttaaatgtcg

SEQ ID NO: 3319306 - DNA, 25 bp, Homo sapien
ttatgtattgattttgcaacttagg

SEQ ID NO: 3319307 - DNA, 25 bp, Homo sapien
tgaaacaggcgcgtcattctctctg

SEQ ID NO: 3319308 - DNA, 25 bp, Homo sapien
ggatgtttttgagtcccatggttca

SEQ ID NO: 3319309 - DNA, 25 bp, Homo sapien
tgtgtaaccctgcagtttattaaaa

SEQ ID NO: 3319310 - DNA, 25 bp, Homo sapien
tctgctaggcattaaactttaaaac

SEQ ID NO: 3319311 - DNA, 25 bp, Homo sapien
tgtttctccatatcaaaccctttca

SEQ ID NO: 3319312 - DNA, 25 bp, Homo sapien
tagaccataatgcttcaccctaacg

SEQ ID NO: 3319313 - DNA, 25 bp, Homo sapien
tttagttagcattgaggcaaaacag

SEQ ID NO: 3319314 - DNA, 25 bp, Homo sapien
gctttttagttagcattgaggcaaa

SEQ ID NO: 3319315 - DNA, 25 bp, Homo sapien
gcagctttttagttagcattgaggc

SEQ ID NO: 3319316 - DNA, 25 bp, Homo sapien
ttagcattgaggcaaaacagggaac

SEQ ID NO: 3319317 - DNA, 25 bp, Homo sapien
tttgcaaaagtccactcggcgctga

SEQ ID NO: 3319318 - DNA, 25 bp, Homo sapien
aactttcctgttcaccagtgtgagg

SEQ ID NO: 3319319 - DNA, 25 bp, Homo sapien
gagccgttcacagtttcccggtgag

SEQ ID NO: 3319320 - DNA, 25 bp, Homo sapien
tcttgaatgtaccatgagccgttca

SEQ ID NO: 3319321 - DNA, 25 bp, Homo sapien
catgaggaagtcagctccagcaggc

SEQ ID NO: 3319322 - DNA, 25 bp, Homo sapien
ggaggctgcatccacctcagttatg

SEQ ID NO: 3319323 - DNA, 25 bp, Homo sapien
caaaggaatgactggcacatcgtgc

SEQ ID NO: 3319324 - DNA, 25 bp, Homo sapien
tgattatctactacatccaaaggaa

SEQ ID NO: 3319325 - DNA, 25 bp, Homo sapien
gtgaatgtgtaagccagtacccctt

SEQ ID NO: 3319326 - DNA, 25 bp, Homo sapien
cagtgaatgtgtaagccagtacccc

SEQ ID NO: 3319327 - DNA, 25 bp, Homo sapien
aatgtgtaagccagtaccccttcat

SEQ ID NO: 3319328 - DNA, 25 bp, Homo sapien
gtgcagtgaatgtgtaagccagtac

SEQ ID NO: 3319329 - DNA, 25 bp, Homo sapien
tttttaccaagaatctaaggcatag

SEQ ID NO: 3319330 - DNA, 25 bp, Homo sapien
cattcctcatgggtgcccctcggtt

SEQ ID NO: 3319331 - DNA, 25 bp, Homo sapien
cttcccacagtagctcattagttat

SEQ ID NO: 3319332 - DNA, 25 bp, Homo sapien
caccccatgaggcaggtgctctttt

SEQ ID NO: 3319333 - DNA, 25 bp, Homo sapien
caaggctttatggtaggatgcgaaa

SEQ ID NO: 3319334 - DNA, 25 bp, Homo sapien
ccaaaacaaggctttatggtaggat

SEQ ID NO: 3319335 - DNA, 25 bp, Homo sapien
ggtaggatgcgaaatgcagtttcat

SEQ ID NO: 3319336 - DNA, 25 bp, Homo sapien
gctttatggtaggatgcgaaatgca

SEQ ID NO: 3319337 - DNA, 25 bp, Homo sapien
gattgccttcgccatggctcaggaa

SEQ ID NO: 3319338 - DNA, 25 bp, Homo sapien
tgtctcctttgaacaagccagttaa

SEQ ID NO: 3319339 - DNA, 25 bp, Homo sapien
aaccaggctgtgacacttgtctcct

SEQ ID NO: 3319340 - DNA, 25 bp, Homo sapien
gaatttcgattttagcatcatatgc

SEQ ID NO: 3319341 - DNA, 25 bp, Homo sapien
aagcaatcggcatctgcgtggctaa

SEQ ID NO: 3319342 - DNA, 25 bp, Homo sapien
aaagcaatcggcatctgcgtggcta

SEQ ID NO: 3319343 - DNA, 25 bp, Homo sapien
tcacttcaaatcctagatctgaaaa

SEQ ID NO: 3319344 - DNA, 25 bp, Homo sapien
gaattttgagcagtagttcttctgc

SEQ ID NO: 3319345 - DNA, 25 bp, Homo sapien
cctcatgaattttgagcagtagttc

SEQ ID NO: 3319346 - DNA, 25 bp, Homo sapien
aaagcatttcacttcaaatcctaga

SEQ ID NO: 3319347 - DNA, 25 bp, Homo sapien
ccaaaagaacctctcatgattgaag

SEQ ID NO: 3319348 - DNA, 25 bp, Homo sapien
gcaggtgccccgcctttctggcagt

SEQ ID NO: 3319349 - DNA, 25 bp, Homo sapien
cgggtaagattgtctctatctgcgc

SEQ ID NO: 3319350 - DNA, 25 bp, Homo sapien
gcagtgttaagtgccaaaagaacct

SEQ ID NO: 3319351 - DNA, 25 bp, Homo sapien
tatagaaggcatctgtttctgtcat

SEQ ID NO: 3319352 - DNA, 25 bp, Homo sapien
cttttatagaaggcatctgtttctg

SEQ ID NO: 3319353 - DNA, 25 bp, Homo sapien
tttatagaaggcatctgtttctgtc

SEQ ID NO: 3319354 - DNA, 25 bp, Homo sapien
ttatagaaggcatctgtttctgtca

SEQ ID NO: 3319355 - DNA, 25 bp, Homo sapien
cactaaggtgtgagagccaaaagca

SEQ ID NO: 3319356 - DNA, 25 bp, Homo sapien
tggaactgccccaagcaatgagacc

SEQ ID NO: 3319357 - DNA, 25 bp, Homo sapien
ggaagaatgaccctaaagcatggac

SEQ ID NO: 3319358 - DNA, 25 bp, Homo sapien
gcaagatgcacccttcagttgagga

SEQ ID NO: 3319359 - DNA, 25 bp, Homo sapien
gagtgtttcttagactgaagcgcga

SEQ ID NO: 3319360 - DNA, 25 bp, Homo sapien
tccccgagtgtttcttagactgaag

SEQ ID NO: 3319361 - DNA, 25 bp, Homo sapien
tcttagactgaagcgcgaaaccgtc

SEQ ID NO: 3319362 - DNA, 25 bp, Homo sapien
tttcttagactgaagcgcgaaaccg

SEQ ID NO: 3319363 - DNA, 25 bp, Homo sapien
aagagtgcaacttctccaggccgcc

SEQ ID NO: 3319364 - DNA, 25 bp, Homo sapien
ctgcaaagccgaaggaacccgcggc

SEQ ID NO: 3319365 - DNA, 25 bp, Homo sapien
agcaagacgcagacctgctcggtgc

SEQ ID NO: 3319366 - DNA, 25 bp, Homo sapien
cctgagcgcttcaatccaagagtgc

SEQ ID NO: 3319367 - DNA, 25 bp, Homo sapien
ctgcggagccccgaggccgagctca

SEQ ID NO: 3319368 - DNA, 25 bp, Homo sapien
tgcggagccccgaggccgagctcat

SEQ ID NO: 3319369 - DNA, 25 bp, Homo sapien
tgcagccaaacgcgcagccagacac

SEQ ID NO: 3319370 - DNA, 25 bp, Homo sapien
gaaaacattccctcgacaagagtgg

SEQ ID NO: 3319371 - DNA, 25 bp, Homo sapien
aagagtggaactccagttggctgac

SEQ ID NO: 3319372 - DNA, 25 bp, Homo sapien
gaatgagttatctgaccaccagaac

SEQ ID NO: 3319373 - DNA, 25 bp, Homo sapien
ttgtactcgttggaaacagcagtgg

SEQ ID NO: 3319374 - DNA, 25 bp, Homo sapien
tcctatgaaagtactgaacccacag

SEQ ID NO: 3319375 - DNA, 25 bp, Homo sapien
agcctcttaaagcaacagctagcca

SEQ ID NO: 3319376 - DNA, 25 bp, Homo sapien
gctgcccaggttctactcacggctt

SEQ ID NO: 3319377 - DNA, 25 bp, Homo sapien
gacagtaaattgcaaactcctatga

SEQ ID NO: 3319378 - DNA, 25 bp, Homo sapien
aataatgagcattgtgcatcgcacc

SEQ ID NO: 3319379 - DNA, 25 bp, Homo sapien
tggactagtctacaggttcactgaa

SEQ ID NO: 3319380 - DNA, 25 bp, Homo sapien
acctgtgaggatgcgtttaattagc

SEQ ID NO: 3319381 - DNA, 25 bp, Homo sapien
gagtcttattctgacgcctatgctg

SEQ ID NO: 3319382 - DNA, 25 bp, Homo sapien
gaagatactaggttcccggcaatga

SEQ ID NO: 3319383 - DNA, 25 bp, Homo sapien
gatacctgagaagacaagcgtgccc

SEQ ID NO: 3319384 - DNA, 25 bp, Homo sapien
tcttaataactttggccatgggtca

SEQ ID NO: 3319385 - DNA, 25 bp, Homo sapien
tatatatggcttgaggtcccaggct

SEQ ID NO: 3319386 - DNA, 25 bp, Homo sapien
ccagatatggtttacaacctaaatg

SEQ ID NO: 3319387 - DNA, 25 bp, Homo sapien
cgttggctgtccagatatggtttac

SEQ ID NO: 3319388 - DNA, 25 bp, Homo sapien
ggctcgttggctgtccagatatggt

SEQ ID NO: 3319389 - DNA, 25 bp, Homo sapien
gctgtccagatatggtttacaacct

SEQ ID NO: 3319390 - DNA, 25 bp, Homo sapien
cacagtcattcttgcttttgccaca

SEQ ID NO: 3319391 - DNA, 25 bp, Homo sapien
acagtcattcttgcttttgccacag

SEQ ID NO: 3319392 - DNA, 25 bp, Homo sapien
tgtcagggaagggataccaatgtta

SEQ ID NO: 3319393 - DNA, 25 bp, Homo sapien
ctttgtcagggaagggataccaatg

SEQ ID NO: 3319394 - DNA, 25 bp, Homo sapien
tcagggaagggataccaatgttaag

SEQ ID NO: 3319395 - DNA, 25 bp, Homo sapien
acactttgtcagggaagggatacca

SEQ ID NO: 3319396 - DNA, 25 bp, Homo sapien
aaactcctctgaagtactgcattca

SEQ ID NO: 3319397 - DNA, 25 bp, Homo sapien
gactgctgtatagatagttccaaaa

SEQ ID NO: 3319398 - DNA, 25 bp, Homo sapien
ccaaaatccatttctgcctacaaat

SEQ ID NO: 3319399 - DNA, 25 bp, Homo sapien
gcaaaaggcatttggatggattact

SEQ ID NO: 3319400 - DNA, 25 bp, Homo sapien
gcgttagaacactcacagttacctg

SEQ ID NO: 3319401 - DNA, 25 bp, Homo sapien
tgctccctattctgcagcgttagaa

SEQ ID NO: 3319402 - DNA, 25 bp, Homo sapien
gaaagatgaggctaagtccattaaa

SEQ ID NO: 3319403 - DNA, 25 bp, Homo sapien
tccttgtgtctaggaatcattctca

SEQ ID NO: 3319404 - DNA, 25 bp, Homo sapien
ccataacgtgggaaaggcttagatc

SEQ ID NO: 3319405 - DNA, 25 bp, Homo sapien
accataacgtgggaaaggcttagat

SEQ ID NO: 3319406 - DNA, 25 bp, Homo sapien
ccacatccattcggtggggagggtt

SEQ ID NO: 3319407 - DNA, 25 bp, Homo sapien
agccacatccattcggtggggaggg

SEQ ID NO: 3319408 - DNA, 25 bp, Homo sapien
ccaccataggagagtaaagaggaag

SEQ ID NO: 3319409 - DNA, 25 bp, Homo sapien
tgctgtgccaaacagggctagtggt

SEQ ID NO: 3319410 - DNA, 25 bp, Homo sapien
tttggctccccagtgtaaatggcaa

SEQ ID NO: 3319411 - DNA, 25 bp, Homo sapien
cctttgaatgggagaatgatcagac

SEQ ID NO: 3319412 - DNA, 25 bp, Homo sapien
tgcggccattgtcctctaaaatttg

SEQ ID NO: 3319413 - DNA, 25 bp, Homo sapien
tccactgtgtacaactgcatggaaa

SEQ ID NO: 3319414 - DNA, 25 bp, Homo sapien
aaaacaccatgatgtgttgcggcca

SEQ ID NO: 3319415 - DNA, 25 bp, Homo sapien
tgtaagcggatacaaaccaaatcca

SEQ ID NO: 3319416 - DNA, 25 bp, Homo sapien
atcacccgtcttttgtctggactcc

SEQ ID NO: 3319417 - DNA, 25 bp, Homo sapien
tgcatgcgtcaccctgcttccattt

SEQ ID NO: 3319418 - DNA, 25 bp, Homo sapien
tcttttgtctggactcctgcatgcg

SEQ ID NO: 3319419 - DNA, 25 bp, Homo sapien
tgtctggactcctgcatgcgtcacc

SEQ ID NO: 3319420 - DNA, 25 bp, Homo sapien
ttggttctgatttggtcacctgaat

SEQ ID NO: 3319421 - DNA, 25 bp, Homo sapien
gcatgagccattacgtcctgcctaa

SEQ ID NO: 3319422 - DNA, 25 bp, Homo sapien
tgatctctttcgtgcaactaaaaat

SEQ ID NO: 3319423 - DNA, 25 bp, Homo sapien
gagagactgctcgagtaacagcaat

SEQ ID NO: 3319424 - DNA, 25 bp, Homo sapien
tcgtctgccctgatcagactccaca

SEQ ID NO: 3319425 - DNA, 25 bp, Homo sapien
gtgaggcctttgctgaacaacccat

SEQ ID NO: 3319426 - DNA, 25 bp, Homo sapien
catttagaagagtaaattgcctcca

SEQ ID NO: 3319427 - DNA, 25 bp, Homo sapien
attgcctccaacatggcccctcgtc

SEQ ID NO: 3319428 - DNA, 25 bp, Homo sapien
gtctgttccactctattcccatgat

SEQ ID NO: 3319429 - DNA, 25 bp, Homo sapien
tcccatgattcctacgtcagtaagt

SEQ ID NO: 3319430 - DNA, 25 bp, Homo sapien
aatgagctaaaaccagtctgttcca

SEQ ID NO: 3319431 - DNA, 25 bp, Homo sapien
taaattctcagtttgcttcgcatgt

SEQ ID NO: 3319432 - DNA, 25 bp, Homo sapien
ccaatcccccgaaagcacgagccct

SEQ ID NO: 3319433 - DNA, 25 bp, Homo sapien
ccaggatctccgtcaccccaatccc

SEQ ID NO: 3319434 - DNA, 25 bp, Homo sapien
caggatctccgtcaccccaatcccc

SEQ ID NO: 3319435 - DNA, 25 bp, Homo sapien
ccgaaagcacgagccctcgctgggc

SEQ ID NO: 3319436 - DNA, 25 bp, Homo sapien
cgccgttccggatggtcttcagggt

SEQ ID NO: 3319437 - DNA, 25 bp, Homo sapien
cggcgttcaggtacgtgtctatctt

SEQ ID NO: 3319438 - DNA, 25 bp, Homo sapien
tgtctatcttatgaacgccgttccg

SEQ ID NO: 3319439 - DNA, 25 bp, Homo sapien
tatgaacgccgttccggatggtctt

SEQ ID NO: 3319440 - DNA, 25 bp, Homo sapien
gcgcggggcgcgagagcagggccat

SEQ ID NO: 3319441 - DNA, 25 bp, Homo sapien
ctgacaacagcggccatgaggagga

SEQ ID NO: 3319442 - DNA, 25 bp, Homo sapien
caggagggtgagcgcggggcgcgag

SEQ ID NO: 3319443 - DNA, 25 bp, Homo sapien
ggtgagcgcggggcgcgagagcagg

SEQ ID NO: 3319444 - DNA, 25 bp, Homo sapien
gcgcgggccccggacttggcagcag

SEQ ID NO: 3319445 - DNA, 25 bp, Homo sapien
tacgtgaaccgcctcgggcaggcag

SEQ ID NO: 3319446 - DNA, 25 bp, Homo sapien
tggccctcaggatctcgctgtcttt

SEQ ID NO: 3319447 - DNA, 25 bp, Homo sapien
gctgtctttacgtgaaccgcctcgg

SEQ ID NO: 3319448 - DNA, 25 bp, Homo sapien
tcacctgggccagcaaccgtcccct

SEQ ID NO: 3319449 - DNA, 25 bp, Homo sapien
ctgggccagcaaccgtcccctgtgc

SEQ ID NO: 3319450 - DNA, 25 bp, Homo sapien
ctggaccagcgcgcccgctcacctg

SEQ ID NO: 3319451 - DNA, 25 bp, Homo sapien
agcaaccgtcccctgtgcgcctgcg

SEQ ID NO: 3319452 - DNA, 25 bp, Homo sapien
tgcgagaggtccagctgagtttccg

SEQ ID NO: 3319453 - DNA, 25 bp, Homo sapien
tcagctcgcagagcagggcttttcc

SEQ ID NO: 3319454 - DNA, 25 bp, Homo sapien
tccattggcaatgtgggcagagtcc

SEQ ID NO: 3319455 - DNA, 25 bp, Homo sapien
tagccccgagagacaagcttttctg

SEQ ID NO: 3319456 - DNA, 25 bp, Homo sapien
tattgggcagaccaagcgcggtggt

SEQ ID NO: 3319457 - DNA, 25 bp, Homo sapien
tgggcagaccaagcgcggtggttta

SEQ ID NO: 3319458 - DNA, 25 bp, Homo sapien
aagatccagagcaatgttgaaagta

SEQ ID NO: 3319459 - DNA, 25 bp, Homo sapien
gatccagagcaatgttgaaagtatt

SEQ ID NO: 3319460 - DNA, 25 bp, Homo sapien
tcttgggcagtgattaattcctacc

SEQ ID NO: 3319461 - DNA, 25 bp, Homo sapien
taaaagagtcgaggtgagaagtcat

SEQ ID NO: 3319462 - DNA, 25 bp, Homo sapien
cagggtagcccaacaaacggtgtag

SEQ ID NO: 3319463 - DNA, 25 bp, Homo sapien
gaacactactttacaaggatgcaga

SEQ ID NO: 3319464 - DNA, 25 bp, Homo sapien
gtataatttgtagggctcagtgcaa

SEQ ID NO: 3319465 - DNA, 25 bp, Homo sapien
cagactatctgtataatttgtaggg

SEQ ID NO: 3319466 - DNA, 25 bp, Homo sapien
tatctgtataatttgtagggctcag

SEQ ID NO: 3319467 - DNA, 25 bp, Homo sapien
gaccacagactatctgtataatttg

SEQ ID NO: 3319468 - DNA, 25 bp, Homo sapien
gagtgtactcagacttacatctgga

SEQ ID NO: 3319469 - DNA, 25 bp, Homo sapien
tagtgcctagcacagcttattccat

SEQ ID NO: 3319470 - DNA, 25 bp, Homo sapien
tatggcgtccaggtggctgtatctc

SEQ ID NO: 3319471 - DNA, 25 bp, Homo sapien
cagttacagtggtgtgaaagcaagg

SEQ ID NO: 3319472 - DNA, 25 bp, Homo sapien
caagctgtacgtggagactgggacc

SEQ ID NO: 3319473 - DNA, 25 bp, Homo sapien
tctgtagtctggaattaggagcgct

SEQ ID NO: 3319474 - DNA, 25 bp, Homo sapien
cacatagagtcgcttcagagggctg

SEQ ID NO: 3319475 - DNA, 25 bp, Homo sapien
aaatataagacgatggcagagctcc

SEQ ID NO: 3319476 - DNA, 25 bp, Homo sapien
agtgttgagaagaggtagacaaccc

SEQ ID NO: 3319477 - DNA, 25 bp, Homo sapien
caagtggtagggatgtagccagaag

SEQ ID NO: 3319478 - DNA, 25 bp, Homo sapien
cagaaggaagacaaatgaggtctct

SEQ ID NO: 3319479 - DNA, 25 bp, Homo sapien
tcttgtcatgtgtcttatgttgtag

SEQ ID NO: 3319480 - DNA, 25 bp, Homo sapien
ttaaaaatatccagtgagatttgct

SEQ ID NO: 3319481 - DNA, 25 bp, Homo sapien
ttccattaaatggaactcttgagag

SEQ ID NO: 3319482 - DNA, 25 bp, Homo sapien
ccattaaatggaactcttgagagaa

SEQ ID NO: 3319483 - DNA, 25 bp, Homo sapien
cattaaatggaactcttgagagaaa

SEQ ID NO: 3319484 - DNA, 25 bp, Homo sapien
ttaaatggaactcttgagagaaaaa

SEQ ID NO: 3319485 - DNA, 25 bp, Homo sapien
tactgagaaataaaaggccttccta

SEQ ID NO: 3319486 - DNA, 25 bp, Homo sapien
tgtactgagaaataaaaggccttcc

SEQ ID NO: 3319487 - DNA, 25 bp, Homo sapien
cattgtactgagaaataaaaggcct

SEQ ID NO: 3319488 - DNA, 25 bp, Homo sapien
tatacattgtactgagaaataaaag

SEQ ID NO: 3319489 - DNA, 25 bp, Homo sapien
taatccagtcaaaataattggccac

SEQ ID NO: 3319490 - DNA, 25 bp, Homo sapien
taattggccactttggtgtaaacac

SEQ ID NO: 3319491 - DNA, 25 bp, Homo sapien
atggtagctaatccagtcaaaataa

SEQ ID NO: 3319492 - DNA, 25 bp, Homo sapien
tagctaatccagtcaaaataattgg

SEQ ID NO: 3319493 - DNA, 25 bp, Homo sapien
catacagactaaggggcctccagag

SEQ ID NO: 3319494 - DNA, 25 bp, Homo sapien
tccagagtcccctttacaggcatcg

SEQ ID NO: 3319495 - DNA, 25 bp, Homo sapien
gcatcgatggaaccatcatatgtac

SEQ ID NO: 3319496 - DNA, 25 bp, Homo sapien
agtcacattgttggcatccatacag

SEQ ID NO: 3319497 - DNA, 25 bp, Homo sapien
ctcctccatggcatttaacaacttt

SEQ ID NO: 3319498 - DNA, 25 bp, Homo sapien
catggcatttaacaactttggcttt

SEQ ID NO: 3319499 - DNA, 25 bp, Homo sapien
ccatttttcaaggctgccatgcctc

SEQ ID NO: 3319500 - DNA, 25 bp, Homo sapien
catgcctcctccatggcatttaaca

SEQ ID NO: 3319501 - DNA, 25 bp, Homo sapien
ccgtaaaacttagagcagttgctta

SEQ ID NO: 3319502 - DNA, 25 bp, Homo sapien
ccactgaagtgaaaagactctttcg

SEQ ID NO: 3319503 - DNA, 25 bp, Homo sapien
acgatttccgtaaaacttagagcag

SEQ ID NO: 3319504 - DNA, 25 bp, Homo sapien
caccccactgaagtgaaaagactct

SEQ ID NO: 3319505 - DNA, 25 bp, Homo sapien
tgtggcctctggttcccaggtggtt

SEQ ID NO: 3319506 - DNA, 25 bp, Homo sapien
ctgtggcctctggttcccaggtggt

SEQ ID NO: 3319507 - DNA, 25 bp, Homo sapien
tctggttcccaggtggttttagaca

SEQ ID NO: 3319508 - DNA, 25 bp, Homo sapien
ggaacgaggcagctcacaatctttt

SEQ ID NO: 3319509 - DNA, 25 bp, Homo sapien
taggttggaataggtaaggagacca

SEQ ID NO: 3319510 - DNA, 25 bp, Homo sapien
gatgtcattttggtaagtgcctgca

SEQ ID NO: 3319511 - DNA, 25 bp, Homo sapien
cccagccagaaacgatgcatgtatc

SEQ ID NO: 3319512 - DNA, 25 bp, Homo sapien
gtgcagcagtcagaatccaacagcc

SEQ ID NO: 3319513 - DNA, 25 bp, Homo sapien
tggcatccttaattgccacctgcca

SEQ ID NO: 3319514 - DNA, 25 bp, Homo sapien
taattgccacctgccatgggaggtc

SEQ ID NO: 3319515 - DNA, 25 bp, Homo sapien
ccacaggtgattccactggcatcct

SEQ ID NO: 3319516 - DNA, 25 bp, Homo sapien
ttaactccacaagatagtttaggta

SEQ ID NO: 3319517 - DNA, 25 bp, Homo sapien
ggtaataatgattttatccgtcttc

SEQ ID NO: 3319518 - DNA, 25 bp, Homo sapien
tcgtttccttcgaatgtgcattctg

SEQ ID NO: 3319519 - DNA, 25 bp, Homo sapien
agttgtgctcgctttcctcccacaa

SEQ ID NO: 3319520 - DNA, 25 bp, Homo sapien
ctgcatccatgtcagcagtcaaaat

SEQ ID NO: 3319521 - DNA, 25 bp, Homo sapien
catgtcagcagtcaaaatttctgtt

SEQ ID NO: 3319522 - DNA, 25 bp, Homo sapien
tcagcagtcaaaatttctgtttctt

SEQ ID NO: 3319523 - DNA, 25 bp, Homo sapien
tgtcagcagtcaaaatttctgtttc

SEQ ID NO: 3319524 - DNA, 25 bp, Homo sapien
gcctctacgcctaaactaatgttca

SEQ ID NO: 3319525 - DNA, 25 bp, Homo sapien
gagctaccttgattttgagagaaaa

SEQ ID NO: 3319526 - DNA, 25 bp, Homo sapien
tcacactgagaaaaggcctctacgc

SEQ ID NO: 3319527 - DNA, 25 bp, Homo sapien
ggtggtcccaaagagctagagcatt

SEQ ID NO: 3319528 - DNA, 25 bp, Homo sapien
tgtaatgcagtccacctcaccattg

SEQ ID NO: 3319529 - DNA, 25 bp, Homo sapien
ccacctcaccattgcattgatactg

SEQ ID NO: 3319530 - DNA, 25 bp, Homo sapien
tgcaaacacccgatttgcaatggaa

SEQ ID NO: 3319531 - DNA, 25 bp, Homo sapien
ccgatttgcaatggaagcctttgcc

SEQ ID NO: 3319532 - DNA, 25 bp, Homo sapien
tgcaaacataagcaggagaggtttt

SEQ ID NO: 3319533 - DNA, 25 bp, Homo sapien
caaacataagcaggagaggtttttt

SEQ ID NO: 3319534 - DNA, 25 bp, Homo sapien
gtgcaaacataagcaggagaggttt

SEQ ID NO: 3319535 - DNA, 25 bp, Homo sapien
acataagcaggagaggtttttttca

SEQ ID NO: 3319536 - DNA, 25 bp, Homo sapien
ataccatcacaggctttcatctgag

SEQ ID NO: 3319537 - DNA, 25 bp, Homo sapien
gataccatcacaggctttcatctga

SEQ ID NO: 3319538 - DNA, 25 bp, Homo sapien
taccatcacaggctttcatctgaga

SEQ ID NO: 3319539 - DNA, 25 bp, Homo sapien
ctgaaagaagtcatccattggagaa

SEQ ID NO: 3319540 - DNA, 25 bp, Homo sapien
tgaaagaagtcatccattggagaat

SEQ ID NO: 3319541 - DNA, 25 bp, Homo sapien
tggagtggtggcatgacatccttat

SEQ ID NO: 3319542 - DNA, 25 bp, Homo sapien
gaaatttatttatggagtggtggca

SEQ ID NO: 3319543 - DNA, 25 bp, Homo sapien
gtggtggcatgacatccttatcaga

SEQ ID NO: 3319544 - DNA, 25 bp, Homo sapien
tgaaatttatttatggagtggtggc

SEQ ID NO: 3319545 - DNA, 25 bp, Homo sapien
ccaagacttgcttggttagtgccat

SEQ ID NO: 3319546 - DNA, 25 bp, Homo sapien
gctgacattgacaaacactggtttc

SEQ ID NO: 3319547 - DNA, 25 bp, Homo sapien
gaggaatcaagagtacgtgctgaca

SEQ ID NO: 3319548 - DNA, 25 bp, Homo sapien
gtcaaacctggcttatggaggctct

SEQ ID NO: 3319549 - DNA, 25 bp, Homo sapien
gagtcaggcaactttgcttcccata

SEQ ID NO: 3319550 - DNA, 25 bp, Homo sapien
aataaattcatatatgctggccctc

SEQ ID NO: 3319551 - DNA, 25 bp, Homo sapien
tcttaaaggagatgctgagctttct

SEQ ID NO: 3319552 - DNA, 25 bp, Homo sapien
gtttgattgacttgtgtttgctaca

SEQ ID NO: 3319553 - DNA, 25 bp, Homo sapien
gagagatcagacaacttaaaccttc

SEQ ID NO: 3319554 - DNA, 25 bp, Homo sapien
tcttagtaaaagtacattcagccaa

SEQ ID NO: 3319555 - DNA, 25 bp, Homo sapien
caaactggtctctaatcctcggcaa

SEQ ID NO: 3319556 - DNA, 25 bp, Homo sapien
taacaaaccacatcagcgaaatcct

SEQ ID NO: 3319557 - DNA, 25 bp, Homo sapien
gcatttataaccctactgtagcagg

SEQ ID NO: 3319558 - DNA, 25 bp, Homo sapien
tgaaactcagaaatagcctatggct

SEQ ID NO: 3319559 - DNA, 25 bp, Homo sapien
cttgggcaagataccgaaactctga

SEQ ID NO: 3319560 - DNA, 25 bp, Homo sapien
gaggctgtgccatgagaacaaacaa

SEQ ID NO: 3319561 - DNA, 25 bp, Homo sapien
aatgtgtttgtgactctcagaatca

SEQ ID NO: 3319562 - DNA, 25 bp, Homo sapien
ttgaaagttagaagatattctgaac

SEQ ID NO: 3319563 - DNA, 25 bp, Homo sapien
tgtagacgagtaggagacagacaga

SEQ ID NO: 3319564 - DNA, 25 bp, Homo sapien
gaaaaagtgtacataattgtagacg

SEQ ID NO: 3319565 - DNA, 25 bp, Homo sapien
gcatatcatcctcataacaatgcta

SEQ ID NO: 3319566 - DNA, 25 bp, Homo sapien
aatcagccatgagaaaatccactga

SEQ ID NO: 3319567 - DNA, 25 bp, Homo sapien
caatgctatgatgcacatagttaat

SEQ ID NO: 3319568 - DNA, 25 bp, Homo sapien
ggttccaagtgttgggtaaacatga

SEQ ID NO: 3319569 - DNA, 25 bp, Homo sapien
gttttacttcaactattccctctga

SEQ ID NO: 3319570 - DNA, 25 bp, Homo sapien
ttgaaacccaaggtcaaggcaggcc

SEQ ID NO: 3319571 - DNA, 25 bp, Homo sapien
ctgcttttgcatatgaacattgtct

SEQ ID NO: 3319572 - DNA, 25 bp, Homo sapien
tgcatatgaacattgtcttatcttg

SEQ ID NO: 3319573 - DNA, 25 bp, Homo sapien
cagaagactttatcgcaggagaggt

SEQ ID NO: 3319574 - DNA, 25 bp, Homo sapien
tagtttacaaacacaggtgccctca

SEQ ID NO: 3319575 - DNA, 25 bp, Homo sapien
gggaagcttctcctgttagttgcac

SEQ ID NO: 3319576 - DNA, 25 bp, Homo sapien
acacactgcagtgccattctttggg

SEQ ID NO: 3319577 - DNA, 25 bp, Homo sapien
gggccaaaagccaatctgcgaagaa

SEQ ID NO: 3319578 - DNA, 25 bp, Homo sapien
tagaaataatatgagggctgggaac

SEQ ID NO: 3319579 - DNA, 25 bp, Homo sapien
ggatgcgcctcctgtcctctagtct

SEQ ID NO: 3319580 - DNA, 25 bp, Homo sapien
ctgcccgcagtgagccccgctcctt

SEQ ID NO: 3319581 - DNA, 25 bp, Homo sapien
gatgtcaattcactcaatgctggca

SEQ ID NO: 3319582 - DNA, 25 bp, Homo sapien
tgaggttctctagagattgcactac

SEQ ID NO: 3319583 - DNA, 25 bp, Homo sapien
gttagagccaactctctcatgcggg

SEQ ID NO: 3319584 - DNA, 25 bp, Homo sapien
ggctgagaactagccttggcaaggt

SEQ ID NO: 3319585 - DNA, 25 bp, Homo sapien
atagctatatgccttatcctcaagt

SEQ ID NO: 3319586 - DNA, 25 bp, Homo sapien
agctatatgccttatcctcaagttt

SEQ ID NO: 3319587 - DNA, 25 bp, Homo sapien
tagctatatgccttatcctcaagtt

SEQ ID NO: 3319588 - DNA, 25 bp, Homo sapien
gctatatgccttatcctcaagtttc

SEQ ID NO: 3319589 - DNA, 25 bp, Homo sapien
tctattagtagctaactccttcagc

SEQ ID NO: 3319590 - DNA, 25 bp, Homo sapien
cctgtaggacaggtctattagtagc

SEQ ID NO: 3319591 - DNA, 25 bp, Homo sapien
tgtagtgcatttcctgtaggacagg

SEQ ID NO: 3319592 - DNA, 25 bp, Homo sapien
gacaggtctattagtagctaactcc

SEQ ID NO: 3319593 - DNA, 25 bp, Homo sapien
aggctctgttcattccttgtcatcc

SEQ ID NO: 3319594 - DNA, 25 bp, Homo sapien
cacgagtctcataggctctgttcat

SEQ ID NO: 3319595 - DNA, 25 bp, Homo sapien
tattttggtatgctttatggtgtca

SEQ ID NO: 3319596 - DNA, 25 bp, Homo sapien
tatggtgtcacacgagtctcatagg

SEQ ID NO: 3319597 - DNA, 25 bp, Homo sapien
ccttaagtggaagcacagaaataac

SEQ ID NO: 3319598 - DNA, 25 bp, Homo sapien
cttaagtggaagcacagaaataaca

SEQ ID NO: 3319599 - DNA, 25 bp, Homo sapien
tctgctgagaactcttttccactcc

SEQ ID NO: 3319600 - DNA, 25 bp, Homo sapien
agaacaaacctcctaaagagctttg

SEQ ID NO: 3319601 - DNA, 25 bp, Homo sapien
tctgaaagaatttggctgaaatcca

SEQ ID NO: 3319602 - DNA, 25 bp, Homo sapien
ccactccaggtattcttttgaaatt

SEQ ID NO: 3319603 - DNA, 25 bp, Homo sapien
gatctactggacatagcgcggctca

SEQ ID NO: 3319604 - DNA, 25 bp, Homo sapien
gctgtgacaggttctgaggcgccca

SEQ ID NO: 3319605 - DNA, 25 bp, Homo sapien
cagataaacgcttccgtcggctgtg

SEQ ID NO: 3319606 - DNA, 25 bp, Homo sapien
aaattagtgagtgctgttgcgggcc

SEQ ID NO: 3319607 - DNA, 25 bp, Homo sapien
agagaatgtcttttcgaggcggagg

SEQ ID NO: 3319608 - DNA, 25 bp, Homo sapien
aatgtcttttcgaggcggaggtcgt

SEQ ID NO: 3319609 - DNA, 25 bp, Homo sapien
cggaggtcgtggaggctttaatcga

SEQ ID NO: 3319610 - DNA, 25 bp, Homo sapien
tggaggctttaatcgaggtggtgga

SEQ ID NO: 3319611 - DNA, 25 bp, Homo sapien
ctactatggattggaaacttgtttc

SEQ ID NO: 3319612 - DNA, 25 bp, Homo sapien
ggaactaatgctgattttaaacttg

SEQ ID NO: 3319613 - DNA, 25 bp, Homo sapien
cagttgacttctgcattaacctgca

SEQ ID NO: 3319614 - DNA, 25 bp, Homo sapien
gttgacagacatcaccagttgactt

SEQ ID NO: 3319615 - DNA, 25 bp, Homo sapien
atttacttatattgtgcatgaggcc

SEQ ID NO: 3319616 - DNA, 25 bp, Homo sapien
gagttgcccaatttatgtcttataa

SEQ ID NO: 3319617 - DNA, 25 bp, Homo sapien
gaagtaaacggtgtctcagataaaa

SEQ ID NO: 3319618 - DNA, 25 bp, Homo sapien
gaactcttgctagctaaacacagta

SEQ ID NO: 3319619 - DNA, 25 bp, Homo sapien
tcaccaacgggcatgttgctgccat

SEQ ID NO: 3319620 - DNA, 25 bp, Homo sapien
tctgcatgctcccagtgagacagtg

SEQ ID NO: 3319621 - DNA, 25 bp, Homo sapien
aagagacttctccaacataccccgg

SEQ ID NO: 3319622 - DNA, 25 bp, Homo sapien
taccccggtctaatgccgttagcaa

SEQ ID NO: 3319623 - DNA, 25 bp, Homo sapien
tgaaagacaccttcaccgttaacac

SEQ ID NO: 3319624 - DNA, 25 bp, Homo sapien
ctgaaagacaccttcaccgttaaca

SEQ ID NO: 3319625 - DNA, 25 bp, Homo sapien
gccattactgcttagttctgagttc

SEQ ID NO: 3319626 - DNA, 25 bp, Homo sapien
attactgcttagttctgagttctcc

SEQ ID NO: 3319627 - DNA, 25 bp, Homo sapien
cagccattactgcttagttctgagt

SEQ ID NO: 3319628 - DNA, 25 bp, Homo sapien
ctgcagccattactgcttagttctg

SEQ ID NO: 3319629 - DNA, 25 bp, Homo sapien
ggctattgtagtgctcttcctggcc

SEQ ID NO: 3319630 - DNA, 25 bp, Homo sapien
gacaggctattgtagtgctcttcct

SEQ ID NO: 3319631 - DNA, 25 bp, Homo sapien
aggtggacaggctattgtagtgctc

SEQ ID NO: 3319632 - DNA, 25 bp, Homo sapien
tggacaggctattgtagtgctcttc

SEQ ID NO: 3319633 - DNA, 25 bp, Homo sapien
gtggtccaaagcgtgctggtgacct

SEQ ID NO: 3319634 - DNA, 25 bp, Homo sapien
accctggaggttgcaccgcaggtcg

SEQ ID NO: 3319635 - DNA, 25 bp, Homo sapien
ctgtggtccaaagcgtgctggtgac

SEQ ID NO: 3319636 - DNA, 25 bp, Homo sapien
ggtccaaagcgtgctggtgaccttc

SEQ ID NO: 3319637 - DNA, 25 bp, Homo sapien
accagcgttcagcatcctttcggtt

SEQ ID NO: 3319638 - DNA, 25 bp, Homo sapien
gcccagagccgaatccacttccaca

SEQ ID NO: 3319639 - DNA, 25 bp, Homo sapien
catgtcactcaggatattggtggca

SEQ ID NO: 3319640 - DNA, 25 bp, Homo sapien
tcaggatattggtggcatcagcgcc

SEQ ID NO: 3319641 - DNA, 25 bp, Homo sapien
tattggtggcatcagcgcccagagc

SEQ ID NO: 3319642 - DNA, 25 bp, Homo sapien
cattaatttccccctcatggttctt

SEQ ID NO: 3319643 - DNA, 25 bp, Homo sapien
gcattaatttccccctcatggttct

SEQ ID NO: 3319644 - DNA, 25 bp, Homo sapien
tctcatacttagttcagaagtcatc

SEQ ID NO: 3319645 - DNA, 25 bp, Homo sapien
ctgctccctctcatacttagttcag

SEQ ID NO: 3319646 - DNA, 25 bp, Homo sapien
catacttagttcagaagtcatctgc

SEQ ID NO: 3319647 - DNA, 25 bp, Homo sapien
gctccctctcatacttagttcagaa

SEQ ID NO: 3319648 - DNA, 25 bp, Homo sapien
catgggccctcgctatgtgtctgca

SEQ ID NO: 3319649 - DNA, 25 bp, Homo sapien
tacgtgattctacaactgcagtgga

SEQ ID NO: 3319650 - DNA, 25 bp, Homo sapien
tgtgagatgtccagagaagcgaagc

SEQ ID NO: 3319651 - DNA, 25 bp, Homo sapien
taataatcctctgatacaggcaggg

SEQ ID NO: 3319652 - DNA, 25 bp, Homo sapien
gccacagtttcaccatcaggccatt

SEQ ID NO: 3319653 - DNA, 25 bp, Homo sapien
tctggttctggaggagcttcatgct

SEQ ID NO: 3319654 - DNA, 25 bp, Homo sapien
gctgcgccccaagtcaaagtaatag

SEQ ID NO: 3319655 - DNA, 25 bp, Homo sapien
tcctgaagagcagttgccctggtcc

SEQ ID NO: 3319656 - DNA, 25 bp, Homo sapien
tcatcccatgaaatcagtctctgca

SEQ ID NO: 3319657 - DNA, 25 bp, Homo sapien
aaccgaggagttgcctgttccttca

SEQ ID NO: 3319658 - DNA, 25 bp, Homo sapien
tctaccgcatctcccaaagcggaaa

SEQ ID NO: 3319659 - DNA, 25 bp, Homo sapien
aatgaatggcatcactctctaccgc

SEQ ID NO: 3319660 - DNA, 25 bp, Homo sapien
taacgattgctggaaagatctcagt

SEQ ID NO: 3319661 - DNA, 25 bp, Homo sapien
ctaatcggataggtgggaactctgt

SEQ ID NO: 3319662 - DNA, 25 bp, Homo sapien
ttatgtccaagatgcagggcgtgcc

SEQ ID NO: 3319663 - DNA, 25 bp, Homo sapien
tggcaacagcacctgtaaaggactg

SEQ ID NO: 3319664 - DNA, 25 bp, Homo sapien
tcagtaaccaagaattccagaagcc

SEQ ID NO: 3319665 - DNA, 25 bp, Homo sapien
gtaaccaagaattccagaagccaaa

SEQ ID NO: 3319666 - DNA, 25 bp, Homo sapien
agaagccaaatccctctcttttcct

SEQ ID NO: 3319667 - DNA, 25 bp, Homo sapien
gaagccaaatccctctcttttccta

SEQ ID NO: 3319668 - DNA, 25 bp, Homo sapien
ggaaatgatgccagtctgtttactg

SEQ ID NO: 3319669 - DNA, 25 bp, Homo sapien
tgaaatacccccaacagatcgggag

SEQ ID NO: 3319670 - DNA, 25 bp, Homo sapien
cataatttctcagcgtcatctggat

SEQ ID NO: 3319671 - DNA, 25 bp, Homo sapien
ccaacagatcgggaggcagatttgg

SEQ ID NO: 3319672 - DNA, 25 bp, Homo sapien
tgggcccagatatgtctgagcaggt

SEQ ID NO: 3319673 - DNA, 25 bp, Homo sapien
cacaggtctatttgcaatggaggtg

SEQ ID NO: 3319674 - DNA, 25 bp, Homo sapien
ctaatgagttcaacctgaggaaagc

SEQ ID NO: 3319675 - DNA, 25 bp, Homo sapien
tgaggatgttccagaaagggcattc

SEQ ID NO: 3319676 - DNA, 25 bp, Homo sapien
ggaggaagtagagattctgccgcag

SEQ ID NO: 3319677 - DNA, 25 bp, Homo sapien
tcttggacaccagcatacagaggct

SEQ ID NO: 3319678 - DNA, 25 bp, Homo sapien
gctcattggcaaactgggacctacc

SEQ ID NO: 3319679 - DNA, 25 bp, Homo sapien
tgaaacgagtatgaccagggaggac

SEQ ID NO: 3319680 - DNA, 25 bp, Homo sapien
gaatatgccctagctgcctcggttg

SEQ ID NO: 3319681 - DNA, 25 bp, Homo sapien
cagtttctttacatgagcagagagg

SEQ ID NO: 3319682 - DNA, 25 bp, Homo sapien
ttctaggttcccactgtctttccca

SEQ ID NO: 3319683 - DNA, 25 bp, Homo sapien
tcttttccctctagcaatgtacatg

SEQ ID NO: 3319684 - DNA, 25 bp, Homo sapien
tgaagtttctaactcagtctagaca

SEQ ID NO: 3319685 - DNA, 25 bp, Homo sapien
gacttggcttgatgctcagacctag

SEQ ID NO: 3319686 - DNA, 25 bp, Homo sapien
tgtcatgggccagtgatccagcctc

SEQ ID NO: 3319687 - DNA, 25 bp, Homo sapien
tcaccatagtaggatcgggatgcag

SEQ ID NO: 3319688 - DNA, 25 bp, Homo sapien
taagcaacactagaaggtccacgta

SEQ ID NO: 3319689 - DNA, 25 bp, Homo sapien
gctttgaagttcagtgtaccccaca

SEQ ID NO: 3319690 - DNA, 25 bp, Homo sapien
taatctatgcagtgtggaagcccct

SEQ ID NO: 3319691 - DNA, 25 bp, Homo sapien
tttaaacacctctacattgcttggg

SEQ ID NO: 3319692 - DNA, 25 bp, Homo sapien
cccaatatttcgaacagccctgtga

SEQ ID NO: 3319693 - DNA, 25 bp, Homo sapien
gcccgcaaggcatagtaagagtaca

SEQ ID NO: 3319694 - DNA, 25 bp, Homo sapien
gatgaacatggcaaacttccgggag

SEQ ID NO: 3319695 - DNA, 25 bp, Homo sapien
taagagtacatcacggcgtgcacgc

SEQ ID NO: 3319696 - DNA, 25 bp, Homo sapien
gcgtgcacgccatagttcatagtca

SEQ ID NO: 3319697 - DNA, 25 bp, Homo sapien
caaactgactgcttcaggcctttgg

SEQ ID NO: 3319698 - DNA, 25 bp, Homo sapien
tgtaaaaaccctggtcacaaactga

SEQ ID NO: 3319699 - DNA, 25 bp, Homo sapien
tgtacaccatataagcaccagttcg

SEQ ID NO: 3319700 - DNA, 25 bp, Homo sapien
tagttcgggtgctttgcttagcaca

SEQ ID NO: 3319701 - DNA, 25 bp, Homo sapien
ccaggctttttgtgccctccttgga

SEQ ID NO: 3319702 - DNA, 25 bp, Homo sapien
ctctggactcgccttgccagcccag

SEQ ID NO: 3319703 - DNA, 25 bp, Homo sapien
gccagcccaggctttttgtgccctc

SEQ ID NO: 3319704 - DNA, 25 bp, Homo sapien
tctggactcgccttgccagcccagg

SEQ ID NO: 3319705 - DNA, 25 bp, Homo sapien
ctaagctctgaacaataaggctaac

SEQ ID NO: 3319706 - DNA, 25 bp, Homo sapien
gggatgtgacagtgctactgctggg

SEQ ID NO: 3319707 - DNA, 25 bp, Homo sapien
caaaggcgcattgttgggatgtgac

SEQ ID NO: 3319708 - DNA, 25 bp, Homo sapien
cttttcagggaaaccgtcagtgcca

SEQ ID NO: 3319709 - DNA, 25 bp, Homo sapien
ccattgggcccatgtgtctgtgggc

SEQ ID NO: 3319710 - DNA, 25 bp, Homo sapien
tgtggagggagcagtatacgtttct

SEQ ID NO: 3319711 - DNA, 25 bp, Homo sapien
gacacaatgcagcaaggcgatgagg

SEQ ID NO: 3319712 - DNA, 25 bp, Homo sapien
gcagtatacgtttctgctccctctg

SEQ ID NO: 3319713 - DNA, 25 bp, Homo sapien
caaatgaaatcagtggaatagcaga

SEQ ID NO: 3319714 - DNA, 25 bp, Homo sapien
gagtttttattgacttgcagttcca

SEQ ID NO: 3319715 - DNA, 25 bp, Homo sapien
gaaagagtttttattgacttgcagt

SEQ ID NO: 3319716 - DNA, 25 bp, Homo sapien
aggaaagagtttttattgacttgca

SEQ ID NO: 3319717 - DNA, 25 bp, Homo sapien
aagagtttttattgacttgcagttc

SEQ ID NO: 3319718 - DNA, 25 bp, Homo sapien
ttacaatgaacacaatacagccatg

SEQ ID NO: 3319719 - DNA, 25 bp, Homo sapien
gaacatcaagatgcacgattaagtg

SEQ ID NO: 3319720 - DNA, 25 bp, Homo sapien
cttcacacggtagcagaaaggagaa

SEQ ID NO: 3319721 - DNA, 25 bp, Homo sapien
gtaccaacgatctctgcatcaggtg

SEQ ID NO: 3319722 - DNA, 25 bp, Homo sapien
gaccagtacttgactctgtgcgagc

SEQ ID NO: 3319723 - DNA, 25 bp, Homo sapien
tcccagactaaacaatgcaaggctt

SEQ ID NO: 3319724 - DNA, 25 bp, Homo sapien
tttacagaacttgattgagccccta

SEQ ID NO: 3319725 - DNA, 25 bp, Homo sapien
tttgattctccctacacctcatggg

SEQ ID NO: 3319726 - DNA, 25 bp, Homo sapien
cacaacgcattcctgtggaggctca

SEQ ID NO: 3319727 - DNA, 25 bp, Homo sapien
ccagctgtggattagggacaccttt

SEQ ID NO: 3319728 - DNA, 25 bp, Homo sapien
tcagaatcttgacttgggagcccct

SEQ ID NO: 3319729 - DNA, 25 bp, Homo sapien
tttggagaccccaccgtgcaagatg

SEQ ID NO: 3319730 - DNA, 25 bp, Homo sapien
gcatggttgctcagacatttgagaa

SEQ ID NO: 3319731 - DNA, 25 bp, Homo sapien
ggttgctcagacatttgagaatctc

SEQ ID NO: 3319732 - DNA, 25 bp, Homo sapien
tggcatggttgctcagacatttgag

SEQ ID NO: 3319733 - DNA, 25 bp, Homo sapien
catggttgctcagacatttgagaat

SEQ ID NO: 3319734 - DNA, 25 bp, Homo sapien
ggagcccttgatgctttagggcttt

SEQ ID NO: 3319735 - DNA, 25 bp, Homo sapien
agcccttgatgctttagggctttcc

SEQ ID NO: 3319736 - DNA, 25 bp, Homo sapien
gatgctttagggctttcctgtcttc

SEQ ID NO: 3319737 - DNA, 25 bp, Homo sapien
cagccagtccagcagagaggatgga

SEQ ID NO: 3319738 - DNA, 25 bp, Homo sapien
tcatctactgaacacgtcccaaaag

SEQ ID NO: 3319739 - DNA, 25 bp, Homo sapien
gggacagttactgtaagagtccctg

SEQ ID NO: 3319740 - DNA, 25 bp, Homo sapien
ttagttgttcaatggggacagttac

SEQ ID NO: 3319741 - DNA, 25 bp, Homo sapien
ctgaacacgtcccaaaagcctttag

SEQ ID NO: 3319742 - DNA, 25 bp, Homo sapien
tctggaaccaggtatgtgcccatag

SEQ ID NO: 3319743 - DNA, 25 bp, Homo sapien
ccagatgtcttgatgcaaatgaccc

SEQ ID NO: 3319744 - DNA, 25 bp, Homo sapien
gaaacaggacctcactttgtctgga

SEQ ID NO: 3319745 - DNA, 25 bp, Homo sapien
tctaatcgaagccactaatgaagtc

SEQ ID NO: 3319746 - DNA, 25 bp, Homo sapien
agatgtgactcacacttggtgctgg

SEQ ID NO: 3319747 - DNA, 25 bp, Homo sapien
gagatgtgactcacacttggtgctg

SEQ ID NO: 3319748 - DNA, 25 bp, Homo sapien
gagagtttgactttcatactttaga

SEQ ID NO: 3319749 - DNA, 25 bp, Homo sapien
tggccgagagtttgactttcatact

SEQ ID NO: 3319750 - DNA, 25 bp, Homo sapien
taattttaccttatgtgtgaatgca

SEQ ID NO: 3319751 - DNA, 25 bp, Homo sapien
ccactcctggccgagagtttgactt

SEQ ID NO: 3319752 - DNA, 25 bp, Homo sapien
catcatactggccatatttataaag

SEQ ID NO: 3319753 - DNA, 25 bp, Homo sapien
aaagattaattgacaccaggacctg

SEQ ID NO: 3319754 - DNA, 25 bp, Homo sapien
gattaattgacaccaggacctggtg

SEQ ID NO: 3319755 - DNA, 25 bp, Homo sapien
tgtaggtggaagttggtcactatgc

SEQ ID NO: 3319756 - DNA, 25 bp, Homo sapien
gagaccagagcactaatggcttcct

SEQ ID NO: 3319757 - DNA, 25 bp, Homo sapien
tcctcagttcaaactttgctcgttt

SEQ ID NO: 3319758 - DNA, 25 bp, Homo sapien
ccgaccaccgaatataaaggcagca

SEQ ID NO: 3319759 - DNA, 25 bp, Homo sapien
ctttgctcgtttattcattaggtgc

SEQ ID NO: 3319760 - DNA, 25 bp, Homo sapien
catcagatgggatcacctttaggaa

SEQ ID NO: 3319761 - DNA, 25 bp, Homo sapien
gaactgcggctcttcacaggaatca

SEQ ID NO: 3319762 - DNA, 25 bp, Homo sapien
gcattatttctatccctgagggcag

SEQ ID NO: 3319763 - DNA, 25 bp, Homo sapien
catgaagggtactgaaagtctgagc

SEQ ID NO: 3319764 - DNA, 25 bp, Homo sapien
ttttgtttcagtagatatggcttaa

SEQ ID NO: 3319765 - DNA, 25 bp, Homo sapien
gctgctctagttagcaaaatcaaac

SEQ ID NO: 3319766 - DNA, 25 bp, Homo sapien
tagaaccaaagactgtagactgtcc

SEQ ID NO: 3319767 - DNA, 25 bp, Homo sapien
agcgttgcatcttagagaggtacaa

SEQ ID NO: 3319768 - DNA, 25 bp, Homo sapien
taagtgtcacagagcaaatcaagtc

SEQ ID NO: 3319769 - DNA, 25 bp, Homo sapien
gggagcatcatcacttacagagaag

SEQ ID NO: 3319770 - DNA, 25 bp, Homo sapien
caatacagaacctaatgggaagggc

SEQ ID NO: 3319771 - DNA, 25 bp, Homo sapien
tcatcctactgtgaaagcatagcga

SEQ ID NO: 3319772 - DNA, 25 bp, Homo sapien
tgtcagttaagtttatgcttccact

SEQ ID NO: 3319773 - DNA, 25 bp, Homo sapien
gatcttattatccatgtcagttaag

SEQ ID NO: 3319774 - DNA, 25 bp, Homo sapien
gttttgactttactatagatcttat

SEQ ID NO: 3319775 - DNA, 25 bp, Homo sapien
caagattagtttcattcaagatttg

SEQ ID NO: 3319776 - DNA, 25 bp, Homo sapien
caaatatacatgatatccaggcaga

SEQ ID NO: 3319777 - DNA, 25 bp, Homo sapien
tggaagctacatcacaaaggccatt

SEQ ID NO: 3319778 - DNA, 25 bp, Homo sapien
caaagaggcgaactgtctatccaca

SEQ ID NO: 3319779 - DNA, 25 bp, Homo sapien
aaacaaaccctagccagccttctgg

SEQ ID NO: 3319780 - DNA, 25 bp, Homo sapien
aacaagaacatacactgaggaaagg

SEQ ID NO: 3319781 - DNA, 25 bp, Homo sapien
tgtacaaaaattttggataccatgt

SEQ ID NO: 3319782 - DNA, 25 bp, Homo sapien
gagcatttccttactgcaaattaca

SEQ ID NO: 3319783 - DNA, 25 bp, Homo sapien
cagacacattgatcaatggacagaa

SEQ ID NO: 3319784 - DNA, 25 bp, Homo sapien
tgttcactttcataaactgcccaga

SEQ ID NO: 3319785 - DNA, 25 bp, Homo sapien
gaactagacaaagtcagtggcccaa

SEQ ID NO: 3319786 - DNA, 25 bp, Homo sapien
taagctacacctagtggaatgggag

SEQ ID NO: 3319787 - DNA, 25 bp, Homo sapien
tgtgccctggccaaacagtggaact

SEQ ID NO: 3319788 - DNA, 25 bp, Homo sapien
gatgttgagatttgacatgcctgcc

SEQ ID NO: 3319789 - DNA, 25 bp, Homo sapien
catttgtgggccataaagaagtcta

SEQ ID NO: 3319790 - DNA, 25 bp, Homo sapien
tagatgcttgggtgtgtcagaagac

SEQ ID NO: 3319791 - DNA, 25 bp, Homo sapien
catgcctgcccattaagagacagca

SEQ ID NO: 3319792 - DNA, 25 bp, Homo sapien
tttctcttacaccatccccactgag

SEQ ID NO: 3319793 - DNA, 25 bp, Homo sapien
cactgagttgagaagatggcttggt

SEQ ID NO: 3319794 - DNA, 25 bp, Homo sapien
caccatccccactgagttgagaaga

SEQ ID NO: 3319795 - DNA, 25 bp, Homo sapien
cagctgctaacttttctcttacacc

SEQ ID NO: 3319796 - DNA, 25 bp, Homo sapien
cttctagacttacattgtgatttgc

SEQ ID NO: 3319797 - DNA, 25 bp, Homo sapien
acattgtgatttgcatagatttttc

SEQ ID NO: 3319798 - DNA, 25 bp, Homo sapien
gacttacattgtgatttgcatagat

SEQ ID NO: 3319799 - DNA, 25 bp, Homo sapien
attttaatcacttctagacttacat

SEQ ID NO: 3319800 - DNA, 25 bp, Homo sapien
tcttatggattggtacgacctcttt

SEQ ID NO: 3319801 - DNA, 25 bp, Homo sapien
acattaggaaaagtggcacctaaag

SEQ ID NO: 3319802 - DNA, 25 bp, Homo sapien
caacacatgagggtttgcttacaac

SEQ ID NO: 3319803 - DNA, 25 bp, Homo sapien
tacagagaatgcaaagtcaccctgc

SEQ ID NO: 3319804 - DNA, 25 bp, Homo sapien
agtatcgacaatttacaggaggccc

SEQ ID NO: 3319805 - DNA, 25 bp, Homo sapien
gctggactagcaaaacagaccattt

SEQ ID NO: 3319806 - DNA, 25 bp, Homo sapien
ccagggcacctgtttagtggaacca

SEQ ID NO: 3319807 - DNA, 25 bp, Homo sapien
gactggtttctgactagctggacta

SEQ ID NO: 3319808 - DNA, 25 bp, Homo sapien
tctggaggaaagatactgtcagcct

SEQ ID NO: 3319809 - DNA, 25 bp, Homo sapien
gcctgctatcaagtgagatcctaga

SEQ ID NO: 3319810 - DNA, 25 bp, Homo sapien
gcacattcatttcgcccctggactg

SEQ ID NO: 3319811 - DNA, 25 bp, Homo sapien
tcctgggacagcttatcaacaaaag

SEQ ID NO: 3319812 - DNA, 25 bp, Homo sapien
acatgcacagtaaaaggacttgtgt

SEQ ID NO: 3319813 - DNA, 25 bp, Homo sapien
aatgatcctcagcttccacaagtag

SEQ ID NO: 3319814 - DNA, 25 bp, Homo sapien
taggtgcattgagacacacttctgg

SEQ ID NO: 3319815 - DNA, 25 bp, Homo sapien
tacatacagcgttaagtacttaacc

SEQ ID NO: 3319816 - DNA, 25 bp, Homo sapien
tgagcctgtctagcaaattagtgca

SEQ ID NO: 3319817 - DNA, 25 bp, Homo sapien
tcccaacttgaagccactcagaggt

SEQ ID NO: 3319818 - DNA, 25 bp, Homo sapien
gcaacccaaagtcatgagaatccca

SEQ ID NO: 3319819 - DNA, 25 bp, Homo sapien
gactttaacctgtgggatctgtccc

SEQ ID NO: 3319820 - DNA, 25 bp, Homo sapien
tcatgaaaaggtagaacatgtcatc

SEQ ID NO: 3319821 - DNA, 25 bp, Homo sapien
atcatgaaaaggtagaacatgtcat

SEQ ID NO: 3319822 - DNA, 25 bp, Homo sapien
catcatgaaaaggtagaacatgtca

SEQ ID NO: 3319823 - DNA, 25 bp, Homo sapien
atccctccagcattgctggggaaaa

SEQ ID NO: 3319824 - DNA, 25 bp, Homo sapien
ctgataccaggtattgtacatacat

SEQ ID NO: 3319825 - DNA, 25 bp, Homo sapien
cattaagtacattatagttaatgca

SEQ ID NO: 3319826 - DNA, 25 bp, Homo sapien
tggagcaactagcatccactgctgt

SEQ ID NO: 3319827 - DNA, 25 bp, Homo sapien
tgtcagccgacatcagaagataatc

SEQ ID NO: 3319828 - DNA, 25 bp, Homo sapien
tgctgttagcacaaacctggcaggc

SEQ ID NO: 3319829 - DNA, 25 bp, Homo sapien
tattggtgggcaccgtgtcagccga

SEQ ID NO: 3319830 - DNA, 25 bp, Homo sapien
caccctgggatattgggagaaatgc

SEQ ID NO: 3319831 - DNA, 25 bp, Homo sapien
tctggttcaagactttttgtcctgc

SEQ ID NO: 3319832 - DNA, 25 bp, Homo sapien
caattagggtcaggaagagttgcaa

SEQ ID NO: 3319833 - DNA, 25 bp, Homo sapien
tctctcctcaagagggtctaagcct

SEQ ID NO: 3319834 - DNA, 25 bp, Homo sapien
taggcgatctggactgtggcatctc

SEQ ID NO: 3319835 - DNA, 25 bp, Homo sapien
gggagaggccaagcgagaaaaccca

SEQ ID NO: 3319836 - DNA, 25 bp, Homo sapien
tctctctatgaaaccggaaagggaa

SEQ ID NO: 3319837 - DNA, 25 bp, Homo sapien
tcacactccggttgcgggagaggcc

SEQ ID NO: 3319838 - DNA, 25 bp, Homo sapien
gaactgcttttcgaattcatattct

SEQ ID NO: 3319839 - DNA, 25 bp, Homo sapien
tccattggatggcttcattctcgtt

SEQ ID NO: 3319840 - DNA, 25 bp, Homo sapien
tcttgtaaagtcaacactgacatgt

SEQ ID NO: 3319841 - DNA, 25 bp, Homo sapien
tattcttgtaaagtcaacactgaca

SEQ ID NO: 3319842 - DNA, 25 bp, Homo sapien
gctcggtctccagcggtcgtctctt

SEQ ID NO: 3319843 - DNA, 25 bp, Homo sapien
ctaggtcttccccacgccgctcggt

SEQ ID NO: 3319844 - DNA, 25 bp, Homo sapien
gcgcttgatttcgagtgttctcctg

SEQ ID NO: 3319845 - DNA, 25 bp, Homo sapien
tctgtaaagcgcttgatttcgagtg

SEQ ID NO: 3319846 - DNA, 25 bp, Homo sapien
gaatgccttgcggtcttagtgcccg

SEQ ID NO: 3319847 - DNA, 25 bp, Homo sapien
tagtgcccgcacgtttgtccatcac

SEQ ID NO: 3319848 - DNA, 25 bp, Homo sapien
tccaccgtaggaggaaatgaatgcc

SEQ ID NO: 3319849 - DNA, 25 bp, Homo sapien
cggcgtccgcatccaccgtaggagg

SEQ ID NO: 3319850 - DNA, 25 bp, Homo sapien
ctagacgatccacattcccatttcc

SEQ ID NO: 3319851 - DNA, 25 bp, Homo sapien
ggcatggaaattaccctgctctcat

SEQ ID NO: 3319852 - DNA, 25 bp, Homo sapien
agcttctgccattgtgtctggtacc

SEQ ID NO: 3319853 - DNA, 25 bp, Homo sapien
cttctgccattgtgtctggtaccat

SEQ ID NO: 3319854 - DNA, 25 bp, Homo sapien
aaggcatggaaattaccctgctctc

SEQ ID NO: 3319855 - DNA, 25 bp, Homo sapien
ctttcaggcagagagtgctcaaagg

SEQ ID NO: 3319856 - DNA, 25 bp, Homo sapien
ctcaaagggtagaacggctcttttg

SEQ ID NO: 3319857 - DNA, 25 bp, Homo sapien
tgtgcaactgtgctttcaggcagag

SEQ ID NO: 3319858 - DNA, 25 bp, Homo sapien
cagagagtgctcaaagggtagaacg

SEQ ID NO: 3319859 - DNA, 25 bp, Homo sapien
gtttaatcgttaatagcaaaattga

SEQ ID NO: 3319860 - DNA, 25 bp, Homo sapien
cactctatagactaactatatagta

SEQ ID NO: 3319861 - DNA, 25 bp, Homo sapien
taatgtttaatcgttaatagcaaaa

SEQ ID NO: 3319862 - DNA, 25 bp, Homo sapien
ggggggtaaatcactctatagacta

SEQ ID NO: 3319863 - DNA, 25 bp, Homo sapien
tcttgtgtggcaggtatcttgtttt

SEQ ID NO: 3319864 - DNA, 25 bp, Homo sapien
tgtgtggcaggtatcttgtttttac

SEQ ID NO: 3319865 - DNA, 25 bp, Homo sapien
ctcttgtgtggcaggtatcttgttt

SEQ ID NO: 3319866 - DNA, 25 bp, Homo sapien
cttgtgtggcaggtatcttgttttt

SEQ ID NO: 3319867 - DNA, 25 bp, Homo sapien
gcaggagtttctgcaccactgaggt

SEQ ID NO: 3319868 - DNA, 25 bp, Homo sapien
ggtcagtctcggctatatccctggt

SEQ ID NO: 3319869 - DNA, 25 bp, Homo sapien
ctgtgtcatgagatctgcgatgttc

SEQ ID NO: 3319870 - DNA, 25 bp, Homo sapien
gaggtgagttcctgctcattcttgg

SEQ ID NO: 3319871 - DNA, 25 bp, Homo sapien
atctccattataaatactctccagg

SEQ ID NO: 3319872 - DNA, 25 bp, Homo sapien
ccattataaatactctccaggacca

SEQ ID NO: 3319873 - DNA, 25 bp, Homo sapien
ctccattataaatactctccaggac

SEQ ID NO: 3319874 - DNA, 25 bp, Homo sapien
catctccattataaatactctccag

SEQ ID NO: 3319875 - DNA, 25 bp, Homo sapien
ggtgtatgtaatgggcacagatgtc

SEQ ID NO: 3319876 - DNA, 25 bp, Homo sapien
cagatgtcaggttgatgtagccagt

SEQ ID NO: 3319877 - DNA, 25 bp, Homo sapien
tgtagccagtacaccaaggggaagc

SEQ ID NO: 3319878 - DNA, 25 bp, Homo sapien
cacatgggtgtatgtaatgggcaca

SEQ ID NO: 3319879 - DNA, 25 bp, Homo sapien
acaagaggctcttaggctctgagga

SEQ ID NO: 3319880 - DNA, 25 bp, Homo sapien
tgtgtcacaagaggctcttaggctc

SEQ ID NO: 3319881 - DNA, 25 bp, Homo sapien
aagaggctcttaggctctgaggaag

SEQ ID NO: 3319882 - DNA, 25 bp, Homo sapien
tgtcacaagaggctcttaggctctg

SEQ ID NO: 3319883 - DNA, 25 bp, Homo sapien
tcgtatactccgctagcccagttct

SEQ ID NO: 3319884 - DNA, 25 bp, Homo sapien
caaggtcttcgtatactccgctagc

SEQ ID NO: 3319885 - DNA, 25 bp, Homo sapien
ggtcttcgtatactccgctagccca

SEQ ID NO: 3319886 - DNA, 25 bp, Homo sapien
tatactccgctagcccagttcttta

SEQ ID NO: 3319887 - DNA, 25 bp, Homo sapien
cacttgtgctgcattgttgaactag

SEQ ID NO: 3319888 - DNA, 25 bp, Homo sapien
gctgcattgttgaactagggtttac

SEQ ID NO: 3319889 - DNA, 25 bp, Homo sapien
gggtttactttctgtccagcgataa

SEQ ID NO: 3319890 - DNA, 25 bp, Homo sapien
taagattgatcccaaagactccctc

SEQ ID NO: 3319891 - DNA, 25 bp, Homo sapien
atgggtgcctcacgagctcagcaaa

SEQ ID NO: 3319892 - DNA, 25 bp, Homo sapien
tcatcattgaagcagatggaaaggc

SEQ ID NO: 3319893 - DNA, 25 bp, Homo sapien
caaccaactgagagcactcatggaa

SEQ ID NO: 3319894 - DNA, 25 bp, Homo sapien
gcaaagaagctcgataaatgggtgc

SEQ ID NO: 3319895 - DNA, 25 bp, Homo sapien
ctagatgaataaaggagtccatcat

SEQ ID NO: 3319896 - DNA, 25 bp, Homo sapien
tttattctctgcctgatattctgac

SEQ ID NO: 3319897 - DNA, 25 bp, Homo sapien
tggaagcagacattccagcatcttc

SEQ ID NO: 3319898 - DNA, 25 bp, Homo sapien
agaagtccaactagatgaataaagg

SEQ ID NO: 3319899 - DNA, 25 bp, Homo sapien
ttcaaagtgagttcccggacacact

SEQ ID NO: 3319900 - DNA, 25 bp, Homo sapien
tttcaaagtgagttcccggacacac

SEQ ID NO: 3319901 - DNA, 25 bp, Homo sapien
tcaaagtgagttcccggacacactt

SEQ ID NO: 3319902 - DNA, 25 bp, Homo sapien
caaagtgagttcccggacacacttc

SEQ ID NO: 3319903 - DNA, 25 bp, Homo sapien
ccatctttctcgtgttgctctttta

SEQ ID NO: 3319904 - DNA, 25 bp, Homo sapien
catctttctcgtgttgctcttttac

SEQ ID NO: 3319905 - DNA, 25 bp, Homo sapien
tctttctcgtgttgctcttttactt

SEQ ID NO: 3319906 - DNA, 25 bp, Homo sapien
ctttctcgtgttgctcttttacttt

SEQ ID NO: 3319907 - DNA, 25 bp, Homo sapien
cactaagggcgctctgttctggagc

SEQ ID NO: 3319908 - DNA, 25 bp, Homo sapien
ttcactgtggcactagacagggcac

SEQ ID NO: 3319909 - DNA, 25 bp, Homo sapien
gaccttggttgtatgtctgctctcc

SEQ ID NO: 3319910 - DNA, 25 bp, Homo sapien
cctttgcctttgtaacaagcctggc

SEQ ID NO: 3319911 - DNA, 25 bp, Homo sapien
ctgtgtttcgcagaatgctctgcag

SEQ ID NO: 3319912 - DNA, 25 bp, Homo sapien
tgtgtttcgcagaatgctctgcaga

SEQ ID NO: 3319913 - DNA, 25 bp, Homo sapien
tcacctggaaactgcttcaaacctt

SEQ ID NO: 3319914 - DNA, 25 bp, Homo sapien
aactgcttcaaaccttctatcttgg

SEQ ID NO: 3319915 - DNA, 25 bp, Homo sapien
ctggaaactgcttcaaaccttctat

SEQ ID NO: 3319916 - DNA, 25 bp, Homo sapien
ggaaactgcttcaaaccttctatct

SEQ ID NO: 3319917 - DNA, 25 bp, Homo sapien
cacgtgcttcccattgcaatgggtt

SEQ ID NO: 3319918 - DNA, 25 bp, Homo sapien
gtgcacgtgcttcccattgcaatgg

SEQ ID NO: 3319919 - DNA, 25 bp, Homo sapien
aaatcttgtgcacgtgcttcccatt

SEQ ID NO: 3319920 - DNA, 25 bp, Homo sapien
cagaaaataatgacccctttctctt

SEQ ID NO: 3319921 - DNA, 25 bp, Homo sapien
cttggctgtttcaactctgcgccac

SEQ ID NO: 3319922 - DNA, 25 bp, Homo sapien
tctgcgccacgggtttctgtgccta

SEQ ID NO: 3319923 - DNA, 25 bp, Homo sapien
gccacgggtttctgtgcctaaattg

SEQ ID NO: 3319924 - DNA, 25 bp, Homo sapien
taaattgttcatctccatatatcca

SEQ ID NO: 3319925 - DNA, 25 bp, Homo sapien
ccacaggtccttagttccctctgtg

SEQ ID NO: 3319926 - DNA, 25 bp, Homo sapien
ggacagaatcattgccacaggtcct

SEQ ID NO: 3319927 - DNA, 25 bp, Homo sapien
ttaaccaaagcaagttctagcggca

SEQ ID NO: 3319928 - DNA, 25 bp, Homo sapien
ccaaagcaagttctagcggcagaga

SEQ ID NO: 3319929 - DNA, 25 bp, Homo sapien
catacacacgccagtaagatcttgc

SEQ ID NO: 3319930 - DNA, 25 bp, Homo sapien
atacacacgccagtaagatcttgcc

SEQ ID NO: 3319931 - DNA, 25 bp, Homo sapien
gcactcatacacacgccagtaagat

SEQ ID NO: 3319932 - DNA, 25 bp, Homo sapien
ctcatacacacgccagtaagatctt

SEQ ID NO: 3319933 - DNA, 25 bp, Homo sapien
tgttctggttcctcaagtttacggc

SEQ ID NO: 3319934 - DNA, 25 bp, Homo sapien
agtttacggcccctgagccagtcaa

SEQ ID NO: 3319935 - DNA, 25 bp, Homo sapien
ctgagccagtcaagcctcatgaagg

SEQ ID NO: 3319936 - DNA, 25 bp, Homo sapien
cagtcaagcctcatgaaggcaaagg

SEQ ID NO: 3319937 - DNA, 25 bp, Homo sapien
aacaggtagtgtgtccctcagaggc

SEQ ID NO: 3319938 - DNA, 25 bp, Homo sapien
catgggagtattcttgattgcatat

SEQ ID NO: 3319939 - DNA, 25 bp, Homo sapien
cagaaaagctaggtatagttgttat

SEQ ID NO: 3319940 - DNA, 25 bp, Homo sapien
tatatcatgggagtattcttgattg

SEQ ID NO: 3319941 - DNA, 25 bp, Homo sapien
aatgtaagccaatacaacatactcc

SEQ ID NO: 3319942 - DNA, 25 bp, Homo sapien
atgtaagccaatacaacatactcct

SEQ ID NO: 3319943 - DNA, 25 bp, Homo sapien
tgtaagccaatacaacatactcctg

SEQ ID NO: 3319944 - DNA, 25 bp, Homo sapien
aaatgtaagccaatacaacatactc

SEQ ID NO: 3319945 - DNA, 25 bp, Homo sapien
gaagtcgcagaagcagaattcacag

SEQ ID NO: 3319946 - DNA, 25 bp, Homo sapien
cacagttccaaaaagtacaggccat

SEQ ID NO: 3319947 - DNA, 25 bp, Homo sapien
gaaatctgacagtactgctaggcct

SEQ ID NO: 3319948 - DNA, 25 bp, Homo sapien
caaccagtctgtattgctgacaaga

SEQ ID NO: 3319949 - DNA, 25 bp, Homo sapien
gacaacccctgatgaaataacatct

SEQ ID NO: 3319950 - DNA, 25 bp, Homo sapien
attctttgatgtcttcgcatccaat

SEQ ID NO: 3319951 - DNA, 25 bp, Homo sapien
ttcgcatccaattattgtgactgtg

SEQ ID NO: 3319952 - DNA, 25 bp, Homo sapien
caacccctgatgaaataacatctgt

SEQ ID NO: 3319953 - DNA, 25 bp, Homo sapien
tggctgattccgtttctggtgaagc

SEQ ID NO: 3319954 - DNA, 25 bp, Homo sapien
ggctgattccgtttctggtgaagcc

SEQ ID NO: 3319955 - DNA, 25 bp, Homo sapien
gtcaagttcattctagctcagtttc

SEQ ID NO: 3319956 - DNA, 25 bp, Homo sapien
tctaagatggctctctcacaaggct

SEQ ID NO: 3319957 - DNA, 25 bp, Homo sapien
cagctggggctacaatcctctgaaa

SEQ ID NO: 3319958 - DNA, 25 bp, Homo sapien
tctcacaaggctgtcaagttcattc

SEQ ID NO: 3319959 - DNA, 25 bp, Homo sapien
ggactgcatgagtatcttcatgaca

SEQ ID NO: 3319960 - DNA, 25 bp, Homo sapien
gatatgacggttgtcttctcccaga

SEQ ID NO: 3319961 - DNA, 25 bp, Homo sapien
cttcatgacatgatatgacggttgt

SEQ ID NO: 3319962 - DNA, 25 bp, Homo sapien
cataggactgcatgagtatcttcat

SEQ ID NO: 3319963 - DNA, 25 bp, Homo sapien
tcttcatcatgaaaaggactgcttc

SEQ ID NO: 3319964 - DNA, 25 bp, Homo sapien
tgaaaaggactgcttctcttttcaa

SEQ ID NO: 3319965 - DNA, 25 bp, Homo sapien
tcatcatgaaaaggactgcttctct

SEQ ID NO: 3319966 - DNA, 25 bp, Homo sapien
tcatgaaaaggactgcttctctttt

SEQ ID NO: 3319967 - DNA, 25 bp, Homo sapien
tcccctggcgcatggcggttgacaa

SEQ ID NO: 3319968 - DNA, 25 bp, Homo sapien
tttagacggccaatgaagtcctagg

SEQ ID NO: 3319969 - DNA, 25 bp, Homo sapien
tgcacctcgggtcgttctaagggat

SEQ ID NO: 3319970 - DNA, 25 bp, Homo sapien
agaacgtctccttcgatgtcacgga

SEQ ID NO: 3319971 - DNA, 25 bp, Homo sapien
ctggagaaactgacgtcaggagtgt

SEQ ID NO: 3319972 - DNA, 25 bp, Homo sapien
tggagaaactgacgtcaggagtgtc

SEQ ID NO: 3319973 - DNA, 25 bp, Homo sapien
gagaaggccctgcattcgatccggg

SEQ ID NO: 3319974 - DNA, 25 bp, Homo sapien
caccctctgaagagacgccgagaag

SEQ ID NO: 3319975 - DNA, 25 bp, Homo sapien
aagttctattgggtgcagcaagccg

SEQ ID NO: 3319976 - DNA, 25 bp, Homo sapien
tcgtgggcaaccaaatgcaggcacc

SEQ ID NO: 3319977 - DNA, 25 bp, Homo sapien
aagcagtttcgagggctgttgacac

SEQ ID NO: 3319978 - DNA, 25 bp, Homo sapien
ctgccactggtatgggtcccaagtc

SEQ ID NO: 3319979 - DNA, 25 bp, Homo sapien
caagtcacattcaataagctgccca

SEQ ID NO: 3319980 - DNA, 25 bp, Homo sapien
ggaaacgcgcccaagaattgggctg

SEQ ID NO: 3319981 - DNA, 25 bp, Homo sapien
tgcaaactctcagcggaggcagaga

SEQ ID NO: 3319982 - DNA, 25 bp, Homo sapien
cgacgaggataaaagttcctgccca

SEQ ID NO: 3319983 - DNA, 25 bp, Homo sapien
tctcatctttccagagcgacgagga

SEQ ID NO: 3319984 - DNA, 25 bp, Homo sapien
tggtggttctaggtctcatctttcc

SEQ ID NO: 3319985 - DNA, 25 bp, Homo sapien
gaggaagcattggcagaggcagtct

SEQ ID NO: 3319986 - DNA, 25 bp, Homo sapien
gaagcattggcagaggcagtctccg

SEQ ID NO: 3319987 - DNA, 25 bp, Homo sapien
ggaagcattggcagaggcagtctcc

SEQ ID NO: 3319988 - DNA, 25 bp, Homo sapien
agcattggcagaggcagtctccggg

SEQ ID NO: 3319989 - DNA, 25 bp, Homo sapien
tggcgaacctctgagcgctcaagga

SEQ ID NO: 3319990 - DNA, 25 bp, Homo sapien
cgagctcgccatttttgaacccaag

SEQ ID NO: 3319991 - DNA, 25 bp, Homo sapien
aaaaggtgcctgctagtaacaggtg

SEQ ID NO: 3319992 - DNA, 25 bp, Homo sapien
cagaaatcattaagagacctagaga

SEQ ID NO: 3319993 - DNA, 25 bp, Homo sapien
taagtgttgacatgcagcaaaaatc

SEQ ID NO: 3319994 - DNA, 25 bp, Homo sapien
atgcagcaaaaatcggttgagtgga

SEQ ID NO: 3319995 - DNA, 25 bp, Homo sapien
gagtggaaccgaggtggtggttgca

SEQ ID NO: 3319996 - DNA, 25 bp, Homo sapien
caaaaatcggttgagtggaaccgag

SEQ ID NO: 3319997 - DNA, 25 bp, Homo sapien
cgaggggactgactgcaccggctct

SEQ ID NO: 3319998 - DNA, 25 bp, Homo sapien
ggactgactgcaccggctctgggag

SEQ ID NO: 3319999 - DNA, 25 bp, Homo sapien
ccggctctgggagctaggtttctct

SEQ ID NO: 3320000 - DNA, 25 bp, Homo sapien
ggctctgggagctaggtttctctcg

SEQ ID NO: 3320001 - DNA, 25 bp, Homo sapien
tggatgggaaaaggaggtgcggaaa

SEQ ID NO: 3320002 - DNA, 25 bp, Homo sapien
ggaggtgcggaaaggggcaggcggc

SEQ ID NO: 3320003 - DNA, 25 bp, Homo sapien
aaggaggtgcggaaaggggcaggcg

SEQ ID NO: 3320004 - DNA, 25 bp, Homo sapien
ctggatgggaaaaggaggtgcggaa

SEQ ID NO: 3320005 - DNA, 25 bp, Homo sapien
caggagacctaaatcctccgggcag

SEQ ID NO: 3320006 - DNA, 25 bp, Homo sapien
cctccgggcaggtctcgttagcgct

SEQ ID NO: 3320007 - DNA, 25 bp, Homo sapien
ctgcaggagacctaaatcctccggg

SEQ ID NO: 3320008 - DNA, 25 bp, Homo sapien
gcaggtctcgttagcgcttccagcc

SEQ ID NO: 3320009 - DNA, 25 bp, Homo sapien
gggccagggctgtaattcatcttga

SEQ ID NO: 3320010 - DNA, 25 bp, Homo sapien
gctgtaattcatcttgatttgcttc

SEQ ID NO: 3320011 - DNA, 25 bp, Homo sapien
gtcctgcagtttgcaaactataatc

SEQ ID NO: 3320012 - DNA, 25 bp, Homo sapien
tgatttgcttcattgtcctgcagtt

SEQ ID NO: 3320013 - DNA, 25 bp, Homo sapien
catccggcaaggtcctaggatcccg

SEQ ID NO: 3320014 - DNA, 25 bp, Homo sapien
ccagtctttcaagggcggagttgcc

SEQ ID NO: 3320015 - DNA, 25 bp, Homo sapien
tatatacactcccttgctcgcaagc

SEQ ID NO: 3320016 - DNA, 25 bp, Homo sapien
tacacagggtaggttgtacatagca

SEQ ID NO: 3320017 - DNA, 25 bp, Homo sapien
cagcgacgggctactcaggttgttc

SEQ ID NO: 3320018 - DNA, 25 bp, Homo sapien
catgctggacgacatgctcatggac

SEQ ID NO: 3320019 - DNA, 25 bp, Homo sapien
gaatagcctgggtacatgtcgtcgt

SEQ ID NO: 3320020 - DNA, 25 bp, Homo sapien
tataaacatacggaggagtcggcgg

SEQ ID NO: 3320021 - DNA, 25 bp, Homo sapien
taaagaaggtgtaagaagcgcgagc

SEQ ID NO: 3320022 - DNA, 25 bp, Homo sapien
tgctcccggagatcacaaaactagg

SEQ ID NO: 3320023 - DNA, 25 bp, Homo sapien
tgaatggccgaaacaaccgtaaaga

SEQ ID NO: 3320024 - DNA, 25 bp, Homo sapien
gaactgtaatctcgcaaccaggccg

SEQ ID NO: 3320025 - DNA, 25 bp, Homo sapien
gatttcttcgcgtgtggacatgtcc

SEQ ID NO: 3320026 - DNA, 25 bp, Homo sapien
gttggtccacacagcgatttcttcg

SEQ ID NO: 3320027 - DNA, 25 bp, Homo sapien
gcttcttcttagacgggtcctcggc

SEQ ID NO: 3320028 - DNA, 25 bp, Homo sapien
gctggtaaagtgagtccgctgccgc

SEQ ID NO: 3320029 - DNA, 25 bp, Homo sapien
tgcctggcgccggaggagggtgcgc

SEQ ID NO: 3320030 - DNA, 25 bp, Homo sapien
acctgcaacgcggacgccaactgga

SEQ ID NO: 3320031 - DNA, 25 bp, Homo sapien
acgccaactggaccggcggcagaag

SEQ ID NO: 3320032 - DNA, 25 bp, Homo sapien
actttcccgtcagcatgcccacctg

SEQ ID NO: 3320033 - DNA, 25 bp, Homo sapien
tatatttatacacctctgcgcagac

SEQ ID NO: 3320034 - DNA, 25 bp, Homo sapien
gcaatttcctaacgagtggagctcc

SEQ ID NO: 3320035 - DNA, 25 bp, Homo sapien
gaaggtcctcgaatcaagatgctgg

SEQ ID NO: 3320036 - DNA, 25 bp, Homo sapien
tacatgtttatctcactgcagcggc

SEQ ID NO: 3320037 - DNA, 25 bp, Homo sapien
tgagcgggaatgtctgcagggcggc

SEQ ID NO: 3320038 - DNA, 25 bp, Homo sapien
agcgggtggcgcagagcagctgagc

SEQ ID NO: 3320039 - DNA, 25 bp, Homo sapien
cggtcgagggagaactaaagggatg

SEQ ID NO: 3320040 - DNA, 25 bp, Homo sapien
gatgcggggtagtcaaaattccggc

SEQ ID NO: 3320041 - DNA, 25 bp, Homo sapien
tgtcggagatggtgtgcacctccag

SEQ ID NO: 3320042 - DNA, 25 bp, Homo sapien
agtgaagcgggcctttcatgcagtt

SEQ ID NO: 3320043 - DNA, 25 bp, Homo sapien
gaaccgaagccatggctaacggctg

SEQ ID NO: 3320044 - DNA, 25 bp, Homo sapien
ggagacggccgacagcttggtcccc

SEQ ID NO: 3320045 - DNA, 25 bp, Homo sapien
gtcgcgctctaggcgcggagtttcc

SEQ ID NO: 3320046 - DNA, 25 bp, Homo sapien
agtccttggctactgccccgccgag

SEQ ID NO: 3320047 - DNA, 25 bp, Homo sapien
tagtccttggctactgccccgccga

SEQ ID NO: 3320048 - DNA, 25 bp, Homo sapien
cccgctccgggtcgcgctctaggcg

SEQ ID NO: 3320049 - DNA, 25 bp, Homo sapien
gtgatattagatcccctgcggcggc

SEQ ID NO: 3320050 - DNA, 25 bp, Homo sapien
tcagcgggcaaacgaagacatggga

SEQ ID NO: 3320051 - DNA, 25 bp, Homo sapien
caataaggaaagctaacgccgaccg

SEQ ID NO: 3320052 - DNA, 25 bp, Homo sapien
gaaggctcaagcgaaaaagtccgga

SEQ ID NO: 3320053 - DNA, 25 bp, Homo sapien
gcagcggcgattgggtgacattctt

SEQ ID NO: 3320054 - DNA, 25 bp, Homo sapien
agcagcggcgattgggtgacattct

SEQ ID NO: 3320055 - DNA, 25 bp, Homo sapien
gtgggagttaccacctcacagtggc

SEQ ID NO: 3320056 - DNA, 25 bp, Homo sapien
gatggcagtgggagttaccacctca

SEQ ID NO: 3320057 - DNA, 25 bp, Homo sapien
tcagatggcagtgggagttaccacc

SEQ ID NO: 3320058 - DNA, 25 bp, Homo sapien
cagtgggagttaccacctcacagtg

SEQ ID NO: 3320059 - DNA, 25 bp, Homo sapien
tcagtcaatattaggaagacgacaa

SEQ ID NO: 3320060 - DNA, 25 bp, Homo sapien
taggaagacgacaaagctttttaca

SEQ ID NO: 3320061 - DNA, 25 bp, Homo sapien
gacatcagattgttccattagtata

SEQ ID NO: 3320062 - DNA, 25 bp, Homo sapien
tttacataggattaagaagacatca

SEQ ID NO: 3320063 - DNA, 25 bp, Homo sapien
gagccgctctaacaactgctgcata

SEQ ID NO: 3320064 - DNA, 25 bp, Homo sapien
tgcatatattagcagcgggcggtga

SEQ ID NO: 3320065 - DNA, 25 bp, Homo sapien
tttgtgtaccgagtcagcagcgagg

SEQ ID NO: 3320066 - DNA, 25 bp, Homo sapien
gaataacagccgaaccagccttaag

SEQ ID NO: 3320067 - DNA, 25 bp, Homo sapien
gactactttcggacaactggtacaa

SEQ ID NO: 3320068 - DNA, 25 bp, Homo sapien
cagggatccgcagggactgactact

SEQ ID NO: 3320069 - DNA, 25 bp, Homo sapien
ctgtgaagaccacttttgcgggcag

SEQ ID NO: 3320070 - DNA, 25 bp, Homo sapien
cacttttgcgggcagggatccgcag

SEQ ID NO: 3320071 - DNA, 25 bp, Homo sapien
caccagcgacttgggtcgaacactt

SEQ ID NO: 3320072 - DNA, 25 bp, Homo sapien
aagaaggttgggaccgagctgctgc

SEQ ID NO: 3320073 - DNA, 25 bp, Homo sapien
gtgccacaacgggccatggagccca

SEQ ID NO: 3320074 - DNA, 25 bp, Homo sapien
gaccgagctgctgccgcgtgtgaag

SEQ ID NO: 3320075 - DNA, 25 bp, Homo sapien
aaagccaggcgtcaggtccaaaggg

SEQ ID NO: 3320076 - DNA, 25 bp, Homo sapien
tgcagtccgatttcagcacggaacc

SEQ ID NO: 3320077 - DNA, 25 bp, Homo sapien
acagaggagggtcagtccgtcctcc

SEQ ID NO: 3320078 - DNA, 25 bp, Homo sapien
gccctgaaactttttaagccagtga

SEQ ID NO: 3320079 - DNA, 25 bp, Homo sapien
tgtgactggcgcaagcagaactcct

SEQ ID NO: 3320080 - DNA, 25 bp, Homo sapien
caatgcgggcctgaaagtaatggtt

SEQ ID NO: 3320081 - DNA, 25 bp, Homo sapien
tagttatcaaaagcgaacgaccagg

SEQ ID NO: 3320082 - DNA, 25 bp, Homo sapien
tcacgtgcactaaaacaatgcgggc

SEQ ID NO: 3320083 - DNA, 25 bp, Homo sapien
attctccccagaagtcatcgctgct

SEQ ID NO: 3320084 - DNA, 25 bp, Homo sapien
cccagaagtcatcgctgctcttgat

SEQ ID NO: 3320085 - DNA, 25 bp, Homo sapien
gtcatcgctgctcttgatttttaac

SEQ ID NO: 3320086 - DNA, 25 bp, Homo sapien
tgagcccgcgcaaagcattctcccc

SEQ ID NO: 3320087 - DNA, 25 bp, Homo sapien
gaaatcacgcgacgttatctctgca

SEQ ID NO: 3320088 - DNA, 25 bp, Homo sapien
ctaccgattatcaaacagaagaaga

SEQ ID NO: 3320089 - DNA, 25 bp, Homo sapien
catatcccaaacatactacggtcta

SEQ ID NO: 3320090 - DNA, 25 bp, Homo sapien
tgagcgtttaactggcccagcaggg

SEQ ID NO: 3320091 - DNA, 25 bp, Homo sapien
ttgcctcccgcgatgaaccgcgcac

SEQ ID NO: 3320092 - DNA, 25 bp, Homo sapien
caagtttcccttgcttgcctcccgc

SEQ ID NO: 3320093 - DNA, 25 bp, Homo sapien
gtttcccttgcttgcctcccgcgat

SEQ ID NO: 3320094 - DNA, 25 bp, Homo sapien
ccttgcttgcctcccgcgatgaacc

SEQ ID NO: 3320095 - DNA, 25 bp, Homo sapien
ccacaagtctgggtggggcgtggct

SEQ ID NO: 3320096 - DNA, 25 bp, Homo sapien
tgttggaccacttttccacgccagc

SEQ ID NO: 3320097 - DNA, 25 bp, Homo sapien
cgcgcagcgggatataacgagcgac

SEQ ID NO: 3320098 - DNA, 25 bp, Homo sapien
cgacagaggtcgctgttggaccact

SEQ ID NO: 3320099 - DNA, 25 bp, Homo sapien
gatataacgagcgacagaggtcgct

SEQ ID NO: 3320100 - DNA, 25 bp, Homo sapien
ccaggatgctgccgcgggaagaact

SEQ ID NO: 3320101 - DNA, 25 bp, Homo sapien
tgaactcgacctttttgatttcgga

SEQ ID NO: 3320102 - DNA, 25 bp, Homo sapien
tctcaggagagtccgtgaactcgac

SEQ ID NO: 3320103 - DNA, 25 bp, Homo sapien
ggctgcctcttttcggctctcagga

SEQ ID NO: 3320104 - DNA, 25 bp, Homo sapien
aagagacattcaacggccgccggct

SEQ ID NO: 3320105 - DNA, 25 bp, Homo sapien
agagacattcaacggccgccggctg

SEQ ID NO: 3320106 - DNA, 25 bp, Homo sapien
gagaagagacattcaacggccgccg

SEQ ID NO: 3320107 - DNA, 25 bp, Homo sapien
ttggagaagagacattcaacggccg

SEQ ID NO: 3320108 - DNA, 25 bp, Homo sapien
gggcttcggtacacagcgcgccgct

SEQ ID NO: 3320109 - DNA, 25 bp, Homo sapien
ggaaagagctgacggcatccccgtc

SEQ ID NO: 3320110 - DNA, 25 bp, Homo sapien
gatggcgtactctttctgcgcctcc

SEQ ID NO: 3320111 - DNA, 25 bp, Homo sapien
gagcaaagacccagttagaggaaag

SEQ ID NO: 3320112 - DNA, 25 bp, Homo sapien
ccagtttgcggcagttggtctccat

SEQ ID NO: 3320113 - DNA, 25 bp, Homo sapien
accagtttgcggcagttggtctcca

SEQ ID NO: 3320114 - DNA, 25 bp, Homo sapien
cacacgccgacaccagtttgcggca

SEQ ID NO: 3320115 - DNA, 25 bp, Homo sapien
ctaattgcacacacgccgacaccag

SEQ ID NO: 3320116 - DNA, 25 bp, Homo sapien
cgttgtcgggttggcggaggcacag

SEQ ID NO: 3320117 - DNA, 25 bp, Homo sapien
acgaccggagggcccacttcgcgcg

SEQ ID NO: 3320118 - DNA, 25 bp, Homo sapien
gagcaagcgttgtcgggttggcgga

SEQ ID NO: 3320119 - DNA, 25 bp, Homo sapien
gtgggagcaagcgttgtcgggttgg

SEQ ID NO: 3320120 - DNA, 25 bp, Homo sapien
gcgtctcggcctctcctgaagggag

SEQ ID NO: 3320121 - DNA, 25 bp, Homo sapien
cgtctcggcctctcctgaagggagc

SEQ ID NO: 3320122 - DNA, 25 bp, Homo sapien
gtctcggcctctcctgaagggagct

SEQ ID NO: 3320123 - DNA, 25 bp, Homo sapien
ctgtggcgtggggatccagggtggg

SEQ ID NO: 3320124 - DNA, 25 bp, Homo sapien
tggggatccagggtggggacggcca

SEQ ID NO: 3320125 - DNA, 25 bp, Homo sapien
gggctgcccggcgctgtggcgtggg

SEQ ID NO: 3320126 - DNA, 25 bp, Homo sapien
aggggctgcccggcgctgtggcgtg

SEQ ID NO: 3320127 - DNA, 25 bp, Homo sapien
ggcggggactctgccgattcgatcc

SEQ ID NO: 3320128 - DNA, 25 bp, Homo sapien
cagtttggcggctccagatttagtg

SEQ ID NO: 3320129 - DNA, 25 bp, Homo sapien
actctgccgattcgatccttgtggg

SEQ ID NO: 3320130 - DNA, 25 bp, Homo sapien
cgctagcgagaacgcgggcggggac

SEQ ID NO: 3320131 - DNA, 25 bp, Homo sapien
ctcgttttaaatgccagccacggtc

SEQ ID NO: 3320132 - DNA, 25 bp, Homo sapien
gacttcagcaccctgtagattgtta

SEQ ID NO: 3320133 - DNA, 25 bp, Homo sapien
gttttaaatgccagccacggtctgg

SEQ ID NO: 3320134 - DNA, 25 bp, Homo sapien
ctggcttccctctcgacttcagcac

SEQ ID NO: 3320135 - DNA, 25 bp, Homo sapien
tctccgaagtggaacaaatttccag

SEQ ID NO: 3320136 - DNA, 25 bp, Homo sapien
aaatttccagactcgcattatctca

SEQ ID NO: 3320137 - DNA, 25 bp, Homo sapien
tcgcattatctcacatccctgcggg

SEQ ID NO: 3320138 - DNA, 25 bp, Homo sapien
aagccacaaatcacctacggtgaag

SEQ ID NO: 3320139 - DNA, 25 bp, Homo sapien
cgagcctccggctgcacggcaagcg

SEQ ID NO: 3320140 - DNA, 25 bp, Homo sapien
ggctgcacggcaagcgcccgaaagc

SEQ ID NO: 3320141 - DNA, 25 bp, Homo sapien
gggcgatttccagcgagccgagcct

SEQ ID NO: 3320142 - DNA, 25 bp, Homo sapien
ctgtctccgcgtcccactgcttccc

SEQ ID NO: 3320143 - DNA, 25 bp, Homo sapien
actggggcctccgaaatctagccgc

SEQ ID NO: 3320144 - DNA, 25 bp, Homo sapien
caagttccgaaggagtccacgggtg

SEQ ID NO: 3320145 - DNA, 25 bp, Homo sapien
ttccgaaggagtccacgggtgcact

SEQ ID NO: 3320146 - DNA, 25 bp, Homo sapien
gggtgccaagttccgaaggagtcca

SEQ ID NO: 3320147 - DNA, 25 bp, Homo sapien
cccggcagccctaataaatcaaagg

SEQ ID NO: 3320148 - DNA, 25 bp, Homo sapien
cttaggagccaaccgaggagcagga

SEQ ID NO: 3320149 - DNA, 25 bp, Homo sapien
cccactgtggaaaggaggaccagaa

SEQ ID NO: 3320150 - DNA, 25 bp, Homo sapien
gacgtgacgtcagcagagattccac

SEQ ID NO: 3320151 - DNA, 25 bp, Homo sapien
gagcaaatcaggacgggctgggagg

SEQ ID NO: 3320152 - DNA, 25 bp, Homo sapien
aagtggcccaagagacggaacaaag

SEQ ID NO: 3320153 - DNA, 25 bp, Homo sapien
gagcgtgcgtgtgtgaccttctttc

SEQ ID NO: 3320154 - DNA, 25 bp, Homo sapien
cggaacaaaggacaatgttcatggg

SEQ ID NO: 3320155 - DNA, 25 bp, Homo sapien
ctgcagagttgaggaaagaggtcac

SEQ ID NO: 3320156 - DNA, 25 bp, Homo sapien
gagttgaggaaagaggtcacagcaa

SEQ ID NO: 3320157 - DNA, 25 bp, Homo sapien
ttgaggaaagaggtcacagcaaaga

SEQ ID NO: 3320158 - DNA, 25 bp, Homo sapien
tgcagagttgaggaaagaggtcaca

SEQ ID NO: 3320159 - DNA, 25 bp, Homo sapien
gagcgaacgagctaggcttgtcagc

SEQ ID NO: 3320160 - DNA, 25 bp, Homo sapien
ttagctgggacaccgcgcccgaggt

SEQ ID NO: 3320161 - DNA, 25 bp, Homo sapien
gaaagtgagagaccggtagagggcg

SEQ ID NO: 3320162 - DNA, 25 bp, Homo sapien
gaaatctagaagaatggagtgagct

SEQ ID NO: 3320163 - DNA, 25 bp, Homo sapien
tgagagtgtcggcgcacaggtgggc

SEQ ID NO: 3320164 - DNA, 25 bp, Homo sapien
catgctgagagtgtcggcgcacagg

SEQ ID NO: 3320165 - DNA, 25 bp, Homo sapien
tgctgagagtgtcggcgcacaggtg

SEQ ID NO: 3320166 - DNA, 25 bp, Homo sapien
ggcatgctgagagtgtcggcgcaca

SEQ ID NO: 3320167 - DNA, 25 bp, Homo sapien
tacattcaacaagttcaccctgggt

SEQ ID NO: 3320168 - DNA, 25 bp, Homo sapien
cccagtgttcacgaagggtttgcac

SEQ ID NO: 3320169 - DNA, 25 bp, Homo sapien
tggacaaggctcagacgctcataga

SEQ ID NO: 3320170 - DNA, 25 bp, Homo sapien
aatgacgaggttaaggttcctggcg

SEQ ID NO: 3320171 - DNA, 25 bp, Homo sapien
ttctgtctggagtctcgcccgccag

SEQ ID NO: 3320172 - DNA, 25 bp, Homo sapien
cagaggctggttaaccccagtcccg

SEQ ID NO: 3320173 - DNA, 25 bp, Homo sapien
gacactgcgctgagcttttgggtcc

SEQ ID NO: 3320174 - DNA, 25 bp, Homo sapien
gcttttgggtcctcgccttgcccag

SEQ ID NO: 3320175 - DNA, 25 bp, Homo sapien
aagtcgccaggccaagcttgctttt

SEQ ID NO: 3320176 - DNA, 25 bp, Homo sapien
tctaacccaggagcgttaaactctg

SEQ ID NO: 3320177 - DNA, 25 bp, Homo sapien
ggcgcgctatggcagtgagctttcc

SEQ ID NO: 3320178 - DNA, 25 bp, Homo sapien
gcagtgagctttccgcgcaaacgga

SEQ ID NO: 3320179 - DNA, 25 bp, Homo sapien
ttaagagaggcggtgcaaaggcacg

SEQ ID NO: 3320180 - DNA, 25 bp, Homo sapien
cttaagagaggcggtgcaaaggcac

SEQ ID NO: 3320181 - DNA, 25 bp, Homo sapien
tcttaagagaggcggtgcaaaggca

SEQ ID NO: 3320182 - DNA, 25 bp, Homo sapien
cttcttaagagaggcggtgcaaagg

SEQ ID NO: 3320183 - DNA, 25 bp, Homo sapien
ctgcagcagttttctattcgaacct

SEQ ID NO: 3320184 - DNA, 25 bp, Homo sapien
gcagcagttttctattcgaaccttt

SEQ ID NO: 3320185 - DNA, 25 bp, Homo sapien
ctttccgtggtagggcctgtatatt

SEQ ID NO: 3320186 - DNA, 25 bp, Homo sapien
cgcctttccgtggtagggcctgtat

SEQ ID NO: 3320187 - DNA, 25 bp, Homo sapien
tacacagactgccttcaaacccagg

SEQ ID NO: 3320188 - DNA, 25 bp, Homo sapien
gcctgcctgattccaacttggatac

SEQ ID NO: 3320189 - DNA, 25 bp, Homo sapien
tcgtctcttgatctgaaatgcctgc

SEQ ID NO: 3320190 - DNA, 25 bp, Homo sapien
caaacccagggtatctaacagatgt

SEQ ID NO: 3320191 - DNA, 25 bp, Homo sapien
tttttgcactcttttagggtttgca

SEQ ID NO: 3320192 - DNA, 25 bp, Homo sapien
tataatattgttcttctatggtctt

SEQ ID NO: 3320193 - DNA, 25 bp, Homo sapien
caagtccttatcaggtctgacatca

SEQ ID NO: 3320194 - DNA, 25 bp, Homo sapien
ttgttcttctatggtctttttgcac

SEQ ID NO: 3320195 - DNA, 25 bp, Homo sapien
tctagcaagagcttgtagtaactgg

SEQ ID NO: 3320196 - DNA, 25 bp, Homo sapien
gatatcctctttgatgggctttcag

SEQ ID NO: 3320197 - DNA, 25 bp, Homo sapien
taactggaacaactctctgggaaga

SEQ ID NO: 3320198 - DNA, 25 bp, Homo sapien
ctttcttggaatttctagcaagagc

SEQ ID NO: 3320199 - DNA, 25 bp, Homo sapien
attttctatctctacgctgtggatc

SEQ ID NO: 3320200 - DNA, 25 bp, Homo sapien
agactatctcgtccagaatgctgtg

SEQ ID NO: 3320201 - DNA, 25 bp, Homo sapien
tctctacgctgtggatctcattgtt

SEQ ID NO: 3320202 - DNA, 25 bp, Homo sapien
aattcaagactatctcgtccagaat

SEQ ID NO: 3320203 - DNA, 25 bp, Homo sapien
cttttgtcatgacaggaccacttcc

SEQ ID NO: 3320204 - DNA, 25 bp, Homo sapien
caggaccacttccacttattaggac

SEQ ID NO: 3320205 - DNA, 25 bp, Homo sapien
aggaccacttccacttattaggact

SEQ ID NO: 3320206 - DNA, 25 bp, Homo sapien
acttattaggacttttgatatttgt

SEQ ID NO: 3320207 - DNA, 25 bp, Homo sapien
ctcttgaggttataacaaccgcttt

SEQ ID NO: 3320208 - DNA, 25 bp, Homo sapien
caaccgcttttttgtttagctgtgt

SEQ ID NO: 3320209 - DNA, 25 bp, Homo sapien
gccactcttgaggttataacaaccg

SEQ ID NO: 3320210 - DNA, 25 bp, Homo sapien
acaaccgcttttttgtttagctgtg

SEQ ID NO: 3320211 - DNA, 25 bp, Homo sapien
tttttcctttatatttgagttcaca

SEQ ID NO: 3320212 - DNA, 25 bp, Homo sapien
gatttttcctttatatttgagttca

SEQ ID NO: 3320213 - DNA, 25 bp, Homo sapien
caggatttttcctttatatttgagt

SEQ ID NO: 3320214 - DNA, 25 bp, Homo sapien
ttttcctttatatttgagttcacag

SEQ ID NO: 3320215 - DNA, 25 bp, Homo sapien
catcattgatcccttacatgggctc

SEQ ID NO: 3320216 - DNA, 25 bp, Homo sapien
taataacaattggactgacctgtgg

SEQ ID NO: 3320217 - DNA, 25 bp, Homo sapien
ctattggtttatcacacaagcaggc

SEQ ID NO: 3320218 - DNA, 25 bp, Homo sapien
caggcaatagtgaacgtggcactct

SEQ ID NO: 3320219 - DNA, 25 bp, Homo sapien
gcttcaggaacagatgaacgttttt

SEQ ID NO: 3320220 - DNA, 25 bp, Homo sapien
atggagactgagaatagtgaccttt

SEQ ID NO: 3320221 - DNA, 25 bp, Homo sapien
agagcttcaggaacagatgaacgtt

SEQ ID NO: 3320222 - DNA, 25 bp, Homo sapien
gaacgtttttattgcgatggagact

SEQ ID NO: 3320223 - DNA, 25 bp, Homo sapien
gtctgtgagcccttctcgccaagcc

SEQ ID NO: 3320224 - DNA, 25 bp, Homo sapien
gatgctcacactccttcagtccttg

SEQ ID NO: 3320225 - DNA, 25 bp, Homo sapien
ggaaggacagaccattccctgtttg

SEQ ID NO: 3320226 - DNA, 25 bp, Homo sapien
gtccttggcgccctctcactactgc

SEQ ID NO: 3320227 - DNA, 25 bp, Homo sapien
gtgacctgcttggctagtgacagcc

SEQ ID NO: 3320228 - DNA, 25 bp, Homo sapien
ggtgacctgcttggctagtgacagc

SEQ ID NO: 3320229 - DNA, 25 bp, Homo sapien
tgacctgcttggctagtgacagcca

SEQ ID NO: 3320230 - DNA, 25 bp, Homo sapien
tcttaagtcaatcagcaccaaaaga

SEQ ID NO: 3320231 - DNA, 25 bp, Homo sapien
gcctttaaggatacaccaacaattc

SEQ ID NO: 3320232 - DNA, 25 bp, Homo sapien
cctgaaagaagcctttaaggataca

SEQ ID NO: 3320233 - DNA, 25 bp, Homo sapien
tcacacttcttaagtcaatcagcac

SEQ ID NO: 3320234 - DNA, 25 bp, Homo sapien
tattggttgatatttggctgaatag

SEQ ID NO: 3320235 - DNA, 25 bp, Homo sapien
cttcagaatttgacggatgccaaac

SEQ ID NO: 3320236 - DNA, 25 bp, Homo sapien
gattttgaatctaggagtaacttca

SEQ ID NO: 3320237 - DNA, 25 bp, Homo sapien
tgatatttggctgaatagtaaatga

SEQ ID NO: 3320238 - DNA, 25 bp, Homo sapien
cttctacccaatccttgtcttcggt

SEQ ID NO: 3320239 - DNA, 25 bp, Homo sapien
tctttacagcatccccttctaccca

SEQ ID NO: 3320240 - DNA, 25 bp, Homo sapien
tggctgattgctggagctgttctcc

SEQ ID NO: 3320241 - DNA, 25 bp, Homo sapien
caatccttgtcttcggtttctgaac

SEQ ID NO: 3320242 - DNA, 25 bp, Homo sapien
ttcaaatataaaccgagatcctggg

SEQ ID NO: 3320243 - DNA, 25 bp, Homo sapien
cccctggcctggatttcacaggcaa

SEQ ID NO: 3320244 - DNA, 25 bp, Homo sapien
tgttgttggccagaaaactagagtc

SEQ ID NO: 3320245 - DNA, 25 bp, Homo sapien
cctgggcttcattactgttgttggc

SEQ ID NO: 3320246 - DNA, 25 bp, Homo sapien
atcaccaccagatacttccagctgg

SEQ ID NO: 3320247 - DNA, 25 bp, Homo sapien
atcatcaccaccagatacttccagc

SEQ ID NO: 3320248 - DNA, 25 bp, Homo sapien
caccaccagatacttccagctgggg

SEQ ID NO: 3320249 - DNA, 25 bp, Homo sapien
tcatcatcaccaccagatacttcca

SEQ ID NO: 3320250 - DNA, 25 bp, Homo sapien
tctgttacaagatctagtgtttcct

SEQ ID NO: 3320251 - DNA, 25 bp, Homo sapien
ctcagagaagtcatgcttctgaagc

SEQ ID NO: 3320252 - DNA, 25 bp, Homo sapien
tgtggactggctatctaaaagattt

SEQ ID NO: 3320253 - DNA, 25 bp, Homo sapien
ctttccctgtggactggctatctaa

SEQ ID NO: 3320254 - DNA, 25 bp, Homo sapien
tatgaaacttaataattggtactca

SEQ ID NO: 3320255 - DNA, 25 bp, Homo sapien
aagtagggtccaaaatgttcttctg

SEQ ID NO: 3320256 - DNA, 25 bp, Homo sapien
gctggttctttggtgtggactgtat

SEQ ID NO: 3320257 - DNA, 25 bp, Homo sapien
tttcctaactactttcagctggttc

SEQ ID NO: 3320258 - DNA, 25 bp, Homo sapien
cattgcagtcataccattggaccat

SEQ ID NO: 3320259 - DNA, 25 bp, Homo sapien
gagcacttcattgcagtcataccat

SEQ ID NO: 3320260 - DNA, 25 bp, Homo sapien
ttcattgcagtcataccattggacc

SEQ ID NO: 3320261 - DNA, 25 bp, Homo sapien
acttcattgcagtcataccattgga

SEQ ID NO: 3320262 - DNA, 25 bp, Homo sapien
ggagaaggatatcctttctcattag

SEQ ID NO: 3320263 - DNA, 25 bp, Homo sapien
ttagtcaccagaaatgtgcttcctc

SEQ ID NO: 3320264 - DNA, 25 bp, Homo sapien
attagtcaccagaaatgtgcttcct

SEQ ID NO: 3320265 - DNA, 25 bp, Homo sapien
atggtgggagaaggatatcctttct

SEQ ID NO: 3320266 - DNA, 25 bp, Homo sapien
aatatgtttcattattaggtgttgc

SEQ ID NO: 3320267 - DNA, 25 bp, Homo sapien
ctgcaaatatgtttcattattaggt

SEQ ID NO: 3320268 - DNA, 25 bp, Homo sapien
gcaaatatgtttcattattaggtgt

SEQ ID NO: 3320269 - DNA, 25 bp, Homo sapien
tatgtttcattattaggtgttgcca

SEQ ID NO: 3320270 - DNA, 25 bp, Homo sapien
gaggataaccttcagatgtcttctg

SEQ ID NO: 3320271 - DNA, 25 bp, Homo sapien
cttctgtggtgaaatgttgaagtta

SEQ ID NO: 3320272 - DNA, 25 bp, Homo sapien
gactaaagacatcctcggctgtgag

SEQ ID NO: 3320273 - DNA, 25 bp, Homo sapien
tacagaatttattagagtaaaggga

SEQ ID NO: 3320274 - DNA, 25 bp, Homo sapien
ccagactgtttgattgacagtagcg

SEQ ID NO: 3320275 - DNA, 25 bp, Homo sapien
gctttaagcctcttggtgacaagaa

SEQ ID NO: 3320276 - DNA, 25 bp, Homo sapien
aagtactcaggcctgttgacaaagc

SEQ ID NO: 3320277 - DNA, 25 bp, Homo sapien
gacagtagcgtttgtagtttcagct

SEQ ID NO: 3320278 - DNA, 25 bp, Homo sapien
gctgcttgctgttgtcattgccgga

SEQ ID NO: 3320279 - DNA, 25 bp, Homo sapien
ctgcttgctgttgtcattgccggac

SEQ ID NO: 3320280 - DNA, 25 bp, Homo sapien
gggcctgtgccaaatgcatttcgct

SEQ ID NO: 3320281 - DNA, 25 bp, Homo sapien
gacgctgtgggatactgctcagggc

SEQ ID NO: 3320282 - DNA, 25 bp, Homo sapien
gtttgccctaggcatttctttttga

SEQ ID NO: 3320283 - DNA, 25 bp, Homo sapien
tgcatttcgctgtttgccctaggca

SEQ ID NO: 3320284 - DNA, 25 bp, Homo sapien
tgtacagactgtgctgagatgcagt

SEQ ID NO: 3320285 - DNA, 25 bp, Homo sapien
tgaactccggcaattggaagatggg

SEQ ID NO: 3320286 - DNA, 25 bp, Homo sapien
ggcagtaatgagatctatggtgaac

SEQ ID NO: 3320287 - DNA, 25 bp, Homo sapien
ttcctgtacagactgtgctgagatg

SEQ ID NO: 3320288 - DNA, 25 bp, Homo sapien
tatttttactcaaagcaggccagaa

SEQ ID NO: 3320289 - DNA, 25 bp, Homo sapien
agtatttttactcaaagcaggccag

SEQ ID NO: 3320290 - DNA, 25 bp, Homo sapien
gtatttttactcaaagcaggccaga

SEQ ID NO: 3320291 - DNA, 25 bp, Homo sapien
atttttactcaaagcaggccagaaa

SEQ ID NO: 3320292 - DNA, 25 bp, Homo sapien
aggaaaacagcttttggagcttttg

SEQ ID NO: 3320293 - DNA, 25 bp, Homo sapien
tataaagtccaattcacagccaagg

SEQ ID NO: 3320294 - DNA, 25 bp, Homo sapien
ttataaagtccaattcacagccaag

SEQ ID NO: 3320295 - DNA, 25 bp, Homo sapien
ggagcttttgggtgtccataaacag

SEQ ID NO: 3320296 - DNA, 25 bp, Homo sapien
acttctatgagatgtccagctgatg

SEQ ID NO: 3320297 - DNA, 25 bp, Homo sapien
tctttccaggccctagacatttgct

SEQ ID NO: 3320298 - DNA, 25 bp, Homo sapien
gctgccttatctcttgtgactccca

SEQ ID NO: 3320299 - DNA, 25 bp, Homo sapien
catgctaataaagctgaggagctct

SEQ ID NO: 3320300 - DNA, 25 bp, Homo sapien
caatatctagggtaattccagggct

SEQ ID NO: 3320301 - DNA, 25 bp, Homo sapien
tccagggcttagtggctgtgatctt

SEQ ID NO: 3320302 - DNA, 25 bp, Homo sapien
caaagggtcttctgtaggatttcat

SEQ ID NO: 3320303 - DNA, 25 bp, Homo sapien
gtgatcttttgtcaactctccttgt

SEQ ID NO: 3320304 - DNA, 25 bp, Homo sapien
tatagatcattagtagtcattggcc

SEQ ID NO: 3320305 - DNA, 25 bp, Homo sapien
taacccaatgtatggccccagttct

SEQ ID NO: 3320306 - DNA, 25 bp, Homo sapien
gctagcaccctatttaatctgactg

SEQ ID NO: 3320307 - DNA, 25 bp, Homo sapien
tatttttggagcaaacccaagatcc

SEQ ID NO: 3320308 - DNA, 25 bp, Homo sapien
tgaaagtgagacatctgttttcctt

SEQ ID NO: 3320309 - DNA, 25 bp, Homo sapien
ggtttttgtaatgctttgcagttca

SEQ ID NO: 3320310 - DNA, 25 bp, Homo sapien
tgtaaattgttggaatccataactc

SEQ ID NO: 3320311 - DNA, 25 bp, Homo sapien
tttgtactaggatctaattcttgaa

SEQ ID NO: 3320312 - DNA, 25 bp, Homo sapien
taactttgattccacctggggcaaa

SEQ ID NO: 3320313 - DNA, 25 bp, Homo sapien
catcgctttcaggtaccctaatcag

SEQ ID NO: 3320314 - DNA, 25 bp, Homo sapien
tctccccatcgctttcaggtaccct

SEQ ID NO: 3320315 - DNA, 25 bp, Homo sapien
cgctttcaggtaccctaatcagacg

SEQ ID NO: 3320316 - DNA, 25 bp, Homo sapien
ctccccatcgctttcaggtacccta

SEQ ID NO: 3320317 - DNA, 25 bp, Homo sapien
gggttgatatctgacaatgatagct

SEQ ID NO: 3320318 - DNA, 25 bp, Homo sapien
tttatgcatgaaaaacgcacacata

SEQ ID NO: 3320319 - DNA, 25 bp, Homo sapien
cgcacacataatcagtttttcctaa

SEQ ID NO: 3320320 - DNA, 25 bp, Homo sapien
caaatggatggaggaataaaactgc

SEQ ID NO: 3320321 - DNA, 25 bp, Homo sapien
ggagcctgaatagttgattgtatga

SEQ ID NO: 3320322 - DNA, 25 bp, Homo sapien
gcttcagttgattgtggagcctgaa

SEQ ID NO: 3320323 - DNA, 25 bp, Homo sapien
cacttccaactggtgttactaaaga

SEQ ID NO: 3320324 - DNA, 25 bp, Homo sapien
taaagaaagcgtacagaaggtgggc

SEQ ID NO: 3320325 - DNA, 25 bp, Homo sapien
cacatttggctcttcaacatggcat

SEQ ID NO: 3320326 - DNA, 25 bp, Homo sapien
agacacatttggctcttcaacatgg

SEQ ID NO: 3320327 - DNA, 25 bp, Homo sapien
cttgtttggctagggcacagcttgg

SEQ ID NO: 3320328 - DNA, 25 bp, Homo sapien
attggcaccttgtttggctagggca

SEQ ID NO: 3320329 - DNA, 25 bp, Homo sapien
ttaggctcccatgtgcttattcata

SEQ ID NO: 3320330 - DNA, 25 bp, Homo sapien
cttattcatagctacggcaaacagc

SEQ ID NO: 3320331 - DNA, 25 bp, Homo sapien
atgtgcttattcatagctacggcaa

SEQ ID NO: 3320332 - DNA, 25 bp, Homo sapien
cccatgtgcttattcatagctacgg

SEQ ID NO: 3320333 - DNA, 25 bp, Homo sapien
cattcagcatcttgtcgacgcaggc

SEQ ID NO: 3320334 - DNA, 25 bp, Homo sapien
gcatcttgtcgacgcaggctacagt

SEQ ID NO: 3320335 - DNA, 25 bp, Homo sapien
cagcatcttgtcgacgcaggctaca

SEQ ID NO: 3320336 - DNA, 25 bp, Homo sapien
cttgtcgacgcaggctacagttcag

SEQ ID NO: 3320337 - DNA, 25 bp, Homo sapien
tcactcagcagtgatttctggcagt

SEQ ID NO: 3320338 - DNA, 25 bp, Homo sapien
aggtcttctccttactccaaaatat

SEQ ID NO: 3320339 - DNA, 25 bp, Homo sapien
cctggaactggcttcagcacacaga

SEQ ID NO: 3320340 - DNA, 25 bp, Homo sapien
cacttgtcctggaactggcttcagc

SEQ ID NO: 3320341 - DNA, 25 bp, Homo sapien
acttgtcctggaactggcttcagca

SEQ ID NO: 3320342 - DNA, 25 bp, Homo sapien
tgtcctggaactggcttcagcacac

SEQ ID NO: 3320343 - DNA, 25 bp, Homo sapien
attcatgtacacagtaggcaggctc

SEQ ID NO: 3320344 - DNA, 25 bp, Homo sapien
ggtactcaagtaggaatgattcaca

SEQ ID NO: 3320345 - DNA, 25 bp, Homo sapien
tgtaagaacctgtaaagatgatcaa

SEQ ID NO: 3320346 - DNA, 25 bp, Homo sapien
tctgtaagggttcttattgtaagaa

SEQ ID NO: 3320347 - DNA, 25 bp, Homo sapien
gtaagaacctgtaaagatgatcaat

SEQ ID NO: 3320348 - DNA, 25 bp, Homo sapien
ttctgtaagggttcttattgtaaga

SEQ ID NO: 3320349 - DNA, 25 bp, Homo sapien
gaatgctgagcctacatgagctacc

SEQ ID NO: 3320350 - DNA, 25 bp, Homo sapien
gccagcactggaaaagctttactag

SEQ ID NO: 3320351 - DNA, 25 bp, Homo sapien
agctaccagatcaagggccagcact

SEQ ID NO: 3320352 - DNA, 25 bp, Homo sapien
ctgccttgcactgccgaatgctgag

SEQ ID NO: 3320353 - DNA, 25 bp, Homo sapien
tggctggatcgccaaagtttttagt

SEQ ID NO: 3320354 - DNA, 25 bp, Homo sapien
caggggaactaacgggtcacaatct

SEQ ID NO: 3320355 - DNA, 25 bp, Homo sapien
gaaatatctctgttagcgcccctga

SEQ ID NO: 3320356 - DNA, 25 bp, Homo sapien
ctaacgggtcacaatctccgtggca

SEQ ID NO: 3320357 - DNA, 25 bp, Homo sapien
tgagcgcagtgacatccgccagttt

SEQ ID NO: 3320358 - DNA, 25 bp, Homo sapien
agcaactgagcgcagtgacatccgc

SEQ ID NO: 3320359 - DNA, 25 bp, Homo sapien
aactgagcgcagtgacatccgccag

SEQ ID NO: 3320360 - DNA, 25 bp, Homo sapien
agcgcagtgacatccgccagtttct

SEQ ID NO: 3320361 - DNA, 25 bp, Homo sapien
tggtaagggcagtatataaagataa

SEQ ID NO: 3320362 - DNA, 25 bp, Homo sapien
gtggtaagggcagtatataaagata

SEQ ID NO: 3320363 - DNA, 25 bp, Homo sapien
ttcacttcttgatcgatcaaagctt

SEQ ID NO: 3320364 - DNA, 25 bp, Homo sapien
tgcctgtttaatcccaggttcgtcc

SEQ ID NO: 3320365 - DNA, 25 bp, Homo sapien
cttgatcgatcaaagcttttatatt

SEQ ID NO: 3320366 - DNA, 25 bp, Homo sapien
aattcggttagaaggaatgccattc

SEQ ID NO: 3320367 - DNA, 25 bp, Homo sapien
aaggcataacaggagcatgcaggca

SEQ ID NO: 3320368 - DNA, 25 bp, Homo sapien
tgtaaaggcataacaggagcatgca

SEQ ID NO: 3320369 - DNA, 25 bp, Homo sapien
taatgtaaaggcataacaggagcat

SEQ ID NO: 3320370 - DNA, 25 bp, Homo sapien
tatttaatgtaaaggcataacagga

SEQ ID NO: 3320371 - DNA, 25 bp, Homo sapien
catgaaggaaaatcaccgccgcggt

SEQ ID NO: 3320372 - DNA, 25 bp, Homo sapien
ctgcaaaggcttctatccatcggtg

SEQ ID NO: 3320373 - DNA, 25 bp, Homo sapien
atccatgaaggaaaatcaccgccgc

SEQ ID NO: 3320374 - DNA, 25 bp, Homo sapien
tctatccatcggtgcccagtatctc

SEQ ID NO: 3320375 - DNA, 25 bp, Homo sapien
tctggccatcctgtgatgatagcat

SEQ ID NO: 3320376 - DNA, 25 bp, Homo sapien
atttgtataggtccgtcatctggcc

SEQ ID NO: 3320377 - DNA, 25 bp, Homo sapien
taaagtgaatttgtataggtccgtc

SEQ ID NO: 3320378 - DNA, 25 bp, Homo sapien
aaaggatttgatactataaagtgaa

SEQ ID NO: 3320379 - DNA, 25 bp, Homo sapien
tgaataatatactgtacaaagcagc

SEQ ID NO: 3320380 - DNA, 25 bp, Homo sapien
aatattaattgtgagcattcttgaa

SEQ ID NO: 3320381 - DNA, 25 bp, Homo sapien
ttaattgtgagcattcttgaataat

SEQ ID NO: 3320382 - DNA, 25 bp, Homo sapien
aataatatactgtacaaagcagcca

SEQ ID NO: 3320383 - DNA, 25 bp, Homo sapien
tggttcaggttgtctaggacaacaa

SEQ ID NO: 3320384 - DNA, 25 bp, Homo sapien
tcaggttgtctaggacaacaagaat

SEQ ID NO: 3320385 - DNA, 25 bp, Homo sapien
caggttgtctaggacaacaagaatg

SEQ ID NO: 3320386 - DNA, 25 bp, Homo sapien
gttcaggttgtctaggacaacaaga

SEQ ID NO: 3320387 - DNA, 25 bp, Homo sapien
tggcgacaaggtagcatttattact

SEQ ID NO: 3320388 - DNA, 25 bp, Homo sapien
cgaggcatactgatcaaatttagca

SEQ ID NO: 3320389 - DNA, 25 bp, Homo sapien
tatggtttgggactgtatggcgaca

SEQ ID NO: 3320390 - DNA, 25 bp, Homo sapien
aaatatctagctatgttgtcagcag

SEQ ID NO: 3320391 - DNA, 25 bp, Homo sapien
gttaaaatcatgaaagcattgagca

SEQ ID NO: 3320392 - DNA, 25 bp, Homo sapien
ttgagcaagtcttgtgtgtagatta

SEQ ID NO: 3320393 - DNA, 25 bp, Homo sapien
cattgagcaagtcttgtgtgtagat

SEQ ID NO: 3320394 - DNA, 25 bp, Homo sapien
gcattgagcaagtcttgtgtgtaga

SEQ ID NO: 3320395 - DNA, 25 bp, Homo sapien
tccatgaaatcactactgtcttcct

SEQ ID NO: 3320396 - DNA, 25 bp, Homo sapien
atgaaatcactactgtcttcctcta

SEQ ID NO: 3320397 - DNA, 25 bp, Homo sapien
gaaatcactactgtcttcctctaac

SEQ ID NO: 3320398 - DNA, 25 bp, Homo sapien
tcactactgtcttcctctaactctt

SEQ ID NO: 3320399 - DNA, 25 bp, Homo sapien
cattactgtcaggtccacgcagata

SEQ ID NO: 3320400 - DNA, 25 bp, Homo sapien
cacgcagatagctaagacactttat

SEQ ID NO: 3320401 - DNA, 25 bp, Homo sapien
cttctgacatgggattccagtgaga

SEQ ID NO: 3320402 - DNA, 25 bp, Homo sapien
gaagaagatggatattgatcggcac

SEQ ID NO: 3320403 - DNA, 25 bp, Homo sapien
catcgcaaatggaattctaaatcca

SEQ ID NO: 3320404 - DNA, 25 bp, Homo sapien
catggcttttggtcaaataaaccct

SEQ ID NO: 3320405 - DNA, 25 bp, Homo sapien
tcatgatgagctattgtcataacat

SEQ ID NO: 3320406 - DNA, 25 bp, Homo sapien
gaattctaaatccatgaagtcccca

SEQ ID NO: 3320407 - DNA, 25 bp, Homo sapien
cattagccaggtatcttagcaacaa

SEQ ID NO: 3320408 - DNA, 25 bp, Homo sapien
ttagcaacaagaccataccagattc

SEQ ID NO: 3320409 - DNA, 25 bp, Homo sapien
ggctcgtttccgtggcattagccag

SEQ ID NO: 3320410 - DNA, 25 bp, Homo sapien
cagattctagcagtgctctgtggtg

SEQ ID NO: 3320411 - DNA, 25 bp, Homo sapien
gccttgtctcgcatttcagattgac

SEQ ID NO: 3320412 - DNA, 25 bp, Homo sapien
cgttttagccgaggtactgccttgt

SEQ ID NO: 3320413 - DNA, 25 bp, Homo sapien
tcattaagatgtgcctcatagttca

SEQ ID NO: 3320414 - DNA, 25 bp, Homo sapien
aataatgttgctggcgttttagccg

SEQ ID NO: 3320415 - DNA, 25 bp, Homo sapien
tatgagacaaaatgccgtgtcaacc

SEQ ID NO: 3320416 - DNA, 25 bp, Homo sapien
taactgcttgctcacatagctgaat

SEQ ID NO: 3320417 - DNA, 25 bp, Homo sapien
atagagatgtcgaatttcctccaaa

SEQ ID NO: 3320418 - DNA, 25 bp, Homo sapien
tagctgaatatgtgtggaagaacca

SEQ ID NO: 3320419 - DNA, 25 bp, Homo sapien
attgtgcatcaaggtgaattgagtt

SEQ ID NO: 3320420 - DNA, 25 bp, Homo sapien
cattgtgcatcaaggtgaattgagt

SEQ ID NO: 3320421 - DNA, 25 bp, Homo sapien
caagaatcggattaccgaagcaccc

SEQ ID NO: 3320422 - DNA, 25 bp, Homo sapien
gcctacaccaagaatcggattaccg

SEQ ID NO: 3320423 - DNA, 25 bp, Homo sapien
ccgaagcacccattgatgatgtaac

SEQ ID NO: 3320424 - DNA, 25 bp, Homo sapien
tttcctgggcacagcctacaccaag

SEQ ID NO: 3320425 - DNA, 25 bp, Homo sapien
caagtgtcatcatgaatttgaatat

SEQ ID NO: 3320426 - DNA, 25 bp, Homo sapien
tccaagtgtcatcatgaatttgaat

SEQ ID NO: 3320427 - DNA, 25 bp, Homo sapien
ccaagtgtcatcatgaatttgaata

SEQ ID NO: 3320428 - DNA, 25 bp, Homo sapien
aacactctgtttttacaaggtagca

SEQ ID NO: 3320429 - DNA, 25 bp, Homo sapien
caaacactctgtttttacaaggtag

SEQ ID NO: 3320430 - DNA, 25 bp, Homo sapien
ccagactgttggaaattggcaaaat

SEQ ID NO: 3320431 - DNA, 25 bp, Homo sapien
agactgttggaaattggcaaaataa

SEQ ID NO: 3320432 - DNA, 25 bp, Homo sapien
tcgagggccttctgttactgtcggt

SEQ ID NO: 3320433 - DNA, 25 bp, Homo sapien
cttcatcacacatcagcttcgaggg

SEQ ID NO: 3320434 - DNA, 25 bp, Homo sapien
catcagcttcgagggccttctgtta

SEQ ID NO: 3320435 - DNA, 25 bp, Homo sapien
ggccttctgttactgtcggtccatc

SEQ ID NO: 3320436 - DNA, 25 bp, Homo sapien
gcagtagacaatagtggcattgatc

SEQ ID NO: 3320437 - DNA, 25 bp, Homo sapien
tctgggatttggactgagtgaatgt

SEQ ID NO: 3320438 - DNA, 25 bp, Homo sapien
caaatttgatgagaagagccaggtc

SEQ ID NO: 3320439 - DNA, 25 bp, Homo sapien
tcctcggactccgtagcagagcaga

SEQ ID NO: 3320440 - DNA, 25 bp, Homo sapien
ggtctgtgccagcatatctgaggat

SEQ ID NO: 3320441 - DNA, 25 bp, Homo sapien
aaagtttgtgtattccagtagccaa

SEQ ID NO: 3320442 - DNA, 25 bp, Homo sapien
catgaagaactgctctgtatttcct

SEQ ID NO: 3320443 - DNA, 25 bp, Homo sapien
tagtttcaggcagctaggagttcca

SEQ ID NO: 3320444 - DNA, 25 bp, Homo sapien
gatttatagaagactggtagactat

SEQ ID NO: 3320445 - DNA, 25 bp, Homo sapien
tgggagagatgaccccttttaattc

SEQ ID NO: 3320446 - DNA, 25 bp, Homo sapien
taatataggccacagttctctttga

SEQ ID NO: 3320447 - DNA, 25 bp, Homo sapien
gaagactggtagactatttataaaa

SEQ ID NO: 3320448 - DNA, 25 bp, Homo sapien
cctctggaggctaatggtgctgttg

SEQ ID NO: 3320449 - DNA, 25 bp, Homo sapien
gttgattggtgtttactcatcccag

SEQ ID NO: 3320450 - DNA, 25 bp, Homo sapien
aatttagaaggaccaggccttccag

SEQ ID NO: 3320451 - DNA, 25 bp, Homo sapien
gctggtggtgaactagtagagccca

SEQ ID NO: 3320452 - DNA, 25 bp, Homo sapien
atttcccgcatccactttttttcag

SEQ ID NO: 3320453 - DNA, 25 bp, Homo sapien
atccatttcccgcatccactttttt

SEQ ID NO: 3320454 - DNA, 25 bp, Homo sapien
actgcatccatttcccgcatccact

SEQ ID NO: 3320455 - DNA, 25 bp, Homo sapien
tcccgcatccactttttttcagaat

SEQ ID NO: 3320456 - DNA, 25 bp, Homo sapien
ggagactctgaataaaacctgacta

SEQ ID NO: 3320457 - DNA, 25 bp, Homo sapien
caggagactctgaataaaacctgac

SEQ ID NO: 3320458 - DNA, 25 bp, Homo sapien
taaaagtaggacagttatctttcag

SEQ ID NO: 3320459 - DNA, 25 bp, Homo sapien
aaaagtaggacagttatctttcagg

SEQ ID NO: 3320460 - DNA, 25 bp, Homo sapien
tttctgggaattttctttgtgggca

SEQ ID NO: 3320461 - DNA, 25 bp, Homo sapien
ttctgggaattttctttgtgggcat

SEQ ID NO: 3320462 - DNA, 25 bp, Homo sapien
ttgaaaagaggacaggtgttaaatg

SEQ ID NO: 3320463 - DNA, 25 bp, Homo sapien
ctctaatccgtatttctctggtttc

SEQ ID NO: 3320464 - DNA, 25 bp, Homo sapien
acctccttcgcagaccatagacatg

SEQ ID NO: 3320465 - DNA, 25 bp, Homo sapien
gacagctgcactaggtctcttctgg

SEQ ID NO: 3320466 - DNA, 25 bp, Homo sapien
atgtcaaatgtcagctcttttttct

SEQ ID NO: 3320467 - DNA, 25 bp, Homo sapien
cttgtatgtcaaatgtcagctcttt

SEQ ID NO: 3320468 - DNA, 25 bp, Homo sapien
gtcaaatgtcagctcttttttctgc

SEQ ID NO: 3320469 - DNA, 25 bp, Homo sapien
caaatgtcagctcttttttctgcat

SEQ ID NO: 3320470 - DNA, 25 bp, Homo sapien
gctttgttgaaaccagtctgccttt

SEQ ID NO: 3320471 - DNA, 25 bp, Homo sapien
ctttgttgaaaccagtctgcctttg

SEQ ID NO: 3320472 - DNA, 25 bp, Homo sapien
tttgttgaaaccagtctgcctttgg

SEQ ID NO: 3320473 - DNA, 25 bp, Homo sapien
tgatccacaggtgagtatctgctgg

SEQ ID NO: 3320474 - DNA, 25 bp, Homo sapien
tatctgctggtgttggcggtaacat

SEQ ID NO: 3320475 - DNA, 25 bp, Homo sapien
tgacctgtttgcctcttagatttag

SEQ ID NO: 3320476 - DNA, 25 bp, Homo sapien
gaagtaagttgcctttattgtaatc

SEQ ID NO: 3320477 - DNA, 25 bp, Homo sapien
tacatgtcctggtttttgcttatta

SEQ ID NO: 3320478 - DNA, 25 bp, Homo sapien
ttacatgtcctggtttttgcttatt

SEQ ID NO: 3320479 - DNA, 25 bp, Homo sapien
acatgtcctggtttttgcttattac

SEQ ID NO: 3320480 - DNA, 25 bp, Homo sapien
tatctctcactaccttgtaactgct

SEQ ID NO: 3320481 - DNA, 25 bp, Homo sapien
gagacattggctttcttgcaatatc

SEQ ID NO: 3320482 - DNA, 25 bp, Homo sapien
ctgagacattggctttcttgcaata

SEQ ID NO: 3320483 - DNA, 25 bp, Homo sapien
tcttgcaatatctctcactaccttg

SEQ ID NO: 3320484 - DNA, 25 bp, Homo sapien
ttatacataaggttcttattgtccc

SEQ ID NO: 3320485 - DNA, 25 bp, Homo sapien
tattgataaacaactccagatataa

SEQ ID NO: 3320486 - DNA, 25 bp, Homo sapien
aggttcttattgtccctgttgaagg

SEQ ID NO: 3320487 - DNA, 25 bp, Homo sapien
aggagaaagtagatttacctttgtg

SEQ ID NO: 3320488 - DNA, 25 bp, Homo sapien
tgcatattgatacctgacattgaag

SEQ ID NO: 3320489 - DNA, 25 bp, Homo sapien
tggagctggaacaataattgcacat

SEQ ID NO: 3320490 - DNA, 25 bp, Homo sapien
tacctgacattgaaggacagattcc

SEQ ID NO: 3320491 - DNA, 25 bp, Homo sapien
aattgcacatgcatattgatacctg

SEQ ID NO: 3320492 - DNA, 25 bp, Homo sapien
taaagtcacgggctgagactgtaac

SEQ ID NO: 3320493 - DNA, 25 bp, Homo sapien
atattgtgccgtaggccatgccccg

SEQ ID NO: 3320494 - DNA, 25 bp, Homo sapien
gactgtaactgtgctctcttggcaa

SEQ ID NO: 3320495 - DNA, 25 bp, Homo sapien
tcttggcaacgaggctgtcactagc

SEQ ID NO: 3320496 - DNA, 25 bp, Homo sapien
ttccagcttcttagttccagccctt

SEQ ID NO: 3320497 - DNA, 25 bp, Homo sapien
agcttcttagttccagcccttcttg

SEQ ID NO: 3320498 - DNA, 25 bp, Homo sapien
ttcttagttccagcccttcttgact

SEQ ID NO: 3320499 - DNA, 25 bp, Homo sapien
tttccagcttcttagttccagccct

SEQ ID NO: 3320500 - DNA, 25 bp, Homo sapien
tctggtgattgctagatatggtaac

SEQ ID NO: 3320501 - DNA, 25 bp, Homo sapien
cagcatccctctggtgattgctaga

SEQ ID NO: 3320502 - DNA, 25 bp, Homo sapien
gattgctagatatggtaaccgggaa

SEQ ID NO: 3320503 - DNA, 25 bp, Homo sapien
tgctagatatggtaaccgggaaagg

SEQ ID NO: 3320504 - DNA, 25 bp, Homo sapien
catgatgaaacgctctatttatatt

SEQ ID NO: 3320505 - DNA, 25 bp, Homo sapien
gatgaaacgctctatttatattaaa

SEQ ID NO: 3320506 - DNA, 25 bp, Homo sapien
atgatcctttgccattgcatgatga

SEQ ID NO: 3320507 - DNA, 25 bp, Homo sapien
cctttgccattgcatgatgaaacgc

SEQ ID NO: 3320508 - DNA, 25 bp, Homo sapien
tggttcagttcttgaaatcttgctt

SEQ ID NO: 3320509 - DNA, 25 bp, Homo sapien
cctaccaaaagttgctccagtctgc

SEQ ID NO: 3320510 - DNA, 25 bp, Homo sapien
gctccagtctgcttctcctggttca

SEQ ID NO: 3320511 - DNA, 25 bp, Homo sapien
caaaagttgctccagtctgcttctc

SEQ ID NO: 3320512 - DNA, 25 bp, Homo sapien
gacttccaaaaattgtaagctgcat

SEQ ID NO: 3320513 - DNA, 25 bp, Homo sapien
ctgacttccaaaaattgtaagctgc

SEQ ID NO: 3320514 - DNA, 25 bp, Homo sapien
tgacttccaaaaattgtaagctgca

SEQ ID NO: 3320515 - DNA, 25 bp, Homo sapien
ggtcatttttgaaccgcttgggaca

SEQ ID NO: 3320516 - DNA, 25 bp, Homo sapien
tttgaaccgcttgggacaaagagcc

SEQ ID NO: 3320517 - DNA, 25 bp, Homo sapien
tgaactttggctcataaaggtcatt

SEQ ID NO: 3320518 - DNA, 25 bp, Homo sapien
cttcactcagcttgaactttggctc

SEQ ID NO: 3320519 - DNA, 25 bp, Homo sapien
gatcagtgtgcacagcaaataatga

SEQ ID NO: 3320520 - DNA, 25 bp, Homo sapien
tcagtgtgcacagcaaataatgaag

SEQ ID NO: 3320521 - DNA, 25 bp, Homo sapien
gtataagagcagaataagcactttc

SEQ ID NO: 3320522 - DNA, 25 bp, Homo sapien
taatgaagaggctcgtataagagca

SEQ ID NO: 3320523 - DNA, 25 bp, Homo sapien
ctttctctagaatctattggcaccc

SEQ ID NO: 3320524 - DNA, 25 bp, Homo sapien
ggcaccctcaccaattttgcttgtt

SEQ ID NO: 3320525 - DNA, 25 bp, Homo sapien
tctagaatctattggcaccctcacc

SEQ ID NO: 3320526 - DNA, 25 bp, Homo sapien
tattggcaccctcaccaattttgct

SEQ ID NO: 3320527 - DNA, 25 bp, Homo sapien
tcctctgcactctcgtagtaccttg

SEQ ID NO: 3320528 - DNA, 25 bp, Homo sapien
tagtaccttgttcattctgccgtta

SEQ ID NO: 3320529 - DNA, 25 bp, Homo sapien
tctcccattaaggtaattcttgagg

SEQ ID NO: 3320530 - DNA, 25 bp, Homo sapien
gtgcaatttacacgtccctcctctg

SEQ ID NO: 3320531 - DNA, 25 bp, Homo sapien
gatggtggcagaaggactcctatgt

SEQ ID NO: 3320532 - DNA, 25 bp, Homo sapien
tcctatgtgcctgaaagggaaagta

SEQ ID NO: 3320533 - DNA, 25 bp, Homo sapien
tcagcaatcacaacagaaggctccc

SEQ ID NO: 3320534 - DNA, 25 bp, Homo sapien
gaaagtaggcactccctgactccct

SEQ ID NO: 3320535 - DNA, 25 bp, Homo sapien
caacccgtagactgggaaaagatat

SEQ ID NO: 3320536 - DNA, 25 bp, Homo sapien
agtgaagagacaacccgtagactgg

SEQ ID NO: 3320537 - DNA, 25 bp, Homo sapien
gaaaacattcattttgtaaagtcaa

SEQ ID NO: 3320538 - DNA, 25 bp, Homo sapien
aaaaaacacatagtgaagagacaac

SEQ ID NO: 3320539 - DNA, 25 bp, Homo sapien
tatcctctgtactcctaggacttga

SEQ ID NO: 3320540 - DNA, 25 bp, Homo sapien
ctgcatgtgcctcttaagtcctgga

SEQ ID NO: 3320541 - DNA, 25 bp, Homo sapien
tgaatttgaaggtctaccatctgca

SEQ ID NO: 3320542 - DNA, 25 bp, Homo sapien
tgaacaactgccaacacaagcagaa

SEQ ID NO: 3320543 - DNA, 25 bp, Homo sapien
gattgactagatttgtggttgttgt

SEQ ID NO: 3320544 - DNA, 25 bp, Homo sapien
cgtgtaagattgactagatttgtgg

SEQ ID NO: 3320545 - DNA, 25 bp, Homo sapien
gtaagattgactagatttgtggttg

SEQ ID NO: 3320546 - DNA, 25 bp, Homo sapien
cttcgtgtaagattgactagatttg

SEQ ID NO: 3320547 - DNA, 25 bp, Homo sapien
ttcttccatttcatgtctacttttc

SEQ ID NO: 3320548 - DNA, 25 bp, Homo sapien
tcttccatttcatgtctacttttcc

SEQ ID NO: 3320549 - DNA, 25 bp, Homo sapien
ttttcttccatttcatgtctacttt

SEQ ID NO: 3320550 - DNA, 25 bp, Homo sapien
ttccatttcatgtctacttttcctt

SEQ ID NO: 3320551 - DNA, 25 bp, Homo sapien
ctgcctcgacatattgttgacaaga

SEQ ID NO: 3320552 - DNA, 25 bp, Homo sapien
catttctcacacaagaaagcaacag

SEQ ID NO: 3320553 - DNA, 25 bp, Homo sapien
gaactgccaagcacctcgccttcat

SEQ ID NO: 3320554 - DNA, 25 bp, Homo sapien
gctgccacagcatcgtacaatcact

SEQ ID NO: 3320555 - DNA, 25 bp, Homo sapien
tgctgacagcccttctgactgagaa

SEQ ID NO: 3320556 - DNA, 25 bp, Homo sapien
tggccttcgtgaagctgctgacagc

SEQ ID NO: 3320557 - DNA, 25 bp, Homo sapien
gcccttctgactgagaaactgtaga

SEQ ID NO: 3320558 - DNA, 25 bp, Homo sapien
catcatctttatacgggccaagagt

SEQ ID NO: 3320559 - DNA, 25 bp, Homo sapien
cctctgccaatgtcatgctactagt

SEQ ID NO: 3320560 - DNA, 25 bp, Homo sapien
tccctctgccaatgtcatgctacta

SEQ ID NO: 3320561 - DNA, 25 bp, Homo sapien
tctgccaatgtcatgctactagtca

SEQ ID NO: 3320562 - DNA, 25 bp, Homo sapien
ctgccaatgtcatgctactagtcat

SEQ ID NO: 3320563 - DNA, 25 bp, Homo sapien
ggagccagaagtgatccaacagtac

SEQ ID NO: 3320564 - DNA, 25 bp, Homo sapien
gggaaagctactgccacggcccctg

SEQ ID NO: 3320565 - DNA, 25 bp, Homo sapien
ttagcccactgattcatgagaacct

SEQ ID NO: 3320566 - DNA, 25 bp, Homo sapien
acctccactatagaagaaggagcca

SEQ ID NO: 3320567 - DNA, 25 bp, Homo sapien
ggacattataatacattccgttatg

SEQ ID NO: 3320568 - DNA, 25 bp, Homo sapien
taatacattccgttatgttctggtg

SEQ ID NO: 3320569 - DNA, 25 bp, Homo sapien
tgtaagcaggacattataatacatt

SEQ ID NO: 3320570 - DNA, 25 bp, Homo sapien
gcaggacattataatacattccgtt

SEQ ID NO: 3320571 - DNA, 25 bp, Homo sapien
gtaactgcatctctcaaggttgcca

SEQ ID NO: 3320572 - DNA, 25 bp, Homo sapien
tctcaaggttgccaatggtccatca

SEQ ID NO: 3320573 - DNA, 25 bp, Homo sapien
tatctgtaactgtaactgcatctct

SEQ ID NO: 3320574 - DNA, 25 bp, Homo sapien
caatggtccatcaggattagaaata

SEQ ID NO: 3320575 - DNA, 25 bp, Homo sapien
ggctggaatgttaccacattgagtg

SEQ ID NO: 3320576 - DNA, 25 bp, Homo sapien
gttgagcagtatcttagtagggctg

SEQ ID NO: 3320577 - DNA, 25 bp, Homo sapien
cttagtagggctggaatgttaccac

SEQ ID NO: 3320578 - DNA, 25 bp, Homo sapien
ggaatgttaccacattgagtgtaca

SEQ ID NO: 3320579 - DNA, 25 bp, Homo sapien
gcaatagacactgactgtggctttt

SEQ ID NO: 3320580 - DNA, 25 bp, Homo sapien
tattccctgctgattgacaggtgaa

SEQ ID NO: 3320581 - DNA, 25 bp, Homo sapien
gatctccagctttatgagatagcaa

SEQ ID NO: 3320582 - DNA, 25 bp, Homo sapien
tattggctgacatttgcttgcctgc

SEQ ID NO: 3320583 - DNA, 25 bp, Homo sapien
ctgtattccccattatttccataat

SEQ ID NO: 3320584 - DNA, 25 bp, Homo sapien
gaagcagctactctacaccagtttc

SEQ ID NO: 3320585 - DNA, 25 bp, Homo sapien
tacaccagtttctgtattccccatt

SEQ ID NO: 3320586 - DNA, 25 bp, Homo sapien
tactctacaccagtttctgtattcc

SEQ ID NO: 3320587 - DNA, 25 bp, Homo sapien
gcccacgtccatcttgcgggtgtca

SEQ ID NO: 3320588 - DNA, 25 bp, Homo sapien
tagttgcccacgtccatcttgcggg

SEQ ID NO: 3320589 - DNA, 25 bp, Homo sapien
ttagttgcccacgtccatcttgcgg

SEQ ID NO: 3320590 - DNA, 25 bp, Homo sapien
gttgcccacgtccatcttgcgggtg

SEQ ID NO: 3320591 - DNA, 25 bp, Homo sapien
tctttccagcaggactcatatgcaa

SEQ ID NO: 3320592 - DNA, 25 bp, Homo sapien
ttctttccagcaggactcatatgca

SEQ ID NO: 3320593 - DNA, 25 bp, Homo sapien
ttccagcaggactcatatgcaaaat

SEQ ID NO: 3320594 - DNA, 25 bp, Homo sapien
ctttctttccagcaggactcatatg

SEQ ID NO: 3320595 - DNA, 25 bp, Homo sapien
accccagaaaatgacacggtacaag

SEQ ID NO: 3320596 - DNA, 25 bp, Homo sapien
tttctgtacgaagtgtgcaagcacc

SEQ ID NO: 3320597 - DNA, 25 bp, Homo sapien
gaaaatgacacggtacaagaagagc

SEQ ID NO: 3320598 - DNA, 25 bp, Homo sapien
gactttctgtacgaagtgtgcaagc

SEQ ID NO: 3320599 - DNA, 25 bp, Homo sapien
cggatgcttccgagtggtctctgaa

SEQ ID NO: 3320600 - DNA, 25 bp, Homo sapien
cagggtctgaagcttcggatgcttc

SEQ ID NO: 3320601 - DNA, 25 bp, Homo sapien
gcttggagcttgaattgaatacaaa

SEQ ID NO: 3320602 - DNA, 25 bp, Homo sapien
ctagttaagcaagcggaccacagca

SEQ ID NO: 3320603 - DNA, 25 bp, Homo sapien
aagttgaaacccacagacaagacaa

SEQ ID NO: 3320604 - DNA, 25 bp, Homo sapien
agacaaagtgttccacagaaccggt

SEQ ID NO: 3320605 - DNA, 25 bp, Homo sapien
tatgacttgtgcaagcaagaaggga

SEQ ID NO: 3320606 - DNA, 25 bp, Homo sapien
gggtatgacttgtgcaagcaagaag

SEQ ID NO: 3320607 - DNA, 25 bp, Homo sapien
ctccatgtggggtatgacttgtgca

SEQ ID NO: 3320608 - DNA, 25 bp, Homo sapien
catgtggggtatgacttgtgcaagc

SEQ ID NO: 3320609 - DNA, 25 bp, Homo sapien
tgacccttaattacagactgctctc

SEQ ID NO: 3320610 - DNA, 25 bp, Homo sapien
gacccttaattacagactgctctcc

SEQ ID NO: 3320611 - DNA, 25 bp, Homo sapien
acccttaattacagactgctctcca

SEQ ID NO: 3320612 - DNA, 25 bp, Homo sapien
ctgacccttaattacagactgctct

SEQ ID NO: 3320613 - DNA, 25 bp, Homo sapien
atgagaacagggataaagtaccctt

SEQ ID NO: 3320614 - DNA, 25 bp, Homo sapien
ctccctcgatgtcagaccaatgaga

SEQ ID NO: 3320615 - DNA, 25 bp, Homo sapien
ccctttggagcccatgtagtgttta

SEQ ID NO: 3320616 - DNA, 25 bp, Homo sapien
taagcctcgaagttgtgcagactaa

SEQ ID NO: 3320617 - DNA, 25 bp, Homo sapien
gcttctctcagatctgtatggcaca

SEQ ID NO: 3320618 - DNA, 25 bp, Homo sapien
caataaccagaaacagatttgaagt

SEQ ID NO: 3320619 - DNA, 25 bp, Homo sapien
cttctctcagatctgtatggcacat

SEQ ID NO: 3320620 - DNA, 25 bp, Homo sapien
gatttgaagtaaatgcttctctcag

SEQ ID NO: 3320621 - DNA, 25 bp, Homo sapien
taatgcttgatgtgaaacttgtgga

SEQ ID NO: 3320622 - DNA, 25 bp, Homo sapien
gcagtagctttgtgctgtgagagct

SEQ ID NO: 3320623 - DNA, 25 bp, Homo sapien
gctgctagcagttgatctttggata

SEQ ID NO: 3320624 - DNA, 25 bp, Homo sapien
gaaatgtcaagtccagtgtcatgta

SEQ ID NO: 3320625 - DNA, 25 bp, Homo sapien
gcagagaatcttatactattgcaca

SEQ ID NO: 3320626 - DNA, 25 bp, Homo sapien
tcagtggtcatgcagctgaggataa

SEQ ID NO: 3320627 - DNA, 25 bp, Homo sapien
tatcacagcagagaatcttatacta

SEQ ID NO: 3320628 - DNA, 25 bp, Homo sapien
tgcatacaggccaatataagctgct

SEQ ID NO: 3320629 - DNA, 25 bp, Homo sapien
tgtgtgtgtttatagcgaaaggatc

SEQ ID NO: 3320630 - DNA, 25 bp, Homo sapien
tgtttatagcgaaaggatcaaagga

SEQ ID NO: 3320631 - DNA, 25 bp, Homo sapien
tgtgtgtttatagcgaaaggatcaa

SEQ ID NO: 3320632 - DNA, 25 bp, Homo sapien
tgtgtttatagcgaaaggatcaaag

SEQ ID NO: 3320633 - DNA, 25 bp, Homo sapien
ttgttgctgtcttgacctccattag

SEQ ID NO: 3320634 - DNA, 25 bp, Homo sapien
tgatttgcatgccatcagttttatg

SEQ ID NO: 3320635 - DNA, 25 bp, Homo sapien
tgacctccattagccagaagtttga

SEQ ID NO: 3320636 - DNA, 25 bp, Homo sapien
attagccagaagtttgatgatttgc

SEQ ID NO: 3320637 - DNA, 25 bp, Homo sapien
gaaggcactccaactggtgagtata

SEQ ID NO: 3320638 - DNA, 25 bp, Homo sapien
aacactgagcacctgggatctgaca

SEQ ID NO: 3320639 - DNA, 25 bp, Homo sapien
tttggtggaaggcactccaactggt

SEQ ID NO: 3320640 - DNA, 25 bp, Homo sapien
gatctgacacgtataagtcacggtc

SEQ ID NO: 3320641 - DNA, 25 bp, Homo sapien
tgcaaacaattgaaagagaagcctt

SEQ ID NO: 3320642 - DNA, 25 bp, Homo sapien
tgtaaacaaggctgattccatgaag

SEQ ID NO: 3320643 - DNA, 25 bp, Homo sapien
cacaggagccttctaatgcttacgc

SEQ ID NO: 3320644 - DNA, 25 bp, Homo sapien
cccatcatcaaggtacagagctgtt

SEQ ID NO: 3320645 - DNA, 25 bp, Homo sapien
tttaacaaagcagagtcgtcttaac

SEQ ID NO: 3320646 - DNA, 25 bp, Homo sapien
cagagtcgtcttaacatctgttcac

SEQ ID NO: 3320647 - DNA, 25 bp, Homo sapien
tttcatgttcagtcttttagcccaa

SEQ ID NO: 3320648 - DNA, 25 bp, Homo sapien
tgttcagtcttttagcccaacctgt

SEQ ID NO: 3320649 - DNA, 25 bp, Homo sapien
ggtgaatagactgagcagttttgga

SEQ ID NO: 3320650 - DNA, 25 bp, Homo sapien
taggcctaaggggtgaatagactga

SEQ ID NO: 3320651 - DNA, 25 bp, Homo sapien
acctctaggcctaaggggtgaatag

SEQ ID NO: 3320652 - DNA, 25 bp, Homo sapien
taaggggtgaatagactgagcagtt

SEQ ID NO: 3320653 - DNA, 25 bp, Homo sapien
ttgaatcccgtggactcatctccta

SEQ ID NO: 3320654 - DNA, 25 bp, Homo sapien
ctctctcttgaatcccgtggactca

SEQ ID NO: 3320655 - DNA, 25 bp, Homo sapien
ctcttgaatcccgtggactcatctc

SEQ ID NO: 3320656 - DNA, 25 bp, Homo sapien
gaatcccgtggactcatctcctact

SEQ ID NO: 3320657 - DNA, 25 bp, Homo sapien
gtagcaggatttgtctaagcaggct

SEQ ID NO: 3320658 - DNA, 25 bp, Homo sapien
ggttaacctggcagccggtttggca

SEQ ID NO: 3320659 - DNA, 25 bp, Homo sapien
gaagtaggggttaaatcagcaggtc

SEQ ID NO: 3320660 - DNA, 25 bp, Homo sapien
ttactgtggattataggaagggaag

SEQ ID NO: 3320661 - DNA, 25 bp, Homo sapien
ctatgtagtacttgatagagagtcc

SEQ ID NO: 3320662 - DNA, 25 bp, Homo sapien
tttcatttgtccgttcactatgtag

SEQ ID NO: 3320663 - DNA, 25 bp, Homo sapien
catttgtccgttcactatgtagtac

SEQ ID NO: 3320664 - DNA, 25 bp, Homo sapien
cttgatagagagtccttcagagatg

SEQ ID NO: 3320665 - DNA, 25 bp, Homo sapien
ccttaggatatgttttatcaaacat

SEQ ID NO: 3320666 - DNA, 25 bp, Homo sapien
gcatgtgtttcttctgccaatgcca

SEQ ID NO: 3320667 - DNA, 25 bp, Homo sapien
gtggccccaaagcatgtgtttcttc

SEQ ID NO: 3320668 - DNA, 25 bp, Homo sapien
ccccaaagcatgtgtttcttctgcc

SEQ ID NO: 3320669 - DNA, 25 bp, Homo sapien
catgtgtttcttctgccaatgccat

SEQ ID NO: 3320670 - DNA, 25 bp, Homo sapien
cagcgcctccatgaagaaggtggtc

SEQ ID NO: 3320671 - DNA, 25 bp, Homo sapien
agcgcctccatgaagaaggtggtcc

SEQ ID NO: 3320672 - DNA, 25 bp, Homo sapien
tcagcattttattccctatgggcag

SEQ ID NO: 3320673 - DNA, 25 bp, Homo sapien
tttattccctatgggcagcgcctcc

SEQ ID NO: 3320674 - DNA, 25 bp, Homo sapien
caaatgaaccctgtgcattatcttc

SEQ ID NO: 3320675 - DNA, 25 bp, Homo sapien
tgtcttcggaaaagagatgtgaggt

SEQ ID NO: 3320676 - DNA, 25 bp, Homo sapien
ttacgtgacatgatttgtgtatctg

SEQ ID NO: 3320677 - DNA, 25 bp, Homo sapien
tagcctgttctggtttacgtgacat

SEQ ID NO: 3320678 - DNA, 25 bp, Homo sapien
gagagtttggcccacatggctctca

SEQ ID NO: 3320679 - DNA, 25 bp, Homo sapien
acagactcatctgctgtgccacaga

SEQ ID NO: 3320680 - DNA, 25 bp, Homo sapien
tgagagtttggcccacatggctctc

SEQ ID NO: 3320681 - DNA, 25 bp, Homo sapien
atgagagtttggcccacatggctct

SEQ ID NO: 3320682 - DNA, 25 bp, Homo sapien
taccttggcagtgaacgccttgaga

SEQ ID NO: 3320683 - DNA, 25 bp, Homo sapien
aattcaatcattcttcccagagtga

SEQ ID NO: 3320684 - DNA, 25 bp, Homo sapien
gagcaaatctcgttacagcctagta

SEQ ID NO: 3320685 - DNA, 25 bp, Homo sapien
cccagagtgaagcagaagatgtttc

SEQ ID NO: 3320686 - DNA, 25 bp, Homo sapien
gagataacctttgtccaagctcacg

SEQ ID NO: 3320687 - DNA, 25 bp, Homo sapien
taccagaggtggcacaagggagtct

SEQ ID NO: 3320688 - DNA, 25 bp, Homo sapien
tcttggctaaggctggaaacctgag

SEQ ID NO: 3320689 - DNA, 25 bp, Homo sapien
tgaaatcccgctgtgtaccagaggt

SEQ ID NO: 3320690 - DNA, 25 bp, Homo sapien
agcgctgtccatgactccgtgagga

SEQ ID NO: 3320691 - DNA, 25 bp, Homo sapien
tgtattgtcacatgtcattgccaga

SEQ ID NO: 3320692 - DNA, 25 bp, Homo sapien
tccgtgaggaagggtaactgaaagc

SEQ ID NO: 3320693 - DNA, 25 bp, Homo sapien
tggaaccttcttggattctgcccca

SEQ ID NO: 3320694 - DNA, 25 bp, Homo sapien
taaagctcttcgacggttaatcttg

SEQ ID NO: 3320695 - DNA, 25 bp, Homo sapien
aagttgcccatcacactgaacatta

SEQ ID NO: 3320696 - DNA, 25 bp, Homo sapien
gctcttcgacggttaatcttgaatt

SEQ ID NO: 3320697 - DNA, 25 bp, Homo sapien
aaaatctcttaaagctcttcgacgg

SEQ ID NO: 3320698 - DNA, 25 bp, Homo sapien
caagagacccattagttgagtttcc

SEQ ID NO: 3320699 - DNA, 25 bp, Homo sapien
gctcttccagagtacatcaaagcaa

SEQ ID NO: 3320700 - DNA, 25 bp, Homo sapien
tacacatgaaggttaactgcttgct

SEQ ID NO: 3320701 - DNA, 25 bp, Homo sapien
ccctggcagcagttcattgtcatta

SEQ ID NO: 3320702 - DNA, 25 bp, Homo sapien
ctgtagaaagatcgacattgagttc

SEQ ID NO: 3320703 - DNA, 25 bp, Homo sapien
tcagcttcgataattgctttcattt

SEQ ID NO: 3320704 - DNA, 25 bp, Homo sapien
gtagaaagatcgacattgagttctt

SEQ ID NO: 3320705 - DNA, 25 bp, Homo sapien
agcttcgataattgctttcatttgg

SEQ ID NO: 3320706 - DNA, 25 bp, Homo sapien
aactccagtttatctttgacatccc

SEQ ID NO: 3320707 - DNA, 25 bp, Homo sapien
tgttcttgttaagatagcaagattg

SEQ ID NO: 3320708 - DNA, 25 bp, Homo sapien
cagtttatctttgacatcccgggaa

SEQ ID NO: 3320709 - DNA, 25 bp, Homo sapien
gatagcaagattgaaactccagttt

SEQ ID NO: 3320710 - DNA, 25 bp, Homo sapien
ttaagccggtgggtgtgcttatcag

SEQ ID NO: 3320711 - DNA, 25 bp, Homo sapien
aagccggtgggtgtgcttatcagca

SEQ ID NO: 3320712 - DNA, 25 bp, Homo sapien
caccttgtttaagccggtgggtgtg

SEQ ID NO: 3320713 - DNA, 25 bp, Homo sapien
ctgtcaggcaccttgtttaagccgg

SEQ ID NO: 3320714 - DNA, 25 bp, Homo sapien
tcacagggagtccactttcccattt

SEQ ID NO: 3320715 - DNA, 25 bp, Homo sapien
gattgacattggaagcctttcagac

SEQ ID NO: 3320716 - DNA, 25 bp, Homo sapien
gaacaccgactgaaggcattcttgg

SEQ ID NO: 3320717 - DNA, 25 bp, Homo sapien
caggtcgctgggcacaatgtttgat

SEQ ID NO: 3320718 - DNA, 25 bp, Homo sapien
caaggctgtgctgtagtgactggta

SEQ ID NO: 3320719 - DNA, 25 bp, Homo sapien
tgggataggattcacatcgcagatc

SEQ ID NO: 3320720 - DNA, 25 bp, Homo sapien
taagtgacaaatgaccgtatttccc

SEQ ID NO: 3320721 - DNA, 25 bp, Homo sapien
tccttcctccaaccgagagcttgta

SEQ ID NO: 3320722 - DNA, 25 bp, Homo sapien
tgtacttaggcttcccaccaagatt

SEQ ID NO: 3320723 - DNA, 25 bp, Homo sapien
gtcaatgtcattgccttcacaccaa

SEQ ID NO: 3320724 - DNA, 25 bp, Homo sapien
cacaccaagagaatatgactagcac

SEQ ID NO: 3320725 - DNA, 25 bp, Homo sapien
gaatatgactagcactgtagcccaa

SEQ ID NO: 3320726 - DNA, 25 bp, Homo sapien
tgtcttccatcataaagggagtcaa

SEQ ID NO: 3320727 - DNA, 25 bp, Homo sapien
ttagattgaacaagattttgccact

SEQ ID NO: 3320728 - DNA, 25 bp, Homo sapien
cttatagtcaagttttagattgaac

SEQ ID NO: 3320729 - DNA, 25 bp, Homo sapien
ctctcttatagtcaagttttagatt

SEQ ID NO: 3320730 - DNA, 25 bp, Homo sapien
tttagattgaacaagattttgccac

SEQ ID NO: 3320731 - DNA, 25 bp, Homo sapien
gccactaggtggaagtcaagccact

SEQ ID NO: 3320732 - DNA, 25 bp, Homo sapien
ttgcccgcattttatccagagcccg

SEQ ID NO: 3320733 - DNA, 25 bp, Homo sapien
tgcccgcattttatccagagcccgc

SEQ ID NO: 3320734 - DNA, 25 bp, Homo sapien
cttgcccgcattttatccagagccc

SEQ ID NO: 3320735 - DNA, 25 bp, Homo sapien
ccttgcccgcattttatccagagcc

SEQ ID NO: 3320736 - DNA, 25 bp, Homo sapien
tactcttaaaagcaactacgtggaa

SEQ ID NO: 3320737 - DNA, 25 bp, Homo sapien
aagaatccaccattacttagcaaaa

SEQ ID NO: 3320738 - DNA, 25 bp, Homo sapien
gaaacactctgaactttgaataaga

SEQ ID NO: 3320739 - DNA, 25 bp, Homo sapien
ggaattattggtcagcatcacaggg

SEQ ID NO: 3320740 - DNA, 25 bp, Homo sapien
tgaagtgtgggtttcagataaggat

SEQ ID NO: 3320741 - DNA, 25 bp, Homo sapien
agttccacaacgagaaatggtgctg

SEQ ID NO: 3320742 - DNA, 25 bp, Homo sapien
cagataaggatttacactgagaggc

SEQ ID NO: 3320743 - DNA, 25 bp, Homo sapien
agaaatggtgctgccacgctcactc

SEQ ID NO: 3320744 - DNA, 25 bp, Homo sapien
ctcttggtaccaatgtaacattcca

SEQ ID NO: 3320745 - DNA, 25 bp, Homo sapien
ggtaccaatgtaacattccatattc

SEQ ID NO: 3320746 - DNA, 25 bp, Homo sapien
cttggtaccaatgtaacattccata

SEQ ID NO: 3320747 - DNA, 25 bp, Homo sapien
tctcttggtaccaatgtaacattcc

SEQ ID NO: 3320748 - DNA, 25 bp, Homo sapien
ctgaaagatggaatagtcacgtgca

SEQ ID NO: 3320749 - DNA, 25 bp, Homo sapien
tgaaagatggaatagtcacgtgcat

SEQ ID NO: 3320750 - DNA, 25 bp, Homo sapien
aacccaaagattcccctgaagatgt

SEQ ID NO: 3320751 - DNA, 25 bp, Homo sapien
ctcctgaatcctgtgatcctcagtg

SEQ ID NO: 3320752 - DNA, 25 bp, Homo sapien
tgaatcctgtgatcctcagtgaaat

SEQ ID NO: 3320753 - DNA, 25 bp, Homo sapien
cctgaatcctgtgatcctcagtgaa

SEQ ID NO: 3320754 - DNA, 25 bp, Homo sapien
ctgaatcctgtgatcctcagtgaaa

SEQ ID NO: 3320755 - DNA, 25 bp, Homo sapien
gagctacctgttgcccgcttgcctg

SEQ ID NO: 3320756 - DNA, 25 bp, Homo sapien
gcctctccaccctgtggatgggagc

SEQ ID NO: 3320757 - DNA, 25 bp, Homo sapien
ctgtggatgggagctacctgttgcc

SEQ ID NO: 3320758 - DNA, 25 bp, Homo sapien
aaaatagcctggatatctcacccat

SEQ ID NO: 3320759 - DNA, 25 bp, Homo sapien
ttctctttggcaatggccttcttta

SEQ ID NO: 3320760 - DNA, 25 bp, Homo sapien
tctctttggcaatggccttctttat

SEQ ID NO: 3320761 - DNA, 25 bp, Homo sapien
ctagcaacacttctctttggcaatg

SEQ ID NO: 3320762 - DNA, 25 bp, Homo sapien
caacacttctctttggcaatggcct

SEQ ID NO: 3320763 - DNA, 25 bp, Homo sapien
ccaggaggctcagcaggccaggtgg

SEQ ID NO: 3320764 - DNA, 25 bp, Homo sapien
aggaggctcagcaggccaggtggct

SEQ ID NO: 3320765 - DNA, 25 bp, Homo sapien
tgggttggggccaggaggctcagca

SEQ ID NO: 3320766 - DNA, 25 bp, Homo sapien
ggccaggaggctcagcaggccaggt

SEQ ID NO: 3320767 - DNA, 25 bp, Homo sapien
tgagacatcgttcttgcttatggag

SEQ ID NO: 3320768 - DNA, 25 bp, Homo sapien
ttaagggtacatccgatctgagaca

SEQ ID NO: 3320769 - DNA, 25 bp, Homo sapien
gacatcgttcttgcttatggagaag

SEQ ID NO: 3320770 - DNA, 25 bp, Homo sapien
catccgatctgagacatcgttcttg

SEQ ID NO: 3320771 - DNA, 25 bp, Homo sapien
acatggctgcagaggtctccggaaa

SEQ ID NO: 3320772 - DNA, 25 bp, Homo sapien
ctgcagaggtctccggaaacttaca

SEQ ID NO: 3320773 - DNA, 25 bp, Homo sapien
aagcaagcaacttctttacaaggca

SEQ ID NO: 3320774 - DNA, 25 bp, Homo sapien
agcaagcaacttctttacaaggcag

SEQ ID NO: 3320775 - DNA, 25 bp, Homo sapien
gagttgctgtcaggaatgatccagc

SEQ ID NO: 3320776 - DNA, 25 bp, Homo sapien
cagaaggtatggacacagaaggcag

SEQ ID NO: 3320777 - DNA, 25 bp, Homo sapien
tccatagccagaaataggtcagcgc

SEQ ID NO: 3320778 - DNA, 25 bp, Homo sapien
tcatagttgagaggttccatagcca

SEQ ID NO: 3320779 - DNA, 25 bp, Homo sapien
tgccagagatggcttaacagcagcc

SEQ ID NO: 3320780 - DNA, 25 bp, Homo sapien
gtcctatgtgagatgagacaaagat

SEQ ID NO: 3320781 - DNA, 25 bp, Homo sapien
gtacaacagagagttgtcctatgtg

SEQ ID NO: 3320782 - DNA, 25 bp, Homo sapien
ttctgatgtgtatgaggtgctgcca

SEQ ID NO: 3320783 - DNA, 25 bp, Homo sapien
tctgtggcaattcctcctggatacc

SEQ ID NO: 3320784 - DNA, 25 bp, Homo sapien
gatgcattcactctattgtactgga

SEQ ID NO: 3320785 - DNA, 25 bp, Homo sapien
cacagcgtttccatactggactgaa

SEQ ID NO: 3320786 - DNA, 25 bp, Homo sapien
tggataccatgatctgattgcaggc

SEQ ID NO: 3320787 - DNA, 25 bp, Homo sapien
tccttgccagcgtccttaacttcta

SEQ ID NO: 3320788 - DNA, 25 bp, Homo sapien
ccttgccagcgtccttaacttctac

SEQ ID NO: 3320789 - DNA, 25 bp, Homo sapien
tcatcaaccttaagtcggttggttc

SEQ ID NO: 3320790 - DNA, 25 bp, Homo sapien
taacttccattatacctccagcagt

SEQ ID NO: 3320791 - DNA, 25 bp, Homo sapien
cggtgttcagcgcaaaaggcctcca

SEQ ID NO: 3320792 - DNA, 25 bp, Homo sapien
taagtcggttggttcggtgttcagc

SEQ ID NO: 3320793 - DNA, 25 bp, Homo sapien
tacccctgattccttatggagaact

SEQ ID NO: 3320794 - DNA, 25 bp, Homo sapien
tgcccaccagcagaacattgtatct

SEQ ID NO: 3320795 - DNA, 25 bp, Homo sapien
cattgtatctgtcaattacccctga

SEQ ID NO: 3320796 - DNA, 25 bp, Homo sapien
cctgctcgacccagttttggagtgt

SEQ ID NO: 3320797 - DNA, 25 bp, Homo sapien
gctaaaggaacaagagggacagtga

SEQ ID NO: 3320798 - DNA, 25 bp, Homo sapien
tccttgaaaaggacgggcagatact

SEQ ID NO: 3320799 - DNA, 25 bp, Homo sapien
tgatacaccatcaaacgacccaagg

SEQ ID NO: 3320800 - DNA, 25 bp, Homo sapien
cagaccttcagtgagacactaggaa

SEQ ID NO: 3320801 - DNA, 25 bp, Homo sapien
ccctccatagcggtgatttatttaa

SEQ ID NO: 3320802 - DNA, 25 bp, Homo sapien
agaggattctcaggctggcgcccag

SEQ ID NO: 3320803 - DNA, 25 bp, Homo sapien
ggtcgcgcgagtgcagacgccagcg

SEQ ID NO: 3320804 - DNA, 25 bp, Homo sapien
gtcagcgtggttcgtcccctggcgt

SEQ ID NO: 3320805 - DNA, 25 bp, Homo sapien
gccctgcgccaggtttaggagacgc

SEQ ID NO: 3320806 - DNA, 25 bp, Homo sapien
ttttcaacttcgagtccgtgccctg

SEQ ID NO: 3320807 - DNA, 25 bp, Homo sapien
gtttccgagcccacacctagcgtgt

SEQ ID NO: 3320808 - DNA, 25 bp, Homo sapien
ctagcgtgtctggaaggtgtgggtg

SEQ ID NO: 3320809 - DNA, 25 bp, Homo sapien
tgagccggttggagatgactacaag

SEQ ID NO: 3320810 - DNA, 25 bp, Homo sapien
tatcaacatgggcttcacaaggatg

SEQ ID NO: 3320811 - DNA, 25 bp, Homo sapien
caagcccttggactagttgctgttc

SEQ ID NO: 3320812 - DNA, 25 bp, Homo sapien
tagcctagttgactgcaccctatgg

SEQ ID NO: 3320813 - DNA, 25 bp, Homo sapien
tgaactcagtataagtgcaagttgt

SEQ ID NO: 3320814 - DNA, 25 bp, Homo sapien
cacactggtgttaatagggtatata

SEQ ID NO: 3320815 - DNA, 25 bp, Homo sapien
tcagtactgtacatctgcacactgg

SEQ ID NO: 3320816 - DNA, 25 bp, Homo sapien
tcctttgcaacacataaatgatatg

SEQ ID NO: 3320817 - DNA, 25 bp, Homo sapien
tacaaggctcttcatgtactggttc

SEQ ID NO: 3320818 - DNA, 25 bp, Homo sapien
cagccttaagacctcaagtgagaca

SEQ ID NO: 3320819 - DNA, 25 bp, Homo sapien
taatcaataggcttcacaagggaag

SEQ ID NO: 3320820 - DNA, 25 bp, Homo sapien
agagacatgctttcttacttccaga

SEQ ID NO: 3320821 - DNA, 25 bp, Homo sapien
cacatccagtttggaatgaccaaag

SEQ ID NO: 3320822 - DNA, 25 bp, Homo sapien
acatccagtttggaatgaccaaagc

SEQ ID NO: 3320823 - DNA, 25 bp, Homo sapien
atccagtttggaatgaccaaagcaa

SEQ ID NO: 3320824 - DNA, 25 bp, Homo sapien
ccacatccagtttggaatgaccaaa

SEQ ID NO: 3320825 - DNA, 25 bp, Homo sapien
ccgtgttagcaggaatggtctcgat

SEQ ID NO: 3320826 - DNA, 25 bp, Homo sapien
accgtgttagcaggaatggtctcga

SEQ ID NO: 3320827 - DNA, 25 bp, Homo sapien
gtatgggggtgggcacagagtctcg

SEQ ID NO: 3320828 - DNA, 25 bp, Homo sapien
tgggggtgggcacagagtctcgctc

SEQ ID NO: 3320829 - DNA, 25 bp, Homo sapien
aagatgcaggatttccattccctga

SEQ ID NO: 3320830 - DNA, 25 bp, Homo sapien
taggaagtgctgtcaagtctatagc

SEQ ID NO: 3320831 - DNA, 25 bp, Homo sapien
taggaagtcattcggtcatcccaac

SEQ ID NO: 3320832 - DNA, 25 bp, Homo sapien
tagcagtgctaagattgaaaccaga

SEQ ID NO: 3320833 - DNA, 25 bp, Homo sapien
gatacaaagttcgaaggctgagcct

SEQ ID NO: 3320834 - DNA, 25 bp, Homo sapien
gagaaacgccccttcgcacttatga

SEQ ID NO: 3320835 - DNA, 25 bp, Homo sapien
gaattgaaccgtctcgcaggcagag

SEQ ID NO: 3320836 - DNA, 25 bp, Homo sapien
aattaagacacaaaccagagaccgg

SEQ ID NO: 3320837 - DNA, 25 bp, Homo sapien
tgctggacgcagtgcttcggactgc

SEQ ID NO: 3320838 - DNA, 25 bp, Homo sapien
ctctgcggccgctggagtaaacact

SEQ ID NO: 3320839 - DNA, 25 bp, Homo sapien
ttcggactgcttcgcaaggaagcgg

SEQ ID NO: 3320840 - DNA, 25 bp, Homo sapien
ttgaaccccatttcggctcgtgccg

SEQ ID NO: 3320841 - DNA, 25 bp, Homo sapien
acgtcagactggtggtcgtcttgga

SEQ ID NO: 3320842 - DNA, 25 bp, Homo sapien
tgcttagcagacgtcagactggtgg

SEQ ID NO: 3320843 - DNA, 25 bp, Homo sapien
gactggtggtcgtcttggaggccca

SEQ ID NO: 3320844 - DNA, 25 bp, Homo sapien
tagcagacgtcagactggtggtcgt

SEQ ID NO: 3320845 - DNA, 25 bp, Homo sapien
gctgctctcctctgcatattcattt

SEQ ID NO: 3320846 - DNA, 25 bp, Homo sapien
aattctcagccgatgtgaaggaagc

SEQ ID NO: 3320847 - DNA, 25 bp, Homo sapien
ctctaagaaatgctgaagtatcggc

SEQ ID NO: 3320848 - DNA, 25 bp, Homo sapien
tagtgttcccgtttccagcattatt

SEQ ID NO: 3320849 - DNA, 25 bp, Homo sapien
gcatgaggagggatcgtcagattca

SEQ ID NO: 3320850 - DNA, 25 bp, Homo sapien
tattattggaactgtgtctggtggg

SEQ ID NO: 3320851 - DNA, 25 bp, Homo sapien
tgctctttgcttaccattctggtga

SEQ ID NO: 3320852 - DNA, 25 bp, Homo sapien
ttagggacatagaagtacaaagaca

SEQ ID NO: 3320853 - DNA, 25 bp, Homo sapien
tggtttggcataagctacgattgta

SEQ ID NO: 3320854 - DNA, 25 bp, Homo sapien
tctgacagtaaaggagttcacaaaa

SEQ ID NO: 3320855 - DNA, 25 bp, Homo sapien
ttcctcctacccagatatagtaatg

SEQ ID NO: 3320856 - DNA, 25 bp, Homo sapien
tatagtaatgtcctctgtagttcag

SEQ ID NO: 3320857 - DNA, 25 bp, Homo sapien
tctgagattccacattgaaatccta

SEQ ID NO: 3320858 - DNA, 25 bp, Homo sapien
tgtcgtagggctcatcttggtcacc

SEQ ID NO: 3320859 - DNA, 25 bp, Homo sapien
ttactgttgccactaagcagggcca

SEQ ID NO: 3320860 - DNA, 25 bp, Homo sapien
caacagagctgaacctaatgccatc

SEQ ID NO: 3320861 - DNA, 25 bp, Homo sapien
cataaaaagagccaggaggtaacat

SEQ ID NO: 3320862 - DNA, 25 bp, Homo sapien
ttcaagaagagactgccaaggattc

SEQ ID NO: 3320863 - DNA, 25 bp, Homo sapien
tatccacatgatcactgaccagagc

SEQ ID NO: 3320864 - DNA, 25 bp, Homo sapien
gactgcgttacctgagacaagttga

SEQ ID NO: 3320865 - DNA, 25 bp, Homo sapien
accactggagttgcaggttcaagaa

SEQ ID NO: 3320866 - DNA, 25 bp, Homo sapien
cctcggttctatgaaatatggtagc

SEQ ID NO: 3320867 - DNA, 25 bp, Homo sapien
gcattcgaatctcacctgaggtctg

SEQ ID NO: 3320868 - DNA, 25 bp, Homo sapien
tactaccggagttgggctatggaaa

SEQ ID NO: 3320869 - DNA, 25 bp, Homo sapien
caatatgcattgagggtcagagcca

SEQ ID NO: 3320870 - DNA, 25 bp, Homo sapien
ggacatcacatactactgcccagga

SEQ ID NO: 3320871 - DNA, 25 bp, Homo sapien
caagttctggagactagcacatgga

SEQ ID NO: 3320872 - DNA, 25 bp, Homo sapien
tgtaagcaattcaagccgggtgatc

SEQ ID NO: 3320873 - DNA, 25 bp, Homo sapien
gatttagtggcttacgaccaacaca

SEQ ID NO: 3320874 - DNA, 25 bp, Homo sapien
tagaaatatttaagcgtttatcata

SEQ ID NO: 3320875 - DNA, 25 bp, Homo sapien
tgtaaagtggcccaagaacagttat

SEQ ID NO: 3320876 - DNA, 25 bp, Homo sapien
ctgtaaagtggcccaagaacagtta

SEQ ID NO: 3320877 - DNA, 25 bp, Homo sapien
taagcgtttatcataaacattcaca

SEQ ID NO: 3320878 - DNA, 25 bp, Homo sapien
catgctaaaaccacagtgacgcgca

SEQ ID NO: 3320879 - DNA, 25 bp, Homo sapien
cagtaacaacctgcctggagccttg

SEQ ID NO: 3320880 - DNA, 25 bp, Homo sapien
tagatccagaatacaacaggtgact

SEQ ID NO: 3320881 - DNA, 25 bp, Homo sapien
gtgacgcgcagacactagcctagaa

SEQ ID NO: 3320882 - DNA, 25 bp, Homo sapien
catactccggtatgggcctgtgtgg

SEQ ID NO: 3320883 - DNA, 25 bp, Homo sapien
cattttcatccatttctgtcggaga

SEQ ID NO: 3320884 - DNA, 25 bp, Homo sapien
gaggagcagagcgaataagtgccat

SEQ ID NO: 3320885 - DNA, 25 bp, Homo sapien
taagtgccatactccggtatgggcc

SEQ ID NO: 3320886 - DNA, 25 bp, Homo sapien
tctgaccatgcacctgtatggcagg

SEQ ID NO: 3320887 - DNA, 25 bp, Homo sapien
gaaactgatactctccgaatctgac

SEQ ID NO: 3320888 - DNA, 25 bp, Homo sapien
tctgctgtccacgatcagattggtc

SEQ ID NO: 3320889 - DNA, 25 bp, Homo sapien
ccattttatttaggtagcccagctc

SEQ ID NO: 3320890 - DNA, 25 bp, Homo sapien
gcagagaaaactgaactcgggaaac

SEQ ID NO: 3320891 - DNA, 25 bp, Homo sapien
ccgtcatctggagacaagttactgt

SEQ ID NO: 3320892 - DNA, 25 bp, Homo sapien
ggccaggatggtaaaccgtcatctg

SEQ ID NO: 3320893 - DNA, 25 bp, Homo sapien
caccacttcgctggaagggagtttc

SEQ ID NO: 3320894 - DNA, 25 bp, Homo sapien
cagcaaactctgacagtgatatggt

SEQ ID NO: 3320895 - DNA, 25 bp, Homo sapien
tcttatgaaggtataaaaccacagc

SEQ ID NO: 3320896 - DNA, 25 bp, Homo sapien
tactgcactatatcagagcctgagc

SEQ ID NO: 3320897 - DNA, 25 bp, Homo sapien
gggaagagccgaagacagatacata

SEQ ID NO: 3320898 - DNA, 25 bp, Homo sapien
cagtgaactctcttcagctgttcgg

SEQ ID NO: 3320899 - DNA, 25 bp, Homo sapien
ggaaccgagccagggaccagtgacc

SEQ ID NO: 3320900 - DNA, 25 bp, Homo sapien
tctcccggctcagagcgaggggaat

SEQ ID NO: 3320901 - DNA, 25 bp, Homo sapien
tcctccgcgcgggtaagtgtgagcc

SEQ ID NO: 3320902 - DNA, 25 bp, Homo sapien
ttgtaaagagcgcagcggtggcgcg

SEQ ID NO: 3320903 - DNA, 25 bp, Homo sapien
ccttccttcctctcgaggtgacccg

SEQ ID NO: 3320904 - DNA, 25 bp, Homo sapien
tccttcctctcgaggtgacccggca

SEQ ID NO: 3320905 - DNA, 25 bp, Homo sapien
agcggtggcgcggaggttttcaggc

SEQ ID NO: 3320906 - DNA, 25 bp, Homo sapien
cctctcctccagcccgattggcgag

SEQ ID NO: 3320907 - DNA, 25 bp, Homo sapien
cggaccgcgccttcccaaacgagtg

SEQ ID NO: 3320908 - DNA, 25 bp, Homo sapien
ttcccaaacgagtggcctctcctcc

SEQ ID NO: 3320909 - DNA, 25 bp, Homo sapien
ttggtgcgcggtacaccgacccgga

SEQ ID NO: 3320910 - DNA, 25 bp, Homo sapien
gataatatctcctatgagatccctc

SEQ ID NO: 3320911 - DNA, 25 bp, Homo sapien
caggtgtacagtgcccttttttagg

SEQ ID NO: 3320912 - DNA, 25 bp, Homo sapien
tatcagtgccattgcctttctctcc

SEQ ID NO: 3320913 - DNA, 25 bp, Homo sapien
gaagacaatctgactgttgtccaaa

SEQ ID NO: 3320914 - DNA, 25 bp, Homo sapien
atctgcatgagtaggaagccaataa

SEQ ID NO: 3320915 - DNA, 25 bp, Homo sapien
ttcttccgccaagaagacaccaaaa

SEQ ID NO: 3320916 - DNA, 25 bp, Homo sapien
caccaaaattgtatagcatctctat

SEQ ID NO: 3320917 - DNA, 25 bp, Homo sapien
tgagtaggaagccaataattacttt

SEQ ID NO: 3320918 - DNA, 25 bp, Homo sapien
tccttccggctatcaactgcgccat

SEQ ID NO: 3320919 - DNA, 25 bp, Homo sapien
ccctccttccggctatcaactgcgc

SEQ ID NO: 3320920 - DNA, 25 bp, Homo sapien
ccagctccaggggaggttctagcct

SEQ ID NO: 3320921 - DNA, 25 bp, Homo sapien
gctccaggggaggttctagccttac

SEQ ID NO: 3320922 - DNA, 25 bp, Homo sapien
caagcccactctgctgctcgttagg

SEQ ID NO: 3320923 - DNA, 25 bp, Homo sapien
catggccagattagtgcaaacagca

SEQ ID NO: 3320924 - DNA, 25 bp, Homo sapien
gttaacactgacaaagccttagctg

SEQ ID NO: 3320925 - DNA, 25 bp, Homo sapien
gaaagcgtgttctttccagtccctg

SEQ ID NO: 3320926 - DNA, 25 bp, Homo sapien
tcctagggagcacattcatgcccat

SEQ ID NO: 3320927 - DNA, 25 bp, Homo sapien
cagatgtcactgatagttttcctag

SEQ ID NO: 3320928 - DNA, 25 bp, Homo sapien
tgttcatatatccacaaggccttca

SEQ ID NO: 3320929 - DNA, 25 bp, Homo sapien
catgcccatctgttgcagcctagaa

SEQ ID NO: 3320930 - DNA, 25 bp, Homo sapien
ggactgtaagatcaatttttctaag

SEQ ID NO: 3320931 - DNA, 25 bp, Homo sapien
agtcaccatgcctggactgtaagat

SEQ ID NO: 3320932 - DNA, 25 bp, Homo sapien
tttctaagtgacaataatttttgca

SEQ ID NO: 3320933 - DNA, 25 bp, Homo sapien
catgcctggactgtaagatcaattt

SEQ ID NO: 3320934 - DNA, 25 bp, Homo sapien
cagtggcacactggcccccgggtcc

SEQ ID NO: 3320935 - DNA, 25 bp, Homo sapien
tggcacactggcccccgggtcctcc

SEQ ID NO: 3320936 - DNA, 25 bp, Homo sapien
agtggcacactggcccccgggtcct

SEQ ID NO: 3320937 - DNA, 25 bp, Homo sapien
gtggcacactggcccccgggtcctc

SEQ ID NO: 3320938 - DNA, 25 bp, Homo sapien
tttgacctcggattttatacctagc

SEQ ID NO: 3320939 - DNA, 25 bp, Homo sapien
gacattttcagacctgattggctaa

SEQ ID NO: 3320940 - DNA, 25 bp, Homo sapien
aattgagaggacataggttttgacc

SEQ ID NO: 3320941 - DNA, 25 bp, Homo sapien
taaattattctcaagacagctctct

SEQ ID NO: 3320942 - DNA, 25 bp, Homo sapien
cacagctagactcttggtgcataga

SEQ ID NO: 3320943 - DNA, 25 bp, Homo sapien
gctgtgtaagcaattactgtctacg

SEQ ID NO: 3320944 - DNA, 25 bp, Homo sapien
caaagttgagatgaccaagttgctt

SEQ ID NO: 3320945 - DNA, 25 bp, Homo sapien
cagttttcttgagttgagtgggcga

SEQ ID NO: 3320946 - DNA, 25 bp, Homo sapien
ttgcagctgcacaaggagaaaaatg

SEQ ID NO: 3320947 - DNA, 25 bp, Homo sapien
gctccagctttgtcaggtgaacttg

SEQ ID NO: 3320948 - DNA, 25 bp, Homo sapien
ggtgaacttgaaccgggccatcaga

SEQ ID NO: 3320949 - DNA, 25 bp, Homo sapien
tcctttctcgaatgctgcttgcaga

SEQ ID NO: 3320950 - DNA, 25 bp, Homo sapien
tgtaaccttgctaggacggtgcctg

SEQ ID NO: 3320951 - DNA, 25 bp, Homo sapien
tacattaagggttgcagcctcacac

SEQ ID NO: 3320952 - DNA, 25 bp, Homo sapien
tctcccggaggaaatgacaattacc

SEQ ID NO: 3320953 - DNA, 25 bp, Homo sapien
tgcttacgaagacaaccaggagtgt

SEQ ID NO: 3320954 - DNA, 25 bp, Homo sapien
gaaacagcggaattggatccagcac

SEQ ID NO: 3320955 - DNA, 25 bp, Homo sapien
gtggaaacagcggaattggatccag

SEQ ID NO: 3320956 - DNA, 25 bp, Homo sapien
aacagcggaattggatccagcacca

SEQ ID NO: 3320957 - DNA, 25 bp, Homo sapien
agcggaattggatccagcaccacca

SEQ ID NO: 3320958 - DNA, 25 bp, Homo sapien
ctatggctactgttgacccagcgtc

SEQ ID NO: 3320959 - DNA, 25 bp, Homo sapien
tatggctactgttgacccagcgtct

SEQ ID NO: 3320960 - DNA, 25 bp, Homo sapien
tggctactgttgacccagcgtctcc

SEQ ID NO: 3320961 - DNA, 25 bp, Homo sapien
ctactgttgacccagcgtctccagc

SEQ ID NO: 3320962 - DNA, 25 bp, Homo sapien
ttatttcccgaaaggtagcagaaga

SEQ ID NO: 3320963 - DNA, 25 bp, Homo sapien
tgaattttatccatgggctcaggaa

SEQ ID NO: 3320964 - DNA, 25 bp, Homo sapien
tcattcaggaggagtaggtacccag

SEQ ID NO: 3320965 - DNA, 25 bp, Homo sapien
taacactatgcaaaggagagtacag

SEQ ID NO: 3320966 - DNA, 25 bp, Homo sapien
gaaagcagacagaaccacccctgtc

SEQ ID NO: 3320967 - DNA, 25 bp, Homo sapien
tggagaagcagagaatgctagcgaa

SEQ ID NO: 3320968 - DNA, 25 bp, Homo sapien
ccccttcgcgctctgagcagctgga

SEQ ID NO: 3320969 - DNA, 25 bp, Homo sapien
aaagtcgtttgttgtaacgcacaca

SEQ ID NO: 3320970 - DNA, 25 bp, Homo sapien
caccttgcagggaaataataggtcc

SEQ ID NO: 3320971 - DNA, 25 bp, Homo sapien
gcgttctgctttccggatgactgaa

SEQ ID NO: 3320972 - DNA, 25 bp, Homo sapien
taaagagcgactcacttcaacgtcc

SEQ ID NO: 3320973 - DNA, 25 bp, Homo sapien
gccacactggctttcgcgttctgct

SEQ ID NO: 3320974 - DNA, 25 bp, Homo sapien
gatctagctttgttgcttcgctacc

SEQ ID NO: 3320975 - DNA, 25 bp, Homo sapien
agcagacttggggagaccaaacctc

SEQ ID NO: 3320976 - DNA, 25 bp, Homo sapien
tcagcgaagtgaaagatctggatct

SEQ ID NO: 3320977 - DNA, 25 bp, Homo sapien
gcttcgctaccaatagcagacttgg

SEQ ID NO: 3320978 - DNA, 25 bp, Homo sapien
tccgctaggtcaagagtgaagtctg

SEQ ID NO: 3320979 - DNA, 25 bp, Homo sapien
gaagtctgtattagctgtattagtc

SEQ ID NO: 3320980 - DNA, 25 bp, Homo sapien
tgcctctccaccttagccattaggg

SEQ ID NO: 3320981 - DNA, 25 bp, Homo sapien
tgtattagtcttgctcagagctagg

SEQ ID NO: 3320982 - DNA, 25 bp, Homo sapien
gaacacgtgtgtggctgatccggat

SEQ ID NO: 3320983 - DNA, 25 bp, Homo sapien
tttgacaggtgaaattcccacagcc

SEQ ID NO: 3320984 - DNA, 25 bp, Homo sapien
aatgggaataaagcagatgccagcc

SEQ ID NO: 3320985 - DNA, 25 bp, Homo sapien
ggataatgctccgtgtctgcttagg

SEQ ID NO: 3320986 - DNA, 25 bp, Homo sapien
aaaatcattcagatgctaagataca

SEQ ID NO: 3320987 - DNA, 25 bp, Homo sapien
tcgacattaacatctctatgtagaa

SEQ ID NO: 3320988 - DNA, 25 bp, Homo sapien
ggaggagcgtcagtccgctctgcaa

SEQ ID NO: 3320989 - DNA, 25 bp, Homo sapien
gcaaactctttagatatgccaccat

SEQ ID NO: 3320990 - DNA, 25 bp, Homo sapien
caccaagtccttcggcgttaaagag

SEQ ID NO: 3320991 - DNA, 25 bp, Homo sapien
caaccgaggaatcagaaaggctaca

SEQ ID NO: 3320992 - DNA, 25 bp, Homo sapien
tacacctgccctgtgaagtgagatg

SEQ ID NO: 3320993 - DNA, 25 bp, Homo sapien
gatacccaaagccaagaaatgcaag

SEQ ID NO: 3320994 - DNA, 25 bp, Homo sapien
gcccgtctgaatgaaggatacccaa

SEQ ID NO: 3320995 - DNA, 25 bp, Homo sapien
gggctgccaatagtccatgtctgac

SEQ ID NO: 3320996 - DNA, 25 bp, Homo sapien
gatcttggtgagcttggcgtcctcg

SEQ ID NO: 3320997 - DNA, 25 bp, Homo sapien
gcagggtctcggtgagtgcccagat

SEQ ID NO: 3320998 - DNA, 25 bp, Homo sapien
cagcaacactgcctcggagaagagc

SEQ ID NO: 3320999 - DNA, 25 bp, Homo sapien
tttcgctcgcggttgttggccttca

SEQ ID NO: 3321000 - DNA, 25 bp, Homo sapien
ttcttgatgcgctgcaccgtctcgg

SEQ ID NO: 3321001 - DNA, 25 bp, Homo sapien
ttgaggttgtgcatgcggtttcgct

SEQ ID NO: 3321002 - DNA, 25 bp, Homo sapien
ttcagtctacgggtcttcttgatgc

SEQ ID NO: 3321003 - DNA, 25 bp, Homo sapien
gggcgccgtttgcaatcgtgtacca

SEQ ID NO: 3321004 - DNA, 25 bp, Homo sapien
gcgccgtttgcaatcgtgtaccaga

SEQ ID NO: 3321005 - DNA, 25 bp, Homo sapien
cgtttgcaatcgtgtaccagaccca

SEQ ID NO: 3321006 - DNA, 25 bp, Homo sapien
gaagggcgccgtttgcaatcgtgta

SEQ ID NO: 3321007 - DNA, 25 bp, Homo sapien
ggaggccgatccgagcagcactaac

SEQ ID NO: 3321008 - DNA, 25 bp, Homo sapien
cttcgtcggcgctggatgacagcgg

SEQ ID NO: 3321009 - DNA, 25 bp, Homo sapien
aggccgatccgagcagcactaacac

SEQ ID NO: 3321010 - DNA, 25 bp, Homo sapien
gacgcgccccgcctgacgcgcccgg

SEQ ID NO: 3321011 - DNA, 25 bp, Homo sapien
ttcaactccaaggtctcggatttga

SEQ ID NO: 3321012 - DNA, 25 bp, Homo sapien
cttcaactccaaggtctcggatttg

SEQ ID NO: 3321013 - DNA, 25 bp, Homo sapien
tccctccccgagaagggactgcggc

SEQ ID NO: 3321014 - DNA, 25 bp, Homo sapien
tcaggagcgccgctagcgctcgctg

SEQ ID NO: 3321015 - DNA, 25 bp, Homo sapien
tccgcgggcggtcctgcgttccctc

SEQ ID NO: 3321016 - DNA, 25 bp, Homo sapien
tgctgccagtcagccgggtcctgcc

SEQ ID NO: 3321017 - DNA, 25 bp, Homo sapien
gactttggcctgtgccgggaatctc

SEQ ID NO: 3321018 - DNA, 25 bp, Homo sapien
ttcgcccggcgtgaaagctgcaagc

SEQ ID NO: 3321019 - DNA, 25 bp, Homo sapien
tgcctcagcgttgctgtgactttgg

SEQ ID NO: 3321020 - DNA, 25 bp, Homo sapien
aagcccggcgctactgtggcgcagc

SEQ ID NO: 3321021 - DNA, 25 bp, Homo sapien
gcccgggtctcgtgtgttgtggtgg

SEQ ID NO: 3321022 - DNA, 25 bp, Homo sapien
tgcggctcctggcacgcgactccca

SEQ ID NO: 3321023 - DNA, 25 bp, Homo sapien
gcccgcccgggtctcgtgtgttgtg

SEQ ID NO: 3321024 - DNA, 25 bp, Homo sapien
cggctcctggcacgcgactcccagg

SEQ ID NO: 3321025 - DNA, 25 bp, Homo sapien
ccagttaacgcgaagctgcttgtgg

SEQ ID NO: 3321026 - DNA, 25 bp, Homo sapien
cagttaacgcgaagctgcttgtggt

SEQ ID NO: 3321027 - DNA, 25 bp, Homo sapien
tccagttaacgcgaagctgcttgtg

SEQ ID NO: 3321028 - DNA, 25 bp, Homo sapien
ctccagttaacgcgaagctgcttgt

SEQ ID NO: 3321029 - DNA, 25 bp, Homo sapien
tgcggctgttgtcgccgccgctgtc

SEQ ID NO: 3321030 - DNA, 25 bp, Homo sapien
ccgcagaggctcaagctgcggctgt

SEQ ID NO: 3321031 - DNA, 25 bp, Homo sapien
taaagctcctgttggagctccgggc

SEQ ID NO: 3321032 - DNA, 25 bp, Homo sapien
tgtgattggtggctcgcgctcggct

SEQ ID NO: 3321033 - DNA, 25 bp, Homo sapien
tggaggtcgcgaggcgcagctggcc

SEQ ID NO: 3321034 - DNA, 25 bp, Homo sapien
gctggccaatcagggcgccctggac

SEQ ID NO: 3321035 - DNA, 25 bp, Homo sapien
ttaatgaatggaggtcgcgaggcgc

SEQ ID NO: 3321036 - DNA, 25 bp, Homo sapien
aatcagggcgccctggactccggga

SEQ ID NO: 3321037 - DNA, 25 bp, Homo sapien
ctttcagcagctcattaggggcccg

SEQ ID NO: 3321038 - DNA, 25 bp, Homo sapien
ttcagcagctcattaggggcccgag

SEQ ID NO: 3321039 - DNA, 25 bp, Homo sapien
cagcagctcattaggggcccgagcg

SEQ ID NO: 3321040 - DNA, 25 bp, Homo sapien
tttcagcagctcattaggggcccga

SEQ ID NO: 3321041 - DNA, 25 bp, Homo sapien
gcaaggaggcttcctgcgtgggtgg

SEQ ID NO: 3321042 - DNA, 25 bp, Homo sapien
ccagtttatagcctggagggacagc

SEQ ID NO: 3321043 - DNA, 25 bp, Homo sapien
ggcttcctgcgtgggtggcagcgaa

SEQ ID NO: 3321044 - DNA, 25 bp, Homo sapien
tttatagcctggagggacagcaagg

SEQ ID NO: 3321045 - DNA, 25 bp, Homo sapien
tgctcctgcaagcaaatgcgctgcg

SEQ ID NO: 3321046 - DNA, 25 bp, Homo sapien
agcaaatgcgctgcgctgacatttc

SEQ ID NO: 3321047 - DNA, 25 bp, Homo sapien
tgcgctgcgctgacatttctgtgac

SEQ ID NO: 3321048 - DNA, 25 bp, Homo sapien
ctgcaagcaaatgcgctgcgctgac

SEQ ID NO: 3321049 - DNA, 25 bp, Homo sapien
gggaaacttgttctcaattgctcgt

SEQ ID NO: 3321050 - DNA, 25 bp, Homo sapien
gttctcaattgctcgttagccctcc

SEQ ID NO: 3321051 - DNA, 25 bp, Homo sapien
agagctgaagggctactggacctcg

SEQ ID NO: 3321052 - DNA, 25 bp, Homo sapien
agaaaaaagagctgaagggctactg

SEQ ID NO: 3321053 - DNA, 25 bp, Homo sapien
tgaattcggagtttctgacggtccc

SEQ ID NO: 3321054 - DNA, 25 bp, Homo sapien
caggagagcctggtatggaaacaat

SEQ ID NO: 3321055 - DNA, 25 bp, Homo sapien
agagcaccccttgcaacgctaggat

SEQ ID NO: 3321056 - DNA, 25 bp, Homo sapien
tgcaggctagaaacgcagcttccag

SEQ ID NO: 3321057 - DNA, 25 bp, Homo sapien
cagctccgagccttgagtcagaaag

SEQ ID NO: 3321058 - DNA, 25 bp, Homo sapien
actttaagatgttaatccccagcat

SEQ ID NO: 3321059 - DNA, 25 bp, Homo sapien
gtcagaaagtctcatagactttaag

SEQ ID NO: 3321060 - DNA, 25 bp, Homo sapien
aagtctcatagactttaagatgtta

SEQ ID NO: 3321061 - DNA, 25 bp, Homo sapien
tacaagagtggtatgggctgccaat

SEQ ID NO: 3321062 - DNA, 25 bp, Homo sapien
gctccgacggagacgtgatatgtca

SEQ ID NO: 3321063 - DNA, 25 bp, Homo sapien
aaccatatggcctgggtggctcgag

SEQ ID NO: 3321064 - DNA, 25 bp, Homo sapien
tgaaggctttattccggctccgacg

SEQ ID NO: 3321065 - DNA, 25 bp, Homo sapien
ttgagttctaatagattgttgattg

SEQ ID NO: 3321066 - DNA, 25 bp, Homo sapien
cctgttgagttctaatagattgttg

SEQ ID NO: 3321067 - DNA, 25 bp, Homo sapien
gagttctaatagattgttgattgag

SEQ ID NO: 3321068 - DNA, 25 bp, Homo sapien
tgttgagttctaatagattgttgat

SEQ ID NO: 3321069 - DNA, 25 bp, Homo sapien
gatagttgccaagtttaagaacaac

SEQ ID NO: 3321070 - DNA, 25 bp, Homo sapien
ctgcagtttcaaaagccgaaagaaa

SEQ ID NO: 3321071 - DNA, 25 bp, Homo sapien
acctcccctagggttctgatagttg

SEQ ID NO: 3321072 - DNA, 25 bp, Homo sapien
cctagggttctgatagttgccaagt

SEQ ID NO: 3321073 - DNA, 25 bp, Homo sapien
ggccgccgcaaggtgggtgacgtac

SEQ ID NO: 3321074 - DNA, 25 bp, Homo sapien
tttgggctgcctccagaatcgcagt

SEQ ID NO: 3321075 - DNA, 25 bp, Homo sapien
ccgccgcaaggtgggtgacgtacgg

SEQ ID NO: 3321076 - DNA, 25 bp, Homo sapien
ctgatgacagcagagtggtccagct

SEQ ID NO: 3321077 - DNA, 25 bp, Homo sapien
cttcaaagacttcgccaaaaggagg

SEQ ID NO: 3321078 - DNA, 25 bp, Homo sapien
cgggagcttccttcggctttaggtg

SEQ ID NO: 3321079 - DNA, 25 bp, Homo sapien
ccttcaaagacttcgccaaaaggag

SEQ ID NO: 3321080 - DNA, 25 bp, Homo sapien
gccttcaaagacttcgccaaaagga

SEQ ID NO: 3321081 - DNA, 25 bp, Homo sapien
tcttcaaaggtctagcttctacttc

SEQ ID NO: 3321082 - DNA, 25 bp, Homo sapien
ctagtcttcaaaggtctagcttcta

SEQ ID NO: 3321083 - DNA, 25 bp, Homo sapien
cttcaaaggtctagcttctacttca

SEQ ID NO: 3321084 - DNA, 25 bp, Homo sapien
agtcttcaaaggtctagcttctact

SEQ ID NO: 3321085 - DNA, 25 bp, Homo sapien
tatacaggtattctctataacctgc

SEQ ID NO: 3321086 - DNA, 25 bp, Homo sapien
ctctataacctgccccttgtaaaat

SEQ ID NO: 3321087 - DNA, 25 bp, Homo sapien
ttgaagtatacaggtattctctata

SEQ ID NO: 3321088 - DNA, 25 bp, Homo sapien
tataacctgccccttgtaaaattca

SEQ ID NO: 3321089 - DNA, 25 bp, Homo sapien
tcatgtaaaatgagtctgaatttac

SEQ ID NO: 3321090 - DNA, 25 bp, Homo sapien
aatatcatatttttaataagagggt

SEQ ID NO: 3321091 - DNA, 25 bp, Homo sapien
acatgtgtttactatgttatttaaa

SEQ ID NO: 3321092 - DNA, 25 bp, Homo sapien
aaatatatcatgtaaaatgagtctg

SEQ ID NO: 3321093 - DNA, 25 bp, Homo sapien
ctggtttgcatgttgcaatccatct

SEQ ID NO: 3321094 - DNA, 25 bp, Homo sapien
gctgtggttcatactggtttgcatg

SEQ ID NO: 3321095 - DNA, 25 bp, Homo sapien
ggtttgcatgttgcaatccatcttc

SEQ ID NO: 3321096 - DNA, 25 bp, Homo sapien
tactggtttgcatgttgcaatccat

SEQ ID NO: 3321097 - DNA, 25 bp, Homo sapien
gcagtgttggatcactcgtccccaa

SEQ ID NO: 3321098 - DNA, 25 bp, Homo sapien
tttaatatcaggatggtgaaagtcc

SEQ ID NO: 3321099 - DNA, 25 bp, Homo sapien
tcaaacaggctaaatttcccacaat

SEQ ID NO: 3321100 - DNA, 25 bp, Homo sapien
aagcatctactgtggacacctgcac

SEQ ID NO: 3321101 - DNA, 25 bp, Homo sapien
tctattgctgggtaactcatttgga

SEQ ID NO: 3321102 - DNA, 25 bp, Homo sapien
tgccgcaacagctgtaaactaaatt

SEQ ID NO: 3321103 - DNA, 25 bp, Homo sapien
tctagttagaagtaattggctcatg

SEQ ID NO: 3321104 - DNA, 25 bp, Homo sapien
cattttggataacagagattcagtc

SEQ ID NO: 3321105 - DNA, 25 bp, Homo sapien
tagagcctgctattccacttgcaat

SEQ ID NO: 3321106 - DNA, 25 bp, Homo sapien
ttgagtgtaaacgtagcttctgcca

SEQ ID NO: 3321107 - DNA, 25 bp, Homo sapien
gttatcacaccaatcatagagcctg

SEQ ID NO: 3321108 - DNA, 25 bp, Homo sapien
gcttctgccacattatgaaagctgt

SEQ ID NO: 3321109 - DNA, 25 bp, Homo sapien
cacagggttggtagccattccaata

SEQ ID NO: 3321110 - DNA, 25 bp, Homo sapien
tagcactgattgcaggatgacaacg

SEQ ID NO: 3321111 - DNA, 25 bp, Homo sapien
gatgacaacggtattgagttctcaa

SEQ ID NO: 3321112 - DNA, 25 bp, Homo sapien
cattccaataaagggctccgctcta

SEQ ID NO: 3321113 - DNA, 25 bp, Homo sapien
taaaaggcattgaaaataggtacat

SEQ ID NO: 3321114 - DNA, 25 bp, Homo sapien
cttttgaaattctcgtaaatggcat

SEQ ID NO: 3321115 - DNA, 25 bp, Homo sapien
tgagaactatctatatggatcaagc

SEQ ID NO: 3321116 - DNA, 25 bp, Homo sapien
ccacccagacttgacattagccata

SEQ ID NO: 3321117 - DNA, 25 bp, Homo sapien
gggatccccaacaagaatcagcttt

SEQ ID NO: 3321118 - DNA, 25 bp, Homo sapien
gaggtagctgtttgggatccccaac

SEQ ID NO: 3321119 - DNA, 25 bp, Homo sapien
gaaccctgaatagtaggaggtagct

SEQ ID NO: 3321120 - DNA, 25 bp, Homo sapien
tgttccaatccattttcatgagctg

SEQ ID NO: 3321121 - DNA, 25 bp, Homo sapien
tgcagtcgttcaatccctgctcact

SEQ ID NO: 3321122 - DNA, 25 bp, Homo sapien
ggagtgcagtcgttcaatccctgct

SEQ ID NO: 3321123 - DNA, 25 bp, Homo sapien
gtgcagtcgttcaatccctgctcac

SEQ ID NO: 3321124 - DNA, 25 bp, Homo sapien
tcatccagcacaactacaggaaatt

SEQ ID NO: 3321125 - DNA, 25 bp, Homo sapien
agagaggccggttcagttatctgac

SEQ ID NO: 3321126 - DNA, 25 bp, Homo sapien
caggctgcacaggtaactccaacta

SEQ ID NO: 3321127 - DNA, 25 bp, Homo sapien
attcatgcatgggaatgggcaggct

SEQ ID NO: 3321128 - DNA, 25 bp, Homo sapien
caatgatggaccagatgtatgatga

SEQ ID NO: 3321129 - DNA, 25 bp, Homo sapien
aattcccagcccttagtgacatcac

SEQ ID NO: 3321130 - DNA, 25 bp, Homo sapien
taagttacacattatagcagcatgc

SEQ ID NO: 3321131 - DNA, 25 bp, Homo sapien
tgtagtcactgacctagtagcccgc

SEQ ID NO: 3321132 - DNA, 25 bp, Homo sapien
tagttttattgtgaagacatgccac

SEQ ID NO: 3321133 - DNA, 25 bp, Homo sapien
tgttgctgagattctaacagcagaa

SEQ ID NO: 3321134 - DNA, 25 bp, Homo sapien
ctctaaagttatgtgtcaagaagca

SEQ ID NO: 3321135 - DNA, 25 bp, Homo sapien
gaaaagattttgttactgacctagc

SEQ ID NO: 3321136 - DNA, 25 bp, Homo sapien
cctcactgatgttaggcttggccgt

SEQ ID NO: 3321137 - DNA, 25 bp, Homo sapien
aagttaccaatgtgcaagtggccca

SEQ ID NO: 3321138 - DNA, 25 bp, Homo sapien
tagctgatcaatacagtgtcccaag

SEQ ID NO: 3321139 - DNA, 25 bp, Homo sapien
gcttggccgtgtgacctgtgcaaat

SEQ ID NO: 3321140 - DNA, 25 bp, Homo sapien
ctttcattagtgcatgtagttcttt

SEQ ID NO: 3321141 - DNA, 25 bp, Homo sapien
tctttccgtaggagtcaggtcttct

SEQ ID NO: 3321142 - DNA, 25 bp, Homo sapien
gctcaatgctttttctcacatagac

SEQ ID NO: 3321143 - DNA, 25 bp, Homo sapien
ggtccccagtttatgctgctcaatg

SEQ ID NO: 3321144 - DNA, 25 bp, Homo sapien
attggtttggcaatcttcctaacac

SEQ ID NO: 3321145 - DNA, 25 bp, Homo sapien
aattggtttggcaatcttcctaaca

SEQ ID NO: 3321146 - DNA, 25 bp, Homo sapien
actgccagcaagtaactctttcctg

SEQ ID NO: 3321147 - DNA, 25 bp, Homo sapien
gtgggagcttcactcttttcaaaca

SEQ ID NO: 3321148 - DNA, 25 bp, Homo sapien
aatggtgggagcttcactcttttca

SEQ ID NO: 3321149 - DNA, 25 bp, Homo sapien
tcaccactgccagcaagtaactctt

SEQ ID NO: 3321150 - DNA, 25 bp, Homo sapien
cttcaatgctttcatgtgatgccat

SEQ ID NO: 3321151 - DNA, 25 bp, Homo sapien
agggaaggtatgagtttgcagttcc

SEQ ID NO: 3321152 - DNA, 25 bp, Homo sapien
caatgctttcatgtgatgccatcat

SEQ ID NO: 3321153 - DNA, 25 bp, Homo sapien
tagggaaggtatgagtttgcagttc

SEQ ID NO: 3321154 - DNA, 25 bp, Homo sapien
gatccttgtttaacttgtgtacctg

SEQ ID NO: 3321155 - DNA, 25 bp, Homo sapien
gagctatttgaattagagctgtagc

SEQ ID NO: 3321156 - DNA, 25 bp, Homo sapien
tgtgtacctgaatcaactcactagc

SEQ ID NO: 3321157 - DNA, 25 bp, Homo sapien
gctcctaggctgagtagttcaaatt

SEQ ID NO: 3321158 - DNA, 25 bp, Homo sapien
gatacatactccaatatcgaggagg

SEQ ID NO: 3321159 - DNA, 25 bp, Homo sapien
ggcggactgactttaaaacccatgc

SEQ ID NO: 3321160 - DNA, 25 bp, Homo sapien
tactacatgctgacactttgttgag

SEQ ID NO: 3321161 - DNA, 25 bp, Homo sapien
gttagttaattatcccaagtacaga

SEQ ID NO: 3321162 - DNA, 25 bp, Homo sapien
tctttttaaccactgacagagaata

SEQ ID NO: 3321163 - DNA, 25 bp, Homo sapien
atgtcatagtctgaaaaataattac

SEQ ID NO: 3321164 - DNA, 25 bp, Homo sapien
taaccactgacagagaataatgtca

SEQ ID NO: 3321165 - DNA, 25 bp, Homo sapien
taatgtcatagtctgaaaaataatt

SEQ ID NO: 3321166 - DNA, 25 bp, Homo sapien
catatttacttctgattaccatttt

SEQ ID NO: 3321167 - DNA, 25 bp, Homo sapien
ttttcatatttacttctgattacca

SEQ ID NO: 3321168 - DNA, 25 bp, Homo sapien
gaattttcatatttacttctgatta

SEQ ID NO: 3321169 - DNA, 25 bp, Homo sapien
ttcatatttacttctgattaccatt

SEQ ID NO: 3321170 - DNA, 25 bp, Homo sapien
tactgtgttagaggtagagtagctg

SEQ ID NO: 3321171 - DNA, 25 bp, Homo sapien
agtagctggattaaagtagtcctga

SEQ ID NO: 3321172 - DNA, 25 bp, Homo sapien
tctgtgctagcattacaaaccaata

SEQ ID NO: 3321173 - DNA, 25 bp, Homo sapien
tgtttttcaaagtagtcagttctgt

SEQ ID NO: 3321174 - DNA, 25 bp, Homo sapien
gatgatggtccaaagaaagcactac

SEQ ID NO: 3321175 - DNA, 25 bp, Homo sapien
cactacatgcgataaaagtatccag

SEQ ID NO: 3321176 - DNA, 25 bp, Homo sapien
tatccagctcaaagtctagggtttt

SEQ ID NO: 3321177 - DNA, 25 bp, Homo sapien
tgggccaattagaagggaaatagcc

SEQ ID NO: 3321178 - DNA, 25 bp, Homo sapien
gctatccatgccaaacgtgtaacaa

SEQ ID NO: 3321179 - DNA, 25 bp, Homo sapien
ctatccatgccaaacgtgtaacaat

SEQ ID NO: 3321180 - DNA, 25 bp, Homo sapien
ccatccccaattgtactgggacaaa

SEQ ID NO: 3321181 - DNA, 25 bp, Homo sapien
ttgtactgggacaaatagggcctac

SEQ ID NO: 3321182 - DNA, 25 bp, Homo sapien
gttcttacttcccatcccatcctct

SEQ ID NO: 3321183 - DNA, 25 bp, Homo sapien
ttccccatccccaattgtactggga

SEQ ID NO: 3321184 - DNA, 25 bp, Homo sapien
ggcaatttatacttctggtccagaa

SEQ ID NO: 3321185 - DNA, 25 bp, Homo sapien
aatttatacttctggtccagaaatc

SEQ ID NO: 3321186 - DNA, 25 bp, Homo sapien
aaggcaatttatacttctggtccag

SEQ ID NO: 3321187 - DNA, 25 bp, Homo sapien
gcaatttatacttctggtccagaaa

SEQ ID NO: 3321188 - DNA, 25 bp, Homo sapien
aagaattctacagtctaagaaatga

SEQ ID NO: 3321189 - DNA, 25 bp, Homo sapien
cacctccaaactcctagggctaaag

SEQ ID NO: 3321190 - DNA, 25 bp, Homo sapien
tctgtgccataaagtgtggagaaaa

SEQ ID NO: 3321191 - DNA, 25 bp, Homo sapien
gggtagcaatgcaagttctgtgcca

SEQ ID NO: 3321192 - DNA, 25 bp, Homo sapien
gctgaccagattgggatgggccttc

SEQ ID NO: 3321193 - DNA, 25 bp, Homo sapien
ggctctccaccccatagctcattta

SEQ ID NO: 3321194 - DNA, 25 bp, Homo sapien
tcatttacaccctcaactccctgag

SEQ ID NO: 3321195 - DNA, 25 bp, Homo sapien
tgaccagattgggatgggccttccc

SEQ ID NO: 3321196 - DNA, 25 bp, Homo sapien
agctgaagatctttccttccgactt

SEQ ID NO: 3321197 - DNA, 25 bp, Homo sapien
agatctttccttccgacttagctta

SEQ ID NO: 3321198 - DNA, 25 bp, Homo sapien
tcaggatttacagtagtaaacttct

SEQ ID NO: 3321199 - DNA, 25 bp, Homo sapien
ccttccgacttagcttaagataaag

SEQ ID NO: 3321200 - DNA, 25 bp, Homo sapien
ggagtcacgtcctcaagccatttaa

SEQ ID NO: 3321201 - DNA, 25 bp, Homo sapien
tccttcctgtgttgaatatcctgga

SEQ ID NO: 3321202 - DNA, 25 bp, Homo sapien
gctggcattcctcataaagtggtat

SEQ ID NO: 3321203 - DNA, 25 bp, Homo sapien
catgccaggtcgagctccttcctgt

SEQ ID NO: 3321204 - DNA, 25 bp, Homo sapien
tacccaacaacatagtacgagcatg

SEQ ID NO: 3321205 - DNA, 25 bp, Homo sapien
tagctaacaatgaagtgggatatgc

SEQ ID NO: 3321206 - DNA, 25 bp, Homo sapien
tctcattcgcgtaagtacacacaca

SEQ ID NO: 3321207 - DNA, 25 bp, Homo sapien
tatgcaaatggtggaagcaaactgt

SEQ ID NO: 3321208 - DNA, 25 bp, Homo sapien
ggttttgtgctaacccaaacagcaa

SEQ ID NO: 3321209 - DNA, 25 bp, Homo sapien
gatggcaggatggtacattattttc

SEQ ID NO: 3321210 - DNA, 25 bp, Homo sapien
cccttcaatgatgtataaaatgata

SEQ ID NO: 3321211 - DNA, 25 bp, Homo sapien
catgacaagttttgcaggttgacta

SEQ ID NO: 3321212 - DNA, 25 bp, Homo sapien
tactgtcaaaaactagaacatatga

SEQ ID NO: 3321213 - DNA, 25 bp, Homo sapien
actgtcaaaaactagaacatatgaa

SEQ ID NO: 3321214 - DNA, 25 bp, Homo sapien
tgtcaaaaactagaacatatgaaaa

SEQ ID NO: 3321215 - DNA, 25 bp, Homo sapien
gttactgtcaaaaactagaacatat

SEQ ID NO: 3321216 - DNA, 25 bp, Homo sapien
tgatacaataaaaacacaacagcca

SEQ ID NO: 3321217 - DNA, 25 bp, Homo sapien
tgaagcagcaatcatgatacaataa

SEQ ID NO: 3321218 - DNA, 25 bp, Homo sapien
tacaataaaaacacaacagccatac

SEQ ID NO: 3321219 - DNA, 25 bp, Homo sapien
atgaagcagcaatcatgatacaata

SEQ ID NO: 3321220 - DNA, 25 bp, Homo sapien
agtctgcttataatgagcaggagac

SEQ ID NO: 3321221 - DNA, 25 bp, Homo sapien
ggagactgaaaaacagctggtatgt

SEQ ID NO: 3321222 - DNA, 25 bp, Homo sapien
tgcttataatgagcaggagactgaa

SEQ ID NO: 3321223 - DNA, 25 bp, Homo sapien
gctggtatgtgaatttgcctttggg

SEQ ID NO: 3321224 - DNA, 25 bp, Homo sapien
agctacgaatggcaattttaaccct

SEQ ID NO: 3321225 - DNA, 25 bp, Homo sapien
gaaaccaaatatagcaagaatagct

SEQ ID NO: 3321226 - DNA, 25 bp, Homo sapien
tctaggatccttgaaaattactttc

SEQ ID NO: 3321227 - DNA, 25 bp, Homo sapien
attcaagttatcatagcaactccag

SEQ ID NO: 3321228 - DNA, 25 bp, Homo sapien
gactgctaaaatcctgccgctgttg

SEQ ID NO: 3321229 - DNA, 25 bp, Homo sapien
tctggaaaccgaatcttgactgcta

SEQ ID NO: 3321230 - DNA, 25 bp, Homo sapien
tgcacagagtctaaagagctttcat

SEQ ID NO: 3321231 - DNA, 25 bp, Homo sapien
tagttgtagcaggtagaccctccta

SEQ ID NO: 3321232 - DNA, 25 bp, Homo sapien
tattattaagtgaaacatcccctgg

SEQ ID NO: 3321233 - DNA, 25 bp, Homo sapien
aatgagagtctaagtcaggtggccc

SEQ ID NO: 3321234 - DNA, 25 bp, Homo sapien
tcaactctgtttggagtagccacgt

SEQ ID NO: 3321235 - DNA, 25 bp, Homo sapien
ggtcctcaggctcaatgctaaacga

SEQ ID NO: 3321236 - DNA, 25 bp, Homo sapien
gatattagagcaatgtggtaacgac

SEQ ID NO: 3321237 - DNA, 25 bp, Homo sapien
agacagatattagagcaatgtggta

SEQ ID NO: 3321238 - DNA, 25 bp, Homo sapien
attagagcaatgtggtaacgactac

SEQ ID NO: 3321239 - DNA, 25 bp, Homo sapien
cagatattagagcaatgtggtaacg

SEQ ID NO: 3321240 - DNA, 25 bp, Homo sapien
tctcttgagttcaaagaaaaggtag

SEQ ID NO: 3321241 - DNA, 25 bp, Homo sapien
agggacgtctcagagaattctacca

SEQ ID NO: 3321242 - DNA, 25 bp, Homo sapien
catcaggtaaagttcttgctttcag

SEQ ID NO: 3321243 - DNA, 25 bp, Homo sapien
cagggctcaatgtagagatgttttc

SEQ ID NO: 3321244 - DNA, 25 bp, Homo sapien
tgtaagcaactcatgctaggaaggc

SEQ ID NO: 3321245 - DNA, 25 bp, Homo sapien
gcaatgggcattcttaagttgtcaa

SEQ ID NO: 3321246 - DNA, 25 bp, Homo sapien
tggaaaaactttgccccagtattca

SEQ ID NO: 3321247 - DNA, 25 bp, Homo sapien
ttttcaacatgcaaagtctcccaaa

SEQ ID NO: 3321248 - DNA, 25 bp, Homo sapien
gcaacagaatactacaccagcaatt

SEQ ID NO: 3321249 - DNA, 25 bp, Homo sapien
cttctgagatgctgagaatgctcta

SEQ ID NO: 3321250 - DNA, 25 bp, Homo sapien
gaaatctgcctttggtagcaactag

SEQ ID NO: 3321251 - DNA, 25 bp, Homo sapien
tagcaactagaggtactcagtgtca

SEQ ID NO: 3321252 - DNA, 25 bp, Homo sapien
cacaaaatgtagtattaacataaag

SEQ ID NO: 3321253 - DNA, 25 bp, Homo sapien
aaaatgatttggcaaaatgcaacta

SEQ ID NO: 3321254 - DNA, 25 bp, Homo sapien
aatgatttggcaaaatgcaactata

SEQ ID NO: 3321255 - DNA, 25 bp, Homo sapien
tgatttggcaaaatgcaactataaa

SEQ ID NO: 3321256 - DNA, 25 bp, Homo sapien
gttttcatactcagtgctatctgga

SEQ ID NO: 3321257 - DNA, 25 bp, Homo sapien
taactctggtgtctctgtcataaag

SEQ ID NO: 3321258 - DNA, 25 bp, Homo sapien
tgagctgtgtcctctgaccattaca

SEQ ID NO: 3321259 - DNA, 25 bp, Homo sapien
tggaaactgactgcatcctagctgt

SEQ ID NO: 3321260 - DNA, 25 bp, Homo sapien
tgggtaacaaattcaaagtgcatcg

SEQ ID NO: 3321261 - DNA, 25 bp, Homo sapien
tacaggaactattgtaaataccagg

SEQ ID NO: 3321262 - DNA, 25 bp, Homo sapien
taatgctgaaaaccgggaaattctc

SEQ ID NO: 3321263 - DNA, 25 bp, Homo sapien
gaactgcataactatatgttgacat

SEQ ID NO: 3321264 - DNA, 25 bp, Homo sapien
gtaccttgccttctatgctgccatg

SEQ ID NO: 3321265 - DNA, 25 bp, Homo sapien
taggtagcactacttagatgttggt

SEQ ID NO: 3321266 - DNA, 25 bp, Homo sapien
tagatctcttccagaggtgtgttgg

SEQ ID NO: 3321267 - DNA, 25 bp, Homo sapien
gcctggccaaaataggtaccttgcc

SEQ ID NO: 3321268 - DNA, 25 bp, Homo sapien
ggttaaataaatcgatgttcttcac

SEQ ID NO: 3321269 - DNA, 25 bp, Homo sapien
ttggttaaataaatcgatgttcttc

SEQ ID NO: 3321270 - DNA, 25 bp, Homo sapien
tgtagttggttaaataaatcgatgt

SEQ ID NO: 3321271 - DNA, 25 bp, Homo sapien
taaataaatcgatgttcttcacaaa

SEQ ID NO: 3321272 - DNA, 25 bp, Homo sapien
ctatttgtttaggaataacagcttg

SEQ ID NO: 3321273 - DNA, 25 bp, Homo sapien
gtttaggaataacagcttgaaaagc

SEQ ID NO: 3321274 - DNA, 25 bp, Homo sapien
tttgtttaggaataacagcttgaaa

SEQ ID NO: 3321275 - DNA, 25 bp, Homo sapien
tagggtcacaggtttttctctctat

SEQ ID NO: 3321276 - DNA, 25 bp, Homo sapien
aagtggttcacttagttcaacttca

SEQ ID NO: 3321277 - DNA, 25 bp, Homo sapien
tgaagtggttcacttagttcaactt

SEQ ID NO: 3321278 - DNA, 25 bp, Homo sapien
gaagtggttcacttagttcaacttc

SEQ ID NO: 3321279 - DNA, 25 bp, Homo sapien
tgttgagaatccttgtgcagatgag

SEQ ID NO: 3321280 - DNA, 25 bp, Homo sapien
gttgagaatccttgtgcagatgagg

SEQ ID NO: 3321281 - DNA, 25 bp, Homo sapien
ctaaagcagtactgtgttcacatag

SEQ ID NO: 3321282 - DNA, 25 bp, Homo sapien
gctatctggctcatacgtctgttga

SEQ ID NO: 3321283 - DNA, 25 bp, Homo sapien
cagtttcaacctcaacatggtcagg

SEQ ID NO: 3321284 - DNA, 25 bp, Homo sapien
tactagaagttgagggtaaaacatg

SEQ ID NO: 3321285 - DNA, 25 bp, Homo sapien
caaaataaaaggctgaggttgagca

SEQ ID NO: 3321286 - DNA, 25 bp, Homo sapien
aaataaaaggctgaggttgagcatc

SEQ ID NO: 3321287 - DNA, 25 bp, Homo sapien
tcccaaaataaaaggctgaggttga

SEQ ID NO: 3321288 - DNA, 25 bp, Homo sapien
ataaaaggctgaggttgagcatctt

SEQ ID NO: 3321289 - DNA, 25 bp, Homo sapien
gacttcttgaataggtttattagca

SEQ ID NO: 3321290 - DNA, 25 bp, Homo sapien
cgtatacagcatcagtccacttgaa

SEQ ID NO: 3321291 - DNA, 25 bp, Homo sapien
tgcttaatgtgtcactatactcctc

SEQ ID NO: 3321292 - DNA, 25 bp, Homo sapien
gatggcagagtctctttaacaggaa

SEQ ID NO: 3321293 - DNA, 25 bp, Homo sapien
tgtcctttacccaactctctgaatc

SEQ ID NO: 3321294 - DNA, 25 bp, Homo sapien
aacatgaattgccatcattaaccaa

SEQ ID NO: 3321295 - DNA, 25 bp, Homo sapien
tattctcagacctcttttgaaaaca

SEQ ID NO: 3321296 - DNA, 25 bp, Homo sapien
tctcttcacagtttgtattctcaga

SEQ ID NO: 3321297 - DNA, 25 bp, Homo sapien
gatcctttaatgcaccccttgtcat

SEQ ID NO: 3321298 - DNA, 25 bp, Homo sapien
tcagttctggcagagatgactctga

SEQ ID NO: 3321299 - DNA, 25 bp, Homo sapien
tctgcactgctacaagtaacctgta

SEQ ID NO: 3321300 - DNA, 25 bp, Homo sapien
tccaggatggatcattattaccgac

SEQ ID NO: 3321301 - DNA, 25 bp, Homo sapien
tgtgctcttcatctcagcacactct

SEQ ID NO: 3321302 - DNA, 25 bp, Homo sapien
tataggtgaactctgtgaggataaa

SEQ ID NO: 3321303 - DNA, 25 bp, Homo sapien
ctacagtagaagaatgtataggtga

SEQ ID NO: 3321304 - DNA, 25 bp, Homo sapien
ggataaatacatggcccaccggctt

SEQ ID NO: 3321305 - DNA, 25 bp, Homo sapien
tcttttcacaggctcattggtcagt

SEQ ID NO: 3321306 - DNA, 25 bp, Homo sapien
tggaacctgacgtggtccttgaaaa

SEQ ID NO: 3321307 - DNA, 25 bp, Homo sapien
tgtaagtcacaatgttctcagggtc

SEQ ID NO: 3321308 - DNA, 25 bp, Homo sapien
tagatgattcggacttcagaagagc

SEQ ID NO: 3321309 - DNA, 25 bp, Homo sapien
tgacatccaagagatcggccagagg

SEQ ID NO: 3321310 - DNA, 25 bp, Homo sapien
gggctgacatccaagagatcggcca

SEQ ID NO: 3321311 - DNA, 25 bp, Homo sapien
ctttttaagccagagggctgacatc

SEQ ID NO: 3321312 - DNA, 25 bp, Homo sapien
agatcggccagaggatataaatgtc

SEQ ID NO: 3321313 - DNA, 25 bp, Homo sapien
tacctatggctccagcaactttaac

SEQ ID NO: 3321314 - DNA, 25 bp, Homo sapien
gattaagtatcgatcactttctaag

SEQ ID NO: 3321315 - DNA, 25 bp, Homo sapien
tctttattgacattctgcttaacaa

SEQ ID NO: 3321316 - DNA, 25 bp, Homo sapien
tcttcaactgtgattaagtatcgat

SEQ ID NO: 3321317 - DNA, 25 bp, Homo sapien
tttaagaaacagactctccaaacat

SEQ ID NO: 3321318 - DNA, 25 bp, Homo sapien
ggcatttaagaaacagactctccaa

SEQ ID NO: 3321319 - DNA, 25 bp, Homo sapien
aacagactctccaaacatgctcctt

SEQ ID NO: 3321320 - DNA, 25 bp, Homo sapien
aagaaacagactctccaaacatgct

SEQ ID NO: 3321321 - DNA, 25 bp, Homo sapien
gaacaacacaattatgcttttctta

SEQ ID NO: 3321322 - DNA, 25 bp, Homo sapien
tcttaaacttcttcaagaggaaata

SEQ ID NO: 3321323 - DNA, 25 bp, Homo sapien
ttaaaaaggaacaacacaattatgc

SEQ ID NO: 3321324 - DNA, 25 bp, Homo sapien
aaggaacaacacaattatgcttttc

SEQ ID NO: 3321325 - DNA, 25 bp, Homo sapien
ccaagactgtgccactgcactccag

SEQ ID NO: 3321326 - DNA, 25 bp, Homo sapien
taatcacttgaaccttggatgcaga

SEQ ID NO: 3321327 - DNA, 25 bp, Homo sapien
ggataatcacttgaaccttggatgc

SEQ ID NO: 3321328 - DNA, 25 bp, Homo sapien
ggttgtagtgagccaagactgtgcc

SEQ ID NO: 3321329 - DNA, 25 bp, Homo sapien
tttcctaagtgagtgatcttcagaa

SEQ ID NO: 3321330 - DNA, 25 bp, Homo sapien
tcctaagtgagtgatcttcagaatt

SEQ ID NO: 3321331 - DNA, 25 bp, Homo sapien
taagtgagtgatcttcagaattcca

SEQ ID NO: 3321332 - DNA, 25 bp, Homo sapien
tgtttcctaagtgagtgatcttcag

SEQ ID NO: 3321333 - DNA, 25 bp, Homo sapien
tatttcttctgaagttataaaccag

SEQ ID NO: 3321334 - DNA, 25 bp, Homo sapien
taggaaatattcaactatttatacc

SEQ ID NO: 3321335 - DNA, 25 bp, Homo sapien
aataggaaatattcaactatttata

SEQ ID NO: 3321336 - DNA, 25 bp, Homo sapien
ctgggtccagaaaataggaaatatt

SEQ ID NO: 3321337 - DNA, 25 bp, Homo sapien
ggaaatattcaactatttataccac

SEQ ID NO: 3321338 - DNA, 25 bp, Homo sapien
tcccggttctcttcttaaggagcag

SEQ ID NO: 3321339 - DNA, 25 bp, Homo sapien
taggaaatcccgagaaacacttcac

SEQ ID NO: 3321340 - DNA, 25 bp, Homo sapien
tacaagcagtccgagtagctgtgac

SEQ ID NO: 3321341 - DNA, 25 bp, Homo sapien
aaatcgctcaagtcattcctaggaa

SEQ ID NO: 3321342 - DNA, 25 bp, Homo sapien
taacgcgggacctcaccagatgagg

SEQ ID NO: 3321343 - DNA, 25 bp, Homo sapien
ttctcccgcgaaacaacgtgacgtc

SEQ ID NO: 3321344 - DNA, 25 bp, Homo sapien
aatccactttcgaatttctcccgcg

SEQ ID NO: 3321345 - DNA, 25 bp, Homo sapien
gatgaggacccaaaacttggcccgc

SEQ ID NO: 3321346 - DNA, 25 bp, Homo sapien
tgcggtccactctatcatctatcgt

SEQ ID NO: 3321347 - DNA, 25 bp, Homo sapien
tacaagcggcctatagggtcgcaca

SEQ ID NO: 3321348 - DNA, 25 bp, Homo sapien
tcgaacggagtaagttacaagcggc

SEQ ID NO: 3321349 - DNA, 25 bp, Homo sapien
tgggcgaagtctaattaactctccg

SEQ ID NO: 3321350 - DNA, 25 bp, Homo sapien
gtcaaggcaaaagatagggtagatg

SEQ ID NO: 3321351 - DNA, 25 bp, Homo sapien
caaaagatagggtagatgcagcttc

SEQ ID NO: 3321352 - DNA, 25 bp, Homo sapien
agaggccaccaagccatttacccat

SEQ ID NO: 3321353 - DNA, 25 bp, Homo sapien
agatagggtagatgcagcttcttca

SEQ ID NO: 3321354 - DNA, 25 bp, Homo sapien
gatgaggatgaacgcacagtgtatg

SEQ ID NO: 3321355 - DNA, 25 bp, Homo sapien
tgtatgtggtaagcttaagaacccg

SEQ ID NO: 3321356 - DNA, 25 bp, Homo sapien
taaagaatgttaacgtaatgattat

SEQ ID NO: 3321357 - DNA, 25 bp, Homo sapien
tatgattatagcttacaattataaa

SEQ ID NO: 3321358 - DNA, 25 bp, Homo sapien
tctgattgtgaaaaactctaatatt

SEQ ID NO: 3321359 - DNA, 25 bp, Homo sapien
attctgattgtgaaaaactctaata

SEQ ID NO: 3321360 - DNA, 25 bp, Homo sapien
ttctgattgtgaaaaactctaatat

SEQ ID NO: 3321361 - DNA, 25 bp, Homo sapien
cacagctggattgaaagagtatttg

SEQ ID NO: 3321362 - DNA, 25 bp, Homo sapien
gtataccacattataagtctactgg

SEQ ID NO: 3321363 - DNA, 25 bp, Homo sapien
gggaaatgtggcaatgttgtttata

SEQ ID NO: 3321364 - DNA, 25 bp, Homo sapien
tggagatccaaagggatttgcgttt

SEQ ID NO: 3321365 - DNA, 25 bp, Homo sapien
aataatgatggcacttttacagaag

SEQ ID NO: 3321366 - DNA, 25 bp, Homo sapien
aataagcccattccagccttaagag

SEQ ID NO: 3321367 - DNA, 25 bp, Homo sapien
taggtgtagttgaagtaagatgaac

SEQ ID NO: 3321368 - DNA, 25 bp, Homo sapien
tcatttcagtttcttaacaacccac

SEQ ID NO: 3321369 - DNA, 25 bp, Homo sapien
ctgaagtcagaacagggaagaggaa

SEQ ID NO: 3321370 - DNA, 25 bp, Homo sapien
gaagcagctctgaagatgcagaatc

SEQ ID NO: 3321371 - DNA, 25 bp, Homo sapien
gagaagcagctctgaagatgcagaa

SEQ ID NO: 3321372 - DNA, 25 bp, Homo sapien
gaggaagagaagcagctctgaagat

SEQ ID NO: 3321373 - DNA, 25 bp, Homo sapien
caagtacatccacgtttaagtggtg

SEQ ID NO: 3321374 - DNA, 25 bp, Homo sapien
caaagcaagtacatccacgtttaag

SEQ ID NO: 3321375 - DNA, 25 bp, Homo sapien
ttcaaagcaagtacatccacgttta

SEQ ID NO: 3321376 - DNA, 25 bp, Homo sapien
aagcaagtacatccacgtttaagtg

SEQ ID NO: 3321377 - DNA, 25 bp, Homo sapien
tgaggttagcgtgttctattttgga

SEQ ID NO: 3321378 - DNA, 25 bp, Homo sapien
tttggagaagtaaattggattcact

SEQ ID NO: 3321379 - DNA, 25 bp, Homo sapien
ttcactcctactaaaacatggaagc

SEQ ID NO: 3321380 - DNA, 25 bp, Homo sapien
aattggattcactcctactaaaaca

SEQ ID NO: 3321381 - DNA, 25 bp, Homo sapien
tctttggacttcagagtatttagag

SEQ ID NO: 3321382 - DNA, 25 bp, Homo sapien
gaagggagcccacccaacatacaac

SEQ ID NO: 3321383 - DNA, 25 bp, Homo sapien
gcccacccaacatacaacttctttg

SEQ ID NO: 3321384 - DNA, 25 bp, Homo sapien
ggagcccacccaacatacaacttct

SEQ ID NO: 3321385 - DNA, 25 bp, Homo sapien
agaaaacaaaatggcataactttag

SEQ ID NO: 3321386 - DNA, 25 bp, Homo sapien
aaacaaaatggcataactttagaag

SEQ ID NO: 3321387 - DNA, 25 bp, Homo sapien
caaaatggcataactttagaagaaa

SEQ ID NO: 3321388 - DNA, 25 bp, Homo sapien
acaaaatggcataactttagaagaa

SEQ ID NO: 3321389 - DNA, 25 bp, Homo sapien
ctcctccagaagggtaaaaggcagg

SEQ ID NO: 3321390 - DNA, 25 bp, Homo sapien
gatgtcaatgttaacagctaaaacc

SEQ ID NO: 3321391 - DNA, 25 bp, Homo sapien
tcagctctcagggaatgtatgatcc

SEQ ID NO: 3321392 - DNA, 25 bp, Homo sapien
tgcctttttatctcagagaatcatt

SEQ ID NO: 3321393 - DNA, 25 bp, Homo sapien
ttctgtagtatgcaccacaagcagg

SEQ ID NO: 3321394 - DNA, 25 bp, Homo sapien
tgtagtatgcaccacaagcaggaac

SEQ ID NO: 3321395 - DNA, 25 bp, Homo sapien
tctgtagtatgcaccacaagcagga

SEQ ID NO: 3321396 - DNA, 25 bp, Homo sapien
cattctgtagtatgcaccacaagca

SEQ ID NO: 3321397 - DNA, 25 bp, Homo sapien
gcaagcccctctttcagtaatttta

SEQ ID NO: 3321398 - DNA, 25 bp, Homo sapien
gataggaggctccatagataagatg

SEQ ID NO: 3321399 - DNA, 25 bp, Homo sapien
agtgtttcctatagcaacgataagc

SEQ ID NO: 3321400 - DNA, 25 bp, Homo sapien
gatatctggctgctatgtcttgtag

SEQ ID NO: 3321401 - DNA, 25 bp, Homo sapien
gaaattatcttagatgtcagtgtca

SEQ ID NO: 3321402 - DNA, 25 bp, Homo sapien
ttgttcctcaacttgtaaataagac

SEQ ID NO: 3321403 - DNA, 25 bp, Homo sapien
tacttcacaagatacttgagctgtt

SEQ ID NO: 3321404 - DNA, 25 bp, Homo sapien
ggcaaagactcaacaagcgagtaaa

SEQ ID NO: 3321405 - DNA, 25 bp, Homo sapien
tgggcaaaccctctgcaacacttgt

SEQ ID NO: 3321406 - DNA, 25 bp, Homo sapien
cagaggaagaaaacgcgaccagtct

SEQ ID NO: 3321407 - DNA, 25 bp, Homo sapien
gactgccttatagcctgatcacggt

SEQ ID NO: 3321408 - DNA, 25 bp, Homo sapien
cgagaccctgtcaagtaatggataa

SEQ ID NO: 3321409 - DNA, 25 bp, Homo sapien
cattcctgattgagctgtctgtact

SEQ ID NO: 3321410 - DNA, 25 bp, Homo sapien
tttggtctgcgactcctgttctgca

SEQ ID NO: 3321411 - DNA, 25 bp, Homo sapien
aacttgtccatcatattgaccgcgg

SEQ ID NO: 3321412 - DNA, 25 bp, Homo sapien
gaccgcggataactcttgcttcata

SEQ ID NO: 3321413 - DNA, 25 bp, Homo sapien
acgggagtaggatctgaaggacact

SEQ ID NO: 3321414 - DNA, 25 bp, Homo sapien
gcagccacgcccagtggttagcctt

SEQ ID NO: 3321415 - DNA, 25 bp, Homo sapien
cagtggttagccttagccgtgccca

SEQ ID NO: 3321416 - DNA, 25 bp, Homo sapien
ggacactgcacccaaacaggaatct

SEQ ID NO: 3321417 - DNA, 25 bp, Homo sapien
gcatgcttagtctgagatgcttccc

SEQ ID NO: 3321418 - DNA, 25 bp, Homo sapien
tgggagttgtcagctatagatgcta

SEQ ID NO: 3321419 - DNA, 25 bp, Homo sapien
ccagattcccagatatctaggtgga

SEQ ID NO: 3321420 - DNA, 25 bp, Homo sapien
aagctgcagggccagacatctgatt

SEQ ID NO: 3321421 - DNA, 25 bp, Homo sapien
tccaggtgtatattgcatgggtgca

SEQ ID NO: 3321422 - DNA, 25 bp, Homo sapien
aaggattaccacacgccaacaaggg

SEQ ID NO: 3321423 - DNA, 25 bp, Homo sapien
caagggcccacttgaaattagtgtc

SEQ ID NO: 3321424 - DNA, 25 bp, Homo sapien
taatgattgtcttgaaaagtgggag

SEQ ID NO: 3321425 - DNA, 25 bp, Homo sapien
tttctcaactttcgggcaaagcttc

SEQ ID NO: 3321426 - DNA, 25 bp, Homo sapien
tcgggcaaagcttcacccaacaact

SEQ ID NO: 3321427 - DNA, 25 bp, Homo sapien
cctgcattagccatgtagtacagaa

SEQ ID NO: 3321428 - DNA, 25 bp, Homo sapien
acaactgcagccctgtatcctgcat

SEQ ID NO: 3321429 - DNA, 25 bp, Homo sapien
ctcgagtgctgtttttggtttcttt

SEQ ID NO: 3321430 - DNA, 25 bp, Homo sapien
cctcgagtgctgtttttggtttctt

SEQ ID NO: 3321431 - DNA, 25 bp, Homo sapien
ggttataatcaatttgtcataaata

SEQ ID NO: 3321432 - DNA, 25 bp, Homo sapien
tggttataatcaatttgtcataaat

SEQ ID NO: 3321433 - DNA, 25 bp, Homo sapien
ggctacaccaagtgttgtaggaata

SEQ ID NO: 3321434 - DNA, 25 bp, Homo sapien
tcatctaactgcattggctacacca

SEQ ID NO: 3321435 - DNA, 25 bp, Homo sapien
gagaaagccataccaacatctgagt

SEQ ID NO: 3321436 - DNA, 25 bp, Homo sapien
tctgcaggtgatgtcgtgctagaga

SEQ ID NO: 3321437 - DNA, 25 bp, Homo sapien
gaatgtggagtactctaaatgtttt

SEQ ID NO: 3321438 - DNA, 25 bp, Homo sapien
ttatggacgcattcacacacatttt

SEQ ID NO: 3321439 - DNA, 25 bp, Homo sapien
gttttatggacgcattcacacacat

SEQ ID NO: 3321440 - DNA, 25 bp, Homo sapien
tgtggagtactctaaatgttttatg

SEQ ID NO: 3321441 - DNA, 25 bp, Homo sapien
aagtcctttgagtaagtccactcca

SEQ ID NO: 3321442 - DNA, 25 bp, Homo sapien
gactaatttccattgccccagtagg

SEQ ID NO: 3321443 - DNA, 25 bp, Homo sapien
tccatgggtcaagacgcaggctgtg

SEQ ID NO: 3321444 - DNA, 25 bp, Homo sapien
ctggagggagatagtctggactaat

SEQ ID NO: 3321445 - DNA, 25 bp, Homo sapien
tttttatgtacagaaaactcaacag

SEQ ID NO: 3321446 - DNA, 25 bp, Homo sapien
tatgtacagaaaactcaacagtgca

SEQ ID NO: 3321447 - DNA, 25 bp, Homo sapien
tttatgtacagaaaactcaacagtg

SEQ ID NO: 3321448 - DNA, 25 bp, Homo sapien
atgtacagaaaactcaacagtgcac

SEQ ID NO: 3321449 - DNA, 25 bp, Homo sapien
cttaggacccaggatgttgccaccc

SEQ ID NO: 3321450 - DNA, 25 bp, Homo sapien
agacttaggacccaggatgttgcca

SEQ ID NO: 3321451 - DNA, 25 bp, Homo sapien
aggatgttgccaccccagtgacggc

SEQ ID NO: 3321452 - DNA, 25 bp, Homo sapien
gatgttgccaccccagtgacggcag

SEQ ID NO: 3321453 - DNA, 25 bp, Homo sapien
tgtgaaggcgacagtggtgcaggtc

SEQ ID NO: 3321454 - DNA, 25 bp, Homo sapien
gaaggcgacagtggtgcaggtcttc

SEQ ID NO: 3321455 - DNA, 25 bp, Homo sapien
ctgtgtgaaggcgacagtggtgcag

SEQ ID NO: 3321456 - DNA, 25 bp, Homo sapien
tgaaggcgacagtggtgcaggtctt

SEQ ID NO: 3321457 - DNA, 25 bp, Homo sapien
gacgagacgtcccagtcttgccttc

SEQ ID NO: 3321458 - DNA, 25 bp, Homo sapien
cgagacgtcccagtcttgccttcct

SEQ ID NO: 3321459 - DNA, 25 bp, Homo sapien
ctgtggacgagacgtcccagtcttg

SEQ ID NO: 3321460 - DNA, 25 bp, Homo sapien
gtggacgagacgtcccagtcttgcc

SEQ ID NO: 3321461 - DNA, 25 bp, Homo sapien
agctcgatgggatccacgtcgggtg

SEQ ID NO: 3321462 - DNA, 25 bp, Homo sapien
acatagggcaggcaagaagacagcc

SEQ ID NO: 3321463 - DNA, 25 bp, Homo sapien
cgatgggatccacgtcgggtgcaat

SEQ ID NO: 3321464 - DNA, 25 bp, Homo sapien
ctcgatgggatccacgtcgggtgca

SEQ ID NO: 3321465 - DNA, 25 bp, Homo sapien
ctcaaaggacaggtggtctcttggt

SEQ ID NO: 3321466 - DNA, 25 bp, Homo sapien
caaaggacaggtggtctcttggtgg

SEQ ID NO: 3321467 - DNA, 25 bp, Homo sapien
aaaggacaggtggtctcttggtggg

SEQ ID NO: 3321468 - DNA, 25 bp, Homo sapien
ggacaggtggtctcttggtggggac

SEQ ID NO: 3321469 - DNA, 25 bp, Homo sapien
ctttcttctcggcctgggccaacag

SEQ ID NO: 3321470 - DNA, 25 bp, Homo sapien
cttctcggcctgggccaacagcctt

SEQ ID NO: 3321471 - DNA, 25 bp, Homo sapien
ctcggcctgggccaacagccttctt

SEQ ID NO: 3321472 - DNA, 25 bp, Homo sapien
agcagctttcttctcggcctgggcc

SEQ ID NO: 3321473 - DNA, 25 bp, Homo sapien
tgtttggcggtccagggcctgggtg

SEQ ID NO: 3321474 - DNA, 25 bp, Homo sapien
gctgtttggcggtccagggcctggg

SEQ ID NO: 3321475 - DNA, 25 bp, Homo sapien
tagctgtttggcggtccagggcctg

SEQ ID NO: 3321476 - DNA, 25 bp, Homo sapien
gagtagctgtttggcggtccagggc

SEQ ID NO: 3321477 - DNA, 25 bp, Homo sapien
ccgcttatagaggatggctctctgc

SEQ ID NO: 3321478 - DNA, 25 bp, Homo sapien
cgcttatagaggatggctctctgct

SEQ ID NO: 3321479 - DNA, 25 bp, Homo sapien
tttcagccgcttatagaggatggct

SEQ ID NO: 3321480 - DNA, 25 bp, Homo sapien
cagccgcttatagaggatggctctc

SEQ ID NO: 3321481 - DNA, 25 bp, Homo sapien
atttcacaaagcgggtgaggtctct

SEQ ID NO: 3321482 - DNA, 25 bp, Homo sapien
ggcctttcctcaaacaggggattca

SEQ ID NO: 3321483 - DNA, 25 bp, Homo sapien
aattcttaggcctttcctcaaacag

SEQ ID NO: 3321484 - DNA, 25 bp, Homo sapien
cacaaagcgggtgaggtctcttttg

SEQ ID NO: 3321485 - DNA, 25 bp, Homo sapien
gcaggggccggagccaccttctttc

SEQ ID NO: 3321486 - DNA, 25 bp, Homo sapien
ttagcctcctgcttcttcacgacag

SEQ ID NO: 3321487 - DNA, 25 bp, Homo sapien
gcttcttcacgacagcaggggccgg

SEQ ID NO: 3321488 - DNA, 25 bp, Homo sapien
tcttcacgacagcaggggccggagc

SEQ ID NO: 3321489 - DNA, 25 bp, Homo sapien
gacagtttctacaaaggtaatgagc

SEQ ID NO: 3321490 - DNA, 25 bp, Homo sapien
tgtgcacacaggattagtgagaact

SEQ ID NO: 3321491 - DNA, 25 bp, Homo sapien
tctcagctctttggctaagggcaat

SEQ ID NO: 3321492 - DNA, 25 bp, Homo sapien
cacaaaaagtgaggatcacctgaca

SEQ ID NO: 3321493 - DNA, 25 bp, Homo sapien
tatcacagccaggttcgttaacatc

SEQ ID NO: 3321494 - DNA, 25 bp, Homo sapien
gttctccctggtaatatcatcaata

SEQ ID NO: 3321495 - DNA, 25 bp, Homo sapien
ttgggaacaataccaagtctgactc

SEQ ID NO: 3321496 - DNA, 25 bp, Homo sapien
tactcacggacaacttcaagattgt

SEQ ID NO: 3321497 - DNA, 25 bp, Homo sapien
tggcccgccgaaagcacatggatta

SEQ ID NO: 3321498 - DNA, 25 bp, Homo sapien
gatgggctgtcacgtctggctgatc

SEQ ID NO: 3321499 - DNA, 25 bp, Homo sapien
gatgtcagagcagatcatgtggtgc

SEQ ID NO: 3321500 - DNA, 25 bp, Homo sapien
tgcaacccaagagtgtggaagaggc

SEQ ID NO: 3321501 - DNA, 25 bp, Homo sapien
ctcctccttccatattgttgagtga

SEQ ID NO: 3321502 - DNA, 25 bp, Homo sapien
tattgttgagtgaagctatattcat

SEQ ID NO: 3321503 - DNA, 25 bp, Homo sapien
catattgttgagtgaagctatattc

SEQ ID NO: 3321504 - DNA, 25 bp, Homo sapien
ccttccatattgttgagtgaagcta

SEQ ID NO: 3321505 - DNA, 25 bp, Homo sapien
actttcccctatcaaataatggcca

SEQ ID NO: 3321506 - DNA, 25 bp, Homo sapien
caaataatggccaatttttcctctt

SEQ ID NO: 3321507 - DNA, 25 bp, Homo sapien
tagtcttcaactttcccctatcaaa

SEQ ID NO: 3321508 - DNA, 25 bp, Homo sapien
ttaggccttagctttagtcttcaac

SEQ ID NO: 3321509 - DNA, 25 bp, Homo sapien
tggatagagctagcctttctcagca

SEQ ID NO: 3321510 - DNA, 25 bp, Homo sapien
cctcgtttggtaacactttgtccat

SEQ ID NO: 3321511 - DNA, 25 bp, Homo sapien
cgtttggtaacactttgtccatgtg

SEQ ID NO: 3321512 - DNA, 25 bp, Homo sapien
tgtccatgtgatggatagagctagc

SEQ ID NO: 3321513 - DNA, 25 bp, Homo sapien
gtttatgattcctggtgggtggcac

SEQ ID NO: 3321514 - DNA, 25 bp, Homo sapien
gctgggatcacctcgacagcagcac

SEQ ID NO: 3321515 - DNA, 25 bp, Homo sapien
gatcacctcgacagcagcactgctg

SEQ ID NO: 3321516 - DNA, 25 bp, Homo sapien
ctgcctgctgggatcacctcgacag

SEQ ID NO: 3321517 - DNA, 25 bp, Homo sapien
tatatgtattgagttttggaaccgt

SEQ ID NO: 3321518 - DNA, 25 bp, Homo sapien
aaagcaaccacaaagggaactctga

SEQ ID NO: 3321519 - DNA, 25 bp, Homo sapien
gcagagggtttttcgttagatacat

SEQ ID NO: 3321520 - DNA, 25 bp, Homo sapien
gcattgatttcccattacagtctta

SEQ ID NO: 3321521 - DNA, 25 bp, Homo sapien
tgcgaacacttctatctattgacag

SEQ ID NO: 3321522 - DNA, 25 bp, Homo sapien
ttaattagcagatggaagtgtgtcc

SEQ ID NO: 3321523 - DNA, 25 bp, Homo sapien
tgctggatcagctgaggtatgtcaa

SEQ ID NO: 3321524 - DNA, 25 bp, Homo sapien
aattaggaaaggtctcgtctggtct

SEQ ID NO: 3321525 - DNA, 25 bp, Homo sapien
gcttggtgcttgcatgtctacttac

SEQ ID NO: 3321526 - DNA, 25 bp, Homo sapien
gcaccgggtttttgagaatattctc

SEQ ID NO: 3321527 - DNA, 25 bp, Homo sapien
tgcattcacggctgccatctacctc

SEQ ID NO: 3321528 - DNA, 25 bp, Homo sapien
agtgcttggtgcttgcatgtctact

SEQ ID NO: 3321529 - DNA, 25 bp, Homo sapien
tccactgctcagaagggctcctcag

SEQ ID NO: 3321530 - DNA, 25 bp, Homo sapien
tctgtgagccttctccactgctcag

SEQ ID NO: 3321531 - DNA, 25 bp, Homo sapien
acacaatctgtgagccttctccact

SEQ ID NO: 3321532 - DNA, 25 bp, Homo sapien
ttctccactgctcagaagggctcct

SEQ ID NO: 3321533 - DNA, 25 bp, Homo sapien
gattgccagtttacaaaaggaggaa

SEQ ID NO: 3321534 - DNA, 25 bp, Homo sapien
caatgttagagtcaagattgccagt

SEQ ID NO: 3321535 - DNA, 25 bp, Homo sapien
actttaacgaggcttcctcagcggt

SEQ ID NO: 3321536 - DNA, 25 bp, Homo sapien
cctcagcggtatccacgggcagaaa

SEQ ID NO: 3321537 - DNA, 25 bp, Homo sapien
cttttatgggagatattgccctttt

SEQ ID NO: 3321538 - DNA, 25 bp, Homo sapien
tgggagatattgcccttttttctct

SEQ ID NO: 3321539 - DNA, 25 bp, Homo sapien
tcttttatgggagatattgcccttt

SEQ ID NO: 3321540 - DNA, 25 bp, Homo sapien
ttatgggagatattgcccttttttc

SEQ ID NO: 3321541 - DNA, 25 bp, Homo sapien
ttaaagaccaaaccacttagctcca

SEQ ID NO: 3321542 - DNA, 25 bp, Homo sapien
aaaccacttagctccagcgtgagga

SEQ ID NO: 3321543 - DNA, 25 bp, Homo sapien
gagccaccaccctcatagtgaagct

SEQ ID NO: 3321544 - DNA, 25 bp, Homo sapien
gccaccaccctcatagtgaagctgt

SEQ ID NO: 3321545 - DNA, 25 bp, Homo sapien
cgtaggcacctaacagaatgaacta

SEQ ID NO: 3321546 - DNA, 25 bp, Homo sapien
tcttagccattagcattgatgagag

SEQ ID NO: 3321547 - DNA, 25 bp, Homo sapien
tctctgtaggattgggtacaacgta

SEQ ID NO: 3321548 - DNA, 25 bp, Homo sapien
ggtagtgtcttagttcccatcttca

SEQ ID NO: 3321549 - DNA, 25 bp, Homo sapien
ggctgctgcatttgttgtctgagtg

SEQ ID NO: 3321550 - DNA, 25 bp, Homo sapien
tgctgcatttgttgtctgagtgaat

SEQ ID NO: 3321551 - DNA, 25 bp, Homo sapien
tgcatttgttgtctgagtgaatatt

SEQ ID NO: 3321552 - DNA, 25 bp, Homo sapien
atttgttgtctgagtgaatattatt

SEQ ID NO: 3321553 - DNA, 25 bp, Homo sapien
tgaagactcagccttagttctctct

SEQ ID NO: 3321554 - DNA, 25 bp, Homo sapien
ctctctctgaggaccacaatcctaa

SEQ ID NO: 3321555 - DNA, 25 bp, Homo sapien
ctaatgacgcccctctctgcatgag

SEQ ID NO: 3321556 - DNA, 25 bp, Homo sapien
tctcacaatctgcactgaagactca

SEQ ID NO: 3321557 - DNA, 25 bp, Homo sapien
tccttgcctgaagcagttacattca

SEQ ID NO: 3321558 - DNA, 25 bp, Homo sapien
ctgattagtttggtttccttgcctg

SEQ ID NO: 3321559 - DNA, 25 bp, Homo sapien
acatttttcggtctgattagtttgg

SEQ ID NO: 3321560 - DNA, 25 bp, Homo sapien
ccttgcctgaagcagttacattcat

SEQ ID NO: 3321561 - DNA, 25 bp, Homo sapien
tttcctcggctttgagaggggcttg

SEQ ID NO: 3321562 - DNA, 25 bp, Homo sapien
gaaactcagttgcctttcctgaact

SEQ ID NO: 3321563 - DNA, 25 bp, Homo sapien
aaacaccagagcctttcgtggaaag

SEQ ID NO: 3321564 - DNA, 25 bp, Homo sapien
tgaactttgagaggggtttgttgcc

SEQ ID NO: 3321565 - DNA, 25 bp, Homo sapien
ttaaagtttggaaaagcgaagcatg

SEQ ID NO: 3321566 - DNA, 25 bp, Homo sapien
tggaaaagcgaagcatgcaggcatc

SEQ ID NO: 3321567 - DNA, 25 bp, Homo sapien
aagtttggaaaagcgaagcatgcag

SEQ ID NO: 3321568 - DNA, 25 bp, Homo sapien
agcgaagcatgcaggcatctggacc

SEQ ID NO: 3321569 - DNA, 25 bp, Homo sapien
gtaatatgcgcttcctaatgtatac

SEQ ID NO: 3321570 - DNA, 25 bp, Homo sapien
ttttgtaatatgcgcttcctaatgt

SEQ ID NO: 3321571 - DNA, 25 bp, Homo sapien
taatatgcgcttcctaatgtataca

SEQ ID NO: 3321572 - DNA, 25 bp, Homo sapien
ttgtaatatgcgcttcctaatgtat

SEQ ID NO: 3321573 - DNA, 25 bp, Homo sapien
cacaatttttgtaaacctgattcct

SEQ ID NO: 3321574 - DNA, 25 bp, Homo sapien
cctgattccttttcacaagggtctt

SEQ ID NO: 3321575 - DNA, 25 bp, Homo sapien
tgcttggaatgctttccccttttct

SEQ ID NO: 3321576 - DNA, 25 bp, Homo sapien
ttggtctgcttggaatgctttcccc

SEQ ID NO: 3321577 - DNA, 25 bp, Homo sapien
gactctttcagatagttattaattt

SEQ ID NO: 3321578 - DNA, 25 bp, Homo sapien
cagagctttgccgttagcattactc

SEQ ID NO: 3321579 - DNA, 25 bp, Homo sapien
tctttcagatagttattaatttcca

SEQ ID NO: 3321580 - DNA, 25 bp, Homo sapien
ttgccgttagcattactcatatgag

SEQ ID NO: 3321581 - DNA, 25 bp, Homo sapien
gatgcattgatcttcgcagccacag

SEQ ID NO: 3321582 - DNA, 25 bp, Homo sapien
caaagaggtggtggtaccgctgaat

SEQ ID NO: 3321583 - DNA, 25 bp, Homo sapien
gatgatggccatcccagagaaaaga

SEQ ID NO: 3321584 - DNA, 25 bp, Homo sapien
gaattgttcatggaactctgggcca

SEQ ID NO: 3321585 - DNA, 25 bp, Homo sapien
ttttaaagcccatagatattccctg

SEQ ID NO: 3321586 - DNA, 25 bp, Homo sapien
ttttcctggatttgcaacatctcgt

SEQ ID NO: 3321587 - DNA, 25 bp, Homo sapien
ggaagagtctgccatttgctgacta

SEQ ID NO: 3321588 - DNA, 25 bp, Homo sapien
tggatttgcaacatctcgtttctct

SEQ ID NO: 3321589 - DNA, 25 bp, Homo sapien
tgcttctacaagttcagactctcca

SEQ ID NO: 3321590 - DNA, 25 bp, Homo sapien
gctgcttctacaagttcagactctc

SEQ ID NO: 3321591 - DNA, 25 bp, Homo sapien
ttgctgcttctacaagttcagactc

SEQ ID NO: 3321592 - DNA, 25 bp, Homo sapien
cttctacaagttcagactctccagg

SEQ ID NO: 3321593 - DNA, 25 bp, Homo sapien
tctagagaatccacccatgcactgt

SEQ ID NO: 3321594 - DNA, 25 bp, Homo sapien
gaatattttcatgaaccttctcagt

SEQ ID NO: 3321595 - DNA, 25 bp, Homo sapien
ctagagaatccacccatgcactgtt

SEQ ID NO: 3321596 - DNA, 25 bp, Homo sapien
tattttcatgaaccttctcagtctc

SEQ ID NO: 3321597 - DNA, 25 bp, Homo sapien
ctgtctgaggttatcttttggtaaa

SEQ ID NO: 3321598 - DNA, 25 bp, Homo sapien
atcttttggtaaaggaatatactgc

SEQ ID NO: 3321599 - DNA, 25 bp, Homo sapien
gaatatactgcttaggaacttccat

SEQ ID NO: 3321600 - DNA, 25 bp, Homo sapien
aggaatatactgcttaggaacttcc

SEQ ID NO: 3321601 - DNA, 25 bp, Homo sapien
cactttccgaggcagattctgtctg

SEQ ID NO: 3321602 - DNA, 25 bp, Homo sapien
tgctgagggttacctttaggcccag

SEQ ID NO: 3321603 - DNA, 25 bp, Homo sapien
tggccccatggagtgtgcaatcccg

SEQ ID NO: 3321604 - DNA, 25 bp, Homo sapien
ttcacagcggccactctggatgggc

SEQ ID NO: 3321605 - DNA, 25 bp, Homo sapien
tcaggttgagaggacgagtagggtg

SEQ ID NO: 3321606 - DNA, 25 bp, Homo sapien
gaatgtagtgaattctgttctggta

SEQ ID NO: 3321607 - DNA, 25 bp, Homo sapien
gacgagtagggtgatggttctttta

SEQ ID NO: 3321608 - DNA, 25 bp, Homo sapien
agaaggagaaactggcttgacaaga

SEQ ID NO: 3321609 - DNA, 25 bp, Homo sapien
ctcactgcttgttcatgtaaatctt

SEQ ID NO: 3321610 - DNA, 25 bp, Homo sapien
aggagtatagtagacaaagggcatg

SEQ ID NO: 3321611 - DNA, 25 bp, Homo sapien
tgtatctgagagtaacatatctatg

SEQ ID NO: 3321612 - DNA, 25 bp, Homo sapien
taaatgataggcatttcaagaaaag

SEQ ID NO: 3321613 - DNA, 25 bp, Homo sapien
ggacagaatatgctcagagcaccag

SEQ ID NO: 3321614 - DNA, 25 bp, Homo sapien
ccctccttaccaccctccatgtgca

SEQ ID NO: 3321615 - DNA, 25 bp, Homo sapien
caggacagaatatgctcagagcacc

SEQ ID NO: 3321616 - DNA, 25 bp, Homo sapien
cctccttaccaccctccatgtgcat

SEQ ID NO: 3321617 - DNA, 25 bp, Homo sapien
tattctatcaaactctaagtgttac

SEQ ID NO: 3321618 - DNA, 25 bp, Homo sapien
ggtcattttgatgtatccacttggc

SEQ ID NO: 3321619 - DNA, 25 bp, Homo sapien
gtatccacttggctaagcagtctcc

SEQ ID NO: 3321620 - DNA, 25 bp, Homo sapien
agcagtctccagttattctatcaaa

SEQ ID NO: 3321621 - DNA, 25 bp, Homo sapien
tttcccgatcatgagcatcccatga

SEQ ID NO: 3321622 - DNA, 25 bp, Homo sapien
cctgatgataagtggcttgggaaag

SEQ ID NO: 3321623 - DNA, 25 bp, Homo sapien
ccatgattctagagacttcagctgg

SEQ ID NO: 3321624 - DNA, 25 bp, Homo sapien
tattctctggctcagtgttggacca

SEQ ID NO: 3321625 - DNA, 25 bp, Homo sapien
aggtgaaggtgaattaccgctatca

SEQ ID NO: 3321626 - DNA, 25 bp, Homo sapien
tctccatactctggcctgaatacct

SEQ ID NO: 3321627 - DNA, 25 bp, Homo sapien
cacttagaaatgtggtataccacat

SEQ ID NO: 3321628 - DNA, 25 bp, Homo sapien
catttttatgcagtatacacttaga

SEQ ID NO: 3321629 - DNA, 25 bp, Homo sapien
gcccttctactgagttcagtgtctg

SEQ ID NO: 3321630 - DNA, 25 bp, Homo sapien
cagcccttctactgagttcagtgtc

SEQ ID NO: 3321631 - DNA, 25 bp, Homo sapien
cccttctactgagttcagtgtctgt

SEQ ID NO: 3321632 - DNA, 25 bp, Homo sapien
ccttctactgagttcagtgtctgtc

SEQ ID NO: 3321633 - DNA, 25 bp, Homo sapien
tgaggcccaccaagatccaatgaat

SEQ ID NO: 3321634 - DNA, 25 bp, Homo sapien
cagagagagcccgacctattcgtct

SEQ ID NO: 3321635 - DNA, 25 bp, Homo sapien
gaatgactgacttatctcgacggcc

SEQ ID NO: 3321636 - DNA, 25 bp, Homo sapien
gaactgctcagagttttatacccac

SEQ ID NO: 3321637 - DNA, 25 bp, Homo sapien
tgggctgacttcttgcttattagta

SEQ ID NO: 3321638 - DNA, 25 bp, Homo sapien
attcattcatcttgccttggatcta

SEQ ID NO: 3321639 - DNA, 25 bp, Homo sapien
cagggtaatgggcagatgggctgac

SEQ ID NO: 3321640 - DNA, 25 bp, Homo sapien
aagctgggatgatctgactctaaac

SEQ ID NO: 3321641 - DNA, 25 bp, Homo sapien
tgtctgaattataggtagaactgtc

SEQ ID NO: 3321642 - DNA, 25 bp, Homo sapien
tcttgaacaatgtgtcttggcttgc

SEQ ID NO: 3321643 - DNA, 25 bp, Homo sapien
caggtctccagacccagtgggtaga

SEQ ID NO: 3321644 - DNA, 25 bp, Homo sapien
caccatagatgcctggctgtctgaa

SEQ ID NO: 3321645 - DNA, 25 bp, Homo sapien
tggcttaggctaccatgatggggaa

SEQ ID NO: 3321646 - DNA, 25 bp, Homo sapien
tattttccacttaatgacatccttc

SEQ ID NO: 3321647 - DNA, 25 bp, Homo sapien
cactactggagtatgaaattcattt

SEQ ID NO: 3321648 - DNA, 25 bp, Homo sapien
gaaatgtagtttggtaacactactg

SEQ ID NO: 3321649 - DNA, 25 bp, Homo sapien
tataatcatggcgaaaagggaagca

SEQ ID NO: 3321650 - DNA, 25 bp, Homo sapien
gttcccagtagctaggaaggcctca

SEQ ID NO: 3321651 - DNA, 25 bp, Homo sapien
cttataatcatggcgaaaagggaag

SEQ ID NO: 3321652 - DNA, 25 bp, Homo sapien
cccagtagctaggaaggcctcagga

SEQ ID NO: 3321653 - DNA, 25 bp, Homo sapien
gccaagcatgccttcttatttgtat

SEQ ID NO: 3321654 - DNA, 25 bp, Homo sapien
actgcaccaggtcatgaaaacatgt

SEQ ID NO: 3321655 - DNA, 25 bp, Homo sapien
tgcatctaaatatccagtaagtgtg

SEQ ID NO: 3321656 - DNA, 25 bp, Homo sapien
ttgtcaatcgtacttttgcaaaacc

SEQ ID NO: 3321657 - DNA, 25 bp, Homo sapien
caaagtagtgtagctgtgctccagc

SEQ ID NO: 3321658 - DNA, 25 bp, Homo sapien
cagcgtcttacaaagttcatcccga

SEQ ID NO: 3321659 - DNA, 25 bp, Homo sapien
gcatattgtctgattagaacccttc

SEQ ID NO: 3321660 - DNA, 25 bp, Homo sapien
caccaggctccactgggatacaaag

SEQ ID NO: 3321661 - DNA, 25 bp, Homo sapien
tgcatgggtctccttatgaattgct

SEQ ID NO: 3321662 - DNA, 25 bp, Homo sapien
gggtctccttatgaattgctccatc

SEQ ID NO: 3321663 - DNA, 25 bp, Homo sapien
cttccgtttgaatgagctgtttaca

SEQ ID NO: 3321664 - DNA, 25 bp, Homo sapien
aattgctccatcttccgtttgaatg

SEQ ID NO: 3321665 - DNA, 25 bp, Homo sapien
ctagacggaactgaatttctagata

SEQ ID NO: 3321666 - DNA, 25 bp, Homo sapien
acggaactgaatttctagatatcct

SEQ ID NO: 3321667 - DNA, 25 bp, Homo sapien
tagacggaactgaatttctagatat

SEQ ID NO: 3321668 - DNA, 25 bp, Homo sapien
gacggaactgaatttctagatatcc

SEQ ID NO: 3321669 - DNA, 25 bp, Homo sapien
ttggtgtcaaatggtgattgttctt

SEQ ID NO: 3321670 - DNA, 25 bp, Homo sapien
tgttgtgtttttccattcgaaacaa

SEQ ID NO: 3321671 - DNA, 25 bp, Homo sapien
tctgattaaggcctggtgtaaatct

SEQ ID NO: 3321672 - DNA, 25 bp, Homo sapien
caaagcttttgtgaggcgtcccttt

SEQ ID NO: 3321673 - DNA, 25 bp, Homo sapien
tattagtttcaaacttgggctaagc

SEQ ID NO: 3321674 - DNA, 25 bp, Homo sapien
tacaaagtgactgaggtgttccagg

SEQ ID NO: 3321675 - DNA, 25 bp, Homo sapien
tattagtaattgcagtcactgtaga

SEQ ID NO: 3321676 - DNA, 25 bp, Homo sapien
taaaacacggcaataaatagaggag

SEQ ID NO: 3321677 - DNA, 25 bp, Homo sapien
gattttcatatccatgaggacaagg

SEQ ID NO: 3321678 - DNA, 25 bp, Homo sapien
tttcatatccatgaggacaagggtt

SEQ ID NO: 3321679 - DNA, 25 bp, Homo sapien
ttcatatccatgaggacaagggttt

SEQ ID NO: 3321680 - DNA, 25 bp, Homo sapien
ttttcatatccatgaggacaagggt

SEQ ID NO: 3321681 - DNA, 25 bp, Homo sapien
ataagaagatacaaccataaaaaga

SEQ ID NO: 3321682 - DNA, 25 bp, Homo sapien
taactgtgtttgataagaagataca

SEQ ID NO: 3321683 - DNA, 25 bp, Homo sapien
aagctgtgtatgctaataagatggg

SEQ ID NO: 3321684 - DNA, 25 bp, Homo sapien
catagtaggcctttagtaactgtgt

SEQ ID NO: 3321685 - DNA, 25 bp, Homo sapien
aagctgggctgttgcacactcatct

SEQ ID NO: 3321686 - DNA, 25 bp, Homo sapien
gctgggctgttgcacactcatcttt

SEQ ID NO: 3321687 - DNA, 25 bp, Homo sapien
gggaatgagtgattgaggctggagt

SEQ ID NO: 3321688 - DNA, 25 bp, Homo sapien
ttgggaatgagtgattgaggctgga

SEQ ID NO: 3321689 - DNA, 25 bp, Homo sapien
cccagacttcctctgtcataataaa

SEQ ID NO: 3321690 - DNA, 25 bp, Homo sapien
ccagacttcctctgtcataataaag

SEQ ID NO: 3321691 - DNA, 25 bp, Homo sapien
gaaactgatcctctgctactgcttc

SEQ ID NO: 3321692 - DNA, 25 bp, Homo sapien
tcctctgcaaaatggctcacgctgc

SEQ ID NO: 3321693 - DNA, 25 bp, Homo sapien
ctgcaaaatggctcacgctgctgct

SEQ ID NO: 3321694 - DNA, 25 bp, Homo sapien
aaactgatcctctgctactgcttct

SEQ ID NO: 3321695 - DNA, 25 bp, Homo sapien
tcttcaggctactcttagtactggg

SEQ ID NO: 3321696 - DNA, 25 bp, Homo sapien
gctttatctcttcaggctactctta

SEQ ID NO: 3321697 - DNA, 25 bp, Homo sapien
ggctactcttagtactgggcacaga

SEQ ID NO: 3321698 - DNA, 25 bp, Homo sapien
tatttaatctcaaagctaggtgctt

SEQ ID NO: 3321699 - DNA, 25 bp, Homo sapien
cctattggtggcatgtttagctgcc

SEQ ID NO: 3321700 - DNA, 25 bp, Homo sapien
tgtttagctgccctgaagcatagcc

SEQ ID NO: 3321701 - DNA, 25 bp, Homo sapien
tgaagcatagcctctgtaactttcc

SEQ ID NO: 3321702 - DNA, 25 bp, Homo sapien
tcacactcagtgcctattggtggca

SEQ ID NO: 3321703 - DNA, 25 bp, Homo sapien
aaggatgcactagagttttggtcat

SEQ ID NO: 3321704 - DNA, 25 bp, Homo sapien
ctggaaggatgcactagagttttgg

SEQ ID NO: 3321705 - DNA, 25 bp, Homo sapien
ggaaggatgcactagagttttggtc

SEQ ID NO: 3321706 - DNA, 25 bp, Homo sapien
gaaggatgcactagagttttggtca

SEQ ID NO: 3321707 - DNA, 25 bp, Homo sapien
actactagcacctccaatgatcaaa

SEQ ID NO: 3321708 - DNA, 25 bp, Homo sapien
tcaaggccgatttctaagtcttgga

SEQ ID NO: 3321709 - DNA, 25 bp, Homo sapien
aatagcatcaaggccgatttctaag

SEQ ID NO: 3321710 - DNA, 25 bp, Homo sapien
catctatactactagcacctccaat

SEQ ID NO: 3321711 - DNA, 25 bp, Homo sapien
tttattgtaggctgataactgtggg

SEQ ID NO: 3321712 - DNA, 25 bp, Homo sapien
ggtgtttttgcatttacaagatgcc

SEQ ID NO: 3321713 - DNA, 25 bp, Homo sapien
aaaaggttagcatttgctttgaagg

SEQ ID NO: 3321714 - DNA, 25 bp, Homo sapien
gctttgaaggtaagacatgttagaa

SEQ ID NO: 3321715 - DNA, 25 bp, Homo sapien
atgaaccatcttgtggttcatggct

SEQ ID NO: 3321716 - DNA, 25 bp, Homo sapien
ctcatgaaccatcttgtggttcatg

SEQ ID NO: 3321717 - DNA, 25 bp, Homo sapien
tgaaccatcttgtggttcatggcta

SEQ ID NO: 3321718 - DNA, 25 bp, Homo sapien
catgaaccatcttgtggttcatggc

SEQ ID NO: 3321719 - DNA, 25 bp, Homo sapien
cttctgattgagtgatgtctgcttc

SEQ ID NO: 3321720 - DNA, 25 bp, Homo sapien
cacgaagctgcttctgattgagtga

SEQ ID NO: 3321721 - DNA, 25 bp, Homo sapien
atctgtgttgtgtcacgaagctgct

SEQ ID NO: 3321722 - DNA, 25 bp, Homo sapien
gtgttgtgtcacgaagctgcttctg

SEQ ID NO: 3321723 - DNA, 25 bp, Homo sapien
cttgtccagagtttgactatgggca

SEQ ID NO: 3321724 - DNA, 25 bp, Homo sapien
ttgactatgggcatcagcacaattt

SEQ ID NO: 3321725 - DNA, 25 bp, Homo sapien
tgactatgggcatcagcacaatttg

SEQ ID NO: 3321726 - DNA, 25 bp, Homo sapien
aggctgctgcattggtgtttctagg

SEQ ID NO: 3321727 - DNA, 25 bp, Homo sapien
tgctgcattggtgtttctaggtgtc

SEQ ID NO: 3321728 - DNA, 25 bp, Homo sapien
ccaggctgctgcattggtgtttcta

SEQ ID NO: 3321729 - DNA, 25 bp, Homo sapien
gctgctgcattggtgtttctaggtg

SEQ ID NO: 3321730 - DNA, 25 bp, Homo sapien
ttcctttggtgtcaggctcttcttc

SEQ ID NO: 3321731 - DNA, 25 bp, Homo sapien
tcctttggtgtcaggctcttcttct

SEQ ID NO: 3321732 - DNA, 25 bp, Homo sapien
tcattcctttggtgtcaggctcttc

SEQ ID NO: 3321733 - DNA, 25 bp, Homo sapien
cattcctttggtgtcaggctcttct

SEQ ID NO: 3321734 - DNA, 25 bp, Homo sapien
aacaatagagcaacctgatcttttg

SEQ ID NO: 3321735 - DNA, 25 bp, Homo sapien
catgaatgtgtttctaagtagttca

SEQ ID NO: 3321736 - DNA, 25 bp, Homo sapien
agacagacaattggcttcttaatgc

SEQ ID NO: 3321737 - DNA, 25 bp, Homo sapien
aagtagttcatctcagattggctct

SEQ ID NO: 3321738 - DNA, 25 bp, Homo sapien
taatcatgttaagcatgtagaggga

SEQ ID NO: 3321739 - DNA, 25 bp, Homo sapien
acagttcagtcgctgcagcattgca

SEQ ID NO: 3321740 - DNA, 25 bp, Homo sapien
tgcagatattcttgggggcactctg

SEQ ID NO: 3321741 - DNA, 25 bp, Homo sapien
gaataggcatttaaaaacgagtcac

SEQ ID NO: 3321742 - DNA, 25 bp, Homo sapien
cctcttggaatttagcatatgctgc

SEQ ID NO: 3321743 - DNA, 25 bp, Homo sapien
tgatttcctcaccaatgtgccattc

SEQ ID NO: 3321744 - DNA, 25 bp, Homo sapien
tttcctcaccaatgtgccattccaa

SEQ ID NO: 3321745 - DNA, 25 bp, Homo sapien
gctgatttcctcaccaatgtgccat

SEQ ID NO: 3321746 - DNA, 25 bp, Homo sapien
ctgctgatttcctcaccaatgtgcc

SEQ ID NO: 3321747 - DNA, 25 bp, Homo sapien
tacagaccacgactattaattccag

SEQ ID NO: 3321748 - DNA, 25 bp, Homo sapien
ggccctaacccattgtcacagacaa

SEQ ID NO: 3321749 - DNA, 25 bp, Homo sapien
cacccactatatgcaatgataaatg

SEQ ID NO: 3321750 - DNA, 25 bp, Homo sapien
aatgtcttttcagttgtggcttcca

SEQ ID NO: 3321751 - DNA, 25 bp, Homo sapien
attgcttccatatggtcttagagcc

SEQ ID NO: 3321752 - DNA, 25 bp, Homo sapien
tgcttccatatggtcttagagccat

SEQ ID NO: 3321753 - DNA, 25 bp, Homo sapien
cttgaattgcttccatatggtctta

SEQ ID NO: 3321754 - DNA, 25 bp, Homo sapien
gaattgcttccatatggtcttagag

SEQ ID NO: 3321755 - DNA, 25 bp, Homo sapien
gagaatagcctgtcttcagtcttta

SEQ ID NO: 3321756 - DNA, 25 bp, Homo sapien
ctccagagaatagcctgtcttcagt

SEQ ID NO: 3321757 - DNA, 25 bp, Homo sapien
agagaatagcctgtcttcagtcttt

SEQ ID NO: 3321758 - DNA, 25 bp, Homo sapien
ttttctccagagaatagcctgtctt

SEQ ID NO: 3321759 - DNA, 25 bp, Homo sapien
gctttggtgggggacgtggggcagc

SEQ ID NO: 3321760 - DNA, 25 bp, Homo sapien
tggtgggggacgtggggcagcaccc

SEQ ID NO: 3321761 - DNA, 25 bp, Homo sapien
ctttggtgggggacgtggggcagca

SEQ ID NO: 3321762 - DNA, 25 bp, Homo sapien
gtgggggacgtggggcagcacccgc

SEQ ID NO: 3321763 - DNA, 25 bp, Homo sapien
cggccctttttggcacgaccattgt

SEQ ID NO: 3321764 - DNA, 25 bp, Homo sapien
ttgggcacgcatcgggcacagttag

SEQ ID NO: 3321765 - DNA, 25 bp, Homo sapien
cttgtccttgggcacgcatcgggca

SEQ ID NO: 3321766 - DNA, 25 bp, Homo sapien
cgcatcgggcacagttagtgcagcg

SEQ ID NO: 3321767 - DNA, 25 bp, Homo sapien
ttggaggcacggaccggagagagga

SEQ ID NO: 3321768 - DNA, 25 bp, Homo sapien
cacggaccggagagaggagccaaaa

SEQ ID NO: 3321769 - DNA, 25 bp, Homo sapien
aggcacggaccggagagaggagcca

SEQ ID NO: 3321770 - DNA, 25 bp, Homo sapien
acggaccggagagaggagccaaaat

SEQ ID NO: 3321771 - DNA, 25 bp, Homo sapien
gattcttccctcgacacatatgaga

SEQ ID NO: 3321772 - DNA, 25 bp, Homo sapien
aaagaacagccaccggtacactaga

SEQ ID NO: 3321773 - DNA, 25 bp, Homo sapien
taatagtgattcttccctcgacaca

SEQ ID NO: 3321774 - DNA, 25 bp, Homo sapien
tagacagccaactgtgtgttctctg

SEQ ID NO: 3321775 - DNA, 25 bp, Homo sapien
taaaacaggatgacacagtaaacac

SEQ ID NO: 3321776 - DNA, 25 bp, Homo sapien
cacagtctcattcgtaaaaggagcc

SEQ ID NO: 3321777 - DNA, 25 bp, Homo sapien
ccctggctaagaattgtcaacttca

SEQ ID NO: 3321778 - DNA, 25 bp, Homo sapien
cttgggtggataactgtgagccaca

SEQ ID NO: 3321779 - DNA, 25 bp, Homo sapien
tcagtctttagtattccagcagcat

SEQ ID NO: 3321780 - DNA, 25 bp, Homo sapien
tcttcacggagttaattgctcagtc

SEQ ID NO: 3321781 - DNA, 25 bp, Homo sapien
tgtgcatgggccataatataccttc

SEQ ID NO: 3321782 - DNA, 25 bp, Homo sapien
tttttactcttgagagcaggacccc

SEQ ID NO: 3321783 - DNA, 25 bp, Homo sapien
taaatattagctcttgcacattcaa

SEQ ID NO: 3321784 - DNA, 25 bp, Homo sapien
cattcctcgccaagtaatatcttta

SEQ ID NO: 3321785 - DNA, 25 bp, Homo sapien
ttccactcttctggactatagtctg

SEQ ID NO: 3321786 - DNA, 25 bp, Homo sapien
gcaatgcttatcttcctaatcgtga

SEQ ID NO: 3321787 - DNA, 25 bp, Homo sapien
gaatccagtgatacacgggtagcct

SEQ ID NO: 3321788 - DNA, 25 bp, Homo sapien
cttgtaacaggttccacagatcttc

SEQ ID NO: 3321789 - DNA, 25 bp, Homo sapien
cgggtagccttaacattactcttgt

SEQ ID NO: 3321790 - DNA, 25 bp, Homo sapien
tatggtcaaccagtgcactctgact

SEQ ID NO: 3321791 - DNA, 25 bp, Homo sapien
ggtggcttagcgtcctgaaattcaa

SEQ ID NO: 3321792 - DNA, 25 bp, Homo sapien
cttgatttctcaccgcacgcatgcg

SEQ ID NO: 3321793 - DNA, 25 bp, Homo sapien
cttcaaatgtaaagagagcccctct

SEQ ID NO: 3321794 - DNA, 25 bp, Homo sapien
caagcttgggctcatgcgcattcat

SEQ ID NO: 3321795 - DNA, 25 bp, Homo sapien
gaagaagtacaattccagcctgtcg

SEQ ID NO: 3321796 - DNA, 25 bp, Homo sapien
gactcaggccttttaccagaaccag

SEQ ID NO: 3321797 - DNA, 25 bp, Homo sapien
gatgtaagtacaccaaaaccagctg

SEQ ID NO: 3321798 - DNA, 25 bp, Homo sapien
gaagtcagctatgaggttacaccca

SEQ ID NO: 3321799 - DNA, 25 bp, Homo sapien
tataatggaggcttaacccctggca

SEQ ID NO: 3321800 - DNA, 25 bp, Homo sapien
ggcatcaatgctataaaggcttcta

SEQ ID NO: 3321801 - DNA, 25 bp, Homo sapien
tgcctacacagaatatcacgaaatg

SEQ ID NO: 3321802 - DNA, 25 bp, Homo sapien
tggctgccgcgtatttaggaaaaca

SEQ ID NO: 3321803 - DNA, 25 bp, Homo sapien
tctgtgctaacctgggaactggcca

SEQ ID NO: 3321804 - DNA, 25 bp, Homo sapien
caaagatggcatccttcatactgga

SEQ ID NO: 3321805 - DNA, 25 bp, Homo sapien
cagccatggcttaggactccaacag

SEQ ID NO: 3321806 - DNA, 25 bp, Homo sapien
tattgtaactacactgggcatcaga

SEQ ID NO: 3321807 - DNA, 25 bp, Homo sapien
tctgtttgtttgtctcaaagaaggg

SEQ ID NO: 3321808 - DNA, 25 bp, Homo sapien
caaagaagggactgtaacaatctga

SEQ ID NO: 3321809 - DNA, 25 bp, Homo sapien
ctttttaccctgagtgagcactttt

SEQ ID NO: 3321810 - DNA, 25 bp, Homo sapien
tcttctctaatacctgcatgtggcg

SEQ ID NO: 3321811 - DNA, 25 bp, Homo sapien
ttttcaactaacattcctggacagt

SEQ ID NO: 3321812 - DNA, 25 bp, Homo sapien
taaactgaaataaccttcagtagaa

SEQ ID NO: 3321813 - DNA, 25 bp, Homo sapien
ttcaactaacattcctggacagtgg

SEQ ID NO: 3321814 - DNA, 25 bp, Homo sapien
agtagaattcggtatttccctgaag

SEQ ID NO: 3321815 - DNA, 25 bp, Homo sapien
ctggaggaagttagttttggcgaat

SEQ ID NO: 3321816 - DNA, 25 bp, Homo sapien
agaaatgagaaactgcgtgagcaaa

SEQ ID NO: 3321817 - DNA, 25 bp, Homo sapien
actgcgtgagcaaaaccagggagga

SEQ ID NO: 3321818 - DNA, 25 bp, Homo sapien
cacgtaaggcacattcagggaagtc

SEQ ID NO: 3321819 - DNA, 25 bp, Homo sapien
ggcagcctctcctcgccgtgtcttc

SEQ ID NO: 3321820 - DNA, 25 bp, Homo sapien
ctgctggctcaccaacactctgtgt

SEQ ID NO: 3321821 - DNA, 25 bp, Homo sapien
tggctctctggaccccttgggctgg

SEQ ID NO: 3321822 - DNA, 25 bp, Homo sapien
caccaacactctgtgttggggcagc

SEQ ID NO: 3321823 - DNA, 25 bp, Homo sapien
tatcactggcaaacagtcacagttt

SEQ ID NO: 3321824 - DNA, 25 bp, Homo sapien
gttctaggagttttctgaaggagta

SEQ ID NO: 3321825 - DNA, 25 bp, Homo sapien
tctaggagttttctgaaggagtatt

SEQ ID NO: 3321826 - DNA, 25 bp, Homo sapien
ctaggtaaacagtcatatcactggc

SEQ ID NO: 3321827 - DNA, 25 bp, Homo sapien
agcgcaggccgggtgatgacaaaat

SEQ ID NO: 3321828 - DNA, 25 bp, Homo sapien
tctttcagcgcaggccgggtgatga

SEQ ID NO: 3321829 - DNA, 25 bp, Homo sapien
tcagcgcaggccgggtgatgacaaa

SEQ ID NO: 3321830 - DNA, 25 bp, Homo sapien
cgcaggccgggtgatgacaaaatct

SEQ ID NO: 3321831 - DNA, 25 bp, Homo sapien
aggcaggaaaatggccgactcattc

SEQ ID NO: 3321832 - DNA, 25 bp, Homo sapien
ctgaagggatttggtaccaagaatg

SEQ ID NO: 3321833 - DNA, 25 bp, Homo sapien
aaacagcagagagtagccgggtgca

SEQ ID NO: 3321834 - DNA, 25 bp, Homo sapien
cagagaaatggtacagtaactgaag

SEQ ID NO: 3321835 - DNA, 25 bp, Homo sapien
agcaagcgttcctcttccagtgggt

SEQ ID NO: 3321836 - DNA, 25 bp, Homo sapien
tcttgaaaaaagcaacgcaatccag

SEQ ID NO: 3321837 - DNA, 25 bp, Homo sapien
tctgggccaattgggctgctaggaa

SEQ ID NO: 3321838 - DNA, 25 bp, Homo sapien
catacttagctgagggttaggttct

SEQ ID NO: 3321839 - DNA, 25 bp, Homo sapien
cagcataggtgcacgtttttccagc

SEQ ID NO: 3321840 - DNA, 25 bp, Homo sapien
gacatatgatttttgggcagcctct

SEQ ID NO: 3321841 - DNA, 25 bp, Homo sapien
gagcatggcccaagcagataagagg

SEQ ID NO: 3321842 - DNA, 25 bp, Homo sapien
gaaataagcagcaaggtcctcacct

SEQ ID NO: 3321843 - DNA, 25 bp, Homo sapien
taaacctacataaagagggcagccc

SEQ ID NO: 3321844 - DNA, 25 bp, Homo sapien
caagagttgtataccctcgtgagca

SEQ ID NO: 3321845 - DNA, 25 bp, Homo sapien
caatgaaatcactcgaaagctgtgt

SEQ ID NO: 3321846 - DNA, 25 bp, Homo sapien
ggcagcccaacagcaaaacaagagt

SEQ ID NO: 3321847 - DNA, 25 bp, Homo sapien
taaatgagaccagagtaggacacac

SEQ ID NO: 3321848 - DNA, 25 bp, Homo sapien
tacacagttcttgcccatggagaca

SEQ ID NO: 3321849 - DNA, 25 bp, Homo sapien
gactatctgggtaccccttgaggct

SEQ ID NO: 3321850 - DNA, 25 bp, Homo sapien
tcaagacagtggtgagagaacccat

SEQ ID NO: 3321851 - DNA, 25 bp, Homo sapien
gaaatcacaaatttattaactctta

SEQ ID NO: 3321852 - DNA, 25 bp, Homo sapien
cagaaatcacaaatttattaactct

SEQ ID NO: 3321853 - DNA, 25 bp, Homo sapien
aactcttaaatatatcaatcagtcc

SEQ ID NO: 3321854 - DNA, 25 bp, Homo sapien
agcagaaatcacaaatttattaact

SEQ ID NO: 3321855 - DNA, 25 bp, Homo sapien
tctcattggcaggttaacatggctc

SEQ ID NO: 3321856 - DNA, 25 bp, Homo sapien
gctagtgatgatgcagaagtgaccc

SEQ ID NO: 3321857 - DNA, 25 bp, Homo sapien
taagacgttgcagtcacaggaggaa

SEQ ID NO: 3321858 - DNA, 25 bp, Homo sapien
ttcattccccaaggcggaggtgagt

SEQ ID NO: 3321859 - DNA, 25 bp, Homo sapien
taaggattatgctaccaaatagggc

SEQ ID NO: 3321860 - DNA, 25 bp, Homo sapien
gatttacacattcgccatagccagc

SEQ ID NO: 3321861 - DNA, 25 bp, Homo sapien
tcacaaagtatcacggagcaggatg

SEQ ID NO: 3321862 - DNA, 25 bp, Homo sapien
tactcagtcaggcacagcaaattga

SEQ ID NO: 3321863 - DNA, 25 bp, Homo sapien
acccatatgtgaatggttttcaggc

SEQ ID NO: 3321864 - DNA, 25 bp, Homo sapien
cccatatgtgaatggttttcaggcc

SEQ ID NO: 3321865 - DNA, 25 bp, Homo sapien
gacccatatgtgaatggttttcagg

SEQ ID NO: 3321866 - DNA, 25 bp, Homo sapien
aagacccatatgtgaatggttttca

SEQ ID NO: 3321867 - DNA, 25 bp, Homo sapien
tagatgttttgccacaaagaggtgc

SEQ ID NO: 3321868 - DNA, 25 bp, Homo sapien
aagaggtgcctcctgagaagttttc

SEQ ID NO: 3321869 - DNA, 25 bp, Homo sapien
ctttcccatttggaatacagggtgg

SEQ ID NO: 3321870 - DNA, 25 bp, Homo sapien
tttcccatttggaatacagggtggc

SEQ ID NO: 3321871 - DNA, 25 bp, Homo sapien
taaacccctggtactgtatgaatgt

SEQ ID NO: 3321872 - DNA, 25 bp, Homo sapien
taactggcgatttgtgctgtacctc

SEQ ID NO: 3321873 - DNA, 25 bp, Homo sapien
tattaaggctatacagaaggcctct

SEQ ID NO: 3321874 - DNA, 25 bp, Homo sapien
gagaagccccatttaagccacctgg

SEQ ID NO: 3321875 - DNA, 25 bp, Homo sapien
ccaactactagcgttaaataacata

SEQ ID NO: 3321876 - DNA, 25 bp, Homo sapien
tactagcgttaaataacatatacca

SEQ ID NO: 3321877 - DNA, 25 bp, Homo sapien
acatataccatgctattaacaatgg

SEQ ID NO: 3321878 - DNA, 25 bp, Homo sapien
aaataacatataccatgctattaac

SEQ ID NO: 3321879 - DNA, 25 bp, Homo sapien
catgggtgtattaacaaagaagctg

SEQ ID NO: 3321880 - DNA, 25 bp, Homo sapien
ccgagcgatgaaaatgaacattctg

SEQ ID NO: 3321881 - DNA, 25 bp, Homo sapien
ggtactgttggtgaccccgagcgat

SEQ ID NO: 3321882 - DNA, 25 bp, Homo sapien
ttgatgggtactgttggtgaccccg

SEQ ID NO: 3321883 - DNA, 25 bp, Homo sapien
gttggtgaccccgagcgatgaaaat

SEQ ID NO: 3321884 - DNA, 25 bp, Homo sapien
cctaccagatgtacatgagggttta

SEQ ID NO: 3321885 - DNA, 25 bp, Homo sapien
tgcattgtctttggcattccactgc

SEQ ID NO: 3321886 - DNA, 25 bp, Homo sapien
ccatccatgtactgtgtgagcctaa

SEQ ID NO: 3321887 - DNA, 25 bp, Homo sapien
cctaatatatgctatgcaggcggca

SEQ ID NO: 3321888 - DNA, 25 bp, Homo sapien
actataggtgcttgtcatcatgact

SEQ ID NO: 3321889 - DNA, 25 bp, Homo sapien
taaaaactctcattgtagaaaagag

SEQ ID NO: 3321890 - DNA, 25 bp, Homo sapien
aataatctgcaaatttgggaaaatt

SEQ ID NO: 3321891 - DNA, 25 bp, Homo sapien
tcagagaggtttaaaaagggcatgt

SEQ ID NO: 3321892 - DNA, 25 bp, Homo sapien
aagggcatgttattaaattaggaat

SEQ ID NO: 3321893 - DNA, 25 bp, Homo sapien
cattttcaaagtagaatcggtgaaa

SEQ ID NO: 3321894 - DNA, 25 bp, Homo sapien
aatcggtgaaaatccatcccttcca

SEQ ID NO: 3321895 - DNA, 25 bp, Homo sapien
aagtagaatcggtgaaaatccatcc

SEQ ID NO: 3321896 - DNA, 25 bp, Homo sapien
tagaatcggtgaaaatccatccctt

SEQ ID NO: 3321897 - DNA, 25 bp, Homo sapien
agttctatcataaaccttggcaagg

SEQ ID NO: 3321898 - DNA, 25 bp, Homo sapien
tctgatttaccagtcactgaaggaa

SEQ ID NO: 3321899 - DNA, 25 bp, Homo sapien
gaaagagcctctaaaaacacttaca

SEQ ID NO: 3321900 - DNA, 25 bp, Homo sapien
caagtcctattgtccaagtgtaaga

SEQ ID NO: 3321901 - DNA, 25 bp, Homo sapien
ccattgttgatagcttcgatcagtt

SEQ ID NO: 3321902 - DNA, 25 bp, Homo sapien
gcttcgatcagttgttcagtgactt

SEQ ID NO: 3321903 - DNA, 25 bp, Homo sapien
tgttgatagcttcgatcagttgttc

SEQ ID NO: 3321904 - DNA, 25 bp, Homo sapien
gatagcttcgatcagttgttcagtg

SEQ ID NO: 3321905 - DNA, 25 bp, Homo sapien
tctgcttgacaaactctacaaaagg

SEQ ID NO: 3321906 - DNA, 25 bp, Homo sapien
tctacaaaaggatgccgacactgtg

SEQ ID NO: 3321907 - DNA, 25 bp, Homo sapien
aaggatgccgacactgtgactggcc

SEQ ID NO: 3321908 - DNA, 25 bp, Homo sapien
tgacaaactctacaaaaggatgccg

SEQ ID NO: 3321909 - DNA, 25 bp, Homo sapien
tatagctgtcaaacccaacaccaat

SEQ ID NO: 3321910 - DNA, 25 bp, Homo sapien
tgtagatgtaggcagataataagat

SEQ ID NO: 3321911 - DNA, 25 bp, Homo sapien
gaagtgacatatgaatcaatactgt

SEQ ID NO: 3321912 - DNA, 25 bp, Homo sapien
gaaagcctccaggtatagctgtcaa

SEQ ID NO: 3321913 - DNA, 25 bp, Homo sapien
cttatgcttagaaacgatggtgctt

SEQ ID NO: 3321914 - DNA, 25 bp, Homo sapien
ggagcttcattagggtaggcttcag

SEQ ID NO: 3321915 - DNA, 25 bp, Homo sapien
gatcaacgtccttcgtggagcttca

SEQ ID NO: 3321916 - DNA, 25 bp, Homo sapien
gaatcatcgggtgtatatggccatc

SEQ ID NO: 3321917 - DNA, 25 bp, Homo sapien
gaagcttcttccactccagagctag

SEQ ID NO: 3321918 - DNA, 25 bp, Homo sapien
taaggtgttccctgaataccagaag

SEQ ID NO: 3321919 - DNA, 25 bp, Homo sapien
gagctagccatttaatcgcaggaag

SEQ ID NO: 3321920 - DNA, 25 bp, Homo sapien
gttggaactgttgccacaagcccag

SEQ ID NO: 3321921 - DNA, 25 bp, Homo sapien
gcctatactcataggacacaaagta

SEQ ID NO: 3321922 - DNA, 25 bp, Homo sapien
gaactgaagtgctcaagcctatact

SEQ ID NO: 3321923 - DNA, 25 bp, Homo sapien
aaagtactttctggcgatttctaga

SEQ ID NO: 3321924 - DNA, 25 bp, Homo sapien
tttctagaactgaagtgctcaagcc

SEQ ID NO: 3321925 - DNA, 25 bp, Homo sapien
tgtgtaaccaaggtgatggccacag

SEQ ID NO: 3321926 - DNA, 25 bp, Homo sapien
ctaagcattctctaagggtatctct

SEQ ID NO: 3321927 - DNA, 25 bp, Homo sapien
tctctccactgtgtaaccaaggtga

SEQ ID NO: 3321928 - DNA, 25 bp, Homo sapien
tctaagggtatctcttctctccact

SEQ ID NO: 3321929 - DNA, 25 bp, Homo sapien
catagctccctgaatcaataaaaga

SEQ ID NO: 3321930 - DNA, 25 bp, Homo sapien
cattacaaagtccatcactatccag

SEQ ID NO: 3321931 - DNA, 25 bp, Homo sapien
gctgcaaaaatagtagcttgtgctt

SEQ ID NO: 3321932 - DNA, 25 bp, Homo sapien
aatagtagcttgtgctttcattaca

SEQ ID NO: 3321933 - DNA, 25 bp, Homo sapien
ctgggtcctggttccattgtgatat

SEQ ID NO: 3321934 - DNA, 25 bp, Homo sapien
ccattgtgatattcacaagcctcat

SEQ ID NO: 3321935 - DNA, 25 bp, Homo sapien
ggttccattgtgatattcacaagcc

SEQ ID NO: 3321936 - DNA, 25 bp, Homo sapien
cctggttccattgtgatattcacaa

SEQ ID NO: 3321937 - DNA, 25 bp, Homo sapien
gtgatatacagatggacttctggtg

SEQ ID NO: 3321938 - DNA, 25 bp, Homo sapien
atacagatggacttctggtgtggaa

SEQ ID NO: 3321939 - DNA, 25 bp, Homo sapien
gatatacagatggacttctggtgtg

SEQ ID NO: 3321940 - DNA, 25 bp, Homo sapien
tatacagatggacttctggtgtgga

SEQ ID NO: 3321941 - DNA, 25 bp, Homo sapien
caagtaataagggtgccaacaactt

SEQ ID NO: 3321942 - DNA, 25 bp, Homo sapien
taataagggtgccaacaactttgtc

SEQ ID NO: 3321943 - DNA, 25 bp, Homo sapien
caacaactttgtccttaattgagac

SEQ ID NO: 3321944 - DNA, 25 bp, Homo sapien
taattgagacttttgcaaacatcct

SEQ ID NO: 3321945 - DNA, 25 bp, Homo sapien
ctgcttgttgtaaagggctccactt

SEQ ID NO: 3321946 - DNA, 25 bp, Homo sapien
tcaagaaggatgaagtctccacaca

SEQ ID NO: 3321947 - DNA, 25 bp, Homo sapien
gcaagagatccaagctcgtggtgaa

SEQ ID NO: 3321948 - DNA, 25 bp, Homo sapien
gtctcatagccatagaatctgcttg

SEQ ID NO: 3321949 - DNA, 25 bp, Homo sapien
cagtcccttgggatgattacgagct

SEQ ID NO: 3321950 - DNA, 25 bp, Homo sapien
gtaactctccatgacactgagtttg

SEQ ID NO: 3321951 - DNA, 25 bp, Homo sapien
aagaggtcaacactagggtgtcaac

SEQ ID NO: 3321952 - DNA, 25 bp, Homo sapien
ggatgattacgagcttgggaagaaa

SEQ ID NO: 3321953 - DNA, 25 bp, Homo sapien
catggctagttcaaaaagagaagca

SEQ ID NO: 3321954 - DNA, 25 bp, Homo sapien
gggcctacattatagcataacaaga

SEQ ID NO: 3321955 - DNA, 25 bp, Homo sapien
ccagactgaggaaccattaatctct

SEQ ID NO: 3321956 - DNA, 25 bp, Homo sapien
gaagcacatggaagtcaggtaaaga

SEQ ID NO: 3321957 - DNA, 25 bp, Homo sapien
taccacagtgtttaatcccctcctc

SEQ ID NO: 3321958 - DNA, 25 bp, Homo sapien
agtgtttaatcccctcctccagcaa

SEQ ID NO: 3321959 - DNA, 25 bp, Homo sapien
acagtgtttaatcccctcctccagc

SEQ ID NO: 3321960 - DNA, 25 bp, Homo sapien
ccacagtgtttaatcccctcctcca

SEQ ID NO: 3321961 - DNA, 25 bp, Homo sapien
tttttatctaatatgactggtatca

SEQ ID NO: 3321962 - DNA, 25 bp, Homo sapien
taatatgactggtatcaatgattca

SEQ ID NO: 3321963 - DNA, 25 bp, Homo sapien
ttatctaatatgactggtatcaatg

SEQ ID NO: 3321964 - DNA, 25 bp, Homo sapien
tctaatatgactggtatcaatgatt

SEQ ID NO: 3321965 - DNA, 25 bp, Homo sapien
gaggtgacctaactgcaaatgtgtg

SEQ ID NO: 3321966 - DNA, 25 bp, Homo sapien
tacatgtagctaaaagaaccttggc

SEQ ID NO: 3321967 - DNA, 25 bp, Homo sapien
aaatgactgactacctctagcagag

SEQ ID NO: 3321968 - DNA, 25 bp, Homo sapien
gactgccaagttgtgatctacagcc

SEQ ID NO: 3321969 - DNA, 25 bp, Homo sapien
gaatatgctacatgtctacagttca

SEQ ID NO: 3321970 - DNA, 25 bp, Homo sapien
agttgtcattactgcaatgtgctag

SEQ ID NO: 3321971 - DNA, 25 bp, Homo sapien
tatatatgtgaagctctgaggtagg

SEQ ID NO: 3321972 - DNA, 25 bp, Homo sapien
tgtgctttaggataggcctacttcc

SEQ ID NO: 3321973 - DNA, 25 bp, Homo sapien
cttcatcctcaattgttgtatttga

SEQ ID NO: 3321974 - DNA, 25 bp, Homo sapien
taaaagtacactgtaactgccagaa

SEQ ID NO: 3321975 - DNA, 25 bp, Homo sapien
taatgtaaacaccagccagtatcat

SEQ ID NO: 3321976 - DNA, 25 bp, Homo sapien
taaaggtgtacccagagtctccata

SEQ ID NO: 3321977 - DNA, 25 bp, Homo sapien
gaaggtaaacccatgcactgtaaaa

SEQ ID NO: 3321978 - DNA, 25 bp, Homo sapien
tatttgatgagatgtatagtcttgt

SEQ ID NO: 3321979 - DNA, 25 bp, Homo sapien
tgttaaagcaagatgatgttgattc

SEQ ID NO: 3321980 - DNA, 25 bp, Homo sapien
gaagtatgtccatagttctagataa

SEQ ID NO: 3321981 - DNA, 25 bp, Homo sapien
tctagataaattaggcccaaaagga

SEQ ID NO: 3321982 - DNA, 25 bp, Homo sapien
cttgtttccatcagggttgtggatt

SEQ ID NO: 3321983 - DNA, 25 bp, Homo sapien
gctggttaccacgttggctttgttg

SEQ ID NO: 3321984 - DNA, 25 bp, Homo sapien
cagcgctggggtaggaatattttct

SEQ ID NO: 3321985 - DNA, 25 bp, Homo sapien
cgctggggtaggaatattttctttg

SEQ ID NO: 3321986 - DNA, 25 bp, Homo sapien
ctggttaccacgttggctttgttgt

SEQ ID NO: 3321987 - DNA, 25 bp, Homo sapien
catgtccgtgatggtgcaatgagaa

SEQ ID NO: 3321988 - DNA, 25 bp, Homo sapien
gctagtctccgatggtcacacacag

SEQ ID NO: 3321989 - DNA, 25 bp, Homo sapien
aaacagagatgccttaaaccccttg

SEQ ID NO: 3321990 - DNA, 25 bp, Homo sapien
tggtagccaatgtctctagatgcag

SEQ ID NO: 3321991 - DNA, 25 bp, Homo sapien
taatgtaaagactaactaaatgatt

SEQ ID NO: 3321992 - DNA, 25 bp, Homo sapien
cattctgtctgggtgagccattctt

SEQ ID NO: 3321993 - DNA, 25 bp, Homo sapien
tctttattgttaggtatgggaaaca

SEQ ID NO: 3321994 - DNA, 25 bp, Homo sapien
ttaaatgaatatgtgcctcaaccac

SEQ ID NO: 3321995 - DNA, 25 bp, Homo sapien
ggcatgggcaagatattcctatttc

SEQ ID NO: 3321996 - DNA, 25 bp, Homo sapien
catggtgaatgtattatggtgtcct

SEQ ID NO: 3321997 - DNA, 25 bp, Homo sapien
gaattactcttatgaggcatgggca

SEQ ID NO: 3321998 - DNA, 25 bp, Homo sapien
taactaggattggtacattgtaaga

SEQ ID NO: 3321999 - DNA, 25 bp, Homo sapien
catcatctgaacactcgaactggac

SEQ ID NO: 3322000 - DNA, 25 bp, Homo sapien
gaagtaccgtgttttgatagttgac

SEQ ID NO: 3322001 - DNA, 25 bp, Homo sapien
tgactttgtaaaagagcaaacctct

SEQ ID NO: 3322002 - DNA, 25 bp, Homo sapien
gatagttgactaacactgacctgta

SEQ ID NO: 3322003 - DNA, 25 bp, Homo sapien
tttactccatctggtttcttcaaca

SEQ ID NO: 3322004 - DNA, 25 bp, Homo sapien
ctttactccatctggtttcttcaac

SEQ ID NO: 3322005 - DNA, 25 bp, Homo sapien
atctggtttcttcaacaaactcttg

SEQ ID NO: 3322006 - DNA, 25 bp, Homo sapien
ggtttcttcaacaaactcttggctg

SEQ ID NO: 3322007 - DNA, 25 bp, Homo sapien
cctgacattcattgatttgggccat

SEQ ID NO: 3322008 - DNA, 25 bp, Homo sapien
tcaatgacaattagtacaccaagtg

SEQ ID NO: 3322009 - DNA, 25 bp, Homo sapien
tacctagctagaatagaactgcatg

SEQ ID NO: 3322010 - DNA, 25 bp, Homo sapien
tggcttcgaaagtggaaatacctag

SEQ ID NO: 3322011 - DNA, 25 bp, Homo sapien
gcttagcattgaacaagatttgact

SEQ ID NO: 3322012 - DNA, 25 bp, Homo sapien
caagtgcggcttaattgctgctcca

SEQ ID NO: 3322013 - DNA, 25 bp, Homo sapien
caagtgttccaagtctaaagggcca

SEQ ID NO: 3322014 - DNA, 25 bp, Homo sapien
ttgggaacctggtcctttgagacaa

SEQ ID NO: 3322015 - DNA, 25 bp, Homo sapien
gagaaattccttgtagccagcatag

SEQ ID NO: 3322016 - DNA, 25 bp, Homo sapien
cttctagcattaaatttcttcaagc

SEQ ID NO: 3322017 - DNA, 25 bp, Homo sapien
taaatttcttcaagcagtctacagt

SEQ ID NO: 3322018 - DNA, 25 bp, Homo sapien
catcatggaagcaacagtagaacgt

SEQ ID NO: 3322019 - DNA, 25 bp, Homo sapien
tcttcaagcagtctacagtctcctg

SEQ ID NO: 3322020 - DNA, 25 bp, Homo sapien
tcattttagttcttgaagttttgga

SEQ ID NO: 3322021 - DNA, 25 bp, Homo sapien
cattttagttcttgaagttttggag

SEQ ID NO: 3322022 - DNA, 25 bp, Homo sapien
tttggcagggttgatagtaagcatt

SEQ ID NO: 3322023 - DNA, 25 bp, Homo sapien
atgcgtttggcagggttgatagtaa

SEQ ID NO: 3322024 - DNA, 25 bp, Homo sapien
cgtttggcagggttgatagtaagca

SEQ ID NO: 3322025 - DNA, 25 bp, Homo sapien
gcagggttgatagtaagcattttat

SEQ ID NO: 3322026 - DNA, 25 bp, Homo sapien
caaatgagcggtaggttcagcatga

SEQ ID NO: 3322027 - DNA, 25 bp, Homo sapien
gatggtgaatgtgctagctattgcc

SEQ ID NO: 3322028 - DNA, 25 bp, Homo sapien
agtgcattttcagggctacgtctgc

SEQ ID NO: 3322029 - DNA, 25 bp, Homo sapien
tctaggtataccaagcagtgcattt

SEQ ID NO: 3322030 - DNA, 25 bp, Homo sapien
taaagtgatataaatagttattaca

SEQ ID NO: 3322031 - DNA, 25 bp, Homo sapien
ttcatctaaagtgatataaatagtt

SEQ ID NO: 3322032 - DNA, 25 bp, Homo sapien
cttcatctaaagtgatataaatagt

SEQ ID NO: 3322033 - DNA, 25 bp, Homo sapien
agtgatataaatagttattacatac

SEQ ID NO: 3322034 - DNA, 25 bp, Homo sapien
gaagggtggataccccacaagtaga

SEQ ID NO: 3322035 - DNA, 25 bp, Homo sapien
ccagaagggtggataccccacaagt

SEQ ID NO: 3322036 - DNA, 25 bp, Homo sapien
gggtggataccccacaagtagaata

SEQ ID NO: 3322037 - DNA, 25 bp, Homo sapien
cttgatctgctgatagagtctgtgt

SEQ ID NO: 3322038 - DNA, 25 bp, Homo sapien
agggatgaaggcctgcacctgtact

SEQ ID NO: 3322039 - DNA, 25 bp, Homo sapien
gtcaccagggcggcagctgtgttca

SEQ ID NO: 3322040 - DNA, 25 bp, Homo sapien
gttcatgtgtctgacaggtacaatt

SEQ ID NO: 3322041 - DNA, 25 bp, Homo sapien
ggcctgcacctgtactgtgtatggg

SEQ ID NO: 3322042 - DNA, 25 bp, Homo sapien
tgtcccctcgggatggtcaatttca

SEQ ID NO: 3322043 - DNA, 25 bp, Homo sapien
ttaaactctgccaagtatcatgggc

SEQ ID NO: 3322044 - DNA, 25 bp, Homo sapien
gatagaggcctaaatcagacttctg

SEQ ID NO: 3322045 - DNA, 25 bp, Homo sapien
ggagcaatgctccacatccctgtta

SEQ ID NO: 3322046 - DNA, 25 bp, Homo sapien
aatcctaactcctaatatgatggaa

SEQ ID NO: 3322047 - DNA, 25 bp, Homo sapien
tctataaaactaaaagcaggccctc

SEQ ID NO: 3322048 - DNA, 25 bp, Homo sapien
ctttggtaggatggaggcctcatga

SEQ ID NO: 3322049 - DNA, 25 bp, Homo sapien
tgtgaagacacaaagagaggataac

SEQ ID NO: 3322050 - DNA, 25 bp, Homo sapien
gacactagcttatcacaaaatttgc

SEQ ID NO: 3322051 - DNA, 25 bp, Homo sapien
tgttatttaacccacttggtctatg

SEQ ID NO: 3322052 - DNA, 25 bp, Homo sapien
tggactaagacactagcttatcaca

SEQ ID NO: 3322053 - DNA, 25 bp, Homo sapien
gacagattgttatagcagaccaaat

SEQ ID NO: 3322054 - DNA, 25 bp, Homo sapien
agatatccaggtgtgccagcaaaac

SEQ ID NO: 3322055 - DNA, 25 bp, Homo sapien
tctggagaaagatatccaggtgtgc

SEQ ID NO: 3322056 - DNA, 25 bp, Homo sapien
ccacatatccactggctttccataa

SEQ ID NO: 3322057 - DNA, 25 bp, Homo sapien
acatgcccacatatccactggcttt

SEQ ID NO: 3322058 - DNA, 25 bp, Homo sapien
gactccagtgagaaatcgatgctaa

SEQ ID NO: 3322059 - DNA, 25 bp, Homo sapien
agttgacaggcaatgagactccagt

SEQ ID NO: 3322060 - DNA, 25 bp, Homo sapien
ttacatccaatgttcttagtgtgca

SEQ ID NO: 3322061 - DNA, 25 bp, Homo sapien
tcgatgctaatgtccagattacatc

SEQ ID NO: 3322062 - DNA, 25 bp, Homo sapien
gaacttctatggctaagccaaagtc

SEQ ID NO: 3322063 - DNA, 25 bp, Homo sapien
tccccttgaacttctatggctaagc

SEQ ID NO: 3322064 - DNA, 25 bp, Homo sapien
acttctatggctaagccaaagtctg

SEQ ID NO: 3322065 - DNA, 25 bp, Homo sapien
cttgaacttctatggctaagccaaa

SEQ ID NO: 3322066 - DNA, 25 bp, Homo sapien
taacagagcagacattttcagcaga

SEQ ID NO: 3322067 - DNA, 25 bp, Homo sapien
gacttggccacggacattgacttag

SEQ ID NO: 3322068 - DNA, 25 bp, Homo sapien
gaatgagagcacctgtcttgacctg

SEQ ID NO: 3322069 - DNA, 25 bp, Homo sapien
cataactgtcctagagagatactgg

SEQ ID NO: 3322070 - DNA, 25 bp, Homo sapien
tgacgaccggtaaatgtgagaaaac

SEQ ID NO: 3322071 - DNA, 25 bp, Homo sapien
gagcaactgtcagcgtaactggtaa

SEQ ID NO: 3322072 - DNA, 25 bp, Homo sapien
gcagggcttgtgtgcattgtgcctc

SEQ ID NO: 3322073 - DNA, 25 bp, Homo sapien
gattcatcgctattatgacgaccgg

SEQ ID NO: 3322074 - DNA, 25 bp, Homo sapien
ggaccagagttgcaccttatactca

SEQ ID NO: 3322075 - DNA, 25 bp, Homo sapien
catgcatatcctctgaatgactggg

SEQ ID NO: 3322076 - DNA, 25 bp, Homo sapien
aatactcataactaacgaagacctc

SEQ ID NO: 3322077 - DNA, 25 bp, Homo sapien
gacctcactgtagggcctttgtgag

SEQ ID NO: 3322078 - DNA, 25 bp, Homo sapien
gaattcatgtacttagcacaaggag

SEQ ID NO: 3322079 - DNA, 25 bp, Homo sapien
ggagagtgccaattacccacagctt

SEQ ID NO: 3322080 - DNA, 25 bp, Homo sapien
gagtgtaactaactgcagtgggaga

SEQ ID NO: 3322081 - DNA, 25 bp, Homo sapien
tatacatggtacaagggattttagc

SEQ ID NO: 3322082 - DNA, 25 bp, Homo sapien
tatctctggaagacccataggcagg

SEQ ID NO: 3322083 - DNA, 25 bp, Homo sapien
gatcagagcaccttcctcataaagt

SEQ ID NO: 3322084 - DNA, 25 bp, Homo sapien
tccaaccaactaaattgagaagtag

SEQ ID NO: 3322085 - DNA, 25 bp, Homo sapien
tacatactatgaggatgatcagagc

SEQ ID NO: 3322086 - DNA, 25 bp, Homo sapien
cagggatttggcacgttcaagaggt

SEQ ID NO: 3322087 - DNA, 25 bp, Homo sapien
taaacagctatggttccagagggct

SEQ ID NO: 3322088 - DNA, 25 bp, Homo sapien
tgtttatgaaatggcctactgaagc

SEQ ID NO: 3322089 - DNA, 25 bp, Homo sapien
tggccaggtataagcccctacgtta

SEQ ID NO: 3322090 - DNA, 25 bp, Homo sapien
tatcttcttcaaccgcattactcac

SEQ ID NO: 3322091 - DNA, 25 bp, Homo sapien
ttaggaactgtgtggtggtttatct

SEQ ID NO: 3322092 - DNA, 25 bp, Homo sapien
tcaggtcccgatggaccacgcccat

SEQ ID NO: 3322093 - DNA, 25 bp, Homo sapien
ttcaggtcccgatggaccacgccca

SEQ ID NO: 3322094 - DNA, 25 bp, Homo sapien
cttcaggtcccgatggaccacgccc

SEQ ID NO: 3322095 - DNA, 25 bp, Homo sapien
tggaccacgcccatctgatggcagt

SEQ ID NO: 3322096 - DNA, 25 bp, Homo sapien
cagatgtgagccagaatgtgggtcc

SEQ ID NO: 3322097 - DNA, 25 bp, Homo sapien
ttatagctgtggtgttccgcctcca

SEQ ID NO: 3322098 - DNA, 25 bp, Homo sapien
gcaacccatggtctcagaacagaag

SEQ ID NO: 3322099 - DNA, 25 bp, Homo sapien
taacagtcagggcaccactaaggtt

SEQ ID NO: 3322100 - DNA, 25 bp, Homo sapien
aactatgccatttaggtgacaatga

SEQ ID NO: 3322101 - DNA, 25 bp, Homo sapien
tgattaacactttctagaatctgct

SEQ ID NO: 3322102 - DNA, 25 bp, Homo sapien
acactttctagaatctgctgtatac

SEQ ID NO: 3322103 - DNA, 25 bp, Homo sapien
atttaggtgacaatgattaacactt

SEQ ID NO: 3322104 - DNA, 25 bp, Homo sapien
taccatttcgccttagaagcgttgc

SEQ ID NO: 3322105 - DNA, 25 bp, Homo sapien
aatgcaagtctccaacaataaaggg

SEQ ID NO: 3322106 - DNA, 25 bp, Homo sapien
aagtggcaggtgaaacaagggtcaa

SEQ ID NO: 3322107 - DNA, 25 bp, Homo sapien
tctgaggtcacaattaaacaggtgt

SEQ ID NO: 3322108 - DNA, 25 bp, Homo sapien
taaaaatatagaccagattcatgga

SEQ ID NO: 3322109 - DNA, 25 bp, Homo sapien
tgtaatctaactacagatgctagat

SEQ ID NO: 3322110 - DNA, 25 bp, Homo sapien
aaaaatatagaccagattcatggag

SEQ ID NO: 3322111 - DNA, 25 bp, Homo sapien
taaaatatgtaatctaactacagat

SEQ ID NO: 3322112 - DNA, 25 bp, Homo sapien
tgtatcttgcccagggcaagtcact

SEQ ID NO: 3322113 - DNA, 25 bp, Homo sapien
gagtcttgtatcttgcccagggcaa

SEQ ID NO: 3322114 - DNA, 25 bp, Homo sapien
tgttgagtcttgtatcttgcccagg

SEQ ID NO: 3322115 - DNA, 25 bp, Homo sapien
ttgaatgttgagtcttgtatcttgc

SEQ ID NO: 3322116 - DNA, 25 bp, Homo sapien
agtattctcttgccactatgtcttc

SEQ ID NO: 3322117 - DNA, 25 bp, Homo sapien
gtagtattctcttgccactatgtct

SEQ ID NO: 3322118 - DNA, 25 bp, Homo sapien
tgtagtattctcttgccactatgtc

SEQ ID NO: 3322119 - DNA, 25 bp, Homo sapien
actgtagtattctcttgccactatg

SEQ ID NO: 3322120 - DNA, 25 bp, Homo sapien
gtcagcgtgccaaccagtgtgccaa

SEQ ID NO: 3322121 - DNA, 25 bp, Homo sapien
gtgccaaccagtgtgccaagtccat

SEQ ID NO: 3322122 - DNA, 25 bp, Homo sapien
agcgtgccaaccagtgtgccaagtc

SEQ ID NO: 3322123 - DNA, 25 bp, Homo sapien
ttgtcagcgtgccaaccagtgtgcc

SEQ ID NO: 3322124 - DNA, 25 bp, Homo sapien
tccacactggaacattacaccaatc

SEQ ID NO: 3322125 - DNA, 25 bp, Homo sapien
caggaaggctgggagtcttgctgca

SEQ ID NO: 3322126 - DNA, 25 bp, Homo sapien
aggaaggctgggagtcttgctgcat

SEQ ID NO: 3322127 - DNA, 25 bp, Homo sapien
tacaccaatcagtgccccatgccag

SEQ ID NO: 3322128 - DNA, 25 bp, Homo sapien
taacagtgtcaggtacacactaggt

SEQ ID NO: 3322129 - DNA, 25 bp, Homo sapien
tattgcttcaaaacaacgagtcctc

SEQ ID NO: 3322130 - DNA, 25 bp, Homo sapien
gacatctatgatcctgttatacagg

SEQ ID NO: 3322131 - DNA, 25 bp, Homo sapien
gagtcctccttggttaatatactgc

SEQ ID NO: 3322132 - DNA, 25 bp, Homo sapien
ttttaactatcttcagtagatgtct

SEQ ID NO: 3322133 - DNA, 25 bp, Homo sapien
actatcttcagtagatgtctcatgg

SEQ ID NO: 3322134 - DNA, 25 bp, Homo sapien
tcttcagtagatgtctcatggacat

SEQ ID NO: 3322135 - DNA, 25 bp, Homo sapien
ttaactatcttcagtagatgtctca

SEQ ID NO: 3322136 - DNA, 25 bp, Homo sapien
tcagacagtaatctagaagagtgtg

SEQ ID NO: 3322137 - DNA, 25 bp, Homo sapien
caagtacacagaagggtatacagac

SEQ ID NO: 3322138 - DNA, 25 bp, Homo sapien
tgacatcctgccttcaacaaaagat

SEQ ID NO: 3322139 - DNA, 25 bp, Homo sapien
tttagacggtaccaactgacatcct

SEQ ID NO: 3322140 - DNA, 25 bp, Homo sapien
tatgagccacatatggaatgctagg

SEQ ID NO: 3322141 - DNA, 25 bp, Homo sapien
gaatgctaggagtttcacagtccta

SEQ ID NO: 3322142 - DNA, 25 bp, Homo sapien
ttgtcatgaaagagtgcacctgatt

SEQ ID NO: 3322143 - DNA, 25 bp, Homo sapien
gatgctttgtaccagggttcaaccc

SEQ ID NO: 3322144 - DNA, 25 bp, Homo sapien
cacagcttgccgataaatggacact

SEQ ID NO: 3322145 - DNA, 25 bp, Homo sapien
cgtcacacaccaaatcggaagatag

SEQ ID NO: 3322146 - DNA, 25 bp, Homo sapien
tgcttgggagataaacaaaggtcac

SEQ ID NO: 3322147 - DNA, 25 bp, Homo sapien
aatggacactctcccatggcattct

SEQ ID NO: 3322148 - DNA, 25 bp, Homo sapien
gctagcatgtaattcccttggtgag

SEQ ID NO: 3322149 - DNA, 25 bp, Homo sapien
gggccaccattgagcaacatttgaa

SEQ ID NO: 3322150 - DNA, 25 bp, Homo sapien
catattggataaatgtgcctggcaa

SEQ ID NO: 3322151 - DNA, 25 bp, Homo sapien
taagaatgatgtaagcctggaactg

SEQ ID NO: 3322152 - DNA, 25 bp, Homo sapien
tcgaaaaagtctgtatcatcaataa

SEQ ID NO: 3322153 - DNA, 25 bp, Homo sapien
cttcgaaaaagtctgtatcatcaat

SEQ ID NO: 3322154 - DNA, 25 bp, Homo sapien
ccttcgaaaaagtctgtatcatcaa

SEQ ID NO: 3322155 - DNA, 25 bp, Homo sapien
gaaaaagtctgtatcatcaataata

SEQ ID NO: 3322156 - DNA, 25 bp, Homo sapien
cacccttaaatgtaatagctcatcc

SEQ ID NO: 3322157 - DNA, 25 bp, Homo sapien
tgtaatagctcatccacactaacct

SEQ ID NO: 3322158 - DNA, 25 bp, Homo sapien
catttctacaattttccacgtctgt

SEQ ID NO: 3322159 - DNA, 25 bp, Homo sapien
tctcctttcacccttaaatgtaata

SEQ ID NO: 3322160 - DNA, 25 bp, Homo sapien
ttgtagactcagctatgttctataa

SEQ ID NO: 3322161 - DNA, 25 bp, Homo sapien
cccaaagcacttgtgattagaggtg

SEQ ID NO: 3322162 - DNA, 25 bp, Homo sapien
gcccagcctccttcttaaatacaaa

SEQ ID NO: 3322163 - DNA, 25 bp, Homo sapien
aatttgtagactcagctatgttcta

SEQ ID NO: 3322164 - DNA, 25 bp, Homo sapien
cacagaacaatatcgtggcaaacgt

SEQ ID NO: 3322165 - DNA, 25 bp, Homo sapien
ttagtgacaacctagagcctgagcc

SEQ ID NO: 3322166 - DNA, 25 bp, Homo sapien
gcttgaagctgtctacacagaacaa

SEQ ID NO: 3322167 - DNA, 25 bp, Homo sapien
tgcaccagaggaatccgcataagaa

SEQ ID NO: 3322168 - DNA, 25 bp, Homo sapien
aacaccaagtagtgaaagccctctt

SEQ ID NO: 3322169 - DNA, 25 bp, Homo sapien
gccctcttctgatatgctatcatga

SEQ ID NO: 3322170 - DNA, 25 bp, Homo sapien
tgaaagccctcttctgatatgctat

SEQ ID NO: 3322171 - DNA, 25 bp, Homo sapien
aatcaaacaccaagtagtgaaagcc

SEQ ID NO: 3322172 - DNA, 25 bp, Homo sapien
catatgagtggacgcaattagccta

SEQ ID NO: 3322173 - DNA, 25 bp, Homo sapien
tccaaaggttagctgacccatggcc

SEQ ID NO: 3322174 - DNA, 25 bp, Homo sapien
gcattttgaagcatactgcacctcg

SEQ ID NO: 3322175 - DNA, 25 bp, Homo sapien
tgactgctctgttattgccataagc

SEQ ID NO: 3322176 - DNA, 25 bp, Homo sapien
caccacacacttctatgagcgatat

SEQ ID NO: 3322177 - DNA, 25 bp, Homo sapien
caactttctcacagtctaggcatta

SEQ ID NO: 3322178 - DNA, 25 bp, Homo sapien
ggcattaaccaaacagttattcaaa

SEQ ID NO: 3322179 - DNA, 25 bp, Homo sapien
tgcttaagattcaaacttggtaaac

SEQ ID NO: 3322180 - DNA, 25 bp, Homo sapien
tagtgtggctatcccacccacaagg

SEQ ID NO: 3322181 - DNA, 25 bp, Homo sapien
ggagcaaacttcttaacgtgaccca

SEQ ID NO: 3322182 - DNA, 25 bp, Homo sapien
ttataccagtaaaccaggacagccc

SEQ ID NO: 3322183 - DNA, 25 bp, Homo sapien
aaacaaccatttaacatcccctgtg

SEQ ID NO: 3322184 - DNA, 25 bp, Homo sapien
catgagcataaggatacgtaacaga

SEQ ID NO: 3322185 - DNA, 25 bp, Homo sapien
tgcaaaccatggtctgtgggccaac

SEQ ID NO: 3322186 - DNA, 25 bp, Homo sapien
actgtttaactgactcacctgagga

SEQ ID NO: 3322187 - DNA, 25 bp, Homo sapien
cagagaacttacatggcccacaaag

SEQ ID NO: 3322188 - DNA, 25 bp, Homo sapien
aaaacagtaatccaactattcaggg

SEQ ID NO: 3322189 - DNA, 25 bp, Homo sapien
cccttagagatttactgtggtataa

SEQ ID NO: 3322190 - DNA, 25 bp, Homo sapien
tcatcgaggaagctaaatgcaatct

SEQ ID NO: 3322191 - DNA, 25 bp, Homo sapien
agggagttaaagtcccattagcaag

SEQ ID NO: 3322192 - DNA, 25 bp, Homo sapien
tgctgaagctcaagaatctgccatt

SEQ ID NO: 3322193 - DNA, 25 bp, Homo sapien
tataagaatgcttcagaaccaccct

SEQ ID NO: 3322194 - DNA, 25 bp, Homo sapien
tagagcccgctccagatcaatttgt

SEQ ID NO: 3322195 - DNA, 25 bp, Homo sapien
aaagtggtagattcctagagcccgc

SEQ ID NO: 3322196 - DNA, 25 bp, Homo sapien
tcaaaagacggcagattctagcttc

SEQ ID NO: 3322197 - DNA, 25 bp, Homo sapien
aatattagggtgcttcaaaagacgg

SEQ ID NO: 3322198 - DNA, 25 bp, Homo sapien
aaagacggcagattctagcttctct

SEQ ID NO: 3322199 - DNA, 25 bp, Homo sapien
ggtgcttcaaaagacggcagattct

SEQ ID NO: 3322200 - DNA, 25 bp, Homo sapien
cagagccttctctaagagtcaagcg

SEQ ID NO: 3322201 - DNA, 25 bp, Homo sapien
tccgtcagacatgaggataatctgt

SEQ ID NO: 3322202 - DNA, 25 bp, Homo sapien
gataatctgtcaatcatccagagcc

SEQ ID NO: 3322203 - DNA, 25 bp, Homo sapien
ctcgtcttacttccgtcagacatga

SEQ ID NO: 3322204 - DNA, 25 bp, Homo sapien
tggaacacattccactcacctaatg

SEQ ID NO: 3322205 - DNA, 25 bp, Homo sapien
gatataattaactctgtgaccacaa

SEQ ID NO: 3322206 - DNA, 25 bp, Homo sapien
aaaggttgttaatgctaaagagctc

SEQ ID NO: 3322207 - DNA, 25 bp, Homo sapien
aaacagatctgggtgccataaccag

SEQ ID NO: 3322208 - DNA, 25 bp, Homo sapien
tttcttaattcttccctagatgtcc

SEQ ID NO: 3322209 - DNA, 25 bp, Homo sapien
ttcttaattcttccctagatgtcca

SEQ ID NO: 3322210 - DNA, 25 bp, Homo sapien
tattccagccacatattctccagtc

SEQ ID NO: 3322211 - DNA, 25 bp, Homo sapien
ggtctgtgtgttcccagaatttcat

SEQ ID NO: 3322212 - DNA, 25 bp, Homo sapien
tctggtactaacctcattcaaaagg

SEQ ID NO: 3322213 - DNA, 25 bp, Homo sapien
agattatgtatctgccaaacgtgtg

SEQ ID NO: 3322214 - DNA, 25 bp, Homo sapien
tttttcagttaaatgacatgctctc

SEQ ID NO: 3322215 - DNA, 25 bp, Homo sapien
gcagaagagttctcaactgaccata

SEQ ID NO: 3322216 - DNA, 25 bp, Homo sapien
ttccattcccaaatcaaaacaccaa

SEQ ID NO: 3322217 - DNA, 25 bp, Homo sapien
aaatcaaaacaccaattcatcccta

SEQ ID NO: 3322218 - DNA, 25 bp, Homo sapien
aaattccaggtgccttgtgtctgca

SEQ ID NO: 3322219 - DNA, 25 bp, Homo sapien
tctggaagtcagaggaataccaagt

SEQ ID NO: 3322220 - DNA, 25 bp, Homo sapien
ttccttgtgcctactgaaatgtcat

SEQ ID NO: 3322221 - DNA, 25 bp, Homo sapien
tataaagtagccttagaagcacagt

SEQ ID NO: 3322222 - DNA, 25 bp, Homo sapien
tttgattgtactgggatattctggc

SEQ ID NO: 3322223 - DNA, 25 bp, Homo sapien
tatttaatgtacctaggctggctca

SEQ ID NO: 3322224 - DNA, 25 bp, Homo sapien
catacaaggtaaaggctggccacgt

SEQ ID NO: 3322225 - DNA, 25 bp, Homo sapien
gatcaaaaggatacaaggagtcagg

SEQ ID NO: 3322226 - DNA, 25 bp, Homo sapien
tgaaatatgatagcgagccaccatt

SEQ ID NO: 3322227 - DNA, 25 bp, Homo sapien
tgggctcacctcttcattcagacca

SEQ ID NO: 3322228 - DNA, 25 bp, Homo sapien
taaatgtgctatcaaactgaacacg

SEQ ID NO: 3322229 - DNA, 25 bp, Homo sapien
taaatattcctgacagtctacactc

SEQ ID NO: 3322230 - DNA, 25 bp, Homo sapien
tattctcacatgcaaatcacctagt

SEQ ID NO: 3322231 - DNA, 25 bp, Homo sapien
ttcagtggtccctatttctattagt

SEQ ID NO: 3322232 - DNA, 25 bp, Homo sapien
aaacatcaagttcccacatatgtgg

SEQ ID NO: 3322233 - DNA, 25 bp, Homo sapien
aatttatcatgtattcagtggtccc

SEQ ID NO: 3322234 - DNA, 25 bp, Homo sapien
gatactcttctataacttgttgtaa

SEQ ID NO: 3322235 - DNA, 25 bp, Homo sapien
ttgaaactcccataccttccctata

SEQ ID NO: 3322236 - DNA, 25 bp, Homo sapien
tgtacaaacagaccttcttaaacta

SEQ ID NO: 3322237 - DNA, 25 bp, Homo sapien
tcctagtcacttttctacaattgcc

SEQ ID NO: 3322238 - DNA, 25 bp, Homo sapien
atcacaagaggaggggagttaaggc

SEQ ID NO: 3322239 - DNA, 25 bp, Homo sapien
ggtacaaccacttgagacaactgtt

SEQ ID NO: 3322240 - DNA, 25 bp, Homo sapien
tgatcaactagtctccgctcatgtg

SEQ ID NO: 3322241 - DNA, 25 bp, Homo sapien
tatattactagtcaaagggctgcac

SEQ ID NO: 3322242 - DNA, 25 bp, Homo sapien
aacgaataggcaaaccacagtctgg

SEQ ID NO: 3322243 - DNA, 25 bp, Homo sapien
tgtatgcaactgtgaaaatccactg

SEQ ID NO: 3322244 - DNA, 25 bp, Homo sapien
ggtgatcaaaaccagatagtagtct

SEQ ID NO: 3322245 - DNA, 25 bp, Homo sapien
gaaggaacattctgtagtgctagaa

SEQ ID NO: 3322246 - DNA, 25 bp, Homo sapien
ccctcaacaggtgaaatggacctat

SEQ ID NO: 3322247 - DNA, 25 bp, Homo sapien
ttaggcactttataactacagcagg

SEQ ID NO: 3322248 - DNA, 25 bp, Homo sapien
cttgcattgccacatgacagcagtg

SEQ ID NO: 3322249 - DNA, 25 bp, Homo sapien
tacagcaggtttaagtcatcaaaga

SEQ ID NO: 3322250 - DNA, 25 bp, Homo sapien
gagtcctgcactcacaatttaggca

SEQ ID NO: 3322251 - DNA, 25 bp, Homo sapien
tcaaaacgtaaatgagagtttagaa

SEQ ID NO: 3322252 - DNA, 25 bp, Homo sapien
acgcatcatgatgtatactccaaca

SEQ ID NO: 3322253 - DNA, 25 bp, Homo sapien
tatgcgcattatgaagaattccatc

SEQ ID NO: 3322254 - DNA, 25 bp, Homo sapien
tggcaatgtccagttcatcagaata

SEQ ID NO: 3322255 - DNA, 25 bp, Homo sapien
ttgggggtaaaatgatctagcactt

SEQ ID NO: 3322256 - DNA, 25 bp, Homo sapien
tttgggggtaaaatgatctagcact

SEQ ID NO: 3322257 - DNA, 25 bp, Homo sapien
gggggtaaaatgatctagcactttc

SEQ ID NO: 3322258 - DNA, 25 bp, Homo sapien
atttgggggtaaaatgatctagcac

SEQ ID NO: 3322259 - DNA, 25 bp, Homo sapien
tcaactttggtaatatgacatccag

SEQ ID NO: 3322260 - DNA, 25 bp, Homo sapien
aatcgtcacagtcactaaaccagag

SEQ ID NO: 3322261 - DNA, 25 bp, Homo sapien
aaaaactatgtacaaccctgagcca

SEQ ID NO: 3322262 - DNA, 25 bp, Homo sapien
caaaagctgcctgtagagtccttag

SEQ ID NO: 3322263 - DNA, 25 bp, Homo sapien
caggttctgggagccatttttggac

SEQ ID NO: 3322264 - DNA, 25 bp, Homo sapien
gattcaaggcctgtacctgctaatg

SEQ ID NO: 3322265 - DNA, 25 bp, Homo sapien
tctctctgctagatgcaacttggaa

SEQ ID NO: 3322266 - DNA, 25 bp, Homo sapien
gacactttggtgctagattcaaggc

SEQ ID NO: 3322267 - DNA, 25 bp, Homo sapien
cagtacattgcatgttctccagagg

SEQ ID NO: 3322268 - DNA, 25 bp, Homo sapien
taatccaggccaatccatcgtattc

SEQ ID NO: 3322269 - DNA, 25 bp, Homo sapien
aatctgatttcacagccaatgctgg

SEQ ID NO: 3322270 - DNA, 25 bp, Homo sapien
ccagattgtctatcctttgcccaaa

SEQ ID NO: 3322271 - DNA, 25 bp, Homo sapien
gttaagctcccaaaggtatttgcag

SEQ ID NO: 3322272 - DNA, 25 bp, Homo sapien
tgacccagaaagctggccaaattcc

SEQ ID NO: 3322273 - DNA, 25 bp, Homo sapien
gcccaggaaggaatatgatgtaccc

SEQ ID NO: 3322274 - DNA, 25 bp, Homo sapien
cacagcttactttcgacaggcataa

SEQ ID NO: 3322275 - DNA, 25 bp, Homo sapien
tactgctaaaagttctaggtcctca

SEQ ID NO: 3322276 - DNA, 25 bp, Homo sapien
ggtgggtgccaaacactactcttga

SEQ ID NO: 3322277 - DNA, 25 bp, Homo sapien
tcaataaatacctgtggtgggtgcc

SEQ ID NO: 3322278 - DNA, 25 bp, Homo sapien
caagcagttaataatgtcagtacca

SEQ ID NO: 3322279 - DNA, 25 bp, Homo sapien
gcataatgtggcatatatcaactat

SEQ ID NO: 3322280 - DNA, 25 bp, Homo sapien
taaacactaatagcataatgtggca

SEQ ID NO: 3322281 - DNA, 25 bp, Homo sapien
ggcatatatcaactatccacaattt

SEQ ID NO: 3322282 - DNA, 25 bp, Homo sapien
taatttaaacactaatagcataatg

SEQ ID NO: 3322283 - DNA, 25 bp, Homo sapien
taaacaaagttctcacacaatcagg

SEQ ID NO: 3322284 - DNA, 25 bp, Homo sapien
taaggatgacacatgccacttctgg

SEQ ID NO: 3322285 - DNA, 25 bp, Homo sapien
ttccaattcaagacaagtaaccatg

SEQ ID NO: 3322286 - DNA, 25 bp, Homo sapien
cagtatggcacctgacaaccacttt

SEQ ID NO: 3322287 - DNA, 25 bp, Homo sapien
tagcaatggagtagaggtaaaatac

SEQ ID NO: 3322288 - DNA, 25 bp, Homo sapien
tagatgaggcctaattttgcataca

SEQ ID NO: 3322289 - DNA, 25 bp, Homo sapien
gaatgtcaagaagccattacttcca

SEQ ID NO: 3322290 - DNA, 25 bp, Homo sapien
tctaacgatcaagaaatacactggg

SEQ ID NO: 3322291 - DNA, 25 bp, Homo sapien
tcaaggctgccactggatttataag

SEQ ID NO: 3322292 - DNA, 25 bp, Homo sapien
gcaaagattcaaacgtagttctcac

SEQ ID NO: 3322293 - DNA, 25 bp, Homo sapien
tagttctcacagctaaatcaaggct

SEQ ID NO: 3322294 - DNA, 25 bp, Homo sapien
tactgatgaagaacctgatatccag

SEQ ID NO: 3322295 - DNA, 25 bp, Homo sapien
tatttacatacaacagaacctataa

SEQ ID NO: 3322296 - DNA, 25 bp, Homo sapien
caacagaacctataatcaacatgac

SEQ ID NO: 3322297 - DNA, 25 bp, Homo sapien
gatacctaagtctaaagttcagtta

SEQ ID NO: 3322298 - DNA, 25 bp, Homo sapien
agttcagttataactacatgatata

SEQ ID NO: 3322299 - DNA, 25 bp, Homo sapien
ttgtccagtaggaattttcatacat

SEQ ID NO: 3322300 - DNA, 25 bp, Homo sapien
tttttggtgttgataattttggcag

SEQ ID NO: 3322301 - DNA, 25 bp, Homo sapien
ttttggtgttgataattttggcagc

SEQ ID NO: 3322302 - DNA, 25 bp, Homo sapien
tccagtaggaattttcatacatctt

SEQ ID NO: 3322303 - DNA, 25 bp, Homo sapien
ttacagttcacactcacagcaccaa

SEQ ID NO: 3322304 - DNA, 25 bp, Homo sapien
acagttcacactcacagcaccaaat

SEQ ID NO: 3322305 - DNA, 25 bp, Homo sapien
acactcacagcaccaaatgctctga

SEQ ID NO: 3322306 - DNA, 25 bp, Homo sapien
actcacagcaccaaatgctctgaga

SEQ ID NO: 3322307 - DNA, 25 bp, Homo sapien
gctgatactcgtccgtgaacctggt

SEQ ID NO: 3322308 - DNA, 25 bp, Homo sapien
tttccaagctcctcgaaaagctgat

SEQ ID NO: 3322309 - DNA, 25 bp, Homo sapien
tcctcgaaaagctgatactcgtccg

SEQ ID NO: 3322310 - DNA, 25 bp, Homo sapien
actcgtccgtgaacctggtgcaggt

SEQ ID NO: 3322311 - DNA, 25 bp, Homo sapien
agacgcgcggctaaccccgggactg

SEQ ID NO: 3322312 - DNA, 25 bp, Homo sapien
cgcgacggaccagaagcgagcagac

SEQ ID NO: 3322313 - DNA, 25 bp, Homo sapien
ttcctggtccgaaagtagctcgccc

SEQ ID NO: 3322314 - DNA, 25 bp, Homo sapien
cagggccgctcttactttcctggtc

SEQ ID NO: 3322315 - DNA, 25 bp, Homo sapien
gcaagcagttgcgaaacgatccgca

SEQ ID NO: 3322316 - DNA, 25 bp, Homo sapien
cagggggtaaagtactcaagaagag

SEQ ID NO: 3322317 - DNA, 25 bp, Homo sapien
gccaggcacgggacgagtggcaagc

SEQ ID NO: 3322318 - DNA, 25 bp, Homo sapien
ctgtccccaaatgcagggggtaaag

SEQ ID NO: 3322319 - DNA, 25 bp, Homo sapien
acgagcccgcgcggcttcaagacgg

SEQ ID NO: 3322320 - DNA, 25 bp, Homo sapien
agaaagagcgctcggctcaggcgaa

SEQ ID NO: 3322321 - DNA, 25 bp, Homo sapien
cttcaagacggcgcggcgagagaaa

SEQ ID NO: 3322322 - DNA, 25 bp, Homo sapien
cgaagcgaggcaccttggcggcctc

SEQ ID NO: 3322323 - DNA, 25 bp, Homo sapien
ggatctctcgcactccctcctttgg

SEQ ID NO: 3322324 - DNA, 25 bp, Homo sapien
tccctctagcgactccaagcctgtc

SEQ ID NO: 3322325 - DNA, 25 bp, Homo sapien
ctcctttggttgcacacacgagcac

SEQ ID NO: 3322326 - DNA, 25 bp, Homo sapien
caagcctgtcccttcgtggatctct

SEQ ID NO: 3322327 - DNA, 25 bp, Homo sapien
ggtgaatgaggcgagaagtcacagt

SEQ ID NO: 3322328 - DNA, 25 bp, Homo sapien
tgaatgaggcgagaagtcacagtta

SEQ ID NO: 3322329 - DNA, 25 bp, Homo sapien
aatgaggcgagaagtcacagttacc

SEQ ID NO: 3322330 - DNA, 25 bp, Homo sapien
ctggaggtttgggtgaatgaggcga

SEQ ID NO: 3322331 - DNA, 25 bp, Homo sapien
cacgacacccggtgggccgagcaag

SEQ ID NO: 3322332 - DNA, 25 bp, Homo sapien
cgcccctgttttgggcgccgggcag

SEQ ID NO: 3322333 - DNA, 25 bp, Homo sapien
caatctggggctgactgagcgggaa

SEQ ID NO: 3322334 - DNA, 25 bp, Homo sapien
atgcagggcaactcgaggatggccc

SEQ ID NO: 3322335 - DNA, 25 bp, Homo sapien
tccacgccgctcagagttgacacag

SEQ ID NO: 3322336 - DNA, 25 bp, Homo sapien
ccggatgtgggctgttcactgctct

SEQ ID NO: 3322337 - DNA, 25 bp, Homo sapien
gatgtgggctgttcactgctctcag

SEQ ID NO: 3322338 - DNA, 25 bp, Homo sapien
caggggccggatgtgggctgttcac

SEQ ID NO: 3322339 - DNA, 25 bp, Homo sapien
catcatgaagggagcttttattatc

SEQ ID NO: 3322340 - DNA, 25 bp, Homo sapien
atgccatcatcatgaagggagcttt

SEQ ID NO: 3322341 - DNA, 25 bp, Homo sapien
catcatcatgaagggagcttttatt

SEQ ID NO: 3322342 - DNA, 25 bp, Homo sapien
tcatgaagggagcttttattatcat

SEQ ID NO: 3322343 - DNA, 25 bp, Homo sapien
ctaagcattcaaataataggcctgc

SEQ ID NO: 3322344 - DNA, 25 bp, Homo sapien
catgcaaaatccagacctcttatgt

SEQ ID NO: 3322345 - DNA, 25 bp, Homo sapien
gagtccactggcaggttctgattgg

SEQ ID NO: 3322346 - DNA, 25 bp, Homo sapien
gttctaggaaagacatgcaaaatcc

SEQ ID NO: 3322347 - DNA, 25 bp, Homo sapien
aaagacatgcaaaatccagacctct

SEQ ID NO: 3322348 - DNA, 25 bp, Homo sapien
tgtaagcctggacagccctagtttt

SEQ ID NO: 3322349 - DNA, 25 bp, Homo sapien
taacatgaacactaggagctgctgg

SEQ ID NO: 3322350 - DNA, 25 bp, Homo sapien
tagaagctgtgttgcattcagcagc

SEQ ID NO: 3322351 - DNA, 25 bp, Homo sapien
cagcagccttgttctttgagataac

SEQ ID NO: 3322352 - DNA, 25 bp, Homo sapien
catcatctgggaagtccagaagtcc

SEQ ID NO: 3322353 - DNA, 25 bp, Homo sapien
ttttacagttaggatcctggtgctt

SEQ ID NO: 3322354 - DNA, 25 bp, Homo sapien
tcctggtgctttgatcggtaaaaac

SEQ ID NO: 3322355 - DNA, 25 bp, Homo sapien
gatcctggtgctttgatcggtaaaa

SEQ ID NO: 3322356 - DNA, 25 bp, Homo sapien
gcttttacagttaggatcctggtgc

SEQ ID NO: 3322357 - DNA, 25 bp, Homo sapien
caagagtagccacagtcagtattgg

SEQ ID NO: 3322358 - DNA, 25 bp, Homo sapien
tagccacagtcagtattgggtagat

SEQ ID NO: 3322359 - DNA, 25 bp, Homo sapien
tttttgctgagttcgcatcagaagg

SEQ ID NO: 3322360 - DNA, 25 bp, Homo sapien
aagggtggtgaactctttggacaga

SEQ ID NO: 3322361 - DNA, 25 bp, Homo sapien
aaatgaaaagcacgaggatgaagac

SEQ ID NO: 3322362 - DNA, 25 bp, Homo sapien
gaaatgaaaagcacgaggatgaaga

SEQ ID NO: 3322363 - DNA, 25 bp, Homo sapien
ttcctgaaacaggattgttgcaaat

SEQ ID NO: 3322364 - DNA, 25 bp, Homo sapien
tcctgaaacaggattgttgcaaatg

SEQ ID NO: 3322365 - DNA, 25 bp, Homo sapien
gtgcaggacagattgcaatggctga

SEQ ID NO: 3322366 - DNA, 25 bp, Homo sapien
ctgattggttcagctggtaggactg

SEQ ID NO: 3322367 - DNA, 25 bp, Homo sapien
caaattgaatagacacctgtgcagg

SEQ ID NO: 3322368 - DNA, 25 bp, Homo sapien
ggtaggactgtcatctttaagtctg

SEQ ID NO: 3322369 - DNA, 25 bp, Homo sapien
aggattcttgtcttgaatatgagtc

SEQ ID NO: 3322370 - DNA, 25 bp, Homo sapien
tcattcagatgggtgtagaaatcat

SEQ ID NO: 3322371 - DNA, 25 bp, Homo sapien
cagatgggtgtagaaatcattggtg

SEQ ID NO: 3322372 - DNA, 25 bp, Homo sapien
ggattcttgtcttgaatatgagtca

SEQ ID NO: 3322373 - DNA, 25 bp, Homo sapien
tgctgttttctctcctcgacatctt

SEQ ID NO: 3322374 - DNA, 25 bp, Homo sapien
cttgctgttttctctcctcgacatc

SEQ ID NO: 3322375 - DNA, 25 bp, Homo sapien
tcctcgacatctttcttgactttct

SEQ ID NO: 3322376 - DNA, 25 bp, Homo sapien
tttctctcctcgacatctttcttga

SEQ ID NO: 3322377 - DNA, 25 bp, Homo sapien
gggtagtaacatgaattcacttaaa

SEQ ID NO: 3322378 - DNA, 25 bp, Homo sapien
ttcactaatataactcataattcac

SEQ ID NO: 3322379 - DNA, 25 bp, Homo sapien
attttattgtgcagggtagtaacat

SEQ ID NO: 3322380 - DNA, 25 bp, Homo sapien
caaagcacagccttgtatattattt

SEQ ID NO: 3322381 - DNA, 25 bp, Homo sapien
gtttactgacaagcatgagatcctg

SEQ ID NO: 3322382 - DNA, 25 bp, Homo sapien
caagtttactgacaagcatgagatc

SEQ ID NO: 3322383 - DNA, 25 bp, Homo sapien
actgacaagcatgagatcctgtttg

SEQ ID NO: 3322384 - DNA, 25 bp, Homo sapien
tttactgacaagcatgagatcctgt

SEQ ID NO: 3322385 - DNA, 25 bp, Homo sapien
tggataggtcccgaatagaagttac

SEQ ID NO: 3322386 - DNA, 25 bp, Homo sapien
caaggtaggctttggataggtcccg

SEQ ID NO: 3322387 - DNA, 25 bp, Homo sapien
ggctttggataggtcccgaatagaa

SEQ ID NO: 3322388 - DNA, 25 bp, Homo sapien
gtaggctttggataggtcccgaata

SEQ ID NO: 3322389 - DNA, 25 bp, Homo sapien
ctgtcgacaaaacacaaactttagg

SEQ ID NO: 3322390 - DNA, 25 bp, Homo sapien
gtgtatactgtaagcttcaaggcct

SEQ ID NO: 3322391 - DNA, 25 bp, Homo sapien
ctctgcattaggagagggcacttca

SEQ ID NO: 3322392 - DNA, 25 bp, Homo sapien
gcaaggttacctactccaggcagga

SEQ ID NO: 3322393 - DNA, 25 bp, Homo sapien
caattttagctagaagttagatcag

SEQ ID NO: 3322394 - DNA, 25 bp, Homo sapien
tattttttaggaccaatgatacaat

SEQ ID NO: 3322395 - DNA, 25 bp, Homo sapien
ggaccaatgatacaattttagctag

SEQ ID NO: 3322396 - DNA, 25 bp, Homo sapien
gaagttagatcagaaaagccacagt

SEQ ID NO: 3322397 - DNA, 25 bp, Homo sapien
ggtgcaagctgttcacatgtgagaa

SEQ ID NO: 3322398 - DNA, 25 bp, Homo sapien
cacgcatggtaaaatgaggtgcaag

SEQ ID NO: 3322399 - DNA, 25 bp, Homo sapien
tcaaggcctttgaggtgacacaatc

SEQ ID NO: 3322400 - DNA, 25 bp, Homo sapien
tacattcattgtgggcagtgtgctc

SEQ ID NO: 3322401 - DNA, 25 bp, Homo sapien
aaattagcatgcttgcggatggtat

SEQ ID NO: 3322402 - DNA, 25 bp, Homo sapien
attagcatgcttgcggatggtatac

SEQ ID NO: 3322403 - DNA, 25 bp, Homo sapien
tctcctcctataattcaaagcagtg

SEQ ID NO: 3322404 - DNA, 25 bp, Homo sapien
caaagcagtgtttggtcagttgact

SEQ ID NO: 3322405 - DNA, 25 bp, Homo sapien
gatggtaggttattgttctcctcct

SEQ ID NO: 3322406 - DNA, 25 bp, Homo sapien
aaattagcatgcttgcggatggtag

SEQ ID NO: 3322407 - DNA, 25 bp, Homo sapien
gcttaggccagcgatattatcgagc

SEQ ID NO: 3322408 - DNA, 25 bp, Homo sapien
ggcttgcaagagtagcaccttggca

SEQ ID NO: 3322409 - DNA, 25 bp, Homo sapien
actctctctaagtgtggcttgcaag

SEQ ID NO: 3322410 - DNA, 25 bp, Homo sapien
tgaaaacaagcctgacgcttaggcc

SEQ ID NO: 3322411 - DNA, 25 bp, Homo sapien
tatccacaagtaacacctgaatggc

SEQ ID NO: 3322412 - DNA, 25 bp, Homo sapien
ttatccacaagtaacacctgaatgg

SEQ ID NO: 3322413 - DNA, 25 bp, Homo sapien
gcttatccacaagtaacacctgaat

SEQ ID NO: 3322414 - DNA, 25 bp, Homo sapien
gtgcttatccacaagtaacacctga

SEQ ID NO: 3322415 - DNA, 25 bp, Homo sapien
tcagcctgatttttgcttggcttct

SEQ ID NO: 3322416 - DNA, 25 bp, Homo sapien
ctttttctcagcctgatttttgctt

SEQ ID NO: 3322417 - DNA, 25 bp, Homo sapien
tctcagcctgatttttgcttggctt

SEQ ID NO: 3322418 - DNA, 25 bp, Homo sapien
tttctcagcctgatttttgcttggc

SEQ ID NO: 3322419 - DNA, 25 bp, Homo sapien
gacccctccattgagcctagggtta

SEQ ID NO: 3322420 - DNA, 25 bp, Homo sapien
ccccagacccctccattgagcctag

SEQ ID NO: 3322421 - DNA, 25 bp, Homo sapien
agacccctccattgagcctagggtt

SEQ ID NO: 3322422 - DNA, 25 bp, Homo sapien
cagacccctccattgagcctagggt

SEQ ID NO: 3322423 - DNA, 25 bp, Homo sapien
ctgtgagagcctccgtaggagcttc

SEQ ID NO: 3322424 - DNA, 25 bp, Homo sapien
actgtgagagcctccgtaggagctt

SEQ ID NO: 3322425 - DNA, 25 bp, Homo sapien
aactgtgagagcctccgtaggagct

SEQ ID NO: 3322426 - DNA, 25 bp, Homo sapien
tgtgagagcctccgtaggagcttct

SEQ ID NO: 3322427 - DNA, 25 bp, Homo sapien
caaggtgatccgttcattgtgccac

SEQ ID NO: 3322428 - DNA, 25 bp, Homo sapien
gatacctgttagataggtccaccct

SEQ ID NO: 3322429 - DNA, 25 bp, Homo sapien
cctctcatatgggtcggctgtgatg

SEQ ID NO: 3322430 - DNA, 25 bp, Homo sapien
cggtcccaggttgctgaaagactga

SEQ ID NO: 3322431 - DNA, 25 bp, Homo sapien
taagtctttagagccaatgtcacgt

SEQ ID NO: 3322432 - DNA, 25 bp, Homo sapien
gccattgtcatagtcccaggcagca

SEQ ID NO: 3322433 - DNA, 25 bp, Homo sapien
tacatctgtgtggagtatatgccat

SEQ ID NO: 3322434 - DNA, 25 bp, Homo sapien
ggtagtgttcgaaatacctgccagg

SEQ ID NO: 3322435 - DNA, 25 bp, Homo sapien
gcgttgaatatccaacctccttcag

SEQ ID NO: 3322436 - DNA, 25 bp, Homo sapien
gatagaatgttgaagtccggtgtgt

SEQ ID NO: 3322437 - DNA, 25 bp, Homo sapien
ttttccgaccatatgcgttgaatat

SEQ ID NO: 3322438 - DNA, 25 bp, Homo sapien
tcagtttctgaggtagggtggcatt

SEQ ID NO: 3322439 - DNA, 25 bp, Homo sapien
gatagaggtttctgactacacaata

SEQ ID NO: 3322440 - DNA, 25 bp, Homo sapien
ccttatgtatgtttcccacagtgtc

SEQ ID NO: 3322441 - DNA, 25 bp, Homo sapien
tagatctctgaaacgagatagaggt

SEQ ID NO: 3322442 - DNA, 25 bp, Homo sapien
tggtatttgccaagggcgttttcca

SEQ ID NO: 3322443 - DNA, 25 bp, Homo sapien
ttggtccagtccaggatccaaaaca

SEQ ID NO: 3322444 - DNA, 25 bp, Homo sapien
tggtccagtccaggatccaaaacat

SEQ ID NO: 3322445 - DNA, 25 bp, Homo sapien
tcttgataatttttggtccagtcca

SEQ ID NO: 3322446 - DNA, 25 bp, Homo sapien
taatttttggtccagtccaggatcc

SEQ ID NO: 3322447 - DNA, 25 bp, Homo sapien
aatgtggtacgtataacccacagaa

SEQ ID NO: 3322448 - DNA, 25 bp, Homo sapien
taagtcctcacagcactattcaaaa

SEQ ID NO: 3322449 - DNA, 25 bp, Homo sapien
ccataaataggagattggataaaga

SEQ ID NO: 3322450 - DNA, 25 bp, Homo sapien
tgctaaactttgattgcacatgaac

SEQ ID NO: 3322451 - DNA, 25 bp, Homo sapien
caagtggtgaaatcagaacgaaacc

SEQ ID NO: 3322452 - DNA, 25 bp, Homo sapien
gataccattgcttgggtctcatgaa

SEQ ID NO: 3322453 - DNA, 25 bp, Homo sapien
taaatgtctatggaggaatgcaaag

SEQ ID NO: 3322454 - DNA, 25 bp, Homo sapien
tcctggtagtcagattggaatttcc

SEQ ID NO: 3322455 - DNA, 25 bp, Homo sapien
ttctgttataacatccaaaactgtc

SEQ ID NO: 3322456 - DNA, 25 bp, Homo sapien
tttctgttataacatccaaaactgt

SEQ ID NO: 3322457 - DNA, 25 bp, Homo sapien
atttctgttataacatccaaaactg

SEQ ID NO: 3322458 - DNA, 25 bp, Homo sapien
cgaatgtagtcagaccacatggctt

SEQ ID NO: 3322459 - DNA, 25 bp, Homo sapien
acatggctttcaggtcatgttccat

SEQ ID NO: 3322460 - DNA, 25 bp, Homo sapien
caaaggagccccgaatgtagtcaga

SEQ ID NO: 3322461 - DNA, 25 bp, Homo sapien
tattgtgaaagtaaccaaaggagcc

SEQ ID NO: 3322462 - DNA, 25 bp, Homo sapien
atgaacaattcaaagtgtagttttt

SEQ ID NO: 3322463 - DNA, 25 bp, Homo sapien
ggcagattggattccagttacaagg

SEQ ID NO: 3322464 - DNA, 25 bp, Homo sapien
ctaggaaggcagattggattccagt

SEQ ID NO: 3322465 - DNA, 25 bp, Homo sapien
ccaagagtgtaagaacggtcaagtt

SEQ ID NO: 3322466 - DNA, 25 bp, Homo sapien
gagcccaagagtgtaagaacggtca

SEQ ID NO: 3322467 - DNA, 25 bp, Homo sapien
cttagctcacatcttaagatttgac

SEQ ID NO: 3322468 - DNA, 25 bp, Homo sapien
actttaattaagaggagccagcttg

SEQ ID NO: 3322469 - DNA, 25 bp, Homo sapien
gcttgtgccataggctccaatttca

SEQ ID NO: 3322470 - DNA, 25 bp, Homo sapien
gaatcagtgcttcatatcttagctc

SEQ ID NO: 3322471 - DNA, 25 bp, Homo sapien
tcttggccgaaatactggccacata

SEQ ID NO: 3322472 - DNA, 25 bp, Homo sapien
tggccgaaatactggccacataaac

SEQ ID NO: 3322473 - DNA, 25 bp, Homo sapien
aaatactggccacataaacatggca

SEQ ID NO: 3322474 - DNA, 25 bp, Homo sapien
cacctcttggccgaaatactggcca

SEQ ID NO: 3322475 - DNA, 25 bp, Homo sapien
caaacataggtaacgtgaactgggc

SEQ ID NO: 3322476 - DNA, 25 bp, Homo sapien
cataggtaacgtgaactgggcagct

SEQ ID NO: 3322477 - DNA, 25 bp, Homo sapien
ttggcaaacataggtaacgtgaact

SEQ ID NO: 3322478 - DNA, 25 bp, Homo sapien
taggtaacgtgaactgggcagctcc

SEQ ID NO: 3322479 - DNA, 25 bp, Homo sapien
ttaaatgaaggttccagcaatttgt

SEQ ID NO: 3322480 - DNA, 25 bp, Homo sapien
tataggatccaattccaagaacaac

SEQ ID NO: 3322481 - DNA, 25 bp, Homo sapien
tatttttccaatggatactggctac

SEQ ID NO: 3322482 - DNA, 25 bp, Homo sapien
acttcacagaagcaagggttccctg

SEQ ID NO: 3322483 - DNA, 25 bp, Homo sapien
acaacttcacagaagcaagggttcc

SEQ ID NO: 3322484 - DNA, 25 bp, Homo sapien
atccaaatcaattacagtagcctgt

SEQ ID NO: 3322485 - DNA, 25 bp, Homo sapien
tccagtttaactccttcggcagcga

SEQ ID NO: 3322486 - DNA, 25 bp, Homo sapien
tggccccaggacaggtaaccataag

SEQ ID NO: 3322487 - DNA, 25 bp, Homo sapien
tctccagcttgagctagtaaggccc

SEQ ID NO: 3322488 - DNA, 25 bp, Homo sapien
ttaatctcagatccgtggtaaccca

SEQ ID NO: 3322489 - DNA, 25 bp, Homo sapien
tagcatctttccaggacagacacag

SEQ ID NO: 3322490 - DNA, 25 bp, Homo sapien
gctagcatctttccaggacagacac

SEQ ID NO: 3322491 - DNA, 25 bp, Homo sapien
gcatctttccaggacagacacaggc

SEQ ID NO: 3322492 - DNA, 25 bp, Homo sapien
tgctagcatctttccaggacagaca

SEQ ID NO: 3322493 - DNA, 25 bp, Homo sapien
aggcggaggcggatgccccgcacag

SEQ ID NO: 3322494 - DNA, 25 bp, Homo sapien
ccacacctggaaagaactgcgaagt

SEQ ID NO: 3322495 - DNA, 25 bp, Homo sapien
cccaacagacggtgaagactctcca

SEQ ID NO: 3322496 - DNA, 25 bp, Homo sapien
gacaggaacttttcgtggccagagc

SEQ ID NO: 3322497 - DNA, 25 bp, Homo sapien
gataaactgccgtagtggaccggcc

SEQ ID NO: 3322498 - DNA, 25 bp, Homo sapien
tccgcagaaactccgggcagcaatt

SEQ ID NO: 3322499 - DNA, 25 bp, Homo sapien
cgggcagcaattccttttccccgct

SEQ ID NO: 3322500 - DNA, 25 bp, Homo sapien
agaaactccgggcagcaattccttt

SEQ ID NO: 3322501 - DNA, 25 bp, Homo sapien
tccacctccgcagaaactccgggca

SEQ ID NO: 3322502 - DNA, 25 bp, Homo sapien
caggcgctgcaaactgcgtgcgttt

SEQ ID NO: 3322503 - DNA, 25 bp, Homo sapien
aacttatttagctttggcactccga

SEQ ID NO: 3322504 - DNA, 25 bp, Homo sapien
aaaaggactgtttagaggctcgatc

SEQ ID NO: 3322505 - DNA, 25 bp, Homo sapien
tctttgcgtagttggcgcacccggc

SEQ ID NO: 3322506 - DNA, 25 bp, Homo sapien
ccacagggtgtctccagccaaaagc

SEQ ID NO: 3322507 - DNA, 25 bp, Homo sapien
ttctccttcaagaaccccgaagcca

SEQ ID NO: 3322508 - DNA, 25 bp, Homo sapien
gggaggaggttacagaagctgggta

SEQ ID NO: 3322509 - DNA, 25 bp, Homo sapien
agaagctgggtagctctccacgagt

SEQ ID NO: 3322510 - DNA, 25 bp, Homo sapien
agctgggtagctctccacgagtttg

SEQ ID NO: 3322511 - DNA, 25 bp, Homo sapien
ctgggtagctctccacgagtttgtc

SEQ ID NO: 3322512 - DNA, 25 bp, Homo sapien
gccccagagtgcaccatattggtca

SEQ ID NO: 3322513 - DNA, 25 bp, Homo sapien
ccccagagtgcaccatattggtcat

SEQ ID NO: 3322514 - DNA, 25 bp, Homo sapien
agccccagagtgcaccatattggtc

SEQ ID NO: 3322515 - DNA, 25 bp, Homo sapien
gcttgggcctgatgctctctggtga

SEQ ID NO: 3322516 - DNA, 25 bp, Homo sapien
gctctctggtgatcgagcttgtccc

SEQ ID NO: 3322517 - DNA, 25 bp, Homo sapien
tttttgctacgtacaggcccagcca

SEQ ID NO: 3322518 - DNA, 25 bp, Homo sapien
gagcttgtccctttttgctacgtac

SEQ ID NO: 3322519 - DNA, 25 bp, Homo sapien
gtacttatgtaatgtaggaagaccc

SEQ ID NO: 3322520 - DNA, 25 bp, Homo sapien
gagtgtacttatgtaatgtaggaag

SEQ ID NO: 3322521 - DNA, 25 bp, Homo sapien
caggagtgtacttatgtaatgtagg

SEQ ID NO: 3322522 - DNA, 25 bp, Homo sapien
cagcaggagtgtacttatgtaatgt

SEQ ID NO: 3322523 - DNA, 25 bp, Homo sapien
tttcgcagctgtagataagcagtaa

SEQ ID NO: 3322524 - DNA, 25 bp, Homo sapien
ttcgcagctgtagataagcagtaat

SEQ ID NO: 3322525 - DNA, 25 bp, Homo sapien
tctagctgctgaagactgtagtgat

SEQ ID NO: 3322526 - DNA, 25 bp, Homo sapien
tagctgctgaagactgtagtgattt

SEQ ID NO: 3322527 - DNA, 25 bp, Homo sapien
ctagctgctgaagactgtagtgatt

SEQ ID NO: 3322528 - DNA, 25 bp, Homo sapien
ctactcaacgataaccagggtgaaa

SEQ ID NO: 3322529 - DNA, 25 bp, Homo sapien
caacgataaccagggtgaaagtgtc

SEQ ID NO: 3322530 - DNA, 25 bp, Homo sapien
cataggtctcttgtccagctagaga

SEQ ID NO: 3322531 - DNA, 25 bp, Homo sapien
tgtctgttagaacataggtctcttg

SEQ ID NO: 3322532 - DNA, 25 bp, Homo sapien
cattaattacatggcccctgttggc

SEQ ID NO: 3322533 - DNA, 25 bp, Homo sapien
tacatggcccctgttggcagtcatc

SEQ ID NO: 3322534 - DNA, 25 bp, Homo sapien
agcttcctggatgaatcactgagtc

SEQ ID NO: 3322535 - DNA, 25 bp, Homo sapien
cactgagtcattaattacatggccc

SEQ ID NO: 3322536 - DNA, 25 bp, Homo sapien
aataaagaatcgattcacaagttcc

SEQ ID NO: 3322537 - DNA, 25 bp, Homo sapien
gatgtctggacgtgtgaactgagcc

SEQ ID NO: 3322538 - DNA, 25 bp, Homo sapien
tgcaccggtgaggcttgagatgtct

SEQ ID NO: 3322539 - DNA, 25 bp, Homo sapien
cagtgaagtggctaagatgaaagcc

SEQ ID NO: 3322540 - DNA, 25 bp, Homo sapien
ggtatcactccaccagtgttcaaga

SEQ ID NO: 3322541 - DNA, 25 bp, Homo sapien
gaaagagctaaatggacatcccagc

SEQ ID NO: 3322542 - DNA, 25 bp, Homo sapien
aaattgaagcctatctagaaagagc

SEQ ID NO: 3322543 - DNA, 25 bp, Homo sapien
catctatgtgatgtgctcagaagaa

SEQ ID NO: 3322544 - DNA, 25 bp, Homo sapien
tgccttttatataagcgctgttcaa

SEQ ID NO: 3322545 - DNA, 25 bp, Homo sapien
taagcgctgttcaaatccaccaatg

SEQ ID NO: 3322546 - DNA, 25 bp, Homo sapien
caaccacgtgcttggtcaccttagg

SEQ ID NO: 3322547 - DNA, 25 bp, Homo sapien
accttaggcatggtcacctttggaa

SEQ ID NO: 3322548 - DNA, 25 bp, Homo sapien
aaatgaggttttgtacatgagctgc

SEQ ID NO: 3322549 - DNA, 25 bp, Homo sapien
gacatctggaaattcattgacctca

SEQ ID NO: 3322550 - DNA, 25 bp, Homo sapien
gaggttttgtacatgagctgctttt

SEQ ID NO: 3322551 - DNA, 25 bp, Homo sapien
aatgaggttttgtacatgagctgct

SEQ ID NO: 3322552 - DNA, 25 bp, Homo sapien
aaacagccctttgaaaaatatcaga

SEQ ID NO: 3322553 - DNA, 25 bp, Homo sapien
cagatatgctgccaacgaagatgcc

SEQ ID NO: 3322554 - DNA, 25 bp, Homo sapien
gctgccaacgaagatgccagtgctg

SEQ ID NO: 3322555 - DNA, 25 bp, Homo sapien
aaaatatcagatatgctgccaacga

SEQ ID NO: 3322556 - DNA, 25 bp, Homo sapien
catctgctggcgttgactgccccat

SEQ ID NO: 3322557 - DNA, 25 bp, Homo sapien
gttgctgctaggaaggtcgacctcc

SEQ ID NO: 3322558 - DNA, 25 bp, Homo sapien
gtcatgagccctcttgtgggacgca

SEQ ID NO: 3322559 - DNA, 25 bp, Homo sapien
cagggatactctagtagctgtgaaa

SEQ ID NO: 3322560 - DNA, 25 bp, Homo sapien
ttctctggcatggaagcttcagaca

SEQ ID NO: 3322561 - DNA, 25 bp, Homo sapien
tctctggcatggaagcttcagacat

SEQ ID NO: 3322562 - DNA, 25 bp, Homo sapien
tttctctggcatggaagcttcagac

SEQ ID NO: 3322563 - DNA, 25 bp, Homo sapien
tctgggtgctttcctgctgattgtg

SEQ ID NO: 3322564 - DNA, 25 bp, Homo sapien
cataccagtgatcagaggattgccc

SEQ ID NO: 3322565 - DNA, 25 bp, Homo sapien
agaaatgcccctaggatcctgtatt

SEQ ID NO: 3322566 - DNA, 25 bp, Homo sapien
gcacggttgcatggagtcccataga

SEQ ID NO: 3322567 - DNA, 25 bp, Homo sapien
tgtctcctgaaagtggagttaagga

SEQ ID NO: 3322568 - DNA, 25 bp, Homo sapien
ttgtctcctgaaagtggagttaagg

SEQ ID NO: 3322569 - DNA, 25 bp, Homo sapien
taccatatgactgtgatagaaggca

SEQ ID NO: 3322570 - DNA, 25 bp, Homo sapien
tttctgtttagaatgctgggcctca

SEQ ID NO: 3322571 - DNA, 25 bp, Homo sapien
acattaggtgctctctgatcaaggc

SEQ ID NO: 3322572 - DNA, 25 bp, Homo sapien
cccagaagacttgaggtgcggacat

SEQ ID NO: 3322573 - DNA, 25 bp, Homo sapien
ctctatcccttctccaatcttagag

SEQ ID NO: 3322574 - DNA, 25 bp, Homo sapien
actctatcccttctccaatcttaga

SEQ ID NO: 3322575 - DNA, 25 bp, Homo sapien
gaaataaatcacaaccctgacatct

SEQ ID NO: 3322576 - DNA, 25 bp, Homo sapien
aagcaaaaggttggacaatctgtac

SEQ ID NO: 3322577 - DNA, 25 bp, Homo sapien
ggtaattattccaccagtaccatta

SEQ ID NO: 3322578 - DNA, 25 bp, Homo sapien
taccattatccaatctgagatgttg

SEQ ID NO: 3322579 - DNA, 25 bp, Homo sapien
aattcttagagtccatgtttctttc

SEQ ID NO: 3322580 - DNA, 25 bp, Homo sapien
ttcccacactgttgttaattcttag

SEQ ID NO: 3322581 - DNA, 25 bp, Homo sapien
tttagggtagtcataaatctcctcc

SEQ ID NO: 3322582 - DNA, 25 bp, Homo sapien
gtagtcataaatctcctccgtggct

SEQ ID NO: 3322583 - DNA, 25 bp, Homo sapien
ctttcaggggtagaatctaaacaga

SEQ ID NO: 3322584 - DNA, 25 bp, Homo sapien
ggaaaagtatcttccaggctttctg

SEQ ID NO: 3322585 - DNA, 25 bp, Homo sapien
aaaagtatcttccaggctttctgga

SEQ ID NO: 3322586 - DNA, 25 bp, Homo sapien
taaattcttggaaaagtatcttcca

SEQ ID NO: 3322587 - DNA, 25 bp, Homo sapien
aactagtttgcccaatgcgtacagt

SEQ ID NO: 3322588 - DNA, 25 bp, Homo sapien
gcctttttgggcacagcgctaactg

SEQ ID NO: 3322589 - DNA, 25 bp, Homo sapien
tttttttagcttgagtggagacaag

SEQ ID NO: 3322590 - DNA, 25 bp, Homo sapien
taactgcagaaactagtttgcccaa

SEQ ID NO: 3322591 - DNA, 25 bp, Homo sapien
agtcagaagttcagcacaatatgcc

SEQ ID NO: 3322592 - DNA, 25 bp, Homo sapien
cctggaatatcacaaagctgaagat

SEQ ID NO: 3322593 - DNA, 25 bp, Homo sapien
tgtaagtcagaagttcagcacaata

SEQ ID NO: 3322594 - DNA, 25 bp, Homo sapien
gcctggaatatcacaaagctgaaga

SEQ ID NO: 3322595 - DNA, 25 bp, Homo sapien
tgcaacagggaagcttttacaatcc

SEQ ID NO: 3322596 - DNA, 25 bp, Homo sapien
caatgattcattaaccgggcggctc

SEQ ID NO: 3322597 - DNA, 25 bp, Homo sapien
tgagtgaactaatctttggtggaaa

SEQ ID NO: 3322598 - DNA, 25 bp, Homo sapien
gaagttaggtaccatgcattcctgc

SEQ ID NO: 3322599 - DNA, 25 bp, Homo sapien
tctgagcacccatacattgtcagca

SEQ ID NO: 3322600 - DNA, 25 bp, Homo sapien
tgagcacccatacattgtcagcaat

SEQ ID NO: 3322601 - DNA, 25 bp, Homo sapien
cttctgagcacccatacattgtcag

SEQ ID NO: 3322602 - DNA, 25 bp, Homo sapien
tggcttctgagcacccatacattgt

SEQ ID NO: 3322603 - DNA, 25 bp, Homo sapien
cctttaacaaacatacaggagccat

SEQ ID NO: 3322604 - DNA, 25 bp, Homo sapien
ttgtttatgtcctttaacaaacata

SEQ ID NO: 3322605 - DNA, 25 bp, Homo sapien
tacactgctttgtaacttcttgttt

SEQ ID NO: 3322606 - DNA, 25 bp, Homo sapien
cactgctttgtaacttcttgtttgt

SEQ ID NO: 3322607 - DNA, 25 bp, Homo sapien
ttcagatagatgcagattaaggcca

SEQ ID NO: 3322608 - DNA, 25 bp, Homo sapien
tgactgcccatgtagaatgcccact

SEQ ID NO: 3322609 - DNA, 25 bp, Homo sapien
aatcgcgaggtcaaggaattggtcc

SEQ ID NO: 3322610 - DNA, 25 bp, Homo sapien
aatgttgttgggttcagtcaggctg

SEQ ID NO: 3322611 - DNA, 25 bp, Homo sapien
ctagagtcttacttgattcagcaga

SEQ ID NO: 3322612 - DNA, 25 bp, Homo sapien
tccttctagccaaatcaacaactcg

SEQ ID NO: 3322613 - DNA, 25 bp, Homo sapien
caagcctgaaaagatgatccctgac

SEQ ID NO: 3322614 - DNA, 25 bp, Homo sapien
tagatcttgatcctgcatctgagct

SEQ ID NO: 3322615 - DNA, 25 bp, Homo sapien
ttggctgtatgtaatgatagaagga

SEQ ID NO: 3322616 - DNA, 25 bp, Homo sapien
tatgtaatgatagaaggaaagagag

SEQ ID NO: 3322617 - DNA, 25 bp, Homo sapien
ctatagtcagagtccttttggctgt

SEQ ID NO: 3322618 - DNA, 25 bp, Homo sapien
tcagagtccttttggctgtatgtaa

SEQ ID NO: 3322619 - DNA, 25 bp, Homo sapien
cagtcaaaccagctgtttctttcat

SEQ ID NO: 3322620 - DNA, 25 bp, Homo sapien
aggtcattgtaaaacaagttcctca

SEQ ID NO: 3322621 - DNA, 25 bp, Homo sapien
tattatcacaaagtaagatcacagg

SEQ ID NO: 3322622 - DNA, 25 bp, Homo sapien
caggtcattgtaaaacaagttcctc

SEQ ID NO: 3322623 - DNA, 25 bp, Homo sapien
gatgcttgatattatcacaaagtaa

SEQ ID NO: 3322624 - DNA, 25 bp, Homo sapien
ttttgcatagcatcttttacatctt

SEQ ID NO: 3322625 - DNA, 25 bp, Homo sapien
ttctgtttattttgcatagcatctt

SEQ ID NO: 3322626 - DNA, 25 bp, Homo sapien
ttgcatagcatcttttacatcttgc

SEQ ID NO: 3322627 - DNA, 25 bp, Homo sapien
ctgtttattttgcatagcatctttt

SEQ ID NO: 3322628 - DNA, 25 bp, Homo sapien
tcgagtgatggcaattagacgcggc

SEQ ID NO: 3322629 - DNA, 25 bp, Homo sapien
gctaaagttccgactggcagagggt

SEQ ID NO: 3322630 - DNA, 25 bp, Homo sapien
tagggttagaaagccagcgatgccc

SEQ ID NO: 3322631 - DNA, 25 bp, Homo sapien
gaacccatacggcttctaagagctg

SEQ ID NO: 3322632 - DNA, 25 bp, Homo sapien
gtcgtgccccgctgagccaagtgcg

SEQ ID NO: 3322633 - DNA, 25 bp, Homo sapien
gtacgaaggcgcgtctgcatccatg

SEQ ID NO: 3322634 - DNA, 25 bp, Homo sapien
ccgagggaggacacggttaaagcat

SEQ ID NO: 3322635 - DNA, 25 bp, Homo sapien
ctgtgaacccagagagccctcctta

SEQ ID NO: 3322636 - DNA, 25 bp, Homo sapien
aatgctgaaccttgatcccactgaa

SEQ ID NO: 3322637 - DNA, 25 bp, Homo sapien
cacctgcctcatgttctgggaatgc

SEQ ID NO: 3322638 - DNA, 25 bp, Homo sapien
ttctgggaatgctgaaccttgatcc

SEQ ID NO: 3322639 - DNA, 25 bp, Homo sapien
tcatgttctgggaatgctgaacctt

SEQ ID NO: 3322640 - DNA, 25 bp, Homo sapien
ccccatctgatctttggttgtgcct

SEQ ID NO: 3322641 - DNA, 25 bp, Homo sapien
catctgtaatggtaactccccatct

SEQ ID NO: 3322642 - DNA, 25 bp, Homo sapien
cccatctgatctttggttgtgcctc

SEQ ID NO: 3322643 - DNA, 25 bp, Homo sapien
gtaatggtaactccccatctgatct

SEQ ID NO: 3322644 - DNA, 25 bp, Homo sapien
ttttcaccattacctgggccttcca

SEQ ID NO: 3322645 - DNA, 25 bp, Homo sapien
ttcttcaccagtggtactaaatgac

SEQ ID NO: 3322646 - DNA, 25 bp, Homo sapien
ccagtggtactaaatgactcatttt

SEQ ID NO: 3322647 - DNA, 25 bp, Homo sapien
tgtcttggtgtagtcccacatcact

SEQ ID NO: 3322648 - DNA, 25 bp, Homo sapien
ggatggctgggttctagatccctga

SEQ ID NO: 3322649 - DNA, 25 bp, Homo sapien
atgggatggctgggttctagatccc

SEQ ID NO: 3322650 - DNA, 25 bp, Homo sapien
tgggatggctgggttctagatccct

SEQ ID NO: 3322651 - DNA, 25 bp, Homo sapien
gggatggctgggttctagatccctg

SEQ ID NO: 3322652 - DNA, 25 bp, Homo sapien
tcatttacctgaacgacaccaagag

SEQ ID NO: 3322653 - DNA, 25 bp, Homo sapien
caactgagcatggtgccttttggaa

SEQ ID NO: 3322654 - DNA, 25 bp, Homo sapien
taatctttcccattactttgctttg

SEQ ID NO: 3322655 - DNA, 25 bp, Homo sapien
ttccataacaactgagcatggtgcc

SEQ ID NO: 3322656 - DNA, 25 bp, Homo sapien
tctttcccattactttgctttgcct

SEQ ID NO: 3322657 - DNA, 25 bp, Homo sapien
tagagcttgtctaggttgaagggac

SEQ ID NO: 3322658 - DNA, 25 bp, Homo sapien
tatggtcatcatagaaaaacctgct

SEQ ID NO: 3322659 - DNA, 25 bp, Homo sapien
catagcgagatatcaagctcaggtc

SEQ ID NO: 3322660 - DNA, 25 bp, Homo sapien
aatatcattcaagtcgcatagcgag

SEQ ID NO: 3322661 - DNA, 25 bp, Homo sapien
tgaggccactgccacgttcatgttg

SEQ ID NO: 3322662 - DNA, 25 bp, Homo sapien
gggacaggcttttgtgaagtttcag

SEQ ID NO: 3322663 - DNA, 25 bp, Homo sapien
cacgttcatgttggagtcatagtcc

SEQ ID NO: 3322664 - DNA, 25 bp, Homo sapien
tcagagattgagacagagctaaatc

SEQ ID NO: 3322665 - DNA, 25 bp, Homo sapien
aactccttacttgattgatcctgga

SEQ ID NO: 3322666 - DNA, 25 bp, Homo sapien
gatcttatctctactttacttaaca

SEQ ID NO: 3322667 - DNA, 25 bp, Homo sapien
aaactccttacttgattgatcctgg

SEQ ID NO: 3322668 - DNA, 25 bp, Homo sapien
gaaagatcttatctctactttactt

SEQ ID NO: 3322669 - DNA, 25 bp, Homo sapien
tactgcatcttacacctaggagaag

SEQ ID NO: 3322670 - DNA, 25 bp, Homo sapien
ggcagacagattagctagcaagact

SEQ ID NO: 3322671 - DNA, 25 bp, Homo sapien
tggtaggtgccctgttgaaagaaca

SEQ ID NO: 3322672 - DNA, 25 bp, Homo sapien
gggagaacaatagaggagatacttt

SEQ ID NO: 3322673 - DNA, 25 bp, Homo sapien
tttgcaacccacctgaccaaagcag

SEQ ID NO: 3322674 - DNA, 25 bp, Homo sapien
caaaggatgcagtgttataggtttc

SEQ ID NO: 3322675 - DNA, 25 bp, Homo sapien
gaaaagaggcctattgatgttggtg

SEQ ID NO: 3322676 - DNA, 25 bp, Homo sapien
tatattagcagtagtcagagatcac

SEQ ID NO: 3322677 - DNA, 25 bp, Homo sapien
ttaagaagtagtagtactggtagta

SEQ ID NO: 3322678 - DNA, 25 bp, Homo sapien
gaagtagtagtactggtagtaaatg

SEQ ID NO: 3322679 - DNA, 25 bp, Homo sapien
agtagtactggtagtaaatggccat

SEQ ID NO: 3322680 - DNA, 25 bp, Homo sapien
tagtagtactggtagtaaatggcca

SEQ ID NO: 3322681 - DNA, 25 bp, Homo sapien
aaatgtatacattggttttcacgtt

SEQ ID NO: 3322682 - DNA, 25 bp, Homo sapien
tgtatacattggttttcacgtttta

SEQ ID NO: 3322683 - DNA, 25 bp, Homo sapien
aatgtatacattggttttcacgttt

SEQ ID NO: 3322684 - DNA, 25 bp, Homo sapien
atgtatacattggttttcacgtttt

SEQ ID NO: 3322685 - DNA, 25 bp, Homo sapien
tctgctagagcacgagaaaagccca

SEQ ID NO: 3322686 - DNA, 25 bp, Homo sapien
tgctagagcacgagaaaagcccaag

SEQ ID NO: 3322687 - DNA, 25 bp, Homo sapien
gtctgctagagcacgagaaaagccc

SEQ ID NO: 3322688 - DNA, 25 bp, Homo sapien
tagagcacgagaaaagcccaagaca

SEQ ID NO: 3322689 - DNA, 25 bp, Homo sapien
tattccggcccttgaatcctcttac

SEQ ID NO: 3322690 - DNA, 25 bp, Homo sapien
ttattgatattccggcccttgaatc

SEQ ID NO: 3322691 - DNA, 25 bp, Homo sapien
tgatattccggcccttgaatcctct

SEQ ID NO: 3322692 - DNA, 25 bp, Homo sapien
tattgatattccggcccttgaatcc

SEQ ID NO: 3322693 - DNA, 25 bp, Homo sapien
gatttcactgtaagttaaataacca

SEQ ID NO: 3322694 - DNA, 25 bp, Homo sapien
gtaggagtacatcttgttattatca

SEQ ID NO: 3322695 - DNA, 25 bp, Homo sapien
tgtcagcccatagaaaaagacttga

SEQ ID NO: 3322696 - DNA, 25 bp, Homo sapien
ccaaatgctcttattagttccaagt

SEQ ID NO: 3322697 - DNA, 25 bp, Homo sapien
ctgtttatgttcctgagtgttcgat

SEQ ID NO: 3322698 - DNA, 25 bp, Homo sapien
tcctgagtgttcgatacctggccat

SEQ ID NO: 3322699 - DNA, 25 bp, Homo sapien
tgttcctgagtgttcgatacctggc

SEQ ID NO: 3322700 - DNA, 25 bp, Homo sapien
tttatgttcctgagtgttcgatacc

SEQ ID NO: 3322701 - DNA, 25 bp, Homo sapien
aagacaggaagtcttcttttttctg

SEQ ID NO: 3322702 - DNA, 25 bp, Homo sapien
cagttttgaaggttattcaaagtgg

SEQ ID NO: 3322703 - DNA, 25 bp, Homo sapien
gcagttttgaaggttattcaaagtg

SEQ ID NO: 3322704 - DNA, 25 bp, Homo sapien
ttttcaagtcgtttttcaaatgcat

SEQ ID NO: 3322705 - DNA, 25 bp, Homo sapien
tttgaaccagcgggactttgtagct

SEQ ID NO: 3322706 - DNA, 25 bp, Homo sapien
ttgaaccagcgggactttgtagctg

SEQ ID NO: 3322707 - DNA, 25 bp, Homo sapien
ttttgaaccagcgggactttgtagc

SEQ ID NO: 3322708 - DNA, 25 bp, Homo sapien
tctgttcaatatcccggaaactagg

SEQ ID NO: 3322709 - DNA, 25 bp, Homo sapien
agtatttgcttttgacgaacacttg

SEQ ID NO: 3322710 - DNA, 25 bp, Homo sapien
tgaaaaacttccaaccagattggta

SEQ ID NO: 3322711 - DNA, 25 bp, Homo sapien
tttatctgttcaatatcccggaaac

SEQ ID NO: 3322712 - DNA, 25 bp, Homo sapien
gtaactggataattttgcctttcga

SEQ ID NO: 3322713 - DNA, 25 bp, Homo sapien
ctatctccatagaaagaagctgatc

SEQ ID NO: 3322714 - DNA, 25 bp, Homo sapien
gacagtatagaacagagaatccacg

SEQ ID NO: 3322715 - DNA, 25 bp, Homo sapien
ttatgcatactattgtgtaactgga

SEQ ID NO: 3322716 - DNA, 25 bp, Homo sapien
tccccagatcctatcttctctgcca

SEQ ID NO: 3322717 - DNA, 25 bp, Homo sapien
tttctctgggctatgattatggctt

SEQ ID NO: 3322718 - DNA, 25 bp, Homo sapien
gacccaacaaagtgtattcttgatc

SEQ ID NO: 3322719 - DNA, 25 bp, Homo sapien
agtttctctgcagtacattacattg

SEQ ID NO: 3322720 - DNA, 25 bp, Homo sapien
gtttctctgcagtacattacattgc

SEQ ID NO: 3322721 - DNA, 25 bp, Homo sapien
tccagaaagacccaacaaagtgtat

SEQ ID NO: 3322722 - DNA, 25 bp, Homo sapien
ttttgacattagatttagaggtggg

SEQ ID NO: 3322723 - DNA, 25 bp, Homo sapien
ggtgggatgaaagtccttcttgcac

SEQ ID NO: 3322724 - DNA, 25 bp, Homo sapien
gacattagatttagaggtgggatga

SEQ ID NO: 3322725 - DNA, 25 bp, Homo sapien
ttttttgacattagatttagaggtg

SEQ ID NO: 3322726 - DNA, 25 bp, Homo sapien
atgaagttggtgaaggatttcccca

SEQ ID NO: 3322727 - DNA, 25 bp, Homo sapien
tgaagttggtgaaggatttccccat

SEQ ID NO: 3322728 - DNA, 25 bp, Homo sapien
ccttttgctcaggaacccgagccat

SEQ ID NO: 3322729 - DNA, 25 bp, Homo sapien
tggtcagtaataccaccttttgctc

SEQ ID NO: 3322730 - DNA, 25 bp, Homo sapien
caccttttgctcaggaacccgagcc

SEQ ID NO: 3322731 - DNA, 25 bp, Homo sapien
gtcagtaataccaccttttgctcag

SEQ ID NO: 3322732 - DNA, 25 bp, Homo sapien
gggtttggatcactacaggaggctc

SEQ ID NO: 3322733 - DNA, 25 bp, Homo sapien
gcttgaggtaagctccttaaagtct

SEQ ID NO: 3322734 - DNA, 25 bp, Homo sapien
tcaacatgggataacaaaaccatct

SEQ ID NO: 3322735 - DNA, 25 bp, Homo sapien
tacattgcattgtgcatgaacaaca

SEQ ID NO: 3322736 - DNA, 25 bp, Homo sapien
cagtgggacggatgcacagggtaca

SEQ ID NO: 3322737 - DNA, 25 bp, Homo sapien
accaggtaccgaccctgcttagagc

SEQ ID NO: 3322738 - DNA, 25 bp, Homo sapien
tgctgtcagcaatcccaaccaggta

SEQ ID NO: 3322739 - DNA, 25 bp, Homo sapien
catgtggtaggtagggactgctgca

SEQ ID NO: 3322740 - DNA, 25 bp, Homo sapien
aaacaagggttgatatcacctgatt

SEQ ID NO: 3322741 - DNA, 25 bp, Homo sapien
gaaacaagggttgatatcacctgat

SEQ ID NO: 3322742 - DNA, 25 bp, Homo sapien
agaaacaagggttgatatcacctga

SEQ ID NO: 3322743 - DNA, 25 bp, Homo sapien
gctgatgtaggctgctcattagtat

SEQ ID NO: 3322744 - DNA, 25 bp, Homo sapien
tgatgtaggctgctcattagtattt

SEQ ID NO: 3322745 - DNA, 25 bp, Homo sapien
tcagctgatgtaggctgctcattag

SEQ ID NO: 3322746 - DNA, 25 bp, Homo sapien
ctcagctgatgtaggctgctcatta

SEQ ID NO: 3322747 - DNA, 25 bp, Homo sapien
ataatagtttcaatggaggcaattc

SEQ ID NO: 3322748 - DNA, 25 bp, Homo sapien
taatagtttcaatggaggcaattcc

SEQ ID NO: 3322749 - DNA, 25 bp, Homo sapien
gcaaacaaatcaacaatcgcaatat

SEQ ID NO: 3322750 - DNA, 25 bp, Homo sapien
caaatcaacaatcgcaatatatata

SEQ ID NO: 3322751 - DNA, 25 bp, Homo sapien
aacaaatcaacaatcgcaatatata

SEQ ID NO: 3322752 - DNA, 25 bp, Homo sapien
aagcaaacaaatcaacaatcgcaat

SEQ ID NO: 3322753 - DNA, 25 bp, Homo sapien
ttctacatccgtctgctcactggca

SEQ ID NO: 3322754 - DNA, 25 bp, Homo sapien
ttattctttctacatccgtctgctc

SEQ ID NO: 3322755 - DNA, 25 bp, Homo sapien
tgctggtttaagtctttgaattgag

SEQ ID NO: 3322756 - DNA, 25 bp, Homo sapien
gtttaagtctttgaattgagagtcc

SEQ ID NO: 3322757 - DNA, 25 bp, Homo sapien
cagatgaaagcgaagaagtgctgcg

SEQ ID NO: 3322758 - DNA, 25 bp, Homo sapien
tgctgcgctaccacaattatgcgaa

SEQ ID NO: 3322759 - DNA, 25 bp, Homo sapien
gaatgtgcacccaaccatgagcaat

SEQ ID NO: 3322760 - DNA, 25 bp, Homo sapien
catgagcaatactttcattctgttc

SEQ ID NO: 3322761 - DNA, 25 bp, Homo sapien
tgaagagagaagtgtatgattcaca

SEQ ID NO: 3322762 - DNA, 25 bp, Homo sapien
gtaacattccccagtatcccatggg

SEQ ID NO: 3322763 - DNA, 25 bp, Homo sapien
caggttcatgtaacattccccagta

SEQ ID NO: 3322764 - DNA, 25 bp, Homo sapien
cagctaggagatcaaaagagttttc

SEQ ID NO: 3322765 - DNA, 25 bp, Homo sapien
taagcatgctcaaatcttgatgagt

SEQ ID NO: 3322766 - DNA, 25 bp, Homo sapien
gaaagtctctgggaaattaatatca

SEQ ID NO: 3322767 - DNA, 25 bp, Homo sapien
tgaccgcaggatgaaaacttcttag

SEQ ID NO: 3322768 - DNA, 25 bp, Homo sapien
ctttggaattgaccgcaggatgaaa

SEQ ID NO: 3322769 - DNA, 25 bp, Homo sapien
ccttcttgagtttgatgtgtcagtg

SEQ ID NO: 3322770 - DNA, 25 bp, Homo sapien
tacctttgtcaaactcttccaagtc

SEQ ID NO: 3322771 - DNA, 25 bp, Homo sapien
gatgtgtcagtgaaattttaccttt

SEQ ID NO: 3322772 - DNA, 25 bp, Homo sapien
caagtcagagttattgtttaaagga

SEQ ID NO: 3322773 - DNA, 25 bp, Homo sapien
aagtcttgattcaataatctctgaa

SEQ ID NO: 3322774 - DNA, 25 bp, Homo sapien
ttctgaaagtcttgattcaataatc

SEQ ID NO: 3322775 - DNA, 25 bp, Homo sapien
tttattcaagtaagaatgcaagtcc

SEQ ID NO: 3322776 - DNA, 25 bp, Homo sapien
gctactgtagtctccacgttctgtg

SEQ ID NO: 3322777 - DNA, 25 bp, Homo sapien
gcaagtcctttcaggtatcttcgaa

SEQ ID NO: 3322778 - DNA, 25 bp, Homo sapien
tcttaattctgtggccaaacactaa

SEQ ID NO: 3322779 - DNA, 25 bp, Homo sapien
agcccccatgatacttcatcttcaa

SEQ ID NO: 3322780 - DNA, 25 bp, Homo sapien
gtaattgagctccaacaactgccag

SEQ ID NO: 3322781 - DNA, 25 bp, Homo sapien
ctggaaacaagaatctgaaggattc

SEQ ID NO: 3322782 - DNA, 25 bp, Homo sapien
actgccagcccccatgatacttcat

SEQ ID NO: 3322783 - DNA, 25 bp, Homo sapien
cacattctctgcaagttctagttta

SEQ ID NO: 3322784 - DNA, 25 bp, Homo sapien
caagattccatatgttggtgggaat

SEQ ID NO: 3322785 - DNA, 25 bp, Homo sapien
gggaatggataagcaccagctcagc

SEQ ID NO: 3322786 - DNA, 25 bp, Homo sapien
accagctcagcttgtttcagaatta

SEQ ID NO: 3322787 - DNA, 25 bp, Homo sapien
ggtttgttcacagttaattgcacaa

SEQ ID NO: 3322788 - DNA, 25 bp, Homo sapien
gtttgttcacagttaattgcacaaa

SEQ ID NO: 3322789 - DNA, 25 bp, Homo sapien
tttgttcacagttaattgcacaaag

SEQ ID NO: 3322790 - DNA, 25 bp, Homo sapien
ttttccttgatcttgctgacttgga

SEQ ID NO: 3322791 - DNA, 25 bp, Homo sapien
ttccttgatcttgctgacttggaaa

SEQ ID NO: 3322792 - DNA, 25 bp, Homo sapien
ccttgatcttgctgacttggaaagc

SEQ ID NO: 3322793 - DNA, 25 bp, Homo sapien
tccttgatcttgctgacttggaaag

SEQ ID NO: 3322794 - DNA, 25 bp, Homo sapien
gcctgagctagggtgtacactggct

SEQ ID NO: 3322795 - DNA, 25 bp, Homo sapien
ggtgactgatgtgggcctgagctag

SEQ ID NO: 3322796 - DNA, 25 bp, Homo sapien
cctgagctagggtgtacactggctg

SEQ ID NO: 3322797 - DNA, 25 bp, Homo sapien
gagctagggtgtacactggctggtt

SEQ ID NO: 3322798 - DNA, 25 bp, Homo sapien
tcaccaatccagtcctctttagttt

SEQ ID NO: 3322799 - DNA, 25 bp, Homo sapien
tctgaatctgaaacccgagctatgc

SEQ ID NO: 3322800 - DNA, 25 bp, Homo sapien
cagtgtgactgagagtagcttccag

SEQ ID NO: 3322801 - DNA, 25 bp, Homo sapien
cagcagaactctagcctttgggaaa

SEQ ID NO: 3322802 - DNA, 25 bp, Homo sapien
ttctgcagggtctaattcattagac

SEQ ID NO: 3322803 - DNA, 25 bp, Homo sapien
tgtagaacttattgctgcagctttg

SEQ ID NO: 3322804 - DNA, 25 bp, Homo sapien
ggaaacaatacaattggcaccctta

SEQ ID NO: 3322805 - DNA, 25 bp, Homo sapien
ccttattggaacagtgaagaggtct

SEQ ID NO: 3322806 - DNA, 25 bp, Homo sapien
gatctgcccatggattgctagccca

SEQ ID NO: 3322807 - DNA, 25 bp, Homo sapien
agatgatctgcccatggattgctag

SEQ ID NO: 3322808 - DNA, 25 bp, Homo sapien
ggattgctagcccacaaaaagccat

SEQ ID NO: 3322809 - DNA, 25 bp, Homo sapien
tgcccatggattgctagcccacaaa

SEQ ID NO: 3322810 - DNA, 25 bp, Homo sapien
ggacctgatgaagaggctgacgtat

SEQ ID NO: 3322811 - DNA, 25 bp, Homo sapien
tacgttgagctgaatgaagtggaca

SEQ ID NO: 3322812 - DNA, 25 bp, Homo sapien
cagacaggattttgtgctgttttcc

SEQ ID NO: 3322813 - DNA, 25 bp, Homo sapien
ggctgacgtataactcaaagatttt

SEQ ID NO: 3322814 - DNA, 25 bp, Homo sapien
ggatgctgaataccccaattaggac

SEQ ID NO: 3322815 - DNA, 25 bp, Homo sapien
tatactatgtagaaggcacactgcc

SEQ ID NO: 3322816 - DNA, 25 bp, Homo sapien
attaacatttgggtggcgtggctga

SEQ ID NO: 3322817 - DNA, 25 bp, Homo sapien
tctacaatagtagacatactggcat

SEQ ID NO: 3322818 - DNA, 25 bp, Homo sapien
gagaggcttagttcttgtctccagt

SEQ ID NO: 3322819 - DNA, 25 bp, Homo sapien
tagtaattagagaggaacgttctag

SEQ ID NO: 3322820 - DNA, 25 bp, Homo sapien
tgtcccagtctgtgtagcagtttgg

SEQ ID NO: 3322821 - DNA, 25 bp, Homo sapien
tctgtgtagcagtttggatagttcc

SEQ ID NO: 3322822 - DNA, 25 bp, Homo sapien
ggatagttccacattatgatctcgg

SEQ ID NO: 3322823 - DNA, 25 bp, Homo sapien
gatccataggtggatattttcggcc

SEQ ID NO: 3322824 - DNA, 25 bp, Homo sapien
tccataggtggatattttcggcctt

SEQ ID NO: 3322825 - DNA, 25 bp, Homo sapien
taggtggatattttcggcctttgct

SEQ ID NO: 3322826 - DNA, 25 bp, Homo sapien
tggatccataggtggatattttcgg

SEQ ID NO: 3322827 - DNA, 25 bp, Homo sapien
ctgggtcagatctcagctgctgtcc

SEQ ID NO: 3322828 - DNA, 25 bp, Homo sapien
ggacttcatccatcacagtagctgg

SEQ ID NO: 3322829 - DNA, 25 bp, Homo sapien
cagagtaattataacgaggtgtaac

SEQ ID NO: 3322830 - DNA, 25 bp, Homo sapien
ggtgtaactcccagaaacttctgga

SEQ ID NO: 3322831 - DNA, 25 bp, Homo sapien
tttttaagtcagatggagcccaatg

SEQ ID NO: 3322832 - DNA, 25 bp, Homo sapien
tagaaattgaacctcagagcagctg

SEQ ID NO: 3322833 - DNA, 25 bp, Homo sapien
gagcccaatgtcctgttgaaataac

SEQ ID NO: 3322834 - DNA, 25 bp, Homo sapien
taccatccaggtactaggcatcttc

SEQ ID NO: 3322835 - DNA, 25 bp, Homo sapien
ttccattactgccactccttcagat

SEQ ID NO: 3322836 - DNA, 25 bp, Homo sapien
gggccactgttccattactgccact

SEQ ID NO: 3322837 - DNA, 25 bp, Homo sapien
tgttccattactgccactccttcag

SEQ ID NO: 3322838 - DNA, 25 bp, Homo sapien
ttcttgggccactgttccattactg

SEQ ID NO: 3322839 - DNA, 25 bp, Homo sapien
gccagatcagtaagggattaattct

SEQ ID NO: 3322840 - DNA, 25 bp, Homo sapien
gacagccagatcagtaagggattaa

SEQ ID NO: 3322841 - DNA, 25 bp, Homo sapien
cagccagatcagtaagggattaatt

SEQ ID NO: 3322842 - DNA, 25 bp, Homo sapien
ccagatcagtaagggattaattctg

SEQ ID NO: 3322843 - DNA, 25 bp, Homo sapien
caagagatgcggctcgtcttggagc

SEQ ID NO: 3322844 - DNA, 25 bp, Homo sapien
tggtgtagggaaaaagtccatatac

SEQ ID NO: 3322845 - DNA, 25 bp, Homo sapien
tggtaccaagagtatgccctgtctg

SEQ ID NO: 3322846 - DNA, 25 bp, Homo sapien
tcttggagcttcttccgaatggaag

SEQ ID NO: 3322847 - DNA, 25 bp, Homo sapien
agctcatcacttctctcaccctcaa

SEQ ID NO: 3322848 - DNA, 25 bp, Homo sapien
tcatcacttctctcaccctcaaatg

SEQ ID NO: 3322849 - DNA, 25 bp, Homo sapien
atcacttctctcaccctcaaatgtt

SEQ ID NO: 3322850 - DNA, 25 bp, Homo sapien
gctcatcacttctctcaccctcaaa

SEQ ID NO: 3322851 - DNA, 25 bp, Homo sapien
caaatgtctttggactagggagatt

SEQ ID NO: 3322852 - DNA, 25 bp, Homo sapien
tgattgaaggatgcataagaagaaa

SEQ ID NO: 3322853 - DNA, 25 bp, Homo sapien
tgctgatgattgaaggatgcataag

SEQ ID NO: 3322854 - DNA, 25 bp, Homo sapien
gactagggagattgctgatgattga

SEQ ID NO: 3322855 - DNA, 25 bp, Homo sapien
ggtcacataatcgtaccccgatctc

SEQ ID NO: 3322856 - DNA, 25 bp, Homo sapien
gttggtcacataatcgtaccccgat

SEQ ID NO: 3322857 - DNA, 25 bp, Homo sapien
cctgttggtcacataatcgtacccc

SEQ ID NO: 3322858 - DNA, 25 bp, Homo sapien
gaaagccaaagcctttatgttctgc

SEQ ID NO: 3322859 - DNA, 25 bp, Homo sapien
acaagtttgcatttaagggaagatt

SEQ ID NO: 3322860 - DNA, 25 bp, Homo sapien
cttgtaagagatgcatgcaccacat

SEQ ID NO: 3322861 - DNA, 25 bp, Homo sapien
gaatttatagtctctgacagcactg

SEQ ID NO: 3322862 - DNA, 25 bp, Homo sapien
gattggcagcacgtatttgtgaccc

SEQ ID NO: 3322863 - DNA, 25 bp, Homo sapien
tgttttttgtggaccaattactaga

SEQ ID NO: 3322864 - DNA, 25 bp, Homo sapien
tgtgtcgtttatcatcacatggatt

SEQ ID NO: 3322865 - DNA, 25 bp, Homo sapien
agaaattttggtaagtggtcacaag

SEQ ID NO: 3322866 - DNA, 25 bp, Homo sapien
gtggtcacaagttttctctctggac

SEQ ID NO: 3322867 - DNA, 25 bp, Homo sapien
aattaggttacagatcctggatttt

SEQ ID NO: 3322868 - DNA, 25 bp, Homo sapien
aaattaggttacagatcctggattt

SEQ ID NO: 3322869 - DNA, 25 bp, Homo sapien
cccaagagagaatgttaaatgttac

SEQ ID NO: 3322870 - DNA, 25 bp, Homo sapien
cacaaaggtatataaccctaggcgg

SEQ ID NO: 3322871 - DNA, 25 bp, Homo sapien
taaccctaggcggtcatttccatag

SEQ ID NO: 3322872 - DNA, 25 bp, Homo sapien
tttgcaatttcaggttggtccagct

SEQ ID NO: 3322873 - DNA, 25 bp, Homo sapien
ggcagagtttgcaatttcaggttgg

SEQ ID NO: 3322874 - DNA, 25 bp, Homo sapien
tcagaagtatagcattactttgcat

SEQ ID NO: 3322875 - DNA, 25 bp, Homo sapien
gaaattgagagtgtcatttcctcac

SEQ ID NO: 3322876 - DNA, 25 bp, Homo sapien
tcactgttcttcagaagtatagcat

SEQ ID NO: 3322877 - DNA, 25 bp, Homo sapien
tgaaattgaaattgagagtgtcatt

SEQ ID NO: 3322878 - DNA, 25 bp, Homo sapien
taccatcaaacttcaatctagtaac

SEQ ID NO: 3322879 - DNA, 25 bp, Homo sapien
aaacttcaatctagtaactttcaga

SEQ ID NO: 3322880 - DNA, 25 bp, Homo sapien
tttgcttattgtggagccaatacca

SEQ ID NO: 3322881 - DNA, 25 bp, Homo sapien
gcttattgtggagccaataccatca

SEQ ID NO: 3322882 - DNA, 25 bp, Homo sapien
taatgtcctagaaatctaccacctg

SEQ ID NO: 3322883 - DNA, 25 bp, Homo sapien
taagacggtgtaagtagcatgcttc

SEQ ID NO: 3322884 - DNA, 25 bp, Homo sapien
tatgcattcgatcccaataagtatg

SEQ ID NO: 3322885 - DNA, 25 bp, Homo sapien
taccacctgccttcttagcgttgtt

SEQ ID NO: 3322886 - DNA, 25 bp, Homo sapien
tctgtgctggaaggtaactgaattt

SEQ ID NO: 3322887 - DNA, 25 bp, Homo sapien
tgtgctggaaggtaactgaattttt

SEQ ID NO: 3322888 - DNA, 25 bp, Homo sapien
ttttttgctcaacagccctctcttt

SEQ ID NO: 3322889 - DNA, 25 bp, Homo sapien
tctctttgacacatgttcatttatt

SEQ ID NO: 3322890 - DNA, 25 bp, Homo sapien
ctttctgacgtacttgtagtacagc

SEQ ID NO: 3322891 - DNA, 25 bp, Homo sapien
atgctttctgacgtacttgtagtac

SEQ ID NO: 3322892 - DNA, 25 bp, Homo sapien
ttggcagttaaacccgaatgcaggt

SEQ ID NO: 3322893 - DNA, 25 bp, Homo sapien
catgttggcagttaaacccgaatgc

SEQ ID NO: 3322894 - DNA, 25 bp, Homo sapien
cagagaggtaattgaacactgactg

SEQ ID NO: 3322895 - DNA, 25 bp, Homo sapien
cacagagaggtaattgaacactgac

SEQ ID NO: 3322896 - DNA, 25 bp, Homo sapien
tgttctcacagagaggtaattgaac

SEQ ID NO: 3322897 - DNA, 25 bp, Homo sapien
ctcacagagaggtaattgaacactg

SEQ ID NO: 3322898 - DNA, 25 bp, Homo sapien
cttattgtaaggtgcatacatagaa

SEQ ID NO: 3322899 - DNA, 25 bp, Homo sapien
tttaaatgcatgaccagtaagatgt

SEQ ID NO: 3322900 - DNA, 25 bp, Homo sapien
aatatagatttaaatgcatgaccag

SEQ ID NO: 3322901 - DNA, 25 bp, Homo sapien
gcatgaccagtaagatgtgctgtaa

SEQ ID NO: 3322902 - DNA, 25 bp, Homo sapien
tgggtttagaaggattgtgagaaaa

SEQ ID NO: 3322903 - DNA, 25 bp, Homo sapien
agaaggattgtgagaaaaagttcac

SEQ ID NO: 3322904 - DNA, 25 bp, Homo sapien
tagaaggattgtgagaaaaagttca

SEQ ID NO: 3322905 - DNA, 25 bp, Homo sapien
ttagaaggattgtgagaaaaagttc

SEQ ID NO: 3322906 - DNA, 25 bp, Homo sapien
gaaaatagtgtgagtgaacaaccca

SEQ ID NO: 3322907 - DNA, 25 bp, Homo sapien
tagtgtgagtgaacaacccacaagt

SEQ ID NO: 3322908 - DNA, 25 bp, Homo sapien
tgtagaaaatagtgtgagtgaacaa

SEQ ID NO: 3322909 - DNA, 25 bp, Homo sapien
aatagtgtgagtgaacaacccacaa

SEQ ID NO: 3322910 - DNA, 25 bp, Homo sapien
tggtgacttgaataccccagacctt

SEQ ID NO: 3322911 - DNA, 25 bp, Homo sapien
tccaagctgcatacagctgaatgtg

SEQ ID NO: 3322912 - DNA, 25 bp, Homo sapien
aatgtgaaccgggtagacccctgag

SEQ ID NO: 3322913 - DNA, 25 bp, Homo sapien
tgaagccctttctgtaccgggcagg

SEQ ID NO: 3322914 - DNA, 25 bp, Homo sapien
atagttactatgaaatctgtcttag

SEQ ID NO: 3322915 - DNA, 25 bp, Homo sapien
gttactatgaaatctgtcttagatc

SEQ ID NO: 3322916 - DNA, 25 bp, Homo sapien
tgatgtgttgcaaatagttactatg

SEQ ID NO: 3322917 - DNA, 25 bp, Homo sapien
gatgtgttgcaaatagttactatga

SEQ ID NO: 3322918 - DNA, 25 bp, Homo sapien
gaccacatgagctacttgattccat

SEQ ID NO: 3322919 - DNA, 25 bp, Homo sapien
aaaagttcctccatattctggacca

SEQ ID NO: 3322920 - DNA, 25 bp, Homo sapien
gattccatcttctcctaattcccaa

SEQ ID NO: 3322921 - DNA, 25 bp, Homo sapien
ctgaagctctaacacctaggataaa

SEQ ID NO: 3322922 - DNA, 25 bp, Homo sapien
catgatataacacatgacaagaaaa

SEQ ID NO: 3322923 - DNA, 25 bp, Homo sapien
tgatataacacatgacaagaaaagc

SEQ ID NO: 3322924 - DNA, 25 bp, Homo sapien
gatataacacatgacaagaaaagcc

SEQ ID NO: 3322925 - DNA, 25 bp, Homo sapien
tataacacatgacaagaaaagccat

SEQ ID NO: 3322926 - DNA, 25 bp, Homo sapien
tcaagtctaggcttatgatttctcc

SEQ ID NO: 3322927 - DNA, 25 bp, Homo sapien
ccttggaaatggcagtccacggcat

SEQ ID NO: 3322928 - DNA, 25 bp, Homo sapien
catctctctgtagtgtcaagtctag

SEQ ID NO: 3322929 - DNA, 25 bp, Homo sapien
gccaagaacatagggctacatctct

SEQ ID NO: 3322930 - DNA, 25 bp, Homo sapien
tacatctgagtcttctcagagctct

SEQ ID NO: 3322931 - DNA, 25 bp, Homo sapien
ttacatctgagtcttctcagagctc

SEQ ID NO: 3322932 - DNA, 25 bp, Homo sapien
ctgagtcttctcagagctctcagca

SEQ ID NO: 3322933 - DNA, 25 bp, Homo sapien
tcttctcagagctctcagcatggct

SEQ ID NO: 3322934 - DNA, 25 bp, Homo sapien
tgctctactaaagatgactcgttgt

SEQ ID NO: 3322935 - DNA, 25 bp, Homo sapien
tactaaagatgactcgttgtggaag

SEQ ID NO: 3322936 - DNA, 25 bp, Homo sapien
cagtgcaaattccttgttgagaatc

SEQ ID NO: 3322937 - DNA, 25 bp, Homo sapien
tccacagaccgaagtaaaaggtcat

SEQ ID NO: 3322938 - DNA, 25 bp, Homo sapien
tccaaggttgaaggtaaaatttgca

SEQ ID NO: 3322939 - DNA, 25 bp, Homo sapien
ttgcaacctgagtgcgcagtaaatt

SEQ ID NO: 3322940 - DNA, 25 bp, Homo sapien
ctgagtgcgcagtaaattttgagtc

SEQ ID NO: 3322941 - DNA, 25 bp, Homo sapien
gtaaattttgagtctctagtaatgc

SEQ ID NO: 3322942 - DNA, 25 bp, Homo sapien
tcagtaaaatggagttgggattcca

SEQ ID NO: 3322943 - DNA, 25 bp, Homo sapien
ctcagtaaaatggagttgggattcc

SEQ ID NO: 3322944 - DNA, 25 bp, Homo sapien
cagtaaaatggagttgggattccat

SEQ ID NO: 3322945 - DNA, 25 bp, Homo sapien
agaggaacaggattttataactaag

SEQ ID NO: 3322946 - DNA, 25 bp, Homo sapien
tcatgaaaagaggaacaggatttta

SEQ ID NO: 3322947 - DNA, 25 bp, Homo sapien
tgaaaagaggaacaggattttataa

SEQ ID NO: 3322948 - DNA, 25 bp, Homo sapien
gaggaacaggattttataactaaga

SEQ ID NO: 3322949 - DNA, 25 bp, Homo sapien
atgaggttgtgattccaagaccatt

SEQ ID NO: 3322950 - DNA, 25 bp, Homo sapien
cctttgtaaggatagtggtcattaa

SEQ ID NO: 3322951 - DNA, 25 bp, Homo sapien
ttctcctttgtaaggatagtggtca

SEQ ID NO: 3322952 - DNA, 25 bp, Homo sapien
gaggttgtgattccaagaccatttc

SEQ ID NO: 3322953 - DNA, 25 bp, Homo sapien
cacttgaagaaaggtccactgagag

SEQ ID NO: 3322954 - DNA, 25 bp, Homo sapien
cagcttaagcacttaatgatgttca

SEQ ID NO: 3322955 - DNA, 25 bp, Homo sapien
gcccaataattcattgcacttgaag

SEQ ID NO: 3322956 - DNA, 25 bp, Homo sapien
tgcagatagcctcaaaattcatccc

SEQ ID NO: 3322957 - DNA, 25 bp, Homo sapien
attgtgttcatgaatcttagcaggt

SEQ ID NO: 3322958 - DNA, 25 bp, Homo sapien
cttgaggattattcccactaaacct

SEQ ID NO: 3322959 - DNA, 25 bp, Homo sapien
ctaaacctctgcaaccctgttattt

SEQ ID NO: 3322960 - DNA, 25 bp, Homo sapien
cactaaacctctgcaaccctgttat

SEQ ID NO: 3322961 - DNA, 25 bp, Homo sapien
attattcccactaaacctctgcaac

SEQ ID NO: 3322962 - DNA, 25 bp, Homo sapien
agtgactccagtggtatcctatttt

SEQ ID NO: 3322963 - DNA, 25 bp, Homo sapien
gactccagtggtatcctattttcaa

SEQ ID NO: 3322964 - DNA, 25 bp, Homo sapien
tgactccagtggtatcctattttca

SEQ ID NO: 3322965 - DNA, 25 bp, Homo sapien
actccagtggtatcctattttcaac

SEQ ID NO: 3322966 - DNA, 25 bp, Homo sapien
tattagtaatattttatcggtacca

SEQ ID NO: 3322967 - DNA, 25 bp, Homo sapien
ttcgatgttgtctataaataagctt

SEQ ID NO: 3322968 - DNA, 25 bp, Homo sapien
tcggtaccatattgtgaaatacaaa

SEQ ID NO: 3322969 - DNA, 25 bp, Homo sapien
gaaatacaaatttcgatgttgtcta

SEQ ID NO: 3322970 - DNA, 25 bp, Homo sapien
tattggctctccacgaagagaagga

SEQ ID NO: 3322971 - DNA, 25 bp, Homo sapien
cggctggactccaaaatagctatga

SEQ ID NO: 3322972 - DNA, 25 bp, Homo sapien
catgtggtactgaaatcggctggac

SEQ ID NO: 3322973 - DNA, 25 bp, Homo sapien
gatcctgaatcaccgttgcaaagag

SEQ ID NO: 3322974 - DNA, 25 bp, Homo sapien
tccaatactgagaattgctgcagaa

SEQ ID NO: 3322975 - DNA, 25 bp, Homo sapien
ccagagttcatgtaaccatcgcaaa

SEQ ID NO: 3322976 - DNA, 25 bp, Homo sapien
ggcaatagatgggaaggatatacgt

SEQ ID NO: 3322977 - DNA, 25 bp, Homo sapien
aatgtttgaagggagcacaactgag

SEQ ID NO: 3322978 - DNA, 25 bp, Homo sapien
gacacgagaattacaccagggagca

SEQ ID NO: 3322979 - DNA, 25 bp, Homo sapien
gcagctatgacactgttccacgaga

SEQ ID NO: 3322980 - DNA, 25 bp, Homo sapien
taattcagcgatgggctgcattccg

SEQ ID NO: 3322981 - DNA, 25 bp, Homo sapien
cacaccgcggtgattgattagatgc

SEQ ID NO: 3322982 - DNA, 25 bp, Homo sapien
taccagcaaaagacaaccagatcag

SEQ ID NO: 3322983 - DNA, 25 bp, Homo sapien
agctgaaccaaacagacctgctgat

SEQ ID NO: 3322984 - DNA, 25 bp, Homo sapien
accaaacagacctgctgatccatga

SEQ ID NO: 3322985 - DNA, 25 bp, Homo sapien
agcaaaagacaaccagatcagctga

SEQ ID NO: 3322986 - DNA, 25 bp, Homo sapien
ctcagcattcaggatagttgttgat

SEQ ID NO: 3322987 - DNA, 25 bp, Homo sapien
acttggatacttgtagtcaaggaca

SEQ ID NO: 3322988 - DNA, 25 bp, Homo sapien
tgttgatataaggaaagtacttgga

SEQ ID NO: 3322989 - DNA, 25 bp, Homo sapien
gaaagtacttggatacttgtagtca

SEQ ID NO: 3322990 - DNA, 25 bp, Homo sapien
ggatcagcgggaggtaaaagttcta

SEQ ID NO: 3322991 - DNA, 25 bp, Homo sapien
gatcagcgggaggtaaaagttctat

SEQ ID NO: 3322992 - DNA, 25 bp, Homo sapien
gtgggctgagaaggactacacctct

SEQ ID NO: 3322993 - DNA, 25 bp, Homo sapien
cctcttccactagagatgcagacat

SEQ ID NO: 3322994 - DNA, 25 bp, Homo sapien
gagatgcagacattgtgctttgctc

SEQ ID NO: 3322995 - DNA, 25 bp, Homo sapien
gaaggactacacctcttccactaga

SEQ ID NO: 3322996 - DNA, 25 bp, Homo sapien
cagtgtgtccggaattggcgggttc

SEQ ID NO: 3322997 - DNA, 25 bp, Homo sapien
agtgtgtccggaattggcgggttct

SEQ ID NO: 3322998 - DNA, 25 bp, Homo sapien
gcacaactgtcatgaagattttttt

SEQ ID NO: 3322999 - DNA, 25 bp, Homo sapien
ttcttctcttttctttgtttcatgc

SEQ ID NO: 3323000 - DNA, 25 bp, Homo sapien
tttcttctcttttctttgtttcatg

SEQ ID NO: 3323001 - DNA, 25 bp, Homo sapien
acaactgtcatgaagatttttttct

SEQ ID NO: 3323002 - DNA, 25 bp, Homo sapien
ggtaaacgtaaccacacagccatat

SEQ ID NO: 3323003 - DNA, 25 bp, Homo sapien
cgtaaccacacagccatataaaatt

SEQ ID NO: 3323004 - DNA, 25 bp, Homo sapien
catgtgtttcttgatgcacggtaaa

SEQ ID NO: 3323005 - DNA, 25 bp, Homo sapien
tcttgatgcacggtaaacgtaacca

SEQ ID NO: 3323006 - DNA, 25 bp, Homo sapien
gaatcagagcatcattgaagggatt

SEQ ID NO: 3323007 - DNA, 25 bp, Homo sapien
gttctcacagtagatgacagtcatc

SEQ ID NO: 3323008 - DNA, 25 bp, Homo sapien
tcacagtagatgacagtcatctgaa

SEQ ID NO: 3323009 - DNA, 25 bp, Homo sapien
tgaatcagagcatcattgaagggat

SEQ ID NO: 3323010 - DNA, 25 bp, Homo sapien
ggaaaatggacgtaagagcaaataa

SEQ ID NO: 3323011 - DNA, 25 bp, Homo sapien
ccaaacactgtgtttgatgaaaact

SEQ ID NO: 3323012 - DNA, 25 bp, Homo sapien
aatggacgtaagagcaaataaatgt

SEQ ID NO: 3323013 - DNA, 25 bp, Homo sapien
ggcaaggaaaatggacgtaagagca

SEQ ID NO: 3323014 - DNA, 25 bp, Homo sapien
cacaatggatagtgtattgaataca

SEQ ID NO: 3323015 - DNA, 25 bp, Homo sapien
atggtaggtgtatgacaggttcagc

SEQ ID NO: 3323016 - DNA, 25 bp, Homo sapien
atacacagtaggagtcctagtactc

SEQ ID NO: 3323017 - DNA, 25 bp, Homo sapien
tcactaaggcttgcctattattagg

SEQ ID NO: 3323018 - DNA, 25 bp, Homo sapien
aagggactccttatactcctgaaga

SEQ ID NO: 3323019 - DNA, 25 bp, Homo sapien
tggcaattaatcacacatgtcaaag

SEQ ID NO: 3323020 - DNA, 25 bp, Homo sapien
tgaggaagtaagtgactcttggcaa

SEQ ID NO: 3323021 - DNA, 25 bp, Homo sapien
tgttttaatcagagtggcactagga

SEQ ID NO: 3323022 - DNA, 25 bp, Homo sapien
taagtggaaaaatagaaattcaata

SEQ ID NO: 3323023 - DNA, 25 bp, Homo sapien
tggaaaaatagaaattcaataaata

SEQ ID NO: 3323024 - DNA, 25 bp, Homo sapien
ctaagtggaaaaatagaaattcaat

SEQ ID NO: 3323025 - DNA, 25 bp, Homo sapien
tagaaattcaataaatataaagtaa

SEQ ID NO: 3323026 - DNA, 25 bp, Homo sapien
taacatttgctgatacacttgctga

SEQ ID NO: 3323027 - DNA, 25 bp, Homo sapien
tgatacacttgctgatatttctgta

SEQ ID NO: 3323028 - DNA, 25 bp, Homo sapien
catttgctgatacacttgctgatat

SEQ ID NO: 3323029 - DNA, 25 bp, Homo sapien
gatacacttgctgatatttctgtag

SEQ ID NO: 3323030 - DNA, 25 bp, Homo sapien
tcaatagcttcaggttgatgaaacc

SEQ ID NO: 3323031 - DNA, 25 bp, Homo sapien
cattttgcggctcatggaaagctga

SEQ ID NO: 3323032 - DNA, 25 bp, Homo sapien
tggctgttcactcttttgaatgcaa

SEQ ID NO: 3323033 - DNA, 25 bp, Homo sapien
tgctaactccattttgcggctcatg

SEQ ID NO: 3323034 - DNA, 25 bp, Homo sapien
agcctcttggcattttcaatcagaa

SEQ ID NO: 3323035 - DNA, 25 bp, Homo sapien
tttgacatctaatagcctcttggca

SEQ ID NO: 3323036 - DNA, 25 bp, Homo sapien
atagcctcttggcattttcaatcag

SEQ ID NO: 3323037 - DNA, 25 bp, Homo sapien
catttgacatctaatagcctcttgg

SEQ ID NO: 3323038 - DNA, 25 bp, Homo sapien
gaagttgaatagctgaactgtactt

SEQ ID NO: 3323039 - DNA, 25 bp, Homo sapien
cctgatgctgtcagtgcagatggaa

SEQ ID NO: 3323040 - DNA, 25 bp, Homo sapien
tggtggtcaagatatcctggtattc

SEQ ID NO: 3323041 - DNA, 25 bp, Homo sapien
gatggaataacctgacagctggtgg

SEQ ID NO: 3323042 - DNA, 25 bp, Homo sapien
actcatcctgtttcttggataggga

SEQ ID NO: 3323043 - DNA, 25 bp, Homo sapien
acctttgaatcaatgactcatcctg

SEQ ID NO: 3323044 - DNA, 25 bp, Homo sapien
tgtctgtgagacctttgaatcaatg

SEQ ID NO: 3323045 - DNA, 25 bp, Homo sapien
tagggaggcttctgtccaaatcctt

SEQ ID NO: 3323046 - DNA, 25 bp, Homo sapien
tcactcagtgatgtagttgttattt

SEQ ID NO: 3323047 - DNA, 25 bp, Homo sapien
cactcagtgatgtagttgttatttt

SEQ ID NO: 3323048 - DNA, 25 bp, Homo sapien
gatgaacagcgtggagttgctggat

SEQ ID NO: 3323049 - DNA, 25 bp, Homo sapien
tttttgatgaacagcgtggagttgc

SEQ ID NO: 3323050 - DNA, 25 bp, Homo sapien
caatgtgtattggagcactggtact

SEQ ID NO: 3323051 - DNA, 25 bp, Homo sapien
tcagcaatctgagtcaaatgggatg

SEQ ID NO: 3323052 - DNA, 25 bp, Homo sapien
tgggcaggattgtagacagttcaac

SEQ ID NO: 3323053 - DNA, 25 bp, Homo sapien
gcttatgctgtgaaaatccacttcg

SEQ ID NO: 3323054 - DNA, 25 bp, Homo sapien
ctttcccctgtggaaattgatgcca

SEQ ID NO: 3323055 - DNA, 25 bp, Homo sapien
tttcccctgtggaaattgatgccat

SEQ ID NO: 3323056 - DNA, 25 bp, Homo sapien
gatatggccacagtccaaacacatt

SEQ ID NO: 3323057 - DNA, 25 bp, Homo sapien
aacagctttactaatcagatatggc

SEQ ID NO: 3323058 - DNA, 25 bp, Homo sapien
gcaattgaatatgctgaaaacagct

SEQ ID NO: 3323059 - DNA, 25 bp, Homo sapien
gcaaattacatatgcctggcaattg

SEQ ID NO: 3323060 - DNA, 25 bp, Homo sapien
ggtcattgaattttctgagctcgta

SEQ ID NO: 3323061 - DNA, 25 bp, Homo sapien
cattcaggatgtaattggtcattga

SEQ ID NO: 3323062 - DNA, 25 bp, Homo sapien
cttccccaggtgagtgacattcagg

SEQ ID NO: 3323063 - DNA, 25 bp, Homo sapien
ggtctataactttcagcttccccag

SEQ ID NO: 3323064 - DNA, 25 bp, Homo sapien
tgcaaatgaggactgtttgaaactc

SEQ ID NO: 3323065 - DNA, 25 bp, Homo sapien
ctgtttgaaactctatagtatcctt

SEQ ID NO: 3323066 - DNA, 25 bp, Homo sapien
gcttccaagtaataggaacatccaa

SEQ ID NO: 3323067 - DNA, 25 bp, Homo sapien
ttcttcccattagaaatgtgcccaa

SEQ ID NO: 3323068 - DNA, 25 bp, Homo sapien
gaagtatgttctgaatctggagaag

SEQ ID NO: 3323069 - DNA, 25 bp, Homo sapien
gtagtcttgaagtccattgttctga

SEQ ID NO: 3323070 - DNA, 25 bp, Homo sapien
ggcacgccgacgcagaatgtagtct

SEQ ID NO: 3323071 - DNA, 25 bp, Homo sapien
tactaagggtgaagtatgttctgaa

SEQ ID NO: 3323072 - DNA, 25 bp, Homo sapien
ttgagtattaaggtcctccaggtta

SEQ ID NO: 3323073 - DNA, 25 bp, Homo sapien
cttcctccacctgatataagtcttt

SEQ ID NO: 3323074 - DNA, 25 bp, Homo sapien
caagcaatgaaactccagttggcat

SEQ ID NO: 3323075 - DNA, 25 bp, Homo sapien
ttcaagcaatgaaactccagttggc

SEQ ID NO: 3323076 - DNA, 25 bp, Homo sapien
attcaagcaatgaaactccagttgg

SEQ ID NO: 3323077 - DNA, 25 bp, Homo sapien
tcaagcaatgaaactccagttggca

SEQ ID NO: 3323078 - DNA, 25 bp, Homo sapien
ggtatgccatccctaacatacaact

SEQ ID NO: 3323079 - DNA, 25 bp, Homo sapien
gctgctaggtatgccatccctaaca

SEQ ID NO: 3323080 - DNA, 25 bp, Homo sapien
tgattgtcattcctcttaagcttac

SEQ ID NO: 3323081 - DNA, 25 bp, Homo sapien
ttggctgctaggtatgccatcccta

SEQ ID NO: 3323082 - DNA, 25 bp, Homo sapien
gacacagtaggctcattgtgggcca

SEQ ID NO: 3323083 - DNA, 25 bp, Homo sapien
ccaacaatgattggctaccagcctg

SEQ ID NO: 3323084 - DNA, 25 bp, Homo sapien
gaagagtgacacagtaggctcattg

SEQ ID NO: 3323085 - DNA, 25 bp, Homo sapien
tgattggctaccagcctgaagagtg

SEQ ID NO: 3323086 - DNA, 25 bp, Homo sapien
gataaagaattgtttgacacatcgg

SEQ ID NO: 3323087 - DNA, 25 bp, Homo sapien
ttgacacatcgggtcgttctgctta

SEQ ID NO: 3323088 - DNA, 25 bp, Homo sapien
atacagttgctgttgctacagagga

SEQ ID NO: 3323089 - DNA, 25 bp, Homo sapien
cagaggactgaggataaagaattgt

SEQ ID NO: 3323090 - DNA, 25 bp, Homo sapien
acttgtgtagatggagtcagtatac

SEQ ID NO: 3323091 - DNA, 25 bp, Homo sapien
tgtagatggagtcagtataccctgg

SEQ ID NO: 3323092 - DNA, 25 bp, Homo sapien
ctttgacttgtgtagatggagtcag

SEQ ID NO: 3323093 - DNA, 25 bp, Homo sapien
tggagtcagtataccctggttccat

SEQ ID NO: 3323094 - DNA, 25 bp, Homo sapien
ttactgcgcattcccaccctgactg

SEQ ID NO: 3323095 - DNA, 25 bp, Homo sapien
gaagcgccacattcaaatctttgtc

SEQ ID NO: 3323096 - DNA, 25 bp, Homo sapien
cgaaggaagcgccacattcaaatct

SEQ ID NO: 3323097 - DNA, 25 bp, Homo sapien
ccaaggatcttcacagacgaaggaa

SEQ ID NO: 3323098 - DNA, 25 bp, Homo sapien
caaagagactaacattacaagggaa

SEQ ID NO: 3323099 - DNA, 25 bp, Homo sapien
gatgatgtagttaacattaatagct

SEQ ID NO: 3323100 - DNA, 25 bp, Homo sapien
attgattatctgatgtttgtacagc

SEQ ID NO: 3323101 - DNA, 25 bp, Homo sapien
gaactcttcagaaatcagtacaaag

SEQ ID NO: 3323102 - DNA, 25 bp, Homo sapien
cagcattggtagccagaatatagta

SEQ ID NO: 3323103 - DNA, 25 bp, Homo sapien
cattggtagccagaatatagtattt

SEQ ID NO: 3323104 - DNA, 25 bp, Homo sapien
tggtagccagaatatagtatttaag

SEQ ID NO: 3323105 - DNA, 25 bp, Homo sapien
ggtagccagaatatagtatttaaga

SEQ ID NO: 3323106 - DNA, 25 bp, Homo sapien
cctggatgctgataatttcacctac

SEQ ID NO: 3323107 - DNA, 25 bp, Homo sapien
gacctggatgctgataatttcacct

SEQ ID NO: 3323108 - DNA, 25 bp, Homo sapien
tgacctggatgctgataatttcacc

SEQ ID NO: 3323109 - DNA, 25 bp, Homo sapien
acctggatgctgataatttcaccta

SEQ ID NO: 3323110 - DNA, 25 bp, Homo sapien
cttaaagaatccaccagagtctcca

SEQ ID NO: 3323111 - DNA, 25 bp, Homo sapien
agacttatcacttggtctcttgaag

SEQ ID NO: 3323112 - DNA, 25 bp, Homo sapien
ttaaagaatccaccagagtctccat

SEQ ID NO: 3323113 - DNA, 25 bp, Homo sapien
gacttagacttatcacttggtctct

SEQ ID NO: 3323114 - DNA, 25 bp, Homo sapien
aagggcacttatcactaattgctgt

SEQ ID NO: 3323115 - DNA, 25 bp, Homo sapien
gcagctcttctttagcgttgtaagg

SEQ ID NO: 3323116 - DNA, 25 bp, Homo sapien
ttctttagcgttgtaagggcactta

SEQ ID NO: 3323117 - DNA, 25 bp, Homo sapien
gggcacttatcactaattgctgtca

SEQ ID NO: 3323118 - DNA, 25 bp, Homo sapien
gagcaaccctctctatgtttgacaa

SEQ ID NO: 3323119 - DNA, 25 bp, Homo sapien
tagtctgcagactaagctctatggc

SEQ ID NO: 3323120 - DNA, 25 bp, Homo sapien
gcatatgtttgaaggacttctccca

SEQ ID NO: 3323121 - DNA, 25 bp, Homo sapien
tgaccatgcccttgacagttacagc

SEQ ID NO: 3323122 - DNA, 25 bp, Homo sapien
taacagggtactagctgttcttctg

SEQ ID NO: 3323123 - DNA, 25 bp, Homo sapien
acagggtactagctgttcttctgtg

SEQ ID NO: 3323124 - DNA, 25 bp, Homo sapien
ttaacagggtactagctgttcttct

SEQ ID NO: 3323125 - DNA, 25 bp, Homo sapien
gttgctgtagaaagaatggccaggg

SEQ ID NO: 3323126 - DNA, 25 bp, Homo sapien
gtggttggcagaataaattgaggct

SEQ ID NO: 3323127 - DNA, 25 bp, Homo sapien
tggttggcagaataaattgaggcta

SEQ ID NO: 3323128 - DNA, 25 bp, Homo sapien
tgtggttggcagaataaattgaggc

SEQ ID NO: 3323129 - DNA, 25 bp, Homo sapien
cttgtggttggcagaataaattgag

SEQ ID NO: 3323130 - DNA, 25 bp, Homo sapien
gaaataataagtttcactatagatc

SEQ ID NO: 3323131 - DNA, 25 bp, Homo sapien
tagtatcagctataatatatctgga

SEQ ID NO: 3323132 - DNA, 25 bp, Homo sapien
tcaaaatacattggtcatataatag

SEQ ID NO: 3323133 - DNA, 25 bp, Homo sapien
cagcaactaaaactgcttggaatga

SEQ ID NO: 3323134 - DNA, 25 bp, Homo sapien
gcaaagccctggcagactaaaacca

SEQ ID NO: 3323135 - DNA, 25 bp, Homo sapien
tgaatttggaactggcattgccaca

SEQ ID NO: 3323136 - DNA, 25 bp, Homo sapien
cattgccacaggtgcaaagagtcta

SEQ ID NO: 3323137 - DNA, 25 bp, Homo sapien
tctggacacagatgcctgcttaatg

SEQ ID NO: 3323138 - DNA, 25 bp, Homo sapien
gaacagaattagattatgtagaaac

SEQ ID NO: 3323139 - DNA, 25 bp, Homo sapien
attatgtagaaacttggacaattcc

SEQ ID NO: 3323140 - DNA, 25 bp, Homo sapien
aattagattatgtagaaacttggac

SEQ ID NO: 3323141 - DNA, 25 bp, Homo sapien
tagattatgtagaaacttggacaat

SEQ ID NO: 3323142 - DNA, 25 bp, Homo sapien
cgtgtttagagtcatcaaaatataa

SEQ ID NO: 3323143 - DNA, 25 bp, Homo sapien
tggaacgtgtttagagtcatcaaaa

SEQ ID NO: 3323144 - DNA, 25 bp, Homo sapien
atttggaacgtgtttagagtcatca

SEQ ID NO: 3323145 - DNA, 25 bp, Homo sapien
gaacgtgtttagagtcatcaaaata

SEQ ID NO: 3323146 - DNA, 25 bp, Homo sapien
tgatgtattcatgagttggcagagg

SEQ ID NO: 3323147 - DNA, 25 bp, Homo sapien
gaggtgcagccagatagcctggcat

SEQ ID NO: 3323148 - DNA, 25 bp, Homo sapien
gtctgtttatgacactcatttgaat

SEQ ID NO: 3323149 - DNA, 25 bp, Homo sapien
gtttatgacactcatttgaatgatg

SEQ ID NO: 3323150 - DNA, 25 bp, Homo sapien
cctaggctttgccaccaaggtggct

SEQ ID NO: 3323151 - DNA, 25 bp, Homo sapien
aggtcccaggattccccatcctagg

SEQ ID NO: 3323152 - DNA, 25 bp, Homo sapien
tcttgatgatatgcaggaccaggaa

SEQ ID NO: 3323153 - DNA, 25 bp, Homo sapien
catttgttaatcagaagtgccaagg

SEQ ID NO: 3323154 - DNA, 25 bp, Homo sapien
ctcaaaatagcaggtctccttccag

SEQ ID NO: 3323155 - DNA, 25 bp, Homo sapien
ttccacaccctcaaaatagcaggtc

SEQ ID NO: 3323156 - DNA, 25 bp, Homo sapien
ctgttcagcttccacaccctcaaaa

SEQ ID NO: 3323157 - DNA, 25 bp, Homo sapien
aaaatagcaggtctccttccagcat

SEQ ID NO: 3323158 - DNA, 25 bp, Homo sapien
cttcacacaaggtcatgtcctcctc

SEQ ID NO: 3323159 - DNA, 25 bp, Homo sapien
cagactaaggatgtatctgactgtc

SEQ ID NO: 3323160 - DNA, 25 bp, Homo sapien
tcatgggcagactaaggatgtatct

SEQ ID NO: 3323161 - DNA, 25 bp, Homo sapien
tatctgactgtctcagttgagtgtc

SEQ ID NO: 3323162 - DNA, 25 bp, Homo sapien
gagagtatggttggtatcatttcag

SEQ ID NO: 3323163 - DNA, 25 bp, Homo sapien
gcaagcatgtggtagataacagagt

SEQ ID NO: 3323164 - DNA, 25 bp, Homo sapien
catgtggtagataacagagtatgtt

SEQ ID NO: 3323165 - DNA, 25 bp, Homo sapien
ttattgatgtggtttgagggttctt

SEQ ID NO: 3323166 - DNA, 25 bp, Homo sapien
tgtttatccaacttgcgactcagtg

SEQ ID NO: 3323167 - DNA, 25 bp, Homo sapien
ggtgtcattgcatgtaagatggagc

SEQ ID NO: 3323168 - DNA, 25 bp, Homo sapien
ccttacaaggtgtgtgggctatgta

SEQ ID NO: 3323169 - DNA, 25 bp, Homo sapien
ttggagataaggacagctgggtcct

SEQ ID NO: 3323170 - DNA, 25 bp, Homo sapien
gactagacctctaggtagaattggg

SEQ ID NO: 3323171 - DNA, 25 bp, Homo sapien
ggtagaattgggcacagagtcctca

SEQ ID NO: 3323172 - DNA, 25 bp, Homo sapien
cccatccaggactagacctctaggt

SEQ ID NO: 3323173 - DNA, 25 bp, Homo sapien
acctctaggtagaattgggcacaga

SEQ ID NO: 3323174 - DNA, 25 bp, Homo sapien
attgcacaaccaaagggccaatgtt

SEQ ID NO: 3323175 - DNA, 25 bp, Homo sapien
cattgcacaaccaaagggccaatgt

SEQ ID NO: 3323176 - DNA, 25 bp, Homo sapien
tcattgcacaaccaaagggccaatg

SEQ ID NO: 3323177 - DNA, 25 bp, Homo sapien
ctaaatagctagataatcctctgtg

SEQ ID NO: 3323178 - DNA, 25 bp, Homo sapien
ttgaatcagtaaacttaaatatggg

SEQ ID NO: 3323179 - DNA, 25 bp, Homo sapien
cttaaatatggggacaggattattt

SEQ ID NO: 3323180 - DNA, 25 bp, Homo sapien
cagtaaacttaaatatggggacagg

SEQ ID NO: 3323181 - DNA, 25 bp, Homo sapien
aatatggggacaggattatttacca

SEQ ID NO: 3323182 - DNA, 25 bp, Homo sapien
ctttgacatgttctggagacatttt

SEQ ID NO: 3323183 - DNA, 25 bp, Homo sapien
tattttccctcttaggcctctcggc

SEQ ID NO: 3323184 - DNA, 25 bp, Homo sapien
tgaaatttgtgaattgggaaatgga

SEQ ID NO: 3323185 - DNA, 25 bp, Homo sapien
tctgcagtaagctagaatttctccc

SEQ ID NO: 3323186 - DNA, 25 bp, Homo sapien
ggctggctaacagatcaccaaacat

SEQ ID NO: 3323187 - DNA, 25 bp, Homo sapien
aagatcggccctgactcgttagcgc

SEQ ID NO: 3323188 - DNA, 25 bp, Homo sapien
tcgttagcgctccagccatatttgc

SEQ ID NO: 3323189 - DNA, 25 bp, Homo sapien
accaaacattttaccaagcagccag

SEQ ID NO: 3323190 - DNA, 25 bp, Homo sapien
tgtatctgttgatgtccttaaccaa

SEQ ID NO: 3323191 - DNA, 25 bp, Homo sapien
cttggcctgcgtctccatgtagtgt

SEQ ID NO: 3323192 - DNA, 25 bp, Homo sapien
ccagggtggccaggattgtatctgt

SEQ ID NO: 3323193 - DNA, 25 bp, Homo sapien
ttgatgtccttaaccaacttgcccc

SEQ ID NO: 3323194 - DNA, 25 bp, Homo sapien
tgtgtaggggtcattactgaacttt

SEQ ID NO: 3323195 - DNA, 25 bp, Homo sapien
aatgttcttagttgtgtaggggtca

SEQ ID NO: 3323196 - DNA, 25 bp, Homo sapien
cactgacttatattctattgtttct

SEQ ID NO: 3323197 - DNA, 25 bp, Homo sapien
tgaactttcgtaggtgctattagaa

SEQ ID NO: 3323198 - DNA, 25 bp, Homo sapien
tatggtcacaaagtccttaaagcta

SEQ ID NO: 3323199 - DNA, 25 bp, Homo sapien
ctctctgttgctcaaatgggtaaat

SEQ ID NO: 3323200 - DNA, 25 bp, Homo sapien
atggtcacaaagtccttaaagctac

SEQ ID NO: 3323201 - DNA, 25 bp, Homo sapien
tgttatggtcacaaagtccttaaag

SEQ ID NO: 3323202 - DNA, 25 bp, Homo sapien
tttcttctctgccccactgacagct

SEQ ID NO: 3323203 - DNA, 25 bp, Homo sapien
tcttctctgccccactgacagcttg

SEQ ID NO: 3323204 - DNA, 25 bp, Homo sapien
gctttcttctctgccccactgacag

SEQ ID NO: 3323205 - DNA, 25 bp, Homo sapien
cagctttcttctctgccccactgac

SEQ ID NO: 3323206 - DNA, 25 bp, Homo sapien
gggtagattggacgtttagctccca

SEQ ID NO: 3323207 - DNA, 25 bp, Homo sapien
ctcccacttctttgttgtactgctg

SEQ ID NO: 3323208 - DNA, 25 bp, Homo sapien
tactgctgtcgaagtgggtagattg

SEQ ID NO: 3323209 - DNA, 25 bp, Homo sapien
ggagaagtggaatgtctacacctca

SEQ ID NO: 3323210 - DNA, 25 bp, Homo sapien
ttatctgcctttttggtgttgggtg

SEQ ID NO: 3323211 - DNA, 25 bp, Homo sapien
tgcctttttggtgttgggtgcccag

SEQ ID NO: 3323212 - DNA, 25 bp, Homo sapien
tttggtgttgggtgcccagtaagtc

SEQ ID NO: 3323213 - DNA, 25 bp, Homo sapien
ttggtgttgggtgcccagtaagtcc

SEQ ID NO: 3323214 - DNA, 25 bp, Homo sapien
agatcaacttcctttatagacctgc

SEQ ID NO: 3323215 - DNA, 25 bp, Homo sapien
gaagatcaacttcctttatagacct

SEQ ID NO: 3323216 - DNA, 25 bp, Homo sapien
tgggaatggggaagatcaacttcct

SEQ ID NO: 3323217 - DNA, 25 bp, Homo sapien
tggggaagatcaacttcctttatag

SEQ ID NO: 3323218 - DNA, 25 bp, Homo sapien
tcactaagaagtaactctaaaacat

SEQ ID NO: 3323219 - DNA, 25 bp, Homo sapien
atcactaagaagtaactctaaaaca

SEQ ID NO: 3323220 - DNA, 25 bp, Homo sapien
tacatatgacgtcgatgatgtcttt

SEQ ID NO: 3323221 - DNA, 25 bp, Homo sapien
cttagattccaggttacatatgacg

SEQ ID NO: 3323222 - DNA, 25 bp, Homo sapien
gaacaaagcctctgtaataccaacc

SEQ ID NO: 3323223 - DNA, 25 bp, Homo sapien
tctgtaataccaacccttagattcc

SEQ ID NO: 3323224 - DNA, 25 bp, Homo sapien
aacctgcaggatagtcttccctctg

SEQ ID NO: 3323225 - DNA, 25 bp, Homo sapien
ggaagggctttcctgtgtaatcaat

SEQ ID NO: 3323226 - DNA, 25 bp, Homo sapien
ttaaagacagtagtgctctttcctc

SEQ ID NO: 3323227 - DNA, 25 bp, Homo sapien
tttcctctaaactaggcatttctca

SEQ ID NO: 3323228 - DNA, 25 bp, Homo sapien
taaaggatccagtatgtaaatcatc

SEQ ID NO: 3323229 - DNA, 25 bp, Homo sapien
gttggtgcacataatagtttgactc

SEQ ID NO: 3323230 - DNA, 25 bp, Homo sapien
gaagcgcatgctcatatacatatta

SEQ ID NO: 3323231 - DNA, 25 bp, Homo sapien
ggagagcatacatatgaagcgcatg

SEQ ID NO: 3323232 - DNA, 25 bp, Homo sapien
tagtgtaatgaattcccaggcaaac

SEQ ID NO: 3323233 - DNA, 25 bp, Homo sapien
catgggcactttgttaggagaataa

SEQ ID NO: 3323234 - DNA, 25 bp, Homo sapien
tacaacattgggcataattacctaa

SEQ ID NO: 3323235 - DNA, 25 bp, Homo sapien
taatctatcgtacactacagtaaag

SEQ ID NO: 3323236 - DNA, 25 bp, Homo sapien
gcattccagtgtcaatctactctga

SEQ ID NO: 3323237 - DNA, 25 bp, Homo sapien
tactgccaggaaaacatatgttaag

SEQ ID NO: 3323238 - DNA, 25 bp, Homo sapien
tagatgccaatgaggtagttcagcc

SEQ ID NO: 3323239 - DNA, 25 bp, Homo sapien
tagtacaaggagagaacctaaggag

SEQ ID NO: 3323240 - DNA, 25 bp, Homo sapien
caacaagatcatgtgtacctctttc

SEQ ID NO: 3323241 - DNA, 25 bp, Homo sapien
tgcaaatacaggatgattcttgttc

SEQ ID NO: 3323242 - DNA, 25 bp, Homo sapien
tctgagtggcacaagtatcatctct

SEQ ID NO: 3323243 - DNA, 25 bp, Homo sapien
agatcatgtgtacctctttcactgg

SEQ ID NO: 3323244 - DNA, 25 bp, Homo sapien
gaagcactgtatttatgtctacgta

SEQ ID NO: 3323245 - DNA, 25 bp, Homo sapien
tatgtctacgtattgcgtgtgtaca

SEQ ID NO: 3323246 - DNA, 25 bp, Homo sapien
taaaatggtaactggaagcactgta

SEQ ID NO: 3323247 - DNA, 25 bp, Homo sapien
tacgtattgcgtgtgtacaaagaga

SEQ ID NO: 3323248 - DNA, 25 bp, Homo sapien
gactttggaagtacatgctaggaaa

SEQ ID NO: 3323249 - DNA, 25 bp, Homo sapien
aattgctaccagaagtgaggctgat

SEQ ID NO: 3323250 - DNA, 25 bp, Homo sapien
ggctgatgctggaacaaatacctaa

SEQ ID NO: 3323251 - DNA, 25 bp, Homo sapien
cattaggagtaattctggtgagggc

SEQ ID NO: 3323252 - DNA, 25 bp, Homo sapien
gagtgaaggcagagcatgttcacag

SEQ ID NO: 3323253 - DNA, 25 bp, Homo sapien
tgagtagaggtaaagagctgtgcag

SEQ ID NO: 3323254 - DNA, 25 bp, Homo sapien
gtagaggtaaagagctgtgcagtga

SEQ ID NO: 3323255 - DNA, 25 bp, Homo sapien
tgtgcagtgaaggatcttcagtgac

SEQ ID NO: 3323256 - DNA, 25 bp, Homo sapien
aggacactgattcttccaggtgatg

SEQ ID NO: 3323257 - DNA, 25 bp, Homo sapien
aggtgatggctggttataatttcta

SEQ ID NO: 3323258 - DNA, 25 bp, Homo sapien
gtgatggctggttataatttctaaa

SEQ ID NO: 3323259 - DNA, 25 bp, Homo sapien
ggacactgattcttccaggtgatgg

SEQ ID NO: 3323260 - DNA, 25 bp, Homo sapien
ggtaaatgacaattaactcaacaat

SEQ ID NO: 3323261 - DNA, 25 bp, Homo sapien
aatgacaattaactcaacaatacta

SEQ ID NO: 3323262 - DNA, 25 bp, Homo sapien
taaatgacaattaactcaacaatac

SEQ ID NO: 3323263 - DNA, 25 bp, Homo sapien
tgacaattaactcaacaatactaac

SEQ ID NO: 3323264 - DNA, 25 bp, Homo sapien
gttcctattgacactaggggtgcca

SEQ ID NO: 3323265 - DNA, 25 bp, Homo sapien
cctattgacactaggggtgccattt

SEQ ID NO: 3323266 - DNA, 25 bp, Homo sapien
tgttcctattgacactaggggtgcc

SEQ ID NO: 3323267 - DNA, 25 bp, Homo sapien
tcctattgacactaggggtgccatt

SEQ ID NO: 3323268 - DNA, 25 bp, Homo sapien
tatgccatctccatcacgtaaagta

SEQ ID NO: 3323269 - DNA, 25 bp, Homo sapien
gtatttgaactatcctcatccaaca

SEQ ID NO: 3323270 - DNA, 25 bp, Homo sapien
ctgaatatgccatctccatcacgta

SEQ ID NO: 3323271 - DNA, 25 bp, Homo sapien
tctccatcacgtaaagtatttgaac

SEQ ID NO: 3323272 - DNA, 25 bp, Homo sapien
tcttcagtaacaagttcagtgatga

SEQ ID NO: 3323273 - DNA, 25 bp, Homo sapien
ttcagtaacaagttcagtgatgaat

SEQ ID NO: 3323274 - DNA, 25 bp, Homo sapien
ttattcttcagtaacaagttcagtg

SEQ ID NO: 3323275 - DNA, 25 bp, Homo sapien
tattcttcagtaacaagttcagtga

SEQ ID NO: 3323276 - DNA, 25 bp, Homo sapien
tttgtaaattactactagatttgtc

SEQ ID NO: 3323277 - DNA, 25 bp, Homo sapien
tgtcttcagtcctccataatgtcat

SEQ ID NO: 3323278 - DNA, 25 bp, Homo sapien
cttaattcaggaattccatatttct

SEQ ID NO: 3323279 - DNA, 25 bp, Homo sapien
ctactagatttgtcttcagtcctcc

SEQ ID NO: 3323280 - DNA, 25 bp, Homo sapien
tctaaattacttgcaaggatatctt

SEQ ID NO: 3323281 - DNA, 25 bp, Homo sapien
ctaaattacttgcaaggatatcttt

SEQ ID NO: 3323282 - DNA, 25 bp, Homo sapien
atctaaattacttgcaaggatatct

SEQ ID NO: 3323283 - DNA, 25 bp, Homo sapien
gcactaattcagttctggataaaga

SEQ ID NO: 3323284 - DNA, 25 bp, Homo sapien
cttcttcaagtatcagcaaagtaga

SEQ ID NO: 3323285 - DNA, 25 bp, Homo sapien
ggcatagctactgagtcttctgtta

SEQ ID NO: 3323286 - DNA, 25 bp, Homo sapien
gctacagttaaggtgtcagccatac

SEQ ID NO: 3323287 - DNA, 25 bp, Homo sapien
tctttttggatccactacttcggca

SEQ ID NO: 3323288 - DNA, 25 bp, Homo sapien
cccagatgatctctttctactaaaa

SEQ ID NO: 3323289 - DNA, 25 bp, Homo sapien
cactgtaatacaaatatgcagtctc

SEQ ID NO: 3323290 - DNA, 25 bp, Homo sapien
ggatccactacttcggcactgtaat

SEQ ID NO: 3323291 - DNA, 25 bp, Homo sapien
tacatttacaagctgagtaaacact

SEQ ID NO: 3323292 - DNA, 25 bp, Homo sapien
gtttgtcatccattgactcagcgaa

SEQ ID NO: 3323293 - DNA, 25 bp, Homo sapien
tcagcgaagtctcaccagtgccatt

SEQ ID NO: 3323294 - DNA, 25 bp, Homo sapien
tcctggggtgtatgatttagaatac

SEQ ID NO: 3323295 - DNA, 25 bp, Homo sapien
tgtagaagctaaccttatattcata

SEQ ID NO: 3323296 - DNA, 25 bp, Homo sapien
gctaaccttatattcatattccagg

SEQ ID NO: 3323297 - DNA, 25 bp, Homo sapien
tggtccctgccgaatccgcagtaga

SEQ ID NO: 3323298 - DNA, 25 bp, Homo sapien
cgcagtagaggaactcggatttgat

SEQ ID NO: 3323299 - DNA, 25 bp, Homo sapien
cataacaattaatagacacgcaagc

SEQ ID NO: 3323300 - DNA, 25 bp, Homo sapien
caattaatagacacgcaagcctgta

SEQ ID NO: 3323301 - DNA, 25 bp, Homo sapien
ccagaaggtgttacttaattcatgc

SEQ ID NO: 3323302 - DNA, 25 bp, Homo sapien
atagacacgcaagcctgtaccgacg

SEQ ID NO: 3323303 - DNA, 25 bp, Homo sapien
ggtatgaataatgggaattctaggc

SEQ ID NO: 3323304 - DNA, 25 bp, Homo sapien
tctaagaaggtatgaataatgggaa

SEQ ID NO: 3323305 - DNA, 25 bp, Homo sapien
tgccagtaactgaagtctaagaagg

SEQ ID NO: 3323306 - DNA, 25 bp, Homo sapien
gggaagctgctattagatcttgcca

SEQ ID NO: 3323307 - DNA, 25 bp, Homo sapien
agagctccacaatctcagaatccat

SEQ ID NO: 3323308 - DNA, 25 bp, Homo sapien
gctccacaatctcagaatccatatt

SEQ ID NO: 3323309 - DNA, 25 bp, Homo sapien
ctccacaatctcagaatccatatta

SEQ ID NO: 3323310 - DNA, 25 bp, Homo sapien
gagctccacaatctcagaatccata

SEQ ID NO: 3323311 - DNA, 25 bp, Homo sapien
tgcgtgcaccatgagcgagccgaag

SEQ ID NO: 3323312 - DNA, 25 bp, Homo sapien
tcagtgggtgcgtgcaccatgagcg

SEQ ID NO: 3323313 - DNA, 25 bp, Homo sapien
gtgggtgcgtgcaccatgagcgagc

SEQ ID NO: 3323314 - DNA, 25 bp, Homo sapien
gggtgcgtgcaccatgagcgagccg

SEQ ID NO: 3323315 - DNA, 25 bp, Homo sapien
tttactgtgagttctatagggactg

SEQ ID NO: 3323316 - DNA, 25 bp, Homo sapien
agttaagtgtacttccctgggcatg

SEQ ID NO: 3323317 - DNA, 25 bp, Homo sapien
tctatagggactggttcacttttat

SEQ ID NO: 3323318 - DNA, 25 bp, Homo sapien
tcttgagttaagtgtacttccctgg

SEQ ID NO: 3323319 - DNA, 25 bp, Homo sapien
tctgatgtacaaaagtgtgattaaa

SEQ ID NO: 3323320 - DNA, 25 bp, Homo sapien
ctgatgtacaaaagtgtgattaaaa

SEQ ID NO: 3323321 - DNA, 25 bp, Homo sapien
tgatgtacaaaagtgtgattaaaaa

SEQ ID NO: 3323322 - DNA, 25 bp, Homo sapien
ttctattaattgtgcggaaggttga

SEQ ID NO: 3323323 - DNA, 25 bp, Homo sapien
attgtgcggaaggttgaaatgcata

SEQ ID NO: 3323324 - DNA, 25 bp, Homo sapien
ttaattgtgcggaaggttgaaatgc

SEQ ID NO: 3323325 - DNA, 25 bp, Homo sapien
cataagtcaatttggccagaagcac

SEQ ID NO: 3323326 - DNA, 25 bp, Homo sapien
gaataaaagtggttctctgggctac

SEQ ID NO: 3323327 - DNA, 25 bp, Homo sapien
aagcagggatggaataaaagtggtt

SEQ ID NO: 3323328 - DNA, 25 bp, Homo sapien
tggttctctgggctacctctaatac

SEQ ID NO: 3323329 - DNA, 25 bp, Homo sapien
tctgggctacctctaatactgccat

SEQ ID NO: 3323330 - DNA, 25 bp, Homo sapien
gtggaatacaggtccaggcatgtcc

SEQ ID NO: 3323331 - DNA, 25 bp, Homo sapien
agtggaatacaggtccaggcatgtc

SEQ ID NO: 3323332 - DNA, 25 bp, Homo sapien
agagactgactagtggctgctctaa

SEQ ID NO: 3323333 - DNA, 25 bp, Homo sapien
cacattgattggtggacttttctca

SEQ ID NO: 3323334 - DNA, 25 bp, Homo sapien
ctaagtaattttctcaggatcattc

SEQ ID NO: 3323335 - DNA, 25 bp, Homo sapien
gatttcaccaattctggggagaaca

SEQ ID NO: 3323336 - DNA, 25 bp, Homo sapien
tgaatagttctgttgctgatttcac

SEQ ID NO: 3323337 - DNA, 25 bp, Homo sapien
catctcaaatggcaggccgtttgca

SEQ ID NO: 3323338 - DNA, 25 bp, Homo sapien
tctcaaatggcaggccgtttgcacc

SEQ ID NO: 3323339 - DNA, 25 bp, Homo sapien
ctcatctcaaatggcaggccgtttg

SEQ ID NO: 3323340 - DNA, 25 bp, Homo sapien
ctcaaatggcaggccgtttgcacct

SEQ ID NO: 3323341 - DNA, 25 bp, Homo sapien
tagaagaatgttgagagcaactgtc

SEQ ID NO: 3323342 - DNA, 25 bp, Homo sapien
atttagaagaatgttgagagcaact

SEQ ID NO: 3323343 - DNA, 25 bp, Homo sapien
gaatgttgagagcaactgtcaaagt

SEQ ID NO: 3323344 - DNA, 25 bp, Homo sapien
gagagcaactgtcaaagtcttacag

SEQ ID NO: 3323345 - DNA, 25 bp, Homo sapien
acagaaatgcgttttggccaggcgc

SEQ ID NO: 3323346 - DNA, 25 bp, Homo sapien
tgacctgcagtacaccaacagaaat

SEQ ID NO: 3323347 - DNA, 25 bp, Homo sapien
aggagaaataactggattagtccaa

SEQ ID NO: 3323348 - DNA, 25 bp, Homo sapien
gactactcaaagaactgacctgcag

SEQ ID NO: 3323349 - DNA, 25 bp, Homo sapien
tgatagcgggttggcaagaagcctt

SEQ ID NO: 3323350 - DNA, 25 bp, Homo sapien
gctaagattagggaatgaaggctcc

SEQ ID NO: 3323351 - DNA, 25 bp, Homo sapien
tcaagtaactacatgtgatagcggg

SEQ ID NO: 3323352 - DNA, 25 bp, Homo sapien
tattattctgactctccagggaaga

SEQ ID NO: 3323353 - DNA, 25 bp, Homo sapien
gaaatgatgcaactgacgtttgtgg

SEQ ID NO: 3323354 - DNA, 25 bp, Homo sapien
cgtttgtggaagaaacacatctcct

SEQ ID NO: 3323355 - DNA, 25 bp, Homo sapien
cacagtcattgcttgtgggctttat

SEQ ID NO: 3323356 - DNA, 25 bp, Homo sapien
tatccttgatagctttcagaaatga

SEQ ID NO: 3323357 - DNA, 25 bp, Homo sapien
aaatactgatcactaccatcctcca

SEQ ID NO: 3323358 - DNA, 25 bp, Homo sapien
ctttaaatactgatcactaccatcc

SEQ ID NO: 3323359 - DNA, 25 bp, Homo sapien
ttaaatactgatcactaccatcctc

SEQ ID NO: 3323360 - DNA, 25 bp, Homo sapien
tgatcactaccatcctccacacctg

SEQ ID NO: 3323361 - DNA, 25 bp, Homo sapien
tcttggcttgtgaatttttattcat

SEQ ID NO: 3323362 - DNA, 25 bp, Homo sapien
ttcttggcttgtgaatttttattca

SEQ ID NO: 3323363 - DNA, 25 bp, Homo sapien
cttttactattcttggcttgtgaat

SEQ ID NO: 3323364 - DNA, 25 bp, Homo sapien
ttacttttactattcttggcttgtg

SEQ ID NO: 3323365 - DNA, 25 bp, Homo sapien
tgctttaggctacacaacttgatgt

SEQ ID NO: 3323366 - DNA, 25 bp, Homo sapien
aaaaagtcgcagaggttcagctaaa

SEQ ID NO: 3323367 - DNA, 25 bp, Homo sapien
tgtgctcactggaatatacagatgt

SEQ ID NO: 3323368 - DNA, 25 bp, Homo sapien
catattaaattcaagcagtaggaga

SEQ ID NO: 3323369 - DNA, 25 bp, Homo sapien
acgcgtggccttcattctcctcggt

SEQ ID NO: 3323370 - DNA, 25 bp, Homo sapien
cactggatcctgagcgccataggta

SEQ ID NO: 3323371 - DNA, 25 bp, Homo sapien
ccggaacgaacgtctgggcgctttg

SEQ ID NO: 3323372 - DNA, 25 bp, Homo sapien
ccatgtgtctgagcgagagcgtgac

SEQ ID NO: 3323373 - DNA, 25 bp, Homo sapien
ggaaggagtgacaagagttctgtcc

SEQ ID NO: 3323374 - DNA, 25 bp, Homo sapien
cctctgcctgctgctacagtggaat

SEQ ID NO: 3323375 - DNA, 25 bp, Homo sapien
tgctgctacagtggaatcccctgtg

SEQ ID NO: 3323376 - DNA, 25 bp, Homo sapien
tggaaggagtgacaagagttctgtc

SEQ ID NO: 3323377 - DNA, 25 bp, Homo sapien
gatggcggcttactggtcatgtgac

SEQ ID NO: 3323378 - DNA, 25 bp, Homo sapien
ttagactgtaccaagtctcagcatc

SEQ ID NO: 3323379 - DNA, 25 bp, Homo sapien
agcatctcacggtccttttctgttt

SEQ ID NO: 3323380 - DNA, 25 bp, Homo sapien
catgtgacttttcaccatccaggca

SEQ ID NO: 3323381 - DNA, 25 bp, Homo sapien
tgatcagtgctcaaggataagggtt

SEQ ID NO: 3323382 - DNA, 25 bp, Homo sapien
gatcagtgctcaaggataagggttc

SEQ ID NO: 3323383 - DNA, 25 bp, Homo sapien
ttgatcagtgctcaaggataagggt

SEQ ID NO: 3323384 - DNA, 25 bp, Homo sapien
gagaagcctcagctgtttagcctca

SEQ ID NO: 3323385 - DNA, 25 bp, Homo sapien
aatttgggttggctcaggtaggcat

SEQ ID NO: 3323386 - DNA, 25 bp, Homo sapien
tccgatgccaatcacctgagaagtg

SEQ ID NO: 3323387 - DNA, 25 bp, Homo sapien
tcagctgactcaccgatgcttctgc

SEQ ID NO: 3323388 - DNA, 25 bp, Homo sapien
gcctcataggcaaagcaaatcacat

SEQ ID NO: 3323389 - DNA, 25 bp, Homo sapien
gctttatatggttctgtgtttccca

SEQ ID NO: 3323390 - DNA, 25 bp, Homo sapien
gagcaacagctaacctctcctaaag

SEQ ID NO: 3323391 - DNA, 25 bp, Homo sapien
gcatacgcatttttaagcctctgct

SEQ ID NO: 3323392 - DNA, 25 bp, Homo sapien
tccaactgggtacactgcaaggttt

SEQ ID NO: 3323393 - DNA, 25 bp, Homo sapien
ttattcccataaaagctgctgctct

SEQ ID NO: 3323394 - DNA, 25 bp, Homo sapien
tattcccataaaagctgctgctctt

SEQ ID NO: 3323395 - DNA, 25 bp, Homo sapien
ctgggtacactgcaaggtttatctg

SEQ ID NO: 3323396 - DNA, 25 bp, Homo sapien
ctttttcacatggtgatggatgtcc

SEQ ID NO: 3323397 - DNA, 25 bp, Homo sapien
tcccaggctttttcacatggtgatg

SEQ ID NO: 3323398 - DNA, 25 bp, Homo sapien
ttttcttccagcagactatcccagg

SEQ ID NO: 3323399 - DNA, 25 bp, Homo sapien
ctgtctcagattgggttttccagaa

SEQ ID NO: 3323400 - DNA, 25 bp, Homo sapien
tgtcacttcctatgactctatcacc

SEQ ID NO: 3323401 - DNA, 25 bp, Homo sapien
cctctgtcacttcctatgactctat

SEQ ID NO: 3323402 - DNA, 25 bp, Homo sapien
cctatgactctatcaccatcatctg

SEQ ID NO: 3323403 - DNA, 25 bp, Homo sapien
acttcctatgactctatcaccatca

SEQ ID NO: 3323404 - DNA, 25 bp, Homo sapien
gcctatggtgtgaccagcattgcca

SEQ ID NO: 3323405 - DNA, 25 bp, Homo sapien
tggcctatggtgtgaccagcattgc

SEQ ID NO: 3323406 - DNA, 25 bp, Homo sapien
tatggtgtgaccagcattgccatgg

SEQ ID NO: 3323407 - DNA, 25 bp, Homo sapien
atggtggcctatggtgtgaccagca

SEQ ID NO: 3323408 - DNA, 25 bp, Homo sapien
gtaagtgtgatttaatgtattagaa

SEQ ID NO: 3323409 - DNA, 25 bp, Homo sapien
cttttgtaatgaagcgtaagtgtga

SEQ ID NO: 3323410 - DNA, 25 bp, Homo sapien
ttttgtaatgaagcgtaagtgtgat

SEQ ID NO: 3323411 - DNA, 25 bp, Homo sapien
agcgtaagtgtgatttaatgtatta

SEQ ID NO: 3323412 - DNA, 25 bp, Homo sapien
catgttccaagactagctggctatt

SEQ ID NO: 3323413 - DNA, 25 bp, Homo sapien
agtgccatgttccaagactagctgg

SEQ ID NO: 3323414 - DNA, 25 bp, Homo sapien
tgccatgttccaagactagctggct

SEQ ID NO: 3323415 - DNA, 25 bp, Homo sapien
cagtgccatgttccaagactagctg

SEQ ID NO: 3323416 - DNA, 25 bp, Homo sapien
cataatttacatcccgcttataaag

SEQ ID NO: 3323417 - DNA, 25 bp, Homo sapien
ctcataatttacatcccgcttataa

SEQ ID NO: 3323418 - DNA, 25 bp, Homo sapien
tttacatcccgcttataaagaacat

SEQ ID NO: 3323419 - DNA, 25 bp, Homo sapien
taatttacatcccgcttataaagaa

SEQ ID NO: 3323420 - DNA, 25 bp, Homo sapien
tcaagctacatacggctcttgacag

SEQ ID NO: 3323421 - DNA, 25 bp, Homo sapien
agctacatacggctcttgacagatg

SEQ ID NO: 3323422 - DNA, 25 bp, Homo sapien
caagctacatacggctcttgacaga

SEQ ID NO: 3323423 - DNA, 25 bp, Homo sapien
ctacatacggctcttgacagatgct

SEQ ID NO: 3323424 - DNA, 25 bp, Homo sapien
accaacgctgtgaaagagagacgaa

SEQ ID NO: 3323425 - DNA, 25 bp, Homo sapien
agagacgaatagctcgtaaaatcag

SEQ ID NO: 3323426 - DNA, 25 bp, Homo sapien
gaccaacgctgtgaaagagagacga

SEQ ID NO: 3323427 - DNA, 25 bp, Homo sapien
gacgaatagctcgtaaaatcagcaa

SEQ ID NO: 3323428 - DNA, 25 bp, Homo sapien
gagttgcttgatactctaagactta

SEQ ID NO: 3323429 - DNA, 25 bp, Homo sapien
tgagtgacgcaatatcatagagtgt

SEQ ID NO: 3323430 - DNA, 25 bp, Homo sapien
ttcagacagaattatatggcgtagg

SEQ ID NO: 3323431 - DNA, 25 bp, Homo sapien
cactgggaggcttaagatcatagca

SEQ ID NO: 3323432 - DNA, 25 bp, Homo sapien
tagtcaatggcagaagaggatagaa

SEQ ID NO: 3323433 - DNA, 25 bp, Homo sapien
ctagtcaatggcagaagaggataga

SEQ ID NO: 3323434 - DNA, 25 bp, Homo sapien
agtcaatggcagaagaggatagaac

SEQ ID NO: 3323435 - DNA, 25 bp, Homo sapien
tcaagacctttgacttcgaaacaat

SEQ ID NO: 3323436 - DNA, 25 bp, Homo sapien
gctcaagagtctgtccaaatatgag

SEQ ID NO: 3323437 - DNA, 25 bp, Homo sapien
gatgctttagtcttgtgctcaagag

SEQ ID NO: 3323438 - DNA, 25 bp, Homo sapien
gtgtttatcatgctgccaatcctca

SEQ ID NO: 3323439 - DNA, 25 bp, Homo sapien
tcaaaaatcactgatgtcgacagca

SEQ ID NO: 3323440 - DNA, 25 bp, Homo sapien
cactgatgtcgacagcaataaacct

SEQ ID NO: 3323441 - DNA, 25 bp, Homo sapien
aaaatcactgatgtcgacagcaata

SEQ ID NO: 3323442 - DNA, 25 bp, Homo sapien
aatcactgatgtcgacagcaataaa

SEQ ID NO: 3323443 - DNA, 25 bp, Homo sapien
tgcctgatcctggccttcgtggaga

SEQ ID NO: 3323444 - DNA, 25 bp, Homo sapien
agcaaaggcgggaggtgcctccatc

SEQ ID NO: 3323445 - DNA, 25 bp, Homo sapien
ggcaggccaggcagttcagacagcc

SEQ ID NO: 3323446 - DNA, 25 bp, Homo sapien
tcctgggactaacgaagcaaaggcg

SEQ ID NO: 3323447 - DNA, 25 bp, Homo sapien
gcagccctgatgtttgatcatggca

SEQ ID NO: 3323448 - DNA, 25 bp, Homo sapien
tttgggctgcagttcaagcagccct

SEQ ID NO: 3323449 - DNA, 25 bp, Homo sapien
tggcaccaaaccctagtacggtcag

SEQ ID NO: 3323450 - DNA, 25 bp, Homo sapien
caaaccctagtacggtcaggtactg

SEQ ID NO: 3323451 - DNA, 25 bp, Homo sapien
ctagtacggtcaggtactgcctatc

SEQ ID NO: 3323452 - DNA, 25 bp, Homo sapien
cctgagtgttggcaccaaaccctag

SEQ ID NO: 3323453 - DNA, 25 bp, Homo sapien
tgcccatatgcgaaggcttgtgcct

SEQ ID NO: 3323454 - DNA, 25 bp, Homo sapien
catatgcgaaggcttgtgcctttta

SEQ ID NO: 3323455 - DNA, 25 bp, Homo sapien
aggttgtgcccatatgcgaaggctt

SEQ ID NO: 3323456 - DNA, 25 bp, Homo sapien
ttgtgcccatatgcgaaggcttgtg

SEQ ID NO: 3323457 - DNA, 25 bp, Homo sapien
cattttacttctccatagacaggca

SEQ ID NO: 3323458 - DNA, 25 bp, Homo sapien
gcagctttgggtgattaaatctcag

SEQ ID NO: 3323459 - DNA, 25 bp, Homo sapien
catctgttgtccgcaggcagtgcat

SEQ ID NO: 3323460 - DNA, 25 bp, Homo sapien
cctgatggcagtgctaacatgcttt

SEQ ID NO: 3323461 - DNA, 25 bp, Homo sapien
ctgaagcagctgattgccgtcatca

SEQ ID NO: 3323462 - DNA, 25 bp, Homo sapien
ccttgttctttaatgggttgtgtag

SEQ ID NO: 3323463 - DNA, 25 bp, Homo sapien
cagctgattgccgtcatcaagtaac

SEQ ID NO: 3323464 - DNA, 25 bp, Homo sapien
gccgtcatcaagtaacttattagta

SEQ ID NO: 3323465 - DNA, 25 bp, Homo sapien
ttagaggtgaatggcagttgagcac

SEQ ID NO: 3323466 - DNA, 25 bp, Homo sapien
taaggaaagttagaggtgaatggca

SEQ ID NO: 3323467 - DNA, 25 bp, Homo sapien
aaagttagaggtgaatggcagttga

SEQ ID NO: 3323468 - DNA, 25 bp, Homo sapien
ctgataaggaaagttagaggtgaat

SEQ ID NO: 3323469 - DNA, 25 bp, Homo sapien
tgccacctcctttctactattcttt

SEQ ID NO: 3323470 - DNA, 25 bp, Homo sapien
tctgccacctcctttctactattct

SEQ ID NO: 3323471 - DNA, 25 bp, Homo sapien
ctgccacctcctttctactattctt

SEQ ID NO: 3323472 - DNA, 25 bp, Homo sapien
ttatgcaggaaatgacacaactttc

SEQ ID NO: 3323473 - DNA, 25 bp, Homo sapien
tatgcaggaaatgacacaactttct

SEQ ID NO: 3323474 - DNA, 25 bp, Homo sapien
caaatgcagcgtctgttgaagacgg

SEQ ID NO: 3323475 - DNA, 25 bp, Homo sapien
ggcctcaaatgcagcgtctgttgaa

SEQ ID NO: 3323476 - DNA, 25 bp, Homo sapien
tgtgggcctcaaatgcagcgtctgt

SEQ ID NO: 3323477 - DNA, 25 bp, Homo sapien
ctcaaatgcagcgtctgttgaagac

SEQ ID NO: 3323478 - DNA, 25 bp, Homo sapien
tgtgctttgtgaaacgaacacattc

SEQ ID NO: 3323479 - DNA, 25 bp, Homo sapien
cctcgccaatatcctgtgctttgtg

SEQ ID NO: 3323480 - DNA, 25 bp, Homo sapien
gaaacgaacacattctgtgaactta

SEQ ID NO: 3323481 - DNA, 25 bp, Homo sapien
tgctcaaatttaggattacctcgcc

SEQ ID NO: 3323482 - DNA, 25 bp, Homo sapien
ctgtcagatattggtctgtaaagcc

SEQ ID NO: 3323483 - DNA, 25 bp, Homo sapien
ttctgtcagatattggtctgtaaag

SEQ ID NO: 3323484 - DNA, 25 bp, Homo sapien
gtcagatattggtctgtaaagcctc

SEQ ID NO: 3323485 - DNA, 25 bp, Homo sapien
cctttctgtcagatattggtctgta

SEQ ID NO: 3323486 - DNA, 25 bp, Homo sapien
ctcatagcccgttctctttgcactg

SEQ ID NO: 3323487 - DNA, 25 bp, Homo sapien
ggaagaagtcaaatcgtgcagggat

SEQ ID NO: 3323488 - DNA, 25 bp, Homo sapien
tactgcatgtgctggaaccttgttc

SEQ ID NO: 3323489 - DNA, 25 bp, Homo sapien
gattccgggagccttttatgcctcc

SEQ ID NO: 3323490 - DNA, 25 bp, Homo sapien
tgaaggctgtgccattaccaccacc

SEQ ID NO: 3323491 - DNA, 25 bp, Homo sapien
taggtggcgagctctggctaatctg

SEQ ID NO: 3323492 - DNA, 25 bp, Homo sapien
tggctaatctgctgccctcagcgct

SEQ ID NO: 3323493 - DNA, 25 bp, Homo sapien
gaccatgagcttctctgggtaggtg

SEQ ID NO: 3323494 - DNA, 25 bp, Homo sapien
cagaatgttgacattctctgccaaa

SEQ ID NO: 3323495 - DNA, 25 bp, Homo sapien
tgaatttgtgtcattatacttgaaa

SEQ ID NO: 3323496 - DNA, 25 bp, Homo sapien
taatggcatataatccaagacagaa

SEQ ID NO: 3323497 - DNA, 25 bp, Homo sapien
gggtttgccccgatctctattgtta

SEQ ID NO: 3323498 - DNA, 25 bp, Homo sapien
ccatgcttgggagagttgaattact

SEQ ID NO: 3323499 - DNA, 25 bp, Homo sapien
tggttactgatcttacaaggcctca

SEQ ID NO: 3323500 - DNA, 25 bp, Homo sapien
catcacagggttaaagaaacaaagc

SEQ ID NO: 3323501 - DNA, 25 bp, Homo sapien
tcagctatttgagccttcacagggt

SEQ ID NO: 3323502 - DNA, 25 bp, Homo sapien
tatgtgttacccattagtactgtgt

SEQ ID NO: 3323503 - DNA, 25 bp, Homo sapien
tatatatggcagcaaacctccatat

SEQ ID NO: 3323504 - DNA, 25 bp, Homo sapien
tggggatgaagcactaataatcact

SEQ ID NO: 3323505 - DNA, 25 bp, Homo sapien
catttacaagtggaatggacaggaa

SEQ ID NO: 3323506 - DNA, 25 bp, Homo sapien
tgaaacactggtgggagtaagaacc

SEQ ID NO: 3323507 - DNA, 25 bp, Homo sapien
aaacaaaatatagtggtgatcccca

SEQ ID NO: 3323508 - DNA, 25 bp, Homo sapien
tcaataacaaaaaccgaagagcacg

SEQ ID NO: 3323509 - DNA, 25 bp, Homo sapien
cagttatctctgcaaatcattagga

SEQ ID NO: 3323510 - DNA, 25 bp, Homo sapien
tctttcctctttggcggacagtcta

SEQ ID NO: 3323511 - DNA, 25 bp, Homo sapien
ttggcggacagtctactctatttga

SEQ ID NO: 3323512 - DNA, 25 bp, Homo sapien
tcctctttggcggacagtctactct

SEQ ID NO: 3323513 - DNA, 25 bp, Homo sapien
tctctttcctctttggcggacagtc

SEQ ID NO: 3323514 - DNA, 25 bp, Homo sapien
gatctcgaccgtttctttttcatac

SEQ ID NO: 3323515 - DNA, 25 bp, Homo sapien
tttcatacatgaggcctgaatatta

SEQ ID NO: 3323516 - DNA, 25 bp, Homo sapien
tacatgaggcctgaatattagaatc

SEQ ID NO: 3323517 - DNA, 25 bp, Homo sapien
ctgaatattagaatcttctacccac

SEQ ID NO: 3323518 - DNA, 25 bp, Homo sapien
taataatagagggactttgagcccg

SEQ ID NO: 3323519 - DNA, 25 bp, Homo sapien
gaaaaccgtggccaaatctttgaca

SEQ ID NO: 3323520 - DNA, 25 bp, Homo sapien
gattccgattctgcgatccagccag

SEQ ID NO: 3323521 - DNA, 25 bp, Homo sapien
ggtgaaacccaacagtgagtacgga

SEQ ID NO: 3323522 - DNA, 25 bp, Homo sapien
gcagcggccgcccagaaaaaaaata

SEQ ID NO: 3323523 - DNA, 25 bp, Homo sapien
aaatcaaaggcgagggccgagctga

SEQ ID NO: 3323524 - DNA, 25 bp, Homo sapien
gccacggtagcagctccgggggctc

SEQ ID NO: 3323525 - DNA, 25 bp, Homo sapien
gggtcgcagcggccgcccagaaaaa

SEQ ID NO: 3323526 - DNA, 25 bp, Homo sapien
tgaaaagtctttaacctgtgccttg

SEQ ID NO: 3323527 - DNA, 25 bp, Homo sapien
ttatcgacatcttcattatgcaaat

SEQ ID NO: 3323528 - DNA, 25 bp, Homo sapien
ccttttgatactgatgaaaagtctt

SEQ ID NO: 3323529 - DNA, 25 bp, Homo sapien
ccttggtattatcgacatcttcatt

SEQ ID NO: 3323530 - DNA, 25 bp, Homo sapien
ttgcgttgagccacggaaacttgga

SEQ ID NO: 3323531 - DNA, 25 bp, Homo sapien
tatcacagcataaatcagcctgctg

SEQ ID NO: 3323532 - DNA, 25 bp, Homo sapien
aacttggagattgcttcttatcaca

SEQ ID NO: 3323533 - DNA, 25 bp, Homo sapien
aggtatacatttattgcgttgagcc

SEQ ID NO: 3323534 - DNA, 25 bp, Homo sapien
ttaattcgctttatctcttttctag

SEQ ID NO: 3323535 - DNA, 25 bp, Homo sapien
agttgaaattaatacgcgggacagt

SEQ ID NO: 3323536 - DNA, 25 bp, Homo sapien
ttctagttgaaattaatacgcggga

SEQ ID NO: 3323537 - DNA, 25 bp, Homo sapien
tagttgaaattaatacgcgggacag

SEQ ID NO: 3323538 - DNA, 25 bp, Homo sapien
tgtttctcggtttcaggacacagac

SEQ ID NO: 3323539 - DNA, 25 bp, Homo sapien
actctgttgttgtgcagtggtgacc

SEQ ID NO: 3323540 - DNA, 25 bp, Homo sapien
tcaggtagacctaggagcaaaaaca

SEQ ID NO: 3323541 - DNA, 25 bp, Homo sapien
acaggactggaatggtgtttctcgg

SEQ ID NO: 3323542 - DNA, 25 bp, Homo sapien
gatgccaagcagatgtagcctcctg

SEQ ID NO: 3323543 - DNA, 25 bp, Homo sapien
atttttccagtatcatgaattgtac

SEQ ID NO: 3323544 - DNA, 25 bp, Homo sapien
aatttttccagtatcatgaattgta

SEQ ID NO: 3323545 - DNA, 25 bp, Homo sapien
tttttccagtatcatgaattgtaca

SEQ ID NO: 3323546 - DNA, 25 bp, Homo sapien
caaccttcctatacgtgtagcatac

SEQ ID NO: 3323547 - DNA, 25 bp, Homo sapien
ctttgtgcggatgtataaaattgcc

SEQ ID NO: 3323548 - DNA, 25 bp, Homo sapien
tgtgtattccttctggcaatatgag

SEQ ID NO: 3323549 - DNA, 25 bp, Homo sapien
aaagtacaaactgcagatattcacc

SEQ ID NO: 3323550 - DNA, 25 bp, Homo sapien
gtgatctgttcaacgtttccagata

SEQ ID NO: 3323551 - DNA, 25 bp, Homo sapien
agtgatctgttcaacgtttccagat

SEQ ID NO: 3323552 - DNA, 25 bp, Homo sapien
cagtgatctgttcaacgtttccaga

SEQ ID NO: 3323553 - DNA, 25 bp, Homo sapien
gggcagcaacatctttgcctagatc

SEQ ID NO: 3323554 - DNA, 25 bp, Homo sapien
tcatcctaaacgtgtggcaccacta

SEQ ID NO: 3323555 - DNA, 25 bp, Homo sapien
agatcttgtttagcatggtgttgaa

SEQ ID NO: 3323556 - DNA, 25 bp, Homo sapien
gcaccactactgagggcagcaacat

SEQ ID NO: 3323557 - DNA, 25 bp, Homo sapien
taaggcagactatatcttaaggagt

SEQ ID NO: 3323558 - DNA, 25 bp, Homo sapien
ctcaatagcgtgcagtaaggcagac

SEQ ID NO: 3323559 - DNA, 25 bp, Homo sapien
cgtgcagtaaggcagactatatctt

SEQ ID NO: 3323560 - DNA, 25 bp, Homo sapien
agatttttttcgctcaaattacagg

SEQ ID NO: 3323561 - DNA, 25 bp, Homo sapien
ctgaatgttccaaggaggtcatgtc

SEQ ID NO: 3323562 - DNA, 25 bp, Homo sapien
ccaaggaggtcatgtcaacagttaa

SEQ ID NO: 3323563 - DNA, 25 bp, Homo sapien
catgtcaacagttaaagactgccat

SEQ ID NO: 3323564 - DNA, 25 bp, Homo sapien
aacagttaaagactgccattttgcc

SEQ ID NO: 3323565 - DNA, 25 bp, Homo sapien
cctttctcataatcagcttccacaa

SEQ ID NO: 3323566 - DNA, 25 bp, Homo sapien
gccaagatcatttgtcattcctttc

SEQ ID NO: 3323567 - DNA, 25 bp, Homo sapien
tttctcataatcagcttccacaacc

SEQ ID NO: 3323568 - DNA, 25 bp, Homo sapien
ctctccaggccaagatcatttgtca

SEQ ID NO: 3323569 - DNA, 25 bp, Homo sapien
gaaaatccttccctgagcactaatt

SEQ ID NO: 3323570 - DNA, 25 bp, Homo sapien
tacagagtgactaagaggaaaagcg

SEQ ID NO: 3323571 - DNA, 25 bp, Homo sapien
tatttccacaggtatatggtctttg

SEQ ID NO: 3323572 - DNA, 25 bp, Homo sapien
tagatagaaagacattgagaccaga

SEQ ID NO: 3323573 - DNA, 25 bp, Homo sapien
gcttcagtgtgggaacacggtctcc

SEQ ID NO: 3323574 - DNA, 25 bp, Homo sapien
gcatagtcagatctactcgttggaa

SEQ ID NO: 3323575 - DNA, 25 bp, Homo sapien
ggaagaggaactccatgagagcaag

SEQ ID NO: 3323576 - DNA, 25 bp, Homo sapien
agggcctactccgaacctcgatgta

SEQ ID NO: 3323577 - DNA, 25 bp, Homo sapien
cacttggctgtacctctggtatcca

SEQ ID NO: 3323578 - DNA, 25 bp, Homo sapien
ggatggtcttctccacacacgtaag

SEQ ID NO: 3323579 - DNA, 25 bp, Homo sapien
ccaccctcaactttgaatactggat

SEQ ID NO: 3323580 - DNA, 25 bp, Homo sapien
gatggctgaaatgttgaccacttgg

SEQ ID NO: 3323581 - DNA, 25 bp, Homo sapien
tagaagatacggtgaggaatgtatt

SEQ ID NO: 3323582 - DNA, 25 bp, Homo sapien
gttagaagatacggtgaggaatgta

SEQ ID NO: 3323583 - DNA, 25 bp, Homo sapien
gattagtgacgttgtaaacaccacc

SEQ ID NO: 3323584 - DNA, 25 bp, Homo sapien
gaagatacggtgaggaatgtattga

SEQ ID NO: 3323585 - DNA, 25 bp, Homo sapien
gaatgtgctcaacattggccactcc

SEQ ID NO: 3323586 - DNA, 25 bp, Homo sapien
gtctcccagaagaattatgttacta

SEQ ID NO: 3323587 - DNA, 25 bp, Homo sapien
tgtattcctcaaggcaccatcatgt

SEQ ID NO: 3323588 - DNA, 25 bp, Homo sapien
ccattcttaagtctccttgggagtc

SEQ ID NO: 3323589 - DNA, 25 bp, Homo sapien
tggatgataaacaccagcttgacga

SEQ ID NO: 3323590 - DNA, 25 bp, Homo sapien
gacgaataacctcctctagtacatc

SEQ ID NO: 3323591 - DNA, 25 bp, Homo sapien
cagcttgacgaataacctcctctag

SEQ ID NO: 3323592 - DNA, 25 bp, Homo sapien
aaacaccagcttgacgaataacctc

SEQ ID NO: 3323593 - DNA, 25 bp, Homo sapien
tgttgttggagcttatcaaagaaat

SEQ ID NO: 3323594 - DNA, 25 bp, Homo sapien
ctatgttgttggagcttatcaaaga

SEQ ID NO: 3323595 - DNA, 25 bp, Homo sapien
tatgttgttggagcttatcaaagaa

SEQ ID NO: 3323596 - DNA, 25 bp, Homo sapien
atgttgttggagcttatcaaagaaa

SEQ ID NO: 3323597 - DNA, 25 bp, Homo sapien
caagcaaaccatgtgatttagtata

SEQ ID NO: 3323598 - DNA, 25 bp, Homo sapien
aagcaaaccatgtgatttagtatac

SEQ ID NO: 3323599 - DNA, 25 bp, Homo sapien
tgaacaagcaaaccatgtgatttag

SEQ ID NO: 3323600 - DNA, 25 bp, Homo sapien
aacaagcaaaccatgtgatttagta

SEQ ID NO: 3323601 - DNA, 25 bp, Homo sapien
acagttgtcaatgctattatgacat

SEQ ID NO: 3323602 - DNA, 25 bp, Homo sapien
agctgacagttgtcaatgctattat

SEQ ID NO: 3323603 - DNA, 25 bp, Homo sapien
ctgacagttgtcaatgctattatga

SEQ ID NO: 3323604 - DNA, 25 bp, Homo sapien
tgacagttgtcaatgctattatgac

SEQ ID NO: 3323605 - DNA, 25 bp, Homo sapien
gaatatgtactgagccagcaccacc

SEQ ID NO: 3323606 - DNA, 25 bp, Homo sapien
ttcctcttcaaggtgaatatgtact

SEQ ID NO: 3323607 - DNA, 25 bp, Homo sapien
accagggcgcacacgctggcgctca

SEQ ID NO: 3323608 - DNA, 25 bp, Homo sapien
tggcgctcactaccgcgcccaccct

SEQ ID NO: 3323609 - DNA, 25 bp, Homo sapien
cttgtgtttcttgcttgatatcacc

SEQ ID NO: 3323610 - DNA, 25 bp, Homo sapien
gtttcttgcttgatatcaccaagca

SEQ ID NO: 3323611 - DNA, 25 bp, Homo sapien
aattcaccatccttgctatttttgt

SEQ ID NO: 3323612 - DNA, 25 bp, Homo sapien
tcatcgtggaagcaattcaccatcc

SEQ ID NO: 3323613 - DNA, 25 bp, Homo sapien
cagataattttactagcatctggtg

SEQ ID NO: 3323614 - DNA, 25 bp, Homo sapien
aagatcagataattttactagcatc

SEQ ID NO: 3323615 - DNA, 25 bp, Homo sapien
gataattttactagcatctggtgcc

SEQ ID NO: 3323616 - DNA, 25 bp, Homo sapien
aattttactagcatctggtgcccca

SEQ ID NO: 3323617 - DNA, 25 bp, Homo sapien
ctgatgccttagataccactgccat

SEQ ID NO: 3323618 - DNA, 25 bp, Homo sapien
acactgatgccttagataccactgc

SEQ ID NO: 3323619 - DNA, 25 bp, Homo sapien
actgatgccttagataccactgcca

SEQ ID NO: 3323620 - DNA, 25 bp, Homo sapien
ccagctccaagcatgcactgtgcac

SEQ ID NO: 3323621 - DNA, 25 bp, Homo sapien
ggcaatgcccttaatctgaagaact

SEQ ID NO: 3323622 - DNA, 25 bp, Homo sapien
agacatgaaggcaagggagctccga

SEQ ID NO: 3323623 - DNA, 25 bp, Homo sapien
taggcctggtaagatggcaatgccc

SEQ ID NO: 3323624 - DNA, 25 bp, Homo sapien
gaactacaggtggaagacatacaga

SEQ ID NO: 3323625 - DNA, 25 bp, Homo sapien
caaagagtagcctttgtgttgttcc

SEQ ID NO: 3323626 - DNA, 25 bp, Homo sapien
catcattcagatgcggaattctatg

SEQ ID NO: 3323627 - DNA, 25 bp, Homo sapien
tcctgaatcttaatgaacttcctca

SEQ ID NO: 3323628 - DNA, 25 bp, Homo sapien
tttcagccctagaagttcactttga

SEQ ID NO: 3323629 - DNA, 25 bp, Homo sapien
gactggttaagagccatcacttggg

SEQ ID NO: 3323630 - DNA, 25 bp, Homo sapien
tgatgatgtaatgaacattctccca

SEQ ID NO: 3323631 - DNA, 25 bp, Homo sapien
tatgatgatgtaatgaacattctcc

SEQ ID NO: 3323632 - DNA, 25 bp, Homo sapien
atgatgatgtaatgaacattctccc

SEQ ID NO: 3323633 - DNA, 25 bp, Homo sapien
gaagtaatgaagtttcaactttgca

SEQ ID NO: 3323634 - DNA, 25 bp, Homo sapien
aatgaagtttcaactttgcactcag

SEQ ID NO: 3323635 - DNA, 25 bp, Homo sapien
gtttcaactttgcactcaggtaatg

SEQ ID NO: 3323636 - DNA, 25 bp, Homo sapien
aatccttataaagaagtaatgaagt

SEQ ID NO: 3323637 - DNA, 25 bp, Homo sapien
ttgtctaggaagatttgatctctgc

SEQ ID NO: 3323638 - DNA, 25 bp, Homo sapien
gatcattgtctaggaagatttgatc

SEQ ID NO: 3323639 - DNA, 25 bp, Homo sapien
cattgtctaggaagatttgatctct

SEQ ID NO: 3323640 - DNA, 25 bp, Homo sapien
tggatcattgtctaggaagatttga

SEQ ID NO: 3323641 - DNA, 25 bp, Homo sapien
cattgcttatagcactcactctgtg

SEQ ID NO: 3323642 - DNA, 25 bp, Homo sapien
acattgcttatagcactcactctgt

SEQ ID NO: 3323643 - DNA, 25 bp, Homo sapien
tacattgcttatagcactcactctg

SEQ ID NO: 3323644 - DNA, 25 bp, Homo sapien
attgcttatagcactcactctgtgg

SEQ ID NO: 3323645 - DNA, 25 bp, Homo sapien
tttgagctctgctgtggatgaaaag

SEQ ID NO: 3323646 - DNA, 25 bp, Homo sapien
gctgtggatgaaaagacaaaccaat

SEQ ID NO: 3323647 - DNA, 25 bp, Homo sapien
tctgctgtggatgaaaagacaaacc

SEQ ID NO: 3323648 - DNA, 25 bp, Homo sapien
agctctgctgtggatgaaaagacaa

SEQ ID NO: 3323649 - DNA, 25 bp, Homo sapien
cacaagagtcacatgacagcagcct

SEQ ID NO: 3323650 - DNA, 25 bp, Homo sapien
tgccaaatccagtatgaagtgagtt

SEQ ID NO: 3323651 - DNA, 25 bp, Homo sapien
aagcagaaaaagcaacgaggtgtct

SEQ ID NO: 3323652 - DNA, 25 bp, Homo sapien
cgaggtgtcttgtcatagcattcca

SEQ ID NO: 3323653 - DNA, 25 bp, Homo sapien
taattcagtgttgttaaaggtgacc

SEQ ID NO: 3323654 - DNA, 25 bp, Homo sapien
tatcttgtggcttaattcagtgttg

SEQ ID NO: 3323655 - DNA, 25 bp, Homo sapien
ataatgtcttgatgtatcttgtggc

SEQ ID NO: 3323656 - DNA, 25 bp, Homo sapien
tgtattaataatgtcttgatgtatc

SEQ ID NO: 3323657 - DNA, 25 bp, Homo sapien
caaagtcagatatttaatgacggtc

SEQ ID NO: 3323658 - DNA, 25 bp, Homo sapien
agtcagatatttaatgacggtcata

SEQ ID NO: 3323659 - DNA, 25 bp, Homo sapien
tcagatatttaatgacggtcatata

SEQ ID NO: 3323660 - DNA, 25 bp, Homo sapien
tatttaatgacggtcatataggtca

SEQ ID NO: 3323661 - DNA, 25 bp, Homo sapien
tctgttcaacatgatgtttgctgtg

SEQ ID NO: 3323662 - DNA, 25 bp, Homo sapien
attgagacgatcatatggcttttgc

SEQ ID NO: 3323663 - DNA, 25 bp, Homo sapien
ggaatggttccagctcttgtctgtt

SEQ ID NO: 3323664 - DNA, 25 bp, Homo sapien
atatttatcatgaaggagtgttgga

SEQ ID NO: 3323665 - DNA, 25 bp, Homo sapien
tactcaagaatgtaacagcagttgc

SEQ ID NO: 3323666 - DNA, 25 bp, Homo sapien
tatccagactgttatgttttccctt

SEQ ID NO: 3323667 - DNA, 25 bp, Homo sapien
ctgtaatgcttgtgtttatccagac

SEQ ID NO: 3323668 - DNA, 25 bp, Homo sapien
cacagtccccatgctaaatctcttt

SEQ ID NO: 3323669 - DNA, 25 bp, Homo sapien
gcgatgaaaagcaaatggcattttc

SEQ ID NO: 3323670 - DNA, 25 bp, Homo sapien
gaaaagcaaatggcattttctgtag

SEQ ID NO: 3323671 - DNA, 25 bp, Homo sapien
aaagcaaatggcattttctgtagca

SEQ ID NO: 3323672 - DNA, 25 bp, Homo sapien
ctgcgatgaaaagcaaatggcattt

SEQ ID NO: 3323673 - DNA, 25 bp, Homo sapien
ttttcacagagatttctttgagtaa

SEQ ID NO: 3323674 - DNA, 25 bp, Homo sapien
tttcacagagatttctttgagtaac

SEQ ID NO: 3323675 - DNA, 25 bp, Homo sapien
tgtttggtgacttgggttgacactg

SEQ ID NO: 3323676 - DNA, 25 bp, Homo sapien
tttggtgacttgggttgacactgag

SEQ ID NO: 3323677 - DNA, 25 bp, Homo sapien
gtttggtgacttgggttgacactga

SEQ ID NO: 3323678 - DNA, 25 bp, Homo sapien
aaagtaagttgcagtgtgtattgtt

SEQ ID NO: 3323679 - DNA, 25 bp, Homo sapien
actttctgtggtaattaaatactga

SEQ ID NO: 3323680 - DNA, 25 bp, Homo sapien
tgactacagactggcattaaagaac

SEQ ID NO: 3323681 - DNA, 25 bp, Homo sapien
ttgtaacagagaagacgtaaatgca

SEQ ID NO: 3323682 - DNA, 25 bp, Homo sapien
tctgacataccttcttcaataccca

SEQ ID NO: 3323683 - DNA, 25 bp, Homo sapien
cattcatctgacataccttcttcaa

SEQ ID NO: 3323684 - DNA, 25 bp, Homo sapien
tgacataccttcttcaatacccaca

SEQ ID NO: 3323685 - DNA, 25 bp, Homo sapien
tatctggcattcatctgacatacct

SEQ ID NO: 3323686 - DNA, 25 bp, Homo sapien
tctattacatgcaaagacgttcata

SEQ ID NO: 3323687 - DNA, 25 bp, Homo sapien
ttacatgcaaagacgttcatagtca

SEQ ID NO: 3323688 - DNA, 25 bp, Homo sapien
tattacatgcaaagacgttcatagt

SEQ ID NO: 3323689 - DNA, 25 bp, Homo sapien
tacatgcaaagacgttcatagtcat

SEQ ID NO: 3323690 - DNA, 25 bp, Homo sapien
tgtacatgtttaacccttctcttga

SEQ ID NO: 3323691 - DNA, 25 bp, Homo sapien
tatactcttaatgttaacagcaatg

SEQ ID NO: 3323692 - DNA, 25 bp, Homo sapien
aatatagatgaagggtgtgactgcc

SEQ ID NO: 3323693 - DNA, 25 bp, Homo sapien
ctgcccatgaagatgttgtacatgt

SEQ ID NO: 3323694 - DNA, 25 bp, Homo sapien
taaggtaagcatctagtgctttccc

SEQ ID NO: 3323695 - DNA, 25 bp, Homo sapien
caaaaccctcttattgcccctccat

SEQ ID NO: 3323696 - DNA, 25 bp, Homo sapien
ctaaggtaagcatctagtgctttcc

SEQ ID NO: 3323697 - DNA, 25 bp, Homo sapien
aggtaagcatctagtgctttcccaa

SEQ ID NO: 3323698 - DNA, 25 bp, Homo sapien
ctcgatgagtaacctggggccctgg

SEQ ID NO: 3323699 - DNA, 25 bp, Homo sapien
tctcgatgagtaacctggggccctg

SEQ ID NO: 3323700 - DNA, 25 bp, Homo sapien
ctgtgaatgacgggggatcaaaacc

SEQ ID NO: 3323701 - DNA, 25 bp, Homo sapien
tgaatgacgggggatcaaaaccagg

SEQ ID NO: 3323702 - DNA, 25 bp, Homo sapien
tgtgaatgacgggggatcaaaacca

SEQ ID NO: 3323703 - DNA, 25 bp, Homo sapien
ggggatcaaaaccaggtcctgtagc

SEQ ID NO: 3323704 - DNA, 25 bp, Homo sapien
gccaccaccaccgctacccagccct

SEQ ID NO: 3323705 - DNA, 25 bp, Homo sapien
ccaccaccaccgctacccagccctg

SEQ ID NO: 3323706 - DNA, 25 bp, Homo sapien
caccaccgctacccagccctggcca

SEQ ID NO: 3323707 - DNA, 25 bp, Homo sapien
taattgcagctacgtataacatccc

SEQ ID NO: 3323708 - DNA, 25 bp, Homo sapien
taacatccccctgatttcaactatc

SEQ ID NO: 3323709 - DNA, 25 bp, Homo sapien
taagctatttatccggttaattgca

SEQ ID NO: 3323710 - DNA, 25 bp, Homo sapien
gcagatagatgtctcttaagctatt

SEQ ID NO: 3323711 - DNA, 25 bp, Homo sapien
tctgagggtgagaccaagcaacctg

SEQ ID NO: 3323712 - DNA, 25 bp, Homo sapien
aagccccatttgcatcacctaggaa

SEQ ID NO: 3323713 - DNA, 25 bp, Homo sapien
cataagccctatagcgatattaagg

SEQ ID NO: 3323714 - DNA, 25 bp, Homo sapien
gttctcagtaatgctctagtccagg

SEQ ID NO: 3323715 - DNA, 25 bp, Homo sapien
gatgtaatttacaagcagatgcttc

SEQ ID NO: 3323716 - DNA, 25 bp, Homo sapien
attacgggcaccgccatcatgcctg

SEQ ID NO: 3323717 - DNA, 25 bp, Homo sapien
tctgaagctgggatgctaataaaaa

SEQ ID NO: 3323718 - DNA, 25 bp, Homo sapien
cttccttttgtgtctgaagctggga

SEQ ID NO: 3323719 - DNA, 25 bp, Homo sapien
gcactgccacagtgttagactaaat

SEQ ID NO: 3323720 - DNA, 25 bp, Homo sapien
gctggccttaatgtccctgggttag

SEQ ID NO: 3323721 - DNA, 25 bp, Homo sapien
taaataggaatacctctctggagga

SEQ ID NO: 3323722 - DNA, 25 bp, Homo sapien
tctggaggaaaatttttcgctggcc

SEQ ID NO: 3323723 - DNA, 25 bp, Homo sapien
gcctgagcggccgaagtcgccacca

SEQ ID NO: 3323724 - DNA, 25 bp, Homo sapien
tgaggccgaagacccgagggaagga

SEQ ID NO: 3323725 - DNA, 25 bp, Homo sapien
cgggcaccgcgtagcacccaagcgc

SEQ ID NO: 3323726 - DNA, 25 bp, Homo sapien
cagaaacccgatccgggcgccttgg

SEQ ID NO: 3323727 - DNA, 25 bp, Homo sapien
gaaattgaggcactgagcggttacc

SEQ ID NO: 3323728 - DNA, 25 bp, Homo sapien
gagtggccttgaacagctcccttgc

SEQ ID NO: 3323729 - DNA, 25 bp, Homo sapien
gatcacatccctggcaagtgctgaa

SEQ ID NO: 3323730 - DNA, 25 bp, Homo sapien
tatgcagtttgagtccggctccagc

SEQ ID NO: 3323731 - DNA, 25 bp, Homo sapien
tgataaagtctccaaagggagcctc

SEQ ID NO: 3323732 - DNA, 25 bp, Homo sapien
ttatgataaagtctccaaagggagc

SEQ ID NO: 3323733 - DNA, 25 bp, Homo sapien
ataaagtctccaaagggagcctcat

SEQ ID NO: 3323734 - DNA, 25 bp, Homo sapien
tatgataaagtctccaaagggagcc

SEQ ID NO: 3323735 - DNA, 25 bp, Homo sapien
ggcaattgtggcgaggagcttaatt

SEQ ID NO: 3323736 - DNA, 25 bp, Homo sapien
attgtggcgaggagcttaattttcc

SEQ ID NO: 3323737 - DNA, 25 bp, Homo sapien
acagggcaattgtggcgaggagctt

SEQ ID NO: 3323738 - DNA, 25 bp, Homo sapien
tggcgaggagcttaattttccatat

SEQ ID NO: 3323739 - DNA, 25 bp, Homo sapien
actgttcaccttttctcatccgatg

SEQ ID NO: 3323740 - DNA, 25 bp, Homo sapien
gcggttgggttattctggttctaga

SEQ ID NO: 3323741 - DNA, 25 bp, Homo sapien
cagtcatgccattgacacgtaattt

SEQ ID NO: 3323742 - DNA, 25 bp, Homo sapien
gtttaacaccggatattaggcactg

SEQ ID NO: 3323743 - DNA, 25 bp, Homo sapien
tataatttgaacacaactgactggc

SEQ ID NO: 3323744 - DNA, 25 bp, Homo sapien
tgttcacggatgtatctccagcaca

SEQ ID NO: 3323745 - DNA, 25 bp, Homo sapien
gaacacaactgactggccaaaacac

SEQ ID NO: 3323746 - DNA, 25 bp, Homo sapien
ctccagcacagagaaatgtgcctgg

SEQ ID NO: 3323747 - DNA, 25 bp, Homo sapien
agccctgcttttgctcaaagagcac

SEQ ID NO: 3323748 - DNA, 25 bp, Homo sapien
ccctgcttttgctcaaagagcacac

SEQ ID NO: 3323749 - DNA, 25 bp, Homo sapien
tcagccctgcttttgctcaaagagc

SEQ ID NO: 3323750 - DNA, 25 bp, Homo sapien
cagccctgcttttgctcaaagagca

SEQ ID NO: 3323751 - DNA, 25 bp, Homo sapien
caatatgtttgtgccccactatcac

SEQ ID NO: 3323752 - DNA, 25 bp, Homo sapien
gttacagtagcaatatgtttgtgcc

SEQ ID NO: 3323753 - DNA, 25 bp, Homo sapien
tatcaccaccacatctactgaacta

SEQ ID NO: 3323754 - DNA, 25 bp, Homo sapien
caccaccacatctactgaactagag

SEQ ID NO: 3323755 - DNA, 25 bp, Homo sapien
cttggctccgctttggcatttttgt

SEQ ID NO: 3323756 - DNA, 25 bp, Homo sapien
ttcatacttgtgtgtcagctccaca

SEQ ID NO: 3323757 - DNA, 25 bp, Homo sapien
cgcctggccgggctactcttttact

SEQ ID NO: 3323758 - DNA, 25 bp, Homo sapien
ccacgcctggccgggctactctttt

SEQ ID NO: 3323759 - DNA, 25 bp, Homo sapien
taagcaaacctgaaaattgaagaca

SEQ ID NO: 3323760 - DNA, 25 bp, Homo sapien
gcccagcctatagctttgattttga

SEQ ID NO: 3323761 - DNA, 25 bp, Homo sapien
tataggacaaaagtctgcatggaaa

SEQ ID NO: 3323762 - DNA, 25 bp, Homo sapien
catacgtttagtgaaatataggaca

SEQ ID NO: 3323763 - DNA, 25 bp, Homo sapien
gaattgtccgtccttctgaaggtca

SEQ ID NO: 3323764 - DNA, 25 bp, Homo sapien
cagggaggtattataacacagataa

SEQ ID NO: 3323765 - DNA, 25 bp, Homo sapien
tccaaaaggagtgggtttgccacat

SEQ ID NO: 3323766 - DNA, 25 bp, Homo sapien
catacaataccgctttccagggagg

SEQ ID NO: 3323767 - DNA, 25 bp, Homo sapien
gcaacaatctgcaggaagaataatc

SEQ ID NO: 3323768 - DNA, 25 bp, Homo sapien
ggagaaggcaacaatctgcaggaag

SEQ ID NO: 3323769 - DNA, 25 bp, Homo sapien
tcggttaggtgaaggagtggagaag

SEQ ID NO: 3323770 - DNA, 25 bp, Homo sapien
cctggatgatcatgattcggttagg

SEQ ID NO: 3323771 - DNA, 25 bp, Homo sapien
tttcttcccatgtccctaacaccca

SEQ ID NO: 3323772 - DNA, 25 bp, Homo sapien
catcagccatgccatctggggtgag

SEQ ID NO: 3323773 - DNA, 25 bp, Homo sapien
tctaatgagcatgtatggatggaca

SEQ ID NO: 3323774 - DNA, 25 bp, Homo sapien
caaaataaattaacactctaatgag

SEQ ID NO: 3323775 - DNA, 25 bp, Homo sapien
tctccacttgagactggctctctgt

SEQ ID NO: 3323776 - DNA, 25 bp, Homo sapien
agcctctcaaacgtgttggcgtaga

SEQ ID NO: 3323777 - DNA, 25 bp, Homo sapien
ccacttgagactggctctctgtggt

SEQ ID NO: 3323778 - DNA, 25 bp, Homo sapien
cgtagagcgtcttctcccaggcaag

SEQ ID NO: 3323779 - DNA, 25 bp, Homo sapien
ttgtgatccagactggggtcaaagt

SEQ ID NO: 3323780 - DNA, 25 bp, Homo sapien
aggtgatatggcacacctcccctgc

SEQ ID NO: 3323781 - DNA, 25 bp, Homo sapien
atttgtccttgtgatccagactggg

SEQ ID NO: 3323782 - DNA, 25 bp, Homo sapien
tcccctgccttcatggctgctatgg

SEQ ID NO: 3323783 - DNA, 25 bp, Homo sapien
tgggagctggcaccggcaccagcat

SEQ ID NO: 3323784 - DNA, 25 bp, Homo sapien
gctgtggtgctgactgcggaccaca

SEQ ID NO: 3323785 - DNA, 25 bp, Homo sapien
caccagcatactctgagccaaaggc

SEQ ID NO: 3323786 - DNA, 25 bp, Homo sapien
caggggtgctaccttcagggtgtgc

SEQ ID NO: 3323787 - DNA, 25 bp, Homo sapien
tagccttatatagtgtagccttgaa

SEQ ID NO: 3323788 - DNA, 25 bp, Homo sapien
tagccttatagtagtagtgtagtag

SEQ ID NO: 3323789 - DNA, 25 bp, Homo sapien
ttcttctgcatacggctaactagtt

SEQ ID NO: 3323790 - DNA, 25 bp, Homo sapien
aatgggaagtgctttccccatggct

SEQ ID NO: 3323791 - DNA, 25 bp, Homo sapien
cactgaaagctctaattcggatccc

SEQ ID NO: 3323792 - DNA, 25 bp, Homo sapien
acctcgcttggtcacttgatgctcc

SEQ ID NO: 3323793 - DNA, 25 bp, Homo sapien
actgaaagctctaattcggatccca

SEQ ID NO: 3323794 - DNA, 25 bp, Homo sapien
gcaggtacctcgcttggtcacttga

SEQ ID NO: 3323795 - DNA, 25 bp, Homo sapien
tgccaacaccatacaatcttcatta

SEQ ID NO: 3323796 - DNA, 25 bp, Homo sapien
gatgccaacaccatacaatcttcat

SEQ ID NO: 3323797 - DNA, 25 bp, Homo sapien
ctgatgccaacaccatacaatcttc

SEQ ID NO: 3323798 - DNA, 25 bp, Homo sapien
tccattggtccactgatgccaacac

SEQ ID NO: 3323799 - DNA, 25 bp, Homo sapien
tgtaggtttttagaccactgtttgc

SEQ ID NO: 3323800 - DNA, 25 bp, Homo sapien
cactgtttgcctgtacgatgttttc

SEQ ID NO: 3323801 - DNA, 25 bp, Homo sapien
cataacacccatgaaaaatgcttgc

SEQ ID NO: 3323802 - DNA, 25 bp, Homo sapien
taactcttccatcacaacgtaattg

SEQ ID NO: 3323803 - DNA, 25 bp, Homo sapien
ggttaaacatgagaataggcctcag

SEQ ID NO: 3323804 - DNA, 25 bp, Homo sapien
ttatagcagcagatgccagacatgc

SEQ ID NO: 3323805 - DNA, 25 bp, Homo sapien
ggacaaatatgggaaacacagtctt

SEQ ID NO: 3323806 - DNA, 25 bp, Homo sapien
taggcctcagcagttatatacagtg

SEQ ID NO: 3323807 - DNA, 25 bp, Homo sapien
gtttatagctgtaatattcttgtca

SEQ ID NO: 3323808 - DNA, 25 bp, Homo sapien
gcatggtacctcatatgtacaacaa

SEQ ID NO: 3323809 - DNA, 25 bp, Homo sapien
aattctgatagtagcatggtacctc

SEQ ID NO: 3323810 - DNA, 25 bp, Homo sapien
ctagatataattctgatagtagcat

SEQ ID NO: 3323811 - DNA, 25 bp, Homo sapien
gctccataccaatgagcccatttct

SEQ ID NO: 3323812 - DNA, 25 bp, Homo sapien
gagtttaaaaggtgttcatctctct

SEQ ID NO: 3323813 - DNA, 25 bp, Homo sapien
tgctccataccaatgagcccatttc

SEQ ID NO: 3323814 - DNA, 25 bp, Homo sapien
agtttaaaaggtgttcatctctctt

SEQ ID NO: 3323815 - DNA, 25 bp, Homo sapien
gagattctcccacctcaacctcccg

SEQ ID NO: 3323816 - DNA, 25 bp, Homo sapien
tagccaggctggtctccaactccta

SEQ ID NO: 3323817 - DNA, 25 bp, Homo sapien
cataacttccgcctctcgggctcaa

SEQ ID NO: 3323818 - DNA, 25 bp, Homo sapien
caggcgttcaccaccacaccaggct

SEQ ID NO: 3323819 - DNA, 25 bp, Homo sapien
ttgagtgctcattaggtcgccgggc

SEQ ID NO: 3323820 - DNA, 25 bp, Homo sapien
cttaagtttacaagcatgcgcggac

SEQ ID NO: 3323821 - DNA, 25 bp, Homo sapien
gagaaccgtcagtttgagccagatg

SEQ ID NO: 3323822 - DNA, 25 bp, Homo sapien
tctttgggacctgtcagccgtggca

SEQ ID NO: 3323823 - DNA, 25 bp, Homo sapien
aaaataggttgtatgtccagctggc

SEQ ID NO: 3323824 - DNA, 25 bp, Homo sapien
tcttaaggattgagcaaactgcagg

SEQ ID NO: 3323825 - DNA, 25 bp, Homo sapien
catgagtgtagtaaagggtaccgca

SEQ ID NO: 3323826 - DNA, 25 bp, Homo sapien
ggtggcactcttacatcatggtcgg

SEQ ID NO: 3323827 - DNA, 25 bp, Homo sapien
aggctgagactttggtataaacacc

SEQ ID NO: 3323828 - DNA, 25 bp, Homo sapien
cgcgtttgtgttcatggaggtttcc

SEQ ID NO: 3323829 - DNA, 25 bp, Homo sapien
tctccgggccgttcacacatgagtg

SEQ ID NO: 3323830 - DNA, 25 bp, Homo sapien
ctttttatccaaggtacaaaggctg

SEQ ID NO: 3323831 - DNA, 25 bp, Homo sapien
ctgagcatgtaatagttatgaaaat

SEQ ID NO: 3323832 - DNA, 25 bp, Homo sapien
tgattagtggcattccagataacca

SEQ ID NO: 3323833 - DNA, 25 bp, Homo sapien
ctactcagaccaaacatctgattag

SEQ ID NO: 3323834 - DNA, 25 bp, Homo sapien
agataaccatcgcaacatttaacag

SEQ ID NO: 3323835 - DNA, 25 bp, Homo sapien
aacaggctggcaaaacatggctgct

SEQ ID NO: 3323836 - DNA, 25 bp, Homo sapien
tgtcataatcactgcggtcgggtcg

SEQ ID NO: 3323837 - DNA, 25 bp, Homo sapien
tggctgctgaatctggcacattgct

SEQ ID NO: 3323838 - DNA, 25 bp, Homo sapien
gatactcccgatgaatcacaatctg

SEQ ID NO: 3323839 - DNA, 25 bp, Homo sapien
tacaatcgacttcactcttgcaagg

SEQ ID NO: 3323840 - DNA, 25 bp, Homo sapien
tgcaaggtggacttaaactacttcc

SEQ ID NO: 3323841 - DNA, 25 bp, Homo sapien
gtaatctgttctccaagaaggagca

SEQ ID NO: 3323842 - DNA, 25 bp, Homo sapien
tgatcctctactgcaaacccattgt

SEQ ID NO: 3323843 - DNA, 25 bp, Homo sapien
tacttttcctcgtttttaagcatca

SEQ ID NO: 3323844 - DNA, 25 bp, Homo sapien
cttttcctcgtttttaagcatcact

SEQ ID NO: 3323845 - DNA, 25 bp, Homo sapien
tatattaggcatctgacacactgtg

SEQ ID NO: 3323846 - DNA, 25 bp, Homo sapien
ttcttgaacaagtccactttggagt

SEQ ID NO: 3323847 - DNA, 25 bp, Homo sapien
gagctctgctctaccatatactatg

SEQ ID NO: 3323848 - DNA, 25 bp, Homo sapien
aaggctatgttcctaagagctctgc

SEQ ID NO: 3323849 - DNA, 25 bp, Homo sapien
gccggagggaaacctgccaaggcca

SEQ ID NO: 3323850 - DNA, 25 bp, Homo sapien
agctactcaggagcgtagccccgca

SEQ ID NO: 3323851 - DNA, 25 bp, Homo sapien
catgggatgacttcagccggaggga

SEQ ID NO: 3323852 - DNA, 25 bp, Homo sapien
agcgtagccccgcagaggagcctgc

SEQ ID NO: 3323853 - DNA, 25 bp, Homo sapien
gacggtgcagtaatctcaagccaca

SEQ ID NO: 3323854 - DNA, 25 bp, Homo sapien
accaatgatccgcttctgccgacgg

SEQ ID NO: 3323855 - DNA, 25 bp, Homo sapien
tctgccgacggtgcagtaatctcaa

SEQ ID NO: 3323856 - DNA, 25 bp, Homo sapien
tccgcttctgccgacggtgcagtaa

SEQ ID NO: 3323857 - DNA, 25 bp, Homo sapien
tcctgtgcacttcacattatccaca

SEQ ID NO: 3323858 - DNA, 25 bp, Homo sapien
actgtggcggcagttgtgtcttcca

SEQ ID NO: 3323859 - DNA, 25 bp, Homo sapien
tctcatttcctgtgcacttcacatt

SEQ ID NO: 3323860 - DNA, 25 bp, Homo sapien
ccacatggatgggtccttttccttc

SEQ ID NO: 3323861 - DNA, 25 bp, Homo sapien
tcagtcatatatctgaataaatcac

SEQ ID NO: 3323862 - DNA, 25 bp, Homo sapien
ggcacatcaaaaaatcatgatagtc

SEQ ID NO: 3323863 - DNA, 25 bp, Homo sapien
attacatcacttgcctctaatttag

SEQ ID NO: 3323864 - DNA, 25 bp, Homo sapien
aatcatgtgaagaatcagtcagtca

SEQ ID NO: 3323865 - DNA, 25 bp, Homo sapien
taacgccatatttagaactcaattt

SEQ ID NO: 3323866 - DNA, 25 bp, Homo sapien
cagatgaattattggaaaactatcc

SEQ ID NO: 3323867 - DNA, 25 bp, Homo sapien
taaagtggacatagagggtataaac

SEQ ID NO: 3323868 - DNA, 25 bp, Homo sapien
tatttcaaactaacgccatatttag

SEQ ID NO: 3323869 - DNA, 25 bp, Homo sapien
gacctctttgactattcctgtgcca

SEQ ID NO: 3323870 - DNA, 25 bp, Homo sapien
tatcatgctatatgtgcacaagcca

SEQ ID NO: 3323871 - DNA, 25 bp, Homo sapien
taaagtagttgtcccaataacctgc

SEQ ID NO: 3323872 - DNA, 25 bp, Homo sapien
cacattcaggattgcggtacatctc

SEQ ID NO: 3323873 - DNA, 25 bp, Homo sapien
ggaaaggcttctcactggtttactg

SEQ ID NO: 3323874 - DNA, 25 bp, Homo sapien
tctttaaactggatgtcaagtgctc

SEQ ID NO: 3323875 - DNA, 25 bp, Homo sapien
gactctgccatccatagaaaaaagg

SEQ ID NO: 3323876 - DNA, 25 bp, Homo sapien
tacacaggctgtaagtgaatcaatt

SEQ ID NO: 3323877 - DNA, 25 bp, Homo sapien
tccattcatttaggctgtttccaca

SEQ ID NO: 3323878 - DNA, 25 bp, Homo sapien
tcatccattcatttaggctgtttcc

SEQ ID NO: 3323879 - DNA, 25 bp, Homo sapien
cttcatccattcatttaggctgttt

SEQ ID NO: 3323880 - DNA, 25 bp, Homo sapien
catccattcatttaggctgtttcca

SEQ ID NO: 3323881 - DNA, 25 bp, Homo sapien
tgtactgggaatgtaatgcaagaac

SEQ ID NO: 3323882 - DNA, 25 bp, Homo sapien
gattaattggctgtaggacaactgg

SEQ ID NO: 3323883 - DNA, 25 bp, Homo sapien
gaagtagtatcgagtaaccagaaac

SEQ ID NO: 3323884 - DNA, 25 bp, Homo sapien
gcaactgggtccaaaactgagccat

SEQ ID NO: 3323885 - DNA, 25 bp, Homo sapien
cctgagggaagcttatctaatgcat

SEQ ID NO: 3323886 - DNA, 25 bp, Homo sapien
tcattcatgacatatgcagagccag

SEQ ID NO: 3323887 - DNA, 25 bp, Homo sapien
tctaaccaacaggagatgatctgcc

SEQ ID NO: 3323888 - DNA, 25 bp, Homo sapien
tcttattgtaactcacgcctgaggg

SEQ ID NO: 3323889 - DNA, 25 bp, Homo sapien
tgataaaaacctccactcgtccttc

SEQ ID NO: 3323890 - DNA, 25 bp, Homo sapien
tgtagccaagctgacgacagatcac

SEQ ID NO: 3323891 - DNA, 25 bp, Homo sapien
gatcacagctgcatccttatcagtc

SEQ ID NO: 3323892 - DNA, 25 bp, Homo sapien
tagccaagctgacgacagatcacag

SEQ ID NO: 3323893 - DNA, 25 bp, Homo sapien
taatgttggcgcacagactcaaaag

SEQ ID NO: 3323894 - DNA, 25 bp, Homo sapien
tttcataatgttggcgcacagactc

SEQ ID NO: 3323895 - DNA, 25 bp, Homo sapien
atttcataatgttggcgcacagact

SEQ ID NO: 3323896 - DNA, 25 bp, Homo sapien
tggcgcacagactcaaaagattatt

SEQ ID NO: 3323897 - DNA, 25 bp, Homo sapien
cttcatattcaaggccagtggttag

SEQ ID NO: 3323898 - DNA, 25 bp, Homo sapien
gaggtgcaatggctactgaatgatg

SEQ ID NO: 3323899 - DNA, 25 bp, Homo sapien
caaggccagtggttagaggtgcaat

SEQ ID NO: 3323900 - DNA, 25 bp, Homo sapien
gtgcaatggctactgaatgatggaa

SEQ ID NO: 3323901 - DNA, 25 bp, Homo sapien
aatggttggcagatgcttgtttacc

SEQ ID NO: 3323902 - DNA, 25 bp, Homo sapien
gcagctgacgtcatccaaccatatg

SEQ ID NO: 3323903 - DNA, 25 bp, Homo sapien
ccccactgtcgcctggaacactgaa

SEQ ID NO: 3323904 - DNA, 25 bp, Homo sapien
aacatcttcgcggtggctgcagtca

SEQ ID NO: 3323905 - DNA, 25 bp, Homo sapien
tctgtaatatacctccaagcgaccc

SEQ ID NO: 3323906 - DNA, 25 bp, Homo sapien
aaatcccaattgtcgacaaaccacg

SEQ ID NO: 3323907 - DNA, 25 bp, Homo sapien
tttcccacctgcaagtctgatgacc

SEQ ID NO: 3323908 - DNA, 25 bp, Homo sapien
caaaccacgtatgtattcagctcag

SEQ ID NO: 3323909 - DNA, 25 bp, Homo sapien
caggagctctttggacactgctcaa

SEQ ID NO: 3323910 - DNA, 25 bp, Homo sapien
tcatccaacataactgggccagacc

SEQ ID NO: 3323911 - DNA, 25 bp, Homo sapien
aaagctcattcccagtgcagcgtac

SEQ ID NO: 3323912 - DNA, 25 bp, Homo sapien
ggacactgctcaattgaaagctcat

SEQ ID NO: 3323913 - DNA, 25 bp, Homo sapien
tctgcatcggcatcatcccattggt

SEQ ID NO: 3323914 - DNA, 25 bp, Homo sapien
tcccattggtcatcacaaacggttc

SEQ ID NO: 3323915 - DNA, 25 bp, Homo sapien
gccagcatggtagagctccacccgg

SEQ ID NO: 3323916 - DNA, 25 bp, Homo sapien
tgcctccagcaaggcgaatgatggg

SEQ ID NO: 3323917 - DNA, 25 bp, Homo sapien
gggaaaagctacacgtgacagcagc

SEQ ID NO: 3323918 - DNA, 25 bp, Homo sapien
catgggaaaagctacacgtgacagc

SEQ ID NO: 3323919 - DNA, 25 bp, Homo sapien
tgggaaaagctacacgtgacagcag

SEQ ID NO: 3323920 - DNA, 25 bp, Homo sapien
ggaaaagctacacgtgacagcagct

SEQ ID NO: 3323921 - DNA, 25 bp, Homo sapien
tttcttcatctcctcggcaacggac

SEQ ID NO: 3323922 - DNA, 25 bp, Homo sapien
ctttttcacaaagcagtatattttc

SEQ ID NO: 3323923 - DNA, 25 bp, Homo sapien
ataaatgggaataaggcccagtcca

SEQ ID NO: 3323924 - DNA, 25 bp, Homo sapien
atctcctcggcaacggacattgctc

SEQ ID NO: 3323925 - DNA, 25 bp, Homo sapien
cacttgcatatacttccactgtgcc

SEQ ID NO: 3323926 - DNA, 25 bp, Homo sapien
gtgccccaaactccacttgcatata

SEQ ID NO: 3323927 - DNA, 25 bp, Homo sapien
catttttgccgccacgaagtcgtac

SEQ ID NO: 3323928 - DNA, 25 bp, Homo sapien
gcagctggtgacaaatgactgatgc

SEQ ID NO: 3323929 - DNA, 25 bp, Homo sapien
gaatctcaattcaggaaacccttgc

SEQ ID NO: 3323930 - DNA, 25 bp, Homo sapien
cagaggtcaacagctaaattaaggc

SEQ ID NO: 3323931 - DNA, 25 bp, Homo sapien
taaagcgatgacttcattcccgagg

SEQ ID NO: 3323932 - DNA, 25 bp, Homo sapien
gatgatacttaccatactgagctgg

SEQ ID NO: 3323933 - DNA, 25 bp, Homo sapien
gacaaaagttgtggcgctgtcctcg

SEQ ID NO: 3323934 - DNA, 25 bp, Homo sapien
aagtccgtcacgctgacccatggct

SEQ ID NO: 3323935 - DNA, 25 bp, Homo sapien
tgccacgggcgtctccgtagaaaca

SEQ ID NO: 3323936 - DNA, 25 bp, Homo sapien
gtagaaacaccagggtctgcccgcg

SEQ ID NO: 3323937 - DNA, 25 bp, Homo sapien
gggcgcgggaagcgcgggagaggcg

SEQ ID NO: 3323938 - DNA, 25 bp, Homo sapien
taacatcagggctagcacgaagcgg

SEQ ID NO: 3323939 - DNA, 25 bp, Homo sapien
gggagcgcccctaacatcagggcta

SEQ ID NO: 3323940 - DNA, 25 bp, Homo sapien
tggagggaatcattgaggacagaat

SEQ ID NO: 3323941 - DNA, 25 bp, Homo sapien
gacagaatcaaagccgaccacttcg

SEQ ID NO: 3323942 - DNA, 25 bp, Homo sapien
gggctgccgcgtccctcgaatcccc

SEQ ID NO: 3323943 - DNA, 25 bp, Homo sapien
gtctggtccatgctccccagcttct

SEQ ID NO: 3323944 - DNA, 25 bp, Homo sapien
agcttctcgggcttggagcggagaa

SEQ ID NO: 3323945 - DNA, 25 bp, Homo sapien
gccgctggtgccctgccgcgcctcg

SEQ ID NO: 3323946 - DNA, 25 bp, Homo sapien
aggtagcggcgcaggcacgagcccg

SEQ ID NO: 3323947 - DNA, 25 bp, Homo sapien
tgagccccaggtagcggcgcaggca

SEQ ID NO: 3323948 - DNA, 25 bp, Homo sapien
gagccccaggtagcggcgcaggcac

SEQ ID NO: 3323949 - DNA, 25 bp, Homo sapien
gcgcaggcacgagcccgggaactct

SEQ ID NO: 3323950 - DNA, 25 bp, Homo sapien
tttgggacccaagaattcaactctc

SEQ ID NO: 3323951 - DNA, 25 bp, Homo sapien
cagaacaacaactggaaacctaggg

SEQ ID NO: 3323952 - DNA, 25 bp, Homo sapien
tctggtagtgcctagatccagaaca

SEQ ID NO: 3323953 - DNA, 25 bp, Homo sapien
acacagccctgttctggtagtgcct

SEQ ID NO: 3323954 - DNA, 25 bp, Homo sapien
ttccgctttaagattgatggcagtc

SEQ ID NO: 3323955 - DNA, 25 bp, Homo sapien
ccgctttaagattgatggcagtcat

SEQ ID NO: 3323956 - DNA, 25 bp, Homo sapien
cagcaatttccgctttaagattgat

SEQ ID NO: 3323957 - DNA, 25 bp, Homo sapien
aatttccgctttaagattgatggca

SEQ ID NO: 3323958 - DNA, 25 bp, Homo sapien
catttcagtggtaattttttctgca

SEQ ID NO: 3323959 - DNA, 25 bp, Homo sapien
tctcagccatttttcctcctgaatg

SEQ ID NO: 3323960 - DNA, 25 bp, Homo sapien
tcttcccacacccatttcagtggta

SEQ ID NO: 3323961 - DNA, 25 bp, Homo sapien
ttcctcctgaatgctctttgtctct

SEQ ID NO: 3323962 - DNA, 25 bp, Homo sapien
taagcctgaagttctcccacttcct

SEQ ID NO: 3323963 - DNA, 25 bp, Homo sapien
gttcagttctggaaatgccattata

SEQ ID NO: 3323964 - DNA, 25 bp, Homo sapien
gagtcaactactcatcttgcctagg

SEQ ID NO: 3323965 - DNA, 25 bp, Homo sapien
ctcctgttggtagactcaagataaa

SEQ ID NO: 3323966 - DNA, 25 bp, Homo sapien
tcatgctgtactatctttgctctcc

SEQ ID NO: 3323967 - DNA, 25 bp, Homo sapien
catgacatcgaccaggaatcttgta

SEQ ID NO: 3323968 - DNA, 25 bp, Homo sapien
agcatgacatcgaccaggaatcttg

SEQ ID NO: 3323969 - DNA, 25 bp, Homo sapien
aaagcatgacatcgaccaggaatct

SEQ ID NO: 3323970 - DNA, 25 bp, Homo sapien
gcatgacatcgaccaggaatcttgt

SEQ ID NO: 3323971 - DNA, 25 bp, Homo sapien
ggtctctatagtggcatctccaaca

SEQ ID NO: 3323972 - DNA, 25 bp, Homo sapien
ctcagtggtatcatctgactcagct

SEQ ID NO: 3323973 - DNA, 25 bp, Homo sapien
tctggattgctaagaccagggtctc

SEQ ID NO: 3323974 - DNA, 25 bp, Homo sapien
catgcccctcagtggtatcatctga

SEQ ID NO: 3323975 - DNA, 25 bp, Homo sapien
gcaaagatgagaggatgggccctgc

SEQ ID NO: 3323976 - DNA, 25 bp, Homo sapien
catccgcagtgcgtggtctggcatc

SEQ ID NO: 3323977 - DNA, 25 bp, Homo sapien
agatgagaggatgggccctgcagag

SEQ ID NO: 3323978 - DNA, 25 bp, Homo sapien
gtagtgatgtcttccctttgatggg

SEQ ID NO: 3323979 - DNA, 25 bp, Homo sapien
tccctgtcacagtcagtttggggac

SEQ ID NO: 3323980 - DNA, 25 bp, Homo sapien
ttctcctttgtgactcccctgccat

SEQ ID NO: 3323981 - DNA, 25 bp, Homo sapien
tcacagtcagtttggggactgatcc

SEQ ID NO: 3323982 - DNA, 25 bp, Homo sapien
agtcagtttggggactgatcctcca

SEQ ID NO: 3323983 - DNA, 25 bp, Homo sapien
tctttggcgctacagcttgcgcatt

SEQ ID NO: 3323984 - DNA, 25 bp, Homo sapien
tttggcgctacagcttgcgcattcg

SEQ ID NO: 3323985 - DNA, 25 bp, Homo sapien
ggcgctacagcttgcgcattcgctt

SEQ ID NO: 3323986 - DNA, 25 bp, Homo sapien
cttctttggcgctacagcttgcgca

SEQ ID NO: 3323987 - DNA, 25 bp, Homo sapien
cacttgttctggttgtagaggcggt

SEQ ID NO: 3323988 - DNA, 25 bp, Homo sapien
tggaccattgcccagctacgtgaat

SEQ ID NO: 3323989 - DNA, 25 bp, Homo sapien
attgttcctggccatctaataggca

SEQ ID NO: 3323990 - DNA, 25 bp, Homo sapien
gattatgtccgcttttggcctacaa

SEQ ID NO: 3323991 - DNA, 25 bp, Homo sapien
cattgcctcctctgaaagtgggaga

SEQ ID NO: 3323992 - DNA, 25 bp, Homo sapien
ggtgagtactcaccaacagttggta

SEQ ID NO: 3323993 - DNA, 25 bp, Homo sapien
gcttacaggctgcatggcacatctt

SEQ ID NO: 3323994 - DNA, 25 bp, Homo sapien
gaagctgaagaatcccattgcctcc

SEQ ID NO: 3323995 - DNA, 25 bp, Homo sapien
tggacagacaccagcttggatttaa

SEQ ID NO: 3323996 - DNA, 25 bp, Homo sapien
tgagaaatttagtggacttcgtaag

SEQ ID NO: 3323997 - DNA, 25 bp, Homo sapien
cttcgtaagttgagacttcctaagg

SEQ ID NO: 3323998 - DNA, 25 bp, Homo sapien
ggatttaatatttcattccgaggca

SEQ ID NO: 3323999 - DNA, 25 bp, Homo sapien
gttttgtctcaggcttgtggcaccc

SEQ ID NO: 3324000 - DNA, 25 bp, Homo sapien
ttttgtctcaggcttgtggcacccc

SEQ ID NO: 3324001 - DNA, 25 bp, Homo sapien
tgttttgtctcaggcttgtggcacc

SEQ ID NO: 3324002 - DNA, 25 bp, Homo sapien
gactctcaatgagattttgtatgtg

SEQ ID NO: 3324003 - DNA, 25 bp, Homo sapien
agctgatgagcatgtacattccaaa

SEQ ID NO: 3324004 - DNA, 25 bp, Homo sapien
ggtatctggttcatctagtaaatca

SEQ ID NO: 3324005 - DNA, 25 bp, Homo sapien
ggtggtatctggttcatctagtaaa

SEQ ID NO: 3324006 - DNA, 25 bp, Homo sapien
tccggtggtatctggttcatctagt

SEQ ID NO: 3324007 - DNA, 25 bp, Homo sapien
catgatttggcctagggcttggcaa

SEQ ID NO: 3324008 - DNA, 25 bp, Homo sapien
tacaacacggctatgtccacatgca

SEQ ID NO: 3324009 - DNA, 25 bp, Homo sapien
tgaaacccacggctagactcaagtt

SEQ ID NO: 3324010 - DNA, 25 bp, Homo sapien
tattaccgtcacctctcccagtggt

SEQ ID NO: 3324011 - DNA, 25 bp, Homo sapien
atacggctgtgccacatacgtgcat

SEQ ID NO: 3324012 - DNA, 25 bp, Homo sapien
tagggctgtgccacatacggctgtg

SEQ ID NO: 3324013 - DNA, 25 bp, Homo sapien
ggctgtgccacatacggctgtgcca

SEQ ID NO: 3324014 - DNA, 25 bp, Homo sapien
tgccacatacggctgtgccacatac

SEQ ID NO: 3324015 - DNA, 25 bp, Homo sapien
atgctttcatcgcagtcagtttcaa

SEQ ID NO: 3324016 - DNA, 25 bp, Homo sapien
acatgctttcatcgcagtcagtttc

SEQ ID NO: 3324017 - DNA, 25 bp, Homo sapien
ttacatgctttcatcgcagtcagtt

SEQ ID NO: 3324018 - DNA, 25 bp, Homo sapien
tgctttcatcgcagtcagtttcaaa

SEQ ID NO: 3324019 - DNA, 25 bp, Homo sapien
gaccaaatgctaagaatgtctttgt

SEQ ID NO: 3324020 - DNA, 25 bp, Homo sapien
tgtctttgttatgtgaaacagattc

SEQ ID NO: 3324021 - DNA, 25 bp, Homo sapien
gatgaccaatgctaagaccaaatgc

SEQ ID NO: 3324022 - DNA, 25 bp, Homo sapien
gaactgtctccttgaaagctggatg

SEQ ID NO: 3324023 - DNA, 25 bp, Homo sapien
gaaaagcagcatttcacggccaaga

SEQ ID NO: 3324024 - DNA, 25 bp, Homo sapien
tgtctactcggtgatgaaaagcagc

SEQ ID NO: 3324025 - DNA, 25 bp, Homo sapien
cagtctgtctatggtaatagcccag

SEQ ID NO: 3324026 - DNA, 25 bp, Homo sapien
tgaactttgccacgtctgcttcctg

SEQ ID NO: 3324027 - DNA, 25 bp, Homo sapien
cagtgcagtatcgtgaaagtttgtt

SEQ ID NO: 3324028 - DNA, 25 bp, Homo sapien
ggccagtgcagtatcgtgaaagttt

SEQ ID NO: 3324029 - DNA, 25 bp, Homo sapien
cccttcgttacggcaggtgccgtgt

SEQ ID NO: 3324030 - DNA, 25 bp, Homo sapien
tgcagtatcgtgaaagtttgttttc

SEQ ID NO: 3324031 - DNA, 25 bp, Homo sapien
agagtaggaggaacccctggtgctt

SEQ ID NO: 3324032 - DNA, 25 bp, Homo sapien
aagagagtaggaggaacccctggtg

SEQ ID NO: 3324033 - DNA, 25 bp, Homo sapien
cctttacaaagtcatgggagctgcg

SEQ ID NO: 3324034 - DNA, 25 bp, Homo sapien
ctgcagggtgcatgccctttacaaa

SEQ ID NO: 3324035 - DNA, 25 bp, Homo sapien
cttgtgcattgggatgatgcttgtg

SEQ ID NO: 3324036 - DNA, 25 bp, Homo sapien
atttccagctccgattcttcaaggg

SEQ ID NO: 3324037 - DNA, 25 bp, Homo sapien
tgttcttggggcatgaattctcttg

SEQ ID NO: 3324038 - DNA, 25 bp, Homo sapien
ctgggccgattgctgcaggtgttcc

SEQ ID NO: 3324039 - DNA, 25 bp, Homo sapien
ctgtggtgtcaaaatgcaagagata

SEQ ID NO: 3324040 - DNA, 25 bp, Homo sapien
tgcaagagatatgcggcagcagagg

SEQ ID NO: 3324041 - DNA, 25 bp, Homo sapien
tgggaggtttcatctgctcgaagct

SEQ ID NO: 3324042 - DNA, 25 bp, Homo sapien
gtggtgtcaaaatgcaagagatatg

SEQ ID NO: 3324043 - DNA, 25 bp, Homo sapien
cgtgaaccgcagcagcagcagccag

SEQ ID NO: 3324044 - DNA, 25 bp, Homo sapien
aaccgcagcagcagcagccaggcca

SEQ ID NO: 3324045 - DNA, 25 bp, Homo sapien
tgaaccgcagcagcagcagccaggc

SEQ ID NO: 3324046 - DNA, 25 bp, Homo sapien
accgcagcagcagcagccaggccat

SEQ ID NO: 3324047 - DNA, 25 bp, Homo sapien
taggcccaagaaattatagaagtat

SEQ ID NO: 3324048 - DNA, 25 bp, Homo sapien
gacactacctagagttagcgcagaa

SEQ ID NO: 3324049 - DNA, 25 bp, Homo sapien
gaccaaatgtgtgtgcagagtttct

SEQ ID NO: 3324050 - DNA, 25 bp, Homo sapien
caactctctggataccaaccgcgta

SEQ ID NO: 3324051 - DNA, 25 bp, Homo sapien
ttagctcaactcgagccatttcctg

SEQ ID NO: 3324052 - DNA, 25 bp, Homo sapien
caaggagctggttattgggctgtcc

SEQ ID NO: 3324053 - DNA, 25 bp, Homo sapien
ctgattgcttcatcagcaaggagct

SEQ ID NO: 3324054 - DNA, 25 bp, Homo sapien
aaatgaggtgaaggagttttcctgc

SEQ ID NO: 3324055 - DNA, 25 bp, Homo sapien
tcacgacatactgccgctgcacgac

SEQ ID NO: 3324056 - DNA, 25 bp, Homo sapien
gccgctgcacgaccatggccagcgt

SEQ ID NO: 3324057 - DNA, 25 bp, Homo sapien
acttgagtgtcactaccagtatttt

SEQ ID NO: 3324058 - DNA, 25 bp, Homo sapien
tatgtcatgtcacgacatactgccg

SEQ ID NO: 3324059 - DNA, 25 bp, Homo sapien
ctttgacttgagaacagcctctgca

SEQ ID NO: 3324060 - DNA, 25 bp, Homo sapien
tggtggcatgaacaggcccagcttt

SEQ ID NO: 3324061 - DNA, 25 bp, Homo sapien
gaacaggcccagctttgacttgaga

SEQ ID NO: 3324062 - DNA, 25 bp, Homo sapien
gcttcctggtggcatgaacaggccc

SEQ ID NO: 3324063 - DNA, 25 bp, Homo sapien
ctagcgtttgctgctttgcatcctc

SEQ ID NO: 3324064 - DNA, 25 bp, Homo sapien
cctttccaggcctagcgtttgctgc

SEQ ID NO: 3324065 - DNA, 25 bp, Homo sapien
tccaggcctagcgtttgctgctttg

SEQ ID NO: 3324066 - DNA, 25 bp, Homo sapien
caggcctagcgtttgctgctttgca

SEQ ID NO: 3324067 - DNA, 25 bp, Homo sapien
ccaaatcgtcctgaagtcggcctct

SEQ ID NO: 3324068 - DNA, 25 bp, Homo sapien
cggcctccggttggtgggctcctct

SEQ ID NO: 3324069 - DNA, 25 bp, Homo sapien
caggccagctcctgccctctgatgg

SEQ ID NO: 3324070 - DNA, 25 bp, Homo sapien
cctccggttggtgggctcctctagg

SEQ ID NO: 3324071 - DNA, 25 bp, Homo sapien
tcatggcaactttttggcacagtga

SEQ ID NO: 3324072 - DNA, 25 bp, Homo sapien
tttttggcacagtgaaaaatatcgc

SEQ ID NO: 3324073 - DNA, 25 bp, Homo sapien
ggcacagtgaaaaatatcgcccatg

SEQ ID NO: 3324074 - DNA, 25 bp, Homo sapien
catggcaactttttggcacagtgaa

SEQ ID NO: 3324075 - DNA, 25 bp, Homo sapien
caattcatggtacatacaggggctc

SEQ ID NO: 3324076 - DNA, 25 bp, Homo sapien
ggtcccacaattcatggtacataca

SEQ ID NO: 3324077 - DNA, 25 bp, Homo sapien
aaggtcccacaattcatggtacata

SEQ ID NO: 3324078 - DNA, 25 bp, Homo sapien
cccacaattcatggtacatacaggg

SEQ ID NO: 3324079 - DNA, 25 bp, Homo sapien
gtcctgggatcttctttggggtcgc

SEQ ID NO: 3324080 - DNA, 25 bp, Homo sapien
tcctgggatcttctttggggtcgcc

SEQ ID NO: 3324081 - DNA, 25 bp, Homo sapien
atcttctttggggtcgcccacctgc

SEQ ID NO: 3324082 - DNA, 25 bp, Homo sapien
tgggatcttctttggggtcgcccac

SEQ ID NO: 3324083 - DNA, 25 bp, Homo sapien
cagcctctgggaaccatgcagcggc

SEQ ID NO: 3324084 - DNA, 25 bp, Homo sapien
ccagtccagcctctgggaaccatgc

SEQ ID NO: 3324085 - DNA, 25 bp, Homo sapien
tgggaaccatgcagcggctcccagt

SEQ ID NO: 3324086 - DNA, 25 bp, Homo sapien
ggctcccagtggccctgcacccacc

SEQ ID NO: 3324087 - DNA, 25 bp, Homo sapien
ccagggcagcgtcaagagtctgagc

SEQ ID NO: 3324088 - DNA, 25 bp, Homo sapien
gccagggcagcgtcaagagtctgag

SEQ ID NO: 3324089 - DNA, 25 bp, Homo sapien
ggaagatgtgtgcatagtgggcctg

SEQ ID NO: 3324090 - DNA, 25 bp, Homo sapien
agatgtgtgcatagtgggcctggtg

SEQ ID NO: 3324091 - DNA, 25 bp, Homo sapien
gaagatgtgtgcatagtgggcctgg

SEQ ID NO: 3324092 - DNA, 25 bp, Homo sapien
ggggaagatgtgtgcatagtgggcc

SEQ ID NO: 3324093 - DNA, 25 bp, Homo sapien
tcggtctccggttccctgagcctgt

SEQ ID NO: 3324094 - DNA, 25 bp, Homo sapien
ctgagcctgtcctcggcttctccac

SEQ ID NO: 3324095 - DNA, 25 bp, Homo sapien
ggttccctgagcctgtcctcggctt

SEQ ID NO: 3324096 - DNA, 25 bp, Homo sapien
ctccggttccctgagcctgtcctcg

SEQ ID NO: 3324097 - DNA, 25 bp, Homo sapien
gtcctccagtgtgggatccatgtcc

SEQ ID NO: 3324098 - DNA, 25 bp, Homo sapien
tccagtgtgggatccatgtccgtgg

SEQ ID NO: 3324099 - DNA, 25 bp, Homo sapien
tgtgggatccatgtccgtggggttc

SEQ ID NO: 3324100 - DNA, 25 bp, Homo sapien
tgggatccatgtccgtggggttccc

SEQ ID NO: 3324101 - DNA, 25 bp, Homo sapien
gaggagcctggtagctccaggtcgc

SEQ ID NO: 3324102 - DNA, 25 bp, Homo sapien
gagcctggtagctccaggtcgccca

SEQ ID NO: 3324103 - DNA, 25 bp, Homo sapien
cctgatgactgaggagcctggtagc

SEQ ID NO: 3324104 - DNA, 25 bp, Homo sapien
agcctggtagctccaggtcgcccac

SEQ ID NO: 3324105 - DNA, 25 bp, Homo sapien
tcaggtcttttgcaccagaaggtgg

SEQ ID NO: 3324106 - DNA, 25 bp, Homo sapien
aggtcttttgcaccagaaggtggca

SEQ ID NO: 3324107 - DNA, 25 bp, Homo sapien
gaaacaggtcgccttggaaggtgtc

SEQ ID NO: 3324108 - DNA, 25 bp, Homo sapien
actttcaggtcttttgcaccagaag

SEQ ID NO: 3324109 - DNA, 25 bp, Homo sapien
tccctgactgtgtgcagccgttctg

SEQ ID NO: 3324110 - DNA, 25 bp, Homo sapien
caccacctgtgtcagttcctgtagt

SEQ ID NO: 3324111 - DNA, 25 bp, Homo sapien
cctttgggccagagtatgatgcagt

SEQ ID NO: 3324112 - DNA, 25 bp, Homo sapien
catactgagtagaagcctttgggcc

SEQ ID NO: 3324113 - DNA, 25 bp, Homo sapien
ctctgatatgctccgctcccacaag

SEQ ID NO: 3324114 - DNA, 25 bp, Homo sapien
tgctccgctcccacaagcccttgtt

SEQ ID NO: 3324115 - DNA, 25 bp, Homo sapien
gtctctgatatgctccgctcccaca

SEQ ID NO: 3324116 - DNA, 25 bp, Homo sapien
ccacaagcccttgttacactcctgc

SEQ ID NO: 3324117 - DNA, 25 bp, Homo sapien
ccaggtcgtggtatttctgcgtctc

SEQ ID NO: 3324118 - DNA, 25 bp, Homo sapien
ggtcgtggtatttctgcgtctcatt

SEQ ID NO: 3324119 - DNA, 25 bp, Homo sapien
ggccaggtcgtggtatttctgcgtc

SEQ ID NO: 3324120 - DNA, 25 bp, Homo sapien
caggtcgtggtatttctgcgtctca

SEQ ID NO: 3324121 - DNA, 25 bp, Homo sapien
gaccaccactcatgggccactggat

SEQ ID NO: 3324122 - DNA, 25 bp, Homo sapien
accaccactcatgggccactggatg

SEQ ID NO: 3324123 - DNA, 25 bp, Homo sapien
atgaccaccactcatgggccactgg

SEQ ID NO: 3324124 - DNA, 25 bp, Homo sapien
tcatgaccaccactcatgggccact

SEQ ID NO: 3324125 - DNA, 25 bp, Homo sapien
gggggccgcccagagtcagcactcc

SEQ ID NO: 3324126 - DNA, 25 bp, Homo sapien
cagggggccgcccagagtcagcact

SEQ ID NO: 3324127 - DNA, 25 bp, Homo sapien
gggccgcccagagtcagcactccca

SEQ ID NO: 3324128 - DNA, 25 bp, Homo sapien
ggccgcccagagtcagcactcccag

SEQ ID NO: 3324129 - DNA, 25 bp, Homo sapien
ctggtggatgctcatgagcaacagc

SEQ ID NO: 3324130 - DNA, 25 bp, Homo sapien
agctgccaacttggcaggttgtttt

SEQ ID NO: 3324131 - DNA, 25 bp, Homo sapien
tggcaggttgctgggcctcgtgtgg

SEQ ID NO: 3324132 - DNA, 25 bp, Homo sapien
aacttggcaggttgttttctctggt

SEQ ID NO: 3324133 - DNA, 25 bp, Homo sapien
ggccacagagtgaccttccacattc

SEQ ID NO: 3324134 - DNA, 25 bp, Homo sapien
ggggaacacggccacagagtgacct

SEQ ID NO: 3324135 - DNA, 25 bp, Homo sapien
ggaacacggccacagagtgaccttc

SEQ ID NO: 3324136 - DNA, 25 bp, Homo sapien
acggccacagagtgaccttccacat

SEQ ID NO: 3324137 - DNA, 25 bp, Homo sapien
gtgatattgggagtgtatagttgtc

SEQ ID NO: 3324138 - DNA, 25 bp, Homo sapien
tgtatagttgtcattgtgacaaacc

SEQ ID NO: 3324139 - DNA, 25 bp, Homo sapien
tattgggagtgtatagttgtcattg

SEQ ID NO: 3324140 - DNA, 25 bp, Homo sapien
gggagtgtatagttgtcattgtgac

SEQ ID NO: 3324141 - DNA, 25 bp, Homo sapien
tccagagaatcatgccgagtgtaga

SEQ ID NO: 3324142 - DNA, 25 bp, Homo sapien
gaccacctggttgcaggacttatag

SEQ ID NO: 3324143 - DNA, 25 bp, Homo sapien
tcgcaagtgaggattgagaccacct

SEQ ID NO: 3324144 - DNA, 25 bp, Homo sapien
taaaggctacatgggatctttctgt

SEQ ID NO: 3324145 - DNA, 25 bp, Homo sapien
gaggtgaatcctgagttatgctaca

SEQ ID NO: 3324146 - DNA, 25 bp, Homo sapien
ctttcacacttaggatagggttcaa

SEQ ID NO: 3324147 - DNA, 25 bp, Homo sapien
ttcaagtgggaaggaccacacgagg

SEQ ID NO: 3324148 - DNA, 25 bp, Homo sapien
taaagcacataatctgaagcaagag

SEQ ID NO: 3324149 - DNA, 25 bp, Homo sapien
cccagagtaggaccataagtggctg

SEQ ID NO: 3324150 - DNA, 25 bp, Homo sapien
ttcttaggtagagcacatgtgggcc

SEQ ID NO: 3324151 - DNA, 25 bp, Homo sapien
gagacagtgacaagtacgcctggcc

SEQ ID NO: 3324152 - DNA, 25 bp, Homo sapien
gcctgcaaaaagctatgggtactat

SEQ ID NO: 3324153 - DNA, 25 bp, Homo sapien
ataagcatctactgagtgtccattc

SEQ ID NO: 3324154 - DNA, 25 bp, Homo sapien
aaagttagcgagttatcctcaacca

SEQ ID NO: 3324155 - DNA, 25 bp, Homo sapien
caaccaacaggttcatcaataagca

SEQ ID NO: 3324156 - DNA, 25 bp, Homo sapien
agctcagaaaagttagcgagttatc

SEQ ID NO: 3324157 - DNA, 25 bp, Homo sapien
atgatgtcttactccacttccgcca

SEQ ID NO: 3324158 - DNA, 25 bp, Homo sapien
ccaattaaacttgaggcaacatgat

SEQ ID NO: 3324159 - DNA, 25 bp, Homo sapien
ttccaattaaacttgaggcaacatg

SEQ ID NO: 3324160 - DNA, 25 bp, Homo sapien
cttactccacttccgccactgtagg

SEQ ID NO: 3324161 - DNA, 25 bp, Homo sapien
cactcgtctaggaagtgagaggcca

SEQ ID NO: 3324162 - DNA, 25 bp, Homo sapien
tggttaactagccaaggccactcgt

SEQ ID NO: 3324163 - DNA, 25 bp, Homo sapien
taaacgtcaggactgtcatctgtgg

SEQ ID NO: 3324164 - DNA, 25 bp, Homo sapien
caagggaacctgctatcctgggaaa

SEQ ID NO: 3324165 - DNA, 25 bp, Homo sapien
tgtgcgtgaacagaatggaacaact

SEQ ID NO: 3324166 - DNA, 25 bp, Homo sapien
tctgctggccgtggacgagaaagaa

SEQ ID NO: 3324167 - DNA, 25 bp, Homo sapien
tgagagacttcgaccaaaatcgcct

SEQ ID NO: 3324168 - DNA, 25 bp, Homo sapien
tagcgagccttgcttgcagttgtca

SEQ ID NO: 3324169 - DNA, 25 bp, Homo sapien
ccccaagcatggtgtgaaagcagag

SEQ ID NO: 3324170 - DNA, 25 bp, Homo sapien
ccatggggcactttgacactagtca

SEQ ID NO: 3324171 - DNA, 25 bp, Homo sapien
ttgacactagtcatcagtgtggatg

SEQ ID NO: 3324172 - DNA, 25 bp, Homo sapien
cccaagcatggtgtgaaagcagaga

SEQ ID NO: 3324173 - DNA, 25 bp, Homo sapien
tatcatctagaaaattaggcaccaa

SEQ ID NO: 3324174 - DNA, 25 bp, Homo sapien
tctcattgcaattgggagaggaact

SEQ ID NO: 3324175 - DNA, 25 bp, Homo sapien
ttaattggctttatacctgagcacc

SEQ ID NO: 3324176 - DNA, 25 bp, Homo sapien
tggaaatgcaacatcaatgacagag

SEQ ID NO: 3324177 - DNA, 25 bp, Homo sapien
caggaactgtcggaaaaccatttct

SEQ ID NO: 3324178 - DNA, 25 bp, Homo sapien
gtcttctaccaggaactgtcggaaa

SEQ ID NO: 3324179 - DNA, 25 bp, Homo sapien
tgttctcgctgctttacaattgtga

SEQ ID NO: 3324180 - DNA, 25 bp, Homo sapien
cataagaagagcctccgtaaagtcc

SEQ ID NO: 3324181 - DNA, 25 bp, Homo sapien
gaaagtgcctgatatctagagtgga

SEQ ID NO: 3324182 - DNA, 25 bp, Homo sapien
caatacattcgtgagatgagggaca

SEQ ID NO: 3324183 - DNA, 25 bp, Homo sapien
gaaatgtgatccagtgaaggtgcag

SEQ ID NO: 3324184 - DNA, 25 bp, Homo sapien
gatagtaactgtcccctgagcctta

SEQ ID NO: 3324185 - DNA, 25 bp, Homo sapien
aaaatgtggctcatccaaattgaga

SEQ ID NO: 3324186 - DNA, 25 bp, Homo sapien
caggttctgaattagagcagtggag

SEQ ID NO: 3324187 - DNA, 25 bp, Homo sapien
gacacacatactattgagcatttaa

SEQ ID NO: 3324188 - DNA, 25 bp, Homo sapien
tgtgctgtccagtacaacagccaga

SEQ ID NO: 3324189 - DNA, 25 bp, Homo sapien
cagaaaggcctgcaatagggaaaca

SEQ ID NO: 3324190 - DNA, 25 bp, Homo sapien
tgctctaagaagaaacccacaggga

SEQ ID NO: 3324191 - DNA, 25 bp, Homo sapien
cacctgcctcctgtgtaattaagag

SEQ ID NO: 3324192 - DNA, 25 bp, Homo sapien
tagggaaacacatgcagttagctgc

SEQ ID NO: 3324193 - DNA, 25 bp, Homo sapien
tagaacagggaatgaatgtcagcct

SEQ ID NO: 3324194 - DNA, 25 bp, Homo sapien
acagtgatggtcgtctcttcaaggg

SEQ ID NO: 3324195 - DNA, 25 bp, Homo sapien
cacagaaagtatagtggaaggtctc

SEQ ID NO: 3324196 - DNA, 25 bp, Homo sapien
tgtcagccttgggagaaacttagct

SEQ ID NO: 3324197 - DNA, 25 bp, Homo sapien
ccatctttatttccccgctttacat

SEQ ID NO: 3324198 - DNA, 25 bp, Homo sapien
catactggtatggattggtagatcc

SEQ ID NO: 3324199 - DNA, 25 bp, Homo sapien
gattggtagatccatctttatttcc

SEQ ID NO: 3324200 - DNA, 25 bp, Homo sapien
aataaaaggaaagcatactggtatg

SEQ ID NO: 3324201 - DNA, 25 bp, Homo sapien
agagagccatgatacaaccctcggg

SEQ ID NO: 3324202 - DNA, 25 bp, Homo sapien
gagacccggaccaagctagtgagct

SEQ ID NO: 3324203 - DNA, 25 bp, Homo sapien
gagaatgccctagaaaaacgtgtaa

SEQ ID NO: 3324204 - DNA, 25 bp, Homo sapien
gctatgatccagttgtgagacccgg

SEQ ID NO: 3324205 - DNA, 25 bp, Homo sapien
cttcattgaatatggcctcttttgt

SEQ ID NO: 3324206 - DNA, 25 bp, Homo sapien
cccattatcattctgagttgttgag

SEQ ID NO: 3324207 - DNA, 25 bp, Homo sapien
ttgagagtatgggtttcccacttca

SEQ ID NO: 3324208 - DNA, 25 bp, Homo sapien
cttttgttggataatacccattatc

SEQ ID NO: 3324209 - DNA, 25 bp, Homo sapien
tagaagtagcaatatgagattatca

SEQ ID NO: 3324210 - DNA, 25 bp, Homo sapien
accatgtacttgaacattggtgtag

SEQ ID NO: 3324211 - DNA, 25 bp, Homo sapien
aacataaaaccatgtacttgaacat

SEQ ID NO: 3324212 - DNA, 25 bp, Homo sapien
cattggtgtagttcattacctgaaa

SEQ ID NO: 3324213 - DNA, 25 bp, Homo sapien
cagttcagcaccagggatgagtcca

SEQ ID NO: 3324214 - DNA, 25 bp, Homo sapien
catcactgtgagttggccagagaac

SEQ ID NO: 3324215 - DNA, 25 bp, Homo sapien
gaatgcagcgtcttagatagcccag

SEQ ID NO: 3324216 - DNA, 25 bp, Homo sapien
gagtcaaacaatagccatcggcagt

SEQ ID NO: 3324217 - DNA, 25 bp, Homo sapien
acgggactcagagcaacgaacggca

SEQ ID NO: 3324218 - DNA, 25 bp, Homo sapien
gaacatgtgtagaccattagccagt

SEQ ID NO: 3324219 - DNA, 25 bp, Homo sapien
cgaacggcagcaggtaacattgtac

SEQ ID NO: 3324220 - DNA, 25 bp, Homo sapien
ccttggatcagttctggtgggctgc

SEQ ID NO: 3324221 - DNA, 25 bp, Homo sapien
tgaccagctgtctctggtatgctcg

SEQ ID NO: 3324222 - DNA, 25 bp, Homo sapien
catcagttgagatctctggtctgct

SEQ ID NO: 3324223 - DNA, 25 bp, Homo sapien
tgtacactggcaatactttcatgga

SEQ ID NO: 3324224 - DNA, 25 bp, Homo sapien
gcaatactttcatggaatctggtag

SEQ ID NO: 3324225 - DNA, 25 bp, Homo sapien
tacccactcactgcttaggatgcaa

SEQ ID NO: 3324226 - DNA, 25 bp, Homo sapien
tctttactgagaacaattccctgag

SEQ ID NO: 3324227 - DNA, 25 bp, Homo sapien
cagtctggtgtagctgttatcagca

SEQ ID NO: 3324228 - DNA, 25 bp, Homo sapien
tatctagtgctacagcagtctggtg

SEQ ID NO: 3324229 - DNA, 25 bp, Homo sapien
tcctgtataaagcatgtccatttgg

SEQ ID NO: 3324230 - DNA, 25 bp, Homo sapien
gatgcaggaaccagatagatcgccc

SEQ ID NO: 3324231 - DNA, 25 bp, Homo sapien
gatcgccccgatgctatttctggtc

SEQ ID NO: 3324232 - DNA, 25 bp, Homo sapien
gaggttggcccacaatgacactatt

SEQ ID NO: 3324233 - DNA, 25 bp, Homo sapien
tacaatccagatagctccttgatgg

SEQ ID NO: 3324234 - DNA, 25 bp, Homo sapien
tgcagcctagttttggctccagcaa

SEQ ID NO: 3324235 - DNA, 25 bp, Homo sapien
tgcttgggtcaaggaaactttgggc

SEQ ID NO: 3324236 - DNA, 25 bp, Homo sapien
tatgatcctcagaatgacagcttcc

SEQ ID NO: 3324237 - DNA, 25 bp, Homo sapien
ctgtaggaaagtaccaagtttacag

SEQ ID NO: 3324238 - DNA, 25 bp, Homo sapien
gctcctgaagtgtgagatactccag

SEQ ID NO: 3324239 - DNA, 25 bp, Homo sapien
catgattggactgcattctggctag

SEQ ID NO: 3324240 - DNA, 25 bp, Homo sapien
taacaaatgaatgtccagagaggac

SEQ ID NO: 3324241 - DNA, 25 bp, Homo sapien
acctggtgggctttgtgtaacctga

SEQ ID NO: 3324242 - DNA, 25 bp, Homo sapien
catctatgtgcaataggtagctcac

SEQ ID NO: 3324243 - DNA, 25 bp, Homo sapien
aacatctatgtgcaataggtagctc

SEQ ID NO: 3324244 - DNA, 25 bp, Homo sapien
acatctatgtgcaataggtagctca

SEQ ID NO: 3324245 - DNA, 25 bp, Homo sapien
gattaactagaatttcccggatgac

SEQ ID NO: 3324246 - DNA, 25 bp, Homo sapien
ccaacatatgggcagtctgattaac

SEQ ID NO: 3324247 - DNA, 25 bp, Homo sapien
ctggcttgctgcagaaggacttgca

SEQ ID NO: 3324248 - DNA, 25 bp, Homo sapien
aattcttccggtaacatgccaacat

SEQ ID NO: 3324249 - DNA, 25 bp, Homo sapien
tcagaccacccagcaagaataatag

SEQ ID NO: 3324250 - DNA, 25 bp, Homo sapien
catttgctaatggtctcctcttgac

SEQ ID NO: 3324251 - DNA, 25 bp, Homo sapien
gagaacattggcctacctacagcaa

SEQ ID NO: 3324252 - DNA, 25 bp, Homo sapien
gatgtcctgaattcttacgggctgg

SEQ ID NO: 3324253 - DNA, 25 bp, Homo sapien
tagctgagagctgcagtttaagcca

SEQ ID NO: 3324254 - DNA, 25 bp, Homo sapien
tgattgtcgtgtaaagcacagcaca

SEQ ID NO: 3324255 - DNA, 25 bp, Homo sapien
tggcaaagaagttgataagagcatc

SEQ ID NO: 3324256 - DNA, 25 bp, Homo sapien
gattgtgaatccgaagtcttctttg

SEQ ID NO: 3324257 - DNA, 25 bp, Homo sapien
cacaaatttgctggacttgcatgca

SEQ ID NO: 3324258 - DNA, 25 bp, Homo sapien
tatggagaaacctcccaactgagtg

SEQ ID NO: 3324259 - DNA, 25 bp, Homo sapien
tccccactgatcattgtcggcaaca

SEQ ID NO: 3324260 - DNA, 25 bp, Homo sapien
cagaagtgaataccgttggaagtca

SEQ ID NO: 3324261 - DNA, 25 bp, Homo sapien
tggcagccatttctacatcggtggt

SEQ ID NO: 3324262 - DNA, 25 bp, Homo sapien
ccttgtcacaatcgatggcagccat

SEQ ID NO: 3324263 - DNA, 25 bp, Homo sapien
tgcttgaactccacggtcactgcct

SEQ ID NO: 3324264 - DNA, 25 bp, Homo sapien
actgagtttgtcatcgtgcttgaac

SEQ ID NO: 3324265 - DNA, 25 bp, Homo sapien
gaaccctcataatagcatcaaagcc

SEQ ID NO: 3324266 - DNA, 25 bp, Homo sapien
aaaaattgttgtctatccaagtgca

SEQ ID NO: 3324267 - DNA, 25 bp, Homo sapien
caatatcatttctgaggtcgttcaa

SEQ ID NO: 3324268 - DNA, 25 bp, Homo sapien
ctgtgctggtacgaaccctcataat

SEQ ID NO: 3324269 - DNA, 25 bp, Homo sapien
ttacatacaactgggtggtgcctgc

SEQ ID NO: 3324270 - DNA, 25 bp, Homo sapien
cacatgtgcacaatactgagctcag

SEQ ID NO: 3324271 - DNA, 25 bp, Homo sapien
tactacttgacacataggagagaca

SEQ ID NO: 3324272 - DNA, 25 bp, Homo sapien
gctacggcaggattcagttttgcaa

SEQ ID NO: 3324273 - DNA, 25 bp, Homo sapien
aatgagtcatagacatttgtttggg

SEQ ID NO: 3324274 - DNA, 25 bp, Homo sapien
taaagggttcctccagtgagctgag

SEQ ID NO: 3324275 - DNA, 25 bp, Homo sapien
tatttgtaaagggttcctccagtga

SEQ ID NO: 3324276 - DNA, 25 bp, Homo sapien
gaggccacgtccacatactgactag

SEQ ID NO: 3324277 - DNA, 25 bp, Homo sapien
ctggtgcttcagcagttggcaagga

SEQ ID NO: 3324278 - DNA, 25 bp, Homo sapien
ggtgcttcagcagttggcaaggaag

SEQ ID NO: 3324279 - DNA, 25 bp, Homo sapien
tggtgcttcagcagttggcaaggaa

SEQ ID NO: 3324280 - DNA, 25 bp, Homo sapien
aaacatgtctggaatctggtccaac

SEQ ID NO: 3324281 - DNA, 25 bp, Homo sapien
aacatgtctggaatctggtccaaca

SEQ ID NO: 3324282 - DNA, 25 bp, Homo sapien
ttcattagagtctgcaaacatgtct

SEQ ID NO: 3324283 - DNA, 25 bp, Homo sapien
caatgtatgattgaatcaaaacaca

SEQ ID NO: 3324284 - DNA, 25 bp, Homo sapien
gaatcaaaacacagtgcaattaaag

SEQ ID NO: 3324285 - DNA, 25 bp, Homo sapien
aacaatgtatgattgaatcaaaaca

SEQ ID NO: 3324286 - DNA, 25 bp, Homo sapien
aatgtatgattgaatcaaaacacag

SEQ ID NO: 3324287 - DNA, 25 bp, Homo sapien
ttatgaatcacagattgggattctt

SEQ ID NO: 3324288 - DNA, 25 bp, Homo sapien
gaggctgggccagattactcttcac

SEQ ID NO: 3324289 - DNA, 25 bp, Homo sapien
tgttatatgtgataaaacccactcg

SEQ ID NO: 3324290 - DNA, 25 bp, Homo sapien
gattcttgatagttgacaaggaaac

SEQ ID NO: 3324291 - DNA, 25 bp, Homo sapien
gaattcgatatttaactgaggatga

SEQ ID NO: 3324292 - DNA, 25 bp, Homo sapien
gcatgctaataaaggacaggaccca

SEQ ID NO: 3324293 - DNA, 25 bp, Homo sapien
tcccctgagggtcgggtacaatgtg

SEQ ID NO: 3324294 - DNA, 25 bp, Homo sapien
aggacccaaagcttatgttatctgt

SEQ ID NO: 3324295 - DNA, 25 bp, Homo sapien
tgttactatatgaaacatcaatcat

SEQ ID NO: 3324296 - DNA, 25 bp, Homo sapien
actatatgaaacatcaatcatgaag

SEQ ID NO: 3324297 - DNA, 25 bp, Homo sapien
ttcacatatgagcttgacaagtcca

SEQ ID NO: 3324298 - DNA, 25 bp, Homo sapien
cacatatgagcttgacaagtccatt

SEQ ID NO: 3324299 - DNA, 25 bp, Homo sapien
taaagcagctgctacgaacatgttt

SEQ ID NO: 3324300 - DNA, 25 bp, Homo sapien
cagcttttaggaagtgatccttcag

SEQ ID NO: 3324301 - DNA, 25 bp, Homo sapien
tccctttactggctggtgttcaaac

SEQ ID NO: 3324302 - DNA, 25 bp, Homo sapien
tttgcggtaacatagaacgtcaggc

SEQ ID NO: 3324303 - DNA, 25 bp, Homo sapien
gacacctggttgcttcctccttttg

SEQ ID NO: 3324304 - DNA, 25 bp, Homo sapien
ctcatatagaatcattccatattta

SEQ ID NO: 3324305 - DNA, 25 bp, Homo sapien
tccaaagtggcaacatattcataag

SEQ ID NO: 3324306 - DNA, 25 bp, Homo sapien
cataagatcctagagataactctgg

SEQ ID NO: 3324307 - DNA, 25 bp, Homo sapien
tctgcaataatccaaagtggcaaca

SEQ ID NO: 3324308 - DNA, 25 bp, Homo sapien
tctcatagtggtccagtcttcttcc

SEQ ID NO: 3324309 - DNA, 25 bp, Homo sapien
gactacaccactaagatctcagcta

SEQ ID NO: 3324310 - DNA, 25 bp, Homo sapien
ttatgatttagaccatcctagagaa

SEQ ID NO: 3324311 - DNA, 25 bp, Homo sapien
gctggaatgtagtataccgtaaata

SEQ ID NO: 3324312 - DNA, 25 bp, Homo sapien
gatgtcttcacccatgtggagtttg

SEQ ID NO: 3324313 - DNA, 25 bp, Homo sapien
agaattctgagtcgtttttctcttc

SEQ ID NO: 3324314 - DNA, 25 bp, Homo sapien
gcacatgtaggccttgcacctgttg

SEQ ID NO: 3324315 - DNA, 25 bp, Homo sapien
cattcacacagttgcaaaatccaca

SEQ ID NO: 3324316 - DNA, 25 bp, Homo sapien
cttcgatgaactgcataaatgggca

SEQ ID NO: 3324317 - DNA, 25 bp, Homo sapien
ttcctccttcgatgaactgcataaa

SEQ ID NO: 3324318 - DNA, 25 bp, Homo sapien
ctggtccactctcgccgtgatttac

SEQ ID NO: 3324319 - DNA, 25 bp, Homo sapien
ctcgccgtgatttaccaagtaaagg

SEQ ID NO: 3324320 - DNA, 25 bp, Homo sapien
cactctcgccgtgatttaccaagta

SEQ ID NO: 3324321 - DNA, 25 bp, Homo sapien
tccactctcgccgtgatttaccaag

SEQ ID NO: 3324322 - DNA, 25 bp, Homo sapien
tcaggtcctgaaggctacctggtca

SEQ ID NO: 3324323 - DNA, 25 bp, Homo sapien
tgtgcagtgtacagcattgtgcctg

SEQ ID NO: 3324324 - DNA, 25 bp, Homo sapien
tttatggtcgcttctgatccacagc

SEQ ID NO: 3324325 - DNA, 25 bp, Homo sapien
tcatctttgacaggagggcaagtat

SEQ ID NO: 3324326 - DNA, 25 bp, Homo sapien
taatcctctgccgactttccttgag

SEQ ID NO: 3324327 - DNA, 25 bp, Homo sapien
tccttgagtatatgtagggaaacag

SEQ ID NO: 3324328 - DNA, 25 bp, Homo sapien
ggcaacctaatgacagcctgtgaag

SEQ ID NO: 3324329 - DNA, 25 bp, Homo sapien
tgaagcaaagagaacaatgacacga

SEQ ID NO: 3324330 - DNA, 25 bp, Homo sapien
gaatttcatcctgacgttatgatgt

SEQ ID NO: 3324331 - DNA, 25 bp, Homo sapien
tggctggtatctgttgtccctttcc

SEQ ID NO: 3324332 - DNA, 25 bp, Homo sapien
agtggctggtatctgttgtcccttt

SEQ ID NO: 3324333 - DNA, 25 bp, Homo sapien
gtgaatttcatcctgacgttatgat

SEQ ID NO: 3324334 - DNA, 25 bp, Homo sapien
tggtggggatgttccgttttctcca

SEQ ID NO: 3324335 - DNA, 25 bp, Homo sapien
tgcactagccgtgagcaagactcct

SEQ ID NO: 3324336 - DNA, 25 bp, Homo sapien
caccgagtcaggcatgggatataat

SEQ ID NO: 3324337 - DNA, 25 bp, Homo sapien
aaaagcgcagtattttggtggggat

SEQ ID NO: 3324338 - DNA, 25 bp, Homo sapien
cagtaatcagtttaatttcagagca

SEQ ID NO: 3324339 - DNA, 25 bp, Homo sapien
catgcattttgtatgtccaagtttt

SEQ ID NO: 3324340 - DNA, 25 bp, Homo sapien
gaaaatgcatagtctcccaatcttc

SEQ ID NO: 3324341 - DNA, 25 bp, Homo sapien
tttacaggccatgatatcatacagt

SEQ ID NO: 3324342 - DNA, 25 bp, Homo sapien
tatattcagagtaattctattcttg

SEQ ID NO: 3324343 - DNA, 25 bp, Homo sapien
ccaggaagcactgctatataaaggg

SEQ ID NO: 3324344 - DNA, 25 bp, Homo sapien
ctgctatataaagggaagtaattct

SEQ ID NO: 3324345 - DNA, 25 bp, Homo sapien
gaagcactgctatataaagggaagt

SEQ ID NO: 3324346 - DNA, 25 bp, Homo sapien
tcacactgctttactctccatacca

SEQ ID NO: 3324347 - DNA, 25 bp, Homo sapien
ctcacactgctttactctccatacc

SEQ ID NO: 3324348 - DNA, 25 bp, Homo sapien
tcctcacactgctttactctccata

SEQ ID NO: 3324349 - DNA, 25 bp, Homo sapien
cctcacactgctttactctccatac

SEQ ID NO: 3324350 - DNA, 25 bp, Homo sapien
tgacagcagctaatggaatctgagc

SEQ ID NO: 3324351 - DNA, 25 bp, Homo sapien
aatggtggcaaagggcttgatgaca

SEQ ID NO: 3324352 - DNA, 25 bp, Homo sapien
catatctgacgtgcatggaaaacag

SEQ ID NO: 3324353 - DNA, 25 bp, Homo sapien
caacggatgaatcgaggactggcat

SEQ ID NO: 3324354 - DNA, 25 bp, Homo sapien
cttggtcttgtatcatgcaatctgt

SEQ ID NO: 3324355 - DNA, 25 bp, Homo sapien
tatcatgcaatctgtagtgaccagg

SEQ ID NO: 3324356 - DNA, 25 bp, Homo sapien
gctctatcattctcaatcacctgga

SEQ ID NO: 3324357 - DNA, 25 bp, Homo sapien
tggtgttggtggcataaacttgtcc

SEQ ID NO: 3324358 - DNA, 25 bp, Homo sapien
aggaaatactggcctggcacaatgg

SEQ ID NO: 3324359 - DNA, 25 bp, Homo sapien
ggaaatactggcctggcacaatggc

SEQ ID NO: 3324360 - DNA, 25 bp, Homo sapien
cacgcccactgggacttcagctgta

SEQ ID NO: 3324361 - DNA, 25 bp, Homo sapien
tatagacggcaaactaaaagagcac

SEQ ID NO: 3324362 - DNA, 25 bp, Homo sapien
gactccagaggaaaatcatctccct

SEQ ID NO: 3324363 - DNA, 25 bp, Homo sapien
atcctcccctagagatttgagcttt

SEQ ID NO: 3324364 - DNA, 25 bp, Homo sapien
cttatcctggccctgaatggaatca

SEQ ID NO: 3324365 - DNA, 25 bp, Homo sapien
tcctggccctgaatggaatcacatg

SEQ ID NO: 3324366 - DNA, 25 bp, Homo sapien
tggccctgaatggaatcacatgtat

SEQ ID NO: 3324367 - DNA, 25 bp, Homo sapien
aggagcttatcctggccctgaatgg

SEQ ID NO: 3324368 - DNA, 25 bp, Homo sapien
ctagggatagagtcaggatccagct

SEQ ID NO: 3324369 - DNA, 25 bp, Homo sapien
gctagggatagagtcaggatccagc

SEQ ID NO: 3324370 - DNA, 25 bp, Homo sapien
agggatagagtcaggatccagcttc

SEQ ID NO: 3324371 - DNA, 25 bp, Homo sapien
tgggctagggatagagtcaggatcc

SEQ ID NO: 3324372 - DNA, 25 bp, Homo sapien
tgggtaagacagttgtgcgcctgcc

SEQ ID NO: 3324373 - DNA, 25 bp, Homo sapien
ctgggtaagacagttgtgcgcctgc

SEQ ID NO: 3324374 - DNA, 25 bp, Homo sapien
gagagcccatctggtctgtacattg

SEQ ID NO: 3324375 - DNA, 25 bp, Homo sapien
aggcaccaggaccattgagtgtggt

SEQ ID NO: 3324376 - DNA, 25 bp, Homo sapien
caatgatgtggctgacagagggcca

SEQ ID NO: 3324377 - DNA, 25 bp, Homo sapien
cctgctgcggaggatatccagcacc

SEQ ID NO: 3324378 - DNA, 25 bp, Homo sapien
cattactcaggtaaattgcacattc

SEQ ID NO: 3324379 - DNA, 25 bp, Homo sapien
gcatctgtatctggtacaaatctag

SEQ ID NO: 3324380 - DNA, 25 bp, Homo sapien
aaccagagacaagagaagggccacc

SEQ ID NO: 3324381 - DNA, 25 bp, Homo sapien
tatttgcatcctgtgcgtgacttga

SEQ ID NO: 3324382 - DNA, 25 bp, Homo sapien
gattatgggaaactgggttgcttct

SEQ ID NO: 3324383 - DNA, 25 bp, Homo sapien
cctttctctgattatgggaaactgg

SEQ ID NO: 3324384 - DNA, 25 bp, Homo sapien
ttctctgattatgggaaactgggtt

SEQ ID NO: 3324385 - DNA, 25 bp, Homo sapien
tctgattatgggaaactgggttgct

SEQ ID NO: 3324386 - DNA, 25 bp, Homo sapien
gtggagctttccatgactcacagga

SEQ ID NO: 3324387 - DNA, 25 bp, Homo sapien
catctagataaatggccgactgtgc

SEQ ID NO: 3324388 - DNA, 25 bp, Homo sapien
gatgtaaatctcagtactgtgactc

SEQ ID NO: 3324389 - DNA, 25 bp, Homo sapien
gactgtgctgtcattacagtggagc

SEQ ID NO: 3324390 - DNA, 25 bp, Homo sapien
tgcactgtgaaacaatgagtactat

SEQ ID NO: 3324391 - DNA, 25 bp, Homo sapien
tgaatggaaggtattctgagggtcc

SEQ ID NO: 3324392 - DNA, 25 bp, Homo sapien
taccttgaaataagtggcagcatga

SEQ ID NO: 3324393 - DNA, 25 bp, Homo sapien
tcttattgttcaatcattgaatgga

SEQ ID NO: 3324394 - DNA, 25 bp, Homo sapien
actacttcaacacagtatgccctag

SEQ ID NO: 3324395 - DNA, 25 bp, Homo sapien
aggacacaaggcagtcaataaacac

SEQ ID NO: 3324396 - DNA, 25 bp, Homo sapien
cataagatagatgctttattattaa

SEQ ID NO: 3324397 - DNA, 25 bp, Homo sapien
cagtatgccctagttacatctattt

SEQ ID NO: 3324398 - DNA, 25 bp, Homo sapien
gataagaagattgtgcagagggttg

SEQ ID NO: 3324399 - DNA, 25 bp, Homo sapien
ttgatttgcatagcactgagctggc

SEQ ID NO: 3324400 - DNA, 25 bp, Homo sapien
tgaggatgccacattgttgacaggt

SEQ ID NO: 3324401 - DNA, 25 bp, Homo sapien
gacagatgaagtggatataggacct

SEQ ID NO: 3324402 - DNA, 25 bp, Homo sapien
tgcagagttgactcagttttctgtg

SEQ ID NO: 3324403 - DNA, 25 bp, Homo sapien
gcctttattcaacatggctctggac

SEQ ID NO: 3324404 - DNA, 25 bp, Homo sapien
tgtatgcggaattaagatgccaagt

SEQ ID NO: 3324405 - DNA, 25 bp, Homo sapien
tctgtggcctgttcaacttcaaaca

SEQ ID NO: 3324406 - DNA, 25 bp, Homo sapien
aaatctgtcagtacttccctaggaa

SEQ ID NO: 3324407 - DNA, 25 bp, Homo sapien
tcacagaagcatgtcccatgagggc

SEQ ID NO: 3324408 - DNA, 25 bp, Homo sapien
tgattcacctgcacaatcacggtgc

SEQ ID NO: 3324409 - DNA, 25 bp, Homo sapien
tcaatccagtatgcaagttgtagca

SEQ ID NO: 3324410 - DNA, 25 bp, Homo sapien
tcttctaaacttgaaaccagctgtt

SEQ ID NO: 3324411 - DNA, 25 bp, Homo sapien
taccagtgaccaaaacattcttcta

SEQ ID NO: 3324412 - DNA, 25 bp, Homo sapien
gagatgcctggaagtttacaacaat

SEQ ID NO: 3324413 - DNA, 25 bp, Homo sapien
ccagctgttcaatctttgcacttct

SEQ ID NO: 3324414 - DNA, 25 bp, Homo sapien
cacagacccattggcgacaatccga

SEQ ID NO: 3324415 - DNA, 25 bp, Homo sapien
gacccattggcgacaatccgattta

SEQ ID NO: 3324416 - DNA, 25 bp, Homo sapien
tcaagctcacagacccattggcgac

SEQ ID NO: 3324417 - DNA, 25 bp, Homo sapien
cacatcaagctcacagacccattgg

SEQ ID NO: 3324418 - DNA, 25 bp, Homo sapien
acccggaggcaacattcccctagtg

SEQ ID NO: 3324419 - DNA, 25 bp, Homo sapien
ggcaacattcccctagtggcggtgg

SEQ ID NO: 3324420 - DNA, 25 bp, Homo sapien
gcaacattcccctagtggcggtggc

SEQ ID NO: 3324421 - DNA, 25 bp, Homo sapien
ggaggcaacattcccctagtggcgg

SEQ ID NO: 3324422 - DNA, 25 bp, Homo sapien
tattagcagctcttctcaaatagag

SEQ ID NO: 3324423 - DNA, 25 bp, Homo sapien
tttattagcagctcttctcaaatag

SEQ ID NO: 3324424 - DNA, 25 bp, Homo sapien
catttattagcagctcttctcaaat

SEQ ID NO: 3324425 - DNA, 25 bp, Homo sapien
ttagcagctcttctcaaatagagac

SEQ ID NO: 3324426 - DNA, 25 bp, Homo sapien
cactgggcttgggttagagtagttc

SEQ ID NO: 3324427 - DNA, 25 bp, Homo sapien
ttattagttgtatgaacctgggcaa

SEQ ID NO: 3324428 - DNA, 25 bp, Homo sapien
tctctttggaactgtcttcagacat

SEQ ID NO: 3324429 - DNA, 25 bp, Homo sapien
tgagaaattgcagtaaaggagagaa

SEQ ID NO: 3324430 - DNA, 25 bp, Homo sapien
catagtgcccataatgaggtggaga

SEQ ID NO: 3324431 - DNA, 25 bp, Homo sapien
gtggagaaaggcctattccaggctg

SEQ ID NO: 3324432 - DNA, 25 bp, Homo sapien
ggtgtagccacgtaaccttgttgac

SEQ ID NO: 3324433 - DNA, 25 bp, Homo sapien
gagatgctgtgtgcgacggatcccc

SEQ ID NO: 3324434 - DNA, 25 bp, Homo sapien
aaatatcattccataggataattct

SEQ ID NO: 3324435 - DNA, 25 bp, Homo sapien
tatcattccataggataattctaca

SEQ ID NO: 3324436 - DNA, 25 bp, Homo sapien
tcattccataggataattctacaaa

SEQ ID NO: 3324437 - DNA, 25 bp, Homo sapien
cattccataggataattctacaaaa

SEQ ID NO: 3324438 - DNA, 25 bp, Homo sapien
gcggctctgcgcctagtgccggcag

SEQ ID NO: 3324439 - DNA, 25 bp, Homo sapien
tgcggtcgcttctcccgccgcgcct

SEQ ID NO: 3324440 - DNA, 25 bp, Homo sapien
gccgggctcccgctgcggtcgcttc

SEQ ID NO: 3324441 - DNA, 25 bp, Homo sapien
accccgcgggcttccgagcgctggc

SEQ ID NO: 3324442 - DNA, 25 bp, Homo sapien
tgggctgggaactgccacgtcaaac

SEQ ID NO: 3324443 - DNA, 25 bp, Homo sapien
gggctgggaactgccacgtcaaacc

SEQ ID NO: 3324444 - DNA, 25 bp, Homo sapien
cgtgtacacgcacatttgatgacgt

SEQ ID NO: 3324445 - DNA, 25 bp, Homo sapien
gcgaatctggcacgtgtacacgcac

SEQ ID NO: 3324446 - DNA, 25 bp, Homo sapien
ttaaaggcgaatctggcacgtgtac

SEQ ID NO: 3324447 - DNA, 25 bp, Homo sapien
tgtacacgcacatttgatgacgtac

SEQ ID NO: 3324448 - DNA, 25 bp, Homo sapien
cagcctggcaacgtgtaacgcggga

SEQ ID NO: 3324449 - DNA, 25 bp, Homo sapien
tgtgaagtaggatggctgatcccag

SEQ ID NO: 3324450 - DNA, 25 bp, Homo sapien
agcgttgtgtatactccttcttccg

SEQ ID NO: 3324451 - DNA, 25 bp, Homo sapien
cgtgcaatgcactacagaggaagga

SEQ ID NO: 3324452 - DNA, 25 bp, Homo sapien
tcctgtgattgagtccctggccctc

SEQ ID NO: 3324453 - DNA, 25 bp, Homo sapien
tgttgccacctgagcttagcctctg

SEQ ID NO: 3324454 - DNA, 25 bp, Homo sapien
ccatcctgttgccacctgagcttag

SEQ ID NO: 3324455 - DNA, 25 bp, Homo sapien
ttgatctgacccatcctgttgccac

SEQ ID NO: 3324456 - DNA, 25 bp, Homo sapien
ccacctgagcttagcctctgatgtt

SEQ ID NO: 3324457 - DNA, 25 bp, Homo sapien
agattttccaattgatgaagtgagt

SEQ ID NO: 3324458 - DNA, 25 bp, Homo sapien
ccaattgatgaagtgagtaagatgt

SEQ ID NO: 3324459 - DNA, 25 bp, Homo sapien
agtaagatgtgattcaatgttttca

SEQ ID NO: 3324460 - DNA, 25 bp, Homo sapien
ttttccaattgatgaagtgagtaag

SEQ ID NO: 3324461 - DNA, 25 bp, Homo sapien
gggcagttctgagttccatcaccac

SEQ ID NO: 3324462 - DNA, 25 bp, Homo sapien
tggggcagttctgagttccatcacc

SEQ ID NO: 3324463 - DNA, 25 bp, Homo sapien
agttctgagttccatcaccactaac

SEQ ID NO: 3324464 - DNA, 25 bp, Homo sapien
gcagttctgagttccatcaccacta

SEQ ID NO: 3324465 - DNA, 25 bp, Homo sapien
aagagcaactctttgatcccgaggg

SEQ ID NO: 3324466 - DNA, 25 bp, Homo sapien
ctcgttttagacctgaggagtggag

SEQ ID NO: 3324467 - DNA, 25 bp, Homo sapien
gaatcaagagcaactctttgatccc

SEQ ID NO: 3324468 - DNA, 25 bp, Homo sapien
gggcagggttctctctcgttttaga

SEQ ID NO: 3324469 - DNA, 25 bp, Homo sapien
catgaccgcaggagatgtgcttgcc

SEQ ID NO: 3324470 - DNA, 25 bp, Homo sapien
gcctgttgtcgtctattcccagaaa

SEQ ID NO: 3324471 - DNA, 25 bp, Homo sapien
tgcctggctgcctgttgtcgtctat

SEQ ID NO: 3324472 - DNA, 25 bp, Homo sapien
tttcccactgattccagcatgaccg

SEQ ID NO: 3324473 - DNA, 25 bp, Homo sapien
tatttctctcaacggtgctcccctt

SEQ ID NO: 3324474 - DNA, 25 bp, Homo sapien
gcagcagatcatccctgtcaggaca

SEQ ID NO: 3324475 - DNA, 25 bp, Homo sapien
tgagaccccttgcatcatcatttcg

SEQ ID NO: 3324476 - DNA, 25 bp, Homo sapien
catttcgtgaaggttaggctttaca

SEQ ID NO: 3324477 - DNA, 25 bp, Homo sapien
gcacatgataaatgcgtgattctcc

SEQ ID NO: 3324478 - DNA, 25 bp, Homo sapien
cacaagtattccagttgcatcagcc

SEQ ID NO: 3324479 - DNA, 25 bp, Homo sapien
atcagcctctagtgtgcccagcaca

SEQ ID NO: 3324480 - DNA, 25 bp, Homo sapien
ggaggtgcgcatgtttcattcctgg

SEQ ID NO: 3324481 - DNA, 25 bp, Homo sapien
ctccattggctgcaaatcagtatcc

SEQ ID NO: 3324482 - DNA, 25 bp, Homo sapien
tctccattggctgcaaatcagtatc

SEQ ID NO: 3324483 - DNA, 25 bp, Homo sapien
tccattggctgcaaatcagtatcca

SEQ ID NO: 3324484 - DNA, 25 bp, Homo sapien
ttctccattggctgcaaatcagtat

SEQ ID NO: 3324485 - DNA, 25 bp, Homo sapien
tatcggttgctgtagggagtcaaaa

SEQ ID NO: 3324486 - DNA, 25 bp, Homo sapien
ttatcggttgctgtagggagtcaaa

SEQ ID NO: 3324487 - DNA, 25 bp, Homo sapien
atcggttgctgtagggagtcaaaat

SEQ ID NO: 3324488 - DNA, 25 bp, Homo sapien
gggagaggaagttcattactccatc

SEQ ID NO: 3324489 - DNA, 25 bp, Homo sapien
gactaggttactgtgggtcccttca

SEQ ID NO: 3324490 - DNA, 25 bp, Homo sapien
tcaattaaggatcccatcatgttat

SEQ ID NO: 3324491 - DNA, 25 bp, Homo sapien
cgcatgctacaatgaccagatagct

SEQ ID NO: 3324492 - DNA, 25 bp, Homo sapien
tgcggacacaggactgagagtagac

SEQ ID NO: 3324493 - DNA, 25 bp, Homo sapien
tttctttatctagatttttgaagtc

SEQ ID NO: 3324494 - DNA, 25 bp, Homo sapien
agatttttgaagtctcttctccctg

SEQ ID NO: 3324495 - DNA, 25 bp, Homo sapien
tctagatttttgaagtctcttctcc

SEQ ID NO: 3324496 - DNA, 25 bp, Homo sapien
tctttctttatctagatttttgaag

SEQ ID NO: 3324497 - DNA, 25 bp, Homo sapien
ccatggtaatctcttcaatgaataa

SEQ ID NO: 3324498 - DNA, 25 bp, Homo sapien
gaattcaaccatggtaatctcttca

SEQ ID NO: 3324499 - DNA, 25 bp, Homo sapien
tcaaccatggtaatctcttcaatga

SEQ ID NO: 3324500 - DNA, 25 bp, Homo sapien
cagagaattcaaccatggtaatctc

SEQ ID NO: 3324501 - DNA, 25 bp, Homo sapien
aaactgggaatagttctcctctgac

SEQ ID NO: 3324502 - DNA, 25 bp, Homo sapien
tgcaaactgggaatagttctcctct

SEQ ID NO: 3324503 - DNA, 25 bp, Homo sapien
actgggaatagttctcctctgactc

SEQ ID NO: 3324504 - DNA, 25 bp, Homo sapien
caaactgggaatagttctcctctga

SEQ ID NO: 3324505 - DNA, 25 bp, Homo sapien
caggttttgctctccactctttttt

SEQ ID NO: 3324506 - DNA, 25 bp, Homo sapien
ttttgaaccctcttttctacctgca

SEQ ID NO: 3324507 - DNA, 25 bp, Homo sapien
gatggtgtagtcaaacaggttttgc

SEQ ID NO: 3324508 - DNA, 25 bp, Homo sapien
tagcttgatggtgtagtcaaacagg

SEQ ID NO: 3324509 - DNA, 25 bp, Homo sapien
tgagatagaggcaccactgacccca

SEQ ID NO: 3324510 - DNA, 25 bp, Homo sapien
gaccccacaagaagtaaggcaccat

SEQ ID NO: 3324511 - DNA, 25 bp, Homo sapien
tttccttcagagttacagcagagtt

SEQ ID NO: 3324512 - DNA, 25 bp, Homo sapien
taagtcctccgaaaagcttcccatc

SEQ ID NO: 3324513 - DNA, 25 bp, Homo sapien
tcagatgcattgaaaaataagtcac

SEQ ID NO: 3324514 - DNA, 25 bp, Homo sapien
tttcagatgcattgaaaaataagtc

SEQ ID NO: 3324515 - DNA, 25 bp, Homo sapien
cattgaaaaataagtcaccattact

SEQ ID NO: 3324516 - DNA, 25 bp, Homo sapien
caccattactttctgttttttccat

SEQ ID NO: 3324517 - DNA, 25 bp, Homo sapien
gaaatctttcttgcccaataactgg

SEQ ID NO: 3324518 - DNA, 25 bp, Homo sapien
taaaagtgccggctatggagactgc

SEQ ID NO: 3324519 - DNA, 25 bp, Homo sapien
ggctcgtggtctcaagagtgaagct

SEQ ID NO: 3324520 - DNA, 25 bp, Homo sapien
caataactggattgactctagtgac

SEQ ID NO: 3324521 - DNA, 25 bp, Homo sapien
tagttgaaatctttattgtttaaca

SEQ ID NO: 3324522 - DNA, 25 bp, Homo sapien
ctgtactgatgcgatatactccaga

SEQ ID NO: 3324523 - DNA, 25 bp, Homo sapien
tggatcggcctctttcgctttccaa

SEQ ID NO: 3324524 - DNA, 25 bp, Homo sapien
tccagaggtgattttggatcggcct

SEQ ID NO: 3324525 - DNA, 25 bp, Homo sapien
caatcgttctgtgcattttgctttc

SEQ ID NO: 3324526 - DNA, 25 bp, Homo sapien
ttggctttgcccaagcacagtgccg

SEQ ID NO: 3324527 - DNA, 25 bp, Homo sapien
tgacattatgatgaggagtttcagg

SEQ ID NO: 3324528 - DNA, 25 bp, Homo sapien
gagtttcaggtccagacatcctgtg

SEQ ID NO: 3324529 - DNA, 25 bp, Homo sapien
cacagctgtgagagctacaggagcc

SEQ ID NO: 3324530 - DNA, 25 bp, Homo sapien
tgcgaaggttggtggccaaggagcc

SEQ ID NO: 3324531 - DNA, 25 bp, Homo sapien
ctgcgaaggttggtggccaaggagc

SEQ ID NO: 3324532 - DNA, 25 bp, Homo sapien
tcaagaggtaaaaagtctctccatt

SEQ ID NO: 3324533 - DNA, 25 bp, Homo sapien
cctcaagaggtaaaaagtctctcca

SEQ ID NO: 3324534 - DNA, 25 bp, Homo sapien
tcatacccactgttcgttttctcct

SEQ ID NO: 3324535 - DNA, 25 bp, Homo sapien
atacccactgttcgttttctccttg

SEQ ID NO: 3324536 - DNA, 25 bp, Homo sapien
tttgcacagacaactgggaagatca

SEQ ID NO: 3324537 - DNA, 25 bp, Homo sapien
aaatcaaagagctgtggtgtacagc

SEQ ID NO: 3324538 - DNA, 25 bp, Homo sapien
caactgggaagatcaaaatcaaaga

SEQ ID NO: 3324539 - DNA, 25 bp, Homo sapien
agctctaggctccttagctgagaga

SEQ ID NO: 3324540 - DNA, 25 bp, Homo sapien
gtaggtggaacgccaagcagagaac

SEQ ID NO: 3324541 - DNA, 25 bp, Homo sapien
aggtaggtggaacgccaagcagaga

SEQ ID NO: 3324542 - DNA, 25 bp, Homo sapien
taggtggaacgccaagcagagaaca

SEQ ID NO: 3324543 - DNA, 25 bp, Homo sapien
aggtggaacgccaagcagagaacaa

SEQ ID NO: 3324544 - DNA, 25 bp, Homo sapien
gagcgaatagcttcccgagatgaga

SEQ ID NO: 3324545 - DNA, 25 bp, Homo sapien
ggagaagcacgacaaaacccatgtt

SEQ ID NO: 3324546 - DNA, 25 bp, Homo sapien
tgagcaaaagctacatcgaggtgag

SEQ ID NO: 3324547 - DNA, 25 bp, Homo sapien
ggtccccatgaatagaacggccaaa

SEQ ID NO: 3324548 - DNA, 25 bp, Homo sapien
ctgtgacactttggtgttgccgagt

SEQ ID NO: 3324549 - DNA, 25 bp, Homo sapien
cgagttagtcaacaattattctggg

SEQ ID NO: 3324550 - DNA, 25 bp, Homo sapien
taagaaccaacactgtattcccaga

SEQ ID NO: 3324551 - DNA, 25 bp, Homo sapien
gaaacatgaccctcgctggtcttgg

SEQ ID NO: 3324552 - DNA, 25 bp, Homo sapien
cacaactcattgtgggtggtattac

SEQ ID NO: 3324553 - DNA, 25 bp, Homo sapien
ccacaattagatctttggtttggag

SEQ ID NO: 3324554 - DNA, 25 bp, Homo sapien
gctaagaatctctaaggaattggtt

SEQ ID NO: 3324555 - DNA, 25 bp, Homo sapien
tcttcacgtaagtccaatatgggct

SEQ ID NO: 3324556 - DNA, 25 bp, Homo sapien
ttactctagtaaaccaaccgatgga

SEQ ID NO: 3324557 - DNA, 25 bp, Homo sapien
tcagcagctcggaggaaggtgcttc

SEQ ID NO: 3324558 - DNA, 25 bp, Homo sapien
caaagtctcctctcggtctagtgga

SEQ ID NO: 3324559 - DNA, 25 bp, Homo sapien
ctatatgggctcatgtggaaggcaa

SEQ ID NO: 3324560 - DNA, 25 bp, Homo sapien
acttaatttacagcacattcaataa

SEQ ID NO: 3324561 - DNA, 25 bp, Homo sapien
tatatcaaatatatcccaattccac

SEQ ID NO: 3324562 - DNA, 25 bp, Homo sapien
cacattcaataatgaaccaacagga

SEQ ID NO: 3324563 - DNA, 25 bp, Homo sapien
aataatgaaccaacaggagagttgc

SEQ ID NO: 3324564 - DNA, 25 bp, Homo sapien
accaatcttgttccagacgtggcct

SEQ ID NO: 3324565 - DNA, 25 bp, Homo sapien
tgtatagacctgaaccaatcttgtt

SEQ ID NO: 3324566 - DNA, 25 bp, Homo sapien
atgtatagacctgaaccaatcttgt

SEQ ID NO: 3324567 - DNA, 25 bp, Homo sapien
tgttccagacgtggcctgtgttaac

SEQ ID NO: 3324568 - DNA, 25 bp, Homo sapien
taagcattggctttcataaacgccg

SEQ ID NO: 3324569 - DNA, 25 bp, Homo sapien
tttcttaacattgatgccatcacag

SEQ ID NO: 3324570 - DNA, 25 bp, Homo sapien
gatcacttttcttaacattgatgcc

SEQ ID NO: 3324571 - DNA, 25 bp, Homo sapien
cataaacgccgattctgtggctgaa

SEQ ID NO: 3324572 - DNA, 25 bp, Homo sapien
cagatgcgcatctgaggctcattat

SEQ ID NO: 3324573 - DNA, 25 bp, Homo sapien
gcatctgaggctcattattatctgc

SEQ ID NO: 3324574 - DNA, 25 bp, Homo sapien
cttccagatgcgcatctgaggctca

SEQ ID NO: 3324575 - DNA, 25 bp, Homo sapien
gatgcgcatctgaggctcattatta

SEQ ID NO: 3324576 - DNA, 25 bp, Homo sapien
tcgcacccagtgtgcataaggtaac

SEQ ID NO: 3324577 - DNA, 25 bp, Homo sapien
gcacgccagtaggaataagagacat

SEQ ID NO: 3324578 - DNA, 25 bp, Homo sapien
gcataaggtaacaggcacgccagta

SEQ ID NO: 3324579 - DNA, 25 bp, Homo sapien
gcaagtacaaacttcgcacccagtg

SEQ ID NO: 3324580 - DNA, 25 bp, Homo sapien
tgggctccccacaagatcttaacgt

SEQ ID NO: 3324581 - DNA, 25 bp, Homo sapien
tatttggctccactgaaacttgagg

SEQ ID NO: 3324582 - DNA, 25 bp, Homo sapien
tcttcactaagactgcggagacaag

SEQ ID NO: 3324583 - DNA, 25 bp, Homo sapien
gagacaaggagctagttactggcca

SEQ ID NO: 3324584 - DNA, 25 bp, Homo sapien
catgttggaagaattatcccatctc

SEQ ID NO: 3324585 - DNA, 25 bp, Homo sapien
catggacctgggcaaaaaggtcagc

SEQ ID NO: 3324586 - DNA, 25 bp, Homo sapien
aaaggtcagcatccccagagacatc

SEQ ID NO: 3324587 - DNA, 25 bp, Homo sapien
tacagatgttgatggcatggacctg

SEQ ID NO: 3324588 - DNA, 25 bp, Homo sapien
attttgtcatacaactattatacat

SEQ ID NO: 3324589 - DNA, 25 bp, Homo sapien
tatcaaactactcaaaattataaga

SEQ ID NO: 3324590 - DNA, 25 bp, Homo sapien
tcaaactactcaaaattataagaaa

SEQ ID NO: 3324591 - DNA, 25 bp, Homo sapien
ttttgtcatacaactattatacata

SEQ ID NO: 3324592 - DNA, 25 bp, Homo sapien
aacatagctaactggcctcgggtcc

SEQ ID NO: 3324593 - DNA, 25 bp, Homo sapien
gattcctcgacacaacaaaacaagc

SEQ ID NO: 3324594 - DNA, 25 bp, Homo sapien
tcttctaggtcctgtagcactccag

SEQ ID NO: 3324595 - DNA, 25 bp, Homo sapien
gaatcagaaacacgaaagtagccta

SEQ ID NO: 3324596 - DNA, 25 bp, Homo sapien
atcagatatcacagcaagctcttct

SEQ ID NO: 3324597 - DNA, 25 bp, Homo sapien
ccatcagatatcacagcaagctctt

SEQ ID NO: 3324598 - DNA, 25 bp, Homo sapien
catcagatatcacagcaagctcttc

SEQ ID NO: 3324599 - DNA, 25 bp, Homo sapien
gcttctatatttcgtttgaaaacca

SEQ ID NO: 3324600 - DNA, 25 bp, Homo sapien
ctgcttctatatttcgtttgaaaac

SEQ ID NO: 3324601 - DNA, 25 bp, Homo sapien
tgcttctatatttcgtttgaaaacc

SEQ ID NO: 3324602 - DNA, 25 bp, Homo sapien
ctatatttcgtttgaaaaccagcac

SEQ ID NO: 3324603 - DNA, 25 bp, Homo sapien
gaatagaaaacctacaaaatcagag

SEQ ID NO: 3324604 - DNA, 25 bp, Homo sapien
tgcaatccatcctactgacaaaggt

SEQ ID NO: 3324605 - DNA, 25 bp, Homo sapien
cagacaattccattacaaagtgggt

SEQ ID NO: 3324606 - DNA, 25 bp, Homo sapien
gaaactattatcagattgaatagaa

SEQ ID NO: 3324607 - DNA, 25 bp, Homo sapien
tctgaagttgacaagacagcatctt

SEQ ID NO: 3324608 - DNA, 25 bp, Homo sapien
tcagtgaacatagataagagtctcc

SEQ ID NO: 3324609 - DNA, 25 bp, Homo sapien
gagtctccttagatacaggctcaca

SEQ ID NO: 3324610 - DNA, 25 bp, Homo sapien
agtttaagttacaggctcatgcata

SEQ ID NO: 3324611 - DNA, 25 bp, Homo sapien
agcagggtgaactgaagggtattct

SEQ ID NO: 3324612 - DNA, 25 bp, Homo sapien
tgaactgaagggtattcttctgtaa

SEQ ID NO: 3324613 - DNA, 25 bp, Homo sapien
gtcaaattcttgagcagggtgaact

SEQ ID NO: 3324614 - DNA, 25 bp, Homo sapien
aattcttgagcagggtgaactgaag

SEQ ID NO: 3324615 - DNA, 25 bp, Homo sapien
gacttttctgacaatcattaaccag

SEQ ID NO: 3324616 - DNA, 25 bp, Homo sapien
taaccaggtcaacagacttattaaa

SEQ ID NO: 3324617 - DNA, 25 bp, Homo sapien
tgttcgaaagcacggcaaagaggcg

SEQ ID NO: 3324618 - DNA, 25 bp, Homo sapien
ttaaaacctgttcgaaagcacggca

SEQ ID NO: 3324619 - DNA, 25 bp, Homo sapien
aagccaactgtatcgcgcacgccat

SEQ ID NO: 3324620 - DNA, 25 bp, Homo sapien
cagcgccaagctgccgcttttgcag

SEQ ID NO: 3324621 - DNA, 25 bp, Homo sapien
gatctcgcgcctccgaggaagccaa

SEQ ID NO: 3324622 - DNA, 25 bp, Homo sapien
tatctcttggtctcgcgcgatctcg

SEQ ID NO: 3324623 - DNA, 25 bp, Homo sapien
tccccgcgggaatagaattccgcag

SEQ ID NO: 3324624 - DNA, 25 bp, Homo sapien
gggaatagaattccgcaggtccaga

SEQ ID NO: 3324625 - DNA, 25 bp, Homo sapien
caggtccagaaagccgggaaatcgc

SEQ ID NO: 3324626 - DNA, 25 bp, Homo sapien
tagaattccgcaggtccagaaagcc

SEQ ID NO: 3324627 - DNA, 25 bp, Homo sapien
tgagcctcggtactgtggcagcagt

SEQ ID NO: 3324628 - DNA, 25 bp, Homo sapien
tcactggcctgactggtccctgggt

SEQ ID NO: 3324629 - DNA, 25 bp, Homo sapien
tgttgatcgcaggtgtcactggcct

SEQ ID NO: 3324630 - DNA, 25 bp, Homo sapien
tgctccgctcacagggtcgggctct

SEQ ID NO: 3324631 - DNA, 25 bp, Homo sapien
tagagctcaaggtaagtctccgaaa

SEQ ID NO: 3324632 - DNA, 25 bp, Homo sapien
ctagccctctggttggagatccaga

SEQ ID NO: 3324633 - DNA, 25 bp, Homo sapien
gcgggcctgaccgggacactctcat

SEQ ID NO: 3324634 - DNA, 25 bp, Homo sapien
ctcgcgcaaggagggtagagctcaa

SEQ ID NO: 3324635 - DNA, 25 bp, Homo sapien
gcttagaggcatgatcttctccagg

SEQ ID NO: 3324636 - DNA, 25 bp, Homo sapien
gatgcagttcgacagttggtgccaa

SEQ ID NO: 3324637 - DNA, 25 bp, Homo sapien
tctgcccagagcaatgtaaggactg

SEQ ID NO: 3324638 - DNA, 25 bp, Homo sapien
tatttatgcagtgccggtgagaaca

SEQ ID NO: 3324639 - DNA, 25 bp, Homo sapien
cacatcttcacactccacttataat

SEQ ID NO: 3324640 - DNA, 25 bp, Homo sapien
tttggtggtagagggtctcgccttg

SEQ ID NO: 3324641 - DNA, 25 bp, Homo sapien
tggaaccctggcactgcagtaatgg

SEQ ID NO: 3324642 - DNA, 25 bp, Homo sapien
catttgagctttcagtaagttgtaa

SEQ ID NO: 3324643 - DNA, 25 bp, Homo sapien
ctctgtctgaggctaccaagtatgc

SEQ ID NO: 3324644 - DNA, 25 bp, Homo sapien
cttatggtaagaacctattaaagct

SEQ ID NO: 3324645 - DNA, 25 bp, Homo sapien
gcatacatgaatttcccctctctgt

SEQ ID NO: 3324646 - DNA, 25 bp, Homo sapien
catatttaagcacattgagcactta

SEQ ID NO: 3324647 - DNA, 25 bp, Homo sapien
tctgtccatgaaagattagctcgtt

SEQ ID NO: 3324648 - DNA, 25 bp, Homo sapien
aatggaactatacatggttgcttca

SEQ ID NO: 3324649 - DNA, 25 bp, Homo sapien
ttttcagtcagctccactatgtccc

SEQ ID NO: 3324650 - DNA, 25 bp, Homo sapien
aaatttgccatgcttgcctgctcag

SEQ ID NO: 3324651 - DNA, 25 bp, Homo sapien
tacccaaggaccataatgcaagaga

SEQ ID NO: 3324652 - DNA, 25 bp, Homo sapien
tcttcacacctaagaactgttgggt

SEQ ID NO: 3324653 - DNA, 25 bp, Homo sapien
gaacaggtttgccttttcacgttga

SEQ ID NO: 3324654 - DNA, 25 bp, Homo sapien
cacgttgataactctgcttctggga

SEQ ID NO: 3324655 - DNA, 25 bp, Homo sapien
ggctgctaaccaccagtgttaggaa

SEQ ID NO: 3324656 - DNA, 25 bp, Homo sapien
tgatagtcactgcatatgatccctt

SEQ ID NO: 3324657 - DNA, 25 bp, Homo sapien
tgtaagttttcaagatcggatggaa

SEQ ID NO: 3324658 - DNA, 25 bp, Homo sapien
accagaaaagggcttcacccatttg

SEQ ID NO: 3324659 - DNA, 25 bp, Homo sapien
taacagcagtctcagacatttgtct

SEQ ID NO: 3324660 - DNA, 25 bp, Homo sapien
gttgattcaacactccagatacaga

SEQ ID NO: 3324661 - DNA, 25 bp, Homo sapien
gatactagaaaaatgggcttcaagt

SEQ ID NO: 3324662 - DNA, 25 bp, Homo sapien
acctcctgactcatgtactactaca

SEQ ID NO: 3324663 - DNA, 25 bp, Homo sapien
gctttccgcagacagtaagcccagg

SEQ ID NO: 3324664 - DNA, 25 bp, Homo sapien
tgggcatctcctagcataatcaaga

SEQ ID NO: 3324665 - DNA, 25 bp, Homo sapien
tttttattccagctaggccctcaag

SEQ ID NO: 3324666 - DNA, 25 bp, Homo sapien
catggatgtccctgttcaagcagag

SEQ ID NO: 3324667 - DNA, 25 bp, Homo sapien
cagttcacacagttgatttggtaaa

SEQ ID NO: 3324668 - DNA, 25 bp, Homo sapien
gatgaaaccattagcaagcagtgca

SEQ ID NO: 3324669 - DNA, 25 bp, Homo sapien
cacagttgatttggtaaactcagtg

SEQ ID NO: 3324670 - DNA, 25 bp, Homo sapien
cattagcaagcagtgcagaaacagt

SEQ ID NO: 3324671 - DNA, 25 bp, Homo sapien
accataccttccatagatggttctc

SEQ ID NO: 3324672 - DNA, 25 bp, Homo sapien
taccttccatagatggttctcttta

SEQ ID NO: 3324673 - DNA, 25 bp, Homo sapien
accttccatagatggttctctttag

SEQ ID NO: 3324674 - DNA, 25 bp, Homo sapien
cataccttccatagatggttctctt

SEQ ID NO: 3324675 - DNA, 25 bp, Homo sapien
tttatagtcagcaattatattccag

SEQ ID NO: 3324676 - DNA, 25 bp, Homo sapien
tcagcaattatattccagacttgac

SEQ ID NO: 3324677 - DNA, 25 bp, Homo sapien
taattgctaactttatagtcagcaa

SEQ ID NO: 3324678 - DNA, 25 bp, Homo sapien
aattatattccagacttgactaacc

SEQ ID NO: 3324679 - DNA, 25 bp, Homo sapien
gatcttatgccctgtttaaaaggcg

SEQ ID NO: 3324680 - DNA, 25 bp, Homo sapien
tacccaggtaagagggcatgcatgc

SEQ ID NO: 3324681 - DNA, 25 bp, Homo sapien
taagactgtatcaacctgtcgccca

SEQ ID NO: 3324682 - DNA, 25 bp, Homo sapien
ctgtgtctaaaataatgcctggctc

SEQ ID NO: 3324683 - DNA, 25 bp, Homo sapien
tgtgaaattcttctattgagagtcc

SEQ ID NO: 3324684 - DNA, 25 bp, Homo sapien
ggaagggtcccttggagatgtgaaa

SEQ ID NO: 3324685 - DNA, 25 bp, Homo sapien
gttctgcaaattagtaacaaagtgt

SEQ ID NO: 3324686 - DNA, 25 bp, Homo sapien
taagaacttagctaggaatgggtga

SEQ ID NO: 3324687 - DNA, 25 bp, Homo sapien
gcccaaaagcgagcaaatgatctct

SEQ ID NO: 3324688 - DNA, 25 bp, Homo sapien
tcttggacatatataaactctctgg

SEQ ID NO: 3324689 - DNA, 25 bp, Homo sapien
aatatgacgccaagttttctccaca

SEQ ID NO: 3324690 - DNA, 25 bp, Homo sapien
cacggacgtgctaaagaaggacatt

SEQ ID NO: 3324691 - DNA, 25 bp, Homo sapien
gaaaagccagaggtccaaccagtag

SEQ ID NO: 3324692 - DNA, 25 bp, Homo sapien
ccagtaggagtgtttgggaagccca

SEQ ID NO: 3324693 - DNA, 25 bp, Homo sapien
gaggcctcacatcgaagttctgcct

SEQ ID NO: 3324694 - DNA, 25 bp, Homo sapien
aaacaccaccacatcgaaaaggatg

SEQ ID NO: 3324695 - DNA, 25 bp, Homo sapien
tcctgcagcttcgtaacaaccctag

SEQ ID NO: 3324696 - DNA, 25 bp, Homo sapien
cccgggttccggaatgcactctgaa

SEQ ID NO: 3324697 - DNA, 25 bp, Homo sapien
ttcgccgcaccggaaactgagcgga

SEQ ID NO: 3324698 - DNA, 25 bp, Homo sapien
ttcccggactttggtgttcgccgca

SEQ ID NO: 3324699 - DNA, 25 bp, Homo sapien
tcgttggaagaaatacgttctcgtc

SEQ ID NO: 3324700 - DNA, 25 bp, Homo sapien
ctacttctgcctcgcggcgtcccag

SEQ ID NO: 3324701 - DNA, 25 bp, Homo sapien
ttgacactaagtcaatgggcccgcc

SEQ ID NO: 3324702 - DNA, 25 bp, Homo sapien
cagtccagtcaggtgatggactcct

SEQ ID NO: 3324703 - DNA, 25 bp, Homo sapien
gagtttccaaacgggccagagagca

SEQ ID NO: 3324704 - DNA, 25 bp, Homo sapien
ggactgagtttccaaacgggccaga

SEQ ID NO: 3324705 - DNA, 25 bp, Homo sapien
gactgagtttccaaacgggccagag

SEQ ID NO: 3324706 - DNA, 25 bp, Homo sapien
agtttccaaacgggccagagagcag

SEQ ID NO: 3324707 - DNA, 25 bp, Homo sapien
tatttccctctacattctgtaatgg

SEQ ID NO: 3324708 - DNA, 25 bp, Homo sapien
taacttgtctccaccttctatgtca

SEQ ID NO: 3324709 - DNA, 25 bp, Homo sapien
ttttctcaagatcaaggcagtgaat

SEQ ID NO: 3324710 - DNA, 25 bp, Homo sapien
tctgtaatggtctcctattaatggg

SEQ ID NO: 3324711 - DNA, 25 bp, Homo sapien
gccaacatgcagttgaaaatatgct

SEQ ID NO: 3324712 - DNA, 25 bp, Homo sapien
caattgagcagaataggcattttat

SEQ ID NO: 3324713 - DNA, 25 bp, Homo sapien
ccatttcacatctactaggatggca

SEQ ID NO: 3324714 - DNA, 25 bp, Homo sapien
tgggcatcaaagaacattgtaaaga

SEQ ID NO: 3324715 - DNA, 25 bp, Homo sapien
tcattaggggactaaatctgtagaa

SEQ ID NO: 3324716 - DNA, 25 bp, Homo sapien
cagataattcctgtagtttattaag

SEQ ID NO: 3324717 - DNA, 25 bp, Homo sapien
gtcagggtagcagttcttaagtaaa

SEQ ID NO: 3324718 - DNA, 25 bp, Homo sapien
cccttgcctttatgtcttaagtggg

SEQ ID NO: 3324719 - DNA, 25 bp, Homo sapien
tgtgaggtagaggacacctaagccc

SEQ ID NO: 3324720 - DNA, 25 bp, Homo sapien
cagtgtaggcattgttaggcttcca

SEQ ID NO: 3324721 - DNA, 25 bp, Homo sapien
gaaaagcttagaagacactgggtct

SEQ ID NO: 3324722 - DNA, 25 bp, Homo sapien
tcagatctgattgaacaagtccagg

SEQ ID NO: 3324723 - DNA, 25 bp, Homo sapien
gattttcagccaagcgtgggaatga

SEQ ID NO: 3324724 - DNA, 25 bp, Homo sapien
taaagtctgggctgtaaccatcacc

SEQ ID NO: 3324725 - DNA, 25 bp, Homo sapien
tcaaagacaagttagtggacaggct

SEQ ID NO: 3324726 - DNA, 25 bp, Homo sapien
caatttgtattttggactgtgcgcc

SEQ ID NO: 3324727 - DNA, 25 bp, Homo sapien
atccttttggcttctactccttcat

SEQ ID NO: 3324728 - DNA, 25 bp, Homo sapien
tccttttggcttctactccttcata

SEQ ID NO: 3324729 - DNA, 25 bp, Homo sapien
cggacagtattcagttcgtttccat

SEQ ID NO: 3324730 - DNA, 25 bp, Homo sapien
tataatttctcggacagtattcagt

SEQ ID NO: 3324731 - DNA, 25 bp, Homo sapien
tcacctataatttctcggacagtat

SEQ ID NO: 3324732 - DNA, 25 bp, Homo sapien
atttctcggacagtattcagttcgt

SEQ ID NO: 3324733 - DNA, 25 bp, Homo sapien
cctgagttcagttccgtctgctaga

SEQ ID NO: 3324734 - DNA, 25 bp, Homo sapien
caatgtttcgaaaagtgcttgattc

SEQ ID NO: 3324735 - DNA, 25 bp, Homo sapien
ccttcttgtgtaattgtcagcttca

SEQ ID NO: 3324736 - DNA, 25 bp, Homo sapien
taattaaaggtgacaccaagttcaa

SEQ ID NO: 3324737 - DNA, 25 bp, Homo sapien
gtcatagttttcactccggtctacc

SEQ ID NO: 3324738 - DNA, 25 bp, Homo sapien
ccttccaagtgctgtcaaacgccat

SEQ ID NO: 3324739 - DNA, 25 bp, Homo sapien
catagttttcactccggtctacctt

SEQ ID NO: 3324740 - DNA, 25 bp, Homo sapien
ttgtcatagttttcactccggtcta

SEQ ID NO: 3324741 - DNA, 25 bp, Homo sapien
gcagctagagattcaggtctgtcct

SEQ ID NO: 3324742 - DNA, 25 bp, Homo sapien
gatttcagttgagtcagcctctagg

SEQ ID NO: 3324743 - DNA, 25 bp, Homo sapien
gagtcagcctctaggcagctagaga

SEQ ID NO: 3324744 - DNA, 25 bp, Homo sapien
tctaggcagctagagattcaggtct

SEQ ID NO: 3324745 - DNA, 25 bp, Homo sapien
cacatttgcgacaatggctgtgcct

SEQ ID NO: 3324746 - DNA, 25 bp, Homo sapien
tgtgcctttagtcaccctcctgtag

SEQ ID NO: 3324747 - DNA, 25 bp, Homo sapien
caatggctgtgcctttagtcaccct

SEQ ID NO: 3324748 - DNA, 25 bp, Homo sapien
ccacatttgcgacaatggctgtgcc

SEQ ID NO: 3324749 - DNA, 25 bp, Homo sapien
tttctgctggtgttaatgtgagtgg

SEQ ID NO: 3324750 - DNA, 25 bp, Homo sapien
ctgcagggaaggtaacaccaagtgc

SEQ ID NO: 3324751 - DNA, 25 bp, Homo sapien
ggcacgggtagccttggctttctgc

SEQ ID NO: 3324752 - DNA, 25 bp, Homo sapien
taacaccaagtgctccttcccttgg

SEQ ID NO: 3324753 - DNA, 25 bp, Homo sapien
cctttcagcagctagtatgtcactg

SEQ ID NO: 3324754 - DNA, 25 bp, Homo sapien
tttcagcagctagtatgtcactggg

SEQ ID NO: 3324755 - DNA, 25 bp, Homo sapien
tcagcagctagtatgtcactgggct

SEQ ID NO: 3324756 - DNA, 25 bp, Homo sapien
accctttcagcagctagtatgtcac

SEQ ID NO: 3324757 - DNA, 25 bp, Homo sapien
aataattgctctttggataacccat

SEQ ID NO: 3324758 - DNA, 25 bp, Homo sapien
aaataagctaggagttgatgtggcc

SEQ ID NO: 3324759 - DNA, 25 bp, Homo sapien
cgtcatgttagcaagctgggtcaat

SEQ ID NO: 3324760 - DNA, 25 bp, Homo sapien
tatgagtgactgatggtcaccaggc

SEQ ID NO: 3324761 - DNA, 25 bp, Homo sapien
taaaactacatcataaaaccaaggc

SEQ ID NO: 3324762 - DNA, 25 bp, Homo sapien
tgcttcagtgtgcttactctgatga

SEQ ID NO: 3324763 - DNA, 25 bp, Homo sapien
tttcaaatgcaagagccgtttgtct

SEQ ID NO: 3324764 - DNA, 25 bp, Homo sapien
tgtgcttactctgatgagtaaggaa

SEQ ID NO: 3324765 - DNA, 25 bp, Homo sapien
tcaaatgcaagagccgtttgtctaa

SEQ ID NO: 3324766 - DNA, 25 bp, Homo sapien
tcacatagcttgtgaagaactccaa

SEQ ID NO: 3324767 - DNA, 25 bp, Homo sapien
catagcttgtgaagaactccaagag

SEQ ID NO: 3324768 - DNA, 25 bp, Homo sapien
cttttccctatcataggcagtagga

SEQ ID NO: 3324769 - DNA, 25 bp, Homo sapien
gcagtaggacttgtgacaggctttt

SEQ ID NO: 3324770 - DNA, 25 bp, Homo sapien
tctccaaggcgtggagtgacagctc

SEQ ID NO: 3324771 - DNA, 25 bp, Homo sapien
tgagacgctctcgtggcttcagcag

SEQ ID NO: 3324772 - DNA, 25 bp, Homo sapien
tgtgaccagaccacccaggttaaat

SEQ ID NO: 3324773 - DNA, 25 bp, Homo sapien
cagtgacagcccgtcgcactgaaca

SEQ ID NO: 3324774 - DNA, 25 bp, Homo sapien
agactcaagtcctgttccagtagtg

SEQ ID NO: 3324775 - DNA, 25 bp, Homo sapien
gactcaagtcctgttccagtagtgt

SEQ ID NO: 3324776 - DNA, 25 bp, Homo sapien
actcaagtcctgttccagtagtgtt

SEQ ID NO: 3324777 - DNA, 25 bp, Homo sapien
cttgctctgattaacattgccatgc

SEQ ID NO: 3324778 - DNA, 25 bp, Homo sapien
gctctgattaacattgccatgctac

SEQ ID NO: 3324779 - DNA, 25 bp, Homo sapien
ctgattaacattgccatgctactca

SEQ ID NO: 3324780 - DNA, 25 bp, Homo sapien
ttgctctgattaacattgccatgct

SEQ ID NO: 3324781 - DNA, 25 bp, Homo sapien
taaaaaagcccaagggcagactaca

SEQ ID NO: 3324782 - DNA, 25 bp, Homo sapien
gcccaagggcagactacagaagaca

SEQ ID NO: 3324783 - DNA, 25 bp, Homo sapien
aagggcagactacagaagacactag

SEQ ID NO: 3324784 - DNA, 25 bp, Homo sapien
ccaagggcagactacagaagacact

SEQ ID NO: 3324785 - DNA, 25 bp, Homo sapien
gagattgagttgtaacccaacccat

SEQ ID NO: 3324786 - DNA, 25 bp, Homo sapien
taatctgaggttcaaaccgctccat

SEQ ID NO: 3324787 - DNA, 25 bp, Homo sapien
tctggagattgagttgtaacccaac

SEQ ID NO: 3324788 - DNA, 25 bp, Homo sapien
gcattaatctgaggttcaaaccgct

SEQ ID NO: 3324789 - DNA, 25 bp, Homo sapien
ggcatccaaaatctctcgaatatgg

SEQ ID NO: 3324790 - DNA, 25 bp, Homo sapien
aaatctctcgaatatggaaacaaac

SEQ ID NO: 3324791 - DNA, 25 bp, Homo sapien
tggcatccaaaatctctcgaatatg

SEQ ID NO: 3324792 - DNA, 25 bp, Homo sapien
tccaaaatctctcgaatatggaaac

SEQ ID NO: 3324793 - DNA, 25 bp, Homo sapien
gctcccaataaggtgcatataaccc

SEQ ID NO: 3324794 - DNA, 25 bp, Homo sapien
ctgggctcccaataaggtgcatata

SEQ ID NO: 3324795 - DNA, 25 bp, Homo sapien
agcttctaatgcagcaaaagcaata

SEQ ID NO: 3324796 - DNA, 25 bp, Homo sapien
cttctaatgcagcaaaagcaatatg

SEQ ID NO: 3324797 - DNA, 25 bp, Homo sapien
tgttgaaaagcatagtcctacttgc

SEQ ID NO: 3324798 - DNA, 25 bp, Homo sapien
caatattgagctgtccaagtttctc

SEQ ID NO: 3324799 - DNA, 25 bp, Homo sapien
tatacactcatagacagaatgtaga

SEQ ID NO: 3324800 - DNA, 25 bp, Homo sapien
tgttacatctgtacagtggacacct

SEQ ID NO: 3324801 - DNA, 25 bp, Homo sapien
aggtccgcccgcatttgcggccggt

SEQ ID NO: 3324802 - DNA, 25 bp, Homo sapien
accagcttcaggtccgcccgcattt

SEQ ID NO: 3324803 - DNA, 25 bp, Homo sapien
ttcaggtccgcccgcatttgcggcc

SEQ ID NO: 3324804 - DNA, 25 bp, Homo sapien
agcttcaggtccgcccgcatttgcg

SEQ ID NO: 3324805 - DNA, 25 bp, Homo sapien
aagaacttctaatagtaagtgtttg

SEQ ID NO: 3324806 - DNA, 25 bp, Homo sapien
ttagagcaacgtacagaagaacttc

SEQ ID NO: 3324807 - DNA, 25 bp, Homo sapien
aaaaagattttagagcaacgtacag

SEQ ID NO: 3324808 - DNA, 25 bp, Homo sapien
aagattttagagcaacgtacagaag

SEQ ID NO: 3324809 - DNA, 25 bp, Homo sapien
gcgaatgacgaggagcacatggtca

SEQ ID NO: 3324810 - DNA, 25 bp, Homo sapien
tagcgaatgacgaggagcacatggt

SEQ ID NO: 3324811 - DNA, 25 bp, Homo sapien
gaatgacgaggagcacatggtcatc

SEQ ID NO: 3324812 - DNA, 25 bp, Homo sapien
acatagcgaatgacgaggagcacat

SEQ ID NO: 3324813 - DNA, 25 bp, Homo sapien
gagccgctgcatggtcccagaggct

SEQ ID NO: 3324814 - DNA, 25 bp, Homo sapien
ctgggagccgctgcatggtcccaga

SEQ ID NO: 3324815 - DNA, 25 bp, Homo sapien
gccactgggagccgctgcatggtcc

SEQ ID NO: 3324816 - DNA, 25 bp, Homo sapien
cactgggagccgctgcatggtccca

SEQ ID NO: 3324817 - DNA, 25 bp, Homo sapien
tgtgggaccttcagagcttttcact

SEQ ID NO: 3324818 - DNA, 25 bp, Homo sapien
tagagtccaagaggctgccagaagt

SEQ ID NO: 3324819 - DNA, 25 bp, Homo sapien
gggatattttttattgtgccagaaa

SEQ ID NO: 3324820 - DNA, 25 bp, Homo sapien
cggggatattttttattgtgccaga

SEQ ID NO: 3324821 - DNA, 25 bp, Homo sapien
tccaagaggctgccagaagtgaaaa

SEQ ID NO: 3324822 - DNA, 25 bp, Homo sapien
agcgggacctgggaaggccgctgag

SEQ ID NO: 3324823 - DNA, 25 bp, Homo sapien
aaagcgggacctgggaaggccgctg

SEQ ID NO: 3324824 - DNA, 25 bp, Homo sapien
gggacctgggaaggccgctgagagc

SEQ ID NO: 3324825 - DNA, 25 bp, Homo sapien
gcgggacctgggaaggccgctgaga

SEQ ID NO: 3324826 - DNA, 25 bp, Homo sapien
ggagacgcaaccaggaagaagagct

SEQ ID NO: 3324827 - DNA, 25 bp, Homo sapien
tgggcccagagaggacacccggagg

SEQ ID NO: 3324828 - DNA, 25 bp, Homo sapien
agctgggcccagagaggacacccgg

SEQ ID NO: 3324829 - DNA, 25 bp, Homo sapien
gcccagagaggacacccggagggtg

SEQ ID NO: 3324830 - DNA, 25 bp, Homo sapien
gccaggccttgtcgaggcctgcaga

SEQ ID NO: 3324831 - DNA, 25 bp, Homo sapien
aggccttgtcgaggcctgcagaggc

SEQ ID NO: 3324832 - DNA, 25 bp, Homo sapien
aggccaggccttgtcgaggcctgca

SEQ ID NO: 3324833 - DNA, 25 bp, Homo sapien
aggaggccaggccttgtcgaggcct

SEQ ID NO: 3324834 - DNA, 25 bp, Homo sapien
cctggggaagccgacttgagaacga

SEQ ID NO: 3324835 - DNA, 25 bp, Homo sapien
tggggaagccgacttgagaacgact

SEQ ID NO: 3324836 - DNA, 25 bp, Homo sapien
gaagccgacttgagaacgacttggg

SEQ ID NO: 3324837 - DNA, 25 bp, Homo sapien
gggaagccgacttgagaacgacttg

SEQ ID NO: 3324838 - DNA, 25 bp, Homo sapien
ctgcagaggccgccgagaggaagag

SEQ ID NO: 3324839 - DNA, 25 bp, Homo sapien
agaggccgccgagaggaagagctgg

SEQ ID NO: 3324840 - DNA, 25 bp, Homo sapien
ctggagaggccgactggaggaagtc

SEQ ID NO: 3324841 - DNA, 25 bp, Homo sapien
ggagaggccgactggaggaagtcca

SEQ ID NO: 3324842 - DNA, 25 bp, Homo sapien
caaatgctcagttttcggaggatgc

SEQ ID NO: 3324843 - DNA, 25 bp, Homo sapien
aaaaggaaacgctcagcctggaaag

SEQ ID NO: 3324844 - DNA, 25 bp, Homo sapien
gctgagttaggagaggccaactttt

SEQ ID NO: 3324845 - DNA, 25 bp, Homo sapien
tagcttggcctacacagcacttgga

SEQ ID NO: 3324846 - DNA, 25 bp, Homo sapien
gcaggagatgggcctgtagacgcac

SEQ ID NO: 3324847 - DNA, 25 bp, Homo sapien
gctcagcaggagttgggccaaagga

SEQ ID NO: 3324848 - DNA, 25 bp, Homo sapien
tcagcaggagttgggccaaaggagg

SEQ ID NO: 3324849 - DNA, 25 bp, Homo sapien
gcagctcagcaggagttgggccaaa

SEQ ID NO: 3324850 - DNA, 25 bp, Homo sapien
cgtcctggagatgccgagttaagga

SEQ ID NO: 3324851 - DNA, 25 bp, Homo sapien
tgggaggatgagctcgtcctggaga

SEQ ID NO: 3324852 - DNA, 25 bp, Homo sapien
taaggacattctgggcctggacagg

SEQ ID NO: 3324853 - DNA, 25 bp, Homo sapien
agttaaggacattctgggcctggac

SEQ ID NO: 3324854 - DNA, 25 bp, Homo sapien
agctggccccgtagaggctgccgaa

SEQ ID NO: 3324855 - DNA, 25 bp, Homo sapien
ggagctggccccgtagaggctgccg

SEQ ID NO: 3324856 - DNA, 25 bp, Homo sapien
caggagctggccccgtagaggctgc

SEQ ID NO: 3324857 - DNA, 25 bp, Homo sapien
ggcaggagctggccccgtagaggct

SEQ ID NO: 3324858 - DNA, 25 bp, Homo sapien
actgggccaaaaaaggctgttgtga

SEQ ID NO: 3324859 - DNA, 25 bp, Homo sapien
aactgggccaaaaaaggctgttgtg

SEQ ID NO: 3324860 - DNA, 25 bp, Homo sapien
ggagctgtgcctggagaggtcactg

SEQ ID NO: 3324861 - DNA, 25 bp, Homo sapien
ctgtgcctggagaggtcactgtgag

SEQ ID NO: 3324862 - DNA, 25 bp, Homo sapien
tgacgttctgggacaggagctgtgc

SEQ ID NO: 3324863 - DNA, 25 bp, Homo sapien
tgcctggagaggtcactgtgaggca

SEQ ID NO: 3324864 - DNA, 25 bp, Homo sapien
tagggtatgggcctaaataggccat

SEQ ID NO: 3324865 - DNA, 25 bp, Homo sapien
agggtatgggcctaaataggccatt

SEQ ID NO: 3324866 - DNA, 25 bp, Homo sapien
gtagggtatgggcctaaataggcca

SEQ ID NO: 3324867 - DNA, 25 bp, Homo sapien
gggtatgggcctaaataggccattg

SEQ ID NO: 3324868 - DNA, 25 bp, Homo sapien
gtgggcatgttaagcttgttttcct

SEQ ID NO: 3324869 - DNA, 25 bp, Homo sapien
gaatcagtgggcatgttaagcttgt

SEQ ID NO: 3324870 - DNA, 25 bp, Homo sapien
atcagtgggcatgttaagcttgttt

SEQ ID NO: 3324871 - DNA, 25 bp, Homo sapien
cagtgggcatgttaagcttgttttc

SEQ ID NO: 3324872 - DNA, 25 bp, Homo sapien
catgcacggttcacaacagggtgca

SEQ ID NO: 3324873 - DNA, 25 bp, Homo sapien
atgcacggttcacaacagggtgcat

SEQ ID NO: 3324874 - DNA, 25 bp, Homo sapien
caacagggtgcattctcctatgaga

SEQ ID NO: 3324875 - DNA, 25 bp, Homo sapien
ttcacaacagggtgcattctcctat

SEQ ID NO: 3324876 - DNA, 25 bp, Homo sapien
tcagctgtgatagcactactacact

SEQ ID NO: 3324877 - DNA, 25 bp, Homo sapien
caccactctggaatccacttatatg

SEQ ID NO: 3324878 - DNA, 25 bp, Homo sapien
tctcagccacgtgggaggttgagat

SEQ ID NO: 3324879 - DNA, 25 bp, Homo sapien
atgggagaatcacttcagcctggaa

SEQ ID NO: 3324880 - DNA, 25 bp, Homo sapien
tgtgatagcactactgtactcaagc

SEQ ID NO: 3324881 - DNA, 25 bp, Homo sapien
gctcaggtaggaggatccttagccc

SEQ ID NO: 3324882 - DNA, 25 bp, Homo sapien
tcaggtaggaggatccttagcccag

SEQ ID NO: 3324883 - DNA, 25 bp, Homo sapien
aggctcaggtaggaggatccttagc

SEQ ID NO: 3324884 - DNA, 25 bp, Homo sapien
taacatgttgcccagtcagtctctc

SEQ ID NO: 3324885 - DNA, 25 bp, Homo sapien
cagaagtctttcatggtagatccag

SEQ ID NO: 3324886 - DNA, 25 bp, Homo sapien
gtctctcttcctggattcagaagtc

SEQ ID NO: 3324887 - DNA, 25 bp, Homo sapien
ggattcagaagtctttcatggtaga

SEQ ID NO: 3324888 - DNA, 25 bp, Homo sapien
catttcacaatcaacagtatgtggt

SEQ ID NO: 3324889 - DNA, 25 bp, Homo sapien
tcgaaaggatccatcccatgccatt

SEQ ID NO: 3324890 - DNA, 25 bp, Homo sapien
cattcgaaaggatccatcccatgcc

SEQ ID NO: 3324891 - DNA, 25 bp, Homo sapien
gtgcattcgaaaggatccatcccat

SEQ ID NO: 3324892 - DNA, 25 bp, Homo sapien
caaaaagaaaaaacgtatacatatg

SEQ ID NO: 3324893 - DNA, 25 bp, Homo sapien
tgtgagacccggtatcaaaaagaaa

SEQ ID NO: 3324894 - DNA, 25 bp, Homo sapien
cagtgtgagacccggtatcaaaaag

SEQ ID NO: 3324895 - DNA, 25 bp, Homo sapien
gacagtgtgagacccggtatcaaaa

SEQ ID NO: 3324896 - DNA, 25 bp, Homo sapien
gctacaacaaagtaccctacattta

SEQ ID NO: 3324897 - DNA, 25 bp, Homo sapien
caaagtaccctacatttagtggcat

SEQ ID NO: 3324898 - DNA, 25 bp, Homo sapien
aagtaccctacatttagtggcatca

SEQ ID NO: 3324899 - DNA, 25 bp, Homo sapien
caacaaagtaccctacatttagtgg

SEQ ID NO: 3324900 - DNA, 25 bp, Homo sapien
catgatactatctgacaagggcagt

SEQ ID NO: 3324901 - DNA, 25 bp, Homo sapien
caagggcagtgatgcatgataacat

SEQ ID NO: 3324902 - DNA, 25 bp, Homo sapien
ccaagtcttcatcattttgtgcata

SEQ ID NO: 3324903 - DNA, 25 bp, Homo sapien
ggcaaatcgctcattaaccccaagt

SEQ ID NO: 3324904 - DNA, 25 bp, Homo sapien
gcactattatttgatcatttttgag

SEQ ID NO: 3324905 - DNA, 25 bp, Homo sapien
gcatgcactattatttgatcatttt

SEQ ID NO: 3324906 - DNA, 25 bp, Homo sapien
cccattgcacttgatgcatgcacta

SEQ ID NO: 3324907 - DNA, 25 bp, Homo sapien
cttcccattgcacttgatgcatgca

SEQ ID NO: 3324908 - DNA, 25 bp, Homo sapien
gagcaatattcccatctaatttcta

SEQ ID NO: 3324909 - DNA, 25 bp, Homo sapien
caggtgtgcactgcaacgtgtagct

SEQ ID NO: 3324910 - DNA, 25 bp, Homo sapien
ttgagcaatattcccatctaatttc

SEQ ID NO: 3324911 - DNA, 25 bp, Homo sapien
cactgcaacgtgtagctcatttttt

SEQ ID NO: 3324912 - DNA, 25 bp, Homo sapien
tcacagaggccgtgccaatctctct

SEQ ID NO: 3324913 - DNA, 25 bp, Homo sapien
acttaagtatgtgtgctactgaggc

SEQ ID NO: 3324914 - DNA, 25 bp, Homo sapien
taagtatgtgtgctactgaggcaag

SEQ ID NO: 3324915 - DNA, 25 bp, Homo sapien
aagtatgtgtgctactgaggcaagc

SEQ ID NO: 3324916 - DNA, 25 bp, Homo sapien
gaaactagtatttatcgatcttgat

SEQ ID NO: 3324917 - DNA, 25 bp, Homo sapien
cactgggaaactagtatttatcgat

SEQ ID NO: 3324918 - DNA, 25 bp, Homo sapien
gggaaactagtatttatcgatcttg

SEQ ID NO: 3324919 - DNA, 25 bp, Homo sapien
ctagtatttatcgatcttgataaga

SEQ ID NO: 3324920 - DNA, 25 bp, Homo sapien
cagtgaccagcaaggttgcgccatt

SEQ ID NO: 3324921 - DNA, 25 bp, Homo sapien
gcagtgaccagcaaggttgcgccat

SEQ ID NO: 3324922 - DNA, 25 bp, Homo sapien
cctgggcgataagagtgaaaactcc

SEQ ID NO: 3324923 - DNA, 25 bp, Homo sapien
gggcgataagagtgaaaactccatc

SEQ ID NO: 3324924 - DNA, 25 bp, Homo sapien
gaaaaaagggtatgggatcatcacc

SEQ ID NO: 3324925 - DNA, 25 bp, Homo sapien
aaagggtatgggatcatcaccggac

SEQ ID NO: 3324926 - DNA, 25 bp, Homo sapien
aaaagggtatgggatcatcaccgga

SEQ ID NO: 3324927 - DNA, 25 bp, Homo sapien
gactggaaaaaagggtatgggatca

SEQ ID NO: 3324928 - DNA, 25 bp, Homo sapien
ttcacctgttgaattcattaagttc

SEQ ID NO: 3324929 - DNA, 25 bp, Homo sapien
ctcaggaagctgatttatcaagttg

SEQ ID NO: 3324930 - DNA, 25 bp, Homo sapien
tcttcacctgttgaattcattaagt

SEQ ID NO: 3324931 - DNA, 25 bp, Homo sapien
aatcttcacctgttgaattcattaa

SEQ ID NO: 3324932 - DNA, 25 bp, Homo sapien
tttacgtagatgagcgatacaatta

SEQ ID NO: 3324933 - DNA, 25 bp, Homo sapien
acgtagatgagcgatacaattattc

SEQ ID NO: 3324934 - DNA, 25 bp, Homo sapien
ttacgtagatgagcgatacaattat

SEQ ID NO: 3324935 - DNA, 25 bp, Homo sapien
gtagatgagcgatacaattattcca

SEQ ID NO: 3324936 - DNA, 25 bp, Homo sapien
cacctccacgaccaggaaacggatt

SEQ ID NO: 3324937 - DNA, 25 bp, Homo sapien
ttcgagactggcagcacaagctgag

SEQ ID NO: 3324938 - DNA, 25 bp, Homo sapien
ccggatccttataagagcaaagcag

SEQ ID NO: 3324939 - DNA, 25 bp, Homo sapien
aggaaactccagtcattcgagactg

SEQ ID NO: 3324940 - DNA, 25 bp, Homo sapien
caggcagaaggaagcgcctcctcat

SEQ ID NO: 3324941 - DNA, 25 bp, Homo sapien
gcagacattccattgctgtgggcca

SEQ ID NO: 3324942 - DNA, 25 bp, Homo sapien
gaaggttttcagttctgccagcagt

SEQ ID NO: 3324943 - DNA, 25 bp, Homo sapien
aggaagcgcctcctcatggcagagg

SEQ ID NO: 3324944 - DNA, 25 bp, Homo sapien
cacagctccccatggttatggcccc

SEQ ID NO: 3324945 - DNA, 25 bp, Homo sapien
gcccaagggcctgtagaaaaccaca

SEQ ID NO: 3324946 - DNA, 25 bp, Homo sapien
tccccatggttatggccccaggagt

SEQ ID NO: 3324947 - DNA, 25 bp, Homo sapien
gggcctgtagaaaaccacagctccc

SEQ ID NO: 3324948 - DNA, 25 bp, Homo sapien
gcatgtggggactgtgaaatcgccc

SEQ ID NO: 3324949 - DNA, 25 bp, Homo sapien
ctgagatgacccacagtcctcagct

SEQ ID NO: 3324950 - DNA, 25 bp, Homo sapien
ggactgtgaaatcgccctgagatga

SEQ ID NO: 3324951 - DNA, 25 bp, Homo sapien
cctgagatgacccacagtcctcagc

SEQ ID NO: 3324952 - DNA, 25 bp, Homo sapien
agtgaaggtcctcacaccaagatat

SEQ ID NO: 3324953 - DNA, 25 bp, Homo sapien
caccgaggtgaccagtaggcattcc

SEQ ID NO: 3324954 - DNA, 25 bp, Homo sapien
tcaccgaggtgaccagtaggcattc

SEQ ID NO: 3324955 - DNA, 25 bp, Homo sapien
taggcattcccagatacagtgaagg

SEQ ID NO: 3324956 - DNA, 25 bp, Homo sapien
agatgcacctggcatgaggcgtgcc

SEQ ID NO: 3324957 - DNA, 25 bp, Homo sapien
acagaggcagatgagtttcgtctcc

SEQ ID NO: 3324958 - DNA, 25 bp, Homo sapien
aggagcatggcccctgtccacagat

SEQ ID NO: 3324959 - DNA, 25 bp, Homo sapien
gatgagtttcgtctcctccactgga

SEQ ID NO: 3324960 - DNA, 25 bp, Homo sapien
gatgatacaacgtcctatactttgg

SEQ ID NO: 3324961 - DNA, 25 bp, Homo sapien
aaaggtcgtggatttcgctgagaac

SEQ ID NO: 3324962 - DNA, 25 bp, Homo sapien
ttaataaattagcagctggcaggca

SEQ ID NO: 3324963 - DNA, 25 bp, Homo sapien
catcagtcacattgagagtccagaa

SEQ ID NO: 3324964 - DNA, 25 bp, Homo sapien
tcattttccgttccccagcattagc

SEQ ID NO: 3324965 - DNA, 25 bp, Homo sapien
attttccgttccccagcattagcgg

SEQ ID NO: 3324966 - DNA, 25 bp, Homo sapien
cctcattttccgttccccagcatta

SEQ ID NO: 3324967 - DNA, 25 bp, Homo sapien
tgccagagttgaactccctcatttt

SEQ ID NO: 3324968 - DNA, 25 bp, Homo sapien
gctgagcagggctttaaagctatct

SEQ ID NO: 3324969 - DNA, 25 bp, Homo sapien
tagtttacagccacctctgggtcaa

SEQ ID NO: 3324970 - DNA, 25 bp, Homo sapien
tttgggatgtgctcaagtgaatact

SEQ ID NO: 3324971 - DNA, 25 bp, Homo sapien
gggtcaattcccaacattcaaaagc

SEQ ID NO: 3324972 - DNA, 25 bp, Homo sapien
ccttgaaccgttgggttcatacttg

SEQ ID NO: 3324973 - DNA, 25 bp, Homo sapien
tgaaccgttgggttcatacttgagg

SEQ ID NO: 3324974 - DNA, 25 bp, Homo sapien
ttgaaccgttgggttcatacttgag

SEQ ID NO: 3324975 - DNA, 25 bp, Homo sapien
agccttgaaccgttgggttcatact

SEQ ID NO: 3324976 - DNA, 25 bp, Homo sapien
tcgccagaggcccacctctatggtg

SEQ ID NO: 3324977 - DNA, 25 bp, Homo sapien
cccacgcctctgacgtcgccagagg

SEQ ID NO: 3324978 - DNA, 25 bp, Homo sapien
cacctctatggtgtcggcgaaggcg

SEQ ID NO: 3324979 - DNA, 25 bp, Homo sapien
cgtagggccccagtgacgtagccga

SEQ ID NO: 3324980 - DNA, 25 bp, Homo sapien
gataaacaccttactgactgccttc

SEQ ID NO: 3324981 - DNA, 25 bp, Homo sapien
gctcactcgcattcagtattacaac

SEQ ID NO: 3324982 - DNA, 25 bp, Homo sapien
tcatttccagaaccctagtttcttc

SEQ ID NO: 3324983 - DNA, 25 bp, Homo sapien
tctaaaaacttgatcctacatgctt

SEQ ID NO: 3324984 - DNA, 25 bp, Homo sapien
taacatgacaggtttgtataccaac

SEQ ID NO: 3324985 - DNA, 25 bp, Homo sapien
ccaaaataacgtagctagatagaag

SEQ ID NO: 3324986 - DNA, 25 bp, Homo sapien
tcttcttagcaaaggtcaccaaact

SEQ ID NO: 3324987 - DNA, 25 bp, Homo sapien
gatgcagtggataacagtaattggt

SEQ ID NO: 3324988 - DNA, 25 bp, Homo sapien
aaattatgcattcttgacaaaattg

SEQ ID NO: 3324989 - DNA, 25 bp, Homo sapien
gcatggcaaaatgaggaaaccactg

SEQ ID NO: 3324990 - DNA, 25 bp, Homo sapien
catggcaaaatgaggaaaccactga

SEQ ID NO: 3324991 - DNA, 25 bp, Homo sapien
tatttttacaaagcatggcaaaatg

SEQ ID NO: 3324992 - DNA, 25 bp, Homo sapien
tacaaagcatggcaaaatgaggaaa

SEQ ID NO: 3324993 - DNA, 25 bp, Homo sapien
cagagcacggtacctaacatgtggc

SEQ ID NO: 3324994 - DNA, 25 bp, Homo sapien
tccacccaggattgtgattggcacg

SEQ ID NO: 3324995 - DNA, 25 bp, Homo sapien
catgactttatacaggaatcggagg

SEQ ID NO: 3324996 - DNA, 25 bp, Homo sapien
taaaggcacttcactgctaggcaag

SEQ ID NO: 3324997 - DNA, 25 bp, Homo sapien
tgacacacatacaaagcctctaaac

SEQ ID NO: 3324998 - DNA, 25 bp, Homo sapien
atttctcagtgacacatactagagg

SEQ ID NO: 3324999 - DNA, 25 bp, Homo sapien
tcctttaatgtctcaactagtaaag

SEQ ID NO: 3325000 - DNA, 25 bp, Homo sapien
caaactactaaagcataagtacata

SEQ ID NO: 3325001 - DNA, 25 bp, Homo sapien
taggcatattgcagaacacaccatc

SEQ ID NO: 3325002 - DNA, 25 bp, Homo sapien
cacattttggcgaaaggtccttgag

SEQ ID NO: 3325003 - DNA, 25 bp, Homo sapien
ttcaactctgcatgaaataggccac

SEQ ID NO: 3325004 - DNA, 25 bp, Homo sapien
cattgaatgtgagttaagggccagt

SEQ ID NO: 3325005 - DNA, 25 bp, Homo sapien
ctttctgcagccatctagcaaaggg

SEQ ID NO: 3325006 - DNA, 25 bp, Homo sapien
ttctgcagccatctagcaaagggaa

SEQ ID NO: 3325007 - DNA, 25 bp, Homo sapien
tcagttccgcttggcctggccgctt

SEQ ID NO: 3325008 - DNA, 25 bp, Homo sapien
ggccgctttccccattaatcagcat

SEQ ID NO: 3325009 - DNA, 25 bp, Homo sapien
tactatgttgactgtatttacaggg

SEQ ID NO: 3325010 - DNA, 25 bp, Homo sapien
tagggcagggttccactcccattgc

SEQ ID NO: 3325011 - DNA, 25 bp, Homo sapien
gtcagtatcacatagaattttcaac

SEQ ID NO: 3325012 - DNA, 25 bp, Homo sapien
ccacacccgcgcttataatagaaaa

SEQ ID NO: 3325013 - DNA, 25 bp, Homo sapien
atggttcttttggtatctctccttc

SEQ ID NO: 3325014 - DNA, 25 bp, Homo sapien
tattaaattcttttgatggcgagaa

SEQ ID NO: 3325015 - DNA, 25 bp, Homo sapien
gggcaaatagtctgtctcgttggga

SEQ ID NO: 3325016 - DNA, 25 bp, Homo sapien
gaactggactgtagatgcacctctc

SEQ ID NO: 3325017 - DNA, 25 bp, Homo sapien
tttagaagcaaaatataggcgccta

SEQ ID NO: 3325018 - DNA, 25 bp, Homo sapien
gtccaagtttagcaagtctagtagt

SEQ ID NO: 3325019 - DNA, 25 bp, Homo sapien
tttaggttctaattcacaacagtcc

SEQ ID NO: 3325020 - DNA, 25 bp, Homo sapien
tatatacagtattgctccttgaggg

SEQ ID NO: 3325021 - DNA, 25 bp, Homo sapien
tgaacccaacttgcatacttgggat

SEQ ID NO: 3325022 - DNA, 25 bp, Homo sapien
atctatgaacccaacttgcatactt

SEQ ID NO: 3325023 - DNA, 25 bp, Homo sapien
cccaacttgcatacttgggattttg

SEQ ID NO: 3325024 - DNA, 25 bp, Homo sapien
tatgaacccaacttgcatacttggg

SEQ ID NO: 3325025 - DNA, 25 bp, Homo sapien
agcctccctagtcaggtgtgcagta

SEQ ID NO: 3325026 - DNA, 25 bp, Homo sapien
caaagctggctctagaaaggtgaat

SEQ ID NO: 3325027 - DNA, 25 bp, Homo sapien
ctagtcaggtgtgcagtaccacgcc

SEQ ID NO: 3325028 - DNA, 25 bp, Homo sapien
aaggtgaatcagtgggttagcctag

SEQ ID NO: 3325029 - DNA, 25 bp, Homo sapien
aagatcccatagagccataaaaagg

SEQ ID NO: 3325030 - DNA, 25 bp, Homo sapien
tgaacccaagagtctttattatgcc

SEQ ID NO: 3325031 - DNA, 25 bp, Homo sapien
taattcctaccaacaaggtttcata

SEQ ID NO: 3325032 - DNA, 25 bp, Homo sapien
tgagaaattgtggtcctaaggaaag

SEQ ID NO: 3325033 - DNA, 25 bp, Homo sapien
aaaaattcagttgctacaagttctg

SEQ ID NO: 3325034 - DNA, 25 bp, Homo sapien
attcagttgctacaagttctgctat

SEQ ID NO: 3325035 - DNA, 25 bp, Homo sapien
aaaattcagttgctacaagttctgc

SEQ ID NO: 3325036 - DNA, 25 bp, Homo sapien
ctctgtctccttgatcaaaaaattc

SEQ ID NO: 3325037 - DNA, 25 bp, Homo sapien
taacagactcagttttgacaatgaa

SEQ ID NO: 3325038 - DNA, 25 bp, Homo sapien
cctgttaggagctgtatatctccat

SEQ ID NO: 3325039 - DNA, 25 bp, Homo sapien
tgaaggccctgttaggagctgtata

SEQ ID NO: 3325040 - DNA, 25 bp, Homo sapien
ttaaaacagagaccgtgaatgaagg

SEQ ID NO: 3325041 - DNA, 25 bp, Homo sapien
cgttgttgaataggccagggttttg

SEQ ID NO: 3325042 - DNA, 25 bp, Homo sapien
ttgtaattgcagaaagatcacaagc

SEQ ID NO: 3325043 - DNA, 25 bp, Homo sapien
gaataggccagggttttgtaattgc

SEQ ID NO: 3325044 - DNA, 25 bp, Homo sapien
ccagggttttgtaattgcagaaaga

SEQ ID NO: 3325045 - DNA, 25 bp, Homo sapien
tccattacaatgaattaggaaaatg

SEQ ID NO: 3325046 - DNA, 25 bp, Homo sapien
cattttgcagctatatcttacttcc

SEQ ID NO: 3325047 - DNA, 25 bp, Homo sapien
aatgaataagggaaacctatagcca

SEQ ID NO: 3325048 - DNA, 25 bp, Homo sapien
gaaatctgaccgcttttaagatcat

SEQ ID NO: 3325049 - DNA, 25 bp, Homo sapien
tgatgaggatcttccaaattgaatt

SEQ ID NO: 3325050 - DNA, 25 bp, Homo sapien
tataagttcaaaaaattctcctcgc

SEQ ID NO: 3325051 - DNA, 25 bp, Homo sapien
cttttgatgaggatcttccaaattg

SEQ ID NO: 3325052 - DNA, 25 bp, Homo sapien
aaaacaactccttttgatgaggatc

SEQ ID NO: 3325053 - DNA, 25 bp, Homo sapien
aagactcatggactaaattttggtg

SEQ ID NO: 3325054 - DNA, 25 bp, Homo sapien
gtcttatccctttggtccacaaaga

SEQ ID NO: 3325055 - DNA, 25 bp, Homo sapien
tgttagttataatgagtacccaggg

SEQ ID NO: 3325056 - DNA, 25 bp, Homo sapien
caggtattttaagtgcatggcataa

SEQ ID NO: 3325057 - DNA, 25 bp, Homo sapien
ttatattcttcaatggagaggccac

SEQ ID NO: 3325058 - DNA, 25 bp, Homo sapien
tgcttgattattttcaacgtggtct

SEQ ID NO: 3325059 - DNA, 25 bp, Homo sapien
tattttcaacgtggtcttatattct

SEQ ID NO: 3325060 - DNA, 25 bp, Homo sapien
taggtctgtagctaaaatagcttgc

SEQ ID NO: 3325061 - DNA, 25 bp, Homo sapien
ttaagaatcatcaggcactggtcaa

SEQ ID NO: 3325062 - DNA, 25 bp, Homo sapien
attaagaatcatcaggcactggtca

SEQ ID NO: 3325063 - DNA, 25 bp, Homo sapien
tattaagaatcatcaggcactggtc

SEQ ID NO: 3325064 - DNA, 25 bp, Homo sapien
tgaatggcagtaaagctgggcaagt

SEQ ID NO: 3325065 - DNA, 25 bp, Homo sapien
gtaaagctgggcaagtggatgttca

SEQ ID NO: 3325066 - DNA, 25 bp, Homo sapien
agtaaagctgggcaagtggatgttc

SEQ ID NO: 3325067 - DNA, 25 bp, Homo sapien
gattgaatggcagtaaagctgggca

SEQ ID NO: 3325068 - DNA, 25 bp, Homo sapien
cagctactaggttctactgggcaca

SEQ ID NO: 3325069 - DNA, 25 bp, Homo sapien
tattcaccacaggacaaagcaagat

SEQ ID NO: 3325070 - DNA, 25 bp, Homo sapien
taggcatctggctcaagttggctct

SEQ ID NO: 3325071 - DNA, 25 bp, Homo sapien
cacataatgatggacagggctccgc

SEQ ID NO: 3325072 - DNA, 25 bp, Homo sapien
cccagtttgaacttcacacatgatt

SEQ ID NO: 3325073 - DNA, 25 bp, Homo sapien
tgtgctgtgtgtagtgcccttttaa

SEQ ID NO: 3325074 - DNA, 25 bp, Homo sapien
gtgtgtagtgcccttttaagtctct

SEQ ID NO: 3325075 - DNA, 25 bp, Homo sapien
gctgtgtgtagtgcccttttaagtc

SEQ ID NO: 3325076 - DNA, 25 bp, Homo sapien
tgtcctctattagagcagagaagac

SEQ ID NO: 3325077 - DNA, 25 bp, Homo sapien
gagaagacagtcatgggatagaaca

SEQ ID NO: 3325078 - DNA, 25 bp, Homo sapien
tacagtgtgactgtggctaccagga

SEQ ID NO: 3325079 - DNA, 25 bp, Homo sapien
accatgacttcagctcacttctgtc

SEQ ID NO: 3325080 - DNA, 25 bp, Homo sapien
cattcgttcgatcattttaccactt

SEQ ID NO: 3325081 - DNA, 25 bp, Homo sapien
actaccaccctatttattatcttct

SEQ ID NO: 3325082 - DNA, 25 bp, Homo sapien
aacacattcgttcgatcattttacc

SEQ ID NO: 3325083 - DNA, 25 bp, Homo sapien
ttgaaaaaaacacattcgttcgatc

SEQ ID NO: 3325084 - DNA, 25 bp, Homo sapien
gaacacttacagtccatgcactaaa

SEQ ID NO: 3325085 - DNA, 25 bp, Homo sapien
tgcagacctaatgcaggtaatctct

SEQ ID NO: 3325086 - DNA, 25 bp, Homo sapien
gcttacctcatggtgctcctgaaat

SEQ ID NO: 3325087 - DNA, 25 bp, Homo sapien
taactcaggactagatactttcttg

SEQ ID NO: 3325088 - DNA, 25 bp, Homo sapien
tgtcctaacggatagtgtctcactc

SEQ ID NO: 3325089 - DNA, 25 bp, Homo sapien
tttcccatcaaaggtcagcagagga

SEQ ID NO: 3325090 - DNA, 25 bp, Homo sapien
cagggcaatatagcatcttagagca

SEQ ID NO: 3325091 - DNA, 25 bp, Homo sapien
tggaatttccttgagagatctgccc

SEQ ID NO: 3325092 - DNA, 25 bp, Homo sapien
tcagcaatgcaagtatctccaggtc

SEQ ID NO: 3325093 - DNA, 25 bp, Homo sapien
ggcttagtgcagcaatcagcaatgc

SEQ ID NO: 3325094 - DNA, 25 bp, Homo sapien
cgctgtatgtaagagttattcacac

SEQ ID NO: 3325095 - DNA, 25 bp, Homo sapien
tcacaccacggtgatccaaatcgtg

SEQ ID NO: 3325096 - DNA, 25 bp, Homo sapien
tgtcattcagaatgggatcaccaca

SEQ ID NO: 3325097 - DNA, 25 bp, Homo sapien
tatcagttgctgtgtccttaaggaa

SEQ ID NO: 3325098 - DNA, 25 bp, Homo sapien
tcacaaaggactaaccctagaatcc

SEQ ID NO: 3325099 - DNA, 25 bp, Homo sapien
tctgtccacctatagtaagtattgc

SEQ ID NO: 3325100 - DNA, 25 bp, Homo sapien
cacttcttttagatttagccagtta

SEQ ID NO: 3325101 - DNA, 25 bp, Homo sapien
ggcaacattcttccgataattcttc

SEQ ID NO: 3325102 - DNA, 25 bp, Homo sapien
tgcttttagagcagcaaacatgcac

SEQ ID NO: 3325103 - DNA, 25 bp, Homo sapien
tgagctgtattaaaggcatgtctcc

SEQ ID NO: 3325104 - DNA, 25 bp, Homo sapien
tctccaattatgataggcaacattc

SEQ ID NO: 3325105 - DNA, 25 bp, Homo sapien
tgtgtcaccaactaggagagtccaa

SEQ ID NO: 3325106 - DNA, 25 bp, Homo sapien
ggtatatagcacatgtccgaggaca

SEQ ID NO: 3325107 - DNA, 25 bp, Homo sapien
cgtgaaggtatttagtgcaaggccc

SEQ ID NO: 3325108 - DNA, 25 bp, Homo sapien
catttgagagccataaaagcggcca

SEQ ID NO: 3325109 - DNA, 25 bp, Homo sapien
acttttccaaaggatgttgctgcat

SEQ ID NO: 3325110 - DNA, 25 bp, Homo sapien
gacttttccaaaggatgttgctgca

SEQ ID NO: 3325111 - DNA, 25 bp, Homo sapien
ccaaaggatgttgctgcattcctac

SEQ ID NO: 3325112 - DNA, 25 bp, Homo sapien
tccaaaggatgttgctgcattccta

SEQ ID NO: 3325113 - DNA, 25 bp, Homo sapien
cagtaattttaagggtctgggcaga

SEQ ID NO: 3325114 - DNA, 25 bp, Homo sapien
catccgaattgtacacagtgctgtt

SEQ ID NO: 3325115 - DNA, 25 bp, Homo sapien
agtaaacatccgaattgtacacagt

SEQ ID NO: 3325116 - DNA, 25 bp, Homo sapien
caaagtcactgaagctaaagtcagt

SEQ ID NO: 3325117 - DNA, 25 bp, Homo sapien
tctctgaattcttggacaaaacagt

SEQ ID NO: 3325118 - DNA, 25 bp, Homo sapien
cactggaactgtgataccacctaat

SEQ ID NO: 3325119 - DNA, 25 bp, Homo sapien
tatggttgggtaatccaattcaaaa

SEQ ID NO: 3325120 - DNA, 25 bp, Homo sapien
taccacctaataccacccaatattg

SEQ ID NO: 3325121 - DNA, 25 bp, Homo sapien
ttggaatcgctagtgcaaaaaggct

SEQ ID NO: 3325122 - DNA, 25 bp, Homo sapien
tattgaaaattgatgttccctcccc

SEQ ID NO: 3325123 - DNA, 25 bp, Homo sapien
ggcttggaacatcataggaacataa

SEQ ID NO: 3325124 - DNA, 25 bp, Homo sapien
gatttcaatggtattgctactagat

SEQ ID NO: 3325125 - DNA, 25 bp, Homo sapien
cacagtcagtataagttatttaatg

SEQ ID NO: 3325126 - DNA, 25 bp, Homo sapien
ttgtattatcagtgactttgcatcc

SEQ ID NO: 3325127 - DNA, 25 bp, Homo sapien
cagtcagtataagttatttaatgcc

SEQ ID NO: 3325128 - DNA, 25 bp, Homo sapien
gctttgtattatcagtgactttgca

SEQ ID NO: 3325129 - DNA, 25 bp, Homo sapien
cgctaacgactgtagctctcttgtt

SEQ ID NO: 3325130 - DNA, 25 bp, Homo sapien
taacgactgtagctctcttgtttct

SEQ ID NO: 3325131 - DNA, 25 bp, Homo sapien
cttcctctgctgctgaagcatgata

SEQ ID NO: 3325132 - DNA, 25 bp, Homo sapien
ctgctgaagcatgatacgacagaac

SEQ ID NO: 3325133 - DNA, 25 bp, Homo sapien
gatgaggcctgtaaccattctagaa

SEQ ID NO: 3325134 - DNA, 25 bp, Homo sapien
tgtaaagccatccattgacagttgg

SEQ ID NO: 3325135 - DNA, 25 bp, Homo sapien
gatttggctgtaagctcacacctag

SEQ ID NO: 3325136 - DNA, 25 bp, Homo sapien
agaaaaactggatgcctgggacaca

SEQ ID NO: 3325137 - DNA, 25 bp, Homo sapien
ggtttcttcactcgctacctgcaca

SEQ ID NO: 3325138 - DNA, 25 bp, Homo sapien
gaaagagtgttcctcggtcagtccc

SEQ ID NO: 3325139 - DNA, 25 bp, Homo sapien
gagtcggctggtcctttgtgagaaa

SEQ ID NO: 3325140 - DNA, 25 bp, Homo sapien
tacagattcccagcttctacccaag

SEQ ID NO: 3325141 - DNA, 25 bp, Homo sapien
gtgtgagaggtccctaaacttcacc

SEQ ID NO: 3325142 - DNA, 25 bp, Homo sapien
tgagaggtccctaaacttcacccac

SEQ ID NO: 3325143 - DNA, 25 bp, Homo sapien
tgtgagaggtccctaaacttcaccc

SEQ ID NO: 3325144 - DNA, 25 bp, Homo sapien
gtgagaggtccctaaacttcaccca

SEQ ID NO: 3325145 - DNA, 25 bp, Homo sapien
atgtgaccatttgcttggccatggc

SEQ ID NO: 3325146 - DNA, 25 bp, Homo sapien
tccaatgtgaccatttgcttggcca

SEQ ID NO: 3325147 - DNA, 25 bp, Homo sapien
caatgtgaccatttgcttggccatg

SEQ ID NO: 3325148 - DNA, 25 bp, Homo sapien
ctccaatgtgaccatttgcttggcc

SEQ ID NO: 3325149 - DNA, 25 bp, Homo sapien
aaaagcttccagaaactgttcgtca

SEQ ID NO: 3325150 - DNA, 25 bp, Homo sapien
tctccactgcttcatacatctgcgt

SEQ ID NO: 3325151 - DNA, 25 bp, Homo sapien
catctgcgtgttctggatccccaag

SEQ ID NO: 3325152 - DNA, 25 bp, Homo sapien
tcgtcatttcggttgaaaggcttaa

SEQ ID NO: 3325153 - DNA, 25 bp, Homo sapien
ctataacaatccgagaaattgagca

SEQ ID NO: 3325154 - DNA, 25 bp, Homo sapien
taacaatccgagaaattgagcaaat

SEQ ID NO: 3325155 - DNA, 25 bp, Homo sapien
ccgagaaattgagcaaatgttattg

SEQ ID NO: 3325156 - DNA, 25 bp, Homo sapien
caatccgagaaattgagcaaatgtt

SEQ ID NO: 3325157 - DNA, 25 bp, Homo sapien
ggcaactgacataagcagtctcaaa

SEQ ID NO: 3325158 - DNA, 25 bp, Homo sapien
cacctctgtatccaacagaatcaaa

SEQ ID NO: 3325159 - DNA, 25 bp, Homo sapien
atagaatgcagaaaggaggcaactg

SEQ ID NO: 3325160 - DNA, 25 bp, Homo sapien
tttgattctgcaaataattatgcaa

SEQ ID NO: 3325161 - DNA, 25 bp, Homo sapien
gactgtaactagtttcccatgaaga

SEQ ID NO: 3325162 - DNA, 25 bp, Homo sapien
taagcccctttaccaccatcaatgt

SEQ ID NO: 3325163 - DNA, 25 bp, Homo sapien
cacttcagctggcaaaacgcctagc

SEQ ID NO: 3325164 - DNA, 25 bp, Homo sapien
gaagacggttgcacattaagcccct

SEQ ID NO: 3325165 - DNA, 25 bp, Homo sapien
tgacaaaggggcctgatgcgtaact

SEQ ID NO: 3325166 - DNA, 25 bp, Homo sapien
cagccactccccgttcccagttatt

SEQ ID NO: 3325167 - DNA, 25 bp, Homo sapien
tgatgcgtaacttcctccagccact

SEQ ID NO: 3325168 - DNA, 25 bp, Homo sapien
gggcctgatgcgtaacttcctccag

SEQ ID NO: 3325169 - DNA, 25 bp, Homo sapien
aagaaagaagtatagctgggaatac

SEQ ID NO: 3325170 - DNA, 25 bp, Homo sapien
agcaaacttctaatgcactgctggt

SEQ ID NO: 3325171 - DNA, 25 bp, Homo sapien
gcaaacttctaatgcactgctggtt

SEQ ID NO: 3325172 - DNA, 25 bp, Homo sapien
aaagcaaacttctaatgcactgctg

SEQ ID NO: 3325173 - DNA, 25 bp, Homo sapien
aagcaaacttctaatgcactgctgg

SEQ ID NO: 3325174 - DNA, 25 bp, Homo sapien
tagcttcaagtctaaaattgggtta

SEQ ID NO: 3325175 - DNA, 25 bp, Homo sapien
ttctagcttcaagtctaaaattggg

SEQ ID NO: 3325176 - DNA, 25 bp, Homo sapien
tctagcttcaagtctaaaattgggt

SEQ ID NO: 3325177 - DNA, 25 bp, Homo sapien
cttctagcttcaagtctaaaattgg

SEQ ID NO: 3325178 - DNA, 25 bp, Homo sapien
tgggatattaagtggttccatagta

SEQ ID NO: 3325179 - DNA, 25 bp, Homo sapien
ccagggaaatcttttatccttactg

SEQ ID NO: 3325180 - DNA, 25 bp, Homo sapien
ctgagcatacatgtaattgattttg

SEQ ID NO: 3325181 - DNA, 25 bp, Homo sapien
tccttactgacatctgggatattaa

SEQ ID NO: 3325182 - DNA, 25 bp, Homo sapien
aaagcatgggcaaacagttaaataa

SEQ ID NO: 3325183 - DNA, 25 bp, Homo sapien
aaaaagcatgggcaaacagttaaat

SEQ ID NO: 3325184 - DNA, 25 bp, Homo sapien
cagatatgagttccctctgtgcagt

SEQ ID NO: 3325185 - DNA, 25 bp, Homo sapien
gatatgagttccctctgtgcagtta

SEQ ID NO: 3325186 - DNA, 25 bp, Homo sapien
taacaatgcaagcaccacacgtgtg

SEQ ID NO: 3325187 - DNA, 25 bp, Homo sapien
ccttagcagtatatgggcgacaaac

SEQ ID NO: 3325188 - DNA, 25 bp, Homo sapien
caggtagcacctaaatggagtggaa

SEQ ID NO: 3325189 - DNA, 25 bp, Homo sapien
gctacctctgggcttttacaggaga

SEQ ID NO: 3325190 - DNA, 25 bp, Homo sapien
tggttggaaaaatctcgaatgagct

SEQ ID NO: 3325191 - DNA, 25 bp, Homo sapien
taaaagctaactttaccatcccagc

SEQ ID NO: 3325192 - DNA, 25 bp, Homo sapien
ccatcccagctaaaaacagtgaaac

SEQ ID NO: 3325193 - DNA, 25 bp, Homo sapien
taatgagaattggagtcctaaatcc

SEQ ID NO: 3325194 - DNA, 25 bp, Homo sapien
aattcctcacactccatgtgaaaca

SEQ ID NO: 3325195 - DNA, 25 bp, Homo sapien
attcctcacactccatgtgaaacac

SEQ ID NO: 3325196 - DNA, 25 bp, Homo sapien
ggagcaatcttcatccactatgaaa

SEQ ID NO: 3325197 - DNA, 25 bp, Homo sapien
acttctaatgattgttgttcttcaa

SEQ ID NO: 3325198 - DNA, 25 bp, Homo sapien
tgcacttgcatgaaagagataatag

SEQ ID NO: 3325199 - DNA, 25 bp, Homo sapien
cactatgaaaatggtgcatttctgc

SEQ ID NO: 3325200 - DNA, 25 bp, Homo sapien
tgaagtctcatagagctgagcatta

SEQ ID NO: 3325201 - DNA, 25 bp, Homo sapien
aagtctcatagagctgagcattatg

SEQ ID NO: 3325202 - DNA, 25 bp, Homo sapien
gtctcatagagctgagcattatgaa

SEQ ID NO: 3325203 - DNA, 25 bp, Homo sapien
ctcatagagctgagcattatgaaga

SEQ ID NO: 3325204 - DNA, 25 bp, Homo sapien
tcatctttttcagtaaatgtcccac

SEQ ID NO: 3325205 - DNA, 25 bp, Homo sapien
tttcatctttttcagtaaatgtccc

SEQ ID NO: 3325206 - DNA, 25 bp, Homo sapien
ttcatctttttcagtaaatgtccca

SEQ ID NO: 3325207 - DNA, 25 bp, Homo sapien
cttttcatctttttcagtaaatgtc

SEQ ID NO: 3325208 - DNA, 25 bp, Homo sapien
tgatggcctgggctacaccaacaac

SEQ ID NO: 3325209 - DNA, 25 bp, Homo sapien
tgttgatggcctgggctacaccaac

SEQ ID NO: 3325210 - DNA, 25 bp, Homo sapien
cgtttcctgatttcttgttgatggc

SEQ ID NO: 3325211 - DNA, 25 bp, Homo sapien
ttcctgatttcttgttgatggcctg

SEQ ID NO: 3325212 - DNA, 25 bp, Homo sapien
tataaggagagaaaagcgacaattt

SEQ ID NO: 3325213 - DNA, 25 bp, Homo sapien
gcgacaatttttttattgactgaaa

SEQ ID NO: 3325214 - DNA, 25 bp, Homo sapien
aaagcgacaatttttttattgactg

SEQ ID NO: 3325215 - DNA, 25 bp, Homo sapien
ctggtataaggagagaaaagcgaca

SEQ ID NO: 3325216 - DNA, 25 bp, Homo sapien
caacagacttatttttgggaaagag

SEQ ID NO: 3325217 - DNA, 25 bp, Homo sapien
tcaacagacttatttttgggaaaga

SEQ ID NO: 3325218 - DNA, 25 bp, Homo sapien
tgccaaactgtaaagaccatcaagg

SEQ ID NO: 3325219 - DNA, 25 bp, Homo sapien
ccaaactgtaaagaccatcaaggct

SEQ ID NO: 3325220 - DNA, 25 bp, Homo sapien
cgagtaaaataaccagctaacatta

SEQ ID NO: 3325221 - DNA, 25 bp, Homo sapien
aaactgtaaagaccatcaaggctag

SEQ ID NO: 3325222 - DNA, 25 bp, Homo sapien
tccactttgcccattaactccattc

SEQ ID NO: 3325223 - DNA, 25 bp, Homo sapien
ccactttgcccattaactccattct

SEQ ID NO: 3325224 - DNA, 25 bp, Homo sapien
tttccactttgcccattaactccat

SEQ ID NO: 3325225 - DNA, 25 bp, Homo sapien
ttccactttgcccattaactccatt

SEQ ID NO: 3325226 - DNA, 25 bp, Homo sapien
tggcatacaaagaatgctttgtgtc

SEQ ID NO: 3325227 - DNA, 25 bp, Homo sapien
gtgtcttgtagcctgtaatttggtc

SEQ ID NO: 3325228 - DNA, 25 bp, Homo sapien
cttccctatgattcttaattggcat

SEQ ID NO: 3325229 - DNA, 25 bp, Homo sapien
tcttgtagcctgtaatttggtcaac

SEQ ID NO: 3325230 - DNA, 25 bp, Homo sapien
tattgttgtgaaaggcatcatcatg

SEQ ID NO: 3325231 - DNA, 25 bp, Homo sapien
caattttattgttgtgaaaggcatc

SEQ ID NO: 3325232 - DNA, 25 bp, Homo sapien
tttattgttgtgaaaggcatcatca

SEQ ID NO: 3325233 - DNA, 25 bp, Homo sapien
ttgtgaaaggcatcatcatgtaagt

SEQ ID NO: 3325234 - DNA, 25 bp, Homo sapien
ttgacaaagataaattgaagttgct

SEQ ID NO: 3325235 - DNA, 25 bp, Homo sapien
caaagataaattgaagttgctgagc

SEQ ID NO: 3325236 - DNA, 25 bp, Homo sapien
aaagataaattgaagttgctgagct

SEQ ID NO: 3325237 - DNA, 25 bp, Homo sapien
gacaaagataaattgaagttgctga

SEQ ID NO: 3325238 - DNA, 25 bp, Homo sapien
ctcatatgcatctttgatgttcaag

SEQ ID NO: 3325239 - DNA, 25 bp, Homo sapien
gcatctttgatgttcaagggctcac

SEQ ID NO: 3325240 - DNA, 25 bp, Homo sapien
tgcatctttgatgttcaagggctca

SEQ ID NO: 3325241 - DNA, 25 bp, Homo sapien
atatgcatctttgatgttcaagggc

SEQ ID NO: 3325242 - DNA, 25 bp, Homo sapien
tgacaacaatgggtctaagaggccg

SEQ ID NO: 3325243 - DNA, 25 bp, Homo sapien
tagcggtcagcagatatcagtccat

SEQ ID NO: 3325244 - DNA, 25 bp, Homo sapien
caagattcggtgtggcctctgatac

SEQ ID NO: 3325245 - DNA, 25 bp, Homo sapien
caagagtcttgagcactggtcccct

SEQ ID NO: 3325246 - DNA, 25 bp, Homo sapien
ggaaaaggcgaaagttgacagacat

SEQ ID NO: 3325247 - DNA, 25 bp, Homo sapien
ctgcaggaaaaggcgaaagttgaca

SEQ ID NO: 3325248 - DNA, 25 bp, Homo sapien
caggaaaaggcgaaagttgacagac

SEQ ID NO: 3325249 - DNA, 25 bp, Homo sapien
gcaggaaaaggcgaaagttgacaga

SEQ ID NO: 3325250 - DNA, 25 bp, Homo sapien
ttgttttgtctccaaagggcaacat

SEQ ID NO: 3325251 - DNA, 25 bp, Homo sapien
cttgttttgtctccaaagggcaaca

SEQ ID NO: 3325252 - DNA, 25 bp, Homo sapien
ccaggaggctccgtaggggcaacaa

SEQ ID NO: 3325253 - DNA, 25 bp, Homo sapien
cgttttcgaactccgccgatcctgg

SEQ ID NO: 3325254 - DNA, 25 bp, Homo sapien
tgaggtcggcgactcagaaccagct

SEQ ID NO: 3325255 - DNA, 25 bp, Homo sapien
gaggtgaggtgaggtcggcgactca

SEQ ID NO: 3325256 - DNA, 25 bp, Homo sapien
gcgcgccggcgagtgggacccgggc

SEQ ID NO: 3325257 - DNA, 25 bp, Homo sapien
ccgggcgggctcctcgaccatcact

SEQ ID NO: 3325258 - DNA, 25 bp, Homo sapien
tcgaccatcactgccgggcgtgtgt

SEQ ID NO: 3325259 - DNA, 25 bp, Homo sapien
ctggcggggagcgaccggcagagcc

SEQ ID NO: 3325260 - DNA, 25 bp, Homo sapien
cttggctctggaccagaaagagctg

SEQ ID NO: 3325261 - DNA, 25 bp, Homo sapien
tatgcatcaattcctcaggcttcgg

SEQ ID NO: 3325262 - DNA, 25 bp, Homo sapien
tgcgccctttgtgtgcacgccgcaa

SEQ ID NO: 3325263 - DNA, 25 bp, Homo sapien
ctgcgcagccgcctccaaaaggaca

SEQ ID NO: 3325264 - DNA, 25 bp, Homo sapien
tgggctgtcccgtggactcgtccct

SEQ ID NO: 3325265 - DNA, 25 bp, Homo sapien
ttccgtcatgttgcctttgggctgt

SEQ ID NO: 3325266 - DNA, 25 bp, Homo sapien
catgttgcctttgggctgtcccgtg

SEQ ID NO: 3325267 - DNA, 25 bp, Homo sapien
cctttgggctgtcccgtggactcgt

SEQ ID NO: 3325268 - DNA, 25 bp, Homo sapien
gtaaagtcccagtgatcgtccagcc

SEQ ID NO: 3325269 - DNA, 25 bp, Homo sapien
atgcttcgaccgagtcctgatccct

SEQ ID NO: 3325270 - DNA, 25 bp, Homo sapien
ggtggcttttctaacaaagtatgag

SEQ ID NO: 3325271 - DNA, 25 bp, Homo sapien
caaagtatgagaaggtaaagtccca

SEQ ID NO: 3325272 - DNA, 25 bp, Homo sapien
aagaacaggactcggcctcgagacc

SEQ ID NO: 3325273 - DNA, 25 bp, Homo sapien
cagtcgggccggctttcgacaaagc

SEQ ID NO: 3325274 - DNA, 25 bp, Homo sapien
cgcgcgcctcggaggctctctggta

SEQ ID NO: 3325275 - DNA, 25 bp, Homo sapien
gcagtgttccgctctcgcaggctct

SEQ ID NO: 3325276 - DNA, 25 bp, Homo sapien
ggagcgggaccgacctccttcagag

SEQ ID NO: 3325277 - DNA, 25 bp, Homo sapien
ggaggagcgggaccgacctccttca

SEQ ID NO: 3325278 - DNA, 25 bp, Homo sapien
gctcagtgacttaaagcggtccagc

SEQ ID NO: 3325279 - DNA, 25 bp, Homo sapien
gacttaaagcggtccagccacggac

SEQ ID NO: 3325280 - DNA, 25 bp, Homo sapien
caaaatgggcactacagtcatggac

SEQ ID NO: 3325281 - DNA, 25 bp, Homo sapien
tgaggctcaacagaaggaagtatcc

SEQ ID NO: 3325282 - DNA, 25 bp, Homo sapien
caagctcattcagactgctggcaga

SEQ ID NO: 3325283 - DNA, 25 bp, Homo sapien
ccttgcaatcgcagaagtgagggat

SEQ ID NO: 3325284 - DNA, 25 bp, Homo sapien
cctgttatcaagaatacgctgcttc

SEQ ID NO: 3325285 - DNA, 25 bp, Homo sapien
tacgctgcttcataatctggtacag

SEQ ID NO: 3325286 - DNA, 25 bp, Homo sapien
gctgtcattcctgttatcaagaata

SEQ ID NO: 3325287 - DNA, 25 bp, Homo sapien
taatctggtacagtgcccgaaagcc

SEQ ID NO: 3325288 - DNA, 25 bp, Homo sapien
accaattcaggattgaacgatccct

SEQ ID NO: 3325289 - DNA, 25 bp, Homo sapien
ttcaggattgaacgatccctgaagg

SEQ ID NO: 3325290 - DNA, 25 bp, Homo sapien
gggcaaggattgaccaattcaggat

SEQ ID NO: 3325291 - DNA, 25 bp, Homo sapien
tgggcaaggattgaccaattcagga

SEQ ID NO: 3325292 - DNA, 25 bp, Homo sapien
cagaagatgatgtgtgacccaatta

SEQ ID NO: 3325293 - DNA, 25 bp, Homo sapien
gctaagttcattcctagagccagtg

SEQ ID NO: 3325294 - DNA, 25 bp, Homo sapien
ctgacttcactgctggatccaggga

SEQ ID NO: 3325295 - DNA, 25 bp, Homo sapien
gagccagtgattggtacagaagatg

SEQ ID NO: 3325296 - DNA, 25 bp, Homo sapien
ttgctcctttactcccttgctcttt

SEQ ID NO: 3325297 - DNA, 25 bp, Homo sapien
tgctcctttactcccttgctctttc

SEQ ID NO: 3325298 - DNA, 25 bp, Homo sapien
caggatctcctggaagcttggataa

SEQ ID NO: 3325299 - DNA, 25 bp, Homo sapien
tgaatgtagagtaaacaggatctcc

SEQ ID NO: 3325300 - DNA, 25 bp, Homo sapien
tagagttgcatcaacaggcaaggga

SEQ ID NO: 3325301 - DNA, 25 bp, Homo sapien
tttacccaataccagcagagacact

SEQ ID NO: 3325302 - DNA, 25 bp, Homo sapien
aggtactttgtcatgatgagtgcat

SEQ ID NO: 3325303 - DNA, 25 bp, Homo sapien
ccacagcaggtactttgtcatgatg

SEQ ID NO: 3325304 - DNA, 25 bp, Homo sapien
caggtactttgtcatgatgagtgca

SEQ ID NO: 3325305 - DNA, 25 bp, Homo sapien
agcaggtactttgtcatgatgagtg

SEQ ID NO: 3325306 - DNA, 25 bp, Homo sapien
gcaatttgaggagttttacgggcca

SEQ ID NO: 3325307 - DNA, 25 bp, Homo sapien
cccagaatatgtagtgaggtaaata

SEQ ID NO: 3325308 - DNA, 25 bp, Homo sapien
tacgggccaatgttaaggctaggcg

SEQ ID NO: 3325309 - DNA, 25 bp, Homo sapien
aatctctggtatctttgtggtaccc

SEQ ID NO: 3325310 - DNA, 25 bp, Homo sapien
agtgaacctgctccttcagtgatcc

SEQ ID NO: 3325311 - DNA, 25 bp, Homo sapien
cagtgaacctgctccttcagtgatc

SEQ ID NO: 3325312 - DNA, 25 bp, Homo sapien
tcagtgaacctgctccttcagtgat

SEQ ID NO: 3325313 - DNA, 25 bp, Homo sapien
tgtgaggggcctcttcatctgcttc

SEQ ID NO: 3325314 - DNA, 25 bp, Homo sapien
ctgcatcagaaggtaagaccaactg

SEQ ID NO: 3325315 - DNA, 25 bp, Homo sapien
cagaaggtaagaccaactgtgaggg

SEQ ID NO: 3325316 - DNA, 25 bp, Homo sapien
catcagaaggtaagaccaactgtga

SEQ ID NO: 3325317 - DNA, 25 bp, Homo sapien
gctgataacagcctgatccttctta

SEQ ID NO: 3325318 - DNA, 25 bp, Homo sapien
ggagtgtcatcaattagcaaaacat

SEQ ID NO: 3325319 - DNA, 25 bp, Homo sapien
caaaacattatgttcgctgataaca

SEQ ID NO: 3325320 - DNA, 25 bp, Homo sapien
ctgcgtctctgtggagtgtcatcaa

SEQ ID NO: 3325321 - DNA, 25 bp, Homo sapien
tctcacttgttgaggtgtctttttc

SEQ ID NO: 3325322 - DNA, 25 bp, Homo sapien
tcacttgttgaggtgtctttttctc

SEQ ID NO: 3325323 - DNA, 25 bp, Homo sapien
ctctcacttgttgaggtgtcttttt

SEQ ID NO: 3325324 - DNA, 25 bp, Homo sapien
acttgttgaggtgtctttttctcct

SEQ ID NO: 3325325 - DNA, 25 bp, Homo sapien
caagtgtgatccattgggatagatg

SEQ ID NO: 3325326 - DNA, 25 bp, Homo sapien
tgggtggtgatagatgcattgtgaa

SEQ ID NO: 3325327 - DNA, 25 bp, Homo sapien
gagtcaagtgtgatccattgggata

SEQ ID NO: 3325328 - DNA, 25 bp, Homo sapien
ccattgggatagatgtgggtggtga

SEQ ID NO: 3325329 - DNA, 25 bp, Homo sapien
tgcatctttgccaaggatccctgtc

SEQ ID NO: 3325330 - DNA, 25 bp, Homo sapien
caggcttggtcttggtccttctttg

SEQ ID NO: 3325331 - DNA, 25 bp, Homo sapien
tgtgttttctttgaccaggcttggt

SEQ ID NO: 3325332 - DNA, 25 bp, Homo sapien
caagcaaaatatgcactgtgtgttt

SEQ ID NO: 3325333 - DNA, 25 bp, Homo sapien
ttctataatcgggagcaaggcctgc

SEQ ID NO: 3325334 - DNA, 25 bp, Homo sapien
tctagcccacggatagaataacagc

SEQ ID NO: 3325335 - DNA, 25 bp, Homo sapien
cagcattgtgaacaaatgtgagcct

SEQ ID NO: 3325336 - DNA, 25 bp, Homo sapien
gccatacagttatttgtccaatgtt

SEQ ID NO: 3325337 - DNA, 25 bp, Homo sapien
aaaggctttgcctccacgttctgga

SEQ ID NO: 3325338 - DNA, 25 bp, Homo sapien
cacaggctgggatgaaagcttggca

SEQ ID NO: 3325339 - DNA, 25 bp, Homo sapien
tataactctggtggcagtgtgtagg

SEQ ID NO: 3325340 - DNA, 25 bp, Homo sapien
cacagttaaatttgcactgctgtta

SEQ ID NO: 3325341 - DNA, 25 bp, Homo sapien
catgtaattgaagtgatttgttgac

SEQ ID NO: 3325342 - DNA, 25 bp, Homo sapien
acatcatctcttgcaagttcttgta

SEQ ID NO: 3325343 - DNA, 25 bp, Homo sapien
caagttcttgtatgtagactttaaa

SEQ ID NO: 3325344 - DNA, 25 bp, Homo sapien
tcttcacatcatctcttgcaagttc

SEQ ID NO: 3325345 - DNA, 25 bp, Homo sapien
ctcttgcaagttcttgtatgtagac

SEQ ID NO: 3325346 - DNA, 25 bp, Homo sapien
tagccacttggctctggctaaagtc

SEQ ID NO: 3325347 - DNA, 25 bp, Homo sapien
cacaaagggtttgaggtcaaaggtg

SEQ ID NO: 3325348 - DNA, 25 bp, Homo sapien
aaggtgtattaaactctgaattagc

SEQ ID NO: 3325349 - DNA, 25 bp, Homo sapien
gaggcactgttcaaaggtgaccaca

SEQ ID NO: 3325350 - DNA, 25 bp, Homo sapien
caaagcaaagctaaaggattaatag

SEQ ID NO: 3325351 - DNA, 25 bp, Homo sapien
gctaaaggattaatagttcacaaca

SEQ ID NO: 3325352 - DNA, 25 bp, Homo sapien
tctgcatgcagctacttttgctatc

SEQ ID NO: 3325353 - DNA, 25 bp, Homo sapien
attttacttctgcatgcagctactt

SEQ ID NO: 3325354 - DNA, 25 bp, Homo sapien
ctgaaattaatgtttctatttctct

SEQ ID NO: 3325355 - DNA, 25 bp, Homo sapien
gttccttgtctctttcttggcttct

SEQ ID NO: 3325356 - DNA, 25 bp, Homo sapien
tttctatttctctctttgctgactc

SEQ ID NO: 3325357 - DNA, 25 bp, Homo sapien
ctatttctctctttgctgactctct

SEQ ID NO: 3325358 - DNA, 25 bp, Homo sapien
cctttcctactgaatcttccttctt

SEQ ID NO: 3325359 - DNA, 25 bp, Homo sapien
tcctttcctactgaatcttccttct

SEQ ID NO: 3325360 - DNA, 25 bp, Homo sapien
ttcctttcctactgaatcttccttc

SEQ ID NO: 3325361 - DNA, 25 bp, Homo sapien
gaaggtgaggggaatcaagcatgtc

SEQ ID NO: 3325362 - DNA, 25 bp, Homo sapien
ggtgaaggtgaggggaatcaagcat

SEQ ID NO: 3325363 - DNA, 25 bp, Homo sapien
aaggtgaggggaatcaagcatgtct

SEQ ID NO: 3325364 - DNA, 25 bp, Homo sapien
tgaaggtgaggggaatcaagcatgt

SEQ ID NO: 3325365 - DNA, 25 bp, Homo sapien
aactggagtctttttgagctgctga

SEQ ID NO: 3325366 - DNA, 25 bp, Homo sapien
gagactcagggccatttctgaggac

SEQ ID NO: 3325367 - DNA, 25 bp, Homo sapien
tgcatcctttgtatctgcggccagg

SEQ ID NO: 3325368 - DNA, 25 bp, Homo sapien
gtggcttctcactatccaactggag

SEQ ID NO: 3325369 - DNA, 25 bp, Homo sapien
ccctgtgaggaccacatctaattct

SEQ ID NO: 3325370 - DNA, 25 bp, Homo sapien
tccctgtgaggaccacatctaattc

SEQ ID NO: 3325371 - DNA, 25 bp, Homo sapien
gcaagaactctggagaggtatgtat

SEQ ID NO: 3325372 - DNA, 25 bp, Homo sapien
aagaactctggagaggtatgtatca

SEQ ID NO: 3325373 - DNA, 25 bp, Homo sapien
ggcaagaactctggagaggtatgta

SEQ ID NO: 3325374 - DNA, 25 bp, Homo sapien
caagaactctggagaggtatgtatc

SEQ ID NO: 3325375 - DNA, 25 bp, Homo sapien
gaatcagtattccactcacagtcac

SEQ ID NO: 3325376 - DNA, 25 bp, Homo sapien
tcacagtcacccagtagctgtttcg

SEQ ID NO: 3325377 - DNA, 25 bp, Homo sapien
caaacatattctctctggccggcaa

SEQ ID NO: 3325378 - DNA, 25 bp, Homo sapien
cataccatatcatctccagaatcag

SEQ ID NO: 3325379 - DNA, 25 bp, Homo sapien
gcagcaattagggattcgacacaga

SEQ ID NO: 3325380 - DNA, 25 bp, Homo sapien
tctttctgggaattgcaagccttca

SEQ ID NO: 3325381 - DNA, 25 bp, Homo sapien
tgcacctttgcggtcagagcagcaa

SEQ ID NO: 3325382 - DNA, 25 bp, Homo sapien
tactgaggtaagagctgaaatggac

SEQ ID NO: 3325383 - DNA, 25 bp, Homo sapien
caaagatttgcctgtagtgctctgc

SEQ ID NO: 3325384 - DNA, 25 bp, Homo sapien
tgaggaatcctcgggcttcaaagat

SEQ ID NO: 3325385 - DNA, 25 bp, Homo sapien
tgtcagttgtcggatgagccttaga

SEQ ID NO: 3325386 - DNA, 25 bp, Homo sapien
tcggatgagccttagaaccttgaca

SEQ ID NO: 3325387 - DNA, 25 bp, Homo sapien
tcgtggtaactattggaacaatttc

SEQ ID NO: 3325388 - DNA, 25 bp, Homo sapien
tatgtgcaaatggtagttaaatcgt

SEQ ID NO: 3325389 - DNA, 25 bp, Homo sapien
ttcatcagtggtttttcaacacggc

SEQ ID NO: 3325390 - DNA, 25 bp, Homo sapien
ttcaacacggctctttgagtacttg

SEQ ID NO: 3325391 - DNA, 25 bp, Homo sapien
cattcagcatttttcacgaaaaatt

SEQ ID NO: 3325392 - DNA, 25 bp, Homo sapien
tcattcagcatttttcacgaaaaat

SEQ ID NO: 3325393 - DNA, 25 bp, Homo sapien
tcagcatttttcacgaaaaattgcc

SEQ ID NO: 3325394 - DNA, 25 bp, Homo sapien
ttcagcatttttcacgaaaaattgc

SEQ ID NO: 3325395 - DNA, 25 bp, Homo sapien
gactcaatcttagtatgaggagtcc

SEQ ID NO: 3325396 - DNA, 25 bp, Homo sapien
tcttagtatgaggagtcctgaagga

SEQ ID NO: 3325397 - DNA, 25 bp, Homo sapien
catccaaggactcaatcttagtatg

SEQ ID NO: 3325398 - DNA, 25 bp, Homo sapien
ccaaggactcaatcttagtatgagg

SEQ ID NO: 3325399 - DNA, 25 bp, Homo sapien
ttgaatgtagactttctctttggtt

SEQ ID NO: 3325400 - DNA, 25 bp, Homo sapien
atgggtcatgggctttgcacttccc

SEQ ID NO: 3325401 - DNA, 25 bp, Homo sapien
gagatggatttgagtcatgggtcat

SEQ ID NO: 3325402 - DNA, 25 bp, Homo sapien
gatttgagtcatgggtcatgggctt

SEQ ID NO: 3325403 - DNA, 25 bp, Homo sapien
cactgagattccagaggtaggaatt

SEQ ID NO: 3325404 - DNA, 25 bp, Homo sapien
cttgaatttagtgctgaaagcctca

SEQ ID NO: 3325405 - DNA, 25 bp, Homo sapien
tgggcagttggcattttgagagctt

SEQ ID NO: 3325406 - DNA, 25 bp, Homo sapien
aaacctgtgaagaggaccactgaga

SEQ ID NO: 3325407 - DNA, 25 bp, Homo sapien
ttaagcatttatgtcaatacgttca

SEQ ID NO: 3325408 - DNA, 25 bp, Homo sapien
tgtcaatacgttcaggttcccaaac

SEQ ID NO: 3325409 - DNA, 25 bp, Homo sapien
catttatgtcaatacgttcaggttc

SEQ ID NO: 3325410 - DNA, 25 bp, Homo sapien
tatgtcaatacgttcaggttcccaa

SEQ ID NO: 3325411 - DNA, 25 bp, Homo sapien
tcttctccaaatatgctgaggcagt

SEQ ID NO: 3325412 - DNA, 25 bp, Homo sapien
tttcaatgagaaattgtacaataga

SEQ ID NO: 3325413 - DNA, 25 bp, Homo sapien
gaagcatcactgttgtcacaagtca

SEQ ID NO: 3325414 - DNA, 25 bp, Homo sapien
gtacctgaagcatcactgttgtcac

SEQ ID NO: 3325415 - DNA, 25 bp, Homo sapien
tttggtgaactcatttaccacttct

SEQ ID NO: 3325416 - DNA, 25 bp, Homo sapien
cttcctagaagtaagttgggccttg

SEQ ID NO: 3325417 - DNA, 25 bp, Homo sapien
tattggcttcctgcctatactgtcc

SEQ ID NO: 3325418 - DNA, 25 bp, Homo sapien
tctaagtctgattctggacaggtat

SEQ ID NO: 3325419 - DNA, 25 bp, Homo sapien
cctagaagtaagttgggccttgact

SEQ ID NO: 3325420 - DNA, 25 bp, Homo sapien
aagaagaggtggagcaccctggttc

SEQ ID NO: 3325421 - DNA, 25 bp, Homo sapien
ctgggcttcagaatgaacccgcctt

SEQ ID NO: 3325422 - DNA, 25 bp, Homo sapien
agaagaggtggagcaccctggttcc

SEQ ID NO: 3325423 - DNA, 25 bp, Homo sapien
aatgaacccgccttctatgtctggg

SEQ ID NO: 3325424 - DNA, 25 bp, Homo sapien
cagttccacagggatgttcatgtcc

SEQ ID NO: 3325425 - DNA, 25 bp, Homo sapien
agttccacagggatgttcatgtcct

SEQ ID NO: 3325426 - DNA, 25 bp, Homo sapien
ttcagttccacagggatgttcatgt

SEQ ID NO: 3325427 - DNA, 25 bp, Homo sapien
ttccacagggatgttcatgtcctgc

SEQ ID NO: 3325428 - DNA, 25 bp, Homo sapien
tggtccttttctttggctagattta

SEQ ID NO: 3325429 - DNA, 25 bp, Homo sapien
atgtcctcagtgaagatttgaaggg

SEQ ID NO: 3325430 - DNA, 25 bp, Homo sapien
cttttctttggctagatttatgtac

SEQ ID NO: 3325431 - DNA, 25 bp, Homo sapien
tcttgatgtcctcagtgaagatttg

SEQ ID NO: 3325432 - DNA, 25 bp, Homo sapien
gccacaaaattcaccatgggccagc

SEQ ID NO: 3325433 - DNA, 25 bp, Homo sapien
cagcccaagagaaggcaccccttgg

SEQ ID NO: 3325434 - DNA, 25 bp, Homo sapien
tgcacacagcttattcagaggtatt

SEQ ID NO: 3325435 - DNA, 25 bp, Homo sapien
cccaactttgtctgcacagtcagct

SEQ ID NO: 3325436 - DNA, 25 bp, Homo sapien
ttgcgttgaagaatagtcccttcat

SEQ ID NO: 3325437 - DNA, 25 bp, Homo sapien
cttctaaagctcttgcgttgaagaa

SEQ ID NO: 3325438 - DNA, 25 bp, Homo sapien
aagctcttgcgttgaagaatagtcc

SEQ ID NO: 3325439 - DNA, 25 bp, Homo sapien
tcttgcgttgaagaatagtcccttc

SEQ ID NO: 3325440 - DNA, 25 bp, Homo sapien
tggtcttttactcacggcaagggaa

SEQ ID NO: 3325441 - DNA, 25 bp, Homo sapien
ctgcataccaagcagatgcaagttg

SEQ ID NO: 3325442 - DNA, 25 bp, Homo sapien
gcagatgcaagttggtcttttactc

SEQ ID NO: 3325443 - DNA, 25 bp, Homo sapien
tactcacggcaagggaaaggttgat

SEQ ID NO: 3325444 - DNA, 25 bp, Homo sapien
cactgttcatgctagctgtgctaac

SEQ ID NO: 3325445 - DNA, 25 bp, Homo sapien
taaatgcccaggaatgtgatttctg

SEQ ID NO: 3325446 - DNA, 25 bp, Homo sapien
caattccaccagcactgtatgagtg

SEQ ID NO: 3325447 - DNA, 25 bp, Homo sapien
caccggtatttggtgtcactgttca

SEQ ID NO: 3325448 - DNA, 25 bp, Homo sapien
tgagagcaagcacgtactccactgc

SEQ ID NO: 3325449 - DNA, 25 bp, Homo sapien
cacaaagtgaaggatgcccaggccc

SEQ ID NO: 3325450 - DNA, 25 bp, Homo sapien
cactgtgagtagtttcgcttctaat

SEQ ID NO: 3325451 - DNA, 25 bp, Homo sapien
tttcgcttctaattctggccatctg

SEQ ID NO: 3325452 - DNA, 25 bp, Homo sapien
tacataatgccagtggaacacacac

SEQ ID NO: 3325453 - DNA, 25 bp, Homo sapien
aacagcactggagtaacgttctggg

SEQ ID NO: 3325454 - DNA, 25 bp, Homo sapien
ccatggcttgtagcagctcgagtac

SEQ ID NO: 3325455 - DNA, 25 bp, Homo sapien
gcaattcagcatgcaaggcttcctc

SEQ ID NO: 3325456 - DNA, 25 bp, Homo sapien
catttggaactcagacttaatttcc

SEQ ID NO: 3325457 - DNA, 25 bp, Homo sapien
gcatcagcggagttgtagaatttcc

SEQ ID NO: 3325458 - DNA, 25 bp, Homo sapien
tcctcatttggaactcagacttaat

SEQ ID NO: 3325459 - DNA, 25 bp, Homo sapien
ctcacagccctaaattgaggtttgg

SEQ ID NO: 3325460 - DNA, 25 bp, Homo sapien
tcatctgacaacagactatctgagg

SEQ ID NO: 3325461 - DNA, 25 bp, Homo sapien
acaatttgcatacttccttggccag

SEQ ID NO: 3325462 - DNA, 25 bp, Homo sapien
caggatgaacttccttggctaggga

SEQ ID NO: 3325463 - DNA, 25 bp, Homo sapien
tggccagggataggagagaccacta

SEQ ID NO: 3325464 - DNA, 25 bp, Homo sapien
tgtgaccaaaagagcaaactgtgat

SEQ ID NO: 3325465 - DNA, 25 bp, Homo sapien
tgtgagtctcataaaaagggtctct

SEQ ID NO: 3325466 - DNA, 25 bp, Homo sapien
tacaggactggtaagctacaaccct

SEQ ID NO: 3325467 - DNA, 25 bp, Homo sapien
tgttgccaggaattccaatgctgag

SEQ ID NO: 3325468 - DNA, 25 bp, Homo sapien
tgagaaaggtgcagcaaaagccaac

SEQ ID NO: 3325469 - DNA, 25 bp, Homo sapien
tatggtaagcaacactgagccagag

SEQ ID NO: 3325470 - DNA, 25 bp, Homo sapien
ggacagtccacttggagctacaggg

SEQ ID NO: 3325471 - DNA, 25 bp, Homo sapien
cagcctcgagtaggtgcaagagacc

SEQ ID NO: 3325472 - DNA, 25 bp, Homo sapien
ttagagaagactttacaaatctgcc

SEQ ID NO: 3325473 - DNA, 25 bp, Homo sapien
tgagaactggatagaaagcatgtac

SEQ ID NO: 3325474 - DNA, 25 bp, Homo sapien
gaaatcatctaggttggtaacacca

SEQ ID NO: 3325475 - DNA, 25 bp, Homo sapien
cagtggtccacttattccataaaga

SEQ ID NO: 3325476 - DNA, 25 bp, Homo sapien
ttaactatatcaacaccaaaccagt

SEQ ID NO: 3325477 - DNA, 25 bp, Homo sapien
gattgaagacacctcaagactcact

SEQ ID NO: 3325478 - DNA, 25 bp, Homo sapien
gactcactcaactttggacccttaa

SEQ ID NO: 3325479 - DNA, 25 bp, Homo sapien
tataacttcgtaggaacaagaattc

SEQ ID NO: 3325480 - DNA, 25 bp, Homo sapien
tccattgcttcataggttcaagtta

SEQ ID NO: 3325481 - DNA, 25 bp, Homo sapien
tatccattgcttcataggttcaagt

SEQ ID NO: 3325482 - DNA, 25 bp, Homo sapien
aatatccattgcttcataggttcaa

SEQ ID NO: 3325483 - DNA, 25 bp, Homo sapien
cattgcttcataggttcaagttaca

SEQ ID NO: 3325484 - DNA, 25 bp, Homo sapien
aggaattttgtaggccaccatgcta

SEQ ID NO: 3325485 - DNA, 25 bp, Homo sapien
tcagtcattgacaggaattttgtag

SEQ ID NO: 3325486 - DNA, 25 bp, Homo sapien
ttttgtaggccaccatgctatttac

SEQ ID NO: 3325487 - DNA, 25 bp, Homo sapien
cagtcattgacaggaattttgtagg

SEQ ID NO: 3325488 - DNA, 25 bp, Homo sapien
tcctcagaattggtaataaactgtg

SEQ ID NO: 3325489 - DNA, 25 bp, Homo sapien
ttcctcagaattggtaataaactgt

SEQ ID NO: 3325490 - DNA, 25 bp, Homo sapien
cttcctcagaattggtaataaactg

SEQ ID NO: 3325491 - DNA, 25 bp, Homo sapien
taataaactgtggtcccgactcttc

SEQ ID NO: 3325492 - DNA, 25 bp, Homo sapien
aagaaacttccaacagtggcagaaa

SEQ ID NO: 3325493 - DNA, 25 bp, Homo sapien
actgaacggatttcatcctggatag

SEQ ID NO: 3325494 - DNA, 25 bp, Homo sapien
ctggatagctttctgagacttttct

SEQ ID NO: 3325495 - DNA, 25 bp, Homo sapien
tcactgaacggatttcatcctggat

SEQ ID NO: 3325496 - DNA, 25 bp, Homo sapien
tcctggatagctttctgagactttt

SEQ ID NO: 3325497 - DNA, 25 bp, Homo sapien
aaaatcaaatcaattaattcatttc

SEQ ID NO: 3325498 - DNA, 25 bp, Homo sapien
atcaaatcaattaattcatttcagg

SEQ ID NO: 3325499 - DNA, 25 bp, Homo sapien
aatcaaatcaattaattcatttcag

SEQ ID NO: 3325500 - DNA, 25 bp, Homo sapien
tcaaatcaattaattcatttcaggt

SEQ ID NO: 3325501 - DNA, 25 bp, Homo sapien
atctttccaggacctcaccactttc

SEQ ID NO: 3325502 - DNA, 25 bp, Homo sapien
aatatttgagataactacaaccagt

SEQ ID NO: 3325503 - DNA, 25 bp, Homo sapien
tcaatatttgagataactacaacca

SEQ ID NO: 3325504 - DNA, 25 bp, Homo sapien
actacaaccagtttctgaactgaac

SEQ ID NO: 3325505 - DNA, 25 bp, Homo sapien
gagacactagttagtcaatcagtaa

SEQ ID NO: 3325506 - DNA, 25 bp, Homo sapien
aagaccagggaagtcattactgtgt

SEQ ID NO: 3325507 - DNA, 25 bp, Homo sapien
catgcaaagcctggtggatcaaatt

SEQ ID NO: 3325508 - DNA, 25 bp, Homo sapien
tctagccgtgatacggaaagtggac

SEQ ID NO: 3325509 - DNA, 25 bp, Homo sapien
gcccactcacaatgtagtgggtggg

SEQ ID NO: 3325510 - DNA, 25 bp, Homo sapien
aatattcagcccactcacaatgtag

SEQ ID NO: 3325511 - DNA, 25 bp, Homo sapien
tctatgtgcagagcggaaaaatgac

SEQ ID NO: 3325512 - DNA, 25 bp, Homo sapien
aaatatatttgagatgtcagtacac

SEQ ID NO: 3325513 - DNA, 25 bp, Homo sapien
tccgtatttctgcactcgagtaaag

SEQ ID NO: 3325514 - DNA, 25 bp, Homo sapien
caaggtgagtccgtatttctgcact

SEQ ID NO: 3325515 - DNA, 25 bp, Homo sapien
gagtccgtatttctgcactcgagta

SEQ ID NO: 3325516 - DNA, 25 bp, Homo sapien
caagcaaggtgagtccgtatttctg

SEQ ID NO: 3325517 - DNA, 25 bp, Homo sapien
ctcggccacgatttcggcgctcccg

SEQ ID NO: 3325518 - DNA, 25 bp, Homo sapien
gccacgatttcggcgctcccgcgca

SEQ ID NO: 3325519 - DNA, 25 bp, Homo sapien
tcggccacgatttcggcgctcccgc

SEQ ID NO: 3325520 - DNA, 25 bp, Homo sapien
cggccacgatttcggcgctcccgcg

SEQ ID NO: 3325521 - DNA, 25 bp, Homo sapien
cagccttcctgtgatgtcgcgggag

SEQ ID NO: 3325522 - DNA, 25 bp, Homo sapien
caggcgcgacgagcctttaagccca

SEQ ID NO: 3325523 - DNA, 25 bp, Homo sapien
agcacgtcgtcaggtcctttgcgca

SEQ ID NO: 3325524 - DNA, 25 bp, Homo sapien
caaaagtaacgacgcagcacgtcgt

SEQ ID NO: 3325525 - DNA, 25 bp, Homo sapien
ctacggtaggtgtaggttaggatgt

SEQ ID NO: 3325526 - DNA, 25 bp, Homo sapien
ttaggatgtgtcttctggtcgtggt

SEQ ID NO: 3325527 - DNA, 25 bp, Homo sapien
taggttaggatgtgtcttctggtcg

SEQ ID NO: 3325528 - DNA, 25 bp, Homo sapien
taggtgtaggttaggatgtgtcttc

SEQ ID NO: 3325529 - DNA, 25 bp, Homo sapien
gtccaggctgcgttctgtccaccct

SEQ ID NO: 3325530 - DNA, 25 bp, Homo sapien
ccaggctgcgttctgtccaccctgc

SEQ ID NO: 3325531 - DNA, 25 bp, Homo sapien
cacgtctgtcctgggcttagggccc

SEQ ID NO: 3325532 - DNA, 25 bp, Homo sapien
gtctgtcctgggcttagggccctcc

SEQ ID NO: 3325533 - DNA, 25 bp, Homo sapien
cttgggtagagctagaattttggcg

SEQ ID NO: 3325534 - DNA, 25 bp, Homo sapien
cccttccactgggagcttgggtaga

SEQ ID NO: 3325535 - DNA, 25 bp, Homo sapien
tagagctagaattttggcgtcacgc

SEQ ID NO: 3325536 - DNA, 25 bp, Homo sapien
aattttggcgtcacgctggtagacc

SEQ ID NO: 3325537 - DNA, 25 bp, Homo sapien
cttctctttagctccggtcctttct

SEQ ID NO: 3325538 - DNA, 25 bp, Homo sapien
cacaatagggaattccaataaaatg

SEQ ID NO: 3325539 - DNA, 25 bp, Homo sapien
cacttcagcttcacaatagggaatt

SEQ ID NO: 3325540 - DNA, 25 bp, Homo sapien
tctttagctccggtcctttcttgac

SEQ ID NO: 3325541 - DNA, 25 bp, Homo sapien
ccacctcacgagattcaagtgtcag

SEQ ID NO: 3325542 - DNA, 25 bp, Homo sapien
tgtccacctcacgagattcaagtgt

SEQ ID NO: 3325543 - DNA, 25 bp, Homo sapien
tctgtccacctcacgagattcaagt

SEQ ID NO: 3325544 - DNA, 25 bp, Homo sapien
tgttctgtccacctcacgagattca

SEQ ID NO: 3325545 - DNA, 25 bp, Homo sapien
cttcatgtccttgggaaaaattgcc

SEQ ID NO: 3325546 - DNA, 25 bp, Homo sapien
cagtcaactagcacaatcctacttg

SEQ ID NO: 3325547 - DNA, 25 bp, Homo sapien
gggtgctggccttacaacagtcaac

SEQ ID NO: 3325548 - DNA, 25 bp, Homo sapien
ttactgagcaccagctattgttggg

SEQ ID NO: 3325549 - DNA, 25 bp, Homo sapien
agtcaacatcgtttggtactctcct

SEQ ID NO: 3325550 - DNA, 25 bp, Homo sapien
ccttgaaagtcaacatcgtttggta

SEQ ID NO: 3325551 - DNA, 25 bp, Homo sapien
ggagttctcggttcatgtactttct

SEQ ID NO: 3325552 - DNA, 25 bp, Homo sapien
tactttctttcatctactctttgtc

SEQ ID NO: 3325553 - DNA, 25 bp, Homo sapien
tccacagggaaaggcttgtcacctt

SEQ ID NO: 3325554 - DNA, 25 bp, Homo sapien
aaaagacaaatgagctttggcaatg

SEQ ID NO: 3325555 - DNA, 25 bp, Homo sapien
ttgcagtacaaagttcctcaatgtc

SEQ ID NO: 3325556 - DNA, 25 bp, Homo sapien
gtcatggcataaggatacaggcagg

SEQ ID NO: 3325557 - DNA, 25 bp, Homo sapien
aatgggctcctcaagattcgtttta

SEQ ID NO: 3325558 - DNA, 25 bp, Homo sapien
cttccagtaggtgcgatgtggctgt

SEQ ID NO: 3325559 - DNA, 25 bp, Homo sapien
tgtggctgtgacgtcgggcagaata

SEQ ID NO: 3325560 - DNA, 25 bp, Homo sapien
catttactggatgctcaggctccac

SEQ ID NO: 3325561 - DNA, 25 bp, Homo sapien
tggatgctcaggctccacgtggacc

SEQ ID NO: 3325562 - DNA, 25 bp, Homo sapien
gagctgggtccagctctgatgtttt

SEQ ID NO: 3325563 - DNA, 25 bp, Homo sapien
acgtccatgacctggggctgacagg

SEQ ID NO: 3325564 - DNA, 25 bp, Homo sapien
cacgtccatgacctggggctgacag

SEQ ID NO: 3325565 - DNA, 25 bp, Homo sapien
tatttctgtatttctttaatttgag

SEQ ID NO: 3325566 - DNA, 25 bp, Homo sapien
taatttgagatttttcaaagacatc

SEQ ID NO: 3325567 - DNA, 25 bp, Homo sapien
tttgagatttttcaaagacatctac

SEQ ID NO: 3325568 - DNA, 25 bp, Homo sapien
tgagatttttcaaagacatctacac

SEQ ID NO: 3325569 - DNA, 25 bp, Homo sapien
atttggggcctgctaattctaggtc

SEQ ID NO: 3325570 - DNA, 25 bp, Homo sapien
agcatttggggcctgctaattctag

SEQ ID NO: 3325571 - DNA, 25 bp, Homo sapien
gcaaagcatttggggcctgctaatt

SEQ ID NO: 3325572 - DNA, 25 bp, Homo sapien
caaagcatttggggcctgctaattc

SEQ ID NO: 3325573 - DNA, 25 bp, Homo sapien
gcatatctttgatcaacagtcctag

SEQ ID NO: 3325574 - DNA, 25 bp, Homo sapien
tggctttggtgccagaattggcatc

SEQ ID NO: 3325575 - DNA, 25 bp, Homo sapien
tggtttctgaatgcccttggctttg

SEQ ID NO: 3325576 - DNA, 25 bp, Homo sapien
tgtactttgtgcttaaaaattcctc

SEQ ID NO: 3325577 - DNA, 25 bp, Homo sapien
catgaacaagcatgtcgagtttgga

SEQ ID NO: 3325578 - DNA, 25 bp, Homo sapien
tttgaccttggtcagcatgaacaag

SEQ ID NO: 3325579 - DNA, 25 bp, Homo sapien
taatggctgatgaaacaatatccac

SEQ ID NO: 3325580 - DNA, 25 bp, Homo sapien
tgaaacagctgaatgttcgccccgc

SEQ ID NO: 3325581 - DNA, 25 bp, Homo sapien
cttttgcatagattcgagggggata

SEQ ID NO: 3325582 - DNA, 25 bp, Homo sapien
catctctcatgtcacatactgcagg

SEQ ID NO: 3325583 - DNA, 25 bp, Homo sapien
atttctctctatagcatctttttca

SEQ ID NO: 3325584 - DNA, 25 bp, Homo sapien
caggtgtgtcagttacttttgcata

SEQ ID NO: 3325585 - DNA, 25 bp, Homo sapien
ctgcaagtattttagcctttttgag

SEQ ID NO: 3325586 - DNA, 25 bp, Homo sapien
tccaaattgaatactgcaagtattt

SEQ ID NO: 3325587 - DNA, 25 bp, Homo sapien
gcaagtattttagcctttttgagac

SEQ ID NO: 3325588 - DNA, 25 bp, Homo sapien
gaatccaaattgaatactgcaagta

SEQ ID NO: 3325589 - DNA, 25 bp, Homo sapien
tgggcattccccatgctaggatgct

SEQ ID NO: 3325590 - DNA, 25 bp, Homo sapien
gctacagctgccattatcgccaaga

SEQ ID NO: 3325591 - DNA, 25 bp, Homo sapien
tgcacaatcgcataagcagtggctg

SEQ ID NO: 3325592 - DNA, 25 bp, Homo sapien
tgtggtcctatgcttgctacagctg

SEQ ID NO: 3325593 - DNA, 25 bp, Homo sapien
tctttccggtagttttggagtgcaa

SEQ ID NO: 3325594 - DNA, 25 bp, Homo sapien
agtgcaagggagtctgtgtgagcca

SEQ ID NO: 3325595 - DNA, 25 bp, Homo sapien
tcagaagttctgatctttccggtag

SEQ ID NO: 3325596 - DNA, 25 bp, Homo sapien
tgtgagccatgaccccacatacctg

SEQ ID NO: 3325597 - DNA, 25 bp, Homo sapien
ccccaggaatctgcacgtaccccat

SEQ ID NO: 3325598 - DNA, 25 bp, Homo sapien
tgacacagttggacccaaggggccc

SEQ ID NO: 3325599 - DNA, 25 bp, Homo sapien
acagctgaataggcaggttcctgac

SEQ ID NO: 3325600 - DNA, 25 bp, Homo sapien
gctgaataggcaggttcctgacaca

SEQ ID NO: 3325601 - DNA, 25 bp, Homo sapien
tgtccatctgctgaataactgtccc

SEQ ID NO: 3325602 - DNA, 25 bp, Homo sapien
ccctttgatccttcctcttttaatg

SEQ ID NO: 3325603 - DNA, 25 bp, Homo sapien
tggctctccattactagaccttgag

SEQ ID NO: 3325604 - DNA, 25 bp, Homo sapien
ccttgagttccaatgatgtcaccct

SEQ ID NO: 3325605 - DNA, 25 bp, Homo sapien
tgttggttacacaaactgcatgact

SEQ ID NO: 3325606 - DNA, 25 bp, Homo sapien
gaaaatttccaatatcgttccagga

SEQ ID NO: 3325607 - DNA, 25 bp, Homo sapien
ccacttgcagatgtgagtacgttta

SEQ ID NO: 3325608 - DNA, 25 bp, Homo sapien
catgtatcccagatctggccacttg

SEQ ID NO: 3325609 - DNA, 25 bp, Homo sapien
taccacaccctatgttagcactttt

SEQ ID NO: 3325610 - DNA, 25 bp, Homo sapien
tatgttagcacttttcacactatgg

SEQ ID NO: 3325611 - DNA, 25 bp, Homo sapien
gcacttttcacactatggctgtaac

SEQ ID NO: 3325612 - DNA, 25 bp, Homo sapien
gaggtgcagcagcaaaattagcaag

SEQ ID NO: 3325613 - DNA, 25 bp, Homo sapien
tctactcttacatattggagccagt

SEQ ID NO: 3325614 - DNA, 25 bp, Homo sapien
tggagccagtattgaacaaacactg

SEQ ID NO: 3325615 - DNA, 25 bp, Homo sapien
ggatgtgactactaaaggatactga

SEQ ID NO: 3325616 - DNA, 25 bp, Homo sapien
tgatgatcatggcacgactctgtag

SEQ ID NO: 3325617 - DNA, 25 bp, Homo sapien
tttataaaagctgccttttttctca

SEQ ID NO: 3325618 - DNA, 25 bp, Homo sapien
cttcttatattttataaaagctgcc

SEQ ID NO: 3325619 - DNA, 25 bp, Homo sapien
cttatattttataaaagctgccttt

SEQ ID NO: 3325620 - DNA, 25 bp, Homo sapien
ttataaaagctgccttttttctcat

SEQ ID NO: 3325621 - DNA, 25 bp, Homo sapien
tctggtatacattacaggcctgcct

SEQ ID NO: 3325622 - DNA, 25 bp, Homo sapien
caaatgccctttgaactgagggacc

SEQ ID NO: 3325623 - DNA, 25 bp, Homo sapien
cattccaagatgagctccgatgtga

SEQ ID NO: 3325624 - DNA, 25 bp, Homo sapien
tcaaaacttgtagggacaggtgcat

SEQ ID NO: 3325625 - DNA, 25 bp, Homo sapien
ggtggggaagcctcacattcttggt

SEQ ID NO: 3325626 - DNA, 25 bp, Homo sapien
ccatgtgggtggggaagcctcacat

SEQ ID NO: 3325627 - DNA, 25 bp, Homo sapien
tgtgggtggggaagcctcacattct

SEQ ID NO: 3325628 - DNA, 25 bp, Homo sapien
tggaaggcaaggagaagtaagtcac

SEQ ID NO: 3325629 - DNA, 25 bp, Homo sapien
tctcactagtgatatcctggaaact

SEQ ID NO: 3325630 - DNA, 25 bp, Homo sapien
tttggtctcactagtgatatcctgg

SEQ ID NO: 3325631 - DNA, 25 bp, Homo sapien
gcttaaatttggtctcactagtgat

SEQ ID NO: 3325632 - DNA, 25 bp, Homo sapien
gggctctagcttaaatttggtctca

SEQ ID NO: 3325633 - DNA, 25 bp, Homo sapien
gtattgatgtaaggaagtatttttc

SEQ ID NO: 3325634 - DNA, 25 bp, Homo sapien
gctgttgctttgtgagtgtaattga

SEQ ID NO: 3325635 - DNA, 25 bp, Homo sapien
tagaggagtattactcataatgtca

SEQ ID NO: 3325636 - DNA, 25 bp, Homo sapien
aatattctatattgggaagcaggag

SEQ ID NO: 3325637 - DNA, 25 bp, Homo sapien
tcaagtaaatctgagtgttgtccat

SEQ ID NO: 3325638 - DNA, 25 bp, Homo sapien
tgggaagtggaactccaaacatcct

SEQ ID NO: 3325639 - DNA, 25 bp, Homo sapien
tcctctgttatagcattcactgaca

SEQ ID NO: 3325640 - DNA, 25 bp, Homo sapien
tgatttaggcacaagcaaaagaggc

SEQ ID NO: 3325641 - DNA, 25 bp, Homo sapien
cagagacctaagaattgctagaaat

SEQ ID NO: 3325642 - DNA, 25 bp, Homo sapien
tttaatcagatactcaaaagcctga

SEQ ID NO: 3325643 - DNA, 25 bp, Homo sapien
ttgatcatgcaataaaatcagaccc

SEQ ID NO: 3325644 - DNA, 25 bp, Homo sapien
cctctgtagctgtatttgcctctcc

SEQ ID NO: 3325645 - DNA, 25 bp, Homo sapien
aggaagtggagtcacccagacagaa

SEQ ID NO: 3325646 - DNA, 25 bp, Homo sapien
tcaggctcctgtgatgtatggtggt

SEQ ID NO: 3325647 - DNA, 25 bp, Homo sapien
agtggagtcacccagacagaaaagt

SEQ ID NO: 3325648 - DNA, 25 bp, Homo sapien
gaagtggagtcacccagacagaaaa

SEQ ID NO: 3325649 - DNA, 25 bp, Homo sapien
gcatctggtccaaattttgggtccc

SEQ ID NO: 3325650 - DNA, 25 bp, Homo sapien
gaaggctgtcatctcaaagtttacc

SEQ ID NO: 3325651 - DNA, 25 bp, Homo sapien
gagcccttaattgttagttcccaga

SEQ ID NO: 3325652 - DNA, 25 bp, Homo sapien
tttcaagaggttgtgctcaagctcc

SEQ ID NO: 3325653 - DNA, 25 bp, Homo sapien
gacataagaagtgcaaatccctcga

SEQ ID NO: 3325654 - DNA, 25 bp, Homo sapien
agtgaacatacacatgcttgtgtct

SEQ ID NO: 3325655 - DNA, 25 bp, Homo sapien
gcagtgaacatacacatgcttgtgt

SEQ ID NO: 3325656 - DNA, 25 bp, Homo sapien
ctgcagtgaacatacacatgcttgt

SEQ ID NO: 3325657 - DNA, 25 bp, Homo sapien
catttttttatccagcctatcattg

SEQ ID NO: 3325658 - DNA, 25 bp, Homo sapien
caatcagtctttgccaccttagctg

SEQ ID NO: 3325659 - DNA, 25 bp, Homo sapien
catctggtgatatgctctttggcag

SEQ ID NO: 3325660 - DNA, 25 bp, Homo sapien
gactcccatactggcttctgtccat

SEQ ID NO: 3325661 - DNA, 25 bp, Homo sapien
tgttgtttcagcaggataccatctg

SEQ ID NO: 3325662 - DNA, 25 bp, Homo sapien
cattaaagctacttatgctgctccc

SEQ ID NO: 3325663 - DNA, 25 bp, Homo sapien
aaagctacttatgctgctcccaacc

SEQ ID NO: 3325664 - DNA, 25 bp, Homo sapien
ttaaagctacttatgctgctcccaa

SEQ ID NO: 3325665 - DNA, 25 bp, Homo sapien
agctacttatgctgctcccaacctg

SEQ ID NO: 3325666 - DNA, 25 bp, Homo sapien
ccaataatgcgaattgctctagaat

SEQ ID NO: 3325667 - DNA, 25 bp, Homo sapien
gagttccaataatgcgaattgctct

SEQ ID NO: 3325668 - DNA, 25 bp, Homo sapien
taatgcgaattgctctagaattcat

SEQ ID NO: 3325669 - DNA, 25 bp, Homo sapien
gatgagttccaataatgcgaattgc

SEQ ID NO: 3325670 - DNA, 25 bp, Homo sapien
ccccaaaatatcagctgaagttagc

SEQ ID NO: 3325671 - DNA, 25 bp, Homo sapien
cataaatgacaaatttcggtttctt

SEQ ID NO: 3325672 - DNA, 25 bp, Homo sapien
tatcagctgaagttagccataatgc

SEQ ID NO: 3325673 - DNA, 25 bp, Homo sapien
tcttaatcttctcagagtatttctt

SEQ ID NO: 3325674 - DNA, 25 bp, Homo sapien
aatacttccatggtgcaactgctga

SEQ ID NO: 3325675 - DNA, 25 bp, Homo sapien
gccaacaacacaccatgaaaaggaa

SEQ ID NO: 3325676 - DNA, 25 bp, Homo sapien
taaccccaagaatttatcaccaaga

SEQ ID NO: 3325677 - DNA, 25 bp, Homo sapien
gtatctgaacccacctacattattg

SEQ ID NO: 3325678 - DNA, 25 bp, Homo sapien
tttcccttaagcatcagtgacagtt

SEQ ID NO: 3325679 - DNA, 25 bp, Homo sapien
aatgttctgaggactgtatctgcac

SEQ ID NO: 3325680 - DNA, 25 bp, Homo sapien
gggaaagggctatgttcatcctaac

SEQ ID NO: 3325681 - DNA, 25 bp, Homo sapien
tattgttctgccactctgttgccaa

SEQ ID NO: 3325682 - DNA, 25 bp, Homo sapien
gttgcatatgcatctacagactcta

SEQ ID NO: 3325683 - DNA, 25 bp, Homo sapien
tggcatttgcaagtgagtgcacaca

SEQ ID NO: 3325684 - DNA, 25 bp, Homo sapien
gccaagaaagagagccatgactcct

SEQ ID NO: 3325685 - DNA, 25 bp, Homo sapien
taggagcccttctgaatagtttaat

SEQ ID NO: 3325686 - DNA, 25 bp, Homo sapien
gaggtagtcattccttgtaaacttc

SEQ ID NO: 3325687 - DNA, 25 bp, Homo sapien
tcttatggcaaaactggcattctgc

SEQ ID NO: 3325688 - DNA, 25 bp, Homo sapien
gagtcatcttgtgtcgaatcagcat

SEQ ID NO: 3325689 - DNA, 25 bp, Homo sapien
ggacgattgggattatgagtcatct

SEQ ID NO: 3325690 - DNA, 25 bp, Homo sapien
taggcttgggaaaaccttacactga

SEQ ID NO: 3325691 - DNA, 25 bp, Homo sapien
gcaaggcacaactgtccaagttacc

SEQ ID NO: 3325692 - DNA, 25 bp, Homo sapien
catgagagcagggatcttcatatac

SEQ ID NO: 3325693 - DNA, 25 bp, Homo sapien
gctcagggccctaattgggtaagaa

SEQ ID NO: 3325694 - DNA, 25 bp, Homo sapien
tttgcctggctgacaccattaaaaa

SEQ ID NO: 3325695 - DNA, 25 bp, Homo sapien
gcctggctgacaccattaaaaatat

SEQ ID NO: 3325696 - DNA, 25 bp, Homo sapien
ttgcctggctgacaccattaaaaat

SEQ ID NO: 3325697 - DNA, 25 bp, Homo sapien
tgcctggctgacaccattaaaaata

SEQ ID NO: 3325698 - DNA, 25 bp, Homo sapien
cttgtgctcatccaggcctcgcttc

SEQ ID NO: 3325699 - DNA, 25 bp, Homo sapien
cagtgtgcgtcctcttgtgctcatc

SEQ ID NO: 3325700 - DNA, 25 bp, Homo sapien
tcttgtgctcatccaggcctcgctt

SEQ ID NO: 3325701 - DNA, 25 bp, Homo sapien
gaagttgtgaagacatgatgggcat

SEQ ID NO: 3325702 - DNA, 25 bp, Homo sapien
taagaccagaagttgtgaagacatg

SEQ ID NO: 3325703 - DNA, 25 bp, Homo sapien
ttgtaagaccagaagttgtgaagac

SEQ ID NO: 3325704 - DNA, 25 bp, Homo sapien
agaagttgtgaagacatgatgggca

SEQ ID NO: 3325705 - DNA, 25 bp, Homo sapien
ttcaaaaggtaggatttacacagct

SEQ ID NO: 3325706 - DNA, 25 bp, Homo sapien
tgtcctttgtcatcacaacttggga

SEQ ID NO: 3325707 - DNA, 25 bp, Homo sapien
catctgagagggttctacagaaaca

SEQ ID NO: 3325708 - DNA, 25 bp, Homo sapien
ggcagaattaatcaggagtctcatc

SEQ ID NO: 3325709 - DNA, 25 bp, Homo sapien
ctgagaacaacgtacttgtgcattg

SEQ ID NO: 3325710 - DNA, 25 bp, Homo sapien
tgtgcattgtaaagaatgtcctttg

SEQ ID NO: 3325711 - DNA, 25 bp, Homo sapien
gcattgtaaagaatgtcctttgtaa

SEQ ID NO: 3325712 - DNA, 25 bp, Homo sapien
gaacaacgtacttgtgcattgtaaa

SEQ ID NO: 3325713 - DNA, 25 bp, Homo sapien
gaactaattcaatttggtcacttcc

SEQ ID NO: 3325714 - DNA, 25 bp, Homo sapien
tagaactgaactaattcaatttggt

SEQ ID NO: 3325715 - DNA, 25 bp, Homo sapien
ccagtccacatagaactgaactaat

SEQ ID NO: 3325716 - DNA, 25 bp, Homo sapien
tccacatagaactgaactaattcaa

SEQ ID NO: 3325717 - DNA, 25 bp, Homo sapien
gcacaaggtagagtgctacaggggc

SEQ ID NO: 3325718 - DNA, 25 bp, Homo sapien
gaagtgtcaaactatccctggaatg

SEQ ID NO: 3325719 - DNA, 25 bp, Homo sapien
tgttgaaccatctcaggataagggt

SEQ ID NO: 3325720 - DNA, 25 bp, Homo sapien
catttgggtggcttaagaggagctc

SEQ ID NO: 3325721 - DNA, 25 bp, Homo sapien
cactggaaccttgacaatggaagcc

SEQ ID NO: 3325722 - DNA, 25 bp, Homo sapien
ttgttttccatgttccaatgttgcc

SEQ ID NO: 3325723 - DNA, 25 bp, Homo sapien
ggcagagccagatgctttgttttcc

SEQ ID NO: 3325724 - DNA, 25 bp, Homo sapien
tgttttccatgttccaatgttgcca

SEQ ID NO: 3325725 - DNA, 25 bp, Homo sapien
agagccagatgctttgttttccatg

SEQ ID NO: 3325726 - DNA, 25 bp, Homo sapien
gggggcatcgtcttgagacactccc

SEQ ID NO: 3325727 - DNA, 25 bp, Homo sapien
tctcaagacgatgactgggggcatc

SEQ ID NO: 3325728 - DNA, 25 bp, Homo sapien
ctactgattctcaagacgatgactg

SEQ ID NO: 3325729 - DNA, 25 bp, Homo sapien
tgggggcatcgtcttgagacactcc

SEQ ID NO: 3325730 - DNA, 25 bp, Homo sapien
tgacaggaggcaaaagctaccagct

SEQ ID NO: 3325731 - DNA, 25 bp, Homo sapien
aactcgcaggtgttctgttccaggc

SEQ ID NO: 3325732 - DNA, 25 bp, Homo sapien
gaacctgactacgtatcctgcactg

SEQ ID NO: 3325733 - DNA, 25 bp, Homo sapien
caagaaccccagtgatccacaggag

SEQ ID NO: 3325734 - DNA, 25 bp, Homo sapien
tcaccatagaatgtaaacctggggg

SEQ ID NO: 3325735 - DNA, 25 bp, Homo sapien
gaaagcattcgtgcagtcaccatag

SEQ ID NO: 3325736 - DNA, 25 bp, Homo sapien
aacctgggggtataggcctgacaca

SEQ ID NO: 3325737 - DNA, 25 bp, Homo sapien
gcaataaccagagagtaaatggctt

SEQ ID NO: 3325738 - DNA, 25 bp, Homo sapien
gcttcttctgtgttgtaatcatgtc

SEQ ID NO: 3325739 - DNA, 25 bp, Homo sapien
aagcatgtgaaacagatgcttgagt

SEQ ID NO: 3325740 - DNA, 25 bp, Homo sapien
cctggtgtgagtacgaatgtgcatc

SEQ ID NO: 3325741 - DNA, 25 bp, Homo sapien
tgagtacgaatgtgcatcttcagtc

SEQ ID NO: 3325742 - DNA, 25 bp, Homo sapien
ggtgtgagtacgaatgtgcatcttc

SEQ ID NO: 3325743 - DNA, 25 bp, Homo sapien
tttcacagtaaggacattgataggg

SEQ ID NO: 3325744 - DNA, 25 bp, Homo sapien
tctctgaattggaggtactttaact

SEQ ID NO: 3325745 - DNA, 25 bp, Homo sapien
caggtgaaggacttagctaaagtca

SEQ ID NO: 3325746 - DNA, 25 bp, Homo sapien
gcttgaagtaagtgtatccaaattc

SEQ ID NO: 3325747 - DNA, 25 bp, Homo sapien
gcagttccttaatgccaatttaaca

SEQ ID NO: 3325748 - DNA, 25 bp, Homo sapien
tgatatcgttccacatggttgaact

SEQ ID NO: 3325749 - DNA, 25 bp, Homo sapien
cactgacaaataggagtagctcaag

SEQ ID NO: 3325750 - DNA, 25 bp, Homo sapien
gactaggaaatggttacaaaacagc

SEQ ID NO: 3325751 - DNA, 25 bp, Homo sapien
tagaagtacaccatagagagaagtg

SEQ ID NO: 3325752 - DNA, 25 bp, Homo sapien
gcttctctgaatccgtgcttcctca

SEQ ID NO: 3325753 - DNA, 25 bp, Homo sapien
gatactatatttgagagaacgttcc

SEQ ID NO: 3325754 - DNA, 25 bp, Homo sapien
gaaaatgagaatggtcctagaaatg

SEQ ID NO: 3325755 - DNA, 25 bp, Homo sapien
gtgagaacagactaaaacaatgtga

SEQ ID NO: 3325756 - DNA, 25 bp, Homo sapien
tcaattgtatgcttaggttcaagaa

SEQ ID NO: 3325757 - DNA, 25 bp, Homo sapien
tggacaaaaaggttgtgtccagcct

SEQ ID NO: 3325758 - DNA, 25 bp, Homo sapien
attggacaaaaaggttgtgtccagc

SEQ ID NO: 3325759 - DNA, 25 bp, Homo sapien
aacagttcaattgtatgcttaggtt

SEQ ID NO: 3325760 - DNA, 25 bp, Homo sapien
gcagcaaaggcaatgccaatggaca

SEQ ID NO: 3325761 - DNA, 25 bp, Homo sapien
gccaatggacattaacgttgcagcg

SEQ ID NO: 3325762 - DNA, 25 bp, Homo sapien
ggacattaacgttgcagcggcggca

SEQ ID NO: 3325763 - DNA, 25 bp, Homo sapien
caatgccaatggacattaacgttgc

SEQ ID NO: 3325764 - DNA, 25 bp, Homo sapien
gccacaatatggacagattttctcc

SEQ ID NO: 3325765 - DNA, 25 bp, Homo sapien
tccggatatgaactctgagtgtacc

SEQ ID NO: 3325766 - DNA, 25 bp, Homo sapien
tttctggccacaatatggacagatt

SEQ ID NO: 3325767 - DNA, 25 bp, Homo sapien
gtggctccggatatgaactctgagt

SEQ ID NO: 3325768 - DNA, 25 bp, Homo sapien
tcctcttaaaggtagcatcgcagtg

SEQ ID NO: 3325769 - DNA, 25 bp, Homo sapien
atagctcacacctatacttcttgtg

SEQ ID NO: 3325770 - DNA, 25 bp, Homo sapien
caaaggccttattacatagctcaca

SEQ ID NO: 3325771 - DNA, 25 bp, Homo sapien
gcactgaaggtgtaacaaaggcctt

SEQ ID NO: 3325772 - DNA, 25 bp, Homo sapien
tcttcacattggaacggtctctcct

SEQ ID NO: 3325773 - DNA, 25 bp, Homo sapien
cacattggaacggtctctcctcaga

SEQ ID NO: 3325774 - DNA, 25 bp, Homo sapien
tgttatgtattagcaggtgtctctg

SEQ ID NO: 3325775 - DNA, 25 bp, Homo sapien
cattggaacggtctctcctcagagt

SEQ ID NO: 3325776 - DNA, 25 bp, Homo sapien
acctgtagcttcactcatgaagata

SEQ ID NO: 3325777 - DNA, 25 bp, Homo sapien
cagttttcacactcatcacagttat

SEQ ID NO: 3325778 - DNA, 25 bp, Homo sapien
catcacagttattgtacaggagaat

SEQ ID NO: 3325779 - DNA, 25 bp, Homo sapien
tcactcatgaagatacagttttcac

SEQ ID NO: 3325780 - DNA, 25 bp, Homo sapien
tggatagatcagtttcatcagagaa

SEQ ID NO: 3325781 - DNA, 25 bp, Homo sapien
gagggttccagagactaaacaggaa

SEQ ID NO: 3325782 - DNA, 25 bp, Homo sapien
catcattgtttctatgcttcccaag

SEQ ID NO: 3325783 - DNA, 25 bp, Homo sapien
gatcctgtgccaaattcccatatgg

SEQ ID NO: 3325784 - DNA, 25 bp, Homo sapien
tacaaatctcgcaattatagggtcg

SEQ ID NO: 3325785 - DNA, 25 bp, Homo sapien
caagcctcttgaaagacttattaca

SEQ ID NO: 3325786 - DNA, 25 bp, Homo sapien
tttgtgagcacccacttgatcaagc

SEQ ID NO: 3325787 - DNA, 25 bp, Homo sapien
aaggtttgtcttcgctgtgtattac

SEQ ID NO: 3325788 - DNA, 25 bp, Homo sapien
attaaaaaaatgagtggagacaatc

SEQ ID NO: 3325789 - DNA, 25 bp, Homo sapien
taaaaaaatgagtggagacaatctc

SEQ ID NO: 3325790 - DNA, 25 bp, Homo sapien
aaaatgagtggagacaatctcatat

SEQ ID NO: 3325791 - DNA, 25 bp, Homo sapien
aaaaaatgagtggagacaatctcat

SEQ ID NO: 3325792 - DNA, 25 bp, Homo sapien
ctgagtgggtgatcatatgacgttt

SEQ ID NO: 3325793 - DNA, 25 bp, Homo sapien
tcatatgacgttttagctgattagc

SEQ ID NO: 3325794 - DNA, 25 bp, Homo sapien
tgacgttttagctgattagctgaaa

SEQ ID NO: 3325795 - DNA, 25 bp, Homo sapien
ggtgatcatatgacgttttagctga

SEQ ID NO: 3325796 - DNA, 25 bp, Homo sapien
taggcttgatgctgaagaacacttt

SEQ ID NO: 3325797 - DNA, 25 bp, Homo sapien
tgcacactgaacatataagcttttt

SEQ ID NO: 3325798 - DNA, 25 bp, Homo sapien
ttctatgttcctgtaggcttgatgc

SEQ ID NO: 3325799 - DNA, 25 bp, Homo sapien
tttattgcacactgaacatataagc

SEQ ID NO: 3325800 - DNA, 25 bp, Homo sapien
atcttcacagcttcatataccacct

SEQ ID NO: 3325801 - DNA, 25 bp, Homo sapien
tcttcacagcttcatataccacctt

SEQ ID NO: 3325802 - DNA, 25 bp, Homo sapien
tcacagcttcatataccacctttct

SEQ ID NO: 3325803 - DNA, 25 bp, Homo sapien
acagcttcatataccacctttctca

SEQ ID NO: 3325804 - DNA, 25 bp, Homo sapien
tgatatatccacaaggaattcaaag

SEQ ID NO: 3325805 - DNA, 25 bp, Homo sapien
attaaaagagaaagtgatatatcca

SEQ ID NO: 3325806 - DNA, 25 bp, Homo sapien
taaaagagaaagtgatatatccaca

SEQ ID NO: 3325807 - DNA, 25 bp, Homo sapien
gatatatccacaaggaattcaaagc

SEQ ID NO: 3325808 - DNA, 25 bp, Homo sapien
taaacatatcatacctgaggcacca

SEQ ID NO: 3325809 - DNA, 25 bp, Homo sapien
gaatcaccatctatccatcacctgg

SEQ ID NO: 3325810 - DNA, 25 bp, Homo sapien
taacatggctactaaaggagaaaat

SEQ ID NO: 3325811 - DNA, 25 bp, Homo sapien
tggccccaacaatgactcaccatga

SEQ ID NO: 3325812 - DNA, 25 bp, Homo sapien
ccatcttccctaagtcagctgtgta

SEQ ID NO: 3325813 - DNA, 25 bp, Homo sapien
tttgcaatcatagggaagaccccag

SEQ ID NO: 3325814 - DNA, 25 bp, Homo sapien
taaaagcctagtgaagggcaccaag

SEQ ID NO: 3325815 - DNA, 25 bp, Homo sapien
aagtctccagagtttcgtatgcatc

SEQ ID NO: 3325816 - DNA, 25 bp, Homo sapien
ggcagaaggacatcacttaataatg

SEQ ID NO: 3325817 - DNA, 25 bp, Homo sapien
tgaccacccaaacataactagactt

SEQ ID NO: 3325818 - DNA, 25 bp, Homo sapien
taattcttaatgcatctgaccaccc

SEQ ID NO: 3325819 - DNA, 25 bp, Homo sapien
tagctagctatcagatggaattcaa

SEQ ID NO: 3325820 - DNA, 25 bp, Homo sapien
gtcagccttgcacacaaacctggca

SEQ ID NO: 3325821 - DNA, 25 bp, Homo sapien
tttcctggtgtcttttcagggcatc

SEQ ID NO: 3325822 - DNA, 25 bp, Homo sapien
acagctgtcagccttgcacacaaac

SEQ ID NO: 3325823 - DNA, 25 bp, Homo sapien
attttcctggtgtcttttcagggca

SEQ ID NO: 3325824 - DNA, 25 bp, Homo sapien
tagactgcttttcgctgtgcactga

SEQ ID NO: 3325825 - DNA, 25 bp, Homo sapien
aacttcgcgaagactcctttagact

SEQ ID NO: 3325826 - DNA, 25 bp, Homo sapien
agagcactgaaaacttcgcgaagac

SEQ ID NO: 3325827 - DNA, 25 bp, Homo sapien
ctgaaggaagaattgcaaacagagc

SEQ ID NO: 3325828 - DNA, 25 bp, Homo sapien
caggatgggagcacataagagaaga

SEQ ID NO: 3325829 - DNA, 25 bp, Homo sapien
caataaaagctaaccagaatgcaac

SEQ ID NO: 3325830 - DNA, 25 bp, Homo sapien
caatgagagtctacagttgcatcca

SEQ ID NO: 3325831 - DNA, 25 bp, Homo sapien
gaataaagtcatgttcgtgatccct

SEQ ID NO: 3325832 - DNA, 25 bp, Homo sapien
aaaaactatgagttaagctgaatgg

SEQ ID NO: 3325833 - DNA, 25 bp, Homo sapien
tgtaaaatgcttaatctctcattca

SEQ ID NO: 3325834 - DNA, 25 bp, Homo sapien
aaatgcttaatctctcattcacaca

SEQ ID NO: 3325835 - DNA, 25 bp, Homo sapien
taaactgtgttagcttataatttta

SEQ ID NO: 3325836 - DNA, 25 bp, Homo sapien
tcacattgaggacaagcatagtcct

SEQ ID NO: 3325837 - DNA, 25 bp, Homo sapien
cctcactggtaaaactcgattcaca

SEQ ID NO: 3325838 - DNA, 25 bp, Homo sapien
gcctgcttaactgggaatttcttcc

SEQ ID NO: 3325839 - DNA, 25 bp, Homo sapien
caatgtctggagatgctcagcaaga

SEQ ID NO: 3325840 - DNA, 25 bp, Homo sapien
tccccttctttgatgactgtcataa

SEQ ID NO: 3325841 - DNA, 25 bp, Homo sapien
ttctatatcttcaactgccaaatag

SEQ ID NO: 3325842 - DNA, 25 bp, Homo sapien
tcagcctccatgtcactatccaggt

SEQ ID NO: 3325843 - DNA, 25 bp, Homo sapien
ggtagccaatcagaagctccgtgtc

SEQ ID NO: 3325844 - DNA, 25 bp, Homo sapien
cttcaaatgtacctgctcctcttct

SEQ ID NO: 3325845 - DNA, 25 bp, Homo sapien
caagtgaactcccatcatctgaatt

SEQ ID NO: 3325846 - DNA, 25 bp, Homo sapien
ttttcatgtcattctcttgtcccca

SEQ ID NO: 3325847 - DNA, 25 bp, Homo sapien
cccaaatctccttcaaatgtacctg

SEQ ID NO: 3325848 - DNA, 25 bp, Homo sapien
tcagaaaacacagagctaattccca

SEQ ID NO: 3325849 - DNA, 25 bp, Homo sapien
ttctcagaaaacacagagctaattc

SEQ ID NO: 3325850 - DNA, 25 bp, Homo sapien
caaactagtacacttctcagaaaac

SEQ ID NO: 3325851 - DNA, 25 bp, Homo sapien
cagaaaacacagagctaattcccac

SEQ ID NO: 3325852 - DNA, 25 bp, Homo sapien
gagagggcagccgttttataaacaa

SEQ ID NO: 3325853 - DNA, 25 bp, Homo sapien
tagagggcggacatgttcttattgc

SEQ ID NO: 3325854 - DNA, 25 bp, Homo sapien
caaagaacagggcaggatacactga

SEQ ID NO: 3325855 - DNA, 25 bp, Homo sapien
cttataatcagccatacagggagga

SEQ ID NO: 3325856 - DNA, 25 bp, Homo sapien
ccattctgtagatgttacccattca

SEQ ID NO: 3325857 - DNA, 25 bp, Homo sapien
cccattcattagtcacttggtagcc

SEQ ID NO: 3325858 - DNA, 25 bp, Homo sapien
gtattgaatacccacacacataagg

SEQ ID NO: 3325859 - DNA, 25 bp, Homo sapien
ggttatcagaccaactgccacctgt

SEQ ID NO: 3325860 - DNA, 25 bp, Homo sapien
taccaccaacatgctcaggaattgc

SEQ ID NO: 3325861 - DNA, 25 bp, Homo sapien
ggtgcctgctgatgcaaaatttcaa

SEQ ID NO: 3325862 - DNA, 25 bp, Homo sapien
gaattgccatgcctgactgtcagtc

SEQ ID NO: 3325863 - DNA, 25 bp, Homo sapien
ttagactggctagggtgaaaagctc

SEQ ID NO: 3325864 - DNA, 25 bp, Homo sapien
tacagcggtatagaatagcagtgcc

SEQ ID NO: 3325865 - DNA, 25 bp, Homo sapien
gccagtcgtgcctttgcccaaattt

SEQ ID NO: 3325866 - DNA, 25 bp, Homo sapien
tgttcagctcacactaatggcctgg

SEQ ID NO: 3325867 - DNA, 25 bp, Homo sapien
caatgcacagtcagatatgccggct

SEQ ID NO: 3325868 - DNA, 25 bp, Homo sapien
ccattcggcgggtcccaaattcttg

SEQ ID NO: 3325869 - DNA, 25 bp, Homo sapien
cgccattcggcgggtcccaaattct

SEQ ID NO: 3325870 - DNA, 25 bp, Homo sapien
ctcgccattcggcgggtcccaaatt

SEQ ID NO: 3325871 - DNA, 25 bp, Homo sapien
tagcctcgccattcggcgggtccca

SEQ ID NO: 3325872 - DNA, 25 bp, Homo sapien
tacggtgactaagactcaatcaagg

SEQ ID NO: 3325873 - DNA, 25 bp, Homo sapien
tcaaggatgattagattagggtcta

SEQ ID NO: 3325874 - DNA, 25 bp, Homo sapien
gcagccaggtatgggtctacggcac

SEQ ID NO: 3325875 - DNA, 25 bp, Homo sapien
gattttgtgacatagtagacttctc

SEQ ID NO: 3325876 - DNA, 25 bp, Homo sapien
tgaacgaagcgaagccagttggagt

SEQ ID NO: 3325877 - DNA, 25 bp, Homo sapien
ttgaatggcagccaagttcttctgc

SEQ ID NO: 3325878 - DNA, 25 bp, Homo sapien
tcctgagatggtgcctcatgaacga

SEQ ID NO: 3325879 - DNA, 25 bp, Homo sapien
tgggttggtagcatccaaaatgtac

SEQ ID NO: 3325880 - DNA, 25 bp, Homo sapien
gattctcacatgagtcagattccat

SEQ ID NO: 3325881 - DNA, 25 bp, Homo sapien
ctagccatctaagaatgcacatcca

SEQ ID NO: 3325882 - DNA, 25 bp, Homo sapien
tctaagaatgcacatccactgcctg

SEQ ID NO: 3325883 - DNA, 25 bp, Homo sapien
ttctcacatgagtcagattccataa

SEQ ID NO: 3325884 - DNA, 25 bp, Homo sapien
cagtgtggagcggacggtagctcag

SEQ ID NO: 3325885 - DNA, 25 bp, Homo sapien
gtgtggagcggacggtagctcagca

SEQ ID NO: 3325886 - DNA, 25 bp, Homo sapien
tggcagtgtggagcggacggtagct

SEQ ID NO: 3325887 - DNA, 25 bp, Homo sapien
gtggcagtgtggagcggacggtagc

SEQ ID NO: 3325888 - DNA, 25 bp, Homo sapien
cattctataaggcttcataggtggt

SEQ ID NO: 3325889 - DNA, 25 bp, Homo sapien
tatttttccaccaaggtctacacta

SEQ ID NO: 3325890 - DNA, 25 bp, Homo sapien
gacatttgttttaggagttccagca

SEQ ID NO: 3325891 - DNA, 25 bp, Homo sapien
taagtggttccatttggaccccata

SEQ ID NO: 3325892 - DNA, 25 bp, Homo sapien
tagagtatgtaccacctgcagacga

SEQ ID NO: 3325893 - DNA, 25 bp, Homo sapien
ggccctatctgatcaagtgttgagt

SEQ ID NO: 3325894 - DNA, 25 bp, Homo sapien
ccatagatgtctgttggccctatct

SEQ ID NO: 3325895 - DNA, 25 bp, Homo sapien
tcaggtcccgaacgtcactgatagt

SEQ ID NO: 3325896 - DNA, 25 bp, Homo sapien
gaacaaggcaactgagtacaaaagg

SEQ ID NO: 3325897 - DNA, 25 bp, Homo sapien
gatggcaactggctcccaaagaatg

SEQ ID NO: 3325898 - DNA, 25 bp, Homo sapien
ctttcccacagtgcaggttgatgtg

SEQ ID NO: 3325899 - DNA, 25 bp, Homo sapien
tcccacaaagtaagtgaagaaccag

SEQ ID NO: 3325900 - DNA, 25 bp, Homo sapien
ctcttccacatcaacaccatcttca

SEQ ID NO: 3325901 - DNA, 25 bp, Homo sapien
cttcatcaaaatatgtttcaagtct

SEQ ID NO: 3325902 - DNA, 25 bp, Homo sapien
caaaatatgtttcaagtcttcttca

SEQ ID NO: 3325903 - DNA, 25 bp, Homo sapien
tcatcattatgaacatcagcttctt

SEQ ID NO: 3325904 - DNA, 25 bp, Homo sapien
ctatcatataagaagccaatctgcg

SEQ ID NO: 3325905 - DNA, 25 bp, Homo sapien
tatagcccaggctggcaccatcata

SEQ ID NO: 3325906 - DNA, 25 bp, Homo sapien
gacacctcaacctccttgactcaaa

SEQ ID NO: 3325907 - DNA, 25 bp, Homo sapien
aatcctctcacgtcaacctcatgag

SEQ ID NO: 3325908 - DNA, 25 bp, Homo sapien
gctttgttgcaatctcttccctgag

SEQ ID NO: 3325909 - DNA, 25 bp, Homo sapien
atcagaatcattggtgaatcaagtg

SEQ ID NO: 3325910 - DNA, 25 bp, Homo sapien
catcagaatcattggtgaatcaagt

SEQ ID NO: 3325911 - DNA, 25 bp, Homo sapien
gcatcagaatcattggtgaatcaag

SEQ ID NO: 3325912 - DNA, 25 bp, Homo sapien
taagatatctgtaggtgtaaccgtc

SEQ ID NO: 3325913 - DNA, 25 bp, Homo sapien
gacactgtttcaggctcatacagct

SEQ ID NO: 3325914 - DNA, 25 bp, Homo sapien
tcctgctaagctaaaaggtcctaac

SEQ ID NO: 3325915 - DNA, 25 bp, Homo sapien
tgtaaccgtctttctactgacactg

SEQ ID NO: 3325916 - DNA, 25 bp, Homo sapien
agaatttcctgtgcccatccccatg

SEQ ID NO: 3325917 - DNA, 25 bp, Homo sapien
ccccatgctgtatagtaagcagaca

SEQ ID NO: 3325918 - DNA, 25 bp, Homo sapien
tgtgcccatccccatgctgtatagt

SEQ ID NO: 3325919 - DNA, 25 bp, Homo sapien
gggccagaatttcctgtgcccatcc

SEQ ID NO: 3325920 - DNA, 25 bp, Homo sapien
tccacttgcatcagatcacaccact

SEQ ID NO: 3325921 - DNA, 25 bp, Homo sapien
ggcatagcatatgactccacttgca

SEQ ID NO: 3325922 - DNA, 25 bp, Homo sapien
ttagtttgtatctggttctttagga

SEQ ID NO: 3325923 - DNA, 25 bp, Homo sapien
acccagtgtactgaactgtggcata

SEQ ID NO: 3325924 - DNA, 25 bp, Homo sapien
taaatacttaactggaatcaatatc

SEQ ID NO: 3325925 - DNA, 25 bp, Homo sapien
cttaaatacttaactggaatcaata

SEQ ID NO: 3325926 - DNA, 25 bp, Homo sapien
ttaaatacttaactggaatcaatat

SEQ ID NO: 3325927 - DNA, 25 bp, Homo sapien
tccagcaaagggtccgaacttttca

SEQ ID NO: 3325928 - DNA, 25 bp, Homo sapien
tcatccaagtcttcaggcattctct

SEQ ID NO: 3325929 - DNA, 25 bp, Homo sapien
tctctccagcaaagggtccgaactt

SEQ ID NO: 3325930 - DNA, 25 bp, Homo sapien
tcaacctgtaatccatattttcatc

SEQ ID NO: 3325931 - DNA, 25 bp, Homo sapien
agcaatgattatattgaacaaggat

SEQ ID NO: 3325932 - DNA, 25 bp, Homo sapien
tgaacaaggattagtacaataaatc

SEQ ID NO: 3325933 - DNA, 25 bp, Homo sapien
ggattagtacaataaatcaacatac

SEQ ID NO: 3325934 - DNA, 25 bp, Homo sapien
ttatattgaacaaggattagtacaa

SEQ ID NO: 3325935 - DNA, 25 bp, Homo sapien
ctaaaggaaaagaggcgacagcgga

SEQ ID NO: 3325936 - DNA, 25 bp, Homo sapien
gacagcggagcagcgtgcgcgcggg

SEQ ID NO: 3325937 - DNA, 25 bp, Homo sapien
gaggcgacagcggagcagcgtgcgc

SEQ ID NO: 3325938 - DNA, 25 bp, Homo sapien
gcgacagcggagcagcgtgcgcgcg

SEQ ID NO: 3325939 - DNA, 25 bp, Homo sapien
acgcgtgccttcgccaacgcaaaga

SEQ ID NO: 3325940 - DNA, 25 bp, Homo sapien
ctcacacccgtaaccgaggaagagg

SEQ ID NO: 3325941 - DNA, 25 bp, Homo sapien
agctcacacccgtaaccgaggaaga

SEQ ID NO: 3325942 - DNA, 25 bp, Homo sapien
ttcgccaacgcaaagacgcagctca

SEQ ID NO: 3325943 - DNA, 25 bp, Homo sapien
ctctgcgggccgtgtagagccccat

SEQ ID NO: 3325944 - DNA, 25 bp, Homo sapien
ctttcgcactctgcgggccgtgtag

SEQ ID NO: 3325945 - DNA, 25 bp, Homo sapien
gcactctgcgggccgtgtagagccc

SEQ ID NO: 3325946 - DNA, 25 bp, Homo sapien
tcgcactctgcgggccgtgtagagc

SEQ ID NO: 3325947 - DNA, 25 bp, Homo sapien
gaggacttcagggagaacctgtccg

SEQ ID NO: 3325948 - DNA, 25 bp, Homo sapien
tcagggagaacctgtccggcacgta

SEQ ID NO: 3325949 - DNA, 25 bp, Homo sapien
ttcagggagaacctgtccggcacgt

SEQ ID NO: 3325950 - DNA, 25 bp, Homo sapien
gggagaacctgtccggcacgtacat

SEQ ID NO: 3325951 - DNA, 25 bp, Homo sapien
cccggatccgttcctgccattcctg

SEQ ID NO: 3325952 - DNA, 25 bp, Homo sapien
tcaacaccggcgcttagcgcccggc

SEQ ID NO: 3325953 - DNA, 25 bp, Homo sapien
cggcaggcggcacatcgaaatttgg

SEQ ID NO: 3325954 - DNA, 25 bp, Homo sapien
gggctcggcccggatccgttcctgc

SEQ ID NO: 3325955 - DNA, 25 bp, Homo sapien
ccagggttccttagaaccagggctg

SEQ ID NO: 3325956 - DNA, 25 bp, Homo sapien
tttttgttgtgcttcacaaggaact

SEQ ID NO: 3325957 - DNA, 25 bp, Homo sapien
ttagaaccagggctgaaaccatgcc

SEQ ID NO: 3325958 - DNA, 25 bp, Homo sapien
ttgttgtgcttcacaaggaactgga

SEQ ID NO: 3325959 - DNA, 25 bp, Homo sapien
ttccagccacccttaagccatccag

SEQ ID NO: 3325960 - DNA, 25 bp, Homo sapien
cacccttaagccatccagggctctc

SEQ ID NO: 3325961 - DNA, 25 bp, Homo sapien
ctttgggcacgagaatttccacagc

SEQ ID NO: 3325962 - DNA, 25 bp, Homo sapien
cactgtctctttgggcacgagaatt

SEQ ID NO: 3325963 - DNA, 25 bp, Homo sapien
cactttccggttatacttcccatgg

SEQ ID NO: 3325964 - DNA, 25 bp, Homo sapien
gctctaggacaggtagaactttcca

SEQ ID NO: 3325965 - DNA, 25 bp, Homo sapien
gcagtggctctaggacaggtagaac

SEQ ID NO: 3325966 - DNA, 25 bp, Homo sapien
ttcccatggggcttagcagtggctc

SEQ ID NO: 3325967 - DNA, 25 bp, Homo sapien
tgtaacttggaatttggttcttcac

SEQ ID NO: 3325968 - DNA, 25 bp, Homo sapien
cactgtaacttggaatttggttctt

SEQ ID NO: 3325969 - DNA, 25 bp, Homo sapien
tcactgtaacttggaatttggttct

SEQ ID NO: 3325970 - DNA, 25 bp, Homo sapien
tggttcttcactaatttcatcctgt

SEQ ID NO: 3325971 - DNA, 25 bp, Homo sapien
aggttgagcttctcgactctctttt

SEQ ID NO: 3325972 - DNA, 25 bp, Homo sapien
gttgagcttctcgactctctttttt

SEQ ID NO: 3325973 - DNA, 25 bp, Homo sapien
aaggttgagcttctcgactctcttt

SEQ ID NO: 3325974 - DNA, 25 bp, Homo sapien
ggttgagcttctcgactctcttttt

SEQ ID NO: 3325975 - DNA, 25 bp, Homo sapien
aacatagacaatatgagcattgtgg

SEQ ID NO: 3325976 - DNA, 25 bp, Homo sapien
taacatagacaatatgagcattgtg

SEQ ID NO: 3325977 - DNA, 25 bp, Homo sapien
agttaacatagacaatatgagcatt

SEQ ID NO: 3325978 - DNA, 25 bp, Homo sapien
catagacaatatgagcattgtggat

SEQ ID NO: 3325979 - DNA, 25 bp, Homo sapien
gaatgctgcgaatgtctcagaacag

SEQ ID NO: 3325980 - DNA, 25 bp, Homo sapien
ccagaatgctgcgaatgtctcagaa

SEQ ID NO: 3325981 - DNA, 25 bp, Homo sapien
tgctgcgaatgtctcagaacagggt

SEQ ID NO: 3325982 - DNA, 25 bp, Homo sapien
gcgaatgtctcagaacagggtaaag

SEQ ID NO: 3325983 - DNA, 25 bp, Homo sapien
cctctgattggagccacacttctta

SEQ ID NO: 3325984 - DNA, 25 bp, Homo sapien
actgtcctgaggcacgatttcctgc

SEQ ID NO: 3325985 - DNA, 25 bp, Homo sapien
gattggagccacacttcttactcat

SEQ ID NO: 3325986 - DNA, 25 bp, Homo sapien
gcacgatttcctgcctctgattgga

SEQ ID NO: 3325987 - DNA, 25 bp, Homo sapien
gtctgcagttttggagttgtataca

SEQ ID NO: 3325988 - DNA, 25 bp, Homo sapien
tctgcagttttggagttgtatacat

SEQ ID NO: 3325989 - DNA, 25 bp, Homo sapien
cgtctgcagttttggagttgtatac

SEQ ID NO: 3325990 - DNA, 25 bp, Homo sapien
caaggtagggacatgcgaatctctg

SEQ ID NO: 3325991 - DNA, 25 bp, Homo sapien
agctgccttggagttttccctgtgc

SEQ ID NO: 3325992 - DNA, 25 bp, Homo sapien
tgtgccaataccgagcaggacagta

SEQ ID NO: 3325993 - DNA, 25 bp, Homo sapien
tccatgaggagaggtgatgactctg

SEQ ID NO: 3325994 - DNA, 25 bp, Homo sapien
tgcagccaaaagactctaatgaaag

SEQ ID NO: 3325995 - DNA, 25 bp, Homo sapien
tgtgacaagcctaaacaatgatcca

SEQ ID NO: 3325996 - DNA, 25 bp, Homo sapien
tctgttaaaacagcattgcagccaa

SEQ ID NO: 3325997 - DNA, 25 bp, Homo sapien
taatgaaagtttccctgtgacaagc

SEQ ID NO: 3325998 - DNA, 25 bp, Homo sapien
cctaaccgagtgttctgtggctgtg

SEQ ID NO: 3325999 - DNA, 25 bp, Homo sapien
gaatgcttcgcaaaattctggctgc

SEQ ID NO: 3326000 - DNA, 25 bp, Homo sapien
caagatagttctgtgaggccatggc

SEQ ID NO: 3326001 - DNA, 25 bp, Homo sapien
tgtgctgtgccaatgctagaaactg

SEQ ID NO: 3326002 - DNA, 25 bp, Homo sapien
tatgcaggccaagctttaatatact

SEQ ID NO: 3326003 - DNA, 25 bp, Homo sapien
tgggaaagttctacacaataagagc

SEQ ID NO: 3326004 - DNA, 25 bp, Homo sapien
gaaaaacgcattcatttggtaccag

SEQ ID NO: 3326005 - DNA, 25 bp, Homo sapien
ctagaactcacaagcatacaggtgg

SEQ ID NO: 3326006 - DNA, 25 bp, Homo sapien
gcacagctctctgccattagtcaat

SEQ ID NO: 3326007 - DNA, 25 bp, Homo sapien
cctggaatgcttgcccatggaattg

SEQ ID NO: 3326008 - DNA, 25 bp, Homo sapien
cagtatttagagcagccaagtttgc

SEQ ID NO: 3326009 - DNA, 25 bp, Homo sapien
catggaattggcaaaggaactggca

SEQ ID NO: 3326010 - DNA, 25 bp, Homo sapien
caatgtggaaattatcaggcctgca

SEQ ID NO: 3326011 - DNA, 25 bp, Homo sapien
tagctactgtgatacacggaaactc

SEQ ID NO: 3326012 - DNA, 25 bp, Homo sapien
gagggtggcatgcttcttccaaaaa

SEQ ID NO: 3326013 - DNA, 25 bp, Homo sapien
ttcagccatatggacccacagagcg

SEQ ID NO: 3326014 - DNA, 25 bp, Homo sapien
tgaagccagccagtgaatagagaca

SEQ ID NO: 3326015 - DNA, 25 bp, Homo sapien
gatgcttcccaggtcatttggtcga

SEQ ID NO: 3326016 - DNA, 25 bp, Homo sapien
tctacttggtcatagggagagggcc

SEQ ID NO: 3326017 - DNA, 25 bp, Homo sapien
gatccaggtccaatactccagcgta

SEQ ID NO: 3326018 - DNA, 25 bp, Homo sapien
atgtgttgagtaatgaaaataagtg

SEQ ID NO: 3326019 - DNA, 25 bp, Homo sapien
aatgtgttgagtaatgaaaataagt

SEQ ID NO: 3326020 - DNA, 25 bp, Homo sapien
agaactaatcctttaatgcatgttt

SEQ ID NO: 3326021 - DNA, 25 bp, Homo sapien
cagaactaatcctttaatgcatgtt

SEQ ID NO: 3326022 - DNA, 25 bp, Homo sapien
taatgatctcacagcctcaaggttg

SEQ ID NO: 3326023 - DNA, 25 bp, Homo sapien
gaacctgtggagaatgaagctacct

SEQ ID NO: 3326024 - DNA, 25 bp, Homo sapien
tttggtgccaaactacagaaggtgc

SEQ ID NO: 3326025 - DNA, 25 bp, Homo sapien
tattttcccctaaggcaagcagagc

SEQ ID NO: 3326026 - DNA, 25 bp, Homo sapien
aataatacttagattagatctgtac

SEQ ID NO: 3326027 - DNA, 25 bp, Homo sapien
caatagcaatataactgactagagg

SEQ ID NO: 3326028 - DNA, 25 bp, Homo sapien
ctgactagagggctatcaacttaat

SEQ ID NO: 3326029 - DNA, 25 bp, Homo sapien
tgtacatgagatacatatagtattt

SEQ ID NO: 3326030 - DNA, 25 bp, Homo sapien
ggcacgctagaacaagtctccttca

SEQ ID NO: 3326031 - DNA, 25 bp, Homo sapien
gcagtggtcaaagcaaggaatggca

SEQ ID NO: 3326032 - DNA, 25 bp, Homo sapien
tatctttgacaccaaccggcatcag

SEQ ID NO: 3326033 - DNA, 25 bp, Homo sapien
tttagaagcagttcatgcagtggtc

SEQ ID NO: 3326034 - DNA, 25 bp, Homo sapien
cataatatatctctataagaaggta

SEQ ID NO: 3326035 - DNA, 25 bp, Homo sapien
gtgatttaatgtccctcctggagtt

SEQ ID NO: 3326036 - DNA, 25 bp, Homo sapien
ttatacttaaagtgatttaatgtcc

SEQ ID NO: 3326037 - DNA, 25 bp, Homo sapien
gagttctacataatatatctctata

SEQ ID NO: 3326038 - DNA, 25 bp, Homo sapien
aagtccagaccaggtttcggtgcca

SEQ ID NO: 3326039 - DNA, 25 bp, Homo sapien
tcaaccttgggcctggagtagacat

SEQ ID NO: 3326040 - DNA, 25 bp, Homo sapien
caaaggtacctacataagcggtgct

SEQ ID NO: 3326041 - DNA, 25 bp, Homo sapien
gagtagacatgacgccccagttttg

SEQ ID NO: 3326042 - DNA, 25 bp, Homo sapien
gtggtgcgccccagtgaggtcacat

SEQ ID NO: 3326043 - DNA, 25 bp, Homo sapien
tcacatctactcttgggtcataggg

SEQ ID NO: 3326044 - DNA, 25 bp, Homo sapien
ctttgtaggagaataactcagtgcc

SEQ ID NO: 3326045 - DNA, 25 bp, Homo sapien
tttccaggccaaagtgaccgtggtg

SEQ ID NO: 3326046 - DNA, 25 bp, Homo sapien
ttttgctaatttcacggctgttaga

SEQ ID NO: 3326047 - DNA, 25 bp, Homo sapien
gaaggactagacaatctgattaaaa

SEQ ID NO: 3326048 - DNA, 25 bp, Homo sapien
tacacaatataaagtaccagtaaga

SEQ ID NO: 3326049 - DNA, 25 bp, Homo sapien
ctgaggctgtaagattacttgaagc

SEQ ID NO: 3326050 - DNA, 25 bp, Homo sapien
aagattacaccattgcactcctaag

SEQ ID NO: 3326051 - DNA, 25 bp, Homo sapien
ttacaccattgcactcctaagcgac

SEQ ID NO: 3326052 - DNA, 25 bp, Homo sapien
attacaccattgcactcctaagcga

SEQ ID NO: 3326053 - DNA, 25 bp, Homo sapien
gattacaccattgcactcctaagcg

SEQ ID NO: 3326054 - DNA, 25 bp, Homo sapien
ttccccgctcctgtcctctggcagc

SEQ ID NO: 3326055 - DNA, 25 bp, Homo sapien
ccccgctcctgtcctctggcagctc

SEQ ID NO: 3326056 - DNA, 25 bp, Homo sapien
cttccccgctcctgtcctctggcag

SEQ ID NO: 3326057 - DNA, 25 bp, Homo sapien
gccttccccgctcctgtcctctggc

SEQ ID NO: 3326058 - DNA, 25 bp, Homo sapien
cgtcactgtgactgataatggagta

SEQ ID NO: 3326059 - DNA, 25 bp, Homo sapien
actccaaaggcgcatcacagggcgt

SEQ ID NO: 3326060 - DNA, 25 bp, Homo sapien
cacagggcgtcactgtgactgataa

SEQ ID NO: 3326061 - DNA, 25 bp, Homo sapien
taatggagtattgtcttcttcaacc

SEQ ID NO: 3326062 - DNA, 25 bp, Homo sapien
cttgagctgagtggaaacaggagcc

SEQ ID NO: 3326063 - DNA, 25 bp, Homo sapien
tcatgaaaaaatgccttgtcccgga

SEQ ID NO: 3326064 - DNA, 25 bp, Homo sapien
gctccatctggaattactgacgaat

SEQ ID NO: 3326065 - DNA, 25 bp, Homo sapien
ctgaaaaagttcctcatcccgggtg

SEQ ID NO: 3326066 - DNA, 25 bp, Homo sapien
caaacataagctgaaagttgctagg

SEQ ID NO: 3326067 - DNA, 25 bp, Homo sapien
cagatcctgctaaaactgaggtgag

SEQ ID NO: 3326068 - DNA, 25 bp, Homo sapien
tcaacttggttgcacagtatccaca

SEQ ID NO: 3326069 - DNA, 25 bp, Homo sapien
catttggcacaagtcctcagatcct

SEQ ID NO: 3326070 - DNA, 25 bp, Homo sapien
ctccaaagacagtggttcctgataa

SEQ ID NO: 3326071 - DNA, 25 bp, Homo sapien
ttattctaccagccctcttgtaaaa

SEQ ID NO: 3326072 - DNA, 25 bp, Homo sapien
aatattctccaaagacagtggttcc

SEQ ID NO: 3326073 - DNA, 25 bp, Homo sapien
ttctaccagccctcttgtaaaatcc

SEQ ID NO: 3326074 - DNA, 25 bp, Homo sapien
ctggcgatcaaagggttgacaaatg

SEQ ID NO: 3326075 - DNA, 25 bp, Homo sapien
caaagggttgacaaatgtcgcagcc

SEQ ID NO: 3326076 - DNA, 25 bp, Homo sapien
attctctttggccaagtgcacagct

SEQ ID NO: 3326077 - DNA, 25 bp, Homo sapien
tccttcatcggggatggtcattctc

SEQ ID NO: 3326078 - DNA, 25 bp, Homo sapien
taaaggctgccaaagcaaaatagaa

SEQ ID NO: 3326079 - DNA, 25 bp, Homo sapien
gctcatagctcaatgtctcaggtga

SEQ ID NO: 3326080 - DNA, 25 bp, Homo sapien
caaagatctaagttgaaaaggtcct

SEQ ID NO: 3326081 - DNA, 25 bp, Homo sapien
aaggtcctgattaaaccatgatcgg

SEQ ID NO: 3326082 - DNA, 25 bp, Homo sapien
tgtcgcggtcaacaacgttcagtga

SEQ ID NO: 3326083 - DNA, 25 bp, Homo sapien
caagatagagcctgccaagagaaaa

SEQ ID NO: 3326084 - DNA, 25 bp, Homo sapien
gatgcacgtgttgagatcagagcac

SEQ ID NO: 3326085 - DNA, 25 bp, Homo sapien
tcaacactggttcaaagccgagcgt

SEQ ID NO: 3326086 - DNA, 25 bp, Homo sapien
gcgactccgctcagttagaaaggta

SEQ ID NO: 3326087 - DNA, 25 bp, Homo sapien
tcagagacagcgtagaggtgcccgc

SEQ ID NO: 3326088 - DNA, 25 bp, Homo sapien
aagaaagtatgagccggtcccaggc

SEQ ID NO: 3326089 - DNA, 25 bp, Homo sapien
tgggacctgcaatcactcgttcgga

SEQ ID NO: 3326090 - DNA, 25 bp, Homo sapien
aagtgtcccaactttgcggtcggca

SEQ ID NO: 3326091 - DNA, 25 bp, Homo sapien
tccttttaaactgcagggagcgtgc

SEQ ID NO: 3326092 - DNA, 25 bp, Homo sapien
tgctaagcaccaatatccaggaacg

SEQ ID NO: 3326093 - DNA, 25 bp, Homo sapien
gtgtgcgaaatagtccacgtccccg

SEQ ID NO: 3326094 - DNA, 25 bp, Homo sapien
atgcccgatgaaccaggtttgcggg

SEQ ID NO: 3326095 - DNA, 25 bp, Homo sapien
atgaaccaggtttgcggggaggtat

SEQ ID NO: 3326096 - DNA, 25 bp, Homo sapien
ttaaatgcccgatgaaccaggtttg

SEQ ID NO: 3326097 - DNA, 25 bp, Homo sapien
aaatgcccgatgaaccaggtttgcg

SEQ ID NO: 3326098 - DNA, 25 bp, Homo sapien
ggaacctgtagcgttgccttcaaga

SEQ ID NO: 3326099 - DNA, 25 bp, Homo sapien
aagatagtgagcataactgttcccc

SEQ ID NO: 3326100 - DNA, 25 bp, Homo sapien
gaaagaaggatcatagtgcggccac

SEQ ID NO: 3326101 - DNA, 25 bp, Homo sapien
cattgggacttcagcaaattggagc

SEQ ID NO: 3326102 - DNA, 25 bp, Homo sapien
aattgggaggtcatatgtcttttag

SEQ ID NO: 3326103 - DNA, 25 bp, Homo sapien
atttgattctattagcgacttagcc

SEQ ID NO: 3326104 - DNA, 25 bp, Homo sapien
ggaggtcatatgtcttttagatttg

SEQ ID NO: 3326105 - DNA, 25 bp, Homo sapien
tagcgacttagccacattaaaagtg

SEQ ID NO: 3326106 - DNA, 25 bp, Homo sapien
cacgtagtagcgcaaatgagatact

SEQ ID NO: 3326107 - DNA, 25 bp, Homo sapien
tgtaatgctacttgatgataaccca

SEQ ID NO: 3326108 - DNA, 25 bp, Homo sapien
cacgccaaaaactgggtgctcccag

SEQ ID NO: 3326109 - DNA, 25 bp, Homo sapien
caaagcagaattgtagcacgccaaa

SEQ ID NO: 3326110 - DNA, 25 bp, Homo sapien
taagagtcacagctcagggtataac

SEQ ID NO: 3326111 - DNA, 25 bp, Homo sapien
cctttcaaagggacatagctattct

SEQ ID NO: 3326112 - DNA, 25 bp, Homo sapien
tttcctaagaacagatcacgtgact

SEQ ID NO: 3326113 - DNA, 25 bp, Homo sapien
ggaaggctttcacctaaccatatca

SEQ ID NO: 3326114 - DNA, 25 bp, Homo sapien
ctttggactggagagttaaatcaca

SEQ ID NO: 3326115 - DNA, 25 bp, Homo sapien
cagtgggcgtacctcagttggcaaa

SEQ ID NO: 3326116 - DNA, 25 bp, Homo sapien
cgttcagtttttatcccagtgggcg

SEQ ID NO: 3326117 - DNA, 25 bp, Homo sapien
tgctgctaaataggcctgggcctgg

SEQ ID NO: 3326118 - DNA, 25 bp, Homo sapien
agttaacaagtcagcagctgactta

SEQ ID NO: 3326119 - DNA, 25 bp, Homo sapien
acagttaacaagtcagcagctgact

SEQ ID NO: 3326120 - DNA, 25 bp, Homo sapien
aacagttaacaagtcagcagctgac

SEQ ID NO: 3326121 - DNA, 25 bp, Homo sapien
caacagttaacaagtcagcagctga

SEQ ID NO: 3326122 - DNA, 25 bp, Homo sapien
cagagcttcaggtgtatccagatac

SEQ ID NO: 3326123 - DNA, 25 bp, Homo sapien
ttatgttccagggttgcaaagggct

SEQ ID NO: 3326124 - DNA, 25 bp, Homo sapien
taatttgagctggaataaagtagca

SEQ ID NO: 3326125 - DNA, 25 bp, Homo sapien
gaagcatagatatccaaggatctca

SEQ ID NO: 3326126 - DNA, 25 bp, Homo sapien
tagacatctgtcatgtcactataag

SEQ ID NO: 3326127 - DNA, 25 bp, Homo sapien
catgtcactataagatttaattgca

SEQ ID NO: 3326128 - DNA, 25 bp, Homo sapien
cctagcagaattcttattaaatgga

SEQ ID NO: 3326129 - DNA, 25 bp, Homo sapien
taatacttctaaatctgcttaatct

SEQ ID NO: 3326130 - DNA, 25 bp, Homo sapien
caagtcttgtgatgcaggcgcacaa

SEQ ID NO: 3326131 - DNA, 25 bp, Homo sapien
gatcaggatcttagctgtcagaagc

SEQ ID NO: 3326132 - DNA, 25 bp, Homo sapien
tctacgtttaggatcactgaggtca

SEQ ID NO: 3326133 - DNA, 25 bp, Homo sapien
gctaaagaactaaggccctgtggaa

SEQ ID NO: 3326134 - DNA, 25 bp, Homo sapien
tacggatggactttctttactgagg

SEQ ID NO: 3326135 - DNA, 25 bp, Homo sapien
ctacggatggactttctttactgag

SEQ ID NO: 3326136 - DNA, 25 bp, Homo sapien
cctggcaacagactggaggtggagc

SEQ ID NO: 3326137 - DNA, 25 bp, Homo sapien
ggcaacagactggaggtggagcaag

SEQ ID NO: 3326138 - DNA, 25 bp, Homo sapien
agcctggcaacagactggaggtgga

SEQ ID NO: 3326139 - DNA, 25 bp, Homo sapien
acagactggaggtggagcaagacac

SEQ ID NO: 3326140 - DNA, 25 bp, Homo sapien
gcgtattgtacttcagcaggctcca

SEQ ID NO: 3326141 - DNA, 25 bp, Homo sapien
tgtgtacagctgtccagattgcgta

SEQ ID NO: 3326142 - DNA, 25 bp, Homo sapien
gcaaaactacatgtggtgtccctga

SEQ ID NO: 3326143 - DNA, 25 bp, Homo sapien
tagagtaccatgatgagcccctcag

SEQ ID NO: 3326144 - DNA, 25 bp, Homo sapien
ggcctcacaagaccatagaaacaag

SEQ ID NO: 3326145 - DNA, 25 bp, Homo sapien
tatacagcccgcttctgggtggcct

SEQ ID NO: 3326146 - DNA, 25 bp, Homo sapien
tagctcagtttatacagcccgcttc

SEQ ID NO: 3326147 - DNA, 25 bp, Homo sapien
gaagtgggattttgattatagctca

SEQ ID NO: 3326148 - DNA, 25 bp, Homo sapien
caagagcataccactgatagtctgg

SEQ ID NO: 3326149 - DNA, 25 bp, Homo sapien
gccttgtgttgtacatctggcggaa

SEQ ID NO: 3326150 - DNA, 25 bp, Homo sapien
tggcggaagctggtcaagagcatac

SEQ ID NO: 3326151 - DNA, 25 bp, Homo sapien
tgttgtacatctggcggaagctggt

SEQ ID NO: 3326152 - DNA, 25 bp, Homo sapien
cctaaagggtagcgggatttgtctg

SEQ ID NO: 3326153 - DNA, 25 bp, Homo sapien
ttgtctgggtaaatccaaaatgcag

SEQ ID NO: 3326154 - DNA, 25 bp, Homo sapien
gtagcgggatttgtctgggtaaatc

SEQ ID NO: 3326155 - DNA, 25 bp, Homo sapien
gcgggatttgtctgggtaaatccaa

SEQ ID NO: 3326156 - DNA, 25 bp, Homo sapien
gggcctgttggtacccatggatctt

SEQ ID NO: 3326157 - DNA, 25 bp, Homo sapien
tcttgcaggtggaaaaccaagccgc

SEQ ID NO: 3326158 - DNA, 25 bp, Homo sapien
aaaaccaagccgcagttacagggtg

SEQ ID NO: 3326159 - DNA, 25 bp, Homo sapien
cgcagttacagggtgggcaatacat

SEQ ID NO: 3326160 - DNA, 25 bp, Homo sapien
tgcttttctagtttttctttctcca

SEQ ID NO: 3326161 - DNA, 25 bp, Homo sapien
ctttctccatctgacaagcttttat

SEQ ID NO: 3326162 - DNA, 25 bp, Homo sapien
tctttctccatctgacaagctttta

SEQ ID NO: 3326163 - DNA, 25 bp, Homo sapien
ttttctttctccatctgacaagctt

SEQ ID NO: 3326164 - DNA, 25 bp, Homo sapien
gatccgatcgttcctttttgaagtc

SEQ ID NO: 3326165 - DNA, 25 bp, Homo sapien
tcaactgggattgggaagtttcatt

SEQ ID NO: 3326166 - DNA, 25 bp, Homo sapien
cagcctgttcaactgggattgggaa

SEQ ID NO: 3326167 - DNA, 25 bp, Homo sapien
gattaagtctctctcgatccgatcg

SEQ ID NO: 3326168 - DNA, 25 bp, Homo sapien
tcctcaaacagtcctcggaaaatga

SEQ ID NO: 3326169 - DNA, 25 bp, Homo sapien
gaattccactcgagacttcctcaaa

SEQ ID NO: 3326170 - DNA, 25 bp, Homo sapien
cagtcctcggaaaatgaacacttga

SEQ ID NO: 3326171 - DNA, 25 bp, Homo sapien
tgatattcaaggcatcctgaagagc

SEQ ID NO: 3326172 - DNA, 25 bp, Homo sapien
ttcacattcgtaatgttccttttcc

SEQ ID NO: 3326173 - DNA, 25 bp, Homo sapien
tatttcacattcgtaatgttccttt

SEQ ID NO: 3326174 - DNA, 25 bp, Homo sapien
ggcgttttatttcacattcgtaatg

SEQ ID NO: 3326175 - DNA, 25 bp, Homo sapien
ttgaggcgttttatttcacattcgt

SEQ ID NO: 3326176 - DNA, 25 bp, Homo sapien
tgcggatccttctcccgcgtgctga

SEQ ID NO: 3326177 - DNA, 25 bp, Homo sapien
gctgaggaatctttccgcggcgtcc

SEQ ID NO: 3326178 - DNA, 25 bp, Homo sapien
tctgcctctgatgcggatccttctc

SEQ ID NO: 3326179 - DNA, 25 bp, Homo sapien
gcgtccagtttcgtcttcagctctg

SEQ ID NO: 3326180 - DNA, 25 bp, Homo sapien
ggaggtcgttcaaagacagctgcag

SEQ ID NO: 3326181 - DNA, 25 bp, Homo sapien
gaggaggtcgttcaaagacagctgc

SEQ ID NO: 3326182 - DNA, 25 bp, Homo sapien
ctgaggaggtcgttcaaagacagct

SEQ ID NO: 3326183 - DNA, 25 bp, Homo sapien
tcaaagacagctgcagataccttct

SEQ ID NO: 3326184 - DNA, 25 bp, Homo sapien
cagtccagagggagaatcttagaga

SEQ ID NO: 3326185 - DNA, 25 bp, Homo sapien
aggtcctcagagtggccacagtcca

SEQ ID NO: 3326186 - DNA, 25 bp, Homo sapien
tatagccatcactaacactgtcttc

SEQ ID NO: 3326187 - DNA, 25 bp, Homo sapien
ggatgcatcttccaagatggagatt

SEQ ID NO: 3326188 - DNA, 25 bp, Homo sapien
caaatatgctttagatggaagagga

SEQ ID NO: 3326189 - DNA, 25 bp, Homo sapien
cttgagagcaaatatgctttagatg

SEQ ID NO: 3326190 - DNA, 25 bp, Homo sapien
gagcaaatatgctttagatggaaga

SEQ ID NO: 3326191 - DNA, 25 bp, Homo sapien
aatatgctttagatggaagaggagg

SEQ ID NO: 3326192 - DNA, 25 bp, Homo sapien
ttctctatttgtggaaaataggtca

SEQ ID NO: 3326193 - DNA, 25 bp, Homo sapien
tctctatttgtggaaaataggtcat

SEQ ID NO: 3326194 - DNA, 25 bp, Homo sapien
attttcactgttaccaccatttgtt

SEQ ID NO: 3326195 - DNA, 25 bp, Homo sapien
actgttaccaccatttgtttctcta

SEQ ID NO: 3326196 - DNA, 25 bp, Homo sapien
taactctttcatacttctaaattgc

SEQ ID NO: 3326197 - DNA, 25 bp, Homo sapien
gctgatcccattgctggttaacttc

SEQ ID NO: 3326198 - DNA, 25 bp, Homo sapien
taaattgctgatcccattgctggtt

SEQ ID NO: 3326199 - DNA, 25 bp, Homo sapien
ttcatacttctaaattgctgatccc

SEQ ID NO: 3326200 - DNA, 25 bp, Homo sapien
ttccaaacaccttatcttttgttca

SEQ ID NO: 3326201 - DNA, 25 bp, Homo sapien
tctttcttgttgatggttcagcaca

SEQ ID NO: 3326202 - DNA, 25 bp, Homo sapien
caccttatcttttgttcaagagaat

SEQ ID NO: 3326203 - DNA, 25 bp, Homo sapien
gaattcatcaagttctttcttgttg

SEQ ID NO: 3326204 - DNA, 25 bp, Homo sapien
gatgtgccctgtacaaaatgtgcca

SEQ ID NO: 3326205 - DNA, 25 bp, Homo sapien
gctccgtagaactttctgcggcaat

SEQ ID NO: 3326206 - DNA, 25 bp, Homo sapien
tctgcggcaatcattctagatgtgc

SEQ ID NO: 3326207 - DNA, 25 bp, Homo sapien
tttatgctccgtagaactttctgcg

SEQ ID NO: 3326208 - DNA, 25 bp, Homo sapien
taaggtatattttagggtgagagca

SEQ ID NO: 3326209 - DNA, 25 bp, Homo sapien
gggtgagagcaagtatacaaaattt

SEQ ID NO: 3326210 - DNA, 25 bp, Homo sapien
aagtgactgtggataggaattacac

SEQ ID NO: 3326211 - DNA, 25 bp, Homo sapien
catcaccgttaactcataatagaaa

SEQ ID NO: 3326212 - DNA, 25 bp, Homo sapien
ggatattcacttgtgtcccgcctgg

SEQ ID NO: 3326213 - DNA, 25 bp, Homo sapien
tcccgcctggttggaactctgaaac

SEQ ID NO: 3326214 - DNA, 25 bp, Homo sapien
tgtgtttctcgagcccaaagtagtg

SEQ ID NO: 3326215 - DNA, 25 bp, Homo sapien
caaagtagtgccattttagtgcctg

SEQ ID NO: 3326216 - DNA, 25 bp, Homo sapien
aagtccagggaaggtacaagccttg

SEQ ID NO: 3326217 - DNA, 25 bp, Homo sapien
atttctccacaccaccatggtacac

SEQ ID NO: 3326218 - DNA, 25 bp, Homo sapien
catggtacacggctgtgacatgcat

SEQ ID NO: 3326219 - DNA, 25 bp, Homo sapien
agggaaggtacaagccttgaagaga

SEQ ID NO: 3326220 - DNA, 25 bp, Homo sapien
gaatacctatccaaaacttcttcag

SEQ ID NO: 3326221 - DNA, 25 bp, Homo sapien
ggaatacctatccaaaacttcttca

SEQ ID NO: 3326222 - DNA, 25 bp, Homo sapien
aatacctatccaaaacttcttcaga

SEQ ID NO: 3326223 - DNA, 25 bp, Homo sapien
cacttggcacagtgagtggtaccca

SEQ ID NO: 3326224 - DNA, 25 bp, Homo sapien
cagtcgcaagagcaatagtgtttgg

SEQ ID NO: 3326225 - DNA, 25 bp, Homo sapien
ggagttctcgaagacatattccaca

SEQ ID NO: 3326226 - DNA, 25 bp, Homo sapien
tattccacattgagcacacttggca

SEQ ID NO: 3326227 - DNA, 25 bp, Homo sapien
caaaaaatcatcgacatgagttgtg

SEQ ID NO: 3326228 - DNA, 25 bp, Homo sapien
tcttcccaggaaagagttgtccctg

SEQ ID NO: 3326229 - DNA, 25 bp, Homo sapien
gctgatcttggtaacccaatttaaa

SEQ ID NO: 3326230 - DNA, 25 bp, Homo sapien
gagttgtgctgatcttggtaaccca

SEQ ID NO: 3326231 - DNA, 25 bp, Homo sapien
tggaaagtgccagcaaattcttctg

SEQ ID NO: 3326232 - DNA, 25 bp, Homo sapien
agaatttctttagtaacaggaagtg

SEQ ID NO: 3326233 - DNA, 25 bp, Homo sapien
agctgcctggacactttaaagtgga

SEQ ID NO: 3326234 - DNA, 25 bp, Homo sapien
tttaaagtggaaagtgccagcaaat

SEQ ID NO: 3326235 - DNA, 25 bp, Homo sapien
tgtgtgagagaagttttatactgct

SEQ ID NO: 3326236 - DNA, 25 bp, Homo sapien
ctgtgtgagagaagttttatactgc

SEQ ID NO: 3326237 - DNA, 25 bp, Homo sapien
tgtgagagaagttttatactgcttc

SEQ ID NO: 3326238 - DNA, 25 bp, Homo sapien
gagagaagttttatactgcttcagt

SEQ ID NO: 3326239 - DNA, 25 bp, Homo sapien
gaggagacgcatttctctcaatcag

SEQ ID NO: 3326240 - DNA, 25 bp, Homo sapien
cctctggggtgaaccgttttggatg

SEQ ID NO: 3326241 - DNA, 25 bp, Homo sapien
gagaacatagatttctgtgagttgg

SEQ ID NO: 3326242 - DNA, 25 bp, Homo sapien
ggtgaaccgttttggatgaggagac

SEQ ID NO: 3326243 - DNA, 25 bp, Homo sapien
taagcagctacttgccaccacatgg

SEQ ID NO: 3326244 - DNA, 25 bp, Homo sapien
tacagctgaagagtatctggaagcc

SEQ ID NO: 3326245 - DNA, 25 bp, Homo sapien
taggagaatctagtccagctgcttc

SEQ ID NO: 3326246 - DNA, 25 bp, Homo sapien
ccagagggagttgctcatagtcaca

SEQ ID NO: 3326247 - DNA, 25 bp, Homo sapien
cagcacacgtccctcaggaccacaa

SEQ ID NO: 3326248 - DNA, 25 bp, Homo sapien
gagactgagcgtggtgactacagct

SEQ ID NO: 3326249 - DNA, 25 bp, Homo sapien
caaccaaagagggacgggccctcat

SEQ ID NO: 3326250 - DNA, 25 bp, Homo sapien
ccctcatgaggatagtggttttctg

SEQ ID NO: 3326251 - DNA, 25 bp, Homo sapien
gatctggaggtatactggagttcag

SEQ ID NO: 3326252 - DNA, 25 bp, Homo sapien
agccatagaatgtcaatgtcagtga

SEQ ID NO: 3326253 - DNA, 25 bp, Homo sapien
ctgtctgctataagccatagaatgt

SEQ ID NO: 3326254 - DNA, 25 bp, Homo sapien
ggatctggaggtatactggagttca

SEQ ID NO: 3326255 - DNA, 25 bp, Homo sapien
catcctttcatgtaggccgtgctaa

SEQ ID NO: 3326256 - DNA, 25 bp, Homo sapien
ttcatgtaggccgtgctaattgcct

SEQ ID NO: 3326257 - DNA, 25 bp, Homo sapien
tgtaggccgtgctaattgcctctgt

SEQ ID NO: 3326258 - DNA, 25 bp, Homo sapien
tgctaattgcctctgtattcttcca

SEQ ID NO: 3326259 - DNA, 25 bp, Homo sapien
gaacattaccagtttatcgtcgtgt

SEQ ID NO: 3326260 - DNA, 25 bp, Homo sapien
ctcatttttgttcatgagccatcca

SEQ ID NO: 3326261 - DNA, 25 bp, Homo sapien
taccagtttatcgtcgtgtttctca

SEQ ID NO: 3326262 - DNA, 25 bp, Homo sapien
gattggtgaacattaccagtttatc

SEQ ID NO: 3326263 - DNA, 25 bp, Homo sapien
gccaattcctgcaggcaattaacac

SEQ ID NO: 3326264 - DNA, 25 bp, Homo sapien
tttgaagaattgtgtatgctttaaa

SEQ ID NO: 3326265 - DNA, 25 bp, Homo sapien
aattcctgcaggcaattaacacatt

SEQ ID NO: 3326266 - DNA, 25 bp, Homo sapien
gaattgtgtatgctttaaaagccaa

SEQ ID NO: 3326267 - DNA, 25 bp, Homo sapien
ccatcagaaaatttaggagttaggc

SEQ ID NO: 3326268 - DNA, 25 bp, Homo sapien
catcagaaaatttaggagttaggcc

SEQ ID NO: 3326269 - DNA, 25 bp, Homo sapien
cccatcagaaaatttaggagttagg

SEQ ID NO: 3326270 - DNA, 25 bp, Homo sapien
tcagaaaatttaggagttaggccca

SEQ ID NO: 3326271 - DNA, 25 bp, Homo sapien
aggacactctgggagtctctgccac

SEQ ID NO: 3326272 - DNA, 25 bp, Homo sapien
gacactctgggagtctctgccacag

SEQ ID NO: 3326273 - DNA, 25 bp, Homo sapien
gaaaggacactctgggagtctctgc

SEQ ID NO: 3326274 - DNA, 25 bp, Homo sapien
aaaggacactctgggagtctctgcc

SEQ ID NO: 3326275 - DNA, 25 bp, Homo sapien
acactcatttctaggaatgttcctg

SEQ ID NO: 3326276 - DNA, 25 bp, Homo sapien
ccacataggtcacacactcatttct

SEQ ID NO: 3326277 - DNA, 25 bp, Homo sapien
cactcatttctaggaatgttcctgt

SEQ ID NO: 3326278 - DNA, 25 bp, Homo sapien
tgtaaggaccacataggtcacacac

SEQ ID NO: 3326279 - DNA, 25 bp, Homo sapien
tcatggaactgttattggcagagaa

SEQ ID NO: 3326280 - DNA, 25 bp, Homo sapien
tggaactgttattggcagagaagag

SEQ ID NO: 3326281 - DNA, 25 bp, Homo sapien
catggaactgttattggcagagaag

SEQ ID NO: 3326282 - DNA, 25 bp, Homo sapien
ggaactgttattggcagagaagagt

SEQ ID NO: 3326283 - DNA, 25 bp, Homo sapien
gaaaatgagactggcgaagtaagac

SEQ ID NO: 3326284 - DNA, 25 bp, Homo sapien
tctgagggtacaagtgtctgaagga

SEQ ID NO: 3326285 - DNA, 25 bp, Homo sapien
catgtctgagggtacaagtgtctga

SEQ ID NO: 3326286 - DNA, 25 bp, Homo sapien
actggcgaagtaagacaaggccatt

SEQ ID NO: 3326287 - DNA, 25 bp, Homo sapien
tcctcgagaagacaggcaaagtgct

SEQ ID NO: 3326288 - DNA, 25 bp, Homo sapien
gtaagatctcatggacctcaccgcg

SEQ ID NO: 3326289 - DNA, 25 bp, Homo sapien
tattcatcgagagtattaaagagcc

SEQ ID NO: 3326290 - DNA, 25 bp, Homo sapien
tctgaagatgagctgaatgcgtcac

SEQ ID NO: 3326291 - DNA, 25 bp, Homo sapien
caccatagggtgtttctacaaagtg

SEQ ID NO: 3326292 - DNA, 25 bp, Homo sapien
caaagtgtgataaagccaacctggc

SEQ ID NO: 3326293 - DNA, 25 bp, Homo sapien
caatgtttgtcccatttaagtacag

SEQ ID NO: 3326294 - DNA, 25 bp, Homo sapien
ttaagtacagtttcctcaggaagtg

SEQ ID NO: 3326295 - DNA, 25 bp, Homo sapien
gccctcccatttgtgactcatccca

SEQ ID NO: 3326296 - DNA, 25 bp, Homo sapien
ttgtgaataccagggataagtggcc

SEQ ID NO: 3326297 - DNA, 25 bp, Homo sapien
gaataccagggataagtggccctcc

SEQ ID NO: 3326298 - DNA, 25 bp, Homo sapien
ccagggataagtggccctcccattt

SEQ ID NO: 3326299 - DNA, 25 bp, Homo sapien
gggtctgacttcagaagctatggca

SEQ ID NO: 3326300 - DNA, 25 bp, Homo sapien
actgagatccagtctgatcggaggg

SEQ ID NO: 3326301 - DNA, 25 bp, Homo sapien
tataggtgaggtgtttgctgactgc

SEQ ID NO: 3326302 - DNA, 25 bp, Homo sapien
ctgactgcaattggagaacttgctt

SEQ ID NO: 3326303 - DNA, 25 bp, Homo sapien
cagctctcggagtccacattttctt

SEQ ID NO: 3326304 - DNA, 25 bp, Homo sapien
ttaaaattgttattaagatctgaaa

SEQ ID NO: 3326305 - DNA, 25 bp, Homo sapien
ggtaaatgcttctgtgggggacaac

SEQ ID NO: 3326306 - DNA, 25 bp, Homo sapien
tctgaaaattaattcagtcagtttt

SEQ ID NO: 3326307 - DNA, 25 bp, Homo sapien
gacatagatacttatagtacataga

SEQ ID NO: 3326308 - DNA, 25 bp, Homo sapien
tctggtttagacctcatgtccatag

SEQ ID NO: 3326309 - DNA, 25 bp, Homo sapien
tagtcacgaacacaaaaccatgaac

SEQ ID NO: 3326310 - DNA, 25 bp, Homo sapien
tcatgtccatagtcacgaacacaaa

SEQ ID NO: 3326311 - DNA, 25 bp, Homo sapien
taggccttgtctccaagtgtatctg

SEQ ID NO: 3326312 - DNA, 25 bp, Homo sapien
ttcgctctcatcttccccactatct

SEQ ID NO: 3326313 - DNA, 25 bp, Homo sapien
tcctgtccatattcgctctcatctt

SEQ ID NO: 3326314 - DNA, 25 bp, Homo sapien
tcattcctgtccatattcgctctca

SEQ ID NO: 3326315 - DNA, 25 bp, Homo sapien
catattcgctctcatcttccccact

SEQ ID NO: 3326316 - DNA, 25 bp, Homo sapien
gaatgttctttcttctacagatcat

SEQ ID NO: 3326317 - DNA, 25 bp, Homo sapien
cggaatgttctttcttctacagatc

SEQ ID NO: 3326318 - DNA, 25 bp, Homo sapien
ggaatgttctttcttctacagatca

SEQ ID NO: 3326319 - DNA, 25 bp, Homo sapien
aaactgctagctaagaaccctgatt

SEQ ID NO: 3326320 - DNA, 25 bp, Homo sapien
gaaaaactgctagctaagaaccctg

SEQ ID NO: 3326321 - DNA, 25 bp, Homo sapien
gagaaaaactgctagctaagaaccc

SEQ ID NO: 3326322 - DNA, 25 bp, Homo sapien
gctagctaagaaccctgatttctgt

SEQ ID NO: 3326323 - DNA, 25 bp, Homo sapien
acacagaaatctgttaaatgattgt

SEQ ID NO: 3326324 - DNA, 25 bp, Homo sapien
tgttaaatgattgtgatcaattggt

SEQ ID NO: 3326325 - DNA, 25 bp, Homo sapien
cagaaatctgttaaatgattgtgat

SEQ ID NO: 3326326 - DNA, 25 bp, Homo sapien
aatctgttaaatgattgtgatcaat

SEQ ID NO: 3326327 - DNA, 25 bp, Homo sapien
tctgaagggcattaattatgaagat

SEQ ID NO: 3326328 - DNA, 25 bp, Homo sapien
aatctgaagggcattaattatgaag

SEQ ID NO: 3326329 - DNA, 25 bp, Homo sapien
ctgaagggcattaattatgaagata

SEQ ID NO: 3326330 - DNA, 25 bp, Homo sapien
acaatctgaagggcattaattatga

SEQ ID NO: 3326331 - DNA, 25 bp, Homo sapien
tgcacgatagcaaaaatcatcttga

SEQ ID NO: 3326332 - DNA, 25 bp, Homo sapien
tcagccagttcagacctaaagagag

SEQ ID NO: 3326333 - DNA, 25 bp, Homo sapien
gtctaaaggagaattctcagccagt

SEQ ID NO: 3326334 - DNA, 25 bp, Homo sapien
tctctctgagggaaaactttgcttt

SEQ ID NO: 3326335 - DNA, 25 bp, Homo sapien
gacttaaacttgtacaagtatctga

SEQ ID NO: 3326336 - DNA, 25 bp, Homo sapien
tctcaagatcgttttgggagaggca

SEQ ID NO: 3326337 - DNA, 25 bp, Homo sapien
aaaacttctgtttgtcacctgtcaa

SEQ ID NO: 3326338 - DNA, 25 bp, Homo sapien
tcacttagagaatctaggtttacat

SEQ ID NO: 3326339 - DNA, 25 bp, Homo sapien
atatggacaacatggaatggtgccc

SEQ ID NO: 3326340 - DNA, 25 bp, Homo sapien
attcaatcatcatatggacaacatg

SEQ ID NO: 3326341 - DNA, 25 bp, Homo sapien
tatggacaacatggaatggtgccca

SEQ ID NO: 3326342 - DNA, 25 bp, Homo sapien
tgtattcaatcatcatatggacaac

SEQ ID NO: 3326343 - DNA, 25 bp, Homo sapien
tcaacctgggctcaataagtgatcc

SEQ ID NO: 3326344 - DNA, 25 bp, Homo sapien
ggatttacatctgcaagagctctac

SEQ ID NO: 3326345 - DNA, 25 bp, Homo sapien
cacacccggcctgatatatcttaaa

SEQ ID NO: 3326346 - DNA, 25 bp, Homo sapien
tgattaaccagggcttcaaactaat

SEQ ID NO: 3326347 - DNA, 25 bp, Homo sapien
gatagagagagtacccataggacca

SEQ ID NO: 3326348 - DNA, 25 bp, Homo sapien
gtacatatgcgggaagcagggcctt

SEQ ID NO: 3326349 - DNA, 25 bp, Homo sapien
gagtttaaaatcagtccatgcccta

SEQ ID NO: 3326350 - DNA, 25 bp, Homo sapien
cataggaccacagggttctgacacc

SEQ ID NO: 3326351 - DNA, 25 bp, Homo sapien
tctttatccaaagttcataaccaat

SEQ ID NO: 3326352 - DNA, 25 bp, Homo sapien
catgaatagttcgaagcactgaacc

SEQ ID NO: 3326353 - DNA, 25 bp, Homo sapien
ccaaagttcataaccaattttactg

SEQ ID NO: 3326354 - DNA, 25 bp, Homo sapien
tttccatgaatagttcgaagcactg

SEQ ID NO: 3326355 - DNA, 25 bp, Homo sapien
cactcttctaagcagcagatgtgtt

SEQ ID NO: 3326356 - DNA, 25 bp, Homo sapien
agggctggtccactcttctaagcag

SEQ ID NO: 3326357 - DNA, 25 bp, Homo sapien
aaggtggtgtagatcttctggtgca

SEQ ID NO: 3326358 - DNA, 25 bp, Homo sapien
tgtagatcttctggtgcacagggct

SEQ ID NO: 3326359 - DNA, 25 bp, Homo sapien
ctagagggcattgattccagtgaca

SEQ ID NO: 3326360 - DNA, 25 bp, Homo sapien
ccagtgacatctgcccgcttcctct

SEQ ID NO: 3326361 - DNA, 25 bp, Homo sapien
cattgattccagtgacatctgcccg

SEQ ID NO: 3326362 - DNA, 25 bp, Homo sapien
gattccagtgacatctgcccgcttc

SEQ ID NO: 3326363 - DNA, 25 bp, Homo sapien
gtgatcctacgatgactgccaccag

SEQ ID NO: 3326364 - DNA, 25 bp, Homo sapien
tcaagttgttgcacgtgccacatgg

SEQ ID NO: 3326365 - DNA, 25 bp, Homo sapien
catgggtgatcctacgatgactgcc

SEQ ID NO: 3326366 - DNA, 25 bp, Homo sapien
cacgtgccacatgggtgatcctacg

SEQ ID NO: 3326367 - DNA, 25 bp, Homo sapien
gtaatgaagaatgtcattcacactg

SEQ ID NO: 3326368 - DNA, 25 bp, Homo sapien
tctgtaatgaagaatgtcattcaca

SEQ ID NO: 3326369 - DNA, 25 bp, Homo sapien
gttctctattctgtaatgaagaatg

SEQ ID NO: 3326370 - DNA, 25 bp, Homo sapien
ctactcttctagtttaaaaatatgg

SEQ ID NO: 3326371 - DNA, 25 bp, Homo sapien
cagcaatgcaggtcatagtgaggat

SEQ ID NO: 3326372 - DNA, 25 bp, Homo sapien
ttttaaaaggatgcacaagtccctg

SEQ ID NO: 3326373 - DNA, 25 bp, Homo sapien
aagcccttcggttggtgtattgcca

SEQ ID NO: 3326374 - DNA, 25 bp, Homo sapien
cggtagactggacaaatggcaccat

SEQ ID NO: 3326375 - DNA, 25 bp, Homo sapien
ggtttcatctgtgtctttgtaatta

SEQ ID NO: 3326376 - DNA, 25 bp, Homo sapien
ctgagcctctgccaaaaagtttgat

SEQ ID NO: 3326377 - DNA, 25 bp, Homo sapien
gagcctctgccaaaaagtttgataa

SEQ ID NO: 3326378 - DNA, 25 bp, Homo sapien
ggaaataggacaaatcatacatcaa

SEQ ID NO: 3326379 - DNA, 25 bp, Homo sapien
ctctgagctcccttggtcgctttct

SEQ ID NO: 3326380 - DNA, 25 bp, Homo sapien
tctgagctcccttggtcgctttctg

SEQ ID NO: 3326381 - DNA, 25 bp, Homo sapien
tttttaatgactgctctatagctgt

SEQ ID NO: 3326382 - DNA, 25 bp, Homo sapien
tgatgactgcagtttgtgttttgct

SEQ ID NO: 3326383 - DNA, 25 bp, Homo sapien
ttcaatcaatttcttctccggtttc

SEQ ID NO: 3326384 - DNA, 25 bp, Homo sapien
gactgctctatagctgtcatcatta

SEQ ID NO: 3326385 - DNA, 25 bp, Homo sapien
tgctggtctattcggcttttggatt

SEQ ID NO: 3326386 - DNA, 25 bp, Homo sapien
ttgttgctggtctattcggcttttg

SEQ ID NO: 3326387 - DNA, 25 bp, Homo sapien
ctggtctattcggcttttggatttc

SEQ ID NO: 3326388 - DNA, 25 bp, Homo sapien
gttgctggtctattcggcttttgga

SEQ ID NO: 3326389 - DNA, 25 bp, Homo sapien
caagagatcacaatagaagacacaa

SEQ ID NO: 3326390 - DNA, 25 bp, Homo sapien
aacaagagatcacaatagaagacac

SEQ ID NO: 3326391 - DNA, 25 bp, Homo sapien
acaagagatcacaatagaagacaca

SEQ ID NO: 3326392 - DNA, 25 bp, Homo sapien
agtgggtgtgagcacattcaagtca

SEQ ID NO: 3326393 - DNA, 25 bp, Homo sapien
agccagtgggtgtgagcacattcaa

SEQ ID NO: 3326394 - DNA, 25 bp, Homo sapien
cagtgggtgtgagcacattcaagtc

SEQ ID NO: 3326395 - DNA, 25 bp, Homo sapien
ctagaagccagtgggtgtgagcaca

SEQ ID NO: 3326396 - DNA, 25 bp, Homo sapien
tttgagattatgtgcccgtggtggc

SEQ ID NO: 3326397 - DNA, 25 bp, Homo sapien
ggcacggatcagttccattggagag

SEQ ID NO: 3326398 - DNA, 25 bp, Homo sapien
cattcggttggcctgggcacggatc

SEQ ID NO: 3326399 - DNA, 25 bp, Homo sapien
catacttctgaagggatctcagtcc

SEQ ID NO: 3326400 - DNA, 25 bp, Homo sapien
gggtctctgcttaggtgaaaagtga

SEQ ID NO: 3326401 - DNA, 25 bp, Homo sapien
ctctgcttaggtgaaaagtgagaag

SEQ ID NO: 3326402 - DNA, 25 bp, Homo sapien
ctgcttaggtgaaaagtgagaagtg

SEQ ID NO: 3326403 - DNA, 25 bp, Homo sapien
gtctctgcttaggtgaaaagtgaga

SEQ ID NO: 3326404 - DNA, 25 bp, Homo sapien
tcacataattcatgacgacatgggt

SEQ ID NO: 3326405 - DNA, 25 bp, Homo sapien
acataattcatgacgacatgggtag

SEQ ID NO: 3326406 - DNA, 25 bp, Homo sapien
gatcacataattcatgacgacatgg

SEQ ID NO: 3326407 - DNA, 25 bp, Homo sapien
cacataattcatgacgacatgggta

SEQ ID NO: 3326408 - DNA, 25 bp, Homo sapien
tgtcaatggccgatgacagggactg

SEQ ID NO: 3326409 - DNA, 25 bp, Homo sapien
gatacttgtgctctgaaatcactgg

SEQ ID NO: 3326410 - DNA, 25 bp, Homo sapien
ccaccttggtgaggtgctgatactt

SEQ ID NO: 3326411 - DNA, 25 bp, Homo sapien
caatggccgatgacagggactggca

SEQ ID NO: 3326412 - DNA, 25 bp, Homo sapien
tagaggcccactagcctcaagagca

SEQ ID NO: 3326413 - DNA, 25 bp, Homo sapien
gagtgcccggcggtatatcctgaag

SEQ ID NO: 3326414 - DNA, 25 bp, Homo sapien
tccttgagggtatcatcatagctga

SEQ ID NO: 3326415 - DNA, 25 bp, Homo sapien
catcatagctgagtgcccggcggta

SEQ ID NO: 3326416 - DNA, 25 bp, Homo sapien
tcttcctgctgtagggggtatctct

SEQ ID NO: 3326417 - DNA, 25 bp, Homo sapien
aataggagtgacgatggcgctccct

SEQ ID NO: 3326418 - DNA, 25 bp, Homo sapien
ttgaataggagtgacgatggcgctc

SEQ ID NO: 3326419 - DNA, 25 bp, Homo sapien
cgctccctgaggtgcgtgattagtt

SEQ ID NO: 3326420 - DNA, 25 bp, Homo sapien
ggcactgacccctattcctagaaca

SEQ ID NO: 3326421 - DNA, 25 bp, Homo sapien
caatgccttgcacggtattcttgga

SEQ ID NO: 3326422 - DNA, 25 bp, Homo sapien
tccagacccagcttgaacatcacat

SEQ ID NO: 3326423 - DNA, 25 bp, Homo sapien
gactcttctgtgctcgtagagcaaa

SEQ ID NO: 3326424 - DNA, 25 bp, Homo sapien
tcactgagcgccaaggagcagataa

SEQ ID NO: 3326425 - DNA, 25 bp, Homo sapien
ggtcaccacgtagaacaccagagca

SEQ ID NO: 3326426 - DNA, 25 bp, Homo sapien
aactgctcccgcgtcaggttgtggt

SEQ ID NO: 3326427 - DNA, 25 bp, Homo sapien
agcattgccaaagagcgccagggcg

SEQ ID NO: 3326428 - DNA, 25 bp, Homo sapien
ccgcccgctactggctggccatccg

SEQ ID NO: 3326429 - DNA, 25 bp, Homo sapien
ccaccgcccgctactggctggccat

SEQ ID NO: 3326430 - DNA, 25 bp, Homo sapien
ggccaccgcccgctactggctggcc

SEQ ID NO: 3326431 - DNA, 25 bp, Homo sapien
tgctgtgcgctcccgggacgcgggg

SEQ ID NO: 3326432 - DNA, 25 bp, Homo sapien
tcaaacccacgataaagaggcggga

SEQ ID NO: 3326433 - DNA, 25 bp, Homo sapien
ttgctcttccctaaggcgaggcgcc

SEQ ID NO: 3326434 - DNA, 25 bp, Homo sapien
tgggagactcgatctcagtgaccaa

SEQ ID NO: 3326435 - DNA, 25 bp, Homo sapien
atgttcgcggttcaaataaagttct

SEQ ID NO: 3326436 - DNA, 25 bp, Homo sapien
gcagcaattaagtgggtccagctgc

SEQ ID NO: 3326437 - DNA, 25 bp, Homo sapien
ccacacttggctccactgacaccag

SEQ ID NO: 3326438 - DNA, 25 bp, Homo sapien
ccagcagcaattaagtgggtccagc

SEQ ID NO: 3326439 - DNA, 25 bp, Homo sapien
agtggtccctggtcccacacttggc

SEQ ID NO: 3326440 - DNA, 25 bp, Homo sapien
tcagaagaagcccaaattcacttgg

SEQ ID NO: 3326441 - DNA, 25 bp, Homo sapien
ggtagatatgatttacacccactga

SEQ ID NO: 3326442 - DNA, 25 bp, Homo sapien
tggctaaaggctatcaccagttctt

SEQ ID NO: 3326443 - DNA, 25 bp, Homo sapien
cagttctttaatgtcaaggaggtag

SEQ ID NO: 3326444 - DNA, 25 bp, Homo sapien
ggaggaagggcaggcatgacagcac

SEQ ID NO: 3326445 - DNA, 25 bp, Homo sapien
ggaagggcaggcatgacagcaccat

SEQ ID NO: 3326446 - DNA, 25 bp, Homo sapien
aaggaggaagggcaggcatgacagc

SEQ ID NO: 3326447 - DNA, 25 bp, Homo sapien
aggaagggcaggcatgacagcacca

SEQ ID NO: 3326448 - DNA, 25 bp, Homo sapien
ctttattaagtacacaatcatcaaa

SEQ ID NO: 3326449 - DNA, 25 bp, Homo sapien
cacaatcatcaaacattgtatccat

SEQ ID NO: 3326450 - DNA, 25 bp, Homo sapien
acacaatcatcaaacattgtatcca

SEQ ID NO: 3326451 - DNA, 25 bp, Homo sapien
tattaagtacacaatcatcaaacat

SEQ ID NO: 3326452 - DNA, 25 bp, Homo sapien
tcactgtcatacgcaggtgcaaggc

SEQ ID NO: 3326453 - DNA, 25 bp, Homo sapien
agctcactgtcatacgcaggtgcaa

SEQ ID NO: 3326454 - DNA, 25 bp, Homo sapien
cagctcactgtcatacgcaggtgca

SEQ ID NO: 3326455 - DNA, 25 bp, Homo sapien
gctcactgtcatacgcaggtgcaag

SEQ ID NO: 3326456 - DNA, 25 bp, Homo sapien
ctagacttccacatccttcatggct

SEQ ID NO: 3326457 - DNA, 25 bp, Homo sapien
tccacatccttcatggctgggctca

SEQ ID NO: 3326458 - DNA, 25 bp, Homo sapien
gacttccacatccttcatggctggg

SEQ ID NO: 3326459 - DNA, 25 bp, Homo sapien
acttccacatccttcatggctgggc

SEQ ID NO: 3326460 - DNA, 25 bp, Homo sapien
tttgggaaatttgtctaaaacagca

SEQ ID NO: 3326461 - DNA, 25 bp, Homo sapien
ttgggaaatttgtctaaaacagcag

SEQ ID NO: 3326462 - DNA, 25 bp, Homo sapien
caaggcattgtttgtccttgagata

SEQ ID NO: 3326463 - DNA, 25 bp, Homo sapien
cactgtctctccaaggcattgtttg

SEQ ID NO: 3326464 - DNA, 25 bp, Homo sapien
gtgctttcctttgtctcgctgttgt

SEQ ID NO: 3326465 - DNA, 25 bp, Homo sapien
tgtctcgctgttgtttacactgtct

SEQ ID NO: 3326466 - DNA, 25 bp, Homo sapien
ctcactcaagtgtatatgagaacca

SEQ ID NO: 3326467 - DNA, 25 bp, Homo sapien
agtgtatatgagaaccaaaccttct

SEQ ID NO: 3326468 - DNA, 25 bp, Homo sapien
ctgcagcctgctctcactcaagtgt

SEQ ID NO: 3326469 - DNA, 25 bp, Homo sapien
aataactaggaacagatattctgga

SEQ ID NO: 3326470 - DNA, 25 bp, Homo sapien
gaaaagacacgatagtcttcttgct

SEQ ID NO: 3326471 - DNA, 25 bp, Homo sapien
tgcaatccgccttttctctatcaac

SEQ ID NO: 3326472 - DNA, 25 bp, Homo sapien
tcattctcccggattttaataatct

SEQ ID NO: 3326473 - DNA, 25 bp, Homo sapien
ttgaggtcctaaattgtactgtaat

SEQ ID NO: 3326474 - DNA, 25 bp, Homo sapien
tgttgtatagcctgttcaagatgtc

SEQ ID NO: 3326475 - DNA, 25 bp, Homo sapien
gaaattccccaaatctgatctttca

SEQ ID NO: 3326476 - DNA, 25 bp, Homo sapien
ccttcaaggaaattccccaaatctg

SEQ ID NO: 3326477 - DNA, 25 bp, Homo sapien
gcctgttcaagatgtcttttacttc

SEQ ID NO: 3326478 - DNA, 25 bp, Homo sapien
tgtagtaggcaactgctaccactct

SEQ ID NO: 3326479 - DNA, 25 bp, Homo sapien
ccactctggtggaatgatgaatcaa

SEQ ID NO: 3326480 - DNA, 25 bp, Homo sapien
tgcaattgccaaaagttcagctctt

SEQ ID NO: 3326481 - DNA, 25 bp, Homo sapien
taggccagtgccaggatatgttcag

SEQ ID NO: 3326482 - DNA, 25 bp, Homo sapien
aaggactgacaacagcaggaccggg

SEQ ID NO: 3326483 - DNA, 25 bp, Homo sapien
gcaaggactgacaacagcaggaccg

SEQ ID NO: 3326484 - DNA, 25 bp, Homo sapien
aggactgacaacagcaggaccgggc

SEQ ID NO: 3326485 - DNA, 25 bp, Homo sapien
tgcaaggactgacaacagcaggacc

SEQ ID NO: 3326486 - DNA, 25 bp, Homo sapien
tttctacaaagtaccaatcatcacc

SEQ ID NO: 3326487 - DNA, 25 bp, Homo sapien
ctttctacaaagtaccaatcatcac

SEQ ID NO: 3326488 - DNA, 25 bp, Homo sapien
attttcaacttcagtcaccagggtt

SEQ ID NO: 3326489 - DNA, 25 bp, Homo sapien
cacttcaaggtgctgagtataaccc

SEQ ID NO: 3326490 - DNA, 25 bp, Homo sapien
cagggtttgacacccttccacttca

SEQ ID NO: 3326491 - DNA, 25 bp, Homo sapien
cctggtgaatagtaataagtagtaa

SEQ ID NO: 3326492 - DNA, 25 bp, Homo sapien
acagatgtctaaaatgacagtcact

SEQ ID NO: 3326493 - DNA, 25 bp, Homo sapien
tcacagatgtctaaaatgacagtca

SEQ ID NO: 3326494 - DNA, 25 bp, Homo sapien
ctaaaatgacagtcactgaattttg

SEQ ID NO: 3326495 - DNA, 25 bp, Homo sapien
gatgtctaaaatgacagtcactgaa

SEQ ID NO: 3326496 - DNA, 25 bp, Homo sapien
tttggctgtattagaccagctggcc

SEQ ID NO: 3326497 - DNA, 25 bp, Homo sapien
cttgactttggctgtattagaccag

SEQ ID NO: 3326498 - DNA, 25 bp, Homo sapien
ccttgactttggctgtattagacca

SEQ ID NO: 3326499 - DNA, 25 bp, Homo sapien
gactttggctgtattagaccagctg

SEQ ID NO: 3326500 - DNA, 25 bp, Homo sapien
tgaagctcaacaatctcctcctgca

SEQ ID NO: 3326501 - DNA, 25 bp, Homo sapien
aaacagccggagtaatagcagttca

SEQ ID NO: 3326502 - DNA, 25 bp, Homo sapien
agagaatgacgttttctgaagctca

SEQ ID NO: 3326503 - DNA, 25 bp, Homo sapien
gcaggaggaaacagccggagtaata

SEQ ID NO: 3326504 - DNA, 25 bp, Homo sapien
tttgctagatttgcccttctcctca

SEQ ID NO: 3326505 - DNA, 25 bp, Homo sapien
ctactttgctagatttgcccttctc

SEQ ID NO: 3326506 - DNA, 25 bp, Homo sapien
atctactttgctagatttgcccttc

SEQ ID NO: 3326507 - DNA, 25 bp, Homo sapien
tactttgctagatttgcccttctcc

SEQ ID NO: 3326508 - DNA, 25 bp, Homo sapien
tccctggcagctattggaatagcat

SEQ ID NO: 3326509 - DNA, 25 bp, Homo sapien
ggaacttccacacaatacttggaat

SEQ ID NO: 3326510 - DNA, 25 bp, Homo sapien
tgtggcctcaactctcccagtagga

SEQ ID NO: 3326511 - DNA, 25 bp, Homo sapien
tcttgatggatgataggttgtcccc

SEQ ID NO: 3326512 - DNA, 25 bp, Homo sapien
catcaccttccgcttctctgggatt

SEQ ID NO: 3326513 - DNA, 25 bp, Homo sapien
ccacatcaccttccgcttctctggg

SEQ ID NO: 3326514 - DNA, 25 bp, Homo sapien
atcaccttccgcttctctgggattt

SEQ ID NO: 3326515 - DNA, 25 bp, Homo sapien
acatcaccttccgcttctctgggat

SEQ ID NO: 3326516 - DNA, 25 bp, Homo sapien
tagttgatcctttccccttggaagc

SEQ ID NO: 3326517 - DNA, 25 bp, Homo sapien
cactccgagagcattccacataaac

SEQ ID NO: 3326518 - DNA, 25 bp, Homo sapien
gagcattccacataaactggacctg

SEQ ID NO: 3326519 - DNA, 25 bp, Homo sapien
cataaactggacctgtttagttgat

SEQ ID NO: 3326520 - DNA, 25 bp, Homo sapien
tgttaggcatgaaagcagtaaaact

SEQ ID NO: 3326521 - DNA, 25 bp, Homo sapien
tgaacacagtgctaaggaaatccaa

SEQ ID NO: 3326522 - DNA, 25 bp, Homo sapien
gcttgtaaggaatgatagcatttcc

SEQ ID NO: 3326523 - DNA, 25 bp, Homo sapien
ccagattggactaagatgttaggca

SEQ ID NO: 3326524 - DNA, 25 bp, Homo sapien
taaagaagtatctaaattttgaaga

SEQ ID NO: 3326525 - DNA, 25 bp, Homo sapien
tttgaagattcttcggggtcacaga

SEQ ID NO: 3326526 - DNA, 25 bp, Homo sapien
tcataaactttcaggataatggggt

SEQ ID NO: 3326527 - DNA, 25 bp, Homo sapien
ataattagacactcctgggtaaatt

SEQ ID NO: 3326528 - DNA, 25 bp, Homo sapien
tgcaggaatggtcagctaacacaag

SEQ ID NO: 3326529 - DNA, 25 bp, Homo sapien
caagctggaccactcaaatactgtc

SEQ ID NO: 3326530 - DNA, 25 bp, Homo sapien
tatggaggtgggtatccaacagcca

SEQ ID NO: 3326531 - DNA, 25 bp, Homo sapien
cacctctttgatggctacctatgga

SEQ ID NO: 3326532 - DNA, 25 bp, Homo sapien
gcaaatgttaaagctcacaggtgga

SEQ ID NO: 3326533 - DNA, 25 bp, Homo sapien
taagcaagtagcaccacaagcattg

SEQ ID NO: 3326534 - DNA, 25 bp, Homo sapien
tctgatgagcatcaacggtggtgaa

SEQ ID NO: 3326535 - DNA, 25 bp, Homo sapien
tgcaaataaaccagagaccccttcg

SEQ ID NO: 3326536 - DNA, 25 bp, Homo sapien
gattaaagtatcatggttacaaatg

SEQ ID NO: 3326537 - DNA, 25 bp, Homo sapien
taacatttccaagagttcacaattt

SEQ ID NO: 3326538 - DNA, 25 bp, Homo sapien
caaggctaagcttctgattaaagta

SEQ ID NO: 3326539 - DNA, 25 bp, Homo sapien
tttagtttagttgcgaacttcacta

SEQ ID NO: 3326540 - DNA, 25 bp, Homo sapien
ccactagagatcagaaagaagcacc

SEQ ID NO: 3326541 - DNA, 25 bp, Homo sapien
ggctaaaagcactctagcctcttaa

SEQ ID NO: 3326542 - DNA, 25 bp, Homo sapien
atggccaggcattaaacttagtaac

SEQ ID NO: 3326543 - DNA, 25 bp, Homo sapien
tttagtactacagcagtcaaagaga

SEQ ID NO: 3326544 - DNA, 25 bp, Homo sapien
gagcatgctagtatgaataaggcaa

SEQ ID NO: 3326545 - DNA, 25 bp, Homo sapien
tggcatacaaatgcagctaaaggtg

SEQ ID NO: 3326546 - DNA, 25 bp, Homo sapien
gacgtgtatgtgttggtcatgagca

SEQ ID NO: 3326547 - DNA, 25 bp, Homo sapien
gcaatgtgttaagcactggcataca

SEQ ID NO: 3326548 - DNA, 25 bp, Homo sapien
tgcaggcacacagcagggagctctt

SEQ ID NO: 3326549 - DNA, 25 bp, Homo sapien
ggcagtggggtggtgcaggcacaca

SEQ ID NO: 3326550 - DNA, 25 bp, Homo sapien
cagtggggtggtgcaggcacacagc

SEQ ID NO: 3326551 - DNA, 25 bp, Homo sapien
gcagggagctcttccccgtgacacg

SEQ ID NO: 3326552 - DNA, 25 bp, Homo sapien
tcttatagtccccagatgtatctcc

SEQ ID NO: 3326553 - DNA, 25 bp, Homo sapien
agcagaagagctttcttatagtccc

SEQ ID NO: 3326554 - DNA, 25 bp, Homo sapien
gctttcttatagtccccagatgtat

SEQ ID NO: 3326555 - DNA, 25 bp, Homo sapien
gaagagctttcttatagtccccaga

SEQ ID NO: 3326556 - DNA, 25 bp, Homo sapien
aactctctagtgtcctttgggccag

SEQ ID NO: 3326557 - DNA, 25 bp, Homo sapien
gctaaaagtgcatgggtaaactctc

SEQ ID NO: 3326558 - DNA, 25 bp, Homo sapien
tatatatcagctaacacgggcagtg

SEQ ID NO: 3326559 - DNA, 25 bp, Homo sapien
tcccaagtgggtaatctctgtgact

SEQ ID NO: 3326560 - DNA, 25 bp, Homo sapien
tatccttgtctttcatgcaacatac

SEQ ID NO: 3326561 - DNA, 25 bp, Homo sapien
tcaggttctcttatccttgtctttc

SEQ ID NO: 3326562 - DNA, 25 bp, Homo sapien
ttctcttatccttgtctttcatgca

SEQ ID NO: 3326563 - DNA, 25 bp, Homo sapien
ctcttatccttgtctttcatgcaac

SEQ ID NO: 3326564 - DNA, 25 bp, Homo sapien
cagtctgctttggattcccaaacgt

SEQ ID NO: 3326565 - DNA, 25 bp, Homo sapien
agtctgctttggattcccaaacgta

SEQ ID NO: 3326566 - DNA, 25 bp, Homo sapien
ctgctttggattcccaaacgtaatt

SEQ ID NO: 3326567 - DNA, 25 bp, Homo sapien
gtctgctttggattcccaaacgtaa

SEQ ID NO: 3326568 - DNA, 25 bp, Homo sapien
cttaatcatggaataaagagaggtg

SEQ ID NO: 3326569 - DNA, 25 bp, Homo sapien
actctgatgagggtatgatcatctg

SEQ ID NO: 3326570 - DNA, 25 bp, Homo sapien
gagggtatgatcatctgtcccagct

SEQ ID NO: 3326571 - DNA, 25 bp, Homo sapien
tccttcctgatgttaaacagatcaa

SEQ ID NO: 3326572 - DNA, 25 bp, Homo sapien
cctgatgttaaacagatcaatctca

SEQ ID NO: 3326573 - DNA, 25 bp, Homo sapien
gcaaggtaggcaggtatacttcgaa

SEQ ID NO: 3326574 - DNA, 25 bp, Homo sapien
atagagggtctctgcaaggtaggca

SEQ ID NO: 3326575 - DNA, 25 bp, Homo sapien
ctgcaaggtaggcaggtatacttcg

SEQ ID NO: 3326576 - DNA, 25 bp, Homo sapien
atagcataatagagggtctctgcaa

SEQ ID NO: 3326577 - DNA, 25 bp, Homo sapien
ttctaaaccagatgacaatttctta

SEQ ID NO: 3326578 - DNA, 25 bp, Homo sapien
tctaaaccagatgacaatttcttag

SEQ ID NO: 3326579 - DNA, 25 bp, Homo sapien
ttgccagaagtctcgcggtcaatgg

SEQ ID NO: 3326580 - DNA, 25 bp, Homo sapien
caaggagtagttgctctaaattgcc

SEQ ID NO: 3326581 - DNA, 25 bp, Homo sapien
ctcgcggtcaatggtttcctcaatt

SEQ ID NO: 3326582 - DNA, 25 bp, Homo sapien
tgaaatcctgatatagtcatgtact

SEQ ID NO: 3326583 - DNA, 25 bp, Homo sapien
agacacacttcgtgttccaaagatg

SEQ ID NO: 3326584 - DNA, 25 bp, Homo sapien
tcaaatgagacacacttcgtgttcc

SEQ ID NO: 3326585 - DNA, 25 bp, Homo sapien
tctcaaatgagacacacttcgtgtt

SEQ ID NO: 3326586 - DNA, 25 bp, Homo sapien
aatgagacacacttcgtgttccaaa

SEQ ID NO: 3326587 - DNA, 25 bp, Homo sapien
tctaatgtgtcctactctgaaactc

SEQ ID NO: 3326588 - DNA, 25 bp, Homo sapien
gaattttaactcacttgattcatca

SEQ ID NO: 3326589 - DNA, 25 bp, Homo sapien
actcacttgattcatcatcttgtat

SEQ ID NO: 3326590 - DNA, 25 bp, Homo sapien
actcaattaataaattgttcctcca

SEQ ID NO: 3326591 - DNA, 25 bp, Homo sapien
ggtccaagcaacaaagcacggcaat

SEQ ID NO: 3326592 - DNA, 25 bp, Homo sapien
caaagcacggcaatggtgcaaggtt

SEQ ID NO: 3326593 - DNA, 25 bp, Homo sapien
cacagaagattcatgggtccaagca

SEQ ID NO: 3326594 - DNA, 25 bp, Homo sapien
caatggtgcaaggttacatgttccc

SEQ ID NO: 3326595 - DNA, 25 bp, Homo sapien
tcaggagaaagttatgactacctca

SEQ ID NO: 3326596 - DNA, 25 bp, Homo sapien
ctgggaaaggatttaactggaagct

SEQ ID NO: 3326597 - DNA, 25 bp, Homo sapien
cagaagcaacagtatgggtcaggag

SEQ ID NO: 3326598 - DNA, 25 bp, Homo sapien
gatacatccatgtatagactgggaa

SEQ ID NO: 3326599 - DNA, 25 bp, Homo sapien
tgtgaacatgctcttaaaacctgaa

SEQ ID NO: 3326600 - DNA, 25 bp, Homo sapien
gaaaatagaagttgcaggctaggca

SEQ ID NO: 3326601 - DNA, 25 bp, Homo sapien
taatatcaattctggccatgtgaac

SEQ ID NO: 3326602 - DNA, 25 bp, Homo sapien
gcagttggccttatacccacaagca

SEQ ID NO: 3326603 - DNA, 25 bp, Homo sapien
tctgaaggggctggacacaattggc

SEQ ID NO: 3326604 - DNA, 25 bp, Homo sapien
gctggacacaattggcttgcatttt

SEQ ID NO: 3326605 - DNA, 25 bp, Homo sapien
gggctggacacaattggcttgcatt

SEQ ID NO: 3326606 - DNA, 25 bp, Homo sapien
aaggggctggacacaattggcttgc

SEQ ID NO: 3326607 - DNA, 25 bp, Homo sapien
tctatgattggtggttctaggaacc

SEQ ID NO: 3326608 - DNA, 25 bp, Homo sapien
catatccatgggttgttccactgga

SEQ ID NO: 3326609 - DNA, 25 bp, Homo sapien
tgctaagagacccactgcataattg

SEQ ID NO: 3326610 - DNA, 25 bp, Homo sapien
tcctgttagcaaagtgagatcgcat

SEQ ID NO: 3326611 - DNA, 25 bp, Homo sapien
tgttcaacttgagcttcatcaattc

SEQ ID NO: 3326612 - DNA, 25 bp, Homo sapien
ctgagcatcttgttcaacttgagct

SEQ ID NO: 3326613 - DNA, 25 bp, Homo sapien
aacttgagcttcatcaattccagca

SEQ ID NO: 3326614 - DNA, 25 bp, Homo sapien
aattccagcatcagggtctctgtta

SEQ ID NO: 3326615 - DNA, 25 bp, Homo sapien
gaaaaatggttccacctgatggtta

SEQ ID NO: 3326616 - DNA, 25 bp, Homo sapien
gaatcatcgcagtaagaatcagcaa

SEQ ID NO: 3326617 - DNA, 25 bp, Homo sapien
tacttaactagattcagcccagtcc

SEQ ID NO: 3326618 - DNA, 25 bp, Homo sapien
gatcaatcctgcactatttcacgtt

SEQ ID NO: 3326619 - DNA, 25 bp, Homo sapien
accaacatccgctggtagtaccctg

SEQ ID NO: 3326620 - DNA, 25 bp, Homo sapien
catccgctggtagtaccctgaagtg

SEQ ID NO: 3326621 - DNA, 25 bp, Homo sapien
gaaccaccaacatccgctggtagta

SEQ ID NO: 3326622 - DNA, 25 bp, Homo sapien
ccgctggtagtaccctgaagtgtcc

SEQ ID NO: 3326623 - DNA, 25 bp, Homo sapien
cgtcatcttccaggcttgagccata

SEQ ID NO: 3326624 - DNA, 25 bp, Homo sapien
cacgtcatcttccaggcttgagcca

SEQ ID NO: 3326625 - DNA, 25 bp, Homo sapien
acgtcatcttccaggcttgagccat

SEQ ID NO: 3326626 - DNA, 25 bp, Homo sapien
tcatcttccaggcttgagccatatt

SEQ ID NO: 3326627 - DNA, 25 bp, Homo sapien
tatatctgagcctaacctcgcttgt

SEQ ID NO: 3326628 - DNA, 25 bp, Homo sapien
gccattaaagacaggcagtacctca

SEQ ID NO: 3326629 - DNA, 25 bp, Homo sapien
aattgttccttcagcactccactgc

SEQ ID NO: 3326630 - DNA, 25 bp, Homo sapien
tttacctcccacaatggacatgcac

SEQ ID NO: 3326631 - DNA, 25 bp, Homo sapien
tatcacttctgccttagcggttggg

SEQ ID NO: 3326632 - DNA, 25 bp, Homo sapien
tgtaatccagtagcacaaaggctct

SEQ ID NO: 3326633 - DNA, 25 bp, Homo sapien
taatggcaagatacagcccctagca

SEQ ID NO: 3326634 - DNA, 25 bp, Homo sapien
tacacggctgagtaggacagaccac

SEQ ID NO: 3326635 - DNA, 25 bp, Homo sapien
aggaagtgatagtggaggtgaagtc

SEQ ID NO: 3326636 - DNA, 25 bp, Homo sapien
gaggtgaagtcaaaatataactcac

SEQ ID NO: 3326637 - DNA, 25 bp, Homo sapien
ggtgaagtcaaaatataactcacaa

SEQ ID NO: 3326638 - DNA, 25 bp, Homo sapien
tgaaggaagtgatagtggaggtgaa

SEQ ID NO: 3326639 - DNA, 25 bp, Homo sapien
gcaataatttctgtcagtacttttt

SEQ ID NO: 3326640 - DNA, 25 bp, Homo sapien
gtttgatggctctcagttcttcagg

SEQ ID NO: 3326641 - DNA, 25 bp, Homo sapien
ggtgtccttgaagcaataatttctg

SEQ ID NO: 3326642 - DNA, 25 bp, Homo sapien
tcttcataaacttgtttgatggctc

SEQ ID NO: 3326643 - DNA, 25 bp, Homo sapien
aagccgagagggtttcatcagagcc

SEQ ID NO: 3326644 - DNA, 25 bp, Homo sapien
catcataaagccgagagggtttcat

SEQ ID NO: 3326645 - DNA, 25 bp, Homo sapien
ataagcatcataaagccgagagggt

SEQ ID NO: 3326646 - DNA, 25 bp, Homo sapien
ccgagagggtttcatcagagccaca

SEQ ID NO: 3326647 - DNA, 25 bp, Homo sapien
ttcctggcgctgagcattacttcgg

SEQ ID NO: 3326648 - DNA, 25 bp, Homo sapien
ttacttcgggatgtcaacagagtca

SEQ ID NO: 3326649 - DNA, 25 bp, Homo sapien
aagctgcagagatttcctggcgctg

SEQ ID NO: 3326650 - DNA, 25 bp, Homo sapien
tcttaaaagctgcagagatttcctg

SEQ ID NO: 3326651 - DNA, 25 bp, Homo sapien
agggtgacaagctcaaaagcacaga

SEQ ID NO: 3326652 - DNA, 25 bp, Homo sapien
gggtgacaagctcaaaagcacagag

SEQ ID NO: 3326653 - DNA, 25 bp, Homo sapien
gctgccttatcgactcgggcctcta

SEQ ID NO: 3326654 - DNA, 25 bp, Homo sapien
ggatggctgccttatcgactcgggc

SEQ ID NO: 3326655 - DNA, 25 bp, Homo sapien
tttctgcatcagcccgctcatcaaa

SEQ ID NO: 3326656 - DNA, 25 bp, Homo sapien
caagcctttcatagccttccgaaga

SEQ ID NO: 3326657 - DNA, 25 bp, Homo sapien
gcatcagcccgctcatcaaatccag

SEQ ID NO: 3326658 - DNA, 25 bp, Homo sapien
tagccttccgaagagtttctgcatc

SEQ ID NO: 3326659 - DNA, 25 bp, Homo sapien
taagtctcacaccattttgatctac

SEQ ID NO: 3326660 - DNA, 25 bp, Homo sapien
acagagggcacatctttgcaggttc

SEQ ID NO: 3326661 - DNA, 25 bp, Homo sapien
cttcccattaagtctcacaccattt

SEQ ID NO: 3326662 - DNA, 25 bp, Homo sapien
gggcacatctttgcaggttcccttc

SEQ ID NO: 3326663 - DNA, 25 bp, Homo sapien
ctcaggtcaggggaaggtgaagcag

SEQ ID NO: 3326664 - DNA, 25 bp, Homo sapien
caggtcaggggaaggtgaagcagga

SEQ ID NO: 3326665 - DNA, 25 bp, Homo sapien
tactcaggtcaggggaaggtgaagc

SEQ ID NO: 3326666 - DNA, 25 bp, Homo sapien
ggcgactactcaggtcaggggaagg

SEQ ID NO: 3326667 - DNA, 25 bp, Homo sapien
acctcgggcttagcgcgccatttgc

SEQ ID NO: 3326668 - DNA, 25 bp, Homo sapien
agaaacctcgggcttagcgcgccat

SEQ ID NO: 3326669 - DNA, 25 bp, Homo sapien
atttgcaactcgtgccctccccaag

SEQ ID NO: 3326670 - DNA, 25 bp, Homo sapien
aagagaagaaacctcgggcttagcg

SEQ ID NO: 3326671 - DNA, 25 bp, Homo sapien
gcagctgcacctagactgatccaag

SEQ ID NO: 3326672 - DNA, 25 bp, Homo sapien
gcgacgccgagatgcagacgctgaa

SEQ ID NO: 3326673 - DNA, 25 bp, Homo sapien
gactgtgggacccaagtgccccgaa

SEQ ID NO: 3326674 - DNA, 25 bp, Homo sapien
gacgctgaaggatccggcagctgca

SEQ ID NO: 3326675 - DNA, 25 bp, Homo sapien
acagcgcgcctttgtcgatgggata

SEQ ID NO: 3326676 - DNA, 25 bp, Homo sapien
tattattgcttcctagatggccctc

SEQ ID NO: 3326677 - DNA, 25 bp, Homo sapien
caaaatcatcgcagctaaggacagc

SEQ ID NO: 3326678 - DNA, 25 bp, Homo sapien
tgctcaacatagtgcgtgggcgtct

SEQ ID NO: 3326679 - DNA, 25 bp, Homo sapien
tcttggagatcctgtctggtagctt

SEQ ID NO: 3326680 - DNA, 25 bp, Homo sapien
ttggagatcctgtctggtagcttca

SEQ ID NO: 3326681 - DNA, 25 bp, Homo sapien
tggagatcctgtctggtagcttcag

SEQ ID NO: 3326682 - DNA, 25 bp, Homo sapien
ttcttggagatcctgtctggtagct

SEQ ID NO: 3326683 - DNA, 25 bp, Homo sapien
atgtctcagacacactattctgaat

SEQ ID NO: 3326684 - DNA, 25 bp, Homo sapien
tgtctcagacacactattctgaata

SEQ ID NO: 3326685 - DNA, 25 bp, Homo sapien
gtctcagacacactattctgaataa

SEQ ID NO: 3326686 - DNA, 25 bp, Homo sapien
tctcagacacactattctgaataaa

SEQ ID NO: 3326687 - DNA, 25 bp, Homo sapien
aaacatgagggcattcctcttgacc

SEQ ID NO: 3326688 - DNA, 25 bp, Homo sapien
caagagctaccccagatgtagactc

SEQ ID NO: 3326689 - DNA, 25 bp, Homo sapien
ccccagatgtagactctgattttcc

SEQ ID NO: 3326690 - DNA, 25 bp, Homo sapien
tcatgaaacatgagggcattcctct

SEQ ID NO: 3326691 - DNA, 25 bp, Homo sapien
gaaagttcttttagacagccctaga

SEQ ID NO: 3326692 - DNA, 25 bp, Homo sapien
cacaggaactattcccaggaggtca

SEQ ID NO: 3326693 - DNA, 25 bp, Homo sapien
tccacaaagaggttacggccaccaa

SEQ ID NO: 3326694 - DNA, 25 bp, Homo sapien
tcctctgggagacaaattcaatggc

SEQ ID NO: 3326695 - DNA, 25 bp, Homo sapien
tcttgcagatagcagtagccaatga

SEQ ID NO: 3326696 - DNA, 25 bp, Homo sapien
gaagtggatttgaactggcatgccc

SEQ ID NO: 3326697 - DNA, 25 bp, Homo sapien
tattgggctgctgaggaagctcttt

SEQ ID NO: 3326698 - DNA, 25 bp, Homo sapien
tggcatgccccgttttctctgtggg

SEQ ID NO: 3326699 - DNA, 25 bp, Homo sapien
ctcttattctgtagaatcgcaccag

SEQ ID NO: 3326700 - DNA, 25 bp, Homo sapien
cctgcaagcgaaccaaaaacaaatc

SEQ ID NO: 3326701 - DNA, 25 bp, Homo sapien
cccagaaaagccagtgcatggcaca

SEQ ID NO: 3326702 - DNA, 25 bp, Homo sapien
aaaacaaatcctggcaccttgccat

SEQ ID NO: 3326703 - DNA, 25 bp, Homo sapien
aaatggttatcttgccaagtagaac

SEQ ID NO: 3326704 - DNA, 25 bp, Homo sapien
gagtgtgatgtcattctcattcaac

SEQ ID NO: 3326705 - DNA, 25 bp, Homo sapien
caagtagaactgcagatccattgca

SEQ ID NO: 3326706 - DNA, 25 bp, Homo sapien
attttgcaggtgtgagtgtgatgtc

SEQ ID NO: 3326707 - DNA, 25 bp, Homo sapien
ttgtcctgataagatctgaagccat

SEQ ID NO: 3326708 - DNA, 25 bp, Homo sapien
gccaagattgtcctgataagatctg

SEQ ID NO: 3326709 - DNA, 25 bp, Homo sapien
ttagtgcaacagccaagattgtcct

SEQ ID NO: 3326710 - DNA, 25 bp, Homo sapien
gattgtcctgataagatctgaagcc

SEQ ID NO: 3326711 - DNA, 25 bp, Homo sapien
gttaaattcatggataccagtggtg

SEQ ID NO: 3326712 - DNA, 25 bp, Homo sapien
aagaatgatgggcaggttaaattca

SEQ ID NO: 3326713 - DNA, 25 bp, Homo sapien
taaattcatggataccagtggtgct

SEQ ID NO: 3326714 - DNA, 25 bp, Homo sapien
aaattcatggataccagtggtgctg

SEQ ID NO: 3326715 - DNA, 25 bp, Homo sapien
ttgcaggcccaaactgtcattgcag

SEQ ID NO: 3326716 - DNA, 25 bp, Homo sapien
ttctttttgcaggcccaaactgtca

SEQ ID NO: 3326717 - DNA, 25 bp, Homo sapien
caggcccaaactgtcattgcagctg

SEQ ID NO: 3326718 - DNA, 25 bp, Homo sapien
tttttgcaggcccaaactgtcattg

SEQ ID NO: 3326719 - DNA, 25 bp, Homo sapien
gtttccctacactatgcaaacagta

SEQ ID NO: 3326720 - DNA, 25 bp, Homo sapien
catgccatcacccaaaaggtcacgt

SEQ ID NO: 3326721 - DNA, 25 bp, Homo sapien
tagtaatttaacctgaaaccacaga

SEQ ID NO: 3326722 - DNA, 25 bp, Homo sapien
tacctcttttagctggccctccatg

SEQ ID NO: 3326723 - DNA, 25 bp, Homo sapien
aacgttcaccatccgctgtcccaga

SEQ ID NO: 3326724 - DNA, 25 bp, Homo sapien
tccaaatgactctcactgtaacgtt

SEQ ID NO: 3326725 - DNA, 25 bp, Homo sapien
aatgactctcactgtaacgttcacc

SEQ ID NO: 3326726 - DNA, 25 bp, Homo sapien
tccgctgtcccagattcgaaaccta

SEQ ID NO: 3326727 - DNA, 25 bp, Homo sapien
ctgcacggcaatccgcaagcactaa

SEQ ID NO: 3326728 - DNA, 25 bp, Homo sapien
cgcaagcactaaccgtggttggtgg

SEQ ID NO: 3326729 - DNA, 25 bp, Homo sapien
aatccgcaagcactaaccgtggttg

SEQ ID NO: 3326730 - DNA, 25 bp, Homo sapien
cggcaatccgcaagcactaaccgtg

SEQ ID NO: 3326731 - DNA, 25 bp, Homo sapien
tatgagtaaggatcaccgggaggaa

SEQ ID NO: 3326732 - DNA, 25 bp, Homo sapien
gaatatgagtaaggatcaccgggag

SEQ ID NO: 3326733 - DNA, 25 bp, Homo sapien
tagaatatgagtaaggatcaccggg

SEQ ID NO: 3326734 - DNA, 25 bp, Homo sapien
ctagaatatgagtaaggatcaccgg

SEQ ID NO: 3326735 - DNA, 25 bp, Homo sapien
gaacggacccgtcagagccgccgag

SEQ ID NO: 3326736 - DNA, 25 bp, Homo sapien
ggcctcccacaggagcggagacgcg

SEQ ID NO: 3326737 - DNA, 25 bp, Homo sapien
gtccctgcgcctcacgccggaacgg

SEQ ID NO: 3326738 - DNA, 25 bp, Homo sapien
ctggcacccgaacgcgctgcgagcc

SEQ ID NO: 3326739 - DNA, 25 bp, Homo sapien
ggaagctgggaggccgcgaggacgg

SEQ ID NO: 3326740 - DNA, 25 bp, Homo sapien
gaagctgggaggccgcgaggacgga

SEQ ID NO: 3326741 - DNA, 25 bp, Homo sapien
tggaagctgggaggccgcgaggacg

SEQ ID NO: 3326742 - DNA, 25 bp, Homo sapien
ccggccgtgttggccacggagttct

SEQ ID NO: 3326743 - DNA, 25 bp, Homo sapien
ggtgcaccgagaggcgcccgggctg

SEQ ID NO: 3326744 - DNA, 25 bp, Homo sapien
ccgtgttggccacggagttcttcag

SEQ ID NO: 3326745 - DNA, 25 bp, Homo sapien
ccaaggctcgcggtgcaccgagagg

SEQ ID NO: 3326746 - DNA, 25 bp, Homo sapien
ggcgccggcgctcgctggccctgcg

SEQ ID NO: 3326747 - DNA, 25 bp, Homo sapien
gaggcgccggcgctcgctggccctg

SEQ ID NO: 3326748 - DNA, 25 bp, Homo sapien
ctggaggcgccggcgctcgctggcc

SEQ ID NO: 3326749 - DNA, 25 bp, Homo sapien
tggaggcgccggcgctcgctggccc

SEQ ID NO: 3326750 - DNA, 25 bp, Homo sapien
gagctgaggaaatccggcgcagact

SEQ ID NO: 3326751 - DNA, 25 bp, Homo sapien
tgctcttgaggacgcgagcgacttc

SEQ ID NO: 3326752 - DNA, 25 bp, Homo sapien
gctccgaggaaacgcgccaaggagc

SEQ ID NO: 3326753 - DNA, 25 bp, Homo sapien
ttccgcttcgccgagatcctctcag

SEQ ID NO: 3326754 - DNA, 25 bp, Homo sapien
catggctactgctacctgcttcgac

SEQ ID NO: 3326755 - DNA, 25 bp, Homo sapien
ctagccatggctactgctacctgct

SEQ ID NO: 3326756 - DNA, 25 bp, Homo sapien
gccatggctactgctacctgcttcg

SEQ ID NO: 3326757 - DNA, 25 bp, Homo sapien
ttccattccgtaaccttccactggc

SEQ ID NO: 3326758 - DNA, 25 bp, Homo sapien
cgaggcagagtggttagcgccagtt

SEQ ID NO: 3326759 - DNA, 25 bp, Homo sapien
gcgaggcagagtggttagcgccagt

SEQ ID NO: 3326760 - DNA, 25 bp, Homo sapien
aggcagagtggttagcgccagtttt

SEQ ID NO: 3326761 - DNA, 25 bp, Homo sapien
gcagagtggttagcgccagttttca

SEQ ID NO: 3326762 - DNA, 25 bp, Homo sapien
cctcgtaagaacactggagccacca

SEQ ID NO: 3326763 - DNA, 25 bp, Homo sapien
aatctggagctcttcatctcccacg

SEQ ID NO: 3326764 - DNA, 25 bp, Homo sapien
tttcctcctcgtaagaacactggag

SEQ ID NO: 3326765 - DNA, 25 bp, Homo sapien
cctggagactggatcaatctggagc

SEQ ID NO: 3326766 - DNA, 25 bp, Homo sapien
attcatttcaatgaagtaagttgct

SEQ ID NO: 3326767 - DNA, 25 bp, Homo sapien
ttcatttcaatgaagtaagttgcta

SEQ ID NO: 3326768 - DNA, 25 bp, Homo sapien
tcccttcaatatttgtatcattcat

SEQ ID NO: 3326769 - DNA, 25 bp, Homo sapien
atttgtatcattcatttcaatgaag

SEQ ID NO: 3326770 - DNA, 25 bp, Homo sapien
gacagcacgtggagttgtctccttt

SEQ ID NO: 3326771 - DNA, 25 bp, Homo sapien
caaagcacgactgaacaatgtagac

SEQ ID NO: 3326772 - DNA, 25 bp, Homo sapien
tcactccacaaagcacgactgaaca

SEQ ID NO: 3326773 - DNA, 25 bp, Homo sapien
tgaacaatgtagacagcacgtggag

SEQ ID NO: 3326774 - DNA, 25 bp, Homo sapien
tctgtaagcactcttgtgatgacag

SEQ ID NO: 3326775 - DNA, 25 bp, Homo sapien
gacagaaaccagctgtatgcttcat

SEQ ID NO: 3326776 - DNA, 25 bp, Homo sapien
cgatgtcagcgccaatctgtaagca

SEQ ID NO: 3326777 - DNA, 25 bp, Homo sapien
tatgcttcattgctcaccacactaa

SEQ ID NO: 3326778 - DNA, 25 bp, Homo sapien
tcctttttctaagacggtcatccca

SEQ ID NO: 3326779 - DNA, 25 bp, Homo sapien
catagtcaaataagtgctccctgtc

SEQ ID NO: 3326780 - DNA, 25 bp, Homo sapien
ccctctctgcgggatgatgatttga

SEQ ID NO: 3326781 - DNA, 25 bp, Homo sapien
caggtttccacaagtaaggtcctga

SEQ ID NO: 3326782 - DNA, 25 bp, Homo sapien
ggaagccccactgtcacatagtcaa

SEQ ID NO: 3326783 - DNA, 25 bp, Homo sapien
aactaccaatgggtgctcttcgcca

SEQ ID NO: 3326784 - DNA, 25 bp, Homo sapien
actgaatacagatggtgtcacccca

SEQ ID NO: 3326785 - DNA, 25 bp, Homo sapien
gccctggcactctgaatgtaactac

SEQ ID NO: 3326786 - DNA, 25 bp, Homo sapien
cctccttggaaatgggcttgcgttg

SEQ ID NO: 3326787 - DNA, 25 bp, Homo sapien
ctacttctttccgagcagtgtgaca

SEQ ID NO: 3326788 - DNA, 25 bp, Homo sapien
tgacacccacagagaagggtggggt

SEQ ID NO: 3326789 - DNA, 25 bp, Homo sapien
tgcctacttctttccgagcagtgtg

SEQ ID NO: 3326790 - DNA, 25 bp, Homo sapien
acttctttccgagcagtgtgacacc

SEQ ID NO: 3326791 - DNA, 25 bp, Homo sapien
caaaaaagctgagtggttggcagca

SEQ ID NO: 3326792 - DNA, 25 bp, Homo sapien
tgtgcgagcggtctactgataataa

SEQ ID NO: 3326793 - DNA, 25 bp, Homo sapien
tgtctagtctccaccccgtgagagg

SEQ ID NO: 3326794 - DNA, 25 bp, Homo sapien
tagttactacgtgcgaacattctcc

SEQ ID NO: 3326795 - DNA, 25 bp, Homo sapien
gtcacaccattcaagcacctgtagg

SEQ ID NO: 3326796 - DNA, 25 bp, Homo sapien
cagcctaccaaaatgtgggtattaa

SEQ ID NO: 3326797 - DNA, 25 bp, Homo sapien
gatgctcccataatactctcagata

SEQ ID NO: 3326798 - DNA, 25 bp, Homo sapien
acagatgagttctagagtgctctaa

SEQ ID NO: 3326799 - DNA, 25 bp, Homo sapien
tggatgccagtcttactcatagctg

SEQ ID NO: 3326800 - DNA, 25 bp, Homo sapien
gagagctgccaattaaagctaacag

SEQ ID NO: 3326801 - DNA, 25 bp, Homo sapien
caacctctgttgagtttacctcgca

SEQ ID NO: 3326802 - DNA, 25 bp, Homo sapien
tagattagattatgcccaagtcagc

SEQ ID NO: 3326803 - DNA, 25 bp, Homo sapien
cacaacttctgtattcagaaatgat

SEQ ID NO: 3326804 - DNA, 25 bp, Homo sapien
aactgtacaccatatactttgagtg

SEQ ID NO: 3326805 - DNA, 25 bp, Homo sapien
accacttaaaattagccaaatatct

SEQ ID NO: 3326806 - DNA, 25 bp, Homo sapien
taccataatttgtacttggccacaa

SEQ ID NO: 3326807 - DNA, 25 bp, Homo sapien
tctctggtgggttgaggagagaaac

SEQ ID NO: 3326808 - DNA, 25 bp, Homo sapien
tctggtgggttgaggagagaaacac

SEQ ID NO: 3326809 - DNA, 25 bp, Homo sapien
tgtctctggtgggttgaggagagaa

SEQ ID NO: 3326810 - DNA, 25 bp, Homo sapien
ctctggtgggttgaggagagaaaca

SEQ ID NO: 3326811 - DNA, 25 bp, Homo sapien
aagtaagcttcaatatccaagttaa

SEQ ID NO: 3326812 - DNA, 25 bp, Homo sapien
taagcttcaatatccaagttaattc

SEQ ID NO: 3326813 - DNA, 25 bp, Homo sapien
ctagaaaagtaagcttcaatatcca

SEQ ID NO: 3326814 - DNA, 25 bp, Homo sapien
gaaaagtaagcttcaatatccaagt

SEQ ID NO: 3326815 - DNA, 25 bp, Homo sapien
agacaaggcttaagactttccaggg

SEQ ID NO: 3326816 - DNA, 25 bp, Homo sapien
tttccagggtatatccagtctttcg

SEQ ID NO: 3326817 - DNA, 25 bp, Homo sapien
ttattgactgttgtgcatgctgtgg

SEQ ID NO: 3326818 - DNA, 25 bp, Homo sapien
taggtctggtgaaggtccatgagac

SEQ ID NO: 3326819 - DNA, 25 bp, Homo sapien
aaggcagctccagcaataactgatg

SEQ ID NO: 3326820 - DNA, 25 bp, Homo sapien
aatacttgaggtatgggtcagcatc

SEQ ID NO: 3326821 - DNA, 25 bp, Homo sapien
gctttgtcccgtgactgtgtagagt

SEQ ID NO: 3326822 - DNA, 25 bp, Homo sapien
tgtagagtgctaaatgaaaggcagc

SEQ ID NO: 3326823 - DNA, 25 bp, Homo sapien
tgtacacaaactctgctacttctgg

SEQ ID NO: 3326824 - DNA, 25 bp, Homo sapien
tattgggtaagaaactgatttactg

SEQ ID NO: 3326825 - DNA, 25 bp, Homo sapien
cttgtttcttggtgtaggtatcatc

SEQ ID NO: 3326826 - DNA, 25 bp, Homo sapien
gatttactgttggagcagctaagtc

SEQ ID NO: 3326827 - DNA, 25 bp, Homo sapien
cagtgcccacaagctgaagttttcc

SEQ ID NO: 3326828 - DNA, 25 bp, Homo sapien
gtccacgaggatagctctcatactg

SEQ ID NO: 3326829 - DNA, 25 bp, Homo sapien
tacttcaactaaccagtccacgagg

SEQ ID NO: 3326830 - DNA, 25 bp, Homo sapien
tcaatgtagttcacagccaaatgca

SEQ ID NO: 3326831 - DNA, 25 bp, Homo sapien
tcctcatggtagtctggtacttcat

SEQ ID NO: 3326832 - DNA, 25 bp, Homo sapien
atgtgtgaatatcctcatggtagtc

SEQ ID NO: 3326833 - DNA, 25 bp, Homo sapien
tcttctaatataattgacatgtcca

SEQ ID NO: 3326834 - DNA, 25 bp, Homo sapien
ttccctaaggtatgtgtgaatatcc

SEQ ID NO: 3326835 - DNA, 25 bp, Homo sapien
gccatggaaggaatctcatattaac

SEQ ID NO: 3326836 - DNA, 25 bp, Homo sapien
tggtaggcccctaacaggaaaatga

SEQ ID NO: 3326837 - DNA, 25 bp, Homo sapien
tagctaaaaatgactgccatggaag

SEQ ID NO: 3326838 - DNA, 25 bp, Homo sapien
gtagaatattttaccctagtctcag

SEQ ID NO: 3326839 - DNA, 25 bp, Homo sapien
ggctgaattaaaagccagggcatct

SEQ ID NO: 3326840 - DNA, 25 bp, Homo sapien
tccaaggaggaacggtgacatgctc

SEQ ID NO: 3326841 - DNA, 25 bp, Homo sapien
cagggcatcttcacgctctattttt

SEQ ID NO: 3326842 - DNA, 25 bp, Homo sapien
tccacatgaatggtgaacgcaggct

SEQ ID NO: 3326843 - DNA, 25 bp, Homo sapien
ggagctgagcgaagactacacgttt

SEQ ID NO: 3326844 - DNA, 25 bp, Homo sapien
ttatcagggccacaagaagggtcgg

SEQ ID NO: 3326845 - DNA, 25 bp, Homo sapien
ggtgacaggccaatacgtgacaagt

SEQ ID NO: 3326846 - DNA, 25 bp, Homo sapien
tgtcacaggcattcccacaaaggct

SEQ ID NO: 3326847 - DNA, 25 bp, Homo sapien
ctgcagatatcccgcatccctttac

SEQ ID NO: 3326848 - DNA, 25 bp, Homo sapien
ggcgctgccttttccgggttgatat

SEQ ID NO: 3326849 - DNA, 25 bp, Homo sapien
tgctgcaatgctagcagcgccgagc

SEQ ID NO: 3326850 - DNA, 25 bp, Homo sapien
tggtcctcttggagcgccgtctgct

SEQ ID NO: 3326851 - DNA, 25 bp, Homo sapien
gctgctgcgctagaccccgcgggtt

SEQ ID NO: 3326852 - DNA, 25 bp, Homo sapien
tgctcccgggagtggacggcgggat

SEQ ID NO: 3326853 - DNA, 25 bp, Homo sapien
ctcccgggagtggacggcgggatca

SEQ ID NO: 3326854 - DNA, 25 bp, Homo sapien
cccgggagtggacggcgggatcagc

SEQ ID NO: 3326855 - DNA, 25 bp, Homo sapien
cactgctcccgggagtggacggcgg

SEQ ID NO: 3326856 - DNA, 25 bp, Homo sapien
actgcccagcgtggcgagccaaaga

SEQ ID NO: 3326857 - DNA, 25 bp, Homo sapien
agcggcggctgttcttgcagttcaa

SEQ ID NO: 3326858 - DNA, 25 bp, Homo sapien
aaagacgcccagagatgcagcgagc

SEQ ID NO: 3326859 - DNA, 25 bp, Homo sapien
ccaaagaatagtcgtagccgccggt

SEQ ID NO: 3326860 - DNA, 25 bp, Homo sapien
tcatcttaacatttaggcgtttatt

SEQ ID NO: 3326861 - DNA, 25 bp, Homo sapien
catttaggcgtttattcatagtaac

SEQ ID NO: 3326862 - DNA, 25 bp, Homo sapien
taacatttaggcgtttattcatagt

SEQ ID NO: 3326863 - DNA, 25 bp, Homo sapien
tcttaacatttaggcgtttattcat

SEQ ID NO: 3326864 - DNA, 25 bp, Homo sapien
tctaaaaaattcgtgagtctgccct

SEQ ID NO: 3326865 - DNA, 25 bp, Homo sapien
tcacttgaagcacgctgaatagctc

SEQ ID NO: 3326866 - DNA, 25 bp, Homo sapien
aatttatagcactgagccaagtcca

SEQ ID NO: 3326867 - DNA, 25 bp, Homo sapien
agatggcaccttgaactactgttga

SEQ ID NO: 3326868 - DNA, 25 bp, Homo sapien
gaagcctataaagcggtctacatgt

SEQ ID NO: 3326869 - DNA, 25 bp, Homo sapien
ggcaacatacatagtaaccaggaca

SEQ ID NO: 3326870 - DNA, 25 bp, Homo sapien
ggtaggttatttccactagctggca

SEQ ID NO: 3326871 - DNA, 25 bp, Homo sapien
ggacacaaagcaagtaccagtactt

SEQ ID NO: 3326872 - DNA, 25 bp, Homo sapien
tgctgcatcgaagaatgaaatcaat

SEQ ID NO: 3326873 - DNA, 25 bp, Homo sapien
catgctgcatcgaagaatgaaatca

SEQ ID NO: 3326874 - DNA, 25 bp, Homo sapien
tcatgctgcatcgaagaatgaaatc

SEQ ID NO: 3326875 - DNA, 25 bp, Homo sapien
cagaatttccaatagaaggggtact

SEQ ID NO: 3326876 - DNA, 25 bp, Homo sapien
ccttgggaaatagccagttgaaaag

SEQ ID NO: 3326877 - DNA, 25 bp, Homo sapien
tgtcaactgattcatgactggttca

SEQ ID NO: 3326878 - DNA, 25 bp, Homo sapien
cagtctaagctctaaaggttcatag

SEQ ID NO: 3326879 - DNA, 25 bp, Homo sapien
tatggcaaggtattctagaatggtc

SEQ ID NO: 3326880 - DNA, 25 bp, Homo sapien
agaaagttcgtatttccctcatgaa

SEQ ID NO: 3326881 - DNA, 25 bp, Homo sapien
ctggtatcagaaagttcgtatttcc

SEQ ID NO: 3326882 - DNA, 25 bp, Homo sapien
gagtctttcaagatgtgcaggttgc

SEQ ID NO: 3326883 - DNA, 25 bp, Homo sapien
tctttcaagatgtgcaggttgcttt

SEQ ID NO: 3326884 - DNA, 25 bp, Homo sapien
cactttcttagccaaaagcaactgg

SEQ ID NO: 3326885 - DNA, 25 bp, Homo sapien
gtgtgtttgactgatacttcattta

SEQ ID NO: 3326886 - DNA, 25 bp, Homo sapien
gcaactggtactccagctttgggtg

SEQ ID NO: 3326887 - DNA, 25 bp, Homo sapien
ggattagctttaaagtgtgtttgac

SEQ ID NO: 3326888 - DNA, 25 bp, Homo sapien
cgtatgatatgttgaggttaatttt

SEQ ID NO: 3326889 - DNA, 25 bp, Homo sapien
ctttttgtagcttctttagaaagca

SEQ ID NO: 3326890 - DNA, 25 bp, Homo sapien
tatgatatgttgaggttaattttcc

SEQ ID NO: 3326891 - DNA, 25 bp, Homo sapien
tgatatgttgaggttaattttcctt

SEQ ID NO: 3326892 - DNA, 25 bp, Homo sapien
tttaggatggagatagtagaaatgt

SEQ ID NO: 3326893 - DNA, 25 bp, Homo sapien
cttttaggatggagatagtagaaat

SEQ ID NO: 3326894 - DNA, 25 bp, Homo sapien
gatggagatagtagaaatgttgtca

SEQ ID NO: 3326895 - DNA, 25 bp, Homo sapien
taggatggagatagtagaaatgttg

SEQ ID NO: 3326896 - DNA, 25 bp, Homo sapien
catttttcactaatatttccaacag

SEQ ID NO: 3326897 - DNA, 25 bp, Homo sapien
ctgtagaaggaaattgtccagtaca

SEQ ID NO: 3326898 - DNA, 25 bp, Homo sapien
tagatttcatttgactgtagatttc

SEQ ID NO: 3326899 - DNA, 25 bp, Homo sapien
tatatgcctcctaaagatgtgacaa

SEQ ID NO: 3326900 - DNA, 25 bp, Homo sapien
gtgaacttcagcaaaactgaactgg

SEQ ID NO: 3326901 - DNA, 25 bp, Homo sapien
aaccacccaggagtgaacttcagca

SEQ ID NO: 3326902 - DNA, 25 bp, Homo sapien
tcaagttgtgtatctagaaaggtgt

SEQ ID NO: 3326903 - DNA, 25 bp, Homo sapien
gcctgttagggtcagtgtattcatg

SEQ ID NO: 3326904 - DNA, 25 bp, Homo sapien
gcatggaaataaaaggcactatcac

SEQ ID NO: 3326905 - DNA, 25 bp, Homo sapien
aggcactatcacaaccaattgcttt

SEQ ID NO: 3326906 - DNA, 25 bp, Homo sapien
catggaaataaaaggcactatcaca

SEQ ID NO: 3326907 - DNA, 25 bp, Homo sapien
cacaaccaattgctttatctgattt

SEQ ID NO: 3326908 - DNA, 25 bp, Homo sapien
tcttggagtcacatatgcttgtagt

SEQ ID NO: 3326909 - DNA, 25 bp, Homo sapien
ccatactggccttcaattgagcgaa

SEQ ID NO: 3326910 - DNA, 25 bp, Homo sapien
tactggcggacctgacaggttttgg

SEQ ID NO: 3326911 - DNA, 25 bp, Homo sapien
ctgtcatgatcaataaagtgagttc

SEQ ID NO: 3326912 - DNA, 25 bp, Homo sapien
ttcttctagatggatgccagttgtg

SEQ ID NO: 3326913 - DNA, 25 bp, Homo sapien
gacttgcctatccatatcctttgcc

SEQ ID NO: 3326914 - DNA, 25 bp, Homo sapien
gccagttgtgccaacagcaattttt

SEQ ID NO: 3326915 - DNA, 25 bp, Homo sapien
gaaatgtcatgcactaaattcccat

SEQ ID NO: 3326916 - DNA, 25 bp, Homo sapien
ccttgtagtatctgcctggcaccga

SEQ ID NO: 3326917 - DNA, 25 bp, Homo sapien
tgagttccagccttgtagtatctgc

SEQ ID NO: 3326918 - DNA, 25 bp, Homo sapien
tatctgcctggcaccgataagtggc

SEQ ID NO: 3326919 - DNA, 25 bp, Homo sapien
ggcaccgataagtggcaagaaggaa

SEQ ID NO: 3326920 - DNA, 25 bp, Homo sapien
caagtaaatctattggaacatcact

SEQ ID NO: 3326921 - DNA, 25 bp, Homo sapien
cacatcaagtaaatctattggaaca

SEQ ID NO: 3326922 - DNA, 25 bp, Homo sapien
tccacatcaagtaaatctattggaa

SEQ ID NO: 3326923 - DNA, 25 bp, Homo sapien
catcaagtaaatctattggaacatc

SEQ ID NO: 3326924 - DNA, 25 bp, Homo sapien
aataccttatactgcaaatgttcca

SEQ ID NO: 3326925 - DNA, 25 bp, Homo sapien
gataaggctgtaactggcatcatct

SEQ ID NO: 3326926 - DNA, 25 bp, Homo sapien
tgctttgcttgattgagaagactgt

SEQ ID NO: 3326927 - DNA, 25 bp, Homo sapien
tgcagtctgtacctctaagataagg

SEQ ID NO: 3326928 - DNA, 25 bp, Homo sapien
tggtccactttccttatgaatgggc

SEQ ID NO: 3326929 - DNA, 25 bp, Homo sapien
tattctgcatctcctgattaatttt

SEQ ID NO: 3326930 - DNA, 25 bp, Homo sapien
ttattctgcatctcctgattaattt

SEQ ID NO: 3326931 - DNA, 25 bp, Homo sapien
acaaccaccctggatagatgtgacg

SEQ ID NO: 3326932 - DNA, 25 bp, Homo sapien
tcatcatagctgtcttttcctacac

SEQ ID NO: 3326933 - DNA, 25 bp, Homo sapien
ctgaatatgtggacaccacgatttc

SEQ ID NO: 3326934 - DNA, 25 bp, Homo sapien
tagatgtgacgctttcagacaacat

SEQ ID NO: 3326935 - DNA, 25 bp, Homo sapien
ttttttagacaggacattgatctgt

SEQ ID NO: 3326936 - DNA, 25 bp, Homo sapien
ttagacaggacattgatctgttgcc

SEQ ID NO: 3326937 - DNA, 25 bp, Homo sapien
tagacaggacattgatctgttgccc

SEQ ID NO: 3326938 - DNA, 25 bp, Homo sapien
ttttagacaggacattgatctgttg

SEQ ID NO: 3326939 - DNA, 25 bp, Homo sapien
taggtagttcttagcaggcaaggct

SEQ ID NO: 3326940 - DNA, 25 bp, Homo sapien
taagcggctttcaagctatttggaa

SEQ ID NO: 3326941 - DNA, 25 bp, Homo sapien
taactaacactctaggtaagcggct

SEQ ID NO: 3326942 - DNA, 25 bp, Homo sapien
ttttaaaaacggcactggcaacaca

SEQ ID NO: 3326943 - DNA, 25 bp, Homo sapien
tatacacttccaccattccgtcatc

SEQ ID NO: 3326944 - DNA, 25 bp, Homo sapien
tctctcccaacaagtaaatctttaa

SEQ ID NO: 3326945 - DNA, 25 bp, Homo sapien
caatgtcaaagctgtcaatacacaa

SEQ ID NO: 3326946 - DNA, 25 bp, Homo sapien
cgtagaacaggttcatttgcattat

SEQ ID NO: 3326947 - DNA, 25 bp, Homo sapien
tttgaatttcccacttgcgtactgg

SEQ ID NO: 3326948 - DNA, 25 bp, Homo sapien
gatgtagtaatctgtataagcgcaa

SEQ ID NO: 3326949 - DNA, 25 bp, Homo sapien
tgtataagcgcaagttttccgtctg

SEQ ID NO: 3326950 - DNA, 25 bp, Homo sapien
tctgatgtcccaaacaaaaggtctt

SEQ ID NO: 3326951 - DNA, 25 bp, Homo sapien
taaaacacatagttgatttgtgaaa

SEQ ID NO: 3326952 - DNA, 25 bp, Homo sapien
tattaaaacacatagttgatttgtg

SEQ ID NO: 3326953 - DNA, 25 bp, Homo sapien
tttgtgaaaaataaaatcctgatta

SEQ ID NO: 3326954 - DNA, 25 bp, Homo sapien
ttgtgaaaaataaaatcctgattac

SEQ ID NO: 3326955 - DNA, 25 bp, Homo sapien
tagggggtccaggaacttcaactgc

SEQ ID NO: 3326956 - DNA, 25 bp, Homo sapien
catttccattgtgtagtgctaagac

SEQ ID NO: 3326957 - DNA, 25 bp, Homo sapien
cattgtgtagtgctaagacagtagg

SEQ ID NO: 3326958 - DNA, 25 bp, Homo sapien
cgccatttccattgtgtagtgctaa

SEQ ID NO: 3326959 - DNA, 25 bp, Homo sapien
tgatgccaagaaatggccatctgac

SEQ ID NO: 3326960 - DNA, 25 bp, Homo sapien
gccatctgactatggaattccaaag

SEQ ID NO: 3326961 - DNA, 25 bp, Homo sapien
ggtaaaaacctcatagactcactgg

SEQ ID NO: 3326962 - DNA, 25 bp, Homo sapien
tattttaagcatcctatagagtgtg

SEQ ID NO: 3326963 - DNA, 25 bp, Homo sapien
gtaaaggttctctgtagtcaaagta

SEQ ID NO: 3326964 - DNA, 25 bp, Homo sapien
cagaaattgtgtatggtgaggcaaa

SEQ ID NO: 3326965 - DNA, 25 bp, Homo sapien
caaagtactccattctgataatagc

SEQ ID NO: 3326966 - DNA, 25 bp, Homo sapien
cagtaaccactaatttatctcaagt

SEQ ID NO: 3326967 - DNA, 25 bp, Homo sapien
tacgagataatctttccactggaag

SEQ ID NO: 3326968 - DNA, 25 bp, Homo sapien
tcctggcaggccaatacaggtgtga

SEQ ID NO: 3326969 - DNA, 25 bp, Homo sapien
taataatgttggtctttgcagtcac

SEQ ID NO: 3326970 - DNA, 25 bp, Homo sapien
ttgcactgagaaagaggtctgagcc

SEQ ID NO: 3326971 - DNA, 25 bp, Homo sapien
tcttactaccacactaaattgcctg

SEQ ID NO: 3326972 - DNA, 25 bp, Homo sapien
gcatatgattgaatagtcctcttac

SEQ ID NO: 3326973 - DNA, 25 bp, Homo sapien
cttgggtgagctaaaatgtcttgac

SEQ ID NO: 3326974 - DNA, 25 bp, Homo sapien
ttattaagtggcctcactttgtggc

SEQ ID NO: 3326975 - DNA, 25 bp, Homo sapien
cagttgtttctagcctaagagtctg

SEQ ID NO: 3326976 - DNA, 25 bp, Homo sapien
catcccaaacatcaggagatgtgct

SEQ ID NO: 3326977 - DNA, 25 bp, Homo sapien
gagtctggctgattatataacttgg

SEQ ID NO: 3326978 - DNA, 25 bp, Homo sapien
aattacatatttccacttatcatgg

SEQ ID NO: 3326979 - DNA, 25 bp, Homo sapien
taagatatgatacttagttgcctca

SEQ ID NO: 3326980 - DNA, 25 bp, Homo sapien
gttgcctcacatctatccaaaatat

SEQ ID NO: 3326981 - DNA, 25 bp, Homo sapien
ccagaaagcctattaagatatgata

SEQ ID NO: 3326982 - DNA, 25 bp, Homo sapien
tgatacttagttgcctcacatctat

SEQ ID NO: 3326983 - DNA, 25 bp, Homo sapien
gctttaatgctttcagtgaggtttg

SEQ ID NO: 3326984 - DNA, 25 bp, Homo sapien
gccttgcaatcttcggcccgggtaa

SEQ ID NO: 3326985 - DNA, 25 bp, Homo sapien
tctcctgaggtgtgttgataacccc

SEQ ID NO: 3326986 - DNA, 25 bp, Homo sapien
aatctcagatgctgcagcaataaaa

SEQ ID NO: 3326987 - DNA, 25 bp, Homo sapien
caaagcacataactaccccatcatg

SEQ ID NO: 3326988 - DNA, 25 bp, Homo sapien
aagcacataactaccccatcatgat

SEQ ID NO: 3326989 - DNA, 25 bp, Homo sapien
ttcatgccaaagcacataactaccc

SEQ ID NO: 3326990 - DNA, 25 bp, Homo sapien
atgccaaagcacataactaccccat

SEQ ID NO: 3326991 - DNA, 25 bp, Homo sapien
tgtgtagctctgtgtcttgaggcag

SEQ ID NO: 3326992 - DNA, 25 bp, Homo sapien
tagcttcatagtcttctgagatgtt

SEQ ID NO: 3326993 - DNA, 25 bp, Homo sapien
tgtcttgaggcaggaattagcttca

SEQ ID NO: 3326994 - DNA, 25 bp, Homo sapien
tagtcttctgagatgttactcccac

SEQ ID NO: 3326995 - DNA, 25 bp, Homo sapien
gtgctgagaggtcggcacccagccc

SEQ ID NO: 3326996 - DNA, 25 bp, Homo sapien
ccctcggaccgtcacagacgaaagg

SEQ ID NO: 3326997 - DNA, 25 bp, Homo sapien
accgtcacagacgaaagggagctgc

SEQ ID NO: 3326998 - DNA, 25 bp, Homo sapien
cagacgaaagggagctgcccaaagg

SEQ ID NO: 3326999 - DNA, 25 bp, Homo sapien
accgagactttcgtcagtggaagga

SEQ ID NO: 3327000 - DNA, 25 bp, Homo sapien
ctggcgaccgagactttcgtcagtg

SEQ ID NO: 3327001 - DNA, 25 bp, Homo sapien
gaccgagactttcgtcagtggaagg

SEQ ID NO: 3327002 - DNA, 25 bp, Homo sapien
gcgaccgagactttcgtcagtggaa

SEQ ID NO: 3327003 - DNA, 25 bp, Homo sapien
aatccattcggtttaaaatcagatc

SEQ ID NO: 3327004 - DNA, 25 bp, Homo sapien
ataatccattcggtttaaaatcaga

SEQ ID NO: 3327005 - DNA, 25 bp, Homo sapien
agataatccattcggtttaaaatca

SEQ ID NO: 3327006 - DNA, 25 bp, Homo sapien
gcagataatccattcggtttaaaat

SEQ ID NO: 3327007 - DNA, 25 bp, Homo sapien
taagcagcgccggacaagaacagga

SEQ ID NO: 3327008 - DNA, 25 bp, Homo sapien
ttcgggcccgcaggcctccgaccca

SEQ ID NO: 3327009 - DNA, 25 bp, Homo sapien
agctaccgcgcctaggtcctgggct

SEQ ID NO: 3327010 - DNA, 25 bp, Homo sapien
gcaggcctccgacccagtcagaagg

SEQ ID NO: 3327011 - DNA, 25 bp, Homo sapien
gcggcccagggctaatactggactt

SEQ ID NO: 3327012 - DNA, 25 bp, Homo sapien
gacagcgtgttccaatcagaggcgg

SEQ ID NO: 3327013 - DNA, 25 bp, Homo sapien
gattctgaccgatttcactctgaca

SEQ ID NO: 3327014 - DNA, 25 bp, Homo sapien
catacagggcggtttccacagagac

SEQ ID NO: 3327015 - DNA, 25 bp, Homo sapien
aacacgctagtggtggtcagctgag

SEQ ID NO: 3327016 - DNA, 25 bp, Homo sapien
ccttatgttatggtgctaaagcaac

SEQ ID NO: 3327017 - DNA, 25 bp, Homo sapien
ccattatgagtataagttaaacaac

SEQ ID NO: 3327018 - DNA, 25 bp, Homo sapien
gaattaccatgcacctcagtaattt

SEQ ID NO: 3327019 - DNA, 25 bp, Homo sapien
taagtctaagaagcactttgagtgt

SEQ ID NO: 3327020 - DNA, 25 bp, Homo sapien
caacttttcgaacaataagtctaag

SEQ ID NO: 3327021 - DNA, 25 bp, Homo sapien
tcgaacaataagtctaagaagcact

SEQ ID NO: 3327022 - DNA, 25 bp, Homo sapien
caataagtctaagaagcactttgag

SEQ ID NO: 3327023 - DNA, 25 bp, Homo sapien
tgtctttccaagtacgcccatagtc

SEQ ID NO: 3327024 - DNA, 25 bp, Homo sapien
cattaaagtcaagaggcattgcgga

SEQ ID NO: 3327025 - DNA, 25 bp, Homo sapien
caatcattgtaagcaacgatggcaa

SEQ ID NO: 3327026 - DNA, 25 bp, Homo sapien
tacgacttgacagcaactgactgca

SEQ ID NO: 3327027 - DNA, 25 bp, Homo sapien
cagtggttctaggattatcagtgac

SEQ ID NO: 3327028 - DNA, 25 bp, Homo sapien
aacctcttcagaacttggacaaggg

SEQ ID NO: 3327029 - DNA, 25 bp, Homo sapien
catagctggttgtaaaatgtcttca

SEQ ID NO: 3327030 - DNA, 25 bp, Homo sapien
gaatgtcttaccaagtcatagctgg

SEQ ID NO: 3327031 - DNA, 25 bp, Homo sapien
gcaaagatgtggagtttactctaaa

SEQ ID NO: 3327032 - DNA, 25 bp, Homo sapien
gaactgatagtctcttggaggcaaa

SEQ ID NO: 3327033 - DNA, 25 bp, Homo sapien
tggtatgccactgtaatgtcaaagc

SEQ ID NO: 3327034 - DNA, 25 bp, Homo sapien
agtaatattgggcttttcaacacaa

SEQ ID NO: 3327035 - DNA, 25 bp, Homo sapien
cacatctcagcatgctgggattcag

SEQ ID NO: 3327036 - DNA, 25 bp, Homo sapien
ctcagcatgctgggattcagtttct

SEQ ID NO: 3327037 - DNA, 25 bp, Homo sapien
agcatgctgggattcagtttctcac

SEQ ID NO: 3327038 - DNA, 25 bp, Homo sapien
tcattcacatctcagcatgctggga

SEQ ID NO: 3327039 - DNA, 25 bp, Homo sapien
caaaagttcataacgaaggctggag

SEQ ID NO: 3327040 - DNA, 25 bp, Homo sapien
gttcataacgaaggctggagatatc

SEQ ID NO: 3327041 - DNA, 25 bp, Homo sapien
cttccaaaagttcataacgaaggct

SEQ ID NO: 3327042 - DNA, 25 bp, Homo sapien
tttatgaattagaatggctaattcc

SEQ ID NO: 3327043 - DNA, 25 bp, Homo sapien
ttagggaaggcaatggcaatggaca

SEQ ID NO: 3327044 - DNA, 25 bp, Homo sapien
cctttctgactacaagggagtccct

SEQ ID NO: 3327045 - DNA, 25 bp, Homo sapien
cacaaaggactaatgcgtaaggaag

SEQ ID NO: 3327046 - DNA, 25 bp, Homo sapien
tatctcccattgctaggatcaaagg

SEQ ID NO: 3327047 - DNA, 25 bp, Homo sapien
ctttcaaaacataccgctttataag

SEQ ID NO: 3327048 - DNA, 25 bp, Homo sapien
caaaacataccgctttataagtctt

SEQ ID NO: 3327049 - DNA, 25 bp, Homo sapien
tcaaaacataccgctttataagtct

SEQ ID NO: 3327050 - DNA, 25 bp, Homo sapien
gtgctttcaaaacataccgctttat

SEQ ID NO: 3327051 - DNA, 25 bp, Homo sapien
gattgagaatgctgttaaaactgtg

SEQ ID NO: 3327052 - DNA, 25 bp, Homo sapien
ttcaaaaactcttgagttagactga

SEQ ID NO: 3327053 - DNA, 25 bp, Homo sapien
ttggctgattgagaatgctgttaaa

SEQ ID NO: 3327054 - DNA, 25 bp, Homo sapien
aaaactcttgagttagactgagtga

SEQ ID NO: 3327055 - DNA, 25 bp, Homo sapien
ggataaccaaagttttgaacgagca

SEQ ID NO: 3327056 - DNA, 25 bp, Homo sapien
gggaaagttaacaattcgcatgatg

SEQ ID NO: 3327057 - DNA, 25 bp, Homo sapien
gattttggactaggaactagactga

SEQ ID NO: 3327058 - DNA, 25 bp, Homo sapien
tggactttgagttacccattcccat

SEQ ID NO: 3327059 - DNA, 25 bp, Homo sapien
ctgtgctgcccacggtgatggagat

SEQ ID NO: 3327060 - DNA, 25 bp, Homo sapien
cacggtgatggagataaccacccta

SEQ ID NO: 3327061 - DNA, 25 bp, Homo sapien
cccaaatgtcacataagcccctgag

SEQ ID NO: 3327062 - DNA, 25 bp, Homo sapien
aatgtcacataagcccctgagtgcc

SEQ ID NO: 3327063 - DNA, 25 bp, Homo sapien
ttccataaagaacgtatccaatatt

SEQ ID NO: 3327064 - DNA, 25 bp, Homo sapien
tatttgagcacaacggaagtcactt

SEQ ID NO: 3327065 - DNA, 25 bp, Homo sapien
gtcacttcagacaacccaaatattg

SEQ ID NO: 3327066 - DNA, 25 bp, Homo sapien
tagcatgttgagtaaaacgaccacc

SEQ ID NO: 3327067 - DNA, 25 bp, Homo sapien
gggtcagaagggagccatttatctc

SEQ ID NO: 3327068 - DNA, 25 bp, Homo sapien
gcagcattaactttagccccaaggt

SEQ ID NO: 3327069 - DNA, 25 bp, Homo sapien
tacgcaatccgagagaagctgagca

SEQ ID NO: 3327070 - DNA, 25 bp, Homo sapien
gcacaacagctatggcataaaggcc

SEQ ID NO: 3327071 - DNA, 25 bp, Homo sapien
gggagtgtcacttcactgaggtcac

SEQ ID NO: 3327072 - DNA, 25 bp, Homo sapien
aaatgtattccctaggtccttccag

SEQ ID NO: 3327073 - DNA, 25 bp, Homo sapien
ccagccagagctctttacattcaga

SEQ ID NO: 3327074 - DNA, 25 bp, Homo sapien
cttcgttgcctgaaggaaagctagg

SEQ ID NO: 3327075 - DNA, 25 bp, Homo sapien
tggtgatgccttcgaacctgtctga

SEQ ID NO: 3327076 - DNA, 25 bp, Homo sapien
gcattgaacacaagcagacccagga

SEQ ID NO: 3327077 - DNA, 25 bp, Homo sapien
tcagtaactgtgatattgggcagcg

SEQ ID NO: 3327078 - DNA, 25 bp, Homo sapien
caagaacccagaccataattagcat

SEQ ID NO: 3327079 - DNA, 25 bp, Homo sapien
gaggttctcataccagatcgtcaag

SEQ ID NO: 3327080 - DNA, 25 bp, Homo sapien
gctcccttaggcctgagaggttctc

SEQ ID NO: 3327081 - DNA, 25 bp, Homo sapien
aaggtgcgatccagtagccaatggc

SEQ ID NO: 3327082 - DNA, 25 bp, Homo sapien
gaccagcacaacgagacacttgata

SEQ ID NO: 3327083 - DNA, 25 bp, Homo sapien
aaagtctttgcattgcatggagagc

SEQ ID NO: 3327084 - DNA, 25 bp, Homo sapien
taatgaagctttgtgcctgtgtacc

SEQ ID NO: 3327085 - DNA, 25 bp, Homo sapien
catacttaatggcaagtttgacacg

SEQ ID NO: 3327086 - DNA, 25 bp, Homo sapien
tgagtctcggcagagatccagcaca

SEQ ID NO: 3327087 - DNA, 25 bp, Homo sapien
ttccaggccactggaactaacacat

SEQ ID NO: 3327088 - DNA, 25 bp, Homo sapien
ttgcatatttatacactgccatgga

SEQ ID NO: 3327089 - DNA, 25 bp, Homo sapien
tggaactaacacattgctaaaaata

SEQ ID NO: 3327090 - DNA, 25 bp, Homo sapien
ccaggccactggaactaacacattg

SEQ ID NO: 3327091 - DNA, 25 bp, Homo sapien
catttgttctaatgaaggtgtcaat

SEQ ID NO: 3327092 - DNA, 25 bp, Homo sapien
ttctaatgaaggtgtcaatgaccat

SEQ ID NO: 3327093 - DNA, 25 bp, Homo sapien
ctgccataaggaagtcagctggtag

SEQ ID NO: 3327094 - DNA, 25 bp, Homo sapien
taaggaagtcagctggtagcattcc

SEQ ID NO: 3327095 - DNA, 25 bp, Homo sapien
atttttggagactccagttctactt

SEQ ID NO: 3327096 - DNA, 25 bp, Homo sapien
catttttggagactccagttctact

SEQ ID NO: 3327097 - DNA, 25 bp, Homo sapien
tggagcgaacggtggcagagcaggc

SEQ ID NO: 3327098 - DNA, 25 bp, Homo sapien
tcagtccctcgtgatttcacattca

SEQ ID NO: 3327099 - DNA, 25 bp, Homo sapien
cagccggggtagagcgcaaagctta

SEQ ID NO: 3327100 - DNA, 25 bp, Homo sapien
ttcactgggcaaaaccgaatgtgga

SEQ ID NO: 3327101 - DNA, 25 bp, Homo sapien
cattgatcctcgagcgtgagtggct

SEQ ID NO: 3327102 - DNA, 25 bp, Homo sapien
tagtccacgcagttgacgttcagcg

SEQ ID NO: 3327103 - DNA, 25 bp, Homo sapien
tcgttgctgagctctagggccgtaa

SEQ ID NO: 3327104 - DNA, 25 bp, Homo sapien
taagcgtagaagtcgtcgtcctgca

SEQ ID NO: 3327105 - DNA, 25 bp, Homo sapien
cccctgacagcctggcgccggccct

SEQ ID NO: 3327106 - DNA, 25 bp, Homo sapien
tgacagcctggcgccggcccttctc

SEQ ID NO: 3327107 - DNA, 25 bp, Homo sapien
cctggcgccggcccttctcccgcat

SEQ ID NO: 3327108 - DNA, 25 bp, Homo sapien
ccctgacagcctggcgccggccctt

SEQ ID NO: 3327109 - DNA, 25 bp, Homo sapien
atgcgtctcagggatgggcttccct

SEQ ID NO: 3327110 - DNA, 25 bp, Homo sapien
tgcgtctcagggatgggcttccctc

SEQ ID NO: 3327111 - DNA, 25 bp, Homo sapien
catgcgtctcagggatgggcttccc

SEQ ID NO: 3327112 - DNA, 25 bp, Homo sapien
tcatgcgtctcagggatgggcttcc

SEQ ID NO: 3327113 - DNA, 25 bp, Homo sapien
ctaatcagtagcaacgataaaacaa

SEQ ID NO: 3327114 - DNA, 25 bp, Homo sapien
tgctagatcccagaaggaagccggc

SEQ ID NO: 3327115 - DNA, 25 bp, Homo sapien
cattgaggcttgcaggtacttgaca

SEQ ID NO: 3327116 - DNA, 25 bp, Homo sapien
gataccgttgctaactactcgcctg

SEQ ID NO: 3327117 - DNA, 25 bp, Homo sapien
tactcgcctgaaagtgacacctgtg

SEQ ID NO: 3327118 - DNA, 25 bp, Homo sapien
tctgacagcaaagccgtgatgctta

SEQ ID NO: 3327119 - DNA, 25 bp, Homo sapien
gacagcaaagccgtgatgcttactg

SEQ ID NO: 3327120 - DNA, 25 bp, Homo sapien
cagcaaagccgtgatgcttactgtc

SEQ ID NO: 3327121 - DNA, 25 bp, Homo sapien
acttctgacagcaaagccgtgatgc

SEQ ID NO: 3327122 - DNA, 25 bp, Homo sapien
tgatttttgtctccttgattattgt

SEQ ID NO: 3327123 - DNA, 25 bp, Homo sapien
tttttgtctccttgattattgtctc

SEQ ID NO: 3327124 - DNA, 25 bp, Homo sapien
gattattgtctcctgtgacaatcat

SEQ ID NO: 3327125 - DNA, 25 bp, Homo sapien
tgattattgtctcctgtgacaatca

SEQ ID NO: 3327126 - DNA, 25 bp, Homo sapien
tgttctaccggcaggtccagcctga

SEQ ID NO: 3327127 - DNA, 25 bp, Homo sapien
tgaccaggcgcagactctgcgcgcg

SEQ ID NO: 3327128 - DNA, 25 bp, Homo sapien
ggtcatcccggaggtctcggcctcg

SEQ ID NO: 3327129 - DNA, 25 bp, Homo sapien
tatgggatctactcccagccactga

SEQ ID NO: 3327130 - DNA, 25 bp, Homo sapien
cggcgggcagtagccgtgcggctcc

SEQ ID NO: 3327131 - DNA, 25 bp, Homo sapien
agggcggcgggcagtagccgtgcgg

SEQ ID NO: 3327132 - DNA, 25 bp, Homo sapien
ggcggcgggcagtagccgtgcggct

SEQ ID NO: 3327133 - DNA, 25 bp, Homo sapien
aagggcggcgggcagtagccgtgcg

SEQ ID NO: 3327134 - DNA, 25 bp, Homo sapien
cggcggcgctgcggctccgcgccct

SEQ ID NO: 3327135 - DNA, 25 bp, Homo sapien
ggcgctgcggctccgcgccctcgtc

SEQ ID NO: 3327136 - DNA, 25 bp, Homo sapien
gcggcggcgctgcggctccgcgccc

SEQ ID NO: 3327137 - DNA, 25 bp, Homo sapien
gcggcgctgcggctccgcgccctcg

SEQ ID NO: 3327138 - DNA, 25 bp, Homo sapien
tcctcctccggcgccgggaaggtca

SEQ ID NO: 3327139 - DNA, 25 bp, Homo sapien
ttgcttgttctttgcacttcctgac

SEQ ID NO: 3327140 - DNA, 25 bp, Homo sapien
ccttgcttgttctttgcacttcctg

SEQ ID NO: 3327141 - DNA, 25 bp, Homo sapien
cttgcttgttctttgcacttcctga

SEQ ID NO: 3327142 - DNA, 25 bp, Homo sapien
ctgcggtccgagtgtgggggtgccg

SEQ ID NO: 3327143 - DNA, 25 bp, Homo sapien
cgcgccggctgcggtccgagtgtgg

SEQ ID NO: 3327144 - DNA, 25 bp, Homo sapien
ccgagtgtgggggtgccggctgccg

SEQ ID NO: 3327145 - DNA, 25 bp, Homo sapien
tgggggtgccggctgccggcctcct

SEQ ID NO: 3327146 - DNA, 25 bp, Homo sapien
ggagcggagagcgtcgcggcccgcg

SEQ ID NO: 3327147 - DNA, 25 bp, Homo sapien
gcccagggcgggaaggcaggagcgg

SEQ ID NO: 3327148 - DNA, 25 bp, Homo sapien
aggcaggagcggagagcgtcgcggc

SEQ ID NO: 3327149 - DNA, 25 bp, Homo sapien
cccagggcgggaaggcaggagcgga

SEQ ID NO: 3327150 - DNA, 25 bp, Homo sapien
gcggccgtggctgcgacgaggaagc

SEQ ID NO: 3327151 - DNA, 25 bp, Homo sapien
ccatcaaaccgtgggagcagctgcc

SEQ ID NO: 3327152 - DNA, 25 bp, Homo sapien
gcccaccatcaaaccgtgggagcag

SEQ ID NO: 3327153 - DNA, 25 bp, Homo sapien
gccgcccaccatcaaaccgtgggag

SEQ ID NO: 3327154 - DNA, 25 bp, Homo sapien
cgacagcatcacttgctaggacagc

SEQ ID NO: 3327155 - DNA, 25 bp, Homo sapien
ctgtctccgacagcatcacttgcta

SEQ ID NO: 3327156 - DNA, 25 bp, Homo sapien
ccgtctcctgtctccgacagcatca

SEQ ID NO: 3327157 - DNA, 25 bp, Homo sapien
tctccgacagcatcacttgctagga

SEQ ID NO: 3327158 - DNA, 25 bp, Homo sapien
gagtcatcttttacatccagaccag

SEQ ID NO: 3327159 - DNA, 25 bp, Homo sapien
cagttcagatactcatgatccccag

SEQ ID NO: 3327160 - DNA, 25 bp, Homo sapien
agctcccatcagttgcacctctgaa

SEQ ID NO: 3327161 - DNA, 25 bp, Homo sapien
ccagcccatgttcttgcagcagttt

SEQ ID NO: 3327162 - DNA, 25 bp, Homo sapien
aggccagttagcttcccatgaattt

SEQ ID NO: 3327163 - DNA, 25 bp, Homo sapien
ggccagttagcttcccatgaatttc

SEQ ID NO: 3327164 - DNA, 25 bp, Homo sapien
gaaagcaagttacaacacaggaaga

SEQ ID NO: 3327165 - DNA, 25 bp, Homo sapien
tggctgtccagaagcagggcagtaa

SEQ ID NO: 3327166 - DNA, 25 bp, Homo sapien
caatttgccttcaaggtctgatagg

SEQ ID NO: 3327167 - DNA, 25 bp, Homo sapien
tctgataggtgagtctggctgtcca

SEQ ID NO: 3327168 - DNA, 25 bp, Homo sapien
tctgaacgcaaaccatagagagcat

SEQ ID NO: 3327169 - DNA, 25 bp, Homo sapien
tcatctgtcatataagtctgaacgc

SEQ ID NO: 3327170 - DNA, 25 bp, Homo sapien
tataagtctgaacgcaaaccataga

SEQ ID NO: 3327171 - DNA, 25 bp, Homo sapien
tgtcatataagtctgaacgcaaacc

SEQ ID NO: 3327172 - DNA, 25 bp, Homo sapien
ataactgataaggcacgtttaaggc

SEQ ID NO: 3327173 - DNA, 25 bp, Homo sapien
ataataactgataaggcacgtttaa

SEQ ID NO: 3327174 - DNA, 25 bp, Homo sapien
aataactgataaggcacgtttaagg

SEQ ID NO: 3327175 - DNA, 25 bp, Homo sapien
taataactgataaggcacgtttaag

SEQ ID NO: 3327176 - DNA, 25 bp, Homo sapien
tctgtcactaacacaatgagaaaga

SEQ ID NO: 3327177 - DNA, 25 bp, Homo sapien
accacttaggcaaggtgattggagg

SEQ ID NO: 3327178 - DNA, 25 bp, Homo sapien
ccttatctgtcactaacacaatgag

SEQ ID NO: 3327179 - DNA, 25 bp, Homo sapien
ggccggtgaagcaccccagggacca

SEQ ID NO: 3327180 - DNA, 25 bp, Homo sapien
cctttatgaagtttttagaatatct

SEQ ID NO: 3327181 - DNA, 25 bp, Homo sapien
cgccagttatcacggaatttctcca

SEQ ID NO: 3327182 - DNA, 25 bp, Homo sapien
ttagaatatctcaaggaataaaact

SEQ ID NO: 3327183 - DNA, 25 bp, Homo sapien
ccccaaccattaggctttctgagtt

SEQ ID NO: 3327184 - DNA, 25 bp, Homo sapien
ggtagcttgatcaggatagcactga

SEQ ID NO: 3327185 - DNA, 25 bp, Homo sapien
tgcagccttgtagtatactttgaaa

SEQ ID NO: 3327186 - DNA, 25 bp, Homo sapien
cagccttgtagtatactttgaaatc

SEQ ID NO: 3327187 - DNA, 25 bp, Homo sapien
gcgtgatgcctccagtttcattctt

SEQ ID NO: 3327188 - DNA, 25 bp, Homo sapien
gggcttatgcttgcatgaggataaa

SEQ ID NO: 3327189 - DNA, 25 bp, Homo sapien
gcttgcatgaggataaaggaagcca

SEQ ID NO: 3327190 - DNA, 25 bp, Homo sapien
tatgcttgcatgaggataaaggaag

SEQ ID NO: 3327191 - DNA, 25 bp, Homo sapien
ttaactcaaggtcataatgccccca

SEQ ID NO: 3327192 - DNA, 25 bp, Homo sapien
tctgcccacttgagagtgatctgtc

SEQ ID NO: 3327193 - DNA, 25 bp, Homo sapien
cttgtctttacaagatctgcccact

SEQ ID NO: 3327194 - DNA, 25 bp, Homo sapien
cagacaagatcctgtgtaaagatct

SEQ ID NO: 3327195 - DNA, 25 bp, Homo sapien
ctcaacatcagaggcaggccgaggg

SEQ ID NO: 3327196 - DNA, 25 bp, Homo sapien
tagcccgtgggtctgggatcgatcc

SEQ ID NO: 3327197 - DNA, 25 bp, Homo sapien
tcgatcctgctgatgtgagtccagt

SEQ ID NO: 3327198 - DNA, 25 bp, Homo sapien
ctaatgtgtctccgggacagacccc

SEQ ID NO: 3327199 - DNA, 25 bp, Homo sapien
ggctccaggtatctgtttaatcaca

SEQ ID NO: 3327200 - DNA, 25 bp, Homo sapien
gctataggaacagattttttagaat

SEQ ID NO: 3327201 - DNA, 25 bp, Homo sapien
tgtgaccttgaccttgagaccatga

SEQ ID NO: 3327202 - DNA, 25 bp, Homo sapien
agaccatgagacctaatgtagtttg

SEQ ID NO: 3327203 - DNA, 25 bp, Homo sapien
agtttgctataggaacagatttttt

SEQ ID NO: 3327204 - DNA, 25 bp, Homo sapien
gaaagctgccttggcagaaggatga

SEQ ID NO: 3327205 - DNA, 25 bp, Homo sapien
tgagtccatctgacttaagtcctct

SEQ ID NO: 3327206 - DNA, 25 bp, Homo sapien
gctttactaacaggttcccagagtg

SEQ ID NO: 3327207 - DNA, 25 bp, Homo sapien
gactggttaaggtgtgccactgtac

SEQ ID NO: 3327208 - DNA, 25 bp, Homo sapien
gaacagtcctacctgcttggtacca

SEQ ID NO: 3327209 - DNA, 25 bp, Homo sapien
taatttcccctcgattccacaggag

SEQ ID NO: 3327210 - DNA, 25 bp, Homo sapien
tcagggaactctatcaagccatacc

SEQ ID NO: 3327211 - DNA, 25 bp, Homo sapien
tcagttattactgcctcggagctcc

SEQ ID NO: 3327212 - DNA, 25 bp, Homo sapien
ggtgtttacagcagtggcgatactc

SEQ ID NO: 3327213 - DNA, 25 bp, Homo sapien
gggtgtttacagcagtggcgatact

SEQ ID NO: 3327214 - DNA, 25 bp, Homo sapien
ggttatagggtgtttacagcagtgg

SEQ ID NO: 3327215 - DNA, 25 bp, Homo sapien
agggtgtttacagcagtggcgatac

SEQ ID NO: 3327216 - DNA, 25 bp, Homo sapien
ctcgtccacatactggggtgtccca

SEQ ID NO: 3327217 - DNA, 25 bp, Homo sapien
aggaactgctcgtccacatactggg

SEQ ID NO: 3327218 - DNA, 25 bp, Homo sapien
cgtccacatactggggtgtcccagg

SEQ ID NO: 3327219 - DNA, 25 bp, Homo sapien
acaggaactgctcgtccacatactg

SEQ ID NO: 3327220 - DNA, 25 bp, Homo sapien
attaaatgctgtggcaaatatccca

SEQ ID NO: 3327221 - DNA, 25 bp, Homo sapien
cttgaggacgaggaggggtcttctc

SEQ ID NO: 3327222 - DNA, 25 bp, Homo sapien
catgatgctggaatattacccagga

SEQ ID NO: 3327223 - DNA, 25 bp, Homo sapien
taaacatgattgagtctgtttgttt

SEQ ID NO: 3327224 - DNA, 25 bp, Homo sapien
tattacccaggaaataaacatgatt

SEQ ID NO: 3327225 - DNA, 25 bp, Homo sapien
ttcccatgatgctggaatattaccc

SEQ ID NO: 3327226 - DNA, 25 bp, Homo sapien
agtggctattcactaactagatccc

SEQ ID NO: 3327227 - DNA, 25 bp, Homo sapien
caaactggcagtcccgggaggtcac

SEQ ID NO: 3327228 - DNA, 25 bp, Homo sapien
attcactaactagatcccactgctg

SEQ ID NO: 3327229 - DNA, 25 bp, Homo sapien
gcaaactggcagtcccgggaggtca

SEQ ID NO: 3327230 - DNA, 25 bp, Homo sapien
tgtgaggtacacaatggacacagca

SEQ ID NO: 3327231 - DNA, 25 bp, Homo sapien
tgttgtgaggtacacaatggacaca

SEQ ID NO: 3327232 - DNA, 25 bp, Homo sapien
tcctgttgtgaggtacacaatggac

SEQ ID NO: 3327233 - DNA, 25 bp, Homo sapien
agttcctgttgtgaggtacacaatg

SEQ ID NO: 3327234 - DNA, 25 bp, Homo sapien
ggaagccagtcagcccaaacaatac

SEQ ID NO: 3327235 - DNA, 25 bp, Homo sapien
tcagcccaaacaatacccactacag

SEQ ID NO: 3327236 - DNA, 25 bp, Homo sapien
tggaagccagtcagcccaaacaata

SEQ ID NO: 3327237 - DNA, 25 bp, Homo sapien
gcccaaacaatacccactacagagg

SEQ ID NO: 3327238 - DNA, 25 bp, Homo sapien
tcaaatgcacctgtccttggattta

SEQ ID NO: 3327239 - DNA, 25 bp, Homo sapien
cttggatttaaaacttgttgagtca

SEQ ID NO: 3327240 - DNA, 25 bp, Homo sapien
tctgccctcttcaaatgcacctgtc

SEQ ID NO: 3327241 - DNA, 25 bp, Homo sapien
cctcttcaaatgcacctgtccttgg

SEQ ID NO: 3327242 - DNA, 25 bp, Homo sapien
cagcttgttcttactagtgcaggac

SEQ ID NO: 3327243 - DNA, 25 bp, Homo sapien
tccttaggcatggatgtgagtccct

SEQ ID NO: 3327244 - DNA, 25 bp, Homo sapien
ttatggtctgccttacccactgggc

SEQ ID NO: 3327245 - DNA, 25 bp, Homo sapien
tagtgtcttcagactgccataccgg

SEQ ID NO: 3327246 - DNA, 25 bp, Homo sapien
tgggttaggattggcttggcaatgc

SEQ ID NO: 3327247 - DNA, 25 bp, Homo sapien
atgatttggctctctatcattcatt

SEQ ID NO: 3327248 - DNA, 25 bp, Homo sapien
ggttaggattggcttggcaatgcag

SEQ ID NO: 3327249 - DNA, 25 bp, Homo sapien
gatttggctctctatcattcatttt

SEQ ID NO: 3327250 - DNA, 25 bp, Homo sapien
gtggctataatactgatgtctctga

SEQ ID NO: 3327251 - DNA, 25 bp, Homo sapien
ctgattctccaaccggcagtggcta

SEQ ID NO: 3327252 - DNA, 25 bp, Homo sapien
tcttccatgtgaccggacaagccct

SEQ ID NO: 3327253 - DNA, 25 bp, Homo sapien
gagtgctgacatccaataattcttc

SEQ ID NO: 3327254 - DNA, 25 bp, Homo sapien
gtattccattacacatacttacaca

SEQ ID NO: 3327255 - DNA, 25 bp, Homo sapien
aagactgtttgaatctcataacctc

SEQ ID NO: 3327256 - DNA, 25 bp, Homo sapien
gggaagtacaccacaatccagctgt

SEQ ID NO: 3327257 - DNA, 25 bp, Homo sapien
tcaaacttaacttagacctcagaaa

SEQ ID NO: 3327258 - DNA, 25 bp, Homo sapien
tcataacctcttgcatgcatttgtc

SEQ ID NO: 3327259 - DNA, 25 bp, Homo sapien
tatcacctaacacctcgagtagggc

SEQ ID NO: 3327260 - DNA, 25 bp, Homo sapien
ccttcaacctttaggagagcaaaga

SEQ ID NO: 3327261 - DNA, 25 bp, Homo sapien
tacttccggatgcaaattacgtcta

SEQ ID NO: 3327262 - DNA, 25 bp, Homo sapien
tacatgccgaaatttgttgggtgac

SEQ ID NO: 3327263 - DNA, 25 bp, Homo sapien
ttgttcgctcactggccaagcttca

SEQ ID NO: 3327264 - DNA, 25 bp, Homo sapien
gcttcaggacgtgtgaggtagtttt

SEQ ID NO: 3327265 - DNA, 25 bp, Homo sapien
gccaagcttcaggacgtgtgaggta

SEQ ID NO: 3327266 - DNA, 25 bp, Homo sapien
catgattgttcgctcactggccaag

SEQ ID NO: 3327267 - DNA, 25 bp, Homo sapien
tggtcggcgtctcttccctaggtga

SEQ ID NO: 3327268 - DNA, 25 bp, Homo sapien
tggacccggtccttgtgttcggaga

SEQ ID NO: 3327269 - DNA, 25 bp, Homo sapien
tgttcggagaacagagtcacccagg

SEQ ID NO: 3327270 - DNA, 25 bp, Homo sapien
ctaggtgacgcaagacgcggagctc

SEQ ID NO: 3327271 - DNA, 25 bp, Homo sapien
gcagagcggcctgaagcgagaggtt

SEQ ID NO: 3327272 - DNA, 25 bp, Homo sapien
cgagcccccggcctgaggcgcagca

SEQ ID NO: 3327273 - DNA, 25 bp, Homo sapien
gcggcctgaagcgagaggttgaggc

SEQ ID NO: 3327274 - DNA, 25 bp, Homo sapien
ctcgcgcagagcggcctgaagcgag

SEQ ID NO: 3327275 - DNA, 25 bp, Homo sapien
tcaaccagcgacaaagacgataact

SEQ ID NO: 3327276 - DNA, 25 bp, Homo sapien
gacgataactacacccacaggatgg

SEQ ID NO: 3327277 - DNA, 25 bp, Homo sapien
gatgctgaaaaagaacctgccagtt

SEQ ID NO: 3327278 - DNA, 25 bp, Homo sapien
ggatggtcctcagaaagttacggcc

SEQ ID NO: 3327279 - DNA, 25 bp, Homo sapien
gcattttaaccatcctacagttcac

SEQ ID NO: 3327280 - DNA, 25 bp, Homo sapien
agaaagagtgacttttgtaagcatt

SEQ ID NO: 3327281 - DNA, 25 bp, Homo sapien
ttaaccatcctacagttcacacaag

SEQ ID NO: 3327282 - DNA, 25 bp, Homo sapien
gttcacacaagtaactaagaaatat

SEQ ID NO: 3327283 - DNA, 25 bp, Homo sapien
tagatactatatttaacattcaaca

SEQ ID NO: 3327284 - DNA, 25 bp, Homo sapien
aatagttttactaaccaatctacat

SEQ ID NO: 3327285 - DNA, 25 bp, Homo sapien
agtgaaaccattttagagcccctag

SEQ ID NO: 3327286 - DNA, 25 bp, Homo sapien
ttaagattaagaataatagttacaa

SEQ ID NO: 3327287 - DNA, 25 bp, Homo sapien
gatgctttgacaaaaggtaatccat

SEQ ID NO: 3327288 - DNA, 25 bp, Homo sapien
aatccatctgttcagaaattctaca

SEQ ID NO: 3327289 - DNA, 25 bp, Homo sapien
caatggttgctgtctcatcagcata

SEQ ID NO: 3327290 - DNA, 25 bp, Homo sapien
aattctacaatggttgctgtctcat

SEQ ID NO: 3327291 - DNA, 25 bp, Homo sapien
tgatattgctgattaagtccctggg

SEQ ID NO: 3327292 - DNA, 25 bp, Homo sapien
tccagaactattacgttgatattgc

SEQ ID NO: 3327293 - DNA, 25 bp, Homo sapien
gctttgagctaaatttagcacttcc

SEQ ID NO: 3327294 - DNA, 25 bp, Homo sapien
cttcctccagaggtttgagttcttc

SEQ ID NO: 3327295 - DNA, 25 bp, Homo sapien
catcctggtgagtttgggattcttg

SEQ ID NO: 3327296 - DNA, 25 bp, Homo sapien
gtaaaacttaaatgtgagcatcctg

SEQ ID NO: 3327297 - DNA, 25 bp, Homo sapien
cctggtgagtttgggattcttgtaa

SEQ ID NO: 3327298 - DNA, 25 bp, Homo sapien
aacttaaatgtgagcatcctggtga

SEQ ID NO: 3327299 - DNA, 25 bp, Homo sapien
aatgatctccagctagattactaaa

SEQ ID NO: 3327300 - DNA, 25 bp, Homo sapien
tgatctccagctagattactaaatg

SEQ ID NO: 3327301 - DNA, 25 bp, Homo sapien
gatctccagctagattactaaatgt

SEQ ID NO: 3327302 - DNA, 25 bp, Homo sapien
aaatgatctccagctagattactaa

SEQ ID NO: 3327303 - DNA, 25 bp, Homo sapien
tagtgcaatgcaagacaggagttgc

SEQ ID NO: 3327304 - DNA, 25 bp, Homo sapien
tagaacttgaagtaggtgcactgtt

SEQ ID NO: 3327305 - DNA, 25 bp, Homo sapien
gtaaatccagcagtaaatgctccag

SEQ ID NO: 3327306 - DNA, 25 bp, Homo sapien
cactgtttgtgacaagtgcaagact

SEQ ID NO: 3327307 - DNA, 25 bp, Homo sapien
tttgttacattagcccacacttagg

SEQ ID NO: 3327308 - DNA, 25 bp, Homo sapien
gaatggatgtaggtgaaatccctct

SEQ ID NO: 3327309 - DNA, 25 bp, Homo sapien
gagtgatagggaactcttgaacaag

SEQ ID NO: 3327310 - DNA, 25 bp, Homo sapien
tcaaagactttacctgtctgaaaaa

SEQ ID NO: 3327311 - DNA, 25 bp, Homo sapien
tctgttaatgcacagtaggcaccat

SEQ ID NO: 3327312 - DNA, 25 bp, Homo sapien
cttgaaatacgtgtggaaaagctac

SEQ ID NO: 3327313 - DNA, 25 bp, Homo sapien
tagactgctaactaccacgtgtgtc

SEQ ID NO: 3327314 - DNA, 25 bp, Homo sapien
gaaaagctacattcgctgtgacata

SEQ ID NO: 3327315 - DNA, 25 bp, Homo sapien
tctcagcaccgtcggggagacagct

SEQ ID NO: 3327316 - DNA, 25 bp, Homo sapien
gagacagctgagctgtagaccttgg

SEQ ID NO: 3327317 - DNA, 25 bp, Homo sapien
cttcctctcagcaccgtcggggaga

SEQ ID NO: 3327318 - DNA, 25 bp, Homo sapien
agctgagctgtagaccttggtgcat

SEQ ID NO: 3327319 - DNA, 25 bp, Homo sapien
tggatattgtcaaggccctgttgct

SEQ ID NO: 3327320 - DNA, 25 bp, Homo sapien
gatgtcagacaaaactctcctctcc

SEQ ID NO: 3327321 - DNA, 25 bp, Homo sapien
tccaccaaagcattcgatgtcagac

SEQ ID NO: 3327322 - DNA, 25 bp, Homo sapien
ctgaagctgtggatattgtcaaggc

SEQ ID NO: 3327323 - DNA, 25 bp, Homo sapien
ctccggaggcctgtcagctctcttg

SEQ ID NO: 3327324 - DNA, 25 bp, Homo sapien
cttcagtgaaatgacattcttgtgc

SEQ ID NO: 3327325 - DNA, 25 bp, Homo sapien
tacttcagtgaaatgacattcttgt

SEQ ID NO: 3327326 - DNA, 25 bp, Homo sapien
gctccggaggcctgtcagctctctt

SEQ ID NO: 3327327 - DNA, 25 bp, Homo sapien
taagattcttcagagtattcagaga

SEQ ID NO: 3327328 - DNA, 25 bp, Homo sapien
aagtatatagatagaaggccgggca

SEQ ID NO: 3327329 - DNA, 25 bp, Homo sapien
cacctgttataacaaccagggaaag

SEQ ID NO: 3327330 - DNA, 25 bp, Homo sapien
tacatttcagaaacactatccttct

SEQ ID NO: 3327331 - DNA, 25 bp, Homo sapien
ctagattcagggctgtatttaaaga

SEQ ID NO: 3327332 - DNA, 25 bp, Homo sapien
ttccttccccgaatgtcaactctgg

SEQ ID NO: 3327333 - DNA, 25 bp, Homo sapien
taacggaagaagttaagtctagctg

SEQ ID NO: 3327334 - DNA, 25 bp, Homo sapien
tttcagttacaactcctagattcag

SEQ ID NO: 3327335 - DNA, 25 bp, Homo sapien
tagggatcgtggaaaaaacatgctt

SEQ ID NO: 3327336 - DNA, 25 bp, Homo sapien
agggatcgtggaaaaaacatgctta

SEQ ID NO: 3327337 - DNA, 25 bp, Homo sapien
ggatcgtggaaaaaacatgcttatc

SEQ ID NO: 3327338 - DNA, 25 bp, Homo sapien
gggatcgtggaaaaaacatgcttat

SEQ ID NO: 3327339 - DNA, 25 bp, Homo sapien
cttggtctcagagtaggagtcaccc

SEQ ID NO: 3327340 - DNA, 25 bp, Homo sapien
ctccctggtggttgggattaatatt

SEQ ID NO: 3327341 - DNA, 25 bp, Homo sapien
tgagtgaagcactatgaattccagc

SEQ ID NO: 3327342 - DNA, 25 bp, Homo sapien
ccttggacttgttgaatttgggttg

SEQ ID NO: 3327343 - DNA, 25 bp, Homo sapien
catatgagctttttctgacaaccaa

SEQ ID NO: 3327344 - DNA, 25 bp, Homo sapien
ttcttttcctcctatacgatgtatt

SEQ ID NO: 3327345 - DNA, 25 bp, Homo sapien
ctagagactgtatcatatgagcttt

SEQ ID NO: 3327346 - DNA, 25 bp, Homo sapien
tcctcctatacgatgtatttattgt

SEQ ID NO: 3327347 - DNA, 25 bp, Homo sapien
ggctggtggcctgaaaaccgaagct

SEQ ID NO: 3327348 - DNA, 25 bp, Homo sapien
gacatacgcacttctttcatgtggg

SEQ ID NO: 3327349 - DNA, 25 bp, Homo sapien
taattgctccacagagacatacgca

SEQ ID NO: 3327350 - DNA, 25 bp, Homo sapien
gcctcatttctcttaaaacgggatg

SEQ ID NO: 3327351 - DNA, 25 bp, Homo sapien
tgagttctcccttaacatatgggtg

SEQ ID NO: 3327352 - DNA, 25 bp, Homo sapien
ctgctatagatgcttcgtagatatt

SEQ ID NO: 3327353 - DNA, 25 bp, Homo sapien
cttcgtagatatttgtgttactgtc

SEQ ID NO: 3327354 - DNA, 25 bp, Homo sapien
cccttaacatatgggtgactccatg

SEQ ID NO: 3327355 - DNA, 25 bp, Homo sapien
cattgtttgcttttcgccgggtacg

SEQ ID NO: 3327356 - DNA, 25 bp, Homo sapien
gacaaggtcctgatgttcttagaac

SEQ ID NO: 3327357 - DNA, 25 bp, Homo sapien
gccctgaggctccttttagaactga

SEQ ID NO: 3327358 - DNA, 25 bp, Homo sapien
caggtccatcccgaaaggtatgtca

SEQ ID NO: 3327359 - DNA, 25 bp, Homo sapien
gatagccagctagaatgtttgtagg

SEQ ID NO: 3327360 - DNA, 25 bp, Homo sapien
ttagggcaccgaggataagatagcc

SEQ ID NO: 3327361 - DNA, 25 bp, Homo sapien
gaagtggagtttgaaaggacctcca

SEQ ID NO: 3327362 - DNA, 25 bp, Homo sapien
gaaagcaggtaaatattcagagctg

SEQ ID NO: 3327363 - DNA, 25 bp, Homo sapien
cctgtattactgtccatagatgaac

SEQ ID NO: 3327364 - DNA, 25 bp, Homo sapien
cagatgtttctgtaagaatacccag

SEQ ID NO: 3327365 - DNA, 25 bp, Homo sapien
ttatacaagtgttccaagaagacac

SEQ ID NO: 3327366 - DNA, 25 bp, Homo sapien
tccagggaatcacaaaagacggttg

SEQ ID NO: 3327367 - DNA, 25 bp, Homo sapien
cccgggctggcgtatttgaaactga

SEQ ID NO: 3327368 - DNA, 25 bp, Homo sapien
ggccatcttgaacatagagcagtga

SEQ ID NO: 3327369 - DNA, 25 bp, Homo sapien
attttgtcacaacaacccgggctgg

SEQ ID NO: 3327370 - DNA, 25 bp, Homo sapien
ggctcttagccaaaccctcactgag

SEQ ID NO: 3327371 - DNA, 25 bp, Homo sapien
cattctggtggtaatcaagctcaag

SEQ ID NO: 3327372 - DNA, 25 bp, Homo sapien
gatcataatagacctcattctggtg

SEQ ID NO: 3327373 - DNA, 25 bp, Homo sapien
catgtttaaacaagctgtgctggag

SEQ ID NO: 3327374 - DNA, 25 bp, Homo sapien
tagtgtccaactgcaagttagatcc

SEQ ID NO: 3327375 - DNA, 25 bp, Homo sapien
gaatcttcacttccgtgtgttctag

SEQ ID NO: 3327376 - DNA, 25 bp, Homo sapien
aggaatcttcacttccgtgtgttct

SEQ ID NO: 3327377 - DNA, 25 bp, Homo sapien
tcttcacttccgtgtgttctagagg

SEQ ID NO: 3327378 - DNA, 25 bp, Homo sapien
cacttccgtgtgttctagaggacag

SEQ ID NO: 3327379 - DNA, 25 bp, Homo sapien
gaagtgatttgaatctttctaggaa

SEQ ID NO: 3327380 - DNA, 25 bp, Homo sapien
ggtggttttttctcataagaatcac

SEQ ID NO: 3327381 - DNA, 25 bp, Homo sapien
tgggtggttttttctcataagaatc

SEQ ID NO: 3327382 - DNA, 25 bp, Homo sapien
tggagaagtgatttgaatctttcta

SEQ ID NO: 3327383 - DNA, 25 bp, Homo sapien
ccctgcatttgtggaaggtggtttc

SEQ ID NO: 3327384 - DNA, 25 bp, Homo sapien
ctgcatttgtggaaggtggtttcct

SEQ ID NO: 3327385 - DNA, 25 bp, Homo sapien
ctccctgcatttgtggaaggtggtt

SEQ ID NO: 3327386 - DNA, 25 bp, Homo sapien
cctgcatttgtggaaggtggtttcc

SEQ ID NO: 3327387 - DNA, 25 bp, Homo sapien
caggaaaaagctgaccactcacagt

SEQ ID NO: 3327388 - DNA, 25 bp, Homo sapien
aaaaagctgaccactcacagtttgt

SEQ ID NO: 3327389 - DNA, 25 bp, Homo sapien
ctgaaagcaggaaaaagctgaccac

SEQ ID NO: 3327390 - DNA, 25 bp, Homo sapien
ggaaaaagctgaccactcacagttt

SEQ ID NO: 3327391 - DNA, 25 bp, Homo sapien
tctggagctggcagaaattcaggga

SEQ ID NO: 3327392 - DNA, 25 bp, Homo sapien
gttgacgcattctaatcatgtggcg

SEQ ID NO: 3327393 - DNA, 25 bp, Homo sapien
cagatgacaatcctctccatgttgc

SEQ ID NO: 3327394 - DNA, 25 bp, Homo sapien
accttgggagcttgatttgtggacc

SEQ ID NO: 3327395 - DNA, 25 bp, Homo sapien
tgtccccaagaagatgaccatcaga

SEQ ID NO: 3327396 - DNA, 25 bp, Homo sapien
acagtagagctagaccttggtctcg

SEQ ID NO: 3327397 - DNA, 25 bp, Homo sapien
taccaacagtagagctagaccttgg

SEQ ID NO: 3327398 - DNA, 25 bp, Homo sapien
gtagagctagaccttggtctcgttt

SEQ ID NO: 3327399 - DNA, 25 bp, Homo sapien
aagtaccaacagtagagctagacct

SEQ ID NO: 3327400 - DNA, 25 bp, Homo sapien
gagagtcagcaacttggctggaagc

SEQ ID NO: 3327401 - DNA, 25 bp, Homo sapien
ccagaatgtctataccagagtggct

SEQ ID NO: 3327402 - DNA, 25 bp, Homo sapien
tcttcagcatgtgagcaccatcagc

SEQ ID NO: 3327403 - DNA, 25 bp, Homo sapien
cagagacttcggtgaaggatgatgc

SEQ ID NO: 3327404 - DNA, 25 bp, Homo sapien
ttctcgggccccgtgttctctagct

SEQ ID NO: 3327405 - DNA, 25 bp, Homo sapien
ttctctagctcttgatgtggcctct

SEQ ID NO: 3327406 - DNA, 25 bp, Homo sapien
gatgtggcctcttcggtatcactgg

SEQ ID NO: 3327407 - DNA, 25 bp, Homo sapien
tggcctcttcggtatcactggcagc

SEQ ID NO: 3327408 - DNA, 25 bp, Homo sapien
aagctctctgagttgccacaaccat

SEQ ID NO: 3327409 - DNA, 25 bp, Homo sapien
tgttctctgtgtcaaagctctctga

SEQ ID NO: 3327410 - DNA, 25 bp, Homo sapien
ttgttctctgtgtcaaagctctctg

SEQ ID NO: 3327411 - DNA, 25 bp, Homo sapien
aattacaacaccctccaatcatttg

SEQ ID NO: 3327412 - DNA, 25 bp, Homo sapien
actgtaataccctgcagatgtttgc

SEQ ID NO: 3327413 - DNA, 25 bp, Homo sapien
gagcattcattttgtaagccttgac

SEQ ID NO: 3327414 - DNA, 25 bp, Homo sapien
aagccttgacaaggctacttcctct

SEQ ID NO: 3327415 - DNA, 25 bp, Homo sapien
gaactctggtcctacttgccacggg

SEQ ID NO: 3327416 - DNA, 25 bp, Homo sapien
gagcatcactgggacaagtcctcca

SEQ ID NO: 3327417 - DNA, 25 bp, Homo sapien
tcagctatgactatccaagagtgcg

SEQ ID NO: 3327418 - DNA, 25 bp, Homo sapien
agtgcgaatgtgaccatggaggctc

SEQ ID NO: 3327419 - DNA, 25 bp, Homo sapien
ttagcacaaagacaataggggacag

SEQ ID NO: 3327420 - DNA, 25 bp, Homo sapien
acaataggggacagtttataacttg

SEQ ID NO: 3327421 - DNA, 25 bp, Homo sapien
cacaaagacaataggggacagttta

SEQ ID NO: 3327422 - DNA, 25 bp, Homo sapien
caataggggacagtttataacttgt

SEQ ID NO: 3327423 - DNA, 25 bp, Homo sapien
acagaactgggttgacctgtgaccc

SEQ ID NO: 3327424 - DNA, 25 bp, Homo sapien
ctgggttgacctgtgaccctctcca

SEQ ID NO: 3327425 - DNA, 25 bp, Homo sapien
accaaccacagaactgggttgacct

SEQ ID NO: 3327426 - DNA, 25 bp, Homo sapien
atcagcagtggcctgcgggtctgca

SEQ ID NO: 3327427 - DNA, 25 bp, Homo sapien
tagtatttggatcaacttttggagg

SEQ ID NO: 3327428 - DNA, 25 bp, Homo sapien
gtagtatttggatcaacttttggag

SEQ ID NO: 3327429 - DNA, 25 bp, Homo sapien
cagtagtatttggatcaacttttgg

SEQ ID NO: 3327430 - DNA, 25 bp, Homo sapien
cccagtagtatttggatcaactttt

SEQ ID NO: 3327431 - DNA, 25 bp, Homo sapien
agagcagaccttgagcacatgacag

SEQ ID NO: 3327432 - DNA, 25 bp, Homo sapien
tgtttggagagaatatggtcccaga

SEQ ID NO: 3327433 - DNA, 25 bp, Homo sapien
gacagttgttcttgggaccaggtct

SEQ ID NO: 3327434 - DNA, 25 bp, Homo sapien
actgctataaagagccttgtttgga

SEQ ID NO: 3327435 - DNA, 25 bp, Homo sapien
ccaccagtgcttttggcacctccat

SEQ ID NO: 3327436 - DNA, 25 bp, Homo sapien
ttttggcacctccatattttcttac

SEQ ID NO: 3327437 - DNA, 25 bp, Homo sapien
cagtgcttttggcacctccatattt

SEQ ID NO: 3327438 - DNA, 25 bp, Homo sapien
agtccaccagtgcttttggcacctc

SEQ ID NO: 3327439 - DNA, 25 bp, Homo sapien
ctgcctgtaccactgaaccctgtct

SEQ ID NO: 3327440 - DNA, 25 bp, Homo sapien
ttccacggtgacctgtgggcactgc

SEQ ID NO: 3327441 - DNA, 25 bp, Homo sapien
aattccacggtgacctgtgggcact

SEQ ID NO: 3327442 - DNA, 25 bp, Homo sapien
tgagaaacattcagtcccccgaatt

SEQ ID NO: 3327443 - DNA, 25 bp, Homo sapien
acagaattggattaatccgaatttt

SEQ ID NO: 3327444 - DNA, 25 bp, Homo sapien
ggattaatccgaatttttcattcat

SEQ ID NO: 3327445 - DNA, 25 bp, Homo sapien
ttggattaatccgaatttttcattc

SEQ ID NO: 3327446 - DNA, 25 bp, Homo sapien
gaattggattaatccgaatttttca

SEQ ID NO: 3327447 - DNA, 25 bp, Homo sapien
ttaccataagtgaaaagtaacagaa

SEQ ID NO: 3327448 - DNA, 25 bp, Homo sapien
ttctgggacattccagcatataaac

SEQ ID NO: 3327449 - DNA, 25 bp, Homo sapien
gcatataaacaatccccaaatagca

SEQ ID NO: 3327450 - DNA, 25 bp, Homo sapien
gggacattccagcatataaacaatc

SEQ ID NO: 3327451 - DNA, 25 bp, Homo sapien
gagctgttgcgagcgaacttcctgg

SEQ ID NO: 3327452 - DNA, 25 bp, Homo sapien
ttggaaatgcacactcacaggctgc

SEQ ID NO: 3327453 - DNA, 25 bp, Homo sapien
agattgcacgatacccaagccatgg

SEQ ID NO: 3327454 - DNA, 25 bp, Homo sapien
tgcgtgtactgaagcctggccattc

SEQ ID NO: 3327455 - DNA, 25 bp, Homo sapien
ctgattcttaggagattttgtccaa

SEQ ID NO: 3327456 - DNA, 25 bp, Homo sapien
tcagaatcaatctcatagcttacag

SEQ ID NO: 3327457 - DNA, 25 bp, Homo sapien
gaatcaatctcatagcttacagaca

SEQ ID NO: 3327458 - DNA, 25 bp, Homo sapien
tttcagaatcaatctcatagcttac

SEQ ID NO: 3327459 - DNA, 25 bp, Homo sapien
caatctcatagcttacagacaacat

SEQ ID NO: 3327460 - DNA, 25 bp, Homo sapien
gaaatagcgagtccatacccgataa

SEQ ID NO: 3327461 - DNA, 25 bp, Homo sapien
taagcctggttccaaagcagatagg

SEQ ID NO: 3327462 - DNA, 25 bp, Homo sapien
caagagtggacatgttgcttaaccc

SEQ ID NO: 3327463 - DNA, 25 bp, Homo sapien
tcaatagtaagtagcagagcccagt

SEQ ID NO: 3327464 - DNA, 25 bp, Homo sapien
cggaaatgagagctgcaaacacttt

SEQ ID NO: 3327465 - DNA, 25 bp, Homo sapien
ccagcatagaacatgattgagctgt

SEQ ID NO: 3327466 - DNA, 25 bp, Homo sapien
ccacggaaatgagagctgcaaacac

SEQ ID NO: 3327467 - DNA, 25 bp, Homo sapien
gatccagcatagaacatgattgagc

SEQ ID NO: 3327468 - DNA, 25 bp, Homo sapien
cgccctctagtggagtggcctccat

SEQ ID NO: 3327469 - DNA, 25 bp, Homo sapien
cgaacagacaagacctcaacgccct

SEQ ID NO: 3327470 - DNA, 25 bp, Homo sapien
agacaagacctcaacgccctctagt

SEQ ID NO: 3327471 - DNA, 25 bp, Homo sapien
gacctcaacgccctctagtggagtg

SEQ ID NO: 3327472 - DNA, 25 bp, Homo sapien
ggactacacattgactctgaaacag

SEQ ID NO: 3327473 - DNA, 25 bp, Homo sapien
tggtaagttcagcacaggctctgtg

SEQ ID NO: 3327474 - DNA, 25 bp, Homo sapien
tcaaaagaagtgttccaggcccaag

SEQ ID NO: 3327475 - DNA, 25 bp, Homo sapien
ttcagtctcccatgaccagagggtc

SEQ ID NO: 3327476 - DNA, 25 bp, Homo sapien
aattctaagtctttgtgacctaagg

SEQ ID NO: 3327477 - DNA, 25 bp, Homo sapien
gacctaaggttctcaaaagagcagc

SEQ ID NO: 3327478 - DNA, 25 bp, Homo sapien
tacatggattagacatcaagaagcc

SEQ ID NO: 3327479 - DNA, 25 bp, Homo sapien
caaattcatttggatgtgaagccaa

SEQ ID NO: 3327480 - DNA, 25 bp, Homo sapien
acctcttgataccggttagtattat

SEQ ID NO: 3327481 - DNA, 25 bp, Homo sapien
ttgataccggttagtattatacttc

SEQ ID NO: 3327482 - DNA, 25 bp, Homo sapien
gataccggttagtattatacttcca

SEQ ID NO: 3327483 - DNA, 25 bp, Homo sapien
ctcttgataccggttagtattatac

SEQ ID NO: 3327484 - DNA, 25 bp, Homo sapien
aatcctaaggcccacactgcaatct

SEQ ID NO: 3327485 - DNA, 25 bp, Homo sapien
tctttatcaacttcagctaccattt

SEQ ID NO: 3327486 - DNA, 25 bp, Homo sapien
tcttcaaaactaatggtgccaattc

SEQ ID NO: 3327487 - DNA, 25 bp, Homo sapien
tctttggttcaaatcctaaggccca

SEQ ID NO: 3327488 - DNA, 25 bp, Homo sapien
ggcaggcatatgcactgaagagact

SEQ ID NO: 3327489 - DNA, 25 bp, Homo sapien
tcgttttgctaatgcagggcaggca

SEQ ID NO: 3327490 - DNA, 25 bp, Homo sapien
cagtcctactgtgccatcatgtaca

SEQ ID NO: 3327491 - DNA, 25 bp, Homo sapien
tgtacatcactgttacaccctgggc

SEQ ID NO: 3327492 - DNA, 25 bp, Homo sapien
tctgaacttgtatggtagttagatg

SEQ ID NO: 3327493 - DNA, 25 bp, Homo sapien
ggttccagacccatcaatatcaaat

SEQ ID NO: 3327494 - DNA, 25 bp, Homo sapien
ttttcttccattggtctgaacttgt

SEQ ID NO: 3327495 - DNA, 25 bp, Homo sapien
tcgatggttccagacccatcaatat

SEQ ID NO: 3327496 - DNA, 25 bp, Homo sapien
acacacatatgggtgaaagataaat

SEQ ID NO: 3327497 - DNA, 25 bp, Homo sapien
tggaatagttagcagaaccagaata

SEQ ID NO: 3327498 - DNA, 25 bp, Homo sapien
ccagaataattgatgataaactata

SEQ ID NO: 3327499 - DNA, 25 bp, Homo sapien
tataactggaatagttagcagaacc

SEQ ID NO: 3327500 - DNA, 25 bp, Homo sapien
gccccagcagaaggttacagcttca

SEQ ID NO: 3327501 - DNA, 25 bp, Homo sapien
cttccttgctctggcggaaaaactt

SEQ ID NO: 3327502 - DNA, 25 bp, Homo sapien
tgctctggcggaaaaacttcggccc

SEQ ID NO: 3327503 - DNA, 25 bp, Homo sapien
cagaaggttacagcttcacactcac

SEQ ID NO: 3327504 - DNA, 25 bp, Homo sapien
tctcagccgggacctcccggcgtca

SEQ ID NO: 3327505 - DNA, 25 bp, Homo sapien
cccgcccaacccaagtcttcacagc

SEQ ID NO: 3327506 - DNA, 25 bp, Homo sapien
cggcagccggcgctctcagccggga

SEQ ID NO: 3327507 - DNA, 25 bp, Homo sapien
gacctcccggcgtcacctcccgcag

SEQ ID NO: 3327508 - DNA, 25 bp, Homo sapien
actttctccagtagatcctttattt

SEQ ID NO: 3327509 - DNA, 25 bp, Homo sapien
tcaaccttgttggtataaaagtaga

SEQ ID NO: 3327510 - DNA, 25 bp, Homo sapien
tagacaattacattaccagggtttc

SEQ ID NO: 3327511 - DNA, 25 bp, Homo sapien
agacaattacattaccagggtttcg

SEQ ID NO: 3327512 - DNA, 25 bp, Homo sapien
tcatataacacctggccttttctgt

SEQ ID NO: 3327513 - DNA, 25 bp, Homo sapien
cctaccctaggcatctcatataaat

SEQ ID NO: 3327514 - DNA, 25 bp, Homo sapien
tatggatttgcctaccctaggcatc

SEQ ID NO: 3327515 - DNA, 25 bp, Homo sapien
atctaattccggaactcttttatag

SEQ ID NO: 3327516 - DNA, 25 bp, Homo sapien
cccacgacctccactaaagcccagg

SEQ ID NO: 3327517 - DNA, 25 bp, Homo sapien
ttgtgaagcccacacgaaccaaata

SEQ ID NO: 3327518 - DNA, 25 bp, Homo sapien
cgacctccactaaagcccaggtaag

SEQ ID NO: 3327519 - DNA, 25 bp, Homo sapien
gtgaagcccacacgaaccaaatacc

SEQ ID NO: 3327520 - DNA, 25 bp, Homo sapien
ttgccgtcagtcacacgatggatgc

SEQ ID NO: 3327521 - DNA, 25 bp, Homo sapien
cgtcagtcacacgatggatgcacgg

SEQ ID NO: 3327522 - DNA, 25 bp, Homo sapien
gccgtcagtcacacgatggatgcac

SEQ ID NO: 3327523 - DNA, 25 bp, Homo sapien
gtcagtcacacgatggatgcacggg

SEQ ID NO: 3327524 - DNA, 25 bp, Homo sapien
tgtccactcccacagttggtgcttc

SEQ ID NO: 3327525 - DNA, 25 bp, Homo sapien
cactcccacagttggtgcttccttg

SEQ ID NO: 3327526 - DNA, 25 bp, Homo sapien
actcccacagttggtgcttccttgg

SEQ ID NO: 3327527 - DNA, 25 bp, Homo sapien
cttctgtccactcccacagttggtg

SEQ ID NO: 3327528 - DNA, 25 bp, Homo sapien
gatgaaaaagtaagcgtgccccacc

SEQ ID NO: 3327529 - DNA, 25 bp, Homo sapien
cactctgtagagacaaagccatggc

SEQ ID NO: 3327530 - DNA, 25 bp, Homo sapien
gaggaatggcatgaccaagatccag

SEQ ID NO: 3327531 - DNA, 25 bp, Homo sapien
aagatccagttgtacgtttcagctc

SEQ ID NO: 3327532 - DNA, 25 bp, Homo sapien
gacctgagaatacttgtttactggc

SEQ ID NO: 3327533 - DNA, 25 bp, Homo sapien
ttattgggcccctcttatagaacca

SEQ ID NO: 3327534 - DNA, 25 bp, Homo sapien
ggaaccttgaggtgttgccccatca

SEQ ID NO: 3327535 - DNA, 25 bp, Homo sapien
gggtcaaactgccagcactatcttt

SEQ ID NO: 3327536 - DNA, 25 bp, Homo sapien
cttattgcttattgtgtgtctcccc

SEQ ID NO: 3327537 - DNA, 25 bp, Homo sapien
taatattgcacctagcttctaccac

SEQ ID NO: 3327538 - DNA, 25 bp, Homo sapien
tcaatggagcctactgtgaccatgc

SEQ ID NO: 3327539 - DNA, 25 bp, Homo sapien
tggcataaaggcagggatcttgttc

SEQ ID NO: 3327540 - DNA, 25 bp, Homo sapien
gtctttatggttactatgaattttc

SEQ ID NO: 3327541 - DNA, 25 bp, Homo sapien
ctttatggttactatgaattttcct

SEQ ID NO: 3327542 - DNA, 25 bp, Homo sapien
atgttgtctttatggttactatgaa

SEQ ID NO: 3327543 - DNA, 25 bp, Homo sapien
gttgtctttatggttactatgaatt

SEQ ID NO: 3327544 - DNA, 25 bp, Homo sapien
aaatcacagtcagatgtttaatcaa

SEQ ID NO: 3327545 - DNA, 25 bp, Homo sapien
tgtccactatttcttatgtcattcg

SEQ ID NO: 3327546 - DNA, 25 bp, Homo sapien
cttatgtcattcgttagtctacatg

SEQ ID NO: 3327547 - DNA, 25 bp, Homo sapien
tcagatgtttaatcaatccaaaatg

SEQ ID NO: 3327548 - DNA, 25 bp, Homo sapien
tgtattttcagtcttcgccaggtca

SEQ ID NO: 3327549 - DNA, 25 bp, Homo sapien
gctgttgccgaatactcaggacgga

SEQ ID NO: 3327550 - DNA, 25 bp, Homo sapien
gccaggtcattgagatccatccact

SEQ ID NO: 3327551 - DNA, 25 bp, Homo sapien
gaatgaatatggctttaggcggcag

SEQ ID NO: 3327552 - DNA, 25 bp, Homo sapien
aaagtagcattatgtaaaggctcaa

SEQ ID NO: 3327553 - DNA, 25 bp, Homo sapien
gccttgtggatatcaagaaatccca

SEQ ID NO: 3327554 - DNA, 25 bp, Homo sapien
aaatgctgaatatttctttggctgc

SEQ ID NO: 3327555 - DNA, 25 bp, Homo sapien
gctacttggaggcttatctacctgt

SEQ ID NO: 3327556 - DNA, 25 bp, Homo sapien
atcccctggatatgctcttgttttt

SEQ ID NO: 3327557 - DNA, 25 bp, Homo sapien
tgctcttgttttttccctctaatag

SEQ ID NO: 3327558 - DNA, 25 bp, Homo sapien
ccatcccctggatatgctcttgttt

SEQ ID NO: 3327559 - DNA, 25 bp, Homo sapien
tatgctcttgttttttccctctaat

SEQ ID NO: 3327560 - DNA, 25 bp, Homo sapien
attatggggatcctatttagctctt

SEQ ID NO: 3327561 - DNA, 25 bp, Homo sapien
aattatggggatcctatttagctct

SEQ ID NO: 3327562 - DNA, 25 bp, Homo sapien
taaattatggggatcctatttagct

SEQ ID NO: 3327563 - DNA, 25 bp, Homo sapien
aataaattatggggatcctatttag

SEQ ID NO: 3327564 - DNA, 25 bp, Homo sapien
tctatgtcgtggaagcactggatgg

SEQ ID NO: 3327565 - DNA, 25 bp, Homo sapien
gatctatgctgtttctatgtcgtgg

SEQ ID NO: 3327566 - DNA, 25 bp, Homo sapien
cactaatcaaaagttcggcatgtag

SEQ ID NO: 3327567 - DNA, 25 bp, Homo sapien
ggcatgtagctcatgatctatgctg

SEQ ID NO: 3327568 - DNA, 25 bp, Homo sapien
taacttgaatcactaactgactgaa

SEQ ID NO: 3327569 - DNA, 25 bp, Homo sapien
aagatggatatttcttccccaagga

SEQ ID NO: 3327570 - DNA, 25 bp, Homo sapien
tctccagagtatgcgggagaccctt

SEQ ID NO: 3327571 - DNA, 25 bp, Homo sapien
gagacccttccacctcaagatggat

SEQ ID NO: 3327572 - DNA, 25 bp, Homo sapien
gccaattaaaaatataaaagataca

SEQ ID NO: 3327573 - DNA, 25 bp, Homo sapien
caattaaaaatataaaagatacaca

SEQ ID NO: 3327574 - DNA, 25 bp, Homo sapien
tcttcttcaggctctgacaggcctc

SEQ ID NO: 3327575 - DNA, 25 bp, Homo sapien
atatcttcttcaggctctgacaggc

SEQ ID NO: 3327576 - DNA, 25 bp, Homo sapien
caatatcttcttcaggctctgacag

SEQ ID NO: 3327577 - DNA, 25 bp, Homo sapien
ttcttcaggctctgacaggcctcct

SEQ ID NO: 3327578 - DNA, 25 bp, Homo sapien
gatagaagaatcttacagatgctgc

SEQ ID NO: 3327579 - DNA, 25 bp, Homo sapien
gtttggttaacgtgatacattctgt

SEQ ID NO: 3327580 - DNA, 25 bp, Homo sapien
caaaatccacctataattggtcaaa

SEQ ID NO: 3327581 - DNA, 25 bp, Homo sapien
tttgctgctagttaactatgaacag

SEQ ID NO: 3327582 - DNA, 25 bp, Homo sapien
gcaagggcacagacctgctagcctt

SEQ ID NO: 3327583 - DNA, 25 bp, Homo sapien
cagaggattcattttaagaccttcc

SEQ ID NO: 3327584 - DNA, 25 bp, Homo sapien
accttccctaggcatggctactgaa

SEQ ID NO: 3327585 - DNA, 25 bp, Homo sapien
tccaacttggtcagatgccagaaat

SEQ ID NO: 3327586 - DNA, 25 bp, Homo sapien
gcctaaaggtatgaccttcaaatga

SEQ ID NO: 3327587 - DNA, 25 bp, Homo sapien
cagtcaccaagcctaaaggtatgac

SEQ ID NO: 3327588 - DNA, 25 bp, Homo sapien
ccaagcctaaaggtatgaccttcaa

SEQ ID NO: 3327589 - DNA, 25 bp, Homo sapien
tcaacagtcaccaagcctaaaggta

SEQ ID NO: 3327590 - DNA, 25 bp, Homo sapien
tttcgatcttgtacaaccagtattt

SEQ ID NO: 3327591 - DNA, 25 bp, Homo sapien
tttatttcgatcttgtacaaccagt

SEQ ID NO: 3327592 - DNA, 25 bp, Homo sapien
tatttcgatcttgtacaaccagtat

SEQ ID NO: 3327593 - DNA, 25 bp, Homo sapien
gatcttgtacaaccagtatttttct

SEQ ID NO: 3327594 - DNA, 25 bp, Homo sapien
tgctggcagattcagtgtctaataa

SEQ ID NO: 3327595 - DNA, 25 bp, Homo sapien
gctggcagattcagtgtctaataag

SEQ ID NO: 3327596 - DNA, 25 bp, Homo sapien
ctggcagattcagtgtctaataagg

SEQ ID NO: 3327597 - DNA, 25 bp, Homo sapien
aggtgctacagatacagtggtgaac

SEQ ID NO: 3327598 - DNA, 25 bp, Homo sapien
gatcctgtgcatattaattgagctc

SEQ ID NO: 3327599 - DNA, 25 bp, Homo sapien
caacacaaatgaaactccctatcct

SEQ ID NO: 3327600 - DNA, 25 bp, Homo sapien
actgagttcctctatataatgtaca

SEQ ID NO: 3327601 - DNA, 25 bp, Homo sapien
agccacagagtcaacgttgatgaat

SEQ ID NO: 3327602 - DNA, 25 bp, Homo sapien
gatgtgaagcatatcctggtaatct

SEQ ID NO: 3327603 - DNA, 25 bp, Homo sapien
tccgattctgcgtggtgaaagcaga

SEQ ID NO: 3327604 - DNA, 25 bp, Homo sapien
tgaagcatatcctggtaatctgctg

SEQ ID NO: 3327605 - DNA, 25 bp, Homo sapien
ctaccttctgatcgccattgctgta

SEQ ID NO: 3327606 - DNA, 25 bp, Homo sapien
ttctaccttctgatcgccattgctg

SEQ ID NO: 3327607 - DNA, 25 bp, Homo sapien
tctaccttctgatcgccattgctgt

SEQ ID NO: 3327608 - DNA, 25 bp, Homo sapien
gttctaccttctgatcgccattgct

SEQ ID NO: 3327609 - DNA, 25 bp, Homo sapien
ttatctcattaagtgcacaaccatg

SEQ ID NO: 3327610 - DNA, 25 bp, Homo sapien
taaataatttccaaagagacgagtg

SEQ ID NO: 3327611 - DNA, 25 bp, Homo sapien
tcacatcgctggcactggaagtacc

SEQ ID NO: 3327612 - DNA, 25 bp, Homo sapien
caatgcttggcacgtaacagatgtt

SEQ ID NO: 3327613 - DNA, 25 bp, Homo sapien
tgacctcactgaacactaaactttc

SEQ ID NO: 3327614 - DNA, 25 bp, Homo sapien
gcttcagctgatacatacatgagga

SEQ ID NO: 3327615 - DNA, 25 bp, Homo sapien
tacactctgtgtcttggagaatcca

SEQ ID NO: 3327616 - DNA, 25 bp, Homo sapien
ggcaatccttccaatcaaattaaaa

SEQ ID NO: 3327617 - DNA, 25 bp, Homo sapien
gattctcctattagtgacactgttg

SEQ ID NO: 3327618 - DNA, 25 bp, Homo sapien
tagtgacactgttgcagtataagcg

SEQ ID NO: 3327619 - DNA, 25 bp, Homo sapien
tggaagataaaacgattgattctcc

SEQ ID NO: 3327620 - DNA, 25 bp, Homo sapien
ctgttgcagtataagcgggcttgtc

SEQ ID NO: 3327621 - DNA, 25 bp, Homo sapien
caggcggtccagcgcatcgagccgc

SEQ ID NO: 3327622 - DNA, 25 bp, Homo sapien
gcgcaccgagatgcccccgaatctg

SEQ ID NO: 3327623 - DNA, 25 bp, Homo sapien
cgcgccaggcgcaccgagatgcccc

SEQ ID NO: 3327624 - DNA, 25 bp, Homo sapien
gtccagcgcatcgagccgcgccagg

SEQ ID NO: 3327625 - DNA, 25 bp, Homo sapien
tccaactggcggattccgcacgtaa

SEQ ID NO: 3327626 - DNA, 25 bp, Homo sapien
ctgtgcgcccgaggcccagcggtaa

SEQ ID NO: 3327627 - DNA, 25 bp, Homo sapien
ggattccgcacgtaaccctgtgcgc

SEQ ID NO: 3327628 - DNA, 25 bp, Homo sapien
gcagatcgcacgctccaactggcgg

SEQ ID NO: 3327629 - DNA, 25 bp, Homo sapien
ggccccagctcagtggctgccgcat

SEQ ID NO: 3327630 - DNA, 25 bp, Homo sapien
cagcggccccagctcagtggctgcc

SEQ ID NO: 3327631 - DNA, 25 bp, Homo sapien
gccagcggccccagctcagtggctg

SEQ ID NO: 3327632 - DNA, 25 bp, Homo sapien
gcgcgccagcggccccagctcagtg

SEQ ID NO: 3327633 - DNA, 25 bp, Homo sapien
aatctaagtggcagttccgttcctg

SEQ ID NO: 3327634 - DNA, 25 bp, Homo sapien
gatgccgttacagctgtttcaaaga

SEQ ID NO: 3327635 - DNA, 25 bp, Homo sapien
tggtagtttaattcaacagacgttg

SEQ ID NO: 3327636 - DNA, 25 bp, Homo sapien
aggagatgcaaaaacgtcctgtttt

SEQ ID NO: 3327637 - DNA, 25 bp, Homo sapien
tcttgtcacattggctcagatgggc

SEQ ID NO: 3327638 - DNA, 25 bp, Homo sapien
gactgggctcccttggaatctgctg

SEQ ID NO: 3327639 - DNA, 25 bp, Homo sapien
gatggaggttggtgttcttgtcaca

SEQ ID NO: 3327640 - DNA, 25 bp, Homo sapien
tccgtacatagatgggatagctccc

SEQ ID NO: 3327641 - DNA, 25 bp, Homo sapien
gaactgtgtcagaatagccagatgc

SEQ ID NO: 3327642 - DNA, 25 bp, Homo sapien
aatagccagatgctcggagaaacat

SEQ ID NO: 3327643 - DNA, 25 bp, Homo sapien
aggaactgtgtcagaatagccagat

SEQ ID NO: 3327644 - DNA, 25 bp, Homo sapien
gaatagccagatgctcggagaaaca

SEQ ID NO: 3327645 - DNA, 25 bp, Homo sapien
aatgaggtaccctcttttaagcagc

SEQ ID NO: 3327646 - DNA, 25 bp, Homo sapien
gatctcaggcttagcggcattctga

SEQ ID NO: 3327647 - DNA, 25 bp, Homo sapien
tctgtgtggcactagagaatctata

SEQ ID NO: 3327648 - DNA, 25 bp, Homo sapien
cagcagcagcatatccagatttgag

SEQ ID NO: 3327649 - DNA, 25 bp, Homo sapien
agcttgctcttctagttgcttaagg

SEQ ID NO: 3327650 - DNA, 25 bp, Homo sapien
tatctataaaactagtgtatatatg

SEQ ID NO: 3327651 - DNA, 25 bp, Homo sapien
catgcatcaccaagcttgactacat

SEQ ID NO: 3327652 - DNA, 25 bp, Homo sapien
tctctaatatatactctcaatacta

SEQ ID NO: 3327653 - DNA, 25 bp, Homo sapien
tatttcctttattactgccattgcc

SEQ ID NO: 3327654 - DNA, 25 bp, Homo sapien
tactcttctggttgagttatttcct

SEQ ID NO: 3327655 - DNA, 25 bp, Homo sapien
tgccattgcctcttgactcgtttct

SEQ ID NO: 3327656 - DNA, 25 bp, Homo sapien
gcctcttgactcgtttctctgcctt

SEQ ID NO: 3327657 - DNA, 25 bp, Homo sapien
ctttgtattcgttagcccagacttt

SEQ ID NO: 3327658 - DNA, 25 bp, Homo sapien
gagtgagtggataaatgaattaact

SEQ ID NO: 3327659 - DNA, 25 bp, Homo sapien
ttccacagatgttgagtgagtggat

SEQ ID NO: 3327660 - DNA, 25 bp, Homo sapien
ttcatctttgtattcgttagcccag

SEQ ID NO: 3327661 - DNA, 25 bp, Homo sapien
ggccagctcttttactcagttgccc

SEQ ID NO: 3327662 - DNA, 25 bp, Homo sapien
gccagctcttttactcagttgccca

SEQ ID NO: 3327663 - DNA, 25 bp, Homo sapien
tacttaagtggcatgcagtgtcttg

SEQ ID NO: 3327664 - DNA, 25 bp, Homo sapien
caacagttgcgctccttggtactta

SEQ ID NO: 3327665 - DNA, 25 bp, Homo sapien
gcaattgagtcatgtcctagcttcc

SEQ ID NO: 3327666 - DNA, 25 bp, Homo sapien
tggaagcaagggatagctgacatct

SEQ ID NO: 3327667 - DNA, 25 bp, Homo sapien
ataagcacaataaaaccacagtagg

SEQ ID NO: 3327668 - DNA, 25 bp, Homo sapien
gctccaaaaattagtaagcacaaag

SEQ ID NO: 3327669 - DNA, 25 bp, Homo sapien
tacttgtaataacatgaacataaaa

SEQ ID NO: 3327670 - DNA, 25 bp, Homo sapien
caacatgtaaaggtagctccaaaaa

SEQ ID NO: 3327671 - DNA, 25 bp, Homo sapien
ttggaagtcctggctgggctccaca

SEQ ID NO: 3327672 - DNA, 25 bp, Homo sapien
aagtcctggctgggctccacagtcc

SEQ ID NO: 3327673 - DNA, 25 bp, Homo sapien
ggaagtcctggctgggctccacagt

SEQ ID NO: 3327674 - DNA, 25 bp, Homo sapien
gtggattggaagtcctggctgggct

SEQ ID NO: 3327675 - DNA, 25 bp, Homo sapien
caaaccccagggactgattcaccta

SEQ ID NO: 3327676 - DNA, 25 bp, Homo sapien
accccagggactgattcacctaact

SEQ ID NO: 3327677 - DNA, 25 bp, Homo sapien
ccccagggactgattcacctaactg

SEQ ID NO: 3327678 - DNA, 25 bp, Homo sapien
gctctttctctgcacatttaaccat

SEQ ID NO: 3327679 - DNA, 25 bp, Homo sapien
gaagaactattttcaagctagtgta

SEQ ID NO: 3327680 - DNA, 25 bp, Homo sapien
ctcttgggtccagggttatagagca

SEQ ID NO: 3327681 - DNA, 25 bp, Homo sapien
gcatagtaagaagccgaaaagaatg

SEQ ID NO: 3327682 - DNA, 25 bp, Homo sapien
taattagatgaggaccataggcagt

SEQ ID NO: 3327683 - DNA, 25 bp, Homo sapien
ttgtgcttaaagtataaaactgttg

SEQ ID NO: 3327684 - DNA, 25 bp, Homo sapien
tgttgtctttccttcttagtttgca

SEQ ID NO: 3327685 - DNA, 25 bp, Homo sapien
tgcttaaagtataaaactgttgtct

SEQ ID NO: 3327686 - DNA, 25 bp, Homo sapien
tccttcttagtttgcatttgctcca

SEQ ID NO: 3327687 - DNA, 25 bp, Homo sapien
caggactctcctcttagcgggcttt

SEQ ID NO: 3327688 - DNA, 25 bp, Homo sapien
ttgcccacaggcagtatatttttct

SEQ ID NO: 3327689 - DNA, 25 bp, Homo sapien
ttcccagatccaaatctagctttta

SEQ ID NO: 3327690 - DNA, 25 bp, Homo sapien
cttcaaggaatttttgcccacaggc

SEQ ID NO: 3327691 - DNA, 25 bp, Homo sapien
taaaaatacagtttagagagccagg

SEQ ID NO: 3327692 - DNA, 25 bp, Homo sapien
tccctgagaggaagattattaactc

SEQ ID NO: 3327693 - DNA, 25 bp, Homo sapien
tatagaacactacctgacaagttgg

SEQ ID NO: 3327694 - DNA, 25 bp, Homo sapien
aagtaattcccagtgctcaaatgtg

SEQ ID NO: 3327695 - DNA, 25 bp, Homo sapien
cagtgttgttaaatagaaaaggtgg

SEQ ID NO: 3327696 - DNA, 25 bp, Homo sapien
cccctgttggctccattaacagctg

SEQ ID NO: 3327697 - DNA, 25 bp, Homo sapien
cagctggagtaaatgccttttgaca

SEQ ID NO: 3327698 - DNA, 25 bp, Homo sapien
gaaaccaagatgttgacagagccta

SEQ ID NO: 3327699 - DNA, 25 bp, Homo sapien
tggggagactgtagttagtgacttg

SEQ ID NO: 3327700 - DNA, 25 bp, Homo sapien
tgtggggagactgtagttagtgact

SEQ ID NO: 3327701 - DNA, 25 bp, Homo sapien
gggagactgtagttagtgacttgtg

SEQ ID NO: 3327702 - DNA, 25 bp, Homo sapien
agactgtagttagtgacttgtgtca

SEQ ID NO: 3327703 - DNA, 25 bp, Homo sapien
ttccacccataccagatcctttcct

SEQ ID NO: 3327704 - DNA, 25 bp, Homo sapien
ccttccacccataccagatcctttc

SEQ ID NO: 3327705 - DNA, 25 bp, Homo sapien
ccacccataccagatcctttccttt

SEQ ID NO: 3327706 - DNA, 25 bp, Homo sapien
cccttccacccataccagatccttt

SEQ ID NO: 3327707 - DNA, 25 bp, Homo sapien
aaaccgacgcatactcaggagcaga

SEQ ID NO: 3327708 - DNA, 25 bp, Homo sapien
tgcctttaccggatgcagcaacaag

SEQ ID NO: 3327709 - DNA, 25 bp, Homo sapien
gatgaactcatccttcaaaccgacg

SEQ ID NO: 3327710 - DNA, 25 bp, Homo sapien
tccatgcctgtcagtaatgaagttg

SEQ ID NO: 3327711 - DNA, 25 bp, Homo sapien
gggaggagccgattgggacaggccc

SEQ ID NO: 3327712 - DNA, 25 bp, Homo sapien
tgtggatattgtccctagactaagg

SEQ ID NO: 3327713 - DNA, 25 bp, Homo sapien
ttatcaagaattgaaggcttctgtg

SEQ ID NO: 3327714 - DNA, 25 bp, Homo sapien
tggcttgttcggtgattctgcctgc

SEQ ID NO: 3327715 - DNA, 25 bp, Homo sapien
tagactaagggaaagccccattgct

SEQ ID NO: 3327716 - DNA, 25 bp, Homo sapien
gattaggttctgctgtggatttctg

SEQ ID NO: 3327717 - DNA, 25 bp, Homo sapien
gaaggagtggttgtgctattccgat

SEQ ID NO: 3327718 - DNA, 25 bp, Homo sapien
ctgaaggctaaagtagggaaggagt

SEQ ID NO: 3327719 - DNA, 25 bp, Homo sapien
ccagagttgtagattaggttctgct

SEQ ID NO: 3327720 - DNA, 25 bp, Homo sapien
tgtgcctgtgatagtctgacttcca

SEQ ID NO: 3327721 - DNA, 25 bp, Homo sapien
ttgtgcctgtgatagtctgacttcc

SEQ ID NO: 3327722 - DNA, 25 bp, Homo sapien
cctgtgatagtctgacttccatctg

SEQ ID NO: 3327723 - DNA, 25 bp, Homo sapien
tgcctgtgatagtctgacttccatc

SEQ ID NO: 3327724 - DNA, 25 bp, Homo sapien
tattcaagatgctgaaaatcctttc

SEQ ID NO: 3327725 - DNA, 25 bp, Homo sapien
cacctagaattcctgagtcattgag

SEQ ID NO: 3327726 - DNA, 25 bp, Homo sapien
gcgacctagtctgttcatcccatga

SEQ ID NO: 3327727 - DNA, 25 bp, Homo sapien
tgggctgcatacactctgagaaaat

SEQ ID NO: 3327728 - DNA, 25 bp, Homo sapien
tggcaagggtctgccacactggaca

SEQ ID NO: 3327729 - DNA, 25 bp, Homo sapien
cagcctgtggtgacatatattctga

SEQ ID NO: 3327730 - DNA, 25 bp, Homo sapien
gaaaacattcccatcattcagaagg

SEQ ID NO: 3327731 - DNA, 25 bp, Homo sapien
ttggacgctgcagatctggaaaaca

SEQ ID NO: 3327732 - DNA, 25 bp, Homo sapien
gtagaaaacaataagtcagtcttgg

SEQ ID NO: 3327733 - DNA, 25 bp, Homo sapien
ccccttcagtagctatgtatcaaaa

SEQ ID NO: 3327734 - DNA, 25 bp, Homo sapien
tttattcagattttcaacccagtca

SEQ ID NO: 3327735 - DNA, 25 bp, Homo sapien
tagtcctaaaccaatagctaataac

SEQ ID NO: 3327736 - DNA, 25 bp, Homo sapien
aggacgcctcgtcagttgagaaaca

SEQ ID NO: 3327737 - DNA, 25 bp, Homo sapien
catattccctttgcaagccctggag

SEQ ID NO: 3327738 - DNA, 25 bp, Homo sapien
gctttcagattatcacggttccaga

SEQ ID NO: 3327739 - DNA, 25 bp, Homo sapien
tgtagacacatcaaaaggacgcctc

SEQ ID NO: 3327740 - DNA, 25 bp, Homo sapien
ttatttggcctctatgccaaatctt

SEQ ID NO: 3327741 - DNA, 25 bp, Homo sapien
atttggcctctatgccaaatcttaa

SEQ ID NO: 3327742 - DNA, 25 bp, Homo sapien
tatttggcctctatgccaaatctta

SEQ ID NO: 3327743 - DNA, 25 bp, Homo sapien
agaggctttgggtgtacttcatact

SEQ ID NO: 3327744 - DNA, 25 bp, Homo sapien
attgcagaacccactagccctggaa

SEQ ID NO: 3327745 - DNA, 25 bp, Homo sapien
gggtgggttcgagttcatcattgca

SEQ ID NO: 3327746 - DNA, 25 bp, Homo sapien
gaaacagtccagtaggatcaaggac

SEQ ID NO: 3327747 - DNA, 25 bp, Homo sapien
aatgggaaggtccacacgcccctat

SEQ ID NO: 3327748 - DNA, 25 bp, Homo sapien
tgaatgggaaggtccacacgcccct

SEQ ID NO: 3327749 - DNA, 25 bp, Homo sapien
tgggaaggtccacacgcccctattc

SEQ ID NO: 3327750 - DNA, 25 bp, Homo sapien
ctcctctggttttagtgaatgggaa

SEQ ID NO: 3327751 - DNA, 25 bp, Homo sapien
tggccaaacccagtactatacagcc

SEQ ID NO: 3327752 - DNA, 25 bp, Homo sapien
cttcacagagaagccggaagacgga

SEQ ID NO: 3327753 - DNA, 25 bp, Homo sapien
gcatcaaagggtacaaacaataacc

SEQ ID NO: 3327754 - DNA, 25 bp, Homo sapien
tgaggatccaacatcatggccaaac

SEQ ID NO: 3327755 - DNA, 25 bp, Homo sapien
aagtaagtcctcgtggctgttgtcg

SEQ ID NO: 3327756 - DNA, 25 bp, Homo sapien
gagtcacaataaggccggaacaccc

SEQ ID NO: 3327757 - DNA, 25 bp, Homo sapien
ctgttgtcggtgaagctctgagagt

SEQ ID NO: 3327758 - DNA, 25 bp, Homo sapien
tcctcttggttggtgaccaaaggga

SEQ ID NO: 3327759 - DNA, 25 bp, Homo sapien
atagaataataactaccctggcggg

SEQ ID NO: 3327760 - DNA, 25 bp, Homo sapien
catgggcagccatacggtcatagtg

SEQ ID NO: 3327761 - DNA, 25 bp, Homo sapien
cactctcttcatgggaaagctgcat

SEQ ID NO: 3327762 - DNA, 25 bp, Homo sapien
tagtaagaatagacacgtcatgggc

SEQ ID NO: 3327763 - DNA, 25 bp, Homo sapien
tatcgcaactgatagcaggactgcg

SEQ ID NO: 3327764 - DNA, 25 bp, Homo sapien
tggagttcccaagaaagaggttctc

SEQ ID NO: 3327765 - DNA, 25 bp, Homo sapien
cactcggtagtgagaatagcgggca

SEQ ID NO: 3327766 - DNA, 25 bp, Homo sapien
cagagcctttgtaggcagatgccag

SEQ ID NO: 3327767 - DNA, 25 bp, Homo sapien
tctgagtgtgcaccaattttattcg

SEQ ID NO: 3327768 - DNA, 25 bp, Homo sapien
tctggtacctttactgtcacagtct

SEQ ID NO: 3327769 - DNA, 25 bp, Homo sapien
cgtttctctggtacctttactgtca

SEQ ID NO: 3327770 - DNA, 25 bp, Homo sapien
accatggaattgaaactgcttcccc

SEQ ID NO: 3327771 - DNA, 25 bp, Homo sapien
caaagtccacgttatttcacaggcc

SEQ ID NO: 3327772 - DNA, 25 bp, Homo sapien
tgatcttgtaagcaccacacctgaa

SEQ ID NO: 3327773 - DNA, 25 bp, Homo sapien
tgtcagagcctgattgcagaacagc

SEQ ID NO: 3327774 - DNA, 25 bp, Homo sapien
acagcagggcgtgcgtatttctttg

SEQ ID NO: 3327775 - DNA, 25 bp, Homo sapien
tgtttgctacaatgaccctgagaag

SEQ ID NO: 3327776 - DNA, 25 bp, Homo sapien
gctacaatgaccctgagaagtggcc

SEQ ID NO: 3327777 - DNA, 25 bp, Homo sapien
gaccctgagaagtggccatcttttc

SEQ ID NO: 3327778 - DNA, 25 bp, Homo sapien
ctttgctgtttgctacaatgaccct

SEQ ID NO: 3327779 - DNA, 25 bp, Homo sapien
actccagcctggcgacaagagctaa

SEQ ID NO: 3327780 - DNA, 25 bp, Homo sapien
ccagcctggcgacaagagctaaact

SEQ ID NO: 3327781 - DNA, 25 bp, Homo sapien
agcctggcgacaagagctaaactcc

SEQ ID NO: 3327782 - DNA, 25 bp, Homo sapien
tccagcctggcgacaagagctaaac

SEQ ID NO: 3327783 - DNA, 25 bp, Homo sapien
cgttaaagtatcatcacagcaggct

SEQ ID NO: 3327784 - DNA, 25 bp, Homo sapien
catttgtggacggatgcctcaataa

SEQ ID NO: 3327785 - DNA, 25 bp, Homo sapien
gaggcggctgaatgagttaacaaac

SEQ ID NO: 3327786 - DNA, 25 bp, Homo sapien
ggcgcccaagaattcgttagctgtg

SEQ ID NO: 3327787 - DNA, 25 bp, Homo sapien
tcctgggcttgataaagtgacatgg

SEQ ID NO: 3327788 - DNA, 25 bp, Homo sapien
cagttcttacagcaaggtgacccca

SEQ ID NO: 3327789 - DNA, 25 bp, Homo sapien
gacatggtagcaacagttcttacag

SEQ ID NO: 3327790 - DNA, 25 bp, Homo sapien
gaccccacaagacatctttgccatg

SEQ ID NO: 3327791 - DNA, 25 bp, Homo sapien
tcataggtctgaaagggcaatccgg

SEQ ID NO: 3327792 - DNA, 25 bp, Homo sapien
ttatgactggatccatcgcccaggg

SEQ ID NO: 3327793 - DNA, 25 bp, Homo sapien
taccactgctccaatgacgacgaag

SEQ ID NO: 3327794 - DNA, 25 bp, Homo sapien
cactgtctattgtaagctggagagc

SEQ ID NO: 3327795 - DNA, 25 bp, Homo sapien
tggccccttggatagttaacagctg

SEQ ID NO: 3327796 - DNA, 25 bp, Homo sapien
gcataggccccttaagtagcatggg

SEQ ID NO: 3327797 - DNA, 25 bp, Homo sapien
ccatccacttgagggtattgagagc

SEQ ID NO: 3327798 - DNA, 25 bp, Homo sapien
tagggctatcttcctagcataggcc

SEQ ID NO: 3327799 - DNA, 25 bp, Homo sapien
agatttctaagaggcttgtcaggtg

SEQ ID NO: 3327800 - DNA, 25 bp, Homo sapien
atttctaagaggcttgtcaggtggc

SEQ ID NO: 3327801 - DNA, 25 bp, Homo sapien
aacactgattcgaaatgtcctcctt

SEQ ID NO: 3327802 - DNA, 25 bp, Homo sapien
gtcaggtggcaaagcataaacactg

SEQ ID NO: 3327803 - DNA, 25 bp, Homo sapien
gacttcattgccgtgattatttttc

SEQ ID NO: 3327804 - DNA, 25 bp, Homo sapien
ctatcaggaataagtagtaaatgac

SEQ ID NO: 3327805 - DNA, 25 bp, Homo sapien
gtctttctgctgcaattagccctta

SEQ ID NO: 3327806 - DNA, 25 bp, Homo sapien
tattattcatgcttagctatcagga

SEQ ID NO: 3327807 - DNA, 25 bp, Homo sapien
ctacttgctgcatttgtacacgtgg

SEQ ID NO: 3327808 - DNA, 25 bp, Homo sapien
cttgctgcatttgtacacgtggtaa

SEQ ID NO: 3327809 - DNA, 25 bp, Homo sapien
tgctgcatttgtacacgtggtaaat

SEQ ID NO: 3327810 - DNA, 25 bp, Homo sapien
acttgctgcatttgtacacgtggta

SEQ ID NO: 3327811 - DNA, 25 bp, Homo sapien
gattttagggcagtagcctgagtgt

SEQ ID NO: 3327812 - DNA, 25 bp, Homo sapien
ctgagagcaaggcaataggaaaact

SEQ ID NO: 3327813 - DNA, 25 bp, Homo sapien
caacgagggtgagatacaggtttac

SEQ ID NO: 3327814 - DNA, 25 bp, Homo sapien
gtgtttgctaaaatggctagccaga

SEQ ID NO: 3327815 - DNA, 25 bp, Homo sapien
agatggtacttccttcacaatcttt

SEQ ID NO: 3327816 - DNA, 25 bp, Homo sapien
cagcagtcagatggtacttccttca

SEQ ID NO: 3327817 - DNA, 25 bp, Homo sapien
attttttgttcctgatctacctgaa

SEQ ID NO: 3327818 - DNA, 25 bp, Homo sapien
ctggattactatcacacagcagtca

SEQ ID NO: 3327819 - DNA, 25 bp, Homo sapien
ttaaacgtagtggcccaagtatcat

SEQ ID NO: 3327820 - DNA, 25 bp, Homo sapien
gcttaaacgtagtggcccaagtatc

SEQ ID NO: 3327821 - DNA, 25 bp, Homo sapien
cttaaacgtagtggcccaagtatca

SEQ ID NO: 3327822 - DNA, 25 bp, Homo sapien
gccttgcccctctgagtgccttgta

SEQ ID NO: 3327823 - DNA, 25 bp, Homo sapien
tctgctacccctcctttgtggtatt

SEQ ID NO: 3327824 - DNA, 25 bp, Homo sapien
ggtattcacgactaaaattcactac

SEQ ID NO: 3327825 - DNA, 25 bp, Homo sapien
taaaatgtctttactgccttgcccc

SEQ ID NO: 3327826 - DNA, 25 bp, Homo sapien
aaattgtgtagggatggaggctcat

SEQ ID NO: 3327827 - DNA, 25 bp, Homo sapien
gctcatgaggaaatctctgagccat

SEQ ID NO: 3327828 - DNA, 25 bp, Homo sapien
tgtagtgaaattgtgtagggatgga

SEQ ID NO: 3327829 - DNA, 25 bp, Homo sapien
tggaggctcatgaggaaatctctga

SEQ ID NO: 3327830 - DNA, 25 bp, Homo sapien
taaacccgaggtagtatgttctaca

SEQ ID NO: 3327831 - DNA, 25 bp, Homo sapien
gcttcatcttgcttaaacccgaggt

SEQ ID NO: 3327832 - DNA, 25 bp, Homo sapien
ttagagtagttgtaggaagtgtgta

SEQ ID NO: 3327833 - DNA, 25 bp, Homo sapien
agggtcaagtgaaggtgagtgagct

SEQ ID NO: 3327834 - DNA, 25 bp, Homo sapien
gagaagaatagagcaagcaaaaaca

SEQ ID NO: 3327835 - DNA, 25 bp, Homo sapien
ctgagaagaatagagcaagcaaaaa

SEQ ID NO: 3327836 - DNA, 25 bp, Homo sapien
agaatagagcaagcaaaaacagtgg

SEQ ID NO: 3327837 - DNA, 25 bp, Homo sapien
gaagaatagagcaagcaaaaacagt

SEQ ID NO: 3327838 - DNA, 25 bp, Homo sapien
aagccatgaccagtttcaaggtagg

SEQ ID NO: 3327839 - DNA, 25 bp, Homo sapien
aaccagtaggatctgaaatacgact

SEQ ID NO: 3327840 - DNA, 25 bp, Homo sapien
tacgacttctaaacagcctgactgc

SEQ ID NO: 3327841 - DNA, 25 bp, Homo sapien
ggaaaaatactgatcaaccagtagg

SEQ ID NO: 3327842 - DNA, 25 bp, Homo sapien
gagtgaggctccactttgatgtggt

SEQ ID NO: 3327843 - DNA, 25 bp, Homo sapien
agcaggcctgatcggctggctggaa

SEQ ID NO: 3327844 - DNA, 25 bp, Homo sapien
aggcctgatcggctggctggaactc

SEQ ID NO: 3327845 - DNA, 25 bp, Homo sapien
ctccactttgatgtggttcgcttgc

SEQ ID NO: 3327846 - DNA, 25 bp, Homo sapien
ctataccacatttaggaacaccaac

SEQ ID NO: 3327847 - DNA, 25 bp, Homo sapien
taactcatcagtggtggagccttgg

SEQ ID NO: 3327848 - DNA, 25 bp, Homo sapien
aaagccaggttctcatcgctgcact

SEQ ID NO: 3327849 - DNA, 25 bp, Homo sapien
cagcagagcctacgacaagaaggtg

SEQ ID NO: 3327850 - DNA, 25 bp, Homo sapien
tgaggaacacagcagccgtctgttg

SEQ ID NO: 3327851 - DNA, 25 bp, Homo sapien
caagacgattgtgtagaagtttcca

SEQ ID NO: 3327852 - DNA, 25 bp, Homo sapien
cagagaataggcttcacactccaca

SEQ ID NO: 3327853 - DNA, 25 bp, Homo sapien
tcagtctgctgtgcaaccttgcctg

SEQ ID NO: 3327854 - DNA, 25 bp, Homo sapien
gtcttctcccgtgaagtgactctgc

SEQ ID NO: 3327855 - DNA, 25 bp, Homo sapien
tcttttgtctgatagctgggatcta

SEQ ID NO: 3327856 - DNA, 25 bp, Homo sapien
ggcacagatccctccgattcttttg

SEQ ID NO: 3327857 - DNA, 25 bp, Homo sapien
ggatctaggccttgacactctggtt

SEQ ID NO: 3327858 - DNA, 25 bp, Homo sapien
caaggctacattgtagggactgggc

SEQ ID NO: 3327859 - DNA, 25 bp, Homo sapien
atcttcccaaaaagcagatcatata

SEQ ID NO: 3327860 - DNA, 25 bp, Homo sapien
aagcagatcatataatgaatcatgc

SEQ ID NO: 3327861 - DNA, 25 bp, Homo sapien
tcatataatgaatcatgctaatcat

SEQ ID NO: 3327862 - DNA, 25 bp, Homo sapien
gcagatcatataatgaatcatgcta

SEQ ID NO: 3327863 - DNA, 25 bp, Homo sapien
cacagctgcccaagaagaattggag

SEQ ID NO: 3327864 - DNA, 25 bp, Homo sapien
ccaccttcgagttctgtgtggtcat

SEQ ID NO: 3327865 - DNA, 25 bp, Homo sapien
ttccaccttcgagttctgtgtggtc

SEQ ID NO: 3327866 - DNA, 25 bp, Homo sapien
cacttccaccttcgagttctgtgtg

SEQ ID NO: 3327867 - DNA, 25 bp, Homo sapien
ttcacttccaccttcgagttctgtg

SEQ ID NO: 3327868 - DNA, 25 bp, Homo sapien
tagctccggtcaagtccacttcttg

SEQ ID NO: 3327869 - DNA, 25 bp, Homo sapien
tgttggttttagctccggtcaagtc

SEQ ID NO: 3327870 - DNA, 25 bp, Homo sapien
ttttagctccggtcaagtccacttc

SEQ ID NO: 3327871 - DNA, 25 bp, Homo sapien
ttggttttagctccggtcaagtcca

SEQ ID NO: 3327872 - DNA, 25 bp, Homo sapien
ttgacccttaactatgaattcctgc

SEQ ID NO: 3327873 - DNA, 25 bp, Homo sapien
agtacattctttcatcacggccttg

SEQ ID NO: 3327874 - DNA, 25 bp, Homo sapien
caaggatcttctgtttcttatccaa

SEQ ID NO: 3327875 - DNA, 25 bp, Homo sapien
gccttggtccaagaattgaccctta

SEQ ID NO: 3327876 - DNA, 25 bp, Homo sapien
tgaaccggggacctcttgatctgca

SEQ ID NO: 3327877 - DNA, 25 bp, Homo sapien
atctgcagtcaaatgctctaccact

SEQ ID NO: 3327878 - DNA, 25 bp, Homo sapien
tgatctgcagtcaaatgctctacca

SEQ ID NO: 3327879 - DNA, 25 bp, Homo sapien
gatttgaaccggggacctcttgatc

SEQ ID NO: 3327880 - DNA, 25 bp, Homo sapien
gggaaatgcataccttgttcagaaa

SEQ ID NO: 3327881 - DNA, 25 bp, Homo sapien
gagaagtggcccgacattctaggta

SEQ ID NO: 3327882 - DNA, 25 bp, Homo sapien
tgattccccagacgggataggcggc

SEQ ID NO: 3327883 - DNA, 25 bp, Homo sapien
gcgaaggcgcgaccacgtgaccttt

SEQ ID NO: 3327884 - DNA, 25 bp, Homo sapien
ccctttggcaggtctgacggcacag

SEQ ID NO: 3327885 - DNA, 25 bp, Homo sapien
tgcactcaggtagaatcaaggtttt

SEQ ID NO: 3327886 - DNA, 25 bp, Homo sapien
gacggcacaggcatcttcagctcaa

SEQ ID NO: 3327887 - DNA, 25 bp, Homo sapien
cacatatggttgttgaactccctca

SEQ ID NO: 3327888 - DNA, 25 bp, Homo sapien
tgacttttattataagctatctaaa

SEQ ID NO: 3327889 - DNA, 25 bp, Homo sapien
atagtagttaatacttacttgactt

SEQ ID NO: 3327890 - DNA, 25 bp, Homo sapien
aaattagcccacattcaacgaccta

SEQ ID NO: 3327891 - DNA, 25 bp, Homo sapien
tttacatttttgagaactggaaaca

SEQ ID NO: 3327892 - DNA, 25 bp, Homo sapien
ttcccaaggcaattacaggattgac

SEQ ID NO: 3327893 - DNA, 25 bp, Homo sapien
tatagtttctccgacacaaaacttc

SEQ ID NO: 3327894 - DNA, 25 bp, Homo sapien
catgggacgtatagacatagggttg

SEQ ID NO: 3327895 - DNA, 25 bp, Homo sapien
ggaaggaacctgtagacatctttca

SEQ ID NO: 3327896 - DNA, 25 bp, Homo sapien
tgacaatgccaagggaagcaaggaa

SEQ ID NO: 3327897 - DNA, 25 bp, Homo sapien
cattgggcagatacggatatttggt

SEQ ID NO: 3327898 - DNA, 25 bp, Homo sapien
ttctgtctggtggtggtgcttagac

SEQ ID NO: 3327899 - DNA, 25 bp, Homo sapien
gtgctgtgctttggtgaaggtcatc

SEQ ID NO: 3327900 - DNA, 25 bp, Homo sapien
ggcaagtggccagctaagtctggag

SEQ ID NO: 3327901 - DNA, 25 bp, Homo sapien
aagtggccagctaagtctggagctc

SEQ ID NO: 3327902 - DNA, 25 bp, Homo sapien
caagtggccagctaagtctggagct

SEQ ID NO: 3327903 - DNA, 25 bp, Homo sapien
gcaagtggccagctaagtctggagc

SEQ ID NO: 3327904 - DNA, 25 bp, Homo sapien
caatctgaacaatttgggttccacg

SEQ ID NO: 3327905 - DNA, 25 bp, Homo sapien
caccaagagcatttcagtcactgtt

SEQ ID NO: 3327906 - DNA, 25 bp, Homo sapien
gaagggcctcctgttggcaacatca

SEQ ID NO: 3327907 - DNA, 25 bp, Homo sapien
tgggttccacgctgtggttttgtaa

SEQ ID NO: 3327908 - DNA, 25 bp, Homo sapien
tttaagtggagacctaagacctctg

SEQ ID NO: 3327909 - DNA, 25 bp, Homo sapien
ccagacctcatttgacggagccaaa

SEQ ID NO: 3327910 - DNA, 25 bp, Homo sapien
caagtcggccactgcagcattgcat

SEQ ID NO: 3327911 - DNA, 25 bp, Homo sapien
gggttctaattcagtacagcaggag

SEQ ID NO: 3327912 - DNA, 25 bp, Homo sapien
caaaaagggaaactataatgacact

SEQ ID NO: 3327913 - DNA, 25 bp, Homo sapien
cagatgacttgcaactcggcatcaa

SEQ ID NO: 3327914 - DNA, 25 bp, Homo sapien
tacacctcacccagattaaacagtt

SEQ ID NO: 3327915 - DNA, 25 bp, Homo sapien
catagtaatgttgaatggacaagct

SEQ ID NO: 3327916 - DNA, 25 bp, Homo sapien
tgagacagactgttcctctgtcgcc

SEQ ID NO: 3327917 - DNA, 25 bp, Homo sapien
tttgagacagactgttcctctgtcg

SEQ ID NO: 3327918 - DNA, 25 bp, Homo sapien
acagactgttcctctgtcgcctagg

SEQ ID NO: 3327919 - DNA, 25 bp, Homo sapien
gacagactgttcctctgtcgcctag

SEQ ID NO: 3327920 - DNA, 25 bp, Homo sapien
tgaaaagaagtacacgaaaacatgc

SEQ ID NO: 3327921 - DNA, 25 bp, Homo sapien
gctcacctctggcactactttgatt

SEQ ID NO: 3327922 - DNA, 25 bp, Homo sapien
gaaatcttgaaatgcaatcgcgtat

SEQ ID NO: 3327923 - DNA, 25 bp, Homo sapien
tgtgggcctcccataactgtctgct

SEQ ID NO: 3327924 - DNA, 25 bp, Homo sapien
acaacggagggttcagtccaggtat

SEQ ID NO: 3327925 - DNA, 25 bp, Homo sapien
tggaaacaacggagggttcagtcca

SEQ ID NO: 3327926 - DNA, 25 bp, Homo sapien
tccaggtattctgccccccaaatga

SEQ ID NO: 3327927 - DNA, 25 bp, Homo sapien
gggttcagtccaggtattctgcccc

SEQ ID NO: 3327928 - DNA, 25 bp, Homo sapien
agaatggccttgcatcgacccacgt

SEQ ID NO: 3327929 - DNA, 25 bp, Homo sapien
tctaggtcttgaaacctgcatccaa

SEQ ID NO: 3327930 - DNA, 25 bp, Homo sapien
ctggatcagggatagagaatggcct

SEQ ID NO: 3327931 - DNA, 25 bp, Homo sapien
cacgtctccgcagtcgttaagtgca

SEQ ID NO: 3327932 - DNA, 25 bp, Homo sapien
gaagaccattgtgatgaagatggta

SEQ ID NO: 3327933 - DNA, 25 bp, Homo sapien
tgaagaccattgtgatgaagatggt

SEQ ID NO: 3327934 - DNA, 25 bp, Homo sapien
atgaagaccattgtgatgaagatgg

SEQ ID NO: 3327935 - DNA, 25 bp, Homo sapien
aagttcttctcttgatgataatgat

SEQ ID NO: 3327936 - DNA, 25 bp, Homo sapien
agtgatgcaaagtccccggcttggc

SEQ ID NO: 3327937 - DNA, 25 bp, Homo sapien
gaaatccttgttgccataacaccag

SEQ ID NO: 3327938 - DNA, 25 bp, Homo sapien
gaacttgatagctctgtaaacactg

SEQ ID NO: 3327939 - DNA, 25 bp, Homo sapien
ttggcttgtcagaacttgatagctc

SEQ ID NO: 3327940 - DNA, 25 bp, Homo sapien
aatattctattgctgggaaatatag

SEQ ID NO: 3327941 - DNA, 25 bp, Homo sapien
tctattgctgggaaatatagcgtaa

SEQ ID NO: 3327942 - DNA, 25 bp, Homo sapien
caaaggtaggaaaatattctattgc

SEQ ID NO: 3327943 - DNA, 25 bp, Homo sapien
tgctgggaaatatagcgtaaaggat

SEQ ID NO: 3327944 - DNA, 25 bp, Homo sapien
ggtgcttcccaatacccactggata

SEQ ID NO: 3327945 - DNA, 25 bp, Homo sapien
ggtacacatattccctaaggtctgc

SEQ ID NO: 3327946 - DNA, 25 bp, Homo sapien
atactgtctttcagtgcccggcaca

SEQ ID NO: 3327947 - DNA, 25 bp, Homo sapien
taacatccaagctcctgaacgtggt

SEQ ID NO: 3327948 - DNA, 25 bp, Homo sapien
cataatgtgagcgtctgcctgggtg

SEQ ID NO: 3327949 - DNA, 25 bp, Homo sapien
caggaagatagtgtacttattgctt

SEQ ID NO: 3327950 - DNA, 25 bp, Homo sapien
gtgtgttggtgccactccgtgtaca

SEQ ID NO: 3327951 - DNA, 25 bp, Homo sapien
catgaggagtactgaattgctttgg

SEQ ID NO: 3327952 - DNA, 25 bp, Homo sapien
caaggaggggccaaactgtctccct

SEQ ID NO: 3327953 - DNA, 25 bp, Homo sapien
taaggcaagctctagaaaccagggt

SEQ ID NO: 3327954 - DNA, 25 bp, Homo sapien
aaacagcacacagtcgatgttgccc

SEQ ID NO: 3327955 - DNA, 25 bp, Homo sapien
tcctctgtggtcagcgcagttcctg

SEQ ID NO: 3327956 - DNA, 25 bp, Homo sapien
acagtcgatgttgcccgatcctctg

SEQ ID NO: 3327957 - DNA, 25 bp, Homo sapien
atgttgtaattctggcaaaaagccc

SEQ ID NO: 3327958 - DNA, 25 bp, Homo sapien
tgttgtaattctggcaaaaagccca

SEQ ID NO: 3327959 - DNA, 25 bp, Homo sapien
ttgtaattctggcaaaaagcccaca

SEQ ID NO: 3327960 - DNA, 25 bp, Homo sapien
aatgttgtaattctggcaaaaagcc

SEQ ID NO: 3327961 - DNA, 25 bp, Homo sapien
tctctaaacgatgctactggtagcc

SEQ ID NO: 3327962 - DNA, 25 bp, Homo sapien
ctggaatctctatgttcaaaaccac

SEQ ID NO: 3327963 - DNA, 25 bp, Homo sapien
aactcaatttgcacaatctctaaac

SEQ ID NO: 3327964 - DNA, 25 bp, Homo sapien
tctctatgttcaaaaccacttcttg

SEQ ID NO: 3327965 - DNA, 25 bp, Homo sapien
tattatgacataaggaagaggttcc

SEQ ID NO: 3327966 - DNA, 25 bp, Homo sapien
ctattatgacataaggaagaggttc

SEQ ID NO: 3327967 - DNA, 25 bp, Homo sapien
tatgacataaggaagaggttccagc

SEQ ID NO: 3327968 - DNA, 25 bp, Homo sapien
tgacataaggaagaggttccagcac

SEQ ID NO: 3327969 - DNA, 25 bp, Homo sapien
ccagggtccttcccattggttctca

SEQ ID NO: 3327970 - DNA, 25 bp, Homo sapien
cagggtccttcccattggttctcac

SEQ ID NO: 3327971 - DNA, 25 bp, Homo sapien
tcaggaaactatcttggctcctaga

SEQ ID NO: 3327972 - DNA, 25 bp, Homo sapien
ggtggagcacactggcgcttcagtt

SEQ ID NO: 3327973 - DNA, 25 bp, Homo sapien
ggaaactatcttggctcctagagtg

SEQ ID NO: 3327974 - DNA, 25 bp, Homo sapien
gtggagcacactggcgcttcagttg

SEQ ID NO: 3327975 - DNA, 25 bp, Homo sapien
acagcattctgggtaacattctaga

SEQ ID NO: 3327976 - DNA, 25 bp, Homo sapien
agcattctgggtaacattctagact

SEQ ID NO: 3327977 - DNA, 25 bp, Homo sapien
caacagcattctgggtaacattcta

SEQ ID NO: 3327978 - DNA, 25 bp, Homo sapien
ccaacagcattctgggtaacattct

SEQ ID NO: 3327979 - DNA, 25 bp, Homo sapien
tgtctccccggtagagctgaacaga

SEQ ID NO: 3327980 - DNA, 25 bp, Homo sapien
gatcattacctaatctcttcctgtc

SEQ ID NO: 3327981 - DNA, 25 bp, Homo sapien
tctccccggtagagctgaacagagc

SEQ ID NO: 3327982 - DNA, 25 bp, Homo sapien
tgtttcagcagcagatcattaccta

SEQ ID NO: 3327983 - DNA, 25 bp, Homo sapien
gcctggtcattagtgaggagcaaga

SEQ ID NO: 3327984 - DNA, 25 bp, Homo sapien
aagagagcctgatgattagtccttg

SEQ ID NO: 3327985 - DNA, 25 bp, Homo sapien
tggcctccagagttcagcgtgacag

SEQ ID NO: 3327986 - DNA, 25 bp, Homo sapien
gatgattagtccttgcagcactgga

SEQ ID NO: 3327987 - DNA, 25 bp, Homo sapien
caagagccattgcttgacagaggca

SEQ ID NO: 3327988 - DNA, 25 bp, Homo sapien
cattggatgtgcatatgttggtgaa

SEQ ID NO: 3327989 - DNA, 25 bp, Homo sapien
gaggccttcacccatggctgtgaga

SEQ ID NO: 3327990 - DNA, 25 bp, Homo sapien
ggtgaatacagttccagacttgcga

SEQ ID NO: 3327991 - DNA, 25 bp, Homo sapien
tctcattgtgttgcttgcctgccat

SEQ ID NO: 3327992 - DNA, 25 bp, Homo sapien
ggttgagaacaccagaattctctca

SEQ ID NO: 3327993 - DNA, 25 bp, Homo sapien
agaacaccagaattctctcattgtg

SEQ ID NO: 3327994 - DNA, 25 bp, Homo sapien
acaccagaattctctcattgtgttg

SEQ ID NO: 3327995 - DNA, 25 bp, Homo sapien
agttataagtgctttcaataactgg

SEQ ID NO: 3327996 - DNA, 25 bp, Homo sapien
tgctttcaataactggtgaatgcaa

SEQ ID NO: 3327997 - DNA, 25 bp, Homo sapien
tataagtgctttcaataactggtga

SEQ ID NO: 3327998 - DNA, 25 bp, Homo sapien
agtgctttcaataactggtgaatgc

SEQ ID NO: 3327999 - DNA, 25 bp, Homo sapien
aagcacagggagagatcttcgtgct

SEQ ID NO: 3328000 - DNA, 25 bp, Homo sapien
ctcaagcacagggagagatcttcgt

SEQ ID NO: 3328001 - DNA, 25 bp, Homo sapien
caagcacagggagagatcttcgtgc

SEQ ID NO: 3328002 - DNA, 25 bp, Homo sapien
tcaagcacagggagagatcttcgtg

SEQ ID NO: 3328003 - DNA, 25 bp, Homo sapien
ctgcttccaatcaggactgctactg

SEQ ID NO: 3328004 - DNA, 25 bp, Homo sapien
gctcgctcctaaagctatgactgca

SEQ ID NO: 3328005 - DNA, 25 bp, Homo sapien
ggtgctgtagctacccatttggctt

SEQ ID NO: 3328006 - DNA, 25 bp, Homo sapien
tcagctgggaagttatctgctgtgg

SEQ ID NO: 3328007 - DNA, 25 bp, Homo sapien
tcctggtcagctgggaagttatctg

SEQ ID NO: 3328008 - DNA, 25 bp, Homo sapien
agggctccgggcctttgatcacgga

SEQ ID NO: 3328009 - DNA, 25 bp, Homo sapien
gatcacggataccatttgcaatctg

SEQ ID NO: 3328010 - DNA, 25 bp, Homo sapien
gctgtttgcctaagttcctccaggg

SEQ ID NO: 3328011 - DNA, 25 bp, Homo sapien
ggaagcattctgctgcgtgctgttt

SEQ ID NO: 3328012 - DNA, 25 bp, Homo sapien
gcgtgtacaaggtggatgctgctcc

SEQ ID NO: 3328013 - DNA, 25 bp, Homo sapien
gtggatgctgctccattagcgtgga

SEQ ID NO: 3328014 - DNA, 25 bp, Homo sapien
gcccctgccatgagagcagcgtgta

SEQ ID NO: 3328015 - DNA, 25 bp, Homo sapien
cacatccgagcagttcttttccttg

SEQ ID NO: 3328016 - DNA, 25 bp, Homo sapien
taagaaacagcttctgtgtaacagc

SEQ ID NO: 3328017 - DNA, 25 bp, Homo sapien
tatgcctaaagaccacagaatctag

SEQ ID NO: 3328018 - DNA, 25 bp, Homo sapien
cagaatctaggcctttacatgtggg

SEQ ID NO: 3328019 - DNA, 25 bp, Homo sapien
gatgtcttctcaacttgcttaggag

SEQ ID NO: 3328020 - DNA, 25 bp, Homo sapien
tcttcctgttgggttgcaaacatgg

SEQ ID NO: 3328021 - DNA, 25 bp, Homo sapien
cctcttcctgttgggttgcaaacat

SEQ ID NO: 3328022 - DNA, 25 bp, Homo sapien
ttcctgttgggttgcaaacatggcc

SEQ ID NO: 3328023 - DNA, 25 bp, Homo sapien
cctggcttactcctcttcctgttgg

SEQ ID NO: 3328024 - DNA, 25 bp, Homo sapien
agcgatgcactgagatcctctgaag

SEQ ID NO: 3328025 - DNA, 25 bp, Homo sapien
ctcagcgatgcactgagatcctctg

SEQ ID NO: 3328026 - DNA, 25 bp, Homo sapien
cgatgcactgagatcctctgaagca

SEQ ID NO: 3328027 - DNA, 25 bp, Homo sapien
atgcactgagatcctctgaagcagg

SEQ ID NO: 3328028 - DNA, 25 bp, Homo sapien
tctgtttgatgactgtggaatgact

SEQ ID NO: 3328029 - DNA, 25 bp, Homo sapien
ctctgtttgatgactgtggaatgac

SEQ ID NO: 3328030 - DNA, 25 bp, Homo sapien
tctctgtttgatgactgtggaatga

SEQ ID NO: 3328031 - DNA, 25 bp, Homo sapien
gtctctgtttgatgactgtggaatg

SEQ ID NO: 3328032 - DNA, 25 bp, Homo sapien
tgctcaagcactgttgttggtttgg

SEQ ID NO: 3328033 - DNA, 25 bp, Homo sapien
gtggccaaatgaattacccgtattg

SEQ ID NO: 3328034 - DNA, 25 bp, Homo sapien
ttgctttccgcaacaactgaattct

SEQ ID NO: 3328035 - DNA, 25 bp, Homo sapien
ccttgcaaggtcgagggtggccaaa

SEQ ID NO: 3328036 - DNA, 25 bp, Homo sapien
ttgataggattccatgaaaacacca

SEQ ID NO: 3328037 - DNA, 25 bp, Homo sapien
tttgataggattccatgaaaacacc

SEQ ID NO: 3328038 - DNA, 25 bp, Homo sapien
ctttaaccagggtagctatggccac

SEQ ID NO: 3328039 - DNA, 25 bp, Homo sapien
ctactttaaccagggtagctatggc

SEQ ID NO: 3328040 - DNA, 25 bp, Homo sapien
accagggtagctatggccacatttg

SEQ ID NO: 3328041 - DNA, 25 bp, Homo sapien
taaccagggtagctatggccacatt

SEQ ID NO: 3328042 - DNA, 25 bp, Homo sapien
tctgacaaaggtccctataaggaat

SEQ ID NO: 3328043 - DNA, 25 bp, Homo sapien
ccatgtcacaccagtcaaaatggtg

SEQ ID NO: 3328044 - DNA, 25 bp, Homo sapien
ggaatttttacaattgaacaagcaa

SEQ ID NO: 3328045 - DNA, 25 bp, Homo sapien
cagatgcttgtgagcctgcagagaa

SEQ ID NO: 3328046 - DNA, 25 bp, Homo sapien
tcttcgagtctcgtagatgtctttg

SEQ ID NO: 3328047 - DNA, 25 bp, Homo sapien
tctacttaactcgttcagaaaaatg

SEQ ID NO: 3328048 - DNA, 25 bp, Homo sapien
gagtctcgtagatgtctttgtcagc

SEQ ID NO: 3328049 - DNA, 25 bp, Homo sapien
atacagaggctgttgtctacttaac

SEQ ID NO: 3328050 - DNA, 25 bp, Homo sapien
cttgggaatggtgaggatgactgcc

SEQ ID NO: 3328051 - DNA, 25 bp, Homo sapien
gaggatgactgccagcagtccccat

SEQ ID NO: 3328052 - DNA, 25 bp, Homo sapien
ttgggaatggtgaggatgactgcca

SEQ ID NO: 3328053 - DNA, 25 bp, Homo sapien
ggtgaggatgactgccagcagtccc

SEQ ID NO: 3328054 - DNA, 25 bp, Homo sapien
cagatttgcaggtcgggtttttcaa

SEQ ID NO: 3328055 - DNA, 25 bp, Homo sapien
tcagatttgcaggtcgggtttttca

SEQ ID NO: 3328056 - DNA, 25 bp, Homo sapien
tttgcaggtcgggtttttcaatcac

SEQ ID NO: 3328057 - DNA, 25 bp, Homo sapien
caggtcgggtttttcaatcactggg

SEQ ID NO: 3328058 - DNA, 25 bp, Homo sapien
atttccaatcttgccccatggtttg

SEQ ID NO: 3328059 - DNA, 25 bp, Homo sapien
aggatgtatgaagaccattattatt

SEQ ID NO: 3328060 - DNA, 25 bp, Homo sapien
cttgttcactgcctatgggaggatg

SEQ ID NO: 3328061 - DNA, 25 bp, Homo sapien
tgttcactgcctatgggaggatgta

SEQ ID NO: 3328062 - DNA, 25 bp, Homo sapien
cagattccagtgtctctggatcaat

SEQ ID NO: 3328063 - DNA, 25 bp, Homo sapien
aaggaagtacaaccgtgatgcacca

SEQ ID NO: 3328064 - DNA, 25 bp, Homo sapien
aaaggaagtacaaccgtgatgcacc

SEQ ID NO: 3328065 - DNA, 25 bp, Homo sapien
caaaggaagtacaaccgtgatgcac

SEQ ID NO: 3328066 - DNA, 25 bp, Homo sapien
gagtaagaagtacgcattcataagg

SEQ ID NO: 3328067 - DNA, 25 bp, Homo sapien
taagaagtacgcattcataaggaac

SEQ ID NO: 3328068 - DNA, 25 bp, Homo sapien
gaagtacgcattcataaggaaccat

SEQ ID NO: 3328069 - DNA, 25 bp, Homo sapien
tcagagtaagaagtacgcattcata

SEQ ID NO: 3328070 - DNA, 25 bp, Homo sapien
tctgaaagttgttattaatctcccc

SEQ ID NO: 3328071 - DNA, 25 bp, Homo sapien
ttctagggaaatggatctcatgctg

SEQ ID NO: 3328072 - DNA, 25 bp, Homo sapien
taatctcccctcatcccaaaattga

SEQ ID NO: 3328073 - DNA, 25 bp, Homo sapien
gaactttgcttaaatcttagaatca

SEQ ID NO: 3328074 - DNA, 25 bp, Homo sapien
taaagagaattgttatgcacagaca

SEQ ID NO: 3328075 - DNA, 25 bp, Homo sapien
catgagcggtcatgggcttcataaa

SEQ ID NO: 3328076 - DNA, 25 bp, Homo sapien
tggctgtccatgagcggtcatgggc

SEQ ID NO: 3328077 - DNA, 25 bp, Homo sapien
ggtcatgggcttcataaagagaatt

SEQ ID NO: 3328078 - DNA, 25 bp, Homo sapien
cagattggttcatgacataaacttt

SEQ ID NO: 3328079 - DNA, 25 bp, Homo sapien
ccatgtatcacttcctactgtaagg

SEQ ID NO: 3328080 - DNA, 25 bp, Homo sapien
ccacgttgccccagattggttcatg

SEQ ID NO: 3328081 - DNA, 25 bp, Homo sapien
tactgtaaggttccacgttgcccca

SEQ ID NO: 3328082 - DNA, 25 bp, Homo sapien
ctattcattgggcttagtcctggaa

SEQ ID NO: 3328083 - DNA, 25 bp, Homo sapien
aaaggtgtcagtcttttctattggg

SEQ ID NO: 3328084 - DNA, 25 bp, Homo sapien
tgttcaccacaacttcaagtgctag

SEQ ID NO: 3328085 - DNA, 25 bp, Homo sapien
ggtcaagaagtagtcagtatcctgt

SEQ ID NO: 3328086 - DNA, 25 bp, Homo sapien
tgccttcaaattcaatgattttatt

SEQ ID NO: 3328087 - DNA, 25 bp, Homo sapien
cttgccttcaaattcaatgatttta

SEQ ID NO: 3328088 - DNA, 25 bp, Homo sapien
aacttgccttcaaattcaatgattt

SEQ ID NO: 3328089 - DNA, 25 bp, Homo sapien
acttgccttcaaattcaatgatttt

SEQ ID NO: 3328090 - DNA, 25 bp, Homo sapien
gaagaaccttgggtgcactaagccc

SEQ ID NO: 3328091 - DNA, 25 bp, Homo sapien
cactgtgatactttctatgcagagt

SEQ ID NO: 3328092 - DNA, 25 bp, Homo sapien
gagccttccatgcattgacactgtg

SEQ ID NO: 3328093 - DNA, 25 bp, Homo sapien
tgacactgtgatactttctatgcag

SEQ ID NO: 3328094 - DNA, 25 bp, Homo sapien
cttctatcaacttctgaaagccctt

SEQ ID NO: 3328095 - DNA, 25 bp, Homo sapien
cttttttcaaggttccttgcaatgg

SEQ ID NO: 3328096 - DNA, 25 bp, Homo sapien
gacgtttgtgattttagacactctg

SEQ ID NO: 3328097 - DNA, 25 bp, Homo sapien
gaatgtccccgtaggacagaagctg

SEQ ID NO: 3328098 - DNA, 25 bp, Homo sapien
ctgtttggaagcctcattgacgttt

SEQ ID NO: 3328099 - DNA, 25 bp, Homo sapien
ctgaatgtccccgtaggacagaagc

SEQ ID NO: 3328100 - DNA, 25 bp, Homo sapien
gagggttccacaggcgtatttctga

SEQ ID NO: 3328101 - DNA, 25 bp, Homo sapien
tgccagatccgcatgtagagggttc

SEQ ID NO: 3328102 - DNA, 25 bp, Homo sapien
tgtgttgaatgcttgccagatccgc

SEQ ID NO: 3328103 - DNA, 25 bp, Homo sapien
taattgcgtttgtgttgaatgcttg

SEQ ID NO: 3328104 - DNA, 25 bp, Homo sapien
tcgcatcggaggccacttcaaaagt

SEQ ID NO: 3328105 - DNA, 25 bp, Homo sapien
cttcgcatcggaggccacttcaaaa

SEQ ID NO: 3328106 - DNA, 25 bp, Homo sapien
gcatcggaggccacttcaaaagtgc

SEQ ID NO: 3328107 - DNA, 25 bp, Homo sapien
cgcatcggaggccacttcaaaagtg

SEQ ID NO: 3328108 - DNA, 25 bp, Homo sapien
tagttctcttcgggcttttgtaaca

SEQ ID NO: 3328109 - DNA, 25 bp, Homo sapien
ctgttgcagcttgtagaaggaagta

SEQ ID NO: 3328110 - DNA, 25 bp, Homo sapien
gctggaagggttggttgatagttct

SEQ ID NO: 3328111 - DNA, 25 bp, Homo sapien
gcagcttgtagaaggaagtagttct

SEQ ID NO: 3328112 - DNA, 25 bp, Homo sapien
ttctcagctaagcagatgagatgga

SEQ ID NO: 3328113 - DNA, 25 bp, Homo sapien
cccaccagagatatgtacaatatgg

SEQ ID NO: 3328114 - DNA, 25 bp, Homo sapien
gagatggctgtcctaggaactgcag

SEQ ID NO: 3328115 - DNA, 25 bp, Homo sapien
caggaaatatagttgcattgggaaa

SEQ ID NO: 3328116 - DNA, 25 bp, Homo sapien
ccttcgggctgtttgcagaaataat

SEQ ID NO: 3328117 - DNA, 25 bp, Homo sapien
cagaaatatgtagtgctctgagcac

SEQ ID NO: 3328118 - DNA, 25 bp, Homo sapien
tcgggctgtttgcagaaataattcc

SEQ ID NO: 3328119 - DNA, 25 bp, Homo sapien
tccttcgggctgtttgcagaaataa

SEQ ID NO: 3328120 - DNA, 25 bp, Homo sapien
tggtcgttagcaaggtgaaagattg

SEQ ID NO: 3328121 - DNA, 25 bp, Homo sapien
gtggtcgttagcaaggtgaaagatt

SEQ ID NO: 3328122 - DNA, 25 bp, Homo sapien
attctgtacccaacacaaatgattc

SEQ ID NO: 3328123 - DNA, 25 bp, Homo sapien
ttgacgcatacaggtctagcatctt

SEQ ID NO: 3328124 - DNA, 25 bp, Homo sapien
ctaagattatcaagcaaccctcgcc

SEQ ID NO: 3328125 - DNA, 25 bp, Homo sapien
accctcgccgctgagacactctgag

SEQ ID NO: 3328126 - DNA, 25 bp, Homo sapien
ttttcctaagattatcaagcaaccc

SEQ ID NO: 3328127 - DNA, 25 bp, Homo sapien
cttccttgtaatactgtgagctcca

SEQ ID NO: 3328128 - DNA, 25 bp, Homo sapien
agcagggcatagaggttgacttcca

SEQ ID NO: 3328129 - DNA, 25 bp, Homo sapien
gcagggcatagaggttgacttccat

SEQ ID NO: 3328130 - DNA, 25 bp, Homo sapien
gaatctatcaagaagttgcctctgg

SEQ ID NO: 3328131 - DNA, 25 bp, Homo sapien
ggctgttattgtaggaattgaatct

SEQ ID NO: 3328132 - DNA, 25 bp, Homo sapien
aaaacacaggcccaaaaccactcat

SEQ ID NO: 3328133 - DNA, 25 bp, Homo sapien
attttctgacctatggctgttattg

SEQ ID NO: 3328134 - DNA, 25 bp, Homo sapien
acagccagtacatctgtttataaga

SEQ ID NO: 3328135 - DNA, 25 bp, Homo sapien
tagaaaagtaccagaatccccagcc

SEQ ID NO: 3328136 - DNA, 25 bp, Homo sapien
aagatagtctgtcacaaaaacagcc

SEQ ID NO: 3328137 - DNA, 25 bp, Homo sapien
taaactatctcacctcgggtacctc

SEQ ID NO: 3328138 - DNA, 25 bp, Homo sapien
gtgccttcacctggtcttccctgtg

SEQ ID NO: 3328139 - DNA, 25 bp, Homo sapien
tgagatctcttgtcttggcttgaag

SEQ ID NO: 3328140 - DNA, 25 bp, Homo sapien
gcagggcagttttcttctgagatct

SEQ ID NO: 3328141 - DNA, 25 bp, Homo sapien
ccagctctgggcattgtaaatctga

SEQ ID NO: 3328142 - DNA, 25 bp, Homo sapien
ccttgcatgtgaaacttgctgaagg

SEQ ID NO: 3328143 - DNA, 25 bp, Homo sapien
tccttgcatgtgaaacttgctgaag

SEQ ID NO: 3328144 - DNA, 25 bp, Homo sapien
tgctgaaggggaacgtgattttatt

SEQ ID NO: 3328145 - DNA, 25 bp, Homo sapien
aaacttgctgaaggggaacgtgatt

SEQ ID NO: 3328146 - DNA, 25 bp, Homo sapien
tgtgtcgctacttcagtgtcctgtt

SEQ ID NO: 3328147 - DNA, 25 bp, Homo sapien
gaggtgagtattcttcctcttcccc

SEQ ID NO: 3328148 - DNA, 25 bp, Homo sapien
caaatgtgtcgctacttcagtgtcc

SEQ ID NO: 3328149 - DNA, 25 bp, Homo sapien
ccccatggtgccatgtaagtagcac

SEQ ID NO: 3328150 - DNA, 25 bp, Homo sapien
actgaagttttgttaatgcaacaaa

SEQ ID NO: 3328151 - DNA, 25 bp, Homo sapien
taatgcaacaaattcttcgacagac

SEQ ID NO: 3328152 - DNA, 25 bp, Homo sapien
ttgttaatgcaacaaattcttcgac

SEQ ID NO: 3328153 - DNA, 25 bp, Homo sapien
aacaaattcttcgacagactctgag

SEQ ID NO: 3328154 - DNA, 25 bp, Homo sapien
tgcaatatgaaggtcagatgccagg

SEQ ID NO: 3328155 - DNA, 25 bp, Homo sapien
atatgaaggtcagatgccaggtgct

SEQ ID NO: 3328156 - DNA, 25 bp, Homo sapien
acatgtgcaatatgaaggtcagatg

SEQ ID NO: 3328157 - DNA, 25 bp, Homo sapien
ccttgagaaaagtacgacctgcggg

SEQ ID NO: 3328158 - DNA, 25 bp, Homo sapien
gaaagggatatgcatattttcgggt

SEQ ID NO: 3328159 - DNA, 25 bp, Homo sapien
tgccctctgaaagggatatgcatat

SEQ ID NO: 3328160 - DNA, 25 bp, Homo sapien
ccctctgaaagggatatgcatattt

SEQ ID NO: 3328161 - DNA, 25 bp, Homo sapien
tatgcatattttcgggttaggtgtt

SEQ ID NO: 3328162 - DNA, 25 bp, Homo sapien
attaaatgcccttagtatacacaat

SEQ ID NO: 3328163 - DNA, 25 bp, Homo sapien
tacacttttatgaattcttcttgga

SEQ ID NO: 3328164 - DNA, 25 bp, Homo sapien
acacaatcttgtaaaagctgcaccc

SEQ ID NO: 3328165 - DNA, 25 bp, Homo sapien
tacctgttacacttttatgaattct

SEQ ID NO: 3328166 - DNA, 25 bp, Homo sapien
gtggaatttggagctgctcataggt

SEQ ID NO: 3328167 - DNA, 25 bp, Homo sapien
atttggagctgctcataggtagcaa

SEQ ID NO: 3328168 - DNA, 25 bp, Homo sapien
cagcttggggactgtcatgtggaat

SEQ ID NO: 3328169 - DNA, 25 bp, Homo sapien
tgccttctgtgaacgaagatggaaa

SEQ ID NO: 3328170 - DNA, 25 bp, Homo sapien
taaaaagattgatgtctacccagag

SEQ ID NO: 3328171 - DNA, 25 bp, Homo sapien
tactccattggctataggtgtaaca

SEQ ID NO: 3328172 - DNA, 25 bp, Homo sapien
aatcctccttcatcagaactttggg

SEQ ID NO: 3328173 - DNA, 25 bp, Homo sapien
caacacagtggctcgatgtgccagg

SEQ ID NO: 3328174 - DNA, 25 bp, Homo sapien
tctcctgcttgttgtacctggattt

SEQ ID NO: 3328175 - DNA, 25 bp, Homo sapien
ctgcttgttgtacctggattttgta

SEQ ID NO: 3328176 - DNA, 25 bp, Homo sapien
catttcctagtggttcttctcctgc

SEQ ID NO: 3328177 - DNA, 25 bp, Homo sapien
tcttctcctgcttgttgtacctgga

SEQ ID NO: 3328178 - DNA, 25 bp, Homo sapien
tgtttggcggtctgctgactgttgc

SEQ ID NO: 3328179 - DNA, 25 bp, Homo sapien
atgtttggcggtctgctgactgttg

SEQ ID NO: 3328180 - DNA, 25 bp, Homo sapien
aattgactgggaagacatattaaac

SEQ ID NO: 3328181 - DNA, 25 bp, Homo sapien
attgactgggaagacatattaaact

SEQ ID NO: 3328182 - DNA, 25 bp, Homo sapien
gggagagattcaggtagatttgaac

SEQ ID NO: 3328183 - DNA, 25 bp, Homo sapien
ggagagattcaggtagatttgaact

SEQ ID NO: 3328184 - DNA, 25 bp, Homo sapien
tgtttgatttcttgtcgtaagccag

SEQ ID NO: 3328185 - DNA, 25 bp, Homo sapien
aagccagttgtggatgatgcaagga

SEQ ID NO: 3328186 - DNA, 25 bp, Homo sapien
tttcttgtcgtaagccagttgtgga

SEQ ID NO: 3328187 - DNA, 25 bp, Homo sapien
tgtggatgatgcaaggattcccaag

SEQ ID NO: 3328188 - DNA, 25 bp, Homo sapien
cctgactgttaccatgaggaattcc

SEQ ID NO: 3328189 - DNA, 25 bp, Homo sapien
tgaggaattcctttaccggagaaca

SEQ ID NO: 3328190 - DNA, 25 bp, Homo sapien
caagtcaccaacctgactgttacca

SEQ ID NO: 3328191 - DNA, 25 bp, Homo sapien
gttcaccaagtcaccaacctgactg

SEQ ID NO: 3328192 - DNA, 25 bp, Homo sapien
tgttttcctaattattatctgggac

SEQ ID NO: 3328193 - DNA, 25 bp, Homo sapien
ttgttttcctaattattatctggga

SEQ ID NO: 3328194 - DNA, 25 bp, Homo sapien
ctggagtttcggtcctgatttgttt

SEQ ID NO: 3328195 - DNA, 25 bp, Homo sapien
ctctctggagtttcggtcctgattt

SEQ ID NO: 3328196 - DNA, 25 bp, Homo sapien
cagcagcactagagaattttgtaag

SEQ ID NO: 3328197 - DNA, 25 bp, Homo sapien
gataaccaggcacatgaagggacag

SEQ ID NO: 3328198 - DNA, 25 bp, Homo sapien
tatcagcaggtatccggaaattata

SEQ ID NO: 3328199 - DNA, 25 bp, Homo sapien
ttctagagactacagataatggcat

SEQ ID NO: 3328200 - DNA, 25 bp, Homo sapien
taagtgacagattcaataagcctga

SEQ ID NO: 3328201 - DNA, 25 bp, Homo sapien
aaaaattaatccacccaggcacaca

SEQ ID NO: 3328202 - DNA, 25 bp, Homo sapien
aaaatatccatctagaatgagagtg

SEQ ID NO: 3328203 - DNA, 25 bp, Homo sapien
taagcctgataatcccaagcagaaa

SEQ ID NO: 3328204 - DNA, 25 bp, Homo sapien
cttcccttgggctcgttcctctata

SEQ ID NO: 3328205 - DNA, 25 bp, Homo sapien
tcccttgggctcgttcctctatatt

SEQ ID NO: 3328206 - DNA, 25 bp, Homo sapien
tgggctcgttcctctatatttacaa

SEQ ID NO: 3328207 - DNA, 25 bp, Homo sapien
ccttgggctcgttcctctatattta

SEQ ID NO: 3328208 - DNA, 25 bp, Homo sapien
ggatgcagactcagatgcaatcact

SEQ ID NO: 3328209 - DNA, 25 bp, Homo sapien
caatcacttccaagggaagctgagc

SEQ ID NO: 3328210 - DNA, 25 bp, Homo sapien
ggaagctgagctggttcatttagga

SEQ ID NO: 3328211 - DNA, 25 bp, Homo sapien
gctgcatcttggtactccttcctga

SEQ ID NO: 3328212 - DNA, 25 bp, Homo sapien
ttggttttgactaacaacaagctgc

SEQ ID NO: 3328213 - DNA, 25 bp, Homo sapien
atgttctattgagagagtgtggaag

SEQ ID NO: 3328214 - DNA, 25 bp, Homo sapien
catcagcaaggtcagtaattccaga

SEQ ID NO: 3328215 - DNA, 25 bp, Homo sapien
tattagcagcataacagtcacacat

SEQ ID NO: 3328216 - DNA, 25 bp, Homo sapien
gatatacaaaaccatactcaacgag

SEQ ID NO: 3328217 - DNA, 25 bp, Homo sapien
actcaacgagtttccagttcatcag

SEQ ID NO: 3328218 - DNA, 25 bp, Homo sapien
cttcaattatttcccagtagcaaaa

SEQ ID NO: 3328219 - DNA, 25 bp, Homo sapien
gataaattaacaatgaattctgcca

SEQ ID NO: 3328220 - DNA, 25 bp, Homo sapien
atgataaattaacaatgaattctgc

SEQ ID NO: 3328221 - DNA, 25 bp, Homo sapien
tcccagtagcaaaatgataaattaa

SEQ ID NO: 3328222 - DNA, 25 bp, Homo sapien
catttggcagattgaaattagaagc

SEQ ID NO: 3328223 - DNA, 25 bp, Homo sapien
caaatctttcatttggcagattgaa

SEQ ID NO: 3328224 - DNA, 25 bp, Homo sapien
ctttcatttggcagattgaaattag

SEQ ID NO: 3328225 - DNA, 25 bp, Homo sapien
ttggcagattgaaattagaagcata

SEQ ID NO: 3328226 - DNA, 25 bp, Homo sapien
gacctccacctgaagaaacggtaga

SEQ ID NO: 3328227 - DNA, 25 bp, Homo sapien
cacacaagtgacatgaattctcggc

SEQ ID NO: 3328228 - DNA, 25 bp, Homo sapien
tatggttctggagtaaagcactgca

SEQ ID NO: 3328229 - DNA, 25 bp, Homo sapien
tattaccatgagaccacagtaggga

SEQ ID NO: 3328230 - DNA, 25 bp, Homo sapien
tattgtgtgaatgttcaaacttagt

SEQ ID NO: 3328231 - DNA, 25 bp, Homo sapien
ttttgatgggcctgctagagctatc

SEQ ID NO: 3328232 - DNA, 25 bp, Homo sapien
acttagtaacctctgccagttgagc

SEQ ID NO: 3328233 - DNA, 25 bp, Homo sapien
cagttgagccgctggcctgtctctt

SEQ ID NO: 3328234 - DNA, 25 bp, Homo sapien
gatcaagtgcatagaggagttccag

SEQ ID NO: 3328235 - DNA, 25 bp, Homo sapien
tcaaaatgtctagatgcccctccag

SEQ ID NO: 3328236 - DNA, 25 bp, Homo sapien
catgggtggacctcgattccggaac

SEQ ID NO: 3328237 - DNA, 25 bp, Homo sapien
taatccatacagtaagtttgcctcc

SEQ ID NO: 3328238 - DNA, 25 bp, Homo sapien
ggctctgggcgtctcctctgcctgg

SEQ ID NO: 3328239 - DNA, 25 bp, Homo sapien
gttactgagaggtgacagtgtgctg

SEQ ID NO: 3328240 - DNA, 25 bp, Homo sapien
acagccctcgctggctctgggcgtc

SEQ ID NO: 3328241 - DNA, 25 bp, Homo sapien
tcacagccctcgctggctctgggcg

SEQ ID NO: 3328242 - DNA, 25 bp, Homo sapien
ttttatttgctcaatcattcatttt

SEQ ID NO: 3328243 - DNA, 25 bp, Homo sapien
ttatttgctcaatcattcatttttt

SEQ ID NO: 3328244 - DNA, 25 bp, Homo sapien
tatttgctcaatcattcatttttta

SEQ ID NO: 3328245 - DNA, 25 bp, Homo sapien
tttgctcaatcattcattttttata

SEQ ID NO: 3328246 - DNA, 25 bp, Homo sapien
ctgccatgtaacaagcagtctggca

SEQ ID NO: 3328247 - DNA, 25 bp, Homo sapien
catgtaacaagcagtctggcaatgg

SEQ ID NO: 3328248 - DNA, 25 bp, Homo sapien
gccatgtaacaagcagtctggcaat

SEQ ID NO: 3328249 - DNA, 25 bp, Homo sapien
atgtaacaagcagtctggcaatggg

SEQ ID NO: 3328250 - DNA, 25 bp, Homo sapien
ctgataatattgatgctgttttcta

SEQ ID NO: 3328251 - DNA, 25 bp, Homo sapien
gttttctatcctgaacttcaaatct

SEQ ID NO: 3328252 - DNA, 25 bp, Homo sapien
gctgttttctatcctgaacttcaaa

SEQ ID NO: 3328253 - DNA, 25 bp, Homo sapien
tgctgttttctatcctgaacttcaa

SEQ ID NO: 3328254 - DNA, 25 bp, Homo sapien
actagccccacatgttccttgaaag

SEQ ID NO: 3328255 - DNA, 25 bp, Homo sapien
acaaactagccccacatgttccttg

SEQ ID NO: 3328256 - DNA, 25 bp, Homo sapien
catgttccttgaaagttccttgaag

SEQ ID NO: 3328257 - DNA, 25 bp, Homo sapien
gccccacatgttccttgaaagttcc

SEQ ID NO: 3328258 - DNA, 25 bp, Homo sapien
ctcaagccattttaagacctgtttg

SEQ ID NO: 3328259 - DNA, 25 bp, Homo sapien
cacctgaaccagactttgtggggag

SEQ ID NO: 3328260 - DNA, 25 bp, Homo sapien
acctgtttggtagccactctgcttg

SEQ ID NO: 3328261 - DNA, 25 bp, Homo sapien
tctcatgtgaatgataattcttctc

SEQ ID NO: 3328262 - DNA, 25 bp, Homo sapien
tccagtgaacattcttaaaccaata

SEQ ID NO: 3328263 - DNA, 25 bp, Homo sapien
actttcattactcatgctggcatgc

SEQ ID NO: 3328264 - DNA, 25 bp, Homo sapien
ctggcatgctcagtaggtggaagcc

SEQ ID NO: 3328265 - DNA, 25 bp, Homo sapien
tacaaactcagctcgaaatacacag

SEQ ID NO: 3328266 - DNA, 25 bp, Homo sapien
tcatgttctccatggtttgttttac

SEQ ID NO: 3328267 - DNA, 25 bp, Homo sapien
gcaaagtcaccaaaatataagccca

SEQ ID NO: 3328268 - DNA, 25 bp, Homo sapien
tcatctatcactgacagtgtttcag

SEQ ID NO: 3328269 - DNA, 25 bp, Homo sapien
agccctgttgtcgtgctgatgagtg

SEQ ID NO: 3328270 - DNA, 25 bp, Homo sapien
ctttgatgaaaagaagctgtatgcc

SEQ ID NO: 3328271 - DNA, 25 bp, Homo sapien
tttctgtagcccaaaagacgtaatg

SEQ ID NO: 3328272 - DNA, 25 bp, Homo sapien
tctgtagcccaaaagacgtaatgaa

SEQ ID NO: 3328273 - DNA, 25 bp, Homo sapien
tagcccaaaagacgtaatgaaattg

SEQ ID NO: 3328274 - DNA, 25 bp, Homo sapien
caaaagacgtaatgaaattgccaaa

SEQ ID NO: 3328275 - DNA, 25 bp, Homo sapien
gaatagttaactttgagagagccca

SEQ ID NO: 3328276 - DNA, 25 bp, Homo sapien
tgtcaccacctgagtgcggctcttg

SEQ ID NO: 3328277 - DNA, 25 bp, Homo sapien
ctgacattcaattttgatttccttg

SEQ ID NO: 3328278 - DNA, 25 bp, Homo sapien
gacatgcaacccaattcagaatctg

SEQ ID NO: 3328279 - DNA, 25 bp, Homo sapien
atagtggatgtgagcttgcagagca

SEQ ID NO: 3328280 - DNA, 25 bp, Homo sapien
cttctggcttcagcctggatagtgg

SEQ ID NO: 3328281 - DNA, 25 bp, Homo sapien
gatagtggatgtgagcttgcagagc

SEQ ID NO: 3328282 - DNA, 25 bp, Homo sapien
tggcttcagcctggatagtggatgt

SEQ ID NO: 3328283 - DNA, 25 bp, Homo sapien
ctgagacaacatacacaagacctgg

SEQ ID NO: 3328284 - DNA, 25 bp, Homo sapien
catacacaagacctggcctgtacac

SEQ ID NO: 3328285 - DNA, 25 bp, Homo sapien
gacaacatacacaagacctggcctg

SEQ ID NO: 3328286 - DNA, 25 bp, Homo sapien
aacatacacaagacctggcctgtac

SEQ ID NO: 3328287 - DNA, 25 bp, Homo sapien
cattcccaagttggttggaagatca

SEQ ID NO: 3328288 - DNA, 25 bp, Homo sapien
ctgaagagtcatttgccaagatgcc

SEQ ID NO: 3328289 - DNA, 25 bp, Homo sapien
caagatgcctttaagggtttcagtc

SEQ ID NO: 3328290 - DNA, 25 bp, Homo sapien
cccaagttggttggaagatcatatc

SEQ ID NO: 3328291 - DNA, 25 bp, Homo sapien
ggagtcgttgcctacttcctcataa

SEQ ID NO: 3328292 - DNA, 25 bp, Homo sapien
tcagaggagtcgttgcctacttcct

SEQ ID NO: 3328293 - DNA, 25 bp, Homo sapien
tcatcctcagaggagtcgttgccta

SEQ ID NO: 3328294 - DNA, 25 bp, Homo sapien
tcgttgcctacttcctcataatcct

SEQ ID NO: 3328295 - DNA, 25 bp, Homo sapien
gccttggcaatggcaattgtgttgt

SEQ ID NO: 3328296 - DNA, 25 bp, Homo sapien
cagcttcccagtgtacaaacgccct

SEQ ID NO: 3328297 - DNA, 25 bp, Homo sapien
cttggcaatggcaattgtgttgttc

SEQ ID NO: 3328298 - DNA, 25 bp, Homo sapien
ggcaatggcaattgtgttgttcagc

SEQ ID NO: 3328299 - DNA, 25 bp, Homo sapien
ccacagtgggcagcggttagttgat

SEQ ID NO: 3328300 - DNA, 25 bp, Homo sapien
caccacagtgggcagcggttagttg

SEQ ID NO: 3328301 - DNA, 25 bp, Homo sapien
tgggcagcggttagttgataccaac

SEQ ID NO: 3328302 - DNA, 25 bp, Homo sapien
cagtgggcagcggttagttgatacc

SEQ ID NO: 3328303 - DNA, 25 bp, Homo sapien
cctgtggggcagcagtacacaagct

SEQ ID NO: 3328304 - DNA, 25 bp, Homo sapien
gcagcattgacatccttgggtacat

SEQ ID NO: 3328305 - DNA, 25 bp, Homo sapien
gtacacaagctgaatgctgcacttg

SEQ ID NO: 3328306 - DNA, 25 bp, Homo sapien
ggcagcattgacatccttgggtaca

SEQ ID NO: 3328307 - DNA, 25 bp, Homo sapien
ctgtggtacaacaggcagtaggcca

SEQ ID NO: 3328308 - DNA, 25 bp, Homo sapien
tgtggtacaacaggcagtaggccat

SEQ ID NO: 3328309 - DNA, 25 bp, Homo sapien
cttgccataccagtaagccatattc

SEQ ID NO: 3328310 - DNA, 25 bp, Homo sapien
acacttgccataccagtaagccata

SEQ ID NO: 3328311 - DNA, 25 bp, Homo sapien
cacttgccataccagtaagccatat

SEQ ID NO: 3328312 - DNA, 25 bp, Homo sapien
ttgccataccagtaagccatattcc

SEQ ID NO: 3328313 - DNA, 25 bp, Homo sapien
cagatgactggcacatagatggccg

SEQ ID NO: 3328314 - DNA, 25 bp, Homo sapien
tgtggtacaccttctctgcagatga

SEQ ID NO: 3328315 - DNA, 25 bp, Homo sapien
gctgaaagcaggcattggcgatccc

SEQ ID NO: 3328316 - DNA, 25 bp, Homo sapien
ggatgtagatgcgagtgctggccac

SEQ ID NO: 3328317 - DNA, 25 bp, Homo sapien
gctgtagtggaggagattactttgc

SEQ ID NO: 3328318 - DNA, 25 bp, Homo sapien
gagggccttgtcaaagtgcagagaa

SEQ ID NO: 3328319 - DNA, 25 bp, Homo sapien
tgtggcagcaattgtcatagatggc

SEQ ID NO: 3328320 - DNA, 25 bp, Homo sapien
actcaatgtccaggttgtggcagca

SEQ ID NO: 3328321 - DNA, 25 bp, Homo sapien
gcattggtcagacggcttccaggtc

SEQ ID NO: 3328322 - DNA, 25 bp, Homo sapien
cacggacatcgttgttgagagcatc

SEQ ID NO: 3328323 - DNA, 25 bp, Homo sapien
gtgcccctgtcaaagctgtggaaca

SEQ ID NO: 3328324 - DNA, 25 bp, Homo sapien
agtcctgtgcattggtcagacggct

SEQ ID NO: 3328325 - DNA, 25 bp, Homo sapien
gaaggcaatagtcagaaccagctgc

SEQ ID NO: 3328326 - DNA, 25 bp, Homo sapien
aaggcaatagtcagaaccagctgcc

SEQ ID NO: 3328327 - DNA, 25 bp, Homo sapien
aggcaatagtcagaaccagctgccc

SEQ ID NO: 3328328 - DNA, 25 bp, Homo sapien
ggaaggcaatagtcagaaccagctg

SEQ ID NO: 3328329 - DNA, 25 bp, Homo sapien
tcaaggttttaggatacccatcacc

SEQ ID NO: 3328330 - DNA, 25 bp, Homo sapien
ttttattgggctcatttcaagtcct

SEQ ID NO: 3328331 - DNA, 25 bp, Homo sapien
cactgtagtcattctactatcgaat

SEQ ID NO: 3328332 - DNA, 25 bp, Homo sapien
gacccttatcagctgtagatggtat

SEQ ID NO: 3328333 - DNA, 25 bp, Homo sapien
gggaactccgcttcataaaacaatc

SEQ ID NO: 3328334 - DNA, 25 bp, Homo sapien
tgaggaggccttacatcatggtgga

SEQ ID NO: 3328335 - DNA, 25 bp, Homo sapien
tacatgcaggggaactccgcttcat

SEQ ID NO: 3328336 - DNA, 25 bp, Homo sapien
actccgcttcataaaacaatcagat

SEQ ID NO: 3328337 - DNA, 25 bp, Homo sapien
ggttccatgcaagttcgaaatctag

SEQ ID NO: 3328338 - DNA, 25 bp, Homo sapien
acaggttccatgcaagttcgaaatc

SEQ ID NO: 3328339 - DNA, 25 bp, Homo sapien
tccatgcaagttcgaaatctagtgg

SEQ ID NO: 3328340 - DNA, 25 bp, Homo sapien
caggttccatgcaagttcgaaatct

SEQ ID NO: 3328341 - DNA, 25 bp, Homo sapien
tttttcctgccctccagttgtggcc

SEQ ID NO: 3328342 - DNA, 25 bp, Homo sapien
aatttttcctgccctccagttgtgg

SEQ ID NO: 3328343 - DNA, 25 bp, Homo sapien
tttcctgccctccagttgtggccat

SEQ ID NO: 3328344 - DNA, 25 bp, Homo sapien
ctaatttttcctgccctccagttgt

SEQ ID NO: 3328345 - DNA, 25 bp, Homo sapien
ctccagaaacaacttccagctggtc

SEQ ID NO: 3328346 - DNA, 25 bp, Homo sapien
tccagaaacaacttccagctggtct

SEQ ID NO: 3328347 - DNA, 25 bp, Homo sapien
tagatcgtcatctgggtaaagccca

SEQ ID NO: 3328348 - DNA, 25 bp, Homo sapien
ctagatcgtcatctgggtaaagccc

SEQ ID NO: 3328349 - DNA, 25 bp, Homo sapien
tgatccaggaccccatctggtaggt

SEQ ID NO: 3328350 - DNA, 25 bp, Homo sapien
gaacagggccactgggagacactgt

SEQ ID NO: 3328351 - DNA, 25 bp, Homo sapien
gacactgtgtcatgatggcaaaact

SEQ ID NO: 3328352 - DNA, 25 bp, Homo sapien
ccagcaggaaaagccacgtgaaagg

SEQ ID NO: 3328353 - DNA, 25 bp, Homo sapien
tggagaagtcgccaagcacaggcag

SEQ ID NO: 3328354 - DNA, 25 bp, Homo sapien
ttggtgaggtatgggatcttctggg

SEQ ID NO: 3328355 - DNA, 25 bp, Homo sapien
ggactcagcgggccgccggtcccac

SEQ ID NO: 3328356 - DNA, 25 bp, Homo sapien
gaggtatgggatcttctgggtgttg

SEQ ID NO: 3328357 - DNA, 25 bp, Homo sapien
cagtgaagccccaggagtaggtgca

SEQ ID NO: 3328358 - DNA, 25 bp, Homo sapien
taataggccatccacccagtgaagc

SEQ ID NO: 3328359 - DNA, 25 bp, Homo sapien
caccatgtgccgactggatgtgaag

SEQ ID NO: 3328360 - DNA, 25 bp, Homo sapien
gcatgaacaacgtctccagcaggtg

SEQ ID NO: 3328361 - DNA, 25 bp, Homo sapien
atggcgcccacgggcatcttctgca

SEQ ID NO: 3328362 - DNA, 25 bp, Homo sapien
tagagtgtggccatggcgcccacgg

SEQ ID NO: 3328363 - DNA, 25 bp, Homo sapien
atcttcatcattcagggacttgccc

SEQ ID NO: 3328364 - DNA, 25 bp, Homo sapien
atcctggaagtagagtgtggccatg

SEQ ID NO: 3328365 - DNA, 25 bp, Homo sapien
cactgcagaggggtcttggtgaaga

SEQ ID NO: 3328366 - DNA, 25 bp, Homo sapien
gtcttggtgaagaggttcttgatct

SEQ ID NO: 3328367 - DNA, 25 bp, Homo sapien
gcagaggggtcttggtgaagaggtt

SEQ ID NO: 3328368 - DNA, 25 bp, Homo sapien
gggtcttggtgaagaggttcttgat

SEQ ID NO: 3328369 - DNA, 25 bp, Homo sapien
ctgcagtggtggtgtggggctccac

SEQ ID NO: 3328370 - DNA, 25 bp, Homo sapien
cttgtccaggaaacacagcttctcc

SEQ ID NO: 3328371 - DNA, 25 bp, Homo sapien
ccaggaaacacagcttctcccctgt

SEQ ID NO: 3328372 - DNA, 25 bp, Homo sapien
gtccaggaaacacagcttctcccct

SEQ ID NO: 3328373 - DNA, 25 bp, Homo sapien
ttgtccaggaaacacagcttctccc

SEQ ID NO: 3328374 - DNA, 25 bp, Homo sapien
ttcatggctgtctcccacggcggct

SEQ ID NO: 3328375 - DNA, 25 bp, Homo sapien
acggcggctactgctccatggctgc

SEQ ID NO: 3328376 - DNA, 25 bp, Homo sapien
cacctcttagtgcttcatggctgtc

SEQ ID NO: 3328377 - DNA, 25 bp, Homo sapien
tttgcgtgcagaatctccacctctt

SEQ ID NO: 3328378 - DNA, 25 bp, Homo sapien
gaagctttacgaagcatctgtgaca

SEQ ID NO: 3328379 - DNA, 25 bp, Homo sapien
tctgctccggtagcttgaaaagtgc

SEQ ID NO: 3328380 - DNA, 25 bp, Homo sapien
tcccatttgcaattatgtgaagctt

SEQ ID NO: 3328381 - DNA, 25 bp, Homo sapien
gtcatttgctctagctctgctccgg

SEQ ID NO: 3328382 - DNA, 25 bp, Homo sapien
cataaaggcccattggaaaattcct

SEQ ID NO: 3328383 - DNA, 25 bp, Homo sapien
tgtttgacaccgtgggcaaatcaga

SEQ ID NO: 3328384 - DNA, 25 bp, Homo sapien
gcaaatcagaactgagggcttctgc

SEQ ID NO: 3328385 - DNA, 25 bp, Homo sapien
aataaaactcataaaggcccattgg

SEQ ID NO: 3328386 - DNA, 25 bp, Homo sapien
gctccttaattgaactgctcttact

SEQ ID NO: 3328387 - DNA, 25 bp, Homo sapien
ctcagctccttaattgaactgctct

SEQ ID NO: 3328388 - DNA, 25 bp, Homo sapien
tcagctccttaattgaactgctctt

SEQ ID NO: 3328389 - DNA, 25 bp, Homo sapien
cagctccttaattgaactgctctta

SEQ ID NO: 3328390 - DNA, 25 bp, Homo sapien
gttaggcataattattaccttatta

SEQ ID NO: 3328391 - DNA, 25 bp, Homo sapien
ttggttagggattggtgtgtttctg

SEQ ID NO: 3328392 - DNA, 25 bp, Homo sapien
tctggttgtacaaagtattgttgta

SEQ ID NO: 3328393 - DNA, 25 bp, Homo sapien
gtattgttgtattatgttaggcata

SEQ ID NO: 3328394 - DNA, 25 bp, Homo sapien
gcagtgggacattaagctagttatc

SEQ ID NO: 3328395 - DNA, 25 bp, Homo sapien
tcttgggcaataattagggcaggtg

SEQ ID NO: 3328396 - DNA, 25 bp, Homo sapien
tttcaatgaatagccaatggagcca

SEQ ID NO: 3328397 - DNA, 25 bp, Homo sapien
gatacatgtctcttacctcatgtgg

SEQ ID NO: 3328398 - DNA, 25 bp, Homo sapien
ctggaaagcatgccgggtctccatt

SEQ ID NO: 3328399 - DNA, 25 bp, Homo sapien
aaagcatgccgggtctccattatct

SEQ ID NO: 3328400 - DNA, 25 bp, Homo sapien
ggctggggagtagtcactccctctt

SEQ ID NO: 3328401 - DNA, 25 bp, Homo sapien
gcatgccgggtctccattatctctt

SEQ ID NO: 3328402 - DNA, 25 bp, Homo sapien
agtaaattctttagattttgcatac

SEQ ID NO: 3328403 - DNA, 25 bp, Homo sapien
accaggccagtaaattctttagatt

SEQ ID NO: 3328404 - DNA, 25 bp, Homo sapien
ccagtaaattctttagattttgcat

SEQ ID NO: 3328405 - DNA, 25 bp, Homo sapien
ctaccaggccagtaaattctttaga

SEQ ID NO: 3328406 - DNA, 25 bp, Homo sapien
agtagtgtagatctgagttccccaa

SEQ ID NO: 3328407 - DNA, 25 bp, Homo sapien
tcaaaagtagtgtagatctgagttc

SEQ ID NO: 3328408 - DNA, 25 bp, Homo sapien
aaagtagtgtagatctgagttcccc

SEQ ID NO: 3328409 - DNA, 25 bp, Homo sapien
agtttcaaaagtagtgtagatctga

SEQ ID NO: 3328410 - DNA, 25 bp, Homo sapien
cagggagataaattagcaatttccc

SEQ ID NO: 3328411 - DNA, 25 bp, Homo sapien
caataagggtgagagcatattaaca

SEQ ID NO: 3328412 - DNA, 25 bp, Homo sapien
caatttcccagccaaacggctcaat

SEQ ID NO: 3328413 - DNA, 25 bp, Homo sapien
gatgggctgtggctgtagcacctaa

SEQ ID NO: 3328414 - DNA, 25 bp, Homo sapien
ctggcccatgggaatttccaagaac

SEQ ID NO: 3328415 - DNA, 25 bp, Homo sapien
catctccacaaaatgcctcattttg

SEQ ID NO: 3328416 - DNA, 25 bp, Homo sapien
tcatctccacaaaatgcctcatttt

SEQ ID NO: 3328417 - DNA, 25 bp, Homo sapien
tttatcatctccacaaaatgcctca

SEQ ID NO: 3328418 - DNA, 25 bp, Homo sapien
tatcatctccacaaaatgcctcatt

SEQ ID NO: 3328419 - DNA, 25 bp, Homo sapien
taaacctgaggtatatacacagtgc

SEQ ID NO: 3328420 - DNA, 25 bp, Homo sapien
tgcactctagtcacctctgaagaag

SEQ ID NO: 3328421 - DNA, 25 bp, Homo sapien
tctcgaggcatctgacggccagaaa

SEQ ID NO: 3328422 - DNA, 25 bp, Homo sapien
gcagtgacagcaccccttggtaaga

SEQ ID NO: 3328423 - DNA, 25 bp, Homo sapien
taggaatcttctgtcctctaaggaa

SEQ ID NO: 3328424 - DNA, 25 bp, Homo sapien
tcacggttctttatgtaacatggct

SEQ ID NO: 3328425 - DNA, 25 bp, Homo sapien
cttctggatagttggtaatgtccct

SEQ ID NO: 3328426 - DNA, 25 bp, Homo sapien
ttttgcagtccctttacatttccca

SEQ ID NO: 3328427 - DNA, 25 bp, Homo sapien
ccgtattgataggaagacagctgag

SEQ ID NO: 3328428 - DNA, 25 bp, Homo sapien
cagctgagtgtcaatgtggcctccg

SEQ ID NO: 3328429 - DNA, 25 bp, Homo sapien
aagcctactggatgaaacagcccca

SEQ ID NO: 3328430 - DNA, 25 bp, Homo sapien
tgtaacaagcccatggtaggcctga

SEQ ID NO: 3328431 - DNA, 25 bp, Homo sapien
tgctatcactgaacaggattctcaa

SEQ ID NO: 3328432 - DNA, 25 bp, Homo sapien
tatcactgaacaggattctcaatac

SEQ ID NO: 3328433 - DNA, 25 bp, Homo sapien
tggctgctatcactgaacaggattc

SEQ ID NO: 3328434 - DNA, 25 bp, Homo sapien
ttcttggctgctatcactgaacagg

SEQ ID NO: 3328435 - DNA, 25 bp, Homo sapien
ctgacacacttttattcccttgatg

SEQ ID NO: 3328436 - DNA, 25 bp, Homo sapien
gagctgactgacacaagcaaagcag

SEQ ID NO: 3328437 - DNA, 25 bp, Homo sapien
cttaatggcatacagtctaaattac

SEQ ID NO: 3328438 - DNA, 25 bp, Homo sapien
ttccctgaactaatcccacttaatg

SEQ ID NO: 3328439 - DNA, 25 bp, Homo sapien
agagctgactgacacaagcaaagca

SEQ ID NO: 3328440 - DNA, 25 bp, Homo sapien
actaaagtgcctcattttccagggc

SEQ ID NO: 3328441 - DNA, 25 bp, Homo sapien
aaactaaagtgcctcattttccagg

SEQ ID NO: 3328442 - DNA, 25 bp, Homo sapien
ctgcatgatgtagcaatagacttta

SEQ ID NO: 3328443 - DNA, 25 bp, Homo sapien
tagcaatagactttagcagctttta

SEQ ID NO: 3328444 - DNA, 25 bp, Homo sapien
ttaaagaggtatcaacagctgctgt

SEQ ID NO: 3328445 - DNA, 25 bp, Homo sapien
ctgctgtgggaactgaaggttagaa

SEQ ID NO: 3328446 - DNA, 25 bp, Homo sapien
gcagaatttcatctcttttgctgtg

SEQ ID NO: 3328447 - DNA, 25 bp, Homo sapien
caggcagaatttcatctcttttgct

SEQ ID NO: 3328448 - DNA, 25 bp, Homo sapien
ggcagaatttcatctcttttgctgt

SEQ ID NO: 3328449 - DNA, 25 bp, Homo sapien
cagaatttcatctcttttgctgtgg

SEQ ID NO: 3328450 - DNA, 25 bp, Homo sapien
gaagtgctctatgcatactccaatt

SEQ ID NO: 3328451 - DNA, 25 bp, Homo sapien
tgattcattgtaaggctcagcagtt

SEQ ID NO: 3328452 - DNA, 25 bp, Homo sapien
tgtgtgcacccaacagaagtgctct

SEQ ID NO: 3328453 - DNA, 25 bp, Homo sapien
taagtatagtacgaattggtgtcac

SEQ ID NO: 3328454 - DNA, 25 bp, Homo sapien
cttgaaagtgtcttaggagctccca

SEQ ID NO: 3328455 - DNA, 25 bp, Homo sapien
aaagtgtcttaggagctcccaggag

SEQ ID NO: 3328456 - DNA, 25 bp, Homo sapien
cccaggagtacacagatggtacttt

SEQ ID NO: 3328457 - DNA, 25 bp, Homo sapien
cacagatggtactttgagactgctg

SEQ ID NO: 3328458 - DNA, 25 bp, Homo sapien
taagaattagagagctgagtccgag

SEQ ID NO: 3328459 - DNA, 25 bp, Homo sapien
aagaattagagagctgagtccgaga

SEQ ID NO: 3328460 - DNA, 25 bp, Homo sapien
gaattagagagctgagtccgagaaa

SEQ ID NO: 3328461 - DNA, 25 bp, Homo sapien
cttaagaattagagagctgagtccg

SEQ ID NO: 3328462 - DNA, 25 bp, Homo sapien
gagagtcatatcaagtttctttgca

SEQ ID NO: 3328463 - DNA, 25 bp, Homo sapien
agagagtcatatcaagtttctttgc

SEQ ID NO: 3328464 - DNA, 25 bp, Homo sapien
gagagagtcatatcaagtttctttg

SEQ ID NO: 3328465 - DNA, 25 bp, Homo sapien
aggagagagtcatatcaagtttctt

SEQ ID NO: 3328466 - DNA, 25 bp, Homo sapien
tatactgccagaccacaagagagtg

SEQ ID NO: 3328467 - DNA, 25 bp, Homo sapien
tcctgtgcatatactgccagaccac

SEQ ID NO: 3328468 - DNA, 25 bp, Homo sapien
ctgccatcgggacttgtgccattta

SEQ ID NO: 3328469 - DNA, 25 bp, Homo sapien
cacaagagagtgtttcagctgccat

SEQ ID NO: 3328470 - DNA, 25 bp, Homo sapien
cttcttactcctcttgccttgcctt

SEQ ID NO: 3328471 - DNA, 25 bp, Homo sapien
actcctcttgccttgccttgctttg

SEQ ID NO: 3328472 - DNA, 25 bp, Homo sapien
ttcttactcctcttgccttgccttg

SEQ ID NO: 3328473 - DNA, 25 bp, Homo sapien
cttactcctcttgccttgccttgct

SEQ ID NO: 3328474 - DNA, 25 bp, Homo sapien
ggtgacgagagtgacctctgctcat

SEQ ID NO: 3328475 - DNA, 25 bp, Homo sapien
ccaagaaggtgacgagagtgacctc

SEQ ID NO: 3328476 - DNA, 25 bp, Homo sapien
cgagagtgacctctgctcatcctca

SEQ ID NO: 3328477 - DNA, 25 bp, Homo sapien
aaaccaagaaggtgacgagagtgac

SEQ ID NO: 3328478 - DNA, 25 bp, Homo sapien
gcccatattgttcgtaagttccata

SEQ ID NO: 3328479 - DNA, 25 bp, Homo sapien
atctgcccatattgttcgtaagttc

SEQ ID NO: 3328480 - DNA, 25 bp, Homo sapien
tattgttcgtaagttccatacatca

SEQ ID NO: 3328481 - DNA, 25 bp, Homo sapien
ccatattgttcgtaagttccataca

SEQ ID NO: 3328482 - DNA, 25 bp, Homo sapien
taagaatggcgattactaaaacgtc

SEQ ID NO: 3328483 - DNA, 25 bp, Homo sapien
caaccatagtgaacggcagtgtggc

SEQ ID NO: 3328484 - DNA, 25 bp, Homo sapien
gaacgcttttacactattgatgtga

SEQ ID NO: 3328485 - DNA, 25 bp, Homo sapien
ctaaaacgtcaagaagcaacagatg

SEQ ID NO: 3328486 - DNA, 25 bp, Homo sapien
gaatgtatgactcttaaaactttca

SEQ ID NO: 3328487 - DNA, 25 bp, Homo sapien
taagtgggagcgaacaaggagaaca

SEQ ID NO: 3328488 - DNA, 25 bp, Homo sapien
aaaatgtggcttttaaatcatctaa

SEQ ID NO: 3328489 - DNA, 25 bp, Homo sapien
tagggaagaaagctaatgcatgctg

SEQ ID NO: 3328490 - DNA, 25 bp, Homo sapien
gaacatgccagaagtagaagacatt

SEQ ID NO: 3328491 - DNA, 25 bp, Homo sapien
agacgactctgatcttaacttcatc

SEQ ID NO: 3328492 - DNA, 25 bp, Homo sapien
tatgacattcaagattatctgcctg

SEQ ID NO: 3328493 - DNA, 25 bp, Homo sapien
tgtaagcccacttttattaaagatg

SEQ ID NO: 3328494 - DNA, 25 bp, Homo sapien
ttctgggcagtctgcgtctcactcc

SEQ ID NO: 3328495 - DNA, 25 bp, Homo sapien
gtggccacctgcattttcataaagc

SEQ ID NO: 3328496 - DNA, 25 bp, Homo sapien
cacatttcccatgaattgtgtgaga

SEQ ID NO: 3328497 - DNA, 25 bp, Homo sapien
tctgtctatgtccaggtcaggttcc

SEQ ID NO: 3328498 - DNA, 25 bp, Homo sapien
tacagattctcccaatcacagatgg

SEQ ID NO: 3328499 - DNA, 25 bp, Homo sapien
tctgtaaatacaggaggccaactgt

SEQ ID NO: 3328500 - DNA, 25 bp, Homo sapien
gacgactgtagttgtaatccttcca

SEQ ID NO: 3328501 - DNA, 25 bp, Homo sapien
aatccttccaactgctagggcaaag

SEQ ID NO: 3328502 - DNA, 25 bp, Homo sapien
gattactgcaattctcagaggcaca

SEQ ID NO: 3328503 - DNA, 25 bp, Homo sapien
caaaatatccgccataagatggcca

SEQ ID NO: 3328504 - DNA, 25 bp, Homo sapien
tcatgcatgttctactggttcaagg

SEQ ID NO: 3328505 - DNA, 25 bp, Homo sapien
tctgatgatcaaggagcacacatat

SEQ ID NO: 3328506 - DNA, 25 bp, Homo sapien
cacagagggttacattgagaaggca

SEQ ID NO: 3328507 - DNA, 25 bp, Homo sapien
taaacgacccatctaagctacagct

SEQ ID NO: 3328508 - DNA, 25 bp, Homo sapien
aatagaaaccgctgagagagaagcc

SEQ ID NO: 3328509 - DNA, 25 bp, Homo sapien
tcccagcggatgaaataggactttg

SEQ ID NO: 3328510 - DNA, 25 bp, Homo sapien
ttactgggaaactaccataggtcca

SEQ ID NO: 3328511 - DNA, 25 bp, Homo sapien
taggtccaagcactattccaagtac

SEQ ID NO: 3328512 - DNA, 25 bp, Homo sapien
gaaagaattcttaatctgggatcca

SEQ ID NO: 3328513 - DNA, 25 bp, Homo sapien
cgtctatgccttatgtgtgaaaaca

SEQ ID NO: 3328514 - DNA, 25 bp, Homo sapien
tgagatcgaccaatttcctgctgag

SEQ ID NO: 3328515 - DNA, 25 bp, Homo sapien
ggtatccctccaacacttcctgatg

SEQ ID NO: 3328516 - DNA, 25 bp, Homo sapien
tagttgaagctagggtcagaacctt

SEQ ID NO: 3328517 - DNA, 25 bp, Homo sapien
cattgttcgtgggactgaaacccta

SEQ ID NO: 3328518 - DNA, 25 bp, Homo sapien
tttgtttaggtggtgcagcagtccc

SEQ ID NO: 3328519 - DNA, 25 bp, Homo sapien
gccggtcaactgtagaatctggaga

SEQ ID NO: 3328520 - DNA, 25 bp, Homo sapien
gactgtcgacttctactgcgtggca

SEQ ID NO: 3328521 - DNA, 25 bp, Homo sapien
caagatataaagtgtaggccgacca

SEQ ID NO: 3328522 - DNA, 25 bp, Homo sapien
taaaaggctaacaactgatgcgtgc

SEQ ID NO: 3328523 - DNA, 25 bp, Homo sapien
tcataggcagctaccagcagtggag

SEQ ID NO: 3328524 - DNA, 25 bp, Homo sapien
gatgcatgacccatagacgctgctg

SEQ ID NO: 3328525 - DNA, 25 bp, Homo sapien
tgctgaagctatactgaggactgtc

SEQ ID NO: 3328526 - DNA, 25 bp, Homo sapien
gtatgctgctgctatcaaagcagtt

SEQ ID NO: 3328527 - DNA, 25 bp, Homo sapien
tatgctgctgctatcaaagcagttc

SEQ ID NO: 3328528 - DNA, 25 bp, Homo sapien
tgctgctgctatcaaagcagttcta

SEQ ID NO: 3328529 - DNA, 25 bp, Homo sapien
gctgctgctatcaaagcagttctac

SEQ ID NO: 3328530 - DNA, 25 bp, Homo sapien
cagctttgttcacttcagcgccatg

SEQ ID NO: 3328531 - DNA, 25 bp, Homo sapien
cacttcagcgccatgttgtagcaaa

SEQ ID NO: 3328532 - DNA, 25 bp, Homo sapien
ttgttcacttcagcgccatgttgta

SEQ ID NO: 3328533 - DNA, 25 bp, Homo sapien
tcattatcagctttgttcacttcag

SEQ ID NO: 3328534 - DNA, 25 bp, Homo sapien
tctaggtaaagaaagcatccactgc

SEQ ID NO: 3328535 - DNA, 25 bp, Homo sapien
ttatggtcaaaggtcggcaggctgc

SEQ ID NO: 3328536 - DNA, 25 bp, Homo sapien
tggtatgtccctgtctagccgctag

SEQ ID NO: 3328537 - DNA, 25 bp, Homo sapien
gctcccctagagacaagtaaattga

SEQ ID NO: 3328538 - DNA, 25 bp, Homo sapien
ggaaagaactcatggtgaccagcta

SEQ ID NO: 3328539 - DNA, 25 bp, Homo sapien
gctaaaagtgctgcaacagtcccag

SEQ ID NO: 3328540 - DNA, 25 bp, Homo sapien
gataagctggtagacgtttgttcac

SEQ ID NO: 3328541 - DNA, 25 bp, Homo sapien
taacagccttactctgctttcgggc

SEQ ID NO: 3328542 - DNA, 25 bp, Homo sapien
tcccagaagagggagtagaacacac

SEQ ID NO: 3328543 - DNA, 25 bp, Homo sapien
caataccttcctcctgcacatacat

SEQ ID NO: 3328544 - DNA, 25 bp, Homo sapien
tcaataccttcctcctgcacataca

SEQ ID NO: 3328545 - DNA, 25 bp, Homo sapien
tggatctgtagttaattacctgcga

SEQ ID NO: 3328546 - DNA, 25 bp, Homo sapien
gaaaaatcaatagatggcaggtgct

SEQ ID NO: 3328547 - DNA, 25 bp, Homo sapien
ggtctaattacctatagctcctgaa

SEQ ID NO: 3328548 - DNA, 25 bp, Homo sapien
tgaaatctcattactacctagaagg

SEQ ID NO: 3328549 - DNA, 25 bp, Homo sapien
taaactgggaatgcaaagtgattgg

SEQ ID NO: 3328550 - DNA, 25 bp, Homo sapien
agcagggctggtatggtttttacac

SEQ ID NO: 3328551 - DNA, 25 bp, Homo sapien
agaaaagcagggctggtatggtttt

SEQ ID NO: 3328552 - DNA, 25 bp, Homo sapien
gctccttctgtcaatcagaaaagca

SEQ ID NO: 3328553 - DNA, 25 bp, Homo sapien
ttcagcatagaaatctgaacaccat

SEQ ID NO: 3328554 - DNA, 25 bp, Homo sapien
atttcagcatagaaatctgaacacc

SEQ ID NO: 3328555 - DNA, 25 bp, Homo sapien
gcatagaaatctgaacaccatgaca

SEQ ID NO: 3328556 - DNA, 25 bp, Homo sapien
atagaaatctgaacaccatgacatt

SEQ ID NO: 3328557 - DNA, 25 bp, Homo sapien
tatccttggagtagtccactgcggc

SEQ ID NO: 3328558 - DNA, 25 bp, Homo sapien
aatgcttcggctgggtttctctcgc

SEQ ID NO: 3328559 - DNA, 25 bp, Homo sapien
caaagcttggcgatgtaaacctctc

SEQ ID NO: 3328560 - DNA, 25 bp, Homo sapien
gagttcagtacatagggccgtcttg

SEQ ID NO: 3328561 - DNA, 25 bp, Homo sapien
cgggttttttatcttcatttgctag

SEQ ID NO: 3328562 - DNA, 25 bp, Homo sapien
gggttttttatcttcatttgctaga

SEQ ID NO: 3328563 - DNA, 25 bp, Homo sapien
gttttttatcttcatttgctagagt

SEQ ID NO: 3328564 - DNA, 25 bp, Homo sapien
ggttttttatcttcatttgctagag

SEQ ID NO: 3328565 - DNA, 25 bp, Homo sapien
taaaattcaacagccacagagttcc

SEQ ID NO: 3328566 - DNA, 25 bp, Homo sapien
tgaaggatgatcactcaagagtact

SEQ ID NO: 3328567 - DNA, 25 bp, Homo sapien
gagtactagatcgtgccagtttcag

SEQ ID NO: 3328568 - DNA, 25 bp, Homo sapien
aactgagggagaaacgcctgattcc

SEQ ID NO: 3328569 - DNA, 25 bp, Homo sapien
cgctgccgctgttagggactctcag

SEQ ID NO: 3328570 - DNA, 25 bp, Homo sapien
gggcacgctcccagctccggatcct

SEQ ID NO: 3328571 - DNA, 25 bp, Homo sapien
acttgcttcgctgagaagtcgctgc

SEQ ID NO: 3328572 - DNA, 25 bp, Homo sapien
gtcgctgccagcagcgctcccaaga

SEQ ID NO: 3328573 - DNA, 25 bp, Homo sapien
ctttctcaggggaggcggagaacgg

SEQ ID NO: 3328574 - DNA, 25 bp, Homo sapien
cccgcctttctcaggggaggcggag

SEQ ID NO: 3328575 - DNA, 25 bp, Homo sapien
gcctttctcaggggaggcggagaac

SEQ ID NO: 3328576 - DNA, 25 bp, Homo sapien
ccgcctttctcaggggaggcggaga

SEQ ID NO: 3328577 - DNA, 25 bp, Homo sapien
ccggctgttggtgccgtatctgctc

SEQ ID NO: 3328578 - DNA, 25 bp, Homo sapien
tttgtcttccaggccggagggactc

SEQ ID NO: 3328579 - DNA, 25 bp, Homo sapien
ccgagctcacgcgagtcgttgcccc

SEQ ID NO: 3328580 - DNA, 25 bp, Homo sapien
gccggagggactcgccggctgttgg

SEQ ID NO: 3328581 - DNA, 25 bp, Homo sapien
gggcagttgggtagggggagattgc

SEQ ID NO: 3328582 - DNA, 25 bp, Homo sapien
tagggggagattgcctcttgcctct

SEQ ID NO: 3328583 - DNA, 25 bp, Homo sapien
gggggagattgcctcttgcctctct

SEQ ID NO: 3328584 - DNA, 25 bp, Homo sapien
gtagggggagattgcctcttgcctc

SEQ ID NO: 3328585 - DNA, 25 bp, Homo sapien
tccattaaattccagggatgctttt

SEQ ID NO: 3328586 - DNA, 25 bp, Homo sapien
tccggtctcctttcagtccattaaa

SEQ ID NO: 3328587 - DNA, 25 bp, Homo sapien
cctttcagtccattaaattccaggg

SEQ ID NO: 3328588 - DNA, 25 bp, Homo sapien
ctcagtcgtccggtctcctttcagt

SEQ ID NO: 3328589 - DNA, 25 bp, Homo sapien
tgagctatgtgggtcaagtttcttc

SEQ ID NO: 3328590 - DNA, 25 bp, Homo sapien
gagaagaacaaagggctgagctatg

SEQ ID NO: 3328591 - DNA, 25 bp, Homo sapien
cctgccagtggaggagcattgtaaa

SEQ ID NO: 3328592 - DNA, 25 bp, Homo sapien
catcagagtattggtctcaattccc

SEQ ID NO: 3328593 - DNA, 25 bp, Homo sapien
cacccaggtacttctggttcaattt

SEQ ID NO: 3328594 - DNA, 25 bp, Homo sapien
tcacccaggtacttctggttcaatt

SEQ ID NO: 3328595 - DNA, 25 bp, Homo sapien
ctggttcaatttcagagaaaacttt

SEQ ID NO: 3328596 - DNA, 25 bp, Homo sapien
cttctggttcaatttcagagaaaac

SEQ ID NO: 3328597 - DNA, 25 bp, Homo sapien
tctgcaccagtgtgcctccaaatgg

SEQ ID NO: 3328598 - DNA, 25 bp, Homo sapien
ggaaattgcctaaattcttgagttc

SEQ ID NO: 3328599 - DNA, 25 bp, Homo sapien
atccacattctgcaccagtgtgcct

SEQ ID NO: 3328600 - DNA, 25 bp, Homo sapien
caaatgggtccaagattgtctgcaa

SEQ ID NO: 3328601 - DNA, 25 bp, Homo sapien
tcctttatttctgtactactggaca

SEQ ID NO: 3328602 - DNA, 25 bp, Homo sapien
ttgctcctttatttctgtactactg

SEQ ID NO: 3328603 - DNA, 25 bp, Homo sapien
acatttcttgttaatttgctccttt

SEQ ID NO: 3328604 - DNA, 25 bp, Homo sapien
gctcctttatttctgtactactgga

SEQ ID NO: 3328605 - DNA, 25 bp, Homo sapien
agaactctagagtaatatgttttaa

SEQ ID NO: 3328606 - DNA, 25 bp, Homo sapien
tagaactctagagtaatatgtttta

SEQ ID NO: 3328607 - DNA, 25 bp, Homo sapien
gaactctagagtaatatgttttaat

SEQ ID NO: 3328608 - DNA, 25 bp, Homo sapien
gtagaactctagagtaatatgtttt

SEQ ID NO: 3328609 - DNA, 25 bp, Homo sapien
ctattccaagagtgaattgtagaat

SEQ ID NO: 3328610 - DNA, 25 bp, Homo sapien
caaatgaagattccattccactata

SEQ ID NO: 3328611 - DNA, 25 bp, Homo sapien
gaataaacatctaatctttgtagca

SEQ ID NO: 3328612 - DNA, 25 bp, Homo sapien
ttccactatactgtcctcgaaggta

SEQ ID NO: 3328613 - DNA, 25 bp, Homo sapien
atttgctgaagtgtggatggtttgt

SEQ ID NO: 3328614 - DNA, 25 bp, Homo sapien
aagtgtggatggtttgttttatctc

SEQ ID NO: 3328615 - DNA, 25 bp, Homo sapien
ttccacatttgctgaagtgtggatg

SEQ ID NO: 3328616 - DNA, 25 bp, Homo sapien
gctgaagtgtggatggtttgtttta

SEQ ID NO: 3328617 - DNA, 25 bp, Homo sapien
tcaaatgagagctttctgtaggaga

SEQ ID NO: 3328618 - DNA, 25 bp, Homo sapien
caaatgagagctttctgtaggagac

SEQ ID NO: 3328619 - DNA, 25 bp, Homo sapien
acgtgacccagacctccaaccctga

SEQ ID NO: 3328620 - DNA, 25 bp, Homo sapien
cctgtatgctgttctgtctagccat

SEQ ID NO: 3328621 - DNA, 25 bp, Homo sapien
agccctgtatgctgttctgtctagc

SEQ ID NO: 3328622 - DNA, 25 bp, Homo sapien
ctggtaacgtgacccagacctccaa

SEQ ID NO: 3328623 - DNA, 25 bp, Homo sapien
ctactactgctatttgctgcccaaa

SEQ ID NO: 3328624 - DNA, 25 bp, Homo sapien
ttgctgcccaaacagttggcaaaat

SEQ ID NO: 3328625 - DNA, 25 bp, Homo sapien
tcaataagagatttgcctgagtcta

SEQ ID NO: 3328626 - DNA, 25 bp, Homo sapien
taagagatttgcctgagtctaaaag

SEQ ID NO: 3328627 - DNA, 25 bp, Homo sapien
ggatgaatatctggtgtcccgcata

SEQ ID NO: 3328628 - DNA, 25 bp, Homo sapien
gcatatgcttccaacatcaaggtca

SEQ ID NO: 3328629 - DNA, 25 bp, Homo sapien
ggtgtcccgcatatgcttccaacat

SEQ ID NO: 3328630 - DNA, 25 bp, Homo sapien
gaatatctggtgtcccgcatatgct

SEQ ID NO: 3328631 - DNA, 25 bp, Homo sapien
gaaggaatagttcaccaggaagcca

SEQ ID NO: 3328632 - DNA, 25 bp, Homo sapien
aatatagagaatatggcttatagag

SEQ ID NO: 3328633 - DNA, 25 bp, Homo sapien
cctagacccagatggaaggaatagt

SEQ ID NO: 3328634 - DNA, 25 bp, Homo sapien
agttctgcatttcggaagacttcgc

SEQ ID NO: 3328635 - DNA, 25 bp, Homo sapien
ggattgatacgtgatttccttgaaa

SEQ ID NO: 3328636 - DNA, 25 bp, Homo sapien
acaatgatcttagtttgttgtattg

SEQ ID NO: 3328637 - DNA, 25 bp, Homo sapien
gaaatgtgaccctttggatgggcgt

SEQ ID NO: 3328638 - DNA, 25 bp, Homo sapien
cattcttggattgatacgtgatttc

SEQ ID NO: 3328639 - DNA, 25 bp, Homo sapien
tggagtgtagtattgtttcagagta

SEQ ID NO: 3328640 - DNA, 25 bp, Homo sapien
gtaattttccacatgacactgacct

SEQ ID NO: 3328641 - DNA, 25 bp, Homo sapien
ttttccacatgacactgaccttgtt

SEQ ID NO: 3328642 - DNA, 25 bp, Homo sapien
tatttggagtgtagtattgtttcag

SEQ ID NO: 3328643 - DNA, 25 bp, Homo sapien
cttctatataatcagtagcatgcat

SEQ ID NO: 3328644 - DNA, 25 bp, Homo sapien
cactcttctatataatcagtagcat

SEQ ID NO: 3328645 - DNA, 25 bp, Homo sapien
gacacactcttctatataatcagta

SEQ ID NO: 3328646 - DNA, 25 bp, Homo sapien
ctcttctatataatcagtagcatgc

SEQ ID NO: 3328647 - DNA, 25 bp, Homo sapien
cacactagtaagtaggtggcaacat

SEQ ID NO: 3328648 - DNA, 25 bp, Homo sapien
ggcaacattgaaggtttcttacact

SEQ ID NO: 3328649 - DNA, 25 bp, Homo sapien
ctgagccacactagtaagtaggtgg

SEQ ID NO: 3328650 - DNA, 25 bp, Homo sapien
taagtaggtggcaacattgaaggtt

SEQ ID NO: 3328651 - DNA, 25 bp, Homo sapien
actgcaattgggcttcttttagctt

SEQ ID NO: 3328652 - DNA, 25 bp, Homo sapien
ctgcaattgggcttcttttagcttc

SEQ ID NO: 3328653 - DNA, 25 bp, Homo sapien
cactgcaattgggcttcttttagct

SEQ ID NO: 3328654 - DNA, 25 bp, Homo sapien
tcactgcaattgggcttcttttagc

SEQ ID NO: 3328655 - DNA, 25 bp, Homo sapien
gctatgacatccaattaatatatgc

SEQ ID NO: 3328656 - DNA, 25 bp, Homo sapien
tctttggacaagagttgaagggcta

SEQ ID NO: 3328657 - DNA, 25 bp, Homo sapien
cctcggtgtaatgtagtctttggac

SEQ ID NO: 3328658 - DNA, 25 bp, Homo sapien
gagtaatcaacttcctcggtgtaat

SEQ ID NO: 3328659 - DNA, 25 bp, Homo sapien
tagacgatactctcagtggaaaacc

SEQ ID NO: 3328660 - DNA, 25 bp, Homo sapien
gaacagcatgcaatagacgatactc

SEQ ID NO: 3328661 - DNA, 25 bp, Homo sapien
aaaccattcatctctaatgaagaag

SEQ ID NO: 3328662 - DNA, 25 bp, Homo sapien
gatactctcagtggaaaaccattca

SEQ ID NO: 3328663 - DNA, 25 bp, Homo sapien
gtcaaggctccggtgtccagacgtg

SEQ ID NO: 3328664 - DNA, 25 bp, Homo sapien
agctgacagtcaaggctccggtgtc

SEQ ID NO: 3328665 - DNA, 25 bp, Homo sapien
aaggctccggtgtccagacgtgtag

SEQ ID NO: 3328666 - DNA, 25 bp, Homo sapien
gacagtcaaggctccggtgtccaga

SEQ ID NO: 3328667 - DNA, 25 bp, Homo sapien
caaccataattatatccttcacata

SEQ ID NO: 3328668 - DNA, 25 bp, Homo sapien
ctcgacttagggttacaaccataat

SEQ ID NO: 3328669 - DNA, 25 bp, Homo sapien
aaccataattatatccttcacatac

SEQ ID NO: 3328670 - DNA, 25 bp, Homo sapien
tacaaccataattatatccttcaca

SEQ ID NO: 3328671 - DNA, 25 bp, Homo sapien
agcagcttagtgcatgtgtcaagta

SEQ ID NO: 3328672 - DNA, 25 bp, Homo sapien
cagcttagtgcatgtgtcaagtacc

SEQ ID NO: 3328673 - DNA, 25 bp, Homo sapien
cttagtgcatgtgtcaagtacctcc

SEQ ID NO: 3328674 - DNA, 25 bp, Homo sapien
gcttagtgcatgtgtcaagtacctc

SEQ ID NO: 3328675 - DNA, 25 bp, Homo sapien
atgtgggtataattcttccttccgt

SEQ ID NO: 3328676 - DNA, 25 bp, Homo sapien
tattgcttctttatacgttctccca

SEQ ID NO: 3328677 - DNA, 25 bp, Homo sapien
tcttccttccgtattgcttctttat

SEQ ID NO: 3328678 - DNA, 25 bp, Homo sapien
gcttctttatacgttctcccacttc

SEQ ID NO: 3328679 - DNA, 25 bp, Homo sapien
tagaaggagcgttcagagttagacg

SEQ ID NO: 3328680 - DNA, 25 bp, Homo sapien
ggagactgccccaagatttggatga

SEQ ID NO: 3328681 - DNA, 25 bp, Homo sapien
gagttagacgtgaataaggaagtgc

SEQ ID NO: 3328682 - DNA, 25 bp, Homo sapien
ctcctcaggtttagcatgggtagaa

SEQ ID NO: 3328683 - DNA, 25 bp, Homo sapien
ggagcagagcacctttttacatgga

SEQ ID NO: 3328684 - DNA, 25 bp, Homo sapien
ggcattgtgatctttggcctgaaag

SEQ ID NO: 3328685 - DNA, 25 bp, Homo sapien
cactgagcatttaagaattggagca

SEQ ID NO: 3328686 - DNA, 25 bp, Homo sapien
caaacgagtattaaagggaattcat

SEQ ID NO: 3328687 - DNA, 25 bp, Homo sapien
taacaaatggattaacgggcctatg

SEQ ID NO: 3328688 - DNA, 25 bp, Homo sapien
tcaccccacgtagctgacttcaatg

SEQ ID NO: 3328689 - DNA, 25 bp, Homo sapien
tcaatgatgcacttaacaaatggat

SEQ ID NO: 3328690 - DNA, 25 bp, Homo sapien
gattaacgggcctatgacactccct

SEQ ID NO: 3328691 - DNA, 25 bp, Homo sapien
tcattgctgctgaagtaagtcaggg

SEQ ID NO: 3328692 - DNA, 25 bp, Homo sapien
cattgctgctgaagtaagtcaggga

SEQ ID NO: 3328693 - DNA, 25 bp, Homo sapien
ctcagatggaagtggacggatgaat

SEQ ID NO: 3328694 - DNA, 25 bp, Homo sapien
gaagaaacctaacatcagatcagaa

SEQ ID NO: 3328695 - DNA, 25 bp, Homo sapien
cttgttttgcatacctcttgaagaa

SEQ ID NO: 3328696 - DNA, 25 bp, Homo sapien
aagtggacggatgaattgaaggcag

SEQ ID NO: 3328697 - DNA, 25 bp, Homo sapien
cattgccatcggtcatccattcttc

SEQ ID NO: 3328698 - DNA, 25 bp, Homo sapien
ttacagcattgccatcggtcatcca

SEQ ID NO: 3328699 - DNA, 25 bp, Homo sapien
tacagcattgccatcggtcatccat

SEQ ID NO: 3328700 - DNA, 25 bp, Homo sapien
cagcattgccatcggtcatccattc

SEQ ID NO: 3328701 - DNA, 25 bp, Homo sapien
gggccactcaggactttttctgtcc

SEQ ID NO: 3328702 - DNA, 25 bp, Homo sapien
tgtgggccactcaggactttttctg

SEQ ID NO: 3328703 - DNA, 25 bp, Homo sapien
ctgtgggccactcaggactttttct

SEQ ID NO: 3328704 - DNA, 25 bp, Homo sapien
gtgggccactcaggactttttctgt

SEQ ID NO: 3328705 - DNA, 25 bp, Homo sapien
tgactgtggcttctcaacacgtgga

SEQ ID NO: 3328706 - DNA, 25 bp, Homo sapien
aagtaactgatccagcgatgaggaa

SEQ ID NO: 3328707 - DNA, 25 bp, Homo sapien
tcaccatgggcactgtgacttctgc

SEQ ID NO: 3328708 - DNA, 25 bp, Homo sapien
tcagcaaggtgaaaagattggaggc

SEQ ID NO: 3328709 - DNA, 25 bp, Homo sapien
gaggctgaagtgattagcatcccga

SEQ ID NO: 3328710 - DNA, 25 bp, Homo sapien
gggcaaggcggagggcgctcgcggt

SEQ ID NO: 3328711 - DNA, 25 bp, Homo sapien
atcccgagaagccagtcggaggccg

SEQ ID NO: 3328712 - DNA, 25 bp, Homo sapien
agaccgcctacagccctccgggagg

SEQ ID NO: 3328713 - DNA, 25 bp, Homo sapien
ggcgcgctagagtgggcttctgact

SEQ ID NO: 3328714 - DNA, 25 bp, Homo sapien
caaaaagccttgtggattacaaagt

SEQ ID NO: 3328715 - DNA, 25 bp, Homo sapien
aagtgaaactgacacgggacaataa

SEQ ID NO: 3328716 - DNA, 25 bp, Homo sapien
taaaagcagagatagcgagggcagg

SEQ ID NO: 3328717 - DNA, 25 bp, Homo sapien
ttgtttgtgccggaccacgggcttg

SEQ ID NO: 3328718 - DNA, 25 bp, Homo sapien
acaaataatgggtcggcaggcgccc

SEQ ID NO: 3328719 - DNA, 25 bp, Homo sapien
tcttcacgttcttcgctgcgggtaa

SEQ ID NO: 3328720 - DNA, 25 bp, Homo sapien
cgaacgctagcgcttggaacgcagt

SEQ ID NO: 3328721 - DNA, 25 bp, Homo sapien
ggagcctaaattgaattaggaagac

SEQ ID NO: 3328722 - DNA, 25 bp, Homo sapien
tagcaaggagcctaaattgaattag

SEQ ID NO: 3328723 - DNA, 25 bp, Homo sapien
taggcatcattagtggtggtagcaa

SEQ ID NO: 3328724 - DNA, 25 bp, Homo sapien
atcattagtggtggtagcaaggagc

SEQ ID NO: 3328725 - DNA, 25 bp, Homo sapien
tcctgatgtgctttccctttccttc

SEQ ID NO: 3328726 - DNA, 25 bp, Homo sapien
agtcctgatgtgctttccctttcct

SEQ ID NO: 3328727 - DNA, 25 bp, Homo sapien
caggtccattctgtgctgttaccat

SEQ ID NO: 3328728 - DNA, 25 bp, Homo sapien
cctgtttgaatacaggtccattctg

SEQ ID NO: 3328729 - DNA, 25 bp, Homo sapien
tggaaaaatggttactggcggtcat

SEQ ID NO: 3328730 - DNA, 25 bp, Homo sapien
cattcagtccgaatgttcctatcta

SEQ ID NO: 3328731 - DNA, 25 bp, Homo sapien
ggcttggatccttacaagtttggaa

SEQ ID NO: 3328732 - DNA, 25 bp, Homo sapien
gttcctatctataacaagctttgga

SEQ ID NO: 3328733 - DNA, 25 bp, Homo sapien
catcagtgtgttcaactatgagtct

SEQ ID NO: 3328734 - DNA, 25 bp, Homo sapien
tgaaattgatccatcagtgtgttca

SEQ ID NO: 3328735 - DNA, 25 bp, Homo sapien
tcagtgtgttcaactatgagtctgt

SEQ ID NO: 3328736 - DNA, 25 bp, Homo sapien
tgaatgaaattgatccatcagtgtg

SEQ ID NO: 3328737 - DNA, 25 bp, Homo sapien
gccaaaaatcccaaagaggagaaga

SEQ ID NO: 3328738 - DNA, 25 bp, Homo sapien
tggtccttagcctgatcctgtgtaa

SEQ ID NO: 3328739 - DNA, 25 bp, Homo sapien
tgaagggaacccaaaaccagatatc

SEQ ID NO: 3328740 - DNA, 25 bp, Homo sapien
gaaaacccctaccttatctatgatg

SEQ ID NO: 3328741 - DNA, 25 bp, Homo sapien
ggaaccctcctatcgtggaatgaaa

SEQ ID NO: 3328742 - DNA, 25 bp, Homo sapien
gaaaagaacttgtgctttcccagtg

SEQ ID NO: 3328743 - DNA, 25 bp, Homo sapien
tatagtctcctgactttcatgaggc

SEQ ID NO: 3328744 - DNA, 25 bp, Homo sapien
cactgccaccttgctatgcgaatga

SEQ ID NO: 3328745 - DNA, 25 bp, Homo sapien
tgttataggactcatttgtgactat

SEQ ID NO: 3328746 - DNA, 25 bp, Homo sapien
ttgtgactatattttgtggaaagga

SEQ ID NO: 3328747 - DNA, 25 bp, Homo sapien
tgactatattttgtggaaaggagac

SEQ ID NO: 3328748 - DNA, 25 bp, Homo sapien
gattgttataggactcatttgtgac

SEQ ID NO: 3328749 - DNA, 25 bp, Homo sapien
tacccttttgcgttcatcacttcct

SEQ ID NO: 3328750 - DNA, 25 bp, Homo sapien
gatttatacccttttgcgttcatca

SEQ ID NO: 3328751 - DNA, 25 bp, Homo sapien
acttcctttctatattccttcagta

SEQ ID NO: 3328752 - DNA, 25 bp, Homo sapien
taataaaggtgaatgatttataccc

SEQ ID NO: 3328753 - DNA, 25 bp, Homo sapien
tattctgatgcagggatttttctcc

SEQ ID NO: 3328754 - DNA, 25 bp, Homo sapien
taagctcccctcttcgggctatatt

SEQ ID NO: 3328755 - DNA, 25 bp, Homo sapien
tttaattcatgccaaggtggcacag

SEQ ID NO: 3328756 - DNA, 25 bp, Homo sapien
cacagaagatagtgatagacctcca

SEQ ID NO: 3328757 - DNA, 25 bp, Homo sapien
tgggcgtatacgtgccagtcacagg

SEQ ID NO: 3328758 - DNA, 25 bp, Homo sapien
gggcgtatacgtgccagtcacaggg

SEQ ID NO: 3328759 - DNA, 25 bp, Homo sapien
tctgggcgtatacgtgccagtcaca

SEQ ID NO: 3328760 - DNA, 25 bp, Homo sapien
catctgggcgtatacgtgccagtca

SEQ ID NO: 3328761 - DNA, 25 bp, Homo sapien
ggtcccacacagatgggacgcggct

SEQ ID NO: 3328762 - DNA, 25 bp, Homo sapien
cccacacagatgggacgcggcttag

SEQ ID NO: 3328763 - DNA, 25 bp, Homo sapien
tcccacacagatgggacgcggctta

SEQ ID NO: 3328764 - DNA, 25 bp, Homo sapien
ggggtcccacacagatgggacgcgg

SEQ ID NO: 3328765 - DNA, 25 bp, Homo sapien
gaggttccccgatccaactcacggc

SEQ ID NO: 3328766 - DNA, 25 bp, Homo sapien
tcacggcaccaaatttcatgcgcgt

SEQ ID NO: 3328767 - DNA, 25 bp, Homo sapien
ggttccccgatccaactcacggcac

SEQ ID NO: 3328768 - DNA, 25 bp, Homo sapien
tttctcacggagcaaagaacaggag

SEQ ID NO: 3328769 - DNA, 25 bp, Homo sapien
ttacacagaggatccacaaactgtt

SEQ ID NO: 3328770 - DNA, 25 bp, Homo sapien
tacacagaggatccacaaactgtta

SEQ ID NO: 3328771 - DNA, 25 bp, Homo sapien
gatctgtgcaagactctggtttggt

SEQ ID NO: 3328772 - DNA, 25 bp, Homo sapien
cagtagtcagaatgtgcgtttgatc

SEQ ID NO: 3328773 - DNA, 25 bp, Homo sapien
ggttgtggctgtgactacagtagtc

SEQ ID NO: 3328774 - DNA, 25 bp, Homo sapien
tagaatctgccctctgggtcacggg

SEQ ID NO: 3328775 - DNA, 25 bp, Homo sapien
aggagcaaaatgatgctgtagagag

SEQ ID NO: 3328776 - DNA, 25 bp, Homo sapien
gcaaaatgatgctgtagagagtgct

SEQ ID NO: 3328777 - DNA, 25 bp, Homo sapien
tcataggagcaaaatgatgctgtag

SEQ ID NO: 3328778 - DNA, 25 bp, Homo sapien
aaaatgatgctgtagagagtgctcc

SEQ ID NO: 3328779 - DNA, 25 bp, Homo sapien
tacacggatgtagcacattccacag

SEQ ID NO: 3328780 - DNA, 25 bp, Homo sapien
ctgagaatgatgctgggaaagcatt

SEQ ID NO: 3328781 - DNA, 25 bp, Homo sapien
tgacaacacagcgttttcatactca

SEQ ID NO: 3328782 - DNA, 25 bp, Homo sapien
caatctgaagtgagtatatgatcat

SEQ ID NO: 3328783 - DNA, 25 bp, Homo sapien
taactgtacctactaccacagccat

SEQ ID NO: 3328784 - DNA, 25 bp, Homo sapien
cagcctcagtaactgtacctactac

SEQ ID NO: 3328785 - DNA, 25 bp, Homo sapien
gggccttagtctcaggctcagcacc

SEQ ID NO: 3328786 - DNA, 25 bp, Homo sapien
acctttaccatcagcctcagtaact

SEQ ID NO: 3328787 - DNA, 25 bp, Homo sapien
ctagctttaacctaagccttggcat

SEQ ID NO: 3328788 - DNA, 25 bp, Homo sapien
tctagctttaacctaagccttggca

SEQ ID NO: 3328789 - DNA, 25 bp, Homo sapien
ctctagctttaacctaagccttggc

SEQ ID NO: 3328790 - DNA, 25 bp, Homo sapien
ccccaaaaccacatgtagtagtagg

SEQ ID NO: 3328791 - DNA, 25 bp, Homo sapien
aggcatggccctgttctgtacctca

SEQ ID NO: 3328792 - DNA, 25 bp, Homo sapien
cagcgggccgatgacccaatgacag

SEQ ID NO: 3328793 - DNA, 25 bp, Homo sapien
gccctgttctgtacctcataaacca

SEQ ID NO: 3328794 - DNA, 25 bp, Homo sapien
cttggcctatcagatactctttctt

SEQ ID NO: 3328795 - DNA, 25 bp, Homo sapien
cctatcagatactctttcttgggaa

SEQ ID NO: 3328796 - DNA, 25 bp, Homo sapien
atactctttcttgggaatttgaacg

SEQ ID NO: 3328797 - DNA, 25 bp, Homo sapien
tggcctatcagatactctttcttgg

SEQ ID NO: 3328798 - DNA, 25 bp, Homo sapien
cagtgggttataagtgaagtggttg

SEQ ID NO: 3328799 - DNA, 25 bp, Homo sapien
gaaatatatttgtctgattctgaga

SEQ ID NO: 3328800 - DNA, 25 bp, Homo sapien
gaggcagtgggttataagtgaagtg

SEQ ID NO: 3328801 - DNA, 25 bp, Homo sapien
ggcagtgggttataagtgaagtggt

SEQ ID NO: 3328802 - DNA, 25 bp, Homo sapien
cagatgttatttgagctgccaaagc

SEQ ID NO: 3328803 - DNA, 25 bp, Homo sapien
caaccaacgggtactgtgatgccag

SEQ ID NO: 3328804 - DNA, 25 bp, Homo sapien
tactgtgatgccagaattgctgaag

SEQ ID NO: 3328805 - DNA, 25 bp, Homo sapien
caggattagacatcctgtatgtcca

SEQ ID NO: 3328806 - DNA, 25 bp, Homo sapien
agttgaatgtgtaccaaactaagcc

SEQ ID NO: 3328807 - DNA, 25 bp, Homo sapien
ctgagttgaatgtgtaccaaactaa

SEQ ID NO: 3328808 - DNA, 25 bp, Homo sapien
gagttgaatgtgtaccaaactaagc

SEQ ID NO: 3328809 - DNA, 25 bp, Homo sapien
tgagttgaatgtgtaccaaactaag

SEQ ID NO: 3328810 - DNA, 25 bp, Homo sapien
tttggagaagaggtattggcaacca

SEQ ID NO: 3328811 - DNA, 25 bp, Homo sapien
ttggagaagaggtattggcaaccac

SEQ ID NO: 3328812 - DNA, 25 bp, Homo sapien
gattctgggcctgatactactagcc

SEQ ID NO: 3328813 - DNA, 25 bp, Homo sapien
ctctgtcctagttgtgcccatcaca

SEQ ID NO: 3328814 - DNA, 25 bp, Homo sapien
tagttgtgcccatcacatgaatggc

SEQ ID NO: 3328815 - DNA, 25 bp, Homo sapien
ctatggtagtggagcctatgtctgg

SEQ ID NO: 3328816 - DNA, 25 bp, Homo sapien
tttgaacacctcgaagctcaaacat

SEQ ID NO: 3328817 - DNA, 25 bp, Homo sapien
aggattgagatgtttgaacacctcg

SEQ ID NO: 3328818 - DNA, 25 bp, Homo sapien
tatgggccacttgagacacgaagga

SEQ ID NO: 3328819 - DNA, 25 bp, Homo sapien
gcatttggcactacagctctgacat

SEQ ID NO: 3328820 - DNA, 25 bp, Homo sapien
tagctgcattagcaaagtaccagaa

SEQ ID NO: 3328821 - DNA, 25 bp, Homo sapien
gctctgacatataaactgtgctaca

SEQ ID NO: 3328822 - DNA, 25 bp, Homo sapien
tctccatgtgatttccagagcctct

SEQ ID NO: 3328823 - DNA, 25 bp, Homo sapien
gatttccagagcctctcatcatcca

SEQ ID NO: 3328824 - DNA, 25 bp, Homo sapien
gaaagtctccatgtgatttccagag

SEQ ID NO: 3328825 - DNA, 25 bp, Homo sapien
catgtgatttccagagcctctcatc

SEQ ID NO: 3328826 - DNA, 25 bp, Homo sapien
tgttctttgcctttgctttcagttc

SEQ ID NO: 3328827 - DNA, 25 bp, Homo sapien
ttctttgcctttgctttcagttcaa

SEQ ID NO: 3328828 - DNA, 25 bp, Homo sapien
tcctcaaatatattgttctttgcct

SEQ ID NO: 3328829 - DNA, 25 bp, Homo sapien
atattgttctttgcctttgctttca

SEQ ID NO: 3328830 - DNA, 25 bp, Homo sapien
aaacacggtgcggtggctgcacagt

SEQ ID NO: 3328831 - DNA, 25 bp, Homo sapien
tgctgtatgtgtcagaaacacggtg

SEQ ID NO: 3328832 - DNA, 25 bp, Homo sapien
tcttgagcgtattctgtgttggcct

SEQ ID NO: 3328833 - DNA, 25 bp, Homo sapien
taaagatcttgcaccagagggtggc

SEQ ID NO: 3328834 - DNA, 25 bp, Homo sapien
ggtgaccatcaagagcacagctatc

SEQ ID NO: 3328835 - DNA, 25 bp, Homo sapien
catggtgaccatcaagagcacagct

SEQ ID NO: 3328836 - DNA, 25 bp, Homo sapien
ccgggctgtccgtgaggatcatgca

SEQ ID NO: 3328837 - DNA, 25 bp, Homo sapien
agcacagctatctgatgtccaagct

SEQ ID NO: 3328838 - DNA, 25 bp, Homo sapien
ctgtcggaaagtccaatctgatgac

SEQ ID NO: 3328839 - DNA, 25 bp, Homo sapien
tgactgaatacagatgagtgatgcc

SEQ ID NO: 3328840 - DNA, 25 bp, Homo sapien
aaatgactgaatacagatgagtgat

SEQ ID NO: 3328841 - DNA, 25 bp, Homo sapien
taaaatgactgaatacagatgagtg

SEQ ID NO: 3328842 - DNA, 25 bp, Homo sapien
ctaaaatgactgaatacagatgagt

SEQ ID NO: 3328843 - DNA, 25 bp, Homo sapien
ccaaataatttgagtgggtccaggg

SEQ ID NO: 3328844 - DNA, 25 bp, Homo sapien
tccaaataatttgagtgggtccagg

SEQ ID NO: 3328845 - DNA, 25 bp, Homo sapien
ctccaaataatttgagtgggtccag

SEQ ID NO: 3328846 - DNA, 25 bp, Homo sapien
cctccaaataatttgagtgggtcca

SEQ ID NO: 3328847 - DNA, 25 bp, Homo sapien
ccaaatcattaaaccatagcggaaa

SEQ ID NO: 3328848 - DNA, 25 bp, Homo sapien
atggtcattatgcttcccaaagttt

SEQ ID NO: 3328849 - DNA, 25 bp, Homo sapien
aagtccaaatcattaaaccatagcg

SEQ ID NO: 3328850 - DNA, 25 bp, Homo sapien
taaaccatagcggaaaagtattcca

SEQ ID NO: 3328851 - DNA, 25 bp, Homo sapien
ttgggaaagctatgccatggtgccc

SEQ ID NO: 3328852 - DNA, 25 bp, Homo sapien
gtgcccacaatgatcataaagacca

SEQ ID NO: 3328853 - DNA, 25 bp, Homo sapien
tgggaaagctatgccatggtgccca

SEQ ID NO: 3328854 - DNA, 25 bp, Homo sapien
ttctgataagctccacccaaacttg

SEQ ID NO: 3328855 - DNA, 25 bp, Homo sapien
agattctcctgggagttgatgttaa

SEQ ID NO: 3328856 - DNA, 25 bp, Homo sapien
cgatgatgtataccttcagattctc

SEQ ID NO: 3328857 - DNA, 25 bp, Homo sapien
cctgggagttgatgttaaaaattat

SEQ ID NO: 3328858 - DNA, 25 bp, Homo sapien
ctgctcgatggtgtgcaccagtccc

SEQ ID NO: 3328859 - DNA, 25 bp, Homo sapien
gctgctcgatggtgtgcaccagtcc

SEQ ID NO: 3328860 - DNA, 25 bp, Homo sapien
agctgctcgatggtgtgcaccagtc

SEQ ID NO: 3328861 - DNA, 25 bp, Homo sapien
gggggcaatgtccagccgggtccat

SEQ ID NO: 3328862 - DNA, 25 bp, Homo sapien
ctgggggcaatgtccagccgggtcc

SEQ ID NO: 3328863 - DNA, 25 bp, Homo sapien
tgggggcaatgtccagccgggtcca

SEQ ID NO: 3328864 - DNA, 25 bp, Homo sapien
tactgccatgtactcagttaatgtg

SEQ ID NO: 3328865 - DNA, 25 bp, Homo sapien
tagtcccttactgccatgtactcag

SEQ ID NO: 3328866 - DNA, 25 bp, Homo sapien
catgcatagtcccttactgccatgt

SEQ ID NO: 3328867 - DNA, 25 bp, Homo sapien
ctcagttaatgtggaaagaaaggga

SEQ ID NO: 3328868 - DNA, 25 bp, Homo sapien
tgcaatgattgcacatacagagcag

SEQ ID NO: 3328869 - DNA, 25 bp, Homo sapien
gacatctgcaatgattgcacataca

SEQ ID NO: 3328870 - DNA, 25 bp, Homo sapien
tctgcaatgattgcacatacagagc

SEQ ID NO: 3328871 - DNA, 25 bp, Homo sapien
ccctagacatctgcaatgattgcac

SEQ ID NO: 3328872 - DNA, 25 bp, Homo sapien
gctgaacttgttgcatcctcttgga

SEQ ID NO: 3328873 - DNA, 25 bp, Homo sapien
tcttggagaattacctcataatcca

SEQ ID NO: 3328874 - DNA, 25 bp, Homo sapien
tttaaaggctgaacttgttgcatcc

SEQ ID NO: 3328875 - DNA, 25 bp, Homo sapien
aacttgttgcatcctcttggagaat

SEQ ID NO: 3328876 - DNA, 25 bp, Homo sapien
ggcagagcaattggctccatcctca

SEQ ID NO: 3328877 - DNA, 25 bp, Homo sapien
ttgaaagattaagcacaaagagatg

SEQ ID NO: 3328878 - DNA, 25 bp, Homo sapien
agtggaagccttgggcccaatgaga

SEQ ID NO: 3328879 - DNA, 25 bp, Homo sapien
aaatcgcttgtagtatgtctgggcc

SEQ ID NO: 3328880 - DNA, 25 bp, Homo sapien
gagactaaggattatgacacaaacc

SEQ ID NO: 3328881 - DNA, 25 bp, Homo sapien
agaaactgccagaagccgttctaat

SEQ ID NO: 3328882 - DNA, 25 bp, Homo sapien
gccgttctaatgatgacatctggtt

SEQ ID NO: 3328883 - DNA, 25 bp, Homo sapien
gaaactgccagaagccgttctaatg

SEQ ID NO: 3328884 - DNA, 25 bp, Homo sapien
cagaagccgttctaatgatgacatc

SEQ ID NO: 3328885 - DNA, 25 bp, Homo sapien
cctcagattgccgtttgcatataat

SEQ ID NO: 3328886 - DNA, 25 bp, Homo sapien
tgccgtttgcatataattctaccat

SEQ ID NO: 3328887 - DNA, 25 bp, Homo sapien
cagtttaggtttcgtttgccctgtg

SEQ ID NO: 3328888 - DNA, 25 bp, Homo sapien
ttctcctcagattgccgtttgcata

SEQ ID NO: 3328889 - DNA, 25 bp, Homo sapien
caacattggacacgatgtattccca

SEQ ID NO: 3328890 - DNA, 25 bp, Homo sapien
ggacctaatatttgcatcgttgcag

SEQ ID NO: 3328891 - DNA, 25 bp, Homo sapien
gcagtgaacctactccacaacgtat

SEQ ID NO: 3328892 - DNA, 25 bp, Homo sapien
taatatgaacccattctactcaggc

SEQ ID NO: 3328893 - DNA, 25 bp, Homo sapien
gctccaaaggcaatcatgaaggttg

SEQ ID NO: 3328894 - DNA, 25 bp, Homo sapien
gttttgcttgcatttaatggagatt

SEQ ID NO: 3328895 - DNA, 25 bp, Homo sapien
ctctgcttcagtagtctccactatg

SEQ ID NO: 3328896 - DNA, 25 bp, Homo sapien
cactatgatgactttgattatggct

SEQ ID NO: 3328897 - DNA, 25 bp, Homo sapien
ctcatccttgtgtttggtctaacat

SEQ ID NO: 3328898 - DNA, 25 bp, Homo sapien
tgtttggtctaacatcatcttcatg

SEQ ID NO: 3328899 - DNA, 25 bp, Homo sapien
taacatcatcttcatgtgggttcct

SEQ ID NO: 3328900 - DNA, 25 bp, Homo sapien
ctgagcctaagtctcatccttgtgt

SEQ ID NO: 3328901 - DNA, 25 bp, Homo sapien
caacagaacagagctgaacacccac

SEQ ID NO: 3328902 - DNA, 25 bp, Homo sapien
tgctgcgagggtcaaagccctgttt

SEQ ID NO: 3328903 - DNA, 25 bp, Homo sapien
agccctgtttcatgtcatacggcaa

SEQ ID NO: 3328904 - DNA, 25 bp, Homo sapien
caagcaaagtgctgcgagggtcaaa

SEQ ID NO: 3328905 - DNA, 25 bp, Homo sapien
tgagacaccgaggtggccagctggc

SEQ ID NO: 3328906 - DNA, 25 bp, Homo sapien
gagacaccgaggtggccagctggca

SEQ ID NO: 3328907 - DNA, 25 bp, Homo sapien
cgtgagacaccgaggtggccagctg

SEQ ID NO: 3328908 - DNA, 25 bp, Homo sapien
agacaccgaggtggccagctggcat

SEQ ID NO: 3328909 - DNA, 25 bp, Homo sapien
tagactcttaggcagtgaagatacg

SEQ ID NO: 3328910 - DNA, 25 bp, Homo sapien
tgttaatcacatacactcagcagat

SEQ ID NO: 3328911 - DNA, 25 bp, Homo sapien
gtcactaggtaggatcaaattgcta

SEQ ID NO: 3328912 - DNA, 25 bp, Homo sapien
tagagttgacaaccacagtggtact

SEQ ID NO: 3328913 - DNA, 25 bp, Homo sapien
tctccactatctggtattacctcgc

SEQ ID NO: 3328914 - DNA, 25 bp, Homo sapien
tctggtattacctcgccaatcttca

SEQ ID NO: 3328915 - DNA, 25 bp, Homo sapien
tacctcgccaatcttcaactgaatt

SEQ ID NO: 3328916 - DNA, 25 bp, Homo sapien
cgccaatcttcaactgaattgtgac

SEQ ID NO: 3328917 - DNA, 25 bp, Homo sapien
catttcactctgctgtaagatatat

SEQ ID NO: 3328918 - DNA, 25 bp, Homo sapien
tcactctgctgtaagatatattata

SEQ ID NO: 3328919 - DNA, 25 bp, Homo sapien
tcatttcactctgctgtaagatata

SEQ ID NO: 3328920 - DNA, 25 bp, Homo sapien
tttcactctgctgtaagatatatta

SEQ ID NO: 3328921 - DNA, 25 bp, Homo sapien
aattgacagcctgaactctgtcctg

SEQ ID NO: 3328922 - DNA, 25 bp, Homo sapien
tcctgttggcattaaagctgtcatg

SEQ ID NO: 3328923 - DNA, 25 bp, Homo sapien
ttctttgggcctgaaatccacctgg

SEQ ID NO: 3328924 - DNA, 25 bp, Homo sapien
aactctgtcctgttgttctttgggc

SEQ ID NO: 3328925 - DNA, 25 bp, Homo sapien
aggctgcaagttccatacacattgg

SEQ ID NO: 3328926 - DNA, 25 bp, Homo sapien
tgactgtctgatagagaatcccact

SEQ ID NO: 3328927 - DNA, 25 bp, Homo sapien
gaatcccactctcaatgactacagg

SEQ ID NO: 3328928 - DNA, 25 bp, Homo sapien
ccaacgtagggacacttgtgtaggc

SEQ ID NO: 3328929 - DNA, 25 bp, Homo sapien
aatctcctctaaggccaacttgatc

SEQ ID NO: 3328930 - DNA, 25 bp, Homo sapien
tacttgggatttacaccaatctcct

SEQ ID NO: 3328931 - DNA, 25 bp, Homo sapien
gggatttacaccaatctcctctaag

SEQ ID NO: 3328932 - DNA, 25 bp, Homo sapien
caatctcctctaaggccaacttgat

SEQ ID NO: 3328933 - DNA, 25 bp, Homo sapien
cagtaggtttctggtttaatttgct

SEQ ID NO: 3328934 - DNA, 25 bp, Homo sapien
taggtttctggtttaatttgctcat

SEQ ID NO: 3328935 - DNA, 25 bp, Homo sapien
gtaggtttctggtttaatttgctca

SEQ ID NO: 3328936 - DNA, 25 bp, Homo sapien
gaacacatctctggtttccattgat

SEQ ID NO: 3328937 - DNA, 25 bp, Homo sapien
aacacatctctggtttccattgatt

SEQ ID NO: 3328938 - DNA, 25 bp, Homo sapien
ctgaacacatctctggtttccattg

SEQ ID NO: 3328939 - DNA, 25 bp, Homo sapien
tgaacacatctctggtttccattga

SEQ ID NO: 3328940 - DNA, 25 bp, Homo sapien
ggtgccatctcggcttaccacaacc

SEQ ID NO: 3328941 - DNA, 25 bp, Homo sapien
ccaccttccaggttcaagcgattct

SEQ ID NO: 3328942 - DNA, 25 bp, Homo sapien
tccaccttccaggttcaagcgattc

SEQ ID NO: 3328943 - DNA, 25 bp, Homo sapien
tgctaccacgcctgcctaatttttg

SEQ ID NO: 3328944 - DNA, 25 bp, Homo sapien
cttctttctctgatcgttgttattc

SEQ ID NO: 3328945 - DNA, 25 bp, Homo sapien
gatcatcagtggaccgggggttact

SEQ ID NO: 3328946 - DNA, 25 bp, Homo sapien
agatcatcagtggaccgggggttac

SEQ ID NO: 3328947 - DNA, 25 bp, Homo sapien
ttctctgatcgttgttattctgttt

SEQ ID NO: 3328948 - DNA, 25 bp, Homo sapien
tgtttccagatttgtgtcctgctca

SEQ ID NO: 3328949 - DNA, 25 bp, Homo sapien
tttccagatttgtgtcctgctcatc

SEQ ID NO: 3328950 - DNA, 25 bp, Homo sapien
gtttccagatttgtgtcctgctcat

SEQ ID NO: 3328951 - DNA, 25 bp, Homo sapien
tctccggatttacaatatctgtgcc

SEQ ID NO: 3328952 - DNA, 25 bp, Homo sapien
tatctgtgccgtctaacctcctgtg

SEQ ID NO: 3328953 - DNA, 25 bp, Homo sapien
gacattcactgtcttcaaggccctt

SEQ ID NO: 3328954 - DNA, 25 bp, Homo sapien
cttagcagacatgagtgaaggcctc

SEQ ID NO: 3328955 - DNA, 25 bp, Homo sapien
gtcaaatataatacttcctgcaaat

SEQ ID NO: 3328956 - DNA, 25 bp, Homo sapien
aatataatacttcctgcaaattcac

SEQ ID NO: 3328957 - DNA, 25 bp, Homo sapien
tataatacttcctgcaaattcactg

SEQ ID NO: 3328958 - DNA, 25 bp, Homo sapien
aatacttcctgcaaattcactgggc

SEQ ID NO: 3328959 - DNA, 25 bp, Homo sapien
ttaatacttatcagtgcctctttgg

SEQ ID NO: 3328960 - DNA, 25 bp, Homo sapien
acttatcagtgcctctttgggaaac

SEQ ID NO: 3328961 - DNA, 25 bp, Homo sapien
aatacttatcagtgcctctttggga

SEQ ID NO: 3328962 - DNA, 25 bp, Homo sapien
tatcagtgcctctttgggaaacttt

SEQ ID NO: 3328963 - DNA, 25 bp, Homo sapien
aagaaagcagataagactttcacac

SEQ ID NO: 3328964 - DNA, 25 bp, Homo sapien
aagcagataagactttcacactgtg

SEQ ID NO: 3328965 - DNA, 25 bp, Homo sapien
gcagataagactttcacactgtgct

SEQ ID NO: 3328966 - DNA, 25 bp, Homo sapien
agataagactttcacactgtgctga

SEQ ID NO: 3328967 - DNA, 25 bp, Homo sapien
caaagtgtaaaaggaatttgcagga

SEQ ID NO: 3328968 - DNA, 25 bp, Homo sapien
taaaaggaatttgcaggagatcctg

SEQ ID NO: 3328969 - DNA, 25 bp, Homo sapien
ctcagggcaaagtgtaaaaggaatt

SEQ ID NO: 3328970 - DNA, 25 bp, Homo sapien
caggagatcctgttggatttcaggg

SEQ ID NO: 3328971 - DNA, 25 bp, Homo sapien
ccacgtataatttcagggttaagag

SEQ ID NO: 3328972 - DNA, 25 bp, Homo sapien
gtgtccctggccttcacatactgta

SEQ ID NO: 3328973 - DNA, 25 bp, Homo sapien
tttcagggttaagagtgtccctggc

SEQ ID NO: 3328974 - DNA, 25 bp, Homo sapien
agtgtccctggccttcacatactgt

SEQ ID NO: 3328975 - DNA, 25 bp, Homo sapien
attctcccttccagtctgatttcaa

SEQ ID NO: 3328976 - DNA, 25 bp, Homo sapien
cattctcccttccagtctgatttca

SEQ ID NO: 3328977 - DNA, 25 bp, Homo sapien
gccaaatcatttggataggtgaaat

SEQ ID NO: 3328978 - DNA, 25 bp, Homo sapien
gccaaatcatttggataggtgaaaa

SEQ ID NO: 3328979 - DNA, 25 bp, Homo sapien
catttggataggtgaaaagggaaag

SEQ ID NO: 3328980 - DNA, 25 bp, Homo sapien
gtgaaatctgattgaacatgccaaa

SEQ ID NO: 3328981 - DNA, 25 bp, Homo sapien
cactagtatcatccgtttagaaaac

SEQ ID NO: 3328982 - DNA, 25 bp, Homo sapien
aggaggctcttgtagatagtccaca

SEQ ID NO: 3328983 - DNA, 25 bp, Homo sapien
atagtccacaaggtcgggcaaggcc

SEQ ID NO: 3328984 - DNA, 25 bp, Homo sapien
gtatcatccgtttagaaaacaaatc

SEQ ID NO: 3328985 - DNA, 25 bp, Homo sapien
cttcccttccactaagcaactggaa

SEQ ID NO: 3328986 - DNA, 25 bp, Homo sapien
taggccacgtagtcaatttcttcac

SEQ ID NO: 3328987 - DNA, 25 bp, Homo sapien
cactaagcaactggaagtcctcaga

SEQ ID NO: 3328988 - DNA, 25 bp, Homo sapien
tggaagtcctcagaaccataggcca

SEQ ID NO: 3328989 - DNA, 25 bp, Homo sapien
tcataaccacatcggattattgaaa

SEQ ID NO: 3328990 - DNA, 25 bp, Homo sapien
ccacatcggattattgaaaggcttt

SEQ ID NO: 3328991 - DNA, 25 bp, Homo sapien
tctgacactcataaccacatcggat

SEQ ID NO: 3328992 - DNA, 25 bp, Homo sapien
catcggattattgaaaggctttttg

SEQ ID NO: 3328993 - DNA, 25 bp, Homo sapien
caaaacactggaagcaatctactag

SEQ ID NO: 3328994 - DNA, 25 bp, Homo sapien
aacgaagtcaatggctgtcacgggc

SEQ ID NO: 3328995 - DNA, 25 bp, Homo sapien
taaaagcggtgaactgtgaatacat

SEQ ID NO: 3328996 - DNA, 25 bp, Homo sapien
gatgctactccacaattaaaagcgg

SEQ ID NO: 3328997 - DNA, 25 bp, Homo sapien
gagtctacagtcaggaaaaatgtct

SEQ ID NO: 3328998 - DNA, 25 bp, Homo sapien
acattaggcttaccctctcacaggg

SEQ ID NO: 3328999 - DNA, 25 bp, Homo sapien
agtttgagccttcgacacctggtga

SEQ ID NO: 3329000 - DNA, 25 bp, Homo sapien
gtctacaatgtagtccagctgaggg

SEQ ID NO: 3329001 - DNA, 25 bp, Homo sapien
cggactccggctttttcatgctcag

SEQ ID NO: 3329002 - DNA, 25 bp, Homo sapien
tagaacagaaatccacggactccgg

SEQ ID NO: 3329003 - DNA, 25 bp, Homo sapien
cagtgcaccctagaatctgaaaact

SEQ ID NO: 3329004 - DNA, 25 bp, Homo sapien
caccttctgtgggaatgtctgatac

SEQ ID NO: 3329005 - DNA, 25 bp, Homo sapien
gggacccacgtattctcctgaggaa

SEQ ID NO: 3329006 - DNA, 25 bp, Homo sapien
tatacagtgctatttgggacccacg

SEQ ID NO: 3329007 - DNA, 25 bp, Homo sapien
tgagccttgaaggaacagttatcct

SEQ ID NO: 3329008 - DNA, 25 bp, Homo sapien
tatacatgatgagcctatacagtgc

SEQ ID NO: 3329009 - DNA, 25 bp, Homo sapien
gtggcaattcgctgaaaacaaatgc

SEQ ID NO: 3329010 - DNA, 25 bp, Homo sapien
gcaaagcaaatgttagtggcaattc

SEQ ID NO: 3329011 - DNA, 25 bp, Homo sapien
caaggcatagcctgagataaaaacc

SEQ ID NO: 3329012 - DNA, 25 bp, Homo sapien
gataaaaaccaggttgtgtcagcag

SEQ ID NO: 3329013 - DNA, 25 bp, Homo sapien
taagcaacaacatagcgaaggtgtt

SEQ ID NO: 3329014 - DNA, 25 bp, Homo sapien
caacaacatagcgaaggtgtttcct

SEQ ID NO: 3329015 - DNA, 25 bp, Homo sapien
atggcataagcaacaacatagcgaa

SEQ ID NO: 3329016 - DNA, 25 bp, Homo sapien
ggcataagcaacaacatagcgaagg

SEQ ID NO: 3329017 - DNA, 25 bp, Homo sapien
tagcaactggcaatctggttctctt

SEQ ID NO: 3329018 - DNA, 25 bp, Homo sapien
ggctggctgatctcacatgttaact

SEQ ID NO: 3329019 - DNA, 25 bp, Homo sapien
ctttgtttgctatccacaggctggc

SEQ ID NO: 3329020 - DNA, 25 bp, Homo sapien
tcaccatgaacaacactagcaactg

SEQ ID NO: 3329021 - DNA, 25 bp, Homo sapien
tggaaagcctgtcacacagcttctt

SEQ ID NO: 3329022 - DNA, 25 bp, Homo sapien
ctctttgccgttgtgtttaccttca

SEQ ID NO: 3329023 - DNA, 25 bp, Homo sapien
gactttagcaagtttgtccacttga

SEQ ID NO: 3329024 - DNA, 25 bp, Homo sapien
ttcaaggtcgaagccatggaaagcc

SEQ ID NO: 3329025 - DNA, 25 bp, Homo sapien
aattggtgaacttaggccattcaca

SEQ ID NO: 3329026 - DNA, 25 bp, Homo sapien
aatattactggtggttggtcaaaat

SEQ ID NO: 3329027 - DNA, 25 bp, Homo sapien
aattgggcaatacttatgagaccct

SEQ ID NO: 3329028 - DNA, 25 bp, Homo sapien
gacttaaggcttacaatatacatat

SEQ ID NO: 3329029 - DNA, 25 bp, Homo sapien
agcagagcttcctcggtggattgct

SEQ ID NO: 3329030 - DNA, 25 bp, Homo sapien
gcagagcttcctcggtggattgctt

SEQ ID NO: 3329031 - DNA, 25 bp, Homo sapien
tcaagacgttcagttgtagctcccc

SEQ ID NO: 3329032 - DNA, 25 bp, Homo sapien
gaaagcaaaggcctacgctcagtga

SEQ ID NO: 3329033 - DNA, 25 bp, Homo sapien
tatattaccaaaggcaagagaccca

SEQ ID NO: 3329034 - DNA, 25 bp, Homo sapien
ggaggaccagtatcatcaagacgtt

SEQ ID NO: 3329035 - DNA, 25 bp, Homo sapien
cgaggtaggttgaggataaagcttc

SEQ ID NO: 3329036 - DNA, 25 bp, Homo sapien
cccaacgaccaatgacgaggtaggt

SEQ ID NO: 3329037 - DNA, 25 bp, Homo sapien
gcaggagctaagcactgagttcctt

SEQ ID NO: 3329038 - DNA, 25 bp, Homo sapien
gaggttctattatcagatgtgaggc

SEQ ID NO: 3329039 - DNA, 25 bp, Homo sapien
cactggtcatctttgccaatgttcc

SEQ ID NO: 3329040 - DNA, 25 bp, Homo sapien
ggcatcacctatgagtgctgaagga

SEQ ID NO: 3329041 - DNA, 25 bp, Homo sapien
ccaatgttccaccataaagagcaat

SEQ ID NO: 3329042 - DNA, 25 bp, Homo sapien
tgctgaaggactcgtggccaaagct

SEQ ID NO: 3329043 - DNA, 25 bp, Homo sapien
gaccaaaagcatgaggtcttttcaa

SEQ ID NO: 3329044 - DNA, 25 bp, Homo sapien
tcctgccacttttagggttggccag

SEQ ID NO: 3329045 - DNA, 25 bp, Homo sapien
gcagcctttcccactagttcatcaa

SEQ ID NO: 3329046 - DNA, 25 bp, Homo sapien
tcccactagttcatcaaatgtgccc

SEQ ID NO: 3329047 - DNA, 25 bp, Homo sapien
gctcaaacatggtttaagatcccca

SEQ ID NO: 3329048 - DNA, 25 bp, Homo sapien
aagatccccattgtgcacatttgtg

SEQ ID NO: 3329049 - DNA, 25 bp, Homo sapien
tgttttggagcagatgactggactc

SEQ ID NO: 3329050 - DNA, 25 bp, Homo sapien
tggactcaacttctacaaaggctaa

SEQ ID NO: 3329051 - DNA, 25 bp, Homo sapien
tgctaacccataaccttgtgaagaa

SEQ ID NO: 3329052 - DNA, 25 bp, Homo sapien
gagttcatcctagtattccccatgt

SEQ ID NO: 3329053 - DNA, 25 bp, Homo sapien
tctcagtgagcaacgctaggaaata

SEQ ID NO: 3329054 - DNA, 25 bp, Homo sapien
accaagatatggaagctagcttagc

SEQ ID NO: 3329055 - DNA, 25 bp, Homo sapien
cacacccggcttatggttatatatc

SEQ ID NO: 3329056 - DNA, 25 bp, Homo sapien
gctattgaggctatgttggtatcaa

SEQ ID NO: 3329057 - DNA, 25 bp, Homo sapien
caccatactggtgagggtagtctca

SEQ ID NO: 3329058 - DNA, 25 bp, Homo sapien
tagtaggcacacaatttataaagac

SEQ ID NO: 3329059 - DNA, 25 bp, Homo sapien
cattgtcctcatagacaggtgtcta

SEQ ID NO: 3329060 - DNA, 25 bp, Homo sapien
ggtgtctatatataaggtgtcctcc

SEQ ID NO: 3329061 - DNA, 25 bp, Homo sapien
tattgtagccctgggataatatcag

SEQ ID NO: 3329062 - DNA, 25 bp, Homo sapien
tatcagaaacttacaaggctctcaa

SEQ ID NO: 3329063 - DNA, 25 bp, Homo sapien
caggaaacgctgttgctctgcttct

SEQ ID NO: 3329064 - DNA, 25 bp, Homo sapien
gctctgcttctatagtaagagtctg

SEQ ID NO: 3329065 - DNA, 25 bp, Homo sapien
ggaaacgctgttgctctgcttctat

SEQ ID NO: 3329066 - DNA, 25 bp, Homo sapien
ttctatagtaagagtctgaaggtca

SEQ ID NO: 3329067 - DNA, 25 bp, Homo sapien
gctaggactgttttcaggcaggcta

SEQ ID NO: 3329068 - DNA, 25 bp, Homo sapien
tgagacttgcagaccgctaggactg

SEQ ID NO: 3329069 - DNA, 25 bp, Homo sapien
tgtcattacattatgctgcaggctg

SEQ ID NO: 3329070 - DNA, 25 bp, Homo sapien
tgtagattgcacgttccgaacccgt

SEQ ID NO: 3329071 - DNA, 25 bp, Homo sapien
ttggaatcagttgaagctgaaacat

SEQ ID NO: 3329072 - DNA, 25 bp, Homo sapien
tttggaatcagttgaagctgaaaca

SEQ ID NO: 3329073 - DNA, 25 bp, Homo sapien
agaagccttggctctccctaggaat

SEQ ID NO: 3329074 - DNA, 25 bp, Homo sapien
agccttggctctccctaggaatgtt

SEQ ID NO: 3329075 - DNA, 25 bp, Homo sapien
ggctctccctaggaatgttattaat

SEQ ID NO: 3329076 - DNA, 25 bp, Homo sapien
ccttggctctccctaggaatgttat

SEQ ID NO: 3329077 - DNA, 25 bp, Homo sapien
ccaaaaagttcttctgtgcttagag

SEQ ID NO: 3329078 - DNA, 25 bp, Homo sapien
agttcttctgtgcttagagtgcaag

SEQ ID NO: 3329079 - DNA, 25 bp, Homo sapien
aaacaccaaaaagttcttctgtgct

SEQ ID NO: 3329080 - DNA, 25 bp, Homo sapien
tcttctgtgcttagagtgcaaggcg

SEQ ID NO: 3329081 - DNA, 25 bp, Homo sapien
gttcagggcttccacaggaatctca

SEQ ID NO: 3329082 - DNA, 25 bp, Homo sapien
gatttatacctctcctcgggagaca

SEQ ID NO: 3329083 - DNA, 25 bp, Homo sapien
gagtatcctgaatagattttaccct

SEQ ID NO: 3329084 - DNA, 25 bp, Homo sapien
gaatctcacgtgtgcttgctacggc

SEQ ID NO: 3329085 - DNA, 25 bp, Homo sapien
taagttctttcagtaggttgccaaa

SEQ ID NO: 3329086 - DNA, 25 bp, Homo sapien
tccatgccatgacataagtttgggc

SEQ ID NO: 3329087 - DNA, 25 bp, Homo sapien
tctttccagagtaagtggaccatca

SEQ ID NO: 3329088 - DNA, 25 bp, Homo sapien
gatacattaaattcttgcagcaccc

SEQ ID NO: 3329089 - DNA, 25 bp, Homo sapien
ctaatctaaggcattcttgaacaag

SEQ ID NO: 3329090 - DNA, 25 bp, Homo sapien
ttccatagggaatccagtaatttct

SEQ ID NO: 3329091 - DNA, 25 bp, Homo sapien
ttctccaagccacctactaatctaa

SEQ ID NO: 3329092 - DNA, 25 bp, Homo sapien
ttcttgaacaagaaccttatgtgtt

SEQ ID NO: 3329093 - DNA, 25 bp, Homo sapien
aagctgctctgaagacgctggctgc

SEQ ID NO: 3329094 - DNA, 25 bp, Homo sapien
catgtgtagtagaccaaagctgaag

SEQ ID NO: 3329095 - DNA, 25 bp, Homo sapien
tgtagtaagaaccaaacattaggac

SEQ ID NO: 3329096 - DNA, 25 bp, Homo sapien
tcatgtgtagtagaccaaagctgaa

SEQ ID NO: 3329097 - DNA, 25 bp, Homo sapien
aacattaggaccgtctcttgtcggg

SEQ ID NO: 3329098 - DNA, 25 bp, Homo sapien
tcattcatctcaaacattgtgtccc

SEQ ID NO: 3329099 - DNA, 25 bp, Homo sapien
ccattctcattcatctcaaacattg

SEQ ID NO: 3329100 - DNA, 25 bp, Homo sapien
attgtgtcccactgaatattgttca

SEQ ID NO: 3329101 - DNA, 25 bp, Homo sapien
aacattgtgtcccactgaatattgt

SEQ ID NO: 3329102 - DNA, 25 bp, Homo sapien
gatgctcttatcatctgagtaacta

SEQ ID NO: 3329103 - DNA, 25 bp, Homo sapien
gacatcgaccgctgaatttatgcca

SEQ ID NO: 3329104 - DNA, 25 bp, Homo sapien
ggtttttgatgacatcgaccgctga

SEQ ID NO: 3329105 - DNA, 25 bp, Homo sapien
taactagaaccatgaattttctggg

SEQ ID NO: 3329106 - DNA, 25 bp, Homo sapien
tattatgagggcgaaaattaccaaa

SEQ ID NO: 3329107 - DNA, 25 bp, Homo sapien
tacatgtatgcatttcacgtactcc

SEQ ID NO: 3329108 - DNA, 25 bp, Homo sapien
ttcaatacctcaacataaggtaggg

SEQ ID NO: 3329109 - DNA, 25 bp, Homo sapien
tcttaagctagatagtggacacatg

SEQ ID NO: 3329110 - DNA, 25 bp, Homo sapien
tctttgcgatgcatggaaaaggagc

SEQ ID NO: 3329111 - DNA, 25 bp, Homo sapien
gaaagaggcctcgaacaaagtgaga

SEQ ID NO: 3329112 - DNA, 25 bp, Homo sapien
gagatgctttagctgatcaagccct

SEQ ID NO: 3329113 - DNA, 25 bp, Homo sapien
tataaactggatattggcgttacag

SEQ ID NO: 3329114 - DNA, 25 bp, Homo sapien
tgctggcaggagacgttaacaagga

SEQ ID NO: 3329115 - DNA, 25 bp, Homo sapien
ttccaaagaaacaaaggtgctggca

SEQ ID NO: 3329116 - DNA, 25 bp, Homo sapien
gacgttaacaaggaagacgcttgag

SEQ ID NO: 3329117 - DNA, 25 bp, Homo sapien
caggagacgttaacaaggaagacgc

SEQ ID NO: 3329118 - DNA, 25 bp, Homo sapien
gactagtgaattgcagtagtgacag

SEQ ID NO: 3329119 - DNA, 25 bp, Homo sapien
gaaaaatcaatttcgataacgcact

SEQ ID NO: 3329120 - DNA, 25 bp, Homo sapien
tgaaaaatcaatttcgataacgcac

SEQ ID NO: 3329121 - DNA, 25 bp, Homo sapien
tagactagtgaattgcagtagtgac

SEQ ID NO: 3329122 - DNA, 25 bp, Homo sapien
gagtgcaacagtgatatttgcttgc

SEQ ID NO: 3329123 - DNA, 25 bp, Homo sapien
tgaggcactctgagcaaaattccaa

SEQ ID NO: 3329124 - DNA, 25 bp, Homo sapien
atatttttgctacaaagataaagag

SEQ ID NO: 3329125 - DNA, 25 bp, Homo sapien
caagagcaccacctaatttgccaat

SEQ ID NO: 3329126 - DNA, 25 bp, Homo sapien
cataaagttcatttggacctacaga

SEQ ID NO: 3329127 - DNA, 25 bp, Homo sapien
tcccatatataatagtgagttccat

SEQ ID NO: 3329128 - DNA, 25 bp, Homo sapien
tatgcatttcatgaccagatctttg

SEQ ID NO: 3329129 - DNA, 25 bp, Homo sapien
tcctctgagtataagtcactgatta

SEQ ID NO: 3329130 - DNA, 25 bp, Homo sapien
ccacatggggttgctcttgatctca

SEQ ID NO: 3329131 - DNA, 25 bp, Homo sapien
aacattaggcacaaacttccagatc

SEQ ID NO: 3329132 - DNA, 25 bp, Homo sapien
tgctcttgatctcaagacctacgaa

SEQ ID NO: 3329133 - DNA, 25 bp, Homo sapien
gtgatctaccatggatccacatggg

SEQ ID NO: 3329134 - DNA, 25 bp, Homo sapien
gagctgtttctattcagccgtgttg

SEQ ID NO: 3329135 - DNA, 25 bp, Homo sapien
gaacggagctgtttctattcagccg

SEQ ID NO: 3329136 - DNA, 25 bp, Homo sapien
tattcagccgtgttgcgctttccat

SEQ ID NO: 3329137 - DNA, 25 bp, Homo sapien
tgtttctattcagccgtgttgcgct

SEQ ID NO: 3329138 - DNA, 25 bp, Homo sapien
tctcgaaatgcaggaaagtatctct

SEQ ID NO: 3329139 - DNA, 25 bp, Homo sapien
gatagccacctcatgactactaagt

SEQ ID NO: 3329140 - DNA, 25 bp, Homo sapien
ccttgagctctgattagcaaagtag

SEQ ID NO: 3329141 - DNA, 25 bp, Homo sapien
caggaggctatttcttgagtctcga

SEQ ID NO: 3329142 - DNA, 25 bp, Homo sapien
gaaactcagagctactgctaatgtt

SEQ ID NO: 3329143 - DNA, 25 bp, Homo sapien
gacagaaggacaagatacttccttc

SEQ ID NO: 3329144 - DNA, 25 bp, Homo sapien
ggatggctccttcctaagaagtgcc

SEQ ID NO: 3329145 - DNA, 25 bp, Homo sapien
aagctttccacatgatgaagttaat

SEQ ID NO: 3329146 - DNA, 25 bp, Homo sapien
tagacccctaggatactacagcagc

SEQ ID NO: 3329147 - DNA, 25 bp, Homo sapien
tcactggtgagacatccagggactg

SEQ ID NO: 3329148 - DNA, 25 bp, Homo sapien
gagtagacccctaggatactacagc

SEQ ID NO: 3329149 - DNA, 25 bp, Homo sapien
tcttgggatggagctcccagaggag

SEQ ID NO: 3329150 - DNA, 25 bp, Homo sapien
gaaaagactcattggctcttctggg

SEQ ID NO: 3329151 - DNA, 25 bp, Homo sapien
ttataattcacccaaaaaccaggca

SEQ ID NO: 3329152 - DNA, 25 bp, Homo sapien
ccaagcaagattggcccaattttct

SEQ ID NO: 3329153 - DNA, 25 bp, Homo sapien
ggtcacactgtaacatggctgccct

SEQ ID NO: 3329154 - DNA, 25 bp, Homo sapien
ccaatgcaagaaacatttctacatc

SEQ ID NO: 3329155 - DNA, 25 bp, Homo sapien
aacataactaattttgccaatgcaa

SEQ ID NO: 3329156 - DNA, 25 bp, Homo sapien
tctacatccaatgcgctaattacca

SEQ ID NO: 3329157 - DNA, 25 bp, Homo sapien
acataactaattttgccaatgcaag

SEQ ID NO: 3329158 - DNA, 25 bp, Homo sapien
ctaaaatcattgataaatgtcctgc

SEQ ID NO: 3329159 - DNA, 25 bp, Homo sapien
tcctgcaggaggcaatgtgaatggc

SEQ ID NO: 3329160 - DNA, 25 bp, Homo sapien
gaggcaatgtgaatggccgagcctg

SEQ ID NO: 3329161 - DNA, 25 bp, Homo sapien
aaaatcattgataaatgtcctgcag

SEQ ID NO: 3329162 - DNA, 25 bp, Homo sapien
caaattccctgagttgaatattcta

SEQ ID NO: 3329163 - DNA, 25 bp, Homo sapien
tacttttggctcttctaccatagtc

SEQ ID NO: 3329164 - DNA, 25 bp, Homo sapien
ggctcttctaccatagtcactattt

SEQ ID NO: 3329165 - DNA, 25 bp, Homo sapien
agttgaatattctacttttggctct

SEQ ID NO: 3329166 - DNA, 25 bp, Homo sapien
aaccacagaaatgtcgaaaacaagt

SEQ ID NO: 3329167 - DNA, 25 bp, Homo sapien
tggaagtaaggactgtaaagtccca

SEQ ID NO: 3329168 - DNA, 25 bp, Homo sapien
tgtcgaaaacaagtgttggaagtaa

SEQ ID NO: 3329169 - DNA, 25 bp, Homo sapien
caagtgttggaagtaaggactgtaa

SEQ ID NO: 3329170 - DNA, 25 bp, Homo sapien
tggacttctcactcccacaggtacc

SEQ ID NO: 3329171 - DNA, 25 bp, Homo sapien
tgacgttcactgcccctactggact

SEQ ID NO: 3329172 - DNA, 25 bp, Homo sapien
ttcactgcccctactggacttctca

SEQ ID NO: 3329173 - DNA, 25 bp, Homo sapien
tcccacaggtacctctgcatgtgct

SEQ ID NO: 3329174 - DNA, 25 bp, Homo sapien
ccatatgtggtggtatgtggctgtt

SEQ ID NO: 3329175 - DNA, 25 bp, Homo sapien
cattgaagtagcattcattttctga

SEQ ID NO: 3329176 - DNA, 25 bp, Homo sapien
gctcctctttacaatactccatatg

SEQ ID NO: 3329177 - DNA, 25 bp, Homo sapien
tctcagtggaactcttagaggcaga

SEQ ID NO: 3329178 - DNA, 25 bp, Homo sapien
tgattactggtcagggctctcttcc

SEQ ID NO: 3329179 - DNA, 25 bp, Homo sapien
aatttgattactggtcagggctctc

SEQ ID NO: 3329180 - DNA, 25 bp, Homo sapien
tttgattactggtcagggctctctt

SEQ ID NO: 3329181 - DNA, 25 bp, Homo sapien
gattactggtcagggctctcttcct

SEQ ID NO: 3329182 - DNA, 25 bp, Homo sapien
cccctccagagcctgattaaggact

SEQ ID NO: 3329183 - DNA, 25 bp, Homo sapien
tgggaccccagaccctcatgaaggt

SEQ ID NO: 3329184 - DNA, 25 bp, Homo sapien
tgccctgaaggcttgtcccaaaagc

SEQ ID NO: 3329185 - DNA, 25 bp, Homo sapien
catgaaggtcaatgcatacactccc

SEQ ID NO: 3329186 - DNA, 25 bp, Homo sapien
cttacagtatctagcttagcagtgc

SEQ ID NO: 3329187 - DNA, 25 bp, Homo sapien
ttaattaagagagatggtcactacc

SEQ ID NO: 3329188 - DNA, 25 bp, Homo sapien
ttagcagtgctgacaatgcccctca

SEQ ID NO: 3329189 - DNA, 25 bp, Homo sapien
tagttgcctaattggtgctttggaa

SEQ ID NO: 3329190 - DNA, 25 bp, Homo sapien
cgctcttctccagttgcccatttgt

SEQ ID NO: 3329191 - DNA, 25 bp, Homo sapien
tgcctgagaatcaaagaattcagtt

SEQ ID NO: 3329192 - DNA, 25 bp, Homo sapien
tgtctactgcctgagaatcaaagaa

SEQ ID NO: 3329193 - DNA, 25 bp, Homo sapien
cccatttgtctactgcctgagaatc

SEQ ID NO: 3329194 - DNA, 25 bp, Homo sapien
cagactgtagactttgtcttaggac

SEQ ID NO: 3329195 - DNA, 25 bp, Homo sapien
ctgtagactttgtcttaggactggc

SEQ ID NO: 3329196 - DNA, 25 bp, Homo sapien
gactttgtcttaggactggctcaat

SEQ ID NO: 3329197 - DNA, 25 bp, Homo sapien
tgtcttaggactggctcaatttcca

SEQ ID NO: 3329198 - DNA, 25 bp, Homo sapien
tgtcaaggccagtgatagagagaag

SEQ ID NO: 3329199 - DNA, 25 bp, Homo sapien
gaagaaacttaagggctgccacatg

SEQ ID NO: 3329200 - DNA, 25 bp, Homo sapien
tccacataagatcctgagctcataa

SEQ ID NO: 3329201 - DNA, 25 bp, Homo sapien
taaattctatgatgtcaaggccagt

SEQ ID NO: 3329202 - DNA, 25 bp, Homo sapien
ttaggattgatgaagaatggggcat

SEQ ID NO: 3329203 - DNA, 25 bp, Homo sapien
cttaggattgatgaagaatggggca

SEQ ID NO: 3329204 - DNA, 25 bp, Homo sapien
atgcacatctatggactttctaagg

SEQ ID NO: 3329205 - DNA, 25 bp, Homo sapien
ttttatgcacatctatggactttct

SEQ ID NO: 3329206 - DNA, 25 bp, Homo sapien
tatgcacatctatggactttctaag

SEQ ID NO: 3329207 - DNA, 25 bp, Homo sapien
tttatgcacatctatggactttcta

SEQ ID NO: 3329208 - DNA, 25 bp, Homo sapien
cattgtgttctcctagtccatcttc

SEQ ID NO: 3329209 - DNA, 25 bp, Homo sapien
gttttaagctttctattggcgtatc

SEQ ID NO: 3329210 - DNA, 25 bp, Homo sapien
acttccattgtgttctcctagtcca

SEQ ID NO: 3329211 - DNA, 25 bp, Homo sapien
tctattggcgtatcatttctttcta

SEQ ID NO: 3329212 - DNA, 25 bp, Homo sapien
tgcagaatagtccttactagttgcc

SEQ ID NO: 3329213 - DNA, 25 bp, Homo sapien
cgcagttggccaataaatttcactt

SEQ ID NO: 3329214 - DNA, 25 bp, Homo sapien
gaaggaaatttggatgcagaatagt

SEQ ID NO: 3329215 - DNA, 25 bp, Homo sapien
gcctaaaatcactctaatatagcag

SEQ ID NO: 3329216 - DNA, 25 bp, Homo sapien
ggaaagcagtacattacactggaga

SEQ ID NO: 3329217 - DNA, 25 bp, Homo sapien
tatgatattaaagagaccagatcca

SEQ ID NO: 3329218 - DNA, 25 bp, Homo sapien
tttcctgtgacaggaacttgggagc

SEQ ID NO: 3329219 - DNA, 25 bp, Homo sapien
actacactggtttggcaggtctgga

SEQ ID NO: 3329220 - DNA, 25 bp, Homo sapien
aggtatcatccaatacactgagggc

SEQ ID NO: 3329221 - DNA, 25 bp, Homo sapien
caggtatcatccaatacactgaggg

SEQ ID NO: 3329222 - DNA, 25 bp, Homo sapien
acagtcacagtctgttgtgagacaa

SEQ ID NO: 3329223 - DNA, 25 bp, Homo sapien
agagcttggacagtcacagtctgtt

SEQ ID NO: 3329224 - DNA, 25 bp, Homo sapien
cacagtctgttgtgagacaacagga

SEQ ID NO: 3329225 - DNA, 25 bp, Homo sapien
gagcttggacagtcacagtctgttg

SEQ ID NO: 3329226 - DNA, 25 bp, Homo sapien
cacatggagattctctaggaggccc

SEQ ID NO: 3329227 - DNA, 25 bp, Homo sapien
tactggaaaagatttggctcctcct

SEQ ID NO: 3329228 - DNA, 25 bp, Homo sapien
cactaagacagatgctgggaaaagc

SEQ ID NO: 3329229 - DNA, 25 bp, Homo sapien
tacaccactcttggctgtactggaa

SEQ ID NO: 3329230 - DNA, 25 bp, Homo sapien
tactgaattacaccaccagcattcc

SEQ ID NO: 3329231 - DNA, 25 bp, Homo sapien
gcacatgacagatagtatggcctct

SEQ ID NO: 3329232 - DNA, 25 bp, Homo sapien
tggttctcctgcatgcacatgacag

SEQ ID NO: 3329233 - DNA, 25 bp, Homo sapien
aggtcttctgacttgtactgaatta

SEQ ID NO: 3329234 - DNA, 25 bp, Homo sapien
actctttcgggaattggatctttga

SEQ ID NO: 3329235 - DNA, 25 bp, Homo sapien
tctttgacagaatgaagtagaacta

SEQ ID NO: 3329236 - DNA, 25 bp, Homo sapien
aactctttcgggaattggatctttg

SEQ ID NO: 3329237 - DNA, 25 bp, Homo sapien
aagtagaactatcagaggaagatcc

SEQ ID NO: 3329238 - DNA, 25 bp, Homo sapien
aatacagtgcaagcttggtggaaca

SEQ ID NO: 3329239 - DNA, 25 bp, Homo sapien
gccaggaccattaagttggaggact

SEQ ID NO: 3329240 - DNA, 25 bp, Homo sapien
caggcaataaacaagacatcaattc

SEQ ID NO: 3329241 - DNA, 25 bp, Homo sapien
cagagatctcaaagagagccaggac

SEQ ID NO: 3329242 - DNA, 25 bp, Homo sapien
acaatagagcttgggatacacttca

SEQ ID NO: 3329243 - DNA, 25 bp, Homo sapien
ttttcagcatatgagcaatttaaac

SEQ ID NO: 3329244 - DNA, 25 bp, Homo sapien
aaaccaacacaatagagcttgggat

SEQ ID NO: 3329245 - DNA, 25 bp, Homo sapien
agttttttcagcatatgagcaattt

SEQ ID NO: 3329246 - DNA, 25 bp, Homo sapien
gcaatctccaacatcagctttacga

SEQ ID NO: 3329247 - DNA, 25 bp, Homo sapien
catcagctttacgaacatctcccat

SEQ ID NO: 3329248 - DNA, 25 bp, Homo sapien
ttaacaccgcaatctccaacatcag

SEQ ID NO: 3329249 - DNA, 25 bp, Homo sapien
ctacagttaacaccgcaatctccaa

SEQ ID NO: 3329250 - DNA, 25 bp, Homo sapien
gagtcccatggttagataaagggaa

SEQ ID NO: 3329251 - DNA, 25 bp, Homo sapien
tagatttatgagtcccatggttaga

SEQ ID NO: 3329252 - DNA, 25 bp, Homo sapien
ccctgtgcatagatttatgagtccc

SEQ ID NO: 3329253 - DNA, 25 bp, Homo sapien
tgtccccctgtgcatagatttatga

SEQ ID NO: 3329254 - DNA, 25 bp, Homo sapien
tgagcccagaagttcgagagttcag

SEQ ID NO: 3329255 - DNA, 25 bp, Homo sapien
gagcccagaagttcgagagttcagc

SEQ ID NO: 3329256 - DNA, 25 bp, Homo sapien
tcccccgaggtgcaacacgagactt

SEQ ID NO: 3329257 - DNA, 25 bp, Homo sapien
aacacgagacttctagggtgtcctt

SEQ ID NO: 3329258 - DNA, 25 bp, Homo sapien
gcaacacgagacttctagggtgtcc

SEQ ID NO: 3329259 - DNA, 25 bp, Homo sapien
cagggtcccccgaggtgcaacacga

SEQ ID NO: 3329260 - DNA, 25 bp, Homo sapien
ggcttattaaagattccctcaatga

SEQ ID NO: 3329261 - DNA, 25 bp, Homo sapien
taaacactggtcttggccacaaaca

SEQ ID NO: 3329262 - DNA, 25 bp, Homo sapien
ccctcaatgagaatgtgtaaacact

SEQ ID NO: 3329263 - DNA, 25 bp, Homo sapien
gtctgacttcccagaaataccctgg

SEQ ID NO: 3329264 - DNA, 25 bp, Homo sapien
tccggagttgctcaaatgggttctc

SEQ ID NO: 3329265 - DNA, 25 bp, Homo sapien
cctggaagttgttctagggtcctgg

SEQ ID NO: 3329266 - DNA, 25 bp, Homo sapien
cctgttttcatgctggctactggcc

SEQ ID NO: 3329267 - DNA, 25 bp, Homo sapien
tcagtagctcagtcctgtcacaggg

SEQ ID NO: 3329268 - DNA, 25 bp, Homo sapien
tataagccacatgtcatggcagaag

SEQ ID NO: 3329269 - DNA, 25 bp, Homo sapien
ccacatgtcatggcagaagcaaaaa

SEQ ID NO: 3329270 - DNA, 25 bp, Homo sapien
tatataagccacatgtcatggcaga

SEQ ID NO: 3329271 - DNA, 25 bp, Homo sapien
atcagaggcaaaaacgtgaacagca

SEQ ID NO: 3329272 - DNA, 25 bp, Homo sapien
ggttggtttttgccttacagtgcat

SEQ ID NO: 3329273 - DNA, 25 bp, Homo sapien
ttggttggtttttgccttacagtgc

SEQ ID NO: 3329274 - DNA, 25 bp, Homo sapien
tggttggtttttgccttacagtgca

SEQ ID NO: 3329275 - DNA, 25 bp, Homo sapien
cagactgttcgttatgaatgaacct

SEQ ID NO: 3329276 - DNA, 25 bp, Homo sapien
gaaatgaagtgagccacatctccag

SEQ ID NO: 3329277 - DNA, 25 bp, Homo sapien
cactcagtatttgttgcagaggaac

SEQ ID NO: 3329278 - DNA, 25 bp, Homo sapien
tgaatgaaccttacgaaatgaagtg

SEQ ID NO: 3329279 - DNA, 25 bp, Homo sapien
tatagacagcttaaattagttcctt

SEQ ID NO: 3329280 - DNA, 25 bp, Homo sapien
caccacttcaactggtgaagttaag

SEQ ID NO: 3329281 - DNA, 25 bp, Homo sapien
cattctccttgactgtaatcaatca

SEQ ID NO: 3329282 - DNA, 25 bp, Homo sapien
gttttctgtcaattatgctactgca

SEQ ID NO: 3329283 - DNA, 25 bp, Homo sapien
taatgccatctggtgtagatcaaca

SEQ ID NO: 3329284 - DNA, 25 bp, Homo sapien
acaaaagctgtctcacacatgtgag

SEQ ID NO: 3329285 - DNA, 25 bp, Homo sapien
gggtctatcaaaagaatcagtggct

SEQ ID NO: 3329286 - DNA, 25 bp, Homo sapien
tccaaatatgcctcagggtctatca

SEQ ID NO: 3329287 - DNA, 25 bp, Homo sapien
aatccacatctcaggccaagtttac

SEQ ID NO: 3329288 - DNA, 25 bp, Homo sapien
tgcaaattaatccacatctcaggcc

SEQ ID NO: 3329289 - DNA, 25 bp, Homo sapien
aaggcattgcaaattaatccacatc

SEQ ID NO: 3329290 - DNA, 25 bp, Homo sapien
tacagagagaatgtatctccttcac

SEQ ID NO: 3329291 - DNA, 25 bp, Homo sapien
cacagatatccttctggattagcag

SEQ ID NO: 3329292 - DNA, 25 bp, Homo sapien
cccaaaatagggatatctaaatcaa

SEQ ID NO: 3329293 - DNA, 25 bp, Homo sapien
ggattagcagatttacctcaaatgt

SEQ ID NO: 3329294 - DNA, 25 bp, Homo sapien
tcatagttttggatgtagtcctgtg

SEQ ID NO: 3329295 - DNA, 25 bp, Homo sapien
ctacaagcttccagtaaacatcttc

SEQ ID NO: 3329296 - DNA, 25 bp, Homo sapien
ccagtaaacatcttctttttacagt

SEQ ID NO: 3329297 - DNA, 25 bp, Homo sapien
tacaagcttccagtaaacatcttct

SEQ ID NO: 3329298 - DNA, 25 bp, Homo sapien
aagcttccagtaaacatcttctttt

SEQ ID NO: 3329299 - DNA, 25 bp, Homo sapien
atggcctctcgccagctttgttctt

SEQ ID NO: 3329300 - DNA, 25 bp, Homo sapien
tggcctctcgccagctttgttcttg

SEQ ID NO: 3329301 - DNA, 25 bp, Homo sapien
gcatggcctctcgccagctttgttc

SEQ ID NO: 3329302 - DNA, 25 bp, Homo sapien
catggcctctcgccagctttgttct

SEQ ID NO: 3329303 - DNA, 25 bp, Homo sapien
cactggtctgcacttcaccaaggat

SEQ ID NO: 3329304 - DNA, 25 bp, Homo sapien
tcataaagcctccaaaatatcttgt

SEQ ID NO: 3329305 - DNA, 25 bp, Homo sapien
tatcttgtccatcaacctgtagtga

SEQ ID NO: 3329306 - DNA, 25 bp, Homo sapien
tcaccaaggatctttcaatcataaa

SEQ ID NO: 3329307 - DNA, 25 bp, Homo sapien
tgtgctcgccgtaatgaaaacctac

SEQ ID NO: 3329308 - DNA, 25 bp, Homo sapien
acagaagaaaacaatcaggttgggt

SEQ ID NO: 3329309 - DNA, 25 bp, Homo sapien
gttgggtgtgctcgccgtaatgaaa

SEQ ID NO: 3329310 - DNA, 25 bp, Homo sapien
aatcaggttgggtgtgctcgccgta

SEQ ID NO: 3329311 - DNA, 25 bp, Homo sapien
ctgtgtagatgcaaagaatgaaggg

SEQ ID NO: 3329312 - DNA, 25 bp, Homo sapien
tcatgcaccctgtgtagatgcaaag

SEQ ID NO: 3329313 - DNA, 25 bp, Homo sapien
ttgactgactgacccgggtaagaaa

SEQ ID NO: 3329314 - DNA, 25 bp, Homo sapien
ctgctgcttctcatgcaccctgtgt

SEQ ID NO: 3329315 - DNA, 25 bp, Homo sapien
cagtctttggctaataacgatacag

SEQ ID NO: 3329316 - DNA, 25 bp, Homo sapien
gagcataggtaggaagcaaactgcc

SEQ ID NO: 3329317 - DNA, 25 bp, Homo sapien
gcaaactgccaacgtctcagttagt

SEQ ID NO: 3329318 - DNA, 25 bp, Homo sapien
gctacatcatggctgctaaccgctt

SEQ ID NO: 3329319 - DNA, 25 bp, Homo sapien
ttctgcagcacctagacacgatcca

SEQ ID NO: 3329320 - DNA, 25 bp, Homo sapien
cctagacacgatccatcagctagat

SEQ ID NO: 3329321 - DNA, 25 bp, Homo sapien
catcagctagatagtcatttctcag

SEQ ID NO: 3329322 - DNA, 25 bp, Homo sapien
tcctcatatggttccccaccttctg

SEQ ID NO: 3329323 - DNA, 25 bp, Homo sapien
tgtgccttgacttaactttacacgg

SEQ ID NO: 3329324 - DNA, 25 bp, Homo sapien
tttacacggcagcaatcatttcaag

SEQ ID NO: 3329325 - DNA, 25 bp, Homo sapien
ccttgacttaactttacacggcagc

SEQ ID NO: 3329326 - DNA, 25 bp, Homo sapien
cttaactttacacggcagcaatcat

SEQ ID NO: 3329327 - DNA, 25 bp, Homo sapien
actggcatttcacggaaggtatttt

SEQ ID NO: 3329328 - DNA, 25 bp, Homo sapien
aactggcatttcacggaaggtattt

SEQ ID NO: 3329329 - DNA, 25 bp, Homo sapien
aaaactggcatttcacggaaggtat

SEQ ID NO: 3329330 - DNA, 25 bp, Homo sapien
tggcatttcacggaaggtattttac

SEQ ID NO: 3329331 - DNA, 25 bp, Homo sapien
gccaagactcagatgcagatattct

SEQ ID NO: 3329332 - DNA, 25 bp, Homo sapien
gtgagatagaagcaaaccaagcaca

SEQ ID NO: 3329333 - DNA, 25 bp, Homo sapien
gggcagtttccagaaatcgcaagtt

SEQ ID NO: 3329334 - DNA, 25 bp, Homo sapien
taacctcttagtgtaaatatcagtg

SEQ ID NO: 3329335 - DNA, 25 bp, Homo sapien
ggaagaatcctacactactctgcag

SEQ ID NO: 3329336 - DNA, 25 bp, Homo sapien
caagtctgaccccaggatgagggag

SEQ ID NO: 3329337 - DNA, 25 bp, Homo sapien
gacagctgtcggactgcatccaagt

SEQ ID NO: 3329338 - DNA, 25 bp, Homo sapien
tgtcttccgggactaagacggcctc

SEQ ID NO: 3329339 - DNA, 25 bp, Homo sapien
ctttcatccgtgtgatgccattaaa

SEQ ID NO: 3329340 - DNA, 25 bp, Homo sapien
gagagtgaagggtgataccatgcat

SEQ ID NO: 3329341 - DNA, 25 bp, Homo sapien
ggagagtgaagggtgataccatgca

SEQ ID NO: 3329342 - DNA, 25 bp, Homo sapien
tttcatccgtgtgatgccattaaaa

SEQ ID NO: 3329343 - DNA, 25 bp, Homo sapien
tttgtgggcaaggtcctttgaagtc

SEQ ID NO: 3329344 - DNA, 25 bp, Homo sapien
gtcttttgtgggcaaggtcctttga

SEQ ID NO: 3329345 - DNA, 25 bp, Homo sapien
tgggcaaggtcctttgaagtcgact

SEQ ID NO: 3329346 - DNA, 25 bp, Homo sapien
tcttttgtgggcaaggtcctttgaa

SEQ ID NO: 3329347 - DNA, 25 bp, Homo sapien
tcatttttaagatttggtgcgtgtc

SEQ ID NO: 3329348 - DNA, 25 bp, Homo sapien
gatttggtgcgtgtccatccaatca

SEQ ID NO: 3329349 - DNA, 25 bp, Homo sapien
tgcgtgtccatccaatcaatttccc

SEQ ID NO: 3329350 - DNA, 25 bp, Homo sapien
ttaagatttggtgcgtgtccatcca

SEQ ID NO: 3329351 - DNA, 25 bp, Homo sapien
aagacaccggagaaacccagacgtg

SEQ ID NO: 3329352 - DNA, 25 bp, Homo sapien
cccagcgccggagacgggctgtgtg

SEQ ID NO: 3329353 - DNA, 25 bp, Homo sapien
ccgggcagcctggacttcgcgagcc

SEQ ID NO: 3329354 - DNA, 25 bp, Homo sapien
gggtgaagagctgcatcccgcacta

SEQ ID NO: 3329355 - DNA, 25 bp, Homo sapien
ggcaggggagcacgcgggcgaagga

SEQ ID NO: 3329356 - DNA, 25 bp, Homo sapien
gcgccgggctccgagaccggcaggg

SEQ ID NO: 3329357 - DNA, 25 bp, Homo sapien
ttccgcgcgtcggaggctggcacct

SEQ ID NO: 3329358 - DNA, 25 bp, Homo sapien
gggccgccgtcgctgacaccaccgc

SEQ ID NO: 3329359 - DNA, 25 bp, Homo sapien
ccctgtagcgagtctccagtgggca

SEQ ID NO: 3329360 - DNA, 25 bp, Homo sapien
cctgtagcgagtctccagtgggcat

SEQ ID NO: 3329361 - DNA, 25 bp, Homo sapien
ctgtcgtccgcccctgtagcgagtc

SEQ ID NO: 3329362 - DNA, 25 bp, Homo sapien
gacctggactcagtgcagcgtgtcc

SEQ ID NO: 3329363 - DNA, 25 bp, Homo sapien
aagcatctgacttgggattcgcctt

SEQ ID NO: 3329364 - DNA, 25 bp, Homo sapien
cgctggccgcgaagggccgttggga

SEQ ID NO: 3329365 - DNA, 25 bp, Homo sapien
gattcgccttagtgcggcgctggcc

SEQ ID NO: 3329366 - DNA, 25 bp, Homo sapien
tcttgccccggaaatgttggcgagg

SEQ ID NO: 3329367 - DNA, 25 bp, Homo sapien
cctttccagaatcgggtgccagcga

SEQ ID NO: 3329368 - DNA, 25 bp, Homo sapien
accctgtcccgctgccgagactggc

SEQ ID NO: 3329369 - DNA, 25 bp, Homo sapien
aatcgggtgccagcgatccaccctg

SEQ ID NO: 3329370 - DNA, 25 bp, Homo sapien
ttccagaatcgggtgccagcgatcc

SEQ ID NO: 3329371 - DNA, 25 bp, Homo sapien
ccttgcgttttttatgtgacaggaa

SEQ ID NO: 3329372 - DNA, 25 bp, Homo sapien
aaacaaattcatgtggcttattgga

SEQ ID NO: 3329373 - DNA, 25 bp, Homo sapien
tatgttggagtatatttttgctgtc

SEQ ID NO: 3329374 - DNA, 25 bp, Homo sapien
tgctgtcatataattccttgcgttt

SEQ ID NO: 3329375 - DNA, 25 bp, Homo sapien
cgtagaaacacgtgcatggaggatc

SEQ ID NO: 3329376 - DNA, 25 bp, Homo sapien
aaaatcaggcagaactatctccagt

SEQ ID NO: 3329377 - DNA, 25 bp, Homo sapien
taaaaactaattgacctaaggcata

SEQ ID NO: 3329378 - DNA, 25 bp, Homo sapien
ctttgggttaaccttgtagctgtgc

SEQ ID NO: 3329379 - DNA, 25 bp, Homo sapien
tccctttataagtgacctggcctat

SEQ ID NO: 3329380 - DNA, 25 bp, Homo sapien
ctttataagtgacctggcctatctc

SEQ ID NO: 3329381 - DNA, 25 bp, Homo sapien
tgatctcatggagtattgtattggg

SEQ ID NO: 3329382 - DNA, 25 bp, Homo sapien
tataagtgacctggcctatctctct

SEQ ID NO: 3329383 - DNA, 25 bp, Homo sapien
gaatgtttcttatttgtgccaaggg

SEQ ID NO: 3329384 - DNA, 25 bp, Homo sapien
gtcttgccaaagaagtgtacctagt

SEQ ID NO: 3329385 - DNA, 25 bp, Homo sapien
tgccaagggactattgatgatgctg

SEQ ID NO: 3329386 - DNA, 25 bp, Homo sapien
aagtagtcagctaaatcatacctgc

SEQ ID NO: 3329387 - DNA, 25 bp, Homo sapien
ttacaactcgaagctgcatcttaaa

SEQ ID NO: 3329388 - DNA, 25 bp, Homo sapien
aatatttcaaggtcattaatttcct

SEQ ID NO: 3329389 - DNA, 25 bp, Homo sapien
taggtaagaggttttgtaattatca

SEQ ID NO: 3329390 - DNA, 25 bp, Homo sapien
gaagaagtgttcttaacatcccaac

SEQ ID NO: 3329391 - DNA, 25 bp, Homo sapien
aaaataggcaacaaatcatagtgga

SEQ ID NO: 3329392 - DNA, 25 bp, Homo sapien
aatcatagtggaaaagaattgccaa

SEQ ID NO: 3329393 - DNA, 25 bp, Homo sapien
tcatgccactgacctacagctttgg

SEQ ID NO: 3329394 - DNA, 25 bp, Homo sapien
tgccactgacctacagctttggcca

SEQ ID NO: 3329395 - DNA, 25 bp, Homo sapien
catcccaggcttaagtataccaagg

SEQ ID NO: 3329396 - DNA, 25 bp, Homo sapien
ttttaaaggcctggtacatgtctgc

SEQ ID NO: 3329397 - DNA, 25 bp, Homo sapien
tagccaagaatcgtcattaagtatc

SEQ ID NO: 3329398 - DNA, 25 bp, Homo sapien
taaagcgtgtggtaaattggaatag

SEQ ID NO: 3329399 - DNA, 25 bp, Homo sapien
acagtacccgttcccttgatgtcta

SEQ ID NO: 3329400 - DNA, 25 bp, Homo sapien
atacgtggccaaaggaataactcca

SEQ ID NO: 3329401 - DNA, 25 bp, Homo sapien
tagagaacatatatcgggtgcctct

SEQ ID NO: 3329402 - DNA, 25 bp, Homo sapien
ttcgcatatacgtggccaaaggaat

SEQ ID NO: 3329403 - DNA, 25 bp, Homo sapien
ttggcgaattactggaagatggcgg

SEQ ID NO: 3329404 - DNA, 25 bp, Homo sapien
tttggcgaattactggaagatggcg

SEQ ID NO: 3329405 - DNA, 25 bp, Homo sapien
tactttcacggcactttttccttca

SEQ ID NO: 3329406 - DNA, 25 bp, Homo sapien
gctaccccgatctttgtgacattga

SEQ ID NO: 3329407 - DNA, 25 bp, Homo sapien
taagttccaatttactttcacggca

SEQ ID NO: 3329408 - DNA, 25 bp, Homo sapien
gatgttaatccctatatttccgtgg

SEQ ID NO: 3329409 - DNA, 25 bp, Homo sapien
caaaatagctgttagacacctttga

SEQ ID NO: 3329410 - DNA, 25 bp, Homo sapien
caatttgacagaataacaagggtca

SEQ ID NO: 3329411 - DNA, 25 bp, Homo sapien
gcctattaagtaaacaacatccctc

SEQ ID NO: 3329412 - DNA, 25 bp, Homo sapien
gctgctctctggttatgtatgtgtg

SEQ ID NO: 3329413 - DNA, 25 bp, Homo sapien
gcagaaaatggtaatcaagtgtgat

SEQ ID NO: 3329414 - DNA, 25 bp, Homo sapien
tgactgactctagtcattatggaaa

SEQ ID NO: 3329415 - DNA, 25 bp, Homo sapien
tagaccctttagctttaatgagcag

SEQ ID NO: 3329416 - DNA, 25 bp, Homo sapien
tacacatggcagtatcaaagcatat

SEQ ID NO: 3329417 - DNA, 25 bp, Homo sapien
tagcccctatatatagccaatagac

SEQ ID NO: 3329418 - DNA, 25 bp, Homo sapien
gatagtcttaacacagcttcctcag

SEQ ID NO: 3329419 - DNA, 25 bp, Homo sapien
gaaaatgaaagttccctgcaatccc

SEQ ID NO: 3329420 - DNA, 25 bp, Homo sapien
tcttgactcagactatctcagagga

SEQ ID NO: 3329421 - DNA, 25 bp, Homo sapien
aaaccagcaatttatacagtggaga

SEQ ID NO: 3329422 - DNA, 25 bp, Homo sapien
gggaccatctgtatatcattaaaca

SEQ ID NO: 3329423 - DNA, 25 bp, Homo sapien
tattagttgcaagtagaaaaccagc

SEQ ID NO: 3329424 - DNA, 25 bp, Homo sapien
tggagaaactgggatcaaattaaca

SEQ ID NO: 3329425 - DNA, 25 bp, Homo sapien
tgccaagatgagcaaggtataatcc

SEQ ID NO: 3329426 - DNA, 25 bp, Homo sapien
tcttcaatggtcaaaaatggtgccc

SEQ ID NO: 3329427 - DNA, 25 bp, Homo sapien
tatacgcaacttggcctactcaaga

SEQ ID NO: 3329428 - DNA, 25 bp, Homo sapien
gatagaatggagatgctttgtgaag

SEQ ID NO: 3329429 - DNA, 25 bp, Homo sapien
cagaatagcaggtaagagggatccc

SEQ ID NO: 3329430 - DNA, 25 bp, Homo sapien
tactctttaagattagacgtggccc

SEQ ID NO: 3329431 - DNA, 25 bp, Homo sapien
gagggatcccagacttgaccaaata

SEQ ID NO: 3329432 - DNA, 25 bp, Homo sapien
tatttctgctagtaggactcactgg

SEQ ID NO: 3329433 - DNA, 25 bp, Homo sapien
gaaagactcatagaaggcaaggtag

SEQ ID NO: 3329434 - DNA, 25 bp, Homo sapien
caaggtaggatgttaggcacgctaa

SEQ ID NO: 3329435 - DNA, 25 bp, Homo sapien
tacttattagcctgactagtttggg

SEQ ID NO: 3329436 - DNA, 25 bp, Homo sapien
ccccgccactactgagagatgggaa

SEQ ID NO: 3329437 - DNA, 25 bp, Homo sapien
attttaatgacacttctgcagtggg

SEQ ID NO: 3329438 - DNA, 25 bp, Homo sapien
taggtgtctgaataaaaatacctct

SEQ ID NO: 3329439 - DNA, 25 bp, Homo sapien
ttctggttccactgtatattatttt

SEQ ID NO: 3329440 - DNA, 25 bp, Homo sapien
ctgctatggctaattcttacagaac

SEQ ID NO: 3329441 - DNA, 25 bp, Homo sapien
ttctgaggtaaggaaattatcatct

SEQ ID NO: 3329442 - DNA, 25 bp, Homo sapien
agaattctctctgttattcaacata

SEQ ID NO: 3329443 - DNA, 25 bp, Homo sapien
tgtagtctgattcttggagactggc

SEQ ID NO: 3329444 - DNA, 25 bp, Homo sapien
tcacaatgacatgtagaattctctc

SEQ ID NO: 3329445 - DNA, 25 bp, Homo sapien
gcaattgtctagcagagctttagac

SEQ ID NO: 3329446 - DNA, 25 bp, Homo sapien
ttagaccaggaagtgccacacagca

SEQ ID NO: 3329447 - DNA, 25 bp, Homo sapien
gctttagaccaggaagtgccacaca

SEQ ID NO: 3329448 - DNA, 25 bp, Homo sapien
cgcaattgtctagcagagctttaga

SEQ ID NO: 3329449 - DNA, 25 bp, Homo sapien
atgagtcttttgtaaaccactccca

SEQ ID NO: 3329450 - DNA, 25 bp, Homo sapien
aagagcaatgagtcttttgtaaacc

SEQ ID NO: 3329451 - DNA, 25 bp, Homo sapien
cccatatcttacagaaagagcaatg

SEQ ID NO: 3329452 - DNA, 25 bp, Homo sapien
gtgatggtgagcactattattccac

SEQ ID NO: 3329453 - DNA, 25 bp, Homo sapien
gtggtccccagtgagcatacacttg

SEQ ID NO: 3329454 - DNA, 25 bp, Homo sapien
tgaacataggcccaagaatccgggc

SEQ ID NO: 3329455 - DNA, 25 bp, Homo sapien
tccacttccagatgctgttaaccag

SEQ ID NO: 3329456 - DNA, 25 bp, Homo sapien
catacacttggctgatgaacatagg

SEQ ID NO: 3329457 - DNA, 25 bp, Homo sapien
gtgaaatggaggacaagcagattga

SEQ ID NO: 3329458 - DNA, 25 bp, Homo sapien
tggaggacaagcagattgatattgg

SEQ ID NO: 3329459 - DNA, 25 bp, Homo sapien
gaaatggtattaccaaactacagca

SEQ ID NO: 3329460 - DNA, 25 bp, Homo sapien
agcaaagaaatggtattaccaaact

SEQ ID NO: 3329461 - DNA, 25 bp, Homo sapien
tttctataattgcaatgtcagggta

SEQ ID NO: 3329462 - DNA, 25 bp, Homo sapien
tctataattgcaatgtcagggtacc

SEQ ID NO: 3329463 - DNA, 25 bp, Homo sapien
ttctataattgcaatgtcagggtac

SEQ ID NO: 3329464 - DNA, 25 bp, Homo sapien
tataggacataagattgcagactgg

SEQ ID NO: 3329465 - DNA, 25 bp, Homo sapien
aaggaactgggccagatgaatcacc

SEQ ID NO: 3329466 - DNA, 25 bp, Homo sapien
tgttcaatcgagcaaccagttggtc

SEQ ID NO: 3329467 - DNA, 25 bp, Homo sapien
gatagcctaatcctattagcacagc

SEQ ID NO: 3329468 - DNA, 25 bp, Homo sapien
gataaagaagccaacccatacaacg

SEQ ID NO: 3329469 - DNA, 25 bp, Homo sapien
cagtagaatagcacgctcgccaatc

SEQ ID NO: 3329470 - DNA, 25 bp, Homo sapien
gatgagtcctcccagtagaatagca

SEQ ID NO: 3329471 - DNA, 25 bp, Homo sapien
gaagccaacccatacaacgatgagt

SEQ ID NO: 3329472 - DNA, 25 bp, Homo sapien
aaaatctccttaagcgacaagcaac

SEQ ID NO: 3329473 - DNA, 25 bp, Homo sapien
ttatagtattagagaatactgtggt

SEQ ID NO: 3329474 - DNA, 25 bp, Homo sapien
gtgtttatagtattagagaatactg

SEQ ID NO: 3329475 - DNA, 25 bp, Homo sapien
tctccttaagcgacaagcaacttca

SEQ ID NO: 3329476 - DNA, 25 bp, Homo sapien
gatgatttagccaaactgaaaacta

SEQ ID NO: 3329477 - DNA, 25 bp, Homo sapien
gctaagctacaatgctccgtaggtt

SEQ ID NO: 3329478 - DNA, 25 bp, Homo sapien
tcacaaaggtaaacatccagtacta

SEQ ID NO: 3329479 - DNA, 25 bp, Homo sapien
taatcagccacatgatcacaaaggt

SEQ ID NO: 3329480 - DNA, 25 bp, Homo sapien
ataacaacggcttcaaccccaagag

SEQ ID NO: 3329481 - DNA, 25 bp, Homo sapien
agcttgttcttgagtccaggcatac

SEQ ID NO: 3329482 - DNA, 25 bp, Homo sapien
tatgccattatataacacagcttgt

SEQ ID NO: 3329483 - DNA, 25 bp, Homo sapien
cccaagagcagcaagtattatgcca

SEQ ID NO: 3329484 - DNA, 25 bp, Homo sapien
taaaggtcaataaagcctgcacaag

SEQ ID NO: 3329485 - DNA, 25 bp, Homo sapien
ttagcagtggttactttcacagaaa

SEQ ID NO: 3329486 - DNA, 25 bp, Homo sapien
ataaaacagccatatgataaaggtc

SEQ ID NO: 3329487 - DNA, 25 bp, Homo sapien
cagaaaggagtggatatagaaatac

SEQ ID NO: 3329488 - DNA, 25 bp, Homo sapien
cagaacattgatggccacaacagca

SEQ ID NO: 3329489 - DNA, 25 bp, Homo sapien
aacagaacattgatggccacaacag

SEQ ID NO: 3329490 - DNA, 25 bp, Homo sapien
aaaacagaacattgatggccacaac

SEQ ID NO: 3329491 - DNA, 25 bp, Homo sapien
aaaaaacagaacattgatggccaca

SEQ ID NO: 3329492 - DNA, 25 bp, Homo sapien
tcctgagtcatccacacaatgttct

SEQ ID NO: 3329493 - DNA, 25 bp, Homo sapien
tcttcctgagtcatccacacaatgt

SEQ ID NO: 3329494 - DNA, 25 bp, Homo sapien
gtcttcctgagtcatccacacaatg

SEQ ID NO: 3329495 - DNA, 25 bp, Homo sapien
ctgtcttcctgagtcatccacacaa

SEQ ID NO: 3329496 - DNA, 25 bp, Homo sapien
tgtcttcctgagtcatccacacgat

SEQ ID NO: 3329497 - DNA, 25 bp, Homo sapien
tcttcctgagtcatccacacgatgt

SEQ ID NO: 3329498 - DNA, 25 bp, Homo sapien
tcctgagtcatccacacgatgttct

SEQ ID NO: 3329499 - DNA, 25 bp, Homo sapien
ttcctgagtcatccacacgatgttc

SEQ ID NO: 3329500 - DNA, 25 bp, Homo sapien
cccaggaaggcgctaagtaaaactg

SEQ ID NO: 3329501 - DNA, 25 bp, Homo sapien
cttagtatggcaaggatcagaataa

SEQ ID NO: 3329502 - DNA, 25 bp, Homo sapien
tctgcagtttaatcacatcccatgt

SEQ ID NO: 3329503 - DNA, 25 bp, Homo sapien
tcccatgtcacacctttttctccaa

SEQ ID NO: 3329504 - DNA, 25 bp, Homo sapien
taaaacctaatgcttgacacatgct

SEQ ID NO: 3329505 - DNA, 25 bp, Homo sapien
tatgatctaacaactgctacatttc

SEQ ID NO: 3329506 - DNA, 25 bp, Homo sapien
cagcagtatatgatctaacaactgc

SEQ ID NO: 3329507 - DNA, 25 bp, Homo sapien
cacatgcttatgtttgccatggaac

SEQ ID NO: 3329508 - DNA, 25 bp, Homo sapien
ggcataccattgattactacaactg

SEQ ID NO: 3329509 - DNA, 25 bp, Homo sapien
tacaaactctgtatgcatagacatg

SEQ ID NO: 3329510 - DNA, 25 bp, Homo sapien
aaagcactgagtgaatggcatacca

SEQ ID NO: 3329511 - DNA, 25 bp, Homo sapien
cattgagtacattacattcaagaga

SEQ ID NO: 3329512 - DNA, 25 bp, Homo sapien
cccaagatggctttgtggaaaatgt

SEQ ID NO: 3329513 - DNA, 25 bp, Homo sapien
gatgagaccagttaaaagtgagcca

SEQ ID NO: 3329514 - DNA, 25 bp, Homo sapien
cagaagagaaactataggtaatgag

SEQ ID NO: 3329515 - DNA, 25 bp, Homo sapien
ggtaatgagaacatcatgagcaaag

SEQ ID NO: 3329516 - DNA, 25 bp, Homo sapien
tgtggagatatgcatagaggcagtt

SEQ ID NO: 3329517 - DNA, 25 bp, Homo sapien
gatggagacaataagaggctctttt

SEQ ID NO: 3329518 - DNA, 25 bp, Homo sapien
ttggctgccacggaaatcaagatgg

SEQ ID NO: 3329519 - DNA, 25 bp, Homo sapien
cacgagcaaccagcatgtagtattt

SEQ ID NO: 3329520 - DNA, 25 bp, Homo sapien
taaaccaaatataggtgaagctacc

SEQ ID NO: 3329521 - DNA, 25 bp, Homo sapien
acccagcccaaaaaacttgtatcag

SEQ ID NO: 3329522 - DNA, 25 bp, Homo sapien
aaacttgtatcagctgtcggatcaa

SEQ ID NO: 3329523 - DNA, 25 bp, Homo sapien
gactatatgaagcaataacccagcc

SEQ ID NO: 3329524 - DNA, 25 bp, Homo sapien
cccaaattgttgtgagggacagtga

SEQ ID NO: 3329525 - DNA, 25 bp, Homo sapien
tgataaagggaaacgggagtataca

SEQ ID NO: 3329526 - DNA, 25 bp, Homo sapien
agtgttaggacactccatattaagg

SEQ ID NO: 3329527 - DNA, 25 bp, Homo sapien
caggaaaagcttctgacccaaattg

SEQ ID NO: 3329528 - DNA, 25 bp, Homo sapien
ggccatatggacatcatcactacag

SEQ ID NO: 3329529 - DNA, 25 bp, Homo sapien
tggagatatggccatatggacatca

SEQ ID NO: 3329530 - DNA, 25 bp, Homo sapien
tatggacatcatcactacagaaaac

SEQ ID NO: 3329531 - DNA, 25 bp, Homo sapien
gatatggccatatggacatcatcac

SEQ ID NO: 3329532 - DNA, 25 bp, Homo sapien
atcctaatagatctccatcggctct

SEQ ID NO: 3329533 - DNA, 25 bp, Homo sapien
catcggctcttataatgctcttcag

SEQ ID NO: 3329534 - DNA, 25 bp, Homo sapien
cggctcttataatgctcttcagtct

SEQ ID NO: 3329535 - DNA, 25 bp, Homo sapien
gatctccatcggctcttataatgct

SEQ ID NO: 3329536 - DNA, 25 bp, Homo sapien
ccctagatgcccatactttgaaatc

SEQ ID NO: 3329537 - DNA, 25 bp, Homo sapien
agaaaaataccagaaccctagatgc

SEQ ID NO: 3329538 - DNA, 25 bp, Homo sapien
taaacaaacctcttctgagtcaaag

SEQ ID NO: 3329539 - DNA, 25 bp, Homo sapien
gagtgactgatttagagctcagaca

SEQ ID NO: 3329540 - DNA, 25 bp, Homo sapien
taagagcggctcctgttcactttcg

SEQ ID NO: 3329541 - DNA, 25 bp, Homo sapien
ctgcttccaggtgtgtcgcctaaga

SEQ ID NO: 3329542 - DNA, 25 bp, Homo sapien
tgtgtcgcctaagagcggctcctgt

SEQ ID NO: 3329543 - DNA, 25 bp, Homo sapien
tgttcactttcgttccgcaggccgg

SEQ ID NO: 3329544 - DNA, 25 bp, Homo sapien
ttctcccatcccgggtggcgtgaag

SEQ ID NO: 3329545 - DNA, 25 bp, Homo sapien
ccaactctcgcgacacctgctttct

SEQ ID NO: 3329546 - DNA, 25 bp, Homo sapien
tacaaggcgtcttgcgcccaactct

SEQ ID NO: 3329547 - DNA, 25 bp, Homo sapien
cactccctacaaggcgtcttgcgcc

SEQ ID NO: 3329548 - DNA, 25 bp, Homo sapien
tgcttgtaacctgcaggtccccgga

SEQ ID NO: 3329549 - DNA, 25 bp, Homo sapien
gggatctgctgcttgtaacctgcag

SEQ ID NO: 3329550 - DNA, 25 bp, Homo sapien
ttgtaacctgcaggtccccggatgc

SEQ ID NO: 3329551 - DNA, 25 bp, Homo sapien
ggatgcgcaccccaacggcgcctgc

SEQ ID NO: 3329552 - DNA, 25 bp, Homo sapien
cctacttaagataattagaatggag

SEQ ID NO: 3329553 - DNA, 25 bp, Homo sapien
tctctttgacccacattcttaaatg

SEQ ID NO: 3329554 - DNA, 25 bp, Homo sapien
cttaagaacttctaaacagcctact

SEQ ID NO: 3329555 - DNA, 25 bp, Homo sapien
taactatttaatgtactctcagaca

SEQ ID NO: 3329556 - DNA, 25 bp, Homo sapien
caagttgtatcccaaaaacctgctg

SEQ ID NO: 3329557 - DNA, 25 bp, Homo sapien
caagatacctctaagatgaagcgct

SEQ ID NO: 3329558 - DNA, 25 bp, Homo sapien
tgtcagtgcgacatcagaaggactc

SEQ ID NO: 3329559 - DNA, 25 bp, Homo sapien
ggttatacaagtcgcaaccctcagt

SEQ ID NO: 3329560 - DNA, 25 bp, Homo sapien
aaatggtggcttaagtgttctcaaa

SEQ ID NO: 3329561 - DNA, 25 bp, Homo sapien
acctcagttgaagaattcaaagtgc

SEQ ID NO: 3329562 - DNA, 25 bp, Homo sapien
tatatccctaaaactacctcagttg

SEQ ID NO: 3329563 - DNA, 25 bp, Homo sapien
tatatataatctcaaagaagtgcgg

SEQ ID NO: 3329564 - DNA, 25 bp, Homo sapien
caaactctttgacttcgtcatctgc

SEQ ID NO: 3329565 - DNA, 25 bp, Homo sapien
tttgacttcgtcatctgcctgtctt

SEQ ID NO: 3329566 - DNA, 25 bp, Homo sapien
actctttgacttcgtcatctgcctg

SEQ ID NO: 3329567 - DNA, 25 bp, Homo sapien
gtctcaaactctttgacttcgtcat

SEQ ID NO: 3329568 - DNA, 25 bp, Homo sapien
ctggccctgcggaaaagcggcagcc

SEQ ID NO: 3329569 - DNA, 25 bp, Homo sapien
ctgcacctggcgcacaaggcgcgtg

SEQ ID NO: 3329570 - DNA, 25 bp, Homo sapien
tctgtggttgctctgcgttgggcac

SEQ ID NO: 3329571 - DNA, 25 bp, Homo sapien
ttgccgccgttgctgcgggatccgc

SEQ ID NO: 3329572 - DNA, 25 bp, Homo sapien
gagaacatggttaagtgaagacctc

SEQ ID NO: 3329573 - DNA, 25 bp, Homo sapien
taattccttcctcgctataaagagc

SEQ ID NO: 3329574 - DNA, 25 bp, Homo sapien
aaagtacggtgattgttacaagcac

SEQ ID NO: 3329575 - DNA, 25 bp, Homo sapien
tcagaggaactctccaaagagggag

SEQ ID NO: 3329576 - DNA, 25 bp, Homo sapien
actggcaggaagaccatctttcaga

SEQ ID NO: 3329577 - DNA, 25 bp, Homo sapien
gatggaatccattctgcactggcag

SEQ ID NO: 3329578 - DNA, 25 bp, Homo sapien
gcatagtgtagtaaccatggtctct

SEQ ID NO: 3329579 - DNA, 25 bp, Homo sapien
ttcactggagattaagaacactgtg

SEQ ID NO: 3329580 - DNA, 25 bp, Homo sapien
tccagcttgccgctttgcaatggac

SEQ ID NO: 3329581 - DNA, 25 bp, Homo sapien
ctttgcaatggactgaagactttga

SEQ ID NO: 3329582 - DNA, 25 bp, Homo sapien
tggcatccagcttgccgctttgcaa

SEQ ID NO: 3329583 - DNA, 25 bp, Homo sapien
tgccgctttgcaatggactgaagac

SEQ ID NO: 3329584 - DNA, 25 bp, Homo sapien
aactgggtgctttcggccaccatgg

SEQ ID NO: 3329585 - DNA, 25 bp, Homo sapien
ggtgctttcggccaccatggcgaac

SEQ ID NO: 3329586 - DNA, 25 bp, Homo sapien
taggaactgggtgctttcggccacc

SEQ ID NO: 3329587 - DNA, 25 bp, Homo sapien
tgggtgctttcggccaccatggcga

SEQ ID NO: 3329588 - DNA, 25 bp, Homo sapien
actgccagcaaccaactctcagaag

SEQ ID NO: 3329589 - DNA, 25 bp, Homo sapien
gtggtactgccagcaaccaactctc

SEQ ID NO: 3329590 - DNA, 25 bp, Homo sapien
ggtgcgctttatcaagccagatggg

SEQ ID NO: 3329591 - DNA, 25 bp, Homo sapien
ccagctggtgcgctttatcaagcca

SEQ ID NO: 3329592 - DNA, 25 bp, Homo sapien
gaaaaatgttgccaagtaatttgca

SEQ ID NO: 3329593 - DNA, 25 bp, Homo sapien
tggtggatccaatttgcttacagtg

SEQ ID NO: 3329594 - DNA, 25 bp, Homo sapien
tactctagttctcatagtagttgct

SEQ ID NO: 3329595 - DNA, 25 bp, Homo sapien
ggctatttttgaaagggcataggca

SEQ ID NO: 3329596 - DNA, 25 bp, Homo sapien
taatcccagtaagcaacttggacag

SEQ ID NO: 3329597 - DNA, 25 bp, Homo sapien
agcaacttggacaggcattttaaaa

SEQ ID NO: 3329598 - DNA, 25 bp, Homo sapien
gaaaagtgacattattttagctagt

SEQ ID NO: 3329599 - DNA, 25 bp, Homo sapien
taatgggtgattatataagttagat

SEQ ID NO: 3329600 - DNA, 25 bp, Homo sapien
aattacccagaactgtgatcctccc

SEQ ID NO: 3329601 - DNA, 25 bp, Homo sapien
ttaattacccagaactgtgatcctc

SEQ ID NO: 3329602 - DNA, 25 bp, Homo sapien
ggtgatttatctttggagagttcag

SEQ ID NO: 3329603 - DNA, 25 bp, Homo sapien
ctcttagcaccactcaatgaaaatt

SEQ ID NO: 3329604 - DNA, 25 bp, Homo sapien
caagaggggatatagttactaacca

SEQ ID NO: 3329605 - DNA, 25 bp, Homo sapien
aatgcaagaggggatatagttacta

SEQ ID NO: 3329606 - DNA, 25 bp, Homo sapien
ggggatatagttactaaccatacag

SEQ ID NO: 3329607 - DNA, 25 bp, Homo sapien
tggaatgcaagaggggatatagtta

SEQ ID NO: 3329608 - DNA, 25 bp, Homo sapien
tctccagagacatgtgatgtcagtt

SEQ ID NO: 3329609 - DNA, 25 bp, Homo sapien
tttttgacaagaacattacataggc

SEQ ID NO: 3329610 - DNA, 25 bp, Homo sapien
gatgatatctaccagatttgctcac

SEQ ID NO: 3329611 - DNA, 25 bp, Homo sapien
caatgtgccttgtttagtatatgct

SEQ ID NO: 3329612 - DNA, 25 bp, Homo sapien
gatgaaccctattgctgagaacagc

SEQ ID NO: 3329613 - DNA, 25 bp, Homo sapien
tagactggctaattcagatgaaccc

SEQ ID NO: 3329614 - DNA, 25 bp, Homo sapien
aaatctggaaagagagtcggaagcc

SEQ ID NO: 3329615 - DNA, 25 bp, Homo sapien
cagaagttccacctcgtgccaagga

SEQ ID NO: 3329616 - DNA, 25 bp, Homo sapien
ccatgaaccatgccaggataagaca

SEQ ID NO: 3329617 - DNA, 25 bp, Homo sapien
ccatgccaggataagacagtgaact

SEQ ID NO: 3329618 - DNA, 25 bp, Homo sapien
agttgagactccagaaactgcttag

SEQ ID NO: 3329619 - DNA, 25 bp, Homo sapien
tactgaagtagcctgattttgaacc

SEQ ID NO: 3329620 - DNA, 25 bp, Homo sapien
caatataactagagggagacctgta

SEQ ID NO: 3329621 - DNA, 25 bp, Homo sapien
caatacggtttcaccctgaatgagt

SEQ ID NO: 3329622 - DNA, 25 bp, Homo sapien
ccagtgagcttcaggtaccaataaa

SEQ ID NO: 3329623 - DNA, 25 bp, Homo sapien
tctcccagaaggaatatttcaccgg

SEQ ID NO: 3329624 - DNA, 25 bp, Homo sapien
gcctgtgtcctgtggtctcaagaaa

SEQ ID NO: 3329625 - DNA, 25 bp, Homo sapien
tgctaaacctacatctaccagtgag

SEQ ID NO: 3329626 - DNA, 25 bp, Homo sapien
tattggcaaaagcaagtggtttcca

SEQ ID NO: 3329627 - DNA, 25 bp, Homo sapien
cgtgcacgagtaatttaaaacctgc

SEQ ID NO: 3329628 - DNA, 25 bp, Homo sapien
aaaacctgcattgggattgattgga

SEQ ID NO: 3329629 - DNA, 25 bp, Homo sapien
tatacatctgcaagtgggtatgtca

SEQ ID NO: 3329630 - DNA, 25 bp, Homo sapien
taccacctgtgcttgtttcctttaa

SEQ ID NO: 3329631 - DNA, 25 bp, Homo sapien
acctgtgcttgtttcctttaattct

SEQ ID NO: 3329632 - DNA, 25 bp, Homo sapien
accacctgtgcttgtttcctttaat

SEQ ID NO: 3329633 - DNA, 25 bp, Homo sapien
caattaccacctgtgcttgtttcct

SEQ ID NO: 3329634 - DNA, 25 bp, Homo sapien
ttcaggtccaaatcgagctctagct

SEQ ID NO: 3329635 - DNA, 25 bp, Homo sapien
tctagctctggcagtcccagggaca

SEQ ID NO: 3329636 - DNA, 25 bp, Homo sapien
tgcactcaaaatagtaatgatcccc

SEQ ID NO: 3329637 - DNA, 25 bp, Homo sapien
tccccaattggctcttcaggtccaa

SEQ ID NO: 3329638 - DNA, 25 bp, Homo sapien
gagcatagtctcgttatccccggta

SEQ ID NO: 3329639 - DNA, 25 bp, Homo sapien
tctaaacaatagacatcagactggg

SEQ ID NO: 3329640 - DNA, 25 bp, Homo sapien
tcaggcaacctaggcaagagagaac

SEQ ID NO: 3329641 - DNA, 25 bp, Homo sapien
aaagtgagctattggttggagtccc

SEQ ID NO: 3329642 - DNA, 25 bp, Homo sapien
taagcagccttagcaccatggtcaa

SEQ ID NO: 3329643 - DNA, 25 bp, Homo sapien
gatctacctacagaaaggcacgtag

SEQ ID NO: 3329644 - DNA, 25 bp, Homo sapien
tacttggataaggacagcctgattc

SEQ ID NO: 3329645 - DNA, 25 bp, Homo sapien
tgcagagaaactggctagtacacac

SEQ ID NO: 3329646 - DNA, 25 bp, Homo sapien
gtgcctaacaaagatggtcaatatt

SEQ ID NO: 3329647 - DNA, 25 bp, Homo sapien
ttacctgaggtattccttacaaata

SEQ ID NO: 3329648 - DNA, 25 bp, Homo sapien
tcaagtgcctaacaaagatggtcaa

SEQ ID NO: 3329649 - DNA, 25 bp, Homo sapien
cctaacaaagatggtcaatattaac

SEQ ID NO: 3329650 - DNA, 25 bp, Homo sapien
ggctaagaatctgtaccttaagcaa

SEQ ID NO: 3329651 - DNA, 25 bp, Homo sapien
tcaggcaagtttcgaaaatagggct

SEQ ID NO: 3329652 - DNA, 25 bp, Homo sapien
cctgaaaaactacctgagaatgaga

SEQ ID NO: 3329653 - DNA, 25 bp, Homo sapien
tggtacgtctggattgaaggctaag

SEQ ID NO: 3329654 - DNA, 25 bp, Homo sapien
taacagaccgcataattttttctgc

SEQ ID NO: 3329655 - DNA, 25 bp, Homo sapien
ttaacagaccgcataattttttctg

SEQ ID NO: 3329656 - DNA, 25 bp, Homo sapien
aacagaccgcataattttttctgca

SEQ ID NO: 3329657 - DNA, 25 bp, Homo sapien
tcttaacagaccgcataattttttc

SEQ ID NO: 3329658 - DNA, 25 bp, Homo sapien
tacaactgtatcataatgcactggc

SEQ ID NO: 3329659 - DNA, 25 bp, Homo sapien
caaagcagaagtcttaactggtgac

SEQ ID NO: 3329660 - DNA, 25 bp, Homo sapien
gatggcttctgcatgtatctacaaa

SEQ ID NO: 3329661 - DNA, 25 bp, Homo sapien
ccagcccggaacctaagtagtcata

SEQ ID NO: 3329662 - DNA, 25 bp, Homo sapien
gagggtcagactcctaaaattaggc

SEQ ID NO: 3329663 - DNA, 25 bp, Homo sapien
ggttttatggtcaacagaatattcc

SEQ ID NO: 3329664 - DNA, 25 bp, Homo sapien
aatgctgcttgtagtgatttctgaa

SEQ ID NO: 3329665 - DNA, 25 bp, Homo sapien
gggaatgcatttggccattacaatg

SEQ ID NO: 3329666 - DNA, 25 bp, Homo sapien
aaaaataattcaagtctatgttaag

SEQ ID NO: 3329667 - DNA, 25 bp, Homo sapien
ggaactagctctgacttaaacccac

SEQ ID NO: 3329668 - DNA, 25 bp, Homo sapien
gtgaaataaggcacaattaatattg

SEQ ID NO: 3329669 - DNA, 25 bp, Homo sapien
gaaataaggcacaattaatattgat

SEQ ID NO: 3329670 - DNA, 25 bp, Homo sapien
tgaaattccttctcctaatttccaa

SEQ ID NO: 3329671 - DNA, 25 bp, Homo sapien
cttctcctaatttccaaagatttct

SEQ ID NO: 3329672 - DNA, 25 bp, Homo sapien
ctgaaattccttctcctaatttcca

SEQ ID NO: 3329673 - DNA, 25 bp, Homo sapien
attccttctcctaatttccaaagat

SEQ ID NO: 3329674 - DNA, 25 bp, Homo sapien
tttcaggatgatgaagccccactag

SEQ ID NO: 3329675 - DNA, 25 bp, Homo sapien
gtgaatcaaacccaaagactccgga

SEQ ID NO: 3329676 - DNA, 25 bp, Homo sapien
tctgaaggcccctgactttggttgt

SEQ ID NO: 3329677 - DNA, 25 bp, Homo sapien
gaggagatctgtacacttgagtagc

SEQ ID NO: 3329678 - DNA, 25 bp, Homo sapien
ttaggagtctgcctacataatcata

SEQ ID NO: 3329679 - DNA, 25 bp, Homo sapien
tcaatcctgtttattgtgatccttg

SEQ ID NO: 3329680 - DNA, 25 bp, Homo sapien
taggagtctgcctacataatcatat

SEQ ID NO: 3329681 - DNA, 25 bp, Homo sapien
tattgtgatccttggtatcttcttc

SEQ ID NO: 3329682 - DNA, 25 bp, Homo sapien
caaaatgtggccagtcctctggagg

SEQ ID NO: 3329683 - DNA, 25 bp, Homo sapien
tttgtactgcattcaaatctgagag

SEQ ID NO: 3329684 - DNA, 25 bp, Homo sapien
tctaagtgcatctttatctaggcaa

SEQ ID NO: 3329685 - DNA, 25 bp, Homo sapien
ggaggcatccctaccagcaaatatt

SEQ ID NO: 3329686 - DNA, 25 bp, Homo sapien
actggttgctgttaatagtggcatc

SEQ ID NO: 3329687 - DNA, 25 bp, Homo sapien
gactgtatcatctttgtggtcccag

SEQ ID NO: 3329688 - DNA, 25 bp, Homo sapien
ggaaatctgccttttgacccaagta

SEQ ID NO: 3329689 - DNA, 25 bp, Homo sapien
tctgctatccttatgaaggttgtaa

SEQ ID NO: 3329690 - DNA, 25 bp, Homo sapien
cacatgtgcgtgcaaaattctacac

SEQ ID NO: 3329691 - DNA, 25 bp, Homo sapien
tatttacccttaatgctgactagac

SEQ ID NO: 3329692 - DNA, 25 bp, Homo sapien
cctggccgagaaagcaagactcctt

SEQ ID NO: 3329693 - DNA, 25 bp, Homo sapien
taaaagaattttccagcaacctcac

SEQ ID NO: 3329694 - DNA, 25 bp, Homo sapien
tgctctttcctgtaagaccattaaa

SEQ ID NO: 3329695 - DNA, 25 bp, Homo sapien
gatgttctgttgactcttgaataga

SEQ ID NO: 3329696 - DNA, 25 bp, Homo sapien
actagaagcatggcccaccaggcct

SEQ ID NO: 3329697 - DNA, 25 bp, Homo sapien
gaatttccctcaggaagcatttaac

SEQ ID NO: 3329698 - DNA, 25 bp, Homo sapien
tacaaccaggagcttatctgaaaag

SEQ ID NO: 3329699 - DNA, 25 bp, Homo sapien
ggtaagtatacttggctattcataa

SEQ ID NO: 3329700 - DNA, 25 bp, Homo sapien
tccctgcattcataatacaaccagg

SEQ ID NO: 3329701 - DNA, 25 bp, Homo sapien
tgaaaagtcagcaataccttcccat

SEQ ID NO: 3329702 - DNA, 25 bp, Homo sapien
cagactccccacctgtagagcagga

SEQ ID NO: 3329703 - DNA, 25 bp, Homo sapien
aaatccttggatttatgggaaccag

SEQ ID NO: 3329704 - DNA, 25 bp, Homo sapien
ggaatacttaccaacttcactgagg

SEQ ID NO: 3329705 - DNA, 25 bp, Homo sapien
tattgtgggtgcttaacgaatctgg

SEQ ID NO: 3329706 - DNA, 25 bp, Homo sapien
tggctaggcatagaaactaacaatt

SEQ ID NO: 3329707 - DNA, 25 bp, Homo sapien
aaattagggtagatattggctaggc

SEQ ID NO: 3329708 - DNA, 25 bp, Homo sapien
tatactccaccaaattacactgtca

SEQ ID NO: 3329709 - DNA, 25 bp, Homo sapien
tctaagcccataaaatgatctggct

SEQ ID NO: 3329710 - DNA, 25 bp, Homo sapien
ttgtcccacgtgtgcttaagtaaac

SEQ ID NO: 3329711 - DNA, 25 bp, Homo sapien
ttgatataagtaggcagacaccttg

SEQ ID NO: 3329712 - DNA, 25 bp, Homo sapien
aagcaaaaactctgtaagctatgta

SEQ ID NO: 3329713 - DNA, 25 bp, Homo sapien
aatactgtactttggccctgttctc

SEQ ID NO: 3329714 - DNA, 25 bp, Homo sapien
taataagctctgcattctggtctgt

SEQ ID NO: 3329715 - DNA, 25 bp, Homo sapien
gctctgcattctggtctgttctcat

SEQ ID NO: 3329716 - DNA, 25 bp, Homo sapien
tctggtctgttctcatcccacatac

SEQ ID NO: 3329717 - DNA, 25 bp, Homo sapien
cagtctttaataagctctgcattct

SEQ ID NO: 3329718 - DNA, 25 bp, Homo sapien
tatacgtctggacttcagagactgg

SEQ ID NO: 3329719 - DNA, 25 bp, Homo sapien
tggccttacggagtaatacagcgag

SEQ ID NO: 3329720 - DNA, 25 bp, Homo sapien
gagagtccgaggtgttgcttatacg

SEQ ID NO: 3329721 - DNA, 25 bp, Homo sapien
ctggagggttgggactttacatgcc

SEQ ID NO: 3329722 - DNA, 25 bp, Homo sapien
aaaaaggctgcgaggagaaatggga

SEQ ID NO: 3329723 - DNA, 25 bp, Homo sapien
aaggttaagggccagcgttgacctg

SEQ ID NO: 3329724 - DNA, 25 bp, Homo sapien
aacttcagaaatctcccttccctgg

SEQ ID NO: 3329725 - DNA, 25 bp, Homo sapien
tgggcaaactaacccggtgcccaga

SEQ ID NO: 3329726 - DNA, 25 bp, Homo sapien
tttggtcacgtcgaagactttccca

SEQ ID NO: 3329727 - DNA, 25 bp, Homo sapien
ccgggccgtagaacttgctgccttt

SEQ ID NO: 3329728 - DNA, 25 bp, Homo sapien
ccattgaccgcgagcaggatgcgcg

SEQ ID NO: 3329729 - DNA, 25 bp, Homo sapien
gagccgtcgtactggcgcagctgct

SEQ ID NO: 3329730 - DNA, 25 bp, Homo sapien
cttcatgcgaggcagagaggtggcg

SEQ ID NO: 3329731 - DNA, 25 bp, Homo sapien
catgcgaggcagagaggtggcgggg

SEQ ID NO: 3329732 - DNA, 25 bp, Homo sapien
tgcgaggcagagaggtggcggggct

SEQ ID NO: 3329733 - DNA, 25 bp, Homo sapien
ttcatgcgaggcagagaggtggcgg

SEQ ID NO: 3329734 - DNA, 25 bp, Homo sapien
cccagaccccgccgcccccagcgca

SEQ ID NO: 3329735 - DNA, 25 bp, Homo sapien
ccagaccccgccgcccccagcgcac

SEQ ID NO: 3329736 - DNA, 25 bp, Homo sapien
accagagccaccagcgccacgttca

SEQ ID NO: 3329737 - DNA, 25 bp, Homo sapien
agagccaccagcgccacgttcagca

SEQ ID NO: 3329738 - DNA, 25 bp, Homo sapien
gagccaccagcgccacgttcagcag

SEQ ID NO: 3329739 - DNA, 25 bp, Homo sapien
ccagagccaccagcgccacgttcag

SEQ ID NO: 3329740 - DNA, 25 bp, Homo sapien
tccccagggtgcctagcttcacgtc

SEQ ID NO: 3329741 - DNA, 25 bp, Homo sapien
tcccgcgtcgcctggactctcgctg

SEQ ID NO: 3329742 - DNA, 25 bp, Homo sapien
gccgccgtcgttgctgctctcgctg

SEQ ID NO: 3329743 - DNA, 25 bp, Homo sapien
gcttcacgtccccatcaccagccgc

SEQ ID NO: 3329744 - DNA, 25 bp, Homo sapien
tccgctaggttaagtagacgagccg

SEQ ID NO: 3329745 - DNA, 25 bp, Homo sapien
tctcagccaataacgtgagaagagg

SEQ ID NO: 3329746 - DNA, 25 bp, Homo sapien
gaagaaaagatgctacgacggccgc

SEQ ID NO: 3329747 - DNA, 25 bp, Homo sapien
ggtaacgttgtctcggatctcccgc

SEQ ID NO: 3329748 - DNA, 25 bp, Homo sapien
catagttgagctgcaaggcgcaaac

SEQ ID NO: 3329749 - DNA, 25 bp, Homo sapien
accagggcgccgtcgcttttgtcgg

SEQ ID NO: 3329750 - DNA, 25 bp, Homo sapien
gatgaggggcgtctgcttttcacca

SEQ ID NO: 3329751 - DNA, 25 bp, Homo sapien
aaaccggcagcgtaggcgcgcagac

SEQ ID NO: 3329752 - DNA, 25 bp, Homo sapien
cggagagaaagcacggaacccgcac

SEQ ID NO: 3329753 - DNA, 25 bp, Homo sapien
acggagagaaagcacggaacccgca

SEQ ID NO: 3329754 - DNA, 25 bp, Homo sapien
gggcttctctggcatcggcagtcta

SEQ ID NO: 3329755 - DNA, 25 bp, Homo sapien
tccccgctgggtttggcaaaggctg

SEQ ID NO: 3329756 - DNA, 25 bp, Homo sapien
agtctacgtgctcctcgcgctggca

SEQ ID NO: 3329757 - DNA, 25 bp, Homo sapien
agccactccccgctgggtttggcaa

SEQ ID NO: 3329758 - DNA, 25 bp, Homo sapien
tgcggccgtagggaagtggacaggt

SEQ ID NO: 3329759 - DNA, 25 bp, Homo sapien
aggttgaggtggtctttctattcgt

SEQ ID NO: 3329760 - DNA, 25 bp, Homo sapien
gccgtagggaagtggacaggttgag

SEQ ID NO: 3329761 - DNA, 25 bp, Homo sapien
tctttctattcgtcattcactctta

SEQ ID NO: 3329762 - DNA, 25 bp, Homo sapien
gacactcttgtagagaggctgtata

SEQ ID NO: 3329763 - DNA, 25 bp, Homo sapien
gagtcactgaggatattgacgaggc

SEQ ID NO: 3329764 - DNA, 25 bp, Homo sapien
gcaagtgacagggtcgacactcttg

SEQ ID NO: 3329765 - DNA, 25 bp, Homo sapien
tcactgtcggttttgtaggagtcac

SEQ ID NO: 3329766 - DNA, 25 bp, Homo sapien
cttctttgaatttctgtgtgttcct

SEQ ID NO: 3329767 - DNA, 25 bp, Homo sapien
tctgtgtgttccttacctgtaccac

SEQ ID NO: 3329768 - DNA, 25 bp, Homo sapien
gaatttctgtgtgttccttacctgt

SEQ ID NO: 3329769 - DNA, 25 bp, Homo sapien
tgtgtgttccttacctgtaccaccc

SEQ ID NO: 3329770 - DNA, 25 bp, Homo sapien
tctgcacggtgggttgtcatgggag

SEQ ID NO: 3329771 - DNA, 25 bp, Homo sapien
agcaaaaggatcatctgccagagca

SEQ ID NO: 3329772 - DNA, 25 bp, Homo sapien
cacggtgggttgtcatgggagcaaa

SEQ ID NO: 3329773 - DNA, 25 bp, Homo sapien
gcaaaaggatcatctgccagagcag

SEQ ID NO: 3329774 - DNA, 25 bp, Homo sapien
tgccccaaaactttctgctctgaga

SEQ ID NO: 3329775 - DNA, 25 bp, Homo sapien
tttctgctctgagacccactatggc

SEQ ID NO: 3329776 - DNA, 25 bp, Homo sapien
cagttgccccaaaactttctgctct

SEQ ID NO: 3329777 - DNA, 25 bp, Homo sapien
tctgctctgagacccactatggctc

SEQ ID NO: 3329778 - DNA, 25 bp, Homo sapien
gtgaagcgacctgtggccccactga

SEQ ID NO: 3329779 - DNA, 25 bp, Homo sapien
ctggtgaagcgacctgtggccccac

SEQ ID NO: 3329780 - DNA, 25 bp, Homo sapien
tggtgaagcgacctgtggccccact

SEQ ID NO: 3329781 - DNA, 25 bp, Homo sapien
gaagcgacctgtggccccactgatg

SEQ ID NO: 3329782 - DNA, 25 bp, Homo sapien
acatgggaaacttgtggggacccat

SEQ ID NO: 3329783 - DNA, 25 bp, Homo sapien
tttagctgcaccatgtatttgtcag

SEQ ID NO: 3329784 - DNA, 25 bp, Homo sapien
gctgcaccatgtatttgtcagtttc

SEQ ID NO: 3329785 - DNA, 25 bp, Homo sapien
ttctcacaccccacatgggaaactt

SEQ ID NO: 3329786 - DNA, 25 bp, Homo sapien
ttggcagactggttttgtagcatgg

SEQ ID NO: 3329787 - DNA, 25 bp, Homo sapien
cagcaggcctaatttggcagactgg

SEQ ID NO: 3329788 - DNA, 25 bp, Homo sapien
gactggttttgtagcatggtagccc

SEQ ID NO: 3329789 - DNA, 25 bp, Homo sapien
ggttttgtagcatggtagcccttca

SEQ ID NO: 3329790 - DNA, 25 bp, Homo sapien
tagcttccctaaagggtgatgtttg

SEQ ID NO: 3329791 - DNA, 25 bp, Homo sapien
attttagcttccctaaagggtgatg

SEQ ID NO: 3329792 - DNA, 25 bp, Homo sapien
cttccctaaagggtgatgtttgcat

SEQ ID NO: 3329793 - DNA, 25 bp, Homo sapien
ttccctaaagggtgatgtttgcata

SEQ ID NO: 3329794 - DNA, 25 bp, Homo sapien
ccactgtggtcaagagagagaagtt

SEQ ID NO: 3329795 - DNA, 25 bp, Homo sapien
tgtactgctctaccagaactggcaa

SEQ ID NO: 3329796 - DNA, 25 bp, Homo sapien
cacgattgtctttctaatgggctca

SEQ ID NO: 3329797 - DNA, 25 bp, Homo sapien
ggtcagacccttttgttccactgtg

SEQ ID NO: 3329798 - DNA, 25 bp, Homo sapien
ctaatcatgcttatcctcaaattgt

SEQ ID NO: 3329799 - DNA, 25 bp, Homo sapien
aatcatgcttatcctcaaattgttt

SEQ ID NO: 3329800 - DNA, 25 bp, Homo sapien
taatcatgcttatcctcaaattgtt

SEQ ID NO: 3329801 - DNA, 25 bp, Homo sapien
cagttccagtcagctttgccattgt

SEQ ID NO: 3329802 - DNA, 25 bp, Homo sapien
tcttcctctgggcagttccagtcag

SEQ ID NO: 3329803 - DNA, 25 bp, Homo sapien
tccagtcagctttgccattgtgcat

SEQ ID NO: 3329804 - DNA, 25 bp, Homo sapien
agttccagtcagctttgccattgtg

SEQ ID NO: 3329805 - DNA, 25 bp, Homo sapien
aacaggaagtggagtgctcttgcaa

SEQ ID NO: 3329806 - DNA, 25 bp, Homo sapien
ggaagtggagtgctcttgcaaggaa

SEQ ID NO: 3329807 - DNA, 25 bp, Homo sapien
caggaagtggagtgctcttgcaagg

SEQ ID NO: 3329808 - DNA, 25 bp, Homo sapien
gaagtggagtgctcttgcaaggaag

SEQ ID NO: 3329809 - DNA, 25 bp, Homo sapien
gtgatattgagctttaacggagtgc

SEQ ID NO: 3329810 - DNA, 25 bp, Homo sapien
tgagctttaacggagtgcccttgag

SEQ ID NO: 3329811 - DNA, 25 bp, Homo sapien
taacggagtgcccttgaggcacacg

SEQ ID NO: 3329812 - DNA, 25 bp, Homo sapien
ccttgaggcacacgggcatttcaca

SEQ ID NO: 3329813 - DNA, 25 bp, Homo sapien
gtccagtcactgttataagcagaga

SEQ ID NO: 3329814 - DNA, 25 bp, Homo sapien
ttgctgtactgcagtccagtcactg

SEQ ID NO: 3329815 - DNA, 25 bp, Homo sapien
actgttataagcagagacagtttcc

SEQ ID NO: 3329816 - DNA, 25 bp, Homo sapien
tgaaattcagattgaattttgcatc

SEQ ID NO: 3329817 - DNA, 25 bp, Homo sapien
aacatggagcatggtactattgtgg

SEQ ID NO: 3329818 - DNA, 25 bp, Homo sapien
taactgtctgatgataggctcaacg

SEQ ID NO: 3329819 - DNA, 25 bp, Homo sapien
tgtaacaagggtgatagcaaacatg

SEQ ID NO: 3329820 - DNA, 25 bp, Homo sapien
taggctcaacggagactgaggtgtt

SEQ ID NO: 3329821 - DNA, 25 bp, Homo sapien
caaatcttgactgtccatcagtcgt

SEQ ID NO: 3329822 - DNA, 25 bp, Homo sapien
gactgtccatcagtcgtttctgaga

SEQ ID NO: 3329823 - DNA, 25 bp, Homo sapien
tagaggtatggtggaaacagaggca

SEQ ID NO: 3329824 - DNA, 25 bp, Homo sapien
agaggcagcaaggccaaatcttgac

SEQ ID NO: 3329825 - DNA, 25 bp, Homo sapien
gtggacagttgtgccttgcattgtt

SEQ ID NO: 3329826 - DNA, 25 bp, Homo sapien
ggacagttgtgccttgcattgttat

SEQ ID NO: 3329827 - DNA, 25 bp, Homo sapien
agttgtgccttgcattgttatcatc

SEQ ID NO: 3329828 - DNA, 25 bp, Homo sapien
acagttgtgccttgcattgttatca

SEQ ID NO: 3329829 - DNA, 25 bp, Homo sapien
tgtgctgatcctcatgaggcacgtg

SEQ ID NO: 3329830 - DNA, 25 bp, Homo sapien
tctgtgctgatcctcatgaggcacg

SEQ ID NO: 3329831 - DNA, 25 bp, Homo sapien
ctgtgctgatcctcatgaggcacgt

SEQ ID NO: 3329832 - DNA, 25 bp, Homo sapien
cagaatttatgataagaacaacgtg

SEQ ID NO: 3329833 - DNA, 25 bp, Homo sapien
acaacgtgcttgtgcccaaacagaa

SEQ ID NO: 3329834 - DNA, 25 bp, Homo sapien
atggcacttgaaatttatgtacttc

SEQ ID NO: 3329835 - DNA, 25 bp, Homo sapien
ctgagtcagaatttatgataagaac

SEQ ID NO: 3329836 - DNA, 25 bp, Homo sapien
ctttttcctccaaatatccagattt

SEQ ID NO: 3329837 - DNA, 25 bp, Homo sapien
caagacagctatctgtcttgtctca

SEQ ID NO: 3329838 - DNA, 25 bp, Homo sapien
cagctgataattgggctatatctga

SEQ ID NO: 3329839 - DNA, 25 bp, Homo sapien
ttgatacaccagctgataattgggc

SEQ ID NO: 3329840 - DNA, 25 bp, Homo sapien
ttaaagacaagacagctatctgtct

SEQ ID NO: 3329841 - DNA, 25 bp, Homo sapien
tggcactgctttcggcctgcaatgc

SEQ ID NO: 3329842 - DNA, 25 bp, Homo sapien
tatgatgggctggatttaatcagtg

SEQ ID NO: 3329843 - DNA, 25 bp, Homo sapien
atcagtgtaggtaccactaacaggc

SEQ ID NO: 3329844 - DNA, 25 bp, Homo sapien
aggctggcactgctttcggcctgca

SEQ ID NO: 3329845 - DNA, 25 bp, Homo sapien
gacatattcagcaatgagctcctca

SEQ ID NO: 3329846 - DNA, 25 bp, Homo sapien
ctcttggtgctacttctaggcgcca

SEQ ID NO: 3329847 - DNA, 25 bp, Homo sapien
ggtgctacttctaggcgccatgaca

SEQ ID NO: 3329848 - DNA, 25 bp, Homo sapien
taggcgccatgacatattcagcaat

SEQ ID NO: 3329849 - DNA, 25 bp, Homo sapien
catccctggttgatgcagccaagcc

SEQ ID NO: 3329850 - DNA, 25 bp, Homo sapien
agcatccctggttgatgcagccaag

SEQ ID NO: 3329851 - DNA, 25 bp, Homo sapien
gcatccctggttgatgcagccaagc

SEQ ID NO: 3329852 - DNA, 25 bp, Homo sapien
gaaagccagatagctgccagatgct

SEQ ID NO: 3329853 - DNA, 25 bp, Homo sapien
ccagttgagccaccaagaacttgag

SEQ ID NO: 3329854 - DNA, 25 bp, Homo sapien
gcatgtggcaaaacaaggcaggccc

SEQ ID NO: 3329855 - DNA, 25 bp, Homo sapien
tcctttcactattatgctgagggca

SEQ ID NO: 3329856 - DNA, 25 bp, Homo sapien
gagcctgctaggagcttgactgcaa

SEQ ID NO: 3329857 - DNA, 25 bp, Homo sapien
ccaggccctagctgagatttgtaga

SEQ ID NO: 3329858 - DNA, 25 bp, Homo sapien
tcaggaggtacctagcaaattagcg

SEQ ID NO: 3329859 - DNA, 25 bp, Homo sapien
ttcatatgaaggacagagagcctgc

SEQ ID NO: 3329860 - DNA, 25 bp, Homo sapien
tgttaaccaatttcccagtggcctg

SEQ ID NO: 3329861 - DNA, 25 bp, Homo sapien
tccaaaggcatcacttgttaaccaa

SEQ ID NO: 3329862 - DNA, 25 bp, Homo sapien
tgaacttgctaaggccgactttgag

SEQ ID NO: 3329863 - DNA, 25 bp, Homo sapien
tcactctgaacttgctaaggccgac

SEQ ID NO: 3329864 - DNA, 25 bp, Homo sapien
tgccacacggtggtgaccagatcag

SEQ ID NO: 3329865 - DNA, 25 bp, Homo sapien
gaaattgtagaccacagaggacccc

SEQ ID NO: 3329866 - DNA, 25 bp, Homo sapien
aggctactgcctaggtgccacacgg

SEQ ID NO: 3329867 - DNA, 25 bp, Homo sapien
gagaaacagattgaagatggcaaga

SEQ ID NO: 3329868 - DNA, 25 bp, Homo sapien
cgtcttagaccatgagggaggatga

SEQ ID NO: 3329869 - DNA, 25 bp, Homo sapien
gatcgtcttagaccatgagggagga

SEQ ID NO: 3329870 - DNA, 25 bp, Homo sapien
gcggggagcgggatcgtcttagacc

SEQ ID NO: 3329871 - DNA, 25 bp, Homo sapien
acggtcagcggggagcgggatcgtc

SEQ ID NO: 3329872 - DNA, 25 bp, Homo sapien
gaggtggaggtgtgagaagtgacaa

SEQ ID NO: 3329873 - DNA, 25 bp, Homo sapien
gaaaagtggcctgatgaggaggtgg

SEQ ID NO: 3329874 - DNA, 25 bp, Homo sapien
agaatgaagagaaaagtggcctgat

SEQ ID NO: 3329875 - DNA, 25 bp, Homo sapien
ggtggaggtgtgagaagtgacaaag

SEQ ID NO: 3329876 - DNA, 25 bp, Homo sapien
ggatgctgacgaggaacaactgcta

SEQ ID NO: 3329877 - DNA, 25 bp, Homo sapien
tgctgacgaggaacaactgctatcc

SEQ ID NO: 3329878 - DNA, 25 bp, Homo sapien
gaggaacaactgctatcctgcccat

SEQ ID NO: 3329879 - DNA, 25 bp, Homo sapien
cttaggatgctgacgaggaacaact

SEQ ID NO: 3329880 - DNA, 25 bp, Homo sapien
gatggattgtgctggtccacccgca

SEQ ID NO: 3329881 - DNA, 25 bp, Homo sapien
gattccctcaatgctagctcttccg

SEQ ID NO: 3329882 - DNA, 25 bp, Homo sapien
cagagaatgcagtccaggctcctgg

SEQ ID NO: 3329883 - DNA, 25 bp, Homo sapien
tgtaggccaaccatggaagaacgtg

SEQ ID NO: 3329884 - DNA, 25 bp, Homo sapien
cagtgcctgctgaagtacatctcca

SEQ ID NO: 3329885 - DNA, 25 bp, Homo sapien
tttgctcattgcactcaacatctcc

SEQ ID NO: 3329886 - DNA, 25 bp, Homo sapien
gctcattgcactcaacatctccagg

SEQ ID NO: 3329887 - DNA, 25 bp, Homo sapien
ctgcagtgcctgctgaagtacatct

SEQ ID NO: 3329888 - DNA, 25 bp, Homo sapien
caggatgaggggacttctggatcct

SEQ ID NO: 3329889 - DNA, 25 bp, Homo sapien
ctcagtgtgcagctggtgatagatg

SEQ ID NO: 3329890 - DNA, 25 bp, Homo sapien
gatggaaacccttgttcataagctt

SEQ ID NO: 3329891 - DNA, 25 bp, Homo sapien
ctttgtggcactgtcggcaggatga

SEQ ID NO: 3329892 - DNA, 25 bp, Homo sapien
catcatcccagccatcaatccagga

SEQ ID NO: 3329893 - DNA, 25 bp, Homo sapien
atcccagccatcaatccaggacatg

SEQ ID NO: 3329894 - DNA, 25 bp, Homo sapien
tcatcccagccatcaatccaggaca

SEQ ID NO: 3329895 - DNA, 25 bp, Homo sapien
cccagccatcaatccaggacatggg

SEQ ID NO: 3329896 - DNA, 25 bp, Homo sapien
ttgttctgacgttgggcttcttctg

SEQ ID NO: 3329897 - DNA, 25 bp, Homo sapien
tggctttgttctgacgttgggcttc

SEQ ID NO: 3329898 - DNA, 25 bp, Homo sapien
gctttgttctgacgttgggcttctt

SEQ ID NO: 3329899 - DNA, 25 bp, Homo sapien
tgttctgacgttgggcttcttctgc

SEQ ID NO: 3329900 - DNA, 25 bp, Homo sapien
tctgtgcaagcacatcgcccatctt

SEQ ID NO: 3329901 - DNA, 25 bp, Homo sapien
caggtctttcaggtttcatgaaatc

SEQ ID NO: 3329902 - DNA, 25 bp, Homo sapien
tttcatgaaatctaagtgtacccag

SEQ ID NO: 3329903 - DNA, 25 bp, Homo sapien
tgtacccagaagacagtacacctct

SEQ ID NO: 3329904 - DNA, 25 bp, Homo sapien
ctcctctggctccagtgattgaaca

SEQ ID NO: 3329905 - DNA, 25 bp, Homo sapien
gtgtgcattttgtggtggctcctct

SEQ ID NO: 3329906 - DNA, 25 bp, Homo sapien
ctgtgggctgtgtgcattttgtggt

SEQ ID NO: 3329907 - DNA, 25 bp, Homo sapien
tcctctggctccagtgattgaacat

SEQ ID NO: 3329908 - DNA, 25 bp, Homo sapien
tcactatgccgtgataaaaagccat

SEQ ID NO: 3329909 - DNA, 25 bp, Homo sapien
cactatgccgtgataaaaagccatc

SEQ ID NO: 3329910 - DNA, 25 bp, Homo sapien
ttcactatgccgtgataaaaagcca

SEQ ID NO: 3329911 - DNA, 25 bp, Homo sapien
cttcactatgccgtgataaaaagcc

SEQ ID NO: 3329912 - DNA, 25 bp, Homo sapien
gggtcaactgaaattgcaactctgg

SEQ ID NO: 3329913 - DNA, 25 bp, Homo sapien
actggagagaagtatggttggacta

SEQ ID NO: 3329914 - DNA, 25 bp, Homo sapien
tatggttggactatgagtcctcagg

SEQ ID NO: 3329915 - DNA, 25 bp, Homo sapien
taatttgcatttgggactggagaga

SEQ ID NO: 3329916 - DNA, 25 bp, Homo sapien
tagccttgggttgaggaaaatatca

SEQ ID NO: 3329917 - DNA, 25 bp, Homo sapien
ctcctagccttgggttgaggaaaat

SEQ ID NO: 3329918 - DNA, 25 bp, Homo sapien
cctagccttgggttgaggaaaatat

SEQ ID NO: 3329919 - DNA, 25 bp, Homo sapien
agccttgggttgaggaaaatatcac

SEQ ID NO: 3329920 - DNA, 25 bp, Homo sapien
ggtccatttgacactttgtgaaaac

SEQ ID NO: 3329921 - DNA, 25 bp, Homo sapien
aaggacgcttcggtccatttgacac

SEQ ID NO: 3329922 - DNA, 25 bp, Homo sapien
tccaaatgccattccggggtaaagc

SEQ ID NO: 3329923 - DNA, 25 bp, Homo sapien
aagccagtgtgttaaggacgcttcg

SEQ ID NO: 3329924 - DNA, 25 bp, Homo sapien
aataatagccccaagttttggctgg

SEQ ID NO: 3329925 - DNA, 25 bp, Homo sapien
tatgaagacgtgcacaagcatggcc

SEQ ID NO: 3329926 - DNA, 25 bp, Homo sapien
tgctacttccacaacaaggactttt

SEQ ID NO: 3329927 - DNA, 25 bp, Homo sapien
gaaaagctaggcatctgctctggca

SEQ ID NO: 3329928 - DNA, 25 bp, Homo sapien
attccaggttccagcggactccagt

SEQ ID NO: 3329929 - DNA, 25 bp, Homo sapien
ccttgaagcagtggcctaatagtcc

SEQ ID NO: 3329930 - DNA, 25 bp, Homo sapien
cacaggtgcctacagtgatcgcatc

SEQ ID NO: 3329931 - DNA, 25 bp, Homo sapien
tgatcgcatccttatgcctagcggg

SEQ ID NO: 3329932 - DNA, 25 bp, Homo sapien
tgtttatcacagtcggtgttttccc

SEQ ID NO: 3329933 - DNA, 25 bp, Homo sapien
ctggtgtttatcacagtcggtgttt

SEQ ID NO: 3329934 - DNA, 25 bp, Homo sapien
ggtgtttatcacagtcggtgttttc

SEQ ID NO: 3329935 - DNA, 25 bp, Homo sapien
ctgctggtgtttatcacagtcggtg

SEQ ID NO: 3329936 - DNA, 25 bp, Homo sapien
tggagggttcaccattcaacctact

SEQ ID NO: 3329937 - DNA, 25 bp, Homo sapien
cacagattctgagtttggaacatag

SEQ ID NO: 3329938 - DNA, 25 bp, Homo sapien
tactgccgatacctctgaaattctc

SEQ ID NO: 3329939 - DNA, 25 bp, Homo sapien
ttaggccctatctagaaaatccagg

SEQ ID NO: 3329940 - DNA, 25 bp, Homo sapien
aatgatcttagctggcatgtcctgg

SEQ ID NO: 3329941 - DNA, 25 bp, Homo sapien
ccaggagcctgagtttcgaagtgag

SEQ ID NO: 3329942 - DNA, 25 bp, Homo sapien
gttgtcagatccagtccatgccttg

SEQ ID NO: 3329943 - DNA, 25 bp, Homo sapien
caatttaaccctacctggtgcagtg

SEQ ID NO: 3329944 - DNA, 25 bp, Homo sapien
tcctagtgggacaagttttgaccaa

SEQ ID NO: 3329945 - DNA, 25 bp, Homo sapien
acactatacatacatcaggtttggg

SEQ ID NO: 3329946 - DNA, 25 bp, Homo sapien
catgtagttggagcagtcatatgat

SEQ ID NO: 3329947 - DNA, 25 bp, Homo sapien
ttggatgaaacaggaacactataca

SEQ ID NO: 3329948 - DNA, 25 bp, Homo sapien
ctcctgcagaggtgttgacgggaaa

SEQ ID NO: 3329949 - DNA, 25 bp, Homo sapien
ggataatgtgacctgctttcaccag

SEQ ID NO: 3329950 - DNA, 25 bp, Homo sapien
ggaagcttcagatcatttccctttg

SEQ ID NO: 3329951 - DNA, 25 bp, Homo sapien
tgttgacgggaaagacgaggaagag

SEQ ID NO: 3329952 - DNA, 25 bp, Homo sapien
gtttcctcagtgcaaggttatacca

SEQ ID NO: 3329953 - DNA, 25 bp, Homo sapien
gttataccacatatgcgctctcttg

SEQ ID NO: 3329954 - DNA, 25 bp, Homo sapien
cagtgcaaggttataccacatatgc

SEQ ID NO: 3329955 - DNA, 25 bp, Homo sapien
acatatgcgctctcttgtgatttat

SEQ ID NO: 3329956 - DNA, 25 bp, Homo sapien
ctttgagtactcaaagctctgctcc

SEQ ID NO: 3329957 - DNA, 25 bp, Homo sapien
tgggtcttcagtctcctctaggtcc

SEQ ID NO: 3329958 - DNA, 25 bp, Homo sapien
tggagcagtttacatttggaggaag

SEQ ID NO: 3329959 - DNA, 25 bp, Homo sapien
ttggtttctaaacaatcttgcccac

SEQ ID NO: 3329960 - DNA, 25 bp, Homo sapien
ctccgaaccagctgcacctgaggag

SEQ ID NO: 3329961 - DNA, 25 bp, Homo sapien
cgaaccagctgcacctgaggaggag

SEQ ID NO: 3329962 - DNA, 25 bp, Homo sapien
accagctgcacctgaggaggagtct

SEQ ID NO: 3329963 - DNA, 25 bp, Homo sapien
gaaccagctgcacctgaggaggagt

SEQ ID NO: 3329964 - DNA, 25 bp, Homo sapien
aagcaaaagaagcattgtctcacag

SEQ ID NO: 3329965 - DNA, 25 bp, Homo sapien
ctgcagtttgcagagcctgaggtcc

SEQ ID NO: 3329966 - DNA, 25 bp, Homo sapien
tgctgcagtttgcagagcctgaggt

SEQ ID NO: 3329967 - DNA, 25 bp, Homo sapien
agcctgaggtccaagcaaaagaagc

SEQ ID NO: 3329968 - DNA, 25 bp, Homo sapien
ttctcccctggctcgcactgtgggc

SEQ ID NO: 3329969 - DNA, 25 bp, Homo sapien
tgtttgccaatctgcctttcttcct

SEQ ID NO: 3329970 - DNA, 25 bp, Homo sapien
ctgtgggcccacactgtttgccaat

SEQ ID NO: 3329971 - DNA, 25 bp, Homo sapien
cttcctgccggtgcttttgctgggg

SEQ ID NO: 3329972 - DNA, 25 bp, Homo sapien
ggaaatatctacaattagggattca

SEQ ID NO: 3329973 - DNA, 25 bp, Homo sapien
gctcttccagtgagagattatatag

SEQ ID NO: 3329974 - DNA, 25 bp, Homo sapien
ctacccgtgggagatcaatgttgga

SEQ ID NO: 3329975 - DNA, 25 bp, Homo sapien
tttgggagcatctgaaaggcagttg

SEQ ID NO: 3329976 - DNA, 25 bp, Homo sapien
aggaatttgacaggacatcactgtc

SEQ ID NO: 3329977 - DNA, 25 bp, Homo sapien
gaatttgacaggacatcactgtctg

SEQ ID NO: 3329978 - DNA, 25 bp, Homo sapien
ttgacaggacatcactgtctggcaa

SEQ ID NO: 3329979 - DNA, 25 bp, Homo sapien
tttgacaggacatcactgtctggca

SEQ ID NO: 3329980 - DNA, 25 bp, Homo sapien
acgtgaccgaatcccagcggctttg

SEQ ID NO: 3329981 - DNA, 25 bp, Homo sapien
cgtgtggccatttggcccgctggcc

SEQ ID NO: 3329982 - DNA, 25 bp, Homo sapien
cagcacccacgtccgagttttccat

SEQ ID NO: 3329983 - DNA, 25 bp, Homo sapien
ccctccttcccgtgtggccatttgg

SEQ ID NO: 3329984 - DNA, 25 bp, Homo sapien
gaatcgccctgtcttaagtacactg

SEQ ID NO: 3329985 - DNA, 25 bp, Homo sapien
catggaattgtgatagaatcgccct

SEQ ID NO: 3329986 - DNA, 25 bp, Homo sapien
gccaaccacgttaagagcatacatc

SEQ ID NO: 3329987 - DNA, 25 bp, Homo sapien
gaaatgccttctatatgtgatgcta

SEQ ID NO: 3329988 - DNA, 25 bp, Homo sapien
atgaagaagagaagacggtctctcc

SEQ ID NO: 3329989 - DNA, 25 bp, Homo sapien
tgtttactacgcttaattgggattc

SEQ ID NO: 3329990 - DNA, 25 bp, Homo sapien
actacgcttaattgggattccacac

SEQ ID NO: 3329991 - DNA, 25 bp, Homo sapien
acgcttaattgggattccacacatg

SEQ ID NO: 3329992 - DNA, 25 bp, Homo sapien
gggatgaatggcaacaacagctgct

SEQ ID NO: 3329993 - DNA, 25 bp, Homo sapien
cttgccaatttattccgccttctgc

SEQ ID NO: 3329994 - DNA, 25 bp, Homo sapien
gagctctccaaactaccctccttga

SEQ ID NO: 3329995 - DNA, 25 bp, Homo sapien
cttagaggccgctgagaacaaagca

SEQ ID NO: 3329996 - DNA, 25 bp, Homo sapien
cttgaaggaataggctggagaactg

SEQ ID NO: 3329997 - DNA, 25 bp, Homo sapien
gagagagggcctcagactcaacggt

SEQ ID NO: 3329998 - DNA, 25 bp, Homo sapien
gctccttctcaaaatagtgcatggg

SEQ ID NO: 3329999 - DNA, 25 bp, Homo sapien
caacggttgtttgttctctggatcc

SEQ ID NO: 3330000 - DNA, 25 bp, Homo sapien
tactactgcgatgggcttatttctg

SEQ ID NO: 3330001 - DNA, 25 bp, Homo sapien
catgcccacccgcacactctggaag

SEQ ID NO: 3330002 - DNA, 25 bp, Homo sapien
atgcccacccgcacactctggaagt

SEQ ID NO: 3330003 - DNA, 25 bp, Homo sapien
cacccgcacactctggaagtcccta

SEQ ID NO: 3330004 - DNA, 25 bp, Homo sapien
gcccacccgcacactctggaagtcc

SEQ ID NO: 3330005 - DNA, 25 bp, Homo sapien
gcagctctccgactgcaggtgtcat

SEQ ID NO: 3330006 - DNA, 25 bp, Homo sapien
tgcagctctccgactgcaggtgtca

SEQ ID NO: 3330007 - DNA, 25 bp, Homo sapien
gacagattaaacctatgaggattcc

SEQ ID NO: 3330008 - DNA, 25 bp, Homo sapien
gtgtagacatgaagacagattaaac

SEQ ID NO: 3330009 - DNA, 25 bp, Homo sapien
taaacctatgaggattccattaggg

SEQ ID NO: 3330010 - DNA, 25 bp, Homo sapien
tgtagacatgaagacagattaaacc

SEQ ID NO: 3330011 - DNA, 25 bp, Homo sapien
agagttgtgaaggcccacaatagtc

SEQ ID NO: 3330012 - DNA, 25 bp, Homo sapien
cagagttgtgaaggcccacaatagt

SEQ ID NO: 3330013 - DNA, 25 bp, Homo sapien
ccatcataatcagtgtggcagtttg

SEQ ID NO: 3330014 - DNA, 25 bp, Homo sapien
ttccatcataatcagtgtggcagtt

SEQ ID NO: 3330015 - DNA, 25 bp, Homo sapien
tcataatcagtgtggcagtttgttt

SEQ ID NO: 3330016 - DNA, 25 bp, Homo sapien
catcataatcagtgtggcagtttgt

SEQ ID NO: 3330017 - DNA, 25 bp, Homo sapien
tcctatcccacttggcctctacaca

SEQ ID NO: 3330018 - DNA, 25 bp, Homo sapien
cctatcccacttggcctctacacat

SEQ ID NO: 3330019 - DNA, 25 bp, Homo sapien
ccacttggcctctacacattcattt

SEQ ID NO: 3330020 - DNA, 25 bp, Homo sapien
atcccacttggcctctacacattca

SEQ ID NO: 3330021 - DNA, 25 bp, Homo sapien
tgaactttgaagtcctttaatccca

SEQ ID NO: 3330022 - DNA, 25 bp, Homo sapien
taagttgcagttgaaccttctctcc

SEQ ID NO: 3330023 - DNA, 25 bp, Homo sapien
ataggttcatcaggtctacataagt

SEQ ID NO: 3330024 - DNA, 25 bp, Homo sapien
ctatgagtttaggtgtatctggaca

SEQ ID NO: 3330025 - DNA, 25 bp, Homo sapien
gagcttttgctagtgttcaagtcca

SEQ ID NO: 3330026 - DNA, 25 bp, Homo sapien
gagaaggcaggcaactatccaagcc

SEQ ID NO: 3330027 - DNA, 25 bp, Homo sapien
catgttagacaatgagaattggttc

SEQ ID NO: 3330028 - DNA, 25 bp, Homo sapien
gaattggttccattagcttagctat

SEQ ID NO: 3330029 - DNA, 25 bp, Homo sapien
gaactctgtcaaggtgatgctctcc

SEQ ID NO: 3330030 - DNA, 25 bp, Homo sapien
gaattacatatgaggtggtacacca

SEQ ID NO: 3330031 - DNA, 25 bp, Homo sapien
aactcagccgcacttgatcaacaga

SEQ ID NO: 3330032 - DNA, 25 bp, Homo sapien
tgcaggaggttcaacaaactcagcc

SEQ ID NO: 3330033 - DNA, 25 bp, Homo sapien
aagtagcaagccagcatggatcctg

SEQ ID NO: 3330034 - DNA, 25 bp, Homo sapien
gctccacaagtagcaagccagcatg

SEQ ID NO: 3330035 - DNA, 25 bp, Homo sapien
gcatggatcctggactgtgaggcca

SEQ ID NO: 3330036 - DNA, 25 bp, Homo sapien
cctgactgctccacaagtagcaagc

SEQ ID NO: 3330037 - DNA, 25 bp, Homo sapien
taaagggtcaattcctatgcctgca

SEQ ID NO: 3330038 - DNA, 25 bp, Homo sapien
agggtcaattcctatgcctgcaggg

SEQ ID NO: 3330039 - DNA, 25 bp, Homo sapien
ggtctaaagggtcaattcctatgcc

SEQ ID NO: 3330040 - DNA, 25 bp, Homo sapien
tctaaagggtcaattcctatgcctg

SEQ ID NO: 3330041 - DNA, 25 bp, Homo sapien
agtccacgtgccatcaacaaacaca

SEQ ID NO: 3330042 - DNA, 25 bp, Homo sapien
gatatagatctgcttgttcagtgtg

SEQ ID NO: 3330043 - DNA, 25 bp, Homo sapien
gtgtgtacctttctctgcgcctcca

SEQ ID NO: 3330044 - DNA, 25 bp, Homo sapien
caacaaacacaggatatagatctgc

SEQ ID NO: 3330045 - DNA, 25 bp, Homo sapien
ctgtaacttgccctctggccagagg

SEQ ID NO: 3330046 - DNA, 25 bp, Homo sapien
gaagactgtaacttgccctctggcc

SEQ ID NO: 3330047 - DNA, 25 bp, Homo sapien
gcttcctggcatagatgtctgtttc

SEQ ID NO: 3330048 - DNA, 25 bp, Homo sapien
tctgaagactgtaacttgccctctg

SEQ ID NO: 3330049 - DNA, 25 bp, Homo sapien
ttcatcatgagatccctccaccaag

SEQ ID NO: 3330050 - DNA, 25 bp, Homo sapien
tgtgagatgtgtcacgctccagcct

SEQ ID NO: 3330051 - DNA, 25 bp, Homo sapien
aactgtattgatcacctttggagga

SEQ ID NO: 3330052 - DNA, 25 bp, Homo sapien
cataggcgtggtaattgggtgttca

SEQ ID NO: 3330053 - DNA, 25 bp, Homo sapien
gaagtgggagagtctcttcagcccg

SEQ ID NO: 3330054 - DNA, 25 bp, Homo sapien
gggagagtctcttcagcccgggagg

SEQ ID NO: 3330055 - DNA, 25 bp, Homo sapien
cagggagctgaagtgggagagtctc

SEQ ID NO: 3330056 - DNA, 25 bp, Homo sapien
agctgaagtgggagagtctcttcag

SEQ ID NO: 3330057 - DNA, 25 bp, Homo sapien
ggcgccaaaagattgggttctcgat

SEQ ID NO: 3330058 - DNA, 25 bp, Homo sapien
tacgtcattaatatggcgccaaaag

SEQ ID NO: 3330059 - DNA, 25 bp, Homo sapien
ctagtggaaataatataatacgtca

SEQ ID NO: 3330060 - DNA, 25 bp, Homo sapien
tataatacgtcattaatatggcgcc

SEQ ID NO: 3330061 - DNA, 25 bp, Homo sapien
taaatgaacgtgtagtgtgtacccc

SEQ ID NO: 3330062 - DNA, 25 bp, Homo sapien
cggaacggtcccatttgctggagaa

SEQ ID NO: 3330063 - DNA, 25 bp, Homo sapien
gagcccttcagtgcacgtgtcttgt

SEQ ID NO: 3330064 - DNA, 25 bp, Homo sapien
gtgtaccccgggactgcaagttgca

SEQ ID NO: 3330065 - DNA, 25 bp, Homo sapien
gacagaggtgatacacagtttccag

SEQ ID NO: 3330066 - DNA, 25 bp, Homo sapien
cttcctcgccggatggcttcctgtg

SEQ ID NO: 3330067 - DNA, 25 bp, Homo sapien
tgtttgttggttccgcgccgccttc

SEQ ID NO: 3330068 - DNA, 25 bp, Homo sapien
cttcctgtgacagaggtgatacaca

SEQ ID NO: 3330069 - DNA, 25 bp, Homo sapien
tcctcccgcgctgttgtttctgtcg

SEQ ID NO: 3330070 - DNA, 25 bp, Homo sapien
cccctcctcccgcgctgttgtttct

SEQ ID NO: 3330071 - DNA, 25 bp, Homo sapien
cctcctcccgcgctgttgtttctgt

SEQ ID NO: 3330072 - DNA, 25 bp, Homo sapien
cctcccgcgctgttgtttctgtcgc

SEQ ID NO: 3330073 - DNA, 25 bp, Homo sapien
ggagctttagcttgccttctagtaa

SEQ ID NO: 3330074 - DNA, 25 bp, Homo sapien
gaaacccgttaggaatgcgtcgtca

SEQ ID NO: 3330075 - DNA, 25 bp, Homo sapien
ttctagtaacgagagggctggcgcc

SEQ ID NO: 3330076 - DNA, 25 bp, Homo sapien
gacctgagacagctacgtttttagg

SEQ ID NO: 3330077 - DNA, 25 bp, Homo sapien
aacaagaaatagcaatgttattagc

SEQ ID NO: 3330078 - DNA, 25 bp, Homo sapien
aatagcaatgttattagcaagttgc

SEQ ID NO: 3330079 - DNA, 25 bp, Homo sapien
caagaaatagcaatgttattagcaa

SEQ ID NO: 3330080 - DNA, 25 bp, Homo sapien
aagatttcagtggtgtgggtccaca

SEQ ID NO: 3330081 - DNA, 25 bp, Homo sapien
gcagttggaggatgagttctacacc

SEQ ID NO: 3330082 - DNA, 25 bp, Homo sapien
caccgggtgagtgtccgtaagcaga

SEQ ID NO: 3330083 - DNA, 25 bp, Homo sapien
gaagtagtggatttcctgtaccagt

SEQ ID NO: 3330084 - DNA, 25 bp, Homo sapien
tacaccttcgtcaacctgctggatg

SEQ ID NO: 3330085 - DNA, 25 bp, Homo sapien
gaggtgctaagtcatcactgaggct

SEQ ID NO: 3330086 - DNA, 25 bp, Homo sapien
agaagatactcctggcagtgaggtg

SEQ ID NO: 3330087 - DNA, 25 bp, Homo sapien
tgacccaaggagttgactcaggatg

SEQ ID NO: 3330088 - DNA, 25 bp, Homo sapien
tagagtgaatgagccccaagaaaat

SEQ ID NO: 3330089 - DNA, 25 bp, Homo sapien
tgtcacactgagattgctgaatgtc

SEQ ID NO: 3330090 - DNA, 25 bp, Homo sapien
tcagcacgctacagatgtgttgttt

SEQ ID NO: 3330091 - DNA, 25 bp, Homo sapien
catcacctctggagtcccgtctgga

SEQ ID NO: 3330092 - DNA, 25 bp, Homo sapien
tggctgttggctgccgagcctcagc

SEQ ID NO: 3330093 - DNA, 25 bp, Homo sapien
cagcccgacacctgctgtaattggg

SEQ ID NO: 3330094 - DNA, 25 bp, Homo sapien
gattcctgggaaggccgcggattcc

SEQ ID NO: 3330095 - DNA, 25 bp, Homo sapien
ggtgcatgagctatggagtcagata

SEQ ID NO: 3330096 - DNA, 25 bp, Homo sapien
gaaaatgcttgtggtgtactaactc

SEQ ID NO: 3330097 - DNA, 25 bp, Homo sapien
tttcccctaaaagatgcagtaaatg

SEQ ID NO: 3330098 - DNA, 25 bp, Homo sapien
ttctcagactgacaaataagtagcc

SEQ ID NO: 3330099 - DNA, 25 bp, Homo sapien
tatcagtttatagcagatcctcaaa

SEQ ID NO: 3330100 - DNA, 25 bp, Homo sapien
tcaaggcatatgatcattctcagac

SEQ ID NO: 3330101 - DNA, 25 bp, Homo sapien
gagagcatcagtccagctctgcagg

SEQ ID NO: 3330102 - DNA, 25 bp, Homo sapien
actccaggcctttcagtgagttcag

SEQ ID NO: 3330103 - DNA, 25 bp, Homo sapien
tgagttcagtgtgcagttgacaaag

SEQ ID NO: 3330104 - DNA, 25 bp, Homo sapien
cagtgtgcagttgacaaagacattt

SEQ ID NO: 3330105 - DNA, 25 bp, Homo sapien
tcagtgagttcagtgtgcagttgac

SEQ ID NO: 3330106 - DNA, 25 bp, Homo sapien
taggattcttggtaaccatttggtc

SEQ ID NO: 3330107 - DNA, 25 bp, Homo sapien
gattcttggtaaccatttggtcttc

SEQ ID NO: 3330108 - DNA, 25 bp, Homo sapien
aggattcttggtaaccatttggtct

SEQ ID NO: 3330109 - DNA, 25 bp, Homo sapien
taaccaattatgtgcgactagaggg

SEQ ID NO: 3330110 - DNA, 25 bp, Homo sapien
tctggtttatctaaccaattatgtg

SEQ ID NO: 3330111 - DNA, 25 bp, Homo sapien
aattatgtgcgactagagggagctc

SEQ ID NO: 3330112 - DNA, 25 bp, Homo sapien
tatctaaccaattatgtgcgactag

SEQ ID NO: 3330113 - DNA, 25 bp, Homo sapien
cttttcctgtggcaggtgattgagt

SEQ ID NO: 3330114 - DNA, 25 bp, Homo sapien
catttccaaaccagcaggttgtaaa

SEQ ID NO: 3330115 - DNA, 25 bp, Homo sapien
cctgtggcaggtgattgagtaaaag

SEQ ID NO: 3330116 - DNA, 25 bp, Homo sapien
gatgtgaaggttgattctaatgatt

SEQ ID NO: 3330117 - DNA, 25 bp, Homo sapien
tctcagtctcgtacgggaggcagaa

SEQ ID NO: 3330118 - DNA, 25 bp, Homo sapien
tagagaaacttacaagccccgagcc

SEQ ID NO: 3330119 - DNA, 25 bp, Homo sapien
acttgtcctcgtaatagccctgtga

SEQ ID NO: 3330120 - DNA, 25 bp, Homo sapien
gggagttcacatcaattgggccaca

SEQ ID NO: 3330121 - DNA, 25 bp, Homo sapien
tagtagatctgatacatccccattg

SEQ ID NO: 3330122 - DNA, 25 bp, Homo sapien
ttgaaagactgctgtccagatcagc

SEQ ID NO: 3330123 - DNA, 25 bp, Homo sapien
caatgagatacagaattatgggcct

SEQ ID NO: 3330124 - DNA, 25 bp, Homo sapien
ccatatggcagggacattatgatac

SEQ ID NO: 3330125 - DNA, 25 bp, Homo sapien
gtatcagattcatttgcactattag

SEQ ID NO: 3330126 - DNA, 25 bp, Homo sapien
tttgcactattaggaatgctagttt

SEQ ID NO: 3330127 - DNA, 25 bp, Homo sapien
tattaggaatgctagttttgtgcaa

SEQ ID NO: 3330128 - DNA, 25 bp, Homo sapien
tcagattcatttgcactattaggaa

SEQ ID NO: 3330129 - DNA, 25 bp, Homo sapien
tatgaggtggccataagcagcaacc

SEQ ID NO: 3330130 - DNA, 25 bp, Homo sapien
gaaatgcaaatggatagagcacggt

SEQ ID NO: 3330131 - DNA, 25 bp, Homo sapien
gagcacggtttctctgacagtataa

SEQ ID NO: 3330132 - DNA, 25 bp, Homo sapien
cccacttgcgttctattagtatgga

SEQ ID NO: 3330133 - DNA, 25 bp, Homo sapien
tgtaaccttgtacagaggatttttc

SEQ ID NO: 3330134 - DNA, 25 bp, Homo sapien
ggatttttcactatgtgcctagctt

SEQ ID NO: 3330135 - DNA, 25 bp, Homo sapien
gtaaccttgtacagaggatttttca

SEQ ID NO: 3330136 - DNA, 25 bp, Homo sapien
ttttcactatgtgcctagcttggtg

SEQ ID NO: 3330137 - DNA, 25 bp, Homo sapien
gaactatttagtagaattgtgcctt

SEQ ID NO: 3330138 - DNA, 25 bp, Homo sapien
gatgactattttatattacatgacc

SEQ ID NO: 3330139 - DNA, 25 bp, Homo sapien
attacatgacccaatcctgtattta

SEQ ID NO: 3330140 - DNA, 25 bp, Homo sapien
ttaaagtatatgtagagatgactat

SEQ ID NO: 3330141 - DNA, 25 bp, Homo sapien
tagttccagccttattctagggaga

SEQ ID NO: 3330142 - DNA, 25 bp, Homo sapien
taatgagcaggatagtctgcttaca

SEQ ID NO: 3330143 - DNA, 25 bp, Homo sapien
gctacgtaaaacctccaagtcggca

SEQ ID NO: 3330144 - DNA, 25 bp, Homo sapien
gaactctacatcctaactgcttgga

SEQ ID NO: 3330145 - DNA, 25 bp, Homo sapien
tgcaggctttaccatttcaatacac

SEQ ID NO: 3330146 - DNA, 25 bp, Homo sapien
cagctggtttattctccactgaagc

SEQ ID NO: 3330147 - DNA, 25 bp, Homo sapien
tgcttacgcgaaataacacaagcct

SEQ ID NO: 3330148 - DNA, 25 bp, Homo sapien
tcccaactctaaagttctgtgagtg

SEQ ID NO: 3330149 - DNA, 25 bp, Homo sapien
aatattttccagattcatcagggag

SEQ ID NO: 3330150 - DNA, 25 bp, Homo sapien
ttctctgcactgtaatcacactgag

SEQ ID NO: 3330151 - DNA, 25 bp, Homo sapien
tttccagattcatcagggaggctgc

SEQ ID NO: 3330152 - DNA, 25 bp, Homo sapien
ccagattcatcagggaggctgcttt

SEQ ID NO: 3330153 - DNA, 25 bp, Homo sapien
catcacaacctataagtactgaaat

SEQ ID NO: 3330154 - DNA, 25 bp, Homo sapien
ctgaaatggtcttattggaaagggt

SEQ ID NO: 3330155 - DNA, 25 bp, Homo sapien
agtactgaaatggtcttattggaaa

SEQ ID NO: 3330156 - DNA, 25 bp, Homo sapien
aagaagaatgcatcacaacctataa

SEQ ID NO: 3330157 - DNA, 25 bp, Homo sapien
tcgtagacgttttctttgccatttg

SEQ ID NO: 3330158 - DNA, 25 bp, Homo sapien
tgattttcgtagacgttttctttgc

SEQ ID NO: 3330159 - DNA, 25 bp, Homo sapien
cgtagacgttttctttgccatttgc

SEQ ID NO: 3330160 - DNA, 25 bp, Homo sapien
tgcgagccaccacgcatagcttatt

SEQ ID NO: 3330161 - DNA, 25 bp, Homo sapien
tttgaactgtttattatctagggat

SEQ ID NO: 3330162 - DNA, 25 bp, Homo sapien
ctagggataagaggatgctccctac

SEQ ID NO: 3330163 - DNA, 25 bp, Homo sapien
cagttgcgagccaccacgcatagct

SEQ ID NO: 3330164 - DNA, 25 bp, Homo sapien
tagacgcctttgaagtctgttggct

SEQ ID NO: 3330165 - DNA, 25 bp, Homo sapien
tttcttgatgctctagaattagctt

SEQ ID NO: 3330166 - DNA, 25 bp, Homo sapien
tgacttagacgcctttgaagtctgt

SEQ ID NO: 3330167 - DNA, 25 bp, Homo sapien
ctgcctgacttagacgcctttgaag

SEQ ID NO: 3330168 - DNA, 25 bp, Homo sapien
catttccagctgagaaagcagctct

SEQ ID NO: 3330169 - DNA, 25 bp, Homo sapien
tcttgggtatgaagtttctgtcgac

SEQ ID NO: 3330170 - DNA, 25 bp, Homo sapien
aagtttctgtcgactcagctcactc

SEQ ID NO: 3330171 - DNA, 25 bp, Homo sapien
gtatgaagtttctgtcgactcagct

SEQ ID NO: 3330172 - DNA, 25 bp, Homo sapien
cagaaaggatcaaaactggaagaag

SEQ ID NO: 3330173 - DNA, 25 bp, Homo sapien
tttgaccagaaaggatcaaaactgg

SEQ ID NO: 3330174 - DNA, 25 bp, Homo sapien
gaaaggatcaaaactggaagaagag

SEQ ID NO: 3330175 - DNA, 25 bp, Homo sapien
gatcaaaactggaagaagagtttgg

SEQ ID NO: 3330176 - DNA, 25 bp, Homo sapien
taattgtgggaaataaggtgcagcc

SEQ ID NO: 3330177 - DNA, 25 bp, Homo sapien
tctgacaaaagcatacactcatgta

SEQ ID NO: 3330178 - DNA, 25 bp, Homo sapien
aaccaccgctgcaattaagatacag

SEQ ID NO: 3330179 - DNA, 25 bp, Homo sapien
caacctcattgggatataattgtgg

SEQ ID NO: 3330180 - DNA, 25 bp, Homo sapien
aaaaagatacagaataggtccattg

SEQ ID NO: 3330181 - DNA, 25 bp, Homo sapien
aaaagatacagaataggtccattgc

SEQ ID NO: 3330182 - DNA, 25 bp, Homo sapien
aaaaaaagatacagaataggtccat

SEQ ID NO: 3330183 - DNA, 25 bp, Homo sapien
aaagatacagaataggtccattgcc

SEQ ID NO: 3330184 - DNA, 25 bp, Homo sapien
cactctgagggaagcaagctaccac

SEQ ID NO: 3330185 - DNA, 25 bp, Homo sapien
gatcctttcctggtcaagctctgag

SEQ ID NO: 3330186 - DNA, 25 bp, Homo sapien
caatgccagttaagacccgaggcct

SEQ ID NO: 3330187 - DNA, 25 bp, Homo sapien
tatgtgggctctacccagggactca

SEQ ID NO: 3330188 - DNA, 25 bp, Homo sapien
gtagataactacacaaagcgttttc

SEQ ID NO: 3330189 - DNA, 25 bp, Homo sapien
tgcagtagtagataactacacaaag

SEQ ID NO: 3330190 - DNA, 25 bp, Homo sapien
tacacaaagcgttttcatcaagttt

SEQ ID NO: 3330191 - DNA, 25 bp, Homo sapien
taactacacaaagcgttttcatcaa

SEQ ID NO: 3330192 - DNA, 25 bp, Homo sapien
ttacaatggctggtttaaagttctc

SEQ ID NO: 3330193 - DNA, 25 bp, Homo sapien
gcttgatattgtccctaaagtctct

SEQ ID NO: 3330194 - DNA, 25 bp, Homo sapien
catttttggatggtttctttcgctc

SEQ ID NO: 3330195 - DNA, 25 bp, Homo sapien
tattgtccctaaagtctctgaggct

SEQ ID NO: 3330196 - DNA, 25 bp, Homo sapien
cgtatactaaagctaagacataggg

SEQ ID NO: 3330197 - DNA, 25 bp, Homo sapien
atgcattaggtgaaaatttgagcca

SEQ ID NO: 3330198 - DNA, 25 bp, Homo sapien
tgcttctatttcaagaagtaagaaa

SEQ ID NO: 3330199 - DNA, 25 bp, Homo sapien
gggtaacaaagagcagaaagtaata

SEQ ID NO: 3330200 - DNA, 25 bp, Homo sapien
tctgcactttcagtaagtttcttcg

SEQ ID NO: 3330201 - DNA, 25 bp, Homo sapien
caattgaacttcaaatccacgttcc

SEQ ID NO: 3330202 - DNA, 25 bp, Homo sapien
aggagatgcctcagttcaacaatgg

SEQ ID NO: 3330203 - DNA, 25 bp, Homo sapien
gccttctgttgagtcgctaggagat

SEQ ID NO: 3330204 - DNA, 25 bp, Homo sapien
cctgaaatgttaaagacggatctag

SEQ ID NO: 3330205 - DNA, 25 bp, Homo sapien
caaggtgtaggtgcaccaggttcct

SEQ ID NO: 3330206 - DNA, 25 bp, Homo sapien
gctagttagttaagacgttcggctc

SEQ ID NO: 3330207 - DNA, 25 bp, Homo sapien
gatcaactggagtactagataggga

SEQ ID NO: 3330208 - DNA, 25 bp, Homo sapien
ctgaatcatttcttggtaacgtgat

SEQ ID NO: 3330209 - DNA, 25 bp, Homo sapien
tagcctttgttcactgacaagccca

SEQ ID NO: 3330210 - DNA, 25 bp, Homo sapien
gcaatcttccttaaactctcagtct

SEQ ID NO: 3330211 - DNA, 25 bp, Homo sapien
tctctcagactccaatacattttga

SEQ ID NO: 3330212 - DNA, 25 bp, Homo sapien
atcttttgaacgctctgaaaccagg

SEQ ID NO: 3330213 - DNA, 25 bp, Homo sapien
tctattttctgctctcgtaagtctt

SEQ ID NO: 3330214 - DNA, 25 bp, Homo sapien
tctgctctcgtaagtcttagctgaa

SEQ ID NO: 3330215 - DNA, 25 bp, Homo sapien
tctgaaaccaggaatctttggtgca

SEQ ID NO: 3330216 - DNA, 25 bp, Homo sapien
cttaatgactcgttcaatttggcct

SEQ ID NO: 3330217 - DNA, 25 bp, Homo sapien
taatgactcgttcaatttggccttg

SEQ ID NO: 3330218 - DNA, 25 bp, Homo sapien
tgactcgttcaatttggccttgttt

SEQ ID NO: 3330219 - DNA, 25 bp, Homo sapien
tttccttaatgactcgttcaatttg

SEQ ID NO: 3330220 - DNA, 25 bp, Homo sapien
tttattaagatagaaccctgagtgt

SEQ ID NO: 3330221 - DNA, 25 bp, Homo sapien
tgtgaatcatgctttggaggaaccc

SEQ ID NO: 3330222 - DNA, 25 bp, Homo sapien
ggaggaacccactttgctaactgta

SEQ ID NO: 3330223 - DNA, 25 bp, Homo sapien
tctaggagagggtagtttcagtgct

SEQ ID NO: 3330224 - DNA, 25 bp, Homo sapien
tccttggtttcccagataaactcag

SEQ ID NO: 3330225 - DNA, 25 bp, Homo sapien
ggcctactcattcctcagtattcat

SEQ ID NO: 3330226 - DNA, 25 bp, Homo sapien
gataaactcagcatatgataggagc

SEQ ID NO: 3330227 - DNA, 25 bp, Homo sapien
tacagctagcaatagcatcctgtgc

SEQ ID NO: 3330228 - DNA, 25 bp, Homo sapien
tctgttaatcgagaaatttgtatat

SEQ ID NO: 3330229 - DNA, 25 bp, Homo sapien
aagttcttctgttaatcgagaaatt

SEQ ID NO: 3330230 - DNA, 25 bp, Homo sapien
taatcgagaaatttgtatattacat

SEQ ID NO: 3330231 - DNA, 25 bp, Homo sapien
tcttctgttaatcgagaaatttgta

SEQ ID NO: 3330232 - DNA, 25 bp, Homo sapien
ctttcttggttcttatggtagcatc

SEQ ID NO: 3330233 - DNA, 25 bp, Homo sapien
ggttcttatggtagcatcttgtaca

SEQ ID NO: 3330234 - DNA, 25 bp, Homo sapien
atggtagcatcttgtacaaaccgag

SEQ ID NO: 3330235 - DNA, 25 bp, Homo sapien
cttatggtagcatcttgtacaaacc

SEQ ID NO: 3330236 - DNA, 25 bp, Homo sapien
actatattctgttttagagctctct

SEQ ID NO: 3330237 - DNA, 25 bp, Homo sapien
gttttagagctctcttgaaaaatcc

SEQ ID NO: 3330238 - DNA, 25 bp, Homo sapien
tatattctgttttagagctctcttg

SEQ ID NO: 3330239 - DNA, 25 bp, Homo sapien
ttctgttttagagctctcttgaaaa

SEQ ID NO: 3330240 - DNA, 25 bp, Homo sapien
tttctggctcttacaatagcctcat

SEQ ID NO: 3330241 - DNA, 25 bp, Homo sapien
gcttcttctaagagttgcatgctat

SEQ ID NO: 3330242 - DNA, 25 bp, Homo sapien
tggcttcttggattgtcacacataa

SEQ ID NO: 3330243 - DNA, 25 bp, Homo sapien
tcattgcactttgcttgtagctctc

SEQ ID NO: 3330244 - DNA, 25 bp, Homo sapien
catgtggctcaacttgtacaaagaa

SEQ ID NO: 3330245 - DNA, 25 bp, Homo sapien
gaaaatcatacctagtcatactggg

SEQ ID NO: 3330246 - DNA, 25 bp, Homo sapien
tcttaggagggagtcttacagactt

SEQ ID NO: 3330247 - DNA, 25 bp, Homo sapien
tcacctgtgaatacgaaagtccctc

SEQ ID NO: 3330248 - DNA, 25 bp, Homo sapien
tgtaactgctgtaaacgcctatctg

SEQ ID NO: 3330249 - DNA, 25 bp, Homo sapien
gctgtaaacgcctatctgatgcttc

SEQ ID NO: 3330250 - DNA, 25 bp, Homo sapien
gttttatactagactgtaactgctg

SEQ ID NO: 3330251 - DNA, 25 bp, Homo sapien
ttgttttatactagactgtaactgc

SEQ ID NO: 3330252 - DNA, 25 bp, Homo sapien
cagtagggccagtgtatatcgttcc

SEQ ID NO: 3330253 - DNA, 25 bp, Homo sapien
tataccgattattttgccacctagg

SEQ ID NO: 3330254 - DNA, 25 bp, Homo sapien
tatcgttccctttagcgtccatttg

SEQ ID NO: 3330255 - DNA, 25 bp, Homo sapien
tgatgggcatctaggctgatcctat

SEQ ID NO: 3330256 - DNA, 25 bp, Homo sapien
acaaaggtgttttctgaagccacag

SEQ ID NO: 3330257 - DNA, 25 bp, Homo sapien
taagcccatacaaaggtgttttctg

SEQ ID NO: 3330258 - DNA, 25 bp, Homo sapien
aagcccatacaaaggtgttttctga

SEQ ID NO: 3330259 - DNA, 25 bp, Homo sapien
catacaaaggtgttttctgaagcca

SEQ ID NO: 3330260 - DNA, 25 bp, Homo sapien
acagcaactctcagctctaatttgg

SEQ ID NO: 3330261 - DNA, 25 bp, Homo sapien
cagtcacattagttaactcttccac

SEQ ID NO: 3330262 - DNA, 25 bp, Homo sapien
cagcaactctcagctctaatttggc

SEQ ID NO: 3330263 - DNA, 25 bp, Homo sapien
tactgtagtgtaggaactgttccct

SEQ ID NO: 3330264 - DNA, 25 bp, Homo sapien
ctcaggtagttattagtgccaggga

SEQ ID NO: 3330265 - DNA, 25 bp, Homo sapien
tcatgtaaaatctctgcgtcaggct

SEQ ID NO: 3330266 - DNA, 25 bp, Homo sapien
aatgagtcccctatgacagactgcc

SEQ ID NO: 3330267 - DNA, 25 bp, Homo sapien
cacatgtttggctggactagtcttc

SEQ ID NO: 3330268 - DNA, 25 bp, Homo sapien
tataagtctacactcctctactggc

SEQ ID NO: 3330269 - DNA, 25 bp, Homo sapien
gccagtcaacatctagcctcaaaga

SEQ ID NO: 3330270 - DNA, 25 bp, Homo sapien
ttttggcataaagtctacactcctc

SEQ ID NO: 3330271 - DNA, 25 bp, Homo sapien
tgactcttagccagtatacgaacag

SEQ ID NO: 3330272 - DNA, 25 bp, Homo sapien
tagtttatacaatgcagctaccatc

SEQ ID NO: 3330273 - DNA, 25 bp, Homo sapien
gaactgactctaccaacacaaaagg

SEQ ID NO: 3330274 - DNA, 25 bp, Homo sapien
gaaggcctgtcttctagaactgact

SEQ ID NO: 3330275 - DNA, 25 bp, Homo sapien
cggtctcgatctgctgacctcatgg

SEQ ID NO: 3330276 - DNA, 25 bp, Homo sapien
gagccaccacacccggccaacaact

SEQ ID NO: 3330277 - DNA, 25 bp, Homo sapien
gcctgcctcggcctcgcagactgct

SEQ ID NO: 3330278 - DNA, 25 bp, Homo sapien
tccgcctgcctcggcctcgcagact

SEQ ID NO: 3330279 - DNA, 25 bp, Homo sapien
tatcacactttgttcagttactgtt

SEQ ID NO: 3330280 - DNA, 25 bp, Homo sapien
ttcggagttgttcgattatcacact

SEQ ID NO: 3330281 - DNA, 25 bp, Homo sapien
ttgttcgattatcacactttgttca

SEQ ID NO: 3330282 - DNA, 25 bp, Homo sapien
ttttttcggagttgttcgattatca

SEQ ID NO: 3330283 - DNA, 25 bp, Homo sapien
tcccttattggatatacggtctgca

SEQ ID NO: 3330284 - DNA, 25 bp, Homo sapien
gataataatccctctgacacgtgtg

SEQ ID NO: 3330285 - DNA, 25 bp, Homo sapien
tgtttagtgacatcgagcattgggc

SEQ ID NO: 3330286 - DNA, 25 bp, Homo sapien
gcagatgcaccgttttgcaatccca

SEQ ID NO: 3330287 - DNA, 25 bp, Homo sapien
cgtccgtacattagagaaagcaggc

SEQ ID NO: 3330288 - DNA, 25 bp, Homo sapien
cagctggccagagattcagcaggcc

SEQ ID NO: 3330289 - DNA, 25 bp, Homo sapien
ggacctattagagcttcgtgagaca

SEQ ID NO: 3330290 - DNA, 25 bp, Homo sapien
ctaggtgtctagaccatgctggacc

SEQ ID NO: 3330291 - DNA, 25 bp, Homo sapien
ttaggtactaacaagaattagcaga

SEQ ID NO: 3330292 - DNA, 25 bp, Homo sapien
tattaggtactaacaagaattagca

SEQ ID NO: 3330293 - DNA, 25 bp, Homo sapien
ttattaggtactaacaagaattagc

SEQ ID NO: 3330294 - DNA, 25 bp, Homo sapien
attaggtactaacaagaattagcag

SEQ ID NO: 3330295 - DNA, 25 bp, Homo sapien
catgttctcattagtaacatgaagt

SEQ ID NO: 3330296 - DNA, 25 bp, Homo sapien
tggtcagttgttgaaaatcaaatag

SEQ ID NO: 3330297 - DNA, 25 bp, Homo sapien
gaagttgtttggtcagttgttgaaa

SEQ ID NO: 3330298 - DNA, 25 bp, Homo sapien
tagtaacatgaagttgtttggtcag

SEQ ID NO: 3330299 - DNA, 25 bp, Homo sapien
tgagaaacagtctgccagagttcca

SEQ ID NO: 3330300 - DNA, 25 bp, Homo sapien
cttgtgtagtctgtccaactcctga

SEQ ID NO: 3330301 - DNA, 25 bp, Homo sapien
aactcctgagaaacagtctgccaga

SEQ ID NO: 3330302 - DNA, 25 bp, Homo sapien
ctcagtcatatgttcctggtaaagc

SEQ ID NO: 3330303 - DNA, 25 bp, Homo sapien
tttctgactgtttcatcatctgcat

SEQ ID NO: 3330304 - DNA, 25 bp, Homo sapien
ttgattggctagctgcaattgttct

SEQ ID NO: 3330305 - DNA, 25 bp, Homo sapien
tctgcatatatgtcagttcctacct

SEQ ID NO: 3330306 - DNA, 25 bp, Homo sapien
gctagctgcaattgttcttgaaggt

SEQ ID NO: 3330307 - DNA, 25 bp, Homo sapien
gtgagttctttgacctgtgagtaac

SEQ ID NO: 3330308 - DNA, 25 bp, Homo sapien
gaaaactatcacgtgtacttagaga

SEQ ID NO: 3330309 - DNA, 25 bp, Homo sapien
gaaggtcttcggtattagtattcta

SEQ ID NO: 3330310 - DNA, 25 bp, Homo sapien
aacatttagaggcatactgcttaac

SEQ ID NO: 3330311 - DNA, 25 bp, Homo sapien
tcagttagcacttccatggtataca

SEQ ID NO: 3330312 - DNA, 25 bp, Homo sapien
tacgaatctccttggttaaaagcat

SEQ ID NO: 3330313 - DNA, 25 bp, Homo sapien
taacatgcctctgagaattgccacc

SEQ ID NO: 3330314 - DNA, 25 bp, Homo sapien
gctcagcccagacatcgtaacatgc

SEQ ID NO: 3330315 - DNA, 25 bp, Homo sapien
gattgcgttactcatttggctcttg

SEQ ID NO: 3330316 - DNA, 25 bp, Homo sapien
cctgccatctgcaaatacggatagt

SEQ ID NO: 3330317 - DNA, 25 bp, Homo sapien
tattacaactgggaatgggattgcg

SEQ ID NO: 3330318 - DNA, 25 bp, Homo sapien
gattaccttggctatctggactctt

SEQ ID NO: 3330319 - DNA, 25 bp, Homo sapien
gttcagtaattcaatttcctcctgg

SEQ ID NO: 3330320 - DNA, 25 bp, Homo sapien
aagtacagtggcattttgaggatcc

SEQ ID NO: 3330321 - DNA, 25 bp, Homo sapien
cacacctatccacaagtgtgatgga

SEQ ID NO: 3330322 - DNA, 25 bp, Homo sapien
tcaagctcacctcagtttttaaacc

SEQ ID NO: 3330323 - DNA, 25 bp, Homo sapien
caaatgccggcttatatccctggat

SEQ ID NO: 3330324 - DNA, 25 bp, Homo sapien
tccctttgctgagatcctgagacca

SEQ ID NO: 3330325 - DNA, 25 bp, Homo sapien
tggttctagaatcacatccctttgc

SEQ ID NO: 3330326 - DNA, 25 bp, Homo sapien
caattaggaaactggacaatcagga

SEQ ID NO: 3330327 - DNA, 25 bp, Homo sapien
ttagctttgacagaagtgactgcca

SEQ ID NO: 3330328 - DNA, 25 bp, Homo sapien
cacaatttaattacgtatgcctcaa

SEQ ID NO: 3330329 - DNA, 25 bp, Homo sapien
catattaaaaggaaggtgcaacaga

SEQ ID NO: 3330330 - DNA, 25 bp, Homo sapien
ctgtaacacctaaactgaatgtgaa

SEQ ID NO: 3330331 - DNA, 25 bp, Homo sapien
gccacaacctgttattataattgca

SEQ ID NO: 3330332 - DNA, 25 bp, Homo sapien
atctggtccctacccgccatgtggg

SEQ ID NO: 3330333 - DNA, 25 bp, Homo sapien
ccctgaagaactctccatgtgatct

SEQ ID NO: 3330334 - DNA, 25 bp, Homo sapien
ttacatatgttgagacacagccata

SEQ ID NO: 3330335 - DNA, 25 bp, Homo sapien
gaaaacgtcaattccttaagcagag

SEQ ID NO: 3330336 - DNA, 25 bp, Homo sapien
taacaagatgccaaatatcactaca

SEQ ID NO: 3330337 - DNA, 25 bp, Homo sapien
aaaataaatatcaggctatcagaaa

SEQ ID NO: 3330338 - DNA, 25 bp, Homo sapien
gtcaaattatgaaagcacatcaata

SEQ ID NO: 3330339 - DNA, 25 bp, Homo sapien
gtattcataggatattgtcagcaca

SEQ ID NO: 3330340 - DNA, 25 bp, Homo sapien
tgtactggcaacagatgatgtcttc

SEQ ID NO: 3330341 - DNA, 25 bp, Homo sapien
ggaataagctcatcttccctgagca

SEQ ID NO: 3330342 - DNA, 25 bp, Homo sapien
ggctaaaactaggtcacatgtccac

SEQ ID NO: 3330343 - DNA, 25 bp, Homo sapien
gatgtcttccataccctcaacagta

SEQ ID NO: 3330344 - DNA, 25 bp, Homo sapien
tagccaaaggcaagacaattccgtg

SEQ ID NO: 3330345 - DNA, 25 bp, Homo sapien
tactgtgttgagactgaccagcaca

SEQ ID NO: 3330346 - DNA, 25 bp, Homo sapien
tacagatcacatatgcactttggca

SEQ ID NO: 3330347 - DNA, 25 bp, Homo sapien
tgtgttgtatgaaccactggcactc

SEQ ID NO: 3330348 - DNA, 25 bp, Homo sapien
attttcaagttgtaatttcatctca

SEQ ID NO: 3330349 - DNA, 25 bp, Homo sapien
cattttcaagttgtaatttcatctc

SEQ ID NO: 3330350 - DNA, 25 bp, Homo sapien
tttcaaccgagaagatcaaggaagc

SEQ ID NO: 3330351 - DNA, 25 bp, Homo sapien
taaactctccgtaccatacaaggcg

SEQ ID NO: 3330352 - DNA, 25 bp, Homo sapien
tgcacaccagaaagggaattaaatg

SEQ ID NO: 3330353 - DNA, 25 bp, Homo sapien
ggagtacactttcgcaagggccagg

SEQ ID NO: 3330354 - DNA, 25 bp, Homo sapien
catactcagtaacaagaggagctaa

SEQ ID NO: 3330355 - DNA, 25 bp, Homo sapien
ctggtaatatttcagctgcccattt

SEQ ID NO: 3330356 - DNA, 25 bp, Homo sapien
cctaggtgtttatcatactcagtaa

SEQ ID NO: 3330357 - DNA, 25 bp, Homo sapien
atttcagctgcccatttagttctcc

SEQ ID NO: 3330358 - DNA, 25 bp, Homo sapien
taggttttcaaatgtgtcgtctcct

SEQ ID NO: 3330359 - DNA, 25 bp, Homo sapien
ggttttcaaatgtgtcgtctccttc

SEQ ID NO: 3330360 - DNA, 25 bp, Homo sapien
tttcaaatgtgtcgtctccttctcc

SEQ ID NO: 3330361 - DNA, 25 bp, Homo sapien
actaggttttcaaatgtgtcgtctc

SEQ ID NO: 3330362 - DNA, 25 bp, Homo sapien
cggctgcttgcacttcacgggtgag

SEQ ID NO: 3330363 - DNA, 25 bp, Homo sapien
tatctgggccgaatagcacagtccc

SEQ ID NO: 3330364 - DNA, 25 bp, Homo sapien
caatgtctatctgccagtactattt

SEQ ID NO: 3330365 - DNA, 25 bp, Homo sapien
ttcttaaagagactgtccaatcccc

SEQ ID NO: 3330366 - DNA, 25 bp, Homo sapien
tatttatatgctctggtgttgggtg

SEQ ID NO: 3330367 - DNA, 25 bp, Homo sapien
tgtcaccacctattattgtattaca

SEQ ID NO: 3330368 - DNA, 25 bp, Homo sapien
taaatgtatgtgagatccatttggt

SEQ ID NO: 3330369 - DNA, 25 bp, Homo sapien
ggaggatataattgaattcatcatg

SEQ ID NO: 3330370 - DNA, 25 bp, Homo sapien
gactctcttgagcatttctgtaggg

SEQ ID NO: 3330371 - DNA, 25 bp, Homo sapien
tgacttgctgcttacctctggctag

SEQ ID NO: 3330372 - DNA, 25 bp, Homo sapien
gatgtttgaacttcctggatccaga

SEQ ID NO: 3330373 - DNA, 25 bp, Homo sapien
tggtgttccataagtactgtagcct

SEQ ID NO: 3330374 - DNA, 25 bp, Homo sapien
agttaagaactgacacaattgggtg

SEQ ID NO: 3330375 - DNA, 25 bp, Homo sapien
caattgggtggtaggtacacaggta

SEQ ID NO: 3330376 - DNA, 25 bp, Homo sapien
gcttttgcaggatacatacagcatg

SEQ ID NO: 3330377 - DNA, 25 bp, Homo sapien
taccaacatgggaaggattaactct

SEQ ID NO: 3330378 - DNA, 25 bp, Homo sapien
ggtgccagactttgttgaatgcttt

SEQ ID NO: 3330379 - DNA, 25 bp, Homo sapien
ctaaaggggtgccagactttgttga

SEQ ID NO: 3330380 - DNA, 25 bp, Homo sapien
aatcctaaaggggtgccagactttg

SEQ ID NO: 3330381 - DNA, 25 bp, Homo sapien
tcacttcctctttgccaatctggat

SEQ ID NO: 3330382 - DNA, 25 bp, Homo sapien
tgtatgtgtttagagctatgaactt

SEQ ID NO: 3330383 - DNA, 25 bp, Homo sapien
cattttatggtctattgtatggtcc

SEQ ID NO: 3330384 - DNA, 25 bp, Homo sapien
gatgccctgcctaaggctgtcagtg

SEQ ID NO: 3330385 - DNA, 25 bp, Homo sapien
tttcagtcttgatgccctgcctaag

SEQ ID NO: 3330386 - DNA, 25 bp, Homo sapien
caagttttggttctaagatttggag

SEQ ID NO: 3330387 - DNA, 25 bp, Homo sapien
gctctctgttgccagtgtactttgg

SEQ ID NO: 3330388 - DNA, 25 bp, Homo sapien
ggtactgttgcattcaccatgctct

SEQ ID NO: 3330389 - DNA, 25 bp, Homo sapien
atgtgaggtactgttgcattcacca

SEQ ID NO: 3330390 - DNA, 25 bp, Homo sapien
ttggattttcttgcacggggcttcg

SEQ ID NO: 3330391 - DNA, 25 bp, Homo sapien
tgcacggggcttcgccttttcttgt

SEQ ID NO: 3330392 - DNA, 25 bp, Homo sapien
gattttcttgcacggggcttcgcct

SEQ ID NO: 3330393 - DNA, 25 bp, Homo sapien
aagtgtgtccaaagtctcccgaatt

SEQ ID NO: 3330394 - DNA, 25 bp, Homo sapien
acactaatgcctgccttattcacta

SEQ ID NO: 3330395 - DNA, 25 bp, Homo sapien
actaatgcctgccttattcactatc

SEQ ID NO: 3330396 - DNA, 25 bp, Homo sapien
agatcacactaatgcctgccttatt

SEQ ID NO: 3330397 - DNA, 25 bp, Homo sapien
cttatagatcacactaatgcctgcc

SEQ ID NO: 3330398 - DNA, 25 bp, Homo sapien
ctttccatttgataccgcctaaaat

SEQ ID NO: 3330399 - DNA, 25 bp, Homo sapien
tttccatttgataccgcctaaaatc

SEQ ID NO: 3330400 - DNA, 25 bp, Homo sapien
ttccatttgataccgcctaaaatct

SEQ ID NO: 3330401 - DNA, 25 bp, Homo sapien
tcagaaagtcgatttctgcagccat

SEQ ID NO: 3330402 - DNA, 25 bp, Homo sapien
tctcagaaagtcgatttctgcagcc

SEQ ID NO: 3330403 - DNA, 25 bp, Homo sapien
tctctcagaaagtcgatttctgcag

SEQ ID NO: 3330404 - DNA, 25 bp, Homo sapien
gctctctcagaaagtcgatttctgc

SEQ ID NO: 3330405 - DNA, 25 bp, Homo sapien
tagtttagagctttcaccaccttta

SEQ ID NO: 3330406 - DNA, 25 bp, Homo sapien
cttcctctgaaagacagagagcttg

SEQ ID NO: 3330407 - DNA, 25 bp, Homo sapien
caacgctcggttggttgtcaagcgc

SEQ ID NO: 3330408 - DNA, 25 bp, Homo sapien
acaaaactaagccaacgctcggttg

SEQ ID NO: 3330409 - DNA, 25 bp, Homo sapien
agcggtgcaatctgcatcctactca

SEQ ID NO: 3330410 - DNA, 25 bp, Homo sapien
gttgtcaagcgctccagcggtgcaa

SEQ ID NO: 3330411 - DNA, 25 bp, Homo sapien
cccccgcgccccagacgagtccctg

SEQ ID NO: 3330412 - DNA, 25 bp, Homo sapien
ccccgcgccccagacgagtccctgg

SEQ ID NO: 3330413 - DNA, 25 bp, Homo sapien
cccgcgccccagacgagtccctggc

SEQ ID NO: 3330414 - DNA, 25 bp, Homo sapien
gcggcatctacagccccgccacgct

SEQ ID NO: 3330415 - DNA, 25 bp, Homo sapien
gttcaaccgaatcccacgctggtgg

SEQ ID NO: 3330416 - DNA, 25 bp, Homo sapien
cccggaccactccttggagacggtg

SEQ ID NO: 3330417 - DNA, 25 bp, Homo sapien
gccctgcgactttgaaaccggtgcc

SEQ ID NO: 3330418 - DNA, 25 bp, Homo sapien
acggcagcctgagagcggcgttcta

SEQ ID NO: 3330419 - DNA, 25 bp, Homo sapien
caaggtccacgtcctgggttcatgc

SEQ ID NO: 3330420 - DNA, 25 bp, Homo sapien
tgcaaggtccacgtcctgggttcat

SEQ ID NO: 3330421 - DNA, 25 bp, Homo sapien
gcaaggtccacgtcctgggttcatg

SEQ ID NO: 3330422 - DNA, 25 bp, Homo sapien
cagcacacttatgaattgggccacc

SEQ ID NO: 3330423 - DNA, 25 bp, Homo sapien
agttcaagatctaattcatgtccca

SEQ ID NO: 3330424 - DNA, 25 bp, Homo sapien
tggcaactcgtctcacatatcaaat

SEQ ID NO: 3330425 - DNA, 25 bp, Homo sapien
ccctgcctctaatgcatagttcaag

SEQ ID NO: 3330426 - DNA, 25 bp, Homo sapien
tgaacaacaggatccagtaggccat

SEQ ID NO: 3330427 - DNA, 25 bp, Homo sapien
tccccaggtccgaggtgattaccag

SEQ ID NO: 3330428 - DNA, 25 bp, Homo sapien
gggacataagcccaaggcagacatc

SEQ ID NO: 3330429 - DNA, 25 bp, Homo sapien
tggtggacatcaggtgcaggcatac

SEQ ID NO: 3330430 - DNA, 25 bp, Homo sapien
gggaagagcgccctcagggacagtg

SEQ ID NO: 3330431 - DNA, 25 bp, Homo sapien
tacttccagcactgttaagccagtg

SEQ ID NO: 3330432 - DNA, 25 bp, Homo sapien
acaggtacttccagcactgttaagc

SEQ ID NO: 3330433 - DNA, 25 bp, Homo sapien
agcccctcgaggcacaggcacatgt

SEQ ID NO: 3330434 - DNA, 25 bp, Homo sapien
agtgtggctggagctagaggtggca

SEQ ID NO: 3330435 - DNA, 25 bp, Homo sapien
aagtgtggctggagctagaggtggc

SEQ ID NO: 3330436 - DNA, 25 bp, Homo sapien
gcagagatggggtggccaacatggc

SEQ ID NO: 3330437 - DNA, 25 bp, Homo sapien
tggtatccaactgactcttctgagt

SEQ ID NO: 3330438 - DNA, 25 bp, Homo sapien
gacactggtatccaactgactcttc

SEQ ID NO: 3330439 - DNA, 25 bp, Homo sapien
caagacactggtatccaactgactc

SEQ ID NO: 3330440 - DNA, 25 bp, Homo sapien
cactggtatccaactgactcttctg

SEQ ID NO: 3330441 - DNA, 25 bp, Homo sapien
caacaattccagactgagcataggg

SEQ ID NO: 3330442 - DNA, 25 bp, Homo sapien
cctacaacaattccagactgagcat

SEQ ID NO: 3330443 - DNA, 25 bp, Homo sapien
gaaggtagcaggaacatgatgatac

SEQ ID NO: 3330444 - DNA, 25 bp, Homo sapien
tacaacaattccagactgagcatag

SEQ ID NO: 3330445 - DNA, 25 bp, Homo sapien
tgttgatataagtattgatggtgtc

SEQ ID NO: 3330446 - DNA, 25 bp, Homo sapien
gatataagtattgatggtgtcatca

SEQ ID NO: 3330447 - DNA, 25 bp, Homo sapien
cttgctcagaaattcaatgaacttt

SEQ ID NO: 3330448 - DNA, 25 bp, Homo sapien
gaactttccatagtggcaagagctg

SEQ ID NO: 3330449 - DNA, 25 bp, Homo sapien
gggatgagagctggcagctcattct

SEQ ID NO: 3330450 - DNA, 25 bp, Homo sapien
cagctcattcttgcccagagagtgg

SEQ ID NO: 3330451 - DNA, 25 bp, Homo sapien
gagctggcagctcattcttgcccag

SEQ ID NO: 3330452 - DNA, 25 bp, Homo sapien
tggcagctcattcttgcccagagag

SEQ ID NO: 3330453 - DNA, 25 bp, Homo sapien
aggctgcctcaaaggcaatgtggtc

SEQ ID NO: 3330454 - DNA, 25 bp, Homo sapien
tactagtagcctcagcagaagtgaa

SEQ ID NO: 3330455 - DNA, 25 bp, Homo sapien
ggtctgcccagattaccatttggag

SEQ ID NO: 3330456 - DNA, 25 bp, Homo sapien
cctcctcctcagcaagtttgagatg

SEQ ID NO: 3330457 - DNA, 25 bp, Homo sapien
gctatctgggtcctgattcaggtct

SEQ ID NO: 3330458 - DNA, 25 bp, Homo sapien
attcattgttccatcccaagagtag

SEQ ID NO: 3330459 - DNA, 25 bp, Homo sapien
gattcattgttccatcccaagagta

SEQ ID NO: 3330460 - DNA, 25 bp, Homo sapien
ttttcctggttgtagatggaggtgg

SEQ ID NO: 3330461 - DNA, 25 bp, Homo sapien
ctcctggcatctccagttaaggatt

SEQ ID NO: 3330462 - DNA, 25 bp, Homo sapien
tgcatcacctgtaaaccaagtccca

SEQ ID NO: 3330463 - DNA, 25 bp, Homo sapien
ggcatctccagttaaggattgataa

SEQ ID NO: 3330464 - DNA, 25 bp, Homo sapien
caaccacactactacctcctggcat

SEQ ID NO: 3330465 - DNA, 25 bp, Homo sapien
agacagcagagctgagaacaaatac

SEQ ID NO: 3330466 - DNA, 25 bp, Homo sapien
gtctggaccatgagacagcagagct

SEQ ID NO: 3330467 - DNA, 25 bp, Homo sapien
gacaggtctggaccatgagacagca

SEQ ID NO: 3330468 - DNA, 25 bp, Homo sapien
taatttataggacaggtctggacca

SEQ ID NO: 3330469 - DNA, 25 bp, Homo sapien
ccagcagtaagatacactgtttgca

SEQ ID NO: 3330470 - DNA, 25 bp, Homo sapien
cactcttttagtgaatgacttctcc

SEQ ID NO: 3330471 - DNA, 25 bp, Homo sapien
ttccagcagtaagatacactgtttg

SEQ ID NO: 3330472 - DNA, 25 bp, Homo sapien
tgggaacactcttttagtgaatgac

SEQ ID NO: 3330473 - DNA, 25 bp, Homo sapien
tagcttatcgtcaagctgcagctct

SEQ ID NO: 3330474 - DNA, 25 bp, Homo sapien
cttatcgtcaagctgcagctcttgg

SEQ ID NO: 3330475 - DNA, 25 bp, Homo sapien
gagttggcttaggagctgctcttca

SEQ ID NO: 3330476 - DNA, 25 bp, Homo sapien
ggagctgctcttcattatgggacac

SEQ ID NO: 3330477 - DNA, 25 bp, Homo sapien
aggtattcaggcattatcctctgtc

SEQ ID NO: 3330478 - DNA, 25 bp, Homo sapien
caatgacgggtaggacttactactg

SEQ ID NO: 3330479 - DNA, 25 bp, Homo sapien
ttatcctctgtcgacccaggtccat

SEQ ID NO: 3330480 - DNA, 25 bp, Homo sapien
ggccaatgacgggtaggacttacta

SEQ ID NO: 3330481 - DNA, 25 bp, Homo sapien
tagccgtcatcattcaggcagcagg

SEQ ID NO: 3330482 - DNA, 25 bp, Homo sapien
gatagccgtcatcattcaggcagca

SEQ ID NO: 3330483 - DNA, 25 bp, Homo sapien
cagatagccgtcatcattcaggcag

SEQ ID NO: 3330484 - DNA, 25 bp, Homo sapien
ctccagatagccgtcatcattcagg

SEQ ID NO: 3330485 - DNA, 25 bp, Homo sapien
cgctgttgctgcagcttcagagtat

SEQ ID NO: 3330486 - DNA, 25 bp, Homo sapien
cgtagggaatcaacctgagcacagg

SEQ ID NO: 3330487 - DNA, 25 bp, Homo sapien
gccgctgttgctgcagcttcagagt

SEQ ID NO: 3330488 - DNA, 25 bp, Homo sapien
ataaccatgggaacgtagggaatca

SEQ ID NO: 3330489 - DNA, 25 bp, Homo sapien
tggcttggggaattaaagagtactc

SEQ ID NO: 3330490 - DNA, 25 bp, Homo sapien
gctggcttggggaattaaagagtac

SEQ ID NO: 3330491 - DNA, 25 bp, Homo sapien
ctggcttggggaattaaagagtact

SEQ ID NO: 3330492 - DNA, 25 bp, Homo sapien
taaacatcactgctgattattcgct

SEQ ID NO: 3330493 - DNA, 25 bp, Homo sapien
ctgctgattattcgctgtaggtggc

SEQ ID NO: 3330494 - DNA, 25 bp, Homo sapien
tcactgctgattattcgctgtaggt

SEQ ID NO: 3330495 - DNA, 25 bp, Homo sapien
catcactgctgattattcgctgtag

SEQ ID NO: 3330496 - DNA, 25 bp, Homo sapien
acgccaacagttctcattgttaatg

SEQ ID NO: 3330497 - DNA, 25 bp, Homo sapien
ccaaacgccaacagttctcattgtt

SEQ ID NO: 3330498 - DNA, 25 bp, Homo sapien
aaacgccaacagttctcattgttaa

SEQ ID NO: 3330499 - DNA, 25 bp, Homo sapien
cgccaacagttctcattgttaatgc

SEQ ID NO: 3330500 - DNA, 25 bp, Homo sapien
tgatttctgagttggaggatagaat

SEQ ID NO: 3330501 - DNA, 25 bp, Homo sapien
acttttgtagctggtccctattcat

SEQ ID NO: 3330502 - DNA, 25 bp, Homo sapien
tggttgatttctgagttggaggata

SEQ ID NO: 3330503 - DNA, 25 bp, Homo sapien
aacttttgtagctggtccctattca

SEQ ID NO: 3330504 - DNA, 25 bp, Homo sapien
tcagagatcagaagacacaaggttt

SEQ ID NO: 3330505 - DNA, 25 bp, Homo sapien
cagagatcagaagacacaaggtttt

SEQ ID NO: 3330506 - DNA, 25 bp, Homo sapien
ttcagagatcagaagacacaaggtt

SEQ ID NO: 3330507 - DNA, 25 bp, Homo sapien
cagttatcgattcttgataattcct

SEQ ID NO: 3330508 - DNA, 25 bp, Homo sapien
tctttgccgatatcccttgaatatg

SEQ ID NO: 3330509 - DNA, 25 bp, Homo sapien
gataattcctctttgccgatatccc

SEQ ID NO: 3330510 - DNA, 25 bp, Homo sapien
tgttgttgtccacaaacagttatcg

SEQ ID NO: 3330511 - DNA, 25 bp, Homo sapien
aacatttcctctggcatttgacgaa

SEQ ID NO: 3330512 - DNA, 25 bp, Homo sapien
tcattgtgctttaacatttcctctg

SEQ ID NO: 3330513 - DNA, 25 bp, Homo sapien
tttgacgaataaacgctattgacac

SEQ ID NO: 3330514 - DNA, 25 bp, Homo sapien
tctggcatttgacgaataaacgcta

SEQ ID NO: 3330515 - DNA, 25 bp, Homo sapien
tcccaagatcagagcgatgtaaacg

SEQ ID NO: 3330516 - DNA, 25 bp, Homo sapien
agatcagagcgatgtaaacgggcat

SEQ ID NO: 3330517 - DNA, 25 bp, Homo sapien
atgaatcccaagatcagagcgatgt

SEQ ID NO: 3330518 - DNA, 25 bp, Homo sapien
caagatcagagcgatgtaaacgggc

SEQ ID NO: 3330519 - DNA, 25 bp, Homo sapien
agacagtggcttcgccaccctagca

SEQ ID NO: 3330520 - DNA, 25 bp, Homo sapien
agtggcttcgccaccctagcaggtt

SEQ ID NO: 3330521 - DNA, 25 bp, Homo sapien
aaagacagtggcttcgccaccctag

SEQ ID NO: 3330522 - DNA, 25 bp, Homo sapien
acagtggcttcgccaccctagcagg

SEQ ID NO: 3330523 - DNA, 25 bp, Homo sapien
agtaatgccagcctgcctgcaaatc

SEQ ID NO: 3330524 - DNA, 25 bp, Homo sapien
gcataaatcgtagtaatagcaccgt

SEQ ID NO: 3330525 - DNA, 25 bp, Homo sapien
tagcaccgtttatttcagtaatgcc

SEQ ID NO: 3330526 - DNA, 25 bp, Homo sapien
atggtggtaattaaggactgtaaat

SEQ ID NO: 3330527 - DNA, 25 bp, Homo sapien
atcaatttcttttgactgtaaatta

SEQ ID NO: 3330528 - DNA, 25 bp, Homo sapien
ttcttttgactgtaaattatcctac

SEQ ID NO: 3330529 - DNA, 25 bp, Homo sapien
catgattgtccaatatcagtgtgct

SEQ ID NO: 3330530 - DNA, 25 bp, Homo sapien
caaaggaggcataatctgccatgta

SEQ ID NO: 3330531 - DNA, 25 bp, Homo sapien
gatcagtaacatgggagacaaagga

SEQ ID NO: 3330532 - DNA, 25 bp, Homo sapien
ctcagtggaattaaggaaggtatca

SEQ ID NO: 3330533 - DNA, 25 bp, Homo sapien
ctggactgaaataaatttgtcagac

SEQ ID NO: 3330534 - DNA, 25 bp, Homo sapien
tggactgaaataaatttgtcagaca

SEQ ID NO: 3330535 - DNA, 25 bp, Homo sapien
ggactgaaataaatttgtcagacat

SEQ ID NO: 3330536 - DNA, 25 bp, Homo sapien
ctgtggtcaagtccaaggctttcct

SEQ ID NO: 3330537 - DNA, 25 bp, Homo sapien
ctttcctgtctttctgtttatccat

SEQ ID NO: 3330538 - DNA, 25 bp, Homo sapien
aaggctttcctgtctttctgtttat

SEQ ID NO: 3330539 - DNA, 25 bp, Homo sapien
gctttcctgtctttctgtttatcca

SEQ ID NO: 3330540 - DNA, 25 bp, Homo sapien
ttctcatagctctgctgcatggtca

SEQ ID NO: 3330541 - DNA, 25 bp, Homo sapien
tgaaatgggcttaatggactgaggc

SEQ ID NO: 3330542 - DNA, 25 bp, Homo sapien
aaatgggcttaatggactgaggctt

SEQ ID NO: 3330543 - DNA, 25 bp, Homo sapien
aaatgaaatgggcttaatggactga

SEQ ID NO: 3330544 - DNA, 25 bp, Homo sapien
ctagttgatccttcacaccaccaaa

SEQ ID NO: 3330545 - DNA, 25 bp, Homo sapien
gctttattgctatagatttctagtt

SEQ ID NO: 3330546 - DNA, 25 bp, Homo sapien
gttgatccttcacaccaccaaagag

SEQ ID NO: 3330547 - DNA, 25 bp, Homo sapien
gatccttcacaccaccaaagagttc

SEQ ID NO: 3330548 - DNA, 25 bp, Homo sapien
cagagagccctatgaacatattaga

SEQ ID NO: 3330549 - DNA, 25 bp, Homo sapien
ttcttcttgattatcagagagccct

SEQ ID NO: 3330550 - DNA, 25 bp, Homo sapien
cttgattatcagagagccctatgaa

SEQ ID NO: 3330551 - DNA, 25 bp, Homo sapien
ttcttgattatcagagagccctatg

SEQ ID NO: 3330552 - DNA, 25 bp, Homo sapien
tgaatctccgggagctgtgaggctc

SEQ ID NO: 3330553 - DNA, 25 bp, Homo sapien
cctttgctctgtgatagttatgcct

SEQ ID NO: 3330554 - DNA, 25 bp, Homo sapien
gcttgatttccgaccctgtgtttgc

SEQ ID NO: 3330555 - DNA, 25 bp, Homo sapien
tctgtgatagttatgccttcttggc

SEQ ID NO: 3330556 - DNA, 25 bp, Homo sapien
tgctctgtggtgtcaaatgcatgag

SEQ ID NO: 3330557 - DNA, 25 bp, Homo sapien
gaatctttaaatgaaactgacactc

SEQ ID NO: 3330558 - DNA, 25 bp, Homo sapien
catgagatgaactcgtctttttctg

SEQ ID NO: 3330559 - DNA, 25 bp, Homo sapien
gtgaatctttaaatgaaactgacac

SEQ ID NO: 3330560 - DNA, 25 bp, Homo sapien
atgcttaatctggataatcttaatg

SEQ ID NO: 3330561 - DNA, 25 bp, Homo sapien
ggataatcttaatggctgctgttgc

SEQ ID NO: 3330562 - DNA, 25 bp, Homo sapien
catgcttaatctggataatcttaat

SEQ ID NO: 3330563 - DNA, 25 bp, Homo sapien
taatcttaatggctgctgttgccaa

SEQ ID NO: 3330564 - DNA, 25 bp, Homo sapien
cttgcgggattggttgagaacacaa

SEQ ID NO: 3330565 - DNA, 25 bp, Homo sapien
gaacacaacctcaggtagatgagca

SEQ ID NO: 3330566 - DNA, 25 bp, Homo sapien
tagatgagcagtctgtgcatagcgc

SEQ ID NO: 3330567 - DNA, 25 bp, Homo sapien
gcatagcgctgtgcacgggagacat

SEQ ID NO: 3330568 - DNA, 25 bp, Homo sapien
caaatacctctgagaccagccttat

SEQ ID NO: 3330569 - DNA, 25 bp, Homo sapien
cgttaacattagaaaccgcttccag

SEQ ID NO: 3330570 - DNA, 25 bp, Homo sapien
tagcctttgtatggtactatcatgg

SEQ ID NO: 3330571 - DNA, 25 bp, Homo sapien
gattgtctaccaaataaggcttcaa

SEQ ID NO: 3330572 - DNA, 25 bp, Homo sapien
cttgtcatgtaggtctgccttatct

SEQ ID NO: 3330573 - DNA, 25 bp, Homo sapien
ccttatctgctgctcttgatatttt

SEQ ID NO: 3330574 - DNA, 25 bp, Homo sapien
tcatgtaggtctgccttatctgctg

SEQ ID NO: 3330575 - DNA, 25 bp, Homo sapien
ttatctgctgctcttgatatttttc

SEQ ID NO: 3330576 - DNA, 25 bp, Homo sapien
aaccacctactgtgtcgtgcacatc

SEQ ID NO: 3330577 - DNA, 25 bp, Homo sapien
aactttattgtacaatctggaatat

SEQ ID NO: 3330578 - DNA, 25 bp, Homo sapien
tcaaccacctactgtgtcgtgcaca

SEQ ID NO: 3330579 - DNA, 25 bp, Homo sapien
cctactgtgtcgtgcacatctctgt

SEQ ID NO: 3330580 - DNA, 25 bp, Homo sapien
gatgtgtatctcatccacaggttcc

SEQ ID NO: 3330581 - DNA, 25 bp, Homo sapien
tctccaaatggaatggatcctgtcc

SEQ ID NO: 3330582 - DNA, 25 bp, Homo sapien
ctgccaggaaagtgtaagtgatctg

SEQ ID NO: 3330583 - DNA, 25 bp, Homo sapien
ctgtggaagtgaagtacgaaatgga

SEQ ID NO: 3330584 - DNA, 25 bp, Homo sapien
taacacatcttggtgacaaattggt

SEQ ID NO: 3330585 - DNA, 25 bp, Homo sapien
cataacacatcttggtgacaaattg

SEQ ID NO: 3330586 - DNA, 25 bp, Homo sapien
atgttggtattcataacacatcttg

SEQ ID NO: 3330587 - DNA, 25 bp, Homo sapien
cacatcttggtgacaaattggtgga

SEQ ID NO: 3330588 - DNA, 25 bp, Homo sapien
tttgaggctctgttggagcatgagg

SEQ ID NO: 3330589 - DNA, 25 bp, Homo sapien
gaggcgaagcaatttttgaggctct

SEQ ID NO: 3330590 - DNA, 25 bp, Homo sapien
atgatttcacgatgagggaggcgaa

SEQ ID NO: 3330591 - DNA, 25 bp, Homo sapien
ggcattaaatggtcagttccgatga

SEQ ID NO: 3330592 - DNA, 25 bp, Homo sapien
tgtcagtaggaatctacattcttgg

SEQ ID NO: 3330593 - DNA, 25 bp, Homo sapien
gtcagtaggaatctacattcttggg

SEQ ID NO: 3330594 - DNA, 25 bp, Homo sapien
gaagggttctgatcacctgcggcat

SEQ ID NO: 3330595 - DNA, 25 bp, Homo sapien
gcaagaagtgctattattctcaggg

SEQ ID NO: 3330596 - DNA, 25 bp, Homo sapien
gaatgggtacaactccctgaccagg

SEQ ID NO: 3330597 - DNA, 25 bp, Homo sapien
gaactgagttgtgaggtccagagct

SEQ ID NO: 3330598 - DNA, 25 bp, Homo sapien
ggccacagaatgtctgccacggtct

SEQ ID NO: 3330599 - DNA, 25 bp, Homo sapien
tctggccacagaatgtctgccacgg

SEQ ID NO: 3330600 - DNA, 25 bp, Homo sapien
attgtctggccacagaatgtctgcc

SEQ ID NO: 3330601 - DNA, 25 bp, Homo sapien
cccctttgatcaaaactttcctgat

SEQ ID NO: 3330602 - DNA, 25 bp, Homo sapien
cctctgcagagttatgctgcaggaa

SEQ ID NO: 3330603 - DNA, 25 bp, Homo sapien
ccatcctctgcagagttatgctgca

SEQ ID NO: 3330604 - DNA, 25 bp, Homo sapien
tattgtgttgacacatccatcctct

SEQ ID NO: 3330605 - DNA, 25 bp, Homo sapien
cgtgtatcaggtaggcaaatattgt

SEQ ID NO: 3330606 - DNA, 25 bp, Homo sapien
gggaagcttcccaatcttctctgtc

SEQ ID NO: 3330607 - DNA, 25 bp, Homo sapien
gggcctggatactctgtggagaggg

SEQ ID NO: 3330608 - DNA, 25 bp, Homo sapien
ccatgggaagcttcccaatcttctc

SEQ ID NO: 3330609 - DNA, 25 bp, Homo sapien
tctgtggagagggattgagtgatag

SEQ ID NO: 3330610 - DNA, 25 bp, Homo sapien
cttgaaacttaatcagcgcgctgcg

SEQ ID NO: 3330611 - DNA, 25 bp, Homo sapien
tgtcagtccgatgtattccccgtgg

SEQ ID NO: 3330612 - DNA, 25 bp, Homo sapien
gcaaattgaattccaggcagttgtc

SEQ ID NO: 3330613 - DNA, 25 bp, Homo sapien
cagtattagtaatgcagcagcttga

SEQ ID NO: 3330614 - DNA, 25 bp, Homo sapien
tcggaagtcttgaatacaaagttca

SEQ ID NO: 3330615 - DNA, 25 bp, Homo sapien
aattataggactgtaattaggattc

SEQ ID NO: 3330616 - DNA, 25 bp, Homo sapien
cgttgcatctgattgagagacttca

SEQ ID NO: 3330617 - DNA, 25 bp, Homo sapien
taattaggattcagacgaggatgac

SEQ ID NO: 3330618 - DNA, 25 bp, Homo sapien
cctggatagttgttctcagctctgc

SEQ ID NO: 3330619 - DNA, 25 bp, Homo sapien
tgctgtgcgatgatttaaacaacgc

SEQ ID NO: 3330620 - DNA, 25 bp, Homo sapien
gatgttggtgttcacaaataaggtc

SEQ ID NO: 3330621 - DNA, 25 bp, Homo sapien
taaacaacgctttgatgctgtagga

SEQ ID NO: 3330622 - DNA, 25 bp, Homo sapien
tactgctttttcaaagtcaattaac

SEQ ID NO: 3330623 - DNA, 25 bp, Homo sapien
atatactgctttttcaaagtcaatt

SEQ ID NO: 3330624 - DNA, 25 bp, Homo sapien
ctgaaaagataatatactgcttttt

SEQ ID NO: 3330625 - DNA, 25 bp, Homo sapien
actgctttttcaaagtcaattaaca

SEQ ID NO: 3330626 - DNA, 25 bp, Homo sapien
tgtactcataggtcagatctgcctc

SEQ ID NO: 3330627 - DNA, 25 bp, Homo sapien
tgggtgtcatccgaacttccacagg

SEQ ID NO: 3330628 - DNA, 25 bp, Homo sapien
gaatttttcgcttcactaagccttg

SEQ ID NO: 3330629 - DNA, 25 bp, Homo sapien
ggtcaaaactggcaatcgaataatt

SEQ ID NO: 3330630 - DNA, 25 bp, Homo sapien
tggctctctgcttcttgactagctt

SEQ ID NO: 3330631 - DNA, 25 bp, Homo sapien
gactagcttcatttactgcccattg

SEQ ID NO: 3330632 - DNA, 25 bp, Homo sapien
tggggatatttacccagagatctgt

SEQ ID NO: 3330633 - DNA, 25 bp, Homo sapien
tttactgcccattgaaattctaacc

SEQ ID NO: 3330634 - DNA, 25 bp, Homo sapien
tgccccgtcccattgtttatgtctt

SEQ ID NO: 3330635 - DNA, 25 bp, Homo sapien
tgtcctcctcatagtctgtcttctg

SEQ ID NO: 3330636 - DNA, 25 bp, Homo sapien
tgtcttctgtactgactggaggctt

SEQ ID NO: 3330637 - DNA, 25 bp, Homo sapien
gtactgactggaggcttccatttct

SEQ ID NO: 3330638 - DNA, 25 bp, Homo sapien
tggccacccctggttctgctttctg

SEQ ID NO: 3330639 - DNA, 25 bp, Homo sapien
tttctgagatagctcccttgaccat

SEQ ID NO: 3330640 - DNA, 25 bp, Homo sapien
tatggtccgttttggcccttctggc

SEQ ID NO: 3330641 - DNA, 25 bp, Homo sapien
cagtggagtatggtccgttttggcc

SEQ ID NO: 3330642 - DNA, 25 bp, Homo sapien
attctgtctttccttaacatatttg

SEQ ID NO: 3330643 - DNA, 25 bp, Homo sapien
ctgtctttccttaacatatttgaag

SEQ ID NO: 3330644 - DNA, 25 bp, Homo sapien
tttccttaacatatttgaagagtca

SEQ ID NO: 3330645 - DNA, 25 bp, Homo sapien
ctgcataattctgtctttccttaac

SEQ ID NO: 3330646 - DNA, 25 bp, Homo sapien
tacatgccactgtaaccagggtcac

SEQ ID NO: 3330647 - DNA, 25 bp, Homo sapien
gactgccatatggtgtcaagactga

SEQ ID NO: 3330648 - DNA, 25 bp, Homo sapien
cggtcagccaaagtgtttacaggtg

SEQ ID NO: 3330649 - DNA, 25 bp, Homo sapien
cagaaatcattcctcgcagatggct

SEQ ID NO: 3330650 - DNA, 25 bp, Homo sapien
caagcatgtgattctgagcaactgt

SEQ ID NO: 3330651 - DNA, 25 bp, Homo sapien
taccagcgtgtctctgtgcacagca

SEQ ID NO: 3330652 - DNA, 25 bp, Homo sapien
ttagcacagattccagccaagactg

SEQ ID NO: 3330653 - DNA, 25 bp, Homo sapien
aggcggctgctcattagttagcaca

SEQ ID NO: 3330654 - DNA, 25 bp, Homo sapien
cctgaaggtccaatttatacttcca

SEQ ID NO: 3330655 - DNA, 25 bp, Homo sapien
ctctttacaacataatcggtactcc

SEQ ID NO: 3330656 - DNA, 25 bp, Homo sapien
caaacctgaaggtccaatttatact

SEQ ID NO: 3330657 - DNA, 25 bp, Homo sapien
cttctctttacaacataatcggtac

SEQ ID NO: 3330658 - DNA, 25 bp, Homo sapien
aaaataaagccactaacctctcagg

SEQ ID NO: 3330659 - DNA, 25 bp, Homo sapien
gaatgaaaagctggcgtatcagaga

SEQ ID NO: 3330660 - DNA, 25 bp, Homo sapien
cattttagctctgggaaatagtaaa

SEQ ID NO: 3330661 - DNA, 25 bp, Homo sapien
cagtgcttaattgaactgtaccagc

SEQ ID NO: 3330662 - DNA, 25 bp, Homo sapien
caatgataattcgactaacctctga

SEQ ID NO: 3330663 - DNA, 25 bp, Homo sapien
caaacacaatgataattcgactaac

SEQ ID NO: 3330664 - DNA, 25 bp, Homo sapien
tctcaaacacaatgataattcgact

SEQ ID NO: 3330665 - DNA, 25 bp, Homo sapien
tgaaaactcattctccccatcgcca

SEQ ID NO: 3330666 - DNA, 25 bp, Homo sapien
ctgttcttgcatccctgaagtgaga

SEQ ID NO: 3330667 - DNA, 25 bp, Homo sapien
tcttgcatccctgaagtgagaatac

SEQ ID NO: 3330668 - DNA, 25 bp, Homo sapien
tgcatccctgaagtgagaatacatt

SEQ ID NO: 3330669 - DNA, 25 bp, Homo sapien
gttcttgcatccctgaagtgagaat

SEQ ID NO: 3330670 - DNA, 25 bp, Homo sapien
tactgattgtccttggctctgctgt

SEQ ID NO: 3330671 - DNA, 25 bp, Homo sapien
ctctttaggttcctctaaggagttg

SEQ ID NO: 3330672 - DNA, 25 bp, Homo sapien
cagcttggaccacacgacagagtaa

SEQ ID NO: 3330673 - DNA, 25 bp, Homo sapien
ctagggtactgattgtccttggctc

SEQ ID NO: 3330674 - DNA, 25 bp, Homo sapien
tgaaatcttggccaagtctgacaga

SEQ ID NO: 3330675 - DNA, 25 bp, Homo sapien
cagagattgtgaacagattcttcag

SEQ ID NO: 3330676 - DNA, 25 bp, Homo sapien
catggtaggtaactggtagaaatca

SEQ ID NO: 3330677 - DNA, 25 bp, Homo sapien
gtcaatgtagtcaagtaacacggca

SEQ ID NO: 3330678 - DNA, 25 bp, Homo sapien
tgcctttggctctatgaacgcacac

SEQ ID NO: 3330679 - DNA, 25 bp, Homo sapien
ccctgggacgttgattgcctttggc

SEQ ID NO: 3330680 - DNA, 25 bp, Homo sapien
gtatgcttgtgttgcattgatcaga

SEQ ID NO: 3330681 - DNA, 25 bp, Homo sapien
tctgtctacaattagagtaccctgg

SEQ ID NO: 3330682 - DNA, 25 bp, Homo sapien
ctcttcttggttggcattctcaagt

SEQ ID NO: 3330683 - DNA, 25 bp, Homo sapien
tcttggttggcattctcaagttttg

SEQ ID NO: 3330684 - DNA, 25 bp, Homo sapien
cttcttggttggcattctcaagttt

SEQ ID NO: 3330685 - DNA, 25 bp, Homo sapien
cttggttggcattctcaagttttgc

SEQ ID NO: 3330686 - DNA, 25 bp, Homo sapien
tggagaaggtacaaggacacttaga

SEQ ID NO: 3330687 - DNA, 25 bp, Homo sapien
tgaggtggatataaagttaccacat

SEQ ID NO: 3330688 - DNA, 25 bp, Homo sapien
tataaagttaccacatcatttggag

SEQ ID NO: 3330689 - DNA, 25 bp, Homo sapien
tttggagaaggtacaaggacactta

SEQ ID NO: 3330690 - DNA, 25 bp, Homo sapien
atttgtccttggactctgagaatac

SEQ ID NO: 3330691 - DNA, 25 bp, Homo sapien
aaatttgtccttggactctgagaat

SEQ ID NO: 3330692 - DNA, 25 bp, Homo sapien
ctaaaatttgtccttggactctgag

SEQ ID NO: 3330693 - DNA, 25 bp, Homo sapien
taaaatttgtccttggactctgaga

SEQ ID NO: 3330694 - DNA, 25 bp, Homo sapien
tatagcaagtcagccgtaagaacct

SEQ ID NO: 3330695 - DNA, 25 bp, Homo sapien
tcggtagagagcatcatcttcacgg

SEQ ID NO: 3330696 - DNA, 25 bp, Homo sapien
cactgttgtcccagcaaaactgtgc

SEQ ID NO: 3330697 - DNA, 25 bp, Homo sapien
ccttgtgccgatgtaattcggtaga

SEQ ID NO: 3330698 - DNA, 25 bp, Homo sapien
tctgaatgacaccacttggcaggag

SEQ ID NO: 3330699 - DNA, 25 bp, Homo sapien
ctgttcttctgaatgacaccacttg

SEQ ID NO: 3330700 - DNA, 25 bp, Homo sapien
ttctgaatgacaccacttggcagga

SEQ ID NO: 3330701 - DNA, 25 bp, Homo sapien
cattcttcctataacttattcttat

SEQ ID NO: 3330702 - DNA, 25 bp, Homo sapien
gatggcatttgagaaatagccattc

SEQ ID NO: 3330703 - DNA, 25 bp, Homo sapien
ggcatttgagaaatagccattcttc

SEQ ID NO: 3330704 - DNA, 25 bp, Homo sapien
catttgagaaatagccattcttcct

SEQ ID NO: 3330705 - DNA, 25 bp, Homo sapien
tagatcttcatggtcagtcacagcc

SEQ ID NO: 3330706 - DNA, 25 bp, Homo sapien
agtttccaacaacaagcacaatcgc

SEQ ID NO: 3330707 - DNA, 25 bp, Homo sapien
ttagcacccgaaaccactgcctaga

SEQ ID NO: 3330708 - DNA, 25 bp, Homo sapien
aagcacaatcgccagagcagccttg

SEQ ID NO: 3330709 - DNA, 25 bp, Homo sapien
tatctctccttcaggtaaatgagga

SEQ ID NO: 3330710 - DNA, 25 bp, Homo sapien
tcgttttcactgtttggtcacaagg

SEQ ID NO: 3330711 - DNA, 25 bp, Homo sapien
cagcctgctgcacttgttttaatgt

SEQ ID NO: 3330712 - DNA, 25 bp, Homo sapien
gacacagctcctggaatcacgtgca

SEQ ID NO: 3330713 - DNA, 25 bp, Homo sapien
ccaggataggtcatgtggctacatt

SEQ ID NO: 3330714 - DNA, 25 bp, Homo sapien
aggataggtcatgtggctacattta

SEQ ID NO: 3330715 - DNA, 25 bp, Homo sapien
tgtggctacatttaattgcaaagaa

SEQ ID NO: 3330716 - DNA, 25 bp, Homo sapien
gaccaggataggtcatgtggctaca

SEQ ID NO: 3330717 - DNA, 25 bp, Homo sapien
tatatcgcatggagtaactgtttgc

SEQ ID NO: 3330718 - DNA, 25 bp, Homo sapien
tagagttaatattgtctggaaggac

SEQ ID NO: 3330719 - DNA, 25 bp, Homo sapien
ctggaaggacattttggaggactga

SEQ ID NO: 3330720 - DNA, 25 bp, Homo sapien
aaaggaatagtctctctgtccactg

SEQ ID NO: 3330721 - DNA, 25 bp, Homo sapien
aagtgtgggttagctaggccattca

SEQ ID NO: 3330722 - DNA, 25 bp, Homo sapien
cattcaagggttgccctagttttga

SEQ ID NO: 3330723 - DNA, 25 bp, Homo sapien
gttttgaggaataccgaggactgtg

SEQ ID NO: 3330724 - DNA, 25 bp, Homo sapien
tgtgggttagctaggccattcaagg

SEQ ID NO: 3330725 - DNA, 25 bp, Homo sapien
cttactccatttttgataccctgaa

SEQ ID NO: 3330726 - DNA, 25 bp, Homo sapien
ccatttttgataccctgaaacaggt

SEQ ID NO: 3330727 - DNA, 25 bp, Homo sapien
tttgataccctgaaacaggtcccat

SEQ ID NO: 3330728 - DNA, 25 bp, Homo sapien
tactccatttttgataccctgaaac

SEQ ID NO: 3330729 - DNA, 25 bp, Homo sapien
agcatcatcccgatactatagcctg

SEQ ID NO: 3330730 - DNA, 25 bp, Homo sapien
atcatcccgatactatagcctggca

SEQ ID NO: 3330731 - DNA, 25 bp, Homo sapien
ggccagcatcatcccgatactatag

SEQ ID NO: 3330732 - DNA, 25 bp, Homo sapien
aggccagcatcatcccgatactata

SEQ ID NO: 3330733 - DNA, 25 bp, Homo sapien
ctcttctagacgacaaccacttttt

SEQ ID NO: 3330734 - DNA, 25 bp, Homo sapien
cggctcttctagacgacaaccactt

SEQ ID NO: 3330735 - DNA, 25 bp, Homo sapien
agcctccggctcttctagacgacaa

SEQ ID NO: 3330736 - DNA, 25 bp, Homo sapien
gcagcctccggctcttctagacgac

SEQ ID NO: 3330737 - DNA, 25 bp, Homo sapien
ttatccaactgccattttcaactgc

SEQ ID NO: 3330738 - DNA, 25 bp, Homo sapien
tccaactgccattttcaactgctat

SEQ ID NO: 3330739 - DNA, 25 bp, Homo sapien
aactgccattttcaactgctatcat

SEQ ID NO: 3330740 - DNA, 25 bp, Homo sapien
tatccaactgccattttcaactgct

SEQ ID NO: 3330741 - DNA, 25 bp, Homo sapien
tggcaataggagatcaagtaaacgt

SEQ ID NO: 3330742 - DNA, 25 bp, Homo sapien
taaccttggtgtgttttggcaatag

SEQ ID NO: 3330743 - DNA, 25 bp, Homo sapien
cacagacagaggtgtttatgagctg

SEQ ID NO: 3330744 - DNA, 25 bp, Homo sapien
tggtcaagtatacgtttcccttcaa

SEQ ID NO: 3330745 - DNA, 25 bp, Homo sapien
gtttgcctcatcatttatgggattc

SEQ ID NO: 3330746 - DNA, 25 bp, Homo sapien
tgcctcatcatttatgggattcctg

SEQ ID NO: 3330747 - DNA, 25 bp, Homo sapien
ttgcctcatcatttatgggattcct

SEQ ID NO: 3330748 - DNA, 25 bp, Homo sapien
tttgcctcatcatttatgggattcc

SEQ ID NO: 3330749 - DNA, 25 bp, Homo sapien
tcagttcttcatcagagggcattaa

SEQ ID NO: 3330750 - DNA, 25 bp, Homo sapien
gttcttcatcagagggcattaaacc

SEQ ID NO: 3330751 - DNA, 25 bp, Homo sapien
tacataacagttcagttcttcatca

SEQ ID NO: 3330752 - DNA, 25 bp, Homo sapien
ttttacataacagttcagttcttca

SEQ ID NO: 3330753 - DNA, 25 bp, Homo sapien
tttgcctaaccccttgagtctcctg

SEQ ID NO: 3330754 - DNA, 25 bp, Homo sapien
tatactgctgaactcgaaattccaa

SEQ ID NO: 3330755 - DNA, 25 bp, Homo sapien
ccttttcagagcctgtctatactgc

SEQ ID NO: 3330756 - DNA, 25 bp, Homo sapien
gaaagttccgctctgctatatgttt

SEQ ID NO: 3330757 - DNA, 25 bp, Homo sapien
cattctccaccaataaattctttcc

SEQ ID NO: 3330758 - DNA, 25 bp, Homo sapien
atttcctgttggtaatctgagtcct

SEQ ID NO: 3330759 - DNA, 25 bp, Homo sapien
ctaaactctttgccctgcctttgtg

SEQ ID NO: 3330760 - DNA, 25 bp, Homo sapien
taaactctttgccctgcctttgtgt

SEQ ID NO: 3330761 - DNA, 25 bp, Homo sapien
aagatatagccaccataggaccctg

SEQ ID NO: 3330762 - DNA, 25 bp, Homo sapien
tcaagatatagccaccataggaccc

SEQ ID NO: 3330763 - DNA, 25 bp, Homo sapien
caagatatagccaccataggaccct

SEQ ID NO: 3330764 - DNA, 25 bp, Homo sapien
tttcaagatatagccaccataggac

SEQ ID NO: 3330765 - DNA, 25 bp, Homo sapien
ctggaagtttgctgttcctggataa

SEQ ID NO: 3330766 - DNA, 25 bp, Homo sapien
catctgcacatgaaaccttaactct

SEQ ID NO: 3330767 - DNA, 25 bp, Homo sapien
caagataggtaaatgcatgacgcag

SEQ ID NO: 3330768 - DNA, 25 bp, Homo sapien
tctgatctcaagaagcacacaattg

SEQ ID NO: 3330769 - DNA, 25 bp, Homo sapien
tagagcttccgccagaaagttgtac

SEQ ID NO: 3330770 - DNA, 25 bp, Homo sapien
ccagaaagttgtactcaggagtgat

SEQ ID NO: 3330771 - DNA, 25 bp, Homo sapien
cctggaaggttagatcaaaagcatc

SEQ ID NO: 3330772 - DNA, 25 bp, Homo sapien
atcccctgcctggaaggttagatca

SEQ ID NO: 3330773 - DNA, 25 bp, Homo sapien
gcttggctgggctagacataattac

SEQ ID NO: 3330774 - DNA, 25 bp, Homo sapien
ggctgggctagacataattactttt

SEQ ID NO: 3330775 - DNA, 25 bp, Homo sapien
tatcataggcttggctgggctagac

SEQ ID NO: 3330776 - DNA, 25 bp, Homo sapien
agctgttatcataggcttggctggg

SEQ ID NO: 3330777 - DNA, 25 bp, Homo sapien
ttaagctctttatcacacttatccc

SEQ ID NO: 3330778 - DNA, 25 bp, Homo sapien
tttttaagctctttatcacacttat

SEQ ID NO: 3330779 - DNA, 25 bp, Homo sapien
tttaagctctttatcacacttatcc

SEQ ID NO: 3330780 - DNA, 25 bp, Homo sapien
taagctctttatcacacttatccct

SEQ ID NO: 3330781 - DNA, 25 bp, Homo sapien
ttgaaaggcatttgatcctatcaca

SEQ ID NO: 3330782 - DNA, 25 bp, Homo sapien
aggcatttgatcctatcacagtgac

SEQ ID NO: 3330783 - DNA, 25 bp, Homo sapien
aaggcatttgatcctatcacagtga

SEQ ID NO: 3330784 - DNA, 25 bp, Homo sapien
gaaaggcatttgatcctatcacagt

SEQ ID NO: 3330785 - DNA, 25 bp, Homo sapien
ccccatgacgggcctcggtgtgtga

SEQ ID NO: 3330786 - DNA, 25 bp, Homo sapien
ctcccccaccccatgacgggcctcg

SEQ ID NO: 3330787 - DNA, 25 bp, Homo sapien
caccccatgacgggcctcggtgtgt

SEQ ID NO: 3330788 - DNA, 25 bp, Homo sapien
ccccaccccatgacgggcctcggtg

SEQ ID NO: 3330789 - DNA, 25 bp, Homo sapien
tttctgcaggatatttaaccaagtt

SEQ ID NO: 3330790 - DNA, 25 bp, Homo sapien
taaatatcataggttagaggacaca

SEQ ID NO: 3330791 - DNA, 25 bp, Homo sapien
gaatagagttaatgccccaggtatg

SEQ ID NO: 3330792 - DNA, 25 bp, Homo sapien
caatgcaatgttatgctccagaagt

SEQ ID NO: 3330793 - DNA, 25 bp, Homo sapien
gaagttcaagatgccagtcatcttc

SEQ ID NO: 3330794 - DNA, 25 bp, Homo sapien
ggttaataaccagataaggtgtcac

SEQ ID NO: 3330795 - DNA, 25 bp, Homo sapien
aattatgccaaagcagctttggtta

SEQ ID NO: 3330796 - DNA, 25 bp, Homo sapien
ttcttggagaatgtcagccatatcc

SEQ ID NO: 3330797 - DNA, 25 bp, Homo sapien
gagagcacctctgggattcactata

SEQ ID NO: 3330798 - DNA, 25 bp, Homo sapien
tgtaccacgggtcagaaaagaaggc

SEQ ID NO: 3330799 - DNA, 25 bp, Homo sapien
ccagattggtaacagctcggcattt

SEQ ID NO: 3330800 - DNA, 25 bp, Homo sapien
caaagaacaattcgcctatcgggcc

SEQ ID NO: 3330801 - DNA, 25 bp, Homo sapien
tgtcttccaagtcagcaacagaaag

SEQ ID NO: 3330802 - DNA, 25 bp, Homo sapien
tttccgccttttagaagctgcccac

SEQ ID NO: 3330803 - DNA, 25 bp, Homo sapien
gaaagtcgtcattcacacactgatg

SEQ ID NO: 3330804 - DNA, 25 bp, Homo sapien
ggctcatgacccaattcctctgtct

SEQ ID NO: 3330805 - DNA, 25 bp, Homo sapien
tgcaacttcagaggcattaacactt

SEQ ID NO: 3330806 - DNA, 25 bp, Homo sapien
agtcttagatttgtgcctctcagtc

SEQ ID NO: 3330807 - DNA, 25 bp, Homo sapien
cagtctctgcacttgtgaaacttgc

SEQ ID NO: 3330808 - DNA, 25 bp, Homo sapien
catgcaggtttgacctagtcttaga

SEQ ID NO: 3330809 - DNA, 25 bp, Homo sapien
tatcatgggacttcaactctcaagg

SEQ ID NO: 3330810 - DNA, 25 bp, Homo sapien
tgtttcctctgagccaacagcatga

SEQ ID NO: 3330811 - DNA, 25 bp, Homo sapien
gattgggtatgcgtttctcagcctg

SEQ ID NO: 3330812 - DNA, 25 bp, Homo sapien
catatcatatgaaagatgcccagag

SEQ ID NO: 3330813 - DNA, 25 bp, Homo sapien
attttgcctgccctctcggttacat

SEQ ID NO: 3330814 - DNA, 25 bp, Homo sapien
catcttaacatccctctgactttca

SEQ ID NO: 3330815 - DNA, 25 bp, Homo sapien
cagtcacgatactgacactcatttt

SEQ ID NO: 3330816 - DNA, 25 bp, Homo sapien
cccagtcacgatactgacactcatt

SEQ ID NO: 3330817 - DNA, 25 bp, Homo sapien
tttaatcctcccacttctaagacca

SEQ ID NO: 3330818 - DNA, 25 bp, Homo sapien
ttaatcctcccacttctaagaccat

SEQ ID NO: 3330819 - DNA, 25 bp, Homo sapien
actgctgctggtcagtcacacaatt

SEQ ID NO: 3330820 - DNA, 25 bp, Homo sapien
gccactgctgctggtcagtcacaca

SEQ ID NO: 3330821 - DNA, 25 bp, Homo sapien
agccactgctgctggtcagtcacac

SEQ ID NO: 3330822 - DNA, 25 bp, Homo sapien
gctgctggtcagtcacacaattttt

SEQ ID NO: 3330823 - DNA, 25 bp, Homo sapien
tgccttgtccttagaatctgagttc

SEQ ID NO: 3330824 - DNA, 25 bp, Homo sapien
ccgctaagtgaggattcagttttgg

SEQ ID NO: 3330825 - DNA, 25 bp, Homo sapien
tgttcccctccgctaagtgaggatt

SEQ ID NO: 3330826 - DNA, 25 bp, Homo sapien
tagcttctgccctatacctaatgga

SEQ ID NO: 3330827 - DNA, 25 bp, Homo sapien
gtcagcttgtaaccgacacccagct

SEQ ID NO: 3330828 - DNA, 25 bp, Homo sapien
ccttcctgccgttttttacagtcag

SEQ ID NO: 3330829 - DNA, 25 bp, Homo sapien
tccagcatgtggtcaaaaaaggcaa

SEQ ID NO: 3330830 - DNA, 25 bp, Homo sapien
ttacagtcagcttgtaaccgacacc

SEQ ID NO: 3330831 - DNA, 25 bp, Homo sapien
aagttcacttcaacactgtccagat

SEQ ID NO: 3330832 - DNA, 25 bp, Homo sapien
cttcattgtctcaggctacgattca

SEQ ID NO: 3330833 - DNA, 25 bp, Homo sapien
tcaggctacgattcaacaaaattta

SEQ ID NO: 3330834 - DNA, 25 bp, Homo sapien
taaattaccccttcattgtctcagg

SEQ ID NO: 3330835 - DNA, 25 bp, Homo sapien
gtgctaggttcaggcttccaatatt

SEQ ID NO: 3330836 - DNA, 25 bp, Homo sapien
ccagtagcagacagtgctaggttca

SEQ ID NO: 3330837 - DNA, 25 bp, Homo sapien
aagacgtcaggccagtagcagacag

SEQ ID NO: 3330838 - DNA, 25 bp, Homo sapien
tatgctttccacagagttggcttcc

SEQ ID NO: 3330839 - DNA, 25 bp, Homo sapien
actgagtttggaggtcctcattctt

SEQ ID NO: 3330840 - DNA, 25 bp, Homo sapien
ccaattgtttcagcagaaaatcact

SEQ ID NO: 3330841 - DNA, 25 bp, Homo sapien
ggttttgcatataatcacactctgt

SEQ ID NO: 3330842 - DNA, 25 bp, Homo sapien
attgtttcagcagaaaatcactctg

SEQ ID NO: 3330843 - DNA, 25 bp, Homo sapien
caaggtgccattcatgctgtcatca

SEQ ID NO: 3330844 - DNA, 25 bp, Homo sapien
tactgctacatttgtcaaggtgcca

SEQ ID NO: 3330845 - DNA, 25 bp, Homo sapien
tcagtactgttgatccagcaccagt

SEQ ID NO: 3330846 - DNA, 25 bp, Homo sapien
agcaccagtgctaattctacttctg

SEQ ID NO: 3330847 - DNA, 25 bp, Homo sapien
ctgtaagccatgacacaggggtccc

SEQ ID NO: 3330848 - DNA, 25 bp, Homo sapien
gtaagccatgacacaggggtcccca

SEQ ID NO: 3330849 - DNA, 25 bp, Homo sapien
tgtaagccatgacacaggggtcccc

SEQ ID NO: 3330850 - DNA, 25 bp, Homo sapien
aaatcatatagtggatattggcaaa

SEQ ID NO: 3330851 - DNA, 25 bp, Homo sapien
ataaaaatcatatagtggatattgg

SEQ ID NO: 3330852 - DNA, 25 bp, Homo sapien
aaaaatcatatagtggatattggca

SEQ ID NO: 3330853 - DNA, 25 bp, Homo sapien
gatattggcaaatggtaatcttcat

SEQ ID NO: 3330854 - DNA, 25 bp, Homo sapien
tttgctagatctttggcaggtaatc

SEQ ID NO: 3330855 - DNA, 25 bp, Homo sapien
tcttgatcagatgtttgctagatct

SEQ ID NO: 3330856 - DNA, 25 bp, Homo sapien
tgctagatctttggcaggtaatcat

SEQ ID NO: 3330857 - DNA, 25 bp, Homo sapien
tggcttctactattcttgatcagat

SEQ ID NO: 3330858 - DNA, 25 bp, Homo sapien
tgagtctgacttttgcattccggat

SEQ ID NO: 3330859 - DNA, 25 bp, Homo sapien
cattctcggaagcttgagtctgact

SEQ ID NO: 3330860 - DNA, 25 bp, Homo sapien
cggattcacttgactgtgaatcaca

SEQ ID NO: 3330861 - DNA, 25 bp, Homo sapien
ctagactcattctcggaagcttgag

SEQ ID NO: 3330862 - DNA, 25 bp, Homo sapien
ttctagcttgataatctctgcttat

SEQ ID NO: 3330863 - DNA, 25 bp, Homo sapien
cttgataatctctgcttatcagttt

SEQ ID NO: 3330864 - DNA, 25 bp, Homo sapien
gcttgataatctctgcttatcagtt

SEQ ID NO: 3330865 - DNA, 25 bp, Homo sapien
agcttgataatctctgcttatcagt

SEQ ID NO: 3330866 - DNA, 25 bp, Homo sapien
caggctgttagtttcctgagaggga

SEQ ID NO: 3330867 - DNA, 25 bp, Homo sapien
ctctctttgtggcttgggcttcata

SEQ ID NO: 3330868 - DNA, 25 bp, Homo sapien
tctctttgtggcttgggcttcatag

SEQ ID NO: 3330869 - DNA, 25 bp, Homo sapien
ttgggcttcatagcaggctgttagt

SEQ ID NO: 3330870 - DNA, 25 bp, Homo sapien
tcattcaaggcaagagatccctgca

SEQ ID NO: 3330871 - DNA, 25 bp, Homo sapien
ctcattcaaggcaagagatccctgc

SEQ ID NO: 3330872 - DNA, 25 bp, Homo sapien
actcattcaaggcaagagatccctg

SEQ ID NO: 3330873 - DNA, 25 bp, Homo sapien
cattcaaggcaagagatccctgcat

SEQ ID NO: 3330874 - DNA, 25 bp, Homo sapien
cctgatcagttccacctccacaccc

SEQ ID NO: 3330875 - DNA, 25 bp, Homo sapien
ctgatcagttccacctccacaccca

SEQ ID NO: 3330876 - DNA, 25 bp, Homo sapien
tgatcagttccacctccacacccat

SEQ ID NO: 3330877 - DNA, 25 bp, Homo sapien
gagactacgttaaatcaggttaaca

SEQ ID NO: 3330878 - DNA, 25 bp, Homo sapien
agcatggttgttgggggagactacg

SEQ ID NO: 3330879 - DNA, 25 bp, Homo sapien
tgttgggggagactacgttaaatca

SEQ ID NO: 3330880 - DNA, 25 bp, Homo sapien
tcaggttaacaataacccaaagtgc

SEQ ID NO: 3330881 - DNA, 25 bp, Homo sapien
ctttggggtccacttcaaatgccgt

SEQ ID NO: 3330882 - DNA, 25 bp, Homo sapien
caaatgccgttaactctattagaac

SEQ ID NO: 3330883 - DNA, 25 bp, Homo sapien
ggtccacttcaaatgccgttaactc

SEQ ID NO: 3330884 - DNA, 25 bp, Homo sapien
cttcaaatgccgttaactctattag

SEQ ID NO: 3330885 - DNA, 25 bp, Homo sapien
atctttattacctgtgagcttgtgt

SEQ ID NO: 3330886 - DNA, 25 bp, Homo sapien
taagcacaacttgcaaatgtaagca

SEQ ID NO: 3330887 - DNA, 25 bp, Homo sapien
ctaagcacaacttgcaaatgtaagc

SEQ ID NO: 3330888 - DNA, 25 bp, Homo sapien
tgtattggttatgtaggcttttccc

SEQ ID NO: 3330889 - DNA, 25 bp, Homo sapien
tcctttaaccatgagtcactaagag

SEQ ID NO: 3330890 - DNA, 25 bp, Homo sapien
aaatctgtattggttatgtaggctt

SEQ ID NO: 3330891 - DNA, 25 bp, Homo sapien
tccctgagttcctttaaccatgagt

SEQ ID NO: 3330892 - DNA, 25 bp, Homo sapien
tggcaaactcccttccatgcatgat

SEQ ID NO: 3330893 - DNA, 25 bp, Homo sapien
taacggtggttctgtatggcaaact

SEQ ID NO: 3330894 - DNA, 25 bp, Homo sapien
ggtggttctgtatggcaaactccct

SEQ ID NO: 3330895 - DNA, 25 bp, Homo sapien
tgcaataacggtggttctgtatggc

SEQ ID NO: 3330896 - DNA, 25 bp, Homo sapien
ctgtcaccgcaaaattttctgtatt

SEQ ID NO: 3330897 - DNA, 25 bp, Homo sapien
catctacctgcgcaatggggaccag

SEQ ID NO: 3330898 - DNA, 25 bp, Homo sapien
taccatctacctgcgcaatggggac

SEQ ID NO: 3330899 - DNA, 25 bp, Homo sapien
ctaccatctacctgcgcaatgggga

SEQ ID NO: 3330900 - DNA, 25 bp, Homo sapien
cactaccatctacctgcgcaatggg

SEQ ID NO: 3330901 - DNA, 25 bp, Homo sapien
ttaaaaggggttgctagtatcagac

SEQ ID NO: 3330902 - DNA, 25 bp, Homo sapien
gggttgctagtatcagactcataaa

SEQ ID NO: 3330903 - DNA, 25 bp, Homo sapien
aaaggggttgctagtatcagactca

SEQ ID NO: 3330904 - DNA, 25 bp, Homo sapien
ttgctagtatcagactcataaaggg

SEQ ID NO: 3330905 - DNA, 25 bp, Homo sapien
ctagaaggctagcgagtagggcttc

SEQ ID NO: 3330906 - DNA, 25 bp, Homo sapien
aggctagcgagtagggcttcagaaa

SEQ ID NO: 3330907 - DNA, 25 bp, Homo sapien
gaaggctagcgagtagggcttcaga

SEQ ID NO: 3330908 - DNA, 25 bp, Homo sapien
cagaaagggacccttgggagatctt

SEQ ID NO: 3330909 - DNA, 25 bp, Homo sapien
aatttctttcttttccttctgtgca

SEQ ID NO: 3330910 - DNA, 25 bp, Homo sapien
atttctttcttttccttctgtgcac

SEQ ID NO: 3330911 - DNA, 25 bp, Homo sapien
gaatgtgcaagtcgcttaggtgagc

SEQ ID NO: 3330912 - DNA, 25 bp, Homo sapien
caagattttctttgacgccttatga

SEQ ID NO: 3330913 - DNA, 25 bp, Homo sapien
gagtcagcaacattagaatgtgcaa

SEQ ID NO: 3330914 - DNA, 25 bp, Homo sapien
tgagctggaggaatgcataacctgg

SEQ ID NO: 3330915 - DNA, 25 bp, Homo sapien
tacaatgagcttgctgcatttagag

SEQ ID NO: 3330916 - DNA, 25 bp, Homo sapien
caggagccgaaagcataagacccat

SEQ ID NO: 3330917 - DNA, 25 bp, Homo sapien
tgacaatagaaccagaatgaaccct

SEQ ID NO: 3330918 - DNA, 25 bp, Homo sapien
attccactgactatagcaagtctca

SEQ ID NO: 3330919 - DNA, 25 bp, Homo sapien
agcgcagcaagccacaggacaggag

SEQ ID NO: 3330920 - DNA, 25 bp, Homo sapien
tttccattagtttgagagtctatat

SEQ ID NO: 3330921 - DNA, 25 bp, Homo sapien
ggccttaatgggaagcttctctttg

SEQ ID NO: 3330922 - DNA, 25 bp, Homo sapien
ccatatactttgtaggaatgtttcc

SEQ ID NO: 3330923 - DNA, 25 bp, Homo sapien
ttttttagcagtaaaactgccgtga

SEQ ID NO: 3330924 - DNA, 25 bp, Homo sapien
tataagagatcatccaaggctgcaa

SEQ ID NO: 3330925 - DNA, 25 bp, Homo sapien
ggctgcaatgaacacctttacaagc

SEQ ID NO: 3330926 - DNA, 25 bp, Homo sapien
ctgattccgcagaaatataagagat

SEQ ID NO: 3330927 - DNA, 25 bp, Homo sapien
ccgtgatcggagcagaattaaatga

SEQ ID NO: 3330928 - DNA, 25 bp, Homo sapien
acaaatagcgctgagataattggct

SEQ ID NO: 3330929 - DNA, 25 bp, Homo sapien
atagcgctgagataattggctagcc

SEQ ID NO: 3330930 - DNA, 25 bp, Homo sapien
aaaattcctttagacattggcttag

SEQ ID NO: 3330931 - DNA, 25 bp, Homo sapien
cccttttcaacaaatagcgctgaga

SEQ ID NO: 3330932 - DNA, 25 bp, Homo sapien
catggtaccttcctctagtctggaa

SEQ ID NO: 3330933 - DNA, 25 bp, Homo sapien
gggtcacaatttgcaggaaggcctg

SEQ ID NO: 3330934 - DNA, 25 bp, Homo sapien
ctgaattcttaaccagcttttttca

SEQ ID NO: 3330935 - DNA, 25 bp, Homo sapien
caagtccccgcttaagtattccctg

SEQ ID NO: 3330936 - DNA, 25 bp, Homo sapien
agttccagtgtccactataagtctc

SEQ ID NO: 3330937 - DNA, 25 bp, Homo sapien
cagtgtccactataagtctccccca

SEQ ID NO: 3330938 - DNA, 25 bp, Homo sapien
ttccagtgtccactataagtctccc

SEQ ID NO: 3330939 - DNA, 25 bp, Homo sapien
gtgtccactataagtctcccccaga

SEQ ID NO: 3330940 - DNA, 25 bp, Homo sapien
tccagtcagacttcgctttgtttat

SEQ ID NO: 3330941 - DNA, 25 bp, Homo sapien
ttccagtcagacttcgctttgttta

SEQ ID NO: 3330942 - DNA, 25 bp, Homo sapien
tgtaacacaaatcctacacacatct

SEQ ID NO: 3330943 - DNA, 25 bp, Homo sapien
tcagatcccactcttttccatttgt

SEQ ID NO: 3330944 - DNA, 25 bp, Homo sapien
gcaattatatttaagacaatcttca

SEQ ID NO: 3330945 - DNA, 25 bp, Homo sapien
tgagagaatcttctgtagctctggc

SEQ ID NO: 3330946 - DNA, 25 bp, Homo sapien
tgctttcaacaccatcaacttgata

SEQ ID NO: 3330947 - DNA, 25 bp, Homo sapien
caacaccatcaacttgataattctt

SEQ ID NO: 3330948 - DNA, 25 bp, Homo sapien
tattcacctttagttcttctgtggt

SEQ ID NO: 3330949 - DNA, 25 bp, Homo sapien
atgctattcacctttagttcttctg

SEQ ID NO: 3330950 - DNA, 25 bp, Homo sapien
atcagtctttgtgagagataacacc

SEQ ID NO: 3330951 - DNA, 25 bp, Homo sapien
tgtgagagataacacctctacctgt

SEQ ID NO: 3330952 - DNA, 25 bp, Homo sapien
tctttgtgagagataacacctctac

SEQ ID NO: 3330953 - DNA, 25 bp, Homo sapien
tgagagataacacctctacctgtgc

SEQ ID NO: 3330954 - DNA, 25 bp, Homo sapien
tacgcaggggtattcattactccac

SEQ ID NO: 3330955 - DNA, 25 bp, Homo sapien
gcactttgcacaaaacgaccaaact

SEQ ID NO: 3330956 - DNA, 25 bp, Homo sapien
tactccaccaaaatagatctgatat

SEQ ID NO: 3330957 - DNA, 25 bp, Homo sapien
ttcaaagacaacatacgcaggggta

SEQ ID NO: 3330958 - DNA, 25 bp, Homo sapien
ggaactctcacgtccagcttcatca

SEQ ID NO: 3330959 - DNA, 25 bp, Homo sapien
cctggaggggagatctttttccaat

SEQ ID NO: 3330960 - DNA, 25 bp, Homo sapien
ttccgtttgcagctgtactgagact

SEQ ID NO: 3330961 - DNA, 25 bp, Homo sapien
catcaccactggcaggcctggaggg

SEQ ID NO: 3330962 - DNA, 25 bp, Homo sapien
tggtctgttgagctgactgacttta

SEQ ID NO: 3330963 - DNA, 25 bp, Homo sapien
ttgagctgactgactttaaaccttg

SEQ ID NO: 3330964 - DNA, 25 bp, Homo sapien
gctgactgactttaaaccttgaaga

SEQ ID NO: 3330965 - DNA, 25 bp, Homo sapien
ctgactttaaaccttgaagacttat

SEQ ID NO: 3330966 - DNA, 25 bp, Homo sapien
actgtgcctggccggtagtttgttt

SEQ ID NO: 3330967 - DNA, 25 bp, Homo sapien
ccactgtgcctggccggtagtttgt

SEQ ID NO: 3330968 - DNA, 25 bp, Homo sapien
agccactgtgcctggccggtagttt

SEQ ID NO: 3330969 - DNA, 25 bp, Homo sapien
tgtgcctggccggtagtttgttttc

SEQ ID NO: 3330970 - DNA, 25 bp, Homo sapien
tggattggaagcttcataaacccct

SEQ ID NO: 3330971 - DNA, 25 bp, Homo sapien
cactgtgacctgaaactaccaactt

SEQ ID NO: 3330972 - DNA, 25 bp, Homo sapien
tccagctgcacttttaatgcctgtg

SEQ ID NO: 3330973 - DNA, 25 bp, Homo sapien
caaagatgatggttgtgtctctgaa

SEQ ID NO: 3330974 - DNA, 25 bp, Homo sapien
gaccttctgtcagagcaggtattga

SEQ ID NO: 3330975 - DNA, 25 bp, Homo sapien
tttgcctttattcagagacatgggt

SEQ ID NO: 3330976 - DNA, 25 bp, Homo sapien
tattgtaccggagatgctcagctgg

SEQ ID NO: 3330977 - DNA, 25 bp, Homo sapien
tgtttcacagattggccatccagga

SEQ ID NO: 3330978 - DNA, 25 bp, Homo sapien
tatgttgtgtacaatgagtactcaa

SEQ ID NO: 3330979 - DNA, 25 bp, Homo sapien
cttgtctacaaaagagtaagaaact

SEQ ID NO: 3330980 - DNA, 25 bp, Homo sapien
tgcccagccaactatgaccactttt

SEQ ID NO: 3330981 - DNA, 25 bp, Homo sapien
caataaatgttattcattgcctctt

SEQ ID NO: 3330982 - DNA, 25 bp, Homo sapien
acagcagtcgtttctgatataaaaa

SEQ ID NO: 3330983 - DNA, 25 bp, Homo sapien
tacagcagtcgtttctgatataaaa

SEQ ID NO: 3330984 - DNA, 25 bp, Homo sapien
ttacagcagtcgtttctgatataaa

SEQ ID NO: 3330985 - DNA, 25 bp, Homo sapien
taaattcccaaggatgagcttccat

SEQ ID NO: 3330986 - DNA, 25 bp, Homo sapien
ataaattcccaaggatgagcttcca

SEQ ID NO: 3330987 - DNA, 25 bp, Homo sapien
ctttatccaatcagggagtttctcg

SEQ ID NO: 3330988 - DNA, 25 bp, Homo sapien
ctttaaagggcaggagcgcactgat

SEQ ID NO: 3330989 - DNA, 25 bp, Homo sapien
atattataacccttacacttccgtg

SEQ ID NO: 3330990 - DNA, 25 bp, Homo sapien
cacttccgtgtaacatttttgctgt

SEQ ID NO: 3330991 - DNA, 25 bp, Homo sapien
agttggatattgtcactggaatcac

SEQ ID NO: 3330992 - DNA, 25 bp, Homo sapien
ctggaatcactgtcatagtctggtg

SEQ ID NO: 3330993 - DNA, 25 bp, Homo sapien
ttatcactggagtggccactgtgca

SEQ ID NO: 3330994 - DNA, 25 bp, Homo sapien
ctttgtcacagtatagttggatatt

SEQ ID NO: 3330995 - DNA, 25 bp, Homo sapien
tctcttgtcaacgtagggctcttca

SEQ ID NO: 3330996 - DNA, 25 bp, Homo sapien
atgatagcacttgaactaaaggaga

SEQ ID NO: 3330997 - DNA, 25 bp, Homo sapien
tttctagcctagcaggacacattgc

SEQ ID NO: 3330998 - DNA, 25 bp, Homo sapien
acacattgcatcaaccacggcaaca

SEQ ID NO: 3330999 - DNA, 25 bp, Homo sapien
ttttgtcaactgttttagttgccag

SEQ ID NO: 3331000 - DNA, 25 bp, Homo sapien
cactgcctctctggtagcacagctg

SEQ ID NO: 3331001 - DNA, 25 bp, Homo sapien
tagttgccagatttgaggaagcaca

SEQ ID NO: 3331002 - DNA, 25 bp, Homo sapien
cttcactgcctctctggtagcacag

SEQ ID NO: 3331003 - DNA, 25 bp, Homo sapien
agcaggacgaattcagtgctgtaac

SEQ ID NO: 3331004 - DNA, 25 bp, Homo sapien
gcagcaggacgaattcagtgctgta

SEQ ID NO: 3331005 - DNA, 25 bp, Homo sapien
caggacgaattcagtgctgtaacca

SEQ ID NO: 3331006 - DNA, 25 bp, Homo sapien
ggcagcaggacgaattcagtgctgt

SEQ ID NO: 3331007 - DNA, 25 bp, Homo sapien
gttcccaatgggagatcagatgtcc

SEQ ID NO: 3331008 - DNA, 25 bp, Homo sapien
gcccctgagtcctttgagagttccc

SEQ ID NO: 3331009 - DNA, 25 bp, Homo sapien
aagacataggagtttgaagatcgac

SEQ ID NO: 3331010 - DNA, 25 bp, Homo sapien
gatcgacttatcgaaagattcaagg

SEQ ID NO: 3331011 - DNA, 25 bp, Homo sapien
cttgatcatgagcattgtctgacag

SEQ ID NO: 3331012 - DNA, 25 bp, Homo sapien
aactgttggtcaagagaaggtgaac

SEQ ID NO: 3331013 - DNA, 25 bp, Homo sapien
gatcatgagcattgtctgacagtag

SEQ ID NO: 3331014 - DNA, 25 bp, Homo sapien
ctgacagtagtcatcagtccaactg

SEQ ID NO: 3331015 - DNA, 25 bp, Homo sapien
gacaaggagacttcagtcaagactc

SEQ ID NO: 3331016 - DNA, 25 bp, Homo sapien
gtcaagactcttgcaatatggatca

SEQ ID NO: 3331017 - DNA, 25 bp, Homo sapien
taacggaaaactattagcaaaggca

SEQ ID NO: 3331018 - DNA, 25 bp, Homo sapien
tagcaaagaaattggtcgaagtgac

SEQ ID NO: 3331019 - DNA, 25 bp, Homo sapien
ttcccttcttgctcatcctttctcc

SEQ ID NO: 3331020 - DNA, 25 bp, Homo sapien
tccttcccttcttgctcatcctttc

SEQ ID NO: 3331021 - DNA, 25 bp, Homo sapien
cttcatccttcccttcttgctcatc

SEQ ID NO: 3331022 - DNA, 25 bp, Homo sapien
tcatccttcccttcttgctcatcct

SEQ ID NO: 3331023 - DNA, 25 bp, Homo sapien
gacctgttagttcccttgtcaggtg

SEQ ID NO: 3331024 - DNA, 25 bp, Homo sapien
ctaatgtgttgacctgttagttccc

SEQ ID NO: 3331025 - DNA, 25 bp, Homo sapien
tgttagttcccttgtcaggtgtatc

SEQ ID NO: 3331026 - DNA, 25 bp, Homo sapien
tgtgttgacctgttagttcccttgt

SEQ ID NO: 3331027 - DNA, 25 bp, Homo sapien
ttctttccatgatcagatgactgtc

SEQ ID NO: 3331028 - DNA, 25 bp, Homo sapien
tgatcagatgactgtccaatgtagc

SEQ ID NO: 3331029 - DNA, 25 bp, Homo sapien
tccatgatcagatgactgtccaatg

SEQ ID NO: 3331030 - DNA, 25 bp, Homo sapien
gatgactgtccaatgtagctatctt

SEQ ID NO: 3331031 - DNA, 25 bp, Homo sapien
gccagactctccttaacttctgagt

SEQ ID NO: 3331032 - DNA, 25 bp, Homo sapien
gactctccttaacttctgagttcag

SEQ ID NO: 3331033 - DNA, 25 bp, Homo sapien
ctacagcacccagtctcccatccaa

SEQ ID NO: 3331034 - DNA, 25 bp, Homo sapien
caggccagactctccttaacttctg

SEQ ID NO: 3331035 - DNA, 25 bp, Homo sapien
aagcgtgtggcctggaatttagaat

SEQ ID NO: 3331036 - DNA, 25 bp, Homo sapien
tgaaacacggtacaagcaagaaggg

SEQ ID NO: 3331037 - DNA, 25 bp, Homo sapien
tcataaagatagtgagtaggtggtc

SEQ ID NO: 3331038 - DNA, 25 bp, Homo sapien
catgtaactgctactatcataaaga

SEQ ID NO: 3331039 - DNA, 25 bp, Homo sapien
tctttaagagtgacagcatgactga

SEQ ID NO: 3331040 - DNA, 25 bp, Homo sapien
ttatctttaagagtgacagcatgac

SEQ ID NO: 3331041 - DNA, 25 bp, Homo sapien
tttaagagtgacagcatgactgaac

SEQ ID NO: 3331042 - DNA, 25 bp, Homo sapien
ggattatctttaagagtgacagcat

SEQ ID NO: 3331043 - DNA, 25 bp, Homo sapien
tagtgtgaatatattctatcttttt

SEQ ID NO: 3331044 - DNA, 25 bp, Homo sapien
agtgtgaatatattctatctttttc

SEQ ID NO: 3331045 - DNA, 25 bp, Homo sapien
cagaaaaatgatagtgtgaatatat

SEQ ID NO: 3331046 - DNA, 25 bp, Homo sapien
tgcaattttataccctctgtcaggc

SEQ ID NO: 3331047 - DNA, 25 bp, Homo sapien
ggtagctgcccacaaaaggagccag

SEQ ID NO: 3331048 - DNA, 25 bp, Homo sapien
taacttgtgcaccttattactggcc

SEQ ID NO: 3331049 - DNA, 25 bp, Homo sapien
gcagtctgcaagcaacaagcaaggg

SEQ ID NO: 3331050 - DNA, 25 bp, Homo sapien
agggtgttagttttttgatgacttg

SEQ ID NO: 3331051 - DNA, 25 bp, Homo sapien
gtgttagttttttgatgacttgtga

SEQ ID NO: 3331052 - DNA, 25 bp, Homo sapien
tgttagttttttgatgacttgtgac

SEQ ID NO: 3331053 - DNA, 25 bp, Homo sapien
ggtgttagttttttgatgacttgtg

SEQ ID NO: 3331054 - DNA, 25 bp, Homo sapien
cccagctcctcagtaagttcaacgt

SEQ ID NO: 3331055 - DNA, 25 bp, Homo sapien
tctcttcttgcaacactgaaagctg

SEQ ID NO: 3331056 - DNA, 25 bp, Homo sapien
cctcagtaagttcaacgttctcttc

SEQ ID NO: 3331057 - DNA, 25 bp, Homo sapien
caacactgaaagctgctgggacttc

SEQ ID NO: 3331058 - DNA, 25 bp, Homo sapien
ttggtcctaaatttaggctctttgc

SEQ ID NO: 3331059 - DNA, 25 bp, Homo sapien
gaaccatttagcttttctgatacag

SEQ ID NO: 3331060 - DNA, 25 bp, Homo sapien
gatacagctactaattcctcttttt

SEQ ID NO: 3331061 - DNA, 25 bp, Homo sapien
gaaaatagaattcatctgtggcatt

SEQ ID NO: 3331062 - DNA, 25 bp, Homo sapien
tttaaacttgctgtagccaaagctg

SEQ ID NO: 3331063 - DNA, 25 bp, Homo sapien
ttaagaatccctatcctcaggatct

SEQ ID NO: 3331064 - DNA, 25 bp, Homo sapien
caggatctactttctccttgtcaga

SEQ ID NO: 3331065 - DNA, 25 bp, Homo sapien
gatctactttctccttgtcagaaga

SEQ ID NO: 3331066 - DNA, 25 bp, Homo sapien
ctatcctcaggatctactttctcct

SEQ ID NO: 3331067 - DNA, 25 bp, Homo sapien
ctcacctgtgtcaactttgatcacc

SEQ ID NO: 3331068 - DNA, 25 bp, Homo sapien
tcacctgtgtcaactttgatcacca

SEQ ID NO: 3331069 - DNA, 25 bp, Homo sapien
cacctgtgtcaactttgatcaccat

SEQ ID NO: 3331070 - DNA, 25 bp, Homo sapien
tctcacctgtgtcaactttgatcac

SEQ ID NO: 3331071 - DNA, 25 bp, Homo sapien
cacagcaggtctttttcagttgatt

SEQ ID NO: 3331072 - DNA, 25 bp, Homo sapien
tttgtgaaagaattaggagaacgta

SEQ ID NO: 3331073 - DNA, 25 bp, Homo sapien
cagttcttcagtcagatactctgtg

SEQ ID NO: 3331074 - DNA, 25 bp, Homo sapien
taggagaacgtaagaacaccagttc

SEQ ID NO: 3331075 - DNA, 25 bp, Homo sapien
ttggctcatccaaagctgtgtagtg

SEQ ID NO: 3331076 - DNA, 25 bp, Homo sapien
tattgaggtccttattgatgacaca

SEQ ID NO: 3331077 - DNA, 25 bp, Homo sapien
taagactttgccttcagttttacat

SEQ ID NO: 3331078 - DNA, 25 bp, Homo sapien
gcccaatcaaggaaacctctgaaat

SEQ ID NO: 3331079 - DNA, 25 bp, Homo sapien
ttatcatcataaatctgtaggagtt

SEQ ID NO: 3331080 - DNA, 25 bp, Homo sapien
tttatcatcataaatctgtaggagt

SEQ ID NO: 3331081 - DNA, 25 bp, Homo sapien
ttggcttaaaatcagatcccataaa

SEQ ID NO: 3331082 - DNA, 25 bp, Homo sapien
taaaatgtaaatgatactaggaacc

SEQ ID NO: 3331083 - DNA, 25 bp, Homo sapien
ccataaaatgtaaatgatactagga

SEQ ID NO: 3331084 - DNA, 25 bp, Homo sapien
tctaattctatagccactgatttgg

SEQ ID NO: 3331085 - DNA, 25 bp, Homo sapien
taattcatgaaagggtttgagagct

SEQ ID NO: 3331086 - DNA, 25 bp, Homo sapien
accttaattcatgaaagggtttgag

SEQ ID NO: 3331087 - DNA, 25 bp, Homo sapien
ggtttgagagctgttcgctgtacac

SEQ ID NO: 3331088 - DNA, 25 bp, Homo sapien
cgctgtacacgtgtttttatccaaa

SEQ ID NO: 3331089 - DNA, 25 bp, Homo sapien
gaatattgaatactttattgcagta

SEQ ID NO: 3331090 - DNA, 25 bp, Homo sapien
ttaagaatattgaatactttattgc

SEQ ID NO: 3331091 - DNA, 25 bp, Homo sapien
cattaagaatattgaatactttatt

SEQ ID NO: 3331092 - DNA, 25 bp, Homo sapien
aagaatattgaatactttattgcag

SEQ ID NO: 3331093 - DNA, 25 bp, Homo sapien
attttaatttgcccttgattgtcct

SEQ ID NO: 3331094 - DNA, 25 bp, Homo sapien
aatttgcccttgattgtcctggaag

SEQ ID NO: 3331095 - DNA, 25 bp, Homo sapien
tttaatttgcccttgattgtcctgg

SEQ ID NO: 3331096 - DNA, 25 bp, Homo sapien
ttaatttgcccttgattgtcctgga

SEQ ID NO: 3331097 - DNA, 25 bp, Homo sapien
cctaagttaggatgtttgtgtcctt

SEQ ID NO: 3331098 - DNA, 25 bp, Homo sapien
tcattcaaagccaatgtgttgctgg

SEQ ID NO: 3331099 - DNA, 25 bp, Homo sapien
ttctttcattcaaagccaatgtgtt

SEQ ID NO: 3331100 - DNA, 25 bp, Homo sapien
ggtcgtgtaggctatgtttttgagt

SEQ ID NO: 3331101 - DNA, 25 bp, Homo sapien
tttcaggacaaatgtcaaggctcat

SEQ ID NO: 3331102 - DNA, 25 bp, Homo sapien
gccattttatagaggtaaaatggac

SEQ ID NO: 3331103 - DNA, 25 bp, Homo sapien
gtccatttcaggacaaatgtcaagg

SEQ ID NO: 3331104 - DNA, 25 bp, Homo sapien
aatggacttttgtccatttcaggac

SEQ ID NO: 3331105 - DNA, 25 bp, Homo sapien
ggttcatcttgcagtgcatcttcca

SEQ ID NO: 3331106 - DNA, 25 bp, Homo sapien
gatataactataggtcttgaacagg

SEQ ID NO: 3331107 - DNA, 25 bp, Homo sapien
aaatagtcctctaatctgttctggc

SEQ ID NO: 3331108 - DNA, 25 bp, Homo sapien
gaagtctggtgttagtctgatggct

SEQ ID NO: 3331109 - DNA, 25 bp, Homo sapien
aaaggagagcttacactttacatga

SEQ ID NO: 3331110 - DNA, 25 bp, Homo sapien
tgcaatgtatgctgtgtatgatcct

SEQ ID NO: 3331111 - DNA, 25 bp, Homo sapien
tcctttactttgactctaggcgatt

SEQ ID NO: 3331112 - DNA, 25 bp, Homo sapien
tttactttgactctaggcgattcca

SEQ ID NO: 3331113 - DNA, 25 bp, Homo sapien
cctcctgaagggtgactgcaatgta

SEQ ID NO: 3331114 - DNA, 25 bp, Homo sapien
tgttcaaccctggtttgagtggaca

SEQ ID NO: 3331115 - DNA, 25 bp, Homo sapien
caaccctggtttgagtggacaaaga

SEQ ID NO: 3331116 - DNA, 25 bp, Homo sapien
tcctgttcaaccctggtttgagtgg

SEQ ID NO: 3331117 - DNA, 25 bp, Homo sapien
catgagtttcctgttcaaccctggt

SEQ ID NO: 3331118 - DNA, 25 bp, Homo sapien
tgttgttgtcaaaatatcatagtca

SEQ ID NO: 3331119 - DNA, 25 bp, Homo sapien
caaccagcagcccttcaaaagtgca

SEQ ID NO: 3331120 - DNA, 25 bp, Homo sapien
tttttgtggccagttgttaaccaga

SEQ ID NO: 3331121 - DNA, 25 bp, Homo sapien
caagtgggaatcaatggttccgtgg

SEQ ID NO: 3331122 - DNA, 25 bp, Homo sapien
aggatgaccagtgatgctgctcaca

SEQ ID NO: 3331123 - DNA, 25 bp, Homo sapien
gacaggtacccattaatgtctatat

SEQ ID NO: 3331124 - DNA, 25 bp, Homo sapien
gggctcttggccatattgtcagaca

SEQ ID NO: 3331125 - DNA, 25 bp, Homo sapien
attcttgggccaaattaggatgacc

SEQ ID NO: 3331126 - DNA, 25 bp, Homo sapien
tctgttccagcagtccttttaatgg

SEQ ID NO: 3331127 - DNA, 25 bp, Homo sapien
tctggctgttgctctagggctaccc

SEQ ID NO: 3331128 - DNA, 25 bp, Homo sapien
ttttaatggccgcactggccactgt

SEQ ID NO: 3331129 - DNA, 25 bp, Homo sapien
tgccctggctattgcccaaccattg

SEQ ID NO: 3331130 - DNA, 25 bp, Homo sapien
ctcattttgttgcaaatacagttaa

SEQ ID NO: 3331131 - DNA, 25 bp, Homo sapien
atttttggatcattcaaacaatacc

SEQ ID NO: 3331132 - DNA, 25 bp, Homo sapien
tacatgttggtatatactcattttg

SEQ ID NO: 3331133 - DNA, 25 bp, Homo sapien
tctttaacatatggtttcacgtggt

SEQ ID NO: 3331134 - DNA, 25 bp, Homo sapien
gtaatgcgtcttcatacccatagtt

SEQ ID NO: 3331135 - DNA, 25 bp, Homo sapien
cagtaatgcgtcttcatacccatag

SEQ ID NO: 3331136 - DNA, 25 bp, Homo sapien
agtaatgcgtcttcatacccatagt

SEQ ID NO: 3331137 - DNA, 25 bp, Homo sapien
gaatccgcattgaaagacttgtagc

SEQ ID NO: 3331138 - DNA, 25 bp, Homo sapien
gaaagaatccgcattgaaagacttg

SEQ ID NO: 3331139 - DNA, 25 bp, Homo sapien
tggtatagaaagaatccgcattgaa

SEQ ID NO: 3331140 - DNA, 25 bp, Homo sapien
tatagaaagaatccgcattgaaaga

SEQ ID NO: 3331141 - DNA, 25 bp, Homo sapien
gcaatttatgagctgtggacaagtc

SEQ ID NO: 3331142 - DNA, 25 bp, Homo sapien
tctgctgcagctttaaccatgtgca

SEQ ID NO: 3331143 - DNA, 25 bp, Homo sapien
ttaacaccttttacgtctgctgcag

SEQ ID NO: 3331144 - DNA, 25 bp, Homo sapien
aagtcttcgccctcagtgtgtgtca

SEQ ID NO: 3331145 - DNA, 25 bp, Homo sapien
attttgatcaagttttagcactgtg

SEQ ID NO: 3331146 - DNA, 25 bp, Homo sapien
ttttgatcaagttttagcactgtgt

SEQ ID NO: 3331147 - DNA, 25 bp, Homo sapien
tttgatcaagttttagcactgtgtc

SEQ ID NO: 3331148 - DNA, 25 bp, Homo sapien
tcacaggcagaggtaaaactccagt

SEQ ID NO: 3331149 - DNA, 25 bp, Homo sapien
cacaggcagaggtaaaactccagtt

SEQ ID NO: 3331150 - DNA, 25 bp, Homo sapien
cactgtttcaatgttgcttgctcgg

SEQ ID NO: 3331151 - DNA, 25 bp, Homo sapien
cagaatgactgttcaagtccagaag

SEQ ID NO: 3331152 - DNA, 25 bp, Homo sapien
cagaagcgcattttggagcactgct

SEQ ID NO: 3331153 - DNA, 25 bp, Homo sapien
aatgttgcttgctcggcaagtgccc

SEQ ID NO: 3331154 - DNA, 25 bp, Homo sapien
atgccccaactccaatggcaggatc

SEQ ID NO: 3331155 - DNA, 25 bp, Homo sapien
ctgaaggctgctgttgtcctgtgct

SEQ ID NO: 3331156 - DNA, 25 bp, Homo sapien
agctgaaggctgctgttgtcctgtg

SEQ ID NO: 3331157 - DNA, 25 bp, Homo sapien
ctggggatgccccaactccaatggc

SEQ ID NO: 3331158 - DNA, 25 bp, Homo sapien
tatgaatggaaagaagtaacagagc

SEQ ID NO: 3331159 - DNA, 25 bp, Homo sapien
cagagcaagtgtaatcatattaata

SEQ ID NO: 3331160 - DNA, 25 bp, Homo sapien
gtgcccagccaagtgtgacctttaa

SEQ ID NO: 3331161 - DNA, 25 bp, Homo sapien
taacactggtactacagtatgaatg

SEQ ID NO: 3331162 - DNA, 25 bp, Homo sapien
catgatagtgttgatgaatacggct

SEQ ID NO: 3331163 - DNA, 25 bp, Homo sapien
tactttgcatgatagtgttgatgaa

SEQ ID NO: 3331164 - DNA, 25 bp, Homo sapien
gatgaatacggctttgaaatgttga

SEQ ID NO: 3331165 - DNA, 25 bp, Homo sapien
tagtgttgatgaatacggctttgaa

SEQ ID NO: 3331166 - DNA, 25 bp, Homo sapien
tcaaagtttctgagctaacttgaat

SEQ ID NO: 3331167 - DNA, 25 bp, Homo sapien
caaagtttctgagctaacttgaatt

SEQ ID NO: 3331168 - DNA, 25 bp, Homo sapien
aaagtttctgagctaacttgaattc

SEQ ID NO: 3331169 - DNA, 25 bp, Homo sapien
tgttttagctcccctattttcctca

SEQ ID NO: 3331170 - DNA, 25 bp, Homo sapien
tcattgttttagctcccctattttc

SEQ ID NO: 3331171 - DNA, 25 bp, Homo sapien
gttgtttgatccaagcctggtccaa

SEQ ID NO: 3331172 - DNA, 25 bp, Homo sapien
agggctccgtgacagagctctggtt

SEQ ID NO: 3331173 - DNA, 25 bp, Homo sapien
agcaggacctctgccgtacgcaggt

SEQ ID NO: 3331174 - DNA, 25 bp, Homo sapien
ctggaagtgctgcctagagccacgg

SEQ ID NO: 3331175 - DNA, 25 bp, Homo sapien
ttgcacctttcactccatttttctg

SEQ ID NO: 3331176 - DNA, 25 bp, Homo sapien
attgcacctttcactccatttttct

SEQ ID NO: 3331177 - DNA, 25 bp, Homo sapien
gcacctttcactccatttttctgag

SEQ ID NO: 3331178 - DNA, 25 bp, Homo sapien
tgcacctttcactccatttttctga

SEQ ID NO: 3331179 - DNA, 25 bp, Homo sapien
agattttcttgtcacagccttctga

SEQ ID NO: 3331180 - DNA, 25 bp, Homo sapien
ttacagagttcagaattcttagacc

SEQ ID NO: 3331181 - DNA, 25 bp, Homo sapien
cagaattcttagacctcaagggcat

SEQ ID NO: 3331182 - DNA, 25 bp, Homo sapien
ggcttacagagttcagaattcttag

SEQ ID NO: 3331183 - DNA, 25 bp, Homo sapien
gttcagaattcttagacctcaaggg

SEQ ID NO: 3331184 - DNA, 25 bp, Homo sapien
ggtttgtagcgcttgatttcttcac

SEQ ID NO: 3331185 - DNA, 25 bp, Homo sapien
gtttaaagctggtttgtagcgcttg

SEQ ID NO: 3331186 - DNA, 25 bp, Homo sapien
tggtttgtagcgcttgatttcttca

SEQ ID NO: 3331187 - DNA, 25 bp, Homo sapien
aagctggtttgtagcgcttgatttc

SEQ ID NO: 3331188 - DNA, 25 bp, Homo sapien
cttgaaattaggtacttgtatcctc

SEQ ID NO: 3331189 - DNA, 25 bp, Homo sapien
gaaattaggtacttgtatcctctca

SEQ ID NO: 3331190 - DNA, 25 bp, Homo sapien
aaattaggtacttgtatcctctcat

SEQ ID NO: 3331191 - DNA, 25 bp, Homo sapien
tgaaattaggtacttgtatcctctc

SEQ ID NO: 3331192 - DNA, 25 bp, Homo sapien
gcattttacagcgacccttaggata

SEQ ID NO: 3331193 - DNA, 25 bp, Homo sapien
ttccttgataggaaaactccaagtg

SEQ ID NO: 3331194 - DNA, 25 bp, Homo sapien
cagcgacccttaggataaggttcat

SEQ ID NO: 3331195 - DNA, 25 bp, Homo sapien
cattgaaggcgttattcataacctc

SEQ ID NO: 3331196 - DNA, 25 bp, Homo sapien
tcatttcatttgcaaggctttccat

SEQ ID NO: 3331197 - DNA, 25 bp, Homo sapien
tttcaagacaaattcaataatcatt

SEQ ID NO: 3331198 - DNA, 25 bp, Homo sapien
caataatcatttcatttgcaaggct

SEQ ID NO: 3331199 - DNA, 25 bp, Homo sapien
ttcaagacaaattcaataatcattt

SEQ ID NO: 3331200 - DNA, 25 bp, Homo sapien
aagcttttccttcgatacttcttga

SEQ ID NO: 3331201 - DNA, 25 bp, Homo sapien
tgaaactcctactgttcaagtatag

SEQ ID NO: 3331202 - DNA, 25 bp, Homo sapien
tcttgaaactcctactgttcaagta

SEQ ID NO: 3331203 - DNA, 25 bp, Homo sapien
tctacaacaccctgaaagcttttcc

SEQ ID NO: 3331204 - DNA, 25 bp, Homo sapien
ctgtaagccatttaattcgtaacaa

SEQ ID NO: 3331205 - DNA, 25 bp, Homo sapien
tgtaagccatttaattcgtaacaaa

SEQ ID NO: 3331206 - DNA, 25 bp, Homo sapien
ttcacctacactcaactctgccaag

SEQ ID NO: 3331207 - DNA, 25 bp, Homo sapien
tcatctttatgtaggacatcataga

SEQ ID NO: 3331208 - DNA, 25 bp, Homo sapien
gatcagggttctaaagcccttggct

SEQ ID NO: 3331209 - DNA, 25 bp, Homo sapien
ggctcccacggtgcttctcataaag

SEQ ID NO: 3331210 - DNA, 25 bp, Homo sapien
catagattttacaacgataataact

SEQ ID NO: 3331211 - DNA, 25 bp, Homo sapien
ttagtcatagattttacaacgataa

SEQ ID NO: 3331212 - DNA, 25 bp, Homo sapien
tagtcatagattttacaacgataat

SEQ ID NO: 3331213 - DNA, 25 bp, Homo sapien
gtcatagattttacaacgataataa

SEQ ID NO: 3331214 - DNA, 25 bp, Homo sapien
tccaaataaggcctgaaaccagggc

SEQ ID NO: 3331215 - DNA, 25 bp, Homo sapien
gcaatgcaattgatactggtcttca

SEQ ID NO: 3331216 - DNA, 25 bp, Homo sapien
tttcatacctattaagggatctctt

SEQ ID NO: 3331217 - DNA, 25 bp, Homo sapien
tttatagcaagatcaatgcaatgca

SEQ ID NO: 3331218 - DNA, 25 bp, Homo sapien
atgttctgcacagcccacagtgcag

SEQ ID NO: 3331219 - DNA, 25 bp, Homo sapien
ttctggctgtaagggagactccttg

SEQ ID NO: 3331220 - DNA, 25 bp, Homo sapien
tgaccacctctagttcagtctccag

SEQ ID NO: 3331221 - DNA, 25 bp, Homo sapien
agcggcctgcgggtggcccatactt

SEQ ID NO: 3331222 - DNA, 25 bp, Homo sapien
ttttcgattatccttgaaaattcca

SEQ ID NO: 3331223 - DNA, 25 bp, Homo sapien
tataacacattgattagatctgaac

SEQ ID NO: 3331224 - DNA, 25 bp, Homo sapien
ttgattagatctgaaccaactgcat

SEQ ID NO: 3331225 - DNA, 25 bp, Homo sapien
tttggaagacatttttcgattatcc

SEQ ID NO: 3331226 - DNA, 25 bp, Homo sapien
cttggatcctctgtagctataacat

SEQ ID NO: 3331227 - DNA, 25 bp, Homo sapien
ggatcctctgtagctataacatttt

SEQ ID NO: 3331228 - DNA, 25 bp, Homo sapien
tggatcctctgtagctataacattt

SEQ ID NO: 3331229 - DNA, 25 bp, Homo sapien
ctcttggatcctctgtagctataac

SEQ ID NO: 3331230 - DNA, 25 bp, Homo sapien
tggggaggctccaggaaacatacac

SEQ ID NO: 3331231 - DNA, 25 bp, Homo sapien
gctccaggaaacatacacttatggt

SEQ ID NO: 3331232 - DNA, 25 bp, Homo sapien
acatacacttatggtggaaggggca

SEQ ID NO: 3331233 - DNA, 25 bp, Homo sapien
gggaggctccaggaaacatacactt

SEQ ID NO: 3331234 - DNA, 25 bp, Homo sapien
ctcaaaatcatggtgaaaggtaagt

SEQ ID NO: 3331235 - DNA, 25 bp, Homo sapien
tcatggtgaaaggtaagtaggagca

SEQ ID NO: 3331236 - DNA, 25 bp, Homo sapien
aaaggtaagtaggagcaagtcacat

SEQ ID NO: 3331237 - DNA, 25 bp, Homo sapien
tgaaaggtaagtaggagcaagtcac

SEQ ID NO: 3331238 - DNA, 25 bp, Homo sapien
gaagtgctagtgtttactggccagt

SEQ ID NO: 3331239 - DNA, 25 bp, Homo sapien
tttgtggtaaggatcctcccctgac

SEQ ID NO: 3331240 - DNA, 25 bp, Homo sapien
tatttccttttcacgagagtggagc

SEQ ID NO: 3331241 - DNA, 25 bp, Homo sapien
gcaagtccaagttaaaggtgccagc

SEQ ID NO: 3331242 - DNA, 25 bp, Homo sapien
cttgcctttcaaacttatgtaagta

SEQ ID NO: 3331243 - DNA, 25 bp, Homo sapien
catcttgcctttcaaacttatgtaa

SEQ ID NO: 3331244 - DNA, 25 bp, Homo sapien
atgtaagtaatttttccgaatctct

SEQ ID NO: 3331245 - DNA, 25 bp, Homo sapien
tcatcttgcctttcaaacttatgta

SEQ ID NO: 3331246 - DNA, 25 bp, Homo sapien
ttttgagttgaccactccttaggca

SEQ ID NO: 3331247 - DNA, 25 bp, Homo sapien
tccctggaagctaacatattgatgc

SEQ ID NO: 3331248 - DNA, 25 bp, Homo sapien
tttttgagttgaccactccttaggc

SEQ ID NO: 3331249 - DNA, 25 bp, Homo sapien
gctccctggaagctaacatattgat

SEQ ID NO: 3331250 - DNA, 25 bp, Homo sapien
tatctctgcccatcagtatgtgccc

SEQ ID NO: 3331251 - DNA, 25 bp, Homo sapien
ctatctctgcccatcagtatgtgcc

SEQ ID NO: 3331252 - DNA, 25 bp, Homo sapien
tctgcccatcagtatgtgcccatct

SEQ ID NO: 3331253 - DNA, 25 bp, Homo sapien
ccatcagtatgtgcccatctgtgtc

SEQ ID NO: 3331254 - DNA, 25 bp, Homo sapien
ctcggtcgtgtagccggttagcagt

SEQ ID NO: 3331255 - DNA, 25 bp, Homo sapien
tcgtgtagccggttagcagtcggtt

SEQ ID NO: 3331256 - DNA, 25 bp, Homo sapien
gtgtagccggttagcagtcggtttc

SEQ ID NO: 3331257 - DNA, 25 bp, Homo sapien
tctgcctcggtcgtgtagccggtta

SEQ ID NO: 3331258 - DNA, 25 bp, Homo sapien
tggccggatggcagtcggtttcccg

SEQ ID NO: 3331259 - DNA, 25 bp, Homo sapien
gggggtctgtgaaggcctgcgcaac

SEQ ID NO: 3331260 - DNA, 25 bp, Homo sapien
tcactgcctgggtcgtgtggccgga

SEQ ID NO: 3331261 - DNA, 25 bp, Homo sapien
ctgtgaaggcctgcgcaacgcgggc

SEQ ID NO: 3331262 - DNA, 25 bp, Homo sapien
attttgtacaaagctgaatcagcaa

SEQ ID NO: 3331263 - DNA, 25 bp, Homo sapien
ttattgatagtcattttgctccgac

SEQ ID NO: 3331264 - DNA, 25 bp, Homo sapien
cattttgctccgacattttgtacaa

SEQ ID NO: 3331265 - DNA, 25 bp, Homo sapien
tgtacaaagctgaatcagcaacagt

SEQ ID NO: 3331266 - DNA, 25 bp, Homo sapien
cctcctcatggaaatttctcttgaa

SEQ ID NO: 3331267 - DNA, 25 bp, Homo sapien
atttcaaattctttcaagcataagg

SEQ ID NO: 3331268 - DNA, 25 bp, Homo sapien
tggttgagttggaggtaacccacca

SEQ ID NO: 3331269 - DNA, 25 bp, Homo sapien
tctttcaagcataaggtacattcat

SEQ ID NO: 3331270 - DNA, 25 bp, Homo sapien
ttttacccttgacattgctgcaaaa

SEQ ID NO: 3331271 - DNA, 25 bp, Homo sapien
tttacccttgacattgctgcaaaaa

SEQ ID NO: 3331272 - DNA, 25 bp, Homo sapien
cttttacccttgacattgctgcaaa

SEQ ID NO: 3331273 - DNA, 25 bp, Homo sapien
tacccttgacattgctgcaaaaatg

SEQ ID NO: 3331274 - DNA, 25 bp, Homo sapien
tcatagttaatctcatattttccaa

SEQ ID NO: 3331275 - DNA, 25 bp, Homo sapien
tccaaatctgttaatgtggcactgg

SEQ ID NO: 3331276 - DNA, 25 bp, Homo sapien
cagagttatagctccaaagaatgag

SEQ ID NO: 3331277 - DNA, 25 bp, Homo sapien
gcatccgctcagtctcataaccagg

SEQ ID NO: 3331278 - DNA, 25 bp, Homo sapien
tgaacccatttggacaatacatcaa

SEQ ID NO: 3331279 - DNA, 25 bp, Homo sapien
acccatttggacaatacatcaaata

SEQ ID NO: 3331280 - DNA, 25 bp, Homo sapien
gaacccatttggacaatacatcaaa

SEQ ID NO: 3331281 - DNA, 25 bp, Homo sapien
ctgaacccatttggacaatacatca

SEQ ID NO: 3331282 - DNA, 25 bp, Homo sapien
tattagttcaatccattctgttctc

SEQ ID NO: 3331283 - DNA, 25 bp, Homo sapien
aaaacaaagcaaggatcaccaaagt

SEQ ID NO: 3331284 - DNA, 25 bp, Homo sapien
caaagcaaggatcaccaaagtttta

SEQ ID NO: 3331285 - DNA, 25 bp, Homo sapien
tttctattagttcaatccattctgt

SEQ ID NO: 3331286 - DNA, 25 bp, Homo sapien
cagggcccgcattattatacctcct

SEQ ID NO: 3331287 - DNA, 25 bp, Homo sapien
cgtaacatttcagggcccgcattat

SEQ ID NO: 3331288 - DNA, 25 bp, Homo sapien
tttcagggcccgcattattatacct

SEQ ID NO: 3331289 - DNA, 25 bp, Homo sapien
gggcccgcattattatacctcctct

SEQ ID NO: 3331290 - DNA, 25 bp, Homo sapien
cagaggtagatgagaggtaagctcc

SEQ ID NO: 3331291 - DNA, 25 bp, Homo sapien
tctgaatatacactcaggtctagct

SEQ ID NO: 3331292 - DNA, 25 bp, Homo sapien
gacccatgtacataatgacctcata

SEQ ID NO: 3331293 - DNA, 25 bp, Homo sapien
tcatgttcctgtgacctgtgtggtc

SEQ ID NO: 3331294 - DNA, 25 bp, Homo sapien
tcctagatgtctcaagcttgccttc

SEQ ID NO: 3331295 - DNA, 25 bp, Homo sapien
taatcctagatgtctcaagcttgcc

SEQ ID NO: 3331296 - DNA, 25 bp, Homo sapien
ttttttaatcctagatgtctcaagc

SEQ ID NO: 3331297 - DNA, 25 bp, Homo sapien
ctagatgtctcaagcttgccttcca

SEQ ID NO: 3331298 - DNA, 25 bp, Homo sapien
cagtaaggaacgctcagtttacaat

SEQ ID NO: 3331299 - DNA, 25 bp, Homo sapien
gtaaggaacgctcagtttacaatac

SEQ ID NO: 3331300 - DNA, 25 bp, Homo sapien
agtaaggaacgctcagtttacaata

SEQ ID NO: 3331301 - DNA, 25 bp, Homo sapien
caatgcagtaaggaacgctcagttt

SEQ ID NO: 3331302 - DNA, 25 bp, Homo sapien
tttgtctgtggtctgtacttgccag

SEQ ID NO: 3331303 - DNA, 25 bp, Homo sapien
cttagtggggatgtctcctttgctt

SEQ ID NO: 3331304 - DNA, 25 bp, Homo sapien
tgtctgtggtctgtacttgccagcc

SEQ ID NO: 3331305 - DNA, 25 bp, Homo sapien
gtggggatgtctcctttgctttctt

SEQ ID NO: 3331306 - DNA, 25 bp, Homo sapien
cccactgagcagctgtttggtggtc

SEQ ID NO: 3331307 - DNA, 25 bp, Homo sapien
gccctggtgaactgattaatcacag

SEQ ID NO: 3331308 - DNA, 25 bp, Homo sapien
caaggccctggtgaactgattaatc

SEQ ID NO: 3331309 - DNA, 25 bp, Homo sapien
ttaatcacagaaggcacttctagct

SEQ ID NO: 3331310 - DNA, 25 bp, Homo sapien
tgacaaagcaagtgaggtgcctttt

SEQ ID NO: 3331311 - DNA, 25 bp, Homo sapien
atttgacaaagcaagtgaggtgcct

SEQ ID NO: 3331312 - DNA, 25 bp, Homo sapien
acaaagcaagtgaggtgccttttgg

SEQ ID NO: 3331313 - DNA, 25 bp, Homo sapien
ccatttgacaaagcaagtgaggtgc

SEQ ID NO: 3331314 - DNA, 25 bp, Homo sapien
cactttcacggtctcctgctttttc

SEQ ID NO: 3331315 - DNA, 25 bp, Homo sapien
ttttcaagacagcaagggtcggcac

SEQ ID NO: 3331316 - DNA, 25 bp, Homo sapien
ctttcacggtctcctgctttttcaa

SEQ ID NO: 3331317 - DNA, 25 bp, Homo sapien
agcaagggtcggcaccaccttcttc

SEQ ID NO: 3331318 - DNA, 25 bp, Homo sapien
ctttgtgtattagaagtaccttgaa

SEQ ID NO: 3331319 - DNA, 25 bp, Homo sapien
taccttgaaatactgggtcagaaaa

SEQ ID NO: 3331320 - DNA, 25 bp, Homo sapien
gaagtaccttgaaatactgggtcag

SEQ ID NO: 3331321 - DNA, 25 bp, Homo sapien
tagaagtaccttgaaatactgggtc

SEQ ID NO: 3331322 - DNA, 25 bp, Homo sapien
gaggttagctggttgtatggttacc

SEQ ID NO: 3331323 - DNA, 25 bp, Homo sapien
tggaaacttcttagttcgtttgcca

SEQ ID NO: 3331324 - DNA, 25 bp, Homo sapien
aagcattctgtaggtaagatattcc

SEQ ID NO: 3331325 - DNA, 25 bp, Homo sapien
acttcttagttcgtttgccaagagg

SEQ ID NO: 3331326 - DNA, 25 bp, Homo sapien
gcttttgctggcaatgatttctcct

SEQ ID NO: 3331327 - DNA, 25 bp, Homo sapien
ggccattgttagagaaacaggtcca

SEQ ID NO: 3331328 - DNA, 25 bp, Homo sapien
acttgccgattagcaggcagtaggc

SEQ ID NO: 3331329 - DNA, 25 bp, Homo sapien
aaatgcttttgctggcaatgatttc

SEQ ID NO: 3331330 - DNA, 25 bp, Homo sapien
tgtcacttcccactttaccattgga

SEQ ID NO: 3331331 - DNA, 25 bp, Homo sapien
ccattggattccaaaaacctatcca

SEQ ID NO: 3331332 - DNA, 25 bp, Homo sapien
aaagcatgcacaggcattttccgga

SEQ ID NO: 3331333 - DNA, 25 bp, Homo sapien
agtcatgaccgctggccactgccag

SEQ ID NO: 3331334 - DNA, 25 bp, Homo sapien
taatcttagtgctagcctggcagac

SEQ ID NO: 3331335 - DNA, 25 bp, Homo sapien
gcaatttccttgtgtggccagtcag

SEQ ID NO: 3331336 - DNA, 25 bp, Homo sapien
gagactgtacctaaatcttatcgag

SEQ ID NO: 3331337 - DNA, 25 bp, Homo sapien
ggcagacacaatctgcacagaactt

SEQ ID NO: 3331338 - DNA, 25 bp, Homo sapien
catttgcagtctaatagaggaaaac

SEQ ID NO: 3331339 - DNA, 25 bp, Homo sapien
catgcattaggctaagatatatggt

SEQ ID NO: 3331340 - DNA, 25 bp, Homo sapien
aaagcactatactaggtttcataag

SEQ ID NO: 3331341 - DNA, 25 bp, Homo sapien
catctatccttcaatatttaggcct

SEQ ID NO: 3331342 - DNA, 25 bp, Homo sapien
ggccattaggaccttggctgaaatt

SEQ ID NO: 3331343 - DNA, 25 bp, Homo sapien
tttggggccattaggaccttggctg

SEQ ID NO: 3331344 - DNA, 25 bp, Homo sapien
tggggccattaggaccttggctgaa

SEQ ID NO: 3331345 - DNA, 25 bp, Homo sapien
tatttggggccattaggaccttggc

SEQ ID NO: 3331346 - DNA, 25 bp, Homo sapien
tgttgttaataactgggacaagacc

SEQ ID NO: 3331347 - DNA, 25 bp, Homo sapien
cttgaagaagcaatgggacactaat

SEQ ID NO: 3331348 - DNA, 25 bp, Homo sapien
gaatcataaagacttccagagtagg

SEQ ID NO: 3331349 - DNA, 25 bp, Homo sapien
ccagagtaggaggatagaaaggtaa

SEQ ID NO: 3331350 - DNA, 25 bp, Homo sapien
tcctgctggtggagcctccgcgcat

SEQ ID NO: 3331351 - DNA, 25 bp, Homo sapien
cgctgcgtccccggcgatctgtctc

SEQ ID NO: 3331352 - DNA, 25 bp, Homo sapien
gtccccggcgatctgtctcaggttt

SEQ ID NO: 3331353 - DNA, 25 bp, Homo sapien
tgcgtccccggcgatctgtctcagg

SEQ ID NO: 3331354 - DNA, 25 bp, Homo sapien
tcaacatcaactactgattaaaaaa

SEQ ID NO: 3331355 - DNA, 25 bp, Homo sapien
caacatcaactactgattaaaaaat

SEQ ID NO: 3331356 - DNA, 25 bp, Homo sapien
aaatcaacatcaactactgattaaa

SEQ ID NO: 3331357 - DNA, 25 bp, Homo sapien
tcttgttctctagctctcattcctc

SEQ ID NO: 3331358 - DNA, 25 bp, Homo sapien
caggatgtagaggttgtagcgtgct

SEQ ID NO: 3331359 - DNA, 25 bp, Homo sapien
ggatgtagaggttgtagcgtgctat

SEQ ID NO: 3331360 - DNA, 25 bp, Homo sapien
atgtagaggttgtagcgtgctatga

SEQ ID NO: 3331361 - DNA, 25 bp, Homo sapien
ccaggatgtagaggttgtagcgtgc

SEQ ID NO: 3331362 - DNA, 25 bp, Homo sapien
ttatcttggtcattcgagttttcat

SEQ ID NO: 3331363 - DNA, 25 bp, Homo sapien
tctttctgtctggcttcttagcttc

SEQ ID NO: 3331364 - DNA, 25 bp, Homo sapien
ctctttctgtctggcttcttagctt

SEQ ID NO: 3331365 - DNA, 25 bp, Homo sapien
tgtctggcttcttagcttcccccat

SEQ ID NO: 3331366 - DNA, 25 bp, Homo sapien
ttctgtctggcttcttagcttcccc

SEQ ID NO: 3331367 - DNA, 25 bp, Homo sapien
atgaacaataatgtcagggtgatca

SEQ ID NO: 3331368 - DNA, 25 bp, Homo sapien
aatgtcagggtgatcaaaaacaaga

SEQ ID NO: 3331369 - DNA, 25 bp, Homo sapien
atgtcagggtgatcaaaaacaagaa

SEQ ID NO: 3331370 - DNA, 25 bp, Homo sapien
ttatgcgtcttcgatgagcaatttc

SEQ ID NO: 3331371 - DNA, 25 bp, Homo sapien
ttcatcagttggcatgtggattgca

SEQ ID NO: 3331372 - DNA, 25 bp, Homo sapien
tcatcagttggcatgtggattgcat

SEQ ID NO: 3331373 - DNA, 25 bp, Homo sapien
catacatcaggtatcgggtctgtca

SEQ ID NO: 3331374 - DNA, 25 bp, Homo sapien
gaaacaatccaagctttcccaatct

SEQ ID NO: 3331375 - DNA, 25 bp, Homo sapien
cctggtagcttgacaacttggtctt

SEQ ID NO: 3331376 - DNA, 25 bp, Homo sapien
tcaagaggagcatttcagcgccctg

SEQ ID NO: 3331377 - DNA, 25 bp, Homo sapien
ccataagtagaattcagacagctgt

SEQ ID NO: 3331378 - DNA, 25 bp, Homo sapien
cataagtagaattcagacagctgtg

SEQ ID NO: 3331379 - DNA, 25 bp, Homo sapien
caccataagtagaattcagacagct

SEQ ID NO: 3331380 - DNA, 25 bp, Homo sapien
aagtagaattcagacagctgtgtca

SEQ ID NO: 3331381 - DNA, 25 bp, Homo sapien
cattcactgggtgatccaattacaa

SEQ ID NO: 3331382 - DNA, 25 bp, Homo sapien
tcattcactgggtgatccaattaca

SEQ ID NO: 3331383 - DNA, 25 bp, Homo sapien
tgtctatcttctgtgttactctgct

SEQ ID NO: 3331384 - DNA, 25 bp, Homo sapien
tatcttctgtgttactctgcttggg

SEQ ID NO: 3331385 - DNA, 25 bp, Homo sapien
catcacatgtctatcttctgtgtta

SEQ ID NO: 3331386 - DNA, 25 bp, Homo sapien
cacatgtctatcttctgtgttactc

SEQ ID NO: 3331387 - DNA, 25 bp, Homo sapien
ttcttttccagctatttggccattt

SEQ ID NO: 3331388 - DNA, 25 bp, Homo sapien
cttcttttccagctatttggccatt

SEQ ID NO: 3331389 - DNA, 25 bp, Homo sapien
tcttcttttccagctatttggccat

SEQ ID NO: 3331390 - DNA, 25 bp, Homo sapien
ggagcatggtacagagagatcgctg

SEQ ID NO: 3331391 - DNA, 25 bp, Homo sapien
tcctgaattgcaggtgccactcctc

SEQ ID NO: 3331392 - DNA, 25 bp, Homo sapien
acagtcctgaattgcaggtgccact

SEQ ID NO: 3331393 - DNA, 25 bp, Homo sapien
catggtacagagagatcgctgggca

SEQ ID NO: 3331394 - DNA, 25 bp, Homo sapien
ttcattacaggctacctgaagagac

SEQ ID NO: 3331395 - DNA, 25 bp, Homo sapien
ctgccagatgacatttttagacaca

SEQ ID NO: 3331396 - DNA, 25 bp, Homo sapien
ttcagcattcatcccgacggcattc

SEQ ID NO: 3331397 - DNA, 25 bp, Homo sapien
gaaaaccagaagtgatacccaggta

SEQ ID NO: 3331398 - DNA, 25 bp, Homo sapien
tatgtaaccaagtcttacaacaaaa

SEQ ID NO: 3331399 - DNA, 25 bp, Homo sapien
tttccagattatgtaaccaagtctt

SEQ ID NO: 3331400 - DNA, 25 bp, Homo sapien
tatatctgacaaggagctaatttcc

SEQ ID NO: 3331401 - DNA, 25 bp, Homo sapien
ttcaccaattattagggaaattcaa

SEQ ID NO: 3331402 - DNA, 25 bp, Homo sapien
actgggccacagacaaaatggacaa

SEQ ID NO: 3331403 - DNA, 25 bp, Homo sapien
ggcccaacactgaagaagggaggct

SEQ ID NO: 3331404 - DNA, 25 bp, Homo sapien
acaagttggggcagcccagctgtgc

SEQ ID NO: 3331405 - DNA, 25 bp, Homo sapien
gacagggctttcagaaacacactgg

SEQ ID NO: 3331406 - DNA, 25 bp, Homo sapien
tcattatgttctgctacataatcat

SEQ ID NO: 3331407 - DNA, 25 bp, Homo sapien
ttcattatgttctgctacataatca

SEQ ID NO: 3331408 - DNA, 25 bp, Homo sapien
ttattcattatgttctgctacataa

SEQ ID NO: 3331409 - DNA, 25 bp, Homo sapien
tattcattatgttctgctacataat

SEQ ID NO: 3331410 - DNA, 25 bp, Homo sapien
tcatctttggtaccttgaacttctt

SEQ ID NO: 3331411 - DNA, 25 bp, Homo sapien
ttcatctttggtaccttgaacttct

SEQ ID NO: 3331412 - DNA, 25 bp, Homo sapien
catctttggtaccttgaacttcttt

SEQ ID NO: 3331413 - DNA, 25 bp, Homo sapien
ctgtgccacaggcatattacacagg

SEQ ID NO: 3331414 - DNA, 25 bp, Homo sapien
gcatattacacaggcttctagtgta

SEQ ID NO: 3331415 - DNA, 25 bp, Homo sapien
ccacaatacgttcagtgtcttcatc

SEQ ID NO: 3331416 - DNA, 25 bp, Homo sapien
ttctcaacttccaccacaatacgtt

SEQ ID NO: 3331417 - DNA, 25 bp, Homo sapien
tcttgtcccactagaagatggtcag

SEQ ID NO: 3331418 - DNA, 25 bp, Homo sapien
ctaaaggtaaagtagagtccactgg

SEQ ID NO: 3331419 - DNA, 25 bp, Homo sapien
tggtcaggaacaataacatactaga

SEQ ID NO: 3331420 - DNA, 25 bp, Homo sapien
tagtcaatggaaacttcaggttcaa

SEQ ID NO: 3331421 - DNA, 25 bp, Homo sapien
caatggaggatttaggtctattgct

SEQ ID NO: 3331422 - DNA, 25 bp, Homo sapien
cacccaaatccaccttcaatggagg

SEQ ID NO: 3331423 - DNA, 25 bp, Homo sapien
ccttcaatggaggatttaggtctat

SEQ ID NO: 3331424 - DNA, 25 bp, Homo sapien
tccaccttcaatggaggatttaggt

SEQ ID NO: 3331425 - DNA, 25 bp, Homo sapien
cctgctgtattttgacactaaatgg

SEQ ID NO: 3331426 - DNA, 25 bp, Homo sapien
actaaatggacaggtgcagccattc

SEQ ID NO: 3331427 - DNA, 25 bp, Homo sapien
gccattctggcctgagtaaggtatg

SEQ ID NO: 3331428 - DNA, 25 bp, Homo sapien
ctatggtcatactcctgctgtattt

SEQ ID NO: 3331429 - DNA, 25 bp, Homo sapien
ttggtcatgtctaacagattgggtg

SEQ ID NO: 3331430 - DNA, 25 bp, Homo sapien
tattttggtcatgtctaacagattg

SEQ ID NO: 3331431 - DNA, 25 bp, Homo sapien
ccttattttggtcatgtctaacaga

SEQ ID NO: 3331432 - DNA, 25 bp, Homo sapien
ttaaaggcataagcatgttccttat

SEQ ID NO: 3331433 - DNA, 25 bp, Homo sapien
gatccattctgacagtggcattaga

SEQ ID NO: 3331434 - DNA, 25 bp, Homo sapien
gaatacagataagaccacaagcatg

SEQ ID NO: 3331435 - DNA, 25 bp, Homo sapien
catatgcgggaattgaccacctttc

SEQ ID NO: 3331436 - DNA, 25 bp, Homo sapien
cacaagcatggcaactgatgtatcc

SEQ ID NO: 3331437 - DNA, 25 bp, Homo sapien
agtgaatagagatatctgacccacc

SEQ ID NO: 3331438 - DNA, 25 bp, Homo sapien
aatagagatatctgacccaccaggc

SEQ ID NO: 3331439 - DNA, 25 bp, Homo sapien
tgaagtgaatagagatatctgaccc

SEQ ID NO: 3331440 - DNA, 25 bp, Homo sapien
tcatccaagggtgaagtgaatagag

SEQ ID NO: 3331441 - DNA, 25 bp, Homo sapien
agctgattttggtgtagagagactt

SEQ ID NO: 3331442 - DNA, 25 bp, Homo sapien
cagttggttccatggaaactgaaag

SEQ ID NO: 3331443 - DNA, 25 bp, Homo sapien
aaagctgattttggtgtagagagac

SEQ ID NO: 3331444 - DNA, 25 bp, Homo sapien
tcagttggttccatggaaactgaaa

SEQ ID NO: 3331445 - DNA, 25 bp, Homo sapien
tctgataaaagtgaggccatataat

SEQ ID NO: 3331446 - DNA, 25 bp, Homo sapien
cttcatctgataaaagtgaggccat

SEQ ID NO: 3331447 - DNA, 25 bp, Homo sapien
ttgaagcttcatctgataaaagtga

SEQ ID NO: 3331448 - DNA, 25 bp, Homo sapien
agcttcatctgataaaagtgaggcc

SEQ ID NO: 3331449 - DNA, 25 bp, Homo sapien
tcaaatgaaataccaatcagaaacc

SEQ ID NO: 3331450 - DNA, 25 bp, Homo sapien
caaatgaaataccaatcagaaacct

SEQ ID NO: 3331451 - DNA, 25 bp, Homo sapien
aaatgaaataccaatcagaaacctg

SEQ ID NO: 3331452 - DNA, 25 bp, Homo sapien
gattacagccagctgcaggtacaga

SEQ ID NO: 3331453 - DNA, 25 bp, Homo sapien
ggtacagagccacgggaccccaaga

SEQ ID NO: 3331454 - DNA, 25 bp, Homo sapien
atagccactactgattacagccagc

SEQ ID NO: 3331455 - DNA, 25 bp, Homo sapien
tgcaggtacagagccacgggacccc

SEQ ID NO: 3331456 - DNA, 25 bp, Homo sapien
ctccaattgctttgccctgcatctt

SEQ ID NO: 3331457 - DNA, 25 bp, Homo sapien
ttgtacatctgttaacatctgccat

SEQ ID NO: 3331458 - DNA, 25 bp, Homo sapien
ctctctcatagaatgtttatttaag

SEQ ID NO: 3331459 - DNA, 25 bp, Homo sapien
ttatttaagaatcctggtatagcgt

SEQ ID NO: 3331460 - DNA, 25 bp, Homo sapien
ggtacttgtagctttatatggtctc

SEQ ID NO: 3331461 - DNA, 25 bp, Homo sapien
tagcgttatatttattcatggtact

SEQ ID NO: 3331462 - DNA, 25 bp, Homo sapien
ccacacatccactaacattcgtttt

SEQ ID NO: 3331463 - DNA, 25 bp, Homo sapien
ccactaacattcgttttctaaagtg

SEQ ID NO: 3331464 - DNA, 25 bp, Homo sapien
actaacattcgttttctaaagtgtg

SEQ ID NO: 3331465 - DNA, 25 bp, Homo sapien
catccactaacattcgttttctaaa

SEQ ID NO: 3331466 - DNA, 25 bp, Homo sapien
cttcagggtagtggcttggcttgct

SEQ ID NO: 3331467 - DNA, 25 bp, Homo sapien
taatgacgctcttgtacaaaagcat

SEQ ID NO: 3331468 - DNA, 25 bp, Homo sapien
tatgtcagcctagagggaccttgtc

SEQ ID NO: 3331469 - DNA, 25 bp, Homo sapien
tgtacctgattggtggcagacggca

SEQ ID NO: 3331470 - DNA, 25 bp, Homo sapien
tctgtttttgcaccgtacacagcca

SEQ ID NO: 3331471 - DNA, 25 bp, Homo sapien
ctataggttgccagttggaacctct

SEQ ID NO: 3331472 - DNA, 25 bp, Homo sapien
ttttgcaccgtacacagccacatgc

SEQ ID NO: 3331473 - DNA, 25 bp, Homo sapien
aacctctgtttttgcaccgtacaca

SEQ ID NO: 3331474 - DNA, 25 bp, Homo sapien
tatttgctaaaataatgaatgagtt

SEQ ID NO: 3331475 - DNA, 25 bp, Homo sapien
tttgctaaaataatgaatgagtttg

SEQ ID NO: 3331476 - DNA, 25 bp, Homo sapien
tgctaaaataatgaatgagtttgtt

SEQ ID NO: 3331477 - DNA, 25 bp, Homo sapien
ttatttgctaaaataatgaatgagt

SEQ ID NO: 3331478 - DNA, 25 bp, Homo sapien
tgctaatgagtggtaggagagcttc

SEQ ID NO: 3331479 - DNA, 25 bp, Homo sapien
cctgctaatgagtggtaggagagct

SEQ ID NO: 3331480 - DNA, 25 bp, Homo sapien
gcaggtgcctgctaatgagtggtag

SEQ ID NO: 3331481 - DNA, 25 bp, Homo sapien
ctaatgagtggtaggagagcttctt

SEQ ID NO: 3331482 - DNA, 25 bp, Homo sapien
tgacaggatctaggattggtaccca

SEQ ID NO: 3331483 - DNA, 25 bp, Homo sapien
gagagcctgttgaacgtttaccacc

SEQ ID NO: 3331484 - DNA, 25 bp, Homo sapien
cagaaagtcttaactccagaggcta

SEQ ID NO: 3331485 - DNA, 25 bp, Homo sapien
tcatcgccaagagaaggatcccttt

SEQ ID NO: 3331486 - DNA, 25 bp, Homo sapien
ggatttaacgcattctgagactgag

SEQ ID NO: 3331487 - DNA, 25 bp, Homo sapien
aaaatggatttcaagctctggagac

SEQ ID NO: 3331488 - DNA, 25 bp, Homo sapien
tcactaaggagttgggcaaagttct

SEQ ID NO: 3331489 - DNA, 25 bp, Homo sapien
caaactcattgctttggacatgggc

SEQ ID NO: 3331490 - DNA, 25 bp, Homo sapien
ccactagacagggagcaaataaagc

SEQ ID NO: 3331491 - DNA, 25 bp, Homo sapien
taggcaagatcaactagctactgca

SEQ ID NO: 3331492 - DNA, 25 bp, Homo sapien
gcttaaaggaccatacatgggagtt

SEQ ID NO: 3331493 - DNA, 25 bp, Homo sapien
tagacattgaattaggaccacatag

SEQ ID NO: 3331494 - DNA, 25 bp, Homo sapien
tcagctcaacgttcaggatctgtgg

SEQ ID NO: 3331495 - DNA, 25 bp, Homo sapien
cggtagacaaaactaagtcccatct

SEQ ID NO: 3331496 - DNA, 25 bp, Homo sapien
gatctgtgggtattgaacacttctc

SEQ ID NO: 3331497 - DNA, 25 bp, Homo sapien
agtggttgttgtggtcctgcaaagc

SEQ ID NO: 3331498 - DNA, 25 bp, Homo sapien
tctatttttttctgtacattggtca

SEQ ID NO: 3331499 - DNA, 25 bp, Homo sapien
ctatttttttctgtacattggtcat

SEQ ID NO: 3331500 - DNA, 25 bp, Homo sapien
ctactaatttttctctattcacttc

SEQ ID NO: 3331501 - DNA, 25 bp, Homo sapien
taatttttctctattcacttctatt

SEQ ID NO: 3331502 - DNA, 25 bp, Homo sapien
acatttacacgggagaacacaggca

SEQ ID NO: 3331503 - DNA, 25 bp, Homo sapien
taagtgcctccatatactagaacct

SEQ ID NO: 3331504 - DNA, 25 bp, Homo sapien
tgctcaaatttaccaatcatcaagg

SEQ ID NO: 3331505 - DNA, 25 bp, Homo sapien
gactgataatacaactaaggtcatg

SEQ ID NO: 3331506 - DNA, 25 bp, Homo sapien
agtagtatgcctcaagcctcatgta

SEQ ID NO: 3331507 - DNA, 25 bp, Homo sapien
tatgcctcaagcctcatgtacttgg

SEQ ID NO: 3331508 - DNA, 25 bp, Homo sapien
tcaagaaagtagtatgcctcaagcc

SEQ ID NO: 3331509 - DNA, 25 bp, Homo sapien
cttcttcaagaaagtagtatgcctc

SEQ ID NO: 3331510 - DNA, 25 bp, Homo sapien
taactcaaggactattttgctgacc

SEQ ID NO: 3331511 - DNA, 25 bp, Homo sapien
tgaatatgaccacccttaggttagc

SEQ ID NO: 3331512 - DNA, 25 bp, Homo sapien
cagtctcaggtcatgtcttcttggc

SEQ ID NO: 3331513 - DNA, 25 bp, Homo sapien
gctgacccaggtatcaaagaatgaa

SEQ ID NO: 3331514 - DNA, 25 bp, Homo sapien
attgtccagctaaatccagtcctaa

SEQ ID NO: 3331515 - DNA, 25 bp, Homo sapien
tatattagacaatgttgattgtcca

SEQ ID NO: 3331516 - DNA, 25 bp, Homo sapien
cagctaaatccagtcctaacctcat

SEQ ID NO: 3331517 - DNA, 25 bp, Homo sapien
gtccagctaaatccagtcctaacct

SEQ ID NO: 3331518 - DNA, 25 bp, Homo sapien
gaatctgccatcagtgtagtaaggc

SEQ ID NO: 3331519 - DNA, 25 bp, Homo sapien
tagcaatgctgtagcacacgtacca

SEQ ID NO: 3331520 - DNA, 25 bp, Homo sapien
gagattggtgacaagattgggaacc

SEQ ID NO: 3331521 - DNA, 25 bp, Homo sapien
taatcacaggattgaagcaaatact

SEQ ID NO: 3331522 - DNA, 25 bp, Homo sapien
cttcagaaacttctgttttgttttg

SEQ ID NO: 3331523 - DNA, 25 bp, Homo sapien
atttctgctgtccttcagaaacttc

SEQ ID NO: 3331524 - DNA, 25 bp, Homo sapien
ttctgctgtccttcagaaacttctg

SEQ ID NO: 3331525 - DNA, 25 bp, Homo sapien
tttctgctgtccttcagaaacttct

SEQ ID NO: 3331526 - DNA, 25 bp, Homo sapien
tttcttcttagtatgacatcatgac

SEQ ID NO: 3331527 - DNA, 25 bp, Homo sapien
tctgaacatctaacagtctcatctc

SEQ ID NO: 3331528 - DNA, 25 bp, Homo sapien
ctcaggtggtttcttcttagtatga

SEQ ID NO: 3331529 - DNA, 25 bp, Homo sapien
agtctcatctcaggtggtttcttct

SEQ ID NO: 3331530 - DNA, 25 bp, Homo sapien
ccattgacatcaaattggccaagct

SEQ ID NO: 3331531 - DNA, 25 bp, Homo sapien
cattgacatcaaattggccaagctt

SEQ ID NO: 3331532 - DNA, 25 bp, Homo sapien
aaaagcattgctcaggtgtgaatgc

SEQ ID NO: 3331533 - DNA, 25 bp, Homo sapien
aaagcattgctcaggtgtgaatgct

SEQ ID NO: 3331534 - DNA, 25 bp, Homo sapien
tgaacttgtttcatcaattttcttg

SEQ ID NO: 3331535 - DNA, 25 bp, Homo sapien
tctatgatttccacattgggcactt

SEQ ID NO: 3331536 - DNA, 25 bp, Homo sapien
aaatctatgatttccacattgggca

SEQ ID NO: 3331537 - DNA, 25 bp, Homo sapien
aatctatgatttccacattgggcac

SEQ ID NO: 3331538 - DNA, 25 bp, Homo sapien
gatgggcttgaaggattaaaacaca

SEQ ID NO: 3331539 - DNA, 25 bp, Homo sapien
agtattttcaatcccaagaacaagg

SEQ ID NO: 3331540 - DNA, 25 bp, Homo sapien
tgtggcattggttccaaagccttgt

SEQ ID NO: 3331541 - DNA, 25 bp, Homo sapien
gcatatgctataaatctttcccaga

SEQ ID NO: 3331542 - DNA, 25 bp, Homo sapien
tgcactttgggtcttttgtatttgt

SEQ ID NO: 3331543 - DNA, 25 bp, Homo sapien
caaccatctaggtcaatcctggtgg

SEQ ID NO: 3331544 - DNA, 25 bp, Homo sapien
catctaggtcaatcctggtggagcc

SEQ ID NO: 3331545 - DNA, 25 bp, Homo sapien
caggaacaaccatctaggtcaatcc

SEQ ID NO: 3331546 - DNA, 25 bp, Homo sapien
gctccaggattctgacgagtcagct

SEQ ID NO: 3331547 - DNA, 25 bp, Homo sapien
gattctgacgagtcagcttgaagag

SEQ ID NO: 3331548 - DNA, 25 bp, Homo sapien
caggattctgacgagtcagcttgaa

SEQ ID NO: 3331549 - DNA, 25 bp, Homo sapien
tccaggattctgacgagtcagcttg

SEQ ID NO: 3331550 - DNA, 25 bp, Homo sapien
actgggaactttccgcggcattgtc

SEQ ID NO: 3331551 - DNA, 25 bp, Homo sapien
ctttccgcggcattgtccccagcca

SEQ ID NO: 3331552 - DNA, 25 bp, Homo sapien
tggggactgggaactttccgcggca

SEQ ID NO: 3331553 - DNA, 25 bp, Homo sapien
actttccgcggcattgtccccagcc

SEQ ID NO: 3331554 - DNA, 25 bp, Homo sapien
tgacgtgtctgtttggcggccagtt

SEQ ID NO: 3331555 - DNA, 25 bp, Homo sapien
gcaaaaacggagaagccgagcgctc

SEQ ID NO: 3331556 - DNA, 25 bp, Homo sapien
tttggccaatcatcggcagctcggt

SEQ ID NO: 3331557 - DNA, 25 bp, Homo sapien
ctcctgggcgattggttggcagaat

SEQ ID NO: 3331558 - DNA, 25 bp, Homo sapien
actaggcactgtcattccacaccca

SEQ ID NO: 3331559 - DNA, 25 bp, Homo sapien
tactaggcactgtcattccacaccc

SEQ ID NO: 3331560 - DNA, 25 bp, Homo sapien
ctaggcactgtcattccacacccag

SEQ ID NO: 3331561 - DNA, 25 bp, Homo sapien
cctactaggcactgtcattccacac

SEQ ID NO: 3331562 - DNA, 25 bp, Homo sapien
tctcagtgtgatatgctcagggtca

SEQ ID NO: 3331563 - DNA, 25 bp, Homo sapien
tatctcagtgtgatatgctcagggt

SEQ ID NO: 3331564 - DNA, 25 bp, Homo sapien
tcagtgtgatatgctcagggtcatc

SEQ ID NO: 3331565 - DNA, 25 bp, Homo sapien
cagtgtgatatgctcagggtcatcc

SEQ ID NO: 3331566 - DNA, 25 bp, Homo sapien
aaggtgagggagaaatgatgatgac

SEQ ID NO: 3331567 - DNA, 25 bp, Homo sapien
ttttcttctttgccggagaggacca

SEQ ID NO: 3331568 - DNA, 25 bp, Homo sapien
atgatgatgacggatgttttcttct

SEQ ID NO: 3331569 - DNA, 25 bp, Homo sapien
ttcttctttgccggagaggaccatg

SEQ ID NO: 3331570 - DNA, 25 bp, Homo sapien
tggacagctatctcattccccaggg

SEQ ID NO: 3331571 - DNA, 25 bp, Homo sapien
gggtaaaaatgttgggagcctagca

SEQ ID NO: 3331572 - DNA, 25 bp, Homo sapien
tcttggtgcagaccttctgtgtggt

SEQ ID NO: 3331573 - DNA, 25 bp, Homo sapien
gacagctatctcattccccagggaa

SEQ ID NO: 3331574 - DNA, 25 bp, Homo sapien
aaatctcctcagtgctggagtctgc

SEQ ID NO: 3331575 - DNA, 25 bp, Homo sapien
tcaaatctcctcagtgctggagtct

SEQ ID NO: 3331576 - DNA, 25 bp, Homo sapien
aatctcctcagtgctggagtctgca

SEQ ID NO: 3331577 - DNA, 25 bp, Homo sapien
atctcctcagtgctggagtctgcat

SEQ ID NO: 3331578 - DNA, 25 bp, Homo sapien
ctagtaaggtcattttgactgtgag

SEQ ID NO: 3331579 - DNA, 25 bp, Homo sapien
taaggtcattttgactgtgaggcag

SEQ ID NO: 3331580 - DNA, 25 bp, Homo sapien
gtaaggtcattttgactgtgaggca

SEQ ID NO: 3331581 - DNA, 25 bp, Homo sapien
agtaaggtcattttgactgtgaggc

SEQ ID NO: 3331582 - DNA, 25 bp, Homo sapien
ctgacaacgtgtcatcccatagtcc

SEQ ID NO: 3331583 - DNA, 25 bp, Homo sapien
caacgtgtcatcccatagtcctcct

SEQ ID NO: 3331584 - DNA, 25 bp, Homo sapien
gacaacgtgtcatcccatagtcctc

SEQ ID NO: 3331585 - DNA, 25 bp, Homo sapien
tgacaacgtgtcatcccatagtcct

SEQ ID NO: 3331586 - DNA, 25 bp, Homo sapien
ggccatttgggcattgcctttgcca

SEQ ID NO: 3331587 - DNA, 25 bp, Homo sapien
taattaagagctggcacatacagac

SEQ ID NO: 3331588 - DNA, 25 bp, Homo sapien
cacattttactgtttgggactagga

SEQ ID NO: 3331589 - DNA, 25 bp, Homo sapien
gggactaggataaccatatgctgca

SEQ ID NO: 3331590 - DNA, 25 bp, Homo sapien
tccctgaccttgcacacaaaaaatc

SEQ ID NO: 3331591 - DNA, 25 bp, Homo sapien
tcagttcttgcttactcctctttcc

SEQ ID NO: 3331592 - DNA, 25 bp, Homo sapien
tctttccctgaccttgcacacaaaa

SEQ ID NO: 3331593 - DNA, 25 bp, Homo sapien
cctctttccctgaccttgcacacaa

SEQ ID NO: 3331594 - DNA, 25 bp, Homo sapien
gcctataaggcacagacagtctcca

SEQ ID NO: 3331595 - DNA, 25 bp, Homo sapien
cattctcttgaatccaaagtactgg

SEQ ID NO: 3331596 - DNA, 25 bp, Homo sapien
aagtactggttaccatcctggccta

SEQ ID NO: 3331597 - DNA, 25 bp, Homo sapien
ccattagacctttcataattgccat

SEQ ID NO: 3331598 - DNA, 25 bp, Homo sapien
gtcccattgcccagaattttctgaa

SEQ ID NO: 3331599 - DNA, 25 bp, Homo sapien
tgcccagaattttctgaactgtaag

SEQ ID NO: 3331600 - DNA, 25 bp, Homo sapien
ccattgcccagaattttctgaactg

SEQ ID NO: 3331601 - DNA, 25 bp, Homo sapien
tgtcccattgcccagaattttctga

SEQ ID NO: 3331602 - DNA, 25 bp, Homo sapien
ggatattaagtctgaagctgctgga

SEQ ID NO: 3331603 - DNA, 25 bp, Homo sapien
cttctttgtcgtttcctatatccat

SEQ ID NO: 3331604 - DNA, 25 bp, Homo sapien
ttcttctttgtcgtttcctatatcc

SEQ ID NO: 3331605 - DNA, 25 bp, Homo sapien
tcttctttgtcgtttcctatatcca

SEQ ID NO: 3331606 - DNA, 25 bp, Homo sapien
aatagaatgcaagggagatttgccc

SEQ ID NO: 3331607 - DNA, 25 bp, Homo sapien
gaaacaacttaaagcaagcccaatc

SEQ ID NO: 3331608 - DNA, 25 bp, Homo sapien
tgtaaggagtccattatttctgtcc

SEQ ID NO: 3331609 - DNA, 25 bp, Homo sapien
tctgtgagcagagggattacattga

SEQ ID NO: 3331610 - DNA, 25 bp, Homo sapien
gcacatggactgtgtacataaaaca

SEQ ID NO: 3331611 - DNA, 25 bp, Homo sapien
taccaaataagccaacatatgtgat

SEQ ID NO: 3331612 - DNA, 25 bp, Homo sapien
tcatgtttgacaaatgctttctgta

SEQ ID NO: 3331613 - DNA, 25 bp, Homo sapien
caccttctaaagaggcccaaataag

SEQ ID NO: 3331614 - DNA, 25 bp, Homo sapien
ggcagccatagttcaaagacacaat

SEQ ID NO: 3331615 - DNA, 25 bp, Homo sapien
gattcttgataacctctttcacaat

SEQ ID NO: 3331616 - DNA, 25 bp, Homo sapien
taacctctttcacaatcctaggcag

SEQ ID NO: 3331617 - DNA, 25 bp, Homo sapien
gataacctctttcacaatcctaggc

SEQ ID NO: 3331618 - DNA, 25 bp, Homo sapien
tcttgataacctctttcacaatcct

SEQ ID NO: 3331619 - DNA, 25 bp, Homo sapien
ttcttgaaaaccaaagagtagcctc

SEQ ID NO: 3331620 - DNA, 25 bp, Homo sapien
tcttgaaaaccaaagagtagcctct

SEQ ID NO: 3331621 - DNA, 25 bp, Homo sapien
caccacgcgcagccacactctttct

SEQ ID NO: 3331622 - DNA, 25 bp, Homo sapien
cgcgcagccacactctttcttgaaa

SEQ ID NO: 3331623 - DNA, 25 bp, Homo sapien
ggtgatgggtctcaggctgtagacc

SEQ ID NO: 3331624 - DNA, 25 bp, Homo sapien
ctggtgatgggtctcaggctgtaga

SEQ ID NO: 3331625 - DNA, 25 bp, Homo sapien
tgatgggtctcaggctgtagaccgc

SEQ ID NO: 3331626 - DNA, 25 bp, Homo sapien
gatgggtctcaggctgtagaccgct

SEQ ID NO: 3331627 - DNA, 25 bp, Homo sapien
gggggtgcacggcaaattgtcctat

SEQ ID NO: 3331628 - DNA, 25 bp, Homo sapien
caaactccataaaggagttgtctgc

SEQ ID NO: 3331629 - DNA, 25 bp, Homo sapien
ctggtaccaagcaccaacaggatat

SEQ ID NO: 3331630 - DNA, 25 bp, Homo sapien
caagcaccaacaggatatttgtcaa

SEQ ID NO: 3331631 - DNA, 25 bp, Homo sapien
cctaaagctcggtgtccctgatggt

SEQ ID NO: 3331632 - DNA, 25 bp, Homo sapien
acctaaagctcggtgtccctgatgg

SEQ ID NO: 3331633 - DNA, 25 bp, Homo sapien
agttacctaaagctcggtgtccctg

SEQ ID NO: 3331634 - DNA, 25 bp, Homo sapien
ttacctaaagctcggtgtccctgat

SEQ ID NO: 3331635 - DNA, 25 bp, Homo sapien
aagcatctcacggttgctgccaaat

SEQ ID NO: 3331636 - DNA, 25 bp, Homo sapien
accagggagggatcaatgtgtaaat

SEQ ID NO: 3331637 - DNA, 25 bp, Homo sapien
agcatctcacggttgctgccaaatg

SEQ ID NO: 3331638 - DNA, 25 bp, Homo sapien
cagggagggatcaatgtgtaaatga

SEQ ID NO: 3331639 - DNA, 25 bp, Homo sapien
atgaatggtgccttttttgtacagg

SEQ ID NO: 3331640 - DNA, 25 bp, Homo sapien
ccagccatgaatggtgccttttttg

SEQ ID NO: 3331641 - DNA, 25 bp, Homo sapien
catgaatggtgccttttttgtacag

SEQ ID NO: 3331642 - DNA, 25 bp, Homo sapien
gccatgaatggtgccttttttgtac

SEQ ID NO: 3331643 - DNA, 25 bp, Homo sapien
tcatctgtgttgaagctcaggcaca

SEQ ID NO: 3331644 - DNA, 25 bp, Homo sapien
ggaaagcattcttaacatacctaca

SEQ ID NO: 3331645 - DNA, 25 bp, Homo sapien
ccattgcagggtgtgaaggctttct

SEQ ID NO: 3331646 - DNA, 25 bp, Homo sapien
tccaaattcaggcatggccattgca

SEQ ID NO: 3331647 - DNA, 25 bp, Homo sapien
gagatctatgcttttgtcctgtgga

SEQ ID NO: 3331648 - DNA, 25 bp, Homo sapien
ggcggctgctctgtaaccgtatgag

SEQ ID NO: 3331649 - DNA, 25 bp, Homo sapien
tcttacaccgtttcttggcggctgc

SEQ ID NO: 3331650 - DNA, 25 bp, Homo sapien
cattagcacgagtccaaaattgtgt

SEQ ID NO: 3331651 - DNA, 25 bp, Homo sapien
taatgttctacattggttgtagcag

SEQ ID NO: 3331652 - DNA, 25 bp, Homo sapien
ttcttccttaatgttctacattggt

SEQ ID NO: 3331653 - DNA, 25 bp, Homo sapien
ccttaatgttctacattggttgtag

SEQ ID NO: 3331654 - DNA, 25 bp, Homo sapien
tctacattggttgtagcagttgttt

SEQ ID NO: 3331655 - DNA, 25 bp, Homo sapien
gaggctgctccagtgagttcctcca

SEQ ID NO: 3331656 - DNA, 25 bp, Homo sapien
ccttggggatctcatggcatagtag

SEQ ID NO: 3331657 - DNA, 25 bp, Homo sapien
tagagtcttactgctgtgccccact

SEQ ID NO: 3331658 - DNA, 25 bp, Homo sapien
ggaccccagaaagcggacagaattg

SEQ ID NO: 3331659 - DNA, 25 bp, Homo sapien
tggacgttgagacgaacacactggc

SEQ ID NO: 3331660 - DNA, 25 bp, Homo sapien
cgttgaccagtggaactacatggag

SEQ ID NO: 3331661 - DNA, 25 bp, Homo sapien
acgtcgagaggacgccaagagcaca

SEQ ID NO: 3331662 - DNA, 25 bp, Homo sapien
gagcacaccgacaggcaccggcagg

SEQ ID NO: 3331663 - DNA, 25 bp, Homo sapien
ttcaagccagagcttactcattgct

SEQ ID NO: 3331664 - DNA, 25 bp, Homo sapien
tctttttgcgtcttttgcctagttc

SEQ ID NO: 3331665 - DNA, 25 bp, Homo sapien
cagtctgaattcacccttcatgtcc

SEQ ID NO: 3331666 - DNA, 25 bp, Homo sapien
catgaggacgttcttggaccaaaac

SEQ ID NO: 3331667 - DNA, 25 bp, Homo sapien
agaatttcttgtattcaagtgccat

SEQ ID NO: 3331668 - DNA, 25 bp, Homo sapien
tctggcttacaagagagatccaaga

SEQ ID NO: 3331669 - DNA, 25 bp, Homo sapien
ctctggcttacaagagagatccaag

SEQ ID NO: 3331670 - DNA, 25 bp, Homo sapien
tctcagtttaatgtccataatgcaa

SEQ ID NO: 3331671 - DNA, 25 bp, Homo sapien
gtttaatgtccataatgcaaataga

SEQ ID NO: 3331672 - DNA, 25 bp, Homo sapien
cttcatcaccttcagcaatagcagg

SEQ ID NO: 3331673 - DNA, 25 bp, Homo sapien
caatagcaggcaccataatgtgtcc

SEQ ID NO: 3331674 - DNA, 25 bp, Homo sapien
gatcagattgaccatgtaaactaca

SEQ ID NO: 3331675 - DNA, 25 bp, Homo sapien
tgttgatcagcacaacaaagaaaat

SEQ ID NO: 3331676 - DNA, 25 bp, Homo sapien
ggctgaggaggagcattatattttg

SEQ ID NO: 3331677 - DNA, 25 bp, Homo sapien
tatgtagggtttttagggtggatca

SEQ ID NO: 3331678 - DNA, 25 bp, Homo sapien
ttacagtgtctgaagttgaggatcc

SEQ ID NO: 3331679 - DNA, 25 bp, Homo sapien
taaggaggcttcaagatcaaagaga

SEQ ID NO: 3331680 - DNA, 25 bp, Homo sapien
gaccctgaaacaggagtctgatttg

SEQ ID NO: 3331681 - DNA, 25 bp, Homo sapien
tagtggttccaagaatgatgggtca

SEQ ID NO: 3331682 - DNA, 25 bp, Homo sapien
gctgtccatccatatgagaaaaatg

SEQ ID NO: 3331683 - DNA, 25 bp, Homo sapien
tgcttgaagtaataagctgtccatc

SEQ ID NO: 3331684 - DNA, 25 bp, Homo sapien
tcttgccagcataggaatttatcag

SEQ ID NO: 3331685 - DNA, 25 bp, Homo sapien
ggagatgaggagtacttaattcccc

SEQ ID NO: 3331686 - DNA, 25 bp, Homo sapien
gctaacattgtttcctactttatca

SEQ ID NO: 3331687 - DNA, 25 bp, Homo sapien
tctgctgtggaaattcaattgtctg

SEQ ID NO: 3331688 - DNA, 25 bp, Homo sapien
atcactaaattttattgtcaggaga

SEQ ID NO: 3331689 - DNA, 25 bp, Homo sapien
aacaatatcctccttagtgctaaca

SEQ ID NO: 3331690 - DNA, 25 bp, Homo sapien
atggatatgaatgttacaggtgatg

SEQ ID NO: 3331691 - DNA, 25 bp, Homo sapien
atgcagtggccatacatgtcatagc

SEQ ID NO: 3331692 - DNA, 25 bp, Homo sapien
gggtagaagagggcatggatatgaa

SEQ ID NO: 3331693 - DNA, 25 bp, Homo sapien
tgcagtggccatacatgtcatagcc

SEQ ID NO: 3331694 - DNA, 25 bp, Homo sapien
tatgcaggaggatagcaaccaggat

SEQ ID NO: 3331695 - DNA, 25 bp, Homo sapien
ggaggatagcaaccaggatgaagac

SEQ ID NO: 3331696 - DNA, 25 bp, Homo sapien
aatagtggtgccaaatgtctttatc

SEQ ID NO: 3331697 - DNA, 25 bp, Homo sapien
caaatgtctttatcctatgcaggag

SEQ ID NO: 3331698 - DNA, 25 bp, Homo sapien
gttgtagttgaattttcataggcca

SEQ ID NO: 3331699 - DNA, 25 bp, Homo sapien
tttcataggccattgcaagatttat

SEQ ID NO: 3331700 - DNA, 25 bp, Homo sapien
aaaggttgtagttgaattttcatag

SEQ ID NO: 3331701 - DNA, 25 bp, Homo sapien
tgcaagatttatacactcttccttt

SEQ ID NO: 3331702 - DNA, 25 bp, Homo sapien
gatgacattcagtgccactcagtag

SEQ ID NO: 3331703 - DNA, 25 bp, Homo sapien
ttctctcaggagattcacacagagt

SEQ ID NO: 3331704 - DNA, 25 bp, Homo sapien
cacacagagttcaggtgcccttgaa

SEQ ID NO: 3331705 - DNA, 25 bp, Homo sapien
gaagcagagtgattctcccgttgta

SEQ ID NO: 3331706 - DNA, 25 bp, Homo sapien
gttggaaggaggcaggtggcacgtc

SEQ ID NO: 3331707 - DNA, 25 bp, Homo sapien
aaggaggcaggtggcacgtcagcac

SEQ ID NO: 3331708 - DNA, 25 bp, Homo sapien
ttggaaggaggcaggtggcacgtca

SEQ ID NO: 3331709 - DNA, 25 bp, Homo sapien
gaggcaggtggcacgtcagcaccat

SEQ ID NO: 3331710 - DNA, 25 bp, Homo sapien
ctaatttggatgcctcataaaacag

SEQ ID NO: 3331711 - DNA, 25 bp, Homo sapien
atccttggacattgtctaatttgga

SEQ ID NO: 3331712 - DNA, 25 bp, Homo sapien
gttccacaaagaaggcgaactcagg

SEQ ID NO: 3331713 - DNA, 25 bp, Homo sapien
ttccacaaagaaggcgaactcagga

SEQ ID NO: 3331714 - DNA, 25 bp, Homo sapien
tacacttttttgaaactattcctca

SEQ ID NO: 3331715 - DNA, 25 bp, Homo sapien
ataatatacacttttttgaaactat

SEQ ID NO: 3331716 - DNA, 25 bp, Homo sapien
cataatatacacttttttgaaacta

SEQ ID NO: 3331717 - DNA, 25 bp, Homo sapien
acacttttttgaaactattcctcat

SEQ ID NO: 3331718 - DNA, 25 bp, Homo sapien
ctgtcgacacctgacaactgtaggg

SEQ ID NO: 3331719 - DNA, 25 bp, Homo sapien
gtagggacaagccttccttggccat

SEQ ID NO: 3331720 - DNA, 25 bp, Homo sapien
ggtgagtgttcagtaatgtgctgca

SEQ ID NO: 3331721 - DNA, 25 bp, Homo sapien
tgctgcaaatcctgtcgacacctga

SEQ ID NO: 3331722 - DNA, 25 bp, Homo sapien
gatggatgaacccacgaagatgaga

SEQ ID NO: 3331723 - DNA, 25 bp, Homo sapien
gagggtgattctcccaagtgaagca

SEQ ID NO: 3331724 - DNA, 25 bp, Homo sapien
tctccttcaggaggttgccacaggc

SEQ ID NO: 3331725 - DNA, 25 bp, Homo sapien
gagtgggacctctcaacaggagtct

SEQ ID NO: 3331726 - DNA, 25 bp, Homo sapien
acagatgcttctaacatctcttctt

SEQ ID NO: 3331727 - DNA, 25 bp, Homo sapien
agaaacagatgcttctaacatctct

SEQ ID NO: 3331728 - DNA, 25 bp, Homo sapien
aaacagatgcttctaacatctcttc

SEQ ID NO: 3331729 - DNA, 25 bp, Homo sapien
tcaagaaacagatgcttctaacatc

SEQ ID NO: 3331730 - DNA, 25 bp, Homo sapien
gccttctagtctattgttattgtca

SEQ ID NO: 3331731 - DNA, 25 bp, Homo sapien
gaagaggccttctagtctattgtta

SEQ ID NO: 3331732 - DNA, 25 bp, Homo sapien
gttattgtcaaattgtgttacataa

SEQ ID NO: 3331733 - DNA, 25 bp, Homo sapien
gtcaaattgtgttacataaaacatg

SEQ ID NO: 3331734 - DNA, 25 bp, Homo sapien
gagacttgcagtcaacttggttcta

SEQ ID NO: 3331735 - DNA, 25 bp, Homo sapien
atactttaacgctctgtcctcaatg

SEQ ID NO: 3331736 - DNA, 25 bp, Homo sapien
tgatagatgtcagttagagaaaatt

SEQ ID NO: 3331737 - DNA, 25 bp, Homo sapien
tcagggatagtctgatagatgtcag

SEQ ID NO: 3331738 - DNA, 25 bp, Homo sapien
gtctgctaaacctgaaactatgatg

SEQ ID NO: 3331739 - DNA, 25 bp, Homo sapien
ccagtttcaaaaggtcggcttcctg

SEQ ID NO: 3331740 - DNA, 25 bp, Homo sapien
tcaaattctgctggattagggatct

SEQ ID NO: 3331741 - DNA, 25 bp, Homo sapien
gacacttcttctagtgagctcagaa

SEQ ID NO: 3331742 - DNA, 25 bp, Homo sapien
tcataagatgtcttagtatatatgc

SEQ ID NO: 3331743 - DNA, 25 bp, Homo sapien
catgcaatactaagcaacagatacc

SEQ ID NO: 3331744 - DNA, 25 bp, Homo sapien
cataagatgtcttagtatatatgca

SEQ ID NO: 3331745 - DNA, 25 bp, Homo sapien
ttcataagatgtcttagtatatatg

SEQ ID NO: 3331746 - DNA, 25 bp, Homo sapien
ctggttttattgaagatttcctcat

SEQ ID NO: 3331747 - DNA, 25 bp, Homo sapien
tcttgtgtcatggaagacttcactc

SEQ ID NO: 3331748 - DNA, 25 bp, Homo sapien
ggtacaggcacagctcacttgaggc

SEQ ID NO: 3331749 - DNA, 25 bp, Homo sapien
actgcagtgaaggaagaactcaatg

SEQ ID NO: 3331750 - DNA, 25 bp, Homo sapien
cctcatggtcaagaatgggtatcct

SEQ ID NO: 3331751 - DNA, 25 bp, Homo sapien
catgggattgggtcctattgcagca

SEQ ID NO: 3331752 - DNA, 25 bp, Homo sapien
ctgtttacagcccaatccctgtgta

SEQ ID NO: 3331753 - DNA, 25 bp, Homo sapien
tcagagtcatgggattgggtcctat

SEQ ID NO: 3331754 - DNA, 25 bp, Homo sapien
gtttacagcccaatccctgtgtagg

SEQ ID NO: 3331755 - DNA, 25 bp, Homo sapien
tacagataaacttggccaagtgttc

SEQ ID NO: 3331756 - DNA, 25 bp, Homo sapien
tgaaacctgggtcatgtacatggat

SEQ ID NO: 3331757 - DNA, 25 bp, Homo sapien
taggcaagagcctccatacgggact

SEQ ID NO: 3331758 - DNA, 25 bp, Homo sapien
aaagccagcatctatatgccagtag

SEQ ID NO: 3331759 - DNA, 25 bp, Homo sapien
atttctgaatagcccatttgtaaga

SEQ ID NO: 3331760 - DNA, 25 bp, Homo sapien
ggaaatagtctataatatctacaaa

SEQ ID NO: 3331761 - DNA, 25 bp, Homo sapien
caatttctgaatagcccatttgtaa

SEQ ID NO: 3331762 - DNA, 25 bp, Homo sapien
tcaatttctgaatagcccatttgta

SEQ ID NO: 3331763 - DNA, 25 bp, Homo sapien
tcttttgtctgatgaatatcctttg

SEQ ID NO: 3331764 - DNA, 25 bp, Homo sapien
atatcctttgggtcataattaagca

SEQ ID NO: 3331765 - DNA, 25 bp, Homo sapien
tatcctttgggtcataattaagcat

SEQ ID NO: 3331766 - DNA, 25 bp, Homo sapien
ttgtctgatgaatatcctttgggtc

SEQ ID NO: 3331767 - DNA, 25 bp, Homo sapien
tgatatatgttgacctcgatgccca

SEQ ID NO: 3331768 - DNA, 25 bp, Homo sapien
ttgggtaggataaatgcccgtgaat

SEQ ID NO: 3331769 - DNA, 25 bp, Homo sapien
cacttttactaagtggctgcaccat

SEQ ID NO: 3331770 - DNA, 25 bp, Homo sapien
tccaagtagcaaagtgtgagtgata

SEQ ID NO: 3331771 - DNA, 25 bp, Homo sapien
catgtagctgaaccctctgaaggag

SEQ ID NO: 3331772 - DNA, 25 bp, Homo sapien
gaaaggaagctcaagtaagcaacag

SEQ ID NO: 3331773 - DNA, 25 bp, Homo sapien
gagtttgggtaaaagcagatctaac

SEQ ID NO: 3331774 - DNA, 25 bp, Homo sapien
gatctaactactgcggtgggaagga

SEQ ID NO: 3331775 - DNA, 25 bp, Homo sapien
ttgtactagtagcatgctgatttgc

SEQ ID NO: 3331776 - DNA, 25 bp, Homo sapien
tactagtagcatgctgatttgcttc

SEQ ID NO: 3331777 - DNA, 25 bp, Homo sapien
tttgtcgttctgtatgattttttaa

SEQ ID NO: 3331778 - DNA, 25 bp, Homo sapien
atcttgatggattttgtagaaactg

SEQ ID NO: 3331779 - DNA, 25 bp, Homo sapien
cagggaactggattacctggacatc

SEQ ID NO: 3331780 - DNA, 25 bp, Homo sapien
tggcatgtgtagtaatatagtgcac

SEQ ID NO: 3331781 - DNA, 25 bp, Homo sapien
agtgcacagggaactggattacctg

SEQ ID NO: 3331782 - DNA, 25 bp, Homo sapien
cttcttgctcaagggtagtgttaac

SEQ ID NO: 3331783 - DNA, 25 bp, Homo sapien
gtgatgtgatatcattctttgcaga

SEQ ID NO: 3331784 - DNA, 25 bp, Homo sapien
tgtgatgtgatatcattctttgcag

SEQ ID NO: 3331785 - DNA, 25 bp, Homo sapien
ttctatccaggaaattactggacat

SEQ ID NO: 3331786 - DNA, 25 bp, Homo sapien
cagaattcttcattggatccgctga

SEQ ID NO: 3331787 - DNA, 25 bp, Homo sapien
gcagaattcttcattggatccgctg

SEQ ID NO: 3331788 - DNA, 25 bp, Homo sapien
agcaggattcaagcttgttcacaag

SEQ ID NO: 3331789 - DNA, 25 bp, Homo sapien
tttgcaggccttcataccagcagca

SEQ ID NO: 3331790 - DNA, 25 bp, Homo sapien
cagccagagtggttctttaagacag

SEQ ID NO: 3331791 - DNA, 25 bp, Homo sapien
ccttgtgagcttaggaacgtgctgc

SEQ ID NO: 3331792 - DNA, 25 bp, Homo sapien
acagtgacaggagtattccagagtt

SEQ ID NO: 3331793 - DNA, 25 bp, Homo sapien
gtgacaggagtattccagagtttgc

SEQ ID NO: 3331794 - DNA, 25 bp, Homo sapien
cagtgacaggagtattccagagttt

SEQ ID NO: 3331795 - DNA, 25 bp, Homo sapien
agtgacaggagtattccagagtttg

SEQ ID NO: 3331796 - DNA, 25 bp, Homo sapien
tgtatttactcagctcctctttcct

SEQ ID NO: 3331797 - DNA, 25 bp, Homo sapien
tccactttccttttgtatttactca

SEQ ID NO: 3331798 - DNA, 25 bp, Homo sapien
tttgtatttactcagctcctctttc

SEQ ID NO: 3331799 - DNA, 25 bp, Homo sapien
ttccttttgtatttactcagctcct

SEQ ID NO: 3331800 - DNA, 25 bp, Homo sapien
tctgagggttacagggtctactttc

SEQ ID NO: 3331801 - DNA, 25 bp, Homo sapien
aggtcacaccagcatcgctttcctt

SEQ ID NO: 3331802 - DNA, 25 bp, Homo sapien
ggcggcagatgtaacagagctgatt

SEQ ID NO: 3331803 - DNA, 25 bp, Homo sapien
tgagggtctagaatgctctgccttg

SEQ ID NO: 3331804 - DNA, 25 bp, Homo sapien
tggctaaactctatttggctttctg

SEQ ID NO: 3331805 - DNA, 25 bp, Homo sapien
tctgttcttggcttaagtgtttctt

SEQ ID NO: 3331806 - DNA, 25 bp, Homo sapien
ctgttcttggcttaagtgtttcttt

SEQ ID NO: 3331807 - DNA, 25 bp, Homo sapien
tcaattcaggcagagatcactatca

SEQ ID NO: 3331808 - DNA, 25 bp, Homo sapien
caggtaactacacagcagacgtggc

SEQ ID NO: 3331809 - DNA, 25 bp, Homo sapien
cagaacaagatgtcaaggccaggca

SEQ ID NO: 3331810 - DNA, 25 bp, Homo sapien
tagaaacagtggctcaaggcatatc

SEQ ID NO: 3331811 - DNA, 25 bp, Homo sapien
gaggagaagcagatcaagccaaacc

SEQ ID NO: 3331812 - DNA, 25 bp, Homo sapien
gcattaccttaactctgctaattga

SEQ ID NO: 3331813 - DNA, 25 bp, Homo sapien
ctcagtcattgctttagtagcatcc

SEQ ID NO: 3331814 - DNA, 25 bp, Homo sapien
tttttcatcatcgatggtgtcatca

SEQ ID NO: 3331815 - DNA, 25 bp, Homo sapien
gactttcttttgagcccggcctaca

SEQ ID NO: 3331816 - DNA, 25 bp, Homo sapien
catttgctttaactcagcctgtcgc

SEQ ID NO: 3331817 - DNA, 25 bp, Homo sapien
agcctcatggctatcaaaactcaca

SEQ ID NO: 3331818 - DNA, 25 bp, Homo sapien
taactcagcctgtcgctcgactttc

SEQ ID NO: 3331819 - DNA, 25 bp, Homo sapien
tgacctggtccctgcaaatgcggat

SEQ ID NO: 3331820 - DNA, 25 bp, Homo sapien
tctcctcaagtaggcatcgcgctga

SEQ ID NO: 3331821 - DNA, 25 bp, Homo sapien
tgtaagtcacccacatacagggagg

SEQ ID NO: 3331822 - DNA, 25 bp, Homo sapien
caagaagttcacgtaggcatagccc

SEQ ID NO: 3331823 - DNA, 25 bp, Homo sapien
ccttgccactgtgagtttgtcccct

SEQ ID NO: 3331824 - DNA, 25 bp, Homo sapien
tcccctggagttctttgagcaatcc

SEQ ID NO: 3331825 - DNA, 25 bp, Homo sapien
cttgccactgtgagtttgtcccctg

SEQ ID NO: 3331826 - DNA, 25 bp, Homo sapien
gtcccctggagttctttgagcaatc

SEQ ID NO: 3331827 - DNA, 25 bp, Homo sapien
ggcctcgggatcaccacacaaaggc

SEQ ID NO: 3331828 - DNA, 25 bp, Homo sapien
tggagttcagacacgactcccccag

SEQ ID NO: 3331829 - DNA, 25 bp, Homo sapien
agctttggcccggttcaagtgtgga

SEQ ID NO: 3331830 - DNA, 25 bp, Homo sapien
ggggatactaggtcacagctttggc

SEQ ID NO: 3331831 - DNA, 25 bp, Homo sapien
gaattcgcatccttagtctccacct

SEQ ID NO: 3331832 - DNA, 25 bp, Homo sapien
ctctttccaggaattcgcatcctta

SEQ ID NO: 3331833 - DNA, 25 bp, Homo sapien
tttccaggaattcgcatccttagtc

SEQ ID NO: 3331834 - DNA, 25 bp, Homo sapien
caggaattcgcatccttagtctcca

SEQ ID NO: 3331835 - DNA, 25 bp, Homo sapien
caccccccagtagggacagactgac

SEQ ID NO: 3331836 - DNA, 25 bp, Homo sapien
tccctgacccctgacacccgagcag

SEQ ID NO: 3331837 - DNA, 25 bp, Homo sapien
tgacccctgacacccgagcagccta

SEQ ID NO: 3331838 - DNA, 25 bp, Homo sapien
ggcaccccccagtagggacagactg

SEQ ID NO: 3331839 - DNA, 25 bp, Homo sapien
gtttcttgctctacagtaccaccag

SEQ ID NO: 3331840 - DNA, 25 bp, Homo sapien
tacagtaccaccagaaattgtatgc

SEQ ID NO: 3331841 - DNA, 25 bp, Homo sapien
tgaacagcagaaacagccctgactc

SEQ ID NO: 3331842 - DNA, 25 bp, Homo sapien
aatttacaatttgtctgaacagcag

SEQ ID NO: 3331843 - DNA, 25 bp, Homo sapien
taggcaagtgtctgctattcaggcc

SEQ ID NO: 3331844 - DNA, 25 bp, Homo sapien
tagctataacggaaagcccttgtac

SEQ ID NO: 3331845 - DNA, 25 bp, Homo sapien
tccttcatatagttgtctaggcaag

SEQ ID NO: 3331846 - DNA, 25 bp, Homo sapien
tattcaggcccaacattttccaaga

SEQ ID NO: 3331847 - DNA, 25 bp, Homo sapien
taccatttacaaatggaggcacaga

SEQ ID NO: 3331848 - DNA, 25 bp, Homo sapien
caacaattccatgaactaggtatta

SEQ ID NO: 3331849 - DNA, 25 bp, Homo sapien
gggcccataacttaaccttcatcca

SEQ ID NO: 3331850 - DNA, 25 bp, Homo sapien
ttattcaaaaccatactgcttagga

SEQ ID NO: 3331851 - DNA, 25 bp, Homo sapien
ggtctgttgctttacctggtattaa

SEQ ID NO: 3331852 - DNA, 25 bp, Homo sapien
tccaagatgcttcactggcaggtct

SEQ ID NO: 3331853 - DNA, 25 bp, Homo sapien
tctgtttccaaagtctagctctcaa

SEQ ID NO: 3331854 - DNA, 25 bp, Homo sapien
taatgaaatagttgtgggactggct

SEQ ID NO: 3331855 - DNA, 25 bp, Homo sapien
ctgtcctatggctgtttagttatct

SEQ ID NO: 3331856 - DNA, 25 bp, Homo sapien
actgtcctatggctgtttagttatc

SEQ ID NO: 3331857 - DNA, 25 bp, Homo sapien
tgtactgtcctatggctgtttagtt

SEQ ID NO: 3331858 - DNA, 25 bp, Homo sapien
ttctgtactgtcctatggctgttta

SEQ ID NO: 3331859 - DNA, 25 bp, Homo sapien
tcaacaaggtccgagaatgcaaggt

SEQ ID NO: 3331860 - DNA, 25 bp, Homo sapien
ggaacaccgtggaacatctaaagga

SEQ ID NO: 3331861 - DNA, 25 bp, Homo sapien
aatgcaaggtgtctgtccggaagcc

SEQ ID NO: 3331862 - DNA, 25 bp, Homo sapien
cctatgagaagagcgagcggaacac

SEQ ID NO: 3331863 - DNA, 25 bp, Homo sapien
attgtaattaaacgctgattaatag

SEQ ID NO: 3331864 - DNA, 25 bp, Homo sapien
taattaaacgctgattaatagcaga

SEQ ID NO: 3331865 - DNA, 25 bp, Homo sapien
ctaaattgtaattaaacgctgatta

SEQ ID NO: 3331866 - DNA, 25 bp, Homo sapien
tgtaattaaacgctgattaatagca

SEQ ID NO: 3331867 - DNA, 25 bp, Homo sapien
tacagcagcagtattccaataagtg

SEQ ID NO: 3331868 - DNA, 25 bp, Homo sapien
tgtgatttacctgacattaaagggc

SEQ ID NO: 3331869 - DNA, 25 bp, Homo sapien
taaagggcaaactaagcaatgagtt

SEQ ID NO: 3331870 - DNA, 25 bp, Homo sapien
agctattttctctataatactgtga

SEQ ID NO: 3331871 - DNA, 25 bp, Homo sapien
tcataagacgtaggataagaacagt

SEQ ID NO: 3331872 - DNA, 25 bp, Homo sapien
taagagactgtcaatttccagttcc

SEQ ID NO: 3331873 - DNA, 25 bp, Homo sapien
tgagatttgcacagtaggtgtaccg

SEQ ID NO: 3331874 - DNA, 25 bp, Homo sapien
caattgggcatgcttttgattactc

SEQ ID NO: 3331875 - DNA, 25 bp, Homo sapien
tcagccattggcaagagccaccagg

SEQ ID NO: 3331876 - DNA, 25 bp, Homo sapien
ttggcaagagccaccaggtctccag

SEQ ID NO: 3331877 - DNA, 25 bp, Homo sapien
caagagccaccaggtctccagtggc

SEQ ID NO: 3331878 - DNA, 25 bp, Homo sapien
cagccattggcaagagccaccaggt

SEQ ID NO: 3331879 - DNA, 25 bp, Homo sapien
cgcagctactgtgcatacacccatt

SEQ ID NO: 3331880 - DNA, 25 bp, Homo sapien
tacacccattttctagacgctggca

SEQ ID NO: 3331881 - DNA, 25 bp, Homo sapien
tctggttccgcagctactgtgcata

SEQ ID NO: 3331882 - DNA, 25 bp, Homo sapien
tgtgcatacacccattttctagacg

SEQ ID NO: 3331883 - DNA, 25 bp, Homo sapien
cacactcatgtgaaaacgtctcttt

SEQ ID NO: 3331884 - DNA, 25 bp, Homo sapien
tggacttccctggtaactctgatgg

SEQ ID NO: 3331885 - DNA, 25 bp, Homo sapien
gttctttgatccaccagatctctga

SEQ ID NO: 3331886 - DNA, 25 bp, Homo sapien
acaattcccgtgctctgttctttga

SEQ ID NO: 3331887 - DNA, 25 bp, Homo sapien
ctctgagttcaggtacttttccgtt

SEQ ID NO: 3331888 - DNA, 25 bp, Homo sapien
tctgagttcaggtacttttccgttg

SEQ ID NO: 3331889 - DNA, 25 bp, Homo sapien
cagagtcttcatcaatctgccaaaa

SEQ ID NO: 3331890 - DNA, 25 bp, Homo sapien
gagtcttcatcaatctgccaaaaca

SEQ ID NO: 3331891 - DNA, 25 bp, Homo sapien
tcatcaatctgccaaaacaatttgt

SEQ ID NO: 3331892 - DNA, 25 bp, Homo sapien
gtcttcatcaatctgccaaaacaat

SEQ ID NO: 3331893 - DNA, 25 bp, Homo sapien
tcaagcagcgacatccagtgagggc

SEQ ID NO: 3331894 - DNA, 25 bp, Homo sapien
tcaatcgtctttaggagcagtagcc

SEQ ID NO: 3331895 - DNA, 25 bp, Homo sapien
caaaccatggcacggagcatgctgg

SEQ ID NO: 3331896 - DNA, 25 bp, Homo sapien
gagacctgtctcagttacgttgtgg

SEQ ID NO: 3331897 - DNA, 25 bp, Homo sapien
tgtcacagaagcaaactggtcagca

SEQ ID NO: 3331898 - DNA, 25 bp, Homo sapien
tttcaggcaccaggttaatgtcaca

SEQ ID NO: 3331899 - DNA, 25 bp, Homo sapien
cagactttcaggcaccaggttaatg

SEQ ID NO: 3331900 - DNA, 25 bp, Homo sapien
atgtcacagaagcaaactggtcagc

SEQ ID NO: 3331901 - DNA, 25 bp, Homo sapien
atggcaatagcacccttgcagcaaa

SEQ ID NO: 3331902 - DNA, 25 bp, Homo sapien
ttgcagcaaatctcaggcacacagg

SEQ ID NO: 3331903 - DNA, 25 bp, Homo sapien
ctgaaaatggcaatagcacccttgc

SEQ ID NO: 3331904 - DNA, 25 bp, Homo sapien
tcctgaaaatggcaatagcaccctt

SEQ ID NO: 3331905 - DNA, 25 bp, Homo sapien
ctctcggatcccctttgggatctct

SEQ ID NO: 3331906 - DNA, 25 bp, Homo sapien
aaagagctctcggatcccctttggg

SEQ ID NO: 3331907 - DNA, 25 bp, Homo sapien
gagctctcggatcccctttgggatc

SEQ ID NO: 3331908 - DNA, 25 bp, Homo sapien
tctcggatcccctttgggatctctt

SEQ ID NO: 3331909 - DNA, 25 bp, Homo sapien
tgtagagctcagatattcctgtgat

SEQ ID NO: 3331910 - DNA, 25 bp, Homo sapien
atcttctggattctcggcaaatgaa

SEQ ID NO: 3331911 - DNA, 25 bp, Homo sapien
tcttctggattctcggcaaatgaat

SEQ ID NO: 3331912 - DNA, 25 bp, Homo sapien
ttttaaatctgcagatgtagagctc

SEQ ID NO: 3331913 - DNA, 25 bp, Homo sapien
ttgtctcttggaggacatagttatc

SEQ ID NO: 3331914 - DNA, 25 bp, Homo sapien
gtctcttggaggacatagttatcat

SEQ ID NO: 3331915 - DNA, 25 bp, Homo sapien
cttttgtctcttggaggacatagtt

SEQ ID NO: 3331916 - DNA, 25 bp, Homo sapien
ttttgtctcttggaggacatagtta

SEQ ID NO: 3331917 - DNA, 25 bp, Homo sapien
tattgtatgagagtggtaagtagca

SEQ ID NO: 3331918 - DNA, 25 bp, Homo sapien
ccattatgtgtgttgcgtttttaaa

SEQ ID NO: 3331919 - DNA, 25 bp, Homo sapien
catcttagaccacactactgtatgg

SEQ ID NO: 3331920 - DNA, 25 bp, Homo sapien
aaatggagtaaaacctattcttgag

SEQ ID NO: 3331921 - DNA, 25 bp, Homo sapien
ggcagtgagataccccggagaagac

SEQ ID NO: 3331922 - DNA, 25 bp, Homo sapien
ccggagaagactcattcaagggcat

SEQ ID NO: 3331923 - DNA, 25 bp, Homo sapien
agataccccggagaagactcattca

SEQ ID NO: 3331924 - DNA, 25 bp, Homo sapien
acccctggcagtgagataccccgga

SEQ ID NO: 3331925 - DNA, 25 bp, Homo sapien
gaggttttaagaggcgggctagtga

SEQ ID NO: 3331926 - DNA, 25 bp, Homo sapien
taattgtgggacttaacaaagagtg

SEQ ID NO: 3331927 - DNA, 25 bp, Homo sapien
ttaagaggcgggctagtgacttgta

SEQ ID NO: 3331928 - DNA, 25 bp, Homo sapien
atggtaattgtgggacttaacaaag

SEQ ID NO: 3331929 - DNA, 25 bp, Homo sapien
gtgttaggggtgtagcaacaacaat

SEQ ID NO: 3331930 - DNA, 25 bp, Homo sapien
gataaaggtgttaggggtgtagcaa

SEQ ID NO: 3331931 - DNA, 25 bp, Homo sapien
gttaggggtgtagcaacaacaataa

SEQ ID NO: 3331932 - DNA, 25 bp, Homo sapien
aggtgttaggggtgtagcaacaaca

SEQ ID NO: 3331933 - DNA, 25 bp, Homo sapien
taggagtggttgtggaacgaatttc

SEQ ID NO: 3331934 - DNA, 25 bp, Homo sapien
catcacatgggttaggagtggttgt

SEQ ID NO: 3331935 - DNA, 25 bp, Homo sapien
agcatcacatgggttaggagtggtt

SEQ ID NO: 3331936 - DNA, 25 bp, Homo sapien
atgggttaggagtggttgtggaacg

SEQ ID NO: 3331937 - DNA, 25 bp, Homo sapien
cataattggacttctgtattcttta

SEQ ID NO: 3331938 - DNA, 25 bp, Homo sapien
catatttcaggtatagatttgcttt

SEQ ID NO: 3331939 - DNA, 25 bp, Homo sapien
tgcccactggtgttgacataattgg

SEQ ID NO: 3331940 - DNA, 25 bp, Homo sapien
ttgacataattggacttctgtattc

SEQ ID NO: 3331941 - DNA, 25 bp, Homo sapien
ctctgacctcttataatgggtgggt

SEQ ID NO: 3331942 - DNA, 25 bp, Homo sapien
acctcttataatgggtgggtctctt

SEQ ID NO: 3331943 - DNA, 25 bp, Homo sapien
ggtctcttataatgggaaacctgag

SEQ ID NO: 3331944 - DNA, 25 bp, Homo sapien
aatgggtgggtctcttataatggga

SEQ ID NO: 3331945 - DNA, 25 bp, Homo sapien
cacatcagcaccactacttttggat

SEQ ID NO: 3331946 - DNA, 25 bp, Homo sapien
gctcaatctttcaacaattgtgaaa

SEQ ID NO: 3331947 - DNA, 25 bp, Homo sapien
ctttagtgagtaccgccttgacctt

SEQ ID NO: 3331948 - DNA, 25 bp, Homo sapien
tgaaagctgctagttcccacatcag

SEQ ID NO: 3331949 - DNA, 25 bp, Homo sapien
gatcaacacattgaaccagatcttg

SEQ ID NO: 3331950 - DNA, 25 bp, Homo sapien
caatgaaccatctatgctttcctgc

SEQ ID NO: 3331951 - DNA, 25 bp, Homo sapien
cagatcttggttcaatgaaccatct

SEQ ID NO: 3331952 - DNA, 25 bp, Homo sapien
taaaggaaccactttcgctgccaca

SEQ ID NO: 3331953 - DNA, 25 bp, Homo sapien
catgtgtaggatccaagactcccga

SEQ ID NO: 3331954 - DNA, 25 bp, Homo sapien
gaatagtgtttagctagcagagtga

SEQ ID NO: 3331955 - DNA, 25 bp, Homo sapien
aatactagcttagtatccaggaagc

SEQ ID NO: 3331956 - DNA, 25 bp, Homo sapien
tacaattgtctcagaatgttcttgg

SEQ ID NO: 3331957 - DNA, 25 bp, Homo sapien
tcaggcttaactcactttatttttc

SEQ ID NO: 3331958 - DNA, 25 bp, Homo sapien
tgtataaaaaccctgtgttgtagcc

SEQ ID NO: 3331959 - DNA, 25 bp, Homo sapien
tcttgtataaaaaccctgtgttgta

SEQ ID NO: 3331960 - DNA, 25 bp, Homo sapien
gtataaaaaccctgtgttgtagcca

SEQ ID NO: 3331961 - DNA, 25 bp, Homo sapien
tggtaaatatagtctccttccagag

SEQ ID NO: 3331962 - DNA, 25 bp, Homo sapien
ctggagcctgagtccgctgcacgga

SEQ ID NO: 3331963 - DNA, 25 bp, Homo sapien
cctgatagggagacttggtaaatat

SEQ ID NO: 3331964 - DNA, 25 bp, Homo sapien
agctggagcctgagtccgctgcacg

SEQ ID NO: 3331965 - DNA, 25 bp, Homo sapien
tggccttggcgaagttgcccagggt

SEQ ID NO: 3331966 - DNA, 25 bp, Homo sapien
ggtggccttggcgaagttgcccagg

SEQ ID NO: 3331967 - DNA, 25 bp, Homo sapien
cttagagatggcatcaaggtggcct

SEQ ID NO: 3331968 - DNA, 25 bp, Homo sapien
tgcccagggtggcagtgcagccccg

SEQ ID NO: 3331969 - DNA, 25 bp, Homo sapien
ttcttgggcacagatgcggagacga

SEQ ID NO: 3331970 - DNA, 25 bp, Homo sapien
gcacagatgcggagacgatgccagt

SEQ ID NO: 3331971 - DNA, 25 bp, Homo sapien
cttcttgggcacagatgcggagacg

SEQ ID NO: 3331972 - DNA, 25 bp, Homo sapien
ttgggcacagatgcggagacgatgc

SEQ ID NO: 3331973 - DNA, 25 bp, Homo sapien
gcttgggcaggatgatagccccacg

SEQ ID NO: 3331974 - DNA, 25 bp, Homo sapien
gcaggatgatagccccacggatggc

SEQ ID NO: 3331975 - DNA, 25 bp, Homo sapien
cggtgtggggcttgccagtcttgtt

SEQ ID NO: 3331976 - DNA, 25 bp, Homo sapien
tgggcaggatgatagccccacggat

SEQ ID NO: 3331977 - DNA, 25 bp, Homo sapien
ccttgaacctgtgcgctggccagca

SEQ ID NO: 3331978 - DNA, 25 bp, Homo sapien
taacacccaggcctacgtggccatt

SEQ ID NO: 3331979 - DNA, 25 bp, Homo sapien
aacctgtgcgctggccagcatgggt

SEQ ID NO: 3331980 - DNA, 25 bp, Homo sapien
caccggcattatcttcaaaacctcg

SEQ ID NO: 3331981 - DNA, 25 bp, Homo sapien
tcccagatgccactaccgaaacctc

SEQ ID NO: 3331982 - DNA, 25 bp, Homo sapien
ggtcccagatgccactaccgaaacc

SEQ ID NO: 3331983 - DNA, 25 bp, Homo sapien
aagccaccgcggttgcccatcccag

SEQ ID NO: 3331984 - DNA, 25 bp, Homo sapien
cacggtcccagatgccactaccgaa

SEQ ID NO: 3331985 - DNA, 25 bp, Homo sapien
tgacaataaccatgggatcacctag

SEQ ID NO: 3331986 - DNA, 25 bp, Homo sapien
tgagtgtgaggtaatttgcagccca

SEQ ID NO: 3331987 - DNA, 25 bp, Homo sapien
cacaaatagcttttagggccagcaa

SEQ ID NO: 3331988 - DNA, 25 bp, Homo sapien
taccatgagaaacttcaagaagccg

SEQ ID NO: 3331989 - DNA, 25 bp, Homo sapien
catcatgttttagtttgagtagttt

SEQ ID NO: 3331990 - DNA, 25 bp, Homo sapien
catgtcatcatgttttagtttgagt

SEQ ID NO: 3331991 - DNA, 25 bp, Homo sapien
gtcatcatgttttagtttgagtagt

SEQ ID NO: 3331992 - DNA, 25 bp, Homo sapien
tgtcatcatgttttagtttgagtag

SEQ ID NO: 3331993 - DNA, 25 bp, Homo sapien
ttccatgtgtactttttcagtttca

SEQ ID NO: 3331994 - DNA, 25 bp, Homo sapien
tttcagtttcagtttgaaactgcat

SEQ ID NO: 3331995 - DNA, 25 bp, Homo sapien
tttttcagtttcagtttgaaactgc

SEQ ID NO: 3331996 - DNA, 25 bp, Homo sapien
ccatgtgtactttttcagtttcagt

SEQ ID NO: 3331997 - DNA, 25 bp, Homo sapien
gaatttccggataagcagctacagg

SEQ ID NO: 3331998 - DNA, 25 bp, Homo sapien
atttccggatttttctggataagca

SEQ ID NO: 3331999 - DNA, 25 bp, Homo sapien
cggatttttctggataagcaactac

SEQ ID NO: 3332000 - DNA, 25 bp, Homo sapien
taagcaactacagggaatttccgga

SEQ ID NO: 3332001 - DNA, 25 bp, Homo sapien
tacatagttgcatattctgactctc

SEQ ID NO: 3332002 - DNA, 25 bp, Homo sapien
tactttgcatttccatctcatccac

SEQ ID NO: 3332003 - DNA, 25 bp, Homo sapien
tcagtttatgactacatagttgcat

SEQ ID NO: 3332004 - DNA, 25 bp, Homo sapien
taagctactttgcatttccatctca

SEQ ID NO: 3332005 - DNA, 25 bp, Homo sapien
gggagagttgctttagagaaagaat

SEQ ID NO: 3332006 - DNA, 25 bp, Homo sapien
acaatgggctgaagggagagttgct

SEQ ID NO: 3332007 - DNA, 25 bp, Homo sapien
agggagagttgctttagagaaagaa

SEQ ID NO: 3332008 - DNA, 25 bp, Homo sapien
gaaattgctatactccttggtggat

SEQ ID NO: 3332009 - DNA, 25 bp, Homo sapien
tgttggactattaaggagacaaata

SEQ ID NO: 3332010 - DNA, 25 bp, Homo sapien
ggagacaaatagaaattgctatact

SEQ ID NO: 3332011 - DNA, 25 bp, Homo sapien
tgtgtgagtgaagtgttggactatt

SEQ ID NO: 3332012 - DNA, 25 bp, Homo sapien
tcttttcttgtgagagatattaagt

SEQ ID NO: 3332013 - DNA, 25 bp, Homo sapien
ttttcttgtgagagatattaagtag

SEQ ID NO: 3332014 - DNA, 25 bp, Homo sapien
ctattcccagaacattaaaaggcag

SEQ ID NO: 3332015 - DNA, 25 bp, Homo sapien
ttctattcccagaacattaaaaggc

SEQ ID NO: 3332016 - DNA, 25 bp, Homo sapien
tccatgccgtgagtcccatcattat

SEQ ID NO: 3332017 - DNA, 25 bp, Homo sapien
aaattccagaaataccactccagga

SEQ ID NO: 3332018 - DNA, 25 bp, Homo sapien
ttccagaaataccactccaggagaa

SEQ ID NO: 3332019 - DNA, 25 bp, Homo sapien
atcctccatgccgtgagtcccatca

SEQ ID NO: 3332020 - DNA, 25 bp, Homo sapien
gttgatctccaaagcagaatctatc

SEQ ID NO: 3332021 - DNA, 25 bp, Homo sapien
ttaacaatgtacgtgctttttataa

SEQ ID NO: 3332022 - DNA, 25 bp, Homo sapien
tttcaacactttaacaatgtacgtg

SEQ ID NO: 3332023 - DNA, 25 bp, Homo sapien
tattccttgcccataaacataggca

SEQ ID NO: 3332024 - DNA, 25 bp, Homo sapien
ttaagtattccttgcccataaacat

SEQ ID NO: 3332025 - DNA, 25 bp, Homo sapien
tagtctcagatactcagggaagctg

SEQ ID NO: 3332026 - DNA, 25 bp, Homo sapien
gggcatctgtagtctcagatactca

SEQ ID NO: 3332027 - DNA, 25 bp, Homo sapien
tgccattacattccagcctggcaac

SEQ ID NO: 3332028 - DNA, 25 bp, Homo sapien
ggtgggcatctgtagtctcagatac

SEQ ID NO: 3332029 - DNA, 25 bp, Homo sapien
cgtctcaaggtcttgctcctacggc

SEQ ID NO: 3332030 - DNA, 25 bp, Homo sapien
tctcaaggtcttgctcctacggctg

SEQ ID NO: 3332031 - DNA, 25 bp, Homo sapien
ctcaaggtcttgctcctacggctgc

SEQ ID NO: 3332032 - DNA, 25 bp, Homo sapien
atggacacgtctcaaggtcttgctc

SEQ ID NO: 3332033 - DNA, 25 bp, Homo sapien
gcactgcaagaactagagtaatgac

SEQ ID NO: 3332034 - DNA, 25 bp, Homo sapien
cttcctacactgggcactgcaagaa

SEQ ID NO: 3332035 - DNA, 25 bp, Homo sapien
ggcactgcaagaactagagtaatga

SEQ ID NO: 3332036 - DNA, 25 bp, Homo sapien
ttcctacactgggcactgcaagaac

SEQ ID NO: 3332037 - DNA, 25 bp, Homo sapien
gtaatttaccctctttgctggcttc

SEQ ID NO: 3332038 - DNA, 25 bp, Homo sapien
cttagtaatttaccctctttgctgg

SEQ ID NO: 3332039 - DNA, 25 bp, Homo sapien
ttgctggcttcataattttctacct

SEQ ID NO: 3332040 - DNA, 25 bp, Homo sapien
tagtaatttaccctctttgctggct

SEQ ID NO: 3332041 - DNA, 25 bp, Homo sapien
tcagcttctttcgaaattcactttg

SEQ ID NO: 3332042 - DNA, 25 bp, Homo sapien
ttgttcattatgcttgctaatcagc

SEQ ID NO: 3332043 - DNA, 25 bp, Homo sapien
gcttgctaatcagctcaatcttaga

SEQ ID NO: 3332044 - DNA, 25 bp, Homo sapien
caatcttagatttgacgtcctcaac

SEQ ID NO: 3332045 - DNA, 25 bp, Homo sapien
tatagttatttccaaaaaatgtaga

SEQ ID NO: 3332046 - DNA, 25 bp, Homo sapien
ctaagtggactcagcaggatgtctc

SEQ ID NO: 3332047 - DNA, 25 bp, Homo sapien
gatgtctcaaaatattccctcttgc

SEQ ID NO: 3332048 - DNA, 25 bp, Homo sapien
ccaaagatatttttactcagtatgc

SEQ ID NO: 3332049 - DNA, 25 bp, Homo sapien
aagatatttttactcagtatgcaga

SEQ ID NO: 3332050 - DNA, 25 bp, Homo sapien
gaatatctctccgactgtgagagtt

SEQ ID NO: 3332051 - DNA, 25 bp, Homo sapien
ttggaatatctctccgactgtgaga

SEQ ID NO: 3332052 - DNA, 25 bp, Homo sapien
ttcttccacttgagggttccttata

SEQ ID NO: 3332053 - DNA, 25 bp, Homo sapien
ggttccttatactcccatacaggga

SEQ ID NO: 3332054 - DNA, 25 bp, Homo sapien
ttgatactgctgatatctgtttgga

SEQ ID NO: 3332055 - DNA, 25 bp, Homo sapien
ctgctgatatctgtttggagataac

SEQ ID NO: 3332056 - DNA, 25 bp, Homo sapien
accattcttgatactgctgatatct

SEQ ID NO: 3332057 - DNA, 25 bp, Homo sapien
tatctgtttggagataactcttcat

SEQ ID NO: 3332058 - DNA, 25 bp, Homo sapien
gaaaaactgatggatctttattttg

SEQ ID NO: 3332059 - DNA, 25 bp, Homo sapien
gtttctctgccatttcagcatatgt

SEQ ID NO: 3332060 - DNA, 25 bp, Homo sapien
ctgccatttcagcatatgtttccag

SEQ ID NO: 3332061 - DNA, 25 bp, Homo sapien
catttcagcatatgtttccagaaga

SEQ ID NO: 3332062 - DNA, 25 bp, Homo sapien
atttcagagggctaattctttgttc

SEQ ID NO: 3332063 - DNA, 25 bp, Homo sapien
gggctaattctttgttcattgtcat

SEQ ID NO: 3332064 - DNA, 25 bp, Homo sapien
agagggctaattctttgttcattgt

SEQ ID NO: 3332065 - DNA, 25 bp, Homo sapien
catttcagagggctaattctttgtt

SEQ ID NO: 3332066 - DNA, 25 bp, Homo sapien
gatttgttctaatggtgacaatgtg

SEQ ID NO: 3332067 - DNA, 25 bp, Homo sapien
gacaatgtggaatacgctaacatgg

SEQ ID NO: 3332068 - DNA, 25 bp, Homo sapien
gaaatgaggtgacatggtaatgagt

SEQ ID NO: 3332069 - DNA, 25 bp, Homo sapien
tcttcgacagctgggtgctattagg

SEQ ID NO: 3332070 - DNA, 25 bp, Homo sapien
ttgagctaggatttatgccattcat

SEQ ID NO: 3332071 - DNA, 25 bp, Homo sapien
tatattttgagctaggatttatgcc

SEQ ID NO: 3332072 - DNA, 25 bp, Homo sapien
tattctcgctaatgacaaagagata

SEQ ID NO: 3332073 - DNA, 25 bp, Homo sapien
tcctaagagttatatttattctcgc

SEQ ID NO: 3332074 - DNA, 25 bp, Homo sapien
caggaggctgctcatagagatgcaa

SEQ ID NO: 3332075 - DNA, 25 bp, Homo sapien
gatgcaaactctggaataacttctt

SEQ ID NO: 3332076 - DNA, 25 bp, Homo sapien
catgttccaggatcatagaaatgag

SEQ ID NO: 3332077 - DNA, 25 bp, Homo sapien
tgttccaggatcatagaaatgagcc

SEQ ID NO: 3332078 - DNA, 25 bp, Homo sapien
tatcaactgttaccacccagtccaa

SEQ ID NO: 3332079 - DNA, 25 bp, Homo sapien
tgttaccacccagtccaatatagcc

SEQ ID NO: 3332080 - DNA, 25 bp, Homo sapien
taatatatcaactgttaccacccag

SEQ ID NO: 3332081 - DNA, 25 bp, Homo sapien
cataatatatcaactgttaccaccc

SEQ ID NO: 3332082 - DNA, 25 bp, Homo sapien
tatatgcgagtgcaacatagtccat

SEQ ID NO: 3332083 - DNA, 25 bp, Homo sapien
gcaacatagtccataagtccttgaa

SEQ ID NO: 3332084 - DNA, 25 bp, Homo sapien
tgcgagtgcaacatagtccataagt

SEQ ID NO: 3332085 - DNA, 25 bp, Homo sapien
agtttatatgcgagtgcaacatagt

SEQ ID NO: 3332086 - DNA, 25 bp, Homo sapien
gccccagggctaatttcaacaagac

SEQ ID NO: 3332087 - DNA, 25 bp, Homo sapien
agccccagggctaatttcaacaaga

SEQ ID NO: 3332088 - DNA, 25 bp, Homo sapien
tgcttgcattatgtccagccccagg

SEQ ID NO: 3332089 - DNA, 25 bp, Homo sapien
tcatctccttgcttgcattatgtcc

SEQ ID NO: 3332090 - DNA, 25 bp, Homo sapien
aataacattgctctgctctacttca

SEQ ID NO: 3332091 - DNA, 25 bp, Homo sapien
ttcatttctatctgcgcttgtccct

SEQ ID NO: 3332092 - DNA, 25 bp, Homo sapien
ttcaataacattgctctgctctact

SEQ ID NO: 3332093 - DNA, 25 bp, Homo sapien
cttgtccctttattagcatagtgtt

SEQ ID NO: 3332094 - DNA, 25 bp, Homo sapien
tttctgagagactcttcttatacct

SEQ ID NO: 3332095 - DNA, 25 bp, Homo sapien
ctgagagactcttcttatacctttc

SEQ ID NO: 3332096 - DNA, 25 bp, Homo sapien
ttctgagagactcttcttatacctt

SEQ ID NO: 3332097 - DNA, 25 bp, Homo sapien
tctgagagactcttcttataccttt

SEQ ID NO: 3332098 - DNA, 25 bp, Homo sapien
ctctccagcattggagagcaggcat

SEQ ID NO: 3332099 - DNA, 25 bp, Homo sapien
gctctccagcattggagagcaggca

SEQ ID NO: 3332100 - DNA, 25 bp, Homo sapien
ttatatcattcttgtgtaggggcta

SEQ ID NO: 3332101 - DNA, 25 bp, Homo sapien
atttatatcattcttgtgtaggggc

SEQ ID NO: 3332102 - DNA, 25 bp, Homo sapien
tatatcattcttgtgtaggggctat

SEQ ID NO: 3332103 - DNA, 25 bp, Homo sapien
tatcattcttgtgtaggggctatgc

SEQ ID NO: 3332104 - DNA, 25 bp, Homo sapien
tctgacattggcattcatggtttca

SEQ ID NO: 3332105 - DNA, 25 bp, Homo sapien
aagttgcttgataatggcttctgac

SEQ ID NO: 3332106 - DNA, 25 bp, Homo sapien
gcttccaacaagcttggtaatattt

SEQ ID NO: 3332107 - DNA, 25 bp, Homo sapien
ggtttcataacctctcatcttgaag

SEQ ID NO: 3332108 - DNA, 25 bp, Homo sapien
atcaccccttccatggtcacaatag

SEQ ID NO: 3332109 - DNA, 25 bp, Homo sapien
tctccagcatatactgcatgtcctc

SEQ ID NO: 3332110 - DNA, 25 bp, Homo sapien
cttccatggtcacaatagaatttag

SEQ ID NO: 3332111 - DNA, 25 bp, Homo sapien
ttctcgccatagtttctgaagtcct

SEQ ID NO: 3332112 - DNA, 25 bp, Homo sapien
agtaggtaggaaactaccaccatca

SEQ ID NO: 3332113 - DNA, 25 bp, Homo sapien
ctaccaccatcacccaattgagaag

SEQ ID NO: 3332114 - DNA, 25 bp, Homo sapien
attgagaagtggtgatgatctgaac

SEQ ID NO: 3332115 - DNA, 25 bp, Homo sapien
ccatcacccaattgagaagtggtga

SEQ ID NO: 3332116 - DNA, 25 bp, Homo sapien
gcagcaggatccagttgagaagctc

SEQ ID NO: 3332117 - DNA, 25 bp, Homo sapien
ggatccagttgagaagctccatctg

SEQ ID NO: 3332118 - DNA, 25 bp, Homo sapien
agcaggatccagttgagaagctcca

SEQ ID NO: 3332119 - DNA, 25 bp, Homo sapien
ccagttgagaagctccatctgcaga

SEQ ID NO: 3332120 - DNA, 25 bp, Homo sapien
caggtacagccgagagacatttctg

SEQ ID NO: 3332121 - DNA, 25 bp, Homo sapien
ctccaggtacagccgagagacattt

SEQ ID NO: 3332122 - DNA, 25 bp, Homo sapien
ccaggtacagccgagagacatttct

SEQ ID NO: 3332123 - DNA, 25 bp, Homo sapien
ggtacagccgagagacatttctgtc

SEQ ID NO: 3332124 - DNA, 25 bp, Homo sapien
acaaacgcgaagtgaacttcaaatg

SEQ ID NO: 3332125 - DNA, 25 bp, Homo sapien
aacgcgaagtgaacttcaaatgtaa

SEQ ID NO: 3332126 - DNA, 25 bp, Homo sapien
gcgaagtgaacttcaaatgtaaact

SEQ ID NO: 3332127 - DNA, 25 bp, Homo sapien
cgcgaagtgaacttcaaatgtaaac

SEQ ID NO: 3332128 - DNA, 25 bp, Homo sapien
tttatcttatttatgactacactta

SEQ ID NO: 3332129 - DNA, 25 bp, Homo sapien
ctacacttaggcaaagatcagtgcc

SEQ ID NO: 3332130 - DNA, 25 bp, Homo sapien
tatcttatttatgactacacttagg

SEQ ID NO: 3332131 - DNA, 25 bp, Homo sapien
cacttaggcaaagatcagtgcccat

SEQ ID NO: 3332132 - DNA, 25 bp, Homo sapien
accacagagctacaaggtcatgcat

SEQ ID NO: 3332133 - DNA, 25 bp, Homo sapien
tctttacattaatggtcttccacgg

SEQ ID NO: 3332134 - DNA, 25 bp, Homo sapien
cttccacggagtgttcaatgaccac

SEQ ID NO: 3332135 - DNA, 25 bp, Homo sapien
acggagtgttcaatgaccacagagc

SEQ ID NO: 3332136 - DNA, 25 bp, Homo sapien
ggtaactgaactgaactatggaata

SEQ ID NO: 3332137 - DNA, 25 bp, Homo sapien
ttcaattcttaacatgaaatgggag

SEQ ID NO: 3332138 - DNA, 25 bp, Homo sapien
ctagtttttagtgcaaggtaactga

SEQ ID NO: 3332139 - DNA, 25 bp, Homo sapien
actatggaatatgccaattgttcaa

SEQ ID NO: 3332140 - DNA, 25 bp, Homo sapien
caatcaatcgctctccaatcaataa

SEQ ID NO: 3332141 - DNA, 25 bp, Homo sapien
aaacctgttgctgcatacgtctgca

SEQ ID NO: 3332142 - DNA, 25 bp, Homo sapien
tacgtctgcactctccaatcaatcg

SEQ ID NO: 3332143 - DNA, 25 bp, Homo sapien
agctggagtaagagcaatgaccacc

SEQ ID NO: 3332144 - DNA, 25 bp, Homo sapien
actgacatcagattcctggtaatga

SEQ ID NO: 3332145 - DNA, 25 bp, Homo sapien
ttgagaactgacatcagattcctgg

SEQ ID NO: 3332146 - DNA, 25 bp, Homo sapien
gatttatattgagaactgacatcag

SEQ ID NO: 3332147 - DNA, 25 bp, Homo sapien
tatattgagaactgacatcagattc

SEQ ID NO: 3332148 - DNA, 25 bp, Homo sapien
cagggagcttggcattaaatcttct

SEQ ID NO: 3332149 - DNA, 25 bp, Homo sapien
ggagcttggcattaaatcttctcag

SEQ ID NO: 3332150 - DNA, 25 bp, Homo sapien
gagcttggcattaaatcttctcaga

SEQ ID NO: 3332151 - DNA, 25 bp, Homo sapien
gggagcttggcattaaatcttctca

SEQ ID NO: 3332152 - DNA, 25 bp, Homo sapien
gctgctccattgctatgtaatctca

SEQ ID NO: 3332153 - DNA, 25 bp, Homo sapien
tgctgctccattgctatgtaatctc

SEQ ID NO: 3332154 - DNA, 25 bp, Homo sapien
tgctccattgctatgtaatctcaaa

SEQ ID NO: 3332155 - DNA, 25 bp, Homo sapien
ctttgctgctccattgctatgtaat

SEQ ID NO: 3332156 - DNA, 25 bp, Homo sapien
ctgaattgtgatgatgatagtaggc

SEQ ID NO: 3332157 - DNA, 25 bp, Homo sapien
tgaattgtgatgatgatagtaggca

SEQ ID NO: 3332158 - DNA, 25 bp, Homo sapien
gaattgtgatgatgatagtaggcat

SEQ ID NO: 3332159 - DNA, 25 bp, Homo sapien
gaaagattctctctaatctgggtac

SEQ ID NO: 3332160 - DNA, 25 bp, Homo sapien
catctgcttcgtagaaagattctct

SEQ ID NO: 3332161 - DNA, 25 bp, Homo sapien
ggtttatattttaggctcaacaatg

SEQ ID NO: 3332162 - DNA, 25 bp, Homo sapien
ctcagtatactgtgtattttgctga

SEQ ID NO: 3332163 - DNA, 25 bp, Homo sapien
tctctcttttcatgggtaaattttg

SEQ ID NO: 3332164 - DNA, 25 bp, Homo sapien
ggtaaattttgttgcgccactacat

SEQ ID NO: 3332165 - DNA, 25 bp, Homo sapien
tttttgtggctttagttcaagatgc

SEQ ID NO: 3332166 - DNA, 25 bp, Homo sapien
ctgacttcacgttcatctctctttt

SEQ ID NO: 3332167 - DNA, 25 bp, Homo sapien
aatgaagacatcagtaagtccatgc

SEQ ID NO: 3332168 - DNA, 25 bp, Homo sapien
gcataactccactctttacatggta

SEQ ID NO: 3332169 - DNA, 25 bp, Homo sapien
gacatcagtaagtccatgctttctc

SEQ ID NO: 3332170 - DNA, 25 bp, Homo sapien
cagcataactccactctttacatgg

SEQ ID NO: 3332171 - DNA, 25 bp, Homo sapien
cagtgccttgcatgtgagagagtaa

SEQ ID NO: 3332172 - DNA, 25 bp, Homo sapien
tggacggcccatcagtctttgaata

SEQ ID NO: 3332173 - DNA, 25 bp, Homo sapien
gagggattttagcactgatgtccag

SEQ ID NO: 3332174 - DNA, 25 bp, Homo sapien
tacagactgccaacagtggacggcc

SEQ ID NO: 3332175 - DNA, 25 bp, Homo sapien
gtctgcttcatctcagtgctcacca

SEQ ID NO: 3332176 - DNA, 25 bp, Homo sapien
catctttacgtgtctgcttcatctc

SEQ ID NO: 3332177 - DNA, 25 bp, Homo sapien
acaacatctttacgtgtctgcttca

SEQ ID NO: 3332178 - DNA, 25 bp, Homo sapien
tttacgtgtctgcttcatctcagtg

SEQ ID NO: 3332179 - DNA, 25 bp, Homo sapien
caagaagcaattattggtttaatta

SEQ ID NO: 3332180 - DNA, 25 bp, Homo sapien
cagcattcaccacatcgccctcttt

SEQ ID NO: 3332181 - DNA, 25 bp, Homo sapien
tctctttgttcgattgccaggcaat

SEQ ID NO: 3332182 - DNA, 25 bp, Homo sapien
tttctctttgttcgattgccaggca

SEQ ID NO: 3332183 - DNA, 25 bp, Homo sapien
agtctttgtgagactcatgacaagc

SEQ ID NO: 3332184 - DNA, 25 bp, Homo sapien
tcttctaggctaaagtcccggccaa

SEQ ID NO: 3332185 - DNA, 25 bp, Homo sapien
ttcccatacagttccaatattctcg

SEQ ID NO: 3332186 - DNA, 25 bp, Homo sapien
caatattctcgcaatgtcaaactca

SEQ ID NO: 3332187 - DNA, 25 bp, Homo sapien
tagttcttcttcgacctggaaagga

SEQ ID NO: 3332188 - DNA, 25 bp, Homo sapien
tccacacacatgtagttcttcttcg

SEQ ID NO: 3332189 - DNA, 25 bp, Homo sapien
tcttcttcgacctggaaaggaccca

SEQ ID NO: 3332190 - DNA, 25 bp, Homo sapien
catgtagttcttcttcgacctggaa

SEQ ID NO: 3332191 - DNA, 25 bp, Homo sapien
caggccatacccttgaattgcataa

SEQ ID NO: 3332192 - DNA, 25 bp, Homo sapien
tttgtccctcagcaagcaggccata

SEQ ID NO: 3332193 - DNA, 25 bp, Homo sapien
gtatctctagatccaagaaaaaatg

SEQ ID NO: 3332194 - DNA, 25 bp, Homo sapien
aacaagcaagacaattcagtaaggc

SEQ ID NO: 3332195 - DNA, 25 bp, Homo sapien
ccaatatgacatttctggttgctac

SEQ ID NO: 3332196 - DNA, 25 bp, Homo sapien
catacagcaccaatatgacatttct

SEQ ID NO: 3332197 - DNA, 25 bp, Homo sapien
tacagcaccaatatgacatttctgg

SEQ ID NO: 3332198 - DNA, 25 bp, Homo sapien
gacatttctggttgctacagatgtg

SEQ ID NO: 3332199 - DNA, 25 bp, Homo sapien
tgtccaagtcagtggaaagtctagg

SEQ ID NO: 3332200 - DNA, 25 bp, Homo sapien
tgggctttctggctgctccaaatct

SEQ ID NO: 3332201 - DNA, 25 bp, Homo sapien
ttcccgccaagatcctgaaatactc

SEQ ID NO: 3332202 - DNA, 25 bp, Homo sapien
tggaaagtctaggagacatgatact

SEQ ID NO: 3332203 - DNA, 25 bp, Homo sapien
gctctataacttctgctaggaatat

SEQ ID NO: 3332204 - DNA, 25 bp, Homo sapien
tttgctctataacttctgctaggaa

SEQ ID NO: 3332205 - DNA, 25 bp, Homo sapien
ctataacttctgctaggaatattct

SEQ ID NO: 3332206 - DNA, 25 bp, Homo sapien
ctttgctataaacttttgctctata

SEQ ID NO: 3332207 - DNA, 25 bp, Homo sapien
gttatggactgccagtgggtccaca

SEQ ID NO: 3332208 - DNA, 25 bp, Homo sapien
cagatataggttatggactgccagt

SEQ ID NO: 3332209 - DNA, 25 bp, Homo sapien
gctccttggtggcagatataggtta

SEQ ID NO: 3332210 - DNA, 25 bp, Homo sapien
cttggtggcagatataggttatgga

SEQ ID NO: 3332211 - DNA, 25 bp, Homo sapien
caggtaggtcctaattccttagatg

SEQ ID NO: 3332212 - DNA, 25 bp, Homo sapien
tagatgaattggagccaaagttcca

SEQ ID NO: 3332213 - DNA, 25 bp, Homo sapien
cacaggcaccacaggtaggtcctaa

SEQ ID NO: 3332214 - DNA, 25 bp, Homo sapien
caccaccagcaagtaagggcgtaaa

SEQ ID NO: 3332215 - DNA, 25 bp, Homo sapien
gcgatggccttcatttgaggagctg

SEQ ID NO: 3332216 - DNA, 25 bp, Homo sapien
taaacatcatgtggatcaaggttgt

SEQ ID NO: 3332217 - DNA, 25 bp, Homo sapien
aaacatcatgtggatcaaggttgtg

SEQ ID NO: 3332218 - DNA, 25 bp, Homo sapien
ataaacatcatgtggatcaaggttg

SEQ ID NO: 3332219 - DNA, 25 bp, Homo sapien
cataaacatcatgtggatcaaggtt

SEQ ID NO: 3332220 - DNA, 25 bp, Homo sapien
ggcccagtggtctgccacttggcta

SEQ ID NO: 3332221 - DNA, 25 bp, Homo sapien
tgagatgtattcatccatgggccca

SEQ ID NO: 3332222 - DNA, 25 bp, Homo sapien
gtggtctgccacttggctaaaacac

SEQ ID NO: 3332223 - DNA, 25 bp, Homo sapien
gagatgtattcatccatgggcccag

SEQ ID NO: 3332224 - DNA, 25 bp, Homo sapien
gattgcacaataactatgcctttaa

SEQ ID NO: 3332225 - DNA, 25 bp, Homo sapien
cacaataactatgcctttaatcaca

SEQ ID NO: 3332226 - DNA, 25 bp, Homo sapien
ttgattgcacaataactatgccttt

SEQ ID NO: 3332227 - DNA, 25 bp, Homo sapien
actatgcctttaatcacataaattc

SEQ ID NO: 3332228 - DNA, 25 bp, Homo sapien
tgaactgctgatagttcacatctga

SEQ ID NO: 3332229 - DNA, 25 bp, Homo sapien
cagatcctctttcagaacacatttc

SEQ ID NO: 3332230 - DNA, 25 bp, Homo sapien
taagaatatcatcagtggacaccgg

SEQ ID NO: 3332231 - DNA, 25 bp, Homo sapien
tggatgcttaggtggatcacccaga

SEQ ID NO: 3332232 - DNA, 25 bp, Homo sapien
cagttttgaaggcatattcaacttc

SEQ ID NO: 3332233 - DNA, 25 bp, Homo sapien
tttgaaggcatattcaacttctcct

SEQ ID NO: 3332234 - DNA, 25 bp, Homo sapien
gtcccagttttgaaggcatattcaa

SEQ ID NO: 3332235 - DNA, 25 bp, Homo sapien
tgaaggcatattcaacttctccttc

SEQ ID NO: 3332236 - DNA, 25 bp, Homo sapien
ttcaagaaatgtgatgatttttcct

SEQ ID NO: 3332237 - DNA, 25 bp, Homo sapien
cattcaagaaatgtgatgatttttc

SEQ ID NO: 3332238 - DNA, 25 bp, Homo sapien
caagaaatgtgatgatttttcctga

SEQ ID NO: 3332239 - DNA, 25 bp, Homo sapien
agaaatgtgatgatttttcctgact

SEQ ID NO: 3332240 - DNA, 25 bp, Homo sapien
tcaaagaaagaggccacatccattc

SEQ ID NO: 3332241 - DNA, 25 bp, Homo sapien
tgccagcatatctcagtgtaataat

SEQ ID NO: 3332242 - DNA, 25 bp, Homo sapien
cagctctttgccagcatatctcagt

SEQ ID NO: 3332243 - DNA, 25 bp, Homo sapien
attttcgaaagtacatgctgccagc

SEQ ID NO: 3332244 - DNA, 25 bp, Homo sapien
tcagaattttcgaaagtacatgctg

SEQ ID NO: 3332245 - DNA, 25 bp, Homo sapien
caatgataagaatacttgacttttt

SEQ ID NO: 3332246 - DNA, 25 bp, Homo sapien
ttgacaatgataagaatacttgact

SEQ ID NO: 3332247 - DNA, 25 bp, Homo sapien
cattgacaatgataagaatacttga

SEQ ID NO: 3332248 - DNA, 25 bp, Homo sapien
ctagttgaagtatcattgacaatga

SEQ ID NO: 3332249 - DNA, 25 bp, Homo sapien
tgttctgagggcatcaagttcaatg

SEQ ID NO: 3332250 - DNA, 25 bp, Homo sapien
cacctaaaagtgtctgtatacaaaa

SEQ ID NO: 3332251 - DNA, 25 bp, Homo sapien
gtaaattaggcattgcacctaaaag

SEQ ID NO: 3332252 - DNA, 25 bp, Homo sapien
tgcattcaatttgctccaacatagg

SEQ ID NO: 3332253 - DNA, 25 bp, Homo sapien
taataatctgggttgctgccatttt

SEQ ID NO: 3332254 - DNA, 25 bp, Homo sapien
ggactgcttaatacttttacacaaa

SEQ ID NO: 3332255 - DNA, 25 bp, Homo sapien
caatagcatttgacgtcaggatcta

SEQ ID NO: 3332256 - DNA, 25 bp, Homo sapien
tatctggcagaaacctagaaggtct

SEQ ID NO: 3332257 - DNA, 25 bp, Homo sapien
ataatgaaggttagatcttttcttc

SEQ ID NO: 3332258 - DNA, 25 bp, Homo sapien
tcaaatatttttttctgttctttga

SEQ ID NO: 3332259 - DNA, 25 bp, Homo sapien
gtataatgaaggttagatcttttct

SEQ ID NO: 3332260 - DNA, 25 bp, Homo sapien
ctgtataatgaaggttagatctttt

SEQ ID NO: 3332261 - DNA, 25 bp, Homo sapien
ctttactttagcattcagcacttgg

SEQ ID NO: 3332262 - DNA, 25 bp, Homo sapien
gaagttaaactatccagccatttga

SEQ ID NO: 3332263 - DNA, 25 bp, Homo sapien
gccaaaccacacagacataagctca

SEQ ID NO: 3332264 - DNA, 25 bp, Homo sapien
ttcagcacttggttgttgtctaaag

SEQ ID NO: 3332265 - DNA, 25 bp, Homo sapien
catgtcaaatgcaatgaacactaga

SEQ ID NO: 3332266 - DNA, 25 bp, Homo sapien
tcatcatgaagcatgtcaaatgcaa

SEQ ID NO: 3332267 - DNA, 25 bp, Homo sapien
cattcatcatgaagcatgtcaaatg

SEQ ID NO: 3332268 - DNA, 25 bp, Homo sapien
caatgaacactagagcatagctggc

SEQ ID NO: 3332269 - DNA, 25 bp, Homo sapien
ttcccttaagcaattgctcagtgct

SEQ ID NO: 3332270 - DNA, 25 bp, Homo sapien
ccttaagcaattgctcagtgctcag

SEQ ID NO: 3332271 - DNA, 25 bp, Homo sapien
cttcccttaagcaattgctcagtgc

SEQ ID NO: 3332272 - DNA, 25 bp, Homo sapien
ttaagcaattgctcagtgctcagtg

SEQ ID NO: 3332273 - DNA, 25 bp, Homo sapien
caaaattggtccctacagagctctg

SEQ ID NO: 3332274 - DNA, 25 bp, Homo sapien
tgagagttaccagttacccttggcc

SEQ ID NO: 3332275 - DNA, 25 bp, Homo sapien
tctgaaggggagtccgtcccaagct

SEQ ID NO: 3332276 - DNA, 25 bp, Homo sapien
tgcttctgagagttaccagttaccc

SEQ ID NO: 3332277 - DNA, 25 bp, Homo sapien
tcttgtatttgcccttaatttgtat

SEQ ID NO: 3332278 - DNA, 25 bp, Homo sapien
cttgtatttgcccttaatttgtata

SEQ ID NO: 3332279 - DNA, 25 bp, Homo sapien
cttcttgtatttgcccttaatttgt

SEQ ID NO: 3332280 - DNA, 25 bp, Homo sapien
ttgtatttgcccttaatttgtatat

SEQ ID NO: 3332281 - DNA, 25 bp, Homo sapien
tacctgttccagagtaattttcttc

SEQ ID NO: 3332282 - DNA, 25 bp, Homo sapien
ccaccacggtttcaccagagagcaa

SEQ ID NO: 3332283 - DNA, 25 bp, Homo sapien
tgcctgtatggcagttgttcccacc

SEQ ID NO: 3332284 - DNA, 25 bp, Homo sapien
tctggtggcattcccgtgactgcct

SEQ ID NO: 3332285 - DNA, 25 bp, Homo sapien
ggcagttgttcccaccacggtttca

SEQ ID NO: 3332286 - DNA, 25 bp, Homo sapien
ttggctgcagatgacctcttgttct

SEQ ID NO: 3332287 - DNA, 25 bp, Homo sapien
ggtttggctgcagatgacctcttgt

SEQ ID NO: 3332288 - DNA, 25 bp, Homo sapien
ctgcagatgacctcttgttctttct

SEQ ID NO: 3332289 - DNA, 25 bp, Homo sapien
caggtttggctgcagatgacctctt

SEQ ID NO: 3332290 - DNA, 25 bp, Homo sapien
cttttagaagctgtggctcttatgc

SEQ ID NO: 3332291 - DNA, 25 bp, Homo sapien
gaagctgtggctcttatgccatcag

SEQ ID NO: 3332292 - DNA, 25 bp, Homo sapien
tgtggctcttatgccatcaggattc

SEQ ID NO: 3332293 - DNA, 25 bp, Homo sapien
gaatcatgttttattgctaaccata

SEQ ID NO: 3332294 - DNA, 25 bp, Homo sapien
ttataatgtaaccatggtgcctcct

SEQ ID NO: 3332295 - DNA, 25 bp, Homo sapien
tataatgtaaccatggtgcctcctg

SEQ ID NO: 3332296 - DNA, 25 bp, Homo sapien
cctactactacttcatgctgtggca

SEQ ID NO: 3332297 - DNA, 25 bp, Homo sapien
tctcctactactacttcatgctgtg

SEQ ID NO: 3332298 - DNA, 25 bp, Homo sapien
tttctcctactactacttcatgctg

SEQ ID NO: 3332299 - DNA, 25 bp, Homo sapien
tactactacttcatgctgtggcatg

SEQ ID NO: 3332300 - DNA, 25 bp, Homo sapien
tggataagcctcgtcctgggaaaac

SEQ ID NO: 3332301 - DNA, 25 bp, Homo sapien
gtgcaatggataagcctcgtcctgg

SEQ ID NO: 3332302 - DNA, 25 bp, Homo sapien
tcaggggaaagcgcgaatgcagtcc

SEQ ID NO: 3332303 - DNA, 25 bp, Homo sapien
tggagtgcaatggataagcctcgtc

SEQ ID NO: 3332304 - DNA, 25 bp, Homo sapien
tggtctttaattccatcagtcttca

SEQ ID NO: 3332305 - DNA, 25 bp, Homo sapien
ttggtctttaattccatcagtcttc

SEQ ID NO: 3332306 - DNA, 25 bp, Homo sapien
ggtctttaattccatcagtcttcat

SEQ ID NO: 3332307 - DNA, 25 bp, Homo sapien
tctatttatcctccggttagcaaca

SEQ ID NO: 3332308 - DNA, 25 bp, Homo sapien
aacaacagctctatttatcctccgg

SEQ ID NO: 3332309 - DNA, 25 bp, Homo sapien
ggttagcaacacacttagacatcgt

SEQ ID NO: 3332310 - DNA, 25 bp, Homo sapien
ctattgttcggcaacaacagctcta

SEQ ID NO: 3332311 - DNA, 25 bp, Homo sapien
ctgacacatttagatatgaagccag

SEQ ID NO: 3332312 - DNA, 25 bp, Homo sapien
tttagatatgaagccagtttccaaa

SEQ ID NO: 3332313 - DNA, 25 bp, Homo sapien
tatgaagccagtttccaaactccaa

SEQ ID NO: 3332314 - DNA, 25 bp, Homo sapien
gacacatttagatatgaagccagtt

SEQ ID NO: 3332315 - DNA, 25 bp, Homo sapien
gaagacgttcaaacacaattaatga

SEQ ID NO: 3332316 - DNA, 25 bp, Homo sapien
caaatagtgaagacgttcaaacaca

SEQ ID NO: 3332317 - DNA, 25 bp, Homo sapien
tttccaaatagtgaagacgttcaaa

SEQ ID NO: 3332318 - DNA, 25 bp, Homo sapien
cgttcaaacacaattaatgataacc

SEQ ID NO: 3332319 - DNA, 25 bp, Homo sapien
tctccatgaagatcctgccaagtct

SEQ ID NO: 3332320 - DNA, 25 bp, Homo sapien
tatttgacagaccaaacgtgtgtcg

SEQ ID NO: 3332321 - DNA, 25 bp, Homo sapien
acgtgtgtcggtttccttgtgtgca

SEQ ID NO: 3332322 - DNA, 25 bp, Homo sapien
tgtgtgcacataatagctgttctcc

SEQ ID NO: 3332323 - DNA, 25 bp, Homo sapien
tacttatgagaggaatttgtcggga

SEQ ID NO: 3332324 - DNA, 25 bp, Homo sapien
gtggccgtccggagttggtcattcc

SEQ ID NO: 3332325 - DNA, 25 bp, Homo sapien
cagagtctgtaaggtattgtgtccg

SEQ ID NO: 3332326 - DNA, 25 bp, Homo sapien
ccttccgatgttcgggcgagtcccg

SEQ ID NO: 3332327 - DNA, 25 bp, Homo sapien
aatcagtctgctaattctcagagat

SEQ ID NO: 3332328 - DNA, 25 bp, Homo sapien
tcagtctgctaattctcagagatac

SEQ ID NO: 3332329 - DNA, 25 bp, Homo sapien
taaatcagtctgctaattctcagag

SEQ ID NO: 3332330 - DNA, 25 bp, Homo sapien
ttaaatcagtctgctaattctcaga

SEQ ID NO: 3332331 - DNA, 25 bp, Homo sapien
cacaatctcaagatacgggttattc

SEQ ID NO: 3332332 - DNA, 25 bp, Homo sapien
tgctaccaagtgaagttttaaccaa

SEQ ID NO: 3332333 - DNA, 25 bp, Homo sapien
tcattttagactgtcacctagactg

SEQ ID NO: 3332334 - DNA, 25 bp, Homo sapien
taaataattcagcttgcctgatcac

SEQ ID NO: 3332335 - DNA, 25 bp, Homo sapien
tcagaacgctttccctttactctct

SEQ ID NO: 3332336 - DNA, 25 bp, Homo sapien
gaaaaggtgcgttccaacattggat

SEQ ID NO: 3332337 - DNA, 25 bp, Homo sapien
gatccagatgtaggatgaaatcaga

SEQ ID NO: 3332338 - DNA, 25 bp, Homo sapien
aacattggatatgaatggatccaga

SEQ ID NO: 3332339 - DNA, 25 bp, Homo sapien
gcctcatggcagttgccacctcatg

SEQ ID NO: 3332340 - DNA, 25 bp, Homo sapien
ccacctcatgaggtgtggcagtcgt

SEQ ID NO: 3332341 - DNA, 25 bp, Homo sapien
gtgtggcagtcgttactgaggtcat

SEQ ID NO: 3332342 - DNA, 25 bp, Homo sapien
ccaatagcctcatggcagttgccac

SEQ ID NO: 3332343 - DNA, 25 bp, Homo sapien
cctgttatctcatcattggcagtct

SEQ ID NO: 3332344 - DNA, 25 bp, Homo sapien
ttctactagggtctcttcagaaaga

SEQ ID NO: 3332345 - DNA, 25 bp, Homo sapien
tcttctactagggtctcttcagaaa

SEQ ID NO: 3332346 - DNA, 25 bp, Homo sapien
catcattggcagtctcagttttaaa

SEQ ID NO: 3332347 - DNA, 25 bp, Homo sapien
tgaaaacttcttgggctctttcatc

SEQ ID NO: 3332348 - DNA, 25 bp, Homo sapien
cttgaaaacttcttgggctctttca

SEQ ID NO: 3332349 - DNA, 25 bp, Homo sapien
tgctttccttgaaaacttcttgggc

SEQ ID NO: 3332350 - DNA, 25 bp, Homo sapien
aaacttcttgggctctttcatccat

SEQ ID NO: 3332351 - DNA, 25 bp, Homo sapien
tcaaccacccaccatatttctgagt

SEQ ID NO: 3332352 - DNA, 25 bp, Homo sapien
atatttctgagtccactcctctctc

SEQ ID NO: 3332353 - DNA, 25 bp, Homo sapien
agcctcaaccacccaccatatttct

SEQ ID NO: 3332354 - DNA, 25 bp, Homo sapien
tatttctgagtccactcctctctca

SEQ ID NO: 3332355 - DNA, 25 bp, Homo sapien
tacacttccatgatatatgttgaga

SEQ ID NO: 3332356 - DNA, 25 bp, Homo sapien
atgttgagataagggcctatctcca

SEQ ID NO: 3332357 - DNA, 25 bp, Homo sapien
cttttgacggtaaattgacaagtag

SEQ ID NO: 3332358 - DNA, 25 bp, Homo sapien
tagagaagggcaaagtggatcacca

SEQ ID NO: 3332359 - DNA, 25 bp, Homo sapien
aataggagggtcttagggctgaact

SEQ ID NO: 3332360 - DNA, 25 bp, Homo sapien
ggaaataggagggtcttagggctga

SEQ ID NO: 3332361 - DNA, 25 bp, Homo sapien
agggtcttagggctgaacttcagca

SEQ ID NO: 3332362 - DNA, 25 bp, Homo sapien
aggagggtcttagggctgaacttca

SEQ ID NO: 3332363 - DNA, 25 bp, Homo sapien
tttatcacccaaagtacactgtgga

SEQ ID NO: 3332364 - DNA, 25 bp, Homo sapien
caaacaatgccaaatattggcgatt

SEQ ID NO: 3332365 - DNA, 25 bp, Homo sapien
aacaaacaatgccaaatattggcga

SEQ ID NO: 3332366 - DNA, 25 bp, Homo sapien
ctgtggattcaaggtcctccatgtg

SEQ ID NO: 3332367 - DNA, 25 bp, Homo sapien
tcccatccacaggccatgaagacat

SEQ ID NO: 3332368 - DNA, 25 bp, Homo sapien
ccaacaccaactctgactctcccat

SEQ ID NO: 3332369 - DNA, 25 bp, Homo sapien
actctcccatccacaggccatgaag

SEQ ID NO: 3332370 - DNA, 25 bp, Homo sapien
cttcaccaacaccaactctgactct

SEQ ID NO: 3332371 - DNA, 25 bp, Homo sapien
aatgcaatttaagttcactaccatt

SEQ ID NO: 3332372 - DNA, 25 bp, Homo sapien
cacatttaggagtcgatgaatgcag

SEQ ID NO: 3332373 - DNA, 25 bp, Homo sapien
tatagtgtcgtattttggtggtgaa

SEQ ID NO: 3332374 - DNA, 25 bp, Homo sapien
cgatgaatgcagtatgagggaacaa

SEQ ID NO: 3332375 - DNA, 25 bp, Homo sapien
tatcccacagccataccaaattcac

SEQ ID NO: 3332376 - DNA, 25 bp, Homo sapien
aactatcccacagccataccaaatt

SEQ ID NO: 3332377 - DNA, 25 bp, Homo sapien
aaaactatcccacagccataccaaa

SEQ ID NO: 3332378 - DNA, 25 bp, Homo sapien
tcccacagccataccaaattcacca

SEQ ID NO: 3332379 - DNA, 25 bp, Homo sapien
ctctctaccttcccttcccactgca

SEQ ID NO: 3332380 - DNA, 25 bp, Homo sapien
ttcccttcccactgcactgcttcga

SEQ ID NO: 3332381 - DNA, 25 bp, Homo sapien
tctctctaccttcccttcccactgc

SEQ ID NO: 3332382 - DNA, 25 bp, Homo sapien
ttcccactgcactgcttcgaatgca

SEQ ID NO: 3332383 - DNA, 25 bp, Homo sapien
tgtcgttcctttacaacctgtggtg

SEQ ID NO: 3332384 - DNA, 25 bp, Homo sapien
ggagaccgttccctcacaaatacag

SEQ ID NO: 3332385 - DNA, 25 bp, Homo sapien
ttgtccccagcaaaatgaagcactg

SEQ ID NO: 3332386 - DNA, 25 bp, Homo sapien
gacacaactcatttctggagaccgt

SEQ ID NO: 3332387 - DNA, 25 bp, Homo sapien
caccaccatgggctaagcaattggg

SEQ ID NO: 3332388 - DNA, 25 bp, Homo sapien
gacactgaaacttggcgtcaccacc

SEQ ID NO: 3332389 - DNA, 25 bp, Homo sapien
tgctcactaacagtccgtaaattgg

SEQ ID NO: 3332390 - DNA, 25 bp, Homo sapien
tgggctaagcaattgggtcccaagt

SEQ ID NO: 3332391 - DNA, 25 bp, Homo sapien
acttgaggaaaatggaccgcattgt

SEQ ID NO: 3332392 - DNA, 25 bp, Homo sapien
cttgcttccaggtgttgctgatgac

SEQ ID NO: 3332393 - DNA, 25 bp, Homo sapien
aaatggaccgcattgttcgtgatag

SEQ ID NO: 3332394 - DNA, 25 bp, Homo sapien
tcaacttgcttccaggtgttgctga

SEQ ID NO: 3332395 - DNA, 25 bp, Homo sapien
ctgcagcctgatgccattgttgcaa

SEQ ID NO: 3332396 - DNA, 25 bp, Homo sapien
gatgccattgttgcaactgacttgg

SEQ ID NO: 3332397 - DNA, 25 bp, Homo sapien
actttgttcagtgattcctatttgc

SEQ ID NO: 3332398 - DNA, 25 bp, Homo sapien
gattcctatttgcactaactgcctt

SEQ ID NO: 3332399 - DNA, 25 bp, Homo sapien
tcagccatgaccaattagttatttc

SEQ ID NO: 3332400 - DNA, 25 bp, Homo sapien
ttagaatagatgatacagttggtca

SEQ ID NO: 3332401 - DNA, 25 bp, Homo sapien
aaactgctattacttgtcagccatg

SEQ ID NO: 3332402 - DNA, 25 bp, Homo sapien
tttgcacataaagtctctgattaag

SEQ ID NO: 3332403 - DNA, 25 bp, Homo sapien
cgtatttcctcacgccagatctcag

SEQ ID NO: 3332404 - DNA, 25 bp, Homo sapien
tttaacatgacatttgtccagctgt

SEQ ID NO: 3332405 - DNA, 25 bp, Homo sapien
tcttttaacatgacatttgtccagc

SEQ ID NO: 3332406 - DNA, 25 bp, Homo sapien
tttgtccagctgttgaatttataat

SEQ ID NO: 3332407 - DNA, 25 bp, Homo sapien
gaaaagattcttgtgagactttttc

SEQ ID NO: 3332408 - DNA, 25 bp, Homo sapien
gggttccatgttgcaacttagataa

SEQ ID NO: 3332409 - DNA, 25 bp, Homo sapien
taaggtcttgttgctgggttccatg

SEQ ID NO: 3332410 - DNA, 25 bp, Homo sapien
cattaccattaggtttatcttgaga

SEQ ID NO: 3332411 - DNA, 25 bp, Homo sapien
cttcattagaaaggttgatgatttt

SEQ ID NO: 3332412 - DNA, 25 bp, Homo sapien
tcattagaaaggttgatgatttttc

SEQ ID NO: 3332413 - DNA, 25 bp, Homo sapien
agaaaggttgatgatttttcactta

SEQ ID NO: 3332414 - DNA, 25 bp, Homo sapien
ttcattagaaaggttgatgattttt

SEQ ID NO: 3332415 - DNA, 25 bp, Homo sapien
tccaagggtgtaattcgttcatcat

SEQ ID NO: 3332416 - DNA, 25 bp, Homo sapien
agggtgtaattcgttcatcattttc

SEQ ID NO: 3332417 - DNA, 25 bp, Homo sapien
caagggtgtaattcgttcatcattt

SEQ ID NO: 3332418 - DNA, 25 bp, Homo sapien
gattccaagggtgtaattcgttcat

SEQ ID NO: 3332419 - DNA, 25 bp, Homo sapien
aagagagaggcagaggaaatcgaac

SEQ ID NO: 3332420 - DNA, 25 bp, Homo sapien
gagagaggcagaggaaatcgaacat

SEQ ID NO: 3332421 - DNA, 25 bp, Homo sapien
ctccgcaaagagagaggcagaggaa

SEQ ID NO: 3332422 - DNA, 25 bp, Homo sapien
caaagagagaggcagaggaaatcga

SEQ ID NO: 3332423 - DNA, 25 bp, Homo sapien
ccagccggcagcccatggccttgcc

SEQ ID NO: 3332424 - DNA, 25 bp, Homo sapien
catggccttgccctcggccaccagg

SEQ ID NO: 3332425 - DNA, 25 bp, Homo sapien
atggccttgccctcggccaccaggc

SEQ ID NO: 3332426 - DNA, 25 bp, Homo sapien
gcagcccatggccttgccctcggcc

SEQ ID NO: 3332427 - DNA, 25 bp, Homo sapien
tcctcgtcgttgctctttgtttctg

SEQ ID NO: 3332428 - DNA, 25 bp, Homo sapien
ctttgtttctgccatctgctcctcg

SEQ ID NO: 3332429 - DNA, 25 bp, Homo sapien
tctgctcctcggtagggtcggcatc

SEQ ID NO: 3332430 - DNA, 25 bp, Homo sapien
ggcactcgagcagttcctggcactc

SEQ ID NO: 3332431 - DNA, 25 bp, Homo sapien
gcgggctcggggcccaatatcaggc

SEQ ID NO: 3332432 - DNA, 25 bp, Homo sapien
gggctcggggcccaatatcaggcat

SEQ ID NO: 3332433 - DNA, 25 bp, Homo sapien
cgcgggctcggggcccaatatcagg

SEQ ID NO: 3332434 - DNA, 25 bp, Homo sapien
cgggctcggggcccaatatcaggca

SEQ ID NO: 3332435 - DNA, 25 bp, Homo sapien
ggaaatagacactcagaatggcact

SEQ ID NO: 3332436 - DNA, 25 bp, Homo sapien
tattaacagtgaccacaggaaatag

SEQ ID NO: 3332437 - DNA, 25 bp, Homo sapien
ctcattcgataatacttctaggtta

SEQ ID NO: 3332438 - DNA, 25 bp, Homo sapien
taattattcccaaacccatagctca

SEQ ID NO: 3332439 - DNA, 25 bp, Homo sapien
tcattgacatggctagaactcctag

SEQ ID NO: 3332440 - DNA, 25 bp, Homo sapien
ggatctttcgttcatcagatgggag

SEQ ID NO: 3332441 - DNA, 25 bp, Homo sapien
ctggatctttcgttcatcagatggg

SEQ ID NO: 3332442 - DNA, 25 bp, Homo sapien
tagaactcctagcatgctgcagcat

SEQ ID NO: 3332443 - DNA, 25 bp, Homo sapien
ctaatcattgctagttattgcagct

SEQ ID NO: 3332444 - DNA, 25 bp, Homo sapien
cagcctgggctctcacaacagcatt

SEQ ID NO: 3332445 - DNA, 25 bp, Homo sapien
ctgggctctcacaacagcattctaa

SEQ ID NO: 3332446 - DNA, 25 bp, Homo sapien
agcctgggctctcacaacagcattc

SEQ ID NO: 3332447 - DNA, 25 bp, Homo sapien
ggctctcacaacagcattctaacat

SEQ ID NO: 3332448 - DNA, 25 bp, Homo sapien
aattgttaaacagtggcccttctct

SEQ ID NO: 3332449 - DNA, 25 bp, Homo sapien
taattgttaaacagtggcccttctc

SEQ ID NO: 3332450 - DNA, 25 bp, Homo sapien
gaaatgtcgcctgaatataaaatca

SEQ ID NO: 3332451 - DNA, 25 bp, Homo sapien
ttctaatgacatgaaatgtcgcctg

SEQ ID NO: 3332452 - DNA, 25 bp, Homo sapien
ctctgagaaggctctattttcccag

SEQ ID NO: 3332453 - DNA, 25 bp, Homo sapien
acccgggctgcgcactgtgcttgcg

SEQ ID NO: 3332454 - DNA, 25 bp, Homo sapien
gtgggcgcgggcttggcgccccaga

SEQ ID NO: 3332455 - DNA, 25 bp, Homo sapien
ctatctcttaactacttgagaggtg

SEQ ID NO: 3332456 - DNA, 25 bp, Homo sapien
tcttaactacttgagaggtgacagc

SEQ ID NO: 3332457 - DNA, 25 bp, Homo sapien
tatcagcagcacgacttgtattctc

SEQ ID NO: 3332458 - DNA, 25 bp, Homo sapien
tcagcagcacgacttgtattctcca

SEQ ID NO: 3332459 - DNA, 25 bp, Homo sapien
cagcagcacgacttgtattctccat

SEQ ID NO: 3332460 - DNA, 25 bp, Homo sapien
ttatcagcagcacgacttgtattct

SEQ ID NO: 3332461 - DNA, 25 bp, Homo sapien
cagtattgaataaagcttctgagca

SEQ ID NO: 3332462 - DNA, 25 bp, Homo sapien
ttgaataaagcttctgagcaatcac

SEQ ID NO: 3332463 - DNA, 25 bp, Homo sapien
aataaagcttctgagcaatcactgg

SEQ ID NO: 3332464 - DNA, 25 bp, Homo sapien
gtacagtattgaataaagcttctga

SEQ ID NO: 3332465 - DNA, 25 bp, Homo sapien
taattcaaaatattcttcacttgcc

SEQ ID NO: 3332466 - DNA, 25 bp, Homo sapien
attcaaaatattcttcacttgccat

SEQ ID NO: 3332467 - DNA, 25 bp, Homo sapien
aatttaattcaaaatattcttcact

SEQ ID NO: 3332468 - DNA, 25 bp, Homo sapien
tttaattcaaaatattcttcacttg

SEQ ID NO: 3332469 - DNA, 25 bp, Homo sapien
caagaagacgtctagcatggcaaga

SEQ ID NO: 3332470 - DNA, 25 bp, Homo sapien
aatgcggtattaacacatgagctgc

SEQ ID NO: 3332471 - DNA, 25 bp, Homo sapien
gctgagactctccaggatgtagaca

SEQ ID NO: 3332472 - DNA, 25 bp, Homo sapien
catgtgctcactctggaaaggactg

SEQ ID NO: 3332473 - DNA, 25 bp, Homo sapien
ggctttttgcagttagttgatgtcc

SEQ ID NO: 3332474 - DNA, 25 bp, Homo sapien
cagatattgggcaagttgttctcac

SEQ ID NO: 3332475 - DNA, 25 bp, Homo sapien
tggattccgggcactggcccatgct

SEQ ID NO: 3332476 - DNA, 25 bp, Homo sapien
gctccttgtgtttaagacctggcag

SEQ ID NO: 3332477 - DNA, 25 bp, Homo sapien
catgcttggcctaatttgacagata

SEQ ID NO: 3332478 - DNA, 25 bp, Homo sapien
tctaacctagtcagagatgaggagc

SEQ ID NO: 3332479 - DNA, 25 bp, Homo sapien
cacttaatagagctgaacactgcaa

SEQ ID NO: 3332480 - DNA, 25 bp, Homo sapien
tagtccagcttctagagggccacat

SEQ ID NO: 3332481 - DNA, 25 bp, Homo sapien
acatcctgggatgaactgaagttga

SEQ ID NO: 3332482 - DNA, 25 bp, Homo sapien
tcttagtcttgaccactccatgagc

SEQ ID NO: 3332483 - DNA, 25 bp, Homo sapien
gacactcctggtccatatttcatca

SEQ ID NO: 3332484 - DNA, 25 bp, Homo sapien
agccctcctggttctcgtacataag

SEQ ID NO: 3332485 - DNA, 25 bp, Homo sapien
cagaactctgacactgagcctgaca

SEQ ID NO: 3332486 - DNA, 25 bp, Homo sapien
tgtggaagtgacatcattaacaaaa

SEQ ID NO: 3332487 - DNA, 25 bp, Homo sapien
tggaagtgacatcattaacaaaagc

SEQ ID NO: 3332488 - DNA, 25 bp, Homo sapien
tatgtggaagtgacatcattaacaa

SEQ ID NO: 3332489 - DNA, 25 bp, Homo sapien
ctatatgtggaagtgacatcattaa

SEQ ID NO: 3332490 - DNA, 25 bp, Homo sapien
aatagctgggaatggagtagactgt

SEQ ID NO: 3332491 - DNA, 25 bp, Homo sapien
ctacttggatgatctaattatggga

SEQ ID NO: 3332492 - DNA, 25 bp, Homo sapien
tgatctaattatgggaatagctggg

SEQ ID NO: 3332493 - DNA, 25 bp, Homo sapien
gctgggaatggagtagactgtctct

SEQ ID NO: 3332494 - DNA, 25 bp, Homo sapien
gatttctccctggaataagagttag

SEQ ID NO: 3332495 - DNA, 25 bp, Homo sapien
tgatttctccctggaataagagtta

SEQ ID NO: 3332496 - DNA, 25 bp, Homo sapien
gccatatggcctattattacctaag

SEQ ID NO: 3332497 - DNA, 25 bp, Homo sapien
tattacctaagaataatacctagga

SEQ ID NO: 3332498 - DNA, 25 bp, Homo sapien
gaattttgctaatttaaagtagcca

SEQ ID NO: 3332499 - DNA, 25 bp, Homo sapien
cattaatagaagctttgaatattta

SEQ ID NO: 3332500 - DNA, 25 bp, Homo sapien
cagcatccaaatataattcttgcaa

SEQ ID NO: 3332501 - DNA, 25 bp, Homo sapien
gcatccaaatataattcttgcaaag

SEQ ID NO: 3332502 - DNA, 25 bp, Homo sapien
tccaaatataattcttgcaaagcca

SEQ ID NO: 3332503 - DNA, 25 bp, Homo sapien
ccaaatataattcttgcaaagccat

SEQ ID NO: 3332504 - DNA, 25 bp, Homo sapien
taatactgcgctgtttattctccca

SEQ ID NO: 3332505 - DNA, 25 bp, Homo sapien
tcttcctaacattagaccaacaggc

SEQ ID NO: 3332506 - DNA, 25 bp, Homo sapien
tctcccaagtttaggccactggaga

SEQ ID NO: 3332507 - DNA, 25 bp, Homo sapien
agtgtatccctacagctggctaata

SEQ ID NO: 3332508 - DNA, 25 bp, Homo sapien
gaatccagtatatgtataaagttgg

SEQ ID NO: 3332509 - DNA, 25 bp, Homo sapien
gaagtgtacaatcaccagctgcagg

SEQ ID NO: 3332510 - DNA, 25 bp, Homo sapien
ataaagttggtgtcatcgataagtt

SEQ ID NO: 3332511 - DNA, 25 bp, Homo sapien
gactggaatccagtatatgtataaa

SEQ ID NO: 3332512 - DNA, 25 bp, Homo sapien
gaacaaatctaaggtacaatctact

SEQ ID NO: 3332513 - DNA, 25 bp, Homo sapien
tagtgactccaaagtgtgccagaaa

SEQ ID NO: 3332514 - DNA, 25 bp, Homo sapien
cagagactcggtagttgaaacaaga

SEQ ID NO: 3332515 - DNA, 25 bp, Homo sapien
tgttatgatgtattctgcttggtgg

SEQ ID NO: 3332516 - DNA, 25 bp, Homo sapien
cactttcaataccagttttctcgtt

SEQ ID NO: 3332517 - DNA, 25 bp, Homo sapien
tctcgtttttccttcttgatctctg

SEQ ID NO: 3332518 - DNA, 25 bp, Homo sapien
tttctcgtttttccttcttgatctc

SEQ ID NO: 3332519 - DNA, 25 bp, Homo sapien
catcactttcaataccagttttctc

SEQ ID NO: 3332520 - DNA, 25 bp, Homo sapien
cctttagaactatatcctgcccgcc

SEQ ID NO: 3332521 - DNA, 25 bp, Homo sapien
tagaactatatcctgcccgcctctt

SEQ ID NO: 3332522 - DNA, 25 bp, Homo sapien
tttagaactatatcctgcccgcctc

SEQ ID NO: 3332523 - DNA, 25 bp, Homo sapien
tccctttagaactatatcctgcccg

SEQ ID NO: 3332524 - DNA, 25 bp, Homo sapien
ggaagtgccctttcagggactctgg

SEQ ID NO: 3332525 - DNA, 25 bp, Homo sapien
ctggacttgtgacagtccctgtttc

SEQ ID NO: 3332526 - DNA, 25 bp, Homo sapien
gagccaggcgggaagtgccctttca

SEQ ID NO: 3332527 - DNA, 25 bp, Homo sapien
tcagggactctggacttgtgacagt

SEQ ID NO: 3332528 - DNA, 25 bp, Homo sapien
acattgagtcaacttcatagcttag

SEQ ID NO: 3332529 - DNA, 25 bp, Homo sapien
catagcctaacattgagtcaacttc

SEQ ID NO: 3332530 - DNA, 25 bp, Homo sapien
ctatgcctcatagcctaacattgag

SEQ ID NO: 3332531 - DNA, 25 bp, Homo sapien
gcctaacattgagtcaacttcatag

SEQ ID NO: 3332532 - DNA, 25 bp, Homo sapien
ttccgatcagctccaaattgtactc

SEQ ID NO: 3332533 - DNA, 25 bp, Homo sapien
tcatttccgatcagctccaaattgt

SEQ ID NO: 3332534 - DNA, 25 bp, Homo sapien
aatctcatttccgatcagctccaaa

SEQ ID NO: 3332535 - DNA, 25 bp, Homo sapien
acaatctcatttccgatcagctcca

SEQ ID NO: 3332536 - DNA, 25 bp, Homo sapien
cttggctttcttccctcattcaagt

SEQ ID NO: 3332537 - DNA, 25 bp, Homo sapien
ccccagggctggaatgaaatggtgc

SEQ ID NO: 3332538 - DNA, 25 bp, Homo sapien
cccagggctggaatgaaatggtgca

SEQ ID NO: 3332539 - DNA, 25 bp, Homo sapien
gctttcttccctcattcaagtgatt

SEQ ID NO: 3332540 - DNA, 25 bp, Homo sapien
tcctgggcctgacacactgattgct

SEQ ID NO: 3332541 - DNA, 25 bp, Homo sapien
ttcctgggcctgacacactgattgc

SEQ ID NO: 3332542 - DNA, 25 bp, Homo sapien
cctgggcctgacacactgattgctg

SEQ ID NO: 3332543 - DNA, 25 bp, Homo sapien
tgggcctgacacactgattgctgtg

SEQ ID NO: 3332544 - DNA, 25 bp, Homo sapien
agcacagttgcttaaccgcccagat

SEQ ID NO: 3332545 - DNA, 25 bp, Homo sapien
cagtctggtgaattgtactggattc

SEQ ID NO: 3332546 - DNA, 25 bp, Homo sapien
gcacagctgtgaggactgagtgttc

SEQ ID NO: 3332547 - DNA, 25 bp, Homo sapien
ataatgtgtgtaccaggttcttctg

SEQ ID NO: 3332548 - DNA, 25 bp, Homo sapien
cagatgaaaatatcagcagtttttc

SEQ ID NO: 3332549 - DNA, 25 bp, Homo sapien
gatgaaaatatcagcagtttttctg

SEQ ID NO: 3332550 - DNA, 25 bp, Homo sapien
agatgaaaatatcagcagtttttct

SEQ ID NO: 3332551 - DNA, 25 bp, Homo sapien
ggcaaaaaacaacacgattcttgct

SEQ ID NO: 3332552 - DNA, 25 bp, Homo sapien
tgaatttatatgaactaccagtacc

SEQ ID NO: 3332553 - DNA, 25 bp, Homo sapien
ttgccctcaaccagcattgagctgg

SEQ ID NO: 3332554 - DNA, 25 bp, Homo sapien
tattagtcaccaaatctagccctgg

SEQ ID NO: 3332555 - DNA, 25 bp, Homo sapien
ctaagcttcggatggtccagcccaa

SEQ ID NO: 3332556 - DNA, 25 bp, Homo sapien
tctagaatattgtgtatcctgctgc

SEQ ID NO: 3332557 - DNA, 25 bp, Homo sapien
ttttctagaatattgtgtatcctgc

SEQ ID NO: 3332558 - DNA, 25 bp, Homo sapien
atattgtgtatcctgctgctgtgcc

SEQ ID NO: 3332559 - DNA, 25 bp, Homo sapien
gaatattgtgtatcctgctgctgtg

SEQ ID NO: 3332560 - DNA, 25 bp, Homo sapien
tgggttctgatgaaggtcttcttcc

SEQ ID NO: 3332561 - DNA, 25 bp, Homo sapien
tgtttcaccaatggctgtcttcttg

SEQ ID NO: 3332562 - DNA, 25 bp, Homo sapien
cttcctgtttcaccaatggctgtct

SEQ ID NO: 3332563 - DNA, 25 bp, Homo sapien
agattagggtgccacaaagattggg

SEQ ID NO: 3332564 - DNA, 25 bp, Homo sapien
ccgggcatggccgtccggagtgtca

SEQ ID NO: 3332565 - DNA, 25 bp, Homo sapien
ggcggctctgcccaagggcatctct

SEQ ID NO: 3332566 - DNA, 25 bp, Homo sapien
caggcttggcggtcacactgatgcg

SEQ ID NO: 3332567 - DNA, 25 bp, Homo sapien
gctggcggctctgcccaagggcatc

SEQ ID NO: 3332568 - DNA, 25 bp, Homo sapien
ctgggggcggaggccatgcagctga

SEQ ID NO: 3332569 - DNA, 25 bp, Homo sapien
gccatgcagctgaccaggtcgctgg

SEQ ID NO: 3332570 - DNA, 25 bp, Homo sapien
agctgaccaggtcgctggctgggcc

SEQ ID NO: 3332571 - DNA, 25 bp, Homo sapien
cggaggccatgcagctgaccaggtc

SEQ ID NO: 3332572 - DNA, 25 bp, Homo sapien
ttatgtagcacttagctgagagtct

SEQ ID NO: 3332573 - DNA, 25 bp, Homo sapien
tttggttgaggagtacgagttgctc

SEQ ID NO: 3332574 - DNA, 25 bp, Homo sapien
ctgagagtcttttgaatcactttct

SEQ ID NO: 3332575 - DNA, 25 bp, Homo sapien
gagagtcttttgaatcactttctga

SEQ ID NO: 3332576 - DNA, 25 bp, Homo sapien
taataggcttcccaggatttccctg

SEQ ID NO: 3332577 - DNA, 25 bp, Homo sapien
tgtgctttcacagcagtgaacggtg

SEQ ID NO: 3332578 - DNA, 25 bp, Homo sapien
acacagaatagaaggtgtcattggg

SEQ ID NO: 3332579 - DNA, 25 bp, Homo sapien
aagtattgcagctttatgtagaacc

SEQ ID NO: 3332580 - DNA, 25 bp, Homo sapien
aattcagacagcagcttatccacag

SEQ ID NO: 3332581 - DNA, 25 bp, Homo sapien
ctgtgaattcagacagcagcttatc

SEQ ID NO: 3332582 - DNA, 25 bp, Homo sapien
cagcagcttatccacagttaagaaa

SEQ ID NO: 3332583 - DNA, 25 bp, Homo sapien
cagacagcagcttatccacagttaa

SEQ ID NO: 3332584 - DNA, 25 bp, Homo sapien
ttgctagtattagatctatttgttt

SEQ ID NO: 3332585 - DNA, 25 bp, Homo sapien
ttttgctagtattagatctatttgt

SEQ ID NO: 3332586 - DNA, 25 bp, Homo sapien
tttgctagtattagatctatttgtt

SEQ ID NO: 3332587 - DNA, 25 bp, Homo sapien
cttttgctagtattagatctatttg

SEQ ID NO: 3332588 - DNA, 25 bp, Homo sapien
ccttgttagatgactgaactgaaac

SEQ ID NO: 3332589 - DNA, 25 bp, Homo sapien
gaactgaaacaccaaccacatagac

SEQ ID NO: 3332590 - DNA, 25 bp, Homo sapien
gaaacaccaaccacatagacttgat

SEQ ID NO: 3332591 - DNA, 25 bp, Homo sapien
ctacaactttcccttgttagatgac

SEQ ID NO: 3332592 - DNA, 25 bp, Homo sapien
tacataaggtagtttataatcacac

SEQ ID NO: 3332593 - DNA, 25 bp, Homo sapien
gcatctcttgtgacatcacttgtta

SEQ ID NO: 3332594 - DNA, 25 bp, Homo sapien
gaagtctgatcgatattcacttaac

SEQ ID NO: 3332595 - DNA, 25 bp, Homo sapien
tactgagctgtaagctacataaggt

SEQ ID NO: 3332596 - DNA, 25 bp, Homo sapien
ttttggcatcacagttaatttatga

SEQ ID NO: 3332597 - DNA, 25 bp, Homo sapien
tcagatgtctcaagcaagtttttgg

SEQ ID NO: 3332598 - DNA, 25 bp, Homo sapien
gttgttgataaaacgatccatatgt

SEQ ID NO: 3332599 - DNA, 25 bp, Homo sapien
ttttgtgttgttgataaaacgatcc

SEQ ID NO: 3332600 - DNA, 25 bp, Homo sapien
aacatttaggtttccggcagtccat

SEQ ID NO: 3332601 - DNA, 25 bp, Homo sapien
gcagctggattctaactggagccag

SEQ ID NO: 3332602 - DNA, 25 bp, Homo sapien
ggcagtccatttgatcgggagagat

SEQ ID NO: 3332603 - DNA, 25 bp, Homo sapien
cactaattgaacaccagcgatgcca

SEQ ID NO: 3332604 - DNA, 25 bp, Homo sapien
ttgtctgtgaggaaagtcttcttta

SEQ ID NO: 3332605 - DNA, 25 bp, Homo sapien
tggtccttaatttggctttgtcaaa

SEQ ID NO: 3332606 - DNA, 25 bp, Homo sapien
tttgtctgtgaggaaagtcttcttt

SEQ ID NO: 3332607 - DNA, 25 bp, Homo sapien
ctggtccttaatttggctttgtcaa

SEQ ID NO: 3332608 - DNA, 25 bp, Homo sapien
tcacctgccaggtaattcagcgagc

SEQ ID NO: 3332609 - DNA, 25 bp, Homo sapien
gctataggaaggacacatgtgacac

SEQ ID NO: 3332610 - DNA, 25 bp, Homo sapien
tgacacactgggagaatgcaaggcc

SEQ ID NO: 3332611 - DNA, 25 bp, Homo sapien
aacaatagctatatggtaggaccac

SEQ ID NO: 3332612 - DNA, 25 bp, Homo sapien
gactagcatcccaagccattctttg

SEQ ID NO: 3332613 - DNA, 25 bp, Homo sapien
tctattctcattccgatgaaggagg

SEQ ID NO: 3332614 - DNA, 25 bp, Homo sapien
tttatgaggcttttgcaagactagc

SEQ ID NO: 3332615 - DNA, 25 bp, Homo sapien
ctcattccgatgaaggaggattgtc

SEQ ID NO: 3332616 - DNA, 25 bp, Homo sapien
tgagtcactgccaatggcactatct

SEQ ID NO: 3332617 - DNA, 25 bp, Homo sapien
ctgagtcactgccaatggcactatc

SEQ ID NO: 3332618 - DNA, 25 bp, Homo sapien
ggtgtacaatttggagtgaatcctc

SEQ ID NO: 3332619 - DNA, 25 bp, Homo sapien
ctgagtgtggtgtacaatttggagt

SEQ ID NO: 3332620 - DNA, 25 bp, Homo sapien
tgtacaatttggagtgaatcctctt

SEQ ID NO: 3332621 - DNA, 25 bp, Homo sapien
gcctgagtgtggtgtacaatttgga

SEQ ID NO: 3332622 - DNA, 25 bp, Homo sapien
cttctgcactctcatcaagctgcat

SEQ ID NO: 3332623 - DNA, 25 bp, Homo sapien
gacgtgaaatattgtgccagaatcc

SEQ ID NO: 3332624 - DNA, 25 bp, Homo sapien
attttacattagtttccaagacgtg

SEQ ID NO: 3332625 - DNA, 25 bp, Homo sapien
gtttccaagacgtgaaatattgtgc

SEQ ID NO: 3332626 - DNA, 25 bp, Homo sapien
tccaagacgtgaaatattgtgccag

SEQ ID NO: 3332627 - DNA, 25 bp, Homo sapien
cttatacagtagaattagcgcattt

SEQ ID NO: 3332628 - DNA, 25 bp, Homo sapien
cttcaatataggctgttctgagtgg

SEQ ID NO: 3332629 - DNA, 25 bp, Homo sapien
atttttaatttgcaaccacaagcca

SEQ ID NO: 3332630 - DNA, 25 bp, Homo sapien
tggcctttgccttcaatataggctg

SEQ ID NO: 3332631 - DNA, 25 bp, Homo sapien
aaaggatgggctgcatggtcacttg

SEQ ID NO: 3332632 - DNA, 25 bp, Homo sapien
agaagccggatcataaaggatgggc

SEQ ID NO: 3332633 - DNA, 25 bp, Homo sapien
gtcacttgatatcccatgatcagca

SEQ ID NO: 3332634 - DNA, 25 bp, Homo sapien
tggtcacttgatatcccatgatcag

SEQ ID NO: 3332635 - DNA, 25 bp, Homo sapien
tatttgttgagttttccgtaactgc

SEQ ID NO: 3332636 - DNA, 25 bp, Homo sapien
tgagttttccgtaactgcaacatgc

SEQ ID NO: 3332637 - DNA, 25 bp, Homo sapien
ctatttgttgagttttccgtaactg

SEQ ID NO: 3332638 - DNA, 25 bp, Homo sapien
ttgttgagttttccgtaactgcaac

SEQ ID NO: 3332639 - DNA, 25 bp, Homo sapien
cttgaaattaaattagtgactgaaa

SEQ ID NO: 3332640 - DNA, 25 bp, Homo sapien
aattaaattagtgactgaaatagcc

SEQ ID NO: 3332641 - DNA, 25 bp, Homo sapien
gaaattaaattagtgactgaaatag

SEQ ID NO: 3332642 - DNA, 25 bp, Homo sapien
ttaaattagtgactgaaatagccat

SEQ ID NO: 3332643 - DNA, 25 bp, Homo sapien
gtatatgatgtaaggcagggttcca

SEQ ID NO: 3332644 - DNA, 25 bp, Homo sapien
tatgcttgtttatcacgtgtatctc

SEQ ID NO: 3332645 - DNA, 25 bp, Homo sapien
tatgtccagaatgctacaatacggc

SEQ ID NO: 3332646 - DNA, 25 bp, Homo sapien
tgctggtggccgtctgtttactctg

SEQ ID NO: 3332647 - DNA, 25 bp, Homo sapien
gacttgatgcactacttcagcaaaa

SEQ ID NO: 3332648 - DNA, 25 bp, Homo sapien
gcttctatccctgaaatgcaaggtt

SEQ ID NO: 3332649 - DNA, 25 bp, Homo sapien
cagcagggttgcatgttaaaaactc

SEQ ID NO: 3332650 - DNA, 25 bp, Homo sapien
cactgctagctagagcactcaggca

SEQ ID NO: 3332651 - DNA, 25 bp, Homo sapien
gtcaggagcttataacaagaccact

SEQ ID NO: 3332652 - DNA, 25 bp, Homo sapien
gattcatgacctttcagtaaggcac

SEQ ID NO: 3332653 - DNA, 25 bp, Homo sapien
tcaatactgagattacgtgacagac

SEQ ID NO: 3332654 - DNA, 25 bp, Homo sapien
tcaaatgaaaagtaggtcaggagct

SEQ ID NO: 3332655 - DNA, 25 bp, Homo sapien
aaacatcaattttgcgggttctgaa

SEQ ID NO: 3332656 - DNA, 25 bp, Homo sapien
gatgaaaaggttagcagaaacatca

SEQ ID NO: 3332657 - DNA, 25 bp, Homo sapien
caattttgcgggttctgaacggttg

SEQ ID NO: 3332658 - DNA, 25 bp, Homo sapien
cttctttgaaacagcttttgatgaa

SEQ ID NO: 3332659 - DNA, 25 bp, Homo sapien
ttatacgcagattccttcaagagag

SEQ ID NO: 3332660 - DNA, 25 bp, Homo sapien
tacgcagattccttcaagagaggac

SEQ ID NO: 3332661 - DNA, 25 bp, Homo sapien
gattccttcaagagaggactccttg

SEQ ID NO: 3332662 - DNA, 25 bp, Homo sapien
ttcaagagaggactccttgtccctc

SEQ ID NO: 3332663 - DNA, 25 bp, Homo sapien
aaggtaagctaatagagatggactc

SEQ ID NO: 3332664 - DNA, 25 bp, Homo sapien
gatggactctaagatgtgaccacac

SEQ ID NO: 3332665 - DNA, 25 bp, Homo sapien
accaaggtaagctaatagagatgga

SEQ ID NO: 3332666 - DNA, 25 bp, Homo sapien
agagatggactctaagatgtgacca

SEQ ID NO: 3332667 - DNA, 25 bp, Homo sapien
tgctactaaagccagtcctatgaat

SEQ ID NO: 3332668 - DNA, 25 bp, Homo sapien
tccaattgcagcaggcaggtcaaag

SEQ ID NO: 3332669 - DNA, 25 bp, Homo sapien
aggcaggtcaaagtttccaagtagt

SEQ ID NO: 3332670 - DNA, 25 bp, Homo sapien
gaatttcgtgaatcaaatcattctc

SEQ ID NO: 3332671 - DNA, 25 bp, Homo sapien
aatatgaaagcatatgccataagca

SEQ ID NO: 3332672 - DNA, 25 bp, Homo sapien
gtggataaacctgcttgccacatac

SEQ ID NO: 3332673 - DNA, 25 bp, Homo sapien
ttgcaggtgctgaagcgtctcttca

SEQ ID NO: 3332674 - DNA, 25 bp, Homo sapien
cttgccacatacagagagaagcttg

SEQ ID NO: 3332675 - DNA, 25 bp, Homo sapien
agctctgaacatgtgaaatcaaaga

SEQ ID NO: 3332676 - DNA, 25 bp, Homo sapien
taatgtctcatcgaaatatctctaa

SEQ ID NO: 3332677 - DNA, 25 bp, Homo sapien
ctaatcccattataagagcttcaca

SEQ ID NO: 3332678 - DNA, 25 bp, Homo sapien
tattcggaggcaaactgctctccag

SEQ ID NO: 3332679 - DNA, 25 bp, Homo sapien
cagatactctcacagtgccatttgg

SEQ ID NO: 3332680 - DNA, 25 bp, Homo sapien
gcctttggtgttgtggattctagaa

SEQ ID NO: 3332681 - DNA, 25 bp, Homo sapien
cctgggtcctggataggatttagat

SEQ ID NO: 3332682 - DNA, 25 bp, Homo sapien
cagttccctttaagtatgcctttgg

SEQ ID NO: 3332683 - DNA, 25 bp, Homo sapien
ttcttcatccactctcctttgtttc

SEQ ID NO: 3332684 - DNA, 25 bp, Homo sapien
acttcatgtatcgtctttcaatttc

SEQ ID NO: 3332685 - DNA, 25 bp, Homo sapien
cctgaagacacttcatgtatcgtct

SEQ ID NO: 3332686 - DNA, 25 bp, Homo sapien
aaacctgaagacacttcatgtatcg

SEQ ID NO: 3332687 - DNA, 25 bp, Homo sapien
gaagacacttcatgtatcgtctttc

SEQ ID NO: 3332688 - DNA, 25 bp, Homo sapien
tatgccacattctattatattgcag

SEQ ID NO: 3332689 - DNA, 25 bp, Homo sapien
gccacattctattatattgcagtaa

SEQ ID NO: 3332690 - DNA, 25 bp, Homo sapien
tctattatattgcagtaaatcgtag

SEQ ID NO: 3332691 - DNA, 25 bp, Homo sapien
ttgcagtaaatcgtagtatccatca

SEQ ID NO: 3332692 - DNA, 25 bp, Homo sapien
gtgtaagttttttgagcagatatag

SEQ ID NO: 3332693 - DNA, 25 bp, Homo sapien
tgagcagatatagaatctatgtgct

SEQ ID NO: 3332694 - DNA, 25 bp, Homo sapien
tctatgtgctttataggaagagcta

SEQ ID NO: 3332695 - DNA, 25 bp, Homo sapien
tagtaagtgtaagttttttgagcag

SEQ ID NO: 3332696 - DNA, 25 bp, Homo sapien
gctccattgcagcaaaatatcttcc

SEQ ID NO: 3332697 - DNA, 25 bp, Homo sapien
agctgggcatatttccagctttctc

SEQ ID NO: 3332698 - DNA, 25 bp, Homo sapien
tggctccattgcagcaaaatatctt

SEQ ID NO: 3332699 - DNA, 25 bp, Homo sapien
aagctgggcatatttccagctttct

SEQ ID NO: 3332700 - DNA, 25 bp, Homo sapien
tattgagtgcttattgctttcagcc

SEQ ID NO: 3332701 - DNA, 25 bp, Homo sapien
tattactgatgaggatatatggatt

SEQ ID NO: 3332702 - DNA, 25 bp, Homo sapien
ctaagattctaatcgtatcatgtaa

SEQ ID NO: 3332703 - DNA, 25 bp, Homo sapien
gttgtgtgagctcattttcagcatt

SEQ ID NO: 3332704 - DNA, 25 bp, Homo sapien
tcttattactgatgaggatatatgg

SEQ ID NO: 3332705 - DNA, 25 bp, Homo sapien
tacactcagcctttcatgcctaaat

SEQ ID NO: 3332706 - DNA, 25 bp, Homo sapien
gggctgcagtgccatcggctctcgc

SEQ ID NO: 3332707 - DNA, 25 bp, Homo sapien
gtgtgaatgacaagcctacactcag

SEQ ID NO: 3332708 - DNA, 25 bp, Homo sapien
acagcctgaggctgtctctctggtc

SEQ ID NO: 3332709 - DNA, 25 bp, Homo sapien
aggtagtcaacctatcctcttttct

SEQ ID NO: 3332710 - DNA, 25 bp, Homo sapien
gaggtagtcaacctatcctcttttc

SEQ ID NO: 3332711 - DNA, 25 bp, Homo sapien
agaggtagtcaacctatcctctttt

SEQ ID NO: 3332712 - DNA, 25 bp, Homo sapien
tcttctgacatcctgtaacatgaat

SEQ ID NO: 3332713 - DNA, 25 bp, Homo sapien
tatacaggatgcacaatttccacgg

SEQ ID NO: 3332714 - DNA, 25 bp, Homo sapien
gaagttcttctacaggcagtgtttt

SEQ ID NO: 3332715 - DNA, 25 bp, Homo sapien
tttctgctgctatgacagatgccac

SEQ ID NO: 3332716 - DNA, 25 bp, Homo sapien
ttctgggaactgcaaaccatgtggt

SEQ ID NO: 3332717 - DNA, 25 bp, Homo sapien
tcaaggagcacataggatagaaaac

SEQ ID NO: 3332718 - DNA, 25 bp, Homo sapien
ccagtctggatgtaggaccttacta

SEQ ID NO: 3332719 - DNA, 25 bp, Homo sapien
gatagaaaaccttacccagtctgga

SEQ ID NO: 3332720 - DNA, 25 bp, Homo sapien
ttctgatagcaccagtaacccaatg

SEQ ID NO: 3332721 - DNA, 25 bp, Homo sapien
ctgagtcagccaaagctgcaaggtc

SEQ ID NO: 3332722 - DNA, 25 bp, Homo sapien
tgagtcagccaaagctgcaaggtct

SEQ ID NO: 3332723 - DNA, 25 bp, Homo sapien
caatgacaactctgactgagtcagc

SEQ ID NO: 3332724 - DNA, 25 bp, Homo sapien
tcggagctgatcagtaactctaaag

SEQ ID NO: 3332725 - DNA, 25 bp, Homo sapien
tgcagatatagccataagcacctaa

SEQ ID NO: 3332726 - DNA, 25 bp, Homo sapien
gattgacagatttatcaagtgagga

SEQ ID NO: 3332727 - DNA, 25 bp, Homo sapien
gcacctaatattgactatagttcgg

SEQ ID NO: 3332728 - DNA, 25 bp, Homo sapien
tgagagttgtcagccaacactcaca

SEQ ID NO: 3332729 - DNA, 25 bp, Homo sapien
caatcacccattggccaaggtctgg

SEQ ID NO: 3332730 - DNA, 25 bp, Homo sapien
tcataatgacgtctaggcgaccagt

SEQ ID NO: 3332731 - DNA, 25 bp, Homo sapien
gcagagaaagtagcagctgagagtt

SEQ ID NO: 3332732 - DNA, 25 bp, Homo sapien
tggtcacatgggctttcaatacgtt

SEQ ID NO: 3332733 - DNA, 25 bp, Homo sapien
taagcagatactattgtggcactca

SEQ ID NO: 3332734 - DNA, 25 bp, Homo sapien
cattatgtattgtaggtcctcaggc

SEQ ID NO: 3332735 - DNA, 25 bp, Homo sapien
ttttcaggacataaccatggctgcc

SEQ ID NO: 3332736 - DNA, 25 bp, Homo sapien
catctccaagtaagtgcattcttac

SEQ ID NO: 3332737 - DNA, 25 bp, Homo sapien
ggcaacatctccaagtaagtgcatt

SEQ ID NO: 3332738 - DNA, 25 bp, Homo sapien
taagtgcattcttacatccattgca

SEQ ID NO: 3332739 - DNA, 25 bp, Homo sapien
ccaagtaagtgcattcttacatcca

SEQ ID NO: 3332740 - DNA, 25 bp, Homo sapien
ctttcatagtatgtgtctgccagta

SEQ ID NO: 3332741 - DNA, 25 bp, Homo sapien
cacactctgaagtcgtgacaaccaa

SEQ ID NO: 3332742 - DNA, 25 bp, Homo sapien
catgctgggagatctgtgctcacag

SEQ ID NO: 3332743 - DNA, 25 bp, Homo sapien
tctgcagatcagaagtataccttaa

SEQ ID NO: 3332744 - DNA, 25 bp, Homo sapien
agctgcttttggtatagacataaac

SEQ ID NO: 3332745 - DNA, 25 bp, Homo sapien
tagacataaacatagtcataggcat

SEQ ID NO: 3332746 - DNA, 25 bp, Homo sapien
caatatttggaacatagcagctgct

SEQ ID NO: 3332747 - DNA, 25 bp, Homo sapien
tcataggcatatagatagagaatgc

SEQ ID NO: 3332748 - DNA, 25 bp, Homo sapien
gttactgaccaattatcagaagagg

SEQ ID NO: 3332749 - DNA, 25 bp, Homo sapien
ccaattatcagaagaggagctcctt

SEQ ID NO: 3332750 - DNA, 25 bp, Homo sapien
gaagaggagctccttaagaagctcc

SEQ ID NO: 3332751 - DNA, 25 bp, Homo sapien
tcacttagttactgaccaattatca

SEQ ID NO: 3332752 - DNA, 25 bp, Homo sapien
acaggacctctggattctttgttct

SEQ ID NO: 3332753 - DNA, 25 bp, Homo sapien
tcatcaacaggacctctggattctt

SEQ ID NO: 3332754 - DNA, 25 bp, Homo sapien
tcaacaggacctctggattctttgt

SEQ ID NO: 3332755 - DNA, 25 bp, Homo sapien
gtctcatcaacaggacctctggatt

SEQ ID NO: 3332756 - DNA, 25 bp, Homo sapien
ctctggcaaacactccagtttgaca

SEQ ID NO: 3332757 - DNA, 25 bp, Homo sapien
tggcaaacactccagtttgacagcc

SEQ ID NO: 3332758 - DNA, 25 bp, Homo sapien
caaacactccagtttgacagccatt

SEQ ID NO: 3332759 - DNA, 25 bp, Homo sapien
ggcaaacactccagtttgacagcca

SEQ ID NO: 3332760 - DNA, 25 bp, Homo sapien
tcttccttgccctctatataacctt

SEQ ID NO: 3332761 - DNA, 25 bp, Homo sapien
ttgcgctatgcctcaggacttccag

SEQ ID NO: 3332762 - DNA, 25 bp, Homo sapien
tgtaaagaggaattgcaacattgtc

SEQ ID NO: 3332763 - DNA, 25 bp, Homo sapien
cattgtctgtaaaagctgcagctcc

SEQ ID NO: 3332764 - DNA, 25 bp, Homo sapien
tagctgatttccatgaaataggtct

SEQ ID NO: 3332765 - DNA, 25 bp, Homo sapien
ttctatagctgatttccatgaaata

SEQ ID NO: 3332766 - DNA, 25 bp, Homo sapien
gctgatttccatgaaataggtctta

SEQ ID NO: 3332767 - DNA, 25 bp, Homo sapien
tgatttccatgaaataggtcttaat

SEQ ID NO: 3332768 - DNA, 25 bp, Homo sapien
atccagtgtggcattagttaagatt

SEQ ID NO: 3332769 - DNA, 25 bp, Homo sapien
taaagtgaccatgtccatgaagctt

SEQ ID NO: 3332770 - DNA, 25 bp, Homo sapien
ccagtgtggcattagttaagattaa

SEQ ID NO: 3332771 - DNA, 25 bp, Homo sapien
tgtcttctgaagtttaaagtgacca

SEQ ID NO: 3332772 - DNA, 25 bp, Homo sapien
cccagaatccttgtcctgaactctg

SEQ ID NO: 3332773 - DNA, 25 bp, Homo sapien
cagaatccttgtcctgaactctgac

SEQ ID NO: 3332774 - DNA, 25 bp, Homo sapien
ccagaatccttgtcctgaactctga

SEQ ID NO: 3332775 - DNA, 25 bp, Homo sapien
gagacacatgactgctgaaggaata

SEQ ID NO: 3332776 - DNA, 25 bp, Homo sapien
gagttctgcatacttggctccatca

SEQ ID NO: 3332777 - DNA, 25 bp, Homo sapien
tccgtggcattcagatctaagagca

SEQ ID NO: 3332778 - DNA, 25 bp, Homo sapien
tgaggtactcccatgtctgaggcag

SEQ ID NO: 3332779 - DNA, 25 bp, Homo sapien
cggtcaattgtagcccctatgctga

SEQ ID NO: 3332780 - DNA, 25 bp, Homo sapien
tactacaagtagaggagaatttccc

SEQ ID NO: 3332781 - DNA, 25 bp, Homo sapien
cctctgcatggctcgaaatcgaaca

SEQ ID NO: 3332782 - DNA, 25 bp, Homo sapien
caaattcttgcccagtacatcgtgg

SEQ ID NO: 3332783 - DNA, 25 bp, Homo sapien
gaaagcgtctcttaataacacagca

SEQ ID NO: 3332784 - DNA, 25 bp, Homo sapien
gcaattaacagctcgcaaacttttg

SEQ ID NO: 3332785 - DNA, 25 bp, Homo sapien
tcaacttcctttggcaacgtaaagc

SEQ ID NO: 3332786 - DNA, 25 bp, Homo sapien
tatgagatttccctcacagagcaag

SEQ ID NO: 3332787 - DNA, 25 bp, Homo sapien
taaacacccgtgattgctgactcca

SEQ ID NO: 3332788 - DNA, 25 bp, Homo sapien
agataccttcggcatggagtccagt

SEQ ID NO: 3332789 - DNA, 25 bp, Homo sapien
ggaatccatctattgcagggtgccg

SEQ ID NO: 3332790 - DNA, 25 bp, Homo sapien
tagctgctcggctgcagactaaaca

SEQ ID NO: 3332791 - DNA, 25 bp, Homo sapien
tctgcaccactgtgtagaccaagta

SEQ ID NO: 3332792 - DNA, 25 bp, Homo sapien
gaagagaccagttcaaacatggtcg

SEQ ID NO: 3332793 - DNA, 25 bp, Homo sapien
aacatggtcgttgatctgcacttgc

SEQ ID NO: 3332794 - DNA, 25 bp, Homo sapien
catttgtcatcagagcttatttctc

SEQ ID NO: 3332795 - DNA, 25 bp, Homo sapien
tgtcaaattttgtctccaaaactcc

SEQ ID NO: 3332796 - DNA, 25 bp, Homo sapien
ccccagtagaaacctgtccatattc

SEQ ID NO: 3332797 - DNA, 25 bp, Homo sapien
caggaagctcggtttcctagagtac

SEQ ID NO: 3332798 - DNA, 25 bp, Homo sapien
gctcggtttcctagagtacaaacta

SEQ ID NO: 3332799 - DNA, 25 bp, Homo sapien
gaagctcggtttcctagagtacaaa

SEQ ID NO: 3332800 - DNA, 25 bp, Homo sapien
tcttaggaacaaaggcagtatcttc

SEQ ID NO: 3332801 - DNA, 25 bp, Homo sapien
ttttctagttgaacgtcttgctcgt

SEQ ID NO: 3332802 - DNA, 25 bp, Homo sapien
tgaacgtcttgctcgtgatagatgt

SEQ ID NO: 3332803 - DNA, 25 bp, Homo sapien
gctcgtgatagatgttagtccattg

SEQ ID NO: 3332804 - DNA, 25 bp, Homo sapien
acctcatttatgaccttttcctgaa

SEQ ID NO: 3332805 - DNA, 25 bp, Homo sapien
tgatcgcattttaaagctgcgctaa

SEQ ID NO: 3332806 - DNA, 25 bp, Homo sapien
atgaacctcatttatgaccttttcc

SEQ ID NO: 3332807 - DNA, 25 bp, Homo sapien
ttcctgaagagaatgatcgcatttt

SEQ ID NO: 3332808 - DNA, 25 bp, Homo sapien
ctgattgatcagaatttccatggtc

SEQ ID NO: 3332809 - DNA, 25 bp, Homo sapien
agagatttgatcttccactcttctg

SEQ ID NO: 3332810 - DNA, 25 bp, Homo sapien
tgtctgtcctaacttcccacttaat

SEQ ID NO: 3332811 - DNA, 25 bp, Homo sapien
tccatggtcttgattgtctgtccta

SEQ ID NO: 3332812 - DNA, 25 bp, Homo sapien
taaattctgctacactgcccagggc

SEQ ID NO: 3332813 - DNA, 25 bp, Homo sapien
tgcccagggcacttcttggtctgta

SEQ ID NO: 3332814 - DNA, 25 bp, Homo sapien
gaagattgatagcagattccatgcc

SEQ ID NO: 3332815 - DNA, 25 bp, Homo sapien
tcgttacagattgatggcatagcct

SEQ ID NO: 3332816 - DNA, 25 bp, Homo sapien
gactctgttttcaggtttagttcac

SEQ ID NO: 3332817 - DNA, 25 bp, Homo sapien
catagagggcttgcttgacagattg

SEQ ID NO: 3332818 - DNA, 25 bp, Homo sapien
gggatgaagccaacagtaggactct

SEQ ID NO: 3332819 - DNA, 25 bp, Homo sapien
tgtggaaatcatagagggcttgctt

SEQ ID NO: 3332820 - DNA, 25 bp, Homo sapien
aattttcaggttcagttgaatccaa

SEQ ID NO: 3332821 - DNA, 25 bp, Homo sapien
caggcttctgtgagtgttgttttga

SEQ ID NO: 3332822 - DNA, 25 bp, Homo sapien
atgggtttatcccttgagcatggac

SEQ ID NO: 3332823 - DNA, 25 bp, Homo sapien
ttggcaggcttctgtgagtgttgtt

SEQ ID NO: 3332824 - DNA, 25 bp, Homo sapien
gcatgcatttatagcagagcaacaa

SEQ ID NO: 3332825 - DNA, 25 bp, Homo sapien
gactcaaaccattgttaatgaggca

SEQ ID NO: 3332826 - DNA, 25 bp, Homo sapien
aatcatgtttgtaaaatcgaagaga

SEQ ID NO: 3332827 - DNA, 25 bp, Homo sapien
aagagagactcttgagactcaaacc

SEQ ID NO: 3332828 - DNA, 25 bp, Homo sapien
tgtcacacggttttcatgtaaccaa

SEQ ID NO: 3332829 - DNA, 25 bp, Homo sapien
tcacacggttttcatgtaaccaatg

SEQ ID NO: 3332830 - DNA, 25 bp, Homo sapien
ggttgtcacacggttttcatgtaac

SEQ ID NO: 3332831 - DNA, 25 bp, Homo sapien
aaggttgtcacacggttttcatgta

SEQ ID NO: 3332832 - DNA, 25 bp, Homo sapien
cactgatttccctaagaaatgtatc

SEQ ID NO: 3332833 - DNA, 25 bp, Homo sapien
ctttcaaatcagaagtaatctattc

SEQ ID NO: 3332834 - DNA, 25 bp, Homo sapien
tttcaaatcagaagtaatctattct

SEQ ID NO: 3332835 - DNA, 25 bp, Homo sapien
ttcaaatcagaagtaatctattctg

SEQ ID NO: 3332836 - DNA, 25 bp, Homo sapien
ggctagaatcaaggtttcaggagaa

SEQ ID NO: 3332837 - DNA, 25 bp, Homo sapien
tattctctgtcattagtgaaggcta

SEQ ID NO: 3332838 - DNA, 25 bp, Homo sapien
tgtgaccgcataagtccaaattctg

SEQ ID NO: 3332839 - DNA, 25 bp, Homo sapien
ccaaattctgcgtgtcttcgtatga

SEQ ID NO: 3332840 - DNA, 25 bp, Homo sapien
gaaatagctctgaatgttcagttgt

SEQ ID NO: 3332841 - DNA, 25 bp, Homo sapien
aatgaaatagctctgaatgttcagt

SEQ ID NO: 3332842 - DNA, 25 bp, Homo sapien
tgaaatagctctgaatgttcagttg

SEQ ID NO: 3332843 - DNA, 25 bp, Homo sapien
aaatagctctgaatgttcagttgtt

SEQ ID NO: 3332844 - DNA, 25 bp, Homo sapien
cacttgctgatgttgaggttgctaa

SEQ ID NO: 3332845 - DNA, 25 bp, Homo sapien
cacagttacacctccctgatgggca

SEQ ID NO: 3332846 - DNA, 25 bp, Homo sapien
tagcacatgacgttttagccacagt

SEQ ID NO: 3332847 - DNA, 25 bp, Homo sapien
tgtgatgacagtttagaacagcccc

SEQ ID NO: 3332848 - DNA, 25 bp, Homo sapien
cttgccaactacttttgagattaaa

SEQ ID NO: 3332849 - DNA, 25 bp, Homo sapien
catacaccaggccttgaaaatgaac

SEQ ID NO: 3332850 - DNA, 25 bp, Homo sapien
tacaccaggccttgaaaatgaactc

SEQ ID NO: 3332851 - DNA, 25 bp, Homo sapien
accaggccttgaaaatgaactctga

SEQ ID NO: 3332852 - DNA, 25 bp, Homo sapien
ttaatctgtcttggagtttctgtga

SEQ ID NO: 3332853 - DNA, 25 bp, Homo sapien
tatgcttctttttgtagcctcataa

SEQ ID NO: 3332854 - DNA, 25 bp, Homo sapien
ctatgcttctttttgtagcctcata

SEQ ID NO: 3332855 - DNA, 25 bp, Homo sapien
cttgctagtttaatctgtcttggag

SEQ ID NO: 3332856 - DNA, 25 bp, Homo sapien
tctgactcttaggatgatggcttcc

SEQ ID NO: 3332857 - DNA, 25 bp, Homo sapien
aagttgatagccaggcatttaactg

SEQ ID NO: 3332858 - DNA, 25 bp, Homo sapien
catggcagtccctttagagttaatg

SEQ ID NO: 3332859 - DNA, 25 bp, Homo sapien
tccatctggatcagctcttggcaag

SEQ ID NO: 3332860 - DNA, 25 bp, Homo sapien
cattgggtgagatttgtcctggtga

SEQ ID NO: 3332861 - DNA, 25 bp, Homo sapien
ctatatcacgagacactgaataact

SEQ ID NO: 3332862 - DNA, 25 bp, Homo sapien
caaattgtgcctccggaggctggag

SEQ ID NO: 3332863 - DNA, 25 bp, Homo sapien
tgtggaaaacggcttcaaattgtgc

SEQ ID NO: 3332864 - DNA, 25 bp, Homo sapien
aaaatgcttaatgtgggaagctttg

SEQ ID NO: 3332865 - DNA, 25 bp, Homo sapien
aaatgcttaatgtgggaagctttga

SEQ ID NO: 3332866 - DNA, 25 bp, Homo sapien
cttaatgtgggaagctttgagggtg

SEQ ID NO: 3332867 - DNA, 25 bp, Homo sapien
gcttaatgtgggaagctttgagggt

SEQ ID NO: 3332868 - DNA, 25 bp, Homo sapien
aattccagacgtaattacacagcgg

SEQ ID NO: 3332869 - DNA, 25 bp, Homo sapien
ccaccaattccagacgtaattacac

SEQ ID NO: 3332870 - DNA, 25 bp, Homo sapien
ccaattccagacgtaattacacagc

SEQ ID NO: 3332871 - DNA, 25 bp, Homo sapien
attccagacgtaattacacagcggg

SEQ ID NO: 3332872 - DNA, 25 bp, Homo sapien
tttgccgttttttgacactatacca

SEQ ID NO: 3332873 - DNA, 25 bp, Homo sapien
tgtgctttctatctccaaatcaata

SEQ ID NO: 3332874 - DNA, 25 bp, Homo sapien
taaaagtgtgttgtaatagttacag

SEQ ID NO: 3332875 - DNA, 25 bp, Homo sapien
tccagggagaaattgttgtgttagg

SEQ ID NO: 3332876 - DNA, 25 bp, Homo sapien
ttctgttgaggagagcgtaattgac

SEQ ID NO: 3332877 - DNA, 25 bp, Homo sapien
accactcagatcttctgttgaggag

SEQ ID NO: 3332878 - DNA, 25 bp, Homo sapien
gagagcgtaattgacacaggacccc

SEQ ID NO: 3332879 - DNA, 25 bp, Homo sapien
ttgaggagagcgtaattgacacagg

SEQ ID NO: 3332880 - DNA, 25 bp, Homo sapien
accaagaatagtaatgatactgtct

SEQ ID NO: 3332881 - DNA, 25 bp, Homo sapien
atatttgctggacccaaattaactt

SEQ ID NO: 3332882 - DNA, 25 bp, Homo sapien
tttgctggacccaaattaacttcac

SEQ ID NO: 3332883 - DNA, 25 bp, Homo sapien
ctaatatttgctggacccaaattaa

SEQ ID NO: 3332884 - DNA, 25 bp, Homo sapien
atttgctggacccaaattaacttca

SEQ ID NO: 3332885 - DNA, 25 bp, Homo sapien
ttgctgcgttagtctgctggtcatg

SEQ ID NO: 3332886 - DNA, 25 bp, Homo sapien
gcatcatctgcttgctgcgttagtc

SEQ ID NO: 3332887 - DNA, 25 bp, Homo sapien
tctgcttgctgcgttagtctgctgg

SEQ ID NO: 3332888 - DNA, 25 bp, Homo sapien
tcaactgggtctgcccttttcatca

SEQ ID NO: 3332889 - DNA, 25 bp, Homo sapien
catttttgttggtgagtctgatccc

SEQ ID NO: 3332890 - DNA, 25 bp, Homo sapien
tcattggtcttatattcaccctcca

SEQ ID NO: 3332891 - DNA, 25 bp, Homo sapien
taggaacgctgagctcagtgcccat

SEQ ID NO: 3332892 - DNA, 25 bp, Homo sapien
cttctcattaggaacgctgagctca

SEQ ID NO: 3332893 - DNA, 25 bp, Homo sapien
aaaccaactgtttcattgaaatcaa

SEQ ID NO: 3332894 - DNA, 25 bp, Homo sapien
caatttcaatcttctcccactgcat

SEQ ID NO: 3332895 - DNA, 25 bp, Homo sapien
tctctgttcttcaatatccaaacca

SEQ ID NO: 3332896 - DNA, 25 bp, Homo sapien
tgttcttcaatatccaaaccaactg

SEQ ID NO: 3332897 - DNA, 25 bp, Homo sapien
ttactgctgctgttcagaatccctt

SEQ ID NO: 3332898 - DNA, 25 bp, Homo sapien
tactgctgctgttcagaatcccttc

SEQ ID NO: 3332899 - DNA, 25 bp, Homo sapien
gatccaggaggacctactggcttcc

SEQ ID NO: 3332900 - DNA, 25 bp, Homo sapien
cattattcccatgtgcaatttaggc

SEQ ID NO: 3332901 - DNA, 25 bp, Homo sapien
ttcagcactacatggaagttccagt

SEQ ID NO: 3332902 - DNA, 25 bp, Homo sapien
gttccagtactaaatccttgctcag

SEQ ID NO: 3332903 - DNA, 25 bp, Homo sapien
tccattagattattgtctcttacca

SEQ ID NO: 3332904 - DNA, 25 bp, Homo sapien
ccattagattattgtctcttaccat

SEQ ID NO: 3332905 - DNA, 25 bp, Homo sapien
gtaattatcatatattgctgtggga

SEQ ID NO: 3332906 - DNA, 25 bp, Homo sapien
tacagctcttgtatttagcataaag

SEQ ID NO: 3332907 - DNA, 25 bp, Homo sapien
tattataacaatccagtaaaaggga

SEQ ID NO: 3332908 - DNA, 25 bp, Homo sapien
ccactttatactcactaggacggct

SEQ ID NO: 3332909 - DNA, 25 bp, Homo sapien
tctttgctgtgtcgttctactatcc

SEQ ID NO: 3332910 - DNA, 25 bp, Homo sapien
tccatctgtttgactcctcatttcc

SEQ ID NO: 3332911 - DNA, 25 bp, Homo sapien
ctctcagtgcgctggatgaggaggc

SEQ ID NO: 3332912 - DNA, 25 bp, Homo sapien
gggatagaataggaaggtgatcttc

SEQ ID NO: 3332913 - DNA, 25 bp, Homo sapien
gagcgattttgtggtctgtttccaa

SEQ ID NO: 3332914 - DNA, 25 bp, Homo sapien
caggtagtctaaaggtaggttcatc

SEQ ID NO: 3332915 - DNA, 25 bp, Homo sapien
gagtcaagcaaggacaaaaggtcct

SEQ ID NO: 3332916 - DNA, 25 bp, Homo sapien
tgtttccaaacagttatccagcagc

SEQ ID NO: 3332917 - DNA, 25 bp, Homo sapien
tctaagtgtagctgacaccagtttc

SEQ ID NO: 3332918 - DNA, 25 bp, Homo sapien
tatttcaatggtccgtgtaaaggaa

SEQ ID NO: 3332919 - DNA, 25 bp, Homo sapien
gactgtattgtctttcctgaggacc

SEQ ID NO: 3332920 - DNA, 25 bp, Homo sapien
ccaatgaaacatggtcttgtaggtc

SEQ ID NO: 3332921 - DNA, 25 bp, Homo sapien
aactttggatggtaatagtatgatc

SEQ ID NO: 3332922 - DNA, 25 bp, Homo sapien
tatgatcttcatggcgttgttatga

SEQ ID NO: 3332923 - DNA, 25 bp, Homo sapien
cagtatcttcctcagtaaactttgg

SEQ ID NO: 3332924 - DNA, 25 bp, Homo sapien
attccaaataaagtgcccagaagag

SEQ ID NO: 3332925 - DNA, 25 bp, Homo sapien
ccattttatcttcagactactttct

SEQ ID NO: 3332926 - DNA, 25 bp, Homo sapien
ttattatatagggataaaggtgcca

SEQ ID NO: 3332927 - DNA, 25 bp, Homo sapien
aaggtgccatcatctacagtttaag

SEQ ID NO: 3332928 - DNA, 25 bp, Homo sapien
tatagggataaaggtgccatcatct

SEQ ID NO: 3332929 - DNA, 25 bp, Homo sapien
ggacattacttgaaatgttagcatg

SEQ ID NO: 3332930 - DNA, 25 bp, Homo sapien
agtgtgcatagcctttaatccagtg

SEQ ID NO: 3332931 - DNA, 25 bp, Homo sapien
tgttagcatggcattggaatagtgg

SEQ ID NO: 3332932 - DNA, 25 bp, Homo sapien
gtgcatagcctttaatccagtgtaa

SEQ ID NO: 3332933 - DNA, 25 bp, Homo sapien
ttattcagcacagttagctctagca

SEQ ID NO: 3332934 - DNA, 25 bp, Homo sapien
gcattgcatcaagagtgagattaga

SEQ ID NO: 3332935 - DNA, 25 bp, Homo sapien
gttagctctagcattgcatcaagag

SEQ ID NO: 3332936 - DNA, 25 bp, Homo sapien
cattattattcagcacagttagctc

SEQ ID NO: 3332937 - DNA, 25 bp, Homo sapien
tcatctttgaagcaagagaattcta

SEQ ID NO: 3332938 - DNA, 25 bp, Homo sapien
ggcaaacaaatcatgctgtcgcatg

SEQ ID NO: 3332939 - DNA, 25 bp, Homo sapien
catgctgtcgcatgacaaatgtgcc

SEQ ID NO: 3332940 - DNA, 25 bp, Homo sapien
attctaatatgtaggcaaacaaatc

SEQ ID NO: 3332941 - DNA, 25 bp, Homo sapien
gctgttgttacttaggtgtatctcc

SEQ ID NO: 3332942 - DNA, 25 bp, Homo sapien
ttgggtttgcatgtccaggacctcc

SEQ ID NO: 3332943 - DNA, 25 bp, Homo sapien
gtggaattttagatacagtctgtgc

SEQ ID NO: 3332944 - DNA, 25 bp, Homo sapien
tccaccctaagtattcaggcactct

SEQ ID NO: 3332945 - DNA, 25 bp, Homo sapien
gagctgcagaacctatgagaatcac

SEQ ID NO: 3332946 - DNA, 25 bp, Homo sapien
cctacgtgataaagagagctgcaga

SEQ ID NO: 3332947 - DNA, 25 bp, Homo sapien
gaagcagaggcgaaaagtgttaaat

SEQ ID NO: 3332948 - DNA, 25 bp, Homo sapien
tgattgcgcagcaggacaaatacag

SEQ ID NO: 3332949 - DNA, 25 bp, Homo sapien
atgttcctgatagtgtgggaaactt

SEQ ID NO: 3332950 - DNA, 25 bp, Homo sapien
tgcaggaactcccatgttcctgata

SEQ ID NO: 3332951 - DNA, 25 bp, Homo sapien
ttcctgatagtgtgggaaacttggg

SEQ ID NO: 3332952 - DNA, 25 bp, Homo sapien
caggaactcccatgttcctgatagt

SEQ ID NO: 3332953 - DNA, 25 bp, Homo sapien
catgctgcaggaaccaagtgctcca

SEQ ID NO: 3332954 - DNA, 25 bp, Homo sapien
cagaacatggatagctgggacagct

SEQ ID NO: 3332955 - DNA, 25 bp, Homo sapien
gctgcaggaaccaagtgctccacat

SEQ ID NO: 3332956 - DNA, 25 bp, Homo sapien
cacagaacatggatagctgggacag

SEQ ID NO: 3332957 - DNA, 25 bp, Homo sapien
cactggaggttagctgtgctgccgt

SEQ ID NO: 3332958 - DNA, 25 bp, Homo sapien
agccggatgctccaccctgatcttg

SEQ ID NO: 3332959 - DNA, 25 bp, Homo sapien
gatagctttcactaccctggtgtca

SEQ ID NO: 3332960 - DNA, 25 bp, Homo sapien
ctccagtgggagttgactgtacccg

SEQ ID NO: 3332961 - DNA, 25 bp, Homo sapien
tctggtgctgcctatcaaggttgag

SEQ ID NO: 3332962 - DNA, 25 bp, Homo sapien
cgatatttagcctgacctttgtggt

SEQ ID NO: 3332963 - DNA, 25 bp, Homo sapien
ttttcccacaatagagatctgtcga

SEQ ID NO: 3332964 - DNA, 25 bp, Homo sapien
caaggttgagtactgataataagcc

SEQ ID NO: 3332965 - DNA, 25 bp, Homo sapien
ggaatggccgacatctgacatccat

SEQ ID NO: 3332966 - DNA, 25 bp, Homo sapien
tattttaggaatggccgacatctga

SEQ ID NO: 3332967 - DNA, 25 bp, Homo sapien
ttaggaatggccgacatctgacatc

SEQ ID NO: 3332968 - DNA, 25 bp, Homo sapien
gagtattttaggaatggccgacatc

SEQ ID NO: 3332969 - DNA, 25 bp, Homo sapien
tatgacaaagagtagcagacattta

SEQ ID NO: 3332970 - DNA, 25 bp, Homo sapien
ggtgatagctcttgctgggacatgt

SEQ ID NO: 3332971 - DNA, 25 bp, Homo sapien
gtcaacatttgcaaccgggtactaa

SEQ ID NO: 3332972 - DNA, 25 bp, Homo sapien
aactgcttcacaatgcctttggtga

SEQ ID NO: 3332973 - DNA, 25 bp, Homo sapien
tcacgagcattgtaaacactcaggt

SEQ ID NO: 3332974 - DNA, 25 bp, Homo sapien
cctcacgagcattgtaaacactcag

SEQ ID NO: 3332975 - DNA, 25 bp, Homo sapien
agtaaaacacgtgcatcctctgcca

SEQ ID NO: 3332976 - DNA, 25 bp, Homo sapien
aaacactcaggtgagtaaaacacgt

SEQ ID NO: 3332977 - DNA, 25 bp, Homo sapien
ggactctctcttgcaaagtcagcct

SEQ ID NO: 3332978 - DNA, 25 bp, Homo sapien
gacatgttgggatttaaccactagt

SEQ ID NO: 3332979 - DNA, 25 bp, Homo sapien
ttctaagtggtaaacggactctctc

SEQ ID NO: 3332980 - DNA, 25 bp, Homo sapien
tcaagtctggagataaatgagggcg

SEQ ID NO: 3332981 - DNA, 25 bp, Homo sapien
tgctgctactgtggcactgtggatc

SEQ ID NO: 3332982 - DNA, 25 bp, Homo sapien
ccagtctctgctgtgctgctactgt

SEQ ID NO: 3332983 - DNA, 25 bp, Homo sapien
tttcctctatccccagatgggacca

SEQ ID NO: 3332984 - DNA, 25 bp, Homo sapien
ggcactgtggatcgtttttcctcta

SEQ ID NO: 3332985 - DNA, 25 bp, Homo sapien
tccaggtgcgtttttataatgacac

SEQ ID NO: 3332986 - DNA, 25 bp, Homo sapien
cacagaatcttccaggtgcgttttt

SEQ ID NO: 3332987 - DNA, 25 bp, Homo sapien
gagatcaactgccagagctcaatct

SEQ ID NO: 3332988 - DNA, 25 bp, Homo sapien
tcaagccactgagatcaactgccag

SEQ ID NO: 3332989 - DNA, 25 bp, Homo sapien
cagcttgctgatgggctctttgaag

SEQ ID NO: 3332990 - DNA, 25 bp, Homo sapien
gacagcttgctgatgggctctttga

SEQ ID NO: 3332991 - DNA, 25 bp, Homo sapien
tctttgaagcaaatggatcctctct

SEQ ID NO: 3332992 - DNA, 25 bp, Homo sapien
tgctgatgggctctttgaagcaaat

SEQ ID NO: 3332993 - DNA, 25 bp, Homo sapien
ggacaggacacgtgcttcaaactgg

SEQ ID NO: 3332994 - DNA, 25 bp, Homo sapien
cgtgcttcaaactggagcgtgtgag

SEQ ID NO: 3332995 - DNA, 25 bp, Homo sapien
tcaaactggagcgtgtgagatgcag

SEQ ID NO: 3332996 - DNA, 25 bp, Homo sapien
tgtcagttttaatgagtgctacaaa

SEQ ID NO: 3332997 - DNA, 25 bp, Homo sapien
agcatgccttctctacgcaaacaca

SEQ ID NO: 3332998 - DNA, 25 bp, Homo sapien
tacatagcatgccttctctacgcaa

SEQ ID NO: 3332999 - DNA, 25 bp, Homo sapien
tatcctagggggtacatagcatgcc

SEQ ID NO: 3333000 - DNA, 25 bp, Homo sapien
gggtacatagcatgccttctctacg

SEQ ID NO: 3333001 - DNA, 25 bp, Homo sapien
tattgtatgtgatgacaaagctgtt

SEQ ID NO: 3333002 - DNA, 25 bp, Homo sapien
tgttgggaagtatcccattggtaac

SEQ ID NO: 3333003 - DNA, 25 bp, Homo sapien
tcttgtttgagaatattgtatgtga

SEQ ID NO: 3333004 - DNA, 25 bp, Homo sapien
acccagaaaggtgtattgtgcttct

SEQ ID NO: 3333005 - DNA, 25 bp, Homo sapien
tggccagctcactctagcaagatac

SEQ ID NO: 3333006 - DNA, 25 bp, Homo sapien
ccactacagagatcccagggcattg

SEQ ID NO: 3333007 - DNA, 25 bp, Homo sapien
cctgtgaaatggtggtagagctcca

SEQ ID NO: 3333008 - DNA, 25 bp, Homo sapien
gcattggaacagtatacctgccaca

SEQ ID NO: 3333009 - DNA, 25 bp, Homo sapien
aagtcatagaaggaacagcccacca

SEQ ID NO: 3333010 - DNA, 25 bp, Homo sapien
agtcatagaaggaacagcccaccac

SEQ ID NO: 3333011 - DNA, 25 bp, Homo sapien
aacatattcatacttcagtaaggga

SEQ ID NO: 3333012 - DNA, 25 bp, Homo sapien
gggaataacaacataggacacatag

SEQ ID NO: 3333013 - DNA, 25 bp, Homo sapien
aagggaataacaacataggacacat

SEQ ID NO: 3333014 - DNA, 25 bp, Homo sapien
tcaaacatattcatacttcagtaag

SEQ ID NO: 3333015 - DNA, 25 bp, Homo sapien
aaagcacatgcatcaagagtttcca

SEQ ID NO: 3333016 - DNA, 25 bp, Homo sapien
ggttgaagcaactagaagcgtgaca

SEQ ID NO: 3333017 - DNA, 25 bp, Homo sapien
tccccagagggaactcatttagcta

SEQ ID NO: 3333018 - DNA, 25 bp, Homo sapien
gattgcagtaccagaactctcccca

SEQ ID NO: 3333019 - DNA, 25 bp, Homo sapien
tatcacatgcttgtgcaggcatcag

SEQ ID NO: 3333020 - DNA, 25 bp, Homo sapien
gcttgtgcaggcatcagtgctagga

SEQ ID NO: 3333021 - DNA, 25 bp, Homo sapien
tcacatatcacatgcttgtgcaggc

SEQ ID NO: 3333022 - DNA, 25 bp, Homo sapien
tgcaggcatcagtgctaggaaccct

SEQ ID NO: 3333023 - DNA, 25 bp, Homo sapien
ttcaggacctcgaatggaacatgtc

SEQ ID NO: 3333024 - DNA, 25 bp, Homo sapien
tggaacaaagttggccctctatggc

SEQ ID NO: 3333025 - DNA, 25 bp, Homo sapien
catacgcatgttgggaaccgaagtc

SEQ ID NO: 3333026 - DNA, 25 bp, Homo sapien
taaacagaggctatcaaggtgaccc

SEQ ID NO: 3333027 - DNA, 25 bp, Homo sapien
caacatatcatagggagagatgtgg

SEQ ID NO: 3333028 - DNA, 25 bp, Homo sapien
aacatatcatagggagagatgtgga

SEQ ID NO: 3333029 - DNA, 25 bp, Homo sapien
ctggaaataggaattataaatcaaa

SEQ ID NO: 3333030 - DNA, 25 bp, Homo sapien
tcaaattttgaaaaccctatgctaa

SEQ ID NO: 3333031 - DNA, 25 bp, Homo sapien
tgaaaaccctatgctaaggaaggaa

SEQ ID NO: 3333032 - DNA, 25 bp, Homo sapien
gaaggaaggagttattataaattca

SEQ ID NO: 3333033 - DNA, 25 bp, Homo sapien
gtgtctccccttgggcagattgcca

SEQ ID NO: 3333034 - DNA, 25 bp, Homo sapien
gattgccaagatctcaagtccatta

SEQ ID NO: 3333035 - DNA, 25 bp, Homo sapien
tcagagactcaagaattgtgcgact

SEQ ID NO: 3333036 - DNA, 25 bp, Homo sapien
taaccccaataggtaggtatcagag

SEQ ID NO: 3333037 - DNA, 25 bp, Homo sapien
agtattatttgtaatgttctggtta

SEQ ID NO: 3333038 - DNA, 25 bp, Homo sapien
tcttcttctggtacaacttccagta

SEQ ID NO: 3333039 - DNA, 25 bp, Homo sapien
tcttctggtacaacttccagtatta

SEQ ID NO: 3333040 - DNA, 25 bp, Homo sapien
ttatcttcttctggtacaacttcca

SEQ ID NO: 3333041 - DNA, 25 bp, Homo sapien
aaccgcttgttgagatgaactgaca

SEQ ID NO: 3333042 - DNA, 25 bp, Homo sapien
gctaaagtgggatcgaacaatggct

SEQ ID NO: 3333043 - DNA, 25 bp, Homo sapien
tatgggactactccattgctgctag

SEQ ID NO: 3333044 - DNA, 25 bp, Homo sapien
tacacacgtgcttgttagcaagagg

SEQ ID NO: 3333045 - DNA, 25 bp, Homo sapien
ctgcacgttctgcacgtttattcca

SEQ ID NO: 3333046 - DNA, 25 bp, Homo sapien
acattcccaccatagcacatgtata

SEQ ID NO: 3333047 - DNA, 25 bp, Homo sapien
catggtgttgcacaatgtcctgaaa

SEQ ID NO: 3333048 - DNA, 25 bp, Homo sapien
ttatgggttttctacatggtgttgc

SEQ ID NO: 3333049 - DNA, 25 bp, Homo sapien
atggtgttgcacaatgtcctgaaag

SEQ ID NO: 3333050 - DNA, 25 bp, Homo sapien
tgggttttctacatggtgttgcaca

SEQ ID NO: 3333051 - DNA, 25 bp, Homo sapien
tccgaatagagggaaagggcaacca

SEQ ID NO: 3333052 - DNA, 25 bp, Homo sapien
gagtgatgacgaagccaatccctgt

SEQ ID NO: 3333053 - DNA, 25 bp, Homo sapien
caatccctgtactaaatgggtccga

SEQ ID NO: 3333054 - DNA, 25 bp, Homo sapien
taaagagataatacgcagggactcc

SEQ ID NO: 3333055 - DNA, 25 bp, Homo sapien
ttaggagagagatttatgtaaaccc

SEQ ID NO: 3333056 - DNA, 25 bp, Homo sapien
aacccatcaagattgctgaggttac

SEQ ID NO: 3333057 - DNA, 25 bp, Homo sapien
aaacccatcaagattgctgaggtta

SEQ ID NO: 3333058 - DNA, 25 bp, Homo sapien
gagagatttatgtaaacccatcaag

SEQ ID NO: 3333059 - DNA, 25 bp, Homo sapien
aactgccagcccaataaaaagccac

SEQ ID NO: 3333060 - DNA, 25 bp, Homo sapien
gaagataaatcagcccagcaactgc

SEQ ID NO: 3333061 - DNA, 25 bp, Homo sapien
catatctgggcatttgtatcgaaga

SEQ ID NO: 3333062 - DNA, 25 bp, Homo sapien
cttgaaaggacgatgcatatctggg

SEQ ID NO: 3333063 - DNA, 25 bp, Homo sapien
tagatatacttgttaatatgcatta

SEQ ID NO: 3333064 - DNA, 25 bp, Homo sapien
ctagatatacttgttaatatgcatt

SEQ ID NO: 3333065 - DNA, 25 bp, Homo sapien
agatatacttgttaatatgcattac

SEQ ID NO: 3333066 - DNA, 25 bp, Homo sapien
ctctcgagacgcaacatagaataac

SEQ ID NO: 3333067 - DNA, 25 bp, Homo sapien
tctggaaggtgaccctctcgagacg

SEQ ID NO: 3333068 - DNA, 25 bp, Homo sapien
catgaatcatggagaggatttctgg

SEQ ID NO: 3333069 - DNA, 25 bp, Homo sapien
aggagtgtgcttgcggacatgaatc

SEQ ID NO: 3333070 - DNA, 25 bp, Homo sapien
acaaagatcggaactgctaatgaga

SEQ ID NO: 3333071 - DNA, 25 bp, Homo sapien
gagagggcaacaaagatcggaactg

SEQ ID NO: 3333072 - DNA, 25 bp, Homo sapien
gaaatttcccagtagccgctcagaa

SEQ ID NO: 3333073 - DNA, 25 bp, Homo sapien
ccaccgttcatggagccaaagcagg

SEQ ID NO: 3333074 - DNA, 25 bp, Homo sapien
cagctcctcagcattaatggtcgta

SEQ ID NO: 3333075 - DNA, 25 bp, Homo sapien
taaagtaggccacatttgtcagcac

SEQ ID NO: 3333076 - DNA, 25 bp, Homo sapien
cagcacatagccaatggtgacaatg

SEQ ID NO: 3333077 - DNA, 25 bp, Homo sapien
gtgacaatggccatggatatacata

SEQ ID NO: 3333078 - DNA, 25 bp, Homo sapien
taacataatcgcctcttcagactct

SEQ ID NO: 3333079 - DNA, 25 bp, Homo sapien
cagttcaggcaacttaaaccttcaa

SEQ ID NO: 3333080 - DNA, 25 bp, Homo sapien
cagactctctccagttcaggcaact

SEQ ID NO: 3333081 - DNA, 25 bp, Homo sapien
cctgcacaaaggctgatcgtttttc

SEQ ID NO: 3333082 - DNA, 25 bp, Homo sapien
agacctcaatataatttcttccaag

SEQ ID NO: 3333083 - DNA, 25 bp, Homo sapien
aagctgggtgtttttagcacactaa

SEQ ID NO: 3333084 - DNA, 25 bp, Homo sapien
taagtcccagcacattataccgaac

SEQ ID NO: 3333085 - DNA, 25 bp, Homo sapien
tgctgggtgccactaatgaagacct

SEQ ID NO: 3333086 - DNA, 25 bp, Homo sapien
gatcaggcctcactaatctagagaa

SEQ ID NO: 3333087 - DNA, 25 bp, Homo sapien
tacaaacagggtgtgagtgccatgg

SEQ ID NO: 3333088 - DNA, 25 bp, Homo sapien
aaaatactgagctccctccgtgacg

SEQ ID NO: 3333089 - DNA, 25 bp, Homo sapien
gaaataatgtcaacacttggaaggg

SEQ ID NO: 3333090 - DNA, 25 bp, Homo sapien
aaatggtaaccacgtgtagctgcta

SEQ ID NO: 3333091 - DNA, 25 bp, Homo sapien
ttccagataaggtaaagagtgggct

SEQ ID NO: 3333092 - DNA, 25 bp, Homo sapien
tttggactataaaagactcagccat

SEQ ID NO: 3333093 - DNA, 25 bp, Homo sapien
gatctagggatgtaaaaatttgcag

SEQ ID NO: 3333094 - DNA, 25 bp, Homo sapien
tctaagagaataattggatatgtaa

SEQ ID NO: 3333095 - DNA, 25 bp, Homo sapien
tctagcaatctattctaagagaata

SEQ ID NO: 3333096 - DNA, 25 bp, Homo sapien
ctcttctagcaatctattctaagag

SEQ ID NO: 3333097 - DNA, 25 bp, Homo sapien
agcaacttgataatagacagaccat

SEQ ID NO: 3333098 - DNA, 25 bp, Homo sapien
taactaacatctaggtgatatacga

SEQ ID NO: 3333099 - DNA, 25 bp, Homo sapien
gcacaagaatattggcacatcccca

SEQ ID NO: 3333100 - DNA, 25 bp, Homo sapien
tgacatgaaatgaagacggtgagac

SEQ ID NO: 3333101 - DNA, 25 bp, Homo sapien
cggtgagacagatctatagcacata

SEQ ID NO: 3333102 - DNA, 25 bp, Homo sapien
tggatcatcgaccacaactactggg

SEQ ID NO: 3333103 - DNA, 25 bp, Homo sapien
gatatcctgtgtttctaagtgcgca

SEQ ID NO: 3333104 - DNA, 25 bp, Homo sapien
ccttggcaagaggacactgcactgt

SEQ ID NO: 3333105 - DNA, 25 bp, Homo sapien
gctgcagttcagagtccacgttgtg

SEQ ID NO: 3333106 - DNA, 25 bp, Homo sapien
tatggtacagcactaaatagccagg

SEQ ID NO: 3333107 - DNA, 25 bp, Homo sapien
tatctcttagagaacggccatgacc

SEQ ID NO: 3333108 - DNA, 25 bp, Homo sapien
cccaggacctagaaatgactttgct

SEQ ID NO: 3333109 - DNA, 25 bp, Homo sapien
taagagtgtcttttccctcgtgaga

SEQ ID NO: 3333110 - DNA, 25 bp, Homo sapien
cccagcacaatgattggaacatagc

SEQ ID NO: 3333111 - DNA, 25 bp, Homo sapien
tatgcatcatgaaagctgttcccag

SEQ ID NO: 3333112 - DNA, 25 bp, Homo sapien
tacttcaagacaagtcttatgcatc

SEQ ID NO: 3333113 - DNA, 25 bp, Homo sapien
cattgactagtcaataaaatacttc

SEQ ID NO: 3333114 - DNA, 25 bp, Homo sapien
taaggtcctataacattctgcaggt

SEQ ID NO: 3333115 - DNA, 25 bp, Homo sapien
gagttcaagctatcccgtgggtagt

SEQ ID NO: 3333116 - DNA, 25 bp, Homo sapien
tgacgatgttaaggttgactagccc

SEQ ID NO: 3333117 - DNA, 25 bp, Homo sapien
gagtaaaacttatccagctccccaa

SEQ ID NO: 3333118 - DNA, 25 bp, Homo sapien
ttctacttcttcagtaacaaagttg

SEQ ID NO: 3333119 - DNA, 25 bp, Homo sapien
tcttcagtaacaaagttgaggtaaa

SEQ ID NO: 3333120 - DNA, 25 bp, Homo sapien
ttcagggttttctacttcttcagta

SEQ ID NO: 3333121 - DNA, 25 bp, Homo sapien
tcagggttttctacttcttcagtaa

SEQ ID NO: 3333122 - DNA, 25 bp, Homo sapien
gctttggatcaggatatgggactga

SEQ ID NO: 3333123 - DNA, 25 bp, Homo sapien
tatgggactgagttccccagggcca

SEQ ID NO: 3333124 - DNA, 25 bp, Homo sapien
taccaagcaatgtttagctttggat

SEQ ID NO: 3333125 - DNA, 25 bp, Homo sapien
caagcaatgtttagctttggatcag

SEQ ID NO: 3333126 - DNA, 25 bp, Homo sapien
ttttgctctacataaagcaagtgac

SEQ ID NO: 3333127 - DNA, 25 bp, Homo sapien
tcaaaagcctacataagcggagaaa

SEQ ID NO: 3333128 - DNA, 25 bp, Homo sapien
gcggagaaattttgctctacataaa

SEQ ID NO: 3333129 - DNA, 25 bp, Homo sapien
cctacataagcggagaaattttgct

SEQ ID NO: 3333130 - DNA, 25 bp, Homo sapien
aagccagtggcaaccgcgtaatact

SEQ ID NO: 3333131 - DNA, 25 bp, Homo sapien
gccagtggcaaccgcgtaatacttg

SEQ ID NO: 3333132 - DNA, 25 bp, Homo sapien
aaagccagtggcaaccgcgtaatac

SEQ ID NO: 3333133 - DNA, 25 bp, Homo sapien
agccagtggcaaccgcgtaatactt

SEQ ID NO: 3333134 - DNA, 25 bp, Homo sapien
tgtgagcttgcaaaaggttaagaaa

SEQ ID NO: 3333135 - DNA, 25 bp, Homo sapien
aagaaaatctggatccgggcgctcc

SEQ ID NO: 3333136 - DNA, 25 bp, Homo sapien
taactccagggactataattatcag

SEQ ID NO: 3333137 - DNA, 25 bp, Homo sapien
tccagctgacactcatgctatttag

SEQ ID NO: 3333138 - DNA, 25 bp, Homo sapien
ggaatacagtattggatcccactcc

SEQ ID NO: 3333139 - DNA, 25 bp, Homo sapien
aaactggcatggaatacagtattgg

SEQ ID NO: 3333140 - DNA, 25 bp, Homo sapien
catatctattgaccaaatacaaaac

SEQ ID NO: 3333141 - DNA, 25 bp, Homo sapien
catcatatctattgaccaaatacaa

SEQ ID NO: 3333142 - DNA, 25 bp, Homo sapien
aatgccagggatatcacagcagtag

SEQ ID NO: 3333143 - DNA, 25 bp, Homo sapien
agctgtaatgagcttgatcgcaagt

SEQ ID NO: 3333144 - DNA, 25 bp, Homo sapien
cgcaagttcagggatttcacattga

SEQ ID NO: 3333145 - DNA, 25 bp, Homo sapien
ccagaatgtagcgtccaaatgccag

SEQ ID NO: 3333146 - DNA, 25 bp, Homo sapien
ccggctgatactggagagcggcata

SEQ ID NO: 3333147 - DNA, 25 bp, Homo sapien
aactttggccggctgatactggaga

SEQ ID NO: 3333148 - DNA, 25 bp, Homo sapien
tgttcccaactttggccggctgata

SEQ ID NO: 3333149 - DNA, 25 bp, Homo sapien
tggagagcggcataaggtttttcat

SEQ ID NO: 3333150 - DNA, 25 bp, Homo sapien
agctggtaatggaccaaagacttcc

SEQ ID NO: 3333151 - DNA, 25 bp, Homo sapien
ccaaaatatatgtgtaatgacctcc

SEQ ID NO: 3333152 - DNA, 25 bp, Homo sapien
ttccacccagactcgtacaaaagct

SEQ ID NO: 3333153 - DNA, 25 bp, Homo sapien
gttcccaattcagcataagacaaag

SEQ ID NO: 3333154 - DNA, 25 bp, Homo sapien
tttatatttgtgtactttagatcaa

SEQ ID NO: 3333155 - DNA, 25 bp, Homo sapien
ttaacatttaacgatacaattcaca

SEQ ID NO: 3333156 - DNA, 25 bp, Homo sapien
aacatttaacgatacaattcacata

SEQ ID NO: 3333157 - DNA, 25 bp, Homo sapien
aatgaggtgctataatttatatttg

SEQ ID NO: 3333158 - DNA, 25 bp, Homo sapien
cagctaaatttttgtgtattttttg

SEQ ID NO: 3333159 - DNA, 25 bp, Homo sapien
agatagggtatcactctggcaccta

SEQ ID NO: 3333160 - DNA, 25 bp, Homo sapien
catgcccagctaaatttttgtgtat

SEQ ID NO: 3333161 - DNA, 25 bp, Homo sapien
gagatagggtatcactctggcacct

SEQ ID NO: 3333162 - DNA, 25 bp, Homo sapien
cacgcccccacgagagaaaaagtcg

SEQ ID NO: 3333163 - DNA, 25 bp, Homo sapien
cacagccacgcccccacgagagaaa

SEQ ID NO: 3333164 - DNA, 25 bp, Homo sapien
agccacgcccccacgagagaaaaag

SEQ ID NO: 3333165 - DNA, 25 bp, Homo sapien
gcccccacgagagaaaaagtcgcac

SEQ ID NO: 3333166 - DNA, 25 bp, Homo sapien
atggtcagagacatgcccacgctgc

SEQ ID NO: 3333167 - DNA, 25 bp, Homo sapien
ggagatggtggacacaacaggcttt

SEQ ID NO: 3333168 - DNA, 25 bp, Homo sapien
tgttctggagcacgcccttaggaga

SEQ ID NO: 3333169 - DNA, 25 bp, Homo sapien
tggagactcccctcagtaaagtgac

SEQ ID NO: 3333170 - DNA, 25 bp, Homo sapien
tcacagcgatctaattactactcag

SEQ ID NO: 3333171 - DNA, 25 bp, Homo sapien
ggtgttactgatcgatgtcttcctc

SEQ ID NO: 3333172 - DNA, 25 bp, Homo sapien
caactttggtgtctcttggtgttac

SEQ ID NO: 3333173 - DNA, 25 bp, Homo sapien
tctcagcgctatagtgttcacaggt

SEQ ID NO: 3333174 - DNA, 25 bp, Homo sapien
cagtaattaaaacccggtggtgcag

SEQ ID NO: 3333175 - DNA, 25 bp, Homo sapien
tgaggcttggttatacaccatggac

SEQ ID NO: 3333176 - DNA, 25 bp, Homo sapien
gataaaagtatcatctcaaaccaga

SEQ ID NO: 3333177 - DNA, 25 bp, Homo sapien
ccatggactactacgcagctgtata

SEQ ID NO: 3333178 - DNA, 25 bp, Homo sapien
ccacaagcaagtctccacgtggatt

SEQ ID NO: 3333179 - DNA, 25 bp, Homo sapien
tccacgtggatttccactccttgtt

SEQ ID NO: 3333180 - DNA, 25 bp, Homo sapien
ctccttgttcttttaagaagcagga

SEQ ID NO: 3333181 - DNA, 25 bp, Homo sapien
tcaaaatgtaaccacaagcaagtct

SEQ ID NO: 3333182 - DNA, 25 bp, Homo sapien
ggagaagaaagattagccaagctaa

SEQ ID NO: 3333183 - DNA, 25 bp, Homo sapien
taaggaatcaggaactactaacatc

SEQ ID NO: 3333184 - DNA, 25 bp, Homo sapien
tactaacatctgtgaccattatctc

SEQ ID NO: 3333185 - DNA, 25 bp, Homo sapien
actatatttatttaagggtgcccag

SEQ ID NO: 3333186 - DNA, 25 bp, Homo sapien
caggcaggtatcatcatctactatg

SEQ ID NO: 3333187 - DNA, 25 bp, Homo sapien
tcagacaggcaggtatcatcatcta

SEQ ID NO: 3333188 - DNA, 25 bp, Homo sapien
aggtcagacaggcaggtatcatcat

SEQ ID NO: 3333189 - DNA, 25 bp, Homo sapien
gacaggcaggtatcatcatctacta

SEQ ID NO: 3333190 - DNA, 25 bp, Homo sapien
tctttcaaagcttctatcattgcat

SEQ ID NO: 3333191 - DNA, 25 bp, Homo sapien
ctttcaaagcttctatcattgcatt

SEQ ID NO: 3333192 - DNA, 25 bp, Homo sapien
ctgaattctagttgtctttctttca

SEQ ID NO: 3333193 - DNA, 25 bp, Homo sapien
ttcaaagcttctatcattgcatttt

SEQ ID NO: 3333194 - DNA, 25 bp, Homo sapien
ttcatctcctgtaacttttctcaag

SEQ ID NO: 3333195 - DNA, 25 bp, Homo sapien
catctcctgtaacttttctcaagtt

SEQ ID NO: 3333196 - DNA, 25 bp, Homo sapien
cttcatctcctgtaacttttctcaa

SEQ ID NO: 3333197 - DNA, 25 bp, Homo sapien
ctggtccccagatttgcccccttct

SEQ ID NO: 3333198 - DNA, 25 bp, Homo sapien
tttgtcacgcaggattaaattccac

SEQ ID NO: 3333199 - DNA, 25 bp, Homo sapien
gagggtcttttgtctgttccaggcc

SEQ ID NO: 3333200 - DNA, 25 bp, Homo sapien
tctcctaggcttgtagatggtgtcc

SEQ ID NO: 3333201 - DNA, 25 bp, Homo sapien
caagatgttgacaagattggttcct

SEQ ID NO: 3333202 - DNA, 25 bp, Homo sapien
tgcctgtacaaacaccaacatcaat

SEQ ID NO: 3333203 - DNA, 25 bp, Homo sapien
gaatgaatgcccctaaatacaaatc

SEQ ID NO: 3333204 - DNA, 25 bp, Homo sapien
ggttgtatcattcctcaactactta

SEQ ID NO: 3333205 - DNA, 25 bp, Homo sapien
taacttgtagcaatatttcccgtca

SEQ ID NO: 3333206 - DNA, 25 bp, Homo sapien
caaaaggatgttagtgttggcagca

SEQ ID NO: 3333207 - DNA, 25 bp, Homo sapien
ggatctataagacaatcttatcaag

SEQ ID NO: 3333208 - DNA, 25 bp, Homo sapien
caagcttgttctagcataagtggca

SEQ ID NO: 3333209 - DNA, 25 bp, Homo sapien
aacaagaggaggtagtgaaggatac

SEQ ID NO: 3333210 - DNA, 25 bp, Homo sapien
ctgatttctttctgcgatgctctct

SEQ ID NO: 3333211 - DNA, 25 bp, Homo sapien
tgatgtcgaatacttctgctttaaa

SEQ ID NO: 3333212 - DNA, 25 bp, Homo sapien
tgccagagctactaggggccatctg

SEQ ID NO: 3333213 - DNA, 25 bp, Homo sapien
catagaaataggcatgatgtcgaat

SEQ ID NO: 3333214 - DNA, 25 bp, Homo sapien
gctccaaatggagcagcaaagtgaa

SEQ ID NO: 3333215 - DNA, 25 bp, Homo sapien
tgaaattagccaattcccttgaaag

SEQ ID NO: 3333216 - DNA, 25 bp, Homo sapien
aaaggttgtagtggttcagcttcag

SEQ ID NO: 3333217 - DNA, 25 bp, Homo sapien
ccttctccaggggttccaagtgagg

SEQ ID NO: 3333218 - DNA, 25 bp, Homo sapien
tttggtgttttgagtactccacagg

SEQ ID NO: 3333219 - DNA, 25 bp, Homo sapien
gcttgttgacacaatgctagaagta

SEQ ID NO: 3333220 - DNA, 25 bp, Homo sapien
taaatatgtcaaaaacatctgctga

SEQ ID NO: 3333221 - DNA, 25 bp, Homo sapien
tatgtcaaaaacatctgctgatctt

SEQ ID NO: 3333222 - DNA, 25 bp, Homo sapien
tccctactcctggtaaacactattc

SEQ ID NO: 3333223 - DNA, 25 bp, Homo sapien
tgtgtgtgtcaagagcatgcaaaat

SEQ ID NO: 3333224 - DNA, 25 bp, Homo sapien
tcctgcagcacattagcactctaaa

SEQ ID NO: 3333225 - DNA, 25 bp, Homo sapien
accttccatagttaattcatgtctg

SEQ ID NO: 3333226 - DNA, 25 bp, Homo sapien
ggatttatttgcagccagggccaca

SEQ ID NO: 3333227 - DNA, 25 bp, Homo sapien
acattaggaaggaaacattggtgcc

SEQ ID NO: 3333228 - DNA, 25 bp, Homo sapien
cagcgttctgctgctaagctccaac

SEQ ID NO: 3333229 - DNA, 25 bp, Homo sapien
cactttattagtgtaggcctcagga

SEQ ID NO: 3333230 - DNA, 25 bp, Homo sapien
agtaggtggtttctcaccagtttgg

SEQ ID NO: 3333231 - DNA, 25 bp, Homo sapien
gatattcagcagtaggtggtttctc

SEQ ID NO: 3333232 - DNA, 25 bp, Homo sapien
tattcagcagtaggtggtttctcac

SEQ ID NO: 3333233 - DNA, 25 bp, Homo sapien
ggcactggcttgatattcagcagta

SEQ ID NO: 3333234 - DNA, 25 bp, Homo sapien
cagggcaggacaccaattagtggag

SEQ ID NO: 3333235 - DNA, 25 bp, Homo sapien
gaactcagcatgaggacaacagggc

SEQ ID NO: 3333236 - DNA, 25 bp, Homo sapien
ggcaggacaccaattagtggaggca

SEQ ID NO: 3333237 - DNA, 25 bp, Homo sapien
ctcagcatgaggacaacagggcagg

SEQ ID NO: 3333238 - DNA, 25 bp, Homo sapien
gtagtgcattgtgcggccctcttca

SEQ ID NO: 3333239 - DNA, 25 bp, Homo sapien
catgtagtgcattgtgcggccctct

SEQ ID NO: 3333240 - DNA, 25 bp, Homo sapien
gtcatgtagtgcattgtgcggccct

SEQ ID NO: 3333241 - DNA, 25 bp, Homo sapien
tgtagtgcattgtgcggccctcttc

SEQ ID NO: 3333242 - DNA, 25 bp, Homo sapien
gagcacatttgcattgtgagcaaca

SEQ ID NO: 3333243 - DNA, 25 bp, Homo sapien
caacatttgtattgggaattgttcc

SEQ ID NO: 3333244 - DNA, 25 bp, Homo sapien
cccaagatggtctggtcttgggttt

SEQ ID NO: 3333245 - DNA, 25 bp, Homo sapien
cacaaccagtttccctgaccaggat

SEQ ID NO: 3333246 - DNA, 25 bp, Homo sapien
agacccaggacaccaccttgtactg

SEQ ID NO: 3333247 - DNA, 25 bp, Homo sapien
aagacccaggacaccaccttgtact

SEQ ID NO: 3333248 - DNA, 25 bp, Homo sapien
gaagacccaggacaccaccttgtac

SEQ ID NO: 3333249 - DNA, 25 bp, Homo sapien
tgaagacccaggacaccaccttgta

SEQ ID NO: 3333250 - DNA, 25 bp, Homo sapien
aatctgaacggattcacaccaagcc

SEQ ID NO: 3333251 - DNA, 25 bp, Homo sapien
ctgaacggattcacaccaagccttt

SEQ ID NO: 3333252 - DNA, 25 bp, Homo sapien
gcctcttcatatagatttctcgaag

SEQ ID NO: 3333253 - DNA, 25 bp, Homo sapien
tatagatttctcgaagacgtatcat

SEQ ID NO: 3333254 - DNA, 25 bp, Homo sapien
ctgtataacattttgtaggctcaac

SEQ ID NO: 3333255 - DNA, 25 bp, Homo sapien
tgtttctcccagagttgcagttttc

SEQ ID NO: 3333256 - DNA, 25 bp, Homo sapien
agtatgtcatagatttcagaggcca

SEQ ID NO: 3333257 - DNA, 25 bp, Homo sapien
ctgccttattggaggactgaagtat

SEQ ID NO: 3333258 - DNA, 25 bp, Homo sapien
ttacaggccccacgggatctctcca

SEQ ID NO: 3333259 - DNA, 25 bp, Homo sapien
gatcttgagaagtcctttgttgtaa

SEQ ID NO: 3333260 - DNA, 25 bp, Homo sapien
ctccactattgctattgtgtcttaa

SEQ ID NO: 3333261 - DNA, 25 bp, Homo sapien
gaagctccccctttgaagacttgcc

SEQ ID NO: 3333262 - DNA, 25 bp, Homo sapien
tgagtacttggatgatttagattca

SEQ ID NO: 3333263 - DNA, 25 bp, Homo sapien
ctgagtacttggatgatttagattc

SEQ ID NO: 3333264 - DNA, 25 bp, Homo sapien
gcacatgacctaactgtcctccaag

SEQ ID NO: 3333265 - DNA, 25 bp, Homo sapien
cctccagtaggcacatgacctaact

SEQ ID NO: 3333266 - DNA, 25 bp, Homo sapien
ggagagagtggagccagcttcgctg

SEQ ID NO: 3333267 - DNA, 25 bp, Homo sapien
cctaactgtcctccaagccaggaga

SEQ ID NO: 3333268 - DNA, 25 bp, Homo sapien
tggcttgcatatcgcttattactgg

SEQ ID NO: 3333269 - DNA, 25 bp, Homo sapien
tggcatgacgttccagtacccaaga

SEQ ID NO: 3333270 - DNA, 25 bp, Homo sapien
gatccctgaagctgctttaaccttt

SEQ ID NO: 3333271 - DNA, 25 bp, Homo sapien
caagaagcacaaatagtgatccctg

SEQ ID NO: 3333272 - DNA, 25 bp, Homo sapien
ccagcctatgcactgcatcccctgc

SEQ ID NO: 3333273 - DNA, 25 bp, Homo sapien
agcctatgcactgcatcccctgctg

SEQ ID NO: 3333274 - DNA, 25 bp, Homo sapien
gcctatgcactgcatcccctgctgg

SEQ ID NO: 3333275 - DNA, 25 bp, Homo sapien
cctatgcactgcatcccctgctggc

SEQ ID NO: 3333276 - DNA, 25 bp, Homo sapien
tataaatggactaaattctgcaatt

SEQ ID NO: 3333277 - DNA, 25 bp, Homo sapien
aatataaatggactaaattctgcaa

SEQ ID NO: 3333278 - DNA, 25 bp, Homo sapien
taaatataaatggactaaattctgc

SEQ ID NO: 3333279 - DNA, 25 bp, Homo sapien
ttaaatataaatggactaaattctg

SEQ ID NO: 3333280 - DNA, 25 bp, Homo sapien
ttttgcacccacacaaatcatatgc

SEQ ID NO: 3333281 - DNA, 25 bp, Homo sapien
ccacatcttggatcatcaatgatga

SEQ ID NO: 3333282 - DNA, 25 bp, Homo sapien
gacttcatcataggacttttgcacc

SEQ ID NO: 3333283 - DNA, 25 bp, Homo sapien
atcatatgcaatggcataaaattcc

SEQ ID NO: 3333284 - DNA, 25 bp, Homo sapien
gcttttgaggatatgacgtgacctt

SEQ ID NO: 3333285 - DNA, 25 bp, Homo sapien
taagcttttgaggatatgacgtgac

SEQ ID NO: 3333286 - DNA, 25 bp, Homo sapien
gaataagcttttgaggatatgacgt

SEQ ID NO: 3333287 - DNA, 25 bp, Homo sapien
tttgaggatatgacgtgaccttctc

SEQ ID NO: 3333288 - DNA, 25 bp, Homo sapien
gcagcccttgccgaatgaaattttt

SEQ ID NO: 3333289 - DNA, 25 bp, Homo sapien
gattttgtggtcatgaatctacagc

SEQ ID NO: 3333290 - DNA, 25 bp, Homo sapien
gaatctacagcaatcattaaggaaa

SEQ ID NO: 3333291 - DNA, 25 bp, Homo sapien
gaaatttttgtcatctgagaacacc

SEQ ID NO: 3333292 - DNA, 25 bp, Homo sapien
tggacttggagctctaccctatatt

SEQ ID NO: 3333293 - DNA, 25 bp, Homo sapien
ctggtccctgtaggttgtgaatagg

SEQ ID NO: 3333294 - DNA, 25 bp, Homo sapien
gatgctgatctaaatccactaagag

SEQ ID NO: 3333295 - DNA, 25 bp, Homo sapien
gagatgtaaccagattgtctaaagg

SEQ ID NO: 3333296 - DNA, 25 bp, Homo sapien
gaagaatggaaataggagacagttc

SEQ ID NO: 3333297 - DNA, 25 bp, Homo sapien
gaaataggagacagttcatggtttc

SEQ ID NO: 3333298 - DNA, 25 bp, Homo sapien
ctgaagaatggaaataggagacagt

SEQ ID NO: 3333299 - DNA, 25 bp, Homo sapien
gaatggaaataggagacagttcatg

SEQ ID NO: 3333300 - DNA, 25 bp, Homo sapien
agcagactttgcagcagcctgccct

SEQ ID NO: 3333301 - DNA, 25 bp, Homo sapien
tccagagaggtgatagaggaccagc

SEQ ID NO: 3333302 - DNA, 25 bp, Homo sapien
tgaactgtgagaagggacactgcca

SEQ ID NO: 3333303 - DNA, 25 bp, Homo sapien
cctgagcagcaattccagagaggtg

SEQ ID NO: 3333304 - DNA, 25 bp, Homo sapien
gaatttgggctttctactaggacag

SEQ ID NO: 3333305 - DNA, 25 bp, Homo sapien
aggcttctatatagcagttgcatgc

SEQ ID NO: 3333306 - DNA, 25 bp, Homo sapien
tcaaggtgttgtctactgctgcaca

SEQ ID NO: 3333307 - DNA, 25 bp, Homo sapien
gatcctgcatcctttgtaaccctta

SEQ ID NO: 3333308 - DNA, 25 bp, Homo sapien
tcaatggatccaatatgatgtacag

SEQ ID NO: 3333309 - DNA, 25 bp, Homo sapien
tacataatggctctcaatggatcca

SEQ ID NO: 3333310 - DNA, 25 bp, Homo sapien
tgtcagatacataatggctctcaat

SEQ ID NO: 3333311 - DNA, 25 bp, Homo sapien
ttataaatatcctgtcagatacata

SEQ ID NO: 3333312 - DNA, 25 bp, Homo sapien
gagggtcgctcttgctcggacaagc

SEQ ID NO: 3333313 - DNA, 25 bp, Homo sapien
caacttgaagcaccagagggtcgct

SEQ ID NO: 3333314 - DNA, 25 bp, Homo sapien
ggcagtgaacacattccaatcagcg

SEQ ID NO: 3333315 - DNA, 25 bp, Homo sapien
tcttggctggcaagagctgtaggcc

SEQ ID NO: 3333316 - DNA, 25 bp, Homo sapien
taagcgtaccaagcaaatggctcct

SEQ ID NO: 3333317 - DNA, 25 bp, Homo sapien
tgtaatgacctacctgtctccctgg

SEQ ID NO: 3333318 - DNA, 25 bp, Homo sapien
tctccctggaccactactactgact

SEQ ID NO: 3333319 - DNA, 25 bp, Homo sapien
gggaaagatcccagaatggcacatt

SEQ ID NO: 3333320 - DNA, 25 bp, Homo sapien
taccttggaattcacatcatttgtg

SEQ ID NO: 3333321 - DNA, 25 bp, Homo sapien
ttatgttgtaatgacgataaaggtc

SEQ ID NO: 3333322 - DNA, 25 bp, Homo sapien
gctgtcagataccttggaattcaca

SEQ ID NO: 3333323 - DNA, 25 bp, Homo sapien
cgataaaggtctgttgtgagatttc

SEQ ID NO: 3333324 - DNA, 25 bp, Homo sapien
tctgtgatgcatcttccccttttct

SEQ ID NO: 3333325 - DNA, 25 bp, Homo sapien
tccatccaacagtttcactaattct

SEQ ID NO: 3333326 - DNA, 25 bp, Homo sapien
gtctttgtcccccaatgtcacagtc

SEQ ID NO: 3333327 - DNA, 25 bp, Homo sapien
aactcatgtctttgtcccccaatgt

SEQ ID NO: 3333328 - DNA, 25 bp, Homo sapien
caatgtggccattcgtaagatatgc

SEQ ID NO: 3333329 - DNA, 25 bp, Homo sapien
ctcagggatgtaattaaggaggcac

SEQ ID NO: 3333330 - DNA, 25 bp, Homo sapien
tagcgtgatcggacttcctctgcaa

SEQ ID NO: 3333331 - DNA, 25 bp, Homo sapien
taagatatgcgaattctcagggatg

SEQ ID NO: 3333332 - DNA, 25 bp, Homo sapien
ggacagtttatccgctgcagctcta

SEQ ID NO: 3333333 - DNA, 25 bp, Homo sapien
acagtttatccgctgcagctctact

SEQ ID NO: 3333334 - DNA, 25 bp, Homo sapien
aggacagtttatccgctgcagctct

SEQ ID NO: 3333335 - DNA, 25 bp, Homo sapien
cagtttatccgctgcagctctactg

SEQ ID NO: 3333336 - DNA, 25 bp, Homo sapien
tcccttgaaagaaactagtgaggca

SEQ ID NO: 3333337 - DNA, 25 bp, Homo sapien
gaaaagcagataacaacctcccttg

SEQ ID NO: 3333338 - DNA, 25 bp, Homo sapien
ggaatcacacagcaacctctcagga

SEQ ID NO: 3333339 - DNA, 25 bp, Homo sapien
gcaaatgtggtcataggaatcacac

SEQ ID NO: 3333340 - DNA, 25 bp, Homo sapien
ctagatgaaaacacaccccaaagac

SEQ ID NO: 3333341 - DNA, 25 bp, Homo sapien
cccatgtcatgtcagaaattcttgc

SEQ ID NO: 3333342 - DNA, 25 bp, Homo sapien
tgaatccatctcaagccacctccta

SEQ ID NO: 3333343 - DNA, 25 bp, Homo sapien
tctcaagccacctcctagatgaaaa

SEQ ID NO: 3333344 - DNA, 25 bp, Homo sapien
tatatggccctgagacgtcaaaggg

SEQ ID NO: 3333345 - DNA, 25 bp, Homo sapien
gaactgatatatggccctgagacgt

SEQ ID NO: 3333346 - DNA, 25 bp, Homo sapien
tagggaactgatatatggccctgag

SEQ ID NO: 3333347 - DNA, 25 bp, Homo sapien
actgttagggaactgatatatggcc

SEQ ID NO: 3333348 - DNA, 25 bp, Homo sapien
tgtacccacgagtctcttgcagaga

SEQ ID NO: 3333349 - DNA, 25 bp, Homo sapien
gacaaggctggatcagcctggctta

SEQ ID NO: 3333350 - DNA, 25 bp, Homo sapien
tgagaggattgaatttccaagcgca

SEQ ID NO: 3333351 - DNA, 25 bp, Homo sapien
aatttccaagcgcaagtcagcagct

SEQ ID NO: 3333352 - DNA, 25 bp, Homo sapien
aaatctgatgctcccttagaaagcc

SEQ ID NO: 3333353 - DNA, 25 bp, Homo sapien
gatgctcccttagaaagccaaaggt

SEQ ID NO: 3333354 - DNA, 25 bp, Homo sapien
agatgacaaatctgatgctccctta

SEQ ID NO: 3333355 - DNA, 25 bp, Homo sapien
gacaaatctgatgctcccttagaaa

SEQ ID NO: 3333356 - DNA, 25 bp, Homo sapien
aacccaagcactcggtgagggcgat

SEQ ID NO: 3333357 - DNA, 25 bp, Homo sapien
ggttggcagcttggctcctctccac

SEQ ID NO: 3333358 - DNA, 25 bp, Homo sapien
ccagcctcggaatataagccttgtg

SEQ ID NO: 3333359 - DNA, 25 bp, Homo sapien
caccaaccggattagtgacaacatc

SEQ ID NO: 3333360 - DNA, 25 bp, Homo sapien
tctgacacagcatccgaaattaact

SEQ ID NO: 3333361 - DNA, 25 bp, Homo sapien
gacagtagttgtaataagaatccat

SEQ ID NO: 3333362 - DNA, 25 bp, Homo sapien
cagaaagtacgttttcaagctggaa

SEQ ID NO: 3333363 - DNA, 25 bp, Homo sapien
tgctctcctactacagatgaccact

SEQ ID NO: 3333364 - DNA, 25 bp, Homo sapien
cactcatcctgcaagtagttggaga

SEQ ID NO: 3333365 - DNA, 25 bp, Homo sapien
ggagaaatggctgtgaacccctaac

SEQ ID NO: 3333366 - DNA, 25 bp, Homo sapien
agttcaccagtaaagcaccaaaagg

SEQ ID NO: 3333367 - DNA, 25 bp, Homo sapien
taaccagatttcagattgtgacacc

SEQ ID NO: 3333368 - DNA, 25 bp, Homo sapien
caggtggagcccaatctttccacca

SEQ ID NO: 3333369 - DNA, 25 bp, Homo sapien
aggtggagcccaatctttccaccac

SEQ ID NO: 3333370 - DNA, 25 bp, Homo sapien
acaaggagctgtgaacaagagccat

SEQ ID NO: 3333371 - DNA, 25 bp, Homo sapien
gcaagggagcaccattaatgatgat

SEQ ID NO: 3333372 - DNA, 25 bp, Homo sapien
ggcaagggagcaccattaatgatga

SEQ ID NO: 3333373 - DNA, 25 bp, Homo sapien
acagctgtctctgggataatgtatt

SEQ ID NO: 3333374 - DNA, 25 bp, Homo sapien
aatgcatgagtcacagctgtctctg

SEQ ID NO: 3333375 - DNA, 25 bp, Homo sapien
gctgtctctgggataatgtatttat

SEQ ID NO: 3333376 - DNA, 25 bp, Homo sapien
ttaatgcatgagtcacagctgtctc

SEQ ID NO: 3333377 - DNA, 25 bp, Homo sapien
tgcagtgcattcagaacgccgataa

SEQ ID NO: 3333378 - DNA, 25 bp, Homo sapien
gagctctgggtctctactccatttc

SEQ ID NO: 3333379 - DNA, 25 bp, Homo sapien
cgccgataaaatgtggagagagccc

SEQ ID NO: 3333380 - DNA, 25 bp, Homo sapien
atccctccaaggctagagctctggg

SEQ ID NO: 3333381 - DNA, 25 bp, Homo sapien
cagtgctgcacggatacagaagggt

SEQ ID NO: 3333382 - DNA, 25 bp, Homo sapien
agtgctgcacggatacagaagggtc

SEQ ID NO: 3333383 - DNA, 25 bp, Homo sapien
gtgctgcacggatacagaagggtct

SEQ ID NO: 3333384 - DNA, 25 bp, Homo sapien
tattcgtgctcaccatcaggactgg

SEQ ID NO: 3333385 - DNA, 25 bp, Homo sapien
catttacatgaccacgagcacaacg

SEQ ID NO: 3333386 - DNA, 25 bp, Homo sapien
gagcacaacgaactcttctgctgtg

SEQ ID NO: 3333387 - DNA, 25 bp, Homo sapien
tttacagccatatgggagaccgtgg

SEQ ID NO: 3333388 - DNA, 25 bp, Homo sapien
tgttttagcttgagcaacctgaaaa

SEQ ID NO: 3333389 - DNA, 25 bp, Homo sapien
gcgacatgccagtcatccatgaaat

SEQ ID NO: 3333390 - DNA, 25 bp, Homo sapien
ggagtaaaaggcgacatgccagtca

SEQ ID NO: 3333391 - DNA, 25 bp, Homo sapien
tagcttgagcaacctgaaaataaag

SEQ ID NO: 3333392 - DNA, 25 bp, Homo sapien
catttgaataacgagcctgagtctt

SEQ ID NO: 3333393 - DNA, 25 bp, Homo sapien
ctagtataagtgctccacatttgaa

SEQ ID NO: 3333394 - DNA, 25 bp, Homo sapien
gagtcttgatgctctcagtactcag

SEQ ID NO: 3333395 - DNA, 25 bp, Homo sapien
gtactcagtgcttgagtaacaggaa

SEQ ID NO: 3333396 - DNA, 25 bp, Homo sapien
gtattgagagatccaccaccccaat

SEQ ID NO: 3333397 - DNA, 25 bp, Homo sapien
tgtcaccatgactggtggtccagaa

SEQ ID NO: 3333398 - DNA, 25 bp, Homo sapien
cctcaagagaagactccgtattgag

SEQ ID NO: 3333399 - DNA, 25 bp, Homo sapien
gaaccgcatgcataaccctcaagag

SEQ ID NO: 3333400 - DNA, 25 bp, Homo sapien
aaacattaactaccacagcaaaaat

SEQ ID NO: 3333401 - DNA, 25 bp, Homo sapien
aacatttgcttgcaatgcaaaatca

SEQ ID NO: 3333402 - DNA, 25 bp, Homo sapien
acatttgcttgcaatgcaaaatcag

SEQ ID NO: 3333403 - DNA, 25 bp, Homo sapien
taggctctatcctcaggaagatgta

SEQ ID NO: 3333404 - DNA, 25 bp, Homo sapien
catagtggcctatacccacatcttc

SEQ ID NO: 3333405 - DNA, 25 bp, Homo sapien
aaaagaccagatatttgctgaactt

SEQ ID NO: 3333406 - DNA, 25 bp, Homo sapien
tttgaaaggaaaacacatagtggcc

SEQ ID NO: 3333407 - DNA, 25 bp, Homo sapien
taaagcataaacctcttttgagttg

SEQ ID NO: 3333408 - DNA, 25 bp, Homo sapien
tcttttgagttgtactcagagacat

SEQ ID NO: 3333409 - DNA, 25 bp, Homo sapien
tagagatgtaaagcataaacctctt

SEQ ID NO: 3333410 - DNA, 25 bp, Homo sapien
taaacctcttttgagttgtactcag

SEQ ID NO: 3333411 - DNA, 25 bp, Homo sapien
gaaaacagtggctagcagagcttca

SEQ ID NO: 3333412 - DNA, 25 bp, Homo sapien
cctttgtagaagatgctgtggcctc

SEQ ID NO: 3333413 - DNA, 25 bp, Homo sapien
cagctggaagaagacctagtggcac

SEQ ID NO: 3333414 - DNA, 25 bp, Homo sapien
caaaccaggagttcgggtcgtgtcg

SEQ ID NO: 3333415 - DNA, 25 bp, Homo sapien
gtgaggtggcacgcatctgtaatcc

SEQ ID NO: 3333416 - DNA, 25 bp, Homo sapien
tgggtgaggtggcacgcatctgtaa

SEQ ID NO: 3333417 - DNA, 25 bp, Homo sapien
ctgggtgaggtggcacgcatctgta

SEQ ID NO: 3333418 - DNA, 25 bp, Homo sapien
aggtggcacgcatctgtaatcccag

SEQ ID NO: 3333419 - DNA, 25 bp, Homo sapien
tggtagcgcccgctttgtcagcgcg

SEQ ID NO: 3333420 - DNA, 25 bp, Homo sapien
gacagtcggctcgactcggtgccct

SEQ ID NO: 3333421 - DNA, 25 bp, Homo sapien
gcatgtttcatagtccgcggcggct

SEQ ID NO: 3333422 - DNA, 25 bp, Homo sapien
aggtctcacagcagacggtgccgac

SEQ ID NO: 3333423 - DNA, 25 bp, Homo sapien
ttctatggagcaaccaaaagccacc

SEQ ID NO: 3333424 - DNA, 25 bp, Homo sapien
ttcttgaacgaattgccctaacagt

SEQ ID NO: 3333425 - DNA, 25 bp, Homo sapien
aaggtaatctggagaacgggcagcc

SEQ ID NO: 3333426 - DNA, 25 bp, Homo sapien
gacacatgtaactagtgccaccgtt

SEQ ID NO: 3333427 - DNA, 25 bp, Homo sapien
gggccatatatctgtcgcagctact

SEQ ID NO: 3333428 - DNA, 25 bp, Homo sapien
tttctgggccatatatctgtcgcag

SEQ ID NO: 3333429 - DNA, 25 bp, Homo sapien
tctgggccatatatctgtcgcagct

SEQ ID NO: 3333430 - DNA, 25 bp, Homo sapien
tgggccatatatctgtcgcagctac

SEQ ID NO: 3333431 - DNA, 25 bp, Homo sapien
tgagcaccagtcgaacatgttaaac

SEQ ID NO: 3333432 - DNA, 25 bp, Homo sapien
tcagaggattgtgctagaaaagccc

SEQ ID NO: 3333433 - DNA, 25 bp, Homo sapien
gaaaagcccagcttgtggaaatgat

SEQ ID NO: 3333434 - DNA, 25 bp, Homo sapien
tcttgtctggatgacgcttcagctt

SEQ ID NO: 3333435 - DNA, 25 bp, Homo sapien
cagatggaggaggtgcaactcgacc

SEQ ID NO: 3333436 - DNA, 25 bp, Homo sapien
tatctctggtaatgccaagcgggtc

SEQ ID NO: 3333437 - DNA, 25 bp, Homo sapien
ggattgtcacactcagtctaggtgc

SEQ ID NO: 3333438 - DNA, 25 bp, Homo sapien
gctgcatcgctgttgccctgaggca

SEQ ID NO: 3333439 - DNA, 25 bp, Homo sapien
caataacagacttggagactggtcg

SEQ ID NO: 3333440 - DNA, 25 bp, Homo sapien
gactcctgccagaaagtaatacctt

SEQ ID NO: 3333441 - DNA, 25 bp, Homo sapien
gactggtcggtcactaactaaaata

SEQ ID NO: 3333442 - DNA, 25 bp, Homo sapien
ttagaatccagtctctaggatctgg

SEQ ID NO: 3333443 - DNA, 25 bp, Homo sapien
tatggtcgcattcttaggaacttga

SEQ ID NO: 3333444 - DNA, 25 bp, Homo sapien
aacttgaattgtgatctgcctagat

SEQ ID NO: 3333445 - DNA, 25 bp, Homo sapien
tatttgtgattagcccacttgtggg

SEQ ID NO: 3333446 - DNA, 25 bp, Homo sapien
ggtgtttcattgcagcccgaccatt

SEQ ID NO: 3333447 - DNA, 25 bp, Homo sapien
gccaaatatgggtggaatcaaatcc

SEQ ID NO: 3333448 - DNA, 25 bp, Homo sapien
tattgagctattgtgaaggttcgaa

SEQ ID NO: 3333449 - DNA, 25 bp, Homo sapien
ttcagtatcttaattgccacatggg

SEQ ID NO: 3333450 - DNA, 25 bp, Homo sapien
aaagtgaatgtgaattagccgaggg

SEQ ID NO: 3333451 - DNA, 25 bp, Homo sapien
gccactgtgcccggctcatgttctc

SEQ ID NO: 3333452 - DNA, 25 bp, Homo sapien
gagttgtggcacagctaaatagtca

SEQ ID NO: 3333453 - DNA, 25 bp, Homo sapien
gccttagaatttggtcacgctgcag

SEQ ID NO: 3333454 - DNA, 25 bp, Homo sapien
gctctgtgggccaaaaatggtcctg

SEQ ID NO: 3333455 - DNA, 25 bp, Homo sapien
tcagagttgcagtgccagtaccacc

SEQ ID NO: 3333456 - DNA, 25 bp, Homo sapien
gttccctgggacacgttagctcaca

SEQ ID NO: 3333457 - DNA, 25 bp, Homo sapien
gaaactgagctctacatcaagccca

SEQ ID NO: 3333458 - DNA, 25 bp, Homo sapien
caaacgtttgactcccattggacat

SEQ ID NO: 3333459 - DNA, 25 bp, Homo sapien
gatattgctgatcaggagaccacac

SEQ ID NO: 3333460 - DNA, 25 bp, Homo sapien
caaaacttgtactgccagccatgaa

SEQ ID NO: 3333461 - DNA, 25 bp, Homo sapien
tgtatttgtgggagagcatgcttgc

SEQ ID NO: 3333462 - DNA, 25 bp, Homo sapien
gcatgcttgcttgcagatgcacaca

SEQ ID NO: 3333463 - DNA, 25 bp, Homo sapien
cacacctgctatgtttgttgggaaa

SEQ ID NO: 3333464 - DNA, 25 bp, Homo sapien
gcccaaggtatgctggatgcttttg

SEQ ID NO: 3333465 - DNA, 25 bp, Homo sapien
gcacatccacagtgcactgttttat

SEQ ID NO: 3333466 - DNA, 25 bp, Homo sapien
tatcagggttatgcaatggaacatc

SEQ ID NO: 3333467 - DNA, 25 bp, Homo sapien
gcaatggaacatcctcgcccaaggt

SEQ ID NO: 3333468 - DNA, 25 bp, Homo sapien
ccgtgacttaccaatctttgattct

SEQ ID NO: 3333469 - DNA, 25 bp, Homo sapien
tccgtgacttaccaatctttgattc

SEQ ID NO: 3333470 - DNA, 25 bp, Homo sapien
attccgtgacttaccaatctttgat

SEQ ID NO: 3333471 - DNA, 25 bp, Homo sapien
gtgacttaccaatctttgattcttt

SEQ ID NO: 3333472 - DNA, 25 bp, Homo sapien
gagtgatgccaaacctcctgggtac

SEQ ID NO: 3333473 - DNA, 25 bp, Homo sapien
gagccactccaagcatttaaagcag

SEQ ID NO: 3333474 - DNA, 25 bp, Homo sapien
tatatagcttagatccctggcactg

SEQ ID NO: 3333475 - DNA, 25 bp, Homo sapien
tacagtttggacagagagccactcc

SEQ ID NO: 3333476 - DNA, 25 bp, Homo sapien
tcaacctgaacagcgcctacaagct

SEQ ID NO: 3333477 - DNA, 25 bp, Homo sapien
gctttactgaggaatctgatggact

SEQ ID NO: 3333478 - DNA, 25 bp, Homo sapien
taaatgtaaggtcagctctcgatct

SEQ ID NO: 3333479 - DNA, 25 bp, Homo sapien
tacactacctggaagatccggacct

SEQ ID NO: 3333480 - DNA, 25 bp, Homo sapien
tctgtagctgcaacaacgtccactg

SEQ ID NO: 3333481 - DNA, 25 bp, Homo sapien
ggagattggatccttcactgatgca

SEQ ID NO: 3333482 - DNA, 25 bp, Homo sapien
tgacaagcacgggaacatctaccaa

SEQ ID NO: 3333483 - DNA, 25 bp, Homo sapien
cttcaaccggaagagaaaccatggc

SEQ ID NO: 3333484 - DNA, 25 bp, Homo sapien
ttttaaagtcatatgtgagccttct

SEQ ID NO: 3333485 - DNA, 25 bp, Homo sapien
tttaaagtcatatgtgagccttcta

SEQ ID NO: 3333486 - DNA, 25 bp, Homo sapien
ctgtagtctaccccacgggctccag

SEQ ID NO: 3333487 - DNA, 25 bp, Homo sapien
ttaaagtcatatgtgagccttctaa

SEQ ID NO: 3333488 - DNA, 25 bp, Homo sapien
ggtcaaatggtcaaacatgtaagtc

SEQ ID NO: 3333489 - DNA, 25 bp, Homo sapien
ttggctttgagtgaacacaaacggg

SEQ ID NO: 3333490 - DNA, 25 bp, Homo sapien
tgactccaagagctttacatacgat

SEQ ID NO: 3333491 - DNA, 25 bp, Homo sapien
tacagtgttagactagaagcaggat

SEQ ID NO: 3333492 - DNA, 25 bp, Homo sapien
gggccctctgtatttcatgtcgtaa

SEQ ID NO: 3333493 - DNA, 25 bp, Homo sapien
caaaggcctggaactagggcatgta

SEQ ID NO: 3333494 - DNA, 25 bp, Homo sapien
tgaccctgaacgagtagagcctaag

SEQ ID NO: 3333495 - DNA, 25 bp, Homo sapien
tcaaacaccagaatggcaaaggcct

SEQ ID NO: 3333496 - DNA, 25 bp, Homo sapien
tctgaaactcttgtagcaataaagc

SEQ ID NO: 3333497 - DNA, 25 bp, Homo sapien
gcaataaagcaggatacttattaaa

SEQ ID NO: 3333498 - DNA, 25 bp, Homo sapien
aaatatcttgccacattaaacaggt

SEQ ID NO: 3333499 - DNA, 25 bp, Homo sapien
taaatatcttgccacattaaacagg

SEQ ID NO: 3333500 - DNA, 25 bp, Homo sapien
ggttcaggctaaaactcaactggga

SEQ ID NO: 3333501 - DNA, 25 bp, Homo sapien
tccacagactggtaaacctgcagag

SEQ ID NO: 3333502 - DNA, 25 bp, Homo sapien
ccaactgatgcgtcaaaagttttcc

SEQ ID NO: 3333503 - DNA, 25 bp, Homo sapien
tgccactgactatctgaaccaactg

SEQ ID NO: 3333504 - DNA, 25 bp, Homo sapien
taaagggttactcttgcctgccaaa

SEQ ID NO: 3333505 - DNA, 25 bp, Homo sapien
gaacgagttgtccagaaagaagcca

SEQ ID NO: 3333506 - DNA, 25 bp, Homo sapien
aaataagtctccctgctgcacgtga

SEQ ID NO: 3333507 - DNA, 25 bp, Homo sapien
taagtaatgtaccaagtgccccatc

SEQ ID NO: 3333508 - DNA, 25 bp, Homo sapien
ccccaggttgcttctagtatgagta

SEQ ID NO: 3333509 - DNA, 25 bp, Homo sapien
gaggtaaagtatctaggatggcccc

SEQ ID NO: 3333510 - DNA, 25 bp, Homo sapien
tagaaagctctcaactggtagcctg

SEQ ID NO: 3333511 - DNA, 25 bp, Homo sapien
atacagtagtgcctgcttcagcagc

SEQ ID NO: 3333512 - DNA, 25 bp, Homo sapien
taagtgcagccaactaaaatactaa

SEQ ID NO: 3333513 - DNA, 25 bp, Homo sapien
cattaagatatggagtgacagacag

SEQ ID NO: 3333514 - DNA, 25 bp, Homo sapien
tataaacaatttctgacctaagtag

SEQ ID NO: 3333515 - DNA, 25 bp, Homo sapien
tcttcatgcagtagttgggaaggag

SEQ ID NO: 3333516 - DNA, 25 bp, Homo sapien
tattctataacaatactgtgctagg

SEQ ID NO: 3333517 - DNA, 25 bp, Homo sapien
gacacaggcatgttacagcaaaagg

SEQ ID NO: 3333518 - DNA, 25 bp, Homo sapien
caaggctaagtgagtgacacaggca

SEQ ID NO: 3333519 - DNA, 25 bp, Homo sapien
ggtatgtctgcacaaatgccaaggc

SEQ ID NO: 3333520 - DNA, 25 bp, Homo sapien
tcacatagcaccagttaagtgagaa

SEQ ID NO: 3333521 - DNA, 25 bp, Homo sapien
gctatatgtaacaatgagattaccc

SEQ ID NO: 3333522 - DNA, 25 bp, Homo sapien
tacctatattagcagagtcttcaca

SEQ ID NO: 3333523 - DNA, 25 bp, Homo sapien
gctttacacaaacaagccattagct

SEQ ID NO: 3333524 - DNA, 25 bp, Homo sapien
tgtaacttgatatcgtagtgagctg

SEQ ID NO: 3333525 - DNA, 25 bp, Homo sapien
cagttgtttcctactgtaagaggca

SEQ ID NO: 3333526 - DNA, 25 bp, Homo sapien
tagtgagctgcttggtccctttcga

SEQ ID NO: 3333527 - DNA, 25 bp, Homo sapien
tgtcagtactgccactaacagcctg

SEQ ID NO: 3333528 - DNA, 25 bp, Homo sapien
tcactgtcttatttccatctgctgg

SEQ ID NO: 3333529 - DNA, 25 bp, Homo sapien
gcaatagctgaaggcgcactgacaa

SEQ ID NO: 3333530 - DNA, 25 bp, Homo sapien
catagttacaggaagggcaatagct

SEQ ID NO: 3333531 - DNA, 25 bp, Homo sapien
ttcttctactagctgcaaagttttc

SEQ ID NO: 3333532 - DNA, 25 bp, Homo sapien
gtgcacctgcattaactgactgaac

SEQ ID NO: 3333533 - DNA, 25 bp, Homo sapien
cctgcattaactgactgaactgcca

SEQ ID NO: 3333534 - DNA, 25 bp, Homo sapien
atggtgcacctgcattaactgactg

SEQ ID NO: 3333535 - DNA, 25 bp, Homo sapien
gcacctgcattaactgactgaactg

SEQ ID NO: 3333536 - DNA, 25 bp, Homo sapien
catcagtagttcctgctaaatcttc

SEQ ID NO: 3333537 - DNA, 25 bp, Homo sapien
tttccactgcgaacagaggatgctg

SEQ ID NO: 3333538 - DNA, 25 bp, Homo sapien
attttttccactgcgaacagaggat

SEQ ID NO: 3333539 - DNA, 25 bp, Homo sapien
tttcatcagtagttcctgctaaatc

SEQ ID NO: 3333540 - DNA, 25 bp, Homo sapien
atgctttccccaaagcttagagaca

SEQ ID NO: 3333541 - DNA, 25 bp, Homo sapien
gctttccccaaagcttagagacagc

SEQ ID NO: 3333542 - DNA, 25 bp, Homo sapien
tgctttccccaaagcttagagacag

SEQ ID NO: 3333543 - DNA, 25 bp, Homo sapien
tatttttatcttgaagtagatctaa

SEQ ID NO: 3333544 - DNA, 25 bp, Homo sapien
atttttatcttgaagtagatctaaa

SEQ ID NO: 3333545 - DNA, 25 bp, Homo sapien
tttttatcttgaagtagatctaaaa

SEQ ID NO: 3333546 - DNA, 25 bp, Homo sapien
ttttatcttgaagtagatctaaaag

SEQ ID NO: 3333547 - DNA, 25 bp, Homo sapien
tgattacacccaatagacggaagat

SEQ ID NO: 3333548 - DNA, 25 bp, Homo sapien
taactgtaacattagctctggatca

SEQ ID NO: 3333549 - DNA, 25 bp, Homo sapien
gatgaatttaaaacctggtccctgc

SEQ ID NO: 3333550 - DNA, 25 bp, Homo sapien
aatgcttattcatcgcataccatgc

SEQ ID NO: 3333551 - DNA, 25 bp, Homo sapien
caagtataagtgataccactgagga

SEQ ID NO: 3333552 - DNA, 25 bp, Homo sapien
tctttaaacactcactgcacccatg

SEQ ID NO: 3333553 - DNA, 25 bp, Homo sapien
acagtttttctccagcgttaagcaa

SEQ ID NO: 3333554 - DNA, 25 bp, Homo sapien
taccaggtaataaggaatttgccta

SEQ ID NO: 3333555 - DNA, 25 bp, Homo sapien
tgggcagacagaacacatctaaaac

SEQ ID NO: 3333556 - DNA, 25 bp, Homo sapien
ctattgaatattggtctgaaaacac

SEQ ID NO: 3333557 - DNA, 25 bp, Homo sapien
caaatttcttggtaggcttactgga

SEQ ID NO: 3333558 - DNA, 25 bp, Homo sapien
tcaaaccacctgataaggacagaat

SEQ ID NO: 3333559 - DNA, 25 bp, Homo sapien
tgtgactgatgtgactgacatttat

SEQ ID NO: 3333560 - DNA, 25 bp, Homo sapien
gcacagtagcgcaaggctgcagtga

SEQ ID NO: 3333561 - DNA, 25 bp, Homo sapien
acttgggaggctacaagcacagtag

SEQ ID NO: 3333562 - DNA, 25 bp, Homo sapien
ttgaagctaggaattcgagatccgc

SEQ ID NO: 3333563 - DNA, 25 bp, Homo sapien
acagaatctctgtggtgtaggaact

SEQ ID NO: 3333564 - DNA, 25 bp, Homo sapien
cacgtgatgctgatacatcccttat

SEQ ID NO: 3333565 - DNA, 25 bp, Homo sapien
ttaagaactattaccagcgacagta

SEQ ID NO: 3333566 - DNA, 25 bp, Homo sapien
gatacaactatggttacagaatctc

SEQ ID NO: 3333567 - DNA, 25 bp, Homo sapien
ttcttctttatacctaactcaggag

SEQ ID NO: 3333568 - DNA, 25 bp, Homo sapien
tgctgggtctttggtttacggccaa

SEQ ID NO: 3333569 - DNA, 25 bp, Homo sapien
cccattggaaattggtgattgctgg

SEQ ID NO: 3333570 - DNA, 25 bp, Homo sapien
acctaactcaggagacccattggaa

SEQ ID NO: 3333571 - DNA, 25 bp, Homo sapien
ttctagcacaaaagcccaacttagt

SEQ ID NO: 3333572 - DNA, 25 bp, Homo sapien
acagcacccggccatattttaggat

SEQ ID NO: 3333573 - DNA, 25 bp, Homo sapien
gcagtgacgcgaacacagctcccta

SEQ ID NO: 3333574 - DNA, 25 bp, Homo sapien
tattttctcataaagcggcacgtcc

SEQ ID NO: 3333575 - DNA, 25 bp, Homo sapien
cagttgacacctccactacagtttc

SEQ ID NO: 3333576 - DNA, 25 bp, Homo sapien
tcagttgacacctccactacagttt

SEQ ID NO: 3333577 - DNA, 25 bp, Homo sapien
atacacaaggaggaacaaacacttc

SEQ ID NO: 3333578 - DNA, 25 bp, Homo sapien
agttgatacacaaggaggaacaaac

SEQ ID NO: 3333579 - DNA, 25 bp, Homo sapien
acacaaggaggaacaaacacttcca

SEQ ID NO: 3333580 - DNA, 25 bp, Homo sapien
ctggagttgatacacaaggaggaac

SEQ ID NO: 3333581 - DNA, 25 bp, Homo sapien
ttccatatgaagcagggcttcagca

SEQ ID NO: 3333582 - DNA, 25 bp, Homo sapien
gcattactgctgtgaactgatgctt

SEQ ID NO: 3333583 - DNA, 25 bp, Homo sapien
ggcttcagcagcttcaattgtctta

SEQ ID NO: 3333584 - DNA, 25 bp, Homo sapien
caagcaggtaggagattccatatga

SEQ ID NO: 3333585 - DNA, 25 bp, Homo sapien
gatgtattgccattaaagccagggc

SEQ ID NO: 3333586 - DNA, 25 bp, Homo sapien
taggccaatactaacttgtgggaag

SEQ ID NO: 3333587 - DNA, 25 bp, Homo sapien
tccttgaaatttgaaccctgcatca

SEQ ID NO: 3333588 - DNA, 25 bp, Homo sapien
gggcacctaacagaaccatgctgcg

SEQ ID NO: 3333589 - DNA, 25 bp, Homo sapien
ggaaatctgttcaaagctaaatggt

SEQ ID NO: 3333590 - DNA, 25 bp, Homo sapien
tatctttaggtgaccctgcttactc

SEQ ID NO: 3333591 - DNA, 25 bp, Homo sapien
gtaaatctatctttaggtgaccctg

SEQ ID NO: 3333592 - DNA, 25 bp, Homo sapien
tgaccctgcttactcttatctgcag

SEQ ID NO: 3333593 - DNA, 25 bp, Homo sapien
atagtttgaggcacattttcaaaac

SEQ ID NO: 3333594 - DNA, 25 bp, Homo sapien
tagtttgaggcacattttcaaaacc

SEQ ID NO: 3333595 - DNA, 25 bp, Homo sapien
agtttgaggcacattttcaaaacca

SEQ ID NO: 3333596 - DNA, 25 bp, Homo sapien
gtttgaggcacattttcaaaaccat

SEQ ID NO: 3333597 - DNA, 25 bp, Homo sapien
tctaatcaaccggtgtttgtatggt

SEQ ID NO: 3333598 - DNA, 25 bp, Homo sapien
gtttgtatggtactgaagactattc

SEQ ID NO: 3333599 - DNA, 25 bp, Homo sapien
tatctttctaatcaaccggtgtttg

SEQ ID NO: 3333600 - DNA, 25 bp, Homo sapien
caaccggtgtttgtatggtactgaa

SEQ ID NO: 3333601 - DNA, 25 bp, Homo sapien
ccaaacttggtaattaagtctgaca

SEQ ID NO: 3333602 - DNA, 25 bp, Homo sapien
tctgacaagaggcatacctctcagc

SEQ ID NO: 3333603 - DNA, 25 bp, Homo sapien
gaggcatacctctcagctttgcata

SEQ ID NO: 3333604 - DNA, 25 bp, Homo sapien
taagtctgacaagaggcatacctct

SEQ ID NO: 3333605 - DNA, 25 bp, Homo sapien
taatgccccaaagctataccagtaa

SEQ ID NO: 3333606 - DNA, 25 bp, Homo sapien
tgtaattcagctatcctccgacctt

SEQ ID NO: 3333607 - DNA, 25 bp, Homo sapien
gcagcacccgatttaccactactta

SEQ ID NO: 3333608 - DNA, 25 bp, Homo sapien
tgccctctgcaagatgagatcagcc

SEQ ID NO: 3333609 - DNA, 25 bp, Homo sapien
catgattcctaatcttctgggccat

SEQ ID NO: 3333610 - DNA, 25 bp, Homo sapien
gaatcatgattcctaatcttctggg

SEQ ID NO: 3333611 - DNA, 25 bp, Homo sapien
tagaatcatgattcctaatcttctg

SEQ ID NO: 3333612 - DNA, 25 bp, Homo sapien
caatgctattgaaaattggcagcaa

SEQ ID NO: 3333613 - DNA, 25 bp, Homo sapien
aacttaagtccgtgcccttccgctg

SEQ ID NO: 3333614 - DNA, 25 bp, Homo sapien
ctgcggccacttccgtgtttacact

SEQ ID NO: 3333615 - DNA, 25 bp, Homo sapien
gctgtctgctattaagcaaagctgc

SEQ ID NO: 3333616 - DNA, 25 bp, Homo sapien
catgcgtacattgtcagcttcactc

SEQ ID NO: 3333617 - DNA, 25 bp, Homo sapien
tcctggttcctcagcaactggggtg

SEQ ID NO: 3333618 - DNA, 25 bp, Homo sapien
agtgcccaacttaaccgcggctccg

SEQ ID NO: 3333619 - DNA, 25 bp, Homo sapien
tggggtgaagcgcacaactcgtccg

SEQ ID NO: 3333620 - DNA, 25 bp, Homo sapien
ccgagtgcccaacttaaccgcggct

SEQ ID NO: 3333621 - DNA, 25 bp, Homo sapien
ttcgtgggtccctcatgcagagacg

SEQ ID NO: 3333622 - DNA, 25 bp, Homo sapien
tgggtccctcatgcagagacgtcgc

SEQ ID NO: 3333623 - DNA, 25 bp, Homo sapien
gatccagctggttcgtgggtccctc

SEQ ID NO: 3333624 - DNA, 25 bp, Homo sapien
atgagcagatccagctggttcgtgg

SEQ ID NO: 3333625 - DNA, 25 bp, Homo sapien
ggagacacacgccgtgcgaccgaca

SEQ ID NO: 3333626 - DNA, 25 bp, Homo sapien
tgacttacaccgtgagcagcggcgg

SEQ ID NO: 3333627 - DNA, 25 bp, Homo sapien
cttcacattgacttacaccgtgagc

SEQ ID NO: 3333628 - DNA, 25 bp, Homo sapien
cattgacttacaccgtgagcagcgg

SEQ ID NO: 3333629 - DNA, 25 bp, Homo sapien
tccgacgcccggatccttgcgcgtc

SEQ ID NO: 3333630 - DNA, 25 bp, Homo sapien
cgcgtcctccgacaggaagccgagg

SEQ ID NO: 3333631 - DNA, 25 bp, Homo sapien
ctcgcacacactccgacgcccggat

SEQ ID NO: 3333632 - DNA, 25 bp, Homo sapien
ggatccttgcgcgtcctccgacagg

SEQ ID NO: 3333633 - DNA, 25 bp, Homo sapien
ggccgccgcagctggcaacgcgatc

SEQ ID NO: 3333634 - DNA, 25 bp, Homo sapien
tgtttgaaacaaagggttatgctaa

SEQ ID NO: 3333635 - DNA, 25 bp, Homo sapien
gctaaagttgtctgcacacaaaact

SEQ ID NO: 3333636 - DNA, 25 bp, Homo sapien
ccaatataatgacgaataacgcttc

SEQ ID NO: 3333637 - DNA, 25 bp, Homo sapien
tacataaaggaacagtgcctcctac

SEQ ID NO: 3333638 - DNA, 25 bp, Homo sapien
gtaccttgagcatgtttagggaaaa

SEQ ID NO: 3333639 - DNA, 25 bp, Homo sapien
aaattcaaagttggtaccttgagca

SEQ ID NO: 3333640 - DNA, 25 bp, Homo sapien
gtttttctcatacaactaaacaatg

SEQ ID NO: 3333641 - DNA, 25 bp, Homo sapien
actaaacaatgaaattcaaagttgg

SEQ ID NO: 3333642 - DNA, 25 bp, Homo sapien
acccagctaatcttgtagatttagt

SEQ ID NO: 3333643 - DNA, 25 bp, Homo sapien
acacccagctaatcttgtagattta

SEQ ID NO: 3333644 - DNA, 25 bp, Homo sapien
agagacagggtttctccatgttatt

SEQ ID NO: 3333645 - DNA, 25 bp, Homo sapien
tctccatgttattcagctggtctcc

SEQ ID NO: 3333646 - DNA, 25 bp, Homo sapien
agacaattgcttaacgtggtataca

SEQ ID NO: 3333647 - DNA, 25 bp, Homo sapien
taaagcaacgcgaagcaaaatgatg

SEQ ID NO: 3333648 - DNA, 25 bp, Homo sapien
tttatcctcaaacgacaagacttca

SEQ ID NO: 3333649 - DNA, 25 bp, Homo sapien
gtgtaatctcgattccaaaagcaga

SEQ ID NO: 3333650 - DNA, 25 bp, Homo sapien
gaaatgctgggctatagtgcactaa

SEQ ID NO: 3333651 - DNA, 25 bp, Homo sapien
taaacgtgagggaccacaaggttgc

SEQ ID NO: 3333652 - DNA, 25 bp, Homo sapien
tggaaacagagcaagtcaaaactcc

SEQ ID NO: 3333653 - DNA, 25 bp, Homo sapien
tcctgatgagtagtgggactgcacc

SEQ ID NO: 3333654 - DNA, 25 bp, Homo sapien
tgataagcacaagaattcagtctgc

SEQ ID NO: 3333655 - DNA, 25 bp, Homo sapien
gactcgagatatactttggaggcaa

SEQ ID NO: 3333656 - DNA, 25 bp, Homo sapien
catcacaggtcatctcaggtaaccc

SEQ ID NO: 3333657 - DNA, 25 bp, Homo sapien
tggtctcagatccaggacaactcct

SEQ ID NO: 3333658 - DNA, 25 bp, Homo sapien
tctcctcttgaaccaagttcttggt

SEQ ID NO: 3333659 - DNA, 25 bp, Homo sapien
aaaataatcagtgcttcttgtctca

SEQ ID NO: 3333660 - DNA, 25 bp, Homo sapien
taatgttgtaaacctagatactaac

SEQ ID NO: 3333661 - DNA, 25 bp, Homo sapien
taactatagaccaatgtccctaaag

SEQ ID NO: 3333662 - DNA, 25 bp, Homo sapien
ccttgacctaccaagtgcaagcaat

SEQ ID NO: 3333663 - DNA, 25 bp, Homo sapien
gcaagttcatctactgataagaaaa

SEQ ID NO: 3333664 - DNA, 25 bp, Homo sapien
gaaaatctcccaagttctagctgtg

SEQ ID NO: 3333665 - DNA, 25 bp, Homo sapien
aaactttctcatgatcttttgcaag

SEQ ID NO: 3333666 - DNA, 25 bp, Homo sapien
taccaagttgtggaagctagagagc

SEQ ID NO: 3333667 - DNA, 25 bp, Homo sapien
taaattaacgatagaagggagacac

SEQ ID NO: 3333668 - DNA, 25 bp, Homo sapien
catgcttaacactgggaatacctta

SEQ ID NO: 3333669 - DNA, 25 bp, Homo sapien
cagaaagtaagtggcttcctcaagg

SEQ ID NO: 3333670 - DNA, 25 bp, Homo sapien
gcgtatcctagctttattaaagggc

SEQ ID NO: 3333671 - DNA, 25 bp, Homo sapien
aggcgtatcctagctttattaaagg

SEQ ID NO: 3333672 - DNA, 25 bp, Homo sapien
gcagggtcccccggtattgctgttg

SEQ ID NO: 3333673 - DNA, 25 bp, Homo sapien
aggagccctgctcatggcaccaggc

SEQ ID NO: 3333674 - DNA, 25 bp, Homo sapien
aaagtcccatcagtttaataacaat

SEQ ID NO: 3333675 - DNA, 25 bp, Homo sapien
gtcccatcagtttaataacaataaa

SEQ ID NO: 3333676 - DNA, 25 bp, Homo sapien
aggttggggggcagcgattgtcctg

SEQ ID NO: 3333677 - DNA, 25 bp, Homo sapien
ggttggggggcagcgattgtcctgt

SEQ ID NO: 3333678 - DNA, 25 bp, Homo sapien
cccggatcttgtccagcagaccaga

SEQ ID NO: 3333679 - DNA, 25 bp, Homo sapien
tgtccagcagaccagaaatgaaggc

SEQ ID NO: 3333680 - DNA, 25 bp, Homo sapien
agcagaccagaaatgaaggcctctg

SEQ ID NO: 3333681 - DNA, 25 bp, Homo sapien
tgctcagcttctgcatgccccggat

SEQ ID NO: 3333682 - DNA, 25 bp, Homo sapien
tcttcctggcagtcgtagaggcgcg

SEQ ID NO: 3333683 - DNA, 25 bp, Homo sapien
agcagctccttgaccgtggcagccc

SEQ ID NO: 3333684 - DNA, 25 bp, Homo sapien
ttgaccgtggcagcccgggcatcgt

SEQ ID NO: 3333685 - DNA, 25 bp, Homo sapien
taggttgaggcgcttccgtagctcc

SEQ ID NO: 3333686 - DNA, 25 bp, Homo sapien
cttgacggtgaccttcccttggcgc

SEQ ID NO: 3333687 - DNA, 25 bp, Homo sapien
tgggccctcatcgtccgcgccgccc

SEQ ID NO: 3333688 - DNA, 25 bp, Homo sapien
ctcactgggccctcatcgtccgcgc

SEQ ID NO: 3333689 - DNA, 25 bp, Homo sapien
actgggccctcatcgtccgcgccgc

SEQ ID NO: 3333690 - DNA, 25 bp, Homo sapien
ggggggctctgaaagtagacgcgtg

SEQ ID NO: 3333691 - DNA, 25 bp, Homo sapien
tctgaaagtagacgcgtggtcctgg

SEQ ID NO: 3333692 - DNA, 25 bp, Homo sapien
ggctctgaaagtagacgcgtggtcc

SEQ ID NO: 3333693 - DNA, 25 bp, Homo sapien
gggggctctgaaagtagacgcgtgg

SEQ ID NO: 3333694 - DNA, 25 bp, Homo sapien
gcagcggcgggggtgcccgagggca

SEQ ID NO: 3333695 - DNA, 25 bp, Homo sapien
tcagatccccagtttttcatgtcga

SEQ ID NO: 3333696 - DNA, 25 bp, Homo sapien
tccttttgtgccacagggaggattt

SEQ ID NO: 3333697 - DNA, 25 bp, Homo sapien
ttcatgtcgatcttctacctccctg

SEQ ID NO: 3333698 - DNA, 25 bp, Homo sapien
caccttcaggtaatcctaggatagg

SEQ ID NO: 3333699 - DNA, 25 bp, Homo sapien
tctatgaaatacgtttcccctcgga

SEQ ID NO: 3333700 - DNA, 25 bp, Homo sapien
cacggctttaaatgaggatgattcc

SEQ ID NO: 3333701 - DNA, 25 bp, Homo sapien
tgacagtgaaacactctgaaaaggt

SEQ ID NO: 3333702 - DNA, 25 bp, Homo sapien
caaaactcagaaatagtcgcccagg

SEQ ID NO: 3333703 - DNA, 25 bp, Homo sapien
tttttccattcaacttaagctacca

SEQ ID NO: 3333704 - DNA, 25 bp, Homo sapien
gactacagtcacgaagcccatatga

SEQ ID NO: 3333705 - DNA, 25 bp, Homo sapien
ctgtaaatcagataccactccagac

SEQ ID NO: 3333706 - DNA, 25 bp, Homo sapien
tataatccaaaacatcatcctacaa

SEQ ID NO: 3333707 - DNA, 25 bp, Homo sapien
gctatctcaccagaaatagactgaa

SEQ ID NO: 3333708 - DNA, 25 bp, Homo sapien
gaggaaactgatagaacactacaat

SEQ ID NO: 3333709 - DNA, 25 bp, Homo sapien
gaaatactaagatctctaagacgac

SEQ ID NO: 3333710 - DNA, 25 bp, Homo sapien
gaaaagaaatcttattgctccatca

SEQ ID NO: 3333711 - DNA, 25 bp, Homo sapien
ccatgatatgagactgttacacctc

SEQ ID NO: 3333712 - DNA, 25 bp, Homo sapien
tcactggtttccaagctatactaaa

SEQ ID NO: 3333713 - DNA, 25 bp, Homo sapien
ggcaatagtattgttgaagcttaca

SEQ ID NO: 3333714 - DNA, 25 bp, Homo sapien
cagctaggatttatactctcagaaa

SEQ ID NO: 3333715 - DNA, 25 bp, Homo sapien
tgtttccacattctcggtctcaact

SEQ ID NO: 3333716 - DNA, 25 bp, Homo sapien
tcatataagtctcatcatcataaac

SEQ ID NO: 3333717 - DNA, 25 bp, Homo sapien
ggctgcatagccctgctctaatctg

SEQ ID NO: 3333718 - DNA, 25 bp, Homo sapien
tctgccacatcttgcatcatataag

SEQ ID NO: 3333719 - DNA, 25 bp, Homo sapien
ctgctggatattcagaaaccttttc

SEQ ID NO: 3333720 - DNA, 25 bp, Homo sapien
tggatattcagaaaccttttcactt

SEQ ID NO: 3333721 - DNA, 25 bp, Homo sapien
gatattcagaaaccttttcactttc

SEQ ID NO: 3333722 - DNA, 25 bp, Homo sapien
gctggatattcagaaaccttttcac

SEQ ID NO: 3333723 - DNA, 25 bp, Homo sapien
gcacaaagttcttagcatagtataa

SEQ ID NO: 3333724 - DNA, 25 bp, Homo sapien
tttctgtcctttaaagtcccatgac

SEQ ID NO: 3333725 - DNA, 25 bp, Homo sapien
taagttattcaattagtgacagctg

SEQ ID NO: 3333726 - DNA, 25 bp, Homo sapien
caagcttaacatgtctaaatggcac

SEQ ID NO: 3333727 - DNA, 25 bp, Homo sapien
tctataatcctccaatctgaattaa

SEQ ID NO: 3333728 - DNA, 25 bp, Homo sapien
gaatcttctataatcctccaatctg

SEQ ID NO: 3333729 - DNA, 25 bp, Homo sapien
atcctccaatctgaattaatttttc

SEQ ID NO: 3333730 - DNA, 25 bp, Homo sapien
tcttctataatcctccaatctgaat

SEQ ID NO: 3333731 - DNA, 25 bp, Homo sapien
gggactatatgcacgtgccagtgca

SEQ ID NO: 3333732 - DNA, 25 bp, Homo sapien
tgccttgtagtaatgttgccagtgc

SEQ ID NO: 3333733 - DNA, 25 bp, Homo sapien
gatttcttaggcatttctaggtaca

SEQ ID NO: 3333734 - DNA, 25 bp, Homo sapien
ggtggttagggcagacaaccttgcc

SEQ ID NO: 3333735 - DNA, 25 bp, Homo sapien
ctctttactgaatgctaagaacaga

SEQ ID NO: 3333736 - DNA, 25 bp, Homo sapien
tgattcaaaatcctacacgcataaa

SEQ ID NO: 3333737 - DNA, 25 bp, Homo sapien
agaagccccggtatttctactactg

SEQ ID NO: 3333738 - DNA, 25 bp, Homo sapien
gactggccccaatattcactcttta

SEQ ID NO: 3333739 - DNA, 25 bp, Homo sapien
tatataaggatacacgacatgtaca

SEQ ID NO: 3333740 - DNA, 25 bp, Homo sapien
cctacagtataatccaagacaatgg

SEQ ID NO: 3333741 - DNA, 25 bp, Homo sapien
gatctccacaccgatttagatataa

SEQ ID NO: 3333742 - DNA, 25 bp, Homo sapien
tatgttccaacaattcacgtaagcc

SEQ ID NO: 3333743 - DNA, 25 bp, Homo sapien
aagctccaaaatagtacctccactg

SEQ ID NO: 3333744 - DNA, 25 bp, Homo sapien
ctccactgtcaaccactgctgatgt

SEQ ID NO: 3333745 - DNA, 25 bp, Homo sapien
tctactccattgctggaaagctcca

SEQ ID NO: 3333746 - DNA, 25 bp, Homo sapien
ccactgtcaaccactgctgatgtca

SEQ ID NO: 3333747 - DNA, 25 bp, Homo sapien
tggttgccagtgttataggtttgca

SEQ ID NO: 3333748 - DNA, 25 bp, Homo sapien
aattaaaggttcactgatggttgcc

SEQ ID NO: 3333749 - DNA, 25 bp, Homo sapien
tattccctgaggaagcttcaaacgc

SEQ ID NO: 3333750 - DNA, 25 bp, Homo sapien
ttaaaagtcaatagagatggagtgg

SEQ ID NO: 3333751 - DNA, 25 bp, Homo sapien
agtctaagcatccttcactattttc

SEQ ID NO: 3333752 - DNA, 25 bp, Homo sapien
tctaagcatccttcactattttcac

SEQ ID NO: 3333753 - DNA, 25 bp, Homo sapien
gtagtctaagcatccttcactattt

SEQ ID NO: 3333754 - DNA, 25 bp, Homo sapien
agtagtctaagcatccttcactatt

SEQ ID NO: 3333755 - DNA, 25 bp, Homo sapien
tacaggcgggtgtttccaggatccc

SEQ ID NO: 3333756 - DNA, 25 bp, Homo sapien
cacaattttaggtgcccgggtccag

SEQ ID NO: 3333757 - DNA, 25 bp, Homo sapien
taaatactaagcactgatgccagga

SEQ ID NO: 3333758 - DNA, 25 bp, Homo sapien
ccgggtccagtagtgaataaaggca

SEQ ID NO: 3333759 - DNA, 25 bp, Homo sapien
cgtgcccagccaagaccctgtacct

SEQ ID NO: 3333760 - DNA, 25 bp, Homo sapien
gtgcccagccaagaccctgtacctt

SEQ ID NO: 3333761 - DNA, 25 bp, Homo sapien
ccgtgcccagccaagaccctgtacc

SEQ ID NO: 3333762 - DNA, 25 bp, Homo sapien
catatatagccaggagaagaagtgc

SEQ ID NO: 3333763 - DNA, 25 bp, Homo sapien
ccagcagcatttgaagatacccagt

SEQ ID NO: 3333764 - DNA, 25 bp, Homo sapien
tcatccaccgatgcacatttgagat

SEQ ID NO: 3333765 - DNA, 25 bp, Homo sapien
catcattttggtagatgcggtacaa

SEQ ID NO: 3333766 - DNA, 25 bp, Homo sapien
cgcggcgtccttttccctctcagca

SEQ ID NO: 3333767 - DNA, 25 bp, Homo sapien
ctgctctccgcgacgcctgggaaga

SEQ ID NO: 3333768 - DNA, 25 bp, Homo sapien
aaccgcctaggcgacggcggcgaca

SEQ ID NO: 3333769 - DNA, 25 bp, Homo sapien
gccgttggccgagcgtccggaggga

SEQ ID NO: 3333770 - DNA, 25 bp, Homo sapien
cctggcgcggtattcaccagctgat

SEQ ID NO: 3333771 - DNA, 25 bp, Homo sapien
caccctagagtaaggctcaaatgtc

SEQ ID NO: 3333772 - DNA, 25 bp, Homo sapien
tgggaaccgtggaaatcaccctaga

SEQ ID NO: 3333773 - DNA, 25 bp, Homo sapien
ttacggcttcacaaccagtctggag

SEQ ID NO: 3333774 - DNA, 25 bp, Homo sapien
cactgttggccactctgagatccgc

SEQ ID NO: 3333775 - DNA, 25 bp, Homo sapien
cagagagtagacaggagcagacagt

SEQ ID NO: 3333776 - DNA, 25 bp, Homo sapien
tcatagttaggaattagagagagcc

SEQ ID NO: 3333777 - DNA, 25 bp, Homo sapien
caggtgttcggctgcctcatgggcc

SEQ ID NO: 3333778 - DNA, 25 bp, Homo sapien
cagtccaattaatctcagacaccac

SEQ ID NO: 3333779 - DNA, 25 bp, Homo sapien
gcggaagtagtggaagtacagggct

SEQ ID NO: 3333780 - DNA, 25 bp, Homo sapien
tcccaaagctagcacaggaatgcgg

SEQ ID NO: 3333781 - DNA, 25 bp, Homo sapien
agggctgccagtccaattaatctca

SEQ ID NO: 3333782 - DNA, 25 bp, Homo sapien
cacttctgagagtgacactggagca

SEQ ID NO: 3333783 - DNA, 25 bp, Homo sapien
tgaagtgctgtactgagaaagccac

SEQ ID NO: 3333784 - DNA, 25 bp, Homo sapien
aagtacctggaagaaacactgagcc

SEQ ID NO: 3333785 - DNA, 25 bp, Homo sapien
cccagctgcattggcagagacctgt

SEQ ID NO: 3333786 - DNA, 25 bp, Homo sapien
aaaagacaaaacctgatctgttcta

SEQ ID NO: 3333787 - DNA, 25 bp, Homo sapien
tagatacccatgctgtcaagaatgt

SEQ ID NO: 3333788 - DNA, 25 bp, Homo sapien
taatgggaacctcaaggggtagata

SEQ ID NO: 3333789 - DNA, 25 bp, Homo sapien
tcaaggggtagatacccatgctgtc

SEQ ID NO: 3333790 - DNA, 25 bp, Homo sapien
ccatggggaatgctttggctgtcac

SEQ ID NO: 3333791 - DNA, 25 bp, Homo sapien
acagtccaaaggagggggatagcca

SEQ ID NO: 3333792 - DNA, 25 bp, Homo sapien
tctgtagcgactggggaagtgccta

SEQ ID NO: 3333793 - DNA, 25 bp, Homo sapien
ctcctgtgtcccaacagtccaaagg

SEQ ID NO: 3333794 - DNA, 25 bp, Homo sapien
atggacttatagactgtaaatcagc

SEQ ID NO: 3333795 - DNA, 25 bp, Homo sapien
ctgatggacttatagactgtaaatc

SEQ ID NO: 3333796 - DNA, 25 bp, Homo sapien
aagacacgattggtaatgaaggcca

SEQ ID NO: 3333797 - DNA, 25 bp, Homo sapien
aaatcagcaaagacacgattggtaa

SEQ ID NO: 3333798 - DNA, 25 bp, Homo sapien
aatctttgtatcattacaattttag

SEQ ID NO: 3333799 - DNA, 25 bp, Homo sapien
catgtcatcctcctgcagggaccat

SEQ ID NO: 3333800 - DNA, 25 bp, Homo sapien
tttgcatgtcatcctcctgcaggga

SEQ ID NO: 3333801 - DNA, 25 bp, Homo sapien
taaaaacatagaacacttcacgaat

SEQ ID NO: 3333802 - DNA, 25 bp, Homo sapien
tcaagacccattaacgttttctaga

SEQ ID NO: 3333803 - DNA, 25 bp, Homo sapien
cctaaaatctatcagtggatgccaa

SEQ ID NO: 3333804 - DNA, 25 bp, Homo sapien
aatacaggttgtatggatagctcaa

SEQ ID NO: 3333805 - DNA, 25 bp, Homo sapien
taagctctttactgcaatgtcatat

SEQ ID NO: 3333806 - DNA, 25 bp, Homo sapien
cagacaccctatggcatttgttgct

SEQ ID NO: 3333807 - DNA, 25 bp, Homo sapien
catttgttgctgaaatgtctaccgg

SEQ ID NO: 3333808 - DNA, 25 bp, Homo sapien
tgctgaaatgtctaccggctggaga

SEQ ID NO: 3333809 - DNA, 25 bp, Homo sapien
aaaagcacttatcagacaccctatg

SEQ ID NO: 3333810 - DNA, 25 bp, Homo sapien
agtttccgcaacattctccttttca

SEQ ID NO: 3333811 - DNA, 25 bp, Homo sapien
ttgagccgaagcagcctcagagcca

SEQ ID NO: 3333812 - DNA, 25 bp, Homo sapien
agcagcctccacgtgacctggacag

SEQ ID NO: 3333813 - DNA, 25 bp, Homo sapien
tatcgatggtgacagcttcatccag

SEQ ID NO: 3333814 - DNA, 25 bp, Homo sapien
ttggcttggtctgatgtgactgtct

SEQ ID NO: 3333815 - DNA, 25 bp, Homo sapien
gaaatggatgtatctctgcttttgt

SEQ ID NO: 3333816 - DNA, 25 bp, Homo sapien
tgaaatggatgtatctctgcttttg

SEQ ID NO: 3333817 - DNA, 25 bp, Homo sapien
ggtctgatgtgactgtcttgtaagc

SEQ ID NO: 3333818 - DNA, 25 bp, Homo sapien
gattcctggcaattaaggcttccaa

SEQ ID NO: 3333819 - DNA, 25 bp, Homo sapien
cctaagattcctggcaattaaggct

SEQ ID NO: 3333820 - DNA, 25 bp, Homo sapien
tttcctcctgaaagtagcctaagat

SEQ ID NO: 3333821 - DNA, 25 bp, Homo sapien
atttcctcctgaaagtagcctaaga

SEQ ID NO: 3333822 - DNA, 25 bp, Homo sapien
tgactgtgacgcctacaaccagata

SEQ ID NO: 3333823 - DNA, 25 bp, Homo sapien
gtgacgcctacaaccagataataaa

SEQ ID NO: 3333824 - DNA, 25 bp, Homo sapien
cagcactgactgtgacgcctacaac

SEQ ID NO: 3333825 - DNA, 25 bp, Homo sapien
cactgactgtgacgcctacaaccag

SEQ ID NO: 3333826 - DNA, 25 bp, Homo sapien
ttagatgacatccggcgcagagatg

SEQ ID NO: 3333827 - DNA, 25 bp, Homo sapien
gttagatgacatccggcgcagagat

SEQ ID NO: 3333828 - DNA, 25 bp, Homo sapien
gacgacgtgcaacctcaaaggaaag

SEQ ID NO: 3333829 - DNA, 25 bp, Homo sapien
caaaggtgtcgatatttggactaca

SEQ ID NO: 3333830 - DNA, 25 bp, Homo sapien
tcgcgtatcctcagaaccaaaggtg

SEQ ID NO: 3333831 - DNA, 25 bp, Homo sapien
ttggactacagagccaagcagttgc

SEQ ID NO: 3333832 - DNA, 25 bp, Homo sapien
ccctcagcggcagcgccagagtctt

SEQ ID NO: 3333833 - DNA, 25 bp, Homo sapien
tggagaccgccctgcggagatacat

SEQ ID NO: 3333834 - DNA, 25 bp, Homo sapien
agagtcttggagaccgccctgcgga

SEQ ID NO: 3333835 - DNA, 25 bp, Homo sapien
ccagagtcttggagaccgccctgcg

SEQ ID NO: 3333836 - DNA, 25 bp, Homo sapien
cgccgcgcagcagcctcggtaccca

SEQ ID NO: 3333837 - DNA, 25 bp, Homo sapien
gcccggaggaggcacgtcgaccttc

SEQ ID NO: 3333838 - DNA, 25 bp, Homo sapien
aggaggcacgtcgaccttcatccag

SEQ ID NO: 3333839 - DNA, 25 bp, Homo sapien
gggagacctttgtagtcctcaccat

SEQ ID NO: 3333840 - DNA, 25 bp, Homo sapien
aatacaaatgctggcttgatatata

SEQ ID NO: 3333841 - DNA, 25 bp, Homo sapien
caaaatacaaatgctggcttgatat

SEQ ID NO: 3333842 - DNA, 25 bp, Homo sapien
aatgctggcttgatatatattcaca

SEQ ID NO: 3333843 - DNA, 25 bp, Homo sapien
taatgatgcaaaatacaaatgctgg

SEQ ID NO: 3333844 - DNA, 25 bp, Homo sapien
gaggaacagctacaatcactatacg

SEQ ID NO: 3333845 - DNA, 25 bp, Homo sapien
cagctacaatcactatacggagcat

SEQ ID NO: 3333846 - DNA, 25 bp, Homo sapien
gaacagctacaatcactatacggag

SEQ ID NO: 3333847 - DNA, 25 bp, Homo sapien
gctacaatcactatacggagcatac

SEQ ID NO: 3333848 - DNA, 25 bp, Homo sapien
tcttcttttgtactctaaaatatct

SEQ ID NO: 3333849 - DNA, 25 bp, Homo sapien
aaaatatcttcattgtgttgtttga

SEQ ID NO: 3333850 - DNA, 25 bp, Homo sapien
aatatcttcattgtgttgtttgatg

SEQ ID NO: 3333851 - DNA, 25 bp, Homo sapien
tgtactctaaaatatcttcattgtg

SEQ ID NO: 3333852 - DNA, 25 bp, Homo sapien
tcttttctaggatagtgtggcctct

SEQ ID NO: 3333853 - DNA, 25 bp, Homo sapien
cacatttttaggaccactgtctgac

SEQ ID NO: 3333854 - DNA, 25 bp, Homo sapien
gttcaatcactagtgctctcagcag

SEQ ID NO: 3333855 - DNA, 25 bp, Homo sapien
tggaggaagtcccaaacccattaga

SEQ ID NO: 3333856 - DNA, 25 bp, Homo sapien
cacgctggtgtagtctcacgacatc

SEQ ID NO: 3333857 - DNA, 25 bp, Homo sapien
tgtagtctcacgacatccgggagta

SEQ ID NO: 3333858 - DNA, 25 bp, Homo sapien
cacgacatccgggagtaaagtactt

SEQ ID NO: 3333859 - DNA, 25 bp, Homo sapien
gctggtgtagtctcacgacatccgg

SEQ ID NO: 3333860 - DNA, 25 bp, Homo sapien
tccacaagaagacagtggtgcccaa

SEQ ID NO: 3333861 - DNA, 25 bp, Homo sapien
ggcggctctcgcacgtagaactttg

SEQ ID NO: 3333862 - DNA, 25 bp, Homo sapien
acgtagaactttgatcgcactgaag

SEQ ID NO: 3333863 - DNA, 25 bp, Homo sapien
tcaggtttggcattcggcggctctc

SEQ ID NO: 3333864 - DNA, 25 bp, Homo sapien
tgctgaggcccagtgcatatgcaat

SEQ ID NO: 3333865 - DNA, 25 bp, Homo sapien
aagagcttgctccagattctgatgc

SEQ ID NO: 3333866 - DNA, 25 bp, Homo sapien
gactgcagtgtggagttcaccttgg

SEQ ID NO: 3333867 - DNA, 25 bp, Homo sapien
gaggtgcgtgttcagcagaacctgc

SEQ ID NO: 3333868 - DNA, 25 bp, Homo sapien
gtgcgtctccagtcatctgtaagag

SEQ ID NO: 3333869 - DNA, 25 bp, Homo sapien
aggcagcaccacactgggtgcgtct

SEQ ID NO: 3333870 - DNA, 25 bp, Homo sapien
cctcccctctcagaacatactgatt

SEQ ID NO: 3333871 - DNA, 25 bp, Homo sapien
tcgatgagcgccacctctttaaaaa

SEQ ID NO: 3333872 - DNA, 25 bp, Homo sapien
cccctctgtctaggactgcagtgtg

SEQ ID NO: 3333873 - DNA, 25 bp, Homo sapien
gtgggatggcatttggtctcaggca

SEQ ID NO: 3333874 - DNA, 25 bp, Homo sapien
tctctgacgcttgtgacagtgcctc

SEQ ID NO: 3333875 - DNA, 25 bp, Homo sapien
ctcttacagatgactggagacgcac

SEQ ID NO: 3333876 - DNA, 25 bp, Homo sapien
gcaggttctgctgaacacgcacctc

SEQ ID NO: 3333877 - DNA, 25 bp, Homo sapien
agacgcacccagtgtggtgctgcct

SEQ ID NO: 3333878 - DNA, 25 bp, Homo sapien
attgcatatgcactgggcctcagca

SEQ ID NO: 3333879 - DNA, 25 bp, Homo sapien
aatcagtatgttctgagaggggagg

SEQ ID NO: 3333880 - DNA, 25 bp, Homo sapien
gaggcactgtcacaagcgtcagaga

SEQ ID NO: 3333881 - DNA, 25 bp, Homo sapien
tttttaaagaggtggcgctcatcga

SEQ ID NO: 3333882 - DNA, 25 bp, Homo sapien
gcatcagaatctggagcaagctctt

SEQ ID NO: 3333883 - DNA, 25 bp, Homo sapien
ccaaggtgaactccacactgcagtc

SEQ ID NO: 3333884 - DNA, 25 bp, Homo sapien
cacactgcagtcctagacagagggg

SEQ ID NO: 3333885 - DNA, 25 bp, Homo sapien
tgcctgagaccaaatgccatcccac

SEQ ID NO: 3333886 - DNA, 25 bp, Homo sapien
gaaaggggacgcagcaaggcggacg

SEQ ID NO: 3333887 - DNA, 25 bp, Homo sapien
gggacgcagcaaggcggacggcgcc

SEQ ID NO: 3333888 - DNA, 25 bp, Homo sapien
gccagcagccgggaaaggggacgca

SEQ ID NO: 3333889 - DNA, 25 bp, Homo sapien
gcagccgggaaaggggacgcagcaa

SEQ ID NO: 3333890 - DNA, 25 bp, Homo sapien
aagtgcgggactcgagggctctgca

SEQ ID NO: 3333891 - DNA, 25 bp, Homo sapien
agctcagtctctccgagttggcaac

SEQ ID NO: 3333892 - DNA, 25 bp, Homo sapien
attccagcacggcaaggttctctag

SEQ ID NO: 3333893 - DNA, 25 bp, Homo sapien
gggcgtcaacgtgaattccagcacg

SEQ ID NO: 3333894 - DNA, 25 bp, Homo sapien
cacttacactcacgatcatactgaa

SEQ ID NO: 3333895 - DNA, 25 bp, Homo sapien
acactcacgatcatactgaagcctc

SEQ ID NO: 3333896 - DNA, 25 bp, Homo sapien
tacactcacgatcatactgaagcct

SEQ ID NO: 3333897 - DNA, 25 bp, Homo sapien
cttacactcacgatcatactgaagc

SEQ ID NO: 3333898 - DNA, 25 bp, Homo sapien
ccttaggtaggcttaagatcacaca

SEQ ID NO: 3333899 - DNA, 25 bp, Homo sapien
tgactccagatctagtgatcctcat

SEQ ID NO: 3333900 - DNA, 25 bp, Homo sapien
tgaagtagaattagtgccttaggta

SEQ ID NO: 3333901 - DNA, 25 bp, Homo sapien
cagaggtgggatacagtttgaggtc

SEQ ID NO: 3333902 - DNA, 25 bp, Homo sapien
tacacttggagtacccagctgtatg

SEQ ID NO: 3333903 - DNA, 25 bp, Homo sapien
gatgggaactgtacacttggagtac

SEQ ID NO: 3333904 - DNA, 25 bp, Homo sapien
tacccagctgtatgtgaaactgcat

SEQ ID NO: 3333905 - DNA, 25 bp, Homo sapien
ggaactgtacacttggagtacccag

SEQ ID NO: 3333906 - DNA, 25 bp, Homo sapien
ggctcatctaatcaggtactcaggt

SEQ ID NO: 3333907 - DNA, 25 bp, Homo sapien
tacagtataactcaaatgggatctc

SEQ ID NO: 3333908 - DNA, 25 bp, Homo sapien
cagcagcggcagcatatagccttgg

SEQ ID NO: 3333909 - DNA, 25 bp, Homo sapien
gaatcagactagtatttgccgagcc

SEQ ID NO: 3333910 - DNA, 25 bp, Homo sapien
aaggttaaaagtggctcatataact

SEQ ID NO: 3333911 - DNA, 25 bp, Homo sapien
aaagttttacggtcagctgttaatg

SEQ ID NO: 3333912 - DNA, 25 bp, Homo sapien
taaaagtggctcatataacttgaaa

SEQ ID NO: 3333913 - DNA, 25 bp, Homo sapien
gttttacggtcagctgttaatgaaa

SEQ ID NO: 3333914 - DNA, 25 bp, Homo sapien
tattcggtatgtagtctgacctcgc

SEQ ID NO: 3333915 - DNA, 25 bp, Homo sapien
tactccgctccaaggtgactcataa

SEQ ID NO: 3333916 - DNA, 25 bp, Homo sapien
ggtcggtccgtcaactctgcattat

SEQ ID NO: 3333917 - DNA, 25 bp, Homo sapien
ggatctgactaactacctttccagg

SEQ ID NO: 3333918 - DNA, 25 bp, Homo sapien
ttttgatgaggaggcggtctgaacc

SEQ ID NO: 3333919 - DNA, 25 bp, Homo sapien
tgaaaggtcgatctagcaggaaggc

SEQ ID NO: 3333920 - DNA, 25 bp, Homo sapien
tgttaacaagtctccactgcggtga

SEQ ID NO: 3333921 - DNA, 25 bp, Homo sapien
taccacgcactgaaatgatgggcgg

SEQ ID NO: 3333922 - DNA, 25 bp, Homo sapien
cctgcgtgttaggaagcgtgacccg

SEQ ID NO: 3333923 - DNA, 25 bp, Homo sapien
tgcgtgttaggaagcgtgacccggg

SEQ ID NO: 3333924 - DNA, 25 bp, Homo sapien
cgtgttaggaagcgtgacccgggtg

SEQ ID NO: 3333925 - DNA, 25 bp, Homo sapien
gcctgcgtgttaggaagcgtgaccc

SEQ ID NO: 3333926 - DNA, 25 bp, Homo sapien
cggatcttggtaagtgtgaggctcc

SEQ ID NO: 3333927 - DNA, 25 bp, Homo sapien
gagcctcccgcccaaggagaatgcg

SEQ ID NO: 3333928 - DNA, 25 bp, Homo sapien
gcggcggtcggacaaactgactgac

SEQ ID NO: 3333929 - DNA, 25 bp, Homo sapien
aatgcgctcttcaagcggatcttgg

SEQ ID NO: 3333930 - DNA, 25 bp, Homo sapien
tggtgcggatgcagcaggctcattc

SEQ ID NO: 3333931 - DNA, 25 bp, Homo sapien
cattcattgcctaaacgcggttctc

SEQ ID NO: 3333932 - DNA, 25 bp, Homo sapien
tctgtggttcctactatggcccgcg

SEQ ID NO: 3333933 - DNA, 25 bp, Homo sapien
catagctctcgtcaggccgaatgca

SEQ ID NO: 3333934 - DNA, 25 bp, Homo sapien
tagtcagttgcatactggagtcttc

SEQ ID NO: 3333935 - DNA, 25 bp, Homo sapien
tgcctccgttgttctcgtttctgga

SEQ ID NO: 3333936 - DNA, 25 bp, Homo sapien
tcttagtttccgagcgggaaacagc

SEQ ID NO: 3333937 - DNA, 25 bp, Homo sapien
gttgttctcgtttctggagtaggga

SEQ ID NO: 3333938 - DNA, 25 bp, Homo sapien
tgcctggccaagtaggatcttttgt

SEQ ID NO: 3333939 - DNA, 25 bp, Homo sapien
tgggtgcaccagaataacctagctg

SEQ ID NO: 3333940 - DNA, 25 bp, Homo sapien
ccttggtattcaacttatggaacag

SEQ ID NO: 3333941 - DNA, 25 bp, Homo sapien
acagtcttagtaggcttgtagctca

SEQ ID NO: 3333942 - DNA, 25 bp, Homo sapien
gaactcttaagatgcagatgccacc

SEQ ID NO: 3333943 - DNA, 25 bp, Homo sapien
caactcctatgagtggcaactgaag

SEQ ID NO: 3333944 - DNA, 25 bp, Homo sapien
ccacccgtgaggagctaaattccta

SEQ ID NO: 3333945 - DNA, 25 bp, Homo sapien
gaagtacaaaccgaactccagtgct

SEQ ID NO: 3333946 - DNA, 25 bp, Homo sapien
cagggaagtcttgtatgatttctaa

SEQ ID NO: 3333947 - DNA, 25 bp, Homo sapien
tgagatttcaaagaaagactgacct

SEQ ID NO: 3333948 - DNA, 25 bp, Homo sapien
ggactttgttgcaagataggtatat

SEQ ID NO: 3333949 - DNA, 25 bp, Homo sapien
catgtatagtatttgggaaaagctg

SEQ ID NO: 3333950 - DNA, 25 bp, Homo sapien
aaatgatattttgccctcatcccat

SEQ ID NO: 3333951 - DNA, 25 bp, Homo sapien
ggcctaattctagttatcttgcaat

SEQ ID NO: 3333952 - DNA, 25 bp, Homo sapien
aagaaaaccacccatctgccactgt

SEQ ID NO: 3333953 - DNA, 25 bp, Homo sapien
aagttcgctgatgttatatgggcac

SEQ ID NO: 3333954 - DNA, 25 bp, Homo sapien
tgcctgtgtttatacttgctagtac

SEQ ID NO: 3333955 - DNA, 25 bp, Homo sapien
tgtggtgcccacaaacggtcaaaat

SEQ ID NO: 3333956 - DNA, 25 bp, Homo sapien
cattccacatgaatgttgaaatctc

SEQ ID NO: 3333957 - DNA, 25 bp, Homo sapien
actgtgatggttggatgttcaaccg

SEQ ID NO: 3333958 - DNA, 25 bp, Homo sapien
gttgaactggcgttggaactgtgat

SEQ ID NO: 3333959 - DNA, 25 bp, Homo sapien
caccagaaccgctccataacaaagt

SEQ ID NO: 3333960 - DNA, 25 bp, Homo sapien
ctcctaggaaggagatgtaattggt

SEQ ID NO: 3333961 - DNA, 25 bp, Homo sapien
gcagcatgggctgcactatggcagt

SEQ ID NO: 3333962 - DNA, 25 bp, Homo sapien
agtcacattcacactcctaggaagg

SEQ ID NO: 3333963 - DNA, 25 bp, Homo sapien
gggttgaggcatataattaccaggg

SEQ ID NO: 3333964 - DNA, 25 bp, Homo sapien
gaccaaggcatctcacatggtagga

SEQ ID NO: 3333965 - DNA, 25 bp, Homo sapien
gagaattcatcatcacggcgacagc

SEQ ID NO: 3333966 - DNA, 25 bp, Homo sapien
aaaccatatcaggtaacaggactgt

SEQ ID NO: 3333967 - DNA, 25 bp, Homo sapien
tagtactacaggtgagtgagtgcca

SEQ ID NO: 3333968 - DNA, 25 bp, Homo sapien
actacaatttgggacttctgtctct

SEQ ID NO: 3333969 - DNA, 25 bp, Homo sapien
cagcgttaactctacaaattgtgtg

SEQ ID NO: 3333970 - DNA, 25 bp, Homo sapien
aaattgtgtggtcaaaaggatcaca

SEQ ID NO: 3333971 - DNA, 25 bp, Homo sapien
taaatgagcctttctgaccaaaata

SEQ ID NO: 3333972 - DNA, 25 bp, Homo sapien
tcggcgttatcataaagactggaaa

SEQ ID NO: 3333973 - DNA, 25 bp, Homo sapien
tcattgttgtacagtatctttccca

SEQ ID NO: 3333974 - DNA, 25 bp, Homo sapien
tatcataaagactggaaatcggctt

SEQ ID NO: 3333975 - DNA, 25 bp, Homo sapien
tggaacatcggcgttatcataaaga

SEQ ID NO: 3333976 - DNA, 25 bp, Homo sapien
cctaatcctttcctatgcaaagcct

SEQ ID NO: 3333977 - DNA, 25 bp, Homo sapien
ggttattcctaatcctttcctatgc

SEQ ID NO: 3333978 - DNA, 25 bp, Homo sapien
ttcctaatcctttcctatgcaaagc

SEQ ID NO: 3333979 - DNA, 25 bp, Homo sapien
tattcctaatcctttcctatgcaaa

SEQ ID NO: 3333980 - DNA, 25 bp, Homo sapien
tcctctcgtcaactgagcaaattct

SEQ ID NO: 3333981 - DNA, 25 bp, Homo sapien
tctcgtcaactgagcaaattctgcc

SEQ ID NO: 3333982 - DNA, 25 bp, Homo sapien
tctgatctttcataacacattccat

SEQ ID NO: 3333983 - DNA, 25 bp, Homo sapien
actctttaaggattttctcagctgg

SEQ ID NO: 3333984 - DNA, 25 bp, Homo sapien
ctttcttttagtcatatgtagtatt

SEQ ID NO: 3333985 - DNA, 25 bp, Homo sapien
tcttttagtcatatgtagtattatc

SEQ ID NO: 3333986 - DNA, 25 bp, Homo sapien
ttagtcatatgtagtattatcttaa

SEQ ID NO: 3333987 - DNA, 25 bp, Homo sapien
tttagtcatatgtagtattatctta

SEQ ID NO: 3333988 - DNA, 25 bp, Homo sapien
gaaaagaccatcgtttcctcattgt

SEQ ID NO: 3333989 - DNA, 25 bp, Homo sapien
tgtgtatagcgagagagaggaatct

SEQ ID NO: 3333990 - DNA, 25 bp, Homo sapien
tctccagtgtgttcttctagttttg

SEQ ID NO: 3333991 - DNA, 25 bp, Homo sapien
tctctatactgtttcattggtggtc

SEQ ID NO: 3333992 - DNA, 25 bp, Homo sapien
ttatagtgtggagccaggaacccaa

SEQ ID NO: 3333993 - DNA, 25 bp, Homo sapien
taagtctgctatacagaaatttaag

SEQ ID NO: 3333994 - DNA, 25 bp, Homo sapien
catgaacaactgcatatggtgatat

SEQ ID NO: 3333995 - DNA, 25 bp, Homo sapien
ggtgatattcactcttaagtctgct

SEQ ID NO: 3333996 - DNA, 25 bp, Homo sapien
ggttgagataatgacgaaatatgcc

SEQ ID NO: 3333997 - DNA, 25 bp, Homo sapien
agataatgacgaaatatgccctggt

SEQ ID NO: 3333998 - DNA, 25 bp, Homo sapien
tctgctctcgaacctgtgttttgtt

SEQ ID NO: 3333999 - DNA, 25 bp, Homo sapien
aaatgttcatactgtctttactgtc

SEQ ID NO: 3334000 - DNA, 25 bp, Homo sapien
tttgaagtacttagcaaaacggctc

SEQ ID NO: 3334001 - DNA, 25 bp, Homo sapien
catctggtaagtagggataagtgag

SEQ ID NO: 3334002 - DNA, 25 bp, Homo sapien
tcataggctcctgtgacaataaaat

SEQ ID NO: 3334003 - DNA, 25 bp, Homo sapien
taaaaataggaccaacctcataggc

SEQ ID NO: 3334004 - DNA, 25 bp, Homo sapien
gaaactcatgtttgcctcagggtct

SEQ ID NO: 3334005 - DNA, 25 bp, Homo sapien
tctatcattgacaggtactaagttc

SEQ ID NO: 3334006 - DNA, 25 bp, Homo sapien
taattcatgtgtccgcataaatgcc

SEQ ID NO: 3334007 - DNA, 25 bp, Homo sapien
attcatgacaactctaacgtaaggg

SEQ ID NO: 3334008 - DNA, 25 bp, Homo sapien
cctccactgaattggaattcatagc

SEQ ID NO: 3334009 - DNA, 25 bp, Homo sapien
tcctccactgaattggaattcatag

SEQ ID NO: 3334010 - DNA, 25 bp, Homo sapien
aaagcacttatattccaggtttggt

SEQ ID NO: 3334011 - DNA, 25 bp, Homo sapien
tagttcaaaacttcacaaatcggac

SEQ ID NO: 3334012 - DNA, 25 bp, Homo sapien
gatgtttggactgacaagcttgttc

SEQ ID NO: 3334013 - DNA, 25 bp, Homo sapien
cctacttgctattgttattggaggc

SEQ ID NO: 3334014 - DNA, 25 bp, Homo sapien
ccaaaactttgtcatgtagtgcatg

SEQ ID NO: 3334015 - DNA, 25 bp, Homo sapien
ggattagcaatactcagccaatata

SEQ ID NO: 3334016 - DNA, 25 bp, Homo sapien
gagttttgtgcatatctctgagcta

SEQ ID NO: 3334017 - DNA, 25 bp, Homo sapien
agtctgggcaagtacataattctag

SEQ ID NO: 3334018 - DNA, 25 bp, Homo sapien
tctctccagaaggtcgggtgggtca

SEQ ID NO: 3334019 - DNA, 25 bp, Homo sapien
tcctgcgtagtgcttcgagactggt

SEQ ID NO: 3334020 - DNA, 25 bp, Homo sapien
tagatgcaggtgtcgcagatcatca

SEQ ID NO: 3334021 - DNA, 25 bp, Homo sapien
cacgatgtaggtccccattgtgtca

SEQ ID NO: 3334022 - DNA, 25 bp, Homo sapien
ggaggggaactcatctggccagctt

SEQ ID NO: 3334023 - DNA, 25 bp, Homo sapien
tccttcaacacgtgtggattatggg

SEQ ID NO: 3334024 - DNA, 25 bp, Homo sapien
gggaactcatctggccagcttgcag

SEQ ID NO: 3334025 - DNA, 25 bp, Homo sapien
gggtccctccttcaacacgtgtgga

SEQ ID NO: 3334026 - DNA, 25 bp, Homo sapien
gggagatgctgatgcccaccagatc

SEQ ID NO: 3334027 - DNA, 25 bp, Homo sapien
tgtatctgctgggtgagtggagggg

SEQ ID NO: 3334028 - DNA, 25 bp, Homo sapien
ggaggggagatgctgatgcccacca

SEQ ID NO: 3334029 - DNA, 25 bp, Homo sapien
atgctgatgcccaccagatccacat

SEQ ID NO: 3334030 - DNA, 25 bp, Homo sapien
tgatgcagcaagatgtcatcagtct

SEQ ID NO: 3334031 - DNA, 25 bp, Homo sapien
gatgcagcaagatgtcatcagtctg

SEQ ID NO: 3334032 - DNA, 25 bp, Homo sapien
atgcagcaagatgtcatcagtctgg

SEQ ID NO: 3334033 - DNA, 25 bp, Homo sapien
cttgatgcagcaagatgtcatcagt

SEQ ID NO: 3334034 - DNA, 25 bp, Homo sapien
gtgagagcagaacccgggtggagct

SEQ ID NO: 3334035 - DNA, 25 bp, Homo sapien
caaactggcccactcctggaggcat

SEQ ID NO: 3334036 - DNA, 25 bp, Homo sapien
agtgaacccttctgccctcagcagt

SEQ ID NO: 3334037 - DNA, 25 bp, Homo sapien
gcagtgagagcagaacccgggtgga

SEQ ID NO: 3334038 - DNA, 25 bp, Homo sapien
cctgtagtacctttactggctttgg

SEQ ID NO: 3334039 - DNA, 25 bp, Homo sapien
tagaacgtgttaagggtatgccctc

SEQ ID NO: 3334040 - DNA, 25 bp, Homo sapien
aatttcttggcagacaattgctgac

SEQ ID NO: 3334041 - DNA, 25 bp, Homo sapien
cagtgtgcctggcaagcctatggca

SEQ ID NO: 3334042 - DNA, 25 bp, Homo sapien
ttgtgaaagtcctatatttccttgc

SEQ ID NO: 3334043 - DNA, 25 bp, Homo sapien
ggaatttatcctatgtatacttgag

SEQ ID NO: 3334044 - DNA, 25 bp, Homo sapien
tgattttcaaccaatgccgggtggt

SEQ ID NO: 3334045 - DNA, 25 bp, Homo sapien
ggttctatccactactgagattggg

SEQ ID NO: 3334046 - DNA, 25 bp, Homo sapien
caaaaactgctccttaactgccctg

SEQ ID NO: 3334047 - DNA, 25 bp, Homo sapien
gtgacctaaaaatgcataccagtgc

SEQ ID NO: 3334048 - DNA, 25 bp, Homo sapien
gaaaatgttttctgggtatgtgacc

SEQ ID NO: 3334049 - DNA, 25 bp, Homo sapien
tatgtgaccacaaagtgcattgtag

SEQ ID NO: 3334050 - DNA, 25 bp, Homo sapien
tcacgagtggcagttaggaatcaga

SEQ ID NO: 3334051 - DNA, 25 bp, Homo sapien
gctgagcaggatcccagaaaagcaa

SEQ ID NO: 3334052 - DNA, 25 bp, Homo sapien
caagctgtgtgcaaaccactctagg

SEQ ID NO: 3334053 - DNA, 25 bp, Homo sapien
gctattctaagacagatggctcact

SEQ ID NO: 3334054 - DNA, 25 bp, Homo sapien
cttctctatctgcaagttataaagt

SEQ ID NO: 3334055 - DNA, 25 bp, Homo sapien
tcctggtcattaaaggcaacttctc

SEQ ID NO: 3334056 - DNA, 25 bp, Homo sapien
tagtgctgttaacagagtgtgtaac

SEQ ID NO: 3334057 - DNA, 25 bp, Homo sapien
ttataaatctgcaatcacggttgcg

SEQ ID NO: 3334058 - DNA, 25 bp, Homo sapien
tattaaggatggagttcttttgttg

SEQ ID NO: 3334059 - DNA, 25 bp, Homo sapien
tctgaagttggctgcttaatatgat

SEQ ID NO: 3334060 - DNA, 25 bp, Homo sapien
ccaggagtgattctacaggaacaga

SEQ ID NO: 3334061 - DNA, 25 bp, Homo sapien
tgtgatggtgtgagttaaaactact

SEQ ID NO: 3334062 - DNA, 25 bp, Homo sapien
ttcaccgtttttagctgggatggtc

SEQ ID NO: 3334063 - DNA, 25 bp, Homo sapien
ccgtttttagctgggatggtctcga

SEQ ID NO: 3334064 - DNA, 25 bp, Homo sapien
gtttttagctgggatggtctcgatc

SEQ ID NO: 3334065 - DNA, 25 bp, Homo sapien
caccgtttttagctgggatggtctc

SEQ ID NO: 3334066 - DNA, 25 bp, Homo sapien
tgtcaaaagccattactcatctcgg

SEQ ID NO: 3334067 - DNA, 25 bp, Homo sapien
tatagtaatttggtggaggccagca

SEQ ID NO: 3334068 - DNA, 25 bp, Homo sapien
tgtcatcaggaggtggcatatctag

SEQ ID NO: 3334069 - DNA, 25 bp, Homo sapien
ttacgaaatgggcactgtcatcagg

SEQ ID NO: 3334070 - DNA, 25 bp, Homo sapien
cccaaaatgtgtgttagagttagca

SEQ ID NO: 3334071 - DNA, 25 bp, Homo sapien
gacaatattgcacgtttcctcagaa

SEQ ID NO: 3334072 - DNA, 25 bp, Homo sapien
taaacttccagtcagtagtcaagag

SEQ ID NO: 3334073 - DNA, 25 bp, Homo sapien
aaagacaacctctaagtgcgctcag

SEQ ID NO: 3334074 - DNA, 25 bp, Homo sapien
caagaccttaggctgcaaaactcgc

SEQ ID NO: 3334075 - DNA, 25 bp, Homo sapien
aacgatacgtcgatgccggaaccga

SEQ ID NO: 3334076 - DNA, 25 bp, Homo sapien
aaatgcgctgtacctaggcctcgaa

SEQ ID NO: 3334077 - DNA, 25 bp, Homo sapien
acagggcaagctttcggcgaggact

SEQ ID NO: 3334078 - DNA, 25 bp, Homo sapien
tcctccagagggcgggaaccttgga

SEQ ID NO: 3334079 - DNA, 25 bp, Homo sapien
tctgcggccctctcgcgagagagtg

SEQ ID NO: 3334080 - DNA, 25 bp, Homo sapien
gcctgcctaggtagaccggcgccag

SEQ ID NO: 3334081 - DNA, 25 bp, Homo sapien
ccagcccgagtgacgcctggcgtgt

SEQ ID NO: 3334082 - DNA, 25 bp, Homo sapien
tgtgcacggtgtgtgtgcgctccat

SEQ ID NO: 3334083 - DNA, 25 bp, Homo sapien
caatgtgggcaagacatgcctgacc

SEQ ID NO: 3334084 - DNA, 25 bp, Homo sapien
aacttctaaggcagcgtttctcaga

SEQ ID NO: 3334085 - DNA, 25 bp, Homo sapien
cgtgatcggcgactccaatgtgggc

SEQ ID NO: 3334086 - DNA, 25 bp, Homo sapien
tcccctaactcaagtgccctttata

SEQ ID NO: 3334087 - DNA, 25 bp, Homo sapien
ggtacagagcactatgatcgagcca

SEQ ID NO: 3334088 - DNA, 25 bp, Homo sapien
ttgttgccaaaatgcccgattaatg

SEQ ID NO: 3334089 - DNA, 25 bp, Homo sapien
tgtcacccacatattttgtcaccca

SEQ ID NO: 3334090 - DNA, 25 bp, Homo sapien
tacgtctcaggtataagattgcagt

SEQ ID NO: 3334091 - DNA, 25 bp, Homo sapien
tatcaagtatgggtcatgtgttctc

SEQ ID NO: 3334092 - DNA, 25 bp, Homo sapien
gatttagacaccataggattaggga

SEQ ID NO: 3334093 - DNA, 25 bp, Homo sapien
catgtattttgggagcacgtttgct

SEQ ID NO: 3334094 - DNA, 25 bp, Homo sapien
aagctgcaaatatatcttgggaatc

SEQ ID NO: 3334095 - DNA, 25 bp, Homo sapien
tagaactgaagctgcaaatatatct

SEQ ID NO: 3334096 - DNA, 25 bp, Homo sapien
actgaagctgcaaatatatcttggg

SEQ ID NO: 3334097 - DNA, 25 bp, Homo sapien
ctgcaaatatatcttgggaatcaca

SEQ ID NO: 3334098 - DNA, 25 bp, Homo sapien
tgaaatcctgaattggctgctgcat

SEQ ID NO: 3334099 - DNA, 25 bp, Homo sapien
aaatcctgaattggctgctgcatgt

SEQ ID NO: 3334100 - DNA, 25 bp, Homo sapien
gaaatcctgaattggctgctgcatg

SEQ ID NO: 3334101 - DNA, 25 bp, Homo sapien
aatcctgaattggctgctgcatgtg

SEQ ID NO: 3334102 - DNA, 25 bp, Homo sapien
tcattatgagcatcagtccttgggc

SEQ ID NO: 3334103 - DNA, 25 bp, Homo sapien
gctgaaatccttatccacatgtggt

SEQ ID NO: 3334104 - DNA, 25 bp, Homo sapien
tgtgttctacccagggcgcttgatc

SEQ ID NO: 3334105 - DNA, 25 bp, Homo sapien
tcttaaaatggctcccagagtgcga

SEQ ID NO: 3334106 - DNA, 25 bp, Homo sapien
cgagtttcgaggttcacatggccaa

SEQ ID NO: 3334107 - DNA, 25 bp, Homo sapien
gatgaaatgaccagatgcagcggct

SEQ ID NO: 3334108 - DNA, 25 bp, Homo sapien
actctgtcaatgtgcccaagggcca

SEQ ID NO: 3334109 - DNA, 25 bp, Homo sapien
tgcaaccgggtgctctaggaagcct

SEQ ID NO: 3334110 - DNA, 25 bp, Homo sapien
gatgcatttgatgggcccaaaacgg

SEQ ID NO: 3334111 - DNA, 25 bp, Homo sapien
ccactgctctcagggtgcggatgca

SEQ ID NO: 3334112 - DNA, 25 bp, Homo sapien
aacggtgagctcttcatcggcctcc

SEQ ID NO: 3334113 - DNA, 25 bp, Homo sapien
gggctgtggtcatagccataggcaa

SEQ ID NO: 3334114 - DNA, 25 bp, Homo sapien
caaggaggcacagtacttggatacg

SEQ ID NO: 3334115 - DNA, 25 bp, Homo sapien
tgaaggagtgatttgccttgtgtcc

SEQ ID NO: 3334116 - DNA, 25 bp, Homo sapien
ggctcaggcacatcaatgaccgttt

SEQ ID NO: 3334117 - DNA, 25 bp, Homo sapien
cttggatacgtggttatagggctca

SEQ ID NO: 3334118 - DNA, 25 bp, Homo sapien
aaagacataacagtattaggtccca

SEQ ID NO: 3334119 - DNA, 25 bp, Homo sapien
cttggtgtgtaattcgaactccatt

SEQ ID NO: 3334120 - DNA, 25 bp, Homo sapien
taacagtattaggtcccacagctac

SEQ ID NO: 3334121 - DNA, 25 bp, Homo sapien
ggtgtgtaattcgaactccattata

SEQ ID NO: 3334122 - DNA, 25 bp, Homo sapien
gatctggaagaagagcattggtaga

SEQ ID NO: 3334123 - DNA, 25 bp, Homo sapien
cgacttatcaaagtggtacactgaa

SEQ ID NO: 3334124 - DNA, 25 bp, Homo sapien
gaaatgcaagatgaagtcgacttat

SEQ ID NO: 3334125 - DNA, 25 bp, Homo sapien
ctttctgattcataaggatctggaa

SEQ ID NO: 3334126 - DNA, 25 bp, Homo sapien
ttcttaagctgtgccactcaaaatg

SEQ ID NO: 3334127 - DNA, 25 bp, Homo sapien
ttctccctataaccaaacctggctc

SEQ ID NO: 3334128 - DNA, 25 bp, Homo sapien
tccagattttctacacttagtaatt

SEQ ID NO: 3334129 - DNA, 25 bp, Homo sapien
tatgtacaaaactctagactttatt

SEQ ID NO: 3334130 - DNA, 25 bp, Homo sapien
tgtcccttcagattaggccccagaa

SEQ ID NO: 3334131 - DNA, 25 bp, Homo sapien
tttggaattggagcaacccatctga

SEQ ID NO: 3334132 - DNA, 25 bp, Homo sapien
gccctaacaacctgctttggaattg

SEQ ID NO: 3334133 - DNA, 25 bp, Homo sapien
gagctgactcaaacctgaccagaag

SEQ ID NO: 3334134 - DNA, 25 bp, Homo sapien
aaagtgcggtcctctcatcagggta

SEQ ID NO: 3334135 - DNA, 25 bp, Homo sapien
caataaatttcccataaagtgcggt

SEQ ID NO: 3334136 - DNA, 25 bp, Homo sapien
catttacttctcctacaaggcttcc

SEQ ID NO: 3334137 - DNA, 25 bp, Homo sapien
acataggctatcttctctccagtca

SEQ ID NO: 3334138 - DNA, 25 bp, Homo sapien
tcacagctcccaagttctaacacag

SEQ ID NO: 3334139 - DNA, 25 bp, Homo sapien
taataacggattcaagggccaacaa

SEQ ID NO: 3334140 - DNA, 25 bp, Homo sapien
tgagtaacagtgagagggcatgcct

SEQ ID NO: 3334141 - DNA, 25 bp, Homo sapien
cagagtgaacagtcacacggcttac

SEQ ID NO: 3334142 - DNA, 25 bp, Homo sapien
cgtctacatacgtgccctggagaac

SEQ ID NO: 3334143 - DNA, 25 bp, Homo sapien
tgggtaatatatccagcacactcca

SEQ ID NO: 3334144 - DNA, 25 bp, Homo sapien
gaccgttcagctctccgtctacata

SEQ ID NO: 3334145 - DNA, 25 bp, Homo sapien
gcacactccatgacgaatgttatct

SEQ ID NO: 3334146 - DNA, 25 bp, Homo sapien
cagtagcaagcattgtgtgaggctc

SEQ ID NO: 3334147 - DNA, 25 bp, Homo sapien
caaagcgggccatcaggacttaggt

SEQ ID NO: 3334148 - DNA, 25 bp, Homo sapien
ctctagagcggataaggaacaaaac

SEQ ID NO: 3334149 - DNA, 25 bp, Homo sapien
tataggagagactggcaagacacac

SEQ ID NO: 3334150 - DNA, 25 bp, Homo sapien
acactggggtaagcggatgaagctg

SEQ ID NO: 3334151 - DNA, 25 bp, Homo sapien
ctgacacactggggtaagcggatga

SEQ ID NO: 3334152 - DNA, 25 bp, Homo sapien
acacactggggtaagcggatgaagc

SEQ ID NO: 3334153 - DNA, 25 bp, Homo sapien
tgacacactggggtaagcggatgaa

SEQ ID NO: 3334154 - DNA, 25 bp, Homo sapien
cattgcatcagatcattgagagcct

SEQ ID NO: 3334155 - DNA, 25 bp, Homo sapien
tcattgcatcagatcattgagagcc

SEQ ID NO: 3334156 - DNA, 25 bp, Homo sapien
gcatcagatcattgagagcctgaga

SEQ ID NO: 3334157 - DNA, 25 bp, Homo sapien
ttgcatcagatcattgagagcctga

SEQ ID NO: 3334158 - DNA, 25 bp, Homo sapien
atgtcttattactgggactgcaatg

SEQ ID NO: 3334159 - DNA, 25 bp, Homo sapien
gtgaacaaagttcccctcaaatctg

SEQ ID NO: 3334160 - DNA, 25 bp, Homo sapien
tgactgtgcagaacccgtgcggtaa

SEQ ID NO: 3334161 - DNA, 25 bp, Homo sapien
aggagtaggtgactgtgcagaaccc

SEQ ID NO: 3334162 - DNA, 25 bp, Homo sapien
tgcagaacccgtgcggtaatccgtc

SEQ ID NO: 3334163 - DNA, 25 bp, Homo sapien
ctccagctgccaaagggtcccctcc

SEQ ID NO: 3334164 - DNA, 25 bp, Homo sapien
ccaactcccctccagctgccaaagg

SEQ ID NO: 3334165 - DNA, 25 bp, Homo sapien
ccctccagctgccaaagggtcccct

SEQ ID NO: 3334166 - DNA, 25 bp, Homo sapien
aactcccctccagctgccaaagggt

SEQ ID NO: 3334167 - DNA, 25 bp, Homo sapien
cgtgcaaaagtttctcacctcatcg

SEQ ID NO: 3334168 - DNA, 25 bp, Homo sapien
aattgattgttatgtacactttgtg

SEQ ID NO: 3334169 - DNA, 25 bp, Homo sapien
aagaaagggtagtcagcgtgcaaaa

SEQ ID NO: 3334170 - DNA, 25 bp, Homo sapien
ggcaccagcagtaccaaattgattg

SEQ ID NO: 3334171 - DNA, 25 bp, Homo sapien
tattggtgtcttcccaatcattctg

SEQ ID NO: 3334172 - DNA, 25 bp, Homo sapien
ttattggtgtcttcccaatcattct

SEQ ID NO: 3334173 - DNA, 25 bp, Homo sapien
cttattggtgtcttcccaatcattc

SEQ ID NO: 3334174 - DNA, 25 bp, Homo sapien
ttgtggttaagatcattcacacaga

SEQ ID NO: 3334175 - DNA, 25 bp, Homo sapien
tggttaagatcattcacacagaacc

SEQ ID NO: 3334176 - DNA, 25 bp, Homo sapien
ggttaagatcattcacacagaacca

SEQ ID NO: 3334177 - DNA, 25 bp, Homo sapien
gtggttaagatcattcacacagaac

SEQ ID NO: 3334178 - DNA, 25 bp, Homo sapien
gagattgtataacgtccccacatcg

SEQ ID NO: 3334179 - DNA, 25 bp, Homo sapien
cacagccaacggcatggaattcaga

SEQ ID NO: 3334180 - DNA, 25 bp, Homo sapien
cggagaaacacgacactgaggcggt

SEQ ID NO: 3334181 - DNA, 25 bp, Homo sapien
cttttcggaagagctgccgcctggg

SEQ ID NO: 3334182 - DNA, 25 bp, Homo sapien
tccgcgcccaaaggcggaaaggcca

SEQ ID NO: 3334183 - DNA, 25 bp, Homo sapien
caaaactgggctaggggattgctcc

SEQ ID NO: 3334184 - DNA, 25 bp, Homo sapien
gatggagcggccgtgcgtttccagc

SEQ ID NO: 3334185 - DNA, 25 bp, Homo sapien
caggtttcgcaactccgagggtgga

SEQ ID NO: 3334186 - DNA, 25 bp, Homo sapien
gcgctccaggccctctgcgcctcct

SEQ ID NO: 3334187 - DNA, 25 bp, Homo sapien
ccttccgcgctccaggccctctgcg

SEQ ID NO: 3334188 - DNA, 25 bp, Homo sapien
caggccctctgcgcctcctcccccg

SEQ ID NO: 3334189 - DNA, 25 bp, Homo sapien
aggccctctgcgcctcctcccccgg

SEQ ID NO: 3334190 - DNA, 25 bp, Homo sapien
ctccaccatctcgtcgtcgctatcc

SEQ ID NO: 3334191 - DNA, 25 bp, Homo sapien
tcctccaccatctcgtcgtcgctat

SEQ ID NO: 3334192 - DNA, 25 bp, Homo sapien
ctcctccaccatctcgtcgtcgcta

SEQ ID NO: 3334193 - DNA, 25 bp, Homo sapien
ccaccatctcgtcgtcgctatccat

SEQ ID NO: 3334194 - DNA, 25 bp, Homo sapien
cttttgcttaggtgcggcttggcgc

SEQ ID NO: 3334195 - DNA, 25 bp, Homo sapien
tgaaagtccgtcgtgcactgtccgt

SEQ ID NO: 3334196 - DNA, 25 bp, Homo sapien
tgtgccgggagcaacttgaaagtcc

SEQ ID NO: 3334197 - DNA, 25 bp, Homo sapien
tgttatcgagcagctgatccgctga

SEQ ID NO: 3334198 - DNA, 25 bp, Homo sapien
tctggcccggattccgcaggatggc

SEQ ID NO: 3334199 - DNA, 25 bp, Homo sapien
tcatcaaatccaaatggcagcgggc

SEQ ID NO: 3334200 - DNA, 25 bp, Homo sapien
caggccctcgggtgattcagaaatt

SEQ ID NO: 3334201 - DNA, 25 bp, Homo sapien
agctgcacgagtgcgacacgcaagg

SEQ ID NO: 3334202 - DNA, 25 bp, Homo sapien
ctactttcccacatcgactggcccc

SEQ ID NO: 3334203 - DNA, 25 bp, Homo sapien
accagtttcccctgtcgtactctgt

SEQ ID NO: 3334204 - DNA, 25 bp, Homo sapien
ccaaatctgcttccatcgcattctt

SEQ ID NO: 3334205 - DNA, 25 bp, Homo sapien
tttcccacatcgactggccccaaat

SEQ ID NO: 3334206 - DNA, 25 bp, Homo sapien
tcttaatcacaaacaatgtgcagca

SEQ ID NO: 3334207 - DNA, 25 bp, Homo sapien
gacagaacaagctctaccagggagg

SEQ ID NO: 3334208 - DNA, 25 bp, Homo sapien
ggaccgcacaggacatccaacatct

SEQ ID NO: 3334209 - DNA, 25 bp, Homo sapien
tcagctcctaacttggcagatccca

SEQ ID NO: 3334210 - DNA, 25 bp, Homo sapien
tgtgatttgaaccaggtcaggttca

SEQ ID NO: 3334211 - DNA, 25 bp, Homo sapien
gttctgtgctctcccccaagatggt

SEQ ID NO: 3334212 - DNA, 25 bp, Homo sapien
caaaggttgtgatttgaaccaggtc

SEQ ID NO: 3334213 - DNA, 25 bp, Homo sapien
tgtggcaaaggttgtgatttgaacc

SEQ ID NO: 3334214 - DNA, 25 bp, Homo sapien
tatctgtgagatggagccacctctg

SEQ ID NO: 3334215 - DNA, 25 bp, Homo sapien
cagggacaagctttgctcactgagc

SEQ ID NO: 3334216 - DNA, 25 bp, Homo sapien
gactgagatcccagttggcagcaga

SEQ ID NO: 3334217 - DNA, 25 bp, Homo sapien
gagccctgcccaaattatagaattg

SEQ ID NO: 3334218 - DNA, 25 bp, Homo sapien
acctctgttagctggagtggtcctt

SEQ ID NO: 3334219 - DNA, 25 bp, Homo sapien
ggtaatgccacccatcccagggaga

SEQ ID NO: 3334220 - DNA, 25 bp, Homo sapien
tgcaggtaatgccacccatcccagg

SEQ ID NO: 3334221 - DNA, 25 bp, Homo sapien
ctggagtggtccttgcccaccatca

SEQ ID NO: 3334222 - DNA, 25 bp, Homo sapien
ccccgctgctgttaaggacaagact

SEQ ID NO: 3334223 - DNA, 25 bp, Homo sapien
tagacatagaacatggaaccaagga

SEQ ID NO: 3334224 - DNA, 25 bp, Homo sapien
gctgataaaaatggtaacgacacgc

SEQ ID NO: 3334225 - DNA, 25 bp, Homo sapien
gctttcaggcaagccagtggaattt

SEQ ID NO: 3334226 - DNA, 25 bp, Homo sapien
cattactttcatggctggtccagca

SEQ ID NO: 3334227 - DNA, 25 bp, Homo sapien
gctttgctggccataatgaactcgg

SEQ ID NO: 3334228 - DNA, 25 bp, Homo sapien
ccgtttcagtgggtgcaagtcaact

SEQ ID NO: 3334229 - DNA, 25 bp, Homo sapien
ggtgtcccacgagctctgtttcctg

SEQ ID NO: 3334230 - DNA, 25 bp, Homo sapien
accatgcacgcagttgcattttcca

SEQ ID NO: 3334231 - DNA, 25 bp, Homo sapien
tcgtgaggcctgcataactctgcct

SEQ ID NO: 3334232 - DNA, 25 bp, Homo sapien
cagaagcagttgcatcgtgaggcct

SEQ ID NO: 3334233 - DNA, 25 bp, Homo sapien
cagctgaagattcaccatgcacgca

SEQ ID NO: 3334234 - DNA, 25 bp, Homo sapien
cggctgcatcatgtcaatctctgcc

SEQ ID NO: 3334235 - DNA, 25 bp, Homo sapien
aaccagtcccggcaactccctgatg

SEQ ID NO: 3334236 - DNA, 25 bp, Homo sapien
aaaccagtcccggcaactccctgat

SEQ ID NO: 3334237 - DNA, 25 bp, Homo sapien
tgaaaccagtcccggcaactccctg

SEQ ID NO: 3334238 - DNA, 25 bp, Homo sapien
ctgaaaccagtcccggcaactccct

SEQ ID NO: 3334239 - DNA, 25 bp, Homo sapien
agctttatctgggtcagcgtgtgat

SEQ ID NO: 3334240 - DNA, 25 bp, Homo sapien
ttatctgggtcagcgtgtgattctg

SEQ ID NO: 3334241 - DNA, 25 bp, Homo sapien
ccaagagtgttcactgcattgagct

SEQ ID NO: 3334242 - DNA, 25 bp, Homo sapien
ttcactgcattgagctttatctggg

SEQ ID NO: 3334243 - DNA, 25 bp, Homo sapien
tctgtagagaaacgtagagactgaa

SEQ ID NO: 3334244 - DNA, 25 bp, Homo sapien
gagtgacttcctctgtcgtaacgga

SEQ ID NO: 3334245 - DNA, 25 bp, Homo sapien
gagatatgacggcacgtgttccact

SEQ ID NO: 3334246 - DNA, 25 bp, Homo sapien
cataatacgaggagctagtctcccc

SEQ ID NO: 3334247 - DNA, 25 bp, Homo sapien
atttgtacttttaactcattggcgg

SEQ ID NO: 3334248 - DNA, 25 bp, Homo sapien
tcagcagatttgtacttttaactca

SEQ ID NO: 3334249 - DNA, 25 bp, Homo sapien
cagcagatttgtacttttaactcat

SEQ ID NO: 3334250 - DNA, 25 bp, Homo sapien
cagatttgtacttttaactcattgg

SEQ ID NO: 3334251 - DNA, 25 bp, Homo sapien
gactgcctctgcaaccgatggtggg

SEQ ID NO: 3334252 - DNA, 25 bp, Homo sapien
tatgaaaacctcaccactagtgtgg

SEQ ID NO: 3334253 - DNA, 25 bp, Homo sapien
aatgcctggaggagtgtagccgtct

SEQ ID NO: 3334254 - DNA, 25 bp, Homo sapien
gacacgaccgtattcctcaattgaa

SEQ ID NO: 3334255 - DNA, 25 bp, Homo sapien
gactcaggaacttgacaagctgcca

SEQ ID NO: 3334256 - DNA, 25 bp, Homo sapien
ccagcgactcaggaacttgacaagc

SEQ ID NO: 3334257 - DNA, 25 bp, Homo sapien
ggaacttgacaagctgccatctctc

SEQ ID NO: 3334258 - DNA, 25 bp, Homo sapien
acaagctgccatctctctgagatcc

SEQ ID NO: 3334259 - DNA, 25 bp, Homo sapien
gacctgcccatagcaagccactcat

SEQ ID NO: 3334260 - DNA, 25 bp, Homo sapien
ggcgtctgggggacctgcccatagc

SEQ ID NO: 3334261 - DNA, 25 bp, Homo sapien
gggagaggcgtctgggggacctgcc

SEQ ID NO: 3334262 - DNA, 25 bp, Homo sapien
cctgcccatagcaagccactcatcg

SEQ ID NO: 3334263 - DNA, 25 bp, Homo sapien
gggcatggccaccattgcatttgat

SEQ ID NO: 3334264 - DNA, 25 bp, Homo sapien
tgggggcatggccaccattgcattt

SEQ ID NO: 3334265 - DNA, 25 bp, Homo sapien
ggcatggccaccattgcatttgata

SEQ ID NO: 3334266 - DNA, 25 bp, Homo sapien
ggggcatggccaccattgcatttga

SEQ ID NO: 3334267 - DNA, 25 bp, Homo sapien
tgtctgcctaaaccatgacctgtga

SEQ ID NO: 3334268 - DNA, 25 bp, Homo sapien
catatttcagatagtgcccagccta

SEQ ID NO: 3334269 - DNA, 25 bp, Homo sapien
cactgcgatcgacacttattctgga

SEQ ID NO: 3334270 - DNA, 25 bp, Homo sapien
ggtattgcacatgccactgcttcag

SEQ ID NO: 3334271 - DNA, 25 bp, Homo sapien
gattttaaaccagttgactagtaca

SEQ ID NO: 3334272 - DNA, 25 bp, Homo sapien
caaaagttacagtcatcagccaggg

SEQ ID NO: 3334273 - DNA, 25 bp, Homo sapien
cagggccacaattctctgctcagct

SEQ ID NO: 3334274 - DNA, 25 bp, Homo sapien
tagtacaggtgtacccaagagtttc

SEQ ID NO: 3334275 - DNA, 25 bp, Homo sapien
gaggtgctcatcctccctgtttgct

SEQ ID NO: 3334276 - DNA, 25 bp, Homo sapien
cctccctgtttgctgcttgtgcagg

SEQ ID NO: 3334277 - DNA, 25 bp, Homo sapien
tgcaggtccacagatgtcccaaagc

SEQ ID NO: 3334278 - DNA, 25 bp, Homo sapien
cccaaagctgacagaggtgctcatc

SEQ ID NO: 3334279 - DNA, 25 bp, Homo sapien
ctggtcctcctctatggaggatggt

SEQ ID NO: 3334280 - DNA, 25 bp, Homo sapien
aaaactggtcctcctctatggagga

SEQ ID NO: 3334281 - DNA, 25 bp, Homo sapien
cgaaaactggtcctcctctatggag

SEQ ID NO: 3334282 - DNA, 25 bp, Homo sapien
accgaaaactggtcctcctctatgg

SEQ ID NO: 3334283 - DNA, 25 bp, Homo sapien
tacagcccactggttcaggatgagt

SEQ ID NO: 3334284 - DNA, 25 bp, Homo sapien
gggatctcccaaaatgacagagtga

SEQ ID NO: 3334285 - DNA, 25 bp, Homo sapien
caaggccgggtcatccattcagagt

SEQ ID NO: 3334286 - DNA, 25 bp, Homo sapien
gtaatcatccaaaagaccgcccagg

SEQ ID NO: 3334287 - DNA, 25 bp, Homo sapien
agcacagctgggacgtgaggttggg

SEQ ID NO: 3334288 - DNA, 25 bp, Homo sapien
cacttgtaggggacaaagggcctat

SEQ ID NO: 3334289 - DNA, 25 bp, Homo sapien
aggcaggtcagcaaaagagggacca

SEQ ID NO: 3334290 - DNA, 25 bp, Homo sapien
ggaccagggtgaaagtacaatgagc

SEQ ID NO: 3334291 - DNA, 25 bp, Homo sapien
tgagctgctccagtactccaggtgt

SEQ ID NO: 3334292 - DNA, 25 bp, Homo sapien
gaaaggtacagagatatggtgctga

SEQ ID NO: 3334293 - DNA, 25 bp, Homo sapien
cagagatatggtgctgagctgctcc

SEQ ID NO: 3334294 - DNA, 25 bp, Homo sapien
tgctccagtactccaggtgttgcca

SEQ ID NO: 3334295 - DNA, 25 bp, Homo sapien
ttctgggaatacaggggatgtgccc

SEQ ID NO: 3334296 - DNA, 25 bp, Homo sapien
cagtcctctgtgagtacaataccct

SEQ ID NO: 3334297 - DNA, 25 bp, Homo sapien
acacagctcctgctggcaagcagct

SEQ ID NO: 3334298 - DNA, 25 bp, Homo sapien
cagctgaagcaaggggctatgccac

SEQ ID NO: 3334299 - DNA, 25 bp, Homo sapien
gtttttcatgaggacgatccgtcag

SEQ ID NO: 3334300 - DNA, 25 bp, Homo sapien
tttcatgaggacgatccgtcagcat

SEQ ID NO: 3334301 - DNA, 25 bp, Homo sapien
ttttcatgaggacgatccgtcagca

SEQ ID NO: 3334302 - DNA, 25 bp, Homo sapien
aagtttttcatgaggacgatccgtc

SEQ ID NO: 3334303 - DNA, 25 bp, Homo sapien
tctactgtatgataaaaatgctaca

SEQ ID NO: 3334304 - DNA, 25 bp, Homo sapien
ctactgtatgataaaaatgctacaa

SEQ ID NO: 3334305 - DNA, 25 bp, Homo sapien
aattgttacacgtttggcatggata

SEQ ID NO: 3334306 - DNA, 25 bp, Homo sapien
tccacgtatgctgtgtgctagctgg

SEQ ID NO: 3334307 - DNA, 25 bp, Homo sapien
ggtgtcttcaaaaaggccaaccaga

SEQ ID NO: 3334308 - DNA, 25 bp, Homo sapien
ttggcataattgttacacgtttggc

SEQ ID NO: 3334309 - DNA, 25 bp, Homo sapien
ctgggtgctttaccaccggtcgatt

SEQ ID NO: 3334310 - DNA, 25 bp, Homo sapien
cctgggtgctttaccaccggtcgat

SEQ ID NO: 3334311 - DNA, 25 bp, Homo sapien
cgggcagtctgctttgtacgagcca

SEQ ID NO: 3334312 - DNA, 25 bp, Homo sapien
caccggtcgatttgcgggcagtctg

SEQ ID NO: 3334313 - DNA, 25 bp, Homo sapien
ccttcggctggagctcggcgagcga

SEQ ID NO: 3334314 - DNA, 25 bp, Homo sapien
cttctccttcggctggagctcggcg

SEQ ID NO: 3334315 - DNA, 25 bp, Homo sapien
ggctggagctcggcgagcgagaggc

SEQ ID NO: 3334316 - DNA, 25 bp, Homo sapien
gctggagctcggcgagcgagaggcg

SEQ ID NO: 3334317 - DNA, 25 bp, Homo sapien
agacctcaatctatgacacatatta

SEQ ID NO: 3334318 - DNA, 25 bp, Homo sapien
gacacatattaagccattcaatttt

SEQ ID NO: 3334319 - DNA, 25 bp, Homo sapien
caatctatgacacatattaagccat

SEQ ID NO: 3334320 - DNA, 25 bp, Homo sapien
tcttgcaatggtggtcaaccacagc

SEQ ID NO: 3334321 - DNA, 25 bp, Homo sapien
taagattggagctccagtgaggatc

SEQ ID NO: 3334322 - DNA, 25 bp, Homo sapien
cactatgttccatgcaaagttgact

SEQ ID NO: 3334323 - DNA, 25 bp, Homo sapien
caaaggctgggaatgattgatctct

SEQ ID NO: 3334324 - DNA, 25 bp, Homo sapien
cacatccttcagagtgcggcagtaa

SEQ ID NO: 3334325 - DNA, 25 bp, Homo sapien
tagttggtcccagtactgagcattt

SEQ ID NO: 3334326 - DNA, 25 bp, Homo sapien
ccgggtacgcggagagcaagtcaaa

SEQ ID NO: 3334327 - DNA, 25 bp, Homo sapien
gatgtcatctgaagtgcaataccac

SEQ ID NO: 3334328 - DNA, 25 bp, Homo sapien
tagtagacccagtgatatctgcagt

SEQ ID NO: 3334329 - DNA, 25 bp, Homo sapien
tgtggctcacaaaaaaccgactccc

SEQ ID NO: 3334330 - DNA, 25 bp, Homo sapien
gatttttagagcatcactcccagga

SEQ ID NO: 3334331 - DNA, 25 bp, Homo sapien
cctgcggccgccagaagtagatgtg

SEQ ID NO: 3334332 - DNA, 25 bp, Homo sapien
ggatttcgcccaaagggagcctgaa

SEQ ID NO: 3334333 - DNA, 25 bp, Homo sapien
tatgggttttgtattgggcgccagc

SEQ ID NO: 3334334 - DNA, 25 bp, Homo sapien
caggactgccggatggaccctgctc

SEQ ID NO: 3334335 - DNA, 25 bp, Homo sapien
tctccttgtgacagcagagcctttg

SEQ ID NO: 3334336 - DNA, 25 bp, Homo sapien
ggcaccagcagagggaagccgtccc

SEQ ID NO: 3334337 - DNA, 25 bp, Homo sapien
aaattcagtagcatgtctcaaagcc

SEQ ID NO: 3334338 - DNA, 25 bp, Homo sapien
cagttttgctcagtttacgtgggtc

SEQ ID NO: 3334339 - DNA, 25 bp, Homo sapien
gggtaatagtccctctcggctgaag

SEQ ID NO: 3334340 - DNA, 25 bp, Homo sapien
tcctgtaggatctgtggttgtctcc

SEQ ID NO: 3334341 - DNA, 25 bp, Homo sapien
cctggcccgcctttgatgatggagt

SEQ ID NO: 3334342 - DNA, 25 bp, Homo sapien
cttgaagagggtagctggcgccatt

SEQ ID NO: 3334343 - DNA, 25 bp, Homo sapien
gggcattccgctcataggcttggct

SEQ ID NO: 3334344 - DNA, 25 bp, Homo sapien
tgacgttcgcatgctctggagggct

SEQ ID NO: 3334345 - DNA, 25 bp, Homo sapien
gccaagggaatggaaatgtcgccag

SEQ ID NO: 3334346 - DNA, 25 bp, Homo sapien
ttctatgtccctgctaatgattgag

SEQ ID NO: 3334347 - DNA, 25 bp, Homo sapien
tcgccagtagaacaccagtcaacgt

SEQ ID NO: 3334348 - DNA, 25 bp, Homo sapien
cagtcaacgttgcaaaggtctagga

SEQ ID NO: 3334349 - DNA, 25 bp, Homo sapien
aaggtataaaatgagagaggttgca

SEQ ID NO: 3334350 - DNA, 25 bp, Homo sapien
actgggtatggattccgctgtggct

SEQ ID NO: 3334351 - DNA, 25 bp, Homo sapien
gccggggtagatgtgattgctgcaa

SEQ ID NO: 3334352 - DNA, 25 bp, Homo sapien
ctgcactgggtatggattccgctgt

SEQ ID NO: 3334353 - DNA, 25 bp, Homo sapien
ctgctgcactgggtatggattccgc

SEQ ID NO: 3334354 - DNA, 25 bp, Homo sapien
tttggtcacagcacacatatcaaaa

SEQ ID NO: 3334355 - DNA, 25 bp, Homo sapien
tttgtgtctttggtcacagcacaca

SEQ ID NO: 3334356 - DNA, 25 bp, Homo sapien
gcttgccctgggccttctttgtgtc

SEQ ID NO: 3334357 - DNA, 25 bp, Homo sapien
cgtgtgggaacacccttgggctgca

SEQ ID NO: 3334358 - DNA, 25 bp, Homo sapien
tttgtttgtacaatagctgccaggc

SEQ ID NO: 3334359 - DNA, 25 bp, Homo sapien
tttgtacaatagctgccaggcggct

SEQ ID NO: 3334360 - DNA, 25 bp, Homo sapien
tgtttgtacaatagctgccaggcgg

SEQ ID NO: 3334361 - DNA, 25 bp, Homo sapien
gaggtttgtttgtacaatagctgcc

SEQ ID NO: 3334362 - DNA, 25 bp, Homo sapien
tgctgctgcctttgctcccgcagga

SEQ ID NO: 3334363 - DNA, 25 bp, Homo sapien
ctgctgcctttgctcccgcaggaac

SEQ ID NO: 3334364 - DNA, 25 bp, Homo sapien
gctgctgctgcctttgctcccgcag

SEQ ID NO: 3334365 - DNA, 25 bp, Homo sapien
tgctgctgctgcctttgctcccgca

SEQ ID NO: 3334366 - DNA, 25 bp, Homo sapien
actgggcccgctgatcaatgagcat

SEQ ID NO: 3334367 - DNA, 25 bp, Homo sapien
cgctgatcaatgagcatctgcttca

SEQ ID NO: 3334368 - DNA, 25 bp, Homo sapien
tgctctatcaactgggcccgctgat

SEQ ID NO: 3334369 - DNA, 25 bp, Homo sapien
tggctcctgagaccatgccacctga

SEQ ID NO: 3334370 - DNA, 25 bp, Homo sapien
tccttccagtgaaataaagctgttt

SEQ ID NO: 3334371 - DNA, 25 bp, Homo sapien
ttttccaagcccttccttccagtga

SEQ ID NO: 3334372 - DNA, 25 bp, Homo sapien
cccttccttccagtgaaataaagct

SEQ ID NO: 3334373 - DNA, 25 bp, Homo sapien
cttccagtgaaataaagctgtttct

SEQ ID NO: 3334374 - DNA, 25 bp, Homo sapien
ttcgcacggcgtgatggacatcaca

SEQ ID NO: 3334375 - DNA, 25 bp, Homo sapien
tcctccgactgacactgaactggtt

SEQ ID NO: 3334376 - DNA, 25 bp, Homo sapien
caggaattccctggtgactcgaggc

SEQ ID NO: 3334377 - DNA, 25 bp, Homo sapien
tgagagcacaataccgagcagatgg

SEQ ID NO: 3334378 - DNA, 25 bp, Homo sapien
gaagaattcaagtgggggagggcgc

SEQ ID NO: 3334379 - DNA, 25 bp, Homo sapien
ttcttccagccggaggggaggaaga

SEQ ID NO: 3334380 - DNA, 25 bp, Homo sapien
gagtggggtaggggggcagtggcga

SEQ ID NO: 3334381 - DNA, 25 bp, Homo sapien
cggaggggaggaagaattcaagtgg

SEQ ID NO: 3334382 - DNA, 25 bp, Homo sapien
gaactcaactgactaattggctggg

SEQ ID NO: 3334383 - DNA, 25 bp, Homo sapien
gctgggatgaattctagcctaaacc

SEQ ID NO: 3334384 - DNA, 25 bp, Homo sapien
gactatgagtcttcccagtatccag

SEQ ID NO: 3334385 - DNA, 25 bp, Homo sapien
tataatggacagcttctccgagctc

SEQ ID NO: 3334386 - DNA, 25 bp, Homo sapien
aactcgagaggtgggtgaaaactgc

SEQ ID NO: 3334387 - DNA, 25 bp, Homo sapien
acacatggactgaaagtggtttgtc

SEQ ID NO: 3334388 - DNA, 25 bp, Homo sapien
tctccgtggaaagaagacctgagtc

SEQ ID NO: 3334389 - DNA, 25 bp, Homo sapien
agcctctgccggcatgcaagtggcc

SEQ ID NO: 3334390 - DNA, 25 bp, Homo sapien
aactgatgcataggcctatcttgtg

SEQ ID NO: 3334391 - DNA, 25 bp, Homo sapien
caccaccacgctgccaaatggagct

SEQ ID NO: 3334392 - DNA, 25 bp, Homo sapien
cctatcttgtgttatactgggagac

SEQ ID NO: 3334393 - DNA, 25 bp, Homo sapien
aaagcaaagattgcataactgatgc

SEQ ID NO: 3334394 - DNA, 25 bp, Homo sapien
ccatttctctgatagacaccgtttc

SEQ ID NO: 3334395 - DNA, 25 bp, Homo sapien
tagacaccgtttcttgtactttggc

SEQ ID NO: 3334396 - DNA, 25 bp, Homo sapien
ctgagaaagcttcccggacactagg

SEQ ID NO: 3334397 - DNA, 25 bp, Homo sapien
ccggacactagggatcctgtttctg

SEQ ID NO: 3334398 - DNA, 25 bp, Homo sapien
taactgctgttatgggtattgatac

SEQ ID NO: 3334399 - DNA, 25 bp, Homo sapien
tataaccttgagtctaaaactacca

SEQ ID NO: 3334400 - DNA, 25 bp, Homo sapien
gcagatcttttatgctccttcccta

SEQ ID NO: 3334401 - DNA, 25 bp, Homo sapien
gtaggagaactattataagcaggcc

SEQ ID NO: 3334402 - DNA, 25 bp, Homo sapien
tttataacatgtagtcatctaagct

SEQ ID NO: 3334403 - DNA, 25 bp, Homo sapien
gaatgcctgagtgccacaaacacca

SEQ ID NO: 3334404 - DNA, 25 bp, Homo sapien
tgttctccttaatcagcacgctgac

SEQ ID NO: 3334405 - DNA, 25 bp, Homo sapien
cctcttcggcgtggcgaatgcctga

SEQ ID NO: 3334406 - DNA, 25 bp, Homo sapien
gctggccggcaccaattcttatgaa

SEQ ID NO: 3334407 - DNA, 25 bp, Homo sapien
taagccggaatagcacctgtagact

SEQ ID NO: 3334408 - DNA, 25 bp, Homo sapien
ttcttatgaatgacagccggtttgc

SEQ ID NO: 3334409 - DNA, 25 bp, Homo sapien
gcaaggccccgtgtatcagagtgaa

SEQ ID NO: 3334410 - DNA, 25 bp, Homo sapien
gaaacgcactgggaatgacattaga

SEQ ID NO: 3334411 - DNA, 25 bp, Homo sapien
gaaaactgtgccagcgcagcatggt

SEQ ID NO: 3334412 - DNA, 25 bp, Homo sapien
cactgcctcggcaatgtggatttaa

SEQ ID NO: 3334413 - DNA, 25 bp, Homo sapien
gaagaaactacaacaggccaggaag

SEQ ID NO: 3334414 - DNA, 25 bp, Homo sapien
aatgtctgacagtttggcacccgtg

SEQ ID NO: 3334415 - DNA, 25 bp, Homo sapien
tttaggctcctaccagcatggacag

SEQ ID NO: 3334416 - DNA, 25 bp, Homo sapien
gagctctagtatcacacccaggaag

SEQ ID NO: 3334417 - DNA, 25 bp, Homo sapien
tccaagctatgagagaatcagggcg

SEQ ID NO: 3334418 - DNA, 25 bp, Homo sapien
gaacctctcttgatgagaatctaca

SEQ ID NO: 3334419 - DNA, 25 bp, Homo sapien
gacctctgggcatcgtggcacctga

SEQ ID NO: 3334420 - DNA, 25 bp, Homo sapien
gcacctgaacctctcttgatgagaa

SEQ ID NO: 3334421 - DNA, 25 bp, Homo sapien
accaagtgatatccctgtttccaaa

SEQ ID NO: 3334422 - DNA, 25 bp, Homo sapien
gtggcagggaactcctgcttcctac

SEQ ID NO: 3334423 - DNA, 25 bp, Homo sapien
cttgccccaggtcccggcctgactc

SEQ ID NO: 3334424 - DNA, 25 bp, Homo sapien
caccctgcccttgccccaggtcccg

SEQ ID NO: 3334425 - DNA, 25 bp, Homo sapien
cccaggtcccggcctgactcctcac

SEQ ID NO: 3334426 - DNA, 25 bp, Homo sapien
cctccacatccaccctgcccttgcc

SEQ ID NO: 3334427 - DNA, 25 bp, Homo sapien
acaggtgtatactaccatgtctcag

SEQ ID NO: 3334428 - DNA, 25 bp, Homo sapien
tatactaccatgtctcagctagttt

SEQ ID NO: 3334429 - DNA, 25 bp, Homo sapien
ggtgtatactaccatgtctcagcta

SEQ ID NO: 3334430 - DNA, 25 bp, Homo sapien
cacaggtgtatactaccatgtctca

SEQ ID NO: 3334431 - DNA, 25 bp, Homo sapien
ttatcagggtcagagaattttaggg

SEQ ID NO: 3334432 - DNA, 25 bp, Homo sapien
tcacagggctgtgcacttttgaagt

SEQ ID NO: 3334433 - DNA, 25 bp, Homo sapien
gcatcatccttatcagggtcagaga

SEQ ID NO: 3334434 - DNA, 25 bp, Homo sapien
gaagtgaagtgagggccttgcctcc

SEQ ID NO: 3334435 - DNA, 25 bp, Homo sapien
gagcttgacaataaccaggcttgac

SEQ ID NO: 3334436 - DNA, 25 bp, Homo sapien
caataaccaggcttgactatggagg

SEQ ID NO: 3334437 - DNA, 25 bp, Homo sapien
tggcaaattgagcttgacaataacc

SEQ ID NO: 3334438 - DNA, 25 bp, Homo sapien
aggcttgactatggaggccctttct

SEQ ID NO: 3334439 - DNA, 25 bp, Homo sapien
ctggcatggtgaaactaatattaac

SEQ ID NO: 3334440 - DNA, 25 bp, Homo sapien
agcttggactataggagctcactac

SEQ ID NO: 3334441 - DNA, 25 bp, Homo sapien
tggactataggagctcactaccatg

SEQ ID NO: 3334442 - DNA, 25 bp, Homo sapien
ctgactttttgatcaagctggcatg

SEQ ID NO: 3334443 - DNA, 25 bp, Homo sapien
tattccggtgttcctgtgacgtcct

SEQ ID NO: 3334444 - DNA, 25 bp, Homo sapien
gagtcaggtcctaattgttgtcaag

SEQ ID NO: 3334445 - DNA, 25 bp, Homo sapien
tcaagcgttcagagacaaaagtggt

SEQ ID NO: 3334446 - DNA, 25 bp, Homo sapien
taaatgctacctcgaggacacagtc

SEQ ID NO: 3334447 - DNA, 25 bp, Homo sapien
ttatgttgtgtgacagcccgggctg

SEQ ID NO: 3334448 - DNA, 25 bp, Homo sapien
catgcagattgactcctcggaggct

SEQ ID NO: 3334449 - DNA, 25 bp, Homo sapien
gctgaacaccattttaacatgcaga

SEQ ID NO: 3334450 - DNA, 25 bp, Homo sapien
cagcccgggctgctgaacaccattt

SEQ ID NO: 3334451 - DNA, 25 bp, Homo sapien
gacaggtggacatggtaattacgga

SEQ ID NO: 3334452 - DNA, 25 bp, Homo sapien
gagtacttgctaagactcaggcact

SEQ ID NO: 3334453 - DNA, 25 bp, Homo sapien
cagatgcatgttggaggctagagaa

SEQ ID NO: 3334454 - DNA, 25 bp, Homo sapien
tacggaggctccatctgttagtggt

SEQ ID NO: 3334455 - DNA, 25 bp, Homo sapien
gggaggcagacatctagtcagctga

SEQ ID NO: 3334456 - DNA, 25 bp, Homo sapien
gattcgatcagtaaaatcaacccag

SEQ ID NO: 3334457 - DNA, 25 bp, Homo sapien
cagtaaaatcaacccaggccatcag

SEQ ID NO: 3334458 - DNA, 25 bp, Homo sapien
ggccacatgtgggaaggtgaggagg

SEQ ID NO: 3334459 - DNA, 25 bp, Homo sapien
ggagatgtaaaacccttctggagga

SEQ ID NO: 3334460 - DNA, 25 bp, Homo sapien
taattgagggcatttgggtagcacg

SEQ ID NO: 3334461 - DNA, 25 bp, Homo sapien
tgaccccacttgcaacatgcggtag

SEQ ID NO: 3334462 - DNA, 25 bp, Homo sapien
gaatgtttgaggcaccacggttctt

SEQ ID NO: 3334463 - DNA, 25 bp, Homo sapien
ctatccataatcctagacagagcta

SEQ ID NO: 3334464 - DNA, 25 bp, Homo sapien
caaaaacagttgaatatcaccatct

SEQ ID NO: 3334465 - DNA, 25 bp, Homo sapien
gagccttggtgccaagtacttggaa

SEQ ID NO: 3334466 - DNA, 25 bp, Homo sapien
tctttaaatggtcgaactcaaccca

SEQ ID NO: 3334467 - DNA, 25 bp, Homo sapien
tgtacacgcaagataaaacaatcag

SEQ ID NO: 3334468 - DNA, 25 bp, Homo sapien
tttagcaacgaaggaggcctccgtc

SEQ ID NO: 3334469 - DNA, 25 bp, Homo sapien
tcagactttagcaacgaaggaggcc

SEQ ID NO: 3334470 - DNA, 25 bp, Homo sapien
tcagaaaggcctccgatttgttttc

SEQ ID NO: 3334471 - DNA, 25 bp, Homo sapien
tatccagatttgtggctcttccaac

SEQ ID NO: 3334472 - DNA, 25 bp, Homo sapien
cccctccaatatccagatttgtggc

SEQ ID NO: 3334473 - DNA, 25 bp, Homo sapien
taacaggaagtggtgaaccctccat

SEQ ID NO: 3334474 - DNA, 25 bp, Homo sapien
ggctcttccaacatgcttaataaca

SEQ ID NO: 3334475 - DNA, 25 bp, Homo sapien
tagctggcactataggcacaccacc

SEQ ID NO: 3334476 - DNA, 25 bp, Homo sapien
gcagtggccccatcatagctcgctg

SEQ ID NO: 3334477 - DNA, 25 bp, Homo sapien
tttttttagagtcagggtctagcta

SEQ ID NO: 3334478 - DNA, 25 bp, Homo sapien
tttttagagtcagggtctagctatg

SEQ ID NO: 3334479 - DNA, 25 bp, Homo sapien
aagcccaacatgcagctagctacag

SEQ ID NO: 3334480 - DNA, 25 bp, Homo sapien
caggatcaaggtgaagcaaaggctc

SEQ ID NO: 3334481 - DNA, 25 bp, Homo sapien
gagagaagattcacccttctgatga

SEQ ID NO: 3334482 - DNA, 25 bp, Homo sapien
cacacagaatgatgatttcaccaaa

SEQ ID NO: 3334483 - DNA, 25 bp, Homo sapien
ttacataatgtggacaatagtgccc

SEQ ID NO: 3334484 - DNA, 25 bp, Homo sapien
ggaagctggcctaggcttcctggcc

SEQ ID NO: 3334485 - DNA, 25 bp, Homo sapien
gaattgtaggcatccaagaactact

SEQ ID NO: 3334486 - DNA, 25 bp, Homo sapien
ccaagttcaaaatctgactgtggca

SEQ ID NO: 3334487 - DNA, 25 bp, Homo sapien
tgaattacggtctttactcacaaaa

SEQ ID NO: 3334488 - DNA, 25 bp, Homo sapien
gcctctcccattgtcatggtcctga

SEQ ID NO: 3334489 - DNA, 25 bp, Homo sapien
gacatagggctaagaataggtgatt

SEQ ID NO: 3334490 - DNA, 25 bp, Homo sapien
cattgacttcaagggttggttagga

SEQ ID NO: 3334491 - DNA, 25 bp, Homo sapien
gaaggaagcacggaaggaagtggga

SEQ ID NO: 3334492 - DNA, 25 bp, Homo sapien
tccctcaaatgtgcaggaagcttga

SEQ ID NO: 3334493 - DNA, 25 bp, Homo sapien
gggattgacccaacaacaggaattg

SEQ ID NO: 3334494 - DNA, 25 bp, Homo sapien
tataaaaagtgaagcaccgtccacc

SEQ ID NO: 3334495 - DNA, 25 bp, Homo sapien
gaggtccatacgagcacataatctg

SEQ ID NO: 3334496 - DNA, 25 bp, Homo sapien
ctaggcagtttagtggcggtagcac

SEQ ID NO: 3334497 - DNA, 25 bp, Homo sapien
tattctgtggatcacaactgtgggc

SEQ ID NO: 3334498 - DNA, 25 bp, Homo sapien
aactgtgggcctgaaagatctggca

SEQ ID NO: 3334499 - DNA, 25 bp, Homo sapien
cggtagcacgtagactgggccactt

SEQ ID NO: 3334500 - DNA, 25 bp, Homo sapien
tatgcagcgtgtgtgtacacccagc

SEQ ID NO: 3334501 - DNA, 25 bp, Homo sapien
taatgaggcctgtacgccatgactg

SEQ ID NO: 3334502 - DNA, 25 bp, Homo sapien
tcaagggatggaaaccgtgcatttt

SEQ ID NO: 3334503 - DNA, 25 bp, Homo sapien
caacttagggagcagatatgcagcg

SEQ ID NO: 3334504 - DNA, 25 bp, Homo sapien
ccagcagtggggattactatccaaa

SEQ ID NO: 3334505 - DNA, 25 bp, Homo sapien
gattactatccaaaagcaactctcc

SEQ ID NO: 3334506 - DNA, 25 bp, Homo sapien
agagagacaaggagatagtggatat

SEQ ID NO: 3334507 - DNA, 25 bp, Homo sapien
ccagcagtaagccctcagaagagca

SEQ ID NO: 3334508 - DNA, 25 bp, Homo sapien
aaaatgagcatcctatcgctggtcc

SEQ ID NO: 3334509 - DNA, 25 bp, Homo sapien
cacctgggctagagacaaccgatgt

SEQ ID NO: 3334510 - DNA, 25 bp, Homo sapien
tttacaagcgctgtgcacttagcag

SEQ ID NO: 3334511 - DNA, 25 bp, Homo sapien
tacatgtgtccacggtgagcagcgc

SEQ ID NO: 3334512 - DNA, 25 bp, Homo sapien
ctttcagagcccacacggagtacag

SEQ ID NO: 3334513 - DNA, 25 bp, Homo sapien
cactgtgacctgatattgggttgaa

SEQ ID NO: 3334514 - DNA, 25 bp, Homo sapien
ggaaggttgttttattcatgcgaac

SEQ ID NO: 3334515 - DNA, 25 bp, Homo sapien
gaggatgccaaacaaggagtttaaa

SEQ ID NO: 3334516 - DNA, 25 bp, Homo sapien
ccgctcagttcatagggaggtatca

SEQ ID NO: 3334517 - DNA, 25 bp, Homo sapien
tagcctagaccccagtttgtccaga

SEQ ID NO: 3334518 - DNA, 25 bp, Homo sapien
ggagtcctgcaagagtcacacggaa

SEQ ID NO: 3334519 - DNA, 25 bp, Homo sapien
cctcaaacacttgggaccgctcagt

SEQ ID NO: 3334520 - DNA, 25 bp, Homo sapien
tattttagggatctccaatctcatc

SEQ ID NO: 3334521 - DNA, 25 bp, Homo sapien
gtttgatctggacaggagactattt

SEQ ID NO: 3334522 - DNA, 25 bp, Homo sapien
caggagactattttagggatctcca

SEQ ID NO: 3334523 - DNA, 25 bp, Homo sapien
tgtttgatctggacaggagactatt

SEQ ID NO: 3334524 - DNA, 25 bp, Homo sapien
cattagtggctgatcagttgcaaca

SEQ ID NO: 3334525 - DNA, 25 bp, Homo sapien
ttttccattctgacaaggagcttca

SEQ ID NO: 3334526 - DNA, 25 bp, Homo sapien
tcaattgacaaaagaagcccccaat

SEQ ID NO: 3334527 - DNA, 25 bp, Homo sapien
gaccctggggtgtgcaatcttatct

SEQ ID NO: 3334528 - DNA, 25 bp, Homo sapien
atgattgttgagagtaaagcttttg

SEQ ID NO: 3334529 - DNA, 25 bp, Homo sapien
gacagaaagaggattatttgcaaga

SEQ ID NO: 3334530 - DNA, 25 bp, Homo sapien
ttctttgcttccaaaatgattgttg

SEQ ID NO: 3334531 - DNA, 25 bp, Homo sapien
tctaccaaaatgtaagatatggttg

SEQ ID NO: 3334532 - DNA, 25 bp, Homo sapien
tccaggaacgtcacatttgccaaaa

SEQ ID NO: 3334533 - DNA, 25 bp, Homo sapien
tagactgttagtaatccattccagg

SEQ ID NO: 3334534 - DNA, 25 bp, Homo sapien
actttctatgtttctagactgttag

SEQ ID NO: 3334535 - DNA, 25 bp, Homo sapien
gtttttaattgcatggtactttcta

SEQ ID NO: 3334536 - DNA, 25 bp, Homo sapien
gaggaatatagcctcacaggtcatt

SEQ ID NO: 3334537 - DNA, 25 bp, Homo sapien
ctggcatgtagaagtgttcaagaaa

SEQ ID NO: 3334538 - DNA, 25 bp, Homo sapien
ttttattacctatacagcttcctca

SEQ ID NO: 3334539 - DNA, 25 bp, Homo sapien
tcagttgttttattacctatacagc

SEQ ID NO: 3334540 - DNA, 25 bp, Homo sapien
tctcttatttaataggcacaacaat

SEQ ID NO: 3334541 - DNA, 25 bp, Homo sapien
taccattgtgataaagaacactgaa

SEQ ID NO: 3334542 - DNA, 25 bp, Homo sapien
gctaggaactgtgttacttgattta

SEQ ID NO: 3334543 - DNA, 25 bp, Homo sapien
tatgtagaataccttgtatacttca

SEQ ID NO: 3334544 - DNA, 25 bp, Homo sapien
ggtcggagtcgcttccatgcggatc

SEQ ID NO: 3334545 - DNA, 25 bp, Homo sapien
tagggaaaccgtctgtacgagagca

SEQ ID NO: 3334546 - DNA, 25 bp, Homo sapien
caggaggattttcatttatcaggaa

SEQ ID NO: 3334547 - DNA, 25 bp, Homo sapien
gacgtgctgccgtttctattggaga

SEQ ID NO: 3334548 - DNA, 25 bp, Homo sapien
ctgcaagagcagacaagtttcccca

SEQ ID NO: 3334549 - DNA, 25 bp, Homo sapien
tgatgtgacaaatacaggaccaaag

SEQ ID NO: 3334550 - DNA, 25 bp, Homo sapien
cattagtgggcacatcttcaggtcc

SEQ ID NO: 3334551 - DNA, 25 bp, Homo sapien
tgcaggaagatacagactctgggcc

SEQ ID NO: 3334552 - DNA, 25 bp, Homo sapien
ccacaaatgttagggagggacacgc

SEQ ID NO: 3334553 - DNA, 25 bp, Homo sapien
tatttgcggcagtaaccacagacag

SEQ ID NO: 3334554 - DNA, 25 bp, Homo sapien
gaggtatggccaggaatgtcccaca

SEQ ID NO: 3334555 - DNA, 25 bp, Homo sapien
tagaccattctttggatacccggag

SEQ ID NO: 3334556 - DNA, 25 bp, Homo sapien
gaggctcacaataatgggaacacag

SEQ ID NO: 3334557 - DNA, 25 bp, Homo sapien
gatgactaagtggacagcatagggc

SEQ ID NO: 3334558 - DNA, 25 bp, Homo sapien
gcatagggcatagagagctttggcc

SEQ ID NO: 3334559 - DNA, 25 bp, Homo sapien
tgcctttccgggtgagaacttcaga

SEQ ID NO: 3334560 - DNA, 25 bp, Homo sapien
tatgcacaatgcctagacaccacag

SEQ ID NO: 3334561 - DNA, 25 bp, Homo sapien
gaagaaacttacactctcctagagg

SEQ ID NO: 3334562 - DNA, 25 bp, Homo sapien
ggaggaacaatcttgtcagagccaa

SEQ ID NO: 3334563 - DNA, 25 bp, Homo sapien
aacaatgagggtactgtaaggcctc

SEQ ID NO: 3334564 - DNA, 25 bp, Homo sapien
cataattaatgaggctcatcaaaac

SEQ ID NO: 3334565 - DNA, 25 bp, Homo sapien
ccagctgcacacctttctttctcaa

SEQ ID NO: 3334566 - DNA, 25 bp, Homo sapien
tctttctcaacataattaatgaggc

SEQ ID NO: 3334567 - DNA, 25 bp, Homo sapien
ctcaacataattaatgaggctcatc

SEQ ID NO: 3334568 - DNA, 25 bp, Homo sapien
cagggtgtcatgaataagggcgttc

SEQ ID NO: 3334569 - DNA, 25 bp, Homo sapien
tgtcatgaataagggcgttcctttc

SEQ ID NO: 3334570 - DNA, 25 bp, Homo sapien
ctacagggtgtcatgaataagggcg

SEQ ID NO: 3334571 - DNA, 25 bp, Homo sapien
atgaataagggcgttcctttcccag

SEQ ID NO: 3334572 - DNA, 25 bp, Homo sapien
gggtgtagcagaatgcaccttgaaa

SEQ ID NO: 3334573 - DNA, 25 bp, Homo sapien
cttgaaaggaagggaatctaagagt

SEQ ID NO: 3334574 - DNA, 25 bp, Homo sapien
ggcctagggtgtagcagaatgcacc

SEQ ID NO: 3334575 - DNA, 25 bp, Homo sapien
gtagcagaatgcaccttgaaaggaa

SEQ ID NO: 3334576 - DNA, 25 bp, Homo sapien
gaaagttgcttgtctgccatccttg

SEQ ID NO: 3334577 - DNA, 25 bp, Homo sapien
atccggctgaggcaacatctccctg

SEQ ID NO: 3334578 - DNA, 25 bp, Homo sapien
aacacagggttgtggctgacctctg

SEQ ID NO: 3334579 - DNA, 25 bp, Homo sapien
ccttgatgtgattgagcatcagaac

SEQ ID NO: 3334580 - DNA, 25 bp, Homo sapien
tagaacctgtttagacatgagggcc

SEQ ID NO: 3334581 - DNA, 25 bp, Homo sapien
tgagggcctctaaagcaaagacttt

SEQ ID NO: 3334582 - DNA, 25 bp, Homo sapien
acctgtttagacatgagggcctcta

SEQ ID NO: 3334583 - DNA, 25 bp, Homo sapien
ccaagcactagttagaacctgttta

SEQ ID NO: 3334584 - DNA, 25 bp, Homo sapien
cctggccactacctgaggatgtgta

SEQ ID NO: 3334585 - DNA, 25 bp, Homo sapien
tagaacatcacacatcgacagtctg

SEQ ID NO: 3334586 - DNA, 25 bp, Homo sapien
aagaactgctcgaagagtgtgtcac

SEQ ID NO: 3334587 - DNA, 25 bp, Homo sapien
gcaattagaccccactacagtggaa

SEQ ID NO: 3334588 - DNA, 25 bp, Homo sapien
taagccatgggctgattcatcactc

SEQ ID NO: 3334589 - DNA, 25 bp, Homo sapien
tctggtcttcgctcaggtgtgccct

SEQ ID NO: 3334590 - DNA, 25 bp, Homo sapien
ttctgcttcatgagaagcaggcgtt

SEQ ID NO: 3334591 - DNA, 25 bp, Homo sapien
aagtgcagcgtaagccatgggctga

SEQ ID NO: 3334592 - DNA, 25 bp, Homo sapien
gctgctggatatacggcatcaaggg

SEQ ID NO: 3334593 - DNA, 25 bp, Homo sapien
ttggggttggccactggtggtgtca

SEQ ID NO: 3334594 - DNA, 25 bp, Homo sapien
atacggcatcaaggggtttttgttg

SEQ ID NO: 3334595 - DNA, 25 bp, Homo sapien
gctgctgctggatatacggcatcaa

SEQ ID NO: 3334596 - DNA, 25 bp, Homo sapien
cataagtcagaatattgtgctgttt

SEQ ID NO: 3334597 - DNA, 25 bp, Homo sapien
gggtcaggggtttagtgttgccata

SEQ ID NO: 3334598 - DNA, 25 bp, Homo sapien
gccataagtcagaatattgtgctgt

SEQ ID NO: 3334599 - DNA, 25 bp, Homo sapien
caggtctgcattgaagtgggtcagg

SEQ ID NO: 3334600 - DNA, 25 bp, Homo sapien
acatcattgggctatttggtttttc

SEQ ID NO: 3334601 - DNA, 25 bp, Homo sapien
tgttaaaggcttgggggtacatcat

SEQ ID NO: 3334602 - DNA, 25 bp, Homo sapien
ccattggaggcactatagggttttg

SEQ ID NO: 3334603 - DNA, 25 bp, Homo sapien
tctgcaggttgtttgccattggagg

SEQ ID NO: 3334604 - DNA, 25 bp, Homo sapien
gctgttctgctggagacatgtcaga

SEQ ID NO: 3334605 - DNA, 25 bp, Homo sapien
taagggagaccaatttgaagtctga

SEQ ID NO: 3334606 - DNA, 25 bp, Homo sapien
agtctgatttgagtgctgttgctgc

SEQ ID NO: 3334607 - DNA, 25 bp, Homo sapien
ttctgctggagacatgtcagagctg

SEQ ID NO: 3334608 - DNA, 25 bp, Homo sapien
tgctgccggattcaggagataacca

SEQ ID NO: 3334609 - DNA, 25 bp, Homo sapien
gataaccatttccaggccgaggtgg

SEQ ID NO: 3334610 - DNA, 25 bp, Homo sapien
caaagtcttcgttgaacaggtcctg

SEQ ID NO: 3334611 - DNA, 25 bp, Homo sapien
tcatcctcaggaaccgtgttggcca

SEQ ID NO: 3334612 - DNA, 25 bp, Homo sapien
caggtcactgcaaccgttgacagga

SEQ ID NO: 3334613 - DNA, 25 bp, Homo sapien
tgcaagtagggtcatcgagaggttc

SEQ ID NO: 3334614 - DNA, 25 bp, Homo sapien
acaggaagtttaatctcagggagcc

SEQ ID NO: 3334615 - DNA, 25 bp, Homo sapien
caagatggtgaagctatcctccagg

SEQ ID NO: 3334616 - DNA, 25 bp, Homo sapien
tctgctggtctccattaagtggtga

SEQ ID NO: 3334617 - DNA, 25 bp, Homo sapien
taagtggtgatcgagctccttccaa

SEQ ID NO: 3334618 - DNA, 25 bp, Homo sapien
gatcttctagaagcccaggagtgtg

SEQ ID NO: 3334619 - DNA, 25 bp, Homo sapien
tcgaattcgtttgctagtcggagaa

SEQ ID NO: 3334620 - DNA, 25 bp, Homo sapien
tggagcctccgagtgttccctttcc

SEQ ID NO: 3334621 - DNA, 25 bp, Homo sapien
ctgattggagcctccgagtgttccc

SEQ ID NO: 3334622 - DNA, 25 bp, Homo sapien
tccagggcctaaagttctccactgc

SEQ ID NO: 3334623 - DNA, 25 bp, Homo sapien
ctccagggcctaaagttctccactg

SEQ ID NO: 3334624 - DNA, 25 bp, Homo sapien
tcctagcagattcttgaggtgttcc

SEQ ID NO: 3334625 - DNA, 25 bp, Homo sapien
gggcccccaatcctagcagattctt

SEQ ID NO: 3334626 - DNA, 25 bp, Homo sapien
aggtgttccatgggccagagtgtcc

SEQ ID NO: 3334627 - DNA, 25 bp, Homo sapien
gattcttgaggtgttccatgggcca

SEQ ID NO: 3334628 - DNA, 25 bp, Homo sapien
agtcctgaaagtccaatgagcagtg

SEQ ID NO: 3334629 - DNA, 25 bp, Homo sapien
aaaccttccgatccaatgttttcat

SEQ ID NO: 3334630 - DNA, 25 bp, Homo sapien
cttattacagaatctttacggctaa

SEQ ID NO: 3334631 - DNA, 25 bp, Homo sapien
tacggctaataaccttctggacggc

SEQ ID NO: 3334632 - DNA, 25 bp, Homo sapien
tctggacggcaatgtagcagtctac

SEQ ID NO: 3334633 - DNA, 25 bp, Homo sapien
ggcaatgtagcagtctacgtccagt

SEQ ID NO: 3334634 - DNA, 25 bp, Homo sapien
tgtgtggggtcatggtaatggctaa

SEQ ID NO: 3334635 - DNA, 25 bp, Homo sapien
tgtggggtcatggtaatggctaatc

SEQ ID NO: 3334636 - DNA, 25 bp, Homo sapien
gggtcatggtaatggctaatcctac

SEQ ID NO: 3334637 - DNA, 25 bp, Homo sapien
tggggtcatggtaatggctaatcct

SEQ ID NO: 3334638 - DNA, 25 bp, Homo sapien
gatatcactactgaagcgccgatat

SEQ ID NO: 3334639 - DNA, 25 bp, Homo sapien
tcctgctcgtaagcatgtatgctgt

SEQ ID NO: 3334640 - DNA, 25 bp, Homo sapien
caggaaaccaatcctgctcgtaagc

SEQ ID NO: 3334641 - DNA, 25 bp, Homo sapien
agcgccgatataaggacacatttcc

SEQ ID NO: 3334642 - DNA, 25 bp, Homo sapien
tgatatcctacttgcacacagatgt

SEQ ID NO: 3334643 - DNA, 25 bp, Homo sapien
tggagtcaggtatactaaagtgtac

SEQ ID NO: 3334644 - DNA, 25 bp, Homo sapien
tattgaataacaagccagaggttcc

SEQ ID NO: 3334645 - DNA, 25 bp, Homo sapien
tccccttaggaaactagcatcttat

SEQ ID NO: 3334646 - DNA, 25 bp, Homo sapien
tctccatagagaagtattgccttcc

SEQ ID NO: 3334647 - DNA, 25 bp, Homo sapien
agttgttacttctccatagagaagt

SEQ ID NO: 3334648 - DNA, 25 bp, Homo sapien
tgccttccaggccataacaattcct

SEQ ID NO: 3334649 - DNA, 25 bp, Homo sapien
gaagtattgccttccaggccataac

SEQ ID NO: 3334650 - DNA, 25 bp, Homo sapien
tatgctgagactacgcaaattccgt

SEQ ID NO: 3334651 - DNA, 25 bp, Homo sapien
taactatggacttctggctattacg

SEQ ID NO: 3334652 - DNA, 25 bp, Homo sapien
tgtgggtgaaaatccaatgctatca

SEQ ID NO: 3334653 - DNA, 25 bp, Homo sapien
ggctattacgttattctgtgggtga

SEQ ID NO: 3334654 - DNA, 25 bp, Homo sapien
gcacacttaggacacgacagggttc

SEQ ID NO: 3334655 - DNA, 25 bp, Homo sapien
gcatttcaagctcggccagtaggct

SEQ ID NO: 3334656 - DNA, 25 bp, Homo sapien
taaggttatggctcgtgtcccaagt

SEQ ID NO: 3334657 - DNA, 25 bp, Homo sapien
gaaggctccgtcattgctataggca

SEQ ID NO: 3334658 - DNA, 25 bp, Homo sapien
gatctctcgtatctccattttaagg

SEQ ID NO: 3334659 - DNA, 25 bp, Homo sapien
ctctgtatgacacagattggcttga

SEQ ID NO: 3334660 - DNA, 25 bp, Homo sapien
ggttcacctgatggacaaacaattg

SEQ ID NO: 3334661 - DNA, 25 bp, Homo sapien
cagaactagtttcacgccagccatg

SEQ ID NO: 3334662 - DNA, 25 bp, Homo sapien
gataattcaagtcaatggaggccac

SEQ ID NO: 3334663 - DNA, 25 bp, Homo sapien
taatacccatacgatgtcagcacat

SEQ ID NO: 3334664 - DNA, 25 bp, Homo sapien
caacgaacagtacgcatagtgccta

SEQ ID NO: 3334665 - DNA, 25 bp, Homo sapien
taacatatcataatagtgcctgggt

SEQ ID NO: 3334666 - DNA, 25 bp, Homo sapien
aggaatgagccaccgcgtccagccc

SEQ ID NO: 3334667 - DNA, 25 bp, Homo sapien
gaccttgtgattcgtccacctcggc

SEQ ID NO: 3334668 - DNA, 25 bp, Homo sapien
acaggaatgagccaccgcgtccagc

SEQ ID NO: 3334669 - DNA, 25 bp, Homo sapien
tggagtctcgcactatcatccaggc

SEQ ID NO: 3334670 - DNA, 25 bp, Homo sapien
tggagacagacttgagaggggtcac

SEQ ID NO: 3334671 - DNA, 25 bp, Homo sapien
aaagaacaaagagggcccacagttg

SEQ ID NO: 3334672 - DNA, 25 bp, Homo sapien
ggtgaagacagccacgattgacagg

SEQ ID NO: 3334673 - DNA, 25 bp, Homo sapien
gacagccacgattgacaggaaaaga

SEQ ID NO: 3334674 - DNA, 25 bp, Homo sapien
tcttgcagtagcagattttgtatgc

SEQ ID NO: 3334675 - DNA, 25 bp, Homo sapien
aataccacctttctgataacacgat

SEQ ID NO: 3334676 - DNA, 25 bp, Homo sapien
tggaatatgtacaatggagatcctc

SEQ ID NO: 3334677 - DNA, 25 bp, Homo sapien
cacgatctgttgattatccactata

SEQ ID NO: 3334678 - DNA, 25 bp, Homo sapien
ttcgacagcaggattccgtctcaaa

SEQ ID NO: 3334679 - DNA, 25 bp, Homo sapien
tctagaacactaaaagctaccactt

SEQ ID NO: 3334680 - DNA, 25 bp, Homo sapien
tctacactaaaaagtcaaacgtgga

SEQ ID NO: 3334681 - DNA, 25 bp, Homo sapien
ctatgcctcagtttcgacagcagga

SEQ ID NO: 3334682 - DNA, 25 bp, Homo sapien
agcagccacgctgccttcagtgttg

SEQ ID NO: 3334683 - DNA, 25 bp, Homo sapien
tgttgacagtcagcaattttgaatg

SEQ ID NO: 3334684 - DNA, 25 bp, Homo sapien
ttcttcagtagcagccacgctgcct

SEQ ID NO: 3334685 - DNA, 25 bp, Homo sapien
gccttcagtgttgacagtcagcaat

SEQ ID NO: 3334686 - DNA, 25 bp, Homo sapien
tgccatcacaacttggtccccgcat

SEQ ID NO: 3334687 - DNA, 25 bp, Homo sapien
ctaccaccttaggtccctctccttg

SEQ ID NO: 3334688 - DNA, 25 bp, Homo sapien
catcacaacttggtccccgcatttc

SEQ ID NO: 3334689 - DNA, 25 bp, Homo sapien
accaccttaggtccctctccttgca

SEQ ID NO: 3334690 - DNA, 25 bp, Homo sapien
tacgaagggctattaggctgcgtgc

SEQ ID NO: 3334691 - DNA, 25 bp, Homo sapien
tctgggtagcaagtctagtattaag

SEQ ID NO: 3334692 - DNA, 25 bp, Homo sapien
cagtagcaggaaagtttggtaagca

SEQ ID NO: 3334693 - DNA, 25 bp, Homo sapien
taatgctttataggcagactgtgag

SEQ ID NO: 3334694 - DNA, 25 bp, Homo sapien
tcctcacatgtgccaagaggaaaac

SEQ ID NO: 3334695 - DNA, 25 bp, Homo sapien
tcacatgtgccaagaggaaaacaaa

SEQ ID NO: 3334696 - DNA, 25 bp, Homo sapien
catgtgccaagaggaaaacaaaatc

SEQ ID NO: 3334697 - DNA, 25 bp, Homo sapien
tcggactgtcctcacatgtgccaag

SEQ ID NO: 3334698 - DNA, 25 bp, Homo sapien
ccttttgaatttgtatcgtaggcat

SEQ ID NO: 3334699 - DNA, 25 bp, Homo sapien
gtgcttaattccaaatgggtcccat

SEQ ID NO: 3334700 - DNA, 25 bp, Homo sapien
gaaatgctctggctgcaattttatt

SEQ ID NO: 3334701 - DNA, 25 bp, Homo sapien
cttaattccaaatgggtcccatgca

SEQ ID NO: 3334702 - DNA, 25 bp, Homo sapien
aaaaatgaaatgctctggctgcaat

SEQ ID NO: 3334703 - DNA, 25 bp, Homo sapien
ctctgctataccaagggtaggttgg

SEQ ID NO: 3334704 - DNA, 25 bp, Homo sapien
gtaggttggtaaagcttcacagaaa

SEQ ID NO: 3334705 - DNA, 25 bp, Homo sapien
atgttctgagcccaacctatggaga

SEQ ID NO: 3334706 - DNA, 25 bp, Homo sapien
ctatggagacacgttccaatttagg

SEQ ID NO: 3334707 - DNA, 25 bp, Homo sapien
taaatatcttgaggcggacttaggg

SEQ ID NO: 3334708 - DNA, 25 bp, Homo sapien
gaagtaggaaatgcttggcagcaca

SEQ ID NO: 3334709 - DNA, 25 bp, Homo sapien
cagaaggtgattaggaggacgccca

SEQ ID NO: 3334710 - DNA, 25 bp, Homo sapien
ggtcagctagagaagcaacaagcct

SEQ ID NO: 3334711 - DNA, 25 bp, Homo sapien
tgggcgtggctcattcactagtgga

SEQ ID NO: 3334712 - DNA, 25 bp, Homo sapien
tcatggccctatgagattgggagga

SEQ ID NO: 3334713 - DNA, 25 bp, Homo sapien
cagtgtgagcattccctggtccaga

SEQ ID NO: 3334714 - DNA, 25 bp, Homo sapien
ccagacttggaatggacctttctca

SEQ ID NO: 3334715 - DNA, 25 bp, Homo sapien
ttctgacgacaatttgcaaagagga

SEQ ID NO: 3334716 - DNA, 25 bp, Homo sapien
tctttcagatgaatatactacctgg

SEQ ID NO: 3334717 - DNA, 25 bp, Homo sapien
taaaatagttgccaccaaataacag

SEQ ID NO: 3334718 - DNA, 25 bp, Homo sapien
gatcaacaaccaccttagccactag

SEQ ID NO: 3334719 - DNA, 25 bp, Homo sapien
gaaatatattcaccatgggaattag

SEQ ID NO: 3334720 - DNA, 25 bp, Homo sapien
tggagggcctagaggttatgaaaac

SEQ ID NO: 3334721 - DNA, 25 bp, Homo sapien
tctcagtgttcaggcctggattaaa

SEQ ID NO: 3334722 - DNA, 25 bp, Homo sapien
acagattgaactgcaaagtggaggg

SEQ ID NO: 3334723 - DNA, 25 bp, Homo sapien
gaatcataggtgataccttcaggaa

SEQ ID NO: 3334724 - DNA, 25 bp, Homo sapien
gaaggcatagtacattaacatccag

SEQ ID NO: 3334725 - DNA, 25 bp, Homo sapien
ctcaagtacagttgagaagccatat

SEQ ID NO: 3334726 - DNA, 25 bp, Homo sapien
taaaagcaagtcctacatttctgca

SEQ ID NO: 3334727 - DNA, 25 bp, Homo sapien
gggaatcaggtcgtaagggcagagc

SEQ ID NO: 3334728 - DNA, 25 bp, Homo sapien
ttataagagttcctggtgagctgct

SEQ ID NO: 3334729 - DNA, 25 bp, Homo sapien
agttcctggtgagctgcttcggccc

SEQ ID NO: 3334730 - DNA, 25 bp, Homo sapien
aacagaggcccaggtactatggtct

SEQ ID NO: 3334731 - DNA, 25 bp, Homo sapien
gaaaaacagatgtcgattgtttctg

SEQ ID NO: 3334732 - DNA, 25 bp, Homo sapien
tgctggtcaccatagcattgggttg

SEQ ID NO: 3334733 - DNA, 25 bp, Homo sapien
ggttgttatgatgtcacttctcatc

SEQ ID NO: 3334734 - DNA, 25 bp, Homo sapien
cagatgtcgattgtttctgaatact

SEQ ID NO: 3334735 - DNA, 25 bp, Homo sapien
gatttataaactctgtccatcgaga

SEQ ID NO: 3334736 - DNA, 25 bp, Homo sapien
ctgtccatcgagagcacactccaga

SEQ ID NO: 3334737 - DNA, 25 bp, Homo sapien
agttggcagaactgccccttctcga

SEQ ID NO: 3334738 - DNA, 25 bp, Homo sapien
taaattgcaagtcgcctcagttggc

SEQ ID NO: 3334739 - DNA, 25 bp, Homo sapien
tagttgcatatagtggaagcttaag

SEQ ID NO: 3334740 - DNA, 25 bp, Homo sapien
ctttaaataggcaataaaagctata

SEQ ID NO: 3334741 - DNA, 25 bp, Homo sapien
tttctagttgcatatagtggaagct

SEQ ID NO: 3334742 - DNA, 25 bp, Homo sapien
ttgcatatagtggaagcttaagtta

SEQ ID NO: 3334743 - DNA, 25 bp, Homo sapien
acctttatcccagcccacttcttga

SEQ ID NO: 3334744 - DNA, 25 bp, Homo sapien
cccagcccacttcttgagaattttc

SEQ ID NO: 3334745 - DNA, 25 bp, Homo sapien
catcaaaaccaaactatagggccag

SEQ ID NO: 3334746 - DNA, 25 bp, Homo sapien
ttacatcaaaaccaaactatagggc

SEQ ID NO: 3334747 - DNA, 25 bp, Homo sapien
ccattgaggtctgaggtggaagcaa

SEQ ID NO: 3334748 - DNA, 25 bp, Homo sapien
ttaataagtcacgatgggaaacagt

SEQ ID NO: 3334749 - DNA, 25 bp, Homo sapien
taactacttattacgcagcaacctc

SEQ ID NO: 3334750 - DNA, 25 bp, Homo sapien
tactagccttataatcggaagatct

SEQ ID NO: 3334751 - DNA, 25 bp, Homo sapien
tcccaagggacctactttaccagca

SEQ ID NO: 3334752 - DNA, 25 bp, Homo sapien
gtactgcagaattcccaagggacct

SEQ ID NO: 3334753 - DNA, 25 bp, Homo sapien
agtggttccccaggtaggcactggc

SEQ ID NO: 3334754 - DNA, 25 bp, Homo sapien
tggttccccaggtaggcactggcag

SEQ ID NO: 3334755 - DNA, 25 bp, Homo sapien
cgcagggagacaatgacggctccag

SEQ ID NO: 3334756 - DNA, 25 bp, Homo sapien
gacaaagaacgccatgagactcgca

SEQ ID NO: 3334757 - DNA, 25 bp, Homo sapien
gctccccagtagagagacacatggt

SEQ ID NO: 3334758 - DNA, 25 bp, Homo sapien
ctccaggaaaaacgcagcgctcacg

SEQ ID NO: 3334759 - DNA, 25 bp, Homo sapien
gatgatgacaggaatagggcttgct

SEQ ID NO: 3334760 - DNA, 25 bp, Homo sapien
taaataacgctccaggtaatggatg

SEQ ID NO: 3334761 - DNA, 25 bp, Homo sapien
tggatgatgacaggaatagggcttg

SEQ ID NO: 3334762 - DNA, 25 bp, Homo sapien
taacgctccaggtaatggatgatga

SEQ ID NO: 3334763 - DNA, 25 bp, Homo sapien
gagatgaactttgttaatgagcgcc

SEQ ID NO: 3334764 - DNA, 25 bp, Homo sapien
gttttaatacactgcaagagggagt

SEQ ID NO: 3334765 - DNA, 25 bp, Homo sapien
tatgcacacgtgagtcaaacagact

SEQ ID NO: 3334766 - DNA, 25 bp, Homo sapien
ggagctaggctcctatttcataggt

SEQ ID NO: 3334767 - DNA, 25 bp, Homo sapien
caggctgcaattcttgaccctgtgc

SEQ ID NO: 3334768 - DNA, 25 bp, Homo sapien
tgcaattcttgaccctgtgccttct

SEQ ID NO: 3334769 - DNA, 25 bp, Homo sapien
gctgcaattcttgaccctgtgcctt

SEQ ID NO: 3334770 - DNA, 25 bp, Homo sapien
ggctgcaattcttgaccctgtgcct

SEQ ID NO: 3334771 - DNA, 25 bp, Homo sapien
gaggagtggttcaggtgaactaatg

SEQ ID NO: 3334772 - DNA, 25 bp, Homo sapien
tgtttttatgggaggttgaggagtg

SEQ ID NO: 3334773 - DNA, 25 bp, Homo sapien
tagtttgatattgagcaaaagtgta

SEQ ID NO: 3334774 - DNA, 25 bp, Homo sapien
aacccttggcatcaaactctctttg

SEQ ID NO: 3334775 - DNA, 25 bp, Homo sapien
tctggcctggtatttgctcatattg

SEQ ID NO: 3334776 - DNA, 25 bp, Homo sapien
gagaaaaagtaacccttggcatcaa

SEQ ID NO: 3334777 - DNA, 25 bp, Homo sapien
tcttgtgtggaacagctatgtcaga

SEQ ID NO: 3334778 - DNA, 25 bp, Homo sapien
agggaatggaagagtgctgacaata

SEQ ID NO: 3334779 - DNA, 25 bp, Homo sapien
gagtgggtgggatcctgtttctgag

SEQ ID NO: 3334780 - DNA, 25 bp, Homo sapien
gaatggaagagtgctgacaatattt

SEQ ID NO: 3334781 - DNA, 25 bp, Homo sapien
ctaccagatactgcttgttggacag

SEQ ID NO: 3334782 - DNA, 25 bp, Homo sapien
tgcttgttggacagtgaaattgcaa

SEQ ID NO: 3334783 - DNA, 25 bp, Homo sapien
tgaagagtcttattaaaactcctac

SEQ ID NO: 3334784 - DNA, 25 bp, Homo sapien
cagatactgcttgttggacagtgaa

SEQ ID NO: 3334785 - DNA, 25 bp, Homo sapien
gccactgatcccaatccttcctcca

SEQ ID NO: 3334786 - DNA, 25 bp, Homo sapien
gtcctgaatcccactgccccatcag

SEQ ID NO: 3334787 - DNA, 25 bp, Homo sapien
tggtgccactgatcccaatccttcc

SEQ ID NO: 3334788 - DNA, 25 bp, Homo sapien
ggtgccactgatcccaatccttcct

SEQ ID NO: 3334789 - DNA, 25 bp, Homo sapien
aatgccagatacacacctgggtaca

SEQ ID NO: 3334790 - DNA, 25 bp, Homo sapien
ggtacacagttcacttcccctagga

SEQ ID NO: 3334791 - DNA, 25 bp, Homo sapien
aaaaagagggagacgacagatgaac

SEQ ID NO: 3334792 - DNA, 25 bp, Homo sapien
tgaactgagtatgacaaaatcttgg

SEQ ID NO: 3334793 - DNA, 25 bp, Homo sapien
tacacttggtcacttccagcaatgg

SEQ ID NO: 3334794 - DNA, 25 bp, Homo sapien
gatgtccagtcttcgaggtgaaacc

SEQ ID NO: 3334795 - DNA, 25 bp, Homo sapien
tgccactgcgattagaacaactgtt

SEQ ID NO: 3334796 - DNA, 25 bp, Homo sapien
gtgaaaccgctgaccttgagtaaag

SEQ ID NO: 3334797 - DNA, 25 bp, Homo sapien
tctgtctgagtgacagccactcaca

SEQ ID NO: 3334798 - DNA, 25 bp, Homo sapien
gaggattctgcttggtctgacaaaa

SEQ ID NO: 3334799 - DNA, 25 bp, Homo sapien
cattctgtgagtaggaagaaacgaa

SEQ ID NO: 3334800 - DNA, 25 bp, Homo sapien
caaaactaccataagcaaagatgct

SEQ ID NO: 3334801 - DNA, 25 bp, Homo sapien
ggattcaaaccaagtctgatgctta

SEQ ID NO: 3334802 - DNA, 25 bp, Homo sapien
tagatgctccataacgccatatagc

SEQ ID NO: 3334803 - DNA, 25 bp, Homo sapien
gctctgtgaagatacctctgatttt

SEQ ID NO: 3334804 - DNA, 25 bp, Homo sapien
agcaacatctacaaaccccactggg

SEQ ID NO: 3334805 - DNA, 25 bp, Homo sapien
tggactgctccctggtacggtcaat

SEQ ID NO: 3334806 - DNA, 25 bp, Homo sapien
ccatggaaccatggctgaccatgca

SEQ ID NO: 3334807 - DNA, 25 bp, Homo sapien
ctggtacggtcaattgggcatgttc

SEQ ID NO: 3334808 - DNA, 25 bp, Homo sapien
gcggaaatccacaggcccactaact

SEQ ID NO: 3334809 - DNA, 25 bp, Homo sapien
ttcgttacgtaacaattcaacaggc

SEQ ID NO: 3334810 - DNA, 25 bp, Homo sapien
cattttctacaaaggaggaatttag

SEQ ID NO: 3334811 - DNA, 25 bp, Homo sapien
gtgcctactggctgcaagacagtta

SEQ ID NO: 3334812 - DNA, 25 bp, Homo sapien
ggaggatccggtttcacattttcta

SEQ ID NO: 3334813 - DNA, 25 bp, Homo sapien
aagtggccatggtgtttcgaaggac

SEQ ID NO: 3334814 - DNA, 25 bp, Homo sapien
aaggactggaagatgccgtctgaga

SEQ ID NO: 3334815 - DNA, 25 bp, Homo sapien
agactgggagaagggtttcagtgaa

SEQ ID NO: 3334816 - DNA, 25 bp, Homo sapien
cttttgaggccaagatttccacagg

SEQ ID NO: 3334817 - DNA, 25 bp, Homo sapien
cgcccgtatctgaataatgaagttg

SEQ ID NO: 3334818 - DNA, 25 bp, Homo sapien
gtgaaaccgagagggctgcaaccca

SEQ ID NO: 3334819 - DNA, 25 bp, Homo sapien
cgtggctcacgctgagcttccagct

SEQ ID NO: 3334820 - DNA, 25 bp, Homo sapien
tccagctccaaactctcagcacagg

SEQ ID NO: 3334821 - DNA, 25 bp, Homo sapien
gagactgaacttaaatggagtgaag

SEQ ID NO: 3334822 - DNA, 25 bp, Homo sapien
aaatagctctggtttagcttggagg

SEQ ID NO: 3334823 - DNA, 25 bp, Homo sapien
atattgtaagtcagcgctggcggca

SEQ ID NO: 3334824 - DNA, 25 bp, Homo sapien
taagtcagcgctggcggcaatggcc

SEQ ID NO: 3334825 - DNA, 25 bp, Homo sapien
ctcctaccatctccctcgccgcctc

SEQ ID NO: 3334826 - DNA, 25 bp, Homo sapien
cctcctaccatctccctcgccgcct

SEQ ID NO: 3334827 - DNA, 25 bp, Homo sapien
caacttgggtctttcattggagtca

SEQ ID NO: 3334828 - DNA, 25 bp, Homo sapien
ccccttaggctctgaggagtaaaag

SEQ ID NO: 3334829 - DNA, 25 bp, Homo sapien
ggagtaaaagccactgactacagtg

SEQ ID NO: 3334830 - DNA, 25 bp, Homo sapien
tcaactggtgccctagagacaaagc

SEQ ID NO: 3334831 - DNA, 25 bp, Homo sapien
gctcggggtacagctgtacatcctc

SEQ ID NO: 3334832 - DNA, 25 bp, Homo sapien
ctcggggtacagctgtacatcctcg

SEQ ID NO: 3334833 - DNA, 25 bp, Homo sapien
tgctcggggtacagctgtacatcct

SEQ ID NO: 3334834 - DNA, 25 bp, Homo sapien
tgggctccactgaacacatttctct

SEQ ID NO: 3334835 - DNA, 25 bp, Homo sapien
ctgccgtgggctccactgaacacat

SEQ ID NO: 3334836 - DNA, 25 bp, Homo sapien
catgtgttccactgccgtgggctcc

SEQ ID NO: 3334837 - DNA, 25 bp, Homo sapien
agccatgtgttccactgccgtgggc

SEQ ID NO: 3334838 - DNA, 25 bp, Homo sapien
taaagtgaccaactctcgcagcgat

SEQ ID NO: 3334839 - DNA, 25 bp, Homo sapien
ccatgggaatacaacacgctgtcaa

SEQ ID NO: 3334840 - DNA, 25 bp, Homo sapien
cacgctgtcaatctataaagtgacc

SEQ ID NO: 3334841 - DNA, 25 bp, Homo sapien
tataaagtgaccaactctcgcagcg

SEQ ID NO: 3334842 - DNA, 25 bp, Homo sapien
ttacttgttaatcctgtttgatacc

SEQ ID NO: 3334843 - DNA, 25 bp, Homo sapien
gaaattacttgttaatcctgtttga

SEQ ID NO: 3334844 - DNA, 25 bp, Homo sapien
cttgaaattacttgttaatcctgtt

SEQ ID NO: 3334845 - DNA, 25 bp, Homo sapien
acttgttaatcctgtttgataccca

SEQ ID NO: 3334846 - DNA, 25 bp, Homo sapien
tctgtttgggagcataccactttac

SEQ ID NO: 3334847 - DNA, 25 bp, Homo sapien
actttacaccagtattactgcaggg

SEQ ID NO: 3334848 - DNA, 25 bp, Homo sapien
ttcccattcccatccgaattaggta

SEQ ID NO: 3334849 - DNA, 25 bp, Homo sapien
tcccatccgaattaggtaattctgt

SEQ ID NO: 3334850 - DNA, 25 bp, Homo sapien
gaaaagagaacctaacatttgatgt

SEQ ID NO: 3334851 - DNA, 25 bp, Homo sapien
ccgtgcctagccccaagtttagagt

SEQ ID NO: 3334852 - DNA, 25 bp, Homo sapien
agaaaagagaacctaacatttgatg

SEQ ID NO: 3334853 - DNA, 25 bp, Homo sapien
gtgcctagccccaagtttagagtat

SEQ ID NO: 3334854 - DNA, 25 bp, Homo sapien
taaggaaacataccacagcaccgct

SEQ ID NO: 3334855 - DNA, 25 bp, Homo sapien
gcttttggaaaccaggagcagcctt

SEQ ID NO: 3334856 - DNA, 25 bp, Homo sapien
tcatcaaggtagaagccgatctctc

SEQ ID NO: 3334857 - DNA, 25 bp, Homo sapien
ggaataaactcgatgcagacagtct

SEQ ID NO: 3334858 - DNA, 25 bp, Homo sapien
ggagctcactctcccagtgttagaa

SEQ ID NO: 3334859 - DNA, 25 bp, Homo sapien
taacccggtcacttccaagctggac

SEQ ID NO: 3334860 - DNA, 25 bp, Homo sapien
cctaggcacttttcagactgattga

SEQ ID NO: 3334861 - DNA, 25 bp, Homo sapien
gagtgcttaaacaagggtctctctc

SEQ ID NO: 3334862 - DNA, 25 bp, Homo sapien
gtatttggcctctttaacacatggg

SEQ ID NO: 3334863 - DNA, 25 bp, Homo sapien
ggtgcatggttccagacagctcgcg

SEQ ID NO: 3334864 - DNA, 25 bp, Homo sapien
tcttcaaagtcttaggctccaggcc

SEQ ID NO: 3334865 - DNA, 25 bp, Homo sapien
gtgtggacaccatctttccctgaaa

SEQ ID NO: 3334866 - DNA, 25 bp, Homo sapien
tacaagtgaactggactcatgatgc

SEQ ID NO: 3334867 - DNA, 25 bp, Homo sapien
cagaaatcccgaagttggagaccac

SEQ ID NO: 3334868 - DNA, 25 bp, Homo sapien
gctgagctcgtaccagtagccctaa

SEQ ID NO: 3334869 - DNA, 25 bp, Homo sapien
tcatgatgctccaccaaggaggcaa

SEQ ID NO: 3334870 - DNA, 25 bp, Homo sapien
taactaggccaattgatgttttgcc

SEQ ID NO: 3334871 - DNA, 25 bp, Homo sapien
ttttcctaacatgcaggtctgcctg

SEQ ID NO: 3334872 - DNA, 25 bp, Homo sapien
tcaaatttatgacatcatgctacca

SEQ ID NO: 3334873 - DNA, 25 bp, Homo sapien
tctcagtctaaccagaaggttcccc

SEQ ID NO: 3334874 - DNA, 25 bp, Homo sapien
gcagacacaactttacagccaggcc

SEQ ID NO: 3334875 - DNA, 25 bp, Homo sapien
gatttaccctttagtggcagacaca

SEQ ID NO: 3334876 - DNA, 25 bp, Homo sapien
tgatggtttgttgccacgtgcacaa

SEQ ID NO: 3334877 - DNA, 25 bp, Homo sapien
tactatgaagcacgacctaacgcca

SEQ ID NO: 3334878 - DNA, 25 bp, Homo sapien
cattgtgttcaaggttttgtcaaac

SEQ ID NO: 3334879 - DNA, 25 bp, Homo sapien
aacacattgtgttcaaggttttgtc

SEQ ID NO: 3334880 - DNA, 25 bp, Homo sapien
tgttcaaggttttgtcaaacgatgg

SEQ ID NO: 3334881 - DNA, 25 bp, Homo sapien
agagaatcctttaacctactttgag

SEQ ID NO: 3334882 - DNA, 25 bp, Homo sapien
cacattttaatcaacgctgggttta

SEQ ID NO: 3334883 - DNA, 25 bp, Homo sapien
ctcctaatgagggtgtgtacttttc

SEQ ID NO: 3334884 - DNA, 25 bp, Homo sapien
tcctgtggtttctacgctacgaaca

SEQ ID NO: 3334885 - DNA, 25 bp, Homo sapien
cttttactagtaatcagagggtcca

SEQ ID NO: 3334886 - DNA, 25 bp, Homo sapien
cagcaccttggctgtattaccctag

SEQ ID NO: 3334887 - DNA, 25 bp, Homo sapien
cctttggagtgcattcggtctggcc

SEQ ID NO: 3334888 - DNA, 25 bp, Homo sapien
ttaccctagcctgagatttcctttg

SEQ ID NO: 3334889 - DNA, 25 bp, Homo sapien
tcccatgattgtagaggcagcacct

SEQ ID NO: 3334890 - DNA, 25 bp, Homo sapien
gtacacgtcatcttgagctgtgcaa

SEQ ID NO: 3334891 - DNA, 25 bp, Homo sapien
gccggccaacgctgtgatgctgcga

SEQ ID NO: 3334892 - DNA, 25 bp, Homo sapien
taattgctatcctccggctatatgc

SEQ ID NO: 3334893 - DNA, 25 bp, Homo sapien
cacacagggaaactcggatttgtcc

SEQ ID NO: 3334894 - DNA, 25 bp, Homo sapien
tcttttgtctcaaagccagaagacg

SEQ ID NO: 3334895 - DNA, 25 bp, Homo sapien
ctggacgcttgccactgagtgccaa

SEQ ID NO: 3334896 - DNA, 25 bp, Homo sapien
cagaagacgctgtatggaaagacca

SEQ ID NO: 3334897 - DNA, 25 bp, Homo sapien
tcatgaagtgtgcaataagctgttc

SEQ ID NO: 3334898 - DNA, 25 bp, Homo sapien
cagcagaggtgcctctccgcagcca

SEQ ID NO: 3334899 - DNA, 25 bp, Homo sapien
ctgcagcagaggtgcctctccgcag

SEQ ID NO: 3334900 - DNA, 25 bp, Homo sapien
tgcagcagaggtgcctctccgcagc

SEQ ID NO: 3334901 - DNA, 25 bp, Homo sapien
gcagaggtgcctctccgcagccagg

SEQ ID NO: 3334902 - DNA, 25 bp, Homo sapien
ttcctgcctaatctattcccagaaa

SEQ ID NO: 3334903 - DNA, 25 bp, Homo sapien
tgagggtcaggcttaactgtcccct

SEQ ID NO: 3334904 - DNA, 25 bp, Homo sapien
acttgacccccaattggcaacaaca

SEQ ID NO: 3334905 - DNA, 25 bp, Homo sapien
ggagcatctccacagacggtcaaat

SEQ ID NO: 3334906 - DNA, 25 bp, Homo sapien
agatcacactgagcctcgtctggac

SEQ ID NO: 3334907 - DNA, 25 bp, Homo sapien
aattttatttcacacacatttctca

SEQ ID NO: 3334908 - DNA, 25 bp, Homo sapien
aaattttatttcacacacatttctc

SEQ ID NO: 3334909 - DNA, 25 bp, Homo sapien
cacacatttctcaaatccagccccc

SEQ ID NO: 3334910 - DNA, 25 bp, Homo sapien
acatttctcaaatccagcccccaga

SEQ ID NO: 3334911 - DNA, 25 bp, Homo sapien
tctgactttgttcacggactcccca

SEQ ID NO: 3334912 - DNA, 25 bp, Homo sapien
tgtcattggatcaagctcctaaagg

SEQ ID NO: 3334913 - DNA, 25 bp, Homo sapien
tgtgtagtctcagcacccagttaca

SEQ ID NO: 3334914 - DNA, 25 bp, Homo sapien
ggcagactcctagacaccaacggtt

SEQ ID NO: 3334915 - DNA, 25 bp, Homo sapien
atgatgacggtgacaatgacgtcaa

SEQ ID NO: 3334916 - DNA, 25 bp, Homo sapien
ggtacttaataacttgatggagttg

SEQ ID NO: 3334917 - DNA, 25 bp, Homo sapien
ggtgacaatgacgtcaaccaggaca

SEQ ID NO: 3334918 - DNA, 25 bp, Homo sapien
cttaataacttgatggagttgaaga

SEQ ID NO: 3334919 - DNA, 25 bp, Homo sapien
aaaacagttctcgatgagtcacaga

SEQ ID NO: 3334920 - DNA, 25 bp, Homo sapien
tctgagaagctgaaatacgtatccg

SEQ ID NO: 3334921 - DNA, 25 bp, Homo sapien
tcatctagtctgcattcagggccta

SEQ ID NO: 3334922 - DNA, 25 bp, Homo sapien
taaccagaatacagcatggaccctc

SEQ ID NO: 3334923 - DNA, 25 bp, Homo sapien
tacatagtagtcttgggatggctca

SEQ ID NO: 3334924 - DNA, 25 bp, Homo sapien
gacaccatcacacaaaggtacaata

SEQ ID NO: 3334925 - DNA, 25 bp, Homo sapien
tgggagcagtgcagaagagaaccct

SEQ ID NO: 3334926 - DNA, 25 bp, Homo sapien
catgttgagggacaatgagttccac

SEQ ID NO: 3334927 - DNA, 25 bp, Homo sapien
gatgatgagcaagataccgagagag

SEQ ID NO: 3334928 - DNA, 25 bp, Homo sapien
gagcaagataccgagagagttacat

SEQ ID NO: 3334929 - DNA, 25 bp, Homo sapien
agataccgagagagttacattctgt

SEQ ID NO: 3334930 - DNA, 25 bp, Homo sapien
tgatgagcaagataccgagagagtt

SEQ ID NO: 3334931 - DNA, 25 bp, Homo sapien
acaggccttgcccaccaagagtgca

SEQ ID NO: 3334932 - DNA, 25 bp, Homo sapien
ctattaagtagccacggcacaggcc

SEQ ID NO: 3334933 - DNA, 25 bp, Homo sapien
tacctgacaaatgagccattgctta

SEQ ID NO: 3334934 - DNA, 25 bp, Homo sapien
taaaacagcccaataccctggagaa

SEQ ID NO: 3334935 - DNA, 25 bp, Homo sapien
tacaatgcgcacgtccttgggcaaa

SEQ ID NO: 3334936 - DNA, 25 bp, Homo sapien
ctattaattatgtgctcggtccagg

SEQ ID NO: 3334937 - DNA, 25 bp, Homo sapien
tattcgcagtatgctcaaaagggca

SEQ ID NO: 3334938 - DNA, 25 bp, Homo sapien
caaaggttttttgaatccgagctct

SEQ ID NO: 3334939 - DNA, 25 bp, Homo sapien
ttcacattggaagtatatcacacac

SEQ ID NO: 3334940 - DNA, 25 bp, Homo sapien
gaatgtctgaacacatgtttggcaa

SEQ ID NO: 3334941 - DNA, 25 bp, Homo sapien
gttactgacacaagcatccacccag

SEQ ID NO: 3334942 - DNA, 25 bp, Homo sapien
cacgtgcacacaaacaactcaggag

SEQ ID NO: 3334943 - DNA, 25 bp, Homo sapien
tcctggactactgctctccgacagg

SEQ ID NO: 3334944 - DNA, 25 bp, Homo sapien
ctactgctctccgacagggttttca

SEQ ID NO: 3334945 - DNA, 25 bp, Homo sapien
cagccttttgtctactactccttca

SEQ ID NO: 3334946 - DNA, 25 bp, Homo sapien
actcagtttcatctctcctggacta

SEQ ID NO: 3334947 - DNA, 25 bp, Homo sapien
gatcatggcactccctgtcacaaat

SEQ ID NO: 3334948 - DNA, 25 bp, Homo sapien
gttgcagttgtaatgcacttgtgta

SEQ ID NO: 3334949 - DNA, 25 bp, Homo sapien
gcagttgtaatgcacttgtgtaatg

SEQ ID NO: 3334950 - DNA, 25 bp, Homo sapien
caggctcttggacagttgcagttgt

SEQ ID NO: 3334951 - DNA, 25 bp, Homo sapien
ttcagtttacccacagctgttctat

SEQ ID NO: 3334952 - DNA, 25 bp, Homo sapien
ttagaaaatggacactagcctgtgc

SEQ ID NO: 3334953 - DNA, 25 bp, Homo sapien
tgtcttctaagagccatcagccagg

SEQ ID NO: 3334954 - DNA, 25 bp, Homo sapien
caattgctattgctgccgtaagaaa

SEQ ID NO: 3334955 - DNA, 25 bp, Homo sapien
tatgaattttgcaggcacatgagtc

SEQ ID NO: 3334956 - DNA, 25 bp, Homo sapien
tcaatggtgaggaaggaccactgct

SEQ ID NO: 3334957 - DNA, 25 bp, Homo sapien
ctttgttgtaactgcaagaaactcc

SEQ ID NO: 3334958 - DNA, 25 bp, Homo sapien
ccgacgccactctcaatggtgagga

SEQ ID NO: 3334959 - DNA, 25 bp, Homo sapien
cactgcttgctctgctactagaagt

SEQ ID NO: 3334960 - DNA, 25 bp, Homo sapien
tgggcactgcaagctggtgaagcct

SEQ ID NO: 3334961 - DNA, 25 bp, Homo sapien
tgacatccgtgttgcccatgacctg

SEQ ID NO: 3334962 - DNA, 25 bp, Homo sapien
cagcaggatggatgtatcttggacc

SEQ ID NO: 3334963 - DNA, 25 bp, Homo sapien
taaaccggcatattggagatacaac

SEQ ID NO: 3334964 - DNA, 25 bp, Homo sapien
gctaagcctaagacactgctaatga

SEQ ID NO: 3334965 - DNA, 25 bp, Homo sapien
agctaagcctaagacactgctaatg

SEQ ID NO: 3334966 - DNA, 25 bp, Homo sapien
cagctaagcctaagacactgctaat

SEQ ID NO: 3334967 - DNA, 25 bp, Homo sapien
taagcctaagacactgctaatgagg

SEQ ID NO: 3334968 - DNA, 25 bp, Homo sapien
cttcagttgtgttggctactagcat

SEQ ID NO: 3334969 - DNA, 25 bp, Homo sapien
taataagaacaaatgtagtggctca

SEQ ID NO: 3334970 - DNA, 25 bp, Homo sapien
aaaccaccccatcctattgttcagg

SEQ ID NO: 3334971 - DNA, 25 bp, Homo sapien
tcagtaaagatacagtacgtgcact

SEQ ID NO: 3334972 - DNA, 25 bp, Homo sapien
tacctcagcctcacgagaagctggt

SEQ ID NO: 3334973 - DNA, 25 bp, Homo sapien
tcttacctcagcctcacgagaagct

SEQ ID NO: 3334974 - DNA, 25 bp, Homo sapien
tggtattacaggcacgcaacatcat

SEQ ID NO: 3334975 - DNA, 25 bp, Homo sapien
aggcacgcaacatcatgcccagtta

SEQ ID NO: 3334976 - DNA, 25 bp, Homo sapien
cccatcatgtaactcaggcctgaga

SEQ ID NO: 3334977 - DNA, 25 bp, Homo sapien
tttacccagcggtgaatccagaggt

SEQ ID NO: 3334978 - DNA, 25 bp, Homo sapien
cagaggtttcatgagcaactcgact

SEQ ID NO: 3334979 - DNA, 25 bp, Homo sapien
ctaagcccaggtaagtatcaaggat

SEQ ID NO: 3334980 - DNA, 25 bp, Homo sapien
catatgctgagaaaaggcaccgaga

SEQ ID NO: 3334981 - DNA, 25 bp, Homo sapien
taccacgggctactcttgggagcag

SEQ ID NO: 3334982 - DNA, 25 bp, Homo sapien
tagaaaagacccctcagccagagtg

SEQ ID NO: 3334983 - DNA, 25 bp, Homo sapien
tttaataacctgctctaccacgggc

SEQ ID NO: 3334984 - DNA, 25 bp, Homo sapien
tgtataagatctgacagcccggcag

SEQ ID NO: 3334985 - DNA, 25 bp, Homo sapien
ctggtataagtggagccgcctgtgc

SEQ ID NO: 3334986 - DNA, 25 bp, Homo sapien
ctttcagagtgcagaactagttccc

SEQ ID NO: 3334987 - DNA, 25 bp, Homo sapien
taaccatgtgtatgcagacagccac

SEQ ID NO: 3334988 - DNA, 25 bp, Homo sapien
gaaacggcagatgccttccacacga

SEQ ID NO: 3334989 - DNA, 25 bp, Homo sapien
cagcgacactgcacagtgcaacggt

SEQ ID NO: 3334990 - DNA, 25 bp, Homo sapien
tttacctatcgtcgtttttccagca

SEQ ID NO: 3334991 - DNA, 25 bp, Homo sapien
tgcaacggttcaggcaagtggaaag

SEQ ID NO: 3334992 - DNA, 25 bp, Homo sapien
gctacctgactgtccggcatttgca

SEQ ID NO: 3334993 - DNA, 25 bp, Homo sapien
catattcctggtggtgggtacaacc

SEQ ID NO: 3334994 - DNA, 25 bp, Homo sapien
gaaagataaccctccgggtgcaggc

SEQ ID NO: 3334995 - DNA, 25 bp, Homo sapien
ggtacaaccccatctttgagcaaag

SEQ ID NO: 3334996 - DNA, 25 bp, Homo sapien
aaagttacatgaagtggtacctagc

SEQ ID NO: 3334997 - DNA, 25 bp, Homo sapien
taactaccaataaagttacatgaag

SEQ ID NO: 3334998 - DNA, 25 bp, Homo sapien
gaagtggtacctagctttgtggtta

SEQ ID NO: 3334999 - DNA, 25 bp, Homo sapien
gtacctagctttgtggttagcataa

SEQ ID NO: 3335000 - DNA, 25 bp, Homo sapien
gcagtcacattgaaactggctttgc

SEQ ID NO: 3335001 - DNA, 25 bp, Homo sapien
tagccagcgagtgcagctttttcca

SEQ ID NO: 3335002 - DNA, 25 bp, Homo sapien
tgtgctcacttgcagtcacattgaa

SEQ ID NO: 3335003 - DNA, 25 bp, Homo sapien
ggctttgcttctggccacacacagc

SEQ ID NO: 3335004 - DNA, 25 bp, Homo sapien
aaactcaggctgacaggtgtaagca

SEQ ID NO: 3335005 - DNA, 25 bp, Homo sapien
tctacccaagtgaagtgaccctgca

SEQ ID NO: 3335006 - DNA, 25 bp, Homo sapien
tgctctaatcaaagtccatccaaag

SEQ ID NO: 3335007 - DNA, 25 bp, Homo sapien
cacagtttggaacaggacctagaaa

SEQ ID NO: 3335008 - DNA, 25 bp, Homo sapien
actgcttcaaaagttgccattccct

SEQ ID NO: 3335009 - DNA, 25 bp, Homo sapien
tctggccacatccagacgaaaccat

SEQ ID NO: 3335010 - DNA, 25 bp, Homo sapien
tctaaccccactgcttcaaaagttg

SEQ ID NO: 3335011 - DNA, 25 bp, Homo sapien
cgaaaccattaaggctggtgtatac

SEQ ID NO: 3335012 - DNA, 25 bp, Homo sapien
tcctgagtgcagtcttctggaacca

SEQ ID NO: 3335013 - DNA, 25 bp, Homo sapien
cagccctaccgtgtactagctgtat

SEQ ID NO: 3335014 - DNA, 25 bp, Homo sapien
acttttatccagtcacttagcctct

SEQ ID NO: 3335015 - DNA, 25 bp, Homo sapien
ccttgactacctttgtggaacctct

SEQ ID NO: 3335016 - DNA, 25 bp, Homo sapien
gcattgtaaccatttgcccactcac

SEQ ID NO: 3335017 - DNA, 25 bp, Homo sapien
gaggcatgaaaggaacccagattca

SEQ ID NO: 3335018 - DNA, 25 bp, Homo sapien
cagattcagccattaaagtcttaca

SEQ ID NO: 3335019 - DNA, 25 bp, Homo sapien
taacctagtaccttcctagatatac

SEQ ID NO: 3335020 - DNA, 25 bp, Homo sapien
caatttgcagatatgcactgctggt

SEQ ID NO: 3335021 - DNA, 25 bp, Homo sapien
tctttctcacatctcatgaccaatt

SEQ ID NO: 3335022 - DNA, 25 bp, Homo sapien
tcacatctcatgaccaatttgcaga

SEQ ID NO: 3335023 - DNA, 25 bp, Homo sapien
gctggtttagtgtacctaaatacag

SEQ ID NO: 3335024 - DNA, 25 bp, Homo sapien
ttcttctatcgtatcttctggagag

SEQ ID NO: 3335025 - DNA, 25 bp, Homo sapien
agagacattttgggatacacaattt

SEQ ID NO: 3335026 - DNA, 25 bp, Homo sapien
acttcttctatcgtatcttctggag

SEQ ID NO: 3335027 - DNA, 25 bp, Homo sapien
gagagacattttgggatacacaatt

SEQ ID NO: 3335028 - DNA, 25 bp, Homo sapien
agctaacttttcatatctttaatag

SEQ ID NO: 3335029 - DNA, 25 bp, Homo sapien
cccagctaacttttcatatctttaa

SEQ ID NO: 3335030 - DNA, 25 bp, Homo sapien
taacttttcatatctttaatagaga

SEQ ID NO: 3335031 - DNA, 25 bp, Homo sapien
acccagctaacttttcatatcttta

SEQ ID NO: 3335032 - DNA, 25 bp, Homo sapien
tctttttgtgtaggcaggtgctgca

SEQ ID NO: 3335033 - DNA, 25 bp, Homo sapien
tagtcctatcctgtcccaaacaagg

SEQ ID NO: 3335034 - DNA, 25 bp, Homo sapien
caaaggactggcacatttcagacca

SEQ ID NO: 3335035 - DNA, 25 bp, Homo sapien
ggttcctaagtctgatccgtccaga

SEQ ID NO: 3335036 - DNA, 25 bp, Homo sapien
gggtcatgacgagagcaattccagt

SEQ ID NO: 3335037 - DNA, 25 bp, Homo sapien
gagccatgagcaacctgaatgccat

SEQ ID NO: 3335038 - DNA, 25 bp, Homo sapien
tgaaactcacacagaagcaagcctc

SEQ ID NO: 3335039 - DNA, 25 bp, Homo sapien
gcaaatacccagatgatagaggccc

SEQ ID NO: 3335040 - DNA, 25 bp, Homo sapien
caggattgctgtctccagtctctat

SEQ ID NO: 3335041 - DNA, 25 bp, Homo sapien
gaaggtgaaggctctttgggtcatc

SEQ ID NO: 3335042 - DNA, 25 bp, Homo sapien
agcagtgcccaaacatcagcaatca

SEQ ID NO: 3335043 - DNA, 25 bp, Homo sapien
agcaatcagtctactgctgtcccag

SEQ ID NO: 3335044 - DNA, 25 bp, Homo sapien
taaagggaagtgtacgtcatgcaaa

SEQ ID NO: 3335045 - DNA, 25 bp, Homo sapien
tcctcagagggacagtagagtagct

SEQ ID NO: 3335046 - DNA, 25 bp, Homo sapien
tcatgcaaaatgcaagacagttgtc

SEQ ID NO: 3335047 - DNA, 25 bp, Homo sapien
ccttgcatataggtgaaagtcatcc

SEQ ID NO: 3335048 - DNA, 25 bp, Homo sapien
gaggatctatatgcaccaacttgga

SEQ ID NO: 3335049 - DNA, 25 bp, Homo sapien
catgtaggtcctttcaagtcataga

SEQ ID NO: 3335050 - DNA, 25 bp, Homo sapien
gaaatgctcacatatgtacaaggat

SEQ ID NO: 3335051 - DNA, 25 bp, Homo sapien
gaaatggtcacaatatggaatgcta

SEQ ID NO: 3335052 - DNA, 25 bp, Homo sapien
aacctggatcctaataactgtcaac

SEQ ID NO: 3335053 - DNA, 25 bp, Homo sapien
gatcatgatgctacaagggtcacct

SEQ ID NO: 3335054 - DNA, 25 bp, Homo sapien
taaatcagactaaacacctccaggt

SEQ ID NO: 3335055 - DNA, 25 bp, Homo sapien
tctaaaagctcagtgtcaagccatg

SEQ ID NO: 3335056 - DNA, 25 bp, Homo sapien
tctgtgcctcactggagtacaacta

SEQ ID NO: 3335057 - DNA, 25 bp, Homo sapien
agggctttccaaatagagcgcccaa

SEQ ID NO: 3335058 - DNA, 25 bp, Homo sapien
tagtgcgtaagtctaatcaacaggc

SEQ ID NO: 3335059 - DNA, 25 bp, Homo sapien
gagcgcccaatctgagaactacatt

SEQ ID NO: 3335060 - DNA, 25 bp, Homo sapien
caaatacacgaaaagaggacgcggg

SEQ ID NO: 3335061 - DNA, 25 bp, Homo sapien
cgagtgtatcacaaaccaggcgcgc

SEQ ID NO: 3335062 - DNA, 25 bp, Homo sapien
tctgtggcacgggaattttggagcc

SEQ ID NO: 3335063 - DNA, 25 bp, Homo sapien
cgaggtaaacgccacagcagtcctt

SEQ ID NO: 3335064 - DNA, 25 bp, Homo sapien
agcccccggcgaaagcccacggcag

SEQ ID NO: 3335065 - DNA, 25 bp, Homo sapien
cccggcgaaagcccacggcagcact

SEQ ID NO: 3335066 - DNA, 25 bp, Homo sapien
cccccggcgaaagcccacggcagca

SEQ ID NO: 3335067 - DNA, 25 bp, Homo sapien
cggcgaaagcccacggcagcactgg

SEQ ID NO: 3335068 - DNA, 25 bp, Homo sapien
gaccgggaacgtgtgcgatttctaa

SEQ ID NO: 3335069 - DNA, 25 bp, Homo sapien
gaacgtgtgcgatttctaaaccgca

SEQ ID NO: 3335070 - DNA, 25 bp, Homo sapien
gggactcacagaccgggaacgtgtg

SEQ ID NO: 3335071 - DNA, 25 bp, Homo sapien
gcgatttctaaaccgcacgacggga

SEQ ID NO: 3335072 - DNA, 25 bp, Homo sapien
ctaggggttgagggcctggtgcccg

SEQ ID NO: 3335073 - DNA, 25 bp, Homo sapien
gggttgagggcctggtgcccgccca

SEQ ID NO: 3335074 - DNA, 25 bp, Homo sapien
ggttgagggcctggtgcccgcccag

SEQ ID NO: 3335075 - DNA, 25 bp, Homo sapien
taggggttgagggcctggtgcccgc

SEQ ID NO: 3335076 - DNA, 25 bp, Homo sapien
gcacccggcggatgtgctgagaggg

SEQ ID NO: 3335077 - DNA, 25 bp, Homo sapien
aatatttccacgcacccggcggatg

SEQ ID NO: 3335078 - DNA, 25 bp, Homo sapien
agcatcaatatttccacgcacccgg

SEQ ID NO: 3335079 - DNA, 25 bp, Homo sapien
ctgcgacagcatcaatatttccacg

SEQ ID NO: 3335080 - DNA, 25 bp, Homo sapien
cgtgcaaatcagacccttgtacccc

SEQ ID NO: 3335081 - DNA, 25 bp, Homo sapien
aaatcagacccttgtacccccatgt

SEQ ID NO: 3335082 - DNA, 25 bp, Homo sapien
cccttgtacccccatgtaagaagct

SEQ ID NO: 3335083 - DNA, 25 bp, Homo sapien
gtacccccatgtaagaagctccacg

SEQ ID NO: 3335084 - DNA, 25 bp, Homo sapien
acgcgcgccgcaagcccgctgcccg

SEQ ID NO: 3335085 - DNA, 25 bp, Homo sapien
gcgcgccgcaagcccgctgcccgtg

SEQ ID NO: 3335086 - DNA, 25 bp, Homo sapien
ccaacgcgcgccgcaagcccgctgc

SEQ ID NO: 3335087 - DNA, 25 bp, Homo sapien
gcgccgcaagcccgctgcccgtgcg

SEQ ID NO: 3335088 - DNA, 25 bp, Homo sapien
ctgtttgccggtgccggcgcccgat

SEQ ID NO: 3335089 - DNA, 25 bp, Homo sapien
tccagggtccgctggtagaggctca

SEQ ID NO: 3335090 - DNA, 25 bp, Homo sapien
tagaggctcacggtgtcccggcgct

SEQ ID NO: 3335091 - DNA, 25 bp, Homo sapien
tacctgttctcgcagttgacgtggt

SEQ ID NO: 3335092 - DNA, 25 bp, Homo sapien
tgcaaatactactgccattcgcggc

SEQ ID NO: 3335093 - DNA, 25 bp, Homo sapien
ggctgctgttcaggctactgttgat

SEQ ID NO: 3335094 - DNA, 25 bp, Homo sapien
ccgggtgattgctactcggagcagc

SEQ ID NO: 3335095 - DNA, 25 bp, Homo sapien
gagtattattcacaccgatcccggc

SEQ ID NO: 3335096 - DNA, 25 bp, Homo sapien
caagcacatggatggaaacggcgat

SEQ ID NO: 3335097 - DNA, 25 bp, Homo sapien
ggaacgttatcggaataccatcaga

SEQ ID NO: 3335098 - DNA, 25 bp, Homo sapien
gagatttccggtggttggcaagcat

SEQ ID NO: 3335099 - DNA, 25 bp, Homo sapien
caagcatatgcctccagtgcggaca

SEQ ID NO: 3335100 - DNA, 25 bp, Homo sapien
ctagatatcgaatcctcgggctggg

SEQ ID NO: 3335101 - DNA, 25 bp, Homo sapien
gtgaagtcctttgcaaaacgccgcg

SEQ ID NO: 3335102 - DNA, 25 bp, Homo sapien
cgcatcggaaaacggcaagcttgct

SEQ ID NO: 3335103 - DNA, 25 bp, Homo sapien
gaagtaaacacatggacagtccgag

SEQ ID NO: 3335104 - DNA, 25 bp, Homo sapien
cacttgttccaagtctaggccagac

SEQ ID NO: 3335105 - DNA, 25 bp, Homo sapien
cagactgaacacacaaataccaaat

SEQ ID NO: 3335106 - DNA, 25 bp, Homo sapien
ttccaagtctaggccagactgaaca

SEQ ID NO: 3335107 - DNA, 25 bp, Homo sapien
gtctaggccagactgaacacacaaa

SEQ ID NO: 3335108 - DNA, 25 bp, Homo sapien
tattggtcttgggacctaacacagg

SEQ ID NO: 3335109 - DNA, 25 bp, Homo sapien
tttattggtcttgggacctaacaca

SEQ ID NO: 3335110 - DNA, 25 bp, Homo sapien
ttattggtcttgggacctaacacag

SEQ ID NO: 3335111 - DNA, 25 bp, Homo sapien
cagtttatcggttgtgtgtttctct

SEQ ID NO: 3335112 - DNA, 25 bp, Homo sapien
aacagtttatcggttgtgtgtttct

SEQ ID NO: 3335113 - DNA, 25 bp, Homo sapien
tattaacagtttatcggttgtgtgt

SEQ ID NO: 3335114 - DNA, 25 bp, Homo sapien
attattaacagtttatcggttgtgt

SEQ ID NO: 3335115 - DNA, 25 bp, Homo sapien
caacgtgctgagcatttgtatgcaa

SEQ ID NO: 3335116 - DNA, 25 bp, Homo sapien
catgaagaggtgacgcgaggtcacc

SEQ ID NO: 3335117 - DNA, 25 bp, Homo sapien
caaccaggacccacaacgtgctgag

SEQ ID NO: 3335118 - DNA, 25 bp, Homo sapien
tatctccaggctgaatgctgccaac

SEQ ID NO: 3335119 - DNA, 25 bp, Homo sapien
gcctcaaagggacttcccggtctga

SEQ ID NO: 3335120 - DNA, 25 bp, Homo sapien
tgtgtgcatgtctggggactcactc

SEQ ID NO: 3335121 - DNA, 25 bp, Homo sapien
ggttcagggtccagtgagtaccgcc

SEQ ID NO: 3335122 - DNA, 25 bp, Homo sapien
gactcactccccaggtgttctccaa

SEQ ID NO: 3335123 - DNA, 25 bp, Homo sapien
tatgccacaagacttatgaacctgc

SEQ ID NO: 3335124 - DNA, 25 bp, Homo sapien
gacttatgaacctgccaaaatctac

SEQ ID NO: 3335125 - DNA, 25 bp, Homo sapien
cacaagacttatgaacctgccaaaa

SEQ ID NO: 3335126 - DNA, 25 bp, Homo sapien
tttgattatgccacaagacttatga

SEQ ID NO: 3335127 - DNA, 25 bp, Homo sapien
tcaaatgcctctggtcagaaggatc

SEQ ID NO: 3335128 - DNA, 25 bp, Homo sapien
tggtcagaaggatctgctctgtttc

SEQ ID NO: 3335129 - DNA, 25 bp, Homo sapien
gctgctggccagcaaggtctgttgc

SEQ ID NO: 3335130 - DNA, 25 bp, Homo sapien
tgctgtctctgtaaagctgttactg

SEQ ID NO: 3335131 - DNA, 25 bp, Homo sapien
tttaagagcatcctgttgacattcc

SEQ ID NO: 3335132 - DNA, 25 bp, Homo sapien
tcccttcagtcctggtgggctggct

SEQ ID NO: 3335133 - DNA, 25 bp, Homo sapien
tccttcttaacatttggccagccca

SEQ ID NO: 3335134 - DNA, 25 bp, Homo sapien
gccagcccagaagacatcccttcag

SEQ ID NO: 3335135 - DNA, 25 bp, Homo sapien
cagagcaatttaggaccatcagtgt

SEQ ID NO: 3335136 - DNA, 25 bp, Homo sapien
cctttgtttgagatgacaccgggag

SEQ ID NO: 3335137 - DNA, 25 bp, Homo sapien
caccgggagtgaaagcaggttatca

SEQ ID NO: 3335138 - DNA, 25 bp, Homo sapien
catcagtgttacagagactccaacc

SEQ ID NO: 3335139 - DNA, 25 bp, Homo sapien
gaaccacagtgagctaaaggtagca

SEQ ID NO: 3335140 - DNA, 25 bp, Homo sapien
ggtatcccacaaggttgcatcagtg

SEQ ID NO: 3335141 - DNA, 25 bp, Homo sapien
ccaaaggagcgggttgactgatgct

SEQ ID NO: 3335142 - DNA, 25 bp, Homo sapien
caaatcggtaaagacactggtgagt

SEQ ID NO: 3335143 - DNA, 25 bp, Homo sapien
tgtggataagaatgactgaccctgt

SEQ ID NO: 3335144 - DNA, 25 bp, Homo sapien
aacttagatcagatgcgatgctgcc

SEQ ID NO: 3335145 - DNA, 25 bp, Homo sapien
gaatcgaggcaaactcatcacgtct

SEQ ID NO: 3335146 - DNA, 25 bp, Homo sapien
gaaattcacgggcatggttcagaac

SEQ ID NO: 3335147 - DNA, 25 bp, Homo sapien
atatgccattctgcaggatgtccac

SEQ ID NO: 3335148 - DNA, 25 bp, Homo sapien
catcattgtaatggatccatatgcc

SEQ ID NO: 3335149 - DNA, 25 bp, Homo sapien
tcatcttgcccagtcagcatgatgt

SEQ ID NO: 3335150 - DNA, 25 bp, Homo sapien
caagccctctggtgtatagcaacct

SEQ ID NO: 3335151 - DNA, 25 bp, Homo sapien
actcctggtgtgtcttgtgtcttct

SEQ ID NO: 3335152 - DNA, 25 bp, Homo sapien
taacccagtcgcaaaggcttatctt

SEQ ID NO: 3335153 - DNA, 25 bp, Homo sapien
gcttatctttactgcctgtttcctc

SEQ ID NO: 3335154 - DNA, 25 bp, Homo sapien
cagggcacgccaagacaggattgga

SEQ ID NO: 3335155 - DNA, 25 bp, Homo sapien
cagcaaaagcttagggtgagggttc

SEQ ID NO: 3335156 - DNA, 25 bp, Homo sapien
aaagtcccctacatgcatgaatgca

SEQ ID NO: 3335157 - DNA, 25 bp, Homo sapien
gaagtaccggatgccactgtggaaa

SEQ ID NO: 3335158 - DNA, 25 bp, Homo sapien
gacattattgcttcagggtgtgcct

SEQ ID NO: 3335159 - DNA, 25 bp, Homo sapien
gctatcatagcccagtgtctcagtg

SEQ ID NO: 3335160 - DNA, 25 bp, Homo sapien
ggagatatcaaagctttcccatgga

SEQ ID NO: 3335161 - DNA, 25 bp, Homo sapien
tgcctttaaagcatggctgccaggt

SEQ ID NO: 3335162 - DNA, 25 bp, Homo sapien
tcaccctgggtatgaacactaagcc

SEQ ID NO: 3335163 - DNA, 25 bp, Homo sapien
cgggtctaaaattgggatagacact

SEQ ID NO: 3335164 - DNA, 25 bp, Homo sapien
gagcgggtctaaaattgggatagac

SEQ ID NO: 3335165 - DNA, 25 bp, Homo sapien
tgggagcgggtctaaaattgggata

SEQ ID NO: 3335166 - DNA, 25 bp, Homo sapien
ctaaaattgggatagacacttgctg

SEQ ID NO: 3335167 - DNA, 25 bp, Homo sapien
tatggccaatcgctcagcttgtgcc

SEQ ID NO: 3335168 - DNA, 25 bp, Homo sapien
ctgtttaggccaggcccttatggcc

SEQ ID NO: 3335169 - DNA, 25 bp, Homo sapien
ttggcggttagggttgttgtactga

SEQ ID NO: 3335170 - DNA, 25 bp, Homo sapien
tactgaagcaggtattcctgtttag

SEQ ID NO: 3335171 - DNA, 25 bp, Homo sapien
tgtgttcttttgggattccaatgct

SEQ ID NO: 3335172 - DNA, 25 bp, Homo sapien
gtgttcttttgggattccaatgctt

SEQ ID NO: 3335173 - DNA, 25 bp, Homo sapien
ctgggagctacatcttggccaccca

SEQ ID NO: 3335174 - DNA, 25 bp, Homo sapien
gttcttttgggattccaatgctttc

SEQ ID NO: 3335175 - DNA, 25 bp, Homo sapien
tttgtttcttctaacaaggctccca

SEQ ID NO: 3335176 - DNA, 25 bp, Homo sapien
tcttctttattgtaaacgctctaag

SEQ ID NO: 3335177 - DNA, 25 bp, Homo sapien
tctaggaagccttctattcctccag

SEQ ID NO: 3335178 - DNA, 25 bp, Homo sapien
attgtaaacgctctaagttctactg

SEQ ID NO: 3335179 - DNA, 25 bp, Homo sapien
ctctgttcgaagagcgaggactctg

SEQ ID NO: 3335180 - DNA, 25 bp, Homo sapien
agagcgaggactctgtgattatgtg

SEQ ID NO: 3335181 - DNA, 25 bp, Homo sapien
tgttcgaagagcgaggactctgtga

SEQ ID NO: 3335182 - DNA, 25 bp, Homo sapien
cgaagagcgaggactctgtgattat

SEQ ID NO: 3335183 - DNA, 25 bp, Homo sapien
taatgtgagttctaccgtctgaaca

SEQ ID NO: 3335184 - DNA, 25 bp, Homo sapien
actattttagacaccccatgggcca

SEQ ID NO: 3335185 - DNA, 25 bp, Homo sapien
caattttatgcagccgttctctaga

SEQ ID NO: 3335186 - DNA, 25 bp, Homo sapien
tattgtggtaagagcgcttaatgtg

SEQ ID NO: 3335187 - DNA, 25 bp, Homo sapien
gttgaatcccacttttcattgatca

SEQ ID NO: 3335188 - DNA, 25 bp, Homo sapien
gtgcccaataccttcctgtctctga

SEQ ID NO: 3335189 - DNA, 25 bp, Homo sapien
gtttctgcatgtgcccaataccttc

SEQ ID NO: 3335190 - DNA, 25 bp, Homo sapien
ctcactacctgaccaattttgcctg

SEQ ID NO: 3335191 - DNA, 25 bp, Homo sapien
taacgttctgtaagcgtgaagagcc

SEQ ID NO: 3335192 - DNA, 25 bp, Homo sapien
tataagctctgaggcgaaaaggcaa

SEQ ID NO: 3335193 - DNA, 25 bp, Homo sapien
gagccaccaccggaacagtaaggaa

SEQ ID NO: 3335194 - DNA, 25 bp, Homo sapien
ttatgacacagagaaagtacggact

SEQ ID NO: 3335195 - DNA, 25 bp, Homo sapien
gcaccttctgcgacattttgtagta

SEQ ID NO: 3335196 - DNA, 25 bp, Homo sapien
gaactttagatatccatccagcacc

SEQ ID NO: 3335197 - DNA, 25 bp, Homo sapien
ttcctgaatctccagctcgtgtggt

SEQ ID NO: 3335198 - DNA, 25 bp, Homo sapien
tgatgcttcctgaatctccagctcg

SEQ ID NO: 3335199 - DNA, 25 bp, Homo sapien
gggatgggccctgagtttcgctaca

SEQ ID NO: 3335200 - DNA, 25 bp, Homo sapien
gctggtatgccaagagtactgacac

SEQ ID NO: 3335201 - DNA, 25 bp, Homo sapien
tgctgacttcagttgcggccaatgg

SEQ ID NO: 3335202 - DNA, 25 bp, Homo sapien
tcaaagctagaactgactgtcacgt

SEQ ID NO: 3335203 - DNA, 25 bp, Homo sapien
taaactttagatatccaaccaacat

SEQ ID NO: 3335204 - DNA, 25 bp, Homo sapien
gatgggccctgagtgtcattgcata

SEQ ID NO: 3335205 - DNA, 25 bp, Homo sapien
cccttaggatactatataaggaagg

SEQ ID NO: 3335206 - DNA, 25 bp, Homo sapien
tgtagggtttggtcaaatagtggaa

SEQ ID NO: 3335207 - DNA, 25 bp, Homo sapien
cctctttcttgccaaacgcttttgg

SEQ ID NO: 3335208 - DNA, 25 bp, Homo sapien
agcggtcatctttttgctagaactt

SEQ ID NO: 3335209 - DNA, 25 bp, Homo sapien
agcagtagcacgcttcgcagcaggt

SEQ ID NO: 3335210 - DNA, 25 bp, Homo sapien
tcttgccaaacgcttttggagcagg

SEQ ID NO: 3335211 - DNA, 25 bp, Homo sapien
tattctgttcctcattgccttcata

SEQ ID NO: 3335212 - DNA, 25 bp, Homo sapien
attctgttcctcattgccttcataa

SEQ ID NO: 3335213 - DNA, 25 bp, Homo sapien
ctgttcctcattgccttcataactt

SEQ ID NO: 3335214 - DNA, 25 bp, Homo sapien
caatcttcttggcccatcgtgtggc

SEQ ID NO: 3335215 - DNA, 25 bp, Homo sapien
taacatctacagttgcaaccaattt

SEQ ID NO: 3335216 - DNA, 25 bp, Homo sapien
ctctgtgtggaaacttgaggttgaa

SEQ ID NO: 3335217 - DNA, 25 bp, Homo sapien
tgcaaccaattttctggcacgaggt

SEQ ID NO: 3335218 - DNA, 25 bp, Homo sapien
aattttctggcacgaggtccagagg

SEQ ID NO: 3335219 - DNA, 25 bp, Homo sapien
taatctaagttgcaggagaaaaggc

SEQ ID NO: 3335220 - DNA, 25 bp, Homo sapien
taagagcgagggtatagtaatctaa

SEQ ID NO: 3335221 - DNA, 25 bp, Homo sapien
cactttacatgaaatagggtgaaca

SEQ ID NO: 3335222 - DNA, 25 bp, Homo sapien
gcagagtgaactggagtctcacgtt

SEQ ID NO: 3335223 - DNA, 25 bp, Homo sapien
ttcattctccaatgaattcaataac

SEQ ID NO: 3335224 - DNA, 25 bp, Homo sapien
tgtgttttctatatcccacgaacag

SEQ ID NO: 3335225 - DNA, 25 bp, Homo sapien
gaaacagttattcctcacccgacat

SEQ ID NO: 3335226 - DNA, 25 bp, Homo sapien
gcacaaattaacacacacttctggg

SEQ ID NO: 3335227 - DNA, 25 bp, Homo sapien
ctgaaaagagggtctcaaagagaca

SEQ ID NO: 3335228 - DNA, 25 bp, Homo sapien
tagaattaaggaacgacggtgtcgc

SEQ ID NO: 3335229 - DNA, 25 bp, Homo sapien
tattaaatggccacgcactacagat

SEQ ID NO: 3335230 - DNA, 25 bp, Homo sapien
tctctgcttggttcgcaaacgctct

SEQ ID NO: 3335231 - DNA, 25 bp, Homo sapien
tgctatgcctcagtaccactagggt

SEQ ID NO: 3335232 - DNA, 25 bp, Homo sapien
tactgtcattggctgtcgctgttcc

SEQ ID NO: 3335233 - DNA, 25 bp, Homo sapien
cctgattttccacactgggattctc

SEQ ID NO: 3335234 - DNA, 25 bp, Homo sapien
gatagacctgatgagccgcttcacc

SEQ ID NO: 3335235 - DNA, 25 bp, Homo sapien
tgacttctctgtcgctcataccagc

SEQ ID NO: 3335236 - DNA, 25 bp, Homo sapien
tatggcaaaggtggatcccggtgct

SEQ ID NO: 3335237 - DNA, 25 bp, Homo sapien
ccggtgctttgagattggacgactg

SEQ ID NO: 3335238 - DNA, 25 bp, Homo sapien
tgattggatgtcagtgtccttttgt

SEQ ID NO: 3335239 - DNA, 25 bp, Homo sapien
ctgattggatgtcagtgtccttttg

SEQ ID NO: 3335240 - DNA, 25 bp, Homo sapien
cggtccctgacgcagacatcgtgta

SEQ ID NO: 3335241 - DNA, 25 bp, Homo sapien
acatcgtgtagctttctccccgcag

SEQ ID NO: 3335242 - DNA, 25 bp, Homo sapien
ggtcgggagccgctttgcagctctc

SEQ ID NO: 3335243 - DNA, 25 bp, Homo sapien
tcaggcccaggcgttctttgggaga

SEQ ID NO: 3335244 - DNA, 25 bp, Homo sapien
gagccgtaaaataaggattggacca

SEQ ID NO: 3335245 - DNA, 25 bp, Homo sapien
gagggagcctagagagccgtaaaat

SEQ ID NO: 3335246 - DNA, 25 bp, Homo sapien
gcctagagagccgtaaaataaggat

SEQ ID NO: 3335247 - DNA, 25 bp, Homo sapien
gagagccgtaaaataaggattggac

SEQ ID NO: 3335248 - DNA, 25 bp, Homo sapien
gaaaacgtgcaaatgtattgtagag

SEQ ID NO: 3335249 - DNA, 25 bp, Homo sapien
gactttatgattagaattgcatata

SEQ ID NO: 3335250 - DNA, 25 bp, Homo sapien
ttatgttagtctatgaaaacgtgca

SEQ ID NO: 3335251 - DNA, 25 bp, Homo sapien
taacacaataacaggagacttccat

SEQ ID NO: 3335252 - DNA, 25 bp, Homo sapien
tagatggaggctaaaaatgaaggtt

SEQ ID NO: 3335253 - DNA, 25 bp, Homo sapien
gataggaatgctagtgtctctttaa

SEQ ID NO: 3335254 - DNA, 25 bp, Homo sapien
taatcatctctgagagtaacctgta

SEQ ID NO: 3335255 - DNA, 25 bp, Homo sapien
taaccaccgtgttgtgaaaaagtga

SEQ ID NO: 3335256 - DNA, 25 bp, Homo sapien
gagttgatgaatgactttagctgtg

SEQ ID NO: 3335257 - DNA, 25 bp, Homo sapien
tttgcatcccttttgtgacctaatt

SEQ ID NO: 3335258 - DNA, 25 bp, Homo sapien
gttgatgaatgactttagctgtgtg

SEQ ID NO: 3335259 - DNA, 25 bp, Homo sapien
ttttgcatcccttttgtgacctaat

SEQ ID NO: 3335260 - DNA, 25 bp, Homo sapien
gaagttcagagtatagcaatggagt

SEQ ID NO: 3335261 - DNA, 25 bp, Homo sapien
tagagagggagaatgcttgcaagat

SEQ ID NO: 3335262 - DNA, 25 bp, Homo sapien
tattagcggctatgtttggcttcct

SEQ ID NO: 3335263 - DNA, 25 bp, Homo sapien
ggattattacactccaaatgcaaag

SEQ ID NO: 3335264 - DNA, 25 bp, Homo sapien
taggtagttagtattcaagtagttc

SEQ ID NO: 3335265 - DNA, 25 bp, Homo sapien
caaagagtctaaacctgttacccag

SEQ ID NO: 3335266 - DNA, 25 bp, Homo sapien
caagtagttctgtggtctcaaagat

SEQ ID NO: 3335267 - DNA, 25 bp, Homo sapien
gttacccagacacaagaatttcata

SEQ ID NO: 3335268 - DNA, 25 bp, Homo sapien
gctttgaagctattcatagatgaga

SEQ ID NO: 3335269 - DNA, 25 bp, Homo sapien
agctttgaagctattcatagatgag

SEQ ID NO: 3335270 - DNA, 25 bp, Homo sapien
tttgaagctattcatagatgagatg

SEQ ID NO: 3335271 - DNA, 25 bp, Homo sapien
ctttgaagctattcatagatgagat

SEQ ID NO: 3335272 - DNA, 25 bp, Homo sapien
taatataaagcctccccaataataa

SEQ ID NO: 3335273 - DNA, 25 bp, Homo sapien
aatcagccattagaatcccttagta

SEQ ID NO: 3335274 - DNA, 25 bp, Homo sapien
ccattagaatcccttagtaataagg

SEQ ID NO: 3335275 - DNA, 25 bp, Homo sapien
caataataacctgtcaaatagggta

SEQ ID NO: 3335276 - DNA, 25 bp, Homo sapien
cacaaactaggtaaatgtgggtcat

SEQ ID NO: 3335277 - DNA, 25 bp, Homo sapien
aatatgctgcaatataatccagtga

SEQ ID NO: 3335278 - DNA, 25 bp, Homo sapien
gggtaaaccactctggcataaagca

SEQ ID NO: 3335279 - DNA, 25 bp, Homo sapien
caaggcatgtccttaaaggaatcta

SEQ ID NO: 3335280 - DNA, 25 bp, Homo sapien
taccagttatattgttgtatagcca

SEQ ID NO: 3335281 - DNA, 25 bp, Homo sapien
ttccaatagcaatgaagctgctaca

SEQ ID NO: 3335282 - DNA, 25 bp, Homo sapien
actaaaactgtgtaacttctaatgg

SEQ ID NO: 3335283 - DNA, 25 bp, Homo sapien
taatggtattaatctcttagatccg

SEQ ID NO: 3335284 - DNA, 25 bp, Homo sapien
tacaatgccaaacatccctctcggg

SEQ ID NO: 3335285 - DNA, 25 bp, Homo sapien
tttcctctgaaatgaaggactaaaa

SEQ ID NO: 3335286 - DNA, 25 bp, Homo sapien
gattaaagttcaggtctggcatgct

SEQ ID NO: 3335287 - DNA, 25 bp, Homo sapien
gatgaggtaacttcaaagttgcttc

SEQ ID NO: 3335288 - DNA, 25 bp, Homo sapien
tttgcgtactgactttatcggccca

SEQ ID NO: 3335289 - DNA, 25 bp, Homo sapien
tactgactttatcggcccatctcca

SEQ ID NO: 3335290 - DNA, 25 bp, Homo sapien
ctcttcttttgcgtactgactttat

SEQ ID NO: 3335291 - DNA, 25 bp, Homo sapien
ctttcgtactcttcttttgcgtact

SEQ ID NO: 3335292 - DNA, 25 bp, Homo sapien
catcctctgacccagacttatttga

SEQ ID NO: 3335293 - DNA, 25 bp, Homo sapien
cttgcccttctatgatttcaatttc

SEQ ID NO: 3335294 - DNA, 25 bp, Homo sapien
tcttcttgcccttctatgatttcaa

SEQ ID NO: 3335295 - DNA, 25 bp, Homo sapien
gacccagacttatttgattgattac

SEQ ID NO: 3335296 - DNA, 25 bp, Homo sapien
cttttgtttgtggtatacatatgtc

SEQ ID NO: 3335297 - DNA, 25 bp, Homo sapien
gtactccttttgtttgtggtataca

SEQ ID NO: 3335298 - DNA, 25 bp, Homo sapien
tgtttgtggtatacatatgtcggtt

SEQ ID NO: 3335299 - DNA, 25 bp, Homo sapien
catatgtcggtttttttatactctg

SEQ ID NO: 3335300 - DNA, 25 bp, Homo sapien
aagccatgggtgcccttcagcagct

SEQ ID NO: 3335301 - DNA, 25 bp, Homo sapien
gtcacaagataaatcaaccaaagcc

SEQ ID NO: 3335302 - DNA, 25 bp, Homo sapien
gccattaactgttttaatacaccag

SEQ ID NO: 3335303 - DNA, 25 bp, Homo sapien
taattaatgctattggcactcctgc

SEQ ID NO: 3335304 - DNA, 25 bp, Homo sapien
tcatagaccaaagctctaaaccaag

SEQ ID NO: 3335305 - DNA, 25 bp, Homo sapien
agcccagtgatctgctacttccttt

SEQ ID NO: 3335306 - DNA, 25 bp, Homo sapien
ttatcaaagtagatatcagaggtca

SEQ ID NO: 3335307 - DNA, 25 bp, Homo sapien
gatgatcatcttcgaaataatctgg

SEQ ID NO: 3335308 - DNA, 25 bp, Homo sapien
ggattatcgaccagtggaggtctcc

SEQ ID NO: 3335309 - DNA, 25 bp, Homo sapien
caatccgacatgctggattaagaat

SEQ ID NO: 3335310 - DNA, 25 bp, Homo sapien
tatctatcatgggaggtttccactc

SEQ ID NO: 3335311 - DNA, 25 bp, Homo sapien
tattttgggttatctatcatgggag

SEQ ID NO: 3335312 - DNA, 25 bp, Homo sapien
aggtttttcagcattaggatcaggg

SEQ ID NO: 3335313 - DNA, 25 bp, Homo sapien
gatcagggataaattttggttcatc

SEQ ID NO: 3335314 - DNA, 25 bp, Homo sapien
aatcttctatttgggcaggttcact

SEQ ID NO: 3335315 - DNA, 25 bp, Homo sapien
caacacttgaatcttctatttgggc

SEQ ID NO: 3335316 - DNA, 25 bp, Homo sapien
actgtttgatcaactaacacctcaa

SEQ ID NO: 3335317 - DNA, 25 bp, Homo sapien
ggttttttatcattgggatcttcaa

SEQ ID NO: 3335318 - DNA, 25 bp, Homo sapien
cttctggtttgacggcagaaggatc

SEQ ID NO: 3335319 - DNA, 25 bp, Homo sapien
gaggtttgataggaggaaccacatc

SEQ ID NO: 3335320 - DNA, 25 bp, Homo sapien
ttttgggatgtttatgtctgaagat

SEQ ID NO: 3335321 - DNA, 25 bp, Homo sapien
tctggtccaaacataatgatatagg

SEQ ID NO: 3335322 - DNA, 25 bp, Homo sapien
tacatctggaggtttggcatgtttc

SEQ ID NO: 3335323 - DNA, 25 bp, Homo sapien
ctttttaaggtctacatctggaggt

SEQ ID NO: 3335324 - DNA, 25 bp, Homo sapien
ggagtttaatgtatgcacctccaca

SEQ ID NO: 3335325 - DNA, 25 bp, Homo sapien
catcagtgtctgctaggagtttaat

SEQ ID NO: 3335326 - DNA, 25 bp, Homo sapien
tgtctgctaggagtttaatgtatgc

SEQ ID NO: 3335327 - DNA, 25 bp, Homo sapien
gctaggagtttaatgtatgcacctc

SEQ ID NO: 3335328 - DNA, 25 bp, Homo sapien
gattacacacatgaggcatgaggca

SEQ ID NO: 3335329 - DNA, 25 bp, Homo sapien
gggttcaagctgtctgcccacctag

SEQ ID NO: 3335330 - DNA, 25 bp, Homo sapien
ttacacacatgaggcatgaggcacc

SEQ ID NO: 3335331 - DNA, 25 bp, Homo sapien
gctgcaatgcactggtgtgaccttg

SEQ ID NO: 3335332 - DNA, 25 bp, Homo sapien
atgatgctttgctctagattttaat

SEQ ID NO: 3335333 - DNA, 25 bp, Homo sapien
atcaagggtttatcagcaaaaatga

SEQ ID NO: 3335334 - DNA, 25 bp, Homo sapien
ttttgctaatacagcagatattgca

SEQ ID NO: 3335335 - DNA, 25 bp, Homo sapien
cagcagatattgcatgatgctttgc

SEQ ID NO: 3335336 - DNA, 25 bp, Homo sapien
gaagataacaccagaaaaactcttc

SEQ ID NO: 3335337 - DNA, 25 bp, Homo sapien
gataacaccagaaaaactcttctag

SEQ ID NO: 3335338 - DNA, 25 bp, Homo sapien
tctagaagataacaccagaaaaact

SEQ ID NO: 3335339 - DNA, 25 bp, Homo sapien
tagaagataacaccagaaaaactct

SEQ ID NO: 3335340 - DNA, 25 bp, Homo sapien
ctttctttgcttttgataagaccca

SEQ ID NO: 3335341 - DNA, 25 bp, Homo sapien
tttctttgcttttgataagacccat

SEQ ID NO: 3335342 - DNA, 25 bp, Homo sapien
caaaatatacttctcctataggttg

SEQ ID NO: 3335343 - DNA, 25 bp, Homo sapien
agccaaccttccactatcaaaagtt

SEQ ID NO: 3335344 - DNA, 25 bp, Homo sapien
cagccaaccttccactatcaaaagt

SEQ ID NO: 3335345 - DNA, 25 bp, Homo sapien
cctataggttgaggtgtcttatatt

SEQ ID NO: 3335346 - DNA, 25 bp, Homo sapien
gaaagttcactttcattaacatcaa

SEQ ID NO: 3335347 - DNA, 25 bp, Homo sapien
aaagtcttccgtctcaacatcatca

SEQ ID NO: 3335348 - DNA, 25 bp, Homo sapien
gaggaaagttcactttcattaacat

SEQ ID NO: 3335349 - DNA, 25 bp, Homo sapien
tcttcaaagtcttccgtctcaacat

SEQ ID NO: 3335350 - DNA, 25 bp, Homo sapien
tcccagtcctgagctttggttgcca

SEQ ID NO: 3335351 - DNA, 25 bp, Homo sapien
gcctggggcgataatgagtctagta

SEQ ID NO: 3335352 - DNA, 25 bp, Homo sapien
taattagggcctctctggattcaac

SEQ ID NO: 3335353 - DNA, 25 bp, Homo sapien
taaaatcagcgaaagtgtctgattg

SEQ ID NO: 3335354 - DNA, 25 bp, Homo sapien
tggattcaacccagccctttcgccc

SEQ ID NO: 3335355 - DNA, 25 bp, Homo sapien
cataggtggagactgagacagccga

SEQ ID NO: 3335356 - DNA, 25 bp, Homo sapien
gagcctattttgatctcgtttgggt

SEQ ID NO: 3335357 - DNA, 25 bp, Homo sapien
tctgcgcgggtatcgagggagcggc

SEQ ID NO: 3335358 - DNA, 25 bp, Homo sapien
gggtcccttcgcttccacataggtg

SEQ ID NO: 3335359 - DNA, 25 bp, Homo sapien
ggctaggcacctagctgtccccgtg

SEQ ID NO: 3335360 - DNA, 25 bp, Homo sapien
gggctgcaatggcaaccgctggaat

SEQ ID NO: 3335361 - DNA, 25 bp, Homo sapien
cagtcaagaccctagctcgctgcag

SEQ ID NO: 3335362 - DNA, 25 bp, Homo sapien
tctacaaccattgggagagcgcccc

SEQ ID NO: 3335363 - DNA, 25 bp, Homo sapien
tggccccgaccggttcagccctctg

SEQ ID NO: 3335364 - DNA, 25 bp, Homo sapien
gttcagccctctggcggcaaagtaa

SEQ ID NO: 3335365 - DNA, 25 bp, Homo sapien
ctgggggaagcagcaacgactccgc

SEQ ID NO: 3335366 - DNA, 25 bp, Homo sapien
ggaagcagcaacgactccgcttcct

SEQ ID NO: 3335367 - DNA, 25 bp, Homo sapien
gcgggacagcgggaacgcggcctgc

SEQ ID NO: 3335368 - DNA, 25 bp, Homo sapien
gggacagcgggaacgcggcctgctg

SEQ ID NO: 3335369 - DNA, 25 bp, Homo sapien
acagcgggaacgcggcctgctgctc

SEQ ID NO: 3335370 - DNA, 25 bp, Homo sapien
cgggaacgcggcctgctgctcacgc

SEQ ID NO: 3335371 - DNA, 25 bp, Homo sapien
aagtcgttgccacttggtccccgcg

SEQ ID NO: 3335372 - DNA, 25 bp, Homo sapien
ggtccccgcgtctcttcagaccagt

SEQ ID NO: 3335373 - DNA, 25 bp, Homo sapien
gctcagatgtccaagtcgttgccac

SEQ ID NO: 3335374 - DNA, 25 bp, Homo sapien
gcctgttttcggcagtgacagctca

SEQ ID NO: 3335375 - DNA, 25 bp, Homo sapien
aggtgtgtgctacgcgctcctgctc

SEQ ID NO: 3335376 - DNA, 25 bp, Homo sapien
gtgtgctacgcgctcctgctccgag

SEQ ID NO: 3335377 - DNA, 25 bp, Homo sapien
cccgaggtgtgtgctacgcgctcct

SEQ ID NO: 3335378 - DNA, 25 bp, Homo sapien
aggcggtggcggcccgaggtgtgtg

SEQ ID NO: 3335379 - DNA, 25 bp, Homo sapien
cgccgccggccggttgtggcctgga

SEQ ID NO: 3335380 - DNA, 25 bp, Homo sapien
gccgccggccggttgtggcctggac

SEQ ID NO: 3335381 - DNA, 25 bp, Homo sapien
gccgccgccggccggttgtggcctg

SEQ ID NO: 3335382 - DNA, 25 bp, Homo sapien
ccgccgccggccggttgtggcctgg

SEQ ID NO: 3335383 - DNA, 25 bp, Homo sapien
ccatggatggtaaatggatcctcta

SEQ ID NO: 3335384 - DNA, 25 bp, Homo sapien
gatcctctaagcatccacatttgca

SEQ ID NO: 3335385 - DNA, 25 bp, Homo sapien
taaatggatcctctaagcatccaca

SEQ ID NO: 3335386 - DNA, 25 bp, Homo sapien
ggatggtaaatggatcctctaagca

SEQ ID NO: 3335387 - DNA, 25 bp, Homo sapien
catactgaggcgaatgtgtgagatc

SEQ ID NO: 3335388 - DNA, 25 bp, Homo sapien
tgtggcactgtcagatccaggcttg

SEQ ID NO: 3335389 - DNA, 25 bp, Homo sapien
gagaattttgcacccaatagatagg

SEQ ID NO: 3335390 - DNA, 25 bp, Homo sapien
tctccctgacaatagcaagctttcg

SEQ ID NO: 3335391 - DNA, 25 bp, Homo sapien
atttccaaagaatgattttgatact

SEQ ID NO: 3335392 - DNA, 25 bp, Homo sapien
aaaatatgatgtagtcgcttaagaa

SEQ ID NO: 3335393 - DNA, 25 bp, Homo sapien
gtagtcgcttaagaaagttgagaaa

SEQ ID NO: 3335394 - DNA, 25 bp, Homo sapien
gaaacatgaaactcctaatagacat

SEQ ID NO: 3335395 - DNA, 25 bp, Homo sapien
tggaaaagagaaggtttatactgaa

SEQ ID NO: 3335396 - DNA, 25 bp, Homo sapien
gatgaatgtatacccacatgctgga

SEQ ID NO: 3335397 - DNA, 25 bp, Homo sapien
ttctagggaatgatgaatgtatacc

SEQ ID NO: 3335398 - DNA, 25 bp, Homo sapien
ggaatgatgaatgtatacccacatg

SEQ ID NO: 3335399 - DNA, 25 bp, Homo sapien
cctttactaggttgagcttcccaat

SEQ ID NO: 3335400 - DNA, 25 bp, Homo sapien
tgttacatccatagaccaattaggg

SEQ ID NO: 3335401 - DNA, 25 bp, Homo sapien
ggactgcctattctgctccatggaa

SEQ ID NO: 3335402 - DNA, 25 bp, Homo sapien
cattatggttgagagatatggcacc

SEQ ID NO: 3335403 - DNA, 25 bp, Homo sapien
atcttctcctgcgtcacacaccttt

SEQ ID NO: 3335404 - DNA, 25 bp, Homo sapien
cttctcctgcgtcacacacctttac

SEQ ID NO: 3335405 - DNA, 25 bp, Homo sapien
agatcttctcctgcgtcacacacct

SEQ ID NO: 3335406 - DNA, 25 bp, Homo sapien
aagatcttctcctgcgtcacacacc

SEQ ID NO: 3335407 - DNA, 25 bp, Homo sapien
cattcaagagccagtctatgggttt

SEQ ID NO: 3335408 - DNA, 25 bp, Homo sapien
tcattcaagagccagtctatgggtt

SEQ ID NO: 3335409 - DNA, 25 bp, Homo sapien
aaatgtcattcaagagccagtctat

SEQ ID NO: 3335410 - DNA, 25 bp, Homo sapien
tgtcattcaagagccagtctatggg

SEQ ID NO: 3335411 - DNA, 25 bp, Homo sapien
gagttaagtcctcagatctaaacag

SEQ ID NO: 3335412 - DNA, 25 bp, Homo sapien
aagtgagttaagtcctcagatctaa

SEQ ID NO: 3335413 - DNA, 25 bp, Homo sapien
gtgagttaagtcctcagatctaaac

SEQ ID NO: 3335414 - DNA, 25 bp, Homo sapien
aaagtgagttaagtcctcagatcta

SEQ ID NO: 3335415 - DNA, 25 bp, Homo sapien
tatgtgcaaaacaggtagtcctcac

SEQ ID NO: 3335416 - DNA, 25 bp, Homo sapien
taaggattaccacatctgaaggaga

SEQ ID NO: 3335417 - DNA, 25 bp, Homo sapien
gactataagacagctgatcatggga

SEQ ID NO: 3335418 - DNA, 25 bp, Homo sapien
tctgccactcaggaaatagataagc

SEQ ID NO: 3335419 - DNA, 25 bp, Homo sapien
aaaaaccaattatttgaactgatat

SEQ ID NO: 3335420 - DNA, 25 bp, Homo sapien
ctttagctatgatatcatcttctag

SEQ ID NO: 3335421 - DNA, 25 bp, Homo sapien
gatattacctacaaaatctgttatt

SEQ ID NO: 3335422 - DNA, 25 bp, Homo sapien
tttttgtaaagtacatctctttagc

SEQ ID NO: 3335423 - DNA, 25 bp, Homo sapien
atacttggccttgggttgggcatac

SEQ ID NO: 3335424 - DNA, 25 bp, Homo sapien
tgggcatacagcaacaaaatgcaaa

SEQ ID NO: 3335425 - DNA, 25 bp, Homo sapien
atccaatacctgtttgattcgccaa

SEQ ID NO: 3335426 - DNA, 25 bp, Homo sapien
aaatgcaaaaatccaatacctgttt

SEQ ID NO: 3335427 - DNA, 25 bp, Homo sapien
cacaaagtgactttatgtttggcct

SEQ ID NO: 3335428 - DNA, 25 bp, Homo sapien
ggaactcttcatggtcctcttgaag

SEQ ID NO: 3335429 - DNA, 25 bp, Homo sapien
tattttgaaagtagtctccacaagc

SEQ ID NO: 3335430 - DNA, 25 bp, Homo sapien
gtttggcctctgatgaaatgcgtga

SEQ ID NO: 3335431 - DNA, 25 bp, Homo sapien
ctctaaggatccagacctcacttgc

SEQ ID NO: 3335432 - DNA, 25 bp, Homo sapien
caggtattgaaatgacctctaagga

SEQ ID NO: 3335433 - DNA, 25 bp, Homo sapien
gcttggcatttaacatgcttgagta

SEQ ID NO: 3335434 - DNA, 25 bp, Homo sapien
ctaagtgcttggcatttaacatgct

SEQ ID NO: 3335435 - DNA, 25 bp, Homo sapien
tttccatcgccagactttcagcgac

SEQ ID NO: 3335436 - DNA, 25 bp, Homo sapien
catttccatcgccagactttcagcg

SEQ ID NO: 3335437 - DNA, 25 bp, Homo sapien
gactttcagcgaccccgagctgctg

SEQ ID NO: 3335438 - DNA, 25 bp, Homo sapien
cgccagactttcagcgaccccgagc

SEQ ID NO: 3335439 - DNA, 25 bp, Homo sapien
tctgctctgcagtgcatcctgtcct

SEQ ID NO: 3335440 - DNA, 25 bp, Homo sapien
agctcacactgcacatcgcacccct

SEQ ID NO: 3335441 - DNA, 25 bp, Homo sapien
tgtcctgcgggacgcccttgctagc

SEQ ID NO: 3335442 - DNA, 25 bp, Homo sapien
cactgcacatcgcacccctctgctc

SEQ ID NO: 3335443 - DNA, 25 bp, Homo sapien
cgggaagcagtaagtgacaagagcc

SEQ ID NO: 3335444 - DNA, 25 bp, Homo sapien
tgctgaggaggcctatctccagggc

SEQ ID NO: 3335445 - DNA, 25 bp, Homo sapien
tctgatccccgggtttaatgtcctc

SEQ ID NO: 3335446 - DNA, 25 bp, Homo sapien
tctttcagctcccgcggtggcggag

SEQ ID NO: 3335447 - DNA, 25 bp, Homo sapien
tggttaatccgtacgtgcttcggct

SEQ ID NO: 3335448 - DNA, 25 bp, Homo sapien
aaagagcttcatattggttaatccg

SEQ ID NO: 3335449 - DNA, 25 bp, Homo sapien
tcttgcttgataaagagcttcatat

SEQ ID NO: 3335450 - DNA, 25 bp, Homo sapien
ccgtacgtgcttcggctgcttacag

SEQ ID NO: 3335451 - DNA, 25 bp, Homo sapien
tcattttaacaacagaatgtaaata

SEQ ID NO: 3335452 - DNA, 25 bp, Homo sapien
ttttaacaacagaatgtaaataatc

SEQ ID NO: 3335453 - DNA, 25 bp, Homo sapien
atcattttaacaacagaatgtaaat

SEQ ID NO: 3335454 - DNA, 25 bp, Homo sapien
taacaacagaatgtaaataatcttc

SEQ ID NO: 3335455 - DNA, 25 bp, Homo sapien
gacaatcactacagaatccttctct

SEQ ID NO: 3335456 - DNA, 25 bp, Homo sapien
gcaaccaagacaatcactacagaat

SEQ ID NO: 3335457 - DNA, 25 bp, Homo sapien
tctgcaaccaagacaatcactacag

SEQ ID NO: 3335458 - DNA, 25 bp, Homo sapien
agacaatcactacagaatccttctc

SEQ ID NO: 3335459 - DNA, 25 bp, Homo sapien
ttcctctgttaacagtggaaatacc

SEQ ID NO: 3335460 - DNA, 25 bp, Homo sapien
tctgttaacagtggaaatacccagc

SEQ ID NO: 3335461 - DNA, 25 bp, Homo sapien
ttaacagtggaaatacccagcgcaa

SEQ ID NO: 3335462 - DNA, 25 bp, Homo sapien
tataatttcctctgttaacagtgga

SEQ ID NO: 3335463 - DNA, 25 bp, Homo sapien
ggttcatctaactgagtataaaatg

SEQ ID NO: 3335464 - DNA, 25 bp, Homo sapien
tcacatattggtcgattctctcttc

SEQ ID NO: 3335465 - DNA, 25 bp, Homo sapien
catctaactgagtataaaatgtcac

SEQ ID NO: 3335466 - DNA, 25 bp, Homo sapien
aaaatgtcacatattggtcgattct

SEQ ID NO: 3335467 - DNA, 25 bp, Homo sapien
atcaggataaattctaccttctttc

SEQ ID NO: 3335468 - DNA, 25 bp, Homo sapien
tccctttgccaatgattacatcagg

SEQ ID NO: 3335469 - DNA, 25 bp, Homo sapien
ttttccctttgccaatgattacatc

SEQ ID NO: 3335470 - DNA, 25 bp, Homo sapien
agttttccctttgccaatgattaca

SEQ ID NO: 3335471 - DNA, 25 bp, Homo sapien
ttaagtcttcaaatgtattagatac

SEQ ID NO: 3335472 - DNA, 25 bp, Homo sapien
taagtttcctgacaaaatttctctc

SEQ ID NO: 3335473 - DNA, 25 bp, Homo sapien
aagtttcctgacaaaatttctctct

SEQ ID NO: 3335474 - DNA, 25 bp, Homo sapien
ctaagtttcctgacaaaatttctct

SEQ ID NO: 3335475 - DNA, 25 bp, Homo sapien
gtttctacagttaattaattgatta

SEQ ID NO: 3335476 - DNA, 25 bp, Homo sapien
tggtttctacagttaattaattgat

SEQ ID NO: 3335477 - DNA, 25 bp, Homo sapien
gggaacccagaaattcacgcattta

SEQ ID NO: 3335478 - DNA, 25 bp, Homo sapien
tttcaacccaagagacaatctatgg

SEQ ID NO: 3335479 - DNA, 25 bp, Homo sapien
aaagcttattgacctggtctgagca

SEQ ID NO: 3335480 - DNA, 25 bp, Homo sapien
caagttaaacaagcttatgtacagc

SEQ ID NO: 3335481 - DNA, 25 bp, Homo sapien
aatctattttgtcggcatattccca

SEQ ID NO: 3335482 - DNA, 25 bp, Homo sapien
tattttgtcggcatattcccacaag

SEQ ID NO: 3335483 - DNA, 25 bp, Homo sapien
tgtcggcatattcccacaaggtcat

SEQ ID NO: 3335484 - DNA, 25 bp, Homo sapien
aacaatctattttgtcggcatattc

SEQ ID NO: 3335485 - DNA, 25 bp, Homo sapien
agtcggctgtggctcaagtgaatat

SEQ ID NO: 3335486 - DNA, 25 bp, Homo sapien
gagagatcctactaagccaagaggg

SEQ ID NO: 3335487 - DNA, 25 bp, Homo sapien
gctcaagtgaatattgcaggtcatc

SEQ ID NO: 3335488 - DNA, 25 bp, Homo sapien
gggggaacatatgaagtagcctgca

SEQ ID NO: 3335489 - DNA, 25 bp, Homo sapien
cacccgccgaccctgccccgcctgc

SEQ ID NO: 3335490 - DNA, 25 bp, Homo sapien
agcttcccgcatcgcctccgcaccc

SEQ ID NO: 3335491 - DNA, 25 bp, Homo sapien
tccgcacccgccgaccctgccccgc

SEQ ID NO: 3335492 - DNA, 25 bp, Homo sapien
ccgccagcttcccgcatcgcctccg

SEQ ID NO: 3335493 - DNA, 25 bp, Homo sapien
agagaagctgaacaacgcgacggcg

SEQ ID NO: 3335494 - DNA, 25 bp, Homo sapien
aacgcgacggcgaccagggtgatca

SEQ ID NO: 3335495 - DNA, 25 bp, Homo sapien
tggtttgagttatcctgtagatgga

SEQ ID NO: 3335496 - DNA, 25 bp, Homo sapien
gtttgagttatcctgtagatggaga

SEQ ID NO: 3335497 - DNA, 25 bp, Homo sapien
ggaagccgccttgccacagaacttc

SEQ ID NO: 3335498 - DNA, 25 bp, Homo sapien
tgctataaaccgctggccagggcta

SEQ ID NO: 3335499 - DNA, 25 bp, Homo sapien
gaacttctgcaccttttgcttcctg

SEQ ID NO: 3335500 - DNA, 25 bp, Homo sapien
tgctctagggttcagcgcgtgctat

SEQ ID NO: 3335501 - DNA, 25 bp, Homo sapien
aaattgccaaggtgactacttctag

SEQ ID NO: 3335502 - DNA, 25 bp, Homo sapien
ctagggaatggcaggtgatcatctt

SEQ ID NO: 3335503 - DNA, 25 bp, Homo sapien
ttcttgcatggctttggaaattgcc

SEQ ID NO: 3335504 - DNA, 25 bp, Homo sapien
ggtgactacttctagggaatggcag

SEQ ID NO: 3335505 - DNA, 25 bp, Homo sapien
tgacttccgggtcgcggtgcttgaa

SEQ ID NO: 3335506 - DNA, 25 bp, Homo sapien
ccagcgttagcaataggtggagcgc

SEQ ID NO: 3335507 - DNA, 25 bp, Homo sapien
tagttcttccgctcctgtgaggtgg

SEQ ID NO: 3335508 - DNA, 25 bp, Homo sapien
gggtctttgtgcgagccctgccctc

SEQ ID NO: 3335509 - DNA, 25 bp, Homo sapien
cgcgcgaggggggtcggcgcagaga

SEQ ID NO: 3335510 - DNA, 25 bp, Homo sapien
tcggcgcagagacgcccagagccct

SEQ ID NO: 3335511 - DNA, 25 bp, Homo sapien
cctctgctcggcagttctgcgcttt

SEQ ID NO: 3335512 - DNA, 25 bp, Homo sapien
gtgctcaggcgccgctacgcgtgca

SEQ ID NO: 3335513 - DNA, 25 bp, Homo sapien
ctgactgggacagttgtaacgaatt

SEQ ID NO: 3335514 - DNA, 25 bp, Homo sapien
gacagttgtaacgaattatccacat

SEQ ID NO: 3335515 - DNA, 25 bp, Homo sapien
tgactgggacagttgtaacgaatta

SEQ ID NO: 3335516 - DNA, 25 bp, Homo sapien
ctgggacagttgtaacgaattatcc

SEQ ID NO: 3335517 - DNA, 25 bp, Homo sapien
gacaacatcggaagaatgacagaca

SEQ ID NO: 3335518 - DNA, 25 bp, Homo sapien
tccaagacaacatcggaagaatgac

SEQ ID NO: 3335519 - DNA, 25 bp, Homo sapien
cggaagaatgacagacagacgctgc

SEQ ID NO: 3335520 - DNA, 25 bp, Homo sapien
ctgtatccaagacaacatcggaaga

SEQ ID NO: 3335521 - DNA, 25 bp, Homo sapien
tccaaataaccttgacatctctcag

SEQ ID NO: 3335522 - DNA, 25 bp, Homo sapien
ataaccttgacatctctcagcctgg

SEQ ID NO: 3335523 - DNA, 25 bp, Homo sapien
ccacaatcccagcttccaaccaatt

SEQ ID NO: 3335524 - DNA, 25 bp, Homo sapien
gcctggaagttgtccaacactgcca

SEQ ID NO: 3335525 - DNA, 25 bp, Homo sapien
ttcgtaaacactatggtggcagctc

SEQ ID NO: 3335526 - DNA, 25 bp, Homo sapien
tcgtaaacactatggtggcagctca

SEQ ID NO: 3335527 - DNA, 25 bp, Homo sapien
ttctgatttccattctgatacctct

SEQ ID NO: 3335528 - DNA, 25 bp, Homo sapien
taaagaattatgtatgctcctactg

SEQ ID NO: 3335529 - DNA, 25 bp, Homo sapien
tgatttccattctgatacctcttaa

SEQ ID NO: 3335530 - DNA, 25 bp, Homo sapien
ttatgtatgctcctactgcctttat

SEQ ID NO: 3335531 - DNA, 25 bp, Homo sapien
cagcaagtgctgtcaacgattatat

SEQ ID NO: 3335532 - DNA, 25 bp, Homo sapien
cttgaagatgacttgatgactgtgc

SEQ ID NO: 3335533 - DNA, 25 bp, Homo sapien
gaaaccgctctacctacatatgaaa

SEQ ID NO: 3335534 - DNA, 25 bp, Homo sapien
tacctatgtatgcttatgaaaccgc

SEQ ID NO: 3335535 - DNA, 25 bp, Homo sapien
ctttccccttcttaagacactgaga

SEQ ID NO: 3335536 - DNA, 25 bp, Homo sapien
ccagggtatatgctgaatgttttgc

SEQ ID NO: 3335537 - DNA, 25 bp, Homo sapien
cagtcagcaagattcccactggtat

SEQ ID NO: 3335538 - DNA, 25 bp, Homo sapien
tccaccagttggaattgtaattaaa

SEQ ID NO: 3335539 - DNA, 25 bp, Homo sapien
ctcgtttcagttgttcaaagcacac

SEQ ID NO: 3335540 - DNA, 25 bp, Homo sapien
gcacagtccatagtctgccttgact

SEQ ID NO: 3335541 - DNA, 25 bp, Homo sapien
caagtcgcaagaaggaaggtaccaa

SEQ ID NO: 3335542 - DNA, 25 bp, Homo sapien
agcacacaaacataatgacgttcca

SEQ ID NO: 3335543 - DNA, 25 bp, Homo sapien
gataagagccgacaccaagtggcag

SEQ ID NO: 3335544 - DNA, 25 bp, Homo sapien
gccgttggtccttcgttagtgaaca

SEQ ID NO: 3335545 - DNA, 25 bp, Homo sapien
cacacttttgtactgtcctggtgga

SEQ ID NO: 3335546 - DNA, 25 bp, Homo sapien
gacatagctgttgcgcaaaatccag

SEQ ID NO: 3335547 - DNA, 25 bp, Homo sapien
gctctgtacaattgatgatgacact

SEQ ID NO: 3335548 - DNA, 25 bp, Homo sapien
caaaggcctccttcattagatcata

SEQ ID NO: 3335549 - DNA, 25 bp, Homo sapien
gatcatatgttactagctctgtaca

SEQ ID NO: 3335550 - DNA, 25 bp, Homo sapien
ttgatgatgacacttctcatcagat

SEQ ID NO: 3335551 - DNA, 25 bp, Homo sapien
ccgtggagatggctctgtgcttgaa

SEQ ID NO: 3335552 - DNA, 25 bp, Homo sapien
taagtccccgtgtagcgaggtttga

SEQ ID NO: 3335553 - DNA, 25 bp, Homo sapien
attctgtacgcattataagtccccg

SEQ ID NO: 3335554 - DNA, 25 bp, Homo sapien
caaagacccgtcaagccttcggttg

SEQ ID NO: 3335555 - DNA, 25 bp, Homo sapien
ttgcccaatgaatactgccactcct

SEQ ID NO: 3335556 - DNA, 25 bp, Homo sapien
tcgttagaccagctaaaatcttgct

SEQ ID NO: 3335557 - DNA, 25 bp, Homo sapien
tgtgggttgcccaatgaatactgcc

SEQ ID NO: 3335558 - DNA, 25 bp, Homo sapien
actcctccagtcgttagaccagcta

SEQ ID NO: 3335559 - DNA, 25 bp, Homo sapien
tggacgtcgggcattcaccttggac

SEQ ID NO: 3335560 - DNA, 25 bp, Homo sapien
tcctggaccgtgtcgtagaggccga

SEQ ID NO: 3335561 - DNA, 25 bp, Homo sapien
tatacctaataacactggacgtcgg

SEQ ID NO: 3335562 - DNA, 25 bp, Homo sapien
cacagcggtgattgttcccaggaca

SEQ ID NO: 3335563 - DNA, 25 bp, Homo sapien
ccagcgggaaggtgatcacgtccgc

SEQ ID NO: 3335564 - DNA, 25 bp, Homo sapien
aagcacgccgctattccagctgaga

SEQ ID NO: 3335565 - DNA, 25 bp, Homo sapien
gggtgtacgtccgaggctgtcaggc

SEQ ID NO: 3335566 - DNA, 25 bp, Homo sapien
tggagccggactttggccgtgtcca

SEQ ID NO: 3335567 - DNA, 25 bp, Homo sapien
cagcaaacccgatttctgttttttg

SEQ ID NO: 3335568 - DNA, 25 bp, Homo sapien
ttcccttgctcttcacgcctgtccg

SEQ ID NO: 3335569 - DNA, 25 bp, Homo sapien
tgtccgccgggcagcaaacccgatt

SEQ ID NO: 3335570 - DNA, 25 bp, Homo sapien
gctgcagacggagcgcggtgttggg

SEQ ID NO: 3335571 - DNA, 25 bp, Homo sapien
ggcttcgtggcatcgcgccgagtcc

SEQ ID NO: 3335572 - DNA, 25 bp, Homo sapien
gagtccttcagcgtcggcgccagct

SEQ ID NO: 3335573 - DNA, 25 bp, Homo sapien
gattatggatcagaagcaagagccc

SEQ ID NO: 3335574 - DNA, 25 bp, Homo sapien
cagagcttcggcttgaagggatcca

SEQ ID NO: 3335575 - DNA, 25 bp, Homo sapien
gacacttgccagtggaactgcctga

SEQ ID NO: 3335576 - DNA, 25 bp, Homo sapien
tattggatgaggacacttgccagtg

SEQ ID NO: 3335577 - DNA, 25 bp, Homo sapien
gatgaggacacttgccagtggaact

SEQ ID NO: 3335578 - DNA, 25 bp, Homo sapien
cttattggatgaggacacttgccag

SEQ ID NO: 3335579 - DNA, 25 bp, Homo sapien
tgaatctcagagaggatgggacgtg

SEQ ID NO: 3335580 - DNA, 25 bp, Homo sapien
acgtgagaagccctgatactcaggc

SEQ ID NO: 3335581 - DNA, 25 bp, Homo sapien
atgggacgtgagaagccctgatact

SEQ ID NO: 3335582 - DNA, 25 bp, Homo sapien
gagaagccctgatactcaggctcca

SEQ ID NO: 3335583 - DNA, 25 bp, Homo sapien
gagctacaggatttagctttgtgga

SEQ ID NO: 3335584 - DNA, 25 bp, Homo sapien
gatttagctttgtggacttcttctg

SEQ ID NO: 3335585 - DNA, 25 bp, Homo sapien
ctaagagctacaggatttagctttg

SEQ ID NO: 3335586 - DNA, 25 bp, Homo sapien
tttagctttgtggacttcttctggc

SEQ ID NO: 3335587 - DNA, 25 bp, Homo sapien
caggtacgaagcctattaaccaata

SEQ ID NO: 3335588 - DNA, 25 bp, Homo sapien
tattcaatttgccattatgggcatt

SEQ ID NO: 3335589 - DNA, 25 bp, Homo sapien
gtcacccaggtacgaagcctattaa

SEQ ID NO: 3335590 - DNA, 25 bp, Homo sapien
tacgaagcctattaaccaatagtta

SEQ ID NO: 3335591 - DNA, 25 bp, Homo sapien
gataactgataacaattatattcct

SEQ ID NO: 3335592 - DNA, 25 bp, Homo sapien
tttacttaatcaaaatggttgcctg

SEQ ID NO: 3335593 - DNA, 25 bp, Homo sapien
gatcattatggataagcattttaag

SEQ ID NO: 3335594 - DNA, 25 bp, Homo sapien
gaataatgttattgccttaggcagg

SEQ ID NO: 3335595 - DNA, 25 bp, Homo sapien
gcaggtgcgctagctttcatttcca

SEQ ID NO: 3335596 - DNA, 25 bp, Homo sapien
taggatttaccctcgctgactatgc

SEQ ID NO: 3335597 - DNA, 25 bp, Homo sapien
catccagtatcagaagcatcagtac

SEQ ID NO: 3335598 - DNA, 25 bp, Homo sapien
tccccgcaacaagagtgtaatgtac

SEQ ID NO: 3335599 - DNA, 25 bp, Homo sapien
aactcaacacagaagaacataaaaa

SEQ ID NO: 3335600 - DNA, 25 bp, Homo sapien
cacagaagaacataaaaaatccctc

SEQ ID NO: 3335601 - DNA, 25 bp, Homo sapien
ctcaacacagaagaacataaaaaat

SEQ ID NO: 3335602 - DNA, 25 bp, Homo sapien
aaaactcaacacagaagaacataaa

SEQ ID NO: 3335603 - DNA, 25 bp, Homo sapien
gacatggccgagatttcatagtcac

SEQ ID NO: 3335604 - DNA, 25 bp, Homo sapien
ccggacatggccgagatttcatagt

SEQ ID NO: 3335605 - DNA, 25 bp, Homo sapien
gccggacatggccgagatttcatag

SEQ ID NO: 3335606 - DNA, 25 bp, Homo sapien
tcagccggacatggccgagatttca

SEQ ID NO: 3335607 - DNA, 25 bp, Homo sapien
aagtacttgaccagggcaggctcag

SEQ ID NO: 3335608 - DNA, 25 bp, Homo sapien
cgatgtcctcgcagtgcagcttgtc

SEQ ID NO: 3335609 - DNA, 25 bp, Homo sapien
gggcttgcccatcatccggatgttt

SEQ ID NO: 3335610 - DNA, 25 bp, Homo sapien
cacacgggcttgtcaaagtacttga

SEQ ID NO: 3335611 - DNA, 25 bp, Homo sapien
aacagactccaccacgtaaggctgg

SEQ ID NO: 3335612 - DNA, 25 bp, Homo sapien
tcagcaccgagtatgaggacatgga

SEQ ID NO: 3335613 - DNA, 25 bp, Homo sapien
tgtcctccaagggagtgttcctcgc

SEQ ID NO: 3335614 - DNA, 25 bp, Homo sapien
tgtcgtccttggtgtcgtcgtcaga

SEQ ID NO: 3335615 - DNA, 25 bp, Homo sapien
tggggaagagcacgcctgggatgcc

SEQ ID NO: 3335616 - DNA, 25 bp, Homo sapien
ttggggaagagcacgcctgggatgc

SEQ ID NO: 3335617 - DNA, 25 bp, Homo sapien
cttggggaagagcacgcctgggatg

SEQ ID NO: 3335618 - DNA, 25 bp, Homo sapien
ggcaggacggcccactgcctccgct

SEQ ID NO: 3335619 - DNA, 25 bp, Homo sapien
cctttgcaggctgggccacgaacaa

SEQ ID NO: 3335620 - DNA, 25 bp, Homo sapien
tcctttgcaggctgggccacgaaca

SEQ ID NO: 3335621 - DNA, 25 bp, Homo sapien
ctttgcaggctgggccacgaacaac

SEQ ID NO: 3335622 - DNA, 25 bp, Homo sapien
ctcctttgcaggctgggccacgaac

SEQ ID NO: 3335623 - DNA, 25 bp, Homo sapien
tcactgctgccgtggcgtggtacag

SEQ ID NO: 3335624 - DNA, 25 bp, Homo sapien
tgctcattggggtcttcgctgaaca

SEQ ID NO: 3335625 - DNA, 25 bp, Homo sapien
gggtcttcgctgaacatgttataca

SEQ ID NO: 3335626 - DNA, 25 bp, Homo sapien
tgttatacattgtcttacacagttc

SEQ ID NO: 3335627 - DNA, 25 bp, Homo sapien
aaacacaatgtgaaatcttggggga

SEQ ID NO: 3335628 - DNA, 25 bp, Homo sapien
aatgctttagtgctttcagtctcca

SEQ ID NO: 3335629 - DNA, 25 bp, Homo sapien
tctccctggacagaagtaatgcttt

SEQ ID NO: 3335630 - DNA, 25 bp, Homo sapien
acatccatgtacagctcacctcgag

SEQ ID NO: 3335631 - DNA, 25 bp, Homo sapien
tcttaaggaaatccgagactcatct

SEQ ID NO: 3335632 - DNA, 25 bp, Homo sapien
ctcaaataattacgattttcttggg

SEQ ID NO: 3335633 - DNA, 25 bp, Homo sapien
tcaaataattacgattttcttggga

SEQ ID NO: 3335634 - DNA, 25 bp, Homo sapien
ttgcttctgctatccaatccaacaa

SEQ ID NO: 3335635 - DNA, 25 bp, Homo sapien
taggctcaccgtaacaaagccatca

SEQ ID NO: 3335636 - DNA, 25 bp, Homo sapien
tctggctttaggctcaccgtaacaa

SEQ ID NO: 3335637 - DNA, 25 bp, Homo sapien
caccctgtttgcttctgctatccaa

SEQ ID NO: 3335638 - DNA, 25 bp, Homo sapien
cccaaagctggctggtcagacagag

SEQ ID NO: 3335639 - DNA, 25 bp, Homo sapien
ctatgtgttgttgggaaattcctcc

SEQ ID NO: 3335640 - DNA, 25 bp, Homo sapien
caaaatagagaggtgtacaatgccc

SEQ ID NO: 3335641 - DNA, 25 bp, Homo sapien
cattacagggcacatagggacttca

SEQ ID NO: 3335642 - DNA, 25 bp, Homo sapien
ctggttcatcttgatcagaggatgg

SEQ ID NO: 3335643 - DNA, 25 bp, Homo sapien
ttcaaagaagtactgagttgcttca

SEQ ID NO: 3335644 - DNA, 25 bp, Homo sapien
ggttcatcttgatcagaggatggct

SEQ ID NO: 3335645 - DNA, 25 bp, Homo sapien
aagaagtactgagttgcttcaaaag

SEQ ID NO: 3335646 - DNA, 25 bp, Homo sapien
agtttgagcttctctgtgaggtccc

SEQ ID NO: 3335647 - DNA, 25 bp, Homo sapien
gcaagacgtgcattttgtacaggag

SEQ ID NO: 3335648 - DNA, 25 bp, Homo sapien
acgtgcattttgtacaggagtttga

SEQ ID NO: 3335649 - DNA, 25 bp, Homo sapien
caggcaagacgtgcattttgtacag

SEQ ID NO: 3335650 - DNA, 25 bp, Homo sapien
ccagtaggggagaatgagtaataat

SEQ ID NO: 3335651 - DNA, 25 bp, Homo sapien
cattcagtaagtgtactctgccttc

SEQ ID NO: 3335652 - DNA, 25 bp, Homo sapien
tcttctaccttcatgtggccccacc

SEQ ID NO: 3335653 - DNA, 25 bp, Homo sapien
tcatggttcaaggtgtccgctgagt

SEQ ID NO: 3335654 - DNA, 25 bp, Homo sapien
gactttcccatctccataactataa

SEQ ID NO: 3335655 - DNA, 25 bp, Homo sapien
ctgagagttctcccactaatctggg

SEQ ID NO: 3335656 - DNA, 25 bp, Homo sapien
taactataactgaccaatgtaactg

SEQ ID NO: 3335657 - DNA, 25 bp, Homo sapien
taatctggggtatagtttactttgc

SEQ ID NO: 3335658 - DNA, 25 bp, Homo sapien
tagcaagcaggtaggtaacgaagca

SEQ ID NO: 3335659 - DNA, 25 bp, Homo sapien
gatagccattgttcgaatcctgggt

SEQ ID NO: 3335660 - DNA, 25 bp, Homo sapien
taacgaagcataagagtaacagcac

SEQ ID NO: 3335661 - DNA, 25 bp, Homo sapien
aatcctgggtctagcatgtattagc

SEQ ID NO: 3335662 - DNA, 25 bp, Homo sapien
ggctgtctgatgtagaggcaacgat

SEQ ID NO: 3335663 - DNA, 25 bp, Homo sapien
tcatgcaatagtaccacgtccttac

SEQ ID NO: 3335664 - DNA, 25 bp, Homo sapien
tgggcaacactaggcacaactccag

SEQ ID NO: 3335665 - DNA, 25 bp, Homo sapien
tcagtttgcaaacctccccttgtgc

SEQ ID NO: 3335666 - DNA, 25 bp, Homo sapien
taataactggaacaagcgggaggcc

SEQ ID NO: 3335667 - DNA, 25 bp, Homo sapien
aatgcgatactgttccaggtagggc

SEQ ID NO: 3335668 - DNA, 25 bp, Homo sapien
ttagcccagagacaaactcccggaa

SEQ ID NO: 3335669 - DNA, 25 bp, Homo sapien
tcccggaagttaatcaaagagtctc

SEQ ID NO: 3335670 - DNA, 25 bp, Homo sapien
ggtgaatctgtgtgcatcccctggg

SEQ ID NO: 3335671 - DNA, 25 bp, Homo sapien
gaaaacgcccatcctccagtttgga

SEQ ID NO: 3335672 - DNA, 25 bp, Homo sapien
gggaccctcttttgcagcaaatacc

SEQ ID NO: 3335673 - DNA, 25 bp, Homo sapien
tagttctacatacacctccacttga

SEQ ID NO: 3335674 - DNA, 25 bp, Homo sapien
catctgtgaatagctctagaaaaat

SEQ ID NO: 3335675 - DNA, 25 bp, Homo sapien
gaaaaattatcagcgtaggaaccac

SEQ ID NO: 3335676 - DNA, 25 bp, Homo sapien
aagtgtgtggtcatccaatttcaca

SEQ ID NO: 3335677 - DNA, 25 bp, Homo sapien
gtaggaaccactccggcgagcagaa

SEQ ID NO: 3335678 - DNA, 25 bp, Homo sapien
gaaaaaaggcagcctctttattcat

SEQ ID NO: 3335679 - DNA, 25 bp, Homo sapien
tggaaaaaaggcagcctctttattc

SEQ ID NO: 3335680 - DNA, 25 bp, Homo sapien
cttggaaaaaaggcagcctctttat

SEQ ID NO: 3335681 - DNA, 25 bp, Homo sapien
ggaaaaaaggcagcctctttattca

SEQ ID NO: 3335682 - DNA, 25 bp, Homo sapien
tcatggtgactctggtagaaatatc

SEQ ID NO: 3335683 - DNA, 25 bp, Homo sapien
atggtgactctggtagaaatatcca

SEQ ID NO: 3335684 - DNA, 25 bp, Homo sapien
gtgactctggtagaaatatccactc

SEQ ID NO: 3335685 - DNA, 25 bp, Homo sapien
ggtgactctggtagaaatatccact

SEQ ID NO: 3335686 - DNA, 25 bp, Homo sapien
agaacgtttcttctggtcctcagca

SEQ ID NO: 3335687 - DNA, 25 bp, Homo sapien
ccccatgccctgagaacgtttcttc

SEQ ID NO: 3335688 - DNA, 25 bp, Homo sapien
tccagctgctacttccacttcgttt

SEQ ID NO: 3335689 - DNA, 25 bp, Homo sapien
aaaacctgatctgaattgcatcatt

SEQ ID NO: 3335690 - DNA, 25 bp, Homo sapien
aagtttctgtcacaatggttcgtac

SEQ ID NO: 3335691 - DNA, 25 bp, Homo sapien
tctctgtttgaatctcatctgttca

SEQ ID NO: 3335692 - DNA, 25 bp, Homo sapien
gtttcgtagtatcctccagcgtctg

SEQ ID NO: 3335693 - DNA, 25 bp, Homo sapien
caaatctgcccggatagttccgaat

SEQ ID NO: 3335694 - DNA, 25 bp, Homo sapien
cacgttgcgtttcgtagtatcctcc

SEQ ID NO: 3335695 - DNA, 25 bp, Homo sapien
ctgtaaaggagcaatattggtgtct

SEQ ID NO: 3335696 - DNA, 25 bp, Homo sapien
gctagccggcgatattatcacaacg

SEQ ID NO: 3335697 - DNA, 25 bp, Homo sapien
ggcacttccaggttgctagcacgtt

SEQ ID NO: 3335698 - DNA, 25 bp, Homo sapien
taatttggccgatacagcaggctac

SEQ ID NO: 3335699 - DNA, 25 bp, Homo sapien
gagtgcctttgtgagcctttgacct

SEQ ID NO: 3335700 - DNA, 25 bp, Homo sapien
gtcaaatgaatcttccgaagagtcg

SEQ ID NO: 3335701 - DNA, 25 bp, Homo sapien
cttagtcaaatgaatcttccgaaga

SEQ ID NO: 3335702 - DNA, 25 bp, Homo sapien
caaatgaatcttccgaagagtcgct

SEQ ID NO: 3335703 - DNA, 25 bp, Homo sapien
tagtcaaatgaatcttccgaagagt

SEQ ID NO: 3335704 - DNA, 25 bp, Homo sapien
gaaggcatcagtttggagctagccg

SEQ ID NO: 3335705 - DNA, 25 bp, Homo sapien
ccagcaggctgtcataaggagttaa

SEQ ID NO: 3335706 - DNA, 25 bp, Homo sapien
ctggcttaggtttcagagtccggga

SEQ ID NO: 3335707 - DNA, 25 bp, Homo sapien
gagtagctgctcacttcggaggcaa

SEQ ID NO: 3335708 - DNA, 25 bp, Homo sapien
agagggcctttgtcgagcttgcttg

SEQ ID NO: 3335709 - DNA, 25 bp, Homo sapien
cagcccctgccagtttttgatttcc

SEQ ID NO: 3335710 - DNA, 25 bp, Homo sapien
ggtgacttcaacttgtcctgcttgg

SEQ ID NO: 3335711 - DNA, 25 bp, Homo sapien
tgaaaacttgaagggtgacttcaac

SEQ ID NO: 3335712 - DNA, 25 bp, Homo sapien
ccaataagggcattgtgttcctcct

SEQ ID NO: 3335713 - DNA, 25 bp, Homo sapien
ttcagctgacttatgaacttagacg

SEQ ID NO: 3335714 - DNA, 25 bp, Homo sapien
tatgaacttagacgaagcctcgtgt

SEQ ID NO: 3335715 - DNA, 25 bp, Homo sapien
agacgaagcctcgtgttcatcccaa

SEQ ID NO: 3335716 - DNA, 25 bp, Homo sapien
gactcctcgtgcctgtcctcggagt

SEQ ID NO: 3335717 - DNA, 25 bp, Homo sapien
atgggactcctcgtgcctgtcctcg

SEQ ID NO: 3335718 - DNA, 25 bp, Homo sapien
cgacagggctctcgggggcgtgggt

SEQ ID NO: 3335719 - DNA, 25 bp, Homo sapien
tttccacggcctgcgtgccaagctt

SEQ ID NO: 3335720 - DNA, 25 bp, Homo sapien
gcttctccttgtactggtgctggac

SEQ ID NO: 3335721 - DNA, 25 bp, Homo sapien
ggacgtccatgtcctccacggagga

SEQ ID NO: 3335722 - DNA, 25 bp, Homo sapien
ggcccgccacattctgaagtccagt

SEQ ID NO: 3335723 - DNA, 25 bp, Homo sapien
cacggaggacttcatggggtacatc

SEQ ID NO: 3335724 - DNA, 25 bp, Homo sapien
tgtacttattgtgggcttcagctcc

SEQ ID NO: 3335725 - DNA, 25 bp, Homo sapien
tgagcgggtcccaccacgggcccat

SEQ ID NO: 3335726 - DNA, 25 bp, Homo sapien
aggttcttgagcgggtcccaccacg

SEQ ID NO: 3335727 - DNA, 25 bp, Homo sapien
ttcttgagcgggtcccaccacgggc

SEQ ID NO: 3335728 - DNA, 25 bp, Homo sapien
gggaatccacgcatgcttcaggccc

SEQ ID NO: 3335729 - DNA, 25 bp, Homo sapien
gatctcgctcagcagggtgatgccg

SEQ ID NO: 3335730 - DNA, 25 bp, Homo sapien
agtgtcaggcgcttggtcccatcag

SEQ ID NO: 3335731 - DNA, 25 bp, Homo sapien
caatgcggccgtgcagggttctgtc

SEQ ID NO: 3335732 - DNA, 25 bp, Homo sapien
cagggtaggtgtaggcaggcgcctt

SEQ ID NO: 3335733 - DNA, 25 bp, Homo sapien
taggtgtaggcaggcgccttggaca

SEQ ID NO: 3335734 - DNA, 25 bp, Homo sapien
gtaggcaggcgccttggacacgtcc

SEQ ID NO: 3335735 - DNA, 25 bp, Homo sapien
ggtagcagggtaggtgtaggcaggc

SEQ ID NO: 3335736 - DNA, 25 bp, Homo sapien
gggggacgcgcggggcgatggcggc

SEQ ID NO: 3335737 - DNA, 25 bp, Homo sapien
ggggacgcgcggggcgatggcggcg

SEQ ID NO: 3335738 - DNA, 25 bp, Homo sapien
cttgccatagatgctcgcagggccg

SEQ ID NO: 3335739 - DNA, 25 bp, Homo sapien
tgccatagatgctcgcagggccggc

SEQ ID NO: 3335740 - DNA, 25 bp, Homo sapien
gccatagatgctcgcagggccggca

SEQ ID NO: 3335741 - DNA, 25 bp, Homo sapien
ttgccatagatgctcgcagggccgg

SEQ ID NO: 3335742 - DNA, 25 bp, Homo sapien
gcccccaggccccagttgctccact

SEQ ID NO: 3335743 - DNA, 25 bp, Homo sapien
gcagcagcatcccagggcaagcggt

SEQ ID NO: 3335744 - DNA, 25 bp, Homo sapien
ctttcgcagcagcatcccagggcaa

SEQ ID NO: 3335745 - DNA, 25 bp, Homo sapien
agcatcccagggcaagcggtggcca

SEQ ID NO: 3335746 - DNA, 25 bp, Homo sapien
aggaagtgctgcagcgaaaagagct

SEQ ID NO: 3335747 - DNA, 25 bp, Homo sapien
aagtgctgcagcgaaaagagctgca

SEQ ID NO: 3335748 - DNA, 25 bp, Homo sapien
tgctgcagcgaaaagagctgcaact

SEQ ID NO: 3335749 - DNA, 25 bp, Homo sapien
gctgcagcgaaaagagctgcaactg

SEQ ID NO: 3335750 - DNA, 25 bp, Homo sapien
tgatctctgggaatgaccaacagct

SEQ ID NO: 3335751 - DNA, 25 bp, Homo sapien
gactgggagtccctgacaaactggt

SEQ ID NO: 3335752 - DNA, 25 bp, Homo sapien
tgcagagatggaggtcccaagcccc

SEQ ID NO: 3335753 - DNA, 25 bp, Homo sapien
catcagctccgcaaagtgaggcagg

SEQ ID NO: 3335754 - DNA, 25 bp, Homo sapien
ttaggagcacagctggtagggtgca

SEQ ID NO: 3335755 - DNA, 25 bp, Homo sapien
ggctgtgctctttcacattactcag

SEQ ID NO: 3335756 - DNA, 25 bp, Homo sapien
tcctcatctgcttggctgtgctctt

SEQ ID NO: 3335757 - DNA, 25 bp, Homo sapien
cattactcagtgacagagggtgctc

SEQ ID NO: 3335758 - DNA, 25 bp, Homo sapien
ctcctggtgtctggcccggtgtcca

SEQ ID NO: 3335759 - DNA, 25 bp, Homo sapien
gcttcaccctggacaccagagcccg

SEQ ID NO: 3335760 - DNA, 25 bp, Homo sapien
tgccttggcactctccggcctctct

SEQ ID NO: 3335761 - DNA, 25 bp, Homo sapien
ccttggcactctccggcctctctgg

SEQ ID NO: 3335762 - DNA, 25 bp, Homo sapien
agagcccgcgcatccaaatgccttg

SEQ ID NO: 3335763 - DNA, 25 bp, Homo sapien
aactgggccataggatgcctgtgat

SEQ ID NO: 3335764 - DNA, 25 bp, Homo sapien
caaactgggccataggatgcctgtg

SEQ ID NO: 3335765 - DNA, 25 bp, Homo sapien
tcaaactgggccataggatgcctgt

SEQ ID NO: 3335766 - DNA, 25 bp, Homo sapien
cttcaaactgggccataggatgcct

SEQ ID NO: 3335767 - DNA, 25 bp, Homo sapien
cagttccttgagaagtgctagttca

SEQ ID NO: 3335768 - DNA, 25 bp, Homo sapien
ccaaaacaaagacacaggtgtggat

SEQ ID NO: 3335769 - DNA, 25 bp, Homo sapien
aaacagaatttgtgctggaggtgag

SEQ ID NO: 3335770 - DNA, 25 bp, Homo sapien
gatataataccttctctcaggcacc

SEQ ID NO: 3335771 - DNA, 25 bp, Homo sapien
caacaaataggtgtgtggcccttca

SEQ ID NO: 3335772 - DNA, 25 bp, Homo sapien
tctctcccccagacttagaacaagg

SEQ ID NO: 3335773 - DNA, 25 bp, Homo sapien
tgcccctgtgggtactgataccaac

SEQ ID NO: 3335774 - DNA, 25 bp, Homo sapien
caattttcaaagcagacggtacttc

SEQ ID NO: 3335775 - DNA, 25 bp, Homo sapien
tcacgcactgaaagacctggtaata

SEQ ID NO: 3335776 - DNA, 25 bp, Homo sapien
ttgtcctgtgataggatgtctggca

SEQ ID NO: 3335777 - DNA, 25 bp, Homo sapien
tgcggctttgtcctgtgataggatg

SEQ ID NO: 3335778 - DNA, 25 bp, Homo sapien
cctggtaatataggcactgatataa

SEQ ID NO: 3335779 - DNA, 25 bp, Homo sapien
gctgctactagatcaggcttcagga

SEQ ID NO: 3335780 - DNA, 25 bp, Homo sapien
gttcaatctgagctgctactagatc

SEQ ID NO: 3335781 - DNA, 25 bp, Homo sapien
gctactagatcaggcttcaggatgt

SEQ ID NO: 3335782 - DNA, 25 bp, Homo sapien
tctgagctgctactagatcaggctt

SEQ ID NO: 3335783 - DNA, 25 bp, Homo sapien
ggtaaggttccacatcatcgctgag

SEQ ID NO: 3335784 - DNA, 25 bp, Homo sapien
ggaagttctgatgagtctaaagatg

SEQ ID NO: 3335785 - DNA, 25 bp, Homo sapien
tctaaagatgtctacctcagggtaa

SEQ ID NO: 3335786 - DNA, 25 bp, Homo sapien
tgggaggcagtgtgctgtctttatt

SEQ ID NO: 3335787 - DNA, 25 bp, Homo sapien
caggtcttgcatgcagtcgtacagc

SEQ ID NO: 3335788 - DNA, 25 bp, Homo sapien
gtagtctcgtgctagctcctcaaag

SEQ ID NO: 3335789 - DNA, 25 bp, Homo sapien
acatttgcatccagcacagctaggg

SEQ ID NO: 3335790 - DNA, 25 bp, Homo sapien
tggtggaaatcacgcccaggtcttg

SEQ ID NO: 3335791 - DNA, 25 bp, Homo sapien
tgtatacaaaaaggcgcagcttagc

SEQ ID NO: 3335792 - DNA, 25 bp, Homo sapien
cgatgtatacaaaaaggcgcagctt

SEQ ID NO: 3335793 - DNA, 25 bp, Homo sapien
gcagcgatgtatacaaaaaggcgca

SEQ ID NO: 3335794 - DNA, 25 bp, Homo sapien
ctgtggcagcgatgtatacaaaaag

SEQ ID NO: 3335795 - DNA, 25 bp, Homo sapien
gacgagacataggttgaaatgttaa

SEQ ID NO: 3335796 - DNA, 25 bp, Homo sapien
aaaagcatcttcttgacgagacata

SEQ ID NO: 3335797 - DNA, 25 bp, Homo sapien
gcatcttcttgacgagacataggtt

SEQ ID NO: 3335798 - DNA, 25 bp, Homo sapien
tcttgacgagacataggttgaaatg

SEQ ID NO: 3335799 - DNA, 25 bp, Homo sapien
gcagcagcactgaagtgacaatatt

SEQ ID NO: 3335800 - DNA, 25 bp, Homo sapien
ttgtagtaatctgggagcatgcgct

SEQ ID NO: 3335801 - DNA, 25 bp, Homo sapien
aactctggtgttgtagtaatctggg

SEQ ID NO: 3335802 - DNA, 25 bp, Homo sapien
agcatgcgctcacacaaagccacaa

SEQ ID NO: 3335803 - DNA, 25 bp, Homo sapien
tgggatttcgaaaagcataagctgt

SEQ ID NO: 3335804 - DNA, 25 bp, Homo sapien
tgttaagactctccttagtgcagca

SEQ ID NO: 3335805 - DNA, 25 bp, Homo sapien
ggcgagattatacttccccatggac

SEQ ID NO: 3335806 - DNA, 25 bp, Homo sapien
tcatagtacccaggatgtgtggcct

SEQ ID NO: 3335807 - DNA, 25 bp, Homo sapien
gaaatacgggctcagttatcacccc

SEQ ID NO: 3335808 - DNA, 25 bp, Homo sapien
tgcatttcatttcagcgggtacaga

SEQ ID NO: 3335809 - DNA, 25 bp, Homo sapien
tcatgatgccgtcaccctaagggtc

SEQ ID NO: 3335810 - DNA, 25 bp, Homo sapien
gaaacactgggtctaactctcaaca

SEQ ID NO: 3335811 - DNA, 25 bp, Homo sapien
ctccccacgcatgctctccgggatg

SEQ ID NO: 3335812 - DNA, 25 bp, Homo sapien
tgtgcggtacatgcagatcccttgc

SEQ ID NO: 3335813 - DNA, 25 bp, Homo sapien
gatcccttgcccatactcagcaaag

SEQ ID NO: 3335814 - DNA, 25 bp, Homo sapien
gctcccgcgttttctctgtgcggta

SEQ ID NO: 3335815 - DNA, 25 bp, Homo sapien
gaaacattatgacatccaaagtacc

SEQ ID NO: 3335816 - DNA, 25 bp, Homo sapien
aatgaaacattatgacatccaaagt

SEQ ID NO: 3335817 - DNA, 25 bp, Homo sapien
tgaaacattatgacatccaaagtac

SEQ ID NO: 3335818 - DNA, 25 bp, Homo sapien
ataatgaaacattatgacatccaaa

SEQ ID NO: 3335819 - DNA, 25 bp, Homo sapien
ggacgctgttgccatttaggttaaa

SEQ ID NO: 3335820 - DNA, 25 bp, Homo sapien
acatggtcatcagggtctgtgtggc

SEQ ID NO: 3335821 - DNA, 25 bp, Homo sapien
taaactggcgctctccatcagcatc

SEQ ID NO: 3335822 - DNA, 25 bp, Homo sapien
gagaccgccgccgatacatggtcat

SEQ ID NO: 3335823 - DNA, 25 bp, Homo sapien
agacgaggctgctgggtcgagagta

SEQ ID NO: 3335824 - DNA, 25 bp, Homo sapien
gagacgaggctgctgggtcgagagt

SEQ ID NO: 3335825 - DNA, 25 bp, Homo sapien
ggagacgaggctgctgggtcgagag

SEQ ID NO: 3335826 - DNA, 25 bp, Homo sapien
gaggagacgaggctgctgggtcgag

SEQ ID NO: 3335827 - DNA, 25 bp, Homo sapien
tctgtatggttatcaaaagctacat

SEQ ID NO: 3335828 - DNA, 25 bp, Homo sapien
ttcagtgtcttctgtatggttatca

SEQ ID NO: 3335829 - DNA, 25 bp, Homo sapien
catttttttcccatggtgtttcttg

SEQ ID NO: 3335830 - DNA, 25 bp, Homo sapien
tgtcttctgtatggttatcaaaagc

SEQ ID NO: 3335831 - DNA, 25 bp, Homo sapien
cacaggaacaggataaaccaaaaat

SEQ ID NO: 3335832 - DNA, 25 bp, Homo sapien
gcacaggaacaggataaaccaaaaa

SEQ ID NO: 3335833 - DNA, 25 bp, Homo sapien
ggcacaggaacaggataaaccaaaa

SEQ ID NO: 3335834 - DNA, 25 bp, Homo sapien
ttcaagttggcaaataggaaggtca

SEQ ID NO: 3335835 - DNA, 25 bp, Homo sapien
gatcctctgcactagaaagtctcta

SEQ ID NO: 3335836 - DNA, 25 bp, Homo sapien
gttgtaacttcctgcaaactccttg

SEQ ID NO: 3335837 - DNA, 25 bp, Homo sapien
aggaaggtcatcctgtttcgggtgc

SEQ ID NO: 3335838 - DNA, 25 bp, Homo sapien
gaaaagtgcacggtatctctcactc

SEQ ID NO: 3335839 - DNA, 25 bp, Homo sapien
gagtgcagtctgtgtggccatctaa

SEQ ID NO: 3335840 - DNA, 25 bp, Homo sapien
catctttgggcagccggaaaagtgc

SEQ ID NO: 3335841 - DNA, 25 bp, Homo sapien
tcacggagcgggataatgaggctac

SEQ ID NO: 3335842 - DNA, 25 bp, Homo sapien
cctactagccatgtgacaaagttac

SEQ ID NO: 3335843 - DNA, 25 bp, Homo sapien
gctgagctatcgtatcccttggaca

SEQ ID NO: 3335844 - DNA, 25 bp, Homo sapien
tcacattcagactttgaggcttctc

SEQ ID NO: 3335845 - DNA, 25 bp, Homo sapien
tgaacatgtctcaaatcaccaagga

SEQ ID NO: 3335846 - DNA, 25 bp, Homo sapien
cctcatggctatgttggcaagctgc

SEQ ID NO: 3335847 - DNA, 25 bp, Homo sapien
tgagtgatgtctacccaccggatga

SEQ ID NO: 3335848 - DNA, 25 bp, Homo sapien
ccttttgagtttgggcagggatcga

SEQ ID NO: 3335849 - DNA, 25 bp, Homo sapien
cattgtctaagagttgcctcatggc

SEQ ID NO: 3335850 - DNA, 25 bp, Homo sapien
tgctgaggtacatccaaccctgacg

SEQ ID NO: 3335851 - DNA, 25 bp, Homo sapien
tagctgcaagagtaatagttgacga

SEQ ID NO: 3335852 - DNA, 25 bp, Homo sapien
aaagcaaaggtggttaatgctgagg

SEQ ID NO: 3335853 - DNA, 25 bp, Homo sapien
tggcttctttaaacttctccgtgtc

SEQ ID NO: 3335854 - DNA, 25 bp, Homo sapien
tctcagggccatgaataacactggg

SEQ ID NO: 3335855 - DNA, 25 bp, Homo sapien
agggccatgaataacactggggagc

SEQ ID NO: 3335856 - DNA, 25 bp, Homo sapien
tgtctcagggccatgaataacactg

SEQ ID NO: 3335857 - DNA, 25 bp, Homo sapien
tcagggccatgaataacactgggga

SEQ ID NO: 3335858 - DNA, 25 bp, Homo sapien
ggagagtgtctgcaagagattttgc

SEQ ID NO: 3335859 - DNA, 25 bp, Homo sapien
tgcaagagattttgctcaagccatt

SEQ ID NO: 3335860 - DNA, 25 bp, Homo sapien
tgtctgcaagagattttgctcaagc

SEQ ID NO: 3335861 - DNA, 25 bp, Homo sapien
ctcacaaatgtggtgatatcattct

SEQ ID NO: 3335862 - DNA, 25 bp, Homo sapien
cacccgattgttccatctgtgcttg

SEQ ID NO: 3335863 - DNA, 25 bp, Homo sapien
cttccttgtctgtaaccaggtcacc

SEQ ID NO: 3335864 - DNA, 25 bp, Homo sapien
cgattgttccatctgtgcttgttgg

SEQ ID NO: 3335865 - DNA, 25 bp, Homo sapien
catgaatcctccacccgattgttcc

SEQ ID NO: 3335866 - DNA, 25 bp, Homo sapien
tgcctacatgtctatcttcctttac

SEQ ID NO: 3335867 - DNA, 25 bp, Homo sapien
tatgaggtaggtaatgcctacatgt

SEQ ID NO: 3335868 - DNA, 25 bp, Homo sapien
ttctctactgctcgctatgaggtag

SEQ ID NO: 3335869 - DNA, 25 bp, Homo sapien
tttctctactgctcgctatgaggta

SEQ ID NO: 3335870 - DNA, 25 bp, Homo sapien
ggctgcttcggtactgccaaaaggg

SEQ ID NO: 3335871 - DNA, 25 bp, Homo sapien
tgctgggaccataagtctcaggatc

SEQ ID NO: 3335872 - DNA, 25 bp, Homo sapien
gtgtcacatgaaaaggctggccttt

SEQ ID NO: 3335873 - DNA, 25 bp, Homo sapien
tcaagtctttcagcatgctcagtgc

SEQ ID NO: 3335874 - DNA, 25 bp, Homo sapien
tactgaaaagtacgagccaggactg

SEQ ID NO: 3335875 - DNA, 25 bp, Homo sapien
ccaggttctggtcactaaaagtacg

SEQ ID NO: 3335876 - DNA, 25 bp, Homo sapien
cactttcctaaatgcacaaagaagc

SEQ ID NO: 3335877 - DNA, 25 bp, Homo sapien
caaagaagcagtgaggacaggtgtt

SEQ ID NO: 3335878 - DNA, 25 bp, Homo sapien
gagactccaaaggaaacgtgtttga

SEQ ID NO: 3335879 - DNA, 25 bp, Homo sapien
caaatgccactttttctggaccact

SEQ ID NO: 3335880 - DNA, 25 bp, Homo sapien
tgagactccaaaggaaacgtgtttg

SEQ ID NO: 3335881 - DNA, 25 bp, Homo sapien
tggaccactccttaaaaacctgaga

SEQ ID NO: 3335882 - DNA, 25 bp, Homo sapien
taaactctgggtcttaccagccgct

SEQ ID NO: 3335883 - DNA, 25 bp, Homo sapien
gaatagtccttgagttacacagacc

SEQ ID NO: 3335884 - DNA, 25 bp, Homo sapien
cagcatggtgccacttaagaagtcc

SEQ ID NO: 3335885 - DNA, 25 bp, Homo sapien
catgcagaaggcaactaaattaccc

SEQ ID NO: 3335886 - DNA, 25 bp, Homo sapien
ccagaaattgaggtgggaagaccga

SEQ ID NO: 3335887 - DNA, 25 bp, Homo sapien
aaaggatctcgcaggcagtttggca

SEQ ID NO: 3335888 - DNA, 25 bp, Homo sapien
tgcaaaggatctcgcaggcagtttg

SEQ ID NO: 3335889 - DNA, 25 bp, Homo sapien
cagaaattgaggtgggaagaccgag

SEQ ID NO: 3335890 - DNA, 25 bp, Homo sapien
tagactgtacgtttctcaagagcag

SEQ ID NO: 3335891 - DNA, 25 bp, Homo sapien
ttaaatggaactgtaaggcactggt

SEQ ID NO: 3335892 - DNA, 25 bp, Homo sapien
aattacccaggcaatggagcttgcc

SEQ ID NO: 3335893 - DNA, 25 bp, Homo sapien
tctaattctgcaggaggctagccta

SEQ ID NO: 3335894 - DNA, 25 bp, Homo sapien
actgtgatcaatggagatagctcat

SEQ ID NO: 3335895 - DNA, 25 bp, Homo sapien
tgatcaatggagatagctcatgacc

SEQ ID NO: 3335896 - DNA, 25 bp, Homo sapien
gatagctcatgaccttcggaccagc

SEQ ID NO: 3335897 - DNA, 25 bp, Homo sapien
tggagatagctcatgaccttcggac

SEQ ID NO: 3335898 - DNA, 25 bp, Homo sapien
tacaagattcggtaaggagcgaccc

SEQ ID NO: 3335899 - DNA, 25 bp, Homo sapien
cacaggcgatggtccagtagaccag

SEQ ID NO: 3335900 - DNA, 25 bp, Homo sapien
ggcgctggagtccaacacaacatca

SEQ ID NO: 3335901 - DNA, 25 bp, Homo sapien
aacatcaagggtacccaccagcagg

SEQ ID NO: 3335902 - DNA, 25 bp, Homo sapien
tgtgcaaaaccatgggtacggtaac

SEQ ID NO: 3335903 - DNA, 25 bp, Homo sapien
tgtaacaggatgtgttttcaataaa

SEQ ID NO: 3335904 - DNA, 25 bp, Homo sapien
cacccttattttatcaagatgtcta

SEQ ID NO: 3335905 - DNA, 25 bp, Homo sapien
tcaagatgtctattgtaacaggatg

SEQ ID NO: 3335906 - DNA, 25 bp, Homo sapien
gaaggttcccggacttgcaccgcac

SEQ ID NO: 3335907 - DNA, 25 bp, Homo sapien
agaaggttcccggacttgcaccgca

SEQ ID NO: 3335908 - DNA, 25 bp, Homo sapien
tgaagaaggttcccggacttgcacc

SEQ ID NO: 3335909 - DNA, 25 bp, Homo sapien
tttgaagaaggttcccggacttgca

SEQ ID NO: 3335910 - DNA, 25 bp, Homo sapien
tcatttgccacagccattaattggt

SEQ ID NO: 3335911 - DNA, 25 bp, Homo sapien
ctctgtcatgcagtcctcatttgcc

SEQ ID NO: 3335912 - DNA, 25 bp, Homo sapien
gacaggatgaaaccacctcattgga

SEQ ID NO: 3335913 - DNA, 25 bp, Homo sapien
cacgtttcccataacgacaggatga

SEQ ID NO: 3335914 - DNA, 25 bp, Homo sapien
gaaatctggtgttggtcgggtaaca

SEQ ID NO: 3335915 - DNA, 25 bp, Homo sapien
tcgggtaacatcagccacaccatta

SEQ ID NO: 3335916 - DNA, 25 bp, Homo sapien
acagctgtctgtaccaaggaacata

SEQ ID NO: 3335917 - DNA, 25 bp, Homo sapien
cacaccattacaagttaaaaccagt

SEQ ID NO: 3335918 - DNA, 25 bp, Homo sapien
ggtggaaagggtgattatttgaatc

SEQ ID NO: 3335919 - DNA, 25 bp, Homo sapien
ttggtggaaagggtgattatttgaa

SEQ ID NO: 3335920 - DNA, 25 bp, Homo sapien
gaaagggtgattatttgaatcagta

SEQ ID NO: 3335921 - DNA, 25 bp, Homo sapien
agggtgattatttgaatcagtaaca

SEQ ID NO: 3335922 - DNA, 25 bp, Homo sapien
gacactgtacaatacaatcgccact

SEQ ID NO: 3335923 - DNA, 25 bp, Homo sapien
ctccttgacgttagagctgagtgtc

SEQ ID NO: 3335924 - DNA, 25 bp, Homo sapien
tcctattgatacaatccaacagata

SEQ ID NO: 3335925 - DNA, 25 bp, Homo sapien
catcactgcagactgtctccttgac

SEQ ID NO: 3335926 - DNA, 25 bp, Homo sapien
tatagccataagctgtatctccatc

SEQ ID NO: 3335927 - DNA, 25 bp, Homo sapien
tagccataagctgtatctccatcca

SEQ ID NO: 3335928 - DNA, 25 bp, Homo sapien
agccataagctgtatctccatccat

SEQ ID NO: 3335929 - DNA, 25 bp, Homo sapien
ctctatagccataagctgtatctcc

SEQ ID NO: 3335930 - DNA, 25 bp, Homo sapien
aatgctattaccgagctgatggcca

SEQ ID NO: 3335931 - DNA, 25 bp, Homo sapien
atggtaaatgctattaccgagctga

SEQ ID NO: 3335932 - DNA, 25 bp, Homo sapien
gctattaccgagctgatggccactt

SEQ ID NO: 3335933 - DNA, 25 bp, Homo sapien
tgctattaccgagctgatggccact

SEQ ID NO: 3335934 - DNA, 25 bp, Homo sapien
gatgattaaccctaaagaaactgcc

SEQ ID NO: 3335935 - DNA, 25 bp, Homo sapien
gaaaatactattgcccactctgcat

SEQ ID NO: 3335936 - DNA, 25 bp, Homo sapien
tatttagcagacaccactgctgggt

SEQ ID NO: 3335937 - DNA, 25 bp, Homo sapien
tgggctctctaagacaaagatctgg

SEQ ID NO: 3335938 - DNA, 25 bp, Homo sapien
tgtttactggcactaagaaagcggg

SEQ ID NO: 3335939 - DNA, 25 bp, Homo sapien
taccgagtgcttttctgggcaaaca

SEQ ID NO: 3335940 - DNA, 25 bp, Homo sapien
aacatccaattgagcacagtccctg

SEQ ID NO: 3335941 - DNA, 25 bp, Homo sapien
tgaatagcaagacctactgtggcgt

SEQ ID NO: 3335942 - DNA, 25 bp, Homo sapien
tcctgcagggatcggccacggtcct

SEQ ID NO: 3335943 - DNA, 25 bp, Homo sapien
tcgatgcctcgcatacaacgaggca

SEQ ID NO: 3335944 - DNA, 25 bp, Homo sapien
cctcgcatacaacgaggcagggcgg

SEQ ID NO: 3335945 - DNA, 25 bp, Homo sapien
acgactctcgatgcctcgcatacaa

SEQ ID NO: 3335946 - DNA, 25 bp, Homo sapien
tgaagtatgggttggccctctcggt

SEQ ID NO: 3335947 - DNA, 25 bp, Homo sapien
caggatgaagtatgggttggccctc

SEQ ID NO: 3335948 - DNA, 25 bp, Homo sapien
ggttggccctctcggtgatccacag

SEQ ID NO: 3335949 - DNA, 25 bp, Homo sapien
cggtgatccacagcgcgttggccag

SEQ ID NO: 3335950 - DNA, 25 bp, Homo sapien
attcggccccgcggtcagggccaag

SEQ ID NO: 3335951 - DNA, 25 bp, Homo sapien
ggcgggcgcacaatgggcccgtggg

SEQ ID NO: 3335952 - DNA, 25 bp, Homo sapien
gtatagctcagtcccgggatccggc

SEQ ID NO: 3335953 - DNA, 25 bp, Homo sapien
acgcgggcgcggcaagcagcatcct

SEQ ID NO: 3335954 - DNA, 25 bp, Homo sapien
caggcgccactagggaagcccagct

SEQ ID NO: 3335955 - DNA, 25 bp, Homo sapien
ccgctggaaggacgctccggacact

SEQ ID NO: 3335956 - DNA, 25 bp, Homo sapien
cgacaacgcggctcacttggagcgg

SEQ ID NO: 3335957 - DNA, 25 bp, Homo sapien
tccggacactgcgaatgaatgacga

SEQ ID NO: 3335958 - DNA, 25 bp, Homo sapien
agacctggagctcggttagagaccc

SEQ ID NO: 3335959 - DNA, 25 bp, Homo sapien
tgtttaaggttgacgctctatggga

SEQ ID NO: 3335960 - DNA, 25 bp, Homo sapien
ctctatgggatagcgccaccccttt

SEQ ID NO: 3335961 - DNA, 25 bp, Homo sapien
gtcggaagccaacgcagccaatggt

SEQ ID NO: 3335962 - DNA, 25 bp, Homo sapien
ttcttttgcagagcatttactgctg

SEQ ID NO: 3335963 - DNA, 25 bp, Homo sapien
ttttgcagagcatttactgctgagt

SEQ ID NO: 3335964 - DNA, 25 bp, Homo sapien
ttgcagagcatttactgctgagttt

SEQ ID NO: 3335965 - DNA, 25 bp, Homo sapien
cttttgcagagcatttactgctgag

SEQ ID NO: 3335966 - DNA, 25 bp, Homo sapien
cattttcatcataaagttgtactgg

SEQ ID NO: 3335967 - DNA, 25 bp, Homo sapien
ttgtcacttgcaatccccttatagg

SEQ ID NO: 3335968 - DNA, 25 bp, Homo sapien
gttgtactggtgagaattttgctct

SEQ ID NO: 3335969 - DNA, 25 bp, Homo sapien
taaaatacagacctaaattgacatt

SEQ ID NO: 3335970 - DNA, 25 bp, Homo sapien
ctaggaggtcgcaaaggtgactgcc

SEQ ID NO: 3335971 - DNA, 25 bp, Homo sapien
aaaggtgactgccagcttgcctgtc

SEQ ID NO: 3335972 - DNA, 25 bp, Homo sapien
ggtgactgccagcttgcctgtctgc

SEQ ID NO: 3335973 - DNA, 25 bp, Homo sapien
caaaggtgactgccagcttgcctgt

SEQ ID NO: 3335974 - DNA, 25 bp, Homo sapien
ggctctggtctctggaacgctccat

SEQ ID NO: 3335975 - DNA, 25 bp, Homo sapien
cagctaggggaatataagccagttg

SEQ ID NO: 3335976 - DNA, 25 bp, Homo sapien
taggggaatataagccagttggcat

SEQ ID NO: 3335977 - DNA, 25 bp, Homo sapien
gctaggggaatataagccagttggc

SEQ ID NO: 3335978 - DNA, 25 bp, Homo sapien
atgcagctaggggaatataagccag

SEQ ID NO: 3335979 - DNA, 25 bp, Homo sapien
tggtccgtgtctactccaacagtgc

SEQ ID NO: 3335980 - DNA, 25 bp, Homo sapien
tcactggtccgtgtctactccaaca

SEQ ID NO: 3335981 - DNA, 25 bp, Homo sapien
cactggtccgtgtctactccaacag

SEQ ID NO: 3335982 - DNA, 25 bp, Homo sapien
ctggtccgtgtctactccaacagtg

SEQ ID NO: 3335983 - DNA, 25 bp, Homo sapien
tggacagagcttaatgccttgagca

SEQ ID NO: 3335984 - DNA, 25 bp, Homo sapien
gaagcttcactatctgctctgtcac

SEQ ID NO: 3335985 - DNA, 25 bp, Homo sapien
ggacctggacagagcttaatgcctt

SEQ ID NO: 3335986 - DNA, 25 bp, Homo sapien
gcatttgcagaagcttcactatctg

SEQ ID NO: 3335987 - DNA, 25 bp, Homo sapien
gatcctttgttccttggcggtcagc

SEQ ID NO: 3335988 - DNA, 25 bp, Homo sapien
atcctttgttccttggcggtcagcc

SEQ ID NO: 3335989 - DNA, 25 bp, Homo sapien
gaccaaggattgagctgggagatat

SEQ ID NO: 3335990 - DNA, 25 bp, Homo sapien
atattggcgtagtggcagagctgaa

SEQ ID NO: 3335991 - DNA, 25 bp, Homo sapien
agtggaaatcctgtttgttgaagac

SEQ ID NO: 3335992 - DNA, 25 bp, Homo sapien
attgtttgatacagtcaaagggaag

SEQ ID NO: 3335993 - DNA, 25 bp, Homo sapien
ggcttggggctgacagtgggctcac

SEQ ID NO: 3335994 - DNA, 25 bp, Homo sapien
gggcattcaactagagaagcaggct

SEQ ID NO: 3335995 - DNA, 25 bp, Homo sapien
caactagagaagcaggcttggggct

SEQ ID NO: 3335996 - DNA, 25 bp, Homo sapien
ccctccccagggcattcaactagag

SEQ ID NO: 3335997 - DNA, 25 bp, Homo sapien
tgccatctccacagcgaggttggtg

SEQ ID NO: 3335998 - DNA, 25 bp, Homo sapien
cattgtcgcagcaattactctgagc

SEQ ID NO: 3335999 - DNA, 25 bp, Homo sapien
tttgcagagaccgtgcatcctgggc

SEQ ID NO: 3336000 - DNA, 25 bp, Homo sapien
ggttggtgctgaatcctctagctga

SEQ ID NO: 3336001 - DNA, 25 bp, Homo sapien
taagctagaaagtttgcactctgct

SEQ ID NO: 3336002 - DNA, 25 bp, Homo sapien
tacagctagctccaatgcaatgtgc

SEQ ID NO: 3336003 - DNA, 25 bp, Homo sapien
tccaccagaatgtcctacagctagc

SEQ ID NO: 3336004 - DNA, 25 bp, Homo sapien
taaaactgaggttgtcatctgacct

SEQ ID NO: 3336005 - DNA, 25 bp, Homo sapien
agcagaatcagcatttacctgggct

SEQ ID NO: 3336006 - DNA, 25 bp, Homo sapien
cagaatcagcatttacctgggctgc

SEQ ID NO: 3336007 - DNA, 25 bp, Homo sapien
gcagaatcagcatttacctgggctg

SEQ ID NO: 3336008 - DNA, 25 bp, Homo sapien
ggcactgggaaccgaggcaagtctc

SEQ ID NO: 3336009 - DNA, 25 bp, Homo sapien
gggcactgggaaccgaggcaagtct

SEQ ID NO: 3336010 - DNA, 25 bp, Homo sapien
ttgggcactgggaaccgaggcaagt

SEQ ID NO: 3336011 - DNA, 25 bp, Homo sapien
tgttgggcactgggaaccgaggcaa

SEQ ID NO: 3336012 - DNA, 25 bp, Homo sapien
tcccgcagcagttcagaaagtttaa

SEQ ID NO: 3336013 - DNA, 25 bp, Homo sapien
tgctgggaagcaacaattgcattcc

SEQ ID NO: 3336014 - DNA, 25 bp, Homo sapien
ccgcagcagttcagaaagtttaatg

SEQ ID NO: 3336015 - DNA, 25 bp, Homo sapien
ttatcccccaaagaatgaggagatg

SEQ ID NO: 3336016 - DNA, 25 bp, Homo sapien
tttctcctccggcagctttagtgca

SEQ ID NO: 3336017 - DNA, 25 bp, Homo sapien
tcctgtctaccctcaaggtctgact

SEQ ID NO: 3336018 - DNA, 25 bp, Homo sapien
tgtctaccctcaaggtctgacttct

SEQ ID NO: 3336019 - DNA, 25 bp, Homo sapien
gaaggagttgtccacggctgtttcc

SEQ ID NO: 3336020 - DNA, 25 bp, Homo sapien
ctggctgacccagtttgtcattcat

SEQ ID NO: 3336021 - DNA, 25 bp, Homo sapien
tgtcttcagtatttattttattcat

SEQ ID NO: 3336022 - DNA, 25 bp, Homo sapien
ctgtcttcagtatttattttattca

SEQ ID NO: 3336023 - DNA, 25 bp, Homo sapien
gtcttcagtatttattttattcatt

SEQ ID NO: 3336024 - DNA, 25 bp, Homo sapien
tttccccttgtcaactaggagcagg

SEQ ID NO: 3336025 - DNA, 25 bp, Homo sapien
gcacagcatgatagcaagccaggct

SEQ ID NO: 3336026 - DNA, 25 bp, Homo sapien
tttacagcaaatgatgtctggcagc

SEQ ID NO: 3336027 - DNA, 25 bp, Homo sapien
gatgccctggcatgcgtgtgactct

SEQ ID NO: 3336028 - DNA, 25 bp, Homo sapien
gctaagagaaggttggtgcctgcca

SEQ ID NO: 3336029 - DNA, 25 bp, Homo sapien
caactcagggataggcaacaaagtc

SEQ ID NO: 3336030 - DNA, 25 bp, Homo sapien
gatagtccataagcatagtgctcag

SEQ ID NO: 3336031 - DNA, 25 bp, Homo sapien
gcctgccacttgacttacctgagaa

SEQ ID NO: 3336032 - DNA, 25 bp, Homo sapien
tttagccagtacgtaagaacacgat

SEQ ID NO: 3336033 - DNA, 25 bp, Homo sapien
tagacaatgccgagatggaaccatc

SEQ ID NO: 3336034 - DNA, 25 bp, Homo sapien
ggaaccatcatctactacctgcaga

SEQ ID NO: 3336035 - DNA, 25 bp, Homo sapien
tataaatcaaggaagctcagtcaca

SEQ ID NO: 3336036 - DNA, 25 bp, Homo sapien
gaacagtaagtaccatggatgccaa

SEQ ID NO: 3336037 - DNA, 25 bp, Homo sapien
tatgaagcactcaaggcaggtgaag

SEQ ID NO: 3336038 - DNA, 25 bp, Homo sapien
gaataattgcgattactccagcaga

SEQ ID NO: 3336039 - DNA, 25 bp, Homo sapien
tattaagtgcaaacgtcagtggtag

SEQ ID NO: 3336040 - DNA, 25 bp, Homo sapien
gacttgcttcattagttctgggatg

SEQ ID NO: 3336041 - DNA, 25 bp, Homo sapien
caatcaaattgctcgatattaaggg

SEQ ID NO: 3336042 - DNA, 25 bp, Homo sapien
agctccctgatcagagatcctgcca

SEQ ID NO: 3336043 - DNA, 25 bp, Homo sapien
ggccacgtctagcatctggacttgc

SEQ ID NO: 3336044 - DNA, 25 bp, Homo sapien
tagatgaccagagttgacactgcag

SEQ ID NO: 3336045 - DNA, 25 bp, Homo sapien
tagccacataggaggtagcagttcc

SEQ ID NO: 3336046 - DNA, 25 bp, Homo sapien
ggagtgactccatagcccagatttt

SEQ ID NO: 3336047 - DNA, 25 bp, Homo sapien
accaagtagagaccggatgatcaca

SEQ ID NO: 3336048 - DNA, 25 bp, Homo sapien
gcacaccatgtttcagcaggcggca

SEQ ID NO: 3336049 - DNA, 25 bp, Homo sapien
ttcatgctgggaggtcaagaccaca

SEQ ID NO: 3336050 - DNA, 25 bp, Homo sapien
tcagcattcttgaacggagcgccct

SEQ ID NO: 3336051 - DNA, 25 bp, Homo sapien
tggttaatccaagccgcagcctggt

SEQ ID NO: 3336052 - DNA, 25 bp, Homo sapien
ccattgccatgatcaaggaaatgtc

SEQ ID NO: 3336053 - DNA, 25 bp, Homo sapien
cacagtcctggtcagtggaaagttc

SEQ ID NO: 3336054 - DNA, 25 bp, Homo sapien
tggaaagttctacatcagacagtcc

SEQ ID NO: 3336055 - DNA, 25 bp, Homo sapien
aacctccattgccatgatcaaggaa

SEQ ID NO: 3336056 - DNA, 25 bp, Homo sapien
ctcagcagattccatagattcattc

SEQ ID NO: 3336057 - DNA, 25 bp, Homo sapien
ttcaaatgtgaattagttaccaata

SEQ ID NO: 3336058 - DNA, 25 bp, Homo sapien
gacccttgatgctgttttgtttggc

SEQ ID NO: 3336059 - DNA, 25 bp, Homo sapien
gataaggccagggacagaacttgaa

SEQ ID NO: 3336060 - DNA, 25 bp, Homo sapien
taatacctgtctgattcccagatgg

SEQ ID NO: 3336061 - DNA, 25 bp, Homo sapien
atcagtagcctaaactgtggttaac

SEQ ID NO: 3336062 - DNA, 25 bp, Homo sapien
cagtagcctaaactgtggttaacca

SEQ ID NO: 3336063 - DNA, 25 bp, Homo sapien
tgtgacctactttgttctcaaaact

SEQ ID NO: 3336064 - DNA, 25 bp, Homo sapien
tactttgttctcaaaactattgctt

SEQ ID NO: 3336065 - DNA, 25 bp, Homo sapien
aagtttccctttgtgacacaggcat

SEQ ID NO: 3336066 - DNA, 25 bp, Homo sapien
gattcttaacttaaggattagtgat

SEQ ID NO: 3336067 - DNA, 25 bp, Homo sapien
ttaaggattagtgatttgcagggtg

SEQ ID NO: 3336068 - DNA, 25 bp, Homo sapien
acttaaggattagtgatttgcaggg

SEQ ID NO: 3336069 - DNA, 25 bp, Homo sapien
cttaacttaaggattagtgatttgc

SEQ ID NO: 3336070 - DNA, 25 bp, Homo sapien
ggccttttcctggtagttttcatca

SEQ ID NO: 3336071 - DNA, 25 bp, Homo sapien
ttatagctacatataggccttttcc

SEQ ID NO: 3336072 - DNA, 25 bp, Homo sapien
ttcctggtagttttcatcagattct

SEQ ID NO: 3336073 - DNA, 25 bp, Homo sapien
atttatagctacatataggcctttt

SEQ ID NO: 3336074 - DNA, 25 bp, Homo sapien
ctaagaaccgttcacttaaatgatt

SEQ ID NO: 3336075 - DNA, 25 bp, Homo sapien
ggctaagaaccgttcacttaaatga

SEQ ID NO: 3336076 - DNA, 25 bp, Homo sapien
gctaagaaccgttcacttaaatgat

SEQ ID NO: 3336077 - DNA, 25 bp, Homo sapien
aggctaagaaccgttcacttaaatg

SEQ ID NO: 3336078 - DNA, 25 bp, Homo sapien
ggtgagttggataacacattacagt

SEQ ID NO: 3336079 - DNA, 25 bp, Homo sapien
gataacacattacagtaagcaacag

SEQ ID NO: 3336080 - DNA, 25 bp, Homo sapien
ccctggtgagttggataacacatta

SEQ ID NO: 3336081 - DNA, 25 bp, Homo sapien
gttggataacacattacagtaagca

SEQ ID NO: 3336082 - DNA, 25 bp, Homo sapien
actgctgctgatgcttatcttcttg

SEQ ID NO: 3336083 - DNA, 25 bp, Homo sapien
aagaaaaatggcatccttctgtcca

SEQ ID NO: 3336084 - DNA, 25 bp, Homo sapien
aaaatggcatccttctgtccactgc

SEQ ID NO: 3336085 - DNA, 25 bp, Homo sapien
cactgctgctgatgcttatcttctt

SEQ ID NO: 3336086 - DNA, 25 bp, Homo sapien
gacgtgctttgcctcaaaagggctg

SEQ ID NO: 3336087 - DNA, 25 bp, Homo sapien
ccataaatttgggattgcaaggctg

SEQ ID NO: 3336088 - DNA, 25 bp, Homo sapien
tatccaaacaaagtgaagagtgtcc

SEQ ID NO: 3336089 - DNA, 25 bp, Homo sapien
ggcagagtcacaggtggcaccagtt

SEQ ID NO: 3336090 - DNA, 25 bp, Homo sapien
tttgctgctgtttccgctatttcat

SEQ ID NO: 3336091 - DNA, 25 bp, Homo sapien
gatagacagatgctggatctcacaa

SEQ ID NO: 3336092 - DNA, 25 bp, Homo sapien
ctacagctgtggacggaggccaact

SEQ ID NO: 3336093 - DNA, 25 bp, Homo sapien
gaatcccagaaggagatcaggctac

SEQ ID NO: 3336094 - DNA, 25 bp, Homo sapien
agacagggtccgctgcgtataggaa

SEQ ID NO: 3336095 - DNA, 25 bp, Homo sapien
tggttgtgtcatactcaggctgagt

SEQ ID NO: 3336096 - DNA, 25 bp, Homo sapien
ctgtggtctaaattgattgattctc

SEQ ID NO: 3336097 - DNA, 25 bp, Homo sapien
ggctgagtgctccaagtagcaatat

SEQ ID NO: 3336098 - DNA, 25 bp, Homo sapien
aggctgtttgtgaatctgcagatcc

SEQ ID NO: 3336099 - DNA, 25 bp, Homo sapien
atggaggagaaatgttattgcggaa

SEQ ID NO: 3336100 - DNA, 25 bp, Homo sapien
ggcagtctcgctttgagtgggcttt

SEQ ID NO: 3336101 - DNA, 25 bp, Homo sapien
acaggaaagccctggcagtctcgct

SEQ ID NO: 3336102 - DNA, 25 bp, Homo sapien
gaggagaaatgttattgcggaaaac

SEQ ID NO: 3336103 - DNA, 25 bp, Homo sapien
tggcatgtgcttattgcagagatct

SEQ ID NO: 3336104 - DNA, 25 bp, Homo sapien
gattgggtagttgccatctgcgaag

SEQ ID NO: 3336105 - DNA, 25 bp, Homo sapien
gaagcttgacgatgatggcatgtgc

SEQ ID NO: 3336106 - DNA, 25 bp, Homo sapien
cctgtggatcgtggattgggtagtt

SEQ ID NO: 3336107 - DNA, 25 bp, Homo sapien
gcttcatcaattgctccctcaataa

SEQ ID NO: 3336108 - DNA, 25 bp, Homo sapien
ggtctacaggcatttacaagtttta

SEQ ID NO: 3336109 - DNA, 25 bp, Homo sapien
tgttttcctgttcggggtgtggtca

SEQ ID NO: 3336110 - DNA, 25 bp, Homo sapien
gtggtcagagcaggtctacaggcat

SEQ ID NO: 3336111 - DNA, 25 bp, Homo sapien
gctgtctgtttcgctgtgttttcct

SEQ ID NO: 3336112 - DNA, 25 bp, Homo sapien
tgtctgtttcgctgtgttttccttt

SEQ ID NO: 3336113 - DNA, 25 bp, Homo sapien
ggctgtctgtttcgctgtgttttcc

SEQ ID NO: 3336114 - DNA, 25 bp, Homo sapien
ctgtctgtttcgctgtgttttcctt

SEQ ID NO: 3336115 - DNA, 25 bp, Homo sapien
gaaagacacttcgtataaaagttgc

SEQ ID NO: 3336116 - DNA, 25 bp, Homo sapien
aagaaaataccctcaaatgcttcaa

SEQ ID NO: 3336117 - DNA, 25 bp, Homo sapien
tatattagactgaatagtaggtact

SEQ ID NO: 3336118 - DNA, 25 bp, Homo sapien
gtgaataggttacttctgtcaagag

SEQ ID NO: 3336119 - DNA, 25 bp, Homo sapien
taccacagggaagcggacatggaga

SEQ ID NO: 3336120 - DNA, 25 bp, Homo sapien
tccagatccatgaccctatgtgcct

SEQ ID NO: 3336121 - DNA, 25 bp, Homo sapien
gtgcctcaggtaccacagggaagcg

SEQ ID NO: 3336122 - DNA, 25 bp, Homo sapien
ccctatgtgcctcaggtaccacagg

SEQ ID NO: 3336123 - DNA, 25 bp, Homo sapien
gagccctggtgtcagtgtgtgggca

SEQ ID NO: 3336124 - DNA, 25 bp, Homo sapien
gtgagccctggtgtcagtgtgtggg

SEQ ID NO: 3336125 - DNA, 25 bp, Homo sapien
tgagccctggtgtcagtgtgtgggc

SEQ ID NO: 3336126 - DNA, 25 bp, Homo sapien
tgtgagccctggtgtcagtgtgtgg

SEQ ID NO: 3336127 - DNA, 25 bp, Homo sapien
gcaacagtccttctggctatgtcac

SEQ ID NO: 3336128 - DNA, 25 bp, Homo sapien
ggctatgtcactttaagtatggcag

SEQ ID NO: 3336129 - DNA, 25 bp, Homo sapien
tcactttaagtatggcagaactcac

SEQ ID NO: 3336130 - DNA, 25 bp, Homo sapien
ttccaattcctacaaggcaacagtc

SEQ ID NO: 3336131 - DNA, 25 bp, Homo sapien
agtgggcaagtcgtccatgcagtcg

SEQ ID NO: 3336132 - DNA, 25 bp, Homo sapien
tgtcgctggcacctgtgatctggtt

SEQ ID NO: 3336133 - DNA, 25 bp, Homo sapien
gtaaagatgacgtctccctcctggg

SEQ ID NO: 3336134 - DNA, 25 bp, Homo sapien
tgtatcctggaccacctgcaaggct

SEQ ID NO: 3336135 - DNA, 25 bp, Homo sapien
cgggatccctagggctttaagaatg

SEQ ID NO: 3336136 - DNA, 25 bp, Homo sapien
tccctagggctttaagaatgttcat

SEQ ID NO: 3336137 - DNA, 25 bp, Homo sapien
atccctagggctttaagaatgttca

SEQ ID NO: 3336138 - DNA, 25 bp, Homo sapien
gatccctagggctttaagaatgttc

SEQ ID NO: 3336139 - DNA, 25 bp, Homo sapien
acatgggacaggtacgatggtctag

SEQ ID NO: 3336140 - DNA, 25 bp, Homo sapien
tcaacacaggacttgtggaaaagat

SEQ ID NO: 3336141 - DNA, 25 bp, Homo sapien
tagaagccaggggtcaacacaggac

SEQ ID NO: 3336142 - DNA, 25 bp, Homo sapien
caggtacgatggtctagaagccagg

SEQ ID NO: 3336143 - DNA, 25 bp, Homo sapien
aatgagaaccatacatcttagagcg

SEQ ID NO: 3336144 - DNA, 25 bp, Homo sapien
gcaatgagaaccatacatcttagag

SEQ ID NO: 3336145 - DNA, 25 bp, Homo sapien
accatacatcttagagcggcggtaa

SEQ ID NO: 3336146 - DNA, 25 bp, Homo sapien
gagaaccatacatcttagagcggcg

SEQ ID NO: 3336147 - DNA, 25 bp, Homo sapien
ggtgttgctcctgggaaaaaggcaa

SEQ ID NO: 3336148 - DNA, 25 bp, Homo sapien
ctggtgttgctcctgggaaaaaggc

SEQ ID NO: 3336149 - DNA, 25 bp, Homo sapien
aactggtgttgctcctgggaaaaag

SEQ ID NO: 3336150 - DNA, 25 bp, Homo sapien
caactggtgttgctcctgggaaaaa

SEQ ID NO: 3336151 - DNA, 25 bp, Homo sapien
cataggctgagtcagaatgacagca

SEQ ID NO: 3336152 - DNA, 25 bp, Homo sapien
tacacctcctctggatgctaagttt

SEQ ID NO: 3336153 - DNA, 25 bp, Homo sapien
ggtcgttgttctcaaacaccctcag

SEQ ID NO: 3336154 - DNA, 25 bp, Homo sapien
tatttaatactacagcggaaaagcc

SEQ ID NO: 3336155 - DNA, 25 bp, Homo sapien
gaggaaattctgctcaagactatag

SEQ ID NO: 3336156 - DNA, 25 bp, Homo sapien
tgaccaacatatccctccaattagg

SEQ ID NO: 3336157 - DNA, 25 bp, Homo sapien
tataggcctgtcctgaagacttcag

SEQ ID NO: 3336158 - DNA, 25 bp, Homo sapien
tctggtttgctcaattcgctgttgc

SEQ ID NO: 3336159 - DNA, 25 bp, Homo sapien
aaggggagctctggaactgatacag

SEQ ID NO: 3336160 - DNA, 25 bp, Homo sapien
agctctggaactgatacagaaattt

SEQ ID NO: 3336161 - DNA, 25 bp, Homo sapien
ggagctctggaactgatacagaaat

SEQ ID NO: 3336162 - DNA, 25 bp, Homo sapien
gggagctctggaactgatacagaaa

SEQ ID NO: 3336163 - DNA, 25 bp, Homo sapien
aatgaaaacaatagtgaagagatgc

SEQ ID NO: 3336164 - DNA, 25 bp, Homo sapien
gagacaagcgataaaatgattttga

SEQ ID NO: 3336165 - DNA, 25 bp, Homo sapien
agagatgcaccaagaatgtcagcag

SEQ ID NO: 3336166 - DNA, 25 bp, Homo sapien
tcatgggtctcagaaagagacaagc

SEQ ID NO: 3336167 - DNA, 25 bp, Homo sapien
catagggctctaaataatcttcaag

SEQ ID NO: 3336168 - DNA, 25 bp, Homo sapien
gcagagataaaagatgttgctccaa

SEQ ID NO: 3336169 - DNA, 25 bp, Homo sapien
tgttgctccaagaggcattctgtag

SEQ ID NO: 3336170 - DNA, 25 bp, Homo sapien
cgcatagggctctaaataatcttca

SEQ ID NO: 3336171 - DNA, 25 bp, Homo sapien
gtacccttcaatacaaactgcacag

SEQ ID NO: 3336172 - DNA, 25 bp, Homo sapien
acgtcattgggcttgtacccttcaa

SEQ ID NO: 3336173 - DNA, 25 bp, Homo sapien
caatacaaactgcacagttgtcaaa

SEQ ID NO: 3336174 - DNA, 25 bp, Homo sapien
gcagggcaggatccggacaacgtca

SEQ ID NO: 3336175 - DNA, 25 bp, Homo sapien
ccaaggagagcttgcctggagcaaa

SEQ ID NO: 3336176 - DNA, 25 bp, Homo sapien
aatatccaagccaaaacccaaggag

SEQ ID NO: 3336177 - DNA, 25 bp, Homo sapien
ggaagcacagatgagcctattttct

SEQ ID NO: 3336178 - DNA, 25 bp, Homo sapien
aaagctttccgctgtgctggtgcca

SEQ ID NO: 3336179 - DNA, 25 bp, Homo sapien
tcttgatggtcctgatctggagttt

SEQ ID NO: 3336180 - DNA, 25 bp, Homo sapien
ccttcttgatggtcctgatctggag

SEQ ID NO: 3336181 - DNA, 25 bp, Homo sapien
gatggtcctgatctggagtttgctg

SEQ ID NO: 3336182 - DNA, 25 bp, Homo sapien
ttgatggtcctgatctggagtttgc

SEQ ID NO: 3336183 - DNA, 25 bp, Homo sapien
cagaacagatggtccagatacctgg

SEQ ID NO: 3336184 - DNA, 25 bp, Homo sapien
aaacatagcattttggcagcggtgg

SEQ ID NO: 3336185 - DNA, 25 bp, Homo sapien
gtttttgattgcacccagtacgaag

SEQ ID NO: 3336186 - DNA, 25 bp, Homo sapien
tgtgacattcgttgagtcaagcctc

SEQ ID NO: 3336187 - DNA, 25 bp, Homo sapien
ggcatcgatgggctattttcttaaa

SEQ ID NO: 3336188 - DNA, 25 bp, Homo sapien
taaagtactcatccaggggcatgat

SEQ ID NO: 3336189 - DNA, 25 bp, Homo sapien
cacactggtggcatcgatgggctat

SEQ ID NO: 3336190 - DNA, 25 bp, Homo sapien
ctacacggtgtagaagtccacacac

SEQ ID NO: 3336191 - DNA, 25 bp, Homo sapien
tgaatggctggatacttcgacaatg

SEQ ID NO: 3336192 - DNA, 25 bp, Homo sapien
gagccttcatctaacctgaaagtca

SEQ ID NO: 3336193 - DNA, 25 bp, Homo sapien
tacttcgacaatgtaaaataaatgg

SEQ ID NO: 3336194 - DNA, 25 bp, Homo sapien
tgtgagccttcatctaacctgaaag

SEQ ID NO: 3336195 - DNA, 25 bp, Homo sapien
catgcgagggaaatgatcatcagga

SEQ ID NO: 3336196 - DNA, 25 bp, Homo sapien
ggcatttgcatatcgaaacctctgg

SEQ ID NO: 3336197 - DNA, 25 bp, Homo sapien
taataaaagacgagccatgcgaggg

SEQ ID NO: 3336198 - DNA, 25 bp, Homo sapien
caaacacaaccgaagtgcggctcac

SEQ ID NO: 3336199 - DNA, 25 bp, Homo sapien
tatttctgcaagttccgggttccga

SEQ ID NO: 3336200 - DNA, 25 bp, Homo sapien
tgtcacggtgatgtttctttccagc

SEQ ID NO: 3336201 - DNA, 25 bp, Homo sapien
cttttggctcaggaatcattatggc

SEQ ID NO: 3336202 - DNA, 25 bp, Homo sapien
tcattatggccacgatgtcttctac

SEQ ID NO: 3336203 - DNA, 25 bp, Homo sapien
gaagcagtacagataattccaggat

SEQ ID NO: 3336204 - DNA, 25 bp, Homo sapien
cacaaggcacataccaagcaaggag

SEQ ID NO: 3336205 - DNA, 25 bp, Homo sapien
ctgctccagttattagacagcttgg

SEQ ID NO: 3336206 - DNA, 25 bp, Homo sapien
gacagcttggagcaaaagtaccatt

SEQ ID NO: 3336207 - DNA, 25 bp, Homo sapien
gctgatgttcctgaagtgcattgta

SEQ ID NO: 3336208 - DNA, 25 bp, Homo sapien
tctcagtgtagatttgtcattacag

SEQ ID NO: 3336209 - DNA, 25 bp, Homo sapien
tatgtaaggctcatataagttgctg

SEQ ID NO: 3336210 - DNA, 25 bp, Homo sapien
tctccagaagacctgcaagctcaaa

SEQ ID NO: 3336211 - DNA, 25 bp, Homo sapien
tgagcttatggacaactgagagcac

SEQ ID NO: 3336212 - DNA, 25 bp, Homo sapien
tatggacaactgagagcacctggat

SEQ ID NO: 3336213 - DNA, 25 bp, Homo sapien
gagcacctggatattgtagggacct

SEQ ID NO: 3336214 - DNA, 25 bp, Homo sapien
gacaaggatgagcttatggacaact

SEQ ID NO: 3336215 - DNA, 25 bp, Homo sapien
ttggtcaatgaacggaaactcgaag

SEQ ID NO: 3336216 - DNA, 25 bp, Homo sapien
tgccatttctgcaacgttaaaaggt

SEQ ID NO: 3336217 - DNA, 25 bp, Homo sapien
gccatttctgcaacgttaaaaggta

SEQ ID NO: 3336218 - DNA, 25 bp, Homo sapien
ctgttttggtcaatgaacggaaact

SEQ ID NO: 3336219 - DNA, 25 bp, Homo sapien
tagcacatcccagcggtgattctgt

SEQ ID NO: 3336220 - DNA, 25 bp, Homo sapien
gaaattaagaccttgaagcactcct

SEQ ID NO: 3336221 - DNA, 25 bp, Homo sapien
tgagcatgggtcactggaacaatca

SEQ ID NO: 3336222 - DNA, 25 bp, Homo sapien
tctgtacaggctatctcatcagctg

SEQ ID NO: 3336223 - DNA, 25 bp, Homo sapien
aaagcccacaaaacttgctctgcct

SEQ ID NO: 3336224 - DNA, 25 bp, Homo sapien
cgctgcccacgtctgctttctagaa

SEQ ID NO: 3336225 - DNA, 25 bp, Homo sapien
aaatgcgctgcccacgtctgctttc

SEQ ID NO: 3336226 - DNA, 25 bp, Homo sapien
ttgctctgcctgaacaaggaagaaa

SEQ ID NO: 3336227 - DNA, 25 bp, Homo sapien
cctttcatgctagggacaactgtga

SEQ ID NO: 3336228 - DNA, 25 bp, Homo sapien
aactgtgaagttggccatcctagac

SEQ ID NO: 3336229 - DNA, 25 bp, Homo sapien
gaatgggctggacacagtcatgagc

SEQ ID NO: 3336230 - DNA, 25 bp, Homo sapien
cctagacggagaggatatctgctgc

SEQ ID NO: 3336231 - DNA, 25 bp, Homo sapien
aaaagagttgggatttggcggcatg

SEQ ID NO: 3336232 - DNA, 25 bp, Homo sapien
ggaaaagagttgggatttggcggca

SEQ ID NO: 3336233 - DNA, 25 bp, Homo sapien
gagttgggatttggcggcatgtcaa

SEQ ID NO: 3336234 - DNA, 25 bp, Homo sapien
aagagttgggatttggcggcatgtc

SEQ ID NO: 3336235 - DNA, 25 bp, Homo sapien
catcaaggactcttgtggagaagca

SEQ ID NO: 3336236 - DNA, 25 bp, Homo sapien
agctgagctaaagtgggagctatgc

SEQ ID NO: 3336237 - DNA, 25 bp, Homo sapien
atcaaggactcttgtggagaagcac

SEQ ID NO: 3336238 - DNA, 25 bp, Homo sapien
tcttcatcattgtcaatctccttac

SEQ ID NO: 3336239 - DNA, 25 bp, Homo sapien
catcattgtcaatctccttacattt

SEQ ID NO: 3336240 - DNA, 25 bp, Homo sapien
attgtcaatctccttacatttcccc

SEQ ID NO: 3336241 - DNA, 25 bp, Homo sapien
cttcatcattgtcaatctccttaca

SEQ ID NO: 3336242 - DNA, 25 bp, Homo sapien
tctgcttttatgctagtatcgtgca

SEQ ID NO: 3336243 - DNA, 25 bp, Homo sapien
tcttctgcgtgtggatatctggtat

SEQ ID NO: 3336244 - DNA, 25 bp, Homo sapien
gacatggcataagataagcgtcaat

SEQ ID NO: 3336245 - DNA, 25 bp, Homo sapien
ctataaacacgggatatctttccat

SEQ ID NO: 3336246 - DNA, 25 bp, Homo sapien
gactgaagactgaccgaaacaggga

SEQ ID NO: 3336247 - DNA, 25 bp, Homo sapien
ggtgtgtgaaaccaaggaactccta

SEQ ID NO: 3336248 - DNA, 25 bp, Homo sapien
gctgataacactctccacgtcctga

SEQ ID NO: 3336249 - DNA, 25 bp, Homo sapien
tgcctatatggagtagtcccgctct

SEQ ID NO: 3336250 - DNA, 25 bp, Homo sapien
tgcaactccacactctaagctaagg

SEQ ID NO: 3336251 - DNA, 25 bp, Homo sapien
ggtataacctgcacaagagcaccag

SEQ ID NO: 3336252 - DNA, 25 bp, Homo sapien
aaggctatgggcatcttcatcaaga

SEQ ID NO: 3336253 - DNA, 25 bp, Homo sapien
ggctgatgctagaccatgtaccatt

SEQ ID NO: 3336254 - DNA, 25 bp, Homo sapien
tgcatactacatacacagtgttggg

SEQ ID NO: 3336255 - DNA, 25 bp, Homo sapien
gctggaactaaacaacccctctgtg

SEQ ID NO: 3336256 - DNA, 25 bp, Homo sapien
tactctgctactgatggaaattctg

SEQ ID NO: 3336257 - DNA, 25 bp, Homo sapien
tactgcgtagagcattagacaactg

SEQ ID NO: 3336258 - DNA, 25 bp, Homo sapien
ttagaaagctaaaaagcttgatgcc

SEQ ID NO: 3336259 - DNA, 25 bp, Homo sapien
tgccaaggactaaattatctccagc

SEQ ID NO: 3336260 - DNA, 25 bp, Homo sapien
caataaactgttggatcaaaagagc

SEQ ID NO: 3336261 - DNA, 25 bp, Homo sapien
tctccagctgtaagagtagatttca

SEQ ID NO: 3336262 - DNA, 25 bp, Homo sapien
gggaattattacaagagagtgcctc

SEQ ID NO: 3336263 - DNA, 25 bp, Homo sapien
taggtaagaggaggtatgtttgtca

SEQ ID NO: 3336264 - DNA, 25 bp, Homo sapien
ggcaattcatcatgctcgattttct

SEQ ID NO: 3336265 - DNA, 25 bp, Homo sapien
catacgatctcacaattattgggcc

SEQ ID NO: 3336266 - DNA, 25 bp, Homo sapien
cacaatcctcgctgtcaacaggatt

SEQ ID NO: 3336267 - DNA, 25 bp, Homo sapien
ctgaaggtatttcgaccccttcctg

SEQ ID NO: 3336268 - DNA, 25 bp, Homo sapien
ttcctgcactcacacaatcctcgct

SEQ ID NO: 3336269 - DNA, 25 bp, Homo sapien
gaaggtatttcgaccccttcctgca

SEQ ID NO: 3336270 - DNA, 25 bp, Homo sapien
cactttcccgatcagttttccgctg

SEQ ID NO: 3336271 - DNA, 25 bp, Homo sapien
ccgatcagttttccgctgaaaataa

SEQ ID NO: 3336272 - DNA, 25 bp, Homo sapien
gttttccgctgaaaataagcacttg

SEQ ID NO: 3336273 - DNA, 25 bp, Homo sapien
tcagttttccgctgaaaataagcac

SEQ ID NO: 3336274 - DNA, 25 bp, Homo sapien
taaaactatcaaagcttctaaatca

SEQ ID NO: 3336275 - DNA, 25 bp, Homo sapien
caaagcttctaaatcaattgacaat

SEQ ID NO: 3336276 - DNA, 25 bp, Homo sapien
ctctccatttaaaactatcaaagct

SEQ ID NO: 3336277 - DNA, 25 bp, Homo sapien
caattgacaatatttcctgatacat

SEQ ID NO: 3336278 - DNA, 25 bp, Homo sapien
gaaagggaatatgggcatggtgaaa

SEQ ID NO: 3336279 - DNA, 25 bp, Homo sapien
aatatgggcatggtgaaatcagctt

SEQ ID NO: 3336280 - DNA, 25 bp, Homo sapien
agggaatatgggcatggtgaaatca

SEQ ID NO: 3336281 - DNA, 25 bp, Homo sapien
tgggcatggtgaaatcagcttcagg

SEQ ID NO: 3336282 - DNA, 25 bp, Homo sapien
gtaacagttgccgaatattccacct

SEQ ID NO: 3336283 - DNA, 25 bp, Homo sapien
tccaccttcatgtagtggtaggcag

SEQ ID NO: 3336284 - DNA, 25 bp, Homo sapien
actgtgtctcagtccaggcttgatc

SEQ ID NO: 3336285 - DNA, 25 bp, Homo sapien
cctatccagggactgaaaattttgg

SEQ ID NO: 3336286 - DNA, 25 bp, Homo sapien
ttccaacaacatactccataattct

SEQ ID NO: 3336287 - DNA, 25 bp, Homo sapien
agttttcaccttccgggctagatgt

SEQ ID NO: 3336288 - DNA, 25 bp, Homo sapien
cacagttttcaccttccgggctaga

SEQ ID NO: 3336289 - DNA, 25 bp, Homo sapien
atgtccagaaccacagttttcacct

SEQ ID NO: 3336290 - DNA, 25 bp, Homo sapien
gagaggggtcttggattcccagcca

SEQ ID NO: 3336291 - DNA, 25 bp, Homo sapien
ccagcgactctggtttaaccttagt

SEQ ID NO: 3336292 - DNA, 25 bp, Homo sapien
tcagaaactatggaccagcgactct

SEQ ID NO: 3336293 - DNA, 25 bp, Homo sapien
agggcatgggtacttgttgtttaga

SEQ ID NO: 3336294 - DNA, 25 bp, Homo sapien
agcatagcctctccccgtaactgtg

SEQ ID NO: 3336295 - DNA, 25 bp, Homo sapien
ccccgtaactgtgtaggctccatca

SEQ ID NO: 3336296 - DNA, 25 bp, Homo sapien
tgtaggctccatcagttgtactcat

SEQ ID NO: 3336297 - DNA, 25 bp, Homo sapien
ttggaaatgaaagcatagcctctcc

SEQ ID NO: 3336298 - DNA, 25 bp, Homo sapien
taatcggggattgtaaagagaagca

SEQ ID NO: 3336299 - DNA, 25 bp, Homo sapien
gcaatagggatatacttaatggaga

SEQ ID NO: 3336300 - DNA, 25 bp, Homo sapien
ttaaggttttgcaatagggatatac

SEQ ID NO: 3336301 - DNA, 25 bp, Homo sapien
aatggagatcgtgtgttctaatcgg

SEQ ID NO: 3336302 - DNA, 25 bp, Homo sapien
tcatctccaataaagctaatggtag

SEQ ID NO: 3336303 - DNA, 25 bp, Homo sapien
ccattttgaatcatctccaataaag

SEQ ID NO: 3336304 - DNA, 25 bp, Homo sapien
gagctgagcagcaactgatggcaga

SEQ ID NO: 3336305 - DNA, 25 bp, Homo sapien
tggcaaaattctcagtgcagaaacc

SEQ ID NO: 3336306 - DNA, 25 bp, Homo sapien
ttcagacttagaggagcacatttca

SEQ ID NO: 3336307 - DNA, 25 bp, Homo sapien
gagcacatttcattacaactattgg

SEQ ID NO: 3336308 - DNA, 25 bp, Homo sapien
cattacaactattggggtagaccgg

SEQ ID NO: 3336309 - DNA, 25 bp, Homo sapien
ggctgcttcagacttagaggagcac

SEQ ID NO: 3336310 - DNA, 25 bp, Homo sapien
accttcggtggtgtcttgcctcagc

SEQ ID NO: 3336311 - DNA, 25 bp, Homo sapien
gcctcagctgccaaaatagtgtagc

SEQ ID NO: 3336312 - DNA, 25 bp, Homo sapien
ggagcaaagtaatgctaaaaagctg

SEQ ID NO: 3336313 - DNA, 25 bp, Homo sapien
atttctcctgattcgccaccttcgg

SEQ ID NO: 3336314 - DNA, 25 bp, Homo sapien
cttggtgctcttgcactaaagatac

SEQ ID NO: 3336315 - DNA, 25 bp, Homo sapien
gacatataaatctctggtccataga

SEQ ID NO: 3336316 - DNA, 25 bp, Homo sapien
tacagccttatgtcccttaataggg

SEQ ID NO: 3336317 - DNA, 25 bp, Homo sapien
ttttgctatggccttcttggtgctc

SEQ ID NO: 3336318 - DNA, 25 bp, Homo sapien
caattagataatagacaatttccaa

SEQ ID NO: 3336319 - DNA, 25 bp, Homo sapien
ttagataatagacaatttccaattt

SEQ ID NO: 3336320 - DNA, 25 bp, Homo sapien
agataatagacaatttccaattttt

SEQ ID NO: 3336321 - DNA, 25 bp, Homo sapien
aattagataatagacaatttccaat

SEQ ID NO: 3336322 - DNA, 25 bp, Homo sapien
tgacatgagctctcggaatggaaac

SEQ ID NO: 3336323 - DNA, 25 bp, Homo sapien
ccaatgtgttggcagttctagagaa

SEQ ID NO: 3336324 - DNA, 25 bp, Homo sapien
cctacaaatgtagccagagcttggt

SEQ ID NO: 3336325 - DNA, 25 bp, Homo sapien
gaatggaaacttgtccccaaagaga

SEQ ID NO: 3336326 - DNA, 25 bp, Homo sapien
cattgcttatgtcaggcatatgcgg

SEQ ID NO: 3336327 - DNA, 25 bp, Homo sapien
tctgacataaggaggctagcttgct

SEQ ID NO: 3336328 - DNA, 25 bp, Homo sapien
catatgcggtattgagttttgggac

SEQ ID NO: 3336329 - DNA, 25 bp, Homo sapien
ggtacctgcgatcattaacaaaagc

SEQ ID NO: 3336330 - DNA, 25 bp, Homo sapien
taacctcccaatcaggcaaaggata

SEQ ID NO: 3336331 - DNA, 25 bp, Homo sapien
gttataactttagggccatcacact

SEQ ID NO: 3336332 - DNA, 25 bp, Homo sapien
agtagttataactttagggccatca

SEQ ID NO: 3336333 - DNA, 25 bp, Homo sapien
atttaacctcccaatcaggcaaagg

SEQ ID NO: 3336334 - DNA, 25 bp, Homo sapien
ttatttaccatcgtggccacctgtc

SEQ ID NO: 3336335 - DNA, 25 bp, Homo sapien
accatcgtggccacctgtcagtttc

SEQ ID NO: 3336336 - DNA, 25 bp, Homo sapien
atttaccatcgtggccacctgtcag

SEQ ID NO: 3336337 - DNA, 25 bp, Homo sapien
ttaccatcgtggccacctgtcagtt

SEQ ID NO: 3336338 - DNA, 25 bp, Homo sapien
tagcgcctgcatcagggtatacctg

SEQ ID NO: 3336339 - DNA, 25 bp, Homo sapien
tcccaagtgcaagttcgcggtggtg

SEQ ID NO: 3336340 - DNA, 25 bp, Homo sapien
gagcaaaacttaatcggtccaggga

SEQ ID NO: 3336341 - DNA, 25 bp, Homo sapien
tgctgggccggtcactaaccaagaa

SEQ ID NO: 3336342 - DNA, 25 bp, Homo sapien
atgaccacggctgaggcgttctgca

SEQ ID NO: 3336343 - DNA, 25 bp, Homo sapien
tatccctgtacgtgcagttgccctt

SEQ ID NO: 3336344 - DNA, 25 bp, Homo sapien
gagcccacgttgaagatgaccacgg

SEQ ID NO: 3336345 - DNA, 25 bp, Homo sapien
gaacgcgttccggatcttatccctg

SEQ ID NO: 3336346 - DNA, 25 bp, Homo sapien
cgggctcggcgtaggtgatgttcac

SEQ ID NO: 3336347 - DNA, 25 bp, Homo sapien
ggctcggcgtaggtgatgttcacga

SEQ ID NO: 3336348 - DNA, 25 bp, Homo sapien
ctcggcgtaggtgatgttcacgaag

SEQ ID NO: 3336349 - DNA, 25 bp, Homo sapien
cgcgggctcggcgtaggtgatgttc

SEQ ID NO: 3336350 - DNA, 25 bp, Homo sapien
gccacggtaaagtccaggcagagca

SEQ ID NO: 3336351 - DNA, 25 bp, Homo sapien
tgcagcacgcttggatgagagacat

SEQ ID NO: 3336352 - DNA, 25 bp, Homo sapien
cagatgcacgaaacaaaaggaaagc

SEQ ID NO: 3336353 - DNA, 25 bp, Homo sapien
tccttctcggccacggtaaagtcca

SEQ ID NO: 3336354 - DNA, 25 bp, Homo sapien
ggccaaccccgggccgctgcctctc

SEQ ID NO: 3336355 - DNA, 25 bp, Homo sapien
tgccatctttatccgccggggcccc

SEQ ID NO: 3336356 - DNA, 25 bp, Homo sapien
cggccaaccccgggccgctgcctct

SEQ ID NO: 3336357 - DNA, 25 bp, Homo sapien
gccaaccccgggccgctgcctctcc

SEQ ID NO: 3336358 - DNA, 25 bp, Homo sapien
ccctctcagctgtagcgcggtggtt

SEQ ID NO: 3336359 - DNA, 25 bp, Homo sapien
aggagtcctgctgccgagcgtcctg

SEQ ID NO: 3336360 - DNA, 25 bp, Homo sapien
gagcgtcctgctccttcgcccggct

SEQ ID NO: 3336361 - DNA, 25 bp, Homo sapien
gtggttgcattttgcttcttgggcg

SEQ ID NO: 3336362 - DNA, 25 bp, Homo sapien
gcaggcagagcggagtaagcggtcc

SEQ ID NO: 3336363 - DNA, 25 bp, Homo sapien
gcgctcctgatctcgccggtggctg

SEQ ID NO: 3336364 - DNA, 25 bp, Homo sapien
cacgattgctcgtagtctggggtgc

SEQ ID NO: 3336365 - DNA, 25 bp, Homo sapien
ggtggctgcgcctgggcacgcactt

SEQ ID NO: 3336366 - DNA, 25 bp, Homo sapien
tgtcaaatgccagtccttactggtg

SEQ ID NO: 3336367 - DNA, 25 bp, Homo sapien
gtgataattttgcaagaatccttga

SEQ ID NO: 3336368 - DNA, 25 bp, Homo sapien
ttgattcccaaaggttctacagctg

SEQ ID NO: 3336369 - DNA, 25 bp, Homo sapien
tgtctgttacaattcgcaacaattg

SEQ ID NO: 3336370 - DNA, 25 bp, Homo sapien
tgccaccctcggatgaagcttccag

SEQ ID NO: 3336371 - DNA, 25 bp, Homo sapien
gtgccaccctcggatgaagcttcca

SEQ ID NO: 3336372 - DNA, 25 bp, Homo sapien
caggtgccaccctcggatgaagctt

SEQ ID NO: 3336373 - DNA, 25 bp, Homo sapien
ggcaggtgccaccctcggatgaagc

SEQ ID NO: 3336374 - DNA, 25 bp, Homo sapien
ttctctgtttggtgccatactcctc

SEQ ID NO: 3336375 - DNA, 25 bp, Homo sapien
ctctgtttggtgccatactcctcat

SEQ ID NO: 3336376 - DNA, 25 bp, Homo sapien
cttttctctgtttggtgccatactc

SEQ ID NO: 3336377 - DNA, 25 bp, Homo sapien
ttttctctgtttggtgccatactcc

SEQ ID NO: 3336378 - DNA, 25 bp, Homo sapien
ggatggtgaccgctaagttaggact

SEQ ID NO: 3336379 - DNA, 25 bp, Homo sapien
tgggtgccagctgatgatctgtgcc

SEQ ID NO: 3336380 - DNA, 25 bp, Homo sapien
tggttggcctgggttactttctgga

SEQ ID NO: 3336381 - DNA, 25 bp, Homo sapien
gatcctatccctgatgtttctgtgg

SEQ ID NO: 3336382 - DNA, 25 bp, Homo sapien
aacaggcaattatggctaagggatg

SEQ ID NO: 3336383 - DNA, 25 bp, Homo sapien
ggaaacaggcaattatggctaaggg

SEQ ID NO: 3336384 - DNA, 25 bp, Homo sapien
aggcaattatggctaagggatggaa

SEQ ID NO: 3336385 - DNA, 25 bp, Homo sapien
caattatggctaagggatggaagga

SEQ ID NO: 3336386 - DNA, 25 bp, Homo sapien
tcctgcagatgttgttccccaaagc

SEQ ID NO: 3336387 - DNA, 25 bp, Homo sapien
ctttggcagcgttcatccagtgact

SEQ ID NO: 3336388 - DNA, 25 bp, Homo sapien
gatatcccagattcaaaacgaggcc

SEQ ID NO: 3336389 - DNA, 25 bp, Homo sapien
tcataggtgtataaaggtccagccc

SEQ ID NO: 3336390 - DNA, 25 bp, Homo sapien
tgtttgtcctaagaacttccctgtc

SEQ ID NO: 3336391 - DNA, 25 bp, Homo sapien
ctagattacctagtttgagagtacc

SEQ ID NO: 3336392 - DNA, 25 bp, Homo sapien
tcatctcactccgtaccaggttatc

SEQ ID NO: 3336393 - DNA, 25 bp, Homo sapien
cctatatggccaggtagtcctctcc

SEQ ID NO: 3336394 - DNA, 25 bp, Homo sapien
gcatttttgagcctttcgtcgcctt

SEQ ID NO: 3336395 - DNA, 25 bp, Homo sapien
tcgtcgccttttgcagaatgtataa

SEQ ID NO: 3336396 - DNA, 25 bp, Homo sapien
aaacaatagcatgtggtacttggca

SEQ ID NO: 3336397 - DNA, 25 bp, Homo sapien
gagcatctcgaagtatatagcattt

SEQ ID NO: 3336398 - DNA, 25 bp, Homo sapien
ggtggaagttactaataccagactg

SEQ ID NO: 3336399 - DNA, 25 bp, Homo sapien
aaatgtagaatgcagaaaggtagaa

SEQ ID NO: 3336400 - DNA, 25 bp, Homo sapien
taccagactgaatgtgtgctcaaga

SEQ ID NO: 3336401 - DNA, 25 bp, Homo sapien
ttttctgaagaaacggggctaatgc

SEQ ID NO: 3336402 - DNA, 25 bp, Homo sapien
aaacctgcgtatgtaccctctgaat

SEQ ID NO: 3336403 - DNA, 25 bp, Homo sapien
gacggcatcagttgtactccaaacc

SEQ ID NO: 3336404 - DNA, 25 bp, Homo sapien
tcaggaagtctactcaggtaacaaa

SEQ ID NO: 3336405 - DNA, 25 bp, Homo sapien
ctctgtacctgagtgacggcatcag

SEQ ID NO: 3336406 - DNA, 25 bp, Homo sapien
tcaggcaaacattgtcggctgaagg

SEQ ID NO: 3336407 - DNA, 25 bp, Homo sapien
ggcaaacattgtcggctgaaggtct

SEQ ID NO: 3336408 - DNA, 25 bp, Homo sapien
aagggtgtgcacactgacgtttgtg

SEQ ID NO: 3336409 - DNA, 25 bp, Homo sapien
gcctgtcctggatttaaagggtgtg

SEQ ID NO: 3336410 - DNA, 25 bp, Homo sapien
tagttgccattatgcactggcaaag

SEQ ID NO: 3336411 - DNA, 25 bp, Homo sapien
tatgcactggcaaagggtcaagttc

SEQ ID NO: 3336412 - DNA, 25 bp, Homo sapien
tatatactgtagttgccattatgca

SEQ ID NO: 3336413 - DNA, 25 bp, Homo sapien
ctccagcaagcaaatctccaggcct

SEQ ID NO: 3336414 - DNA, 25 bp, Homo sapien
tggggagcggggagtgggatgttct

SEQ ID NO: 3336415 - DNA, 25 bp, Homo sapien
gggagcggggagtgggatgttctct

SEQ ID NO: 3336416 - DNA, 25 bp, Homo sapien
ttgtggtggggagcggggagtggga

SEQ ID NO: 3336417 - DNA, 25 bp, Homo sapien
tggtggggagcggggagtgggatgt

SEQ ID NO: 3336418 - DNA, 25 bp, Homo sapien
ccatgtgggacgaagaggaaacatt

SEQ ID NO: 3336419 - DNA, 25 bp, Homo sapien
ggaaacattttccaccattgatggg

SEQ ID NO: 3336420 - DNA, 25 bp, Homo sapien
ggattgtggtcctgctcttctgcag

SEQ ID NO: 3336421 - DNA, 25 bp, Homo sapien
tctgtaaactccatgtgggacgaag

SEQ ID NO: 3336422 - DNA, 25 bp, Homo sapien
ctcacaagagggcattagctgcggg

SEQ ID NO: 3336423 - DNA, 25 bp, Homo sapien
ggtattgctgctcacaagagggcat

SEQ ID NO: 3336424 - DNA, 25 bp, Homo sapien
gccagtcctgctgagcgtccgactg

SEQ ID NO: 3336425 - DNA, 25 bp, Homo sapien
aaagtgaggtattgctgctcacaag

SEQ ID NO: 3336426 - DNA, 25 bp, Homo sapien
cttcttgtcccattcgagctttttg

SEQ ID NO: 3336427 - DNA, 25 bp, Homo sapien
atggcaattgtagatttctttaaca

SEQ ID NO: 3336428 - DNA, 25 bp, Homo sapien
tgtttttcgttcttgctctgcccac

SEQ ID NO: 3336429 - DNA, 25 bp, Homo sapien
cttgctctgcccacttttatggcaa

SEQ ID NO: 3336430 - DNA, 25 bp, Homo sapien
tatccccacattgtaactaggttca

SEQ ID NO: 3336431 - DNA, 25 bp, Homo sapien
atatccccacattgtaactaggttc

SEQ ID NO: 3336432 - DNA, 25 bp, Homo sapien
tccccacattgtaactaggttcaga

SEQ ID NO: 3336433 - DNA, 25 bp, Homo sapien
cccacattgtaactaggttcagagg

SEQ ID NO: 3336434 - DNA, 25 bp, Homo sapien
aaaggactatctgaaaacaacataa

SEQ ID NO: 3336435 - DNA, 25 bp, Homo sapien
gagccagtgtgcaaggcctcatagt

SEQ ID NO: 3336436 - DNA, 25 bp, Homo sapien
taagacggttcaaaaggactatctg

SEQ ID NO: 3336437 - DNA, 25 bp, Homo sapien
tatctcttaattactggtaagacgg

SEQ ID NO: 3336438 - DNA, 25 bp, Homo sapien
gcataaagcctctctggtaccaaag

SEQ ID NO: 3336439 - DNA, 25 bp, Homo sapien
tgacacttctgcttacgggacagga

SEQ ID NO: 3336440 - DNA, 25 bp, Homo sapien
taaagagatgactctgttctcctgg

SEQ ID NO: 3336441 - DNA, 25 bp, Homo sapien
tcagactaagcaatggcaagggttg

SEQ ID NO: 3336442 - DNA, 25 bp, Homo sapien
caagttcccaagtgacgttggtgat

SEQ ID NO: 3336443 - DNA, 25 bp, Homo sapien
cagtgatgccaacacgacatagaag

SEQ ID NO: 3336444 - DNA, 25 bp, Homo sapien
tggtgatgctggtccgtaagccacc

SEQ ID NO: 3336445 - DNA, 25 bp, Homo sapien
ccacattaggcgaggctctttccag

SEQ ID NO: 3336446 - DNA, 25 bp, Homo sapien
tgtactgaggcagaacaaaccctga

SEQ ID NO: 3336447 - DNA, 25 bp, Homo sapien
tgcctaccacaagaaggagggctgg

SEQ ID NO: 3336448 - DNA, 25 bp, Homo sapien
catttacactgctgtcaccgaggag

SEQ ID NO: 3336449 - DNA, 25 bp, Homo sapien
gagtgacagctttccgacagatgac

SEQ ID NO: 3336450 - DNA, 25 bp, Homo sapien
gaccttctaaactgcaatgggcctc

SEQ ID NO: 3336451 - DNA, 25 bp, Homo sapien
caggtttgggcagagggttaggata

SEQ ID NO: 3336452 - DNA, 25 bp, Homo sapien
tagtataaagaccttctaaactgca

SEQ ID NO: 3336453 - DNA, 25 bp, Homo sapien
gggcctctgtcatatttttctcagg

SEQ ID NO: 3336454 - DNA, 25 bp, Homo sapien
aggtagagccctgagagcatggtct

SEQ ID NO: 3336455 - DNA, 25 bp, Homo sapien
taagggctgcgccagtgtttccctg

SEQ ID NO: 3336456 - DNA, 25 bp, Homo sapien
caatgaaagggctaagtgttcctga

SEQ ID NO: 3336457 - DNA, 25 bp, Homo sapien
tgcactgaatctgattggggccagg

SEQ ID NO: 3336458 - DNA, 25 bp, Homo sapien
tctgtccacaattcaacaactttca

SEQ ID NO: 3336459 - DNA, 25 bp, Homo sapien
aacaactttcagttatcttcactgc

SEQ ID NO: 3336460 - DNA, 25 bp, Homo sapien
tactttggtctaagccaccctcagg

SEQ ID NO: 3336461 - DNA, 25 bp, Homo sapien
tatcttcactgcttctactttggtc

SEQ ID NO: 3336462 - DNA, 25 bp, Homo sapien
ggctcagggcactttctagtatcgt

SEQ ID NO: 3336463 - DNA, 25 bp, Homo sapien
ggtaagcagactgtaagcacccttg

SEQ ID NO: 3336464 - DNA, 25 bp, Homo sapien
taagtatctaacctagaggtcggtc

SEQ ID NO: 3336465 - DNA, 25 bp, Homo sapien
ttttctctatgggtgggctcagggc

SEQ ID NO: 3336466 - DNA, 25 bp, Homo sapien
ttcacttttcagattatcagggatc

SEQ ID NO: 3336467 - DNA, 25 bp, Homo sapien
cagggatcttctgaatctgagtatc

SEQ ID NO: 3336468 - DNA, 25 bp, Homo sapien
tttaagttcttgattactaacttca

SEQ ID NO: 3336469 - DNA, 25 bp, Homo sapien
tgaatctgagtatctttgatctttt

SEQ ID NO: 3336470 - DNA, 25 bp, Homo sapien
gccgtacagagccttaggtagacaa

SEQ ID NO: 3336471 - DNA, 25 bp, Homo sapien
ccatcatttagagtgtgccgtacag

SEQ ID NO: 3336472 - DNA, 25 bp, Homo sapien
caggtacaggcactttaacagaaca

SEQ ID NO: 3336473 - DNA, 25 bp, Homo sapien
gatgtatttggcttgtcgaggaaaa

SEQ ID NO: 3336474 - DNA, 25 bp, Homo sapien
cataattgaaaggagctatagagct

SEQ ID NO: 3336475 - DNA, 25 bp, Homo sapien
cactgagctggctgttggaatccaa

SEQ ID NO: 3336476 - DNA, 25 bp, Homo sapien
cttctttattatggtcagggcatga

SEQ ID NO: 3336477 - DNA, 25 bp, Homo sapien
tatggacacaatcccactcaacaag

SEQ ID NO: 3336478 - DNA, 25 bp, Homo sapien
gttatactgattaggattcaatgaa

SEQ ID NO: 3336479 - DNA, 25 bp, Homo sapien
aaagtccatgaggtagatgcaatca

SEQ ID NO: 3336480 - DNA, 25 bp, Homo sapien
gatgcaatcattggtccctgtatta

SEQ ID NO: 3336481 - DNA, 25 bp, Homo sapien
tgactgtttacaatagatgaggcag

SEQ ID NO: 3336482 - DNA, 25 bp, Homo sapien
gagggacacatgcttctagtcttga

SEQ ID NO: 3336483 - DNA, 25 bp, Homo sapien
agagggacacatgcttctagtcttg

SEQ ID NO: 3336484 - DNA, 25 bp, Homo sapien
ctctctatgtcccatcttgcaatgg

SEQ ID NO: 3336485 - DNA, 25 bp, Homo sapien
tcccatcttgcaatggagagaggga

SEQ ID NO: 3336486 - DNA, 25 bp, Homo sapien
gcttgatgcagtacataagtgatgg

SEQ ID NO: 3336487 - DNA, 25 bp, Homo sapien
cataagtgatggagtatcaatgctg

SEQ ID NO: 3336488 - DNA, 25 bp, Homo sapien
ctctgaggacggcttgatgcagtac

SEQ ID NO: 3336489 - DNA, 25 bp, Homo sapien
tgatggagtatcaatgctggtggtt

SEQ ID NO: 3336490 - DNA, 25 bp, Homo sapien
taccagaaggtagggcagagcaaag

SEQ ID NO: 3336491 - DNA, 25 bp, Homo sapien
gagcaaaggctatgacttgggatgc

SEQ ID NO: 3336492 - DNA, 25 bp, Homo sapien
taagtaagttgcagccctgagaggt

SEQ ID NO: 3336493 - DNA, 25 bp, Homo sapien
ggtgcacccactatcaaatccagaa

SEQ ID NO: 3336494 - DNA, 25 bp, Homo sapien
tacaagtgctccttcaatcacagag

SEQ ID NO: 3336495 - DNA, 25 bp, Homo sapien
tgaacatgacagtactcggcacacc

SEQ ID NO: 3336496 - DNA, 25 bp, Homo sapien
gagctctgaattgatgcatgcctaa

SEQ ID NO: 3336497 - DNA, 25 bp, Homo sapien
tcagcagaatacaggagctagcagc

SEQ ID NO: 3336498 - DNA, 25 bp, Homo sapien
gaagcagcgtaattgccaactgcca

SEQ ID NO: 3336499 - DNA, 25 bp, Homo sapien
tggcaaagaaagtttgggtgaccat

SEQ ID NO: 3336500 - DNA, 25 bp, Homo sapien
gggcaacacaggatggaactgagaa

SEQ ID NO: 3336501 - DNA, 25 bp, Homo sapien
gaaagtttgggtgaccatgaagtaa

SEQ ID NO: 3336502 - DNA, 25 bp, Homo sapien
tttagtccctctgcaagcactgctg

SEQ ID NO: 3336503 - DNA, 25 bp, Homo sapien
ttctgcagcacctaacatacaactc

SEQ ID NO: 3336504 - DNA, 25 bp, Homo sapien
caaagacccctttatggatgagatc

SEQ ID NO: 3336505 - DNA, 25 bp, Homo sapien
catacaactctgaacatcctaattc

SEQ ID NO: 3336506 - DNA, 25 bp, Homo sapien
ttcaggagattttgacccatgtgct

SEQ ID NO: 3336507 - DNA, 25 bp, Homo sapien
ggtaacccctgctatatcataagat

SEQ ID NO: 3336508 - DNA, 25 bp, Homo sapien
gatttcatctgcgagaaaaggagga

SEQ ID NO: 3336509 - DNA, 25 bp, Homo sapien
aaaaggaggaattcttctacagctc

SEQ ID NO: 3336510 - DNA, 25 bp, Homo sapien
taagtatccccatagcattgtttgc

SEQ ID NO: 3336511 - DNA, 25 bp, Homo sapien
tattgtaatgatgattcctcagccc

SEQ ID NO: 3336512 - DNA, 25 bp, Homo sapien
caagcagcctttaacatggatagga

SEQ ID NO: 3336513 - DNA, 25 bp, Homo sapien
tcagccctagcaaagtcagagaagt

SEQ ID NO: 3336514 - DNA, 25 bp, Homo sapien
gacaatgcaggaacatggaaactga

SEQ ID NO: 3336515 - DNA, 25 bp, Homo sapien
ttgaaactcttaaggatgaaggtag

SEQ ID NO: 3336516 - DNA, 25 bp, Homo sapien
cagacggaaaacagtattcttggat

SEQ ID NO: 3336517 - DNA, 25 bp, Homo sapien
tgaaggtagggacaatgcaggaaca

SEQ ID NO: 3336518 - DNA, 25 bp, Homo sapien
caggaagagtatggtgtttaggaac

SEQ ID NO: 3336519 - DNA, 25 bp, Homo sapien
ttgccacacagcaaacgtcagccag

SEQ ID NO: 3336520 - DNA, 25 bp, Homo sapien
ctggaaatcggatgtgagcatgtta

SEQ ID NO: 3336521 - DNA, 25 bp, Homo sapien
cgtcagccagcaggaataagcacat

SEQ ID NO: 3336522 - DNA, 25 bp, Homo sapien
cctgtagtatacgtaataactggta

SEQ ID NO: 3336523 - DNA, 25 bp, Homo sapien
ctggtaagtttagcacaggtggtaa

SEQ ID NO: 3336524 - DNA, 25 bp, Homo sapien
gcagaatatcctgtagtatacgtaa

SEQ ID NO: 3336525 - DNA, 25 bp, Homo sapien
tatatttgcccatattttcagcaga

SEQ ID NO: 3336526 - DNA, 25 bp, Homo sapien
tctcctggcatgaaagagttggtat

SEQ ID NO: 3336527 - DNA, 25 bp, Homo sapien
agcagtagaaagagcgaaacaacag

SEQ ID NO: 3336528 - DNA, 25 bp, Homo sapien
gaaagagcgaaacaacagagcctcc

SEQ ID NO: 3336529 - DNA, 25 bp, Homo sapien
ttctcctggcatgaaagagttggta

SEQ ID NO: 3336530 - DNA, 25 bp, Homo sapien
taaatctgatgaagaagttcctttg

SEQ ID NO: 3336531 - DNA, 25 bp, Homo sapien
aaatctgatgaagaagttcctttgg

SEQ ID NO: 3336532 - DNA, 25 bp, Homo sapien
cttaaatctgatgaagaagttcctt

SEQ ID NO: 3336533 - DNA, 25 bp, Homo sapien
atctgatgaagaagttcctttggag

SEQ ID NO: 3336534 - DNA, 25 bp, Homo sapien
ctataaaccgagaggcattgaagca

SEQ ID NO: 3336535 - DNA, 25 bp, Homo sapien
cgagaggcattgaagcaaacgctgg

SEQ ID NO: 3336536 - DNA, 25 bp, Homo sapien
cattgaagcaaacgctgggagcagc

SEQ ID NO: 3336537 - DNA, 25 bp, Homo sapien
taaaccgagaggcattgaagcaaac

SEQ ID NO: 3336538 - DNA, 25 bp, Homo sapien
tttagaagctggtgagagataagag

SEQ ID NO: 3336539 - DNA, 25 bp, Homo sapien
aatacaatgaacattctggtgagcc

SEQ ID NO: 3336540 - DNA, 25 bp, Homo sapien
cagcgtttggccatcttgtttagaa

SEQ ID NO: 3336541 - DNA, 25 bp, Homo sapien
gtcccttaaacagcgtttggccatc

SEQ ID NO: 3336542 - DNA, 25 bp, Homo sapien
caacttgcaggtggtgtaagatcaa

SEQ ID NO: 3336543 - DNA, 25 bp, Homo sapien
tgtactaaagacaaacatgcatcct

SEQ ID NO: 3336544 - DNA, 25 bp, Homo sapien
tccattagtgccagagccaatgtcc

SEQ ID NO: 3336545 - DNA, 25 bp, Homo sapien
cagcatgaagactgggcaacttgca

SEQ ID NO: 3336546 - DNA, 25 bp, Homo sapien
tgggatagtactgttactctttaag

SEQ ID NO: 3336547 - DNA, 25 bp, Homo sapien
gggatagtactgttactctttaaga

SEQ ID NO: 3336548 - DNA, 25 bp, Homo sapien
cttttgggatagtactgttactctt

SEQ ID NO: 3336549 - DNA, 25 bp, Homo sapien
tttgggatagtactgttactcttta

SEQ ID NO: 3336550 - DNA, 25 bp, Homo sapien
agtcctagtaatgcacttggatgat

SEQ ID NO: 3336551 - DNA, 25 bp, Homo sapien
tagtcctagtaatgcacttggatga

SEQ ID NO: 3336552 - DNA, 25 bp, Homo sapien
ttagtcctagtaatgcacttggatg

SEQ ID NO: 3336553 - DNA, 25 bp, Homo sapien
cattagtcctagtaatgcacttgga

SEQ ID NO: 3336554 - DNA, 25 bp, Homo sapien
aaagtgactccttgggcctaagatc

SEQ ID NO: 3336555 - DNA, 25 bp, Homo sapien
gaggaccgcccaggcaaatagtgtg

SEQ ID NO: 3336556 - DNA, 25 bp, Homo sapien
tagatttgtgtaggatggcctggtc

SEQ ID NO: 3336557 - DNA, 25 bp, Homo sapien
cttggtgttgactacagctgcgtca

SEQ ID NO: 3336558 - DNA, 25 bp, Homo sapien
agggtgagctatctcctgggcatga

SEQ ID NO: 3336559 - DNA, 25 bp, Homo sapien
ttagacagggtgagctatctcctgg

SEQ ID NO: 3336560 - DNA, 25 bp, Homo sapien
gacagggtgagctatctcctgggca

SEQ ID NO: 3336561 - DNA, 25 bp, Homo sapien
ggtgagctatctcctgggcatgaga

SEQ ID NO: 3336562 - DNA, 25 bp, Homo sapien
gcccttctcaagaattcattggcgt

SEQ ID NO: 3336563 - DNA, 25 bp, Homo sapien
cattggcgtctaagatctttttatc

SEQ ID NO: 3336564 - DNA, 25 bp, Homo sapien
aatattctcatgtatcattcctgtg

SEQ ID NO: 3336565 - DNA, 25 bp, Homo sapien
cattcctgtgcttgtgactccatag

SEQ ID NO: 3336566 - DNA, 25 bp, Homo sapien
tgaccctctaatgagaatgatcctc

SEQ ID NO: 3336567 - DNA, 25 bp, Homo sapien
actgaccctctaatgagaatgatcc

SEQ ID NO: 3336568 - DNA, 25 bp, Homo sapien
gaccctctaatgagaatgatcctca

SEQ ID NO: 3336569 - DNA, 25 bp, Homo sapien
ctactgaccctctaatgagaatgat

SEQ ID NO: 3336570 - DNA, 25 bp, Homo sapien
taggcctgagcaacagctcaacgat

SEQ ID NO: 3336571 - DNA, 25 bp, Homo sapien
gagcaacagctcaacgatggaagat

SEQ ID NO: 3336572 - DNA, 25 bp, Homo sapien
tactcttaggcctgagcaacagctc

SEQ ID NO: 3336573 - DNA, 25 bp, Homo sapien
gcctgagcaacagctcaacgatgga

SEQ ID NO: 3336574 - DNA, 25 bp, Homo sapien
cacgagtaggtgacatagttgggat

SEQ ID NO: 3336575 - DNA, 25 bp, Homo sapien
gacattttgaccattctgttgtgaa

SEQ ID NO: 3336576 - DNA, 25 bp, Homo sapien
gtttgtcatgaccagcttagcacca

SEQ ID NO: 3336577 - DNA, 25 bp, Homo sapien
tgctcctgccttgtgcgatgccttc

SEQ ID NO: 3336578 - DNA, 25 bp, Homo sapien
tctttgcaggatgccactgaaaagc

SEQ ID NO: 3336579 - DNA, 25 bp, Homo sapien
atatcctgttccatattatgtccaa

SEQ ID NO: 3336580 - DNA, 25 bp, Homo sapien
tcagttcatctgaaacccatccagt

SEQ ID NO: 3336581 - DNA, 25 bp, Homo sapien
gacggttggctctccttgatgactc

SEQ ID NO: 3336582 - DNA, 25 bp, Homo sapien
tattgtcaaagcctggtaaatatcc

SEQ ID NO: 3336583 - DNA, 25 bp, Homo sapien
ctgacaataaaatgttcttgccgaa

SEQ ID NO: 3336584 - DNA, 25 bp, Homo sapien
tgaaagagtggaaagccttgaatta

SEQ ID NO: 3336585 - DNA, 25 bp, Homo sapien
tgttcttgccgaaaatttacaatac

SEQ ID NO: 3336586 - DNA, 25 bp, Homo sapien
gaaagagtggaaagccttgaattag

SEQ ID NO: 3336587 - DNA, 25 bp, Homo sapien
atttcttgcttaatagcatctatca

SEQ ID NO: 3336588 - DNA, 25 bp, Homo sapien
ttaatttcttgcttaatagcatcta

SEQ ID NO: 3336589 - DNA, 25 bp, Homo sapien
aatttcttgcttaatagcatctatc

SEQ ID NO: 3336590 - DNA, 25 bp, Homo sapien
tttcttgcttaatagcatctatcat

SEQ ID NO: 3336591 - DNA, 25 bp, Homo sapien
ctgaaaggtcgttttccttggatgt

SEQ ID NO: 3336592 - DNA, 25 bp, Homo sapien
ggtcgttttccttggatgtgaatgc

SEQ ID NO: 3336593 - DNA, 25 bp, Homo sapien
tgaaaggtcgttttccttggatgtg

SEQ ID NO: 3336594 - DNA, 25 bp, Homo sapien
ttttccttggatgtgaatgccactt

SEQ ID NO: 3336595 - DNA, 25 bp, Homo sapien
gaccattgcagttatcacagcacta

SEQ ID NO: 3336596 - DNA, 25 bp, Homo sapien
tggaggccctccagattgactgttg

SEQ ID NO: 3336597 - DNA, 25 bp, Homo sapien
gactctgaggtagacgcggcttttc

SEQ ID NO: 3336598 - DNA, 25 bp, Homo sapien
aaaatgctctaagcccgggcttgcc

SEQ ID NO: 3336599 - DNA, 25 bp, Homo sapien
aaaagtcatctgtatcctactctgg

SEQ ID NO: 3336600 - DNA, 25 bp, Homo sapien
tcatctgtatcctactctggtccca

SEQ ID NO: 3336601 - DNA, 25 bp, Homo sapien
agtcatctgtatcctactctggtcc

SEQ ID NO: 3336602 - DNA, 25 bp, Homo sapien
ccaaaagtcatctgtatcctactct

SEQ ID NO: 3336603 - DNA, 25 bp, Homo sapien
ggaagttactgtttcaggcccaatg

SEQ ID NO: 3336604 - DNA, 25 bp, Homo sapien
gcaacgtgatctgaacgcagttttc

SEQ ID NO: 3336605 - DNA, 25 bp, Homo sapien
gcttttctatggcaacgatgcaatc

SEQ ID NO: 3336606 - DNA, 25 bp, Homo sapien
taaatcccacgaagtcatgcaacgt

SEQ ID NO: 3336607 - DNA, 25 bp, Homo sapien
aactaaattaaactgcgctccagga

SEQ ID NO: 3336608 - DNA, 25 bp, Homo sapien
cgtacaagagggattttcagtgatt

SEQ ID NO: 3336609 - DNA, 25 bp, Homo sapien
ctaaattaaactgcgctccaggaag

SEQ ID NO: 3336610 - DNA, 25 bp, Homo sapien
aatttggaaagcaccgtacaagagg

SEQ ID NO: 3336611 - DNA, 25 bp, Homo sapien
aaactaagcgtgagatctttgctac

SEQ ID NO: 3336612 - DNA, 25 bp, Homo sapien
caaaactaagcgtgagatctttgct

SEQ ID NO: 3336613 - DNA, 25 bp, Homo sapien
ctaagcgtgagatctttgctactgc

SEQ ID NO: 3336614 - DNA, 25 bp, Homo sapien
actaagcgtgagatctttgctactg

SEQ ID NO: 3336615 - DNA, 25 bp, Homo sapien
catctcacgcttccatcaaatggga

SEQ ID NO: 3336616 - DNA, 25 bp, Homo sapien
tacactggactacacaataggctgg

SEQ ID NO: 3336617 - DNA, 25 bp, Homo sapien
tggaaaagtgatccgcagagaggct

SEQ ID NO: 3336618 - DNA, 25 bp, Homo sapien
gagaggctcattgctctaagttcac

SEQ ID NO: 3336619 - DNA, 25 bp, Homo sapien
gctgccacccgggtgtcttcttcca

SEQ ID NO: 3336620 - DNA, 25 bp, Homo sapien
tttgtacagcccaagtggagaagga

SEQ ID NO: 3336621 - DNA, 25 bp, Homo sapien
gaagaaccagcagtgctataaaaga

SEQ ID NO: 3336622 - DNA, 25 bp, Homo sapien
tcagataatttgtacagcccaagtg

SEQ ID NO: 3336623 - DNA, 25 bp, Homo sapien
taaaagataagttctgctgtccaat

SEQ ID NO: 3336624 - DNA, 25 bp, Homo sapien
ggctctttggagcaatgttccatca

SEQ ID NO: 3336625 - DNA, 25 bp, Homo sapien
gctctttggagcaatgttccatcat

SEQ ID NO: 3336626 - DNA, 25 bp, Homo sapien
tctttggagcaatgttccatcatgt

SEQ ID NO: 3336627 - DNA, 25 bp, Homo sapien
ctttggagcaatgttccatcatgtt

SEQ ID NO: 3336628 - DNA, 25 bp, Homo sapien
gtttcttgagtgagactacccttca

SEQ ID NO: 3336629 - DNA, 25 bp, Homo sapien
gttgtcacatttggtcgtttcttga

SEQ ID NO: 3336630 - DNA, 25 bp, Homo sapien
catttggtcgtttcttgagtgagac

SEQ ID NO: 3336631 - DNA, 25 bp, Homo sapien
ggtcgtttcttgagtgagactaccc

SEQ ID NO: 3336632 - DNA, 25 bp, Homo sapien
ttcttttggaaattcgtagtcatat

SEQ ID NO: 3336633 - DNA, 25 bp, Homo sapien
aattgagttgagtgaccataatgtg

SEQ ID NO: 3336634 - DNA, 25 bp, Homo sapien
aagagtcaggcttattgcagtttct

SEQ ID NO: 3336635 - DNA, 25 bp, Homo sapien
ttttcagaggtaattgagttgagtg

SEQ ID NO: 3336636 - DNA, 25 bp, Homo sapien
cagtccaataggagaggtagccctt

SEQ ID NO: 3336637 - DNA, 25 bp, Homo sapien
ggtagcccttggtagtcactggttg

SEQ ID NO: 3336638 - DNA, 25 bp, Homo sapien
taagggagttctcaattagatgtcc

SEQ ID NO: 3336639 - DNA, 25 bp, Homo sapien
gcaggtgggtacatgtaatcctcag

SEQ ID NO: 3336640 - DNA, 25 bp, Homo sapien
aatctgcattacaccggacctgatg

SEQ ID NO: 3336641 - DNA, 25 bp, Homo sapien
aataaatctgcattacaccggacct

SEQ ID NO: 3336642 - DNA, 25 bp, Homo sapien
ttacaccggacctgatgtattggca

SEQ ID NO: 3336643 - DNA, 25 bp, Homo sapien
tgcattacaccggacctgatgtatt

SEQ ID NO: 3336644 - DNA, 25 bp, Homo sapien
ccactttgtcctcattactttcacc

SEQ ID NO: 3336645 - DNA, 25 bp, Homo sapien
ttactctgaccactgaattttttgc

SEQ ID NO: 3336646 - DNA, 25 bp, Homo sapien
ctttactctgaccactgaatttttt

SEQ ID NO: 3336647 - DNA, 25 bp, Homo sapien
actctgaccactgaattttttgctg

SEQ ID NO: 3336648 - DNA, 25 bp, Homo sapien
caatttctgtgctcttgtactggca

SEQ ID NO: 3336649 - DNA, 25 bp, Homo sapien
tctaaagcagctatccaagggtgca

SEQ ID NO: 3336650 - DNA, 25 bp, Homo sapien
cacggaaacatatgggaatctttgc

SEQ ID NO: 3336651 - DNA, 25 bp, Homo sapien
gagtcattctgtcttacacggaaac

SEQ ID NO: 3336652 - DNA, 25 bp, Homo sapien
ccttagggacaactgaaacgagtgt

SEQ ID NO: 3336653 - DNA, 25 bp, Homo sapien
taagggaagaagtacaagaacagag

SEQ ID NO: 3336654 - DNA, 25 bp, Homo sapien
gaagttctgtcttcaccttagggac

SEQ ID NO: 3336655 - DNA, 25 bp, Homo sapien
gaacagagagcaaattctttggaac

SEQ ID NO: 3336656 - DNA, 25 bp, Homo sapien
acaccagtccttgatggaataacag

SEQ ID NO: 3336657 - DNA, 25 bp, Homo sapien
cacaccagtccttgatggaataaca

SEQ ID NO: 3336658 - DNA, 25 bp, Homo sapien
atccacaccagtccttgatggaata

SEQ ID NO: 3336659 - DNA, 25 bp, Homo sapien
ccacaccagtccttgatggaataac

SEQ ID NO: 3336660 - DNA, 25 bp, Homo sapien
ttccggggctgccggatgcttatca

SEQ ID NO: 3336661 - DNA, 25 bp, Homo sapien
atgcttatcagctgaatacagcctt

SEQ ID NO: 3336662 - DNA, 25 bp, Homo sapien
ctgaatacagcctttaacctttgtt

SEQ ID NO: 3336663 - DNA, 25 bp, Homo sapien
cggggctgccggatgcttatcagct

SEQ ID NO: 3336664 - DNA, 25 bp, Homo sapien
tccttgtctggtgaagtatgaattc

SEQ ID NO: 3336665 - DNA, 25 bp, Homo sapien
atgggctgcctctccgagggagaaa

SEQ ID NO: 3336666 - DNA, 25 bp, Homo sapien
ggagaaattcaatgtctacagtatc

SEQ ID NO: 3336667 - DNA, 25 bp, Homo sapien
tacagtatcacggatcagcggacca

SEQ ID NO: 3336668 - DNA, 25 bp, Homo sapien
tggatatccaccttcaagacgtcag

SEQ ID NO: 3336669 - DNA, 25 bp, Homo sapien
tcccttcaggtactatttcagacat

SEQ ID NO: 3336670 - DNA, 25 bp, Homo sapien
tcaagacgtcagctaatcttccctg

SEQ ID NO: 3336671 - DNA, 25 bp, Homo sapien
ttccctgatcgcatgcttcatctga

SEQ ID NO: 3336672 - DNA, 25 bp, Homo sapien
aatctgcgtgaagatgtcagtgaag

SEQ ID NO: 3336673 - DNA, 25 bp, Homo sapien
aaaggccaaaatctgcgtgaagatg

SEQ ID NO: 3336674 - DNA, 25 bp, Homo sapien
gaatccatgtagatcagaacatgaa

SEQ ID NO: 3336675 - DNA, 25 bp, Homo sapien
tcccagaatccatgtagatcagaac

SEQ ID NO: 3336676 - DNA, 25 bp, Homo sapien
gattcgcagatatatgagtgccttg

SEQ ID NO: 3336677 - DNA, 25 bp, Homo sapien
gcagagtcacaatgcctaggaaatt

SEQ ID NO: 3336678 - DNA, 25 bp, Homo sapien
tgtcggatagggaatatgactctct

SEQ ID NO: 3336679 - DNA, 25 bp, Homo sapien
aattgatcagatgaacgctggttaa

SEQ ID NO: 3336680 - DNA, 25 bp, Homo sapien
cttcttggttctactccagggacct

SEQ ID NO: 3336681 - DNA, 25 bp, Homo sapien
tgtacccaggaatcagcccaaggta

SEQ ID NO: 3336682 - DNA, 25 bp, Homo sapien
acccaggaatcagcccaaggtacag

SEQ ID NO: 3336683 - DNA, 25 bp, Homo sapien
gggaccttgatgttcctgttgcccc

SEQ ID NO: 3336684 - DNA, 25 bp, Homo sapien
aaggcattgccgctatcagcaacca

SEQ ID NO: 3336685 - DNA, 25 bp, Homo sapien
aggcattgccgctatcagcaaccat

SEQ ID NO: 3336686 - DNA, 25 bp, Homo sapien
gaataaggcattgccgctatcagca

SEQ ID NO: 3336687 - DNA, 25 bp, Homo sapien
ttgtgaataaggcattgccgctatc

SEQ ID NO: 3336688 - DNA, 25 bp, Homo sapien
tcaagactgggttactaagtcttct

SEQ ID NO: 3336689 - DNA, 25 bp, Homo sapien
cttcttgttgatttagcccttcccg

SEQ ID NO: 3336690 - DNA, 25 bp, Homo sapien
agcccttcccgggattctgagactt

SEQ ID NO: 3336691 - DNA, 25 bp, Homo sapien
actgggttactaagtcttcttgttg

SEQ ID NO: 3336692 - DNA, 25 bp, Homo sapien
ccacaaaggaataaacatagcaatc

SEQ ID NO: 3336693 - DNA, 25 bp, Homo sapien
tatctttctgtttttgactagcaaa

SEQ ID NO: 3336694 - DNA, 25 bp, Homo sapien
ttttcactgttcctttatctttctg

SEQ ID NO: 3336695 - DNA, 25 bp, Homo sapien
tcagtgtgttccaggaagcctcttc

SEQ ID NO: 3336696 - DNA, 25 bp, Homo sapien
ttcactgttcctttatctttctgtt

SEQ ID NO: 3336697 - DNA, 25 bp, Homo sapien
tttgtctaagtgcttttcccacttg

SEQ ID NO: 3336698 - DNA, 25 bp, Homo sapien
aacatctttagcagttggtccacac

SEQ ID NO: 3336699 - DNA, 25 bp, Homo sapien
ctttagcagttggtccacactgatc

SEQ ID NO: 3336700 - DNA, 25 bp, Homo sapien
gtccagaacatctttagcagttggt

SEQ ID NO: 3336701 - DNA, 25 bp, Homo sapien
gaagacaaggagtaaggatgtcagc

SEQ ID NO: 3336702 - DNA, 25 bp, Homo sapien
tgaagtcacacactaaaccccaaag

SEQ ID NO: 3336703 - DNA, 25 bp, Homo sapien
agactgttaccgaggtttagatgca

SEQ ID NO: 3336704 - DNA, 25 bp, Homo sapien
ccaatacgttcataattgtcagtgt

SEQ ID NO: 3336705 - DNA, 25 bp, Homo sapien
tttgtgttataggtggaaggagacc

SEQ ID NO: 3336706 - DNA, 25 bp, Homo sapien
agaccagaccacgttttctacagat

SEQ ID NO: 3336707 - DNA, 25 bp, Homo sapien
cagaccacgttttctacagatggaa

SEQ ID NO: 3336708 - DNA, 25 bp, Homo sapien
tgccagtaaatttgtgttataggtg

SEQ ID NO: 3336709 - DNA, 25 bp, Homo sapien
ctataggtggcatctctgtgaacgc

SEQ ID NO: 3336710 - DNA, 25 bp, Homo sapien
gatcgcgtcctttcatgacctggcg

SEQ ID NO: 3336711 - DNA, 25 bp, Homo sapien
tggacagtttcaagctacgaacacc

SEQ ID NO: 3336712 - DNA, 25 bp, Homo sapien
ggaagagacccacagtagcacaata

SEQ ID NO: 3336713 - DNA, 25 bp, Homo sapien
tagatagaatagcatgactgtggct

SEQ ID NO: 3336714 - DNA, 25 bp, Homo sapien
cctaaaataggtctgctggtgtatc

SEQ ID NO: 3336715 - DNA, 25 bp, Homo sapien
ggttgtttaagaatgaactgcctct

SEQ ID NO: 3336716 - DNA, 25 bp, Homo sapien
tagaagtttgcaccagtacaggctt

SEQ ID NO: 3336717 - DNA, 25 bp, Homo sapien
ccattgatcatagctaagagagggc

SEQ ID NO: 3336718 - DNA, 25 bp, Homo sapien
tcatagctattcaaggaggcctctg

SEQ ID NO: 3336719 - DNA, 25 bp, Homo sapien
gcaatttggagaagtgacaagccac

SEQ ID NO: 3336720 - DNA, 25 bp, Homo sapien
ttgtggaacatacctgcaaactgcc

SEQ ID NO: 3336721 - DNA, 25 bp, Homo sapien
tgtagcatgttgaaagcatactttc

SEQ ID NO: 3336722 - DNA, 25 bp, Homo sapien
aagtcccctctggaggtctgtagta

SEQ ID NO: 3336723 - DNA, 25 bp, Homo sapien
tacttggggaaagccatcagctgta

SEQ ID NO: 3336724 - DNA, 25 bp, Homo sapien
cagtacattctctatgcggcatcct

SEQ ID NO: 3336725 - DNA, 25 bp, Homo sapien
tagccctaaggatgcaggttctaga

SEQ ID NO: 3336726 - DNA, 25 bp, Homo sapien
taatttattaagtctggccctatag

SEQ ID NO: 3336727 - DNA, 25 bp, Homo sapien
tgtttaatgcagagttgcagcaacc

SEQ ID NO: 3336728 - DNA, 25 bp, Homo sapien
taggccaggcccaataccattattg

SEQ ID NO: 3336729 - DNA, 25 bp, Homo sapien
cagtggaaataaagtctgcaacctc

SEQ ID NO: 3336730 - DNA, 25 bp, Homo sapien
tgtccacggacagtacaaaagtcac

SEQ ID NO: 3336731 - DNA, 25 bp, Homo sapien
cttcttgagctagttaacagtggga

SEQ ID NO: 3336732 - DNA, 25 bp, Homo sapien
cacaagtgctgggaatggtacatca

SEQ ID NO: 3336733 - DNA, 25 bp, Homo sapien
tatttggctaagagtaacgccagac

SEQ ID NO: 3336734 - DNA, 25 bp, Homo sapien
ggatcatcggattcattcagtgctc

SEQ ID NO: 3336735 - DNA, 25 bp, Homo sapien
gacaagcagcaaggcgacaggatag

SEQ ID NO: 3336736 - DNA, 25 bp, Homo sapien
acacaactagcaggtgtgagctgac

SEQ ID NO: 3336737 - DNA, 25 bp, Homo sapien
gccaatcagctaacatttcagggaa

SEQ ID NO: 3336738 - DNA, 25 bp, Homo sapien
actgtacagtccatggtaaacattc

SEQ ID NO: 3336739 - DNA, 25 bp, Homo sapien
tccgaatattgacagtgctgagact

SEQ ID NO: 3336740 - DNA, 25 bp, Homo sapien
gagagaccctgctttagcatgagac

SEQ ID NO: 3336741 - DNA, 25 bp, Homo sapien
cccgaatgtcactgctggcatagca

SEQ ID NO: 3336742 - DNA, 25 bp, Homo sapien
tatggctccagtagcatcagtttcc

SEQ ID NO: 3336743 - DNA, 25 bp, Homo sapien
taggcctgctgatgaagttaaaccc

SEQ ID NO: 3336744 - DNA, 25 bp, Homo sapien
ccaagtgatgttacccagggacatt

SEQ ID NO: 3336745 - DNA, 25 bp, Homo sapien
taagtaagtatgtgtcaaatgctgc

SEQ ID NO: 3336746 - DNA, 25 bp, Homo sapien
agtaagtatgtgtcaaatgctgcag

SEQ ID NO: 3336747 - DNA, 25 bp, Homo sapien
tgtgtaagtaagtatgtgtcaaatg

SEQ ID NO: 3336748 - DNA, 25 bp, Homo sapien
tatgtgtcaaatgctgcagttggag

SEQ ID NO: 3336749 - DNA, 25 bp, Homo sapien
gcttcatggtgatagggagaatgat

SEQ ID NO: 3336750 - DNA, 25 bp, Homo sapien
tttgttatccttattgtgctgctta

SEQ ID NO: 3336751 - DNA, 25 bp, Homo sapien
atgggttttgttatccttattgtgc

SEQ ID NO: 3336752 - DNA, 25 bp, Homo sapien
gatagggagaatgattgccattgga

SEQ ID NO: 3336753 - DNA, 25 bp, Homo sapien
gaactctgaaggctctgattagcga

SEQ ID NO: 3336754 - DNA, 25 bp, Homo sapien
tcctggttgcttgggaactctgaag

SEQ ID NO: 3336755 - DNA, 25 bp, Homo sapien
tgattagcgagttttcacccttcat

SEQ ID NO: 3336756 - DNA, 25 bp, Homo sapien
cttgtctcttgtcctggttgcttgg

SEQ ID NO: 3336757 - DNA, 25 bp, Homo sapien
ccaaatatagtcttgcctgctgcca

SEQ ID NO: 3336758 - DNA, 25 bp, Homo sapien
tatagtcttgcctgctgccatctga

SEQ ID NO: 3336759 - DNA, 25 bp, Homo sapien
tagtcttgcctgctgccatctgata

SEQ ID NO: 3336760 - DNA, 25 bp, Homo sapien
gtcttgcctgctgccatctgataaa

SEQ ID NO: 3336761 - DNA, 25 bp, Homo sapien
cagtccacatgatctgcctgaacag

SEQ ID NO: 3336762 - DNA, 25 bp, Homo sapien
aacagtccacatgatctgcctgaac

SEQ ID NO: 3336763 - DNA, 25 bp, Homo sapien
tccacatgatctgcctgaacagaaa

SEQ ID NO: 3336764 - DNA, 25 bp, Homo sapien
gaaacagtccacatgatctgcctga

SEQ ID NO: 3336765 - DNA, 25 bp, Homo sapien
agaatgccctgcctgactgaagacc

SEQ ID NO: 3336766 - DNA, 25 bp, Homo sapien
gaaaagaatgccctgcctgactgaa

SEQ ID NO: 3336767 - DNA, 25 bp, Homo sapien
tgactgaagacccatactatccacc

SEQ ID NO: 3336768 - DNA, 25 bp, Homo sapien
cctgcctgactgaagacccatacta

SEQ ID NO: 3336769 - DNA, 25 bp, Homo sapien
taagacctcgaagaccaggagaact

SEQ ID NO: 3336770 - DNA, 25 bp, Homo sapien
ctaagacctcgaagaccaggagaac

SEQ ID NO: 3336771 - DNA, 25 bp, Homo sapien
agacctcgaagaccaggagaacttc

SEQ ID NO: 3336772 - DNA, 25 bp, Homo sapien
gacctcgaagaccaggagaacttcc

SEQ ID NO: 3336773 - DNA, 25 bp, Homo sapien
cttcagctgaagtaaaaacatccca

SEQ ID NO: 3336774 - DNA, 25 bp, Homo sapien
ctgaagtaaaaacatcccaaataag

SEQ ID NO: 3336775 - DNA, 25 bp, Homo sapien
catcccaaataaggtcaattttcat

SEQ ID NO: 3336776 - DNA, 25 bp, Homo sapien
acatcccaaataaggtcaattttca

SEQ ID NO: 3336777 - DNA, 25 bp, Homo sapien
gggaggaagtcatgcaaatacatct

SEQ ID NO: 3336778 - DNA, 25 bp, Homo sapien
cagataaattacaggcgcaacatgt

SEQ ID NO: 3336779 - DNA, 25 bp, Homo sapien
cttaaaagtgaaccctatcagggag

SEQ ID NO: 3336780 - DNA, 25 bp, Homo sapien
gaaactcaataaggccaatgggcct

SEQ ID NO: 3336781 - DNA, 25 bp, Homo sapien
ttgaagatttcatacttgaatttgg

SEQ ID NO: 3336782 - DNA, 25 bp, Homo sapien
tctatagtgacatttctgttctttt

SEQ ID NO: 3336783 - DNA, 25 bp, Homo sapien
ccatctatagtgacatttctgttct

SEQ ID NO: 3336784 - DNA, 25 bp, Homo sapien
gaagatttcatacttgaatttggta

SEQ ID NO: 3336785 - DNA, 25 bp, Homo sapien
gaataccattcagtttgcggcaaat

SEQ ID NO: 3336786 - DNA, 25 bp, Homo sapien
ggcacttttacaacaggtgaaacga

SEQ ID NO: 3336787 - DNA, 25 bp, Homo sapien
tctcaagattgagcattgttcaagt

SEQ ID NO: 3336788 - DNA, 25 bp, Homo sapien
cagcgctcggataaagaagtccttg

SEQ ID NO: 3336789 - DNA, 25 bp, Homo sapien
tgtaagaacgaacgtttcttgttca

SEQ ID NO: 3336790 - DNA, 25 bp, Homo sapien
cctccaaacacttctagtctaaaca

SEQ ID NO: 3336791 - DNA, 25 bp, Homo sapien
tgtaataccgtaaagtgtcggcctc

SEQ ID NO: 3336792 - DNA, 25 bp, Homo sapien
tgttcatttgtaataccgtaaagtg

SEQ ID NO: 3336793 - DNA, 25 bp, Homo sapien
ttttgaaggagattttctagcaatg

SEQ ID NO: 3336794 - DNA, 25 bp, Homo sapien
tttgaaggagattttctagcaatgc

SEQ ID NO: 3336795 - DNA, 25 bp, Homo sapien
attttgaaggagattttctagcaat

SEQ ID NO: 3336796 - DNA, 25 bp, Homo sapien
tggtagtactaaaaccagctctagt

SEQ ID NO: 3336797 - DNA, 25 bp, Homo sapien
catgtccaaagtgactgggactgaa

SEQ ID NO: 3336798 - DNA, 25 bp, Homo sapien
caaagttcatagtcagaggaggagt

SEQ ID NO: 3336799 - DNA, 25 bp, Homo sapien
cccttagtgtatacattgcactcga

SEQ ID NO: 3336800 - DNA, 25 bp, Homo sapien
actcccactctgacgtccatttgtg

SEQ ID NO: 3336801 - DNA, 25 bp, Homo sapien
aaattgccatgggatgcaccacact

SEQ ID NO: 3336802 - DNA, 25 bp, Homo sapien
attgccatgggatgcaccacactcc

SEQ ID NO: 3336803 - DNA, 25 bp, Homo sapien
tctgacgtccatttgtgtgatccat

SEQ ID NO: 3336804 - DNA, 25 bp, Homo sapien
ccttgaaatcaagactagttcacga

SEQ ID NO: 3336805 - DNA, 25 bp, Homo sapien
aatcaagactagttcacgaatagac

SEQ ID NO: 3336806 - DNA, 25 bp, Homo sapien
gaaatcaagactagttcacgaatag

SEQ ID NO: 3336807 - DNA, 25 bp, Homo sapien
tcaagactagttcacgaatagacat

SEQ ID NO: 3336808 - DNA, 25 bp, Homo sapien
gatttggtaatctgggacactcata

SEQ ID NO: 3336809 - DNA, 25 bp, Homo sapien
tggacatcatactaacaacttcttg

SEQ ID NO: 3336810 - DNA, 25 bp, Homo sapien
ggaagagtgctatgccaaatagctg

SEQ ID NO: 3336811 - DNA, 25 bp, Homo sapien
cactgttattttccgacccacttga

SEQ ID NO: 3336812 - DNA, 25 bp, Homo sapien
tttcaaacttaagcttgtcctgcag

SEQ ID NO: 3336813 - DNA, 25 bp, Homo sapien
tataaagccctgtaatattcagact

SEQ ID NO: 3336814 - DNA, 25 bp, Homo sapien
ggtaatctcacattgaacagaatca

SEQ ID NO: 3336815 - DNA, 25 bp, Homo sapien
tatttggatgtctacatggtatgac

SEQ ID NO: 3336816 - DNA, 25 bp, Homo sapien
tacatcatatgagaggcctagtcct

SEQ ID NO: 3336817 - DNA, 25 bp, Homo sapien
ggaagccagaggactacatttacag

SEQ ID NO: 3336818 - DNA, 25 bp, Homo sapien
ttaaagggcctcaaccaggtatggc

SEQ ID NO: 3336819 - DNA, 25 bp, Homo sapien
agaaagtgttgtatcagcagaggtc

SEQ ID NO: 3336820 - DNA, 25 bp, Homo sapien
ctttcttgcaaagagacatctccaa

SEQ ID NO: 3336821 - DNA, 25 bp, Homo sapien
cttgtagaagttcgaagttttcctg

SEQ ID NO: 3336822 - DNA, 25 bp, Homo sapien
taatactttcttgcaaagagacatc

SEQ ID NO: 3336823 - DNA, 25 bp, Homo sapien
gtaatattcttgtagaagttcgaag

SEQ ID NO: 3336824 - DNA, 25 bp, Homo sapien
tatccagtttagactctcctaaagc

SEQ ID NO: 3336825 - DNA, 25 bp, Homo sapien
tctcctccctgaaaggacgatgtct

SEQ ID NO: 3336826 - DNA, 25 bp, Homo sapien
tgtcagatcattcagtctcaatgaa

SEQ ID NO: 3336827 - DNA, 25 bp, Homo sapien
tagtctccctagtttagcatctaag

SEQ ID NO: 3336828 - DNA, 25 bp, Homo sapien
tagaggtagtgactcaaacattctg

SEQ ID NO: 3336829 - DNA, 25 bp, Homo sapien
ctttcagccagagtttgctgttcat

SEQ ID NO: 3336830 - DNA, 25 bp, Homo sapien
gaagcttgacctctaccacgtaatg

SEQ ID NO: 3336831 - DNA, 25 bp, Homo sapien
aagtactggatacacatgaagcaac

SEQ ID NO: 3336832 - DNA, 25 bp, Homo sapien
tataactggcaacacatcattggat

SEQ ID NO: 3336833 - DNA, 25 bp, Homo sapien
tctttaaatcggaaatgccaacggc

SEQ ID NO: 3336834 - DNA, 25 bp, Homo sapien
aatgccaacggccatgtcctctagc

SEQ ID NO: 3336835 - DNA, 25 bp, Homo sapien
gtcctctagcattccaatttcatcg

SEQ ID NO: 3336836 - DNA, 25 bp, Homo sapien
ccccactgtgtgaagctgctgtagg

SEQ ID NO: 3336837 - DNA, 25 bp, Homo sapien
cagacttgtctgtaatttgatgata

SEQ ID NO: 3336838 - DNA, 25 bp, Homo sapien
tgtacttagcagtccttcatattgt

SEQ ID NO: 3336839 - DNA, 25 bp, Homo sapien
gcctgggtcatacagacttgtctgt

SEQ ID NO: 3336840 - DNA, 25 bp, Homo sapien
gggcaagctgtacgcaagttcctga

SEQ ID NO: 3336841 - DNA, 25 bp, Homo sapien
agttcctgaaggagcacaaatgtca

SEQ ID NO: 3336842 - DNA, 25 bp, Homo sapien
gcttggctgaagacgatgtctcttc

SEQ ID NO: 3336843 - DNA, 25 bp, Homo sapien
tcttagcgtcagcatcagacactgg

SEQ ID NO: 3336844 - DNA, 25 bp, Homo sapien
tcaatcagtttgtccaccatagcaa

SEQ ID NO: 3336845 - DNA, 25 bp, Homo sapien
ttctccatcattgttgccgccactg

SEQ ID NO: 3336846 - DNA, 25 bp, Homo sapien
atagcaataatgcagttcaggctct

SEQ ID NO: 3336847 - DNA, 25 bp, Homo sapien
catctgttaatgaaggttccttttc

SEQ ID NO: 3336848 - DNA, 25 bp, Homo sapien
tgcattatgcatggtctcaatgttt

SEQ ID NO: 3336849 - DNA, 25 bp, Homo sapien
caatgtttttctgtagacgtaatgt

SEQ ID NO: 3336850 - DNA, 25 bp, Homo sapien
aatgtttttctgtagacgtaatgtt

SEQ ID NO: 3336851 - DNA, 25 bp, Homo sapien
atgtttttctgtagacgtaatgttt

SEQ ID NO: 3336852 - DNA, 25 bp, Homo sapien
agtaacttttctgagtgggaaagat

SEQ ID NO: 3336853 - DNA, 25 bp, Homo sapien
tgttttcagtagaaagcggttgcta

SEQ ID NO: 3336854 - DNA, 25 bp, Homo sapien
aatgttatataccaaacaaactcgg

SEQ ID NO: 3336855 - DNA, 25 bp, Homo sapien
taggcaaagcttgtatatgctttcc

SEQ ID NO: 3336856 - DNA, 25 bp, Homo sapien
tctctaaggctgcactgcgattgct

SEQ ID NO: 3336857 - DNA, 25 bp, Homo sapien
tacttctggcaacaccactatggct

SEQ ID NO: 3336858 - DNA, 25 bp, Homo sapien
gaataaggcagaacaggtactcagt

SEQ ID NO: 3336859 - DNA, 25 bp, Homo sapien
taactgagggccaacgttgttcacc

SEQ ID NO: 3336860 - DNA, 25 bp, Homo sapien
gtggtatggagtcctgccctctcat

SEQ ID NO: 3336861 - DNA, 25 bp, Homo sapien
tcatcatagtctgaatgatgtggta

SEQ ID NO: 3336862 - DNA, 25 bp, Homo sapien
tgtggtatggagtcctgccctctca

SEQ ID NO: 3336863 - DNA, 25 bp, Homo sapien
agtctgaatgatgtggtatggagtc

SEQ ID NO: 3336864 - DNA, 25 bp, Homo sapien
gcttcttaagaatgcctcctggcct

SEQ ID NO: 3336865 - DNA, 25 bp, Homo sapien
caagttgatccttgaaggcatgtac

SEQ ID NO: 3336866 - DNA, 25 bp, Homo sapien
agagcactcctgacaagttgatcct

SEQ ID NO: 3336867 - DNA, 25 bp, Homo sapien
ggccttgcagtgtagagtgctaaaa

SEQ ID NO: 3336868 - DNA, 25 bp, Homo sapien
tactagggccatacacttctgagga

SEQ ID NO: 3336869 - DNA, 25 bp, Homo sapien
tgttagggtagactaagagcagcct

SEQ ID NO: 3336870 - DNA, 25 bp, Homo sapien
aagataaactattcccgggcctgtg

SEQ ID NO: 3336871 - DNA, 25 bp, Homo sapien
ggatggcaggcattttgactttaca

SEQ ID NO: 3336872 - DNA, 25 bp, Homo sapien
taatccatagtatacaacaagccca

SEQ ID NO: 3336873 - DNA, 25 bp, Homo sapien
gcatggcttgcaaacttaacttaaa

SEQ ID NO: 3336874 - DNA, 25 bp, Homo sapien
gctcatagactatacaaaactgtta

SEQ ID NO: 3336875 - DNA, 25 bp, Homo sapien
aaccatgagatactaacagtgctca

SEQ ID NO: 3336876 - DNA, 25 bp, Homo sapien
cgccctcgttagttctggaagttga

SEQ ID NO: 3336877 - DNA, 25 bp, Homo sapien
tggaagttgatattgagtgtctacc

SEQ ID NO: 3336878 - DNA, 25 bp, Homo sapien
agtgtctaccccatgccagactagc

SEQ ID NO: 3336879 - DNA, 25 bp, Homo sapien
tttctatcacacagcgagccgccct

SEQ ID NO: 3336880 - DNA, 25 bp, Homo sapien
ggctgtgttttcaggtgaatagtaa

SEQ ID NO: 3336881 - DNA, 25 bp, Homo sapien
tgaatagtaaataaactggtatccg

SEQ ID NO: 3336882 - DNA, 25 bp, Homo sapien
gctataagaggttgtagttgattga

SEQ ID NO: 3336883 - DNA, 25 bp, Homo sapien
agcagtaggtctgcatgggttgcta

SEQ ID NO: 3336884 - DNA, 25 bp, Homo sapien
cacatcagtagggatggcatccctt

SEQ ID NO: 3336885 - DNA, 25 bp, Homo sapien
ccccactagaagaatggtacagtag

SEQ ID NO: 3336886 - DNA, 25 bp, Homo sapien
tcagattccatgggcaaaaccctgt

SEQ ID NO: 3336887 - DNA, 25 bp, Homo sapien
ccataaagtaaataggagatgcctc

SEQ ID NO: 3336888 - DNA, 25 bp, Homo sapien
attcttaaatccctgaaaatgggca

SEQ ID NO: 3336889 - DNA, 25 bp, Homo sapien
gcttccgaagaccaccattcttaaa

SEQ ID NO: 3336890 - DNA, 25 bp, Homo sapien
gggctcccacagtgatgacatcgta

SEQ ID NO: 3336891 - DNA, 25 bp, Homo sapien
tctatggagtagcttccgaagacca

SEQ ID NO: 3336892 - DNA, 25 bp, Homo sapien
caaggagatgaacactttgcaaaca

SEQ ID NO: 3336893 - DNA, 25 bp, Homo sapien
tggagtagaaacagacaaggagatg

SEQ ID NO: 3336894 - DNA, 25 bp, Homo sapien
tgaacactttgcaaacatttatctc

SEQ ID NO: 3336895 - DNA, 25 bp, Homo sapien
ctggagtagaaacagacaaggagat

SEQ ID NO: 3336896 - DNA, 25 bp, Homo sapien
taactgcttgatgggcacatctgag

SEQ ID NO: 3336897 - DNA, 25 bp, Homo sapien
tattctaacgcttgaccctaactgg

SEQ ID NO: 3336898 - DNA, 25 bp, Homo sapien
taagcctccaagagtagagtcctca

SEQ ID NO: 3336899 - DNA, 25 bp, Homo sapien
tgaaatctcttgactagttctgacc

SEQ ID NO: 3336900 - DNA, 25 bp, Homo sapien
taaattttggctactgttggacctg

SEQ ID NO: 3336901 - DNA, 25 bp, Homo sapien
gaaacaattggaaagtagctgctga

SEQ ID NO: 3336902 - DNA, 25 bp, Homo sapien
aaggccaaagaggttagctgactcc

SEQ ID NO: 3336903 - DNA, 25 bp, Homo sapien
gacacgctgacctcatatcaaggaa

SEQ ID NO: 3336904 - DNA, 25 bp, Homo sapien
aatttgcggaatcccacttgagata

SEQ ID NO: 3336905 - DNA, 25 bp, Homo sapien
atttgcggaatcccacttgagatat

SEQ ID NO: 3336906 - DNA, 25 bp, Homo sapien
caatttgcggaatcccacttgagat

SEQ ID NO: 3336907 - DNA, 25 bp, Homo sapien
tccccaaagagaatccacgagtgaa

SEQ ID NO: 3336908 - DNA, 25 bp, Homo sapien
tccctgtgggctcaaatcaggaact

SEQ ID NO: 3336909 - DNA, 25 bp, Homo sapien
tcaggcactgtgatcactcaagcag

SEQ ID NO: 3336910 - DNA, 25 bp, Homo sapien
tctaaagggaccaggctcacaaagt

SEQ ID NO: 3336911 - DNA, 25 bp, Homo sapien
tgtcatctacccatggctgtaaagc

SEQ ID NO: 3336912 - DNA, 25 bp, Homo sapien
tctatctggtttgatgacactgtca

SEQ ID NO: 3336913 - DNA, 25 bp, Homo sapien
aacagcatagtacatggttctttca

SEQ ID NO: 3336914 - DNA, 25 bp, Homo sapien
gaattcatatgtatgtggccccaaa

SEQ ID NO: 3336915 - DNA, 25 bp, Homo sapien
ttaaaccattaccacgacttatgcc

SEQ ID NO: 3336916 - DNA, 25 bp, Homo sapien
tatgattggtatgcaaacactagaa

SEQ ID NO: 3336917 - DNA, 25 bp, Homo sapien
cagacaattctaaagcagaactgag

SEQ ID NO: 3336918 - DNA, 25 bp, Homo sapien
catttaaacttgcaaatcagctggt

SEQ ID NO: 3336919 - DNA, 25 bp, Homo sapien
gctgctgcttgatttgaaagaggac

SEQ ID NO: 3336920 - DNA, 25 bp, Homo sapien
ctgctgcttgatttgaaagaggacc

SEQ ID NO: 3336921 - DNA, 25 bp, Homo sapien
caattcactttgagtaagtagagaa

SEQ ID NO: 3336922 - DNA, 25 bp, Homo sapien
tcatttcacatgcaggaaatgcaat

SEQ ID NO: 3336923 - DNA, 25 bp, Homo sapien
tcacatgcaggaaatgcaattcact

SEQ ID NO: 3336924 - DNA, 25 bp, Homo sapien
ttgagtaagtagagaaattgcttcc

SEQ ID NO: 3336925 - DNA, 25 bp, Homo sapien
ttcgcagattgtcccaatgtggaga

SEQ ID NO: 3336926 - DNA, 25 bp, Homo sapien
cagaatgtcttggtacatattcacc

SEQ ID NO: 3336927 - DNA, 25 bp, Homo sapien
agtaaggacattttttcgcagattg

SEQ ID NO: 3336928 - DNA, 25 bp, Homo sapien
cttgctaagttctgtcagaatgtct

SEQ ID NO: 3336929 - DNA, 25 bp, Homo sapien
tcgtggcatagtatagtcagcatac

SEQ ID NO: 3336930 - DNA, 25 bp, Homo sapien
tattccgaaatcagtgtctcagctc

SEQ ID NO: 3336931 - DNA, 25 bp, Homo sapien
tggacagatggcatgccctgtctgc

SEQ ID NO: 3336932 - DNA, 25 bp, Homo sapien
tcttctgtccattgagaattcgtgg

SEQ ID NO: 3336933 - DNA, 25 bp, Homo sapien
gagtccaaatgtcacactaactgtg

SEQ ID NO: 3336934 - DNA, 25 bp, Homo sapien
tgttatgagaacacttcaccgccaa

SEQ ID NO: 3336935 - DNA, 25 bp, Homo sapien
cagaaggtgttaatgcttaagccaa

SEQ ID NO: 3336936 - DNA, 25 bp, Homo sapien
taaagtgtatcacaaccctgagact

SEQ ID NO: 3336937 - DNA, 25 bp, Homo sapien
ctgacatctgctctcgaattcgcat

SEQ ID NO: 3336938 - DNA, 25 bp, Homo sapien
acatctgctctcgaattcgcatcca

SEQ ID NO: 3336939 - DNA, 25 bp, Homo sapien
tctgctctcgaattcgcatccactt

SEQ ID NO: 3336940 - DNA, 25 bp, Homo sapien
tgacatctgctctcgaattcgcatc

SEQ ID NO: 3336941 - DNA, 25 bp, Homo sapien
tgtatctcctaaagcaaggttaaaa

SEQ ID NO: 3336942 - DNA, 25 bp, Homo sapien
ccaaggccggagcttaatagtgtga

SEQ ID NO: 3336943 - DNA, 25 bp, Homo sapien
gttgatctcaaaacgaatccttcta

SEQ ID NO: 3336944 - DNA, 25 bp, Homo sapien
gcttgccttttatacatcaataata

SEQ ID NO: 3336945 - DNA, 25 bp, Homo sapien
caaggactctctaggaatgctgcta

SEQ ID NO: 3336946 - DNA, 25 bp, Homo sapien
actaccaggtacacatcatccaagg

SEQ ID NO: 3336947 - DNA, 25 bp, Homo sapien
catgtctgatgcaagaatacctcct

SEQ ID NO: 3336948 - DNA, 25 bp, Homo sapien
tttgcaacccagtttgacccagcag

SEQ ID NO: 3336949 - DNA, 25 bp, Homo sapien
agcaagatgtacaaataccggtaag

SEQ ID NO: 3336950 - DNA, 25 bp, Homo sapien
tacaaataccggtaagttctccaca

SEQ ID NO: 3336951 - DNA, 25 bp, Homo sapien
agatgtacaaataccggtaagttct

SEQ ID NO: 3336952 - DNA, 25 bp, Homo sapien
gaagcaagatgtacaaataccggta

SEQ ID NO: 3336953 - DNA, 25 bp, Homo sapien
ttaacagtactatatgtctcaattt

SEQ ID NO: 3336954 - DNA, 25 bp, Homo sapien
cccggccagtagtcattatttacta

SEQ ID NO: 3336955 - DNA, 25 bp, Homo sapien
ccggccagtagtcattatttactaa

SEQ ID NO: 3336956 - DNA, 25 bp, Homo sapien
taacagtactatatgtctcaatttt

SEQ ID NO: 3336957 - DNA, 25 bp, Homo sapien
tatcttttccgctcacactttccgg

SEQ ID NO: 3336958 - DNA, 25 bp, Homo sapien
ctgtacattcacataccagggcaca

SEQ ID NO: 3336959 - DNA, 25 bp, Homo sapien
cactttccggggctgtacattcaca

SEQ ID NO: 3336960 - DNA, 25 bp, Homo sapien
aggtaagttatcttttccgctcaca

SEQ ID NO: 3336961 - DNA, 25 bp, Homo sapien
gcaaataggccctttgattcagagg

SEQ ID NO: 3336962 - DNA, 25 bp, Homo sapien
caatacttttgttccaactgagaag

SEQ ID NO: 3336963 - DNA, 25 bp, Homo sapien
tgcttctgaatggagcattgctttg

SEQ ID NO: 3336964 - DNA, 25 bp, Homo sapien
ttgcatagttccaagcaaataggcc

SEQ ID NO: 3336965 - DNA, 25 bp, Homo sapien
tgacttctatggtgccaaccacttt

SEQ ID NO: 3336966 - DNA, 25 bp, Homo sapien
tatggtgccaaccactttgccacca

SEQ ID NO: 3336967 - DNA, 25 bp, Homo sapien
atgtggtcggcttccccatcctcaa

SEQ ID NO: 3336968 - DNA, 25 bp, Homo sapien
cttttgtccctgtacatctgtggtg

SEQ ID NO: 3336969 - DNA, 25 bp, Homo sapien
cactgtttaacgcagaaagcagaga

SEQ ID NO: 3336970 - DNA, 25 bp, Homo sapien
actgtttaacgcagaaagcagagag

SEQ ID NO: 3336971 - DNA, 25 bp, Homo sapien
tgttatacctgaagaacctacttcc

SEQ ID NO: 3336972 - DNA, 25 bp, Homo sapien
gtgttatacctgaagaacctacttc

SEQ ID NO: 3336973 - DNA, 25 bp, Homo sapien
tgaagaacctacttcccttcctcca

SEQ ID NO: 3336974 - DNA, 25 bp, Homo sapien
tgtgttatacctgaagaacctactt

SEQ ID NO: 3336975 - DNA, 25 bp, Homo sapien
tctcctctatgtctagagttacaat

SEQ ID NO: 3336976 - DNA, 25 bp, Homo sapien
tgagtatagcagtgtgagctttcct

SEQ ID NO: 3336977 - DNA, 25 bp, Homo sapien
cttgatctttcttccgagctagaga

SEQ ID NO: 3336978 - DNA, 25 bp, Homo sapien
tcttccgagctagagacattttcct

SEQ ID NO: 3336979 - DNA, 25 bp, Homo sapien
gatgtgacttagtttccagtcccag

SEQ ID NO: 3336980 - DNA, 25 bp, Homo sapien
cgacaatcttcactgggacctcatg

SEQ ID NO: 3336981 - DNA, 25 bp, Homo sapien
cagtcccagctgacattatgggtaa

SEQ ID NO: 3336982 - DNA, 25 bp, Homo sapien
tgggtaatgtacacggccatcgaca

SEQ ID NO: 3336983 - DNA, 25 bp, Homo sapien
ggaaagacagtcattggtcacagga

SEQ ID NO: 3336984 - DNA, 25 bp, Homo sapien
ttggtacaatatacgctattcaggg

SEQ ID NO: 3336985 - DNA, 25 bp, Homo sapien
ccagcccctaagcttctgatgatgg

SEQ ID NO: 3336986 - DNA, 25 bp, Homo sapien
gtcacaggaaattgagaggccaatg

SEQ ID NO: 3336987 - DNA, 25 bp, Homo sapien
tgtggatgaagcaccttgtatacct

SEQ ID NO: 3336988 - DNA, 25 bp, Homo sapien
tgaagcaccttgtatacctgggctg

SEQ ID NO: 3336989 - DNA, 25 bp, Homo sapien
tggatgaagcaccttgtatacctgg

SEQ ID NO: 3336990 - DNA, 25 bp, Homo sapien
gatgaagcaccttgtatacctgggc

SEQ ID NO: 3336991 - DNA, 25 bp, Homo sapien
tgcaatccgacaaatccaacacctt

SEQ ID NO: 3336992 - DNA, 25 bp, Homo sapien
taagcaggtaggtctttgtgtacag

SEQ ID NO: 3336993 - DNA, 25 bp, Homo sapien
ggtttccatggtcatacctacagct

SEQ ID NO: 3336994 - DNA, 25 bp, Homo sapien
gaaactgactttggtaaatatgggc

SEQ ID NO: 3336995 - DNA, 25 bp, Homo sapien
ctttaaaactggcatagcccaagaa

SEQ ID NO: 3336996 - DNA, 25 bp, Homo sapien
caggaccagcaattgctcctttgac

SEQ ID NO: 3336997 - DNA, 25 bp, Homo sapien
tcaggaccagcaattgctcctttga

SEQ ID NO: 3336998 - DNA, 25 bp, Homo sapien
ggaccagcaattgctcctttgactt

SEQ ID NO: 3336999 - DNA, 25 bp, Homo sapien
tacctcaaaaggtctaagagcatat

SEQ ID NO: 3337000 - DNA, 25 bp, Homo sapien
tatctttacttgtgaatatacctca

SEQ ID NO: 3337001 - DNA, 25 bp, Homo sapien
tgggaagaaatctattaaaagttga

SEQ ID NO: 3337002 - DNA, 25 bp, Homo sapien
agaccaagtgaactattaacattga

SEQ ID NO: 3337003 - DNA, 25 bp, Homo sapien
tcctgaagcggtagagatcacatct

SEQ ID NO: 3337004 - DNA, 25 bp, Homo sapien
tgaagcggtagagatcacatctgta

SEQ ID NO: 3337005 - DNA, 25 bp, Homo sapien
tccttcctgaagcggtagagatcac

SEQ ID NO: 3337006 - DNA, 25 bp, Homo sapien
gcggtagagatcacatctgtaattt

SEQ ID NO: 3337007 - DNA, 25 bp, Homo sapien
cagggcaaagtctaggctcatctct

SEQ ID NO: 3337008 - DNA, 25 bp, Homo sapien
tgcagggcaaagtctaggctcatct

SEQ ID NO: 3337009 - DNA, 25 bp, Homo sapien
gcagggcaaagtctaggctcatctc

SEQ ID NO: 3337010 - DNA, 25 bp, Homo sapien
cgggggatccttatgttctggtagg

SEQ ID NO: 3337011 - DNA, 25 bp, Homo sapien
ggggatccttatgttctggtaggac

SEQ ID NO: 3337012 - DNA, 25 bp, Homo sapien
gcgggggatccttatgttctggtag

SEQ ID NO: 3337013 - DNA, 25 bp, Homo sapien
ggatccttatgttctggtaggacac

SEQ ID NO: 3337014 - DNA, 25 bp, Homo sapien
tctgtaagactttggagtagaaact

SEQ ID NO: 3337015 - DNA, 25 bp, Homo sapien
gactttggagtagaaactagtgcag

SEQ ID NO: 3337016 - DNA, 25 bp, Homo sapien
tagaaactagtgcagaagcctcgca

SEQ ID NO: 3337017 - DNA, 25 bp, Homo sapien
cagaagcctcgcacaggtgctgggt

SEQ ID NO: 3337018 - DNA, 25 bp, Homo sapien
tgatagtggcattctaaacaggcac

SEQ ID NO: 3337019 - DNA, 25 bp, Homo sapien
gcggagggaagttaaagcaaagatc

SEQ ID NO: 3337020 - DNA, 25 bp, Homo sapien
gaaatgtacagcgtttcaacagaaa

SEQ ID NO: 3337021 - DNA, 25 bp, Homo sapien
tctgctacacaaagactgcggaggg

SEQ ID NO: 3337022 - DNA, 25 bp, Homo sapien
ctgaactttccttgctctcacctcc

SEQ ID NO: 3337023 - DNA, 25 bp, Homo sapien
tggatgtgatgattaccacagacac

SEQ ID NO: 3337024 - DNA, 25 bp, Homo sapien
ttaccacagacacccaataatccag

SEQ ID NO: 3337025 - DNA, 25 bp, Homo sapien
agcctgaaccactaagactccctga

SEQ ID NO: 3337026 - DNA, 25 bp, Homo sapien
aatcattgtctgccagctgaatagc

SEQ ID NO: 3337027 - DNA, 25 bp, Homo sapien
ggtctggtggaaagcacgtccctca

SEQ ID NO: 3337028 - DNA, 25 bp, Homo sapien
cacaataatgtttagcaccctcttg

SEQ ID NO: 3337029 - DNA, 25 bp, Homo sapien
gattaggttgtagaccccaatcatt

SEQ ID NO: 3337030 - DNA, 25 bp, Homo sapien
atcattctccaggaacttaaagggc

SEQ ID NO: 3337031 - DNA, 25 bp, Homo sapien
cagtttccaatgcacttatagtgaa

SEQ ID NO: 3337032 - DNA, 25 bp, Homo sapien
ggacctagagagcttaaacttcata

SEQ ID NO: 3337033 - DNA, 25 bp, Homo sapien
tctactggacactatgatgataaca

SEQ ID NO: 3337034 - DNA, 25 bp, Homo sapien
tatattccattacataagattctgt

SEQ ID NO: 3337035 - DNA, 25 bp, Homo sapien
tctgttttagcagactagtgccagc

SEQ ID NO: 3337036 - DNA, 25 bp, Homo sapien
cagcaaactggtacttatggacttg

SEQ ID NO: 3337037 - DNA, 25 bp, Homo sapien
ggatgtcaccttgcgattatattcc

SEQ ID NO: 3337038 - DNA, 25 bp, Homo sapien
gactgtgctaagactaagtcctggc

SEQ ID NO: 3337039 - DNA, 25 bp, Homo sapien
tccagatgagaacatagcccgttca

SEQ ID NO: 3337040 - DNA, 25 bp, Homo sapien
tgactatagccttgtgagactctgg

SEQ ID NO: 3337041 - DNA, 25 bp, Homo sapien
aatagagcctcccagagtagttgcg

SEQ ID NO: 3337042 - DNA, 25 bp, Homo sapien
tggcccagtcctaaacaaaattgag

SEQ ID NO: 3337043 - DNA, 25 bp, Homo sapien
tagtctccttagaagcagggtgccg

SEQ ID NO: 3337044 - DNA, 25 bp, Homo sapien
cacatggaagagagcattagtctcc

SEQ ID NO: 3337045 - DNA, 25 bp, Homo sapien
tagttagtggcctcattccaaaggt

SEQ ID NO: 3337046 - DNA, 25 bp, Homo sapien
tagagagcgtagtatccgagcagag

SEQ ID NO: 3337047 - DNA, 25 bp, Homo sapien
cgagcagagctagatcatcaattca

SEQ ID NO: 3337048 - DNA, 25 bp, Homo sapien
cacattaattagagagcgtagtatc

SEQ ID NO: 3337049 - DNA, 25 bp, Homo sapien
gattatagcacattaattagagagc

SEQ ID NO: 3337050 - DNA, 25 bp, Homo sapien
cacataaaatgaaggttggaagaag

SEQ ID NO: 3337051 - DNA, 25 bp, Homo sapien
gaagaagccaagtcaatactggttt

SEQ ID NO: 3337052 - DNA, 25 bp, Homo sapien
tgattattatttggccagtgctctg

SEQ ID NO: 3337053 - DNA, 25 bp, Homo sapien
gggaaaagtgcagcccttatcttta

SEQ ID NO: 3337054 - DNA, 25 bp, Homo sapien
catggccctgaaaactgcgaagctc

SEQ ID NO: 3337055 - DNA, 25 bp, Homo sapien
taatctaacacatccggacaacaga

SEQ ID NO: 3337056 - DNA, 25 bp, Homo sapien
caaggacagatcagtttcaaagagt

SEQ ID NO: 3337057 - DNA, 25 bp, Homo sapien
tgcctagggcctcagtaggatgact

SEQ ID NO: 3337058 - DNA, 25 bp, Homo sapien
gcttcaaaatggtgattaatgtgta

SEQ ID NO: 3337059 - DNA, 25 bp, Homo sapien
cttcaaaatggtgattaatgtgtaa

SEQ ID NO: 3337060 - DNA, 25 bp, Homo sapien
tgcttcaaaatggtgattaatgtgt

SEQ ID NO: 3337061 - DNA, 25 bp, Homo sapien
tcaagtgcaaaaagtaagattgacg

SEQ ID NO: 3337062 - DNA, 25 bp, Homo sapien
aagtaagattgacggcatcctttcc

SEQ ID NO: 3337063 - DNA, 25 bp, Homo sapien
taagattgacggcatcctttccatt

SEQ ID NO: 3337064 - DNA, 25 bp, Homo sapien
tgcaaaaagtaagattgacggcatc

SEQ ID NO: 3337065 - DNA, 25 bp, Homo sapien
taatatccgggtggcgggaacacag

SEQ ID NO: 3337066 - DNA, 25 bp, Homo sapien
taagttaccatcgtgcagctgtcaa

SEQ ID NO: 3337067 - DNA, 25 bp, Homo sapien
catgtgatgtcttgcacttggccaa

SEQ ID NO: 3337068 - DNA, 25 bp, Homo sapien
tggccaaccatcctgcagacatttg

SEQ ID NO: 3337069 - DNA, 25 bp, Homo sapien
tgtctactggataccagtttctgtc

SEQ ID NO: 3337070 - DNA, 25 bp, Homo sapien
aaaaaatgtcttaggactacatcct

SEQ ID NO: 3337071 - DNA, 25 bp, Homo sapien
acatccttccctgagaaacgctcgg

SEQ ID NO: 3337072 - DNA, 25 bp, Homo sapien
gaaacgctcggtgtctactggatac

SEQ ID NO: 3337073 - DNA, 25 bp, Homo sapien
ctcatagatgggatactcagatggg

SEQ ID NO: 3337074 - DNA, 25 bp, Homo sapien
gacatcatagactgttagttttatt

SEQ ID NO: 3337075 - DNA, 25 bp, Homo sapien
aatgtgacaccagtcaaaaacagtg

SEQ ID NO: 3337076 - DNA, 25 bp, Homo sapien
gagacttatccttgacatcatagac

SEQ ID NO: 3337077 - DNA, 25 bp, Homo sapien
tccacaatttcggtgctggagtatc

SEQ ID NO: 3337078 - DNA, 25 bp, Homo sapien
aatttcggtgctggagtatcttgtc

SEQ ID NO: 3337079 - DNA, 25 bp, Homo sapien
tggagtatcttgtcagactctgctc

SEQ ID NO: 3337080 - DNA, 25 bp, Homo sapien
tcggtgctggagtatcttgtcagac

SEQ ID NO: 3337081 - DNA, 25 bp, Homo sapien
gagatctgcaccagtgtattcagtt

SEQ ID NO: 3337082 - DNA, 25 bp, Homo sapien
tttacgatcacggacaggagccacg

SEQ ID NO: 3337083 - DNA, 25 bp, Homo sapien
caccagtgtattcagtttacgatca

SEQ ID NO: 3337084 - DNA, 25 bp, Homo sapien
gggtggattacggagatctgcacca

SEQ ID NO: 3337085 - DNA, 25 bp, Homo sapien
acaccatatctcagggaaaacttct

SEQ ID NO: 3337086 - DNA, 25 bp, Homo sapien
gaaaagaaactaacaccatatctca

SEQ ID NO: 3337087 - DNA, 25 bp, Homo sapien
cagggaaaacttctgcgccgggctg

SEQ ID NO: 3337088 - DNA, 25 bp, Homo sapien
gaaactaacaccatatctcagggaa

SEQ ID NO: 3337089 - DNA, 25 bp, Homo sapien
gctgtggagctgaattgagagttca

SEQ ID NO: 3337090 - DNA, 25 bp, Homo sapien
gtgctgtggagctgaattgagagtt

SEQ ID NO: 3337091 - DNA, 25 bp, Homo sapien
ctgtggagctgaattgagagttcat

SEQ ID NO: 3337092 - DNA, 25 bp, Homo sapien
tgctgtggagctgaattgagagttc

SEQ ID NO: 3337093 - DNA, 25 bp, Homo sapien
tccgtatgagaattatttagcagcc

SEQ ID NO: 3337094 - DNA, 25 bp, Homo sapien
gaggccaggatgacctgacatcagg

SEQ ID NO: 3337095 - DNA, 25 bp, Homo sapien
gaatcagtcccaccagacggctgat

SEQ ID NO: 3337096 - DNA, 25 bp, Homo sapien
taaaagctgttaccaggtccaatat

SEQ ID NO: 3337097 - DNA, 25 bp, Homo sapien
taaacttgtgttcgctcatcaagca

SEQ ID NO: 3337098 - DNA, 25 bp, Homo sapien
ttaacaatggacaagagatactcag

SEQ ID NO: 3337099 - DNA, 25 bp, Homo sapien
catacaataataggtgacgtcggag

SEQ ID NO: 3337100 - DNA, 25 bp, Homo sapien
caaagcagacacaaatccttgatgg

SEQ ID NO: 3337101 - DNA, 25 bp, Homo sapien
ctaatctcttaattcttgattcaaa

SEQ ID NO: 3337102 - DNA, 25 bp, Homo sapien
taatctcttaattcttgattcaaat

SEQ ID NO: 3337103 - DNA, 25 bp, Homo sapien
ttctccagcaggcaaacaagaaagc

SEQ ID NO: 3337104 - DNA, 25 bp, Homo sapien
caagttgtacgagtgaagagtgcct

SEQ ID NO: 3337105 - DNA, 25 bp, Homo sapien
cactagaagacaggtatttggttca

SEQ ID NO: 3337106 - DNA, 25 bp, Homo sapien
ttgaaggctggccaccacatttgcc

SEQ ID NO: 3337107 - DNA, 25 bp, Homo sapien
aaggatgaattccaactgcggttca

SEQ ID NO: 3337108 - DNA, 25 bp, Homo sapien
gaattccaactgcggttcatttgga

SEQ ID NO: 3337109 - DNA, 25 bp, Homo sapien
ggatgaattccaactgcggttcatt

SEQ ID NO: 3337110 - DNA, 25 bp, Homo sapien
tgaattccaactgcggttcatttgg

SEQ ID NO: 3337111 - DNA, 25 bp, Homo sapien
cagtccccgggatcattggcctggg

SEQ ID NO: 3337112 - DNA, 25 bp, Homo sapien
gtccccgggatcattggcctgggct

SEQ ID NO: 3337113 - DNA, 25 bp, Homo sapien
tgacagtccccgggatcattggcct

SEQ ID NO: 3337114 - DNA, 25 bp, Homo sapien
acagtccccgggatcattggcctgg

SEQ ID NO: 3337115 - DNA, 25 bp, Homo sapien
tagatgtatcttcacactaaagatc

SEQ ID NO: 3337116 - DNA, 25 bp, Homo sapien
aatgtcagttctagtgattcctggt

SEQ ID NO: 3337117 - DNA, 25 bp, Homo sapien
gatatcccactctgaaattctgtac

SEQ ID NO: 3337118 - DNA, 25 bp, Homo sapien
gtatcttcacactaaagatctgata

SEQ ID NO: 3337119 - DNA, 25 bp, Homo sapien
gatgccctttgcaacacatatgctg

SEQ ID NO: 3337120 - DNA, 25 bp, Homo sapien
taattagattccacgtttgagacac

SEQ ID NO: 3337121 - DNA, 25 bp, Homo sapien
attggtctaaaaaagtcgatgccct

SEQ ID NO: 3337122 - DNA, 25 bp, Homo sapien
gacgagcctaggaaacatgctgaaa

SEQ ID NO: 3337123 - DNA, 25 bp, Homo sapien
gccataaaataggtcaagctcccta

SEQ ID NO: 3337124 - DNA, 25 bp, Homo sapien
taaagtaggcattaccccaagtcat

SEQ ID NO: 3337125 - DNA, 25 bp, Homo sapien
tttaagactttttcagaagcctcca

SEQ ID NO: 3337126 - DNA, 25 bp, Homo sapien
tgcatattccgaagaggtaaacttt

SEQ ID NO: 3337127 - DNA, 25 bp, Homo sapien
tttgattattgtttcgctggtttca

SEQ ID NO: 3337128 - DNA, 25 bp, Homo sapien
ttattgtttcgctggtttcaaggct

SEQ ID NO: 3337129 - DNA, 25 bp, Homo sapien
tgattattgtttcgctggtttcaag

SEQ ID NO: 3337130 - DNA, 25 bp, Homo sapien
attattgtttcgctggtttcaaggc

SEQ ID NO: 3337131 - DNA, 25 bp, Homo sapien
tccagtactatgcctcctgtaaagc

SEQ ID NO: 3337132 - DNA, 25 bp, Homo sapien
agatttccagtactatgcctcctgt

SEQ ID NO: 3337133 - DNA, 25 bp, Homo sapien
atttccagtactatgcctcctgtaa

SEQ ID NO: 3337134 - DNA, 25 bp, Homo sapien
ttccagtactatgcctcctgtaaag

SEQ ID NO: 3337135 - DNA, 25 bp, Homo sapien
caggtgggcaacacttgctagagct

SEQ ID NO: 3337136 - DNA, 25 bp, Homo sapien
gaaacatctgtgtagctgggcaggt

SEQ ID NO: 3337137 - DNA, 25 bp, Homo sapien
tccattctcactacgggtaaccagg

SEQ ID NO: 3337138 - DNA, 25 bp, Homo sapien
tagagcttccggtccagtggttcca

SEQ ID NO: 3337139 - DNA, 25 bp, Homo sapien
gctggcaatgcctgttagagcttcc

SEQ ID NO: 3337140 - DNA, 25 bp, Homo sapien
tcagacagcagggtaagtgaccctg

SEQ ID NO: 3337141 - DNA, 25 bp, Homo sapien
caaactgcaggtagctaggctggca

SEQ ID NO: 3337142 - DNA, 25 bp, Homo sapien
cagagcttccagtccgatgatccct

SEQ ID NO: 3337143 - DNA, 25 bp, Homo sapien
gggtaaagcgaatgagttgatgata

SEQ ID NO: 3337144 - DNA, 25 bp, Homo sapien
ttagtaaaattggcatctaaaatag

SEQ ID NO: 3337145 - DNA, 25 bp, Homo sapien
tttagtaaaattggcatctaaaata

SEQ ID NO: 3337146 - DNA, 25 bp, Homo sapien
aagtgggtaaagcgaatgagttgat

SEQ ID NO: 3337147 - DNA, 25 bp, Homo sapien
ccttgcttgcatgacgtgacgtgat

SEQ ID NO: 3337148 - DNA, 25 bp, Homo sapien
gaatgaacattaggacaacacaagc

SEQ ID NO: 3337149 - DNA, 25 bp, Homo sapien
caggagtctgaggtgcgagttttat

SEQ ID NO: 3337150 - DNA, 25 bp, Homo sapien
tgacgtgatgtgatgtgattggtat

SEQ ID NO: 3337151 - DNA, 25 bp, Homo sapien
caaatgcctcttccccatcagccct

SEQ ID NO: 3337152 - DNA, 25 bp, Homo sapien
cttcaaatgcctcttccccatcagc

SEQ ID NO: 3337153 - DNA, 25 bp, Homo sapien
tcaaatgcctcttccccatcagccc

SEQ ID NO: 3337154 - DNA, 25 bp, Homo sapien
ttcaaatgcctcttccccatcagcc

SEQ ID NO: 3337155 - DNA, 25 bp, Homo sapien
ggttggctgcatccctctgttgaaa

SEQ ID NO: 3337156 - DNA, 25 bp, Homo sapien
ggagcaaacaactacaggatacggg

SEQ ID NO: 3337157 - DNA, 25 bp, Homo sapien
gaaacagggctcatcaggtgggctt

SEQ ID NO: 3337158 - DNA, 25 bp, Homo sapien
tcacagaggcattgcaccacggtct

SEQ ID NO: 3337159 - DNA, 25 bp, Homo sapien
gaaggcttgaaacttccctggtagc

SEQ ID NO: 3337160 - DNA, 25 bp, Homo sapien
caatgaacttgactctaaacgggca

SEQ ID NO: 3337161 - DNA, 25 bp, Homo sapien
gggaatgatcaggacaaccgttctt

SEQ ID NO: 3337162 - DNA, 25 bp, Homo sapien
tagcctgcccctttgattatcaatg

SEQ ID NO: 3337163 - DNA, 25 bp, Homo sapien
tctgtggtcgaaggctggggggccc

SEQ ID NO: 3337164 - DNA, 25 bp, Homo sapien
gcccaaaagctgaaaaacatggatt

SEQ ID NO: 3337165 - DNA, 25 bp, Homo sapien
gccttcaatctgtggtcgaaggctg

SEQ ID NO: 3337166 - DNA, 25 bp, Homo sapien
gggaggccaacagtgtagccttcaa

SEQ ID NO: 3337167 - DNA, 25 bp, Homo sapien
cacactgggtccgagagcacagctg

SEQ ID NO: 3337168 - DNA, 25 bp, Homo sapien
cacacactgggtccgagagcacagc

SEQ ID NO: 3337169 - DNA, 25 bp, Homo sapien
cactgggtccgagagcacagctgcc

SEQ ID NO: 3337170 - DNA, 25 bp, Homo sapien
tcacacactgggtccgagagcacag

SEQ ID NO: 3337171 - DNA, 25 bp, Homo sapien
tcaaggtgtttcccaactctggcct

SEQ ID NO: 3337172 - DNA, 25 bp, Homo sapien
caaggtgtttcccaactctggcctt

SEQ ID NO: 3337173 - DNA, 25 bp, Homo sapien
ttcccaactctggccttactttgta

SEQ ID NO: 3337174 - DNA, 25 bp, Homo sapien
ccaactctggccttactttgtaaga

SEQ ID NO: 3337175 - DNA, 25 bp, Homo sapien
aaggcttgaatcacccagatatcgg

SEQ ID NO: 3337176 - DNA, 25 bp, Homo sapien
tacctgaaggcttgaatcacccaga

SEQ ID NO: 3337177 - DNA, 25 bp, Homo sapien
aaagtctgccacagaactacctgaa

SEQ ID NO: 3337178 - DNA, 25 bp, Homo sapien
cagaactacctgaaggcttgaatca

SEQ ID NO: 3337179 - DNA, 25 bp, Homo sapien
tattaacagccaaccatgtagtgct

SEQ ID NO: 3337180 - DNA, 25 bp, Homo sapien
aatatgtttctaccccacaaaggag

SEQ ID NO: 3337181 - DNA, 25 bp, Homo sapien
ggatctctacccttgacaccgtgta

SEQ ID NO: 3337182 - DNA, 25 bp, Homo sapien
tcaggcagtctctaacgggatctct

SEQ ID NO: 3337183 - DNA, 25 bp, Homo sapien
tggcacatttgtgtcacccacagaa

SEQ ID NO: 3337184 - DNA, 25 bp, Homo sapien
tacattcctgaatgcttctccagta

SEQ ID NO: 3337185 - DNA, 25 bp, Homo sapien
gaagttacactgacactggtgtagt

SEQ ID NO: 3337186 - DNA, 25 bp, Homo sapien
ggtgtagtggtctcttaaggatact

SEQ ID NO: 3337187 - DNA, 25 bp, Homo sapien
gagtgagtttctccggaaacaccat

SEQ ID NO: 3337188 - DNA, 25 bp, Homo sapien
agagtgagtttctccggaaacacca

SEQ ID NO: 3337189 - DNA, 25 bp, Homo sapien
agctctcgcctctcagccttagaaa

SEQ ID NO: 3337190 - DNA, 25 bp, Homo sapien
cagctctcgcctctcagccttagaa

SEQ ID NO: 3337191 - DNA, 25 bp, Homo sapien
gctctcgcctctcagccttagaaac

SEQ ID NO: 3337192 - DNA, 25 bp, Homo sapien
gatattgtttctggtgggacagccc

SEQ ID NO: 3337193 - DNA, 25 bp, Homo sapien
agatattgtttctggtgggacagcc

SEQ ID NO: 3337194 - DNA, 25 bp, Homo sapien
tattgtttctggtgggacagcccac

SEQ ID NO: 3337195 - DNA, 25 bp, Homo sapien
ttagatattgtttctggtgggacag

SEQ ID NO: 3337196 - DNA, 25 bp, Homo sapien
ggaggaagtccagcatgtgcccctc

SEQ ID NO: 3337197 - DNA, 25 bp, Homo sapien
caggacaagtagtcatatccactgt

SEQ ID NO: 3337198 - DNA, 25 bp, Homo sapien
tccagaaagctgctcacagttagat

SEQ ID NO: 3337199 - DNA, 25 bp, Homo sapien
tcttgcttcgctctcaggaaaagtt

SEQ ID NO: 3337200 - DNA, 25 bp, Homo sapien
tactctagggccatgagttgtttct

SEQ ID NO: 3337201 - DNA, 25 bp, Homo sapien
gtttctttgaagtatctctttccat

SEQ ID NO: 3337202 - DNA, 25 bp, Homo sapien
tgtaaatcaagcagtggtccatgtg

SEQ ID NO: 3337203 - DNA, 25 bp, Homo sapien
tgtcctccatactctagggccatga

SEQ ID NO: 3337204 - DNA, 25 bp, Homo sapien
cacttgacctttattcttcccatct

SEQ ID NO: 3337205 - DNA, 25 bp, Homo sapien
tttctccttatcagcccccacttga

SEQ ID NO: 3337206 - DNA, 25 bp, Homo sapien
tacttctgttctttaaccttctcag

SEQ ID NO: 3337207 - DNA, 25 bp, Homo sapien
tctcagaatttatcaccacttgacc

SEQ ID NO: 3337208 - DNA, 25 bp, Homo sapien
tgctgccctcggaatggatgaaatg

SEQ ID NO: 3337209 - DNA, 25 bp, Homo sapien
caaggtcggagaaagccagtagttc

SEQ ID NO: 3337210 - DNA, 25 bp, Homo sapien
gaaacttcagagagatatctcccag

SEQ ID NO: 3337211 - DNA, 25 bp, Homo sapien
tctatttggaagctagatggacaag

SEQ ID NO: 3337212 - DNA, 25 bp, Homo sapien
ggcaaaatgctcaagggcagcaacc

SEQ ID NO: 3337213 - DNA, 25 bp, Homo sapien
ggctggagagacacctctagcacaa

SEQ ID NO: 3337214 - DNA, 25 bp, Homo sapien
gagacacctctagcacaatcttcac

SEQ ID NO: 3337215 - DNA, 25 bp, Homo sapien
gagagacacctctagcacaatcttc

SEQ ID NO: 3337216 - DNA, 25 bp, Homo sapien
tggagagacacctctagcacaatct

SEQ ID NO: 3337217 - DNA, 25 bp, Homo sapien
taataggtaaagagtgtgcccagtg

SEQ ID NO: 3337218 - DNA, 25 bp, Homo sapien
tgacagttttattctcccataggag

SEQ ID NO: 3337219 - DNA, 25 bp, Homo sapien
taaacgcaaataagtgcacagcctg

SEQ ID NO: 3337220 - DNA, 25 bp, Homo sapien
tgatgagagtatgctgttcccttcc

SEQ ID NO: 3337221 - DNA, 25 bp, Homo sapien
cctgttgagatcactgcatcatggg

SEQ ID NO: 3337222 - DNA, 25 bp, Homo sapien
ccccatgcagttctagtggtagtga

SEQ ID NO: 3337223 - DNA, 25 bp, Homo sapien
catgacatgactttacctacaaaac

SEQ ID NO: 3337224 - DNA, 25 bp, Homo sapien
taattttcggtgatatgtgtcccca

SEQ ID NO: 3337225 - DNA, 25 bp, Homo sapien
tcagacaaactgtggatctctcagg

SEQ ID NO: 3337226 - DNA, 25 bp, Homo sapien
caggagaaacccttcaagccagaat

SEQ ID NO: 3337227 - DNA, 25 bp, Homo sapien
agacaaactgtggatctctcaggag

SEQ ID NO: 3337228 - DNA, 25 bp, Homo sapien
catcagacaaactgtggatctctca

SEQ ID NO: 3337229 - DNA, 25 bp, Homo sapien
aattctgctattatattattgtatc

SEQ ID NO: 3337230 - DNA, 25 bp, Homo sapien
tctgctattatattattgtatcatt

SEQ ID NO: 3337231 - DNA, 25 bp, Homo sapien
gatctaattctgctattatattatt

SEQ ID NO: 3337232 - DNA, 25 bp, Homo sapien
ggatctaattctgctattatattat

SEQ ID NO: 3337233 - DNA, 25 bp, Homo sapien
ttgtttccttttccgtatgcttctg

SEQ ID NO: 3337234 - DNA, 25 bp, Homo sapien
ttccgtatgcttctgaagtttctaa

SEQ ID NO: 3337235 - DNA, 25 bp, Homo sapien
gttcttgtttcaaagctggaagtca

SEQ ID NO: 3337236 - DNA, 25 bp, Homo sapien
ctaaagttcttgtttcaaagctgga

SEQ ID NO: 3337237 - DNA, 25 bp, Homo sapien
ctgccgggaacccttagatcagcct

SEQ ID NO: 3337238 - DNA, 25 bp, Homo sapien
ttctgccgggaacccttagatcagc

SEQ ID NO: 3337239 - DNA, 25 bp, Homo sapien
gcaaccagagcctctgaagatggcc

SEQ ID NO: 3337240 - DNA, 25 bp, Homo sapien
tgaagatggccccttctgccgggaa

SEQ ID NO: 3337241 - DNA, 25 bp, Homo sapien
cttaagttgaagtcttccacatgat

SEQ ID NO: 3337242 - DNA, 25 bp, Homo sapien
agttgaagtcttccacatgatctga

SEQ ID NO: 3337243 - DNA, 25 bp, Homo sapien
ttgaagtcttccacatgatctgatg

SEQ ID NO: 3337244 - DNA, 25 bp, Homo sapien
gaagtcttccacatgatctgatggg

SEQ ID NO: 3337245 - DNA, 25 bp, Homo sapien
ctagaacaggtcgttgccatccaat

SEQ ID NO: 3337246 - DNA, 25 bp, Homo sapien
caccaaggtctcacccaagtctggg

SEQ ID NO: 3337247 - DNA, 25 bp, Homo sapien
tttcaaccttgtgtctaatactcca

SEQ ID NO: 3337248 - DNA, 25 bp, Homo sapien
tctgtgcctagaacaggtcgttgcc

SEQ ID NO: 3337249 - DNA, 25 bp, Homo sapien
caggtaaggccttgaacagtagagg

SEQ ID NO: 3337250 - DNA, 25 bp, Homo sapien
gctcagacctgttagggatttgggt

SEQ ID NO: 3337251 - DNA, 25 bp, Homo sapien
ggatttgggtcagtccaccaggtaa

SEQ ID NO: 3337252 - DNA, 25 bp, Homo sapien
ggcataggaatcaagggctcagacc

SEQ ID NO: 3337253 - DNA, 25 bp, Homo sapien
acaaactggagctgattaggtggcc

SEQ ID NO: 3337254 - DNA, 25 bp, Homo sapien
aatacagttctacagttaggctgcc

SEQ ID NO: 3337255 - DNA, 25 bp, Homo sapien
tactagagatgtattgattcaccaa

SEQ ID NO: 3337256 - DNA, 25 bp, Homo sapien
gcttaggactaggttcttgaaacac

SEQ ID NO: 3337257 - DNA, 25 bp, Homo sapien
ttagaaggtcaaactatgatgtacc

SEQ ID NO: 3337258 - DNA, 25 bp, Homo sapien
tgtttcgaaaacagatgccctagaa

SEQ ID NO: 3337259 - DNA, 25 bp, Homo sapien
ggagtgtgacatggatccttctcaa

SEQ ID NO: 3337260 - DNA, 25 bp, Homo sapien
taaaccactgaccttggactgcagg

SEQ ID NO: 3337261 - DNA, 25 bp, Homo sapien
tctggtaataagaggtttgagagga

SEQ ID NO: 3337262 - DNA, 25 bp, Homo sapien
ttgtccctggcaaattctggtaata

SEQ ID NO: 3337263 - DNA, 25 bp, Homo sapien
cctggccagggaacaagtcctttct

SEQ ID NO: 3337264 - DNA, 25 bp, Homo sapien
tctggtttgacagttgtgtgattta

SEQ ID NO: 3337265 - DNA, 25 bp, Homo sapien
tgatatgtcctaatggttccgagca

SEQ ID NO: 3337266 - DNA, 25 bp, Homo sapien
taaggcagagattgattcctacctc

SEQ ID NO: 3337267 - DNA, 25 bp, Homo sapien
tccgagcatgagtctctaaggcaga

SEQ ID NO: 3337268 - DNA, 25 bp, Homo sapien
tctgccactcattcacggtgctact

SEQ ID NO: 3337269 - DNA, 25 bp, Homo sapien
caaagagactgcaatcctgtactca

SEQ ID NO: 3337270 - DNA, 25 bp, Homo sapien
caactagtttcatgtagagttatac

SEQ ID NO: 3337271 - DNA, 25 bp, Homo sapien
tcttatcattgtaccctaacaaggg

SEQ ID NO: 3337272 - DNA, 25 bp, Homo sapien
tgatgatcatcgtaaggccttccct

SEQ ID NO: 3337273 - DNA, 25 bp, Homo sapien
agaagacctcttgccaggtaacacc

SEQ ID NO: 3337274 - DNA, 25 bp, Homo sapien
aagacctcttgccaggtaacaccat

SEQ ID NO: 3337275 - DNA, 25 bp, Homo sapien
agacctcttgccaggtaacaccatt

SEQ ID NO: 3337276 - DNA, 25 bp, Homo sapien
gaagacctcttgccaggtaacacca

SEQ ID NO: 3337277 - DNA, 25 bp, Homo sapien
tcacatgaggcccattatccccatc

SEQ ID NO: 3337278 - DNA, 25 bp, Homo sapien
acatgaggcccattatccccatcat

SEQ ID NO: 3337279 - DNA, 25 bp, Homo sapien
agatcacatgaggcccattatcccc

SEQ ID NO: 3337280 - DNA, 25 bp, Homo sapien
gatcacatgaggcccattatcccca

SEQ ID NO: 3337281 - DNA, 25 bp, Homo sapien
aggaagaccagatgtgtcttcttta

SEQ ID NO: 3337282 - DNA, 25 bp, Homo sapien
caaaggaagaccagatgtgtcttct

SEQ ID NO: 3337283 - DNA, 25 bp, Homo sapien
aaggaagaccagatgtgtcttcttt

SEQ ID NO: 3337284 - DNA, 25 bp, Homo sapien
aaaggaagaccagatgtgtcttctt

SEQ ID NO: 3337285 - DNA, 25 bp, Homo sapien
ctgagaggtctttgaagaaaagcaa

SEQ ID NO: 3337286 - DNA, 25 bp, Homo sapien
taatgccgtagatgccaattgtgct

SEQ ID NO: 3337287 - DNA, 25 bp, Homo sapien
cgtagatgccaattgtgcttgtttc

SEQ ID NO: 3337288 - DNA, 25 bp, Homo sapien
agtttgtatttaatgccgtagatgc

SEQ ID NO: 3337289 - DNA, 25 bp, Homo sapien
tggtgcaattccaagtaagtttgta

SEQ ID NO: 3337290 - DNA, 25 bp, Homo sapien
gctcattctctatcagctccaaact

SEQ ID NO: 3337291 - DNA, 25 bp, Homo sapien
caagctcattctctatcagctccaa

SEQ ID NO: 3337292 - DNA, 25 bp, Homo sapien
ctacggcattccaagctcattctct

SEQ ID NO: 3337293 - DNA, 25 bp, Homo sapien
tacggcattccaagctcattctcta

SEQ ID NO: 3337294 - DNA, 25 bp, Homo sapien
ttgtctgtcatgttatgccaaatgc

SEQ ID NO: 3337295 - DNA, 25 bp, Homo sapien
tctgtcatgttatgccaaatgccca

SEQ ID NO: 3337296 - DNA, 25 bp, Homo sapien
gtcatgttatgccaaatgcccacac

SEQ ID NO: 3337297 - DNA, 25 bp, Homo sapien
gagttgtctgtcatgttatgccaaa

SEQ ID NO: 3337298 - DNA, 25 bp, Homo sapien
aattctgtaagcatcttagagcctt

SEQ ID NO: 3337299 - DNA, 25 bp, Homo sapien
caaattctgtaagcatcttagagcc

SEQ ID NO: 3337300 - DNA, 25 bp, Homo sapien
aaattctgtaagcatcttagagcct

SEQ ID NO: 3337301 - DNA, 25 bp, Homo sapien
attctgtaagcatcttagagccttc

SEQ ID NO: 3337302 - DNA, 25 bp, Homo sapien
tttccagctaacaaggtgctatttt

SEQ ID NO: 3337303 - DNA, 25 bp, Homo sapien
tttttccagcccattagattctcac

SEQ ID NO: 3337304 - DNA, 25 bp, Homo sapien
agattctcacttaatgagatttttc

SEQ ID NO: 3337305 - DNA, 25 bp, Homo sapien
cttcatctgaggttagtctgttgaa

SEQ ID NO: 3337306 - DNA, 25 bp, Homo sapien
ctaagaccataggaggctggaactg

SEQ ID NO: 3337307 - DNA, 25 bp, Homo sapien
ttgtgtccatggatttttaacccca

SEQ ID NO: 3337308 - DNA, 25 bp, Homo sapien
ctggaactggaataggatttagaga

SEQ ID NO: 3337309 - DNA, 25 bp, Homo sapien
gaggctggaactggaataggattta

SEQ ID NO: 3337310 - DNA, 25 bp, Homo sapien
tatgcccttgcttccaaacctaggt

SEQ ID NO: 3337311 - DNA, 25 bp, Homo sapien
tctgcagccagattatccgagttca

SEQ ID NO: 3337312 - DNA, 25 bp, Homo sapien
gaaaatctaaagaagcagtatgccc

SEQ ID NO: 3337313 - DNA, 25 bp, Homo sapien
taatattagactgtttgagacccct

SEQ ID NO: 3337314 - DNA, 25 bp, Homo sapien
aatagaacatgacaagatcttggat

SEQ ID NO: 3337315 - DNA, 25 bp, Homo sapien
tcttggatgcaggtatttggcttgg

SEQ ID NO: 3337316 - DNA, 25 bp, Homo sapien
gaacatgacaagatcttggatgcag

SEQ ID NO: 3337317 - DNA, 25 bp, Homo sapien
caggtatttggcttgggagaattct

SEQ ID NO: 3337318 - DNA, 25 bp, Homo sapien
tctgtggttgagggttgccctgaga

SEQ ID NO: 3337319 - DNA, 25 bp, Homo sapien
atctgtggttgagggttgccctgag

SEQ ID NO: 3337320 - DNA, 25 bp, Homo sapien
catctgtggttgagggttgccctga

SEQ ID NO: 3337321 - DNA, 25 bp, Homo sapien
cagctcctgtgcatctgtggttgag

SEQ ID NO: 3337322 - DNA, 25 bp, Homo sapien
gaagacaccttcgggcttattcttg

SEQ ID NO: 3337323 - DNA, 25 bp, Homo sapien
gatgaagacaccttcgggcttattc

SEQ ID NO: 3337324 - DNA, 25 bp, Homo sapien
acaccttcgggcttattcttgtaca

SEQ ID NO: 3337325 - DNA, 25 bp, Homo sapien
cagggacactaataagcccattacc

SEQ ID NO: 3337326 - DNA, 25 bp, Homo sapien
ctaaggtgagtctaaacagggacac

SEQ ID NO: 3337327 - DNA, 25 bp, Homo sapien
tggaaaatgtcctgagagtcttctc

SEQ ID NO: 3337328 - DNA, 25 bp, Homo sapien
tagcttatggaaactgctctaaggt

SEQ ID NO: 3337329 - DNA, 25 bp, Homo sapien
cagtctttggtttcaccccacacag

SEQ ID NO: 3337330 - DNA, 25 bp, Homo sapien
tattctgagggtcagtctttggttt

SEQ ID NO: 3337331 - DNA, 25 bp, Homo sapien
cttcatactatcctctgtgggaaga

SEQ ID NO: 3337332 - DNA, 25 bp, Homo sapien
ctttctaggcctgttgtttggaaag

SEQ ID NO: 3337333 - DNA, 25 bp, Homo sapien
attgcatcctaaatgatctttgagt

SEQ ID NO: 3337334 - DNA, 25 bp, Homo sapien
cccacatcacccaagatgaatttat

SEQ ID NO: 3337335 - DNA, 25 bp, Homo sapien
ttacaaatctgtgaaatggttatta

SEQ ID NO: 3337336 - DNA, 25 bp, Homo sapien
cctaaatgatctttgagtatagaat

SEQ ID NO: 3337337 - DNA, 25 bp, Homo sapien
caaacaagtgggaaatagaggaatt

SEQ ID NO: 3337338 - DNA, 25 bp, Homo sapien
tatgaggtaatagaagcacaaacaa

SEQ ID NO: 3337339 - DNA, 25 bp, Homo sapien
attaaatcaatgtaccagaaccaga

SEQ ID NO: 3337340 - DNA, 25 bp, Homo sapien
cagaaccagaaatctaggtgagagt

SEQ ID NO: 3337341 - DNA, 25 bp, Homo sapien
cagacacttttagcctgactttcct

SEQ ID NO: 3337342 - DNA, 25 bp, Homo sapien
agcctgactttcctgcgttcgcttg

SEQ ID NO: 3337343 - DNA, 25 bp, Homo sapien
ttttagcctgactttcctgcgttcg

SEQ ID NO: 3337344 - DNA, 25 bp, Homo sapien
cacttttagcctgactttcctgcgt

SEQ ID NO: 3337345 - DNA, 25 bp, Homo sapien
tggcagcgacagtcgcgcaactggc

SEQ ID NO: 3337346 - DNA, 25 bp, Homo sapien
cgcttcccgctactgatagagcgga

SEQ ID NO: 3337347 - DNA, 25 bp, Homo sapien
agaagttgtcaccagcgcggctggc

SEQ ID NO: 3337348 - DNA, 25 bp, Homo sapien
atgtcaccagcgaccgagtagaggc

SEQ ID NO: 3337349 - DNA, 25 bp, Homo sapien
aatgactctccccatctgcgcttta

SEQ ID NO: 3337350 - DNA, 25 bp, Homo sapien
tctgcgctttacaggtgccacctgg

SEQ ID NO: 3337351 - DNA, 25 bp, Homo sapien
tattccgggctgtgtagggtgtggg

SEQ ID NO: 3337352 - DNA, 25 bp, Homo sapien
gaaaggttttgatggagccgttcaa

SEQ ID NO: 3337353 - DNA, 25 bp, Homo sapien
caagacaccccagcccttctccctg

SEQ ID NO: 3337354 - DNA, 25 bp, Homo sapien
accccagcccttctccctgagggcg

SEQ ID NO: 3337355 - DNA, 25 bp, Homo sapien
acaccccagcccttctccctgaggg

SEQ ID NO: 3337356 - DNA, 25 bp, Homo sapien
agacaccccagcccttctccctgag

SEQ ID NO: 3337357 - DNA, 25 bp, Homo sapien
tgctggacgtcaaaagactttaggg

SEQ ID NO: 3337358 - DNA, 25 bp, Homo sapien
tctagatgattctgggtcctaccaa

SEQ ID NO: 3337359 - DNA, 25 bp, Homo sapien
catgttggcagaacaagttgcatcc

SEQ ID NO: 3337360 - DNA, 25 bp, Homo sapien
tccaagttcaaagtgccggcagttt

SEQ ID NO: 3337361 - DNA, 25 bp, Homo sapien
ccatcccactgtggaaatcagagag

SEQ ID NO: 3337362 - DNA, 25 bp, Homo sapien
catcccactgtggaaatcagagagt

SEQ ID NO: 3337363 - DNA, 25 bp, Homo sapien
ccccatcccactgtggaaatcagag

SEQ ID NO: 3337364 - DNA, 25 bp, Homo sapien
gtccccatcccactgtggaaatcag

SEQ ID NO: 3337365 - DNA, 25 bp, Homo sapien
attctagcccagatattatgctttt

SEQ ID NO: 3337366 - DNA, 25 bp, Homo sapien
cattctagcccagatattatgcttt

SEQ ID NO: 3337367 - DNA, 25 bp, Homo sapien
ttgtctacaagtagtttcggaattc

SEQ ID NO: 3337368 - DNA, 25 bp, Homo sapien
tcggaattcgaatatcatcaaaggg

SEQ ID NO: 3337369 - DNA, 25 bp, Homo sapien
caagtagtttcggaattcgaatatc

SEQ ID NO: 3337370 - DNA, 25 bp, Homo sapien
aattcgaatatcatcaaagggtgga

SEQ ID NO: 3337371 - DNA, 25 bp, Homo sapien
tgctccaatgggaacctgctcccat

SEQ ID NO: 3337372 - DNA, 25 bp, Homo sapien
caaaagatcttgcaatgctaggcct

SEQ ID NO: 3337373 - DNA, 25 bp, Homo sapien
cattgttgatgtggagttcctgcaa

SEQ ID NO: 3337374 - DNA, 25 bp, Homo sapien
tcaaaagatcttgcaatgctaggcc

SEQ ID NO: 3337375 - DNA, 25 bp, Homo sapien
caggtcgtcaggctttactagagaa

SEQ ID NO: 3337376 - DNA, 25 bp, Homo sapien
caggctttactagagaatatgattc

SEQ ID NO: 3337377 - DNA, 25 bp, Homo sapien
aacttcaggtcgtcaggctttacta

SEQ ID NO: 3337378 - DNA, 25 bp, Homo sapien
tttaggaaacttcaggtcgtcaggc

SEQ ID NO: 3337379 - DNA, 25 bp, Homo sapien
tgccggaagcagatgccgtagaatg

SEQ ID NO: 3337380 - DNA, 25 bp, Homo sapien
ctttgccggaagcagatgccgtaga

SEQ ID NO: 3337381 - DNA, 25 bp, Homo sapien
gggaaaacgaagatggcaatcagga

SEQ ID NO: 3337382 - DNA, 25 bp, Homo sapien
ccggaagcagatgccgtagaatgga

SEQ ID NO: 3337383 - DNA, 25 bp, Homo sapien
gatcttccttgggccaaataaatct

SEQ ID NO: 3337384 - DNA, 25 bp, Homo sapien
tttcctcccattgcctttttcagac

SEQ ID NO: 3337385 - DNA, 25 bp, Homo sapien
ctgcttcctgatcttccttgggcca

SEQ ID NO: 3337386 - DNA, 25 bp, Homo sapien
ttttcctcccattgcctttttcaga

SEQ ID NO: 3337387 - DNA, 25 bp, Homo sapien
ggtccccatggcagtttcagtaaaa

SEQ ID NO: 3337388 - DNA, 25 bp, Homo sapien
cagctgtggttatttgtgtaagcct

SEQ ID NO: 3337389 - DNA, 25 bp, Homo sapien
gtgtaagcctcaatagtgaattttg

SEQ ID NO: 3337390 - DNA, 25 bp, Homo sapien
ggacctccgatccattcacttctgg

SEQ ID NO: 3337391 - DNA, 25 bp, Homo sapien
aagtcaacagagatgccagaacttg

SEQ ID NO: 3337392 - DNA, 25 bp, Homo sapien
tccttaagtcaacagagatgccaga

SEQ ID NO: 3337393 - DNA, 25 bp, Homo sapien
ctcatgttgactggtccttaagtca

SEQ ID NO: 3337394 - DNA, 25 bp, Homo sapien
ttctcatgttgactggtccttaagt

SEQ ID NO: 3337395 - DNA, 25 bp, Homo sapien
tgctccatatctttgtcctcattat

SEQ ID NO: 3337396 - DNA, 25 bp, Homo sapien
ttctgctccatatctttgtcctcat

SEQ ID NO: 3337397 - DNA, 25 bp, Homo sapien
ttgtcctcattatcaaaagactcag

SEQ ID NO: 3337398 - DNA, 25 bp, Homo sapien
caccagcagggaacatgaggtcctg

SEQ ID NO: 3337399 - DNA, 25 bp, Homo sapien
tgtttcctgggagagtaccctggca

SEQ ID NO: 3337400 - DNA, 25 bp, Homo sapien
taccctggcagagcctcgagagctt

SEQ ID NO: 3337401 - DNA, 25 bp, Homo sapien
cgagagcttgctgaatgtccaccta

SEQ ID NO: 3337402 - DNA, 25 bp, Homo sapien
gcatccctctttgacactcttattc

SEQ ID NO: 3337403 - DNA, 25 bp, Homo sapien
tgcatccctctttgacactcttatt

SEQ ID NO: 3337404 - DNA, 25 bp, Homo sapien
cctgcatccctctttgacactctta

SEQ ID NO: 3337405 - DNA, 25 bp, Homo sapien
catccctctttgacactcttattct

SEQ ID NO: 3337406 - DNA, 25 bp, Homo sapien
gatgggaggactaatgtaaaactcc

SEQ ID NO: 3337407 - DNA, 25 bp, Homo sapien
gaagctgtcccggttcgctgtcacc

SEQ ID NO: 3337408 - DNA, 25 bp, Homo sapien
cagtgaggcaaggaaactcagaagc

SEQ ID NO: 3337409 - DNA, 25 bp, Homo sapien
taatcactagtgtcacagtgaggca

SEQ ID NO: 3337410 - DNA, 25 bp, Homo sapien
aagtgcccacattcagtggactcgc

SEQ ID NO: 3337411 - DNA, 25 bp, Homo sapien
ctcccttccagtagacctctgtgtg

SEQ ID NO: 3337412 - DNA, 25 bp, Homo sapien
ccagtagacctctgtgtgggtctgc

SEQ ID NO: 3337413 - DNA, 25 bp, Homo sapien
attcagtggactcgcctcgggctcc

SEQ ID NO: 3337414 - DNA, 25 bp, Homo sapien
ctttagcaaccatgaaaatgacttt

SEQ ID NO: 3337415 - DNA, 25 bp, Homo sapien
tcttcaagttgtccaacaagctggg

SEQ ID NO: 3337416 - DNA, 25 bp, Homo sapien
aaacaccagtccttgcatttgtctt

SEQ ID NO: 3337417 - DNA, 25 bp, Homo sapien
gatttctgtgatcaaagatgtaacc

SEQ ID NO: 3337418 - DNA, 25 bp, Homo sapien
tccacatagcttattgaccaagaca

SEQ ID NO: 3337419 - DNA, 25 bp, Homo sapien
tatctccacatagcttattgaccaa

SEQ ID NO: 3337420 - DNA, 25 bp, Homo sapien
tgtgatcaaagatgtaaccttcgag

SEQ ID NO: 3337421 - DNA, 25 bp, Homo sapien
acttttggaaggcatattctgcatc

SEQ ID NO: 3337422 - DNA, 25 bp, Homo sapien
ttggcagcagacggccaaacagtga

SEQ ID NO: 3337423 - DNA, 25 bp, Homo sapien
aattggcagcagacggccaaacagt

SEQ ID NO: 3337424 - DNA, 25 bp, Homo sapien
caaattggcagcagacggccaaaca

SEQ ID NO: 3337425 - DNA, 25 bp, Homo sapien
agagtggcctctgacaaacaagtgg

SEQ ID NO: 3337426 - DNA, 25 bp, Homo sapien
gagggctgcccctctattcctgtgt

SEQ ID NO: 3337427 - DNA, 25 bp, Homo sapien
tccttaggcccactcaaatcatagc

SEQ ID NO: 3337428 - DNA, 25 bp, Homo sapien
caagtggccacatctagtataagga

SEQ ID NO: 3337429 - DNA, 25 bp, Homo sapien
ctggcaagttgggtaaagagtcaag

SEQ ID NO: 3337430 - DNA, 25 bp, Homo sapien
gactggcaagttgggtaaagagtca

SEQ ID NO: 3337431 - DNA, 25 bp, Homo sapien
gcaagttgggtaaagagtcaagacc

SEQ ID NO: 3337432 - DNA, 25 bp, Homo sapien
cagactggcaagttgggtaaagagt

SEQ ID NO: 3337433 - DNA, 25 bp, Homo sapien
tgaaattgtggcaataatcaatagt

SEQ ID NO: 3337434 - DNA, 25 bp, Homo sapien
ttgtggcaataatcaatagtttacc

SEQ ID NO: 3337435 - DNA, 25 bp, Homo sapien
aattgtggcaataatcaatagttta

SEQ ID NO: 3337436 - DNA, 25 bp, Homo sapien
gtggcaataatcaatagtttaccaa

SEQ ID NO: 3337437 - DNA, 25 bp, Homo sapien
catacaggataatgtagctgttgct

SEQ ID NO: 3337438 - DNA, 25 bp, Homo sapien
cgaagggccctgttttcatacagga

SEQ ID NO: 3337439 - DNA, 25 bp, Homo sapien
tgcgtggactcgaagggccctgttt

SEQ ID NO: 3337440 - DNA, 25 bp, Homo sapien
ctaaaatgcgtggactcgaagggcc

SEQ ID NO: 3337441 - DNA, 25 bp, Homo sapien
catgagcttctgtagccccaaaccc

SEQ ID NO: 3337442 - DNA, 25 bp, Homo sapien
atgagcttctgtagccccaaaccca

SEQ ID NO: 3337443 - DNA, 25 bp, Homo sapien
gagcttctgtagccccaaacccatt

SEQ ID NO: 3337444 - DNA, 25 bp, Homo sapien
tgagcttctgtagccccaaacccat

SEQ ID NO: 3337445 - DNA, 25 bp, Homo sapien
ggtggccaatccagaatcctaggag

SEQ ID NO: 3337446 - DNA, 25 bp, Homo sapien
cctgttgtgtaatggttgagtgccc

SEQ ID NO: 3337447 - DNA, 25 bp, Homo sapien
gagacaagcattatcatgaaccagg

SEQ ID NO: 3337448 - DNA, 25 bp, Homo sapien
tgagtgcccagactttggagccaaa

SEQ ID NO: 3337449 - DNA, 25 bp, Homo sapien
gcatattctgcgtggtcttctgggt

SEQ ID NO: 3337450 - DNA, 25 bp, Homo sapien
cagacagtacaccatgagattgtga

SEQ ID NO: 3337451 - DNA, 25 bp, Homo sapien
gctgaggcttattatggtgaccaaa

SEQ ID NO: 3337452 - DNA, 25 bp, Homo sapien
caaaacgtccaagctttgtagaggg

SEQ ID NO: 3337453 - DNA, 25 bp, Homo sapien
ctactgccagtaacagtttttcttg

SEQ ID NO: 3337454 - DNA, 25 bp, Homo sapien
gccagatagtctggaacaaactaat

SEQ ID NO: 3337455 - DNA, 25 bp, Homo sapien
gttgagaaagaatacttctaagcca

SEQ ID NO: 3337456 - DNA, 25 bp, Homo sapien
tgatatattagatgttagcctacct

SEQ ID NO: 3337457 - DNA, 25 bp, Homo sapien
ctactgagaattacatatccagcca

SEQ ID NO: 3337458 - DNA, 25 bp, Homo sapien
tactgagaattacatatccagccaa

SEQ ID NO: 3337459 - DNA, 25 bp, Homo sapien
tctactgagaattacatatccagcc

SEQ ID NO: 3337460 - DNA, 25 bp, Homo sapien
tgggctgccactcaaacaagatgta

SEQ ID NO: 3337461 - DNA, 25 bp, Homo sapien
cctcttgtgactgtgctggtaccta

SEQ ID NO: 3337462 - DNA, 25 bp, Homo sapien
atgaatgccacccaaggaccaagtc

SEQ ID NO: 3337463 - DNA, 25 bp, Homo sapien
caagcccatgaggtgtacttccaca

SEQ ID NO: 3337464 - DNA, 25 bp, Homo sapien
tattatgttaagatcactgcctcag

SEQ ID NO: 3337465 - DNA, 25 bp, Homo sapien
taatccaaaaatccctatgttctgt

SEQ ID NO: 3337466 - DNA, 25 bp, Homo sapien
gcttccatggattgtctcgttaata

SEQ ID NO: 3337467 - DNA, 25 bp, Homo sapien
taaaacagtgccaaactcattagct

SEQ ID NO: 3337468 - DNA, 25 bp, Homo sapien
tgtacttggctaagacaccaccctg

SEQ ID NO: 3337469 - DNA, 25 bp, Homo sapien
catgtgaacgcagctggaggaaaac

SEQ ID NO: 3337470 - DNA, 25 bp, Homo sapien
tacttaagggcattgtctcagcaac

SEQ ID NO: 3337471 - DNA, 25 bp, Homo sapien
caaacaggcccttaatgctggctag

SEQ ID NO: 3337472 - DNA, 25 bp, Homo sapien
tcctcatattgagaatgtcgtacaa

SEQ ID NO: 3337473 - DNA, 25 bp, Homo sapien
gccactttaccacacatggagtcat

SEQ ID NO: 3337474 - DNA, 25 bp, Homo sapien
gcaacagtcgcaatcaaggtacaga

SEQ ID NO: 3337475 - DNA, 25 bp, Homo sapien
tccatccaagttgtgtccatcaata

SEQ ID NO: 3337476 - DNA, 25 bp, Homo sapien
tacctagtagttcaacagtttgatc

SEQ ID NO: 3337477 - DNA, 25 bp, Homo sapien
ttagccattcagcatactgatgacc

SEQ ID NO: 3337478 - DNA, 25 bp, Homo sapien
actgatgaccatagtttgtttagcc

SEQ ID NO: 3337479 - DNA, 25 bp, Homo sapien
tttgccagcattaatgttgtcacca

SEQ ID NO: 3337480 - DNA, 25 bp, Homo sapien
cagcagcacttgacagggaccttct

SEQ ID NO: 3337481 - DNA, 25 bp, Homo sapien
agctgtacatatggccatctcaggg

SEQ ID NO: 3337482 - DNA, 25 bp, Homo sapien
tttcttgggacttcctaaggagtgc

SEQ ID NO: 3337483 - DNA, 25 bp, Homo sapien
ggtggaggataatgactgtatataa

SEQ ID NO: 3337484 - DNA, 25 bp, Homo sapien
aacctgcatatcgatttagagatca

SEQ ID NO: 3337485 - DNA, 25 bp, Homo sapien
taacatctacactatggtgagtcct

SEQ ID NO: 3337486 - DNA, 25 bp, Homo sapien
gaattgttgaagctactctgatttg

SEQ ID NO: 3337487 - DNA, 25 bp, Homo sapien
tgagtcctgtacatccactgtcaga

SEQ ID NO: 3337488 - DNA, 25 bp, Homo sapien
tcatgcatctatcattcaagaggta

SEQ ID NO: 3337489 - DNA, 25 bp, Homo sapien
gagtcatggtgcttttggaagtcta

SEQ ID NO: 3337490 - DNA, 25 bp, Homo sapien
ttttaaagcccattacaatagcacc

SEQ ID NO: 3337491 - DNA, 25 bp, Homo sapien
catacattttttaaccagtggcaaa

SEQ ID NO: 3337492 - DNA, 25 bp, Homo sapien
gtatcttcctacgagtcaacttggt

SEQ ID NO: 3337493 - DNA, 25 bp, Homo sapien
gcatgactgatagattaattacctc

SEQ ID NO: 3337494 - DNA, 25 bp, Homo sapien
ttcacaactatattaaccaagcctg

SEQ ID NO: 3337495 - DNA, 25 bp, Homo sapien
taagactaccataatcgacgtgtga

SEQ ID NO: 3337496 - DNA, 25 bp, Homo sapien
caaggcagacttctcaatccgagtt

SEQ ID NO: 3337497 - DNA, 25 bp, Homo sapien
tgattaatgagccaaggcagacttc

SEQ ID NO: 3337498 - DNA, 25 bp, Homo sapien
ggcagtcacatttaggcgcgcaagc

SEQ ID NO: 3337499 - DNA, 25 bp, Homo sapien
ggcgcgcaagcgcaattcttgatta

SEQ ID NO: 3337500 - DNA, 25 bp, Homo sapien
tagcacttattcgagttttcacgag

SEQ ID NO: 3337501 - DNA, 25 bp, Homo sapien
acgcaggcggaaccgacgaagacta

SEQ ID NO: 3337502 - DNA, 25 bp, Homo sapien
cggatttcacatcgatagcacttat

SEQ ID NO: 3337503 - DNA, 25 bp, Homo sapien
ttttcacgagtaacctgacgcaggc

SEQ ID NO: 3337504 - DNA, 25 bp, Homo sapien
tgactcgacacactctccagtgacg

SEQ ID NO: 3337505 - DNA, 25 bp, Homo sapien
agggagtctacgactcgggagggag

SEQ ID NO: 3337506 - DNA, 25 bp, Homo sapien
aagaccgcctgtgactcgacacact

SEQ ID NO: 3337507 - DNA, 25 bp, Homo sapien
gctccgcgcggaagaccgcctgtga

SEQ ID NO: 3337508 - DNA, 25 bp, Homo sapien
tatttggcacagtcgatcactccct

SEQ ID NO: 3337509 - DNA, 25 bp, Homo sapien
gagtcatttctcaggcctcgtctca

SEQ ID NO: 3337510 - DNA, 25 bp, Homo sapien
catactcacagcataggtgttccat

SEQ ID NO: 3337511 - DNA, 25 bp, Homo sapien
gccttacagttcagtctttggtcca

SEQ ID NO: 3337512 - DNA, 25 bp, Homo sapien
cctatgtattctggcccactttttc

SEQ ID NO: 3337513 - DNA, 25 bp, Homo sapien
acacaaggtcctatgtattctggcc

SEQ ID NO: 3337514 - DNA, 25 bp, Homo sapien
tcatcccttgctgcaagattgcagc

SEQ ID NO: 3337515 - DNA, 25 bp, Homo sapien
tggtcccctgtacttatcacacaag

SEQ ID NO: 3337516 - DNA, 25 bp, Homo sapien
taggaagtaattttcgtgctaacat

SEQ ID NO: 3337517 - DNA, 25 bp, Homo sapien
tatgtgccttgcagtactgtaattc

SEQ ID NO: 3337518 - DNA, 25 bp, Homo sapien
tgcatgatcctgtaggagcaacatt

SEQ ID NO: 3337519 - DNA, 25 bp, Homo sapien
ttccagaagtaaaatctgatggttc

SEQ ID NO: 3337520 - DNA, 25 bp, Homo sapien
gctctaaaagatgaatttcgacaat

SEQ ID NO: 3337521 - DNA, 25 bp, Homo sapien
taaaagatgaatttcgacaatcagg

SEQ ID NO: 3337522 - DNA, 25 bp, Homo sapien
gatgaatttcgacaatcaggaatct

SEQ ID NO: 3337523 - DNA, 25 bp, Homo sapien
tccattcagcacatgaccaacaagc

SEQ ID NO: 3337524 - DNA, 25 bp, Homo sapien
catgcttcaaaggtcacaggccata

SEQ ID NO: 3337525 - DNA, 25 bp, Homo sapien
tgcttcaaaggtcacaggccataca

SEQ ID NO: 3337526 - DNA, 25 bp, Homo sapien
tcatgcttcaaaggtcacaggccat

SEQ ID NO: 3337527 - DNA, 25 bp, Homo sapien
gcttcaaaggtcacaggccatacag

SEQ ID NO: 3337528 - DNA, 25 bp, Homo sapien
taccaggagatagggtaaggaccat

SEQ ID NO: 3337529 - DNA, 25 bp, Homo sapien
gaggagtaattagtatgagcaagag

SEQ ID NO: 3337530 - DNA, 25 bp, Homo sapien
tttaagaggctgtagatcaaaaagg

SEQ ID NO: 3337531 - DNA, 25 bp, Homo sapien
agatcaaaaaggaccccagtaccag

SEQ ID NO: 3337532 - DNA, 25 bp, Homo sapien
tccaccagagtgtgttgcctgatgc

SEQ ID NO: 3337533 - DNA, 25 bp, Homo sapien
ccagagtgtgttgcctgatgctctg

SEQ ID NO: 3337534 - DNA, 25 bp, Homo sapien
gagtgtgttgcctgatgctctggga

SEQ ID NO: 3337535 - DNA, 25 bp, Homo sapien
caccagagtgtgttgcctgatgctc

SEQ ID NO: 3337536 - DNA, 25 bp, Homo sapien
tgttcccgtcaagtagacttcatct

SEQ ID NO: 3337537 - DNA, 25 bp, Homo sapien
tcaagaaattctgttcccgtcaagt

SEQ ID NO: 3337538 - DNA, 25 bp, Homo sapien
cccgtcaagtagacttcatcttcct

SEQ ID NO: 3337539 - DNA, 25 bp, Homo sapien
aattctgttcccgtcaagtagactt

SEQ ID NO: 3337540 - DNA, 25 bp, Homo sapien
gcttggttgaaatctaatcaacttc

SEQ ID NO: 3337541 - DNA, 25 bp, Homo sapien
ttggtgtcaaaagccagagcactgc

SEQ ID NO: 3337542 - DNA, 25 bp, Homo sapien
caatattaggtcctcccttggattt

SEQ ID NO: 3337543 - DNA, 25 bp, Homo sapien
tgtttctcccgagcccatcctgaat

SEQ ID NO: 3337544 - DNA, 25 bp, Homo sapien
tgacaaaaaggctatttgttccact

SEQ ID NO: 3337545 - DNA, 25 bp, Homo sapien
taaagtaaatgggagcaccaacgta

SEQ ID NO: 3337546 - DNA, 25 bp, Homo sapien
cacttgtgagaccagtggaactgat

SEQ ID NO: 3337547 - DNA, 25 bp, Homo sapien
tcagcacaatggctaaagtaaatgg

SEQ ID NO: 3337548 - DNA, 25 bp, Homo sapien
gagtatctgctatagaatcacagga

SEQ ID NO: 3337549 - DNA, 25 bp, Homo sapien
tgtatgcactctccagcaatgtggg

SEQ ID NO: 3337550 - DNA, 25 bp, Homo sapien
gataatagcggaaattctcaaagca

SEQ ID NO: 3337551 - DNA, 25 bp, Homo sapien
ggaatataagcaggctctgacccct

SEQ ID NO: 3337552 - DNA, 25 bp, Homo sapien
ctggcttggctttccctgggaagaa

SEQ ID NO: 3337553 - DNA, 25 bp, Homo sapien
ctgaaaactttcttggtactgagcc

SEQ ID NO: 3337554 - DNA, 25 bp, Homo sapien
tgaaaactttcttggtactgagcca

SEQ ID NO: 3337555 - DNA, 25 bp, Homo sapien
ctccctgtggctttccgcgcttctg

SEQ ID NO: 3337556 - DNA, 25 bp, Homo sapien
ctacacaaagtagtaggaagataaa

SEQ ID NO: 3337557 - DNA, 25 bp, Homo sapien
tacacaaagtagtaggaagataaat

SEQ ID NO: 3337558 - DNA, 25 bp, Homo sapien
ctacatgaaggatttctgctccaaa

SEQ ID NO: 3337559 - DNA, 25 bp, Homo sapien
aattaacataaacagctttgaggaa

SEQ ID NO: 3337560 - DNA, 25 bp, Homo sapien
tctgctccaaaatgtcttgattaat

SEQ ID NO: 3337561 - DNA, 25 bp, Homo sapien
aaatgtcttgattaattaacataaa

SEQ ID NO: 3337562 - DNA, 25 bp, Homo sapien
tctggcaggatcctggcagggttct

SEQ ID NO: 3337563 - DNA, 25 bp, Homo sapien
tgttccatccacggctggtccagtt

SEQ ID NO: 3337564 - DNA, 25 bp, Homo sapien
ggaaaccaggcctgttccatccacg

SEQ ID NO: 3337565 - DNA, 25 bp, Homo sapien
tagttggcagtaaaccaaagtccat

SEQ ID NO: 3337566 - DNA, 25 bp, Homo sapien
gagataatgaattggcttcagagcc

SEQ ID NO: 3337567 - DNA, 25 bp, Homo sapien
ctgagataatgaattggcttcagag

SEQ ID NO: 3337568 - DNA, 25 bp, Homo sapien
tgagataatgaattggcttcagagc

SEQ ID NO: 3337569 - DNA, 25 bp, Homo sapien
gacagtgctcccagatggcctgaac

SEQ ID NO: 3337570 - DNA, 25 bp, Homo sapien
gaaccgtccattgagcagtttgcac

SEQ ID NO: 3337571 - DNA, 25 bp, Homo sapien
gcccatcagaggacatgatcccagt

SEQ ID NO: 3337572 - DNA, 25 bp, Homo sapien
aactgctgatgagaaccgtccattg

SEQ ID NO: 3337573 - DNA, 25 bp, Homo sapien
catcaaagagggtgttcccttccgg

SEQ ID NO: 3337574 - DNA, 25 bp, Homo sapien
gcagcttgtgtgagtccaatgcccc

SEQ ID NO: 3337575 - DNA, 25 bp, Homo sapien
caaacacgcttccaagaattcctga

SEQ ID NO: 3337576 - DNA, 25 bp, Homo sapien
tgaacttctagagtagcagcttgtg

SEQ ID NO: 3337577 - DNA, 25 bp, Homo sapien
caggaagaataggttttgataggca

SEQ ID NO: 3337578 - DNA, 25 bp, Homo sapien
tctaaaggacctgaatcctgaggtc

SEQ ID NO: 3337579 - DNA, 25 bp, Homo sapien
ctggcccctggaacaagagccgttt

SEQ ID NO: 3337580 - DNA, 25 bp, Homo sapien
ggaagaataggttttgataggcagc

SEQ ID NO: 3337581 - DNA, 25 bp, Homo sapien
gacgcagaattctgggtctgaactg

SEQ ID NO: 3337582 - DNA, 25 bp, Homo sapien
agtatcactgtccactatgagctga

SEQ ID NO: 3337583 - DNA, 25 bp, Homo sapien
tggctctaccactctctcaaagggc

SEQ ID NO: 3337584 - DNA, 25 bp, Homo sapien
tgcctgtaaggcagttactgtcaaa

SEQ ID NO: 3337585 - DNA, 25 bp, Homo sapien
gacttggccaagacacagaaattct

SEQ ID NO: 3337586 - DNA, 25 bp, Homo sapien
ctgacttggccaagacacagaaatt

SEQ ID NO: 3337587 - DNA, 25 bp, Homo sapien
ctttctccagcagttttgctcagca

SEQ ID NO: 3337588 - DNA, 25 bp, Homo sapien
gacacagaaattctttctccagcag

SEQ ID NO: 3337589 - DNA, 25 bp, Homo sapien
agcagttctgggttaagccctctat

SEQ ID NO: 3337590 - DNA, 25 bp, Homo sapien
tgggttaagccctctatctgtataa

SEQ ID NO: 3337591 - DNA, 25 bp, Homo sapien
taagccctctatctgtataactggg

SEQ ID NO: 3337592 - DNA, 25 bp, Homo sapien
tctatctgtataactgggttcccca

SEQ ID NO: 3337593 - DNA, 25 bp, Homo sapien
tctatctgcattaacattctgaaca

SEQ ID NO: 3337594 - DNA, 25 bp, Homo sapien
catcccactggaatctatctgcatt

SEQ ID NO: 3337595 - DNA, 25 bp, Homo sapien
ctttgaagctaaaataggcacatcc

SEQ ID NO: 3337596 - DNA, 25 bp, Homo sapien
tgaacaatctaattgcacttccaaa

SEQ ID NO: 3337597 - DNA, 25 bp, Homo sapien
tctgtcctttaatctcgcgcggcgg

SEQ ID NO: 3337598 - DNA, 25 bp, Homo sapien
tgcgcgaccaggagagctaggttct

SEQ ID NO: 3337599 - DNA, 25 bp, Homo sapien
gagagactcgaactcgtggaacccg

SEQ ID NO: 3337600 - DNA, 25 bp, Homo sapien
ctgagtcaagatggcaagccccgga

SEQ ID NO: 3337601 - DNA, 25 bp, Homo sapien
tgttcgccccataaaaggacctaga

SEQ ID NO: 3337602 - DNA, 25 bp, Homo sapien
ttatgtaagtagagctgcgggcacc

SEQ ID NO: 3337603 - DNA, 25 bp, Homo sapien
tgaagtggtctgctccggatggctc

SEQ ID NO: 3337604 - DNA, 25 bp, Homo sapien
tagagacaagcatatcgaacgcgcg

SEQ ID NO: 3337605 - DNA, 25 bp, Homo sapien
ctttacccacgaataaagtagatgg

SEQ ID NO: 3337606 - DNA, 25 bp, Homo sapien
tgaatgtgcctaatagcttgggaga

SEQ ID NO: 3337607 - DNA, 25 bp, Homo sapien
ttttccacaggaggatgaatgtgcc

SEQ ID NO: 3337608 - DNA, 25 bp, Homo sapien
tgcctggtgtagcactggtgttttc

SEQ ID NO: 3337609 - DNA, 25 bp, Homo sapien
aaacactaagtttgggctcctccat

SEQ ID NO: 3337610 - DNA, 25 bp, Homo sapien
taggtaatctgtacccagcgtgggc

SEQ ID NO: 3337611 - DNA, 25 bp, Homo sapien
ttgggcaggtgcacaatctcagcag

SEQ ID NO: 3337612 - DNA, 25 bp, Homo sapien
aggagcttccttgcctgaagcccaa

SEQ ID NO: 3337613 - DNA, 25 bp, Homo sapien
cttttcaagtgtagcaagaatgttt

SEQ ID NO: 3337614 - DNA, 25 bp, Homo sapien
ttcaagtgtagcaagaatgtttttt

SEQ ID NO: 3337615 - DNA, 25 bp, Homo sapien
gtagcaagaatgttttttctgttaa

SEQ ID NO: 3337616 - DNA, 25 bp, Homo sapien
caagtgtagcaagaatgttttttct

SEQ ID NO: 3337617 - DNA, 25 bp, Homo sapien
agagactgacagccagaaggagcat

SEQ ID NO: 3337618 - DNA, 25 bp, Homo sapien
taaaagagcctttgattcatttgct

SEQ ID NO: 3337619 - DNA, 25 bp, Homo sapien
tggcaagcagttagtttacaacaga

SEQ ID NO: 3337620 - DNA, 25 bp, Homo sapien
tgccttgggctagcgtcttatttcg

SEQ ID NO: 3337621 - DNA, 25 bp, Homo sapien
tttaagctaagtaattcattctggc

SEQ ID NO: 3337622 - DNA, 25 bp, Homo sapien
taattcactttatttttcttgtata

SEQ ID NO: 3337623 - DNA, 25 bp, Homo sapien
cacgcttaattcactttatttttct

SEQ ID NO: 3337624 - DNA, 25 bp, Homo sapien
cgcttaattcactttatttttcttg

SEQ ID NO: 3337625 - DNA, 25 bp, Homo sapien
tttccagaggtcaggggtcagatag

SEQ ID NO: 3337626 - DNA, 25 bp, Homo sapien
gactaggtggtcagtgaagtcctga

SEQ ID NO: 3337627 - DNA, 25 bp, Homo sapien
ctctttccagaggtcaggggtcaga

SEQ ID NO: 3337628 - DNA, 25 bp, Homo sapien
cctgagtccgctgcatggagactct

SEQ ID NO: 3337629 - DNA, 25 bp, Homo sapien
ccccgatagcaacgaatgccttgaa

SEQ ID NO: 3337630 - DNA, 25 bp, Homo sapien
agcaacgaatgccttgaacctcgtg

SEQ ID NO: 3337631 - DNA, 25 bp, Homo sapien
gtccccgatagcaacgaatgccttg

SEQ ID NO: 3337632 - DNA, 25 bp, Homo sapien
gatagcaacgaatgccttgaacctc

SEQ ID NO: 3337633 - DNA, 25 bp, Homo sapien
ggcctccgggccctcccgctgcacc

SEQ ID NO: 3337634 - DNA, 25 bp, Homo sapien
cgggccctcccgctgcaccggcgtc

SEQ ID NO: 3337635 - DNA, 25 bp, Homo sapien
cctccgggccctcccgctgcaccgg

SEQ ID NO: 3337636 - DNA, 25 bp, Homo sapien
ccagggcctccgggccctcccgctg

SEQ ID NO: 3337637 - DNA, 25 bp, Homo sapien
atggttcccacaatggatgctgaac

SEQ ID NO: 3337638 - DNA, 25 bp, Homo sapien
tgtgtatcccccaatctctgatctt

SEQ ID NO: 3337639 - DNA, 25 bp, Homo sapien
ctctgatcttgaaggggcctgcctc

SEQ ID NO: 3337640 - DNA, 25 bp, Homo sapien
ggttcccacaatggatgctgaacac

SEQ ID NO: 3337641 - DNA, 25 bp, Homo sapien
acgtctcatgtctttcgtggttggg

SEQ ID NO: 3337642 - DNA, 25 bp, Homo sapien
tctctgtccacgtctcatgtctttc

SEQ ID NO: 3337643 - DNA, 25 bp, Homo sapien
catgtctttcgtggttgggtgccat

SEQ ID NO: 3337644 - DNA, 25 bp, Homo sapien
tgtccacgtctcatgtctttcgtgg

SEQ ID NO: 3337645 - DNA, 25 bp, Homo sapien
caggtgcagagtggaaaggactttg

SEQ ID NO: 3337646 - DNA, 25 bp, Homo sapien
agtatttttagtcacatccacaggc

SEQ ID NO: 3337647 - DNA, 25 bp, Homo sapien
aggactttgatcgtggactagtatt

SEQ ID NO: 3337648 - DNA, 25 bp, Homo sapien
tgatcgtggactagtatttttagtc

SEQ ID NO: 3337649 - DNA, 25 bp, Homo sapien
caagcattcctaactacctggcaaa

SEQ ID NO: 3337650 - DNA, 25 bp, Homo sapien
gcttgctgcgatacaaggctgtata

SEQ ID NO: 3337651 - DNA, 25 bp, Homo sapien
tattggtaccacactcttagggatc

SEQ ID NO: 3337652 - DNA, 25 bp, Homo sapien
tcttggcagtagattccttcggaga

SEQ ID NO: 3337653 - DNA, 25 bp, Homo sapien
tcttgccttttgacgatagctgact

SEQ ID NO: 3337654 - DNA, 25 bp, Homo sapien
gggcatcattgtccaaccaaagttg

SEQ ID NO: 3337655 - DNA, 25 bp, Homo sapien
gtggctatcacagggttcacatggg

SEQ ID NO: 3337656 - DNA, 25 bp, Homo sapien
caaagttgcttctgaagtgctgcca

SEQ ID NO: 3337657 - DNA, 25 bp, Homo sapien
cttttaaagaatgtgtgcactttgc

SEQ ID NO: 3337658 - DNA, 25 bp, Homo sapien
gccgtatctgagcacttgccacctg

SEQ ID NO: 3337659 - DNA, 25 bp, Homo sapien
tccttcactagatggtagcacctgg

SEQ ID NO: 3337660 - DNA, 25 bp, Homo sapien
cacctggtggtaaggagaccattcc

SEQ ID NO: 3337661 - DNA, 25 bp, Homo sapien
ttcacagcaccattgcaaccatggc

SEQ ID NO: 3337662 - DNA, 25 bp, Homo sapien
gaagcagctttatgtgtattcttta

SEQ ID NO: 3337663 - DNA, 25 bp, Homo sapien
taaaatctgtaggagtcttatgaag

SEQ ID NO: 3337664 - DNA, 25 bp, Homo sapien
tcttcaactcaaactctaggcccat

SEQ ID NO: 3337665 - DNA, 25 bp, Homo sapien
cactccgtgggtttgatgtggatgc

SEQ ID NO: 3337666 - DNA, 25 bp, Homo sapien
tcactccgtgggtttgatgtggatg

SEQ ID NO: 3337667 - DNA, 25 bp, Homo sapien
cagattggctaaagcttaagcccaa

SEQ ID NO: 3337668 - DNA, 25 bp, Homo sapien
cattgccacatggttacaggtcaca

SEQ ID NO: 3337669 - DNA, 25 bp, Homo sapien
gcggaggctaaacaaagcattgcca

SEQ ID NO: 3337670 - DNA, 25 bp, Homo sapien
caggtcacacttccaaggacgtaaa

SEQ ID NO: 3337671 - DNA, 25 bp, Homo sapien
ttgagcctagttcacacctagcctg

SEQ ID NO: 3337672 - DNA, 25 bp, Homo sapien
gcagggcaatttttagacacttttg

SEQ ID NO: 3337673 - DNA, 25 bp, Homo sapien
tctcggtcagagtagatattgtcac

SEQ ID NO: 3337674 - DNA, 25 bp, Homo sapien
ttcctcagtatagtaagttgactct

SEQ ID NO: 3337675 - DNA, 25 bp, Homo sapien
tcaggcagcagtgtagcagatgaga

SEQ ID NO: 3337676 - DNA, 25 bp, Homo sapien
ctctaaagagtacccgggaagcctg

SEQ ID NO: 3337677 - DNA, 25 bp, Homo sapien
ttgttgaccaacagaagaccttggc

SEQ ID NO: 3337678 - DNA, 25 bp, Homo sapien
tgttttagcaaaagagcagtggctc

SEQ ID NO: 3337679 - DNA, 25 bp, Homo sapien
caagatgaattgtagactagtaaca

SEQ ID NO: 3337680 - DNA, 25 bp, Homo sapien
taatttagaaagcacgtatagttgt

SEQ ID NO: 3337681 - DNA, 25 bp, Homo sapien
tggcccattggccatagtactgtgc

SEQ ID NO: 3337682 - DNA, 25 bp, Homo sapien
gcctgagtacacagatgtgccctga

SEQ ID NO: 3337683 - DNA, 25 bp, Homo sapien
gcctttggccctctaataatgctga

SEQ ID NO: 3337684 - DNA, 25 bp, Homo sapien
ccgtgacagggattggacatatgaa

SEQ ID NO: 3337685 - DNA, 25 bp, Homo sapien
caagtaagcaatcaggtccgtgaca

SEQ ID NO: 3337686 - DNA, 25 bp, Homo sapien
actactttcactacagagcctttgg

SEQ ID NO: 3337687 - DNA, 25 bp, Homo sapien
tctgttaacagagtttcagcaaact

SEQ ID NO: 3337688 - DNA, 25 bp, Homo sapien
actgatgatcatcccaaattttgac

SEQ ID NO: 3337689 - DNA, 25 bp, Homo sapien
tttattccggttcagtataatctct

SEQ ID NO: 3337690 - DNA, 25 bp, Homo sapien
tcagcaaactgattggtcaaggtat

SEQ ID NO: 3337691 - DNA, 25 bp, Homo sapien
catgggtagtttaagcccagcatgt

SEQ ID NO: 3337692 - DNA, 25 bp, Homo sapien
gataagttatttcccattagtggca

SEQ ID NO: 3337693 - DNA, 25 bp, Homo sapien
catatcaccaggtaaactgtcacca

SEQ ID NO: 3337694 - DNA, 25 bp, Homo sapien
agcccagcatgtcttggcttccaga

SEQ ID NO: 3337695 - DNA, 25 bp, Homo sapien
tctgtactgtacttgctgttctagc

SEQ ID NO: 3337696 - DNA, 25 bp, Homo sapien
gttaccattcaaggacacaatgctg

SEQ ID NO: 3337697 - DNA, 25 bp, Homo sapien
tctgttgctgggaatacgactaaag

SEQ ID NO: 3337698 - DNA, 25 bp, Homo sapien
gccctggctcttcggcacatttttg

SEQ ID NO: 3337699 - DNA, 25 bp, Homo sapien
cagacaagttttccggtagtgccgc

SEQ ID NO: 3337700 - DNA, 25 bp, Homo sapien
ccataacgtcgtcaaggctgtggcg

SEQ ID NO: 3337701 - DNA, 25 bp, Homo sapien
tccaagtttgaatgggcagcgcaaa

SEQ ID NO: 3337702 - DNA, 25 bp, Homo sapien
gccaataaggaatctcgcgagtgtt

SEQ ID NO: 3337703 - DNA, 25 bp, Homo sapien
ctatttggtaagtcaggttggcctg

SEQ ID NO: 3337704 - DNA, 25 bp, Homo sapien
ttttaaggtgctgctcaaggtattc

SEQ ID NO: 3337705 - DNA, 25 bp, Homo sapien
tagctggcgtcttatgtgtattgga

SEQ ID NO: 3337706 - DNA, 25 bp, Homo sapien
tcagtggctctaggttgactggtta

SEQ ID NO: 3337707 - DNA, 25 bp, Homo sapien
tgttagaacctagaatggaatcctg

SEQ ID NO: 3337708 - DNA, 25 bp, Homo sapien
tgaactcaagttatcaacctgcctg

SEQ ID NO: 3337709 - DNA, 25 bp, Homo sapien
tctccccattcagcgtctagagtag

SEQ ID NO: 3337710 - DNA, 25 bp, Homo sapien
caaaaactagttgagaggcttcata

SEQ ID NO: 3337711 - DNA, 25 bp, Homo sapien
tagtgctattgagtctcatctggaa

SEQ ID NO: 3337712 - DNA, 25 bp, Homo sapien
tattttgtcatatgaccttctgaag

SEQ ID NO: 3337713 - DNA, 25 bp, Homo sapien
agaatggccttttagttgtatagcc

SEQ ID NO: 3337714 - DNA, 25 bp, Homo sapien
tccttgcttatgtgggtagaatggg

SEQ ID NO: 3337715 - DNA, 25 bp, Homo sapien
accagaggcctttatgtgctacaca

SEQ ID NO: 3337716 - DNA, 25 bp, Homo sapien
tggagaccctaaagcaggaataccc

SEQ ID NO: 3337717 - DNA, 25 bp, Homo sapien
caggattttagctgtaccagaggcc

SEQ ID NO: 3337718 - DNA, 25 bp, Homo sapien
tctatggacagacctgataaactgg

SEQ ID NO: 3337719 - DNA, 25 bp, Homo sapien
cctctaccaccatagggcccagagc

SEQ ID NO: 3337720 - DNA, 25 bp, Homo sapien
ggcctctaccaccatagggcccaga

SEQ ID NO: 3337721 - DNA, 25 bp, Homo sapien
tattggcctctaccaccatagggcc

SEQ ID NO: 3337722 - DNA, 25 bp, Homo sapien
ttggcctctaccaccatagggccca

SEQ ID NO: 3337723 - DNA, 25 bp, Homo sapien
accatatccatcaccaccaccatgg

SEQ ID NO: 3337724 - DNA, 25 bp, Homo sapien
caaatctattatagcaatccccact

SEQ ID NO: 3337725 - DNA, 25 bp, Homo sapien
aatctattatagcaatccccactgc

SEQ ID NO: 3337726 - DNA, 25 bp, Homo sapien
cttcaatcattaccaaatctattat

SEQ ID NO: 3337727 - DNA, 25 bp, Homo sapien
tgtatatagattgtgaataaattgg

SEQ ID NO: 3337728 - DNA, 25 bp, Homo sapien
tgaataaattgggaaaagaaataga

SEQ ID NO: 3337729 - DNA, 25 bp, Homo sapien
gagataagtagagattatttcactt

SEQ ID NO: 3337730 - DNA, 25 bp, Homo sapien
tgcttactacagaaattcttgtttt

SEQ ID NO: 3337731 - DNA, 25 bp, Homo sapien
ccttcagaagcggatctctgccctg

SEQ ID NO: 3337732 - DNA, 25 bp, Homo sapien
gggtgagacattactagctgccttc

SEQ ID NO: 3337733 - DNA, 25 bp, Homo sapien
ggatctctgccctgaagtttaccag

SEQ ID NO: 3337734 - DNA, 25 bp, Homo sapien
tactagctgccttcagaagcggatc

SEQ ID NO: 3337735 - DNA, 25 bp, Homo sapien
caagagtacgctgagtttagtttct

SEQ ID NO: 3337736 - DNA, 25 bp, Homo sapien
tgcttttttctcacccttaatagtc

SEQ ID NO: 3337737 - DNA, 25 bp, Homo sapien
tagagggagctccttcaagagtacg

SEQ ID NO: 3337738 - DNA, 25 bp, Homo sapien
cgtaagataagttagagggagctcc

SEQ ID NO: 3337739 - DNA, 25 bp, Homo sapien
agtgttaggaacaaaggtgagctgc

SEQ ID NO: 3337740 - DNA, 25 bp, Homo sapien
cactgcaggtcaaacgctgccggct

SEQ ID NO: 3337741 - DNA, 25 bp, Homo sapien
tgcagaccccatccgcgagatggca

SEQ ID NO: 3337742 - DNA, 25 bp, Homo sapien
ccccatccgcgagatggcagtgtta

SEQ ID NO: 3337743 - DNA, 25 bp, Homo sapien
acttcttcgacaaactgtgccttgg

SEQ ID NO: 3337744 - DNA, 25 bp, Homo sapien
cttcaacgacgttggccaggactgg

SEQ ID NO: 3337745 - DNA, 25 bp, Homo sapien
tctaggagtagtggtatcggcgtct

SEQ ID NO: 3337746 - DNA, 25 bp, Homo sapien
ggatgctgtacccaagagagaggcc

SEQ ID NO: 3337747 - DNA, 25 bp, Homo sapien
tcccctttgacaccgacatcagtag

SEQ ID NO: 3337748 - DNA, 25 bp, Homo sapien
cctccacgtgggtaccatcctgctt

SEQ ID NO: 3337749 - DNA, 25 bp, Homo sapien
tgccaccagggagcatcctcgacat

SEQ ID NO: 3337750 - DNA, 25 bp, Homo sapien
tcaccatcggcaacatgctcatctc

SEQ ID NO: 3337751 - DNA, 25 bp, Homo sapien
gagacaccacagctggccagattta

SEQ ID NO: 3337752 - DNA, 25 bp, Homo sapien
tggccagatttaagttcttgatcaa

SEQ ID NO: 3337753 - DNA, 25 bp, Homo sapien
ccagatttaagttcttgatcaatct

SEQ ID NO: 3337754 - DNA, 25 bp, Homo sapien
gacaccacagctggccagatttaag

SEQ ID NO: 3337755 - DNA, 25 bp, Homo sapien
tacctggccatcagtgcgaaggagc

SEQ ID NO: 3337756 - DNA, 25 bp, Homo sapien
tataagcacatcaacaaatcacagg

SEQ ID NO: 3337757 - DNA, 25 bp, Homo sapien
ttagctccaccccttgatacctgaa

SEQ ID NO: 3337758 - DNA, 25 bp, Homo sapien
tgtgtccccagttaatgagtatgga

SEQ ID NO: 3337759 - DNA, 25 bp, Homo sapien
gagagggagctcaaaattgtcaaga

SEQ ID NO: 3337760 - DNA, 25 bp, Homo sapien
gggtgactgggtcctacttgtatct

SEQ ID NO: 3337761 - DNA, 25 bp, Homo sapien
gggtcctacttgtatcttcagttct

SEQ ID NO: 3337762 - DNA, 25 bp, Homo sapien
ggctgagagggagctcaaaattgtc

SEQ ID NO: 3337763 - DNA, 25 bp, Homo sapien
ctatcattcatgtgcggtatcatca

SEQ ID NO: 3337764 - DNA, 25 bp, Homo sapien
ttaaattgaggtaaacagcgtcatc

SEQ ID NO: 3337765 - DNA, 25 bp, Homo sapien
ccatatattgaatcttggctgagaa

SEQ ID NO: 3337766 - DNA, 25 bp, Homo sapien
cccactgtgtcagacagatgaggct

SEQ ID NO: 3337767 - DNA, 25 bp, Homo sapien
aaacagcgtcatcaggccccatata

SEQ ID NO: 3337768 - DNA, 25 bp, Homo sapien
cagtggatttcttacttgcctcaga

SEQ ID NO: 3337769 - DNA, 25 bp, Homo sapien
gatatcccagaattgctaagatcta

SEQ ID NO: 3337770 - DNA, 25 bp, Homo sapien
gttgttaggagacatatcttggctg

SEQ ID NO: 3337771 - DNA, 25 bp, Homo sapien
cacagtctaattatttgtgggctca

SEQ ID NO: 3337772 - DNA, 25 bp, Homo sapien
gcactgcacccataggcatctgaag

SEQ ID NO: 3337773 - DNA, 25 bp, Homo sapien
tcacttggaatgtctgcatgcgcac

SEQ ID NO: 3337774 - DNA, 25 bp, Homo sapien
tggtgtcctcgatgaaaatggtagt

SEQ ID NO: 3337775 - DNA, 25 bp, Homo sapien
tccaaggtaggctgtcccaggtcat

SEQ ID NO: 3337776 - DNA, 25 bp, Homo sapien
tcattgacgtgatattcagcatccc

SEQ ID NO: 3337777 - DNA, 25 bp, Homo sapien
ctttctggagcgcacggcgatggat

SEQ ID NO: 3337778 - DNA, 25 bp, Homo sapien
cgtagcgagcactttcattgacgtg

SEQ ID NO: 3337779 - DNA, 25 bp, Homo sapien
caaacacaaacctccacgtagcgag

SEQ ID NO: 3337780 - DNA, 25 bp, Homo sapien
taggcaggagtagcaggaaagttct

SEQ ID NO: 3337781 - DNA, 25 bp, Homo sapien
cattattgctaatgggtgtttctga

SEQ ID NO: 3337782 - DNA, 25 bp, Homo sapien
ataggcaggagtagcaggaaagttc

SEQ ID NO: 3337783 - DNA, 25 bp, Homo sapien
tctcctcattattgctaatgggtgt

SEQ ID NO: 3337784 - DNA, 25 bp, Homo sapien
aagaaaagctgatcctgtttatcat

SEQ ID NO: 3337785 - DNA, 25 bp, Homo sapien
ggatgtcagtactctttggttttgg

SEQ ID NO: 3337786 - DNA, 25 bp, Homo sapien
agttgggtatctcttatctgcagtt

SEQ ID NO: 3337787 - DNA, 25 bp, Homo sapien
gttgggtatctcttatctgcagttc

SEQ ID NO: 3337788 - DNA, 25 bp, Homo sapien
ttgggtatctcttatctgcagttct

SEQ ID NO: 3337789 - DNA, 25 bp, Homo sapien
cagttgggtatctcttatctgcagt

SEQ ID NO: 3337790 - DNA, 25 bp, Homo sapien
cggatattggtgaactgcaaatgct

SEQ ID NO: 3337791 - DNA, 25 bp, Homo sapien
gaagaacagcggatattggtgaact

SEQ ID NO: 3337792 - DNA, 25 bp, Homo sapien
aagaacagcggatattggtgaactg

SEQ ID NO: 3337793 - DNA, 25 bp, Homo sapien
cagcggatattggtgaactgcaaat

SEQ ID NO: 3337794 - DNA, 25 bp, Homo sapien
tggagattcaaccacttggcaaggc

SEQ ID NO: 3337795 - DNA, 25 bp, Homo sapien
cagtggagattcaaccacttggcaa

SEQ ID NO: 3337796 - DNA, 25 bp, Homo sapien
gtggagattcaaccacttggcaagg

SEQ ID NO: 3337797 - DNA, 25 bp, Homo sapien
gagattcaaccacttggcaaggcat

SEQ ID NO: 3337798 - DNA, 25 bp, Homo sapien
gggatattcaatctctgcttaagga

SEQ ID NO: 3337799 - DNA, 25 bp, Homo sapien
tctctgcttaaggaagcaaacattt

SEQ ID NO: 3337800 - DNA, 25 bp, Homo sapien
gatccatttgacagggggatattca

SEQ ID NO: 3337801 - DNA, 25 bp, Homo sapien
tattcaatctctgcttaaggaagca

SEQ ID NO: 3337802 - DNA, 25 bp, Homo sapien
caggatcaaggtgcattacaaaatc

SEQ ID NO: 3337803 - DNA, 25 bp, Homo sapien
gatcaaggtgcattacaaaatcctg

SEQ ID NO: 3337804 - DNA, 25 bp, Homo sapien
aacaggatcaaggtgcattacaaaa

SEQ ID NO: 3337805 - DNA, 25 bp, Homo sapien
ttaaacaggatcaaggtgcattaca

SEQ ID NO: 3337806 - DNA, 25 bp, Homo sapien
taacgatcagccagaatagtcacct

SEQ ID NO: 3337807 - DNA, 25 bp, Homo sapien
cactggcagcctaagtgaaacgctg

SEQ ID NO: 3337808 - DNA, 25 bp, Homo sapien
tcttctggacgtgagatgtaatcag

SEQ ID NO: 3337809 - DNA, 25 bp, Homo sapien
agtcatcaatgatcaggacctggca

SEQ ID NO: 3337810 - DNA, 25 bp, Homo sapien
tgtggaagaaatcgtgcctgtggca

SEQ ID NO: 3337811 - DNA, 25 bp, Homo sapien
ctgtggaagaaatcgtgcctgtggc

SEQ ID NO: 3337812 - DNA, 25 bp, Homo sapien
tctattttgtattccgcctctggaa

SEQ ID NO: 3337813 - DNA, 25 bp, Homo sapien
cttgacgtgtggagcaaatgacgat

SEQ ID NO: 3337814 - DNA, 25 bp, Homo sapien
cctggcttgcatctccagatcgtct

SEQ ID NO: 3337815 - DNA, 25 bp, Homo sapien
tactggaatcaaaagttccccaatg

SEQ ID NO: 3337816 - DNA, 25 bp, Homo sapien
ggtataattctcaccctccatgtgg

SEQ ID NO: 3337817 - DNA, 25 bp, Homo sapien
ccatgtggctgtagtctgtccagga

SEQ ID NO: 3337818 - DNA, 25 bp, Homo sapien
gggtctacaatttcaaccgttgcca

SEQ ID NO: 3337819 - DNA, 25 bp, Homo sapien
tacagccatgagaggttcagacaga

SEQ ID NO: 3337820 - DNA, 25 bp, Homo sapien
ttccaccatgtgttgatgtagtaac

SEQ ID NO: 3337821 - DNA, 25 bp, Homo sapien
agggaggcatatttcagctgacatt

SEQ ID NO: 3337822 - DNA, 25 bp, Homo sapien
gaaagccttgagataaagaattgtg

SEQ ID NO: 3337823 - DNA, 25 bp, Homo sapien
tcctggcagcgagttccaccatgtg

SEQ ID NO: 3337824 - DNA, 25 bp, Homo sapien
caaggtatcctctgcgtgtaagggt

SEQ ID NO: 3337825 - DNA, 25 bp, Homo sapien
ccagtttagatggaaaggctgattt

SEQ ID NO: 3337826 - DNA, 25 bp, Homo sapien
caatgtagtactctttctccaaaca

SEQ ID NO: 3337827 - DNA, 25 bp, Homo sapien
ctaagaatgtggaatcttcatccac

SEQ ID NO: 3337828 - DNA, 25 bp, Homo sapien
aacacctctatcgtttcctccctgc

SEQ ID NO: 3337829 - DNA, 25 bp, Homo sapien
cacctctatcgtttcctccctgcct

SEQ ID NO: 3337830 - DNA, 25 bp, Homo sapien
tcaacacctctatcgtttcctccct

SEQ ID NO: 3337831 - DNA, 25 bp, Homo sapien
acacctctatcgtttcctccctgcc

SEQ ID NO: 3337832 - DNA, 25 bp, Homo sapien
ggcagggtaaaggagtgagtggaga

SEQ ID NO: 3337833 - DNA, 25 bp, Homo sapien
ggtaaaggagtgagtggagagcgct

SEQ ID NO: 3337834 - DNA, 25 bp, Homo sapien
cagggtaaaggagtgagtggagagc

SEQ ID NO: 3337835 - DNA, 25 bp, Homo sapien
aaggagtgagtggagagcgctgcat

SEQ ID NO: 3337836 - DNA, 25 bp, Homo sapien
ctggccacccctggactttgaagct

SEQ ID NO: 3337837 - DNA, 25 bp, Homo sapien
cctgctactggggtattgatggaca

SEQ ID NO: 3337838 - DNA, 25 bp, Homo sapien
gatggaggaaagggcttcgtcttca

SEQ ID NO: 3337839 - DNA, 25 bp, Homo sapien
tggactttgaagctccaagccagaa

SEQ ID NO: 3337840 - DNA, 25 bp, Homo sapien
ctctggtaaatggtaaggtattgca

SEQ ID NO: 3337841 - DNA, 25 bp, Homo sapien
tggtaaatggtaaggtattgcatgc

SEQ ID NO: 3337842 - DNA, 25 bp, Homo sapien
taaatggtaaggtattgcatgctac

SEQ ID NO: 3337843 - DNA, 25 bp, Homo sapien
aatggtaaggtattgcatgctacaa

SEQ ID NO: 3337844 - DNA, 25 bp, Homo sapien
taatttgcctaaagcactttcatga

SEQ ID NO: 3337845 - DNA, 25 bp, Homo sapien
tgaaaacaccatcaactcttcatca

SEQ ID NO: 3337846 - DNA, 25 bp, Homo sapien
aatctatgattccatgagtataatg

SEQ ID NO: 3337847 - DNA, 25 bp, Homo sapien
atataaatctatgattccatgagta

SEQ ID NO: 3337848 - DNA, 25 bp, Homo sapien
taaatctatgattccatgagtataa

SEQ ID NO: 3337849 - DNA, 25 bp, Homo sapien
atctatgattccatgagtataatga

SEQ ID NO: 3337850 - DNA, 25 bp, Homo sapien
ctcatcaaattcctcattgcttttt

SEQ ID NO: 3337851 - DNA, 25 bp, Homo sapien
catcaaattcctcattgctttttct

SEQ ID NO: 3337852 - DNA, 25 bp, Homo sapien
tcactcatcaaattcctcattgctt

SEQ ID NO: 3337853 - DNA, 25 bp, Homo sapien
tcaaattcctcattgctttttcttc

SEQ ID NO: 3337854 - DNA, 25 bp, Homo sapien
cctcattcaagacataggatatctt

SEQ ID NO: 3337855 - DNA, 25 bp, Homo sapien
tgctgccctcattcaagacatagga

SEQ ID NO: 3337856 - DNA, 25 bp, Homo sapien
gctgccctcattcaagacataggat

SEQ ID NO: 3337857 - DNA, 25 bp, Homo sapien
tgccctcattcaagacataggatat

SEQ ID NO: 3337858 - DNA, 25 bp, Homo sapien
ggcacccctgttggtagtaatctgg

SEQ ID NO: 3337859 - DNA, 25 bp, Homo sapien
gataatgaagccatgctctggtcct

SEQ ID NO: 3337860 - DNA, 25 bp, Homo sapien
tacttgaggtttgtgtgtcgccagg

SEQ ID NO: 3337861 - DNA, 25 bp, Homo sapien
tcacgggacggctaccattgtacaa

SEQ ID NO: 3337862 - DNA, 25 bp, Homo sapien
tctgaacacagggtagagttcgccg

SEQ ID NO: 3337863 - DNA, 25 bp, Homo sapien
ccacatcagtgatgaagatcctgaa

SEQ ID NO: 3337864 - DNA, 25 bp, Homo sapien
gagttcgccgatcacttgaaattcg

SEQ ID NO: 3337865 - DNA, 25 bp, Homo sapien
tctatggatggtcaagataggtttc

SEQ ID NO: 3337866 - DNA, 25 bp, Homo sapien
gattacctcagggaagacgctgtct

SEQ ID NO: 3337867 - DNA, 25 bp, Homo sapien
cactagggtcactacaatgggtacc

SEQ ID NO: 3337868 - DNA, 25 bp, Homo sapien
tatgattcgtccatgccgagggagg

SEQ ID NO: 3337869 - DNA, 25 bp, Homo sapien
tagacaatgaaggactccccgacga

SEQ ID NO: 3337870 - DNA, 25 bp, Homo sapien
gatgagatcctcttgggtgaatcgt

SEQ ID NO: 3337871 - DNA, 25 bp, Homo sapien
catttaccagaatagtgcccagttt

SEQ ID NO: 3337872 - DNA, 25 bp, Homo sapien
ggtgaatcgttctgtgggcaaacca

SEQ ID NO: 3337873 - DNA, 25 bp, Homo sapien
cacctgcagtgtgggcataggctac

SEQ ID NO: 3337874 - DNA, 25 bp, Homo sapien
taagtaaactgcacaacccgtggtg

SEQ ID NO: 3337875 - DNA, 25 bp, Homo sapien
tgccatgctggtaagagacactccc

SEQ ID NO: 3337876 - DNA, 25 bp, Homo sapien
gggaccccggactaatatgaagaca

SEQ ID NO: 3337877 - DNA, 25 bp, Homo sapien
caagatggcggtagaagagtctccc

SEQ ID NO: 3337878 - DNA, 25 bp, Homo sapien
tttccatgtagtgccagtcttcatc

SEQ ID NO: 3337879 - DNA, 25 bp, Homo sapien
cttttccatgtagtgccagtcttca

SEQ ID NO: 3337880 - DNA, 25 bp, Homo sapien
tcagttgagagaggtagttcagcct

SEQ ID NO: 3337881 - DNA, 25 bp, Homo sapien
ggtagttcagcctgctgcagcaaca

SEQ ID NO: 3337882 - DNA, 25 bp, Homo sapien
tgaaagaggcgctccccatgggagt

SEQ ID NO: 3337883 - DNA, 25 bp, Homo sapien
tgaacaccaggtcaccagggtctga

SEQ ID NO: 3337884 - DNA, 25 bp, Homo sapien
gtgaaatacttgcacccagcaggtg

SEQ ID NO: 3337885 - DNA, 25 bp, Homo sapien
caccatcatgggcacgtagtcacgg

SEQ ID NO: 3337886 - DNA, 25 bp, Homo sapien
cgacttgcggatccagcaagagcca

SEQ ID NO: 3337887 - DNA, 25 bp, Homo sapien
gctgctgtccagtcggtagccgact

SEQ ID NO: 3337888 - DNA, 25 bp, Homo sapien
gtcccagtcgggtgccgagaagccc

SEQ ID NO: 3337889 - DNA, 25 bp, Homo sapien
ggtagccgacttgcggatccagcaa

SEQ ID NO: 3337890 - DNA, 25 bp, Homo sapien
tgttgtccattcatccagggattgg

SEQ ID NO: 3337891 - DNA, 25 bp, Homo sapien
tactcgggtcagtcctgcgtctgtg

SEQ ID NO: 3337892 - DNA, 25 bp, Homo sapien
tgcgtctgtgagattgagctcctgt

SEQ ID NO: 3337893 - DNA, 25 bp, Homo sapien
caggtgccacaaagggattgtccct

SEQ ID NO: 3337894 - DNA, 25 bp, Homo sapien
tcttccttaccgctgacaggagtgt

SEQ ID NO: 3337895 - DNA, 25 bp, Homo sapien
taccgctgacaggagtgtatcttct

SEQ ID NO: 3337896 - DNA, 25 bp, Homo sapien
ctgacaggagtgtatcttctagcca

SEQ ID NO: 3337897 - DNA, 25 bp, Homo sapien
ccttaccgctgacaggagtgtatct

SEQ ID NO: 3337898 - DNA, 25 bp, Homo sapien
gcgagttaattccactataactaaa

SEQ ID NO: 3337899 - DNA, 25 bp, Homo sapien
cttgcgagttaattccactataact

SEQ ID NO: 3337900 - DNA, 25 bp, Homo sapien
tcctgtagggaaggacttcttaata

SEQ ID NO: 3337901 - DNA, 25 bp, Homo sapien
tataactaaaagtatgtcctgtagg

SEQ ID NO: 3337902 - DNA, 25 bp, Homo sapien
caaagagctgattcaaactctcaat

SEQ ID NO: 3337903 - DNA, 25 bp, Homo sapien
agagggcagcatgtgcgaggtaggt

SEQ ID NO: 3337904 - DNA, 25 bp, Homo sapien
ggtgaagaaggctctatcttgctct

SEQ ID NO: 3337905 - DNA, 25 bp, Homo sapien
cacaaagagctgattcaaactctca

SEQ ID NO: 3337906 - DNA, 25 bp, Homo sapien
tattttcctgaaatgaggggtctgg

SEQ ID NO: 3337907 - DNA, 25 bp, Homo sapien
tgtgaattagatgttgcccttgctg

SEQ ID NO: 3337908 - DNA, 25 bp, Homo sapien
gggtctggtaaagggctgtgaatta

SEQ ID NO: 3337909 - DNA, 25 bp, Homo sapien
atgtgttattttcctgaaatgaggg

SEQ ID NO: 3337910 - DNA, 25 bp, Homo sapien
tcagtcctttgattcctttagcttt

SEQ ID NO: 3337911 - DNA, 25 bp, Homo sapien
cctcagtcctttgattcctttagct

SEQ ID NO: 3337912 - DNA, 25 bp, Homo sapien
cagtcctttgattcctttagctttt

SEQ ID NO: 3337913 - DNA, 25 bp, Homo sapien
tgagctcctttggtcctttgccttc

SEQ ID NO: 3337914 - DNA, 25 bp, Homo sapien
agctgccaagcagggattgctcggt

SEQ ID NO: 3337915 - DNA, 25 bp, Homo sapien
ggattgctcggtcacgtccttccca

SEQ ID NO: 3337916 - DNA, 25 bp, Homo sapien
actttgagctcctttggtcctttgc

SEQ ID NO: 3337917 - DNA, 25 bp, Homo sapien
gatgagacgtattaaggcagccaaa

SEQ ID NO: 3337918 - DNA, 25 bp, Homo sapien
gaaatttgatgagacgtattaaggc

SEQ ID NO: 3337919 - DNA, 25 bp, Homo sapien
gaaagagtgacacgtaattgatgat

SEQ ID NO: 3337920 - DNA, 25 bp, Homo sapien
gagtgacacgtaattgatgattctt

SEQ ID NO: 3337921 - DNA, 25 bp, Homo sapien
ccacagttccgcagggaacgcaggg

SEQ ID NO: 3337922 - DNA, 25 bp, Homo sapien
ttccgcagggaacgcagggcttttc

SEQ ID NO: 3337923 - DNA, 25 bp, Homo sapien
taaaagaatcatgcaccacagttcc

SEQ ID NO: 3337924 - DNA, 25 bp, Homo sapien
catgcaccacagttccgcagggaac

SEQ ID NO: 3337925 - DNA, 25 bp, Homo sapien
ccgatgttccttattgcactctgca

SEQ ID NO: 3337926 - DNA, 25 bp, Homo sapien
tatcatcttatatctgtcgtacacc

SEQ ID NO: 3337927 - DNA, 25 bp, Homo sapien
tcaccagtgtagagaggaaggtaag

SEQ ID NO: 3337928 - DNA, 25 bp, Homo sapien
aaccaagatgaacatcacaccgatg

SEQ ID NO: 3337929 - DNA, 25 bp, Homo sapien
gggatttcctctgaggattcttcaa

SEQ ID NO: 3337930 - DNA, 25 bp, Homo sapien
gatttcctctgaggattcttcaata

SEQ ID NO: 3337931 - DNA, 25 bp, Homo sapien
tcctctgaggattcttcaatagcct

SEQ ID NO: 3337932 - DNA, 25 bp, Homo sapien
tttcctctgaggattcttcaatagc

SEQ ID NO: 3337933 - DNA, 25 bp, Homo sapien
tagagccaaaatgcagattacaaaa

SEQ ID NO: 3337934 - DNA, 25 bp, Homo sapien
gccaaaatgcagattacaaaataca

SEQ ID NO: 3337935 - DNA, 25 bp, Homo sapien
gagccaaaatgcagattacaaaata

SEQ ID NO: 3337936 - DNA, 25 bp, Homo sapien
aatagagccaaaatgcagattacaa

SEQ ID NO: 3337937 - DNA, 25 bp, Homo sapien
catgtgctaggtagttgtatctaga

SEQ ID NO: 3337938 - DNA, 25 bp, Homo sapien
cacaatcattgaactgtatgtcact

SEQ ID NO: 3337939 - DNA, 25 bp, Homo sapien
tctcattgctgattgcatttgtgca

SEQ ID NO: 3337940 - DNA, 25 bp, Homo sapien
tttgtgcaaaataggccattatggc

SEQ ID NO: 3337941 - DNA, 25 bp, Homo sapien
ggagcaggctaagtgacttgaaagc

SEQ ID NO: 3337942 - DNA, 25 bp, Homo sapien
aaataatgtatatcttggagactgg

SEQ ID NO: 3337943 - DNA, 25 bp, Homo sapien
gcaactaaaggacatggtgaacatt

SEQ ID NO: 3337944 - DNA, 25 bp, Homo sapien
gtcatacaatgaaaatgcactcgaa

SEQ ID NO: 3337945 - DNA, 25 bp, Homo sapien
ttcatattgaccttgaactctgtga

SEQ ID NO: 3337946 - DNA, 25 bp, Homo sapien
gctaacgtaagtctatttaaggcac

SEQ ID NO: 3337947 - DNA, 25 bp, Homo sapien
cttggaaatggaccatgggccattg

SEQ ID NO: 3337948 - DNA, 25 bp, Homo sapien
tccttcagtattggagatactcttt

SEQ ID NO: 3337949 - DNA, 25 bp, Homo sapien
gatcagctagtctaatctcagtggg

SEQ ID NO: 3337950 - DNA, 25 bp, Homo sapien
cagggttccaactgaaatgctggga

SEQ ID NO: 3337951 - DNA, 25 bp, Homo sapien
aatgcctcaaggaaaagtggcaccg

SEQ ID NO: 3337952 - DNA, 25 bp, Homo sapien
aaagttagggtagaggcagatcagc

SEQ ID NO: 3337953 - DNA, 25 bp, Homo sapien
gacgtttttatctaccagacagact

SEQ ID NO: 3337954 - DNA, 25 bp, Homo sapien
ccctaagcaagaaagtctagttttg

SEQ ID NO: 3337955 - DNA, 25 bp, Homo sapien
gacccatgaggtatagttgctttgc

SEQ ID NO: 3337956 - DNA, 25 bp, Homo sapien
tgaaaatcattttctgacccatgag

SEQ ID NO: 3337957 - DNA, 25 bp, Homo sapien
aagaaacctagctctcattttcagg

SEQ ID NO: 3337958 - DNA, 25 bp, Homo sapien
catcaagctcttattagtaacaaag

SEQ ID NO: 3337959 - DNA, 25 bp, Homo sapien
tagaagttttaatcatacatcaagc

SEQ ID NO: 3337960 - DNA, 25 bp, Homo sapien
ggaaggatgctttcagatggtcaac

SEQ ID NO: 3337961 - DNA, 25 bp, Homo sapien
tattatgcacagactcactcaggga

SEQ ID NO: 3337962 - DNA, 25 bp, Homo sapien
tatctctccacatcttgtataagtg

SEQ ID NO: 3337963 - DNA, 25 bp, Homo sapien
gcactgtatggtgggtgacaacctc

SEQ ID NO: 3337964 - DNA, 25 bp, Homo sapien
tcgagacaactcaccttactgtgct

SEQ ID NO: 3337965 - DNA, 25 bp, Homo sapien
gaattgctgaattctttggtcccca

SEQ ID NO: 3337966 - DNA, 25 bp, Homo sapien
cataaatgcgatggttggagccatc

SEQ ID NO: 3337967 - DNA, 25 bp, Homo sapien
tggagccatcaacctcttaacagga

SEQ ID NO: 3337968 - DNA, 25 bp, Homo sapien
tccccaattccgagagtgcctgagt

SEQ ID NO: 3337969 - DNA, 25 bp, Homo sapien
cacaggttagcagtaagacactcat

SEQ ID NO: 3337970 - DNA, 25 bp, Homo sapien
ggttagcagtaagacactcattctg

SEQ ID NO: 3337971 - DNA, 25 bp, Homo sapien
ccacacaggttagcagtaagacact

SEQ ID NO: 3337972 - DNA, 25 bp, Homo sapien
tagcagtaagacactcattctgtat

SEQ ID NO: 3337973 - DNA, 25 bp, Homo sapien
tataaagggtaagaggtgagagtct

SEQ ID NO: 3337974 - DNA, 25 bp, Homo sapien
aatgtctggaagtgtttcccttatg

SEQ ID NO: 3337975 - DNA, 25 bp, Homo sapien
aagaggtgagagtctagttccattc

SEQ ID NO: 3337976 - DNA, 25 bp, Homo sapien
cggtttgggtgactacagcattgta

SEQ ID NO: 3337977 - DNA, 25 bp, Homo sapien
tcagtcctggcatgtgagcgcagag

SEQ ID NO: 3337978 - DNA, 25 bp, Homo sapien
tgttcagatagccaaggagcatgtc

SEQ ID NO: 3337979 - DNA, 25 bp, Homo sapien
gaagggcattcaccagtttggctgg

SEQ ID NO: 3337980 - DNA, 25 bp, Homo sapien
gatatgagggcttctcccgcttggg

SEQ ID NO: 3337981 - DNA, 25 bp, Homo sapien
tcttgctttgtcgcctgggcttgtc

SEQ ID NO: 3337982 - DNA, 25 bp, Homo sapien
tgctttgtcgcctgggcttgtcttg

SEQ ID NO: 3337983 - DNA, 25 bp, Homo sapien
ccagctaattatttagttaagaaat

SEQ ID NO: 3337984 - DNA, 25 bp, Homo sapien
cagctaattatttagttaagaaatg

SEQ ID NO: 3337985 - DNA, 25 bp, Homo sapien
tgtcttctcagcactaaaagatgtt

SEQ ID NO: 3337986 - DNA, 25 bp, Homo sapien
aacggctgtatgcttggcttcctag

SEQ ID NO: 3337987 - DNA, 25 bp, Homo sapien
ctaatcagcttacttcagaaaatgc

SEQ ID NO: 3337988 - DNA, 25 bp, Homo sapien
ggctgccttcacagcatcaacctat

SEQ ID NO: 3337989 - DNA, 25 bp, Homo sapien
actgatttgattggctggatataga

SEQ ID NO: 3337990 - DNA, 25 bp, Homo sapien
ctgatttgattggctggatatagag

SEQ ID NO: 3337991 - DNA, 25 bp, Homo sapien
gagtgctcattgtgggtcatggcca

SEQ ID NO: 3337992 - DNA, 25 bp, Homo sapien
gtccccatgtagatctgagtgctca

SEQ ID NO: 3337993 - DNA, 25 bp, Homo sapien
ctgagtgctcattgtgggtcatggc

SEQ ID NO: 3337994 - DNA, 25 bp, Homo sapien
agccagagtccccatgtagatctga

SEQ ID NO: 3337995 - DNA, 25 bp, Homo sapien
tgctaagaaatccttggtgtattga

SEQ ID NO: 3337996 - DNA, 25 bp, Homo sapien
aatccttggtgtattgattcttcat

SEQ ID NO: 3337997 - DNA, 25 bp, Homo sapien
taagaaatccttggtgtattgattc

SEQ ID NO: 3337998 - DNA, 25 bp, Homo sapien
ccctgctaagaaatccttggtgtat

SEQ ID NO: 3337999 - DNA, 25 bp, Homo sapien
aattgggtgcttaagggaggggatg

SEQ ID NO: 3338000 - DNA, 25 bp, Homo sapien
aaatgtcactctacatagttttgaa

SEQ ID NO: 3338001 - DNA, 25 bp, Homo sapien
gcaaatgtcactctacatagttttg

SEQ ID NO: 3338002 - DNA, 25 bp, Homo sapien
tctgtggtttgatgttctgttgctt

SEQ ID NO: 3338003 - DNA, 25 bp, Homo sapien
gctggatatcctttggggcgatctg

SEQ ID NO: 3338004 - DNA, 25 bp, Homo sapien
ttaggacttagcaaatctggaaaca

SEQ ID NO: 3338005 - DNA, 25 bp, Homo sapien
aaacagctggatatcctttggggcg

SEQ ID NO: 3338006 - DNA, 25 bp, Homo sapien
gcgatctggaacagcttgtcattct

SEQ ID NO: 3338007 - DNA, 25 bp, Homo sapien
tcgtttttcacatgatggcaaaagt

SEQ ID NO: 3338008 - DNA, 25 bp, Homo sapien
gatggcaaaagtaaatggggaagcc

SEQ ID NO: 3338009 - DNA, 25 bp, Homo sapien
acatcgtttttcacatgatggcaaa

SEQ ID NO: 3338010 - DNA, 25 bp, Homo sapien
tgatggcaaaagtaaatggggaagc

SEQ ID NO: 3338011 - DNA, 25 bp, Homo sapien
aatgcacccattctaaataggataa

SEQ ID NO: 3338012 - DNA, 25 bp, Homo sapien
aggctgtctgttatctagttccaaa

SEQ ID NO: 3338013 - DNA, 25 bp, Homo sapien
tgctttcacaggctgtctgttatct

SEQ ID NO: 3338014 - DNA, 25 bp, Homo sapien
tataggcaatgggtaaatgcaccca

SEQ ID NO: 3338015 - DNA, 25 bp, Homo sapien
tgatcttacccaggaggactgtccc

SEQ ID NO: 3338016 - DNA, 25 bp, Homo sapien
taagtagccactaggaccacggctg

SEQ ID NO: 3338017 - DNA, 25 bp, Homo sapien
tcagcagtctgttcgggcggcattt

SEQ ID NO: 3338018 - DNA, 25 bp, Homo sapien
tccatttggtgggtaaggacctcag

SEQ ID NO: 3338019 - DNA, 25 bp, Homo sapien
gccgtcaggcacacaattacaccat

SEQ ID NO: 3338020 - DNA, 25 bp, Homo sapien
tagtagccagtcaacgtaagccaag

SEQ ID NO: 3338021 - DNA, 25 bp, Homo sapien
gactcctagagtcccttagtagcca

SEQ ID NO: 3338022 - DNA, 25 bp, Homo sapien
caagttagtagctacagccgtcagg

SEQ ID NO: 3338023 - DNA, 25 bp, Homo sapien
tgcgctctgaggatacatcgtaaac

SEQ ID NO: 3338024 - DNA, 25 bp, Homo sapien
tctggtgcagtgaaaaacctactgg

SEQ ID NO: 3338025 - DNA, 25 bp, Homo sapien
gaataatatggaggcagtcaagcaa

SEQ ID NO: 3338026 - DNA, 25 bp, Homo sapien
tcagagagcatgctaacaagtggtg

SEQ ID NO: 3338027 - DNA, 25 bp, Homo sapien
tgcaatcacttctgaaccttcagtt

SEQ ID NO: 3338028 - DNA, 25 bp, Homo sapien
tcacttctgaaccttcagttttatc

SEQ ID NO: 3338029 - DNA, 25 bp, Homo sapien
cttctgaaccttcagttttatccag

SEQ ID NO: 3338030 - DNA, 25 bp, Homo sapien
gagcaaattatgttaccaataacac

SEQ ID NO: 3338031 - DNA, 25 bp, Homo sapien
ggggcataagcaaaggaatagcagg

SEQ ID NO: 3338032 - DNA, 25 bp, Homo sapien
gggcataagcaaaggaatagcaggt

SEQ ID NO: 3338033 - DNA, 25 bp, Homo sapien
tagggtaaatactataagtagcatc

SEQ ID NO: 3338034 - DNA, 25 bp, Homo sapien
gggtaaatactataagtagcatctt

SEQ ID NO: 3338035 - DNA, 25 bp, Homo sapien
taatagggtaaatactataagtagc

SEQ ID NO: 3338036 - DNA, 25 bp, Homo sapien
ggtaaatactataagtagcatctta

SEQ ID NO: 3338037 - DNA, 25 bp, Homo sapien
tcaaaaataacacgagccatcgccc

SEQ ID NO: 3338038 - DNA, 25 bp, Homo sapien
aacaacaacaagcatcacctcaaaa

SEQ ID NO: 3338039 - DNA, 25 bp, Homo sapien
catcgcccaccaattaatgagtgtt

SEQ ID NO: 3338040 - DNA, 25 bp, Homo sapien
catcgaatacagtaagaaattaaga

SEQ ID NO: 3338041 - DNA, 25 bp, Homo sapien
gcattgaacagatcatagaatcata

SEQ ID NO: 3338042 - DNA, 25 bp, Homo sapien
actgtagataagaactcagtggacg

SEQ ID NO: 3338043 - DNA, 25 bp, Homo sapien
agtacaattaatatactatcatgtg

SEQ ID NO: 3338044 - DNA, 25 bp, Homo sapien
tcagtggacgttctcctcagatatg

SEQ ID NO: 3338045 - DNA, 25 bp, Homo sapien
tccaaataagtaagacgtgcaaaga

SEQ ID NO: 3338046 - DNA, 25 bp, Homo sapien
gggaatgtgtcagtcctaccattag

SEQ ID NO: 3338047 - DNA, 25 bp, Homo sapien
tctgcttcagggaaacgatggacaa

SEQ ID NO: 3338048 - DNA, 25 bp, Homo sapien
cattttggaatcgaactgttctgtg

SEQ ID NO: 3338049 - DNA, 25 bp, Homo sapien
acactatgagctggatatgtgtccc

SEQ ID NO: 3338050 - DNA, 25 bp, Homo sapien
aacactatgagctggatatgtgtcc

SEQ ID NO: 3338051 - DNA, 25 bp, Homo sapien
taacactatgagctggatatgtgtc

SEQ ID NO: 3338052 - DNA, 25 bp, Homo sapien
taaaactaagaacatatcattttcc

SEQ ID NO: 3338053 - DNA, 25 bp, Homo sapien
tgtctacttagctcgcatttctcag

SEQ ID NO: 3338054 - DNA, 25 bp, Homo sapien
tgtctacttagtaggctgtgtctac

SEQ ID NO: 3338055 - DNA, 25 bp, Homo sapien
gcagtgacaggtcccctaaaatagg

SEQ ID NO: 3338056 - DNA, 25 bp, Homo sapien
cacaaaaacgatttcggagccacaa

SEQ ID NO: 3338057 - DNA, 25 bp, Homo sapien
caccagtggtacttgatgctgatat

SEQ ID NO: 3338058 - DNA, 25 bp, Homo sapien
tgcattgccacaccagtggtacttg

SEQ ID NO: 3338059 - DNA, 25 bp, Homo sapien
ttgccacaccagtggtacttgatgc

SEQ ID NO: 3338060 - DNA, 25 bp, Homo sapien
cattgccacaccagtggtacttgat

SEQ ID NO: 3338061 - DNA, 25 bp, Homo sapien
atgagaagatttttatgactgcaaa

SEQ ID NO: 3338062 - DNA, 25 bp, Homo sapien
atgggatcatggtgtttaaatatat

SEQ ID NO: 3338063 - DNA, 25 bp, Homo sapien
tatgagaagatttttatgactgcaa

SEQ ID NO: 3338064 - DNA, 25 bp, Homo sapien
tgagaagatttttatgactgcaaag

SEQ ID NO: 3338065 - DNA, 25 bp, Homo sapien
tggagaagccctatagcctgaggct

SEQ ID NO: 3338066 - DNA, 25 bp, Homo sapien
gagctttgcagtagagggtcccatc

SEQ ID NO: 3338067 - DNA, 25 bp, Homo sapien
caagagtggccaagataagcagtcc

SEQ ID NO: 3338068 - DNA, 25 bp, Homo sapien
cactgtcagtagtatggaggataac

SEQ ID NO: 3338069 - DNA, 25 bp, Homo sapien
cacagttcccattgtaccatggagg

SEQ ID NO: 3338070 - DNA, 25 bp, Homo sapien
gataacgactggaaatagccagcct

SEQ ID NO: 3338071 - DNA, 25 bp, Homo sapien
taacatcggatatgttccagaacat

SEQ ID NO: 3338072 - DNA, 25 bp, Homo sapien
ggagagagcgtggacttctgccaca

SEQ ID NO: 3338073 - DNA, 25 bp, Homo sapien
aaagcgtggcctattaactggtgca

SEQ ID NO: 3338074 - DNA, 25 bp, Homo sapien
tggcagtccccatacaactaattgg

SEQ ID NO: 3338075 - DNA, 25 bp, Homo sapien
tgcagttagtgtgctaggtgccaaa

SEQ ID NO: 3338076 - DNA, 25 bp, Homo sapien
gagcctactgttttggatagcctat

SEQ ID NO: 3338077 - DNA, 25 bp, Homo sapien
gtctctgaaattatctgagcctcag

SEQ ID NO: 3338078 - DNA, 25 bp, Homo sapien
gtcttctaagatgcttcaccattca

SEQ ID NO: 3338079 - DNA, 25 bp, Homo sapien
gagtagtggaacagatgtctctctt

SEQ ID NO: 3338080 - DNA, 25 bp, Homo sapien
tctggcctctaagatgagagtagtg

SEQ ID NO: 3338081 - DNA, 25 bp, Homo sapien
ggaataaccatattaatcttaggca

SEQ ID NO: 3338082 - DNA, 25 bp, Homo sapien
taagtaattatggaccattttagcc

SEQ ID NO: 3338083 - DNA, 25 bp, Homo sapien
gagcaaagacattacaaacagtgaa

SEQ ID NO: 3338084 - DNA, 25 bp, Homo sapien
tgattttttgctaacgaatcaatga

SEQ ID NO: 3338085 - DNA, 25 bp, Homo sapien
gcattaaatgctaccgattgtacac

SEQ ID NO: 3338086 - DNA, 25 bp, Homo sapien
catggcacaaagtgagtgctatatc

SEQ ID NO: 3338087 - DNA, 25 bp, Homo sapien
tattcagaacctgcctatgtacgga

SEQ ID NO: 3338088 - DNA, 25 bp, Homo sapien
tatgtacggaacctaacctgctgta

SEQ ID NO: 3338089 - DNA, 25 bp, Homo sapien
tgaggcccacgggtgttaaatgatt

SEQ ID NO: 3338090 - DNA, 25 bp, Homo sapien
tctactcggcgctttattgaaaagg

SEQ ID NO: 3338091 - DNA, 25 bp, Homo sapien
gatactgactgcctactatgtggct

SEQ ID NO: 3338092 - DNA, 25 bp, Homo sapien
tagatttggcaactagtccagctca

SEQ ID NO: 3338093 - DNA, 25 bp, Homo sapien
atacaaagattatttttccatacat

SEQ ID NO: 3338094 - DNA, 25 bp, Homo sapien
taatacaaagattatttttccatac

SEQ ID NO: 3338095 - DNA, 25 bp, Homo sapien
gacaatagtaatacaaagattattt

SEQ ID NO: 3338096 - DNA, 25 bp, Homo sapien
ctgacaatagtaatacaaagattat

SEQ ID NO: 3338097 - DNA, 25 bp, Homo sapien
tggctcctgaagttagtgcaaaaaa

SEQ ID NO: 3338098 - DNA, 25 bp, Homo sapien
tagtgcaaaaaaactaccaaagaca

SEQ ID NO: 3338099 - DNA, 25 bp, Homo sapien
cgagctggctcctgaagttagtgca

SEQ ID NO: 3338100 - DNA, 25 bp, Homo sapien
cctgagatcacgagctggctcctga

SEQ ID NO: 3338101 - DNA, 25 bp, Homo sapien
ttatatatcctgcgggtaacctatg

SEQ ID NO: 3338102 - DNA, 25 bp, Homo sapien
tatatcctgcgggtaacctatgtca

SEQ ID NO: 3338103 - DNA, 25 bp, Homo sapien
taacctatgtcatatcctagcttca

SEQ ID NO: 3338104 - DNA, 25 bp, Homo sapien
cctgcgggtaacctatgtcatatcc

SEQ ID NO: 3338105 - DNA, 25 bp, Homo sapien
ctaaacctaaattcagcccaactgg

SEQ ID NO: 3338106 - DNA, 25 bp, Homo sapien
tctctaggttttcaagggtcacagc

SEQ ID NO: 3338107 - DNA, 25 bp, Homo sapien
tatttgcacacaggcttaagcagga

SEQ ID NO: 3338108 - DNA, 25 bp, Homo sapien
aataaatggtcacaaggactcttcc

SEQ ID NO: 3338109 - DNA, 25 bp, Homo sapien
cctggaatttttggaccatgctgga

SEQ ID NO: 3338110 - DNA, 25 bp, Homo sapien
ctggaatttttggaccatgctggat

SEQ ID NO: 3338111 - DNA, 25 bp, Homo sapien
tcctggaatttttggaccatgctgg

SEQ ID NO: 3338112 - DNA, 25 bp, Homo sapien
tcactctgaccattgcaacacttac

SEQ ID NO: 3338113 - DNA, 25 bp, Homo sapien
tgtagccctttttccacaatcactc

SEQ ID NO: 3338114 - DNA, 25 bp, Homo sapien
cactctgaccattgcaacacttact

SEQ ID NO: 3338115 - DNA, 25 bp, Homo sapien
tagtcaccctgtagccctttttcca

SEQ ID NO: 3338116 - DNA, 25 bp, Homo sapien
tagcagtaagacactcattctgtat

SEQ ID NO: 3338117 - DNA, 25 bp, Homo sapien
ttagcagtaagacactcattctgta

SEQ ID NO: 3338118 - DNA, 25 bp, Homo sapien
tgcacacagagccacttctcctccc

SEQ ID NO: 3338119 - DNA, 25 bp, Homo sapien
tggatcttgccacttccttgtttgc

SEQ ID NO: 3338120 - DNA, 25 bp, Homo sapien
ttctcctccctggatcttgccactt

SEQ ID NO: 3338121 - DNA, 25 bp, Homo sapien
ggtgtggtctcaatttctgagctgc

SEQ ID NO: 3338122 - DNA, 25 bp, Homo sapien
cagcagctactcaccttctcatttc

SEQ ID NO: 3338123 - DNA, 25 bp, Homo sapien
aagcacacagcagctactcaccttc

SEQ ID NO: 3338124 - DNA, 25 bp, Homo sapien
agcacacagcagctactcaccttct

SEQ ID NO: 3338125 - DNA, 25 bp, Homo sapien
acagcagctactcaccttctcattt

SEQ ID NO: 3338126 - DNA, 25 bp, Homo sapien
caccagagtggtttatcttcggcat

SEQ ID NO: 3338127 - DNA, 25 bp, Homo sapien
agagcaccagagtggtttatcttcg

SEQ ID NO: 3338128 - DNA, 25 bp, Homo sapien
gcaccagagtggtttatcttcggca

SEQ ID NO: 3338129 - DNA, 25 bp, Homo sapien
gagcaccagagtggtttatcttcgg

SEQ ID NO: 3338130 - DNA, 25 bp, Homo sapien
tgccttgcttgaccagcctctattt

SEQ ID NO: 3338131 - DNA, 25 bp, Homo sapien
cctaggcaaggagggtataatggac

SEQ ID NO: 3338132 - DNA, 25 bp, Homo sapien
gtatacctcttacacgtacatgtgg

SEQ ID NO: 3338133 - DNA, 25 bp, Homo sapien
gatagtagattatgaggacctaggc

SEQ ID NO: 3338134 - DNA, 25 bp, Homo sapien
gaaagtgatattgtttccactgagg

SEQ ID NO: 3338135 - DNA, 25 bp, Homo sapien
gcctttgtacgtgcaggacctgtga

SEQ ID NO: 3338136 - DNA, 25 bp, Homo sapien
cagcaccggacttctatgaaagtta

SEQ ID NO: 3338137 - DNA, 25 bp, Homo sapien
cctatgtggagagtaccagtaggtg

SEQ ID NO: 3338138 - DNA, 25 bp, Homo sapien
gccagagtccccatgtagatctgag

SEQ ID NO: 3338139 - DNA, 25 bp, Homo sapien
agagtccccatgtagatctgagtgc

SEQ ID NO: 3338140 - DNA, 25 bp, Homo sapien
ttagccagagtccccatgtagatct

SEQ ID NO: 3338141 - DNA, 25 bp, Homo sapien
cagagtccccatgtagatctgagtg

SEQ ID NO: 3338142 - DNA, 25 bp, Homo sapien
tttcttgtatctcaaatatcctctg

SEQ ID NO: 3338143 - DNA, 25 bp, Homo sapien
ctttcttgtatctcaaatatcctct

SEQ ID NO: 3338144 - DNA, 25 bp, Homo sapien
ttcttgtatctcaaatatcctctgc

SEQ ID NO: 3338145 - DNA, 25 bp, Homo sapien
ctgttgctacgtgaaatactgttta

SEQ ID NO: 3338146 - DNA, 25 bp, Homo sapien
gattcatgagcgtgtgtcaaaacgt

SEQ ID NO: 3338147 - DNA, 25 bp, Homo sapien
gtcaaaacgtgattacatactctct

SEQ ID NO: 3338148 - DNA, 25 bp, Homo sapien
catcatgtggttttagaaccaaaac

SEQ ID NO: 3338149 - DNA, 25 bp, Homo sapien
taagaaatccttggtgtattgattc

SEQ ID NO: 3338150 - DNA, 25 bp, Homo sapien
aatccttggtgtattgattcttcat

SEQ ID NO: 3338151 - DNA, 25 bp, Homo sapien
tgctaagaaatccttggtgtattga

SEQ ID NO: 3338152 - DNA, 25 bp, Homo sapien
ccctgctaagaaatccttggtgtat

SEQ ID NO: 3338153 - DNA, 25 bp, Homo sapien
ggaacttaggatgattgaaatctgt

SEQ ID NO: 3338154 - DNA, 25 bp, Homo sapien
aaacaatgttggatttggacaagac

SEQ ID NO: 3338155 - DNA, 25 bp, Homo sapien
tcatcttaaactagtacttaggtaa

SEQ ID NO: 3338156 - DNA, 25 bp, Homo sapien
tcttcacttgagaaaagtggggaca

SEQ ID NO: 3338157 - DNA, 25 bp, Homo sapien
tgaaaagtggtaggcagagagactc

SEQ ID NO: 3338158 - DNA, 25 bp, Homo sapien
aagatgagttgacagctactgggca

SEQ ID NO: 3338159 - DNA, 25 bp, Homo sapien
gagagactcagacctatgactgctg

SEQ ID NO: 3338160 - DNA, 25 bp, Homo sapien
taactagtatggtgcattgctgccc

SEQ ID NO: 3338161 - DNA, 25 bp, Homo sapien
ggccagggtagtaagcagattcatt

SEQ ID NO: 3338162 - DNA, 25 bp, Homo sapien
tgagactcaccggaaggagaaaggc

SEQ ID NO: 3338163 - DNA, 25 bp, Homo sapien
cattaatttggctgaggccagggta

SEQ ID NO: 3338164 - DNA, 25 bp, Homo sapien
tgcttcaggcagatacaataggata

SEQ ID NO: 3338165 - DNA, 25 bp, Homo sapien
gaagtgtgcgttgaatatatgctca

SEQ ID NO: 3338166 - DNA, 25 bp, Homo sapien
gaggaagtgtgcgttgaatatatgc

SEQ ID NO: 3338167 - DNA, 25 bp, Homo sapien
ggcagagaggaagtgtgcgttgaat

SEQ ID NO: 3338168 - DNA, 25 bp, Homo sapien
cagagaggaagtgtgcgttgaatat

SEQ ID NO: 3338169 - DNA, 25 bp, Homo sapien
caggtgcagccagtttgcataaaca

SEQ ID NO: 3338170 - DNA, 25 bp, Homo sapien
aggtgcagccagtttgcataaacaa

SEQ ID NO: 3338171 - DNA, 25 bp, Homo sapien
ggtgcagccagtttgcataaacaag

SEQ ID NO: 3338172 - DNA, 25 bp, Homo sapien
ctaggggtgttgccaagttcttttg

SEQ ID NO: 3338173 - DNA, 25 bp, Homo sapien
tgaccatgagctaagactccacttc

SEQ ID NO: 3338174 - DNA, 25 bp, Homo sapien
catgagctaagactccacttcagcc

SEQ ID NO: 3338175 - DNA, 25 bp, Homo sapien
gaccatgagctaagactccacttca

SEQ ID NO: 3338176 - DNA, 25 bp, Homo sapien
tcagaggaataaaccctcctagagc

SEQ ID NO: 3338177 - DNA, 25 bp, Homo sapien
cagaggaataaaccctcctagagct

SEQ ID NO: 3338178 - DNA, 25 bp, Homo sapien
ctcagaggaataaaccctcctagag

SEQ ID NO: 3338179 - DNA, 25 bp, Homo sapien
aagaggatcgttccaataataccag

SEQ ID NO: 3338180 - DNA, 25 bp, Homo sapien
aaattaagaggatcgttccaataat

SEQ ID NO: 3338181 - DNA, 25 bp, Homo sapien
gaggatcgttccaataataccagcc

SEQ ID NO: 3338182 - DNA, 25 bp, Homo sapien
ttaagaggatcgttccaataatacc

SEQ ID NO: 3338183 - DNA, 25 bp, Homo sapien
cacacacaaaataatgagtattatc

SEQ ID NO: 3338184 - DNA, 25 bp, Homo sapien
acacacaaaataatgagtattatca

SEQ ID NO: 3338185 - DNA, 25 bp, Homo sapien
tccagacccagcgttcttcactagt

SEQ ID NO: 3338186 - DNA, 25 bp, Homo sapien
cactagtgtaactgtagataagaac

SEQ ID NO: 3338187 - DNA, 25 bp, Homo sapien
gttgatgacagaactaagacctgag

SEQ ID NO: 3338188 - DNA, 25 bp, Homo sapien
actaagacctgaggcttctgattcc

SEQ ID NO: 3338189 - DNA, 25 bp, Homo sapien
tcaggcaatggatccgatcctccca

SEQ ID NO: 3338190 - DNA, 25 bp, Homo sapien
ggctcaggcaatggatccgatcctc

SEQ ID NO: 3338191 - DNA, 25 bp, Homo sapien
ccaggctcaggcaatggatccgatc

SEQ ID NO: 3338192 - DNA, 25 bp, Homo sapien
caggctcaggcaatggatccgatcc

SEQ ID NO: 3338193 - DNA, 25 bp, Homo sapien
acgatggacaagttgtcccgtttct

SEQ ID NO: 3338194 - DNA, 25 bp, Homo sapien
cgatggacaagttgtcccgtttctc

SEQ ID NO: 3338195 - DNA, 25 bp, Homo sapien
gtcacagttaatagttgtgggtgct

SEQ ID NO: 3338196 - DNA, 25 bp, Homo sapien
ttgaggattcaggtatattttttca

SEQ ID NO: 3338197 - DNA, 25 bp, Homo sapien
tagttgtgggtgctatatgggcttt

SEQ ID NO: 3338198 - DNA, 25 bp, Homo sapien
tgattgaggattcaggtatattttt

SEQ ID NO: 3338199 - DNA, 25 bp, Homo sapien
tcaatcacaacaatgactccagaga

SEQ ID NO: 3338200 - DNA, 25 bp, Homo sapien
cattagcagtatgagctggacatgt

SEQ ID NO: 3338201 - DNA, 25 bp, Homo sapien
gaaacttcattagcagtatgagctg

SEQ ID NO: 3338202 - DNA, 25 bp, Homo sapien
gaaacagttgtaacagaaatttctg

SEQ ID NO: 3338203 - DNA, 25 bp, Homo sapien
ctggacatgtgtcccgtttgtgctt

SEQ ID NO: 3338204 - DNA, 25 bp, Homo sapien
aatgaggtgactgcgtggacataca

SEQ ID NO: 3338205 - DNA, 25 bp, Homo sapien
tgaggtgactgcgtggacatacagc

SEQ ID NO: 3338206 - DNA, 25 bp, Homo sapien
gtgactgcgtggacatacagcgtat

SEQ ID NO: 3338207 - DNA, 25 bp, Homo sapien
aggtgactgcgtggacatacagcgt

SEQ ID NO: 3338208 - DNA, 25 bp, Homo sapien
gctccagaatttcttcttctcccct

SEQ ID NO: 3338209 - DNA, 25 bp, Homo sapien
cagaatttcttcttctcccctgaaa

SEQ ID NO: 3338210 - DNA, 25 bp, Homo sapien
tccagaatttcttcttctcccctga

SEQ ID NO: 3338211 - DNA, 25 bp, Homo sapien
ctcccagcagcagctccagaatttc

SEQ ID NO: 3338212 - DNA, 25 bp, Homo sapien
tgccaccagattactcttatctcag

SEQ ID NO: 3338213 - DNA, 25 bp, Homo sapien
gactgccaccagattactcttatct

SEQ ID NO: 3338214 - DNA, 25 bp, Homo sapien
agagactgccaccagattactctta

SEQ ID NO: 3338215 - DNA, 25 bp, Homo sapien
accagattactcttatctcagcacc

SEQ ID NO: 3338216 - DNA, 25 bp, Homo sapien
agtgtgcattgccacctcagtggta

SEQ ID NO: 3338217 - DNA, 25 bp, Homo sapien
cttaatgctgatatgctcacaattt

SEQ ID NO: 3338218 - DNA, 25 bp, Homo sapien
gaagaggttgaagtgtgcattgcca

SEQ ID NO: 3338219 - DNA, 25 bp, Homo sapien
ctcagtggtacttaatgctgatatg

SEQ ID NO: 3338220 - DNA, 25 bp, Homo sapien
cagtccctgagctaagcgctttagt

SEQ ID NO: 3338221 - DNA, 25 bp, Homo sapien
tgactgagcagaccataaagcatat

SEQ ID NO: 3338222 - DNA, 25 bp, Homo sapien
taatctttagagaattgctgcgtgg

SEQ ID NO: 3338223 - DNA, 25 bp, Homo sapien
gaagcccctccagaatttttgtaca

SEQ ID NO: 3338224 - DNA, 25 bp, Homo sapien
gaatggcacccaagtgcagtggagt

SEQ ID NO: 3338225 - DNA, 25 bp, Homo sapien
caacttggcccctcagctgaatgct

SEQ ID NO: 3338226 - DNA, 25 bp, Homo sapien
tgctcatctcttggagacattcaaa

SEQ ID NO: 3338227 - DNA, 25 bp, Homo sapien
ccctcagctgaatgctcaaagtttc

SEQ ID NO: 3338228 - DNA, 25 bp, Homo sapien
ctaacctggaatgctattagaaaca

SEQ ID NO: 3338229 - DNA, 25 bp, Homo sapien
tctaacctggaatgctattagaaac

SEQ ID NO: 3338230 - DNA, 25 bp, Homo sapien
taacctggaatgctattagaaacaa

SEQ ID NO: 3338231 - DNA, 25 bp, Homo sapien
tctatctcgaaggtgttgtggccta

SEQ ID NO: 3338232 - DNA, 25 bp, Homo sapien
tggctctgtactatccagcttctgg

SEQ ID NO: 3338233 - DNA, 25 bp, Homo sapien
tcccaaaccattgctgagacagcag

SEQ ID NO: 3338234 - DNA, 25 bp, Homo sapien
ggaagcctgaactttttatcctggc

SEQ ID NO: 3338235 - DNA, 25 bp, Homo sapien
accatattgcccatactagcctcaa

SEQ ID NO: 3338236 - DNA, 25 bp, Homo sapien
gagtagtggaacagatgtctctctt

SEQ ID NO: 3338237 - DNA, 25 bp, Homo sapien
gtctctgaaattatctgagcctcag

SEQ ID NO: 3338238 - DNA, 25 bp, Homo sapien
gttttctggcctctaagatgagagt

SEQ ID NO: 3338239 - DNA, 25 bp, Homo sapien
tcaccttgtttatagcctgagggta

SEQ ID NO: 3338240 - DNA, 25 bp, Homo sapien
ggtgacctgcagtggcaaatccaca

SEQ ID NO: 3338241 - DNA, 25 bp, Homo sapien
tctggtcactcctgcctactaaaga

SEQ ID NO: 3338242 - DNA, 25 bp, Homo sapien
taacatagcattgtagggtgacctg

SEQ ID NO: 3338243 - DNA, 25 bp, Homo sapien
attcttaagtaattatggaccatta

SEQ ID NO: 3338244 - DNA, 25 bp, Homo sapien
ttaagtaattatggaccattatagc

SEQ ID NO: 3338245 - DNA, 25 bp, Homo sapien
agtaattatggaccattatagccca

SEQ ID NO: 3338246 - DNA, 25 bp, Homo sapien
tcttaagtaattatggaccattata

SEQ ID NO: 3338247 - DNA, 25 bp, Homo sapien
tatatccatggccaattaactttca

SEQ ID NO: 3338248 - DNA, 25 bp, Homo sapien
tcttcggatagaattgagactccag

SEQ ID NO: 3338249 - DNA, 25 bp, Homo sapien
gaacacagtttggtgaatcatactt

SEQ ID NO: 3338250 - DNA, 25 bp, Homo sapien
gcaagaatggaaaacctaatcctaa

SEQ ID NO: 3338251 - DNA, 25 bp, Homo sapien
taatgatctgtctatgcggagcact

SEQ ID NO: 3338252 - DNA, 25 bp, Homo sapien
cagctagcaaggctctcttcttgga

SEQ ID NO: 3338253 - DNA, 25 bp, Homo sapien
ttctcagactgatgtacctgcaggg

SEQ ID NO: 3338254 - DNA, 25 bp, Homo sapien
gagcactcactgtgtctaaccagat

SEQ ID NO: 3338255 - DNA, 25 bp, Homo sapien
ccagaattttcagggttggctccat

SEQ ID NO: 3338256 - DNA, 25 bp, Homo sapien
cccagaattttcagggttggctcca

SEQ ID NO: 3338257 - DNA, 25 bp, Homo sapien
tgttccacgtttagcataaatgtca

SEQ ID NO: 3338258 - DNA, 25 bp, Homo sapien
tcagtgtctggttcacaatctgaca

SEQ ID NO: 3338259 - DNA, 25 bp, Homo sapien
caatctgacatgtaatgactgaatc

SEQ ID NO: 3338260 - DNA, 25 bp, Homo sapien
tcttaagcagttttcggcattcatg

SEQ ID NO: 3338261 - DNA, 25 bp, Homo sapien
taatacaaagattatttttccatac

SEQ ID NO: 3338262 - DNA, 25 bp, Homo sapien
gacaatagtaatacaaagattattt

SEQ ID NO: 3338263 - DNA, 25 bp, Homo sapien
ctgacaatagtaatacaaagattat

SEQ ID NO: 3338264 - DNA, 25 bp, Homo sapien
atacaaagattatttttccatacat

SEQ ID NO: 3338265 - DNA, 25 bp, Homo sapien
tggttcctgaagttagtgcaaaaaa

SEQ ID NO: 3338266 - DNA, 25 bp, Homo sapien
tagtgcaaaaaaactaccaaagaca

SEQ ID NO: 3338267 - DNA, 25 bp, Homo sapien
gagctggttcctgaagttagtgcaa

SEQ ID NO: 3338268 - DNA, 25 bp, Homo sapien
cctgagatcatgagctggttcctga

SEQ ID NO: 3338269 - DNA, 25 bp, Homo sapien
tcagttgaggcaaatctgaacatca

SEQ ID NO: 3338270 - DNA, 25 bp, Homo sapien
gcaaatctgaacatcatatgggcac

SEQ ID NO: 3338271 - DNA, 25 bp, Homo sapien
tatgggcacaagctaagaagtgact

SEQ ID NO: 3338272 - DNA, 25 bp, Homo sapien
taagaagtgactgatggcgtccacc

SEQ ID NO: 3338273 - DNA, 25 bp, Homo sapien
tagcagtaagacactcattctgtat

SEQ ID NO: 3338274 - DNA, 25 bp, Homo sapien
ttagcagtaagacactcattctgta

SEQ ID NO: 3338275 - DNA, 25 bp, Homo sapien
gtctgttttatgctacggtagcaca

SEQ ID NO: 3338276 - DNA, 25 bp, Homo sapien
ctcatccaaagctaattccacgtat

SEQ ID NO: 3338277 - DNA, 25 bp, Homo sapien
gctaattccacgtatgtctgtttta

SEQ ID NO: 3338278 - DNA, 25 bp, Homo sapien
caaagctaattccacgtatgtctgt

SEQ ID NO: 3338279 - DNA, 25 bp, Homo sapien
gccagagtccccatgtagatctgag

SEQ ID NO: 3338280 - DNA, 25 bp, Homo sapien
cagagtccccatgtagatctgagtg

SEQ ID NO: 3338281 - DNA, 25 bp, Homo sapien
agagtccccatgtagatctgagtgc

SEQ ID NO: 3338282 - DNA, 25 bp, Homo sapien
ttagccagagtccccatgtagatct

SEQ ID NO: 3338283 - DNA, 25 bp, Homo sapien
ctttcttgtatctcaaatatcctct

SEQ ID NO: 3338284 - DNA, 25 bp, Homo sapien
tttcttgtatctcaaatatcctctg

SEQ ID NO: 3338285 - DNA, 25 bp, Homo sapien
ttcttgtatctcaaatatcctctgc

SEQ ID NO: 3338286 - DNA, 25 bp, Homo sapien
taagaaatccttggtgtattgattc

SEQ ID NO: 3338287 - DNA, 25 bp, Homo sapien
aatccttggtgtattgattcttcat

SEQ ID NO: 3338288 - DNA, 25 bp, Homo sapien
tgctaagaaatccttggtgtattga

SEQ ID NO: 3338289 - DNA, 25 bp, Homo sapien
ccctgctaagaaatccttggtgtat

SEQ ID NO: 3338290 - DNA, 25 bp, Homo sapien
tattgttgatgagaacttacttaaa

SEQ ID NO: 3338291 - DNA, 25 bp, Homo sapien
tagatgttcaaatgacaagatagca

SEQ ID NO: 3338292 - DNA, 25 bp, Homo sapien
tgctgagaacaatcacactgtatgt

SEQ ID NO: 3338293 - DNA, 25 bp, Homo sapien
gtctttgtgagaatgctatatgtaa

SEQ ID NO: 3338294 - DNA, 25 bp, Homo sapien
ttctgcgtggctgagaaggtttcag

SEQ ID NO: 3338295 - DNA, 25 bp, Homo sapien
aaaccacatcactatgcccctgacc

SEQ ID NO: 3338296 - DNA, 25 bp, Homo sapien
gccaaaccacatcactatgcccctg

SEQ ID NO: 3338297 - DNA, 25 bp, Homo sapien
attctgcgtggctgagaaggtttca

SEQ ID NO: 3338298 - DNA, 25 bp, Homo sapien
gctgattcgaatgtcacctctggaa

SEQ ID NO: 3338299 - DNA, 25 bp, Homo sapien
taacgccttatagagggaatgggct

SEQ ID NO: 3338300 - DNA, 25 bp, Homo sapien
gaaaagttcaaggaggtcaaagcag

SEQ ID NO: 3338301 - DNA, 25 bp, Homo sapien
tcagttacaaggcagatgtcagtgc

SEQ ID NO: 3338302 - DNA, 25 bp, Homo sapien
ggaaataaagtatcacaggaaggtc

SEQ ID NO: 3338303 - DNA, 25 bp, Homo sapien
ttaaaatattcacctgcatgtccgg

SEQ ID NO: 3338304 - DNA, 25 bp, Homo sapien
tctttcagtggaatgcaagcttcag

SEQ ID NO: 3338305 - DNA, 25 bp, Homo sapien
gcttcagtgagtgctccgacacagt

SEQ ID NO: 3338306 - DNA, 25 bp, Homo sapien
tctgagcataagctttattagtgtg

SEQ ID NO: 3338307 - DNA, 25 bp, Homo sapien
tattagtgtgaacaaaatatagtaa

SEQ ID NO: 3338308 - DNA, 25 bp, Homo sapien
gcctgttcagcaatgaaggaaatga

SEQ ID NO: 3338309 - DNA, 25 bp, Homo sapien
ttgcctgttcagcaatgaaggaaat

SEQ ID NO: 3338310 - DNA, 25 bp, Homo sapien
taaacaaacgtagatgaattcaact

SEQ ID NO: 3338311 - DNA, 25 bp, Homo sapien
gactcaaaagtttacaataggaaga

SEQ ID NO: 3338312 - DNA, 25 bp, Homo sapien
aatttattggagtgtccagtccaca

SEQ ID NO: 3338313 - DNA, 25 bp, Homo sapien
tccccatcattgagtcactggaact

SEQ ID NO: 3338314 - DNA, 25 bp, Homo sapien
tcacttgactgaagtcttatgtctt

SEQ ID NO: 3338315 - DNA, 25 bp, Homo sapien
cacatttggtttggtgaacagattc

SEQ ID NO: 3338316 - DNA, 25 bp, Homo sapien
cacttgactgaagtcttatgtcttc

SEQ ID NO: 3338317 - DNA, 25 bp, Homo sapien
ctttccacatttggtttggtgaaca

SEQ ID NO: 3338318 - DNA, 25 bp, Homo sapien
tacaagaccgaaatatgagacatag

SEQ ID NO: 3338319 - DNA, 25 bp, Homo sapien
aaacagccaaacttgtatagaggca

SEQ ID NO: 3338320 - DNA, 25 bp, Homo sapien
ttaaggcatgtgtctaagtctgtca

SEQ ID NO: 3338321 - DNA, 25 bp, Homo sapien
gagaagtctgcacaaaagcttatgg

SEQ ID NO: 3338322 - DNA, 25 bp, Homo sapien
taaaaggcaaaaggaactgcaaata

SEQ ID NO: 3338323 - DNA, 25 bp, Homo sapien
ttcctaaaaggcaaaaggaactgca

SEQ ID NO: 3338324 - DNA, 25 bp, Homo sapien
ctaaaaggcaaaaggaactgcaaat

SEQ ID NO: 3338325 - DNA, 25 bp, Homo sapien
tcctaaaaggcaaaaggaactgcaa

SEQ ID NO: 3338326 - DNA, 25 bp, Homo sapien
taaaggcacgtctgtgtcaggtgag

SEQ ID NO: 3338327 - DNA, 25 bp, Homo sapien
agaacttaaaggcacgtctgtgtca

SEQ ID NO: 3338328 - DNA, 25 bp, Homo sapien
aacttaaaggcacgtctgtgtcagg

SEQ ID NO: 3338329 - DNA, 25 bp, Homo sapien
cttaaaggcacgtctgtgtcaggtg

SEQ ID NO: 3338330 - DNA, 25 bp, Homo sapien
tctagtcttaagacagtaaaaagta

SEQ ID NO: 3338331 - DNA, 25 bp, Homo sapien
taaaatgcttcagcttaaaaatatt

SEQ ID NO: 3338332 - DNA, 25 bp, Homo sapien
tattaataacacaattttctagtct

SEQ ID NO: 3338333 - DNA, 25 bp, Homo sapien
cacaattttctagtcttaagacagt

SEQ ID NO: 3338334 - DNA, 25 bp, Homo sapien
tatatgcccatgtaagaagatgact

SEQ ID NO: 3338335 - DNA, 25 bp, Homo sapien
ggagaaatatcacctcaaacactga

SEQ ID NO: 3338336 - DNA, 25 bp, Homo sapien
cattgacgaagagagaagacaaccc

SEQ ID NO: 3338337 - DNA, 25 bp, Homo sapien
cacacaagagtaggcattttcagtt

SEQ ID NO: 3338338 - DNA, 25 bp, Homo sapien
ttaagaggatcgttccaataacacc

SEQ ID NO: 3338339 - DNA, 25 bp, Homo sapien
aagaggatcgttccaataacaccag

SEQ ID NO: 3338340 - DNA, 25 bp, Homo sapien
aattaagaggatcgttccaataaca

SEQ ID NO: 3338341 - DNA, 25 bp, Homo sapien
gaggatcgttccaataacaccagcc

SEQ ID NO: 3338342 - DNA, 25 bp, Homo sapien
accccaaaaataatgagtgttatct

SEQ ID NO: 3338343 - DNA, 25 bp, Homo sapien
aatgatgggcaagttgtaccctttc

SEQ ID NO: 3338344 - DNA, 25 bp, Homo sapien
agaaatgatgggcaagttgtaccct

SEQ ID NO: 3338345 - DNA, 25 bp, Homo sapien
cagagaaatgatgggcaagttgtac

SEQ ID NO: 3338346 - DNA, 25 bp, Homo sapien
ggttcagagaaatgatgggcaagtt

SEQ ID NO: 3338347 - DNA, 25 bp, Homo sapien
gactccagagcaactatttaaaact

SEQ ID NO: 3338348 - DNA, 25 bp, Homo sapien
gaactgtcatgagttacagctcgtg

SEQ ID NO: 3338349 - DNA, 25 bp, Homo sapien
cagctcgtgtaaatagagttcaatc

SEQ ID NO: 3338350 - DNA, 25 bp, Homo sapien
ttcaatcacaacaatgactccagag

SEQ ID NO: 3338351 - DNA, 25 bp, Homo sapien
acttcatgagctctaggagtggctg

SEQ ID NO: 3338352 - DNA, 25 bp, Homo sapien
taggagtggctgcatatgtgtcccg

SEQ ID NO: 3338353 - DNA, 25 bp, Homo sapien
tgaaacttcatgagctctaggagtg

SEQ ID NO: 3338354 - DNA, 25 bp, Homo sapien
gagtggctgcatatgtgtcccgttt

SEQ ID NO: 3338355 - DNA, 25 bp, Homo sapien
cacaagaatgaggtgactgcgtgga

SEQ ID NO: 3338356 - DNA, 25 bp, Homo sapien
catataagagaagttgagaaagggc

SEQ ID NO: 3338357 - DNA, 25 bp, Homo sapien
ctgcatataagagaagttgagaaag

SEQ ID NO: 3338358 - DNA, 25 bp, Homo sapien
gagaagttgagaaagggcacaagaa

SEQ ID NO: 3338359 - DNA, 25 bp, Homo sapien
ttatgaaagacaaactctcccacat

SEQ ID NO: 3338360 - DNA, 25 bp, Homo sapien
agagcgtattatgaaagacaaactc

SEQ ID NO: 3338361 - DNA, 25 bp, Homo sapien
gtattatgaaagacaaactctccca

SEQ ID NO: 3338362 - DNA, 25 bp, Homo sapien
gagcgtattatgaaagacaaactct

SEQ ID NO: 3338363 - DNA, 25 bp, Homo sapien
agtgtgcattgccacctcagtggta

SEQ ID NO: 3338364 - DNA, 25 bp, Homo sapien
gttgaagtgtgcattgccacctcag

SEQ ID NO: 3338365 - DNA, 25 bp, Homo sapien
tacttaatgctgatatgctcacaat

SEQ ID NO: 3338366 - DNA, 25 bp, Homo sapien
ctcagtggtacttaatgctgatatg

SEQ ID NO: 3338367 - DNA, 25 bp, Homo sapien
atatttcaatctcctattctgtgca

SEQ ID NO: 3338368 - DNA, 25 bp, Homo sapien
atgggatcatggtgtttaaatatac

SEQ ID NO: 3338369 - DNA, 25 bp, Homo sapien
tcatccttcactcaggtgtgctcgt

SEQ ID NO: 3338370 - DNA, 25 bp, Homo sapien
atgggcatgtaacaataaacttgag

SEQ ID NO: 3338371 - DNA, 25 bp, Homo sapien
ttggctcagcaacatgggaatacaa

SEQ ID NO: 3338372 - DNA, 25 bp, Homo sapien
acatgggaatacaactggaaaatgc

SEQ ID NO: 3338373 - DNA, 25 bp, Homo sapien
tcattttaagaccaatgaaatattt

SEQ ID NO: 3338374 - DNA, 25 bp, Homo sapien
tcaatagcgagcatacttttgctaa

SEQ ID NO: 3338375 - DNA, 25 bp, Homo sapien
caacatttcaatagcgagcatactt

SEQ ID NO: 3338376 - DNA, 25 bp, Homo sapien
ttcaacatttcaatagcgagcatac

SEQ ID NO: 3338377 - DNA, 25 bp, Homo sapien
ccctggtgcttaacatggtgttgta

SEQ ID NO: 3338378 - DNA, 25 bp, Homo sapien
tatgactgcaccatacccttttccg

SEQ ID NO: 3338379 - DNA, 25 bp, Homo sapien
cctttgggaggtcttcgctggcctc

SEQ ID NO: 3338380 - DNA, 25 bp, Homo sapien
aatccagatatgcattccttaggcc

SEQ ID NO: 3338381 - DNA, 25 bp, Homo sapien
caggttatctatgtggctgcagcac

SEQ ID NO: 3338382 - DNA, 25 bp, Homo sapien
tgaggcaccaaatgctgtgggccat

SEQ ID NO: 3338383 - DNA, 25 bp, Homo sapien
gacagcggtcaactctacttggaga

SEQ ID NO: 3338384 - DNA, 25 bp, Homo sapien
aagtctaggattttaccaggcaggc

SEQ ID NO: 3338385 - DNA, 25 bp, Homo sapien
gatattgtataagtacgcttcagtt

SEQ ID NO: 3338386 - DNA, 25 bp, Homo sapien
attgtataagtacgcttcagtttcg

SEQ ID NO: 3338387 - DNA, 25 bp, Homo sapien
tgtataagtacgcttcagtttcgct

SEQ ID NO: 3338388 - DNA, 25 bp, Homo sapien
tattgtataagtacgcttcagtttc

SEQ ID NO: 3338389 - DNA, 25 bp, Homo sapien
catctgtggaagttatgctcagcta

SEQ ID NO: 3338390 - DNA, 25 bp, Homo sapien
gaaagaagccttatcttgcataagc

SEQ ID NO: 3338391 - DNA, 25 bp, Homo sapien
agatgtttgaagaagactgttccca

SEQ ID NO: 3338392 - DNA, 25 bp, Homo sapien
tataaatgggaatcttgcctgtgct

SEQ ID NO: 3338393 - DNA, 25 bp, Homo sapien
gaaaagcatggcctattaacggatg

SEQ ID NO: 3338394 - DNA, 25 bp, Homo sapien
aaagcatggcctattaacggatgca

SEQ ID NO: 3338395 - DNA, 25 bp, Homo sapien
aagcatggcctattaacggatgcag

SEQ ID NO: 3338396 - DNA, 25 bp, Homo sapien
gcatggcctattaacggatgcagtt

SEQ ID NO: 3338397 - DNA, 25 bp, Homo sapien
gaattcagacctatgtaactacaga

SEQ ID NO: 3338398 - DNA, 25 bp, Homo sapien
ctgccaaggtctactgtgatctatg

SEQ ID NO: 3338399 - DNA, 25 bp, Homo sapien
gcattgcctgacttgcttaagttca

SEQ ID NO: 3338400 - DNA, 25 bp, Homo sapien
tcattctactgagcaacttggacta

SEQ ID NO: 3338401 - DNA, 25 bp, Homo sapien
taatgaatgcatatggattgtggtt

SEQ ID NO: 3338402 - DNA, 25 bp, Homo sapien
taagatactaaatgtcagttgtgaa

SEQ ID NO: 3338403 - DNA, 25 bp, Homo sapien
tcaaaagagataggttaggactggt

SEQ ID NO: 3338404 - DNA, 25 bp, Homo sapien
gggacaattacacgtaggctatata

SEQ ID NO: 3338405 - DNA, 25 bp, Homo sapien
gaattttcagggttggctccgtctc

SEQ ID NO: 3338406 - DNA, 25 bp, Homo sapien
tggagactcctggtttatgccataa

SEQ ID NO: 3338407 - DNA, 25 bp, Homo sapien
gatgatatcataccagtgcctttgt

SEQ ID NO: 3338408 - DNA, 25 bp, Homo sapien
tataaataccaatcgggaactgtgc

SEQ ID NO: 3338409 - DNA, 25 bp, Homo sapien
taacagcttgggtactggagaccat

SEQ ID NO: 3338410 - DNA, 25 bp, Homo sapien
gagaccattgtagctttcagggtca

SEQ ID NO: 3338411 - DNA, 25 bp, Homo sapien
gtagccacatcaagagagtttcctt

SEQ ID NO: 3338412 - DNA, 25 bp, Homo sapien
ttgtaagtcacacagagttttccca

SEQ ID NO: 3338413 - DNA, 25 bp, Homo sapien
gacaatagtaatacaaagattattt

SEQ ID NO: 3338414 - DNA, 25 bp, Homo sapien
ctgacaatagtaatacaaagattat

SEQ ID NO: 3338415 - DNA, 25 bp, Homo sapien
taatacaaagattatttttccatac

SEQ ID NO: 3338416 - DNA, 25 bp, Homo sapien
atacaaagattatttttccatacat

SEQ ID NO: 3338417 - DNA, 25 bp, Homo sapien
aaaactaccaaagacaactgcaagt

SEQ ID NO: 3338418 - DNA, 25 bp, Homo sapien
aaaaactaccaaagacaactgcaag

SEQ ID NO: 3338419 - DNA, 25 bp, Homo sapien
aaactaccaaagacaactgcaagtg

SEQ ID NO: 3338420 - DNA, 25 bp, Homo sapien
ctatgaaatctgtgggggcaggtat

SEQ ID NO: 3338421 - DNA, 25 bp, Homo sapien
tctactatgaaatctgtgggggcag

SEQ ID NO: 3338422 - DNA, 25 bp, Homo sapien
acatctactatgaaatctgtggggg

SEQ ID NO: 3338423 - DNA, 25 bp, Homo sapien
tactatgaaatctgtgggggcaggt

SEQ ID NO: 3338424 - DNA, 25 bp, Homo sapien
ctgatactgaggcagtagcaatggg

SEQ ID NO: 3338425 - DNA, 25 bp, Homo sapien
atttgtcctgatactgctgatactg

SEQ ID NO: 3338426 - DNA, 25 bp, Homo sapien
tcctgatactgctgatactgaggca

SEQ ID NO: 3338427 - DNA, 25 bp, Homo sapien
aagacatgttctgagagaggtggaa

SEQ ID NO: 3338428 - DNA, 25 bp, Homo sapien
gtgcattgtactcttgagagtgact

SEQ ID NO: 3338429 - DNA, 25 bp, Homo sapien
gtggtgcattgtactcttgagagtg

SEQ ID NO: 3338430 - DNA, 25 bp, Homo sapien
tcttgagagtgactaggggcttcct

SEQ ID NO: 3338431 - DNA, 25 bp, Homo sapien
tgagagtgactaggggcttccttaa

SEQ ID NO: 3338432 - DNA, 25 bp, Homo sapien
tttccttgagctacttccctttcca

SEQ ID NO: 3338433 - DNA, 25 bp, Homo sapien
ttagctggaatatcaaggcttagtt

SEQ ID NO: 3338434 - DNA, 25 bp, Homo sapien
tatcaaggcttagtttccatatcat

SEQ ID NO: 3338435 - DNA, 25 bp, Homo sapien
tccttgagctacttccctttccata

SEQ ID NO: 3338436 - DNA, 25 bp, Homo sapien
gttcctggcactaagagctggtgtt

SEQ ID NO: 3338437 - DNA, 25 bp, Homo sapien
gagttcaagagtatgactgctgacc

SEQ ID NO: 3338438 - DNA, 25 bp, Homo sapien
caggcatactggctctgcttgatgg

SEQ ID NO: 3338439 - DNA, 25 bp, Homo sapien
tttggacaggcataacaggcatact

SEQ ID NO: 3338440 - DNA, 25 bp, Homo sapien
ttctatacaacatcaaggtacaggg

SEQ ID NO: 3338441 - DNA, 25 bp, Homo sapien
tggccaaggagttgcctgacacact

SEQ ID NO: 3338442 - DNA, 25 bp, Homo sapien
gacacacttgcggagattaccaaga

SEQ ID NO: 3338443 - DNA, 25 bp, Homo sapien
caagaggaggagtcgactttcctaa

SEQ ID NO: 3338444 - DNA, 25 bp, Homo sapien
atcctctagtagctgagagtgtgga

SEQ ID NO: 3338445 - DNA, 25 bp, Homo sapien
caaagagggctaggttctggacttc

SEQ ID NO: 3338446 - DNA, 25 bp, Homo sapien
gagtgtggacagagaggtcaaagag

SEQ ID NO: 3338447 - DNA, 25 bp, Homo sapien
gctaaatggcattaggcagatttgt

SEQ ID NO: 3338448 - DNA, 25 bp, Homo sapien
ggcccactcatatggatttctgcaa

SEQ ID NO: 3338449 - DNA, 25 bp, Homo sapien
gaaattacgtgctgttatatctgcc

SEQ ID NO: 3338450 - DNA, 25 bp, Homo sapien
tcctcagtgatcttccaccacgggt

SEQ ID NO: 3338451 - DNA, 25 bp, Homo sapien
tactccatagcaagagatccaagag

SEQ ID NO: 3338452 - DNA, 25 bp, Homo sapien
ctcagaatcatggccggaaacgaaa

SEQ ID NO: 3338453 - DNA, 25 bp, Homo sapien
tcatggccggaaacgaaaggcactt

SEQ ID NO: 3338454 - DNA, 25 bp, Homo sapien
gaatcatggccggaaacgaaaggca

SEQ ID NO: 3338455 - DNA, 25 bp, Homo sapien
atggccggaaacgaaaggcacttct

SEQ ID NO: 3338456 - DNA, 25 bp, Homo sapien
agttctagagtttgcgaagtccaaa

SEQ ID NO: 3338457 - DNA, 25 bp, Homo sapien
gttctagagtttgcgaagtccaaaa

SEQ ID NO: 3338458 - DNA, 25 bp, Homo sapien
taaagaattctagaacccattggcc

SEQ ID NO: 3338459 - DNA, 25 bp, Homo sapien
aaactgactgctctacctgctagcg

SEQ ID NO: 3338460 - DNA, 25 bp, Homo sapien
ccacccaagtagtcaaatagttgta

SEQ ID NO: 3338461 - DNA, 25 bp, Homo sapien
cataaggatctaggacattttacac

SEQ ID NO: 3338462 - DNA, 25 bp, Homo sapien
tcataactatagaccctctggccat

SEQ ID NO: 3338463 - DNA, 25 bp, Homo sapien
tctccctagcatcagtgcaagagtg

SEQ ID NO: 3338464 - DNA, 25 bp, Homo sapien
aaggcagccacgagcatcttctctc

SEQ ID NO: 3338465 - DNA, 25 bp, Homo sapien
gtctgtagtcccttgtcgcacaaag

SEQ ID NO: 3338466 - DNA, 25 bp, Homo sapien
attatctctgtttctcgggtataag

SEQ ID NO: 3338467 - DNA, 25 bp, Homo sapien
caattctagatgctttattatctct

SEQ ID NO: 3338468 - DNA, 25 bp, Homo sapien
tataagttattgtttgcttccttac

SEQ ID NO: 3338469 - DNA, 25 bp, Homo sapien
gttcaattctagatgctttattatc

SEQ ID NO: 3338470 - DNA, 25 bp, Homo sapien
caagtaagaattgatgtaggtccat

SEQ ID NO: 3338471 - DNA, 25 bp, Homo sapien
aatcaagtaagaattgatgtaggtc

SEQ ID NO: 3338472 - DNA, 25 bp, Homo sapien
ttgttaaccacaaaatcaagtaaga

SEQ ID NO: 3338473 - DNA, 25 bp, Homo sapien
taaccacaaaatcaagtaagaattg

SEQ ID NO: 3338474 - DNA, 25 bp, Homo sapien
gatttataaacagaaaccagggcca

SEQ ID NO: 3338475 - DNA, 25 bp, Homo sapien
tttattttctagactgagaggagcc

SEQ ID NO: 3338476 - DNA, 25 bp, Homo sapien
gagaggagccatggaagatttataa

SEQ ID NO: 3338477 - DNA, 25 bp, Homo sapien
attttattttctagactgagaggag

SEQ ID NO: 3338478 - DNA, 25 bp, Homo sapien
ctttctctggaaactggtgtcatca

SEQ ID NO: 3338479 - DNA, 25 bp, Homo sapien
cttataagctctgcatctgtggaga

SEQ ID NO: 3338480 - DNA, 25 bp, Homo sapien
tgtgaggagtatcaggttctttctt

SEQ ID NO: 3338481 - DNA, 25 bp, Homo sapien
aagaactacactgacttttaatgtc

SEQ ID NO: 3338482 - DNA, 25 bp, Homo sapien
gatgatagttctgattgaattattt

SEQ ID NO: 3338483 - DNA, 25 bp, Homo sapien
tggtaaatttatggggataggagaa

SEQ ID NO: 3338484 - DNA, 25 bp, Homo sapien
atttatggggataggagaaattggg

SEQ ID NO: 3338485 - DNA, 25 bp, Homo sapien
aatttatggggataggagaaattgg

SEQ ID NO: 3338486 - DNA, 25 bp, Homo sapien
ctggtaaatttatggggataggaga

SEQ ID NO: 3338487 - DNA, 25 bp, Homo sapien
atggagtgaaagaaagttataatag

SEQ ID NO: 3338488 - DNA, 25 bp, Homo sapien
gttataatagatccaacacgtacac

SEQ ID NO: 3338489 - DNA, 25 bp, Homo sapien
caaagatgaggatgatcatctattc

SEQ ID NO: 3338490 - DNA, 25 bp, Homo sapien
gatgaggatgatcatctattctgag

SEQ ID NO: 3338491 - DNA, 25 bp, Homo sapien
ggagatatagataaaggtaacttaa

SEQ ID NO: 3338492 - DNA, 25 bp, Homo sapien
tgagacactggtgtctgtctatggc

SEQ ID NO: 3338493 - DNA, 25 bp, Homo sapien
ctgaagaatgtcacattgggtaatg

SEQ ID NO: 3338494 - DNA, 25 bp, Homo sapien
tctgtgggtggtcatgtaatgagac

SEQ ID NO: 3338495 - DNA, 25 bp, Homo sapien
ctttaggcctcagtgcagaggcggc

SEQ ID NO: 3338496 - DNA, 25 bp, Homo sapien
aaaccagtcaatgcccaagtgaggg

SEQ ID NO: 3338497 - DNA, 25 bp, Homo sapien
gagggccaagccctttcagagaatc

SEQ ID NO: 3338498 - DNA, 25 bp, Homo sapien
tgctggcaacgctaagatcaatagt

SEQ ID NO: 3338499 - DNA, 25 bp, Homo sapien
tagatgcacacatcatttttgaggg

SEQ ID NO: 3338500 - DNA, 25 bp, Homo sapien
atactccgggtactccagggtctgc

SEQ ID NO: 3338501 - DNA, 25 bp, Homo sapien
taatgaggtcccgtcctttagcctc

SEQ ID NO: 3338502 - DNA, 25 bp, Homo sapien
ctgggccaggaaggattagctattg

SEQ ID NO: 3338503 - DNA, 25 bp, Homo sapien
tctctggggcctttagaaactctat

SEQ ID NO: 3338504 - DNA, 25 bp, Homo sapien
tagaaactctatctggtgaggtggt

SEQ ID NO: 3338505 - DNA, 25 bp, Homo sapien
cgtgactgcccaaacatccaggtat

SEQ ID NO: 3338506 - DNA, 25 bp, Homo sapien
agctgactttctgggataggcccgt

SEQ ID NO: 3338507 - DNA, 25 bp, Homo sapien
tagagaattaaggctttatccctca

SEQ ID NO: 3338508 - DNA, 25 bp, Homo sapien
gatagagaattaaggctttatccct

SEQ ID NO: 3338509 - DNA, 25 bp, Homo sapien
agagaattaaggctttatccctcat

SEQ ID NO: 3338510 - DNA, 25 bp, Homo sapien
atagagaattaaggctttatccctc

SEQ ID NO: 3338511 - DNA, 25 bp, Homo sapien
tgcaagttccatctacaacaggttg

SEQ ID NO: 3338512 - DNA, 25 bp, Homo sapien
gaaatcttccctagtgactatgatg

SEQ ID NO: 3338513 - DNA, 25 bp, Homo sapien
ccctagtgactatgatgatgcaagt

SEQ ID NO: 3338514 - DNA, 25 bp, Homo sapien
ctacaacaggttgccaaagatccct

SEQ ID NO: 3338515 - DNA, 25 bp, Homo sapien
tgacatgtcccaacacaggtctggt

SEQ ID NO: 3338516 - DNA, 25 bp, Homo sapien
gcattggtcttcatagagcagccca

SEQ ID NO: 3338517 - DNA, 25 bp, Homo sapien
cagtgtgcatctggaaaacttccca

SEQ ID NO: 3338518 - DNA, 25 bp, Homo sapien
caccttgcagaataaggctgaccgg

SEQ ID NO: 3338519 - DNA, 25 bp, Homo sapien
cagtgccactctgattgatgtgttc

SEQ ID NO: 3338520 - DNA, 25 bp, Homo sapien
cctactgtacaaaaggctgcctgat

SEQ ID NO: 3338521 - DNA, 25 bp, Homo sapien
gaaggcaaagaaccttccagtgcca

SEQ ID NO: 3338522 - DNA, 25 bp, Homo sapien
ttctcctccttgatagggcagcacc

SEQ ID NO: 3338523 - DNA, 25 bp, Homo sapien
tgaccgagtctaactttctttgttg

SEQ ID NO: 3338524 - DNA, 25 bp, Homo sapien
ccgagtctaactttctttgttgagt

SEQ ID NO: 3338525 - DNA, 25 bp, Homo sapien
attgaccgagtctaactttctttgt

SEQ ID NO: 3338526 - DNA, 25 bp, Homo sapien
accgagtctaactttctttgttgag

SEQ ID NO: 3338527 - DNA, 25 bp, Homo sapien
ggcactgaaacagtacagccatata

SEQ ID NO: 3338528 - DNA, 25 bp, Homo sapien
tattatgctcccatgtagtagatgt

SEQ ID NO: 3338529 - DNA, 25 bp, Homo sapien
tagtagatgtcttaggcactgaaac

SEQ ID NO: 3338530 - DNA, 25 bp, Homo sapien
ttatgcccctgtttattatgctccc

SEQ ID NO: 3338531 - DNA, 25 bp, Homo sapien
ttggccttccaaatatgttggcagt

SEQ ID NO: 3338532 - DNA, 25 bp, Homo sapien
ctcaggttctggctggtatgaaatt

SEQ ID NO: 3338533 - DNA, 25 bp, Homo sapien
tagggaccatatatctgaaggagtt

SEQ ID NO: 3338534 - DNA, 25 bp, Homo sapien
tgtttttcttcgaaggctgctccaa

SEQ ID NO: 3338535 - DNA, 25 bp, Homo sapien
gtatcatactcccttgcacagactt

SEQ ID NO: 3338536 - DNA, 25 bp, Homo sapien
tggtatcatactcccttgcacagac

SEQ ID NO: 3338537 - DNA, 25 bp, Homo sapien
gtggtatcatactcccttgcacaga

SEQ ID NO: 3338538 - DNA, 25 bp, Homo sapien
atcatactcccttgcacagactttg

SEQ ID NO: 3338539 - DNA, 25 bp, Homo sapien
tcattacactatgagtaaggaataa

SEQ ID NO: 3338540 - DNA, 25 bp, Homo sapien
cattacactatgagtaaggaataat

SEQ ID NO: 3338541 - DNA, 25 bp, Homo sapien
ctcattacactatgagtaaggaata

SEQ ID NO: 3338542 - DNA, 25 bp, Homo sapien
attacactatgagtaaggaataatt

SEQ ID NO: 3338543 - DNA, 25 bp, Homo sapien
gccatctgtcttcaatttcaggcat

SEQ ID NO: 3338544 - DNA, 25 bp, Homo sapien
tggccatctgtcttcaatttcaggc

SEQ ID NO: 3338545 - DNA, 25 bp, Homo sapien
ggccatctgtcttcaatttcaggca

SEQ ID NO: 3338546 - DNA, 25 bp, Homo sapien
ttggccatctgtcttcaatttcagg

SEQ ID NO: 3338547 - DNA, 25 bp, Homo sapien
gaaacatttgttggccgactcaggc

SEQ ID NO: 3338548 - DNA, 25 bp, Homo sapien
tttgccaaagtggaaacatttgttg

SEQ ID NO: 3338549 - DNA, 25 bp, Homo sapien
ggcactaaccaactgtgtctttgca

SEQ ID NO: 3338550 - DNA, 25 bp, Homo sapien
tttcttcactagtcaggattcctga

SEQ ID NO: 3338551 - DNA, 25 bp, Homo sapien
ccctgatccccatgcctcctgactg

SEQ ID NO: 3338552 - DNA, 25 bp, Homo sapien
gagacacctcccagtaggggtcaac

SEQ ID NO: 3338553 - DNA, 25 bp, Homo sapien
acctcccagtaggggtcaacagaca

SEQ ID NO: 3338554 - DNA, 25 bp, Homo sapien
gacacctcccagtaggggtcaacag

SEQ ID NO: 3338555 - DNA, 25 bp, Homo sapien
gcttctatttctaggcctaattggg

SEQ ID NO: 3338556 - DNA, 25 bp, Homo sapien
ttttcctcgagtgagcaaaagcact

SEQ ID NO: 3338557 - DNA, 25 bp, Homo sapien
actgagttttgaattgccggcataa

SEQ ID NO: 3338558 - DNA, 25 bp, Homo sapien
gtatagtatattgcaaggagactca

SEQ ID NO: 3338559 - DNA, 25 bp, Homo sapien
caatgttacactgcattcgcaatgg

SEQ ID NO: 3338560 - DNA, 25 bp, Homo sapien
cacagttttccatccgttggtgacc

SEQ ID NO: 3338561 - DNA, 25 bp, Homo sapien
gcactgaatccagccacagaggatt

SEQ ID NO: 3338562 - DNA, 25 bp, Homo sapien
tggcagtgtccctttactaaagagt

SEQ ID NO: 3338563 - DNA, 25 bp, Homo sapien
gacatcaaagtctgttctttctcct

SEQ ID NO: 3338564 - DNA, 25 bp, Homo sapien
cacgctggtggcttttggcaagaca

SEQ ID NO: 3338565 - DNA, 25 bp, Homo sapien
ggtggcttttggcaagacatcaaag

SEQ ID NO: 3338566 - DNA, 25 bp, Homo sapien
tttggcaagacatcaaagtctgttc

SEQ ID NO: 3338567 - DNA, 25 bp, Homo sapien
catcaaagactgtgttcccagaccc

SEQ ID NO: 3338568 - DNA, 25 bp, Homo sapien
ggcatcactggcagttctaccactg

SEQ ID NO: 3338569 - DNA, 25 bp, Homo sapien
caggaatgaaatggcttaacaagag

SEQ ID NO: 3338570 - DNA, 25 bp, Homo sapien
agagcacattgcaggttgcacaaag

SEQ ID NO: 3338571 - DNA, 25 bp, Homo sapien
gtgctgtgagctacttgtgttctct

SEQ ID NO: 3338572 - DNA, 25 bp, Homo sapien
gggtgctgtgagctacttgtgttct

SEQ ID NO: 3338573 - DNA, 25 bp, Homo sapien
ggtgctgtgagctacttgtgttctc

SEQ ID NO: 3338574 - DNA, 25 bp, Homo sapien
agggtgctgtgagctacttgtgttc

SEQ ID NO: 3338575 - DNA, 25 bp, Homo sapien
ggaggcactgggagacgcaatcaat

SEQ ID NO: 3338576 - DNA, 25 bp, Homo sapien
tagaaaaaggatgacgacagagatg

SEQ ID NO: 3338577 - DNA, 25 bp, Homo sapien
ggagacgcaatcaatgtgagcaaag

SEQ ID NO: 3338578 - DNA, 25 bp, Homo sapien
aaaaggatgacgacagagatgaggc

SEQ ID NO: 3338579 - DNA, 25 bp, Homo sapien
ctaagtcccactaaagaaaatgtca

SEQ ID NO: 3338580 - DNA, 25 bp, Homo sapien
caccaaaagtgtaagagcatcagta

SEQ ID NO: 3338581 - DNA, 25 bp, Homo sapien
agcatcagtagacccttccacaagg

SEQ ID NO: 3338582 - DNA, 25 bp, Homo sapien
catacggtgacgctgctctggacat

SEQ ID NO: 3338583 - DNA, 25 bp, Homo sapien
tctgaagtcgccagtctgcagagcc

SEQ ID NO: 3338584 - DNA, 25 bp, Homo sapien
gaggacgggctcagtaacagagtct

SEQ ID NO: 3338585 - DNA, 25 bp, Homo sapien
aaaatgtcttgttccgggccctcag

SEQ ID NO: 3338586 - DNA, 25 bp, Homo sapien
caatttgtgtggaacctctaagtca

SEQ ID NO: 3338587 - DNA, 25 bp, Homo sapien
acgaggaaggcagtccagatgacca

SEQ ID NO: 3338588 - DNA, 25 bp, Homo sapien
aactgggagttcctttaggtgtgtg

SEQ ID NO: 3338589 - DNA, 25 bp, Homo sapien
ttgacgtgggcaacctcatctccct

SEQ ID NO: 3338590 - DNA, 25 bp, Homo sapien
taggtgtgtgtttgacgtgggcaac

SEQ ID NO: 3338591 - DNA, 25 bp, Homo sapien
tgtgtttgacgtgggcaacctcatc

SEQ ID NO: 3338592 - DNA, 25 bp, Homo sapien
gctctctgtggaaaatagtgcatct

SEQ ID NO: 3338593 - DNA, 25 bp, Homo sapien
ctctctgtggaaaatagtgcatctc

SEQ ID NO: 3338594 - DNA, 25 bp, Homo sapien
ctctgtggaaaatagtgcatctcat

SEQ ID NO: 3338595 - DNA, 25 bp, Homo sapien
tctctgtggaaaatagtgcatctca

SEQ ID NO: 3338596 - DNA, 25 bp, Homo sapien
attgatgcaggggtgatatgctcag

SEQ ID NO: 3338597 - DNA, 25 bp, Homo sapien
catgcgtggagggatgttgtacagg

SEQ ID NO: 3338598 - DNA, 25 bp, Homo sapien
ggtgactgcaaggcctgacagcatg

SEQ ID NO: 3338599 - DNA, 25 bp, Homo sapien
aggaaggagctgccggtgactgcaa

SEQ ID NO: 3338600 - DNA, 25 bp, Homo sapien
tgccaccatctatcccgaacaaagt

SEQ ID NO: 3338601 - DNA, 25 bp, Homo sapien
tagtaagtgttaggattttgatggc

SEQ ID NO: 3338602 - DNA, 25 bp, Homo sapien
tgatggctggcaagctgatacattt

SEQ ID NO: 3338603 - DNA, 25 bp, Homo sapien
tctatcccgaacaaagtagtaagtg

SEQ ID NO: 3338604 - DNA, 25 bp, Homo sapien
gaagatgtgatctagccacccttgg

SEQ ID NO: 3338605 - DNA, 25 bp, Homo sapien
cgttcaagtgtatgcatggctatcc

SEQ ID NO: 3338606 - DNA, 25 bp, Homo sapien
tggtgccagctcatacaagatgcat

SEQ ID NO: 3338607 - DNA, 25 bp, Homo sapien
tcggtttagctgaagaggaagacct

SEQ ID NO: 3338608 - DNA, 25 bp, Homo sapien
gtaacactaagaataagctcaagct

SEQ ID NO: 3338609 - DNA, 25 bp, Homo sapien
tagtataagccataagaaaggcctg

SEQ ID NO: 3338610 - DNA, 25 bp, Homo sapien
gaaagcaccccagattggatccgag

SEQ ID NO: 3338611 - DNA, 25 bp, Homo sapien
tagggtcgtaggttataacagatgc

SEQ ID NO: 3338612 - DNA, 25 bp, Homo sapien
cctccggcgaggatgagtctccaaa

SEQ ID NO: 3338613 - DNA, 25 bp, Homo sapien
caaaccgtggcaaacactctgggag

SEQ ID NO: 3338614 - DNA, 25 bp, Homo sapien
tactcaacggcatctgggatgtccc

SEQ ID NO: 3338615 - DNA, 25 bp, Homo sapien
cgcacacgcgtctgtgccacttcag

SEQ ID NO: 3338616 - DNA, 25 bp, Homo sapien
cctcgaggctggttccgaaggctcg

SEQ ID NO: 3338617 - DNA, 25 bp, Homo sapien
gcaccctcgaggctggttccgaagg

SEQ ID NO: 3338618 - DNA, 25 bp, Homo sapien
ccgcctttagcccaggcagtgcgga

SEQ ID NO: 3338619 - DNA, 25 bp, Homo sapien
ttctttcggagcctcagcttggccg

SEQ ID NO: 3338620 - DNA, 25 bp, Homo sapien
gcacctccccgcgcgctagttaaaa

SEQ ID NO: 3338621 - DNA, 25 bp, Homo sapien
tgtggcagcacctccccgcgcgcta

SEQ ID NO: 3338622 - DNA, 25 bp, Homo sapien
cggtgacgtcaaggggcgcgctgtg

SEQ ID NO: 3338623 - DNA, 25 bp, Homo sapien
gaagcggtgacgtcaaggggcgcgc

SEQ ID NO: 3338624 - DNA, 25 bp, Homo sapien
aagagacctagtacttcctctgctc

SEQ ID NO: 3338625 - DNA, 25 bp, Homo sapien
agagacctagtacttcctctgctct

SEQ ID NO: 3338626 - DNA, 25 bp, Homo sapien
gagacctagtacttcctctgctctg

SEQ ID NO: 3338627 - DNA, 25 bp, Homo sapien
tgccctgcatagtggggatggctcg

SEQ ID NO: 3338628 - DNA, 25 bp, Homo sapien
ggatggctcgcaacgtctcttcatt

SEQ ID NO: 3338629 - DNA, 25 bp, Homo sapien
gcttctgtattcaggaggttgtgag

SEQ ID NO: 3338630 - DNA, 25 bp, Homo sapien
gttggtgccctgcatagtggggatg

SEQ ID NO: 3338631 - DNA, 25 bp, Homo sapien
cttggttctgagtatgtgtattctg

SEQ ID NO: 3338632 - DNA, 25 bp, Homo sapien
gtcttccaggaattctgcagtactt

SEQ ID NO: 3338633 - DNA, 25 bp, Homo sapien
ggttctgagtatgtgtattctgcag

SEQ ID NO: 3338634 - DNA, 25 bp, Homo sapien
gcagtcttccaggaattctgcagta

SEQ ID NO: 3338635 - DNA, 25 bp, Homo sapien
ttgtaggagattgtagtaccctggg

SEQ ID NO: 3338636 - DNA, 25 bp, Homo sapien
gtaccctgggggctaaactgtctgc

SEQ ID NO: 3338637 - DNA, 25 bp, Homo sapien
cctaaattgtaggagattgtagtac

SEQ ID NO: 3338638 - DNA, 25 bp, Homo sapien
caagatcgtgctgcctaaattgtag

SEQ ID NO: 3338639 - DNA, 25 bp, Homo sapien
aatgcaaagcacaagctaaagaatt

SEQ ID NO: 3338640 - DNA, 25 bp, Homo sapien
aaaatgcaaagcacaagctaaagaa

SEQ ID NO: 3338641 - DNA, 25 bp, Homo sapien
aaatgcaaagcacaagctaaagaat

SEQ ID NO: 3338642 - DNA, 25 bp, Homo sapien
aaaaatgcaaagcacaagctaaaga

SEQ ID NO: 3338643 - DNA, 25 bp, Homo sapien
agcagtccctgtgccggaagtcaca

SEQ ID NO: 3338644 - DNA, 25 bp, Homo sapien
ctctctatctacttggaccctcatt

SEQ ID NO: 3338645 - DNA, 25 bp, Homo sapien
gaacaagtgtcactggactcctgtc

SEQ ID NO: 3338646 - DNA, 25 bp, Homo sapien
aaagctgctaattgtccgggtgact

SEQ ID NO: 3338647 - DNA, 25 bp, Homo sapien
ggtggtcgaatgaggcaaatttccc

SEQ ID NO: 3338648 - DNA, 25 bp, Homo sapien
gacttatttttgctgccctcttggg

SEQ ID NO: 3338649 - DNA, 25 bp, Homo sapien
gacctttgtataaagaccaccttca

SEQ ID NO: 3338650 - DNA, 25 bp, Homo sapien
tgccaactgaacattacactgggat

SEQ ID NO: 3338651 - DNA, 25 bp, Homo sapien
tatctagcaactggtcgaaccagga

SEQ ID NO: 3338652 - DNA, 25 bp, Homo sapien
cccagcctgtgaacgcatttaaaga

SEQ ID NO: 3338653 - DNA, 25 bp, Homo sapien
tgaagttccactgtgttacagagtc

SEQ ID NO: 3338654 - DNA, 25 bp, Homo sapien
tattggcctataggtcatctcagca

SEQ ID NO: 3338655 - DNA, 25 bp, Homo sapien
tatcacatgccacagttcaaatgct

SEQ ID NO: 3338656 - DNA, 25 bp, Homo sapien
ctgcctgagcaagataaaaggtaca

SEQ ID NO: 3338657 - DNA, 25 bp, Homo sapien
tattatattggattccttgggcaca

SEQ ID NO: 3338658 - DNA, 25 bp, Homo sapien
taatatgccgtaatgtatcacatgc

SEQ ID NO: 3338659 - DNA, 25 bp, Homo sapien
cagcattccgttaattggactaagt

SEQ ID NO: 3338660 - DNA, 25 bp, Homo sapien
agtaaacacgattaaggagaagaga

SEQ ID NO: 3338661 - DNA, 25 bp, Homo sapien
gaaaagttgagcatcagcattccgt

SEQ ID NO: 3338662 - DNA, 25 bp, Homo sapien
taaacacgattaaggagaagagaaa

SEQ ID NO: 3338663 - DNA, 25 bp, Homo sapien
tctctgtatcttggaatctcgtttg

SEQ ID NO: 3338664 - DNA, 25 bp, Homo sapien
ctgaacttaattcatacgtgaaagt

SEQ ID NO: 3338665 - DNA, 25 bp, Homo sapien
tacgtgaaagtttcacatgtccaca

SEQ ID NO: 3338666 - DNA, 25 bp, Homo sapien
gaatctcgtttgactaacttgggag

SEQ ID NO: 3338667 - DNA, 25 bp, Homo sapien
ggctgggccactcccatgttgagat

SEQ ID NO: 3338668 - DNA, 25 bp, Homo sapien
gaccctgtctcgtcaaaacataagg

SEQ ID NO: 3338669 - DNA, 25 bp, Homo sapien
taaattctgtgctgtagggtaaccc

SEQ ID NO: 3338670 - DNA, 25 bp, Homo sapien
cctaccttgaaggaatgggaacata

SEQ ID NO: 3338671 - DNA, 25 bp, Homo sapien
tacaaactatacaagcttaccaggt

SEQ ID NO: 3338672 - DNA, 25 bp, Homo sapien
tctctgagttacaaactatacaagc

SEQ ID NO: 3338673 - DNA, 25 bp, Homo sapien
gtttttatctctgagttacaaacta

SEQ ID NO: 3338674 - DNA, 25 bp, Homo sapien
tatacaagcttaccaggtataaggt

SEQ ID NO: 3338675 - DNA, 25 bp, Homo sapien
ttgctatcttatcctctttttgtca

SEQ ID NO: 3338676 - DNA, 25 bp, Homo sapien
tgctatcttatcctctttttgtcac

SEQ ID NO: 3338677 - DNA, 25 bp, Homo sapien
tttgctatcttatcctctttttgtc

SEQ ID NO: 3338678 - DNA, 25 bp, Homo sapien
gctatcttatcctctttttgtcaca

SEQ ID NO: 3338679 - DNA, 25 bp, Homo sapien
gaacctaaggcatacccatcattta

SEQ ID NO: 3338680 - DNA, 25 bp, Homo sapien
tatatataaccatggaacctgccaa

SEQ ID NO: 3338681 - DNA, 25 bp, Homo sapien
tcatagtggtggttttcctagctgc

SEQ ID NO: 3338682 - DNA, 25 bp, Homo sapien
tagctgctatggaaaggtttgttca

SEQ ID NO: 3338683 - DNA, 25 bp, Homo sapien
gagccttactcgcaggagacaccag

SEQ ID NO: 3338684 - DNA, 25 bp, Homo sapien
ccagacccaacccatgcttagattt

SEQ ID NO: 3338685 - DNA, 25 bp, Homo sapien
gtccagagccttactcgcaggagac

SEQ ID NO: 3338686 - DNA, 25 bp, Homo sapien
agacaccagacccaacccatgctta

SEQ ID NO: 3338687 - DNA, 25 bp, Homo sapien
tagataggaatatattaactactgc

SEQ ID NO: 3338688 - DNA, 25 bp, Homo sapien
tcacgaatttgtagtggttacataa

SEQ ID NO: 3338689 - DNA, 25 bp, Homo sapien
ggtagtactaattccatgatccatg

SEQ ID NO: 3338690 - DNA, 25 bp, Homo sapien
gatccatgtggatgaaagatttgaa

SEQ ID NO: 3338691 - DNA, 25 bp, Homo sapien
gcctcctcttagatgttctctcaat

SEQ ID NO: 3338692 - DNA, 25 bp, Homo sapien
ggttctggtgttgcctcctcttaga

SEQ ID NO: 3338693 - DNA, 25 bp, Homo sapien
ggtgttgcctcctcttagatgttct

SEQ ID NO: 3338694 - DNA, 25 bp, Homo sapien
tctgtggttctggtgttgcctcctc

SEQ ID NO: 3338695 - DNA, 25 bp, Homo sapien
gaattacgtccccaagagaactgct

SEQ ID NO: 3338696 - DNA, 25 bp, Homo sapien
gggtccctaatgcttcgttttgcaa

SEQ ID NO: 3338697 - DNA, 25 bp, Homo sapien
cacactgggaggcttaacagaaatt

SEQ ID NO: 3338698 - DNA, 25 bp, Homo sapien
gatgtaaggaaaggatctgtgccag

SEQ ID NO: 3338699 - DNA, 25 bp, Homo sapien
aataccaaggagctcaactgtatgg

SEQ ID NO: 3338700 - DNA, 25 bp, Homo sapien
ggcaattataaacttgccaaccatg

SEQ ID NO: 3338701 - DNA, 25 bp, Homo sapien
caacaatgtgaaggtttttaggcag

SEQ ID NO: 3338702 - DNA, 25 bp, Homo sapien
gcagatatagttttcactcctttgg

SEQ ID NO: 3338703 - DNA, 25 bp, Homo sapien
ttaaacctgacaagatgctgttcat

SEQ ID NO: 3338704 - DNA, 25 bp, Homo sapien
cccaagagcaatatattaaacctga

SEQ ID NO: 3338705 - DNA, 25 bp, Homo sapien
taaggtgtaattcgcagctcaggga

SEQ ID NO: 3338706 - DNA, 25 bp, Homo sapien
tcgtcaaagtaaactccccaagagc

SEQ ID NO: 3338707 - DNA, 25 bp, Homo sapien
tttaacgactgcctctccagcgagg

SEQ ID NO: 3338708 - DNA, 25 bp, Homo sapien
caagaatgtgaagcaacgggattgc

SEQ ID NO: 3338709 - DNA, 25 bp, Homo sapien
taagctaccagtggagaaggccaat

SEQ ID NO: 3338710 - DNA, 25 bp, Homo sapien
taagttggatagaagacatgcccag

SEQ ID NO: 3338711 - DNA, 25 bp, Homo sapien
gtagttttacacagctcaagaaggg

SEQ ID NO: 3338712 - DNA, 25 bp, Homo sapien
catagtcttgtgacacttgagaagc

SEQ ID NO: 3338713 - DNA, 25 bp, Homo sapien
ttatgagaattaccctcccactgta

SEQ ID NO: 3338714 - DNA, 25 bp, Homo sapien
ttcagggaggtcaaaatgactagaa

SEQ ID NO: 3338715 - DNA, 25 bp, Homo sapien
ttcccagaatgagtctaggaatagt

SEQ ID NO: 3338716 - DNA, 25 bp, Homo sapien
gaatgagtctaggaatagttcacaa

SEQ ID NO: 3338717 - DNA, 25 bp, Homo sapien
actattcccagaatgagtctaggaa

SEQ ID NO: 3338718 - DNA, 25 bp, Homo sapien
cccagaatgagtctaggaatagttc

SEQ ID NO: 3338719 - DNA, 25 bp, Homo sapien
cataggaaggatcaggcagcaatat

SEQ ID NO: 3338720 - DNA, 25 bp, Homo sapien
ggacgaagcttccataggaaggatc

SEQ ID NO: 3338721 - DNA, 25 bp, Homo sapien
tccataggaaggatcaggcagcaat

SEQ ID NO: 3338722 - DNA, 25 bp, Homo sapien
cttccataggaaggatcaggcagca

SEQ ID NO: 3338723 - DNA, 25 bp, Homo sapien
tgctgatatcccactaagtcccgtg

SEQ ID NO: 3338724 - DNA, 25 bp, Homo sapien
gaagagctcaggatagccttgtcca

SEQ ID NO: 3338725 - DNA, 25 bp, Homo sapien
cattgattctgtgtctaccacatcc

SEQ ID NO: 3338726 - DNA, 25 bp, Homo sapien
aatatcccactgacatatatgcctg

SEQ ID NO: 3338727 - DNA, 25 bp, Homo sapien
aacttccccatccttaagcaaacat

SEQ ID NO: 3338728 - DNA, 25 bp, Homo sapien
tgattttacgatgttccatgtaaca

SEQ ID NO: 3338729 - DNA, 25 bp, Homo sapien
tgtaacatttgccaatacggagggg

SEQ ID NO: 3338730 - DNA, 25 bp, Homo sapien
gtgagaatttgattttacgatgttc

SEQ ID NO: 3338731 - DNA, 25 bp, Homo sapien
caggtacaactatcccatttacgtg

SEQ ID NO: 3338732 - DNA, 25 bp, Homo sapien
taaaatctcctgaggaattctaagg

SEQ ID NO: 3338733 - DNA, 25 bp, Homo sapien
caggcaatgggatagcaggtacaac

SEQ ID NO: 3338734 - DNA, 25 bp, Homo sapien
gaggaattctaaggctttctcaaag

SEQ ID NO: 3338735 - DNA, 25 bp, Homo sapien
ttctttggacaaatcaacattggct

SEQ ID NO: 3338736 - DNA, 25 bp, Homo sapien
caacattggcttcatgtatggaaat

SEQ ID NO: 3338737 - DNA, 25 bp, Homo sapien
tcaacattggcttcatgtatggaaa

SEQ ID NO: 3338738 - DNA, 25 bp, Homo sapien
ggatgctttctttggacaaatcaac

SEQ ID NO: 3338739 - DNA, 25 bp, Homo sapien
tgactttcctcccttgatcaaaagt

SEQ ID NO: 3338740 - DNA, 25 bp, Homo sapien
cccttgatcaaaagtatgtctcctg

SEQ ID NO: 3338741 - DNA, 25 bp, Homo sapien
tttcctcccttgatcaaaagtatgt

SEQ ID NO: 3338742 - DNA, 25 bp, Homo sapien
gatcaaaagtatgtctcctggagta

SEQ ID NO: 3338743 - DNA, 25 bp, Homo sapien
gcatagtgtatccattttgtcactg

SEQ ID NO: 3338744 - DNA, 25 bp, Homo sapien
tttgtcactgtgaattgttgcagac

SEQ ID NO: 3338745 - DNA, 25 bp, Homo sapien
tgagaggcaaggcatagtgtatcca

SEQ ID NO: 3338746 - DNA, 25 bp, Homo sapien
caaggcatagtgtatccattttgtc

SEQ ID NO: 3338747 - DNA, 25 bp, Homo sapien
caactttcctaatgatgtgatgatt

SEQ ID NO: 3338748 - DNA, 25 bp, Homo sapien
ctttcctaatgatgtgatgatttcc

SEQ ID NO: 3338749 - DNA, 25 bp, Homo sapien
cctaatgatgtgatgatttcctaat

SEQ ID NO: 3338750 - DNA, 25 bp, Homo sapien
ttcctaatgatgtgatgatttccta

SEQ ID NO: 3338751 - DNA, 25 bp, Homo sapien
ttagggattaaccatggtcagcatg

SEQ ID NO: 3338752 - DNA, 25 bp, Homo sapien
cctgagaattggtatcggagctgat

SEQ ID NO: 3338753 - DNA, 25 bp, Homo sapien
taagtaacattccaaatccaaaggc

SEQ ID NO: 3338754 - DNA, 25 bp, Homo sapien
taacttattgtattagccagggctc

SEQ ID NO: 3338755 - DNA, 25 bp, Homo sapien
catggtggctcgtactcatattgga

SEQ ID NO: 3338756 - DNA, 25 bp, Homo sapien
gcaactctagctccttgaactccag

SEQ ID NO: 3338757 - DNA, 25 bp, Homo sapien
tgggacctggtcacaagggcctgat

SEQ ID NO: 3338758 - DNA, 25 bp, Homo sapien
ggtttccagagagcgcagggctcct

SEQ ID NO: 3338759 - DNA, 25 bp, Homo sapien
ggggcgagaggctggggctatagct

SEQ ID NO: 3338760 - DNA, 25 bp, Homo sapien
aggggcgagaggctggggctatagc

SEQ ID NO: 3338761 - DNA, 25 bp, Homo sapien
ctggggacatggccaaggggcgaga

SEQ ID NO: 3338762 - DNA, 25 bp, Homo sapien
ggacatggccaaggggcgagaggct

SEQ ID NO: 3338763 - DNA, 25 bp, Homo sapien
actataagaataggacagcatgaca

SEQ ID NO: 3338764 - DNA, 25 bp, Homo sapien
cacaggttaaataataggagagata

SEQ ID NO: 3338765 - DNA, 25 bp, Homo sapien
tgagaagaaattgcccaacagagaa

SEQ ID NO: 3338766 - DNA, 25 bp, Homo sapien
gcatgacaaagggatagatgtttta

SEQ ID NO: 3338767 - DNA, 25 bp, Homo sapien
aatgtttctcttatctattttcctg

SEQ ID NO: 3338768 - DNA, 25 bp, Homo sapien
gaatgtttctcttatctattttcct

SEQ ID NO: 3338769 - DNA, 25 bp, Homo sapien
tgtctgtcaaacacaatggttttcg

SEQ ID NO: 3338770 - DNA, 25 bp, Homo sapien
cacaatggttttcgttgtagcatgg

SEQ ID NO: 3338771 - DNA, 25 bp, Homo sapien
cagtaagtagccaacaggttcagca

SEQ ID NO: 3338772 - DNA, 25 bp, Homo sapien
gatgttaaactgttctgacagtaag

SEQ ID NO: 3338773 - DNA, 25 bp, Homo sapien
cacctggagatgactagaaacaaga

SEQ ID NO: 3338774 - DNA, 25 bp, Homo sapien
gccgtcagtatcagccatgtagcag

SEQ ID NO: 3338775 - DNA, 25 bp, Homo sapien
gtatcagccatgtagcaggtgccac

SEQ ID NO: 3338776 - DNA, 25 bp, Homo sapien
gtcagtatcagccatgtagcaggtg

SEQ ID NO: 3338777 - DNA, 25 bp, Homo sapien
ctttccccattgagataaccaacag

SEQ ID NO: 3338778 - DNA, 25 bp, Homo sapien
tctttccccattgagataaccaaca

SEQ ID NO: 3338779 - DNA, 25 bp, Homo sapien
catctttccccattgagataaccaa

SEQ ID NO: 3338780 - DNA, 25 bp, Homo sapien
tttccccattgagataaccaacagc

SEQ ID NO: 3338781 - DNA, 25 bp, Homo sapien
tagtgataagagcttcacctcctcc

SEQ ID NO: 3338782 - DNA, 25 bp, Homo sapien
ttttagtgataagagcttcacctcc

SEQ ID NO: 3338783 - DNA, 25 bp, Homo sapien
catctgcagcagtaacttaaacatt

SEQ ID NO: 3338784 - DNA, 25 bp, Homo sapien
ttttttagtgataagagcttcacct

SEQ ID NO: 3338785 - DNA, 25 bp, Homo sapien
ctttttatcccaggcaaacttctga

SEQ ID NO: 3338786 - DNA, 25 bp, Homo sapien
gcaaacttctgatcgccttctccat

SEQ ID NO: 3338787 - DNA, 25 bp, Homo sapien
tatcccaggcaaacttctgatcgcc

SEQ ID NO: 3338788 - DNA, 25 bp, Homo sapien
ggcaaacttctgatcgccttctcca

SEQ ID NO: 3338789 - DNA, 25 bp, Homo sapien
cagcaatgcatgaaccacagagagc

SEQ ID NO: 3338790 - DNA, 25 bp, Homo sapien
cccagggaatgctacaatgtcagac

SEQ ID NO: 3338791 - DNA, 25 bp, Homo sapien
ccctagggctgtaagtattccgtga

SEQ ID NO: 3338792 - DNA, 25 bp, Homo sapien
aattctgtggctaaataaccatccc

SEQ ID NO: 3338793 - DNA, 25 bp, Homo sapien
acaaaattagatataacggatgcct

SEQ ID NO: 3338794 - DNA, 25 bp, Homo sapien
gatacgtttaatgattttcgtctca

SEQ ID NO: 3338795 - DNA, 25 bp, Homo sapien
taacggatgccttgttcaataaagg

SEQ ID NO: 3338796 - DNA, 25 bp, Homo sapien
tagatataacggatgccttgttcaa

SEQ ID NO: 3338797 - DNA, 25 bp, Homo sapien
catgaatgtacgagttggcttctta

SEQ ID NO: 3338798 - DNA, 25 bp, Homo sapien
gaatgtacgagttggcttcttatga

SEQ ID NO: 3338799 - DNA, 25 bp, Homo sapien
tgtatcatgaatgtacgagttggct

SEQ ID NO: 3338800 - DNA, 25 bp, Homo sapien
cgagttggcttcttatgattgtcag

SEQ ID NO: 3338801 - DNA, 25 bp, Homo sapien
catggtctacttatagttgctaagc

SEQ ID NO: 3338802 - DNA, 25 bp, Homo sapien
attggacacttttaccatggtctac

SEQ ID NO: 3338803 - DNA, 25 bp, Homo sapien
taatcactaccagttattggacact

SEQ ID NO: 3338804 - DNA, 25 bp, Homo sapien
cattttgctcaacgaaagaatgaca

SEQ ID NO: 3338805 - DNA, 25 bp, Homo sapien
agaccttaaatgaccccatgaagct

SEQ ID NO: 3338806 - DNA, 25 bp, Homo sapien
gtgacggccagaatggaaccaaggt

SEQ ID NO: 3338807 - DNA, 25 bp, Homo sapien
atgaccccatgaagctgaaaaccat

SEQ ID NO: 3338808 - DNA, 25 bp, Homo sapien
ccagaatggaaccaaggtggaaatc

SEQ ID NO: 3338809 - DNA, 25 bp, Homo sapien
tccttcagaaactattccaatcaag

SEQ ID NO: 3338810 - DNA, 25 bp, Homo sapien
tcagaaactattccaatcaagagaa

SEQ ID NO: 3338811 - DNA, 25 bp, Homo sapien
agaaactattccaatcaagagaaaa

SEQ ID NO: 3338812 - DNA, 25 bp, Homo sapien
cttcagaaactattccaatcaagag

SEQ ID NO: 3338813 - DNA, 25 bp, Homo sapien
aagggatgtgaaggagaactacaca

SEQ ID NO: 3338814 - DNA, 25 bp, Homo sapien
ttttagaccaatatgtttcaggatg

SEQ ID NO: 3338815 - DNA, 25 bp, Homo sapien
gaccaatatgtttcaggatgcagca

SEQ ID NO: 3338816 - DNA, 25 bp, Homo sapien
gaaggagaactacacaaccacttct

SEQ ID NO: 3338817 - DNA, 25 bp, Homo sapien
gattaagaaaatgtgacatatatat

SEQ ID NO: 3338818 - DNA, 25 bp, Homo sapien
accatggaatactatgcagccataa

SEQ ID NO: 3338819 - DNA, 25 bp, Homo sapien
aaaaggatgagttcatgtcctttgc

SEQ ID NO: 3338820 - DNA, 25 bp, Homo sapien
tcattctaagccaactatcgcaagg

SEQ ID NO: 3338821 - DNA, 25 bp, Homo sapien
tctggctgtgacttacttaagagca

SEQ ID NO: 3338822 - DNA, 25 bp, Homo sapien
tctctatgaagacatcgacatctct

SEQ ID NO: 3338823 - DNA, 25 bp, Homo sapien
taagtcactatctactctggctgtg

SEQ ID NO: 3338824 - DNA, 25 bp, Homo sapien
gatgtaacccgctaggcatgcactg

SEQ ID NO: 3338825 - DNA, 25 bp, Homo sapien
catatctgtgacttaatgaaattct

SEQ ID NO: 3338826 - DNA, 25 bp, Homo sapien
gaaattctgtagaatcttactacga

SEQ ID NO: 3338827 - DNA, 25 bp, Homo sapien
caacacatgaagcagcagattctag

SEQ ID NO: 3338828 - DNA, 25 bp, Homo sapien
gaatcttactacgagaactgtcaac

SEQ ID NO: 3338829 - DNA, 25 bp, Homo sapien
ctggatggctttatcagttggactg

SEQ ID NO: 3338830 - DNA, 25 bp, Homo sapien
tacatacatcataagacaaaatgga

SEQ ID NO: 3338831 - DNA, 25 bp, Homo sapien
ctgtaactaagaattcatcagattc

SEQ ID NO: 3338832 - DNA, 25 bp, Homo sapien
tatcagttggactggcttcttctaa

SEQ ID NO: 3338833 - DNA, 25 bp, Homo sapien
ggatgtagtccaccaataaaggaag

SEQ ID NO: 3338834 - DNA, 25 bp, Homo sapien
tcaacaatttacctcccatgtggag

SEQ ID NO: 3338835 - DNA, 25 bp, Homo sapien
gtaaaccaagaatgatgaagacctg

SEQ ID NO: 3338836 - DNA, 25 bp, Homo sapien
tgccttcgaacataggactcccaag

SEQ ID NO: 3338837 - DNA, 25 bp, Homo sapien
tcagatctaacgatgagaaccacgg

SEQ ID NO: 3338838 - DNA, 25 bp, Homo sapien
gaacataagagttgtatcaggctga

SEQ ID NO: 3338839 - DNA, 25 bp, Homo sapien
tgatccatgaggaggtgcactacaa

SEQ ID NO: 3338840 - DNA, 25 bp, Homo sapien
gagaggtggaaatacctgatctccc

SEQ ID NO: 3338841 - DNA, 25 bp, Homo sapien
tgaaaatggtaccaccatcacccct

SEQ ID NO: 3338842 - DNA, 25 bp, Homo sapien
agtgaaaatggtaccaccatcaccc

SEQ ID NO: 3338843 - DNA, 25 bp, Homo sapien
gaagtgaaaatggtaccaccatcac

SEQ ID NO: 3338844 - DNA, 25 bp, Homo sapien
tggaagtgaaaatggtaccaccatc

SEQ ID NO: 3338845 - DNA, 25 bp, Homo sapien
catcttgacatgaataatcatcatt

SEQ ID NO: 3338846 - DNA, 25 bp, Homo sapien
ttagatagcatgaagtttgacttca

SEQ ID NO: 3338847 - DNA, 25 bp, Homo sapien
cttgtttccaaaaatgataatcatt

SEQ ID NO: 3338848 - DNA, 25 bp, Homo sapien
acttgtttccaaaaatgataatcat

SEQ ID NO: 3338849 - DNA, 25 bp, Homo sapien
tattcacaagtaccaacgaacagcc

SEQ ID NO: 3338850 - DNA, 25 bp, Homo sapien
tcaagaaactcagacatcgtaggcc

SEQ ID NO: 3338851 - DNA, 25 bp, Homo sapien
ttgccctgtgaagaattaggcttct

SEQ ID NO: 3338852 - DNA, 25 bp, Homo sapien
acgaacagcccagtgtggaaatggc

SEQ ID NO: 3338853 - DNA, 25 bp, Homo sapien
ggttgaacactaaccctgacaagtg

SEQ ID NO: 3338854 - DNA, 25 bp, Homo sapien
tgacaagtgtggagagccaactaca

SEQ ID NO: 3338855 - DNA, 25 bp, Homo sapien
gccaagagctatggtccatctaaag

SEQ ID NO: 3338856 - DNA, 25 bp, Homo sapien
taaaaatgcactagctgccaagagc

SEQ ID NO: 3338857 - DNA, 25 bp, Homo sapien
tgtgtttgacaaaaatacgttctta

SEQ ID NO: 3338858 - DNA, 25 bp, Homo sapien
tcaaggagataatgctgcccttgac

SEQ ID NO: 3338859 - DNA, 25 bp, Homo sapien
ggcagccacacatcatactcattat

SEQ ID NO: 3338860 - DNA, 25 bp, Homo sapien
acctttcagaaaagagctcaatgca

SEQ ID NO: 3338861 - DNA, 25 bp, Homo sapien
taccgataatcctgaacctggtcaa

SEQ ID NO: 3338862 - DNA, 25 bp, Homo sapien
tgaattccatatctgccttagacaa

SEQ ID NO: 3338863 - DNA, 25 bp, Homo sapien
caggttaaatggagttcagtgagtc

SEQ ID NO: 3338864 - DNA, 25 bp, Homo sapien
gataattccatgctaccgataatcc

SEQ ID NO: 3338865 - DNA, 25 bp, Homo sapien
tatgagcatggttcatggcgtccca

SEQ ID NO: 3338866 - DNA, 25 bp, Homo sapien
tagaaacaggaattgagcacaagct

SEQ ID NO: 3338867 - DNA, 25 bp, Homo sapien
gaagagaattaggaccatactgtgg

SEQ ID NO: 3338868 - DNA, 25 bp, Homo sapien
gcaagaggcctagttttcagcatat

SEQ ID NO: 3338869 - DNA, 25 bp, Homo sapien
gagacttgaagattcattgattctt

SEQ ID NO: 3338870 - DNA, 25 bp, Homo sapien
tcattcctttatcctgagacttgaa

SEQ ID NO: 3338871 - DNA, 25 bp, Homo sapien
cctgagacttgaagattcattgatt

SEQ ID NO: 3338872 - DNA, 25 bp, Homo sapien
ttctcattcctttatcctgagactt

SEQ ID NO: 3338873 - DNA, 25 bp, Homo sapien
tattcaagcacaggaagtacacatc

SEQ ID NO: 3338874 - DNA, 25 bp, Homo sapien
taatctattcaagcacaggaagtac

SEQ ID NO: 3338875 - DNA, 25 bp, Homo sapien
aaaacttaagaagactaagagctga

SEQ ID NO: 3338876 - DNA, 25 bp, Homo sapien
ggaagtacacatcaaccagcatggc

SEQ ID NO: 3338877 - DNA, 25 bp, Homo sapien
caactgaagaatctaggaagtgagt

SEQ ID NO: 3338878 - DNA, 25 bp, Homo sapien
taactctaccaatatatcacactgg

SEQ ID NO: 3338879 - DNA, 25 bp, Homo sapien
ggtgaaatggacaaatatgcacaag

SEQ ID NO: 3338880 - DNA, 25 bp, Homo sapien
caaaactcaccaagtaatatactta

SEQ ID NO: 3338881 - DNA, 25 bp, Homo sapien
catcagatttgtagtctgcataaat

SEQ ID NO: 3338882 - DNA, 25 bp, Homo sapien
ttttaaatgacatcagcactttaat

SEQ ID NO: 3338883 - DNA, 25 bp, Homo sapien
aatcttgctttatctctcaggccag

SEQ ID NO: 3338884 - DNA, 25 bp, Homo sapien
tggcccaagcgatccatgtcagctt

SEQ ID NO: 3338885 - DNA, 25 bp, Homo sapien
actgcacccaatctactatttttta

SEQ ID NO: 3338886 - DNA, 25 bp, Homo sapien
tggaatacaacacaccaggaggtct

SEQ ID NO: 3338887 - DNA, 25 bp, Homo sapien
tgagtttacactcttcaaaaggaag

SEQ ID NO: 3338888 - DNA, 25 bp, Homo sapien
tactcccttctgagcacatcctaga

SEQ ID NO: 3338889 - DNA, 25 bp, Homo sapien
taaactcactgtcaactaaaactgc

SEQ ID NO: 3338890 - DNA, 25 bp, Homo sapien
tagattgtcatctcgtaactgatcc

SEQ ID NO: 3338891 - DNA, 25 bp, Homo sapien
gaattggatgttcactaaatgaggc

SEQ ID NO: 3338892 - DNA, 25 bp, Homo sapien
ccatctgattgccaataagtttcta

SEQ ID NO: 3338893 - DNA, 25 bp, Homo sapien
tctcgtaactgatccactccaaatc

SEQ ID NO: 3338894 - DNA, 25 bp, Homo sapien
ggctattttaactgaggcaaatgtc

SEQ ID NO: 3338895 - DNA, 25 bp, Homo sapien
ctatgaagacctaaagatagataca

SEQ ID NO: 3338896 - DNA, 25 bp, Homo sapien
tcaacctccttaggctctgctaggg

SEQ ID NO: 3338897 - DNA, 25 bp, Homo sapien
gagaagttcatccatatcatgcact

SEQ ID NO: 3338898 - DNA, 25 bp, Homo sapien
cagcttgtgacccaatttcccgtac

SEQ ID NO: 3338899 - DNA, 25 bp, Homo sapien
gcaagatgagagtgaccaaacagct

SEQ ID NO: 3338900 - DNA, 25 bp, Homo sapien
gagtgaccaaacagcttgtgaccca

SEQ ID NO: 3338901 - DNA, 25 bp, Homo sapien
tgtgacccaatttcccgtactgttc

SEQ ID NO: 3338902 - DNA, 25 bp, Homo sapien
aagtgaataactggcccattctaaa

SEQ ID NO: 3338903 - DNA, 25 bp, Homo sapien
cattctaaaaaggttgacctcatct

SEQ ID NO: 3338904 - DNA, 25 bp, Homo sapien
tctaaaaaggttgacctcatctttc

SEQ ID NO: 3338905 - DNA, 25 bp, Homo sapien
tgaagtgaataactggcccattcta

SEQ ID NO: 3338906 - DNA, 25 bp, Homo sapien
gttgttctttaatcggcacacaagc

SEQ ID NO: 3338907 - DNA, 25 bp, Homo sapien
tcggcacacaagcacttgatactta

SEQ ID NO: 3338908 - DNA, 25 bp, Homo sapien
ctcccattgtatccgaagttgttct

SEQ ID NO: 3338909 - DNA, 25 bp, Homo sapien
tgacacctcccattgtatccgaagt

SEQ ID NO: 3338910 - DNA, 25 bp, Homo sapien
cagttatgaactagttgtcacttgc

SEQ ID NO: 3338911 - DNA, 25 bp, Homo sapien
taggttcagttatgaactagttgtc

SEQ ID NO: 3338912 - DNA, 25 bp, Homo sapien
tcagttatgaactagttgtcacttg

SEQ ID NO: 3338913 - DNA, 25 bp, Homo sapien
aataggttcagttatgaactagttg

SEQ ID NO: 3338914 - DNA, 25 bp, Homo sapien
agatctagggcgagactattcaacc

SEQ ID NO: 3338915 - DNA, 25 bp, Homo sapien
ctgcaagttaggtgagatctagggc

SEQ ID NO: 3338916 - DNA, 25 bp, Homo sapien
ccatcattactaactgaatgtcctg

SEQ ID NO: 3338917 - DNA, 25 bp, Homo sapien
gagactattcaacctgcaaccatca

SEQ ID NO: 3338918 - DNA, 25 bp, Homo sapien
agtggataaaatatggagctcggaa

SEQ ID NO: 3338919 - DNA, 25 bp, Homo sapien
ttagggcagaattcaactgccggac

SEQ ID NO: 3338920 - DNA, 25 bp, Homo sapien
gaaataaagcccatctttagggcag

SEQ ID NO: 3338921 - DNA, 25 bp, Homo sapien
gactggacgccaccaagtggataaa

SEQ ID NO: 3338922 - DNA, 25 bp, Homo sapien
tgcatctgtttacgctaggaccacg

SEQ ID NO: 3338923 - DNA, 25 bp, Homo sapien
ttgaaaccggagaggcgaatgcatc

SEQ ID NO: 3338924 - DNA, 25 bp, Homo sapien
gccttgaggaaagcgcaaacgtaaa

SEQ ID NO: 3338925 - DNA, 25 bp, Homo sapien
gacacctccagcgttagaatgacta

SEQ ID NO: 3338926 - DNA, 25 bp, Homo sapien
caagggtcgcagctcaatgacgtca

SEQ ID NO: 3338927 - DNA, 25 bp, Homo sapien
agcagctggcttcgccaacggcgtt

SEQ ID NO: 3338928 - DNA, 25 bp, Homo sapien
tggctgcttgccgaaactcagattc

SEQ ID NO: 3338929 - DNA, 25 bp, Homo sapien
gaaactcagattctcggcacctcca

SEQ ID NO: 3338930 - DNA, 25 bp, Homo sapien
tacgtcctatggcttgcgcgtgcgg

SEQ ID NO: 3338931 - DNA, 25 bp, Homo sapien
cattttggccggtggccgtgagaac

SEQ ID NO: 3338932 - DNA, 25 bp, Homo sapien
aatgtagggacgttctccgagagcc

SEQ ID NO: 3338933 - DNA, 25 bp, Homo sapien
tttctccaggtacgtgaatagcccg

SEQ ID NO: 3338934 - DNA, 25 bp, Homo sapien
ctagatgtcaagcagcgtttaaagg

SEQ ID NO: 3338935 - DNA, 25 bp, Homo sapien
taaaggctgctattactatacgatc

SEQ ID NO: 3338936 - DNA, 25 bp, Homo sapien
gcagcgtttaaaggctgctattact

SEQ ID NO: 3338937 - DNA, 25 bp, Homo sapien
tgtcaagcagcgtttaaaggctgct

SEQ ID NO: 3338938 - DNA, 25 bp, Homo sapien
gaagcagacccttagcttttaccag

SEQ ID NO: 3338939 - DNA, 25 bp, Homo sapien
tctaaggattaaacactgggactgt

SEQ ID NO: 3338940 - DNA, 25 bp, Homo sapien
cccgcttccagggagcttaggaata

SEQ ID NO: 3338941 - DNA, 25 bp, Homo sapien
tccgtagctttataggaagcagacc

SEQ ID NO: 3338942 - DNA, 25 bp, Homo sapien
tttgaacaggattacctggagcctg

SEQ ID NO: 3338943 - DNA, 25 bp, Homo sapien
gcctggagccactttaagttgtact

SEQ ID NO: 3338944 - DNA, 25 bp, Homo sapien
cttccctaaaggcaacattaatgca

SEQ ID NO: 3338945 - DNA, 25 bp, Homo sapien
caatacaaagtatcccctggtacca

SEQ ID NO: 3338946 - DNA, 25 bp, Homo sapien
gctatattacctggttaaccctgga

SEQ ID NO: 3338947 - DNA, 25 bp, Homo sapien
tacatgctatattacctggttaacc

SEQ ID NO: 3338948 - DNA, 25 bp, Homo sapien
tacaaaaattctcaagatctacatg

SEQ ID NO: 3338949 - DNA, 25 bp, Homo sapien
caagatctacatgctatattacctg

SEQ ID NO: 3338950 - DNA, 25 bp, Homo sapien
catgagctgaaagtggaggaccctc

SEQ ID NO: 3338951 - DNA, 25 bp, Homo sapien
aagtgatacacaaccaatggtgcgg

SEQ ID NO: 3338952 - DNA, 25 bp, Homo sapien
tatgaggactacacagatgccagca

SEQ ID NO: 3338953 - DNA, 25 bp, Homo sapien
gagtcacaaaggaaacaacacgctg

SEQ ID NO: 3338954 - DNA, 25 bp, Homo sapien
tgttagaaaatacttcggcaacaac

SEQ ID NO: 3338955 - DNA, 25 bp, Homo sapien
ttagaaaatacttcggcaacaacca

SEQ ID NO: 3338956 - DNA, 25 bp, Homo sapien
gaaacattccacctaagagtttctg

SEQ ID NO: 3338957 - DNA, 25 bp, Homo sapien
ctggcctcagtctgcataggaaagt

SEQ ID NO: 3338958 - DNA, 25 bp, Homo sapien
tggcctcagtctgcataggaaagtg

SEQ ID NO: 3338959 - DNA, 25 bp, Homo sapien
gtgaccccatgcaggccagttaaca

SEQ ID NO: 3338960 - DNA, 25 bp, Homo sapien
caggactctgcaattctaggagccc

SEQ ID NO: 3338961 - DNA, 25 bp, Homo sapien
gatgatctccaatgtcaggactctg

SEQ ID NO: 3338962 - DNA, 25 bp, Homo sapien
cactgactgtttagccagacctgca

SEQ ID NO: 3338963 - DNA, 25 bp, Homo sapien
gattgaagaagaatcgaagaatatt

SEQ ID NO: 3338964 - DNA, 25 bp, Homo sapien
ttgaagaagaatcgaagaatattct

SEQ ID NO: 3338965 - DNA, 25 bp, Homo sapien
caagattgaagaagaatcgaagaat

SEQ ID NO: 3338966 - DNA, 25 bp, Homo sapien
aagattgaagaagaatcgaagaata

SEQ ID NO: 3338967 - DNA, 25 bp, Homo sapien
tttaggtaggtcctccccagtctga

SEQ ID NO: 3338968 - DNA, 25 bp, Homo sapien
gcatcaagggctggttaactgcctg

SEQ ID NO: 3338969 - DNA, 25 bp, Homo sapien
gcctgtattgacacaggaactggag

SEQ ID NO: 3338970 - DNA, 25 bp, Homo sapien
ttcattacaaggaaacccaggatag

SEQ ID NO: 3338971 - DNA, 25 bp, Homo sapien
cttttagtatcaaccaagagccctc

SEQ ID NO: 3338972 - DNA, 25 bp, Homo sapien
caggatacaagctctgagtcaatgt

SEQ ID NO: 3338973 - DNA, 25 bp, Homo sapien
tcaaggggttcattacggggccata

SEQ ID NO: 3338974 - DNA, 25 bp, Homo sapien
tcttgcaggcacgtgtaggacatgg

SEQ ID NO: 3338975 - DNA, 25 bp, Homo sapien
ccaagaaggaaatacgtccaggata

SEQ ID NO: 3338976 - DNA, 25 bp, Homo sapien
tgtacctctggagaaactagaaggg

SEQ ID NO: 3338977 - DNA, 25 bp, Homo sapien
tgttggtccaaaagttgtaggttca

SEQ ID NO: 3338978 - DNA, 25 bp, Homo sapien
atgtacctctggagaaactagaagg

SEQ ID NO: 3338979 - DNA, 25 bp, Homo sapien
caaaagttgtaggttcacttggcca

SEQ ID NO: 3338980 - DNA, 25 bp, Homo sapien
ggagaagggcactctaacttctttg

SEQ ID NO: 3338981 - DNA, 25 bp, Homo sapien
gagaagggcactctaacttctttga

SEQ ID NO: 3338982 - DNA, 25 bp, Homo sapien
gaagggcactctaacttctttgact

SEQ ID NO: 3338983 - DNA, 25 bp, Homo sapien
aagggcactctaacttctttgactt

SEQ ID NO: 3338984 - DNA, 25 bp, Homo sapien
tatccaactgactatgtccatgaat

SEQ ID NO: 3338985 - DNA, 25 bp, Homo sapien
aatgtgcttggttcgggtcttttat

SEQ ID NO: 3338986 - DNA, 25 bp, Homo sapien
tttatccaactgactatgtccatga

SEQ ID NO: 3338987 - DNA, 25 bp, Homo sapien
tggttcgggtcttttatccaactga

SEQ ID NO: 3338988 - DNA, 25 bp, Homo sapien
ttctgtatccattctccgcctgctt

SEQ ID NO: 3338989 - DNA, 25 bp, Homo sapien
tctgtatccattctccgcctgcttc

SEQ ID NO: 3338990 - DNA, 25 bp, Homo sapien
catggattgctactctgagaagctg

SEQ ID NO: 3338991 - DNA, 25 bp, Homo sapien
acccttgggaactatggcttaatct

SEQ ID NO: 3338992 - DNA, 25 bp, Homo sapien
tacccttgggaactatggcttaatc

SEQ ID NO: 3338993 - DNA, 25 bp, Homo sapien
ctgaatctcatagagtaaacgggat

SEQ ID NO: 3338994 - DNA, 25 bp, Homo sapien
cttctctctgcgctcttctggggaa

SEQ ID NO: 3338995 - DNA, 25 bp, Homo sapien
gattcttctatagcttgcttctctc

SEQ ID NO: 3338996 - DNA, 25 bp, Homo sapien
agagtaaacgggattcttctatagc

SEQ ID NO: 3338997 - DNA, 25 bp, Homo sapien
gagtttgatctgtaactgactgtga

SEQ ID NO: 3338998 - DNA, 25 bp, Homo sapien
ctgagataactcacgaccttcacac

SEQ ID NO: 3338999 - DNA, 25 bp, Homo sapien
taagactagccaactacagtagtga

SEQ ID NO: 3339000 - DNA, 25 bp, Homo sapien
agaaggggtgaaagagtagaacaag

SEQ ID NO: 3339001 - DNA, 25 bp, Homo sapien
tagtcacctatgaagactccacagg

SEQ ID NO: 3339002 - DNA, 25 bp, Homo sapien
gctacagctcttcgggcaattgaga

SEQ ID NO: 3339003 - DNA, 25 bp, Homo sapien
ggaaacacggtcatatttgcacgat

SEQ ID NO: 3339004 - DNA, 25 bp, Homo sapien
gaccagagggttagcaaacacataa

SEQ ID NO: 3339005 - DNA, 25 bp, Homo sapien
cttatgatctgtgaaggtgtccggc

SEQ ID NO: 3339006 - DNA, 25 bp, Homo sapien
gctaagatttttgtgctcactggag

SEQ ID NO: 3339007 - DNA, 25 bp, Homo sapien
ctcactggagaatttctgagactgt

SEQ ID NO: 3339008 - DNA, 25 bp, Homo sapien
aaggtgtccggctaagatttttgtg

SEQ ID NO: 3339009 - DNA, 25 bp, Homo sapien
tataaacaatcccaagtaccatcat

SEQ ID NO: 3339010 - DNA, 25 bp, Homo sapien
tattataaacaatcccaagtaccat

SEQ ID NO: 3339011 - DNA, 25 bp, Homo sapien
aaaggaatgatagcttgatgtgctc

SEQ ID NO: 3339012 - DNA, 25 bp, Homo sapien
caatcccaaaggaatgatagcttga

SEQ ID NO: 3339013 - DNA, 25 bp, Homo sapien
cctgacactgtgttccagctttctg

SEQ ID NO: 3339014 - DNA, 25 bp, Homo sapien
ccctgacactgtgttccagctttct

SEQ ID NO: 3339015 - DNA, 25 bp, Homo sapien
tcaaaaattttccattgtgatccaa

SEQ ID NO: 3339016 - DNA, 25 bp, Homo sapien
aattttccattgtgatccaacctaa

SEQ ID NO: 3339017 - DNA, 25 bp, Homo sapien
aaccaaaactggtccattctcagaa

SEQ ID NO: 3339018 - DNA, 25 bp, Homo sapien
cagaatgaattccttgaacatctgc

SEQ ID NO: 3339019 - DNA, 25 bp, Homo sapien
gcacaatatgttaaggctctaaaca

SEQ ID NO: 3339020 - DNA, 25 bp, Homo sapien
gtacctacgtcacagaactcatgga

SEQ ID NO: 3339021 - DNA, 25 bp, Homo sapien
cacttgccagcaatatgaccttggg

SEQ ID NO: 3339022 - DNA, 25 bp, Homo sapien
aattgttcaaaaagtaggagcacaa

SEQ ID NO: 3339023 - DNA, 25 bp, Homo sapien
catctactttatcaaaagcacctac

SEQ ID NO: 3339024 - DNA, 25 bp, Homo sapien
ctacaattagagcagatttatgaca

SEQ ID NO: 3339025 - DNA, 25 bp, Homo sapien
gactttagtgatacagcataagcca

SEQ ID NO: 3339026 - DNA, 25 bp, Homo sapien
gcttgacttaaaataagtaacacga

SEQ ID NO: 3339027 - DNA, 25 bp, Homo sapien
taacaatcagctactcaaatccagg

SEQ ID NO: 3339028 - DNA, 25 bp, Homo sapien
ttgaaccaagtaataccaaaggctg

SEQ ID NO: 3339029 - DNA, 25 bp, Homo sapien
catgtgatgggatgccacggtttta

SEQ ID NO: 3339030 - DNA, 25 bp, Homo sapien
tgtgtacgtatcaacatctcccaag

SEQ ID NO: 3339031 - DNA, 25 bp, Homo sapien
cttcatattgtaagccagcagcaat

SEQ ID NO: 3339032 - DNA, 25 bp, Homo sapien
ttcatattgtaagccagcagcaatg

SEQ ID NO: 3339033 - DNA, 25 bp, Homo sapien
catattccacatttctatagactgc

SEQ ID NO: 3339034 - DNA, 25 bp, Homo sapien
tcagccaaatttcatattccacatt

SEQ ID NO: 3339035 - DNA, 25 bp, Homo sapien
cttgtttagacttcagccaaatttc

SEQ ID NO: 3339036 - DNA, 25 bp, Homo sapien
actgcaggattgagtgacttaagaa

SEQ ID NO: 3339037 - DNA, 25 bp, Homo sapien
caaaggcaggctagtagagttccca

SEQ ID NO: 3339038 - DNA, 25 bp, Homo sapien
caggctagtagagttcccattgttc

SEQ ID NO: 3339039 - DNA, 25 bp, Homo sapien
ctagacaaaggcaggctagtagagt

SEQ ID NO: 3339040 - DNA, 25 bp, Homo sapien
gctagtagagttcccattgttcttc

SEQ ID NO: 3339041 - DNA, 25 bp, Homo sapien
caaagtcaggaagtccaatcaacac

SEQ ID NO: 3339042 - DNA, 25 bp, Homo sapien
gagatacacgtaaaactaaagtcaa

SEQ ID NO: 3339043 - DNA, 25 bp, Homo sapien
tctgagtagatgatcctgacttgac

SEQ ID NO: 3339044 - DNA, 25 bp, Homo sapien
aaattaggaagccaccaaatcaatt

SEQ ID NO: 3339045 - DNA, 25 bp, Homo sapien
ttaaatccattcacatcagcagcag

SEQ ID NO: 3339046 - DNA, 25 bp, Homo sapien
taaatccattcacatcagcagcagc

SEQ ID NO: 3339047 - DNA, 25 bp, Homo sapien
attgcctgacaaaggtttaaatcca

SEQ ID NO: 3339048 - DNA, 25 bp, Homo sapien
ctcattgcctgacaaaggtttaaat

SEQ ID NO: 3339049 - DNA, 25 bp, Homo sapien
tcatctaaacgtcttcaaagtcaga

SEQ ID NO: 3339050 - DNA, 25 bp, Homo sapien
tccagtgagctcatacaagttttgg

SEQ ID NO: 3339051 - DNA, 25 bp, Homo sapien
caacagtaattctaactggctcagt

SEQ ID NO: 3339052 - DNA, 25 bp, Homo sapien
cagaaaaaggtatttgcacgtaatt

SEQ ID NO: 3339053 - DNA, 25 bp, Homo sapien
cagcagactgctgtattttatgaat

SEQ ID NO: 3339054 - DNA, 25 bp, Homo sapien
tatgcatctagattgcagacgtaaa

SEQ ID NO: 3339055 - DNA, 25 bp, Homo sapien
cttgtatggcactaagaaaggtatt

SEQ ID NO: 3339056 - DNA, 25 bp, Homo sapien
cattactgggtatgtgaacaattga

SEQ ID NO: 3339057 - DNA, 25 bp, Homo sapien
gtctagttccatcacaattttacta

SEQ ID NO: 3339058 - DNA, 25 bp, Homo sapien
tcagctacttccaacgtgtctagtt

SEQ ID NO: 3339059 - DNA, 25 bp, Homo sapien
acttccaacgtgtctagttccatca

SEQ ID NO: 3339060 - DNA, 25 bp, Homo sapien
gctacttccaacgtgtctagttcca

SEQ ID NO: 3339061 - DNA, 25 bp, Homo sapien
tgacacatagcagagctttctttat

SEQ ID NO: 3339062 - DNA, 25 bp, Homo sapien
gggatacacaatatcataatgattt

SEQ ID NO: 3339063 - DNA, 25 bp, Homo sapien
gacacatagcagagctttctttata

SEQ ID NO: 3339064 - DNA, 25 bp, Homo sapien
acatagcagagctttctttatactt

SEQ ID NO: 3339065 - DNA, 25 bp, Homo sapien
gaggttcactcttgatccccgggct

SEQ ID NO: 3339066 - DNA, 25 bp, Homo sapien
atcagaataccataaccttaataca

SEQ ID NO: 3339067 - DNA, 25 bp, Homo sapien
caccgcacccggctataggaacttt

SEQ ID NO: 3339068 - DNA, 25 bp, Homo sapien
cagaataccataaccttaatacaga

SEQ ID NO: 3339069 - DNA, 25 bp, Homo sapien
tgaaggagaaacatttggttcccga

SEQ ID NO: 3339070 - DNA, 25 bp, Homo sapien
ttctgttacttgtgaaggagaaaca

SEQ ID NO: 3339071 - DNA, 25 bp, Homo sapien
ttacttgtgaaggagaaacatttgg

SEQ ID NO: 3339072 - DNA, 25 bp, Homo sapien
ttattttctgttacttgtgaaggag

SEQ ID NO: 3339073 - DNA, 25 bp, Homo sapien
aaggaatacccaatttgtaacatgg

SEQ ID NO: 3339074 - DNA, 25 bp, Homo sapien
cattcaataccactgaccctgagaa

SEQ ID NO: 3339075 - DNA, 25 bp, Homo sapien
tacggttctagtggccattcaatac

SEQ ID NO: 3339076 - DNA, 25 bp, Homo sapien
gatatcttacagaacatagaccgga

SEQ ID NO: 3339077 - DNA, 25 bp, Homo sapien
ctgtacataagagaaagggcactta

SEQ ID NO: 3339078 - DNA, 25 bp, Homo sapien
aagggcacttatttccacttgtcct

SEQ ID NO: 3339079 - DNA, 25 bp, Homo sapien
gcacttatttccacttgtcctaccc

SEQ ID NO: 3339080 - DNA, 25 bp, Homo sapien
ttatttccacttgtcctacccattc

SEQ ID NO: 3339081 - DNA, 25 bp, Homo sapien
gagacagggaagttaacatgaggaa

SEQ ID NO: 3339082 - DNA, 25 bp, Homo sapien
cctaaattgacaatagagacaggga

SEQ ID NO: 3339083 - DNA, 25 bp, Homo sapien
aaatgacctagaaaaatcactcaag

SEQ ID NO: 3339084 - DNA, 25 bp, Homo sapien
gccacactatagaatatcatgcatt

SEQ ID NO: 3339085 - DNA, 25 bp, Homo sapien
caggagttggtgagtaagtgctatc

SEQ ID NO: 3339086 - DNA, 25 bp, Homo sapien
ttccctcttcacgagatgatcatgg

SEQ ID NO: 3339087 - DNA, 25 bp, Homo sapien
tgactgaaaaagtatagcagcagga

SEQ ID NO: 3339088 - DNA, 25 bp, Homo sapien
gatactcgggagacaaatcgcttga

SEQ ID NO: 3339089 - DNA, 25 bp, Homo sapien
aatattcttcaaatgatccttctat

SEQ ID NO: 3339090 - DNA, 25 bp, Homo sapien
ttccaaacgctttaaatattcttca

SEQ ID NO: 3339091 - DNA, 25 bp, Homo sapien
tccaaacgctttaaatattcttcaa

SEQ ID NO: 3339092 - DNA, 25 bp, Homo sapien
attcttcaaatgatccttctataaa

SEQ ID NO: 3339093 - DNA, 25 bp, Homo sapien
cattacatgtttgaaattacaagtt

SEQ ID NO: 3339094 - DNA, 25 bp, Homo sapien
ttacatgtttgaaattacaagttac

SEQ ID NO: 3339095 - DNA, 25 bp, Homo sapien
attacatgtttgaaattacaagtta

SEQ ID NO: 3339096 - DNA, 25 bp, Homo sapien
ctcgaagatagtgaatacaggccat

SEQ ID NO: 3339097 - DNA, 25 bp, Homo sapien
tctctgttctctcgaagatagtgaa

SEQ ID NO: 3339098 - DNA, 25 bp, Homo sapien
ttctctctgttctctcgaagatagt

SEQ ID NO: 3339099 - DNA, 25 bp, Homo sapien
tgttctctcgaagatagtgaataca

SEQ ID NO: 3339100 - DNA, 25 bp, Homo sapien
acatggcgagactgagagtgcaata

SEQ ID NO: 3339101 - DNA, 25 bp, Homo sapien
catggcgagactgagagtgcaatac

SEQ ID NO: 3339102 - DNA, 25 bp, Homo sapien
aacatggcgagactgagagtgcaat

SEQ ID NO: 3339103 - DNA, 25 bp, Homo sapien
aacagtacgttataaatacgggctg

SEQ ID NO: 3339104 - DNA, 25 bp, Homo sapien
caaactcttgctaggtctaacagta

SEQ ID NO: 3339105 - DNA, 25 bp, Homo sapien
gctaggtctaacagtacgttataaa

SEQ ID NO: 3339106 - DNA, 25 bp, Homo sapien
acgttataaatacgggctgaattca

SEQ ID NO: 3339107 - DNA, 25 bp, Homo sapien
ttcatcaggagagagacaccccgtt

SEQ ID NO: 3339108 - DNA, 25 bp, Homo sapien
ctcttcatcaggagagagacacccc

SEQ ID NO: 3339109 - DNA, 25 bp, Homo sapien
aggagagagacaccccgttaatttg

SEQ ID NO: 3339110 - DNA, 25 bp, Homo sapien
tcaggagagagacaccccgttaatt

SEQ ID NO: 3339111 - DNA, 25 bp, Homo sapien
ttcagacgcaaagcagcgtcccact

SEQ ID NO: 3339112 - DNA, 25 bp, Homo sapien
tcaatttgcacctttcagacgcaaa

SEQ ID NO: 3339113 - DNA, 25 bp, Homo sapien
cgtcccactccggcgttacaatggg

SEQ ID NO: 3339114 - DNA, 25 bp, Homo sapien
tgcacctttcagacgcaaagcagcg

SEQ ID NO: 3339115 - DNA, 25 bp, Homo sapien
gtccatgggcgtcgcgtcctcgcgg

SEQ ID NO: 3339116 - DNA, 25 bp, Homo sapien
cggaacaggcacgacccgtccttgg

SEQ ID NO: 3339117 - DNA, 25 bp, Homo sapien
tacaagcccagtttccgcagatagg

SEQ ID NO: 3339118 - DNA, 25 bp, Homo sapien
cgtccttggcgaccagtttccgata

SEQ ID NO: 3339119 - DNA, 25 bp, Homo sapien
caggccaggcgcggcgagggctagc

SEQ ID NO: 3339120 - DNA, 25 bp, Homo sapien
aggccaggcgcggcgagggctagcc

SEQ ID NO: 3339121 - DNA, 25 bp, Homo sapien
caggcgcggcgagggctagccccac

SEQ ID NO: 3339122 - DNA, 25 bp, Homo sapien
gccaggcgcggcgagggctagcccc

SEQ ID NO: 3339123 - DNA, 25 bp, Homo sapien
cccgaggcagcggtccgcgctctcc

SEQ ID NO: 3339124 - DNA, 25 bp, Homo sapien
ggcccgaggcagcggtccgcgctct

SEQ ID NO: 3339125 - DNA, 25 bp, Homo sapien
ggctgctcgacgccccggcctgggg

SEQ ID NO: 3339126 - DNA, 25 bp, Homo sapien
ccgaggcagcggtccgcgctctccg

SEQ ID NO: 3339127 - DNA, 25 bp, Homo sapien
cgccgcgggaatcgcgcgcgccggg

SEQ ID NO: 3339128 - DNA, 25 bp, Homo sapien
gcgccacccgccaaccctgccgctg

SEQ ID NO: 3339129 - DNA, 25 bp, Homo sapien
gctgcgccgcgggaatcgcgcgcgc

SEQ ID NO: 3339130 - DNA, 25 bp, Homo sapien
caaccctgccgctgcgccgcgggaa

SEQ ID NO: 3339131 - DNA, 25 bp, Homo sapien
tcctaatgagttagagtggagcagg

SEQ ID NO: 3339132 - DNA, 25 bp, Homo sapien
gaactcccatctaacaggactaagg

SEQ ID NO: 3339133 - DNA, 25 bp, Homo sapien
ttctatatagaacggtgcgccctta

SEQ ID NO: 3339134 - DNA, 25 bp, Homo sapien
gcagagcaggtagcaggtaatccta

SEQ ID NO: 3339135 - DNA, 25 bp, Homo sapien
acatttacaccgtctctgcagcggc

SEQ ID NO: 3339136 - DNA, 25 bp, Homo sapien
cttaagtcttgttgaggtccaagga

SEQ ID NO: 3339137 - DNA, 25 bp, Homo sapien
ggcacagacccagcttatcagcaga

SEQ ID NO: 3339138 - DNA, 25 bp, Homo sapien
tcttgcacgcatggactctgctggc

SEQ ID NO: 3339139 - DNA, 25 bp, Homo sapien
gctgaagtgagccagtcatgttccc

SEQ ID NO: 3339140 - DNA, 25 bp, Homo sapien
ctggaacaatggtgagggtgctgaa

SEQ ID NO: 3339141 - DNA, 25 bp, Homo sapien
gaagtgagccagtcatgttccctcc

SEQ ID NO: 3339142 - DNA, 25 bp, Homo sapien
gggtgctgaagtgagccagtcatgt

SEQ ID NO: 3339143 - DNA, 25 bp, Homo sapien
ggacaaacccgtaatcataccactc

SEQ ID NO: 3339144 - DNA, 25 bp, Homo sapien
tcataccactcctaccctggacttg

SEQ ID NO: 3339145 - DNA, 25 bp, Homo sapien
taaggacaaacccgtaatcatacca

SEQ ID NO: 3339146 - DNA, 25 bp, Homo sapien
aatcataccactcctaccctggact

SEQ ID NO: 3339147 - DNA, 25 bp, Homo sapien
cagaacagtttgaagtagtttataa

SEQ ID NO: 3339148 - DNA, 25 bp, Homo sapien
taaaccactcaagatgtttcaccag

SEQ ID NO: 3339149 - DNA, 25 bp, Homo sapien
cagagggagctttgatacggagaat

SEQ ID NO: 3339150 - DNA, 25 bp, Homo sapien
catatagtttcattcaaggtccagg

SEQ ID NO: 3339151 - DNA, 25 bp, Homo sapien
cttgtttcctcctgtacttcaattt

SEQ ID NO: 3339152 - DNA, 25 bp, Homo sapien
tgataacacaatcctgtaatcctcc

SEQ ID NO: 3339153 - DNA, 25 bp, Homo sapien
tccaggtgataacacaatcctgtaa

SEQ ID NO: 3339154 - DNA, 25 bp, Homo sapien
ctcaagattttccaggtgataacac

SEQ ID NO: 3339155 - DNA, 25 bp, Homo sapien
taatcctccctgttgtggttccttg

SEQ ID NO: 3339156 - DNA, 25 bp, Homo sapien
ttggagcggtcactggcaggttaac

SEQ ID NO: 3339157 - DNA, 25 bp, Homo sapien
catctttgttactggcactgtctac

SEQ ID NO: 3339158 - DNA, 25 bp, Homo sapien
gcaggttaacatgccaactttttca

SEQ ID NO: 3339159 - DNA, 25 bp, Homo sapien
ccaagggtgagtaattgcagatgga

SEQ ID NO: 3339160 - DNA, 25 bp, Homo sapien
gaagcaatgtttgctccatatatca

SEQ ID NO: 3339161 - DNA, 25 bp, Homo sapien
tcactgagaagaggtagactaccca

SEQ ID NO: 3339162 - DNA, 25 bp, Homo sapien
catgaattcaacctggcccaaagaa

SEQ ID NO: 3339163 - DNA, 25 bp, Homo sapien
gagatcactgagaagaggtagacta

SEQ ID NO: 3339164 - DNA, 25 bp, Homo sapien
ggtagactacccatgaattcaacct

SEQ ID NO: 3339165 - DNA, 25 bp, Homo sapien
gggatacaactgcttctaagcattt

SEQ ID NO: 3339166 - DNA, 25 bp, Homo sapien
gagatgtccatctcccttatattgg

SEQ ID NO: 3339167 - DNA, 25 bp, Homo sapien
tatattggagcagtatttccaactg

SEQ ID NO: 3339168 - DNA, 25 bp, Homo sapien
tctcattggcgttctcatggtggtt

SEQ ID NO: 3339169 - DNA, 25 bp, Homo sapien
ctaaatttcatcagaagccccaggc

SEQ ID NO: 3339170 - DNA, 25 bp, Homo sapien
gcaggcggcttttagtttaagcagc

SEQ ID NO: 3339171 - DNA, 25 bp, Homo sapien
gctcctcctggttgtagagccccta

SEQ ID NO: 3339172 - DNA, 25 bp, Homo sapien
ggcttttagtttaagcagccactgt

SEQ ID NO: 3339173 - DNA, 25 bp, Homo sapien
tgtagagcccctacgaggcagaagc

SEQ ID NO: 3339174 - DNA, 25 bp, Homo sapien
actaagtgtccccacaaactaagag

SEQ ID NO: 3339175 - DNA, 25 bp, Homo sapien
agtgtttcttagtgacaaagccaag

SEQ ID NO: 3339176 - DNA, 25 bp, Homo sapien
cataaatctatggagtttgagagcc

SEQ ID NO: 3339177 - DNA, 25 bp, Homo sapien
gcctaaagaggcatcagataacatt

SEQ ID NO: 3339178 - DNA, 25 bp, Homo sapien
ggttgtcctagctcagggttgctca

SEQ ID NO: 3339179 - DNA, 25 bp, Homo sapien
cactttcagtcaggctcttcatggg

SEQ ID NO: 3339180 - DNA, 25 bp, Homo sapien
gaatactgcagtcccaattggttac

SEQ ID NO: 3339181 - DNA, 25 bp, Homo sapien
tgttggcaggaagccttagctctcg

SEQ ID NO: 3339182 - DNA, 25 bp, Homo sapien
ttgtgtctcgatgggacatctggaa

SEQ ID NO: 3339183 - DNA, 25 bp, Homo sapien
tttttgtgtctcgatgggacatctg

SEQ ID NO: 3339184 - DNA, 25 bp, Homo sapien
tcgtgcaaccatcaggagagccaat

SEQ ID NO: 3339185 - DNA, 25 bp, Homo sapien
gtctcgatgggacatctggaactgc

SEQ ID NO: 3339186 - DNA, 25 bp, Homo sapien
tcatatattagagtactggacaagg

SEQ ID NO: 3339187 - DNA, 25 bp, Homo sapien
cagccctaaagaagtgccatttacc

SEQ ID NO: 3339188 - DNA, 25 bp, Homo sapien
tccagggacagtagcctctgctggc

SEQ ID NO: 3339189 - DNA, 25 bp, Homo sapien
gaagtgccatttacccaacaggctt

SEQ ID NO: 3339190 - DNA, 25 bp, Homo sapien
cagggttgtagccagagctgtaaac

SEQ ID NO: 3339191 - DNA, 25 bp, Homo sapien
agggttgtagccagagctgtaaact

SEQ ID NO: 3339192 - DNA, 25 bp, Homo sapien
cttcagggttgtagccagagctgta

SEQ ID NO: 3339193 - DNA, 25 bp, Homo sapien
ttgtagccagagctgtaaactgcat

SEQ ID NO: 3339194 - DNA, 25 bp, Homo sapien
tacggtcacagttctttctggacaa

SEQ ID NO: 3339195 - DNA, 25 bp, Homo sapien
taaaacatacggtcacagttctttc

SEQ ID NO: 3339196 - DNA, 25 bp, Homo sapien
ttcaatcagatgtcaggattctgtt

SEQ ID NO: 3339197 - DNA, 25 bp, Homo sapien
aattcaatcagatgtcaggattctg

SEQ ID NO: 3339198 - DNA, 25 bp, Homo sapien
taagatttgttgtgaggagcaaata

SEQ ID NO: 3339199 - DNA, 25 bp, Homo sapien
aagatttgttgtgaggagcaaataa

SEQ ID NO: 3339200 - DNA, 25 bp, Homo sapien
taaatgtaaatggactaaatgctcc

SEQ ID NO: 3339201 - DNA, 25 bp, Homo sapien
aatgtaaatggactaaatgctccag

SEQ ID NO: 3339202 - DNA, 25 bp, Homo sapien
ttaaatgtaaatggactaaatgctc

SEQ ID NO: 3339203 - DNA, 25 bp, Homo sapien
tgtaaatggactaaatgctccagtt

SEQ ID NO: 3339204 - DNA, 25 bp, Homo sapien
gagccgagacgtccgcatccggcgg

SEQ ID NO: 3339205 - DNA, 25 bp, Homo sapien
acgtccgcatccggcggcagcggaa

SEQ ID NO: 3339206 - DNA, 25 bp, Homo sapien
catccggcggcagcggaagcccagg

SEQ ID NO: 3339207 - DNA, 25 bp, Homo sapien
tcctccggagccgagacgtccgcat

SEQ ID NO: 3339208 - DNA, 25 bp, Homo sapien
agctggccaaagaatccacgaacga

SEQ ID NO: 3339209 - DNA, 25 bp, Homo sapien
aaggcaacatctttgatccaactcc

SEQ ID NO: 3339210 - DNA, 25 bp, Homo sapien
caaggttcttatggatgggccagtg

SEQ ID NO: 3339211 - DNA, 25 bp, Homo sapien
taatgtggtatgctgtaggaagctg

SEQ ID NO: 3339212 - DNA, 25 bp, Homo sapien
gatttcccgtactctggacactcca

SEQ ID NO: 3339213 - DNA, 25 bp, Homo sapien
cttcatcaagatttcccgtactctg

SEQ ID NO: 3339214 - DNA, 25 bp, Homo sapien
ttgatgatccttaagttttgtactc

SEQ ID NO: 3339215 - DNA, 25 bp, Homo sapien
tcttgatgatccttaagttttgtac

SEQ ID NO: 3339216 - DNA, 25 bp, Homo sapien
gtaggtgtaggtgtccaaaatgagc

SEQ ID NO: 3339217 - DNA, 25 bp, Homo sapien
ggtatgccgaggtagtccagtggca

SEQ ID NO: 3339218 - DNA, 25 bp, Homo sapien
tctcctttgcatgcaacagggagat

SEQ ID NO: 3339219 - DNA, 25 bp, Homo sapien
caaacagacaatctttgcctgtgag

SEQ ID NO: 3339220 - DNA, 25 bp, Homo sapien
aagaggaaacctgcatgtactagtc

SEQ ID NO: 3339221 - DNA, 25 bp, Homo sapien
gacaggaatgagagcttcgtgaaga

SEQ ID NO: 3339222 - DNA, 25 bp, Homo sapien
acaggaatgagagcttcgtgaagag

SEQ ID NO: 3339223 - DNA, 25 bp, Homo sapien
cctgcatgtactagtctgattcttt

SEQ ID NO: 3339224 - DNA, 25 bp, Homo sapien
taggtttttataatggtctcatcaa

SEQ ID NO: 3339225 - DNA, 25 bp, Homo sapien
actaagaaaggccatctaggctggg

SEQ ID NO: 3339226 - DNA, 25 bp, Homo sapien
tactaggactgcactaagaaaggcc

SEQ ID NO: 3339227 - DNA, 25 bp, Homo sapien
tcatttaagactactaggactgcac

SEQ ID NO: 3339228 - DNA, 25 bp, Homo sapien
gaagaatacaatgtgtggtctgtct

SEQ ID NO: 3339229 - DNA, 25 bp, Homo sapien
tagccttgcctactctgagcatttc

SEQ ID NO: 3339230 - DNA, 25 bp, Homo sapien
ggttttcaacagaggagtggcctga

SEQ ID NO: 3339231 - DNA, 25 bp, Homo sapien
tgaaaggttatccatgtagcatgca

SEQ ID NO: 3339232 - DNA, 25 bp, Homo sapien
tggatcctgagttgacacaaaacgc

SEQ ID NO: 3339233 - DNA, 25 bp, Homo sapien
ggcgcgtctcgaaaggtaactgtca

SEQ ID NO: 3339234 - DNA, 25 bp, Homo sapien
tatagaacgattcagtgggcgcggt

SEQ ID NO: 3339235 - DNA, 25 bp, Homo sapien
aatggactaagtccgctccaccggg

SEQ ID NO: 3339236 - DNA, 25 bp, Homo sapien
agcggagagtggcgcagcgcccggc

SEQ ID NO: 3339237 - DNA, 25 bp, Homo sapien
ctcgtgctcccacacggacgggcgc

SEQ ID NO: 3339238 - DNA, 25 bp, Homo sapien
cgggccgcgagaccccgctcgcccg

SEQ ID NO: 3339239 - DNA, 25 bp, Homo sapien
cgaggctcggggagcggagagtggc

SEQ ID NO: 3339240 - DNA, 25 bp, Homo sapien
tcatgccgcgtcccagccctcccct

SEQ ID NO: 3339241 - DNA, 25 bp, Homo sapien
cggcgccccgggctttccagcgccg

SEQ ID NO: 3339242 - DNA, 25 bp, Homo sapien
gtggggccgccgcggtcgtgctggg

SEQ ID NO: 3339243 - DNA, 25 bp, Homo sapien
ccgccgccgtctctgcacgcgtggg

SEQ ID NO: 3339244 - DNA, 25 bp, Homo sapien
gcctcccgtctgctcggaggagcga

SEQ ID NO: 3339245 - DNA, 25 bp, Homo sapien
catgatggcgcctcccgtctgctcg

SEQ ID NO: 3339246 - DNA, 25 bp, Homo sapien
tggcgcctcccgtctgctcggagga

SEQ ID NO: 3339247 - DNA, 25 bp, Homo sapien
ctcccgtctgctcggaggagcgaac

SEQ ID NO: 3339248 - DNA, 25 bp, Homo sapien
tgctaccacgtcttctcgcgcccag

SEQ ID NO: 3339249 - DNA, 25 bp, Homo sapien
ccgagcctcggctcccgggcctgac

SEQ ID NO: 3339250 - DNA, 25 bp, Homo sapien
ccgcgctgggatctccccggccgcg

SEQ ID NO: 3339251 - DNA, 25 bp, Homo sapien
agcccgccgggctcccctggtgtct

SEQ ID NO: 3339252 - DNA, 25 bp, Homo sapien
ccgttcgcgtggcccgcggacccat

SEQ ID NO: 3339253 - DNA, 25 bp, Homo sapien
gaggacgaccgctggcgctgctctc

SEQ ID NO: 3339254 - DNA, 25 bp, Homo sapien
gctgctctccaaggcgcctggtgga

SEQ ID NO: 3339255 - DNA, 25 bp, Homo sapien
ggtcgaggtcaaggaaagttcgcac

SEQ ID NO: 3339256 - DNA, 25 bp, Homo sapien
ctggtggagcgggtctcgcgggcgg

SEQ ID NO: 3339257 - DNA, 25 bp, Homo sapien
tgatttgcagcaaaaatacctgaag

SEQ ID NO: 3339258 - DNA, 25 bp, Homo sapien
atctgatttgcagcaaaaatacctg

SEQ ID NO: 3339259 - DNA, 25 bp, Homo sapien
tattcagtctaatctgttgatctgg

SEQ ID NO: 3339260 - DNA, 25 bp, Homo sapien
cagtctaatctgttgatctggcatc

SEQ ID NO: 3339261 - DNA, 25 bp, Homo sapien
ggacatgtgagtttgcataggcaga

SEQ ID NO: 3339262 - DNA, 25 bp, Homo sapien
aggacatgtgagtttgcataggcag

SEQ ID NO: 3339263 - DNA, 25 bp, Homo sapien
aaggacatgtgagtttgcataggca

SEQ ID NO: 3339264 - DNA, 25 bp, Homo sapien
gtgagtttgcataggcagaaggaag

SEQ ID NO: 3339265 - DNA, 25 bp, Homo sapien
tgaaagtctcaatcctctaatcttg

SEQ ID NO: 3339266 - DNA, 25 bp, Homo sapien
ggcgtgccacgcttcaggaacctct

SEQ ID NO: 3339267 - DNA, 25 bp, Homo sapien
tagggcttcattttataggcatgat

SEQ ID NO: 3339268 - DNA, 25 bp, Homo sapien
gagcttccatgcctaacttgggcgt

SEQ ID NO: 3339269 - DNA, 25 bp, Homo sapien
gaggattgactgctttgcttcccct

SEQ ID NO: 3339270 - DNA, 25 bp, Homo sapien
cctttgtggaagaatcagcagttct

SEQ ID NO: 3339271 - DNA, 25 bp, Homo sapien
tccctttgtggaagaatcagcagtt

SEQ ID NO: 3339272 - DNA, 25 bp, Homo sapien
taagttctgaggattgactgctttg

SEQ ID NO: 3339273 - DNA, 25 bp, Homo sapien
tcagagtccagagtactatttttgc

SEQ ID NO: 3339274 - DNA, 25 bp, Homo sapien
ccagagtactatttttgccattatc

SEQ ID NO: 3339275 - DNA, 25 bp, Homo sapien
tccttcagagtccagagtactattt

SEQ ID NO: 3339276 - DNA, 25 bp, Homo sapien
gagtccagagtactatttttgccat

SEQ ID NO: 3339277 - DNA, 25 bp, Homo sapien
acccactgaaacagctggttgatat

SEQ ID NO: 3339278 - DNA, 25 bp, Homo sapien
caatagttaattactagtaaggctg

SEQ ID NO: 3339279 - DNA, 25 bp, Homo sapien
taaggctgctttggattatctgtcc

SEQ ID NO: 3339280 - DNA, 25 bp, Homo sapien
gctttgatgaatcataatacattgt

SEQ ID NO: 3339281 - DNA, 25 bp, Homo sapien
tccactgtagggtaagtaacaccga

SEQ ID NO: 3339282 - DNA, 25 bp, Homo sapien
tggaagatgtcgttgtagcacagac

SEQ ID NO: 3339283 - DNA, 25 bp, Homo sapien
taacaccgagctcaggatgcgtgga

SEQ ID NO: 3339284 - DNA, 25 bp, Homo sapien
tctccttagatgaagagcctgaaca

SEQ ID NO: 3339285 - DNA, 25 bp, Homo sapien
gagggagctctcacattctggaaga

SEQ ID NO: 3339286 - DNA, 25 bp, Homo sapien
tgtcatatgagagtggaatctggcc

SEQ ID NO: 3339287 - DNA, 25 bp, Homo sapien
ctggattaatggaaacgaaagcctt

SEQ ID NO: 3339288 - DNA, 25 bp, Homo sapien
gactagattcatgggcacagggctc

SEQ ID NO: 3339289 - DNA, 25 bp, Homo sapien
gcatgtcacttaagttatactggag

SEQ ID NO: 3339290 - DNA, 25 bp, Homo sapien
ctcttgctggcatgtcacttaagtt

SEQ ID NO: 3339291 - DNA, 25 bp, Homo sapien
ttaacactgttgagggaccaaattg

SEQ ID NO: 3339292 - DNA, 25 bp, Homo sapien
ctgttgagggaccaaattgcatctc

SEQ ID NO: 3339293 - DNA, 25 bp, Homo sapien
tcagcgctatgaggctactagaagc

SEQ ID NO: 3339294 - DNA, 25 bp, Homo sapien
ggttggtctgatacgtgctactcca

SEQ ID NO: 3339295 - DNA, 25 bp, Homo sapien
tggcaagctgttagagagcaatacc

SEQ ID NO: 3339296 - DNA, 25 bp, Homo sapien
ccaaggctaggattaagatgattct

SEQ ID NO: 3339297 - DNA, 25 bp, Homo sapien
tatccaaggagtataactagtgctg

SEQ ID NO: 3339298 - DNA, 25 bp, Homo sapien
tccaaggagtataactagtgctgtc

SEQ ID NO: 3339299 - DNA, 25 bp, Homo sapien
accatatccaaggagtataactagt

SEQ ID NO: 3339300 - DNA, 25 bp, Homo sapien
caaggagtataactagtgctgtcat

SEQ ID NO: 3339301 - DNA, 25 bp, Homo sapien
tgcaagtctcccaccggaagggact

SEQ ID NO: 3339302 - DNA, 25 bp, Homo sapien
aagagacttcttgggtggaaacagg

SEQ ID NO: 3339303 - DNA, 25 bp, Homo sapien
gcctcatgtcatttactgccgtgtg

SEQ ID NO: 3339304 - DNA, 25 bp, Homo sapien
tgcccagggcaaccgagtaactgtg

SEQ ID NO: 3339305 - DNA, 25 bp, Homo sapien
ggtcacccccttcagtccattgtct

SEQ ID NO: 3339306 - DNA, 25 bp, Homo sapien
gcaatgcagcaactgcctcctgact

SEQ ID NO: 3339307 - DNA, 25 bp, Homo sapien
cattgtctacagaaagggatctttt

SEQ ID NO: 3339308 - DNA, 25 bp, Homo sapien
tccagcatttcatcttgcaatgcag

SEQ ID NO: 3339309 - DNA, 25 bp, Homo sapien
catttagtagtgttgaaggtccccg

SEQ ID NO: 3339310 - DNA, 25 bp, Homo sapien
cactgtgccttgaacattgcctgga

SEQ ID NO: 3339311 - DNA, 25 bp, Homo sapien
catggctgtcatctcaaacttggga

SEQ ID NO: 3339312 - DNA, 25 bp, Homo sapien
caggatccggcttctaattttcagg

SEQ ID NO: 3339313 - DNA, 25 bp, Homo sapien
gcaattaggtgatttctcccaggcc

SEQ ID NO: 3339314 - DNA, 25 bp, Homo sapien
tctgtgtctagatcccaatgtccag

SEQ ID NO: 3339315 - DNA, 25 bp, Homo sapien
aagcctgaaggctctggcagttctg

SEQ ID NO: 3339316 - DNA, 25 bp, Homo sapien
caggcctcacggcactttagtgtca

SEQ ID NO: 3339317 - DNA, 25 bp, Homo sapien
ccccagcagtgggtggttacactca

SEQ ID NO: 3339318 - DNA, 25 bp, Homo sapien
agatttcatctagccttggagcagg

SEQ ID NO: 3339319 - DNA, 25 bp, Homo sapien
tcattcaggtagcaagcatttcttc

SEQ ID NO: 3339320 - DNA, 25 bp, Homo sapien
gctgccaggaaattgcaatgaggaa

SEQ ID NO: 3339321 - DNA, 25 bp, Homo sapien
tcaagttgatgctccatttgcactg

SEQ ID NO: 3339322 - DNA, 25 bp, Homo sapien
caagttgatgctccatttgcactga

SEQ ID NO: 3339323 - DNA, 25 bp, Homo sapien
ctgtaagagtgaataaggggtagct

SEQ ID NO: 3339324 - DNA, 25 bp, Homo sapien
taagagtgaataaggggtagctgac

SEQ ID NO: 3339325 - DNA, 25 bp, Homo sapien
tgtaagagtgaataaggggtagctg

SEQ ID NO: 3339326 - DNA, 25 bp, Homo sapien
tctgtaagagtgaataaggggtagc

SEQ ID NO: 3339327 - DNA, 25 bp, Homo sapien
tcaggaggatctgacttatgaggag

SEQ ID NO: 3339328 - DNA, 25 bp, Homo sapien
caagtctgaaggataggtgaaggtt

SEQ ID NO: 3339329 - DNA, 25 bp, Homo sapien
aggttttcaggaggatctgacttat

SEQ ID NO: 3339330 - DNA, 25 bp, Homo sapien
tctgaaggataggtgaaggttttca

SEQ ID NO: 3339331 - DNA, 25 bp, Homo sapien
gttttgtcaactacacccataatct

SEQ ID NO: 3339332 - DNA, 25 bp, Homo sapien
tacacccataatcttgttcccagat

SEQ ID NO: 3339333 - DNA, 25 bp, Homo sapien
ttgtcaactacacccataatcttgt

SEQ ID NO: 3339334 - DNA, 25 bp, Homo sapien
tcaaaagctgtccaggaacagattt

SEQ ID NO: 3339335 - DNA, 25 bp, Homo sapien
tacgcccaacgcagtgaggtagcaa

SEQ ID NO: 3339336 - DNA, 25 bp, Homo sapien
tactaattatactgcatgggcccca

SEQ ID NO: 3339337 - DNA, 25 bp, Homo sapien
tatatttcggcagaacgctgagcat

SEQ ID NO: 3339338 - DNA, 25 bp, Homo sapien
tcaaatagctgaaaaggcctgaagc

SEQ ID NO: 3339339 - DNA, 25 bp, Homo sapien
aatcactctgagaagcttgagtgtc

SEQ ID NO: 3339340 - DNA, 25 bp, Homo sapien
tccaaggagcggaagaagggcctcc

SEQ ID NO: 3339341 - DNA, 25 bp, Homo sapien
ttccaaggagcggaagaagggcctc

SEQ ID NO: 3339342 - DNA, 25 bp, Homo sapien
cggtctgtcaaacgtaacgcgtctc

SEQ ID NO: 3339343 - DNA, 25 bp, Homo sapien
tgtcaaacgtaacgcgtctctccct

SEQ ID NO: 3339344 - DNA, 25 bp, Homo sapien
ccgtccgactcgagggtgtcgcgaa

SEQ ID NO: 3339345 - DNA, 25 bp, Homo sapien
cctcgaacttcggaggcgaaagatt

SEQ ID NO: 3339346 - DNA, 25 bp, Homo sapien
cgccagagaacttcccggcgcagag

SEQ ID NO: 3339347 - DNA, 25 bp, Homo sapien
ggtgaggacacgactcggcctccgt

SEQ ID NO: 3339348 - DNA, 25 bp, Homo sapien
tctccgccacacgccggaactgcgc

SEQ ID NO: 3339349 - DNA, 25 bp, Homo sapien
gccacacgccggaactgcgcggcca

SEQ ID NO: 3339350 - DNA, 25 bp, Homo sapien
gaactgcgcggccacgtccacgggg

SEQ ID NO: 3339351 - DNA, 25 bp, Homo sapien
ggaactgcgcggccacgtccacggg

SEQ ID NO: 3339352 - DNA, 25 bp, Homo sapien
aaaagaaactacagagttagctgca

SEQ ID NO: 3339353 - DNA, 25 bp, Homo sapien
gatggaggcagatacaaaattcatc

SEQ ID NO: 3339354 - DNA, 25 bp, Homo sapien
aaatacagtgtgtttggcctcaaaa

SEQ ID NO: 3339355 - DNA, 25 bp, Homo sapien
cttaagataactggaaaggctcctt

SEQ ID NO: 3339356 - DNA, 25 bp, Homo sapien
tcattatttcagaccagtaacagaa

SEQ ID NO: 3339357 - DNA, 25 bp, Homo sapien
tatattaatagactaggaaaatcat

SEQ ID NO: 3339358 - DNA, 25 bp, Homo sapien
aatcattatttcagaccagtaacag

SEQ ID NO: 3339359 - DNA, 25 bp, Homo sapien
cactgtatattaatagactaggaaa

SEQ ID NO: 3339360 - DNA, 25 bp, Homo sapien
taggtcttctttcgaagcagtcact

SEQ ID NO: 3339361 - DNA, 25 bp, Homo sapien
ggaaccattgactttggtgctttag

SEQ ID NO: 3339362 - DNA, 25 bp, Homo sapien
tacacgcactctgcaaagcttatgc

SEQ ID NO: 3339363 - DNA, 25 bp, Homo sapien
tttgtcttcagtattaggccctttc

SEQ ID NO: 3339364 - DNA, 25 bp, Homo sapien
cttagattgcccacgttttccaact

SEQ ID NO: 3339365 - DNA, 25 bp, Homo sapien
ggtcatgcaggcacttagattgccc

SEQ ID NO: 3339366 - DNA, 25 bp, Homo sapien
ggcacttagattgcccacgttttcc

SEQ ID NO: 3339367 - DNA, 25 bp, Homo sapien
tgcaggcacttagattgcccacgtt

SEQ ID NO: 3339368 - DNA, 25 bp, Homo sapien
acagttggtacaggagtcagtcttg

SEQ ID NO: 3339369 - DNA, 25 bp, Homo sapien
tattataggactggaacaagagctc

SEQ ID NO: 3339370 - DNA, 25 bp, Homo sapien
agttggtacaggagtcagtcttgac

SEQ ID NO: 3339371 - DNA, 25 bp, Homo sapien
cttgacaagccaatcattcatatta

SEQ ID NO: 3339372 - DNA, 25 bp, Homo sapien
ccccagacattagtaaagaaattgc

SEQ ID NO: 3339373 - DNA, 25 bp, Homo sapien
tgactgccattctcgggcttcccca

SEQ ID NO: 3339374 - DNA, 25 bp, Homo sapien
cggtttcatgactgccattctcggg

SEQ ID NO: 3339375 - DNA, 25 bp, Homo sapien
cgatcaggaagctctagatcttcaa

SEQ ID NO: 3339376 - DNA, 25 bp, Homo sapien
ttgctgagagggatagctgcaatac

SEQ ID NO: 3339377 - DNA, 25 bp, Homo sapien
tgctgagagggatagctgcaatact

SEQ ID NO: 3339378 - DNA, 25 bp, Homo sapien
atttgctgagagggatagctgcaat

SEQ ID NO: 3339379 - DNA, 25 bp, Homo sapien
gctgagagggatagctgcaatactg

SEQ ID NO: 3339380 - DNA, 25 bp, Homo sapien
tttgaatcttcatacttaagggtca

SEQ ID NO: 3339381 - DNA, 25 bp, Homo sapien
tgctgagcctgctgttgaattgtct

SEQ ID NO: 3339382 - DNA, 25 bp, Homo sapien
tgagcctgctgttgaattgtctcct

SEQ ID NO: 3339383 - DNA, 25 bp, Homo sapien
gctgttgaattgtctcctctttaag

SEQ ID NO: 3339384 - DNA, 25 bp, Homo sapien
agcctgctgttgaattgtctcctct

SEQ ID NO: 3339385 - DNA, 25 bp, Homo sapien
catggcttctaagacgttccagatg

SEQ ID NO: 3339386 - DNA, 25 bp, Homo sapien
cgtgcatcactacccctcaaaaggg

SEQ ID NO: 3339387 - DNA, 25 bp, Homo sapien
aatagcaagctccaagtccctccgt

SEQ ID NO: 3339388 - DNA, 25 bp, Homo sapien
ctctcgcaagttatctttaatttgc

SEQ ID NO: 3339389 - DNA, 25 bp, Homo sapien
tttaatttgctgttcagcctggaga

SEQ ID NO: 3339390 - DNA, 25 bp, Homo sapien
gagctgccactctggtcttggaagg

SEQ ID NO: 3339391 - DNA, 25 bp, Homo sapien
ccactctggtcttggaaggtattca

SEQ ID NO: 3339392 - DNA, 25 bp, Homo sapien
gctgccactctggtcttggaaggta

SEQ ID NO: 3339393 - DNA, 25 bp, Homo sapien
ctggagctgccactctggtcttgga

SEQ ID NO: 3339394 - DNA, 25 bp, Homo sapien
atatttgtatagttaccacaattcc

SEQ ID NO: 3339395 - DNA, 25 bp, Homo sapien
gctaacatgtagtctattcttgaga

SEQ ID NO: 3339396 - DNA, 25 bp, Homo sapien
gaatgatccatgtaccaaagagaag

SEQ ID NO: 3339397 - DNA, 25 bp, Homo sapien
tccaatgtggttagagaagatgttt

SEQ ID NO: 3339398 - DNA, 25 bp, Homo sapien
tctgtgctagctgtggacccttctt

SEQ ID NO: 3339399 - DNA, 25 bp, Homo sapien
tccaccgtaggattgtctgggcccc

SEQ ID NO: 3339400 - DNA, 25 bp, Homo sapien
tcagcttccatgcataaggccaggc

SEQ ID NO: 3339401 - DNA, 25 bp, Homo sapien
gggtgacctctaactgctagctaag

SEQ ID NO: 3339402 - DNA, 25 bp, Homo sapien
agggagaagcctaggaagttcttgc

SEQ ID NO: 3339403 - DNA, 25 bp, Homo sapien
tgtggagtacgggagagggagaagc

SEQ ID NO: 3339404 - DNA, 25 bp, Homo sapien
agagggagaagcctaggaagttctt

SEQ ID NO: 3339405 - DNA, 25 bp, Homo sapien
ggagagggagaagcctaggaagttc

SEQ ID NO: 3339406 - DNA, 25 bp, Homo sapien
tgccaggccgtaaggaagatgtagc

SEQ ID NO: 3339407 - DNA, 25 bp, Homo sapien
tgtgggaaatggaacggaagccaac

SEQ ID NO: 3339408 - DNA, 25 bp, Homo sapien
gaagccaaccgagggcatttaggga

SEQ ID NO: 3339409 - DNA, 25 bp, Homo sapien
tgaagtaggtgctgtagtcctcatc

SEQ ID NO: 3339410 - DNA, 25 bp, Homo sapien
tttgtggactatttcatcatgggta

SEQ ID NO: 3339411 - DNA, 25 bp, Homo sapien
gcttcaattattatgagccttttgg

SEQ ID NO: 3339412 - DNA, 25 bp, Homo sapien
tattcgcctgagagtgtacggcaca

SEQ ID NO: 3339413 - DNA, 25 bp, Homo sapien
catgagctaccgtgttcagcttcga

SEQ ID NO: 3339414 - DNA, 25 bp, Homo sapien
caatgtgagtatctcgtggcttccg

SEQ ID NO: 3339415 - DNA, 25 bp, Homo sapien
cagtttccgtgatgcgctaaaggag

SEQ ID NO: 3339416 - DNA, 25 bp, Homo sapien
gcaacaggtggattagggcatgcct

SEQ ID NO: 3339417 - DNA, 25 bp, Homo sapien
tctaagaaaggcactctacactggc

SEQ ID NO: 3339418 - DNA, 25 bp, Homo sapien
tgaatagtttcttgggtggatctct

SEQ ID NO: 3339419 - DNA, 25 bp, Homo sapien
ttttcatcggtgagttgttgggttc

SEQ ID NO: 3339420 - DNA, 25 bp, Homo sapien
ggaatttctattgtactgtccaaat

SEQ ID NO: 3339421 - DNA, 25 bp, Homo sapien
gcccctaagaggtttacagcagttg

SEQ ID NO: 3339422 - DNA, 25 bp, Homo sapien
gatcgatactccgattatggctggg

SEQ ID NO: 3339423 - DNA, 25 bp, Homo sapien
gattcagaagctgatcgatactccg

SEQ ID NO: 3339424 - DNA, 25 bp, Homo sapien
catggacggtgcgattctgaaagca

SEQ ID NO: 3339425 - DNA, 25 bp, Homo sapien
tgcggatgagcgagtgttgacaacc

SEQ ID NO: 3339426 - DNA, 25 bp, Homo sapien
tctgggtgtaacctgaggcctcctc

SEQ ID NO: 3339427 - DNA, 25 bp, Homo sapien
gagttttgacaggtgacgagcacag

SEQ ID NO: 3339428 - DNA, 25 bp, Homo sapien
gctttctctggacaggatttcacag

SEQ ID NO: 3339429 - DNA, 25 bp, Homo sapien
caggacctgatagggactctgtgac

SEQ ID NO: 3339430 - DNA, 25 bp, Homo sapien
tagatgctgctactctcactagatt

SEQ ID NO: 3339431 - DNA, 25 bp, Homo sapien
gatgctgctactctcactagatttt

SEQ ID NO: 3339432 - DNA, 25 bp, Homo sapien
catagtctctgcctgagtatgtggg

SEQ ID NO: 3339433 - DNA, 25 bp, Homo sapien
tagattttgagatatgcatagtctc

SEQ ID NO: 3339434 - DNA, 25 bp, Homo sapien
aatattccggaatttggtggctgag

SEQ ID NO: 3339435 - DNA, 25 bp, Homo sapien
agctgtaatattccggaatttggtg

SEQ ID NO: 3339436 - DNA, 25 bp, Homo sapien
tgtaatattccggaatttggtggct

SEQ ID NO: 3339437 - DNA, 25 bp, Homo sapien
tttagctgtaatattccggaatttg

SEQ ID NO: 3339438 - DNA, 25 bp, Homo sapien
gaggataccacgattagccagaaga

SEQ ID NO: 3339439 - DNA, 25 bp, Homo sapien
tttgccagggcaccaagtaggctcc

SEQ ID NO: 3339440 - DNA, 25 bp, Homo sapien
cttttactgagacattgacgtggcg

SEQ ID NO: 3339441 - DNA, 25 bp, Homo sapien
gaaagtgctgagaaccctaactgca

SEQ ID NO: 3339442 - DNA, 25 bp, Homo sapien
agcactgtagatggctaccattcct

SEQ ID NO: 3339443 - DNA, 25 bp, Homo sapien
ttccttcatcgactaagcaccaggc

SEQ ID NO: 3339444 - DNA, 25 bp, Homo sapien
agcgctctggcggaaatctccagca

SEQ ID NO: 3339445 - DNA, 25 bp, Homo sapien
agatctgagcgcaaggtctccagcg

SEQ ID NO: 3339446 - DNA, 25 bp, Homo sapien
gtagaagtatgcagtaggtcacctc

SEQ ID NO: 3339447 - DNA, 25 bp, Homo sapien
cgttcatcgctgttaaagaagccag

SEQ ID NO: 3339448 - DNA, 25 bp, Homo sapien
gactgtcgtggatgaacaacccagg

SEQ ID NO: 3339449 - DNA, 25 bp, Homo sapien
caatagaaatgtcatggcacacgac

SEQ ID NO: 3339450 - DNA, 25 bp, Homo sapien
tgccgacagggccacggtctgcaga

SEQ ID NO: 3339451 - DNA, 25 bp, Homo sapien
gagttccggtacttgtcaaagcgca

SEQ ID NO: 3339452 - DNA, 25 bp, Homo sapien
tctcagtccgagataggccaggaag

SEQ ID NO: 3339453 - DNA, 25 bp, Homo sapien
ggccaaagccttgagtgccaggttg

SEQ ID NO: 3339454 - DNA, 25 bp, Homo sapien
acaggagattccgggagctcccgac

SEQ ID NO: 3339455 - DNA, 25 bp, Homo sapien
gattccgggagctcccgaccaccag

SEQ ID NO: 3339456 - DNA, 25 bp, Homo sapien
attccgggagctcccgaccaccagg

SEQ ID NO: 3339457 - DNA, 25 bp, Homo sapien
ggagattccgggagctcccgaccac

SEQ ID NO: 3339458 - DNA, 25 bp, Homo sapien
tagccgcactggtcgcacttgtagt

SEQ ID NO: 3339459 - DNA, 25 bp, Homo sapien
cacttgtagtggttgcccaggcggt

SEQ ID NO: 3339460 - DNA, 25 bp, Homo sapien
tcttgaggtggcactccatggcagc

SEQ ID NO: 3339461 - DNA, 25 bp, Homo sapien
gaacaggcactcttcgcagctgaag

SEQ ID NO: 3339462 - DNA, 25 bp, Homo sapien
cttattaagggtttgttaggatgag

SEQ ID NO: 3339463 - DNA, 25 bp, Homo sapien
attaagggtttgttaggatgagaag

SEQ ID NO: 3339464 - DNA, 25 bp, Homo sapien
tgcttattaagggtttgttaggatg

SEQ ID NO: 3339465 - DNA, 25 bp, Homo sapien
tattaagggtttgttaggatgagaa

SEQ ID NO: 3339466 - DNA, 25 bp, Homo sapien
tagaggagtctgaaactcaccactg

SEQ ID NO: 3339467 - DNA, 25 bp, Homo sapien
agaggagtctgaaactcaccactgt

SEQ ID NO: 3339468 - DNA, 25 bp, Homo sapien
ctagaggagtctgaaactcaccact

SEQ ID NO: 3339469 - DNA, 25 bp, Homo sapien
gcattctccccaatggcttcagagg

SEQ ID NO: 3339470 - DNA, 25 bp, Homo sapien
tccctgaggaaaggcgaactggcaa

SEQ ID NO: 3339471 - DNA, 25 bp, Homo sapien
ggttagcaccgcacgggaagtgtct

SEQ ID NO: 3339472 - DNA, 25 bp, Homo sapien
gtgtctgtaccagcaaaagcatcag

SEQ ID NO: 3339473 - DNA, 25 bp, Homo sapien
tcttcgtcttgcagacaaagttgca

SEQ ID NO: 3339474 - DNA, 25 bp, Homo sapien
gatgacgctcaaacatgttcttcgt

SEQ ID NO: 3339475 - DNA, 25 bp, Homo sapien
cacactcaaacatccgggtgatgag

SEQ ID NO: 3339476 - DNA, 25 bp, Homo sapien
gaacttgtggcacacatcacactca

SEQ ID NO: 3339477 - DNA, 25 bp, Homo sapien
gacgcctgacagctatacccttcca

SEQ ID NO: 3339478 - DNA, 25 bp, Homo sapien
tccgacgcctgacagctataccctt

SEQ ID NO: 3339479 - DNA, 25 bp, Homo sapien
gacagctatacccttccaggcactg

SEQ ID NO: 3339480 - DNA, 25 bp, Homo sapien
ctcctccgacgcctgacagctatac

SEQ ID NO: 3339481 - DNA, 25 bp, Homo sapien
ctttgctgttggctgaatcactcag

SEQ ID NO: 3339482 - DNA, 25 bp, Homo sapien
agatgaccagcagattgttcccgcc

SEQ ID NO: 3339483 - DNA, 25 bp, Homo sapien
aatcatctttgctgttggctgaatc

SEQ ID NO: 3339484 - DNA, 25 bp, Homo sapien
cagcagattgttcccgcccttgttt

SEQ ID NO: 3339485 - DNA, 25 bp, Homo sapien
ggaggatgaagaggggctatttgat

SEQ ID NO: 3339486 - DNA, 25 bp, Homo sapien
aagaggggctatttgattcgctggg

SEQ ID NO: 3339487 - DNA, 25 bp, Homo sapien
ggctatttgattcgctgggggtctt

SEQ ID NO: 3339488 - DNA, 25 bp, Homo sapien
tatttgattcgctgggggtcttcct

SEQ ID NO: 3339489 - DNA, 25 bp, Homo sapien
tcacaaagatcttggtgaaggacac

SEQ ID NO: 3339490 - DNA, 25 bp, Homo sapien
cttcagcatcacaaagatcttggtg

SEQ ID NO: 3339491 - DNA, 25 bp, Homo sapien
tcagcatcacaaagatcttggtgaa

SEQ ID NO: 3339492 - DNA, 25 bp, Homo sapien
catcacaaagatcttggtgaaggac

SEQ ID NO: 3339493 - DNA, 25 bp, Homo sapien
cagatcgaaaacatccactgctcct

SEQ ID NO: 3339494 - DNA, 25 bp, Homo sapien
tccttgtccacgtggagtgacatgt

SEQ ID NO: 3339495 - DNA, 25 bp, Homo sapien
tgcttcctccatggtgacgaagtcg

SEQ ID NO: 3339496 - DNA, 25 bp, Homo sapien
gctcggtctcaaatccacacacgtg

SEQ ID NO: 3339497 - DNA, 25 bp, Homo sapien
aatggacggtcaagtgctggttcag

SEQ ID NO: 3339498 - DNA, 25 bp, Homo sapien
ctcaccagcttcacggaatggacgg

SEQ ID NO: 3339499 - DNA, 25 bp, Homo sapien
ggttcagatttgcacggcacttagc

SEQ ID NO: 3339500 - DNA, 25 bp, Homo sapien
cgctgacaatgtcctcggtgtctgt

SEQ ID NO: 3339501 - DNA, 25 bp, Homo sapien
cagcgagaggtgtcgggacaatgtc

SEQ ID NO: 3339502 - DNA, 25 bp, Homo sapien
cctgcctctaggactatcttttctg

SEQ ID NO: 3339503 - DNA, 25 bp, Homo sapien
gaaaaagctggtcattgaatttcca

SEQ ID NO: 3339504 - DNA, 25 bp, Homo sapien
ggacaatgtctgctgtcggccaaac

SEQ ID NO: 3339505 - DNA, 25 bp, Homo sapien
ctgggtcaaaagaacaaagcatcat

SEQ ID NO: 3339506 - DNA, 25 bp, Homo sapien
tatggctgctttttcagcgtgtgaa

SEQ ID NO: 3339507 - DNA, 25 bp, Homo sapien
agcgtgtgaatttgcctcaatgtcc

SEQ ID NO: 3339508 - DNA, 25 bp, Homo sapien
tggtcacattctagtcttacaggag

SEQ ID NO: 3339509 - DNA, 25 bp, Homo sapien
tctccagttggaagtgtgccacatt

SEQ ID NO: 3339510 - DNA, 25 bp, Homo sapien
gtacacatctgccaacacaatttgg

SEQ ID NO: 3339511 - DNA, 25 bp, Homo sapien
ttgactgacaattccctactgtggg

SEQ ID NO: 3339512 - DNA, 25 bp, Homo sapien
tttggtgtttctcaacgtcagcact

SEQ ID NO: 3339513 - DNA, 25 bp, Homo sapien
tccacctacaagatgccagcagtac

SEQ ID NO: 3339514 - DNA, 25 bp, Homo sapien
gtcatcttgccacaaaatggttacc

SEQ ID NO: 3339515 - DNA, 25 bp, Homo sapien
ggtgcaagtgactatacagtacata

SEQ ID NO: 3339516 - DNA, 25 bp, Homo sapien
tcctataatacagctgatttccctg

SEQ ID NO: 3339517 - DNA, 25 bp, Homo sapien
gatttccctgataacctcagcacag

SEQ ID NO: 3339518 - DNA, 25 bp, Homo sapien
ctaggattatgagaagggtctgaat

SEQ ID NO: 3339519 - DNA, 25 bp, Homo sapien
tgaaggtgtagtttctataatccct

SEQ ID NO: 3339520 - DNA, 25 bp, Homo sapien
gagagttggtgtcaagcattcagta

SEQ ID NO: 3339521 - DNA, 25 bp, Homo sapien
gcccttctggctcacagactgaaaa

SEQ ID NO: 3339522 - DNA, 25 bp, Homo sapien
ttatgtaagcctcaccatggctcac

SEQ ID NO: 3339523 - DNA, 25 bp, Homo sapien
catttggcctaggtaagagaataca

SEQ ID NO: 3339524 - DNA, 25 bp, Homo sapien
tcctatcactacatcaggagacagc

SEQ ID NO: 3339525 - DNA, 25 bp, Homo sapien
gctaagtatcttgctaagagacaca

SEQ ID NO: 3339526 - DNA, 25 bp, Homo sapien
tgaagtcctggaccatcattcctat

SEQ ID NO: 3339527 - DNA, 25 bp, Homo sapien
tttctatcctggttaccagagggca

SEQ ID NO: 3339528 - DNA, 25 bp, Homo sapien
ctatcctggttaccagagggcagtt

SEQ ID NO: 3339529 - DNA, 25 bp, Homo sapien
ttctatcctggttaccagagggcag

SEQ ID NO: 3339530 - DNA, 25 bp, Homo sapien
tctatcctggttaccagagggcagt

SEQ ID NO: 3339531 - DNA, 25 bp, Homo sapien
tagattgaattagccagtcccaaac

SEQ ID NO: 3339532 - DNA, 25 bp, Homo sapien
cagggtcactgcattgcaattttca

SEQ ID NO: 3339533 - DNA, 25 bp, Homo sapien
gcactattcattctcgaggcatcta

SEQ ID NO: 3339534 - DNA, 25 bp, Homo sapien
cactgctgaggccttataaagggtg

SEQ ID NO: 3339535 - DNA, 25 bp, Homo sapien
taatagatccttgaaaactgctagc

SEQ ID NO: 3339536 - DNA, 25 bp, Homo sapien
cctatgtctcaatgagttgtttcca

SEQ ID NO: 3339537 - DNA, 25 bp, Homo sapien
cacctccaggtagtaatttgtaaat

SEQ ID NO: 3339538 - DNA, 25 bp, Homo sapien
cacaaaggagctcaagttacaaaac

SEQ ID NO: 3339539 - DNA, 25 bp, Homo sapien
ggcaaatgcctagttaactgtgcta

SEQ ID NO: 3339540 - DNA, 25 bp, Homo sapien
tagttctcaggaaagtcagtctaga

SEQ ID NO: 3339541 - DNA, 25 bp, Homo sapien
gcagccaggacaccgtgaagctctg

SEQ ID NO: 3339542 - DNA, 25 bp, Homo sapien
tagaaatactggcaacaaccgcagc

SEQ ID NO: 3339543 - DNA, 25 bp, Homo sapien
ttctccagtgccctgtaaaacaggg

SEQ ID NO: 3339544 - DNA, 25 bp, Homo sapien
ctgcacacaggtggccacggtttcc

SEQ ID NO: 3339545 - DNA, 25 bp, Homo sapien
tgctgtgagtactgccctgcacaca

SEQ ID NO: 3339546 - DNA, 25 bp, Homo sapien
tccttgagtatgtggaggagacttg

SEQ ID NO: 3339547 - DNA, 25 bp, Homo sapien
gaatggtgattgtctaaatgtgtct

SEQ ID NO: 3339548 - DNA, 25 bp, Homo sapien
tgatattcttccgtgcagcacggag

SEQ ID NO: 3339549 - DNA, 25 bp, Homo sapien
cagcacggagtcactgggcagcagt

SEQ ID NO: 3339550 - DNA, 25 bp, Homo sapien
ctggagctgatattcttccgtgcag

SEQ ID NO: 3339551 - DNA, 25 bp, Homo sapien
aacccgtagaggaggacagctgtgc

SEQ ID NO: 3339552 - DNA, 25 bp, Homo sapien
ttaaacccgtagaggaggacagctg

SEQ ID NO: 3339553 - DNA, 25 bp, Homo sapien
ctgttaaacccgtagaggaggacag

SEQ ID NO: 3339554 - DNA, 25 bp, Homo sapien
taaacccgtagaggaggacagctgt

SEQ ID NO: 3339555 - DNA, 25 bp, Homo sapien
ccatacaagggacataacagggacc

SEQ ID NO: 3339556 - DNA, 25 bp, Homo sapien
tgggttaggcctgaaaactcggtca

SEQ ID NO: 3339557 - DNA, 25 bp, Homo sapien
tacgtataacaatcagggccagttg

SEQ ID NO: 3339558 - DNA, 25 bp, Homo sapien
attgtgacgaaaaggaccccggatg

SEQ ID NO: 3339559 - DNA, 25 bp, Homo sapien
ctagccctcgtgtctgcgtgcagtg

SEQ ID NO: 3339560 - DNA, 25 bp, Homo sapien
ctcgtgtctgcgtgcagtggctgct

SEQ ID NO: 3339561 - DNA, 25 bp, Homo sapien
tcaaacccaagcaccttctacaaaa

SEQ ID NO: 3339562 - DNA, 25 bp, Homo sapien
ctgccaatcgtgtccaactgatctc

SEQ ID NO: 3339563 - DNA, 25 bp, Homo sapien
atgcactgtggagcccggaaacttc

SEQ ID NO: 3339564 - DNA, 25 bp, Homo sapien
gaagtgaaccctgcacatccggata

SEQ ID NO: 3339565 - DNA, 25 bp, Homo sapien
tctcgggacaaggagcacaatgcca

SEQ ID NO: 3339566 - DNA, 25 bp, Homo sapien
catccggatacttgaaatgtcagct

SEQ ID NO: 3339567 - DNA, 25 bp, Homo sapien
gttttcttttgtatgattgtgctct

SEQ ID NO: 3339568 - DNA, 25 bp, Homo sapien
tcttttgtatgattgtgctctttgc

SEQ ID NO: 3339569 - DNA, 25 bp, Homo sapien
ttttgtatgattgtgctctttgctc

SEQ ID NO: 3339570 - DNA, 25 bp, Homo sapien
tgtatgattgtgctctttgctcact

SEQ ID NO: 3339571 - DNA, 25 bp, Homo sapien
caatgatttccaataattgacattt

SEQ ID NO: 3339572 - DNA, 25 bp, Homo sapien
tcaatgatttccaataattgacatt

SEQ ID NO: 3339573 - DNA, 25 bp, Homo sapien
ctgacagttgaaagaggagctcgga

SEQ ID NO: 3339574 - DNA, 25 bp, Homo sapien
tctctcgcccgattaaagtgctgta

SEQ ID NO: 3339575 - DNA, 25 bp, Homo sapien
tccggctgggtgatatcgagacatg

SEQ ID NO: 3339576 - DNA, 25 bp, Homo sapien
tgctgtagccaacattccggctggg

SEQ ID NO: 3339577 - DNA, 25 bp, Homo sapien
ggtgaatgaagagaaacaaaaacac

SEQ ID NO: 3339578 - DNA, 25 bp, Homo sapien
gaatgaagagaaacaaaaacaccac

SEQ ID NO: 3339579 - DNA, 25 bp, Homo sapien
tgaagagaaacaaaaacaccaccat

SEQ ID NO: 3339580 - DNA, 25 bp, Homo sapien
atgaagagaaacaaaaacaccacca

SEQ ID NO: 3339581 - DNA, 25 bp, Homo sapien
tgttctataaaggatcggcttatta

SEQ ID NO: 3339582 - DNA, 25 bp, Homo sapien
ataaaggatcggcttattatatgct

SEQ ID NO: 3339583 - DNA, 25 bp, Homo sapien
ttatgttctataaaggatcggctta

SEQ ID NO: 3339584 - DNA, 25 bp, Homo sapien
ggatcggcttattatatgcttcttc

SEQ ID NO: 3339585 - DNA, 25 bp, Homo sapien
tcctcgacaaactggccatctgttc

SEQ ID NO: 3339586 - DNA, 25 bp, Homo sapien
tcctgctctgaggagtgaactccaa

SEQ ID NO: 3339587 - DNA, 25 bp, Homo sapien
agagaggcgatgcaagcctgctccc

SEQ ID NO: 3339588 - DNA, 25 bp, Homo sapien
accccagagagaggcgatgcaagcc

SEQ ID NO: 3339589 - DNA, 25 bp, Homo sapien
ggtccacaaatcagtgcaatttcac

SEQ ID NO: 3339590 - DNA, 25 bp, Homo sapien
ccactcatataatcaggtccacaaa

SEQ ID NO: 3339591 - DNA, 25 bp, Homo sapien
atcaggtccacaaatcagtgcaatt

SEQ ID NO: 3339592 - DNA, 25 bp, Homo sapien
caggtccacaaatcagtgcaatttc

SEQ ID NO: 3339593 - DNA, 25 bp, Homo sapien
tggaaacacgcatgtggaccacagg

SEQ ID NO: 3339594 - DNA, 25 bp, Homo sapien
tctgtaaggctgtccccataaacgc

SEQ ID NO: 3339595 - DNA, 25 bp, Homo sapien
tacctcaaaatagcaggaagaattt

SEQ ID NO: 3339596 - DNA, 25 bp, Homo sapien
ttcttctcagtaatccttggttctg

SEQ ID NO: 3339597 - DNA, 25 bp, Homo sapien
cttctatccatcaggaaaacttgtc

SEQ ID NO: 3339598 - DNA, 25 bp, Homo sapien
gagacttatgtccagaatacataag

SEQ ID NO: 3339599 - DNA, 25 bp, Homo sapien
gaagagacttatgtccagaatacat

SEQ ID NO: 3339600 - DNA, 25 bp, Homo sapien
tgagaagagacttatgtccagaata

SEQ ID NO: 3339601 - DNA, 25 bp, Homo sapien
atctgagaagagacttatgtccaga

SEQ ID NO: 3339602 - DNA, 25 bp, Homo sapien
tggtgggcacgtgaaatggtgcagc

SEQ ID NO: 3339603 - DNA, 25 bp, Homo sapien
cacagagttagcatttgactcagca

SEQ ID NO: 3339604 - DNA, 25 bp, Homo sapien
gaaacactagtttacactcttaaga

SEQ ID NO: 3339605 - DNA, 25 bp, Homo sapien
tgtcttcataaacgaaaatgtggta

SEQ ID NO: 3339606 - DNA, 25 bp, Homo sapien
acaacaagtagtcgcagacttccag

SEQ ID NO: 3339607 - DNA, 25 bp, Homo sapien
cataacaacaagtagtcgcagactt

SEQ ID NO: 3339608 - DNA, 25 bp, Homo sapien
taacaacaagtagtcgcagacttcc

SEQ ID NO: 3339609 - DNA, 25 bp, Homo sapien
caacaagtagtcgcagacttccagt

SEQ ID NO: 3339610 - DNA, 25 bp, Homo sapien
tagctggaccgaggcaaagtcgtgc

SEQ ID NO: 3339611 - DNA, 25 bp, Homo sapien
gctttgactgacacatcccgcctta

SEQ ID NO: 3339612 - DNA, 25 bp, Homo sapien
gattccgggctgaacacatagctgg

SEQ ID NO: 3339613 - DNA, 25 bp, Homo sapien
gggctttagtgcgtcctcagagacg

SEQ ID NO: 3339614 - DNA, 25 bp, Homo sapien
taagttcaaagcgtgcatcatccac

SEQ ID NO: 3339615 - DNA, 25 bp, Homo sapien
tactggagaccactaatatgttgcc

SEQ ID NO: 3339616 - DNA, 25 bp, Homo sapien
cctggaagggactacagagcaatgg

SEQ ID NO: 3339617 - DNA, 25 bp, Homo sapien
caaggaaccctaggatatgcttcag

SEQ ID NO: 3339618 - DNA, 25 bp, Homo sapien
cataacatgagctgggtaacacacc

SEQ ID NO: 3339619 - DNA, 25 bp, Homo sapien
ccctttgaggtaggcactagtatta

SEQ ID NO: 3339620 - DNA, 25 bp, Homo sapien
gttgacacagaattacagatggctt

SEQ ID NO: 3339621 - DNA, 25 bp, Homo sapien
gagggcagttgccaaatgttgtcaa

SEQ ID NO: 3339622 - DNA, 25 bp, Homo sapien
gagtggagctgaacctctaattcac

SEQ ID NO: 3339623 - DNA, 25 bp, Homo sapien
caaaagacccgactgaagtgtccct

SEQ ID NO: 3339624 - DNA, 25 bp, Homo sapien
gatctgtggtaagggggacattcca

SEQ ID NO: 3339625 - DNA, 25 bp, Homo sapien
actagtgtctcccactcctgaggag

SEQ ID NO: 3339626 - DNA, 25 bp, Homo sapien
tcctggctgaacaatgctgacgcac

SEQ ID NO: 3339627 - DNA, 25 bp, Homo sapien
caacgcatgtggagtttcaggctga

SEQ ID NO: 3339628 - DNA, 25 bp, Homo sapien
cactgttggccacatactcggaggg

SEQ ID NO: 3339629 - DNA, 25 bp, Homo sapien
gagtgttagacgtcatcatggtccc

SEQ ID NO: 3339630 - DNA, 25 bp, Homo sapien
cccaccatctcctccgaccaattca

SEQ ID NO: 3339631 - DNA, 25 bp, Homo sapien
catgggaccctgaccggtgctgcca

SEQ ID NO: 3339632 - DNA, 25 bp, Homo sapien
atgggaccctgaccggtgctgccaa

SEQ ID NO: 3339633 - DNA, 25 bp, Homo sapien
gaccaattcacgcagaagcaggcac

SEQ ID NO: 3339634 - DNA, 25 bp, Homo sapien
gccggccgtctgtgtcatcaaggca

SEQ ID NO: 3339635 - DNA, 25 bp, Homo sapien
ctgtgacactgccatggccggccgt

SEQ ID NO: 3339636 - DNA, 25 bp, Homo sapien
tgaaagcattctaagaccccacgac

SEQ ID NO: 3339637 - DNA, 25 bp, Homo sapien
tcacacaactgctttatcgtactgg

SEQ ID NO: 3339638 - DNA, 25 bp, Homo sapien
gagattgtccttgcgagcacaccgg

SEQ ID NO: 3339639 - DNA, 25 bp, Homo sapien
catgtgccgcttccagtaactcttc

SEQ ID NO: 3339640 - DNA, 25 bp, Homo sapien
caccggaatggacagagcggacact

SEQ ID NO: 3339641 - DNA, 25 bp, Homo sapien
aacctgtgtgaatcaccatgtgccg

SEQ ID NO: 3339642 - DNA, 25 bp, Homo sapien
tgaatgcaggggctttgtttcctga

SEQ ID NO: 3339643 - DNA, 25 bp, Homo sapien
catgcacagtcagagaagtctgaat

SEQ ID NO: 3339644 - DNA, 25 bp, Homo sapien
ctgtcagactcaagtccatgtctga

SEQ ID NO: 3339645 - DNA, 25 bp, Homo sapien
agaagtctgaatgcaggggctttgt

SEQ ID NO: 3339646 - DNA, 25 bp, Homo sapien
actccaatggagacaaattttcgga

SEQ ID NO: 3339647 - DNA, 25 bp, Homo sapien
caatggagacaaattttcggatccc

SEQ ID NO: 3339648 - DNA, 25 bp, Homo sapien
gaactccaatggagacaaattttcg

SEQ ID NO: 3339649 - DNA, 25 bp, Homo sapien
tctctgaactccaatggagacaaat

SEQ ID NO: 3339650 - DNA, 25 bp, Homo sapien
ctgacttgtttagttgtggcttgag

SEQ ID NO: 3339651 - DNA, 25 bp, Homo sapien
cttgtttagttgtggcttgagcaga

SEQ ID NO: 3339652 - DNA, 25 bp, Homo sapien
tttagttgtggcttgagcagatgct

SEQ ID NO: 3339653 - DNA, 25 bp, Homo sapien
agttgtggcttgagcagatgctgct

SEQ ID NO: 3339654 - DNA, 25 bp, Homo sapien
tttcagaggagccgtgtagcatgtg

SEQ ID NO: 3339655 - DNA, 25 bp, Homo sapien
tatagcaaacggacataatcttccc

SEQ ID NO: 3339656 - DNA, 25 bp, Homo sapien
ttccctctatcgtgtcccctttcag

SEQ ID NO: 3339657 - DNA, 25 bp, Homo sapien
tttatctttatagcaaacggacata

SEQ ID NO: 3339658 - DNA, 25 bp, Homo sapien
agggcggaaaggctatcgagtggtg

SEQ ID NO: 3339659 - DNA, 25 bp, Homo sapien
cggaaaggctatcgagtggtggact

SEQ ID NO: 3339660 - DNA, 25 bp, Homo sapien
tgcagggcggaaaggctatcgagtg

SEQ ID NO: 3339661 - DNA, 25 bp, Homo sapien
cttgcagggcggaaaggctatcgag

SEQ ID NO: 3339662 - DNA, 25 bp, Homo sapien
ctgaattggagggtttagaaactct

SEQ ID NO: 3339663 - DNA, 25 bp, Homo sapien
ataataattccagggattgtggtgg

SEQ ID NO: 3339664 - DNA, 25 bp, Homo sapien
aataataattccagggattgtggtg

SEQ ID NO: 3339665 - DNA, 25 bp, Homo sapien
taataataattccagggattgtggt

SEQ ID NO: 3339666 - DNA, 25 bp, Homo sapien
agaagactgcccgcagcccttgcgg

SEQ ID NO: 3339667 - DNA, 25 bp, Homo sapien
tcaggcagcagcgatgatttctcag

SEQ ID NO: 3339668 - DNA, 25 bp, Homo sapien
tcctgaccaggagtcaaacttcttt

SEQ ID NO: 3339669 - DNA, 25 bp, Homo sapien
gaggaggtcatagaagccagggaaa

SEQ ID NO: 3339670 - DNA, 25 bp, Homo sapien
caaagcggccaaggtagaactggca

SEQ ID NO: 3339671 - DNA, 25 bp, Homo sapien
aatcgcatggtctcctcagtcctgg

SEQ ID NO: 3339672 - DNA, 25 bp, Homo sapien
ttgtcctgcagaacggcattggctg

SEQ ID NO: 3339673 - DNA, 25 bp, Homo sapien
ggctgaatccggagacaagctgcag

SEQ ID NO: 3339674 - DNA, 25 bp, Homo sapien
ttggagcctgggtcatcgtcacaca

SEQ ID NO: 3339675 - DNA, 25 bp, Homo sapien
gtcacacaaagaagacactcccggg

SEQ ID NO: 3339676 - DNA, 25 bp, Homo sapien
tcgagtttgagggaaccagcctcca

SEQ ID NO: 3339677 - DNA, 25 bp, Homo sapien
cccataggatgcttctgacggagtc

SEQ ID NO: 3339678 - DNA, 25 bp, Homo sapien
ttctggcttctgactgtgacagtac

SEQ ID NO: 3339679 - DNA, 25 bp, Homo sapien
tttctggcttctgactgtgacagta

SEQ ID NO: 3339680 - DNA, 25 bp, Homo sapien
atttctggcttctgactgtgacagt

SEQ ID NO: 3339681 - DNA, 25 bp, Homo sapien
ctcccatgttatgcatgctacctat

SEQ ID NO: 3339682 - DNA, 25 bp, Homo sapien
gttatgcatgctacctatttgaggg

SEQ ID NO: 3339683 - DNA, 25 bp, Homo sapien
tgctacctatttgagggtcctcaac

SEQ ID NO: 3339684 - DNA, 25 bp, Homo sapien
tgcatgctacctatttgagggtcct

SEQ ID NO: 3339685 - DNA, 25 bp, Homo sapien
gaatcaaagacacacgaccacgtag

SEQ ID NO: 3339686 - DNA, 25 bp, Homo sapien
gaatggttccaaactaatgcagtag

SEQ ID NO: 3339687 - DNA, 25 bp, Homo sapien
gaaccgctgaacgacgacttctaga

SEQ ID NO: 3339688 - DNA, 25 bp, Homo sapien
ccagaggagctcaagatagtcaaga

SEQ ID NO: 3339689 - DNA, 25 bp, Homo sapien
gaagtctcaggcagcaagacacctc

SEQ ID NO: 3339690 - DNA, 25 bp, Homo sapien
gaagtgcttcctgcggtacagtgac

SEQ ID NO: 3339691 - DNA, 25 bp, Homo sapien
cttctgcagagtgtacgacaacctg

SEQ ID NO: 3339692 - DNA, 25 bp, Homo sapien
tgctggacacaacaaactttagaac

SEQ ID NO: 3339693 - DNA, 25 bp, Homo sapien
tctctgactgtcaggttcacactca

SEQ ID NO: 3339694 - DNA, 25 bp, Homo sapien
catgtggcgaatatttctcctttgg

SEQ ID NO: 3339695 - DNA, 25 bp, Homo sapien
caactcttgctgcattctcggtaga

SEQ ID NO: 3339696 - DNA, 25 bp, Homo sapien
tagcaatggtgcaattacagaatga

SEQ ID NO: 3339697 - DNA, 25 bp, Homo sapien
aggcaccgacgcgcaggaaaggccc

SEQ ID NO: 3339698 - DNA, 25 bp, Homo sapien
ggcaccgacgcgcaggaaaggccca

SEQ ID NO: 3339699 - DNA, 25 bp, Homo sapien
caggcaccgacgcgcaggaaaggcc

SEQ ID NO: 3339700 - DNA, 25 bp, Homo sapien
gcaccgacgcgcaggaaaggcccac

SEQ ID NO: 3339701 - DNA, 25 bp, Homo sapien
caagcacacgagctaaaatggagcc

SEQ ID NO: 3339702 - DNA, 25 bp, Homo sapien
ggtagtcgcaggaggtcagggtcaa

SEQ ID NO: 3339703 - DNA, 25 bp, Homo sapien
ctctcagacggagagggtagtcgca

SEQ ID NO: 3339704 - DNA, 25 bp, Homo sapien
aatttcctctcagacggagagggta

SEQ ID NO: 3339705 - DNA, 25 bp, Homo sapien
cacaagctcatcagctcccaaagtt

SEQ ID NO: 3339706 - DNA, 25 bp, Homo sapien
acacaagctcatcagctcccaaagt

SEQ ID NO: 3339707 - DNA, 25 bp, Homo sapien
cacacaagctcatcagctcccaaag

SEQ ID NO: 3339708 - DNA, 25 bp, Homo sapien
aagggcaagttcgcagagaacactg

SEQ ID NO: 3339709 - DNA, 25 bp, Homo sapien
tgctgcgagttttctgtgaatcgca

SEQ ID NO: 3339710 - DNA, 25 bp, Homo sapien
ttctgtgaatcgcagcgcggagcct

SEQ ID NO: 3339711 - DNA, 25 bp, Homo sapien
gcacaaaatttccctacacacgcag

SEQ ID NO: 3339712 - DNA, 25 bp, Homo sapien
tccttcctcgcacaaaatttcccta

SEQ ID NO: 3339713 - DNA, 25 bp, Homo sapien
ggatcctgtacccggcggctgctgc

SEQ ID NO: 3339714 - DNA, 25 bp, Homo sapien
tccctggatcctgtacccggcggct

SEQ ID NO: 3339715 - DNA, 25 bp, Homo sapien
ctggatcctgtacccggcggctgct

SEQ ID NO: 3339716 - DNA, 25 bp, Homo sapien
gatcctgtacccggcggctgctgcg

SEQ ID NO: 3339717 - DNA, 25 bp, Homo sapien
gggaaggcgcttgggctgctcctgc

SEQ ID NO: 3339718 - DNA, 25 bp, Homo sapien
agggaaggcgcttgggctgctcctg

SEQ ID NO: 3339719 - DNA, 25 bp, Homo sapien
taaataaatgagtgccggtgcggcg

SEQ ID NO: 3339720 - DNA, 25 bp, Homo sapien
ctaatgtcgggatcaaagggcagcg

SEQ ID NO: 3339721 - DNA, 25 bp, Homo sapien
ggaaaccccttctccggtgtgtgca

SEQ ID NO: 3339722 - DNA, 25 bp, Homo sapien
tgtgtgtgtcctatgctcgcgtgtg

SEQ ID NO: 3339723 - DNA, 25 bp, Homo sapien
gatatgccatgaggtccaaactctg

SEQ ID NO: 3339724 - DNA, 25 bp, Homo sapien
tgctgctcctgacggcatgggatat

SEQ ID NO: 3339725 - DNA, 25 bp, Homo sapien
gcactgtagctggtatatgctgctg

SEQ ID NO: 3339726 - DNA, 25 bp, Homo sapien
taagtcaaaatgcaaggtttcaaag

SEQ ID NO: 3339727 - DNA, 25 bp, Homo sapien
tgtgcccaggggatgttgctgtata

SEQ ID NO: 3339728 - DNA, 25 bp, Homo sapien
gggatgttgctgtataggaggagta

SEQ ID NO: 3339729 - DNA, 25 bp, Homo sapien
ctgtgcccaggggatgttgctgtat

SEQ ID NO: 3339730 - DNA, 25 bp, Homo sapien
tgttgctgtataggaggagtaagtc

SEQ ID NO: 3339731 - DNA, 25 bp, Homo sapien
caagcacagcagtaagaagggggaa

SEQ ID NO: 3339732 - DNA, 25 bp, Homo sapien
tagtcaagcacagcagtaagaaggg

SEQ ID NO: 3339733 - DNA, 25 bp, Homo sapien
gagtaaaacaaggagtttcatccat

SEQ ID NO: 3339734 - DNA, 25 bp, Homo sapien
tgactagtcaagcacagcagtaaga

SEQ ID NO: 3339735 - DNA, 25 bp, Homo sapien
aacatctggcaacttcacacgttcc

SEQ ID NO: 3339736 - DNA, 25 bp, Homo sapien
ccaacatctggcaacttcacacgtt

SEQ ID NO: 3339737 - DNA, 25 bp, Homo sapien
tggcaacttcacacgttcccttttc

SEQ ID NO: 3339738 - DNA, 25 bp, Homo sapien
atctggcaacttcacacgttccctt

SEQ ID NO: 3339739 - DNA, 25 bp, Homo sapien
gactgttgttccaaaggcaactgtg

SEQ ID NO: 3339740 - DNA, 25 bp, Homo sapien
tccaaaggcaactgtggggactggt

SEQ ID NO: 3339741 - DNA, 25 bp, Homo sapien
ctgttgttccaaaggcaactgtggg

SEQ ID NO: 3339742 - DNA, 25 bp, Homo sapien
gttccaaaggcaactgtggggactg

SEQ ID NO: 3339743 - DNA, 25 bp, Homo sapien
gaaggtgaatccatgtcacatgctc

SEQ ID NO: 3339744 - DNA, 25 bp, Homo sapien
gaatccatgtcacatgctctttagc

SEQ ID NO: 3339745 - DNA, 25 bp, Homo sapien
agaaggtgaatccatgtcacatgct

SEQ ID NO: 3339746 - DNA, 25 bp, Homo sapien
ggtgaatccatgtcacatgctcttt

SEQ ID NO: 3339747 - DNA, 25 bp, Homo sapien
tgcagctgtaagatgcaacccaagt

SEQ ID NO: 3339748 - DNA, 25 bp, Homo sapien
caacccaagtgtaatgcacattcca

SEQ ID NO: 3339749 - DNA, 25 bp, Homo sapien
aaatccttgaatatggtgagtcatt

SEQ ID NO: 3339750 - DNA, 25 bp, Homo sapien
tattggaccactggtccttcatcaa

SEQ ID NO: 3339751 - DNA, 25 bp, Homo sapien
ctctgggttacctcggggatgttga

SEQ ID NO: 3339752 - DNA, 25 bp, Homo sapien
cttctcttgaaaattggtttaggat

SEQ ID NO: 3339753 - DNA, 25 bp, Homo sapien
tcttgaaaattggtttaggatttca

SEQ ID NO: 3339754 - DNA, 25 bp, Homo sapien
cctctgggttacctcggggatgttg

SEQ ID NO: 3339755 - DNA, 25 bp, Homo sapien
tgtcactcagtactggataatttga

SEQ ID NO: 3339756 - DNA, 25 bp, Homo sapien
cactcagtactggataatttgagaa

SEQ ID NO: 3339757 - DNA, 25 bp, Homo sapien
tgccactgtcactcagtactggata

SEQ ID NO: 3339758 - DNA, 25 bp, Homo sapien
gtactggataatttgagaaataacc

SEQ ID NO: 3339759 - DNA, 25 bp, Homo sapien
tggctccaccaattgcaggggtggt

SEQ ID NO: 3339760 - DNA, 25 bp, Homo sapien
caggggtggttttgctggtagcagc

SEQ ID NO: 3339761 - DNA, 25 bp, Homo sapien
ggtggttttgctggtagcagcaggt

SEQ ID NO: 3339762 - DNA, 25 bp, Homo sapien
gctccaccaattgcaggggtggttt

SEQ ID NO: 3339763 - DNA, 25 bp, Homo sapien
caggccatccttaggcccttgggag

SEQ ID NO: 3339764 - DNA, 25 bp, Homo sapien
aggccatccttaggcccttgggaga

SEQ ID NO: 3339765 - DNA, 25 bp, Homo sapien
ggcaggccatccttaggcccttggg

SEQ ID NO: 3339766 - DNA, 25 bp, Homo sapien
ccggcaggccatccttaggcccttg

SEQ ID NO: 3339767 - DNA, 25 bp, Homo sapien
gccctgagccattagatttggtcgt

SEQ ID NO: 3339768 - DNA, 25 bp, Homo sapien
gaaaacacagacacccggttctagc

SEQ ID NO: 3339769 - DNA, 25 bp, Homo sapien
agatttggtcgtcaaggagcccagc

SEQ ID NO: 3339770 - DNA, 25 bp, Homo sapien
agacacccggttctagctgctccag

SEQ ID NO: 3339771 - DNA, 25 bp, Homo sapien
ctctacaccctgctttaagtgtgtt

SEQ ID NO: 3339772 - DNA, 25 bp, Homo sapien
ttgtgggcatttggtgttacaaatt

SEQ ID NO: 3339773 - DNA, 25 bp, Homo sapien
ctcttgtgggcatttggtgttacaa

SEQ ID NO: 3339774 - DNA, 25 bp, Homo sapien
gtgggcatttggtgttacaaatttc

SEQ ID NO: 3339775 - DNA, 25 bp, Homo sapien
ttccttgcgatgtgttcaaatatcc

SEQ ID NO: 3339776 - DNA, 25 bp, Homo sapien
gtgttcaaatatcctcctttagctt

SEQ ID NO: 3339777 - DNA, 25 bp, Homo sapien
actgattattctagttacccattca

SEQ ID NO: 3339778 - DNA, 25 bp, Homo sapien
agcttccttgcgatgtgttcaaata

SEQ ID NO: 3339779 - DNA, 25 bp, Homo sapien
gaaagcatagtatttgggtggcagt

SEQ ID NO: 3339780 - DNA, 25 bp, Homo sapien
gtgaggcaatgtcctgcgctgcttt

SEQ ID NO: 3339781 - DNA, 25 bp, Homo sapien
atggcagacgctcctccccaagtca

SEQ ID NO: 3339782 - DNA, 25 bp, Homo sapien
aatgtcctgcgctgctttggcttgc

SEQ ID NO: 3339783 - DNA, 25 bp, Homo sapien
ggcctctgattggtttacctttcat

SEQ ID NO: 3339784 - DNA, 25 bp, Homo sapien
gaatcctggtgaaggcctctgattg

SEQ ID NO: 3339785 - DNA, 25 bp, Homo sapien
ggcttcattcttctataccagctgt

SEQ ID NO: 3339786 - DNA, 25 bp, Homo sapien
ctccatggggtggagttacatggct

SEQ ID NO: 3339787 - DNA, 25 bp, Homo sapien
taatccttggatagttgacagcctt

SEQ ID NO: 3339788 - DNA, 25 bp, Homo sapien
taaatgtagataggcaaacttacca

SEQ ID NO: 3339789 - DNA, 25 bp, Homo sapien
tattattttggcctatcagcagata

SEQ ID NO: 3339790 - DNA, 25 bp, Homo sapien
tttcattagtcatagtagttggcca

SEQ ID NO: 3339791 - DNA, 25 bp, Homo sapien
cattgaacaaattcctagggccagg

SEQ ID NO: 3339792 - DNA, 25 bp, Homo sapien
gacctgtcagtatggagatgcccaa

SEQ ID NO: 3339793 - DNA, 25 bp, Homo sapien
caggataccttgtgagtgtcgggca

SEQ ID NO: 3339794 - DNA, 25 bp, Homo sapien
gacttttgcatgagaggcctgcctg

SEQ ID NO: 3339795 - DNA, 25 bp, Homo sapien
aactgggcttgtcaactactcccgg

SEQ ID NO: 3339796 - DNA, 25 bp, Homo sapien
gcaggatgtctggtatccagctacg

SEQ ID NO: 3339797 - DNA, 25 bp, Homo sapien
cagatggcatccatgcaaccgcagt

SEQ ID NO: 3339798 - DNA, 25 bp, Homo sapien
tactcccggtagacactttgctggg

SEQ ID NO: 3339799 - DNA, 25 bp, Homo sapien
gtcaaggaagctattcacagggtgg

SEQ ID NO: 3339800 - DNA, 25 bp, Homo sapien
gtggagaagccccacacgtagaagg

SEQ ID NO: 3339801 - DNA, 25 bp, Homo sapien
tggaatttactccagtgtcaagcag

SEQ ID NO: 3339802 - DNA, 25 bp, Homo sapien
gctggtgactgctacttgctgcagg

SEQ ID NO: 3339803 - DNA, 25 bp, Homo sapien
tcacgctgaaaatcaggggggctgc

SEQ ID NO: 3339804 - DNA, 25 bp, Homo sapien
ggaaagcatcctcaccaccaacagg

SEQ ID NO: 3339805 - DNA, 25 bp, Homo sapien
ccagggcgctagtccacacaacccc

SEQ ID NO: 3339806 - DNA, 25 bp, Homo sapien
ctttctctcacgctgaaaatcaggg

SEQ ID NO: 3339807 - DNA, 25 bp, Homo sapien
cctgccttaatgaagatgctcccgg

SEQ ID NO: 3339808 - DNA, 25 bp, Homo sapien
gatcgggtggcccaaaactgcctgc

SEQ ID NO: 3339809 - DNA, 25 bp, Homo sapien
tcaagttccagcacgtagatccatg

SEQ ID NO: 3339810 - DNA, 25 bp, Homo sapien
gatccatggtcatgatcgggtggcc

SEQ ID NO: 3339811 - DNA, 25 bp, Homo sapien
taagtatgtcatgtcttggacattc

SEQ ID NO: 3339812 - DNA, 25 bp, Homo sapien
taaaataggattccagattattctg

SEQ ID NO: 3339813 - DNA, 25 bp, Homo sapien
gaaattgtaagtatgtcatgtcttg

SEQ ID NO: 3339814 - DNA, 25 bp, Homo sapien
aaatcataaaataggattccagatt

SEQ ID NO: 3339815 - DNA, 25 bp, Homo sapien
cacatggggccagttacctttgtct

SEQ ID NO: 3339816 - DNA, 25 bp, Homo sapien
tttatcacatggggccagttacctt

SEQ ID NO: 3339817 - DNA, 25 bp, Homo sapien
tatcacatggggccagttacctttg

SEQ ID NO: 3339818 - DNA, 25 bp, Homo sapien
tcacatggggccagttacctttgtc

SEQ ID NO: 3339819 - DNA, 25 bp, Homo sapien
tgaaatcttggatgataacgtccct

SEQ ID NO: 3339820 - DNA, 25 bp, Homo sapien
caactgacataaggtgagtatcctc

SEQ ID NO: 3339821 - DNA, 25 bp, Homo sapien
tatcctcatggacttgattccgtag

SEQ ID NO: 3339822 - DNA, 25 bp, Homo sapien
tggactatcgtgagctctggagcca

SEQ ID NO: 3339823 - DNA, 25 bp, Homo sapien
ctattcactagcgatgtgactttgg

SEQ ID NO: 3339824 - DNA, 25 bp, Homo sapien
gaatcctcgttttgctattcactag

SEQ ID NO: 3339825 - DNA, 25 bp, Homo sapien
ggcaggcctaggcttgaatcctcgt

SEQ ID NO: 3339826 - DNA, 25 bp, Homo sapien
gggacagggtccctatcttattgtg

SEQ ID NO: 3339827 - DNA, 25 bp, Homo sapien
tctaatgataggtctgttggcaggt

SEQ ID NO: 3339828 - DNA, 25 bp, Homo sapien
ttgccagagccgctaagtcagagct

SEQ ID NO: 3339829 - DNA, 25 bp, Homo sapien
tggggggaggctatcagcaactcac

SEQ ID NO: 3339830 - DNA, 25 bp, Homo sapien
acattccatctaatgataggtctgt

SEQ ID NO: 3339831 - DNA, 25 bp, Homo sapien
ttgtccagtaccctcctgttataat

SEQ ID NO: 3339832 - DNA, 25 bp, Homo sapien
tccagtaccctcctgttataataca

SEQ ID NO: 3339833 - DNA, 25 bp, Homo sapien
atacaaagctccagctcaaactgaa

SEQ ID NO: 3339834 - DNA, 25 bp, Homo sapien
aatacaaagctccagctcaaactga

SEQ ID NO: 3339835 - DNA, 25 bp, Homo sapien
tatgttttagtagcaccatccgtaa

SEQ ID NO: 3339836 - DNA, 25 bp, Homo sapien
taaagtacaatcagccagatccacc

SEQ ID NO: 3339837 - DNA, 25 bp, Homo sapien
ttagtagcaccatccgtaatttcac

SEQ ID NO: 3339838 - DNA, 25 bp, Homo sapien
cagatccaccttctaatgactatga

SEQ ID NO: 3339839 - DNA, 25 bp, Homo sapien
cagcacaattggtgacttcacaaag

SEQ ID NO: 3339840 - DNA, 25 bp, Homo sapien
ctcctaggtgggaagccgccagaag

SEQ ID NO: 3339841 - DNA, 25 bp, Homo sapien
tgcatgccaggctagtacagctctc

SEQ ID NO: 3339842 - DNA, 25 bp, Homo sapien
tgacttcacaaaggtcccatggctc

SEQ ID NO: 3339843 - DNA, 25 bp, Homo sapien
gcttcgcaactgatcccagatacag

SEQ ID NO: 3339844 - DNA, 25 bp, Homo sapien
cagacacagtctaattgaaaagaag

SEQ ID NO: 3339845 - DNA, 25 bp, Homo sapien
tatcctaacccagcggtggccttag

SEQ ID NO: 3339846 - DNA, 25 bp, Homo sapien
gtcacgtcatacttctgcttcgcaa

SEQ ID NO: 3339847 - DNA, 25 bp, Homo sapien
ttttgggtgatgctttgtctatgtc

SEQ ID NO: 3339848 - DNA, 25 bp, Homo sapien
ggtgatgctttgtctatgtctatgg

SEQ ID NO: 3339849 - DNA, 25 bp, Homo sapien
tctatgtctatggtagaggagaaat

SEQ ID NO: 3339850 - DNA, 25 bp, Homo sapien
ttcccagtcatatttccctctccct

SEQ ID NO: 3339851 - DNA, 25 bp, Homo sapien
aggtagtgtggcttcacagcaagtt

SEQ ID NO: 3339852 - DNA, 25 bp, Homo sapien
tggagaccctgggacgcaggtagtg

SEQ ID NO: 3339853 - DNA, 25 bp, Homo sapien
ggtagtgtggcttcacagcaagttc

SEQ ID NO: 3339854 - DNA, 25 bp, Homo sapien
ccctgggacgcaggtagtgtggctt

SEQ ID NO: 3339855 - DNA, 25 bp, Homo sapien
tcccaagttacggttgcaacgcaag

SEQ ID NO: 3339856 - DNA, 25 bp, Homo sapien
tatgcactcaggaccgtggctcttg

SEQ ID NO: 3339857 - DNA, 25 bp, Homo sapien
tcatttagttccagcgtcccaggaa

SEQ ID NO: 3339858 - DNA, 25 bp, Homo sapien
tgagatcgggaaaaagcctgcaagc

SEQ ID NO: 3339859 - DNA, 25 bp, Homo sapien
tgcaactgtcagtctgaagcagaag

SEQ ID NO: 3339860 - DNA, 25 bp, Homo sapien
cctggagtttgaaggtcatagagcc

SEQ ID NO: 3339861 - DNA, 25 bp, Homo sapien
cctggagtccaaccgcaggaggaga

SEQ ID NO: 3339862 - DNA, 25 bp, Homo sapien
caggactggccacctacgttgtggg

SEQ ID NO: 3339863 - DNA, 25 bp, Homo sapien
gaatgctttgcgttcagtctctcaa

SEQ ID NO: 3339864 - DNA, 25 bp, Homo sapien
tgattggactcttcacttctgtcca

SEQ ID NO: 3339865 - DNA, 25 bp, Homo sapien
tgccttcttcgtgtgtgtgtcttgg

SEQ ID NO: 3339866 - DNA, 25 bp, Homo sapien
ctcaaaaagagtttctgattggact

SEQ ID NO: 3339867 - DNA, 25 bp, Homo sapien
cctgtccagacaactgaattggtca

SEQ ID NO: 3339868 - DNA, 25 bp, Homo sapien
gtggtagacactctaaagcttcacc

SEQ ID NO: 3339869 - DNA, 25 bp, Homo sapien
ccatatggaggcgttatagccagga

SEQ ID NO: 3339870 - DNA, 25 bp, Homo sapien
aagaggctgcggttgtggtagacac

SEQ ID NO: 3339871 - DNA, 25 bp, Homo sapien
ggtggcagccattaaccatcaagga

SEQ ID NO: 3339872 - DNA, 25 bp, Homo sapien
gatctaataagccttgtgaacagca

SEQ ID NO: 3339873 - DNA, 25 bp, Homo sapien
cagcaaggccccagttgagtgagtg

SEQ ID NO: 3339874 - DNA, 25 bp, Homo sapien
catcaagagctgttgcgtagaaggt

SEQ ID NO: 3339875 - DNA, 25 bp, Homo sapien
cttttacctcgttgtcagtgtacag

SEQ ID NO: 3339876 - DNA, 25 bp, Homo sapien
tacaattgtggatttaattgtgaaa

SEQ ID NO: 3339877 - DNA, 25 bp, Homo sapien
cactgacatgtgagtaagataaatg

SEQ ID NO: 3339878 - DNA, 25 bp, Homo sapien
taaatgtatacaattgtggatttaa

SEQ ID NO: 3339879 - DNA, 25 bp, Homo sapien
cgcttctggtaggtttgctgggtta

SEQ ID NO: 3339880 - DNA, 25 bp, Homo sapien
ttcttgctttgaagtagtgggtccc

SEQ ID NO: 3339881 - DNA, 25 bp, Homo sapien
caaaatcagtttgcccgcttctggt

SEQ ID NO: 3339882 - DNA, 25 bp, Homo sapien
tcagtttgcccgcttctggtaggtt

SEQ ID NO: 3339883 - DNA, 25 bp, Homo sapien
gatagtagtgttaaatagcccacca

SEQ ID NO: 3339884 - DNA, 25 bp, Homo sapien
tacactcccactacagggcagaagt

SEQ ID NO: 3339885 - DNA, 25 bp, Homo sapien
gaacagcttttccaggacatacctg

SEQ ID NO: 3339886 - DNA, 25 bp, Homo sapien
cttatttctgcagggtagactccca

SEQ ID NO: 3339887 - DNA, 25 bp, Homo sapien
tttttgcaggatctggcattagcct

SEQ ID NO: 3339888 - DNA, 25 bp, Homo sapien
caaaacctaagagccttcctgtgct

SEQ ID NO: 3339889 - DNA, 25 bp, Homo sapien
taacgccaccaaagttcactatgta

SEQ ID NO: 3339890 - DNA, 25 bp, Homo sapien
agtgtgtactacagcctggttagca

SEQ ID NO: 3339891 - DNA, 25 bp, Homo sapien
cagttacagttcttgcagctatagc

SEQ ID NO: 3339892 - DNA, 25 bp, Homo sapien
taattccaggatgtaacaggctgct

SEQ ID NO: 3339893 - DNA, 25 bp, Homo sapien
gctcagcacatctgcgtaataggaa

SEQ ID NO: 3339894 - DNA, 25 bp, Homo sapien
gctgctgccccgttgggaactaatt

SEQ ID NO: 3339895 - DNA, 25 bp, Homo sapien
ataccatccaagacttgattgttgg

SEQ ID NO: 3339896 - DNA, 25 bp, Homo sapien
ccaagacttgattgttggcaccaac

SEQ ID NO: 3339897 - DNA, 25 bp, Homo sapien
taccatccaagacttgattgttggc

SEQ ID NO: 3339898 - DNA, 25 bp, Homo sapien
catccaagacttgattgttggcacc

SEQ ID NO: 3339899 - DNA, 25 bp, Homo sapien
tggcctgcaaacacgatcttcagca

SEQ ID NO: 3339900 - DNA, 25 bp, Homo sapien
aaagagagatgctcatggcctgcaa

SEQ ID NO: 3339901 - DNA, 25 bp, Homo sapien
tgagcaagggtacagatattaaaga

SEQ ID NO: 3339902 - DNA, 25 bp, Homo sapien
caagggtacagatattaaagagaga

SEQ ID NO: 3339903 - DNA, 25 bp, Homo sapien
aaagctgagccctgcatttttctcc

SEQ ID NO: 3339904 - DNA, 25 bp, Homo sapien
gagccctgcatttttctccatatac

SEQ ID NO: 3339905 - DNA, 25 bp, Homo sapien
gctgagccctgcatttttctccata

SEQ ID NO: 3339906 - DNA, 25 bp, Homo sapien
aagctgagccctgcatttttctcca

SEQ ID NO: 3339907 - DNA, 25 bp, Homo sapien
gaagaatgaagccactcgttctaga

SEQ ID NO: 3339908 - DNA, 25 bp, Homo sapien
catgatgaaggtggctttcctattg

SEQ ID NO: 3339909 - DNA, 25 bp, Homo sapien
tctagatgcatcacataatttagcc

SEQ ID NO: 3339910 - DNA, 25 bp, Homo sapien
tcctttggggtcaccaaggctcagt

SEQ ID NO: 3339911 - DNA, 25 bp, Homo sapien
ctgtctgacagcattgtaggagtaa

SEQ ID NO: 3339912 - DNA, 25 bp, Homo sapien
ctagcaaacagggaattcaagaatg

SEQ ID NO: 3339913 - DNA, 25 bp, Homo sapien
tagcaaacagggaattcaagaatga

SEQ ID NO: 3339914 - DNA, 25 bp, Homo sapien
ggaccttttaggtgctctcagagca

SEQ ID NO: 3339915 - DNA, 25 bp, Homo sapien
gagggtccctcaaagctacgtaatg

SEQ ID NO: 3339916 - DNA, 25 bp, Homo sapien
tcagagcaccttgcatgagagggtc

SEQ ID NO: 3339917 - DNA, 25 bp, Homo sapien
cagagcagaatttggtgatcttcca

SEQ ID NO: 3339918 - DNA, 25 bp, Homo sapien
cctcatactccttgtgatgttcttg

SEQ ID NO: 3339919 - DNA, 25 bp, Homo sapien
tccccttgctttctggactatgaag

SEQ ID NO: 3339920 - DNA, 25 bp, Homo sapien
tggactatgaagtcctcatactcct

SEQ ID NO: 3339921 - DNA, 25 bp, Homo sapien
ttccccttgctttctggactatgaa

SEQ ID NO: 3339922 - DNA, 25 bp, Homo sapien
tgctggtgtgaaacccgaattattc

SEQ ID NO: 3339923 - DNA, 25 bp, Homo sapien
ccaatgtaagggatttgtgtgtaga

SEQ ID NO: 3339924 - DNA, 25 bp, Homo sapien
actgtgtctgctggtgtgaaacccg

SEQ ID NO: 3339925 - DNA, 25 bp, Homo sapien
tgtaagggatttgtgtgtagaacag

SEQ ID NO: 3339926 - DNA, 25 bp, Homo sapien
tttggactggtgagaaggaccgtct

SEQ ID NO: 3339927 - DNA, 25 bp, Homo sapien
cacaggatatttgactatgattata

SEQ ID NO: 3339928 - DNA, 25 bp, Homo sapien
aaagactgaacttggagtggtgaga

SEQ ID NO: 3339929 - DNA, 25 bp, Homo sapien
tgaagacacggcagagagaaatacc

SEQ ID NO: 3339930 - DNA, 25 bp, Homo sapien
aatggaattatcagtaagatatcca

SEQ ID NO: 3339931 - DNA, 25 bp, Homo sapien
ctagtcattggaagcactatgaaat

SEQ ID NO: 3339932 - DNA, 25 bp, Homo sapien
gaaatggaattatcagtaagatatc

SEQ ID NO: 3339933 - DNA, 25 bp, Homo sapien
tagtcattggaagcactatgaaatg

SEQ ID NO: 3339934 - DNA, 25 bp, Homo sapien
gaaaagatgaaagttaaaagcataa

SEQ ID NO: 3339935 - DNA, 25 bp, Homo sapien
tgttgaaaagatgaaagttaaaagc

SEQ ID NO: 3339936 - DNA, 25 bp, Homo sapien
tgaaagttaaaagcataaaactcag

SEQ ID NO: 3339937 - DNA, 25 bp, Homo sapien
agatgaaagttaaaagcataaaact

SEQ ID NO: 3339938 - DNA, 25 bp, Homo sapien
tagatgatcatgaggagtacactgc

SEQ ID NO: 3339939 - DNA, 25 bp, Homo sapien
tatttgggttagagaacgtgtcaca

SEQ ID NO: 3339940 - DNA, 25 bp, Homo sapien
caatccttgatgtatcttcggacaa

SEQ ID NO: 3339941 - DNA, 25 bp, Homo sapien
tgctgatagcaccaaaaggaggctt

SEQ ID NO: 3339942 - DNA, 25 bp, Homo sapien
caatgatgagaggaaccacaacagt

SEQ ID NO: 3339943 - DNA, 25 bp, Homo sapien
atgatgagaggaaccacaacagtca

SEQ ID NO: 3339944 - DNA, 25 bp, Homo sapien
aatgatgagaggaaccacaacagtc

SEQ ID NO: 3339945 - DNA, 25 bp, Homo sapien
agatgtgaaaggcacagaagaagat

SEQ ID NO: 3339946 - DNA, 25 bp, Homo sapien
gaaaggcacagaagaagatgaacca

SEQ ID NO: 3339947 - DNA, 25 bp, Homo sapien
agaaaaaatagatgtgaaaggcaca

SEQ ID NO: 3339948 - DNA, 25 bp, Homo sapien
atagatgtgaaaggcacagaagaag

SEQ ID NO: 3339949 - DNA, 25 bp, Homo sapien
ctttcccctgcagaccaaacctcag

SEQ ID NO: 3339950 - DNA, 25 bp, Homo sapien
ttcccctgcagaccaaacctcagtt

SEQ ID NO: 3339951 - DNA, 25 bp, Homo sapien
cccctgcagaccaaacctcagtttt

SEQ ID NO: 3339952 - DNA, 25 bp, Homo sapien
gcctttcccctgcagaccaaacctc

SEQ ID NO: 3339953 - DNA, 25 bp, Homo sapien
ggtggtctctagccctttttctcca

SEQ ID NO: 3339954 - DNA, 25 bp, Homo sapien
attggtggtctctagccctttttct

SEQ ID NO: 3339955 - DNA, 25 bp, Homo sapien
tggtggtctctagccctttttctcc

SEQ ID NO: 3339956 - DNA, 25 bp, Homo sapien
ataaaaattggtggtctctagccct

SEQ ID NO: 3339957 - DNA, 25 bp, Homo sapien
tgaaatgtgccaaaatgaaccgtaa

SEQ ID NO: 3339958 - DNA, 25 bp, Homo sapien
cacagtctgtttagtgaaatgtgcc

SEQ ID NO: 3339959 - DNA, 25 bp, Homo sapien
cagtctgtttagtgaaatgtgccaa

SEQ ID NO: 3339960 - DNA, 25 bp, Homo sapien
tgccaaaatgaaccgtaaattggct

SEQ ID NO: 3339961 - DNA, 25 bp, Homo sapien
gctgagctctatactagtcccttga

SEQ ID NO: 3339962 - DNA, 25 bp, Homo sapien
aagtggggacctcagacaggcctgc

SEQ ID NO: 3339963 - DNA, 25 bp, Homo sapien
cagatgctgagctctatactagtcc

SEQ ID NO: 3339964 - DNA, 25 bp, Homo sapien
ttgacctactgcaagtggggacctc

SEQ ID NO: 3339965 - DNA, 25 bp, Homo sapien
ggagcaggggtgttataacgatgcc

SEQ ID NO: 3339966 - DNA, 25 bp, Homo sapien
aggagcaggggtgttataacgatgc

SEQ ID NO: 3339967 - DNA, 25 bp, Homo sapien
ggcaagtctttcatctaattcagcc

SEQ ID NO: 3339968 - DNA, 25 bp, Homo sapien
gattagacttcatgtctccatggtg

SEQ ID NO: 3339969 - DNA, 25 bp, Homo sapien
cacataggaccacctcggtccctct

SEQ ID NO: 3339970 - DNA, 25 bp, Homo sapien
tttcatctaattcagccacatagga

SEQ ID NO: 3339971 - DNA, 25 bp, Homo sapien
ttcagttgcattaggaaatgagtca

SEQ ID NO: 3339972 - DNA, 25 bp, Homo sapien
ggaaatgagtcagccatgatgcatt

SEQ ID NO: 3339973 - DNA, 25 bp, Homo sapien
ttttcagttgcattaggaaatgagt

SEQ ID NO: 3339974 - DNA, 25 bp, Homo sapien
aatgagtcagccatgatgcattcat

SEQ ID NO: 3339975 - DNA, 25 bp, Homo sapien
tatctacctctcaccaatgacacca

SEQ ID NO: 3339976 - DNA, 25 bp, Homo sapien
gggtcttaacaacctagagatgcat

SEQ ID NO: 3339977 - DNA, 25 bp, Homo sapien
gagatgcatcctagactctgaatct

SEQ ID NO: 3339978 - DNA, 25 bp, Homo sapien
gttgcttctttccctatctacctct

SEQ ID NO: 3339979 - DNA, 25 bp, Homo sapien
tgatcagtaagaatggcccagagaa

SEQ ID NO: 3339980 - DNA, 25 bp, Homo sapien
gcttacctcacccaactgagcgagg

SEQ ID NO: 3339981 - DNA, 25 bp, Homo sapien
ataatggggttaaggaaaggctgct

SEQ ID NO: 3339982 - DNA, 25 bp, Homo sapien
aatgatcagtaagaatggcccagag

SEQ ID NO: 3339983 - DNA, 25 bp, Homo sapien
tctaagagtcatgttttcagaaagc

SEQ ID NO: 3339984 - DNA, 25 bp, Homo sapien
ttcctgtagggtatttgacaagctt

SEQ ID NO: 3339985 - DNA, 25 bp, Homo sapien
tgacaagcttttaaacatctaagag

SEQ ID NO: 3339986 - DNA, 25 bp, Homo sapien
aagcatacagatttcttctggagaa

SEQ ID NO: 3339987 - DNA, 25 bp, Homo sapien
agagaatacagcaattgtctatgta

SEQ ID NO: 3339988 - DNA, 25 bp, Homo sapien
aatgcagcatccagttatattaagc

SEQ ID NO: 3339989 - DNA, 25 bp, Homo sapien
tcagttaaacagatttcaagataaa

SEQ ID NO: 3339990 - DNA, 25 bp, Homo sapien
caggagtaactatacttttatcagt

SEQ ID NO: 3339991 - DNA, 25 bp, Homo sapien
aagaatagaccatgtggtaggccac

SEQ ID NO: 3339992 - DNA, 25 bp, Homo sapien
tcccgaacaaccactgggtcaatga

SEQ ID NO: 3339993 - DNA, 25 bp, Homo sapien
ctcccgaacaaccactgggtcaatg

SEQ ID NO: 3339994 - DNA, 25 bp, Homo sapien
gaatagaccatgtggtaggccacaa

SEQ ID NO: 3339995 - DNA, 25 bp, Homo sapien
accagaattgtttaagagatgacac

SEQ ID NO: 3339996 - DNA, 25 bp, Homo sapien
gacaccagaattgtttaagagatga

SEQ ID NO: 3339997 - DNA, 25 bp, Homo sapien
caccagaattgtttaagagatgaca

SEQ ID NO: 3339998 - DNA, 25 bp, Homo sapien
cttgacaccagaattgtttaagaga

SEQ ID NO: 3339999 - DNA, 25 bp, Homo sapien
gttagggttgtttcctcacatacca

SEQ ID NO: 3340000 - DNA, 25 bp, Homo sapien
cctctgacatgagctgtgttagggt

SEQ ID NO: 3340001 - DNA, 25 bp, Homo sapien
atagtgtcggatcccacaggttgaa

SEQ ID NO: 3340002 - DNA, 25 bp, Homo sapien
ttcaattctattccggcacttggtg

SEQ ID NO: 3340003 - DNA, 25 bp, Homo sapien
gagtgaagaaatgccggccatcatt

SEQ ID NO: 3340004 - DNA, 25 bp, Homo sapien
gagtacaaaactagtgccagggcct

SEQ ID NO: 3340005 - DNA, 25 bp, Homo sapien
agaattttatcagaagggacagatc

SEQ ID NO: 3340006 - DNA, 25 bp, Homo sapien
taacatgactaacattatagaggga

SEQ ID NO: 3340007 - DNA, 25 bp, Homo sapien
tggcaatgccaattatgtcactcat

SEQ ID NO: 3340008 - DNA, 25 bp, Homo sapien
caaaaaattggcaatgccaattatg

SEQ ID NO: 3340009 - DNA, 25 bp, Homo sapien
aattggcaatgccaattatgtcact

SEQ ID NO: 3340010 - DNA, 25 bp, Homo sapien
aaaaattggcaatgccaattatgtc

SEQ ID NO: 3340011 - DNA, 25 bp, Homo sapien
cgatccagtagaggttcacagtcat

SEQ ID NO: 3340012 - DNA, 25 bp, Homo sapien
attctggtttctaggctttagtaca

SEQ ID NO: 3340013 - DNA, 25 bp, Homo sapien
tggtttctaggctttagtacaaata

SEQ ID NO: 3340014 - DNA, 25 bp, Homo sapien
ttataagagcacgatccagtagagg

SEQ ID NO: 3340015 - DNA, 25 bp, Homo sapien
cctgcttgggacctgcaaaattcat

SEQ ID NO: 3340016 - DNA, 25 bp, Homo sapien
ctttaagccttagtggggtgacatc

SEQ ID NO: 3340017 - DNA, 25 bp, Homo sapien
ttaagccttagtggggtgacatcag

SEQ ID NO: 3340018 - DNA, 25 bp, Homo sapien
tttaagccttagtggggtgacatca

SEQ ID NO: 3340019 - DNA, 25 bp, Homo sapien
cactttaagccttagtggggtgaca

SEQ ID NO: 3340020 - DNA, 25 bp, Homo sapien
aggatttcttagataggatacaaaa

SEQ ID NO: 3340021 - DNA, 25 bp, Homo sapien
tacaaaatgcctgagccataaaaga

SEQ ID NO: 3340022 - DNA, 25 bp, Homo sapien
taggatacaaaatgcctgagccata

SEQ ID NO: 3340023 - DNA, 25 bp, Homo sapien
tctttgtgacaaacaaggatttctt

SEQ ID NO: 3340024 - DNA, 25 bp, Homo sapien
gataggattcattgccctggctctt

SEQ ID NO: 3340025 - DNA, 25 bp, Homo sapien
taagctcagagtataaccatccccg

SEQ ID NO: 3340026 - DNA, 25 bp, Homo sapien
catccccggacacatagaatatgaa

SEQ ID NO: 3340027 - DNA, 25 bp, Homo sapien
cagtgcagctcgttcaattaccaaa

SEQ ID NO: 3340028 - DNA, 25 bp, Homo sapien
tatggatactggcacatgaaaagat

SEQ ID NO: 3340029 - DNA, 25 bp, Homo sapien
taactacttttcttcagggtatgga

SEQ ID NO: 3340030 - DNA, 25 bp, Homo sapien
ctgctaatgagttatgccccaaaaa

SEQ ID NO: 3340031 - DNA, 25 bp, Homo sapien
gacataacctctataaggagacaca

SEQ ID NO: 3340032 - DNA, 25 bp, Homo sapien
cagcaaaagttgtaatagacaagtt

SEQ ID NO: 3340033 - DNA, 25 bp, Homo sapien
cacagcaaaagttgtaatagacaag

SEQ ID NO: 3340034 - DNA, 25 bp, Homo sapien
tcacagcaaaagttgtaatagacaa

SEQ ID NO: 3340035 - DNA, 25 bp, Homo sapien
gcaaaagttgtaatagacaagttaa

SEQ ID NO: 3340036 - DNA, 25 bp, Homo sapien
caaaggctgaattaaatattgcagc

SEQ ID NO: 3340037 - DNA, 25 bp, Homo sapien
ccaaaggctgaattaaatattgcag

SEQ ID NO: 3340038 - DNA, 25 bp, Homo sapien
aggctgaattaaatattgcagctgc

SEQ ID NO: 3340039 - DNA, 25 bp, Homo sapien
cttccaaaggctgaattaaatattg

SEQ ID NO: 3340040 - DNA, 25 bp, Homo sapien
tacatagcagacgtaatatagctct

SEQ ID NO: 3340041 - DNA, 25 bp, Homo sapien
taatcattgtggacattagcagcca

SEQ ID NO: 3340042 - DNA, 25 bp, Homo sapien
caatgaagctataccagagtcctgc

SEQ ID NO: 3340043 - DNA, 25 bp, Homo sapien
agtccaaagccaggctaagagctgt

SEQ ID NO: 3340044 - DNA, 25 bp, Homo sapien
tcttgtcaggcgtccaggaaaaatc

SEQ ID NO: 3340045 - DNA, 25 bp, Homo sapien
ttaactagctcagcggagggtcagg

SEQ ID NO: 3340046 - DNA, 25 bp, Homo sapien
ccgcggcagtgtccaagtgtgttac

SEQ ID NO: 3340047 - DNA, 25 bp, Homo sapien
tcttggtacccgagttcttgtcagg

SEQ ID NO: 3340048 - DNA, 25 bp, Homo sapien
aaattccccaagcagaccaagtcag

SEQ ID NO: 3340049 - DNA, 25 bp, Homo sapien
ttactacgtctatccaatcttggcc

SEQ ID NO: 3340050 - DNA, 25 bp, Homo sapien
atggagactaggctgaaaattcccc

SEQ ID NO: 3340051 - DNA, 25 bp, Homo sapien
tggcctatcctctgctatctggaaa

SEQ ID NO: 3340052 - DNA, 25 bp, Homo sapien
ggcagcgggctcatgcattaacata

SEQ ID NO: 3340053 - DNA, 25 bp, Homo sapien
tgcaaagcagttcctaacaacaggg

SEQ ID NO: 3340054 - DNA, 25 bp, Homo sapien
ggcccttagggcagacagcatatta

SEQ ID NO: 3340055 - DNA, 25 bp, Homo sapien
tattaggtaggcctcctgtgcagac

SEQ ID NO: 3340056 - DNA, 25 bp, Homo sapien
agccccacgcggtttctgttgccta

SEQ ID NO: 3340057 - DNA, 25 bp, Homo sapien
gatttcaatcaagcacgagagtacc

SEQ ID NO: 3340058 - DNA, 25 bp, Homo sapien
gactgttaataatgggaatgacaca

SEQ ID NO: 3340059 - DNA, 25 bp, Homo sapien
tgttttagactaatctcctcccagg

SEQ ID NO: 3340060 - DNA, 25 bp, Homo sapien
ttccagaccagatcaaccctataga

SEQ ID NO: 3340061 - DNA, 25 bp, Homo sapien
caaacactgcactagatacagagga

SEQ ID NO: 3340062 - DNA, 25 bp, Homo sapien
gggttgctaccacaagactgtggct

SEQ ID NO: 3340063 - DNA, 25 bp, Homo sapien
cttagacaaagcagaataggcgtga

SEQ ID NO: 3340064 - DNA, 25 bp, Homo sapien
caattattgtgccatagtcccctag

SEQ ID NO: 3340065 - DNA, 25 bp, Homo sapien
ccctataagtagcttctgcattgga

SEQ ID NO: 3340066 - DNA, 25 bp, Homo sapien
aagtcatagcacctttcaaccaagg

SEQ ID NO: 3340067 - DNA, 25 bp, Homo sapien
taagaatgaactgaagtggaaaccc

SEQ ID NO: 3340068 - DNA, 25 bp, Homo sapien
ctcatttccaccaactgccttggtt

SEQ ID NO: 3340069 - DNA, 25 bp, Homo sapien
tccaccaactgccttggttaaaatc

SEQ ID NO: 3340070 - DNA, 25 bp, Homo sapien
ccaccaactgccttggttaaaatca

SEQ ID NO: 3340071 - DNA, 25 bp, Homo sapien
catttccaccaactgccttggttaa

SEQ ID NO: 3340072 - DNA, 25 bp, Homo sapien
aagacacaggcggaggcatgcaacc

SEQ ID NO: 3340073 - DNA, 25 bp, Homo sapien
aggcggaggcatgcaacctactgtc

SEQ ID NO: 3340074 - DNA, 25 bp, Homo sapien
cacaggcggaggcatgcaacctact

SEQ ID NO: 3340075 - DNA, 25 bp, Homo sapien
gacacaggcggaggcatgcaaccta

SEQ ID NO: 3340076 - DNA, 25 bp, Homo sapien
gcagttttagatgcaccaaagcact

SEQ ID NO: 3340077 - DNA, 25 bp, Homo sapien
aaaagccattcgttgatgggtgtga

SEQ ID NO: 3340078 - DNA, 25 bp, Homo sapien
ggtgtgattgataaaagctgaagaa

SEQ ID NO: 3340079 - DNA, 25 bp, Homo sapien
ttttagatgcaccaaagcactggtc

SEQ ID NO: 3340080 - DNA, 25 bp, Homo sapien
tctggaccaggactaagctaactat

SEQ ID NO: 3340081 - DNA, 25 bp, Homo sapien
tgaacaacgtgcatgtatgtttacc

SEQ ID NO: 3340082 - DNA, 25 bp, Homo sapien
tacttcatactactatagatttggg

SEQ ID NO: 3340083 - DNA, 25 bp, Homo sapien
taagccctaacaaatcagatgtgta

SEQ ID NO: 3340084 - DNA, 25 bp, Homo sapien
ttaggaccactagaaaacactcagc

SEQ ID NO: 3340085 - DNA, 25 bp, Homo sapien
gagatacacacagcagttccttcct

SEQ ID NO: 3340086 - DNA, 25 bp, Homo sapien
gaaagcaagccatccttacagtgaa

SEQ ID NO: 3340087 - DNA, 25 bp, Homo sapien
tcctgttaggtcacaagacatccct

SEQ ID NO: 3340088 - DNA, 25 bp, Homo sapien
cacgataaagcacgagatcacggca

SEQ ID NO: 3340089 - DNA, 25 bp, Homo sapien
aaccagggctctaattgggacgtag

SEQ ID NO: 3340090 - DNA, 25 bp, Homo sapien
gaatgggaccaacacaaatgcttcc

SEQ ID NO: 3340091 - DNA, 25 bp, Homo sapien
gattgctgcttagataccacgataa

SEQ ID NO: 3340092 - DNA, 25 bp, Homo sapien
tctgttttcaatgatagtccactgt

SEQ ID NO: 3340093 - DNA, 25 bp, Homo sapien
gcaacagcaatgtaggatacagtta

SEQ ID NO: 3340094 - DNA, 25 bp, Homo sapien
tcaatgatagtccactgttaaagaa

SEQ ID NO: 3340095 - DNA, 25 bp, Homo sapien
ttgttgcaacagcaatgtaggatac

SEQ ID NO: 3340096 - DNA, 25 bp, Homo sapien
agtttagctccagcgatcgccagca

SEQ ID NO: 3340097 - DNA, 25 bp, Homo sapien
ccctatggacggctccagtttagct

SEQ ID NO: 3340098 - DNA, 25 bp, Homo sapien
ttcacccctatggacggctccagtt

SEQ ID NO: 3340099 - DNA, 25 bp, Homo sapien
tatggacggctccagtttagctcca

SEQ ID NO: 3340100 - DNA, 25 bp, Homo sapien
ttcctcattctctccagcagcctca

SEQ ID NO: 3340101 - DNA, 25 bp, Homo sapien
tcctcattctctccagcagcctcat

SEQ ID NO: 3340102 - DNA, 25 bp, Homo sapien
ttccgaccatgaaccagtctttcct

SEQ ID NO: 3340103 - DNA, 25 bp, Homo sapien
ctattccgaccatgaaccagtcttt

SEQ ID NO: 3340104 - DNA, 25 bp, Homo sapien
ttttttcttttcaagctccgatcac

SEQ ID NO: 3340105 - DNA, 25 bp, Homo sapien
tttttttcttttcaagctccgatca

SEQ ID NO: 3340106 - DNA, 25 bp, Homo sapien
ccttggagcgtctccacactttcct

SEQ ID NO: 3340107 - DNA, 25 bp, Homo sapien
caaattgccgattgtaaagtaaaga

SEQ ID NO: 3340108 - DNA, 25 bp, Homo sapien
cagagcaagtcaaattgccgattgt

SEQ ID NO: 3340109 - DNA, 25 bp, Homo sapien
ttgccgattgtaaagtaaagacctg

SEQ ID NO: 3340110 - DNA, 25 bp, Homo sapien
gtagccagtgacaggaaagtctcac

SEQ ID NO: 3340111 - DNA, 25 bp, Homo sapien
gagtagtagtagccagtgacaggaa

SEQ ID NO: 3340112 - DNA, 25 bp, Homo sapien
gaggagggttgggagtagtagtagc

SEQ ID NO: 3340113 - DNA, 25 bp, Homo sapien
ggagggttgggagtagtagtagcca

SEQ ID NO: 3340114 - DNA, 25 bp, Homo sapien
ccgctgtcgagacctgcggaacctt

SEQ ID NO: 3340115 - DNA, 25 bp, Homo sapien
cgcgggctcgcaggtgcagatgctt

SEQ ID NO: 3340116 - DNA, 25 bp, Homo sapien
taccacgcgcctcagaatacacgcg

SEQ ID NO: 3340117 - DNA, 25 bp, Homo sapien
atgaagaactcggaccaggccgaca

SEQ ID NO: 3340118 - DNA, 25 bp, Homo sapien
tttgctgtgccatgactccgcgggc

SEQ ID NO: 3340119 - DNA, 25 bp, Homo sapien
tttggagacgcgcttcttcgggaca

SEQ ID NO: 3340120 - DNA, 25 bp, Homo sapien
gagcatatctccatggagagcctct

SEQ ID NO: 3340121 - DNA, 25 bp, Homo sapien
gcaagggatttctccgttgaagctg

SEQ ID NO: 3340122 - DNA, 25 bp, Homo sapien
atgttattcccacttgttgaatatc

SEQ ID NO: 3340123 - DNA, 25 bp, Homo sapien
tgttctctgcattccatttagcaga

SEQ ID NO: 3340124 - DNA, 25 bp, Homo sapien
atgttctctgcattccatttagcag

SEQ ID NO: 3340125 - DNA, 25 bp, Homo sapien
aatgttctctgcattccatttagca

SEQ ID NO: 3340126 - DNA, 25 bp, Homo sapien
ttagagttaagaatgttctctgcat

SEQ ID NO: 3340127 - DNA, 25 bp, Homo sapien
acacaactatttttgaaggaactag

SEQ ID NO: 3340128 - DNA, 25 bp, Homo sapien
ttcccttgtcggaatggtccagggc

SEQ ID NO: 3340129 - DNA, 25 bp, Homo sapien
tgaaagtcttcccttgtcggaatgg

SEQ ID NO: 3340130 - DNA, 25 bp, Homo sapien
gatgatgaaagtcttcccttgtcgg

SEQ ID NO: 3340131 - DNA, 25 bp, Homo sapien
cttgatgatgaaagtcttcccttgt

SEQ ID NO: 3340132 - DNA, 25 bp, Homo sapien
gggccactgaggggcaattgtttct

SEQ ID NO: 3340133 - DNA, 25 bp, Homo sapien
ctgttgggggccactgaggggcaat

SEQ ID NO: 3340134 - DNA, 25 bp, Homo sapien
gttgggggccactgaggggcaattg

SEQ ID NO: 3340135 - DNA, 25 bp, Homo sapien
gccactgaggggcaattgtttctct

SEQ ID NO: 3340136 - DNA, 25 bp, Homo sapien
ctcgttttgcctctgggacaaccat

SEQ ID NO: 3340137 - DNA, 25 bp, Homo sapien
acagttcaggatgccgagccaatga

SEQ ID NO: 3340138 - DNA, 25 bp, Homo sapien
ccaatgagatttctcgttttgcctc

SEQ ID NO: 3340139 - DNA, 25 bp, Homo sapien
tgagacagttcaggatgccgagcca

SEQ ID NO: 3340140 - DNA, 25 bp, Homo sapien
ggaggcaaatgcatgaggagtcact

SEQ ID NO: 3340141 - DNA, 25 bp, Homo sapien
gagtcactggctaaattctgatatt

SEQ ID NO: 3340142 - DNA, 25 bp, Homo sapien
gatattgatctggaagcacatactc

SEQ ID NO: 3340143 - DNA, 25 bp, Homo sapien
gatctggaagcacatactctgaaaa

SEQ ID NO: 3340144 - DNA, 25 bp, Homo sapien
caccagagattttataacattttta

SEQ ID NO: 3340145 - DNA, 25 bp, Homo sapien
gaccatggacagagcccgtcgcgcg

SEQ ID NO: 3340146 - DNA, 25 bp, Homo sapien
gtcgcgcgctcgttgctgccgcctt

SEQ ID NO: 3340147 - DNA, 25 bp, Homo sapien
atggacagagcccgtcgcgcgctcg

SEQ ID NO: 3340148 - DNA, 25 bp, Homo sapien
gacagagcccgtcgcgcgctcgttg

SEQ ID NO: 3340149 - DNA, 25 bp, Homo sapien
tgctctcgcacctgctcgccttccc

SEQ ID NO: 3340150 - DNA, 25 bp, Homo sapien
ggtggacaggcggtcccctactctc

SEQ ID NO: 3340151 - DNA, 25 bp, Homo sapien
gccgcctgctctcgcacctgctcgc

SEQ ID NO: 3340152 - DNA, 25 bp, Homo sapien
cagcgcctctcaggcctgccgcctg

SEQ ID NO: 3340153 - DNA, 25 bp, Homo sapien
cagctaaaaataggctccgcaccga

SEQ ID NO: 3340154 - DNA, 25 bp, Homo sapien
tcagctaaaaataggctccgcaccg

SEQ ID NO: 3340155 - DNA, 25 bp, Homo sapien
taaaaataggctccgcaccgagagg

SEQ ID NO: 3340156 - DNA, 25 bp, Homo sapien
gctaaaaataggctccgcaccgaga

SEQ ID NO: 3340157 - DNA, 25 bp, Homo sapien
gacctccgctcgtattgggctggga

SEQ ID NO: 3340158 - DNA, 25 bp, Homo sapien
cgcagaacccgggttggccgcaacg

SEQ ID NO: 3340159 - DNA, 25 bp, Homo sapien
gaacgccgacctccgctcgtattgg

SEQ ID NO: 3340160 - DNA, 25 bp, Homo sapien
tgttctcagcggtggccgggaacct

SEQ ID NO: 3340161 - DNA, 25 bp, Homo sapien
agcagccgcgggacgctgcgaaggg

SEQ ID NO: 3340162 - DNA, 25 bp, Homo sapien
agtgggggcgcgattgtgagtagca

SEQ ID NO: 3340163 - DNA, 25 bp, Homo sapien
attgtgagtagcagccgcgggacgc

SEQ ID NO: 3340164 - DNA, 25 bp, Homo sapien
gcggcggcaacagagcacgggcggg

SEQ ID NO: 3340165 - DNA, 25 bp, Homo sapien
gcggcgggtgagctcaacttcgcac

SEQ ID NO: 3340166 - DNA, 25 bp, Homo sapien
tggcccggcacttctcggagggtcc

SEQ ID NO: 3340167 - DNA, 25 bp, Homo sapien
ctggcccggcacttctcggagggtc

SEQ ID NO: 3340168 - DNA, 25 bp, Homo sapien
gtgagctcaacttcgcacagccctt

SEQ ID NO: 3340169 - DNA, 25 bp, Homo sapien
gatgatgtccctgaacagcaagcag

SEQ ID NO: 3340170 - DNA, 25 bp, Homo sapien
gatgatgatgatgtccctgaacagc

SEQ ID NO: 3340171 - DNA, 25 bp, Homo sapien
tgaacagcaagcaggcgtttagcat

SEQ ID NO: 3340172 - DNA, 25 bp, Homo sapien
cgccccggcgggcgggaagatgatg

SEQ ID NO: 3340173 - DNA, 25 bp, Homo sapien
ggcagcctgcacgtggagcccaagt

SEQ ID NO: 3340174 - DNA, 25 bp, Homo sapien
cagcctgcacgtggagcccaagtac

SEQ ID NO: 3340175 - DNA, 25 bp, Homo sapien
gcggcagcctgcacgtggagcccaa

SEQ ID NO: 3340176 - DNA, 25 bp, Homo sapien
cacggcggcagcctgcacgtggagc

SEQ ID NO: 3340177 - DNA, 25 bp, Homo sapien
tcggcactgcacagcacctcgccgg

SEQ ID NO: 3340178 - DNA, 25 bp, Homo sapien
cggcactgcacagcacctcgccggg

SEQ ID NO: 3340179 - DNA, 25 bp, Homo sapien
acagcacctcgccgggctcctcggc

SEQ ID NO: 3340180 - DNA, 25 bp, Homo sapien
cacctcgccgggctcctcggctccc

SEQ ID NO: 3340181 - DNA, 25 bp, Homo sapien
agctcccccagcagctcgagcaacg

SEQ ID NO: 3340182 - DNA, 25 bp, Homo sapien
ggccagctcccccagcagctcgagc

SEQ ID NO: 3340183 - DNA, 25 bp, Homo sapien
cgcgccctcggccagctcccccagc

SEQ ID NO: 3340184 - DNA, 25 bp, Homo sapien
ccagctcccccagcagctcgagcaa

SEQ ID NO: 3340185 - DNA, 25 bp, Homo sapien
cagtagagaaggtgctgcgtcaatt

SEQ ID NO: 3340186 - DNA, 25 bp, Homo sapien
atcaaacgatgataaacccactgtt

SEQ ID NO: 3340187 - DNA, 25 bp, Homo sapien
tttcatcaaacgatgataaacccac

SEQ ID NO: 3340188 - DNA, 25 bp, Homo sapien
aggtgctgcgtcaatttgtatttca

SEQ ID NO: 3340189 - DNA, 25 bp, Homo sapien
gacacgttcagtttacacttgtaga

SEQ ID NO: 3340190 - DNA, 25 bp, Homo sapien
taagacattcgaacacattcagctg

SEQ ID NO: 3340191 - DNA, 25 bp, Homo sapien
caaactgtgtatgaccaaagtggcc

SEQ ID NO: 3340192 - DNA, 25 bp, Homo sapien
tacctttgtgagttccttagtctgg

SEQ ID NO: 3340193 - DNA, 25 bp, Homo sapien
cttttatgcctgaaataaccttgtt

SEQ ID NO: 3340194 - DNA, 25 bp, Homo sapien
ttcaccatgaagctcactttgtcca

SEQ ID NO: 3340195 - DNA, 25 bp, Homo sapien
tatgcctgaaataaccttgttttta

SEQ ID NO: 3340196 - DNA, 25 bp, Homo sapien
accatgaagctcactttgtccaaat

SEQ ID NO: 3340197 - DNA, 25 bp, Homo sapien
ctctgatggtgaatataggcgtagg

SEQ ID NO: 3340198 - DNA, 25 bp, Homo sapien
ctgatggtgaatataggcgtaggtc

SEQ ID NO: 3340199 - DNA, 25 bp, Homo sapien
tgatggtgaatataggcgtaggtct

SEQ ID NO: 3340200 - DNA, 25 bp, Homo sapien
atggtgaatataggcgtaggtcttg

SEQ ID NO: 3340201 - DNA, 25 bp, Homo sapien
tagagataatcacagttcatttggg

SEQ ID NO: 3340202 - DNA, 25 bp, Homo sapien
tcttgttacatttatcagcagttgc

SEQ ID NO: 3340203 - DNA, 25 bp, Homo sapien
tgcagccactagatctaatttctgt

SEQ ID NO: 3340204 - DNA, 25 bp, Homo sapien
gatcaagctgaatctacactatagc

SEQ ID NO: 3340205 - DNA, 25 bp, Homo sapien
ttgcatatggccagacagttgtctc

SEQ ID NO: 3340206 - DNA, 25 bp, Homo sapien
tgtccagagcggtgtttcctaagtt

SEQ ID NO: 3340207 - DNA, 25 bp, Homo sapien
cagcccactgagtaggacgtccttt

SEQ ID NO: 3340208 - DNA, 25 bp, Homo sapien
taatgatagccgtttgactggagtg

SEQ ID NO: 3340209 - DNA, 25 bp, Homo sapien
aacaagacttatcagtatggtaggc

SEQ ID NO: 3340210 - DNA, 25 bp, Homo sapien
gacacattaggtaaggcttgtaaga

SEQ ID NO: 3340211 - DNA, 25 bp, Homo sapien
tatgtgctatcagctaaaagtatca

SEQ ID NO: 3340212 - DNA, 25 bp, Homo sapien
tacatgtaaccatctcagctgtgtt

SEQ ID NO: 3340213 - DNA, 25 bp, Homo sapien
agtctaaggtgacatgatggatttc

SEQ ID NO: 3340214 - DNA, 25 bp, Homo sapien
ctatattatctgtaacatgctccta

SEQ ID NO: 3340215 - DNA, 25 bp, Homo sapien
catgctcctattacaagtattgaag

SEQ ID NO: 3340216 - DNA, 25 bp, Homo sapien
gagtcatagtccgttttattataac

SEQ ID NO: 3340217 - DNA, 25 bp, Homo sapien
ttcatttttttgatcacctggaaac

SEQ ID NO: 3340218 - DNA, 25 bp, Homo sapien
tttggagaatgagattatgcttagt

SEQ ID NO: 3340219 - DNA, 25 bp, Homo sapien
aagcagtgtttcactattaaggtta

SEQ ID NO: 3340220 - DNA, 25 bp, Homo sapien
gcttagtatattgcgcaaagtgggt

SEQ ID NO: 3340221 - DNA, 25 bp, Homo sapien
gcagtgtttcactattaaggttatc

SEQ ID NO: 3340222 - DNA, 25 bp, Homo sapien
gcttccactgtggatcctctaaact

SEQ ID NO: 3340223 - DNA, 25 bp, Homo sapien
ctactgagttcttccaaacgttctg

SEQ ID NO: 3340224 - DNA, 25 bp, Homo sapien
ctgagttcttccaaacgttctgagt

SEQ ID NO: 3340225 - DNA, 25 bp, Homo sapien
ctgagttttgagatacagcttccac

SEQ ID NO: 3340226 - DNA, 25 bp, Homo sapien
cacaggactgttggctcttggttcc

SEQ ID NO: 3340227 - DNA, 25 bp, Homo sapien
gacctagtaacacagaatctgcctt

SEQ ID NO: 3340228 - DNA, 25 bp, Homo sapien
tgcagaaatgtaggccgcacttcag

SEQ ID NO: 3340229 - DNA, 25 bp, Homo sapien
tccaggtgacctatatgtctgctac

SEQ ID NO: 3340230 - DNA, 25 bp, Homo sapien
gcagcaaagtagttcctagaaataa

SEQ ID NO: 3340231 - DNA, 25 bp, Homo sapien
tcaatctgtatcttattcctttttc

SEQ ID NO: 3340232 - DNA, 25 bp, Homo sapien
tgcattaatatttataggctgactc

SEQ ID NO: 3340233 - DNA, 25 bp, Homo sapien
aatatttataggctgactccacaca

SEQ ID NO: 3340234 - DNA, 25 bp, Homo sapien
tgactccacacaagttctaaacttt

SEQ ID NO: 3340235 - DNA, 25 bp, Homo sapien
ggacaatgactgcacctacctcact

SEQ ID NO: 3340236 - DNA, 25 bp, Homo sapien
tgcaacatagtaatgtttcaagtgc

SEQ ID NO: 3340237 - DNA, 25 bp, Homo sapien
cccctgctatggcaatgcaacatag

SEQ ID NO: 3340238 - DNA, 25 bp, Homo sapien
gaggatataccccaaaagcatctct

SEQ ID NO: 3340239 - DNA, 25 bp, Homo sapien
gctacttgagagtctagatctgcag

SEQ ID NO: 3340240 - DNA, 25 bp, Homo sapien
gggtataggatcgtcaaatgagtca

SEQ ID NO: 3340241 - DNA, 25 bp, Homo sapien
catgtatgggtagagaccacaatgc

SEQ ID NO: 3340242 - DNA, 25 bp, Homo sapien
ttttcatatagcttggacccaccag

SEQ ID NO: 3340243 - DNA, 25 bp, Homo sapien
acttgcagcgtattcatttgtgggc

SEQ ID NO: 3340244 - DNA, 25 bp, Homo sapien
gcagcttcaccgtcccaagtcaatt

SEQ ID NO: 3340245 - DNA, 25 bp, Homo sapien
cgtcccaagtcaattcctgcaatct

SEQ ID NO: 3340246 - DNA, 25 bp, Homo sapien
ctagcctagtatcttcagaaaatct

SEQ ID NO: 3340247 - DNA, 25 bp, Homo sapien
ctaaactttgcatcagaagctggga

SEQ ID NO: 3340248 - DNA, 25 bp, Homo sapien
tacatgtaggtggaaagtcaagact

SEQ ID NO: 3340249 - DNA, 25 bp, Homo sapien
taagcaagactgtgcagaatcccac

SEQ ID NO: 3340250 - DNA, 25 bp, Homo sapien
tcaagacttgctctcactgtaggtg

SEQ ID NO: 3340251 - DNA, 25 bp, Homo sapien
caggaacagcgggggatagggtagg

SEQ ID NO: 3340252 - DNA, 25 bp, Homo sapien
ccaggaacagcgggggatagggtag

SEQ ID NO: 3340253 - DNA, 25 bp, Homo sapien
cagtacctattgttgactaagataa

SEQ ID NO: 3340254 - DNA, 25 bp, Homo sapien
tcagtacctattgttgactaagata

SEQ ID NO: 3340255 - DNA, 25 bp, Homo sapien
gctggtgagatctgcagactctata

SEQ ID NO: 3340256 - DNA, 25 bp, Homo sapien
tgttcactgtaagcatcatctgatg

SEQ ID NO: 3340257 - DNA, 25 bp, Homo sapien
tccatcagaggcatgctcattagct

SEQ ID NO: 3340258 - DNA, 25 bp, Homo sapien
tgaacttttgtctcatccatcagag

SEQ ID NO: 3340259 - DNA, 25 bp, Homo sapien
acactgacctttcgacagttacagc

SEQ ID NO: 3340260 - DNA, 25 bp, Homo sapien
cactgacctttcgacagttacagca

SEQ ID NO: 3340261 - DNA, 25 bp, Homo sapien
cacactgacctttcgacagttacag

SEQ ID NO: 3340262 - DNA, 25 bp, Homo sapien
taaatgaatcttacgggaagagaac

SEQ ID NO: 3340263 - DNA, 25 bp, Homo sapien
tctagtaattagtcttggtaatctc

SEQ ID NO: 3340264 - DNA, 25 bp, Homo sapien
tatgcatcctaaatgaatcttacgg

SEQ ID NO: 3340265 - DNA, 25 bp, Homo sapien
ctcaaatatgagtttgacaatatgc

SEQ ID NO: 3340266 - DNA, 25 bp, Homo sapien
tccccaagcattgtacttgctctca

SEQ ID NO: 3340267 - DNA, 25 bp, Homo sapien
gatgtccccaagcattgtacttgct

SEQ ID NO: 3340268 - DNA, 25 bp, Homo sapien
gtagatgtccccaagcattgtactt

SEQ ID NO: 3340269 - DNA, 25 bp, Homo sapien
aagcattgtacttgctctcaccaaa

SEQ ID NO: 3340270 - DNA, 25 bp, Homo sapien
ttcacctgtgaatttgtctgatcct

SEQ ID NO: 3340271 - DNA, 25 bp, Homo sapien
tatttgtgtatagttgtttaccata

SEQ ID NO: 3340272 - DNA, 25 bp, Homo sapien
gttcctcttcatatatctggcagaa

SEQ ID NO: 3340273 - DNA, 25 bp, Homo sapien
ttccagaaggaatagcatcagttcc

SEQ ID NO: 3340274 - DNA, 25 bp, Homo sapien
tatttgtgtatcaaggtgattccag

SEQ ID NO: 3340275 - DNA, 25 bp, Homo sapien
catatattcggaggaacaggactcc

SEQ ID NO: 3340276 - DNA, 25 bp, Homo sapien
tatcaaggtgattccagtttccaac

SEQ ID NO: 3340277 - DNA, 25 bp, Homo sapien
ggactcctcggtccaaagaatgaga

SEQ ID NO: 3340278 - DNA, 25 bp, Homo sapien
agattttacagtaagtgtcaaggac

SEQ ID NO: 3340279 - DNA, 25 bp, Homo sapien
tggagattttacagtaagtgtcaag

SEQ ID NO: 3340280 - DNA, 25 bp, Homo sapien
ctatggcttcatagcctctccccag

SEQ ID NO: 3340281 - DNA, 25 bp, Homo sapien
tatggcttcatagcctctccccaga

SEQ ID NO: 3340282 - DNA, 25 bp, Homo sapien
gacctctatggaaatcctttttgca

SEQ ID NO: 3340283 - DNA, 25 bp, Homo sapien
acctctatggaaatcctttttgcac

SEQ ID NO: 3340284 - DNA, 25 bp, Homo sapien
cctctatggaaatcctttttgcaca

SEQ ID NO: 3340285 - DNA, 25 bp, Homo sapien
tctatggaaatcctttttgcacatt

SEQ ID NO: 3340286 - DNA, 25 bp, Homo sapien
cacaatcaactcttgtacttgaggt

SEQ ID NO: 3340287 - DNA, 25 bp, Homo sapien
tctcctgggaattcgtaggattagg

SEQ ID NO: 3340288 - DNA, 25 bp, Homo sapien
gagtgaattgatggactgctgctgc

SEQ ID NO: 3340289 - DNA, 25 bp, Homo sapien
tcccaagaatcttttggtctgtgtg

SEQ ID NO: 3340290 - DNA, 25 bp, Homo sapien
tgccttagagttaaggcggtaaata

SEQ ID NO: 3340291 - DNA, 25 bp, Homo sapien
cagctgccttagagttaaggcggta

SEQ ID NO: 3340292 - DNA, 25 bp, Homo sapien
aaacagctgccttagagttaaggcg

SEQ ID NO: 3340293 - DNA, 25 bp, Homo sapien
gctgccttagagttaaggcggtaaa

SEQ ID NO: 3340294 - DNA, 25 bp, Homo sapien
ccttttctcagaaatccatgaaagc

SEQ ID NO: 3340295 - DNA, 25 bp, Homo sapien
tctcatttaaggcaggattcaataa

SEQ ID NO: 3340296 - DNA, 25 bp, Homo sapien
catttaaggcaggattcaataaaat

SEQ ID NO: 3340297 - DNA, 25 bp, Homo sapien
tcaataaaatttcattgtagtttcc

SEQ ID NO: 3340298 - DNA, 25 bp, Homo sapien
tcaaactgtgcagcctggataactc

SEQ ID NO: 3340299 - DNA, 25 bp, Homo sapien
tggataactccaacaccaaagtgga

SEQ ID NO: 3340300 - DNA, 25 bp, Homo sapien
tggtgcctaaatcctcccactgagg

SEQ ID NO: 3340301 - DNA, 25 bp, Homo sapien
cccactgagggaacttcacaggtac

SEQ ID NO: 3340302 - DNA, 25 bp, Homo sapien
ccccaggactgctcctgttcctggt

SEQ ID NO: 3340303 - DNA, 25 bp, Homo sapien
gtccccaggactgctcctgttcctg

SEQ ID NO: 3340304 - DNA, 25 bp, Homo sapien
tgtccccaggactgctcctgttcct

SEQ ID NO: 3340305 - DNA, 25 bp, Homo sapien
ctgtccccaggactgctcctgttcc

SEQ ID NO: 3340306 - DNA, 25 bp, Homo sapien
cagttgccagaagctatcctccact

SEQ ID NO: 3340307 - DNA, 25 bp, Homo sapien
ccagttgccagaagctatcctccac

SEQ ID NO: 3340308 - DNA, 25 bp, Homo sapien
tcagcagctaagtgtgctaagccca

SEQ ID NO: 3340309 - DNA, 25 bp, Homo sapien
cctcagcagctaagtgtgctaagcc

SEQ ID NO: 3340310 - DNA, 25 bp, Homo sapien
agcagctaagtgtgctaagcccaag

SEQ ID NO: 3340311 - DNA, 25 bp, Homo sapien
cagcagctaagtgtgctaagcccaa

SEQ ID NO: 3340312 - DNA, 25 bp, Homo sapien
caaataaccgctgctgaagcagcgg

SEQ ID NO: 3340313 - DNA, 25 bp, Homo sapien
cgctgctgaagcagcggctctttga

SEQ ID NO: 3340314 - DNA, 25 bp, Homo sapien
taaccgctgctgaagcagcggctct

SEQ ID NO: 3340315 - DNA, 25 bp, Homo sapien
gctgctgaagcagcggctctttgaa

SEQ ID NO: 3340316 - DNA, 25 bp, Homo sapien
tacttcactcttgggagaaacagtg

SEQ ID NO: 3340317 - DNA, 25 bp, Homo sapien
cacttgacgatttttacttcactct

SEQ ID NO: 3340318 - DNA, 25 bp, Homo sapien
ctaacacttgacgatttttacttca

SEQ ID NO: 3340319 - DNA, 25 bp, Homo sapien
ttttacttcactcttgggagaaaca

SEQ ID NO: 3340320 - DNA, 25 bp, Homo sapien
aacaagttgagagagcggcctgtct

SEQ ID NO: 3340321 - DNA, 25 bp, Homo sapien
tctttggctatttcagaagctttta

SEQ ID NO: 3340322 - DNA, 25 bp, Homo sapien
cgcccctgtgtcaattgatggaatg

SEQ ID NO: 3340323 - DNA, 25 bp, Homo sapien
gagagtaatctgtaagtcctcagga

SEQ ID NO: 3340324 - DNA, 25 bp, Homo sapien
ttcacattgagaccaatactcaagg

SEQ ID NO: 3340325 - DNA, 25 bp, Homo sapien
cacattgagaccaatactcaaggtt

SEQ ID NO: 3340326 - DNA, 25 bp, Homo sapien
gagaccaatactcaaggttgaagtt

SEQ ID NO: 3340327 - DNA, 25 bp, Homo sapien
ctttttcacattgagaccaatactc

SEQ ID NO: 3340328 - DNA, 25 bp, Homo sapien
atatttgttgtatcacagcagatgt

SEQ ID NO: 3340329 - DNA, 25 bp, Homo sapien
tgttagaaatccgtccaatcctgtc

SEQ ID NO: 3340330 - DNA, 25 bp, Homo sapien
tgttgaacagcccaattcatatgac

SEQ ID NO: 3340331 - DNA, 25 bp, Homo sapien
tcctctgttgtaggttacgtcaccc

SEQ ID NO: 3340332 - DNA, 25 bp, Homo sapien
caactttgctctccacatctattaa

SEQ ID NO: 3340333 - DNA, 25 bp, Homo sapien
aacatcaaggctctgacgctgggca

SEQ ID NO: 3340334 - DNA, 25 bp, Homo sapien
caaacatatttgttgctgtgacaga

SEQ ID NO: 3340335 - DNA, 25 bp, Homo sapien
ggacagtgtttgtcttaatctcaga

SEQ ID NO: 3340336 - DNA, 25 bp, Homo sapien
tttgaccgtagccaataattagtga

SEQ ID NO: 3340337 - DNA, 25 bp, Homo sapien
gttagcctggcaggagcttccaaga

SEQ ID NO: 3340338 - DNA, 25 bp, Homo sapien
gttttattggctggctcttcttcac

SEQ ID NO: 3340339 - DNA, 25 bp, Homo sapien
cacactgagttactgagttagcctg

SEQ ID NO: 3340340 - DNA, 25 bp, Homo sapien
ctctgttttattggctggctcttct

SEQ ID NO: 3340341 - DNA, 25 bp, Homo sapien
tgagaatgctgcttgtccgtttgtc

SEQ ID NO: 3340342 - DNA, 25 bp, Homo sapien
aatgaatgggaacgtctattgatcc

SEQ ID NO: 3340343 - DNA, 25 bp, Homo sapien
cctctgtgtgcagctctagaatgaa

SEQ ID NO: 3340344 - DNA, 25 bp, Homo sapien
tctggccccgatagacctctgtgtg

SEQ ID NO: 3340345 - DNA, 25 bp, Homo sapien
tgacaactccaaaccagccacccca

SEQ ID NO: 3340346 - DNA, 25 bp, Homo sapien
gatgacaactccaaaccagccaccc

SEQ ID NO: 3340347 - DNA, 25 bp, Homo sapien
cagccaccccaggtaaagatctaaa

SEQ ID NO: 3340348 - DNA, 25 bp, Homo sapien
ccagccaccccaggtaaagatctaa

SEQ ID NO: 3340349 - DNA, 25 bp, Homo sapien
aggcatcctggcaaatgcccactca

SEQ ID NO: 3340350 - DNA, 25 bp, Homo sapien
ccaaggcatcctggcaaatgcccac

SEQ ID NO: 3340351 - DNA, 25 bp, Homo sapien
aaggcatcctggcaaatgcccactc

SEQ ID NO: 3340352 - DNA, 25 bp, Homo sapien
ggcatcctggcaaatgcccactcac

SEQ ID NO: 3340353 - DNA, 25 bp, Homo sapien
cagtcaattttgatcagctgagcaa

SEQ ID NO: 3340354 - DNA, 25 bp, Homo sapien
tcctcgtagagaagacccatatgca

SEQ ID NO: 3340355 - DNA, 25 bp, Homo sapien
caggccagagcatacaagttattat

SEQ ID NO: 3340356 - DNA, 25 bp, Homo sapien
aaacatcgttcatagaagtggttcc

SEQ ID NO: 3340357 - DNA, 25 bp, Homo sapien
tccatcagagcgaagagctcggtga

SEQ ID NO: 3340358 - DNA, 25 bp, Homo sapien
gtacaggtaatccagtttatcaggc

SEQ ID NO: 3340359 - DNA, 25 bp, Homo sapien
aagagggacctgactctcgcagcct

SEQ ID NO: 3340360 - DNA, 25 bp, Homo sapien
gacttatgataaccatctcgcagca

SEQ ID NO: 3340361 - DNA, 25 bp, Homo sapien
acagatattcttcttgtaggagttc

SEQ ID NO: 3340362 - DNA, 25 bp, Homo sapien
cacagatattcttcttgtaggagtt

SEQ ID NO: 3340363 - DNA, 25 bp, Homo sapien
gtccacacagatattcttcttgtag

SEQ ID NO: 3340364 - DNA, 25 bp, Homo sapien
cacacagatattcttcttgtaggag

SEQ ID NO: 3340365 - DNA, 25 bp, Homo sapien
aaacaaataccctgcctgctcttgg

SEQ ID NO: 3340366 - DNA, 25 bp, Homo sapien
aacaaataccctgcctgctcttggg

SEQ ID NO: 3340367 - DNA, 25 bp, Homo sapien
cttggtgcaaggagtctggaaaaac

SEQ ID NO: 3340368 - DNA, 25 bp, Homo sapien
cccccaagcaaaactagagctatgt

SEQ ID NO: 3340369 - DNA, 25 bp, Homo sapien
gttgctgcccccaagcaaaactaga

SEQ ID NO: 3340370 - DNA, 25 bp, Homo sapien
tgctgcccccaagcaaaactagagc

SEQ ID NO: 3340371 - DNA, 25 bp, Homo sapien
tgcccccaagcaaaactagagctat

SEQ ID NO: 3340372 - DNA, 25 bp, Homo sapien
acaaatgcagtgacaattacaaagt

SEQ ID NO: 3340373 - DNA, 25 bp, Homo sapien
aaggaatggatactggccagacaaa

SEQ ID NO: 3340374 - DNA, 25 bp, Homo sapien
aggaatggatactggccagacaaat

SEQ ID NO: 3340375 - DNA, 25 bp, Homo sapien
tgagagtgacaagattggattttta

SEQ ID NO: 3340376 - DNA, 25 bp, Homo sapien
agagtgacaagattggatttttaca

SEQ ID NO: 3340377 - DNA, 25 bp, Homo sapien
ctgagagtgacaagattggattttt

SEQ ID NO: 3340378 - DNA, 25 bp, Homo sapien
gagagtgacaagattggatttttac

SEQ ID NO: 3340379 - DNA, 25 bp, Homo sapien
tgtaatcttgctcacacaagcaatg

SEQ ID NO: 3340380 - DNA, 25 bp, Homo sapien
gggttgtaatcttgctcacacaagc

SEQ ID NO: 3340381 - DNA, 25 bp, Homo sapien
acaagcaatgccacctttgtatgtg

SEQ ID NO: 3340382 - DNA, 25 bp, Homo sapien
atgtgtatgcactggcggccagccg

SEQ ID NO: 3340383 - DNA, 25 bp, Homo sapien
tctgtagtttgcaccttcccattaa

SEQ ID NO: 3340384 - DNA, 25 bp, Homo sapien
caactacatgaggagctttctctga

SEQ ID NO: 3340385 - DNA, 25 bp, Homo sapien
tattcaccccgccttttatccagat

SEQ ID NO: 3340386 - DNA, 25 bp, Homo sapien
tgctaatagtcatgagaatctgtag

SEQ ID NO: 3340387 - DNA, 25 bp, Homo sapien
aaccctggtgaagcaaaagagttct

SEQ ID NO: 3340388 - DNA, 25 bp, Homo sapien
tctggtaatatctgtggaaaccctg

SEQ ID NO: 3340389 - DNA, 25 bp, Homo sapien
cagaacaggatacgggtataggcca

SEQ ID NO: 3340390 - DNA, 25 bp, Homo sapien
cagaaaagtccctggtctggtaata

SEQ ID NO: 3340391 - DNA, 25 bp, Homo sapien
tggagacttgaaaagggtctaaata

SEQ ID NO: 3340392 - DNA, 25 bp, Homo sapien
atggagacttgaaaagggtctaaat

SEQ ID NO: 3340393 - DNA, 25 bp, Homo sapien
tgccatgttccaatgaaaaagtata

SEQ ID NO: 3340394 - DNA, 25 bp, Homo sapien
ccatgttccaatgaaaaagtatatt

SEQ ID NO: 3340395 - DNA, 25 bp, Homo sapien
gccatgttccaatgaaaaagtatat

SEQ ID NO: 3340396 - DNA, 25 bp, Homo sapien
atgccatgttccaatgaaaaagtat

SEQ ID NO: 3340397 - DNA, 25 bp, Homo sapien
gataatgatctatgtcatctttttc

SEQ ID NO: 3340398 - DNA, 25 bp, Homo sapien
tcctcttttgataatcctttgaaat

SEQ ID NO: 3340399 - DNA, 25 bp, Homo sapien
cctttgaaatttacctctagataat

SEQ ID NO: 3340400 - DNA, 25 bp, Homo sapien
gaaatttacctctagataatgatct

SEQ ID NO: 3340401 - DNA, 25 bp, Homo sapien
taagcttcgggcgtgtcatgggcag

SEQ ID NO: 3340402 - DNA, 25 bp, Homo sapien
tctggctaaggctgtaagcttcggg

SEQ ID NO: 3340403 - DNA, 25 bp, Homo sapien
ggcagcttctgtctggctaaggctg

SEQ ID NO: 3340404 - DNA, 25 bp, Homo sapien
ttggaatttttctggaggagcaagg

SEQ ID NO: 3340405 - DNA, 25 bp, Homo sapien
tagcatccacttctactgtaataac

SEQ ID NO: 3340406 - DNA, 25 bp, Homo sapien
ataacaagttcacccagattcaagg

SEQ ID NO: 3340407 - DNA, 25 bp, Homo sapien
ctactgtaataacaagttcacccag

SEQ ID NO: 3340408 - DNA, 25 bp, Homo sapien
ttagggtctaaccttggaagtcaca

SEQ ID NO: 3340409 - DNA, 25 bp, Homo sapien
cagagtcttccaatgttacagtgaa

SEQ ID NO: 3340410 - DNA, 25 bp, Homo sapien
agagttccagagtcttccaatgtta

SEQ ID NO: 3340411 - DNA, 25 bp, Homo sapien
gttccagagtcttccaatgttacag

SEQ ID NO: 3340412 - DNA, 25 bp, Homo sapien
cagaggagctgtgaagacttttcca

SEQ ID NO: 3340413 - DNA, 25 bp, Homo sapien
agttcttaacccacaccagtgtagc

SEQ ID NO: 3340414 - DNA, 25 bp, Homo sapien
aagtttcagctgccagttccttcat

SEQ ID NO: 3340415 - DNA, 25 bp, Homo sapien
cattaaagtttcagctgccagttcc

SEQ ID NO: 3340416 - DNA, 25 bp, Homo sapien
taaagtttcagctgccagttccttc

SEQ ID NO: 3340417 - DNA, 25 bp, Homo sapien
attaaagtttcagctgccagttcct

SEQ ID NO: 3340418 - DNA, 25 bp, Homo sapien
tcattttcctggtgttggtcagaca

SEQ ID NO: 3340419 - DNA, 25 bp, Homo sapien
cagttcccatgtgagctccaattta

SEQ ID NO: 3340420 - DNA, 25 bp, Homo sapien
caacaatgaagaatgggactagtgc

SEQ ID NO: 3340421 - DNA, 25 bp, Homo sapien
tagtgctatgaggtgactgacccag

SEQ ID NO: 3340422 - DNA, 25 bp, Homo sapien
atttgcagattactgctgatggtct

SEQ ID NO: 3340423 - DNA, 25 bp, Homo sapien
gcagattactgctgatggtctctcc

SEQ ID NO: 3340424 - DNA, 25 bp, Homo sapien
tgcagattactgctgatggtctctc

SEQ ID NO: 3340425 - DNA, 25 bp, Homo sapien
tttgcagattactgctgatggtctc

SEQ ID NO: 3340426 - DNA, 25 bp, Homo sapien
gtcccaacctcgcccctgccgtcac

SEQ ID NO: 3340427 - DNA, 25 bp, Homo sapien
ggaagggctggctgtaggggtcagg

SEQ ID NO: 3340428 - DNA, 25 bp, Homo sapien
caacctcgcccctgccgtcacgaac

SEQ ID NO: 3340429 - DNA, 25 bp, Homo sapien
agctgaggaagtccggtcccaacct

SEQ ID NO: 3340430 - DNA, 25 bp, Homo sapien
cagttttccgttccgccgaagtcag

SEQ ID NO: 3340431 - DNA, 25 bp, Homo sapien
tggctccgccggagcggagacaggg

SEQ ID NO: 3340432 - DNA, 25 bp, Homo sapien
tcagtgattccgaagcctggctccg

SEQ ID NO: 3340433 - DNA, 25 bp, Homo sapien
attccgaagcctggctccgccggag

SEQ ID NO: 3340434 - DNA, 25 bp, Homo sapien
tcctctctcagtgattccgaagcct

SEQ ID NO: 3340435 - DNA, 25 bp, Homo sapien
cagactcttcgggcttgggggcgga

SEQ ID NO: 3340436 - DNA, 25 bp, Homo sapien
ccagactcttcgggcttgggggcgg

SEQ ID NO: 3340437 - DNA, 25 bp, Homo sapien
tcccagactcttcgggcttgggggc

SEQ ID NO: 3340438 - DNA, 25 bp, Homo sapien
gctcccagactcttcgggcttgggg

SEQ ID NO: 3340439 - DNA, 25 bp, Homo sapien
taccattgatcaccactctgtactg

SEQ ID NO: 3340440 - DNA, 25 bp, Homo sapien
tggtttttgtatcagcatatgtgaa

SEQ ID NO: 3340441 - DNA, 25 bp, Homo sapien
gttaaagcctttactaccattgatc

SEQ ID NO: 3340442 - DNA, 25 bp, Homo sapien
gtaagttaatgtaatgacatttggt

SEQ ID NO: 3340443 - DNA, 25 bp, Homo sapien
ttcctccctccagaaagaacagcat

SEQ ID NO: 3340444 - DNA, 25 bp, Homo sapien
ggacaaaggtctctctgaggcctct

SEQ ID NO: 3340445 - DNA, 25 bp, Homo sapien
agggtgctgcccttgtgatctaatc

SEQ ID NO: 3340446 - DNA, 25 bp, Homo sapien
gaaaaacctagagcttatgagtgcc

SEQ ID NO: 3340447 - DNA, 25 bp, Homo sapien
tacaaaccgataaccctcactgagt

SEQ ID NO: 3340448 - DNA, 25 bp, Homo sapien
accactgaaattcccgtggaggcca

SEQ ID NO: 3340449 - DNA, 25 bp, Homo sapien
gaccactgaaattcccgtggaggcc

SEQ ID NO: 3340450 - DNA, 25 bp, Homo sapien
aagaccactgaaattcccgtggagg

SEQ ID NO: 3340451 - DNA, 25 bp, Homo sapien
agaagaccactgaaattcccgtgga

SEQ ID NO: 3340452 - DNA, 25 bp, Homo sapien
atggtgaaagcctttggccttgctg

SEQ ID NO: 3340453 - DNA, 25 bp, Homo sapien
tcatcttgtggagaaatccgcaatg

SEQ ID NO: 3340454 - DNA, 25 bp, Homo sapien
gagaaatccgcaatggtgaaagcct

SEQ ID NO: 3340455 - DNA, 25 bp, Homo sapien
ggccttgctgccctattccacccaa

SEQ ID NO: 3340456 - DNA, 25 bp, Homo sapien
caaattgggagtcgatgtagagcac

SEQ ID NO: 3340457 - DNA, 25 bp, Homo sapien
ctgaggttcaccgagtaggcttgtt

SEQ ID NO: 3340458 - DNA, 25 bp, Homo sapien
gaataacgtggaaatgtcactcctg

SEQ ID NO: 3340459 - DNA, 25 bp, Homo sapien
tgtagagcactgtgaattccttggg

SEQ ID NO: 3340460 - DNA, 25 bp, Homo sapien
tcttcggaaaagtaagtctctagaa

SEQ ID NO: 3340461 - DNA, 25 bp, Homo sapien
gcagccttagagaattgttgttgaa

SEQ ID NO: 3340462 - DNA, 25 bp, Homo sapien
taagcccagggtgcaagagttcttt

SEQ ID NO: 3340463 - DNA, 25 bp, Homo sapien
tgttgcacattttgataagcccagg

SEQ ID NO: 3340464 - DNA, 25 bp, Homo sapien
ttacagtatttttagatatcccaaa

SEQ ID NO: 3340465 - DNA, 25 bp, Homo sapien
ataatagtaccgcctttttcctgag

SEQ ID NO: 3340466 - DNA, 25 bp, Homo sapien
ccaaagctggccatgttgaggtgag

SEQ ID NO: 3340467 - DNA, 25 bp, Homo sapien
gggtcagcatgtgcctcttgctgca

SEQ ID NO: 3340468 - DNA, 25 bp, Homo sapien
ccggctgacaagtcctgccatccat

SEQ ID NO: 3340469 - DNA, 25 bp, Homo sapien
tctccggctgacaagtcctgccatc

SEQ ID NO: 3340470 - DNA, 25 bp, Homo sapien
tccggctgacaagtcctgccatcca

SEQ ID NO: 3340471 - DNA, 25 bp, Homo sapien
cctctccggctgacaagtcctgcca

SEQ ID NO: 3340472 - DNA, 25 bp, Homo sapien
aaagcacacactgttagcctggcca

SEQ ID NO: 3340473 - DNA, 25 bp, Homo sapien
ccatccctgttaaagcacacactgt

SEQ ID NO: 3340474 - DNA, 25 bp, Homo sapien
aagcacacactgttagcctggccat

SEQ ID NO: 3340475 - DNA, 25 bp, Homo sapien
gtcaccaccatccctgttaaagcac

SEQ ID NO: 3340476 - DNA, 25 bp, Homo sapien
actactgttgcccttgctgttattc

SEQ ID NO: 3340477 - DNA, 25 bp, Homo sapien
tactgttgcccttgctgttattctt

SEQ ID NO: 3340478 - DNA, 25 bp, Homo sapien
gaactactgttgcccttgctgttat

SEQ ID NO: 3340479 - DNA, 25 bp, Homo sapien
actgttgcccttgctgttattcttt

SEQ ID NO: 3340480 - DNA, 25 bp, Homo sapien
actgtcaagttaaccaccggcctgg

SEQ ID NO: 3340481 - DNA, 25 bp, Homo sapien
gcatgggctctttccaagcagggct

SEQ ID NO: 3340482 - DNA, 25 bp, Homo sapien
ctctcctccaagagccgtgatcgga

SEQ ID NO: 3340483 - DNA, 25 bp, Homo sapien
caaccattgtttgttggcggtcagt

SEQ ID NO: 3340484 - DNA, 25 bp, Homo sapien
ggctacattcaaagcgtcagcagcc

SEQ ID NO: 3340485 - DNA, 25 bp, Homo sapien
gctacattcaaagcgtcagcagcct

SEQ ID NO: 3340486 - DNA, 25 bp, Homo sapien
tggctacattcaaagcgtcagcagc

SEQ ID NO: 3340487 - DNA, 25 bp, Homo sapien
gatggagagacttgaagtcatagat

SEQ ID NO: 3340488 - DNA, 25 bp, Homo sapien
tggagagacttgaagtcatagataa

SEQ ID NO: 3340489 - DNA, 25 bp, Homo sapien
agacttgaagtcatagataatcagc

SEQ ID NO: 3340490 - DNA, 25 bp, Homo sapien
ccagtggacaaggatgatggagaga

SEQ ID NO: 3340491 - DNA, 25 bp, Homo sapien
tgtgagctttgtgaagacaaacacc

SEQ ID NO: 3340492 - DNA, 25 bp, Homo sapien
tgagctttgtgaagacaaacaccat

SEQ ID NO: 3340493 - DNA, 25 bp, Homo sapien
ctgtgagctttgtgaagacaaacac

SEQ ID NO: 3340494 - DNA, 25 bp, Homo sapien
gtgagctttgtgaagacaaacacca

SEQ ID NO: 3340495 - DNA, 25 bp, Homo sapien
tcgcctgtcttcagcaggtggtggc

SEQ ID NO: 3340496 - DNA, 25 bp, Homo sapien
cgatttaagacagatgcggtcatta

SEQ ID NO: 3340497 - DNA, 25 bp, Homo sapien
gaaccatctgagtagcaccaggcag

SEQ ID NO: 3340498 - DNA, 25 bp, Homo sapien
ggtcattattttgtgcagaacttca

SEQ ID NO: 3340499 - DNA, 25 bp, Homo sapien
gagtcatgaaggtgtatctgtgcag

SEQ ID NO: 3340500 - DNA, 25 bp, Homo sapien
gtgaagtgagatgggtcacatacca

SEQ ID NO: 3340501 - DNA, 25 bp, Homo sapien
catcaacaactgacagcccacattt

SEQ ID NO: 3340502 - DNA, 25 bp, Homo sapien
cctttgccggaaaaagaatgactgc

SEQ ID NO: 3340503 - DNA, 25 bp, Homo sapien
tttgaggatatctggggagctgatg

SEQ ID NO: 3340504 - DNA, 25 bp, Homo sapien
tgaacagggactggccttgctttga

SEQ ID NO: 3340505 - DNA, 25 bp, Homo sapien
gaacagggactggccttgctttgag

SEQ ID NO: 3340506 - DNA, 25 bp, Homo sapien
cctgaacagggactggccttgcttt

SEQ ID NO: 3340507 - DNA, 25 bp, Homo sapien
ccatcactatttactttgagcaaat

SEQ ID NO: 3340508 - DNA, 25 bp, Homo sapien
caccatcactatttactttgagcaa

SEQ ID NO: 3340509 - DNA, 25 bp, Homo sapien
tcagttgccaccaaggtcagcctgg

SEQ ID NO: 3340510 - DNA, 25 bp, Homo sapien
gtcaccatcactatttactttgagc

SEQ ID NO: 3340511 - DNA, 25 bp, Homo sapien
ccgtgctgccttcatttggcttcag

SEQ ID NO: 3340512 - DNA, 25 bp, Homo sapien
ctgccttcatttggcttcagtgctc

SEQ ID NO: 3340513 - DNA, 25 bp, Homo sapien
cttcatttggcttcagtgctcccat

SEQ ID NO: 3340514 - DNA, 25 bp, Homo sapien
catttggcttcagtgctcccatcat

SEQ ID NO: 3340515 - DNA, 25 bp, Homo sapien
attctctctgaattaagagtggcct

SEQ ID NO: 3340516 - DNA, 25 bp, Homo sapien
tctctgaattaagagtggcctttac

SEQ ID NO: 3340517 - DNA, 25 bp, Homo sapien
taagagtggcctttactctcaactt

SEQ ID NO: 3340518 - DNA, 25 bp, Homo sapien
agtggcctttactctcaactttgag

SEQ ID NO: 3340519 - DNA, 25 bp, Homo sapien
aggccctcagcagacgtgaatggct

SEQ ID NO: 3340520 - DNA, 25 bp, Homo sapien
tcattcagtacttcgcttccacaca

SEQ ID NO: 3340521 - DNA, 25 bp, Homo sapien
tcagtgggcactcgccgctgctcag

SEQ ID NO: 3340522 - DNA, 25 bp, Homo sapien
ttcagtacttcgcttccacacacag

SEQ ID NO: 3340523 - DNA, 25 bp, Homo sapien
cctgctttgagtgtggacatcgcct

SEQ ID NO: 3340524 - DNA, 25 bp, Homo sapien
gacatcgcctgaagctggtacttag

SEQ ID NO: 3340525 - DNA, 25 bp, Homo sapien
tggtacttagagctgcagccccttc

SEQ ID NO: 3340526 - DNA, 25 bp, Homo sapien
gacagatgtttcttgtgctggcctc

SEQ ID NO: 3340527 - DNA, 25 bp, Homo sapien
tcagttgccccgatgaagtatgaac

SEQ ID NO: 3340528 - DNA, 25 bp, Homo sapien
gatttcagtgatcctagacccttcc

SEQ ID NO: 3340529 - DNA, 25 bp, Homo sapien
tggatgctgtggacccgctcagttg

SEQ ID NO: 3340530 - DNA, 25 bp, Homo sapien
tgagtgagtgatgccacatgcctct

SEQ ID NO: 3340531 - DNA, 25 bp, Homo sapien
gacacaggtctgcataggagctgcc

SEQ ID NO: 3340532 - DNA, 25 bp, Homo sapien
ggtgacacaggtctgcataggagct

SEQ ID NO: 3340533 - DNA, 25 bp, Homo sapien
cacaggtctgcataggagctgcctt

SEQ ID NO: 3340534 - DNA, 25 bp, Homo sapien
aggtctgcataggagctgcctttgc

SEQ ID NO: 3340535 - DNA, 25 bp, Homo sapien
gtcttcctgactaatttctgaaaag

SEQ ID NO: 3340536 - DNA, 25 bp, Homo sapien
tcctgactaatttctgaaaagacat

SEQ ID NO: 3340537 - DNA, 25 bp, Homo sapien
cttcctgactaatttctgaaaagac

SEQ ID NO: 3340538 - DNA, 25 bp, Homo sapien
agtcttcctgactaatttctgaaaa

SEQ ID NO: 3340539 - DNA, 25 bp, Homo sapien
gaatttacgggtagcctgaggccaa

SEQ ID NO: 3340540 - DNA, 25 bp, Homo sapien
ccaaggagatacagtagggctttcc

SEQ ID NO: 3340541 - DNA, 25 bp, Homo sapien
aagcctccactagccctcttgaaga

SEQ ID NO: 3340542 - DNA, 25 bp, Homo sapien
ctgttccagtctgtgcacatgcagg

SEQ ID NO: 3340543 - DNA, 25 bp, Homo sapien
ccactaagcaaagttagtatttctg

SEQ ID NO: 3340544 - DNA, 25 bp, Homo sapien
ttatgatgttatatggattgatgtc

SEQ ID NO: 3340545 - DNA, 25 bp, Homo sapien
gacagtgtggtcttatgatgttata

SEQ ID NO: 3340546 - DNA, 25 bp, Homo sapien
ttttgacagtgtggtcttatgatgt

SEQ ID NO: 3340547 - DNA, 25 bp, Homo sapien
caccgggcaagaggactctactgag

SEQ ID NO: 3340548 - DNA, 25 bp, Homo sapien
gcttaaatgtggagtcaccgggcaa

SEQ ID NO: 3340549 - DNA, 25 bp, Homo sapien
gaattctcagaagcaacatatcatc

SEQ ID NO: 3340550 - DNA, 25 bp, Homo sapien
tacagtcagtccaatgagggaggca

SEQ ID NO: 3340551 - DNA, 25 bp, Homo sapien
gacgtgtagctatgagcctccctgc

SEQ ID NO: 3340552 - DNA, 25 bp, Homo sapien
gctgaatactggtgaataccctttg

SEQ ID NO: 3340553 - DNA, 25 bp, Homo sapien
gaggatgcagctgaatactggtgaa

SEQ ID NO: 3340554 - DNA, 25 bp, Homo sapien
accctttgcattgtcctctgcttcc

SEQ ID NO: 3340555 - DNA, 25 bp, Homo sapien
aatccagatcagatccgggctgaat

SEQ ID NO: 3340556 - DNA, 25 bp, Homo sapien
ggtgagtccatttccaatctcttct

SEQ ID NO: 3340557 - DNA, 25 bp, Homo sapien
tcagatccgggctgaatggaatggt

SEQ ID NO: 3340558 - DNA, 25 bp, Homo sapien
tgaatggaatggtgagtccatttcc

SEQ ID NO: 3340559 - DNA, 25 bp, Homo sapien
ttttttcctacatcggatgcagatg

SEQ ID NO: 3340560 - DNA, 25 bp, Homo sapien
cctacatcggatgcagatgtggttg

SEQ ID NO: 3340561 - DNA, 25 bp, Homo sapien
gtggttgtcagagttagagcagcca

SEQ ID NO: 3340562 - DNA, 25 bp, Homo sapien
acatcggatgcagatgtggttgtca

SEQ ID NO: 3340563 - DNA, 25 bp, Homo sapien
attgcaattaggaaggaacagctga

SEQ ID NO: 3340564 - DNA, 25 bp, Homo sapien
gaaatcttggatctgacattgtaaa

SEQ ID NO: 3340565 - DNA, 25 bp, Homo sapien
ctgaaaggaatgcagaaatcttgga

SEQ ID NO: 3340566 - DNA, 25 bp, Homo sapien
taaaattgccgaactgaactgaatt

SEQ ID NO: 3340567 - DNA, 25 bp, Homo sapien
gccccacttcacgatttaggaccga

SEQ ID NO: 3340568 - DNA, 25 bp, Homo sapien
taaagggcttctaggatgtctacag

SEQ ID NO: 3340569 - DNA, 25 bp, Homo sapien
tgtggaccatcttcaacctgcttag

SEQ ID NO: 3340570 - DNA, 25 bp, Homo sapien
cctgcatggattctgacactggaca

SEQ ID NO: 3340571 - DNA, 25 bp, Homo sapien
tccaattcacctgatttcctctctg

SEQ ID NO: 3340572 - DNA, 25 bp, Homo sapien
catttcctgcactcttgtctgttta

SEQ ID NO: 3340573 - DNA, 25 bp, Homo sapien
tgcactcttgtctgtttactccatt

SEQ ID NO: 3340574 - DNA, 25 bp, Homo sapien
tacaagtctttctccaattcacctg

SEQ ID NO: 3340575 - DNA, 25 bp, Homo sapien
ctactttggtgcagcggacatcttt

SEQ ID NO: 3340576 - DNA, 25 bp, Homo sapien
ccatataagtactgattagaagcag

SEQ ID NO: 3340577 - DNA, 25 bp, Homo sapien
tttgttgtcgttgttcccaacacca

SEQ ID NO: 3340578 - DNA, 25 bp, Homo sapien
tttggtgcagcggacatctttttgt

SEQ ID NO: 3340579 - DNA, 25 bp, Homo sapien
gaagcatagcttgatcctttccaga

SEQ ID NO: 3340580 - DNA, 25 bp, Homo sapien
gaacatcatcttagacaattgtccc

SEQ ID NO: 3340581 - DNA, 25 bp, Homo sapien
gaggctcagtaggagcatcaccagg

SEQ ID NO: 3340582 - DNA, 25 bp, Homo sapien
cagtctcttcatgtcgaggctcagt

SEQ ID NO: 3340583 - DNA, 25 bp, Homo sapien
gagcacaggatacagtcctgagcag

SEQ ID NO: 3340584 - DNA, 25 bp, Homo sapien
ccataatgaaaaccaacagatgtga

SEQ ID NO: 3340585 - DNA, 25 bp, Homo sapien
ccatctggagcacatgaaaagtatc

SEQ ID NO: 3340586 - DNA, 25 bp, Homo sapien
ctaaaaagagtgaacttggacttgg

SEQ ID NO: 3340587 - DNA, 25 bp, Homo sapien
gggcagagccaaacaaatcatgtag

SEQ ID NO: 3340588 - DNA, 25 bp, Homo sapien
tggtgaccatagagtagagtttcct

SEQ ID NO: 3340589 - DNA, 25 bp, Homo sapien
taggaagttcatgatagctaggtgt

SEQ ID NO: 3340590 - DNA, 25 bp, Homo sapien
tagctaggtgtcacctctaatgtca

SEQ ID NO: 3340591 - DNA, 25 bp, Homo sapien
gaaaatgggattagaaaaggtgctg

SEQ ID NO: 3340592 - DNA, 25 bp, Homo sapien
gccatagggttgtcctcgggctgta

SEQ ID NO: 3340593 - DNA, 25 bp, Homo sapien
tcagcatgcgttcattcatcagtaa

SEQ ID NO: 3340594 - DNA, 25 bp, Homo sapien
aaagtaaatcagcatgcgttcattc

SEQ ID NO: 3340595 - DNA, 25 bp, Homo sapien
caaaaagtaaatcagcatgcgttca

SEQ ID NO: 3340596 - DNA, 25 bp, Homo sapien
aaatcagcatgcgttcattcatcag

SEQ ID NO: 3340597 - DNA, 25 bp, Homo sapien
ccaacttattgaaggaatgagagca

SEQ ID NO: 3340598 - DNA, 25 bp, Homo sapien
caattgtcattgtgatggtattggg

SEQ ID NO: 3340599 - DNA, 25 bp, Homo sapien
gacaagggccaaatcctgctaaact

SEQ ID NO: 3340600 - DNA, 25 bp, Homo sapien
attcatttctactgccctgtccaac

SEQ ID NO: 3340601 - DNA, 25 bp, Homo sapien
caaggactgtgaaaggttgaagatt

SEQ ID NO: 3340602 - DNA, 25 bp, Homo sapien
agcaaggactgtgaaaggttgaaga

SEQ ID NO: 3340603 - DNA, 25 bp, Homo sapien
ctgtgaaaggttgaagatttgtcca

SEQ ID NO: 3340604 - DNA, 25 bp, Homo sapien
gctccagcatacctggcagccatat

SEQ ID NO: 3340605 - DNA, 25 bp, Homo sapien
gacagcagggtcctatctgcagcct

SEQ ID NO: 3340606 - DNA, 25 bp, Homo sapien
gccttccctgcagggatgtgcgaaa

SEQ ID NO: 3340607 - DNA, 25 bp, Homo sapien
tgcgaaagtgaaagggcacggcctt

SEQ ID NO: 3340608 - DNA, 25 bp, Homo sapien
tttatgaggacgtgatgacagcagg

SEQ ID NO: 3340609 - DNA, 25 bp, Homo sapien
tcttgccttcgttctacaaatatgc

SEQ ID NO: 3340610 - DNA, 25 bp, Homo sapien
cacatgagatccagtcagaaaggct

SEQ ID NO: 3340611 - DNA, 25 bp, Homo sapien
cattaaatgtaacagcgtcacatga

SEQ ID NO: 3340612 - DNA, 25 bp, Homo sapien
tgtcactagatggttgaaaacctaa

SEQ ID NO: 3340613 - DNA, 25 bp, Homo sapien
tttgcaagcaacctcagtccctgga

SEQ ID NO: 3340614 - DNA, 25 bp, Homo sapien
tgaattaaggtagcttcgtagcggt

SEQ ID NO: 3340615 - DNA, 25 bp, Homo sapien
tcgtagcggttcacaagaagccagc

SEQ ID NO: 3340616 - DNA, 25 bp, Homo sapien
cctcttgtctggtgaattaaggtag

SEQ ID NO: 3340617 - DNA, 25 bp, Homo sapien
gaagccagcccgaaaactgtgaggt

SEQ ID NO: 3340618 - DNA, 25 bp, Homo sapien
tttcccacactaggctgctgtccat

SEQ ID NO: 3340619 - DNA, 25 bp, Homo sapien
aggtgacgaatttcccctctgcctt

SEQ ID NO: 3340620 - DNA, 25 bp, Homo sapien
tctgcctttcccacactaggctgct

SEQ ID NO: 3340621 - DNA, 25 bp, Homo sapien
caaaaggtgacgaatttcccctctg

SEQ ID NO: 3340622 - DNA, 25 bp, Homo sapien
tccaaagtgccacaacaaatacaag

SEQ ID NO: 3340623 - DNA, 25 bp, Homo sapien
tcccctttcaggttagagagccctg

SEQ ID NO: 3340624 - DNA, 25 bp, Homo sapien
ccttgaattactgtctgttccaaag

SEQ ID NO: 3340625 - DNA, 25 bp, Homo sapien
tcagggtacattccttcccctttca

SEQ ID NO: 3340626 - DNA, 25 bp, Homo sapien
cgggaggctctatcgtgaacatgcc

SEQ ID NO: 3340627 - DNA, 25 bp, Homo sapien
tgcctggtttagcagaaattctgct

SEQ ID NO: 3340628 - DNA, 25 bp, Homo sapien
attctgcttgtgatcttatggttca

SEQ ID NO: 3340629 - DNA, 25 bp, Homo sapien
gctctatcgtgaacatgcctggttt

SEQ ID NO: 3340630 - DNA, 25 bp, Homo sapien
tctgtaggaagcagttttgaaaggc

SEQ ID NO: 3340631 - DNA, 25 bp, Homo sapien
tgactctctgatactttaaattctg

SEQ ID NO: 3340632 - DNA, 25 bp, Homo sapien
tcaccgctggcaaatggcaaagttt

SEQ ID NO: 3340633 - DNA, 25 bp, Homo sapien
gagtcactgagttgtactgtggtct

SEQ ID NO: 3340634 - DNA, 25 bp, Homo sapien
agctttcagaatgggatgcctaata

SEQ ID NO: 3340635 - DNA, 25 bp, Homo sapien
tcagaatgggatgcctaatatcaac

SEQ ID NO: 3340636 - DNA, 25 bp, Homo sapien
gaatgggatgcctaatatcaacact

SEQ ID NO: 3340637 - DNA, 25 bp, Homo sapien
atgggatgcctaatatcaacactaa

SEQ ID NO: 3340638 - DNA, 25 bp, Homo sapien
agtagccaaaggatagagcttattt

SEQ ID NO: 3340639 - DNA, 25 bp, Homo sapien
tggatacaatatgggacatccctta

SEQ ID NO: 3340640 - DNA, 25 bp, Homo sapien
tctggacaagcacacatggatacaa

SEQ ID NO: 3340641 - DNA, 25 bp, Homo sapien
ggtacataagtagccaaaggataga

SEQ ID NO: 3340642 - DNA, 25 bp, Homo sapien
aaaatttccgaatctctttgagtgc

SEQ ID NO: 3340643 - DNA, 25 bp, Homo sapien
tcatggaaaatttccgaatctcttt

SEQ ID NO: 3340644 - DNA, 25 bp, Homo sapien
ccttcatggaaaatttccgaatctc

SEQ ID NO: 3340645 - DNA, 25 bp, Homo sapien
tggaaaatttccgaatctctttgag

SEQ ID NO: 3340646 - DNA, 25 bp, Homo sapien
tcttgaagcccactccatggatgca

SEQ ID NO: 3340647 - DNA, 25 bp, Homo sapien
cgcttcttgaagcccactccatgga

SEQ ID NO: 3340648 - DNA, 25 bp, Homo sapien
cttcttgaagcccactccatggatg

SEQ ID NO: 3340649 - DNA, 25 bp, Homo sapien
ctgaggggcacgcttcttgaagccc

SEQ ID NO: 3340650 - DNA, 25 bp, Homo sapien
tcttctcaccacctttctttgcggg

SEQ ID NO: 3340651 - DNA, 25 bp, Homo sapien
tctcaccacctttctttgcgggagc

SEQ ID NO: 3340652 - DNA, 25 bp, Homo sapien
tttcttctcaccacctttctttgcg

SEQ ID NO: 3340653 - DNA, 25 bp, Homo sapien
ttctcaccacctttctttgcgggag

SEQ ID NO: 3340654 - DNA, 25 bp, Homo sapien
atcacagcccataaatgtactacat

SEQ ID NO: 3340655 - DNA, 25 bp, Homo sapien
gctctggacacttgcacacagggct

SEQ ID NO: 3340656 - DNA, 25 bp, Homo sapien
ttcacgcaccattatgggctgctta

SEQ ID NO: 3340657 - DNA, 25 bp, Homo sapien
gctgtgggattgtgaacagcagaac

SEQ ID NO: 3340658 - DNA, 25 bp, Homo sapien
agatggtctggccttcacgcaccat

SEQ ID NO: 3340659 - DNA, 25 bp, Homo sapien
caaggtccagtagcagttgttgtca

SEQ ID NO: 3340660 - DNA, 25 bp, Homo sapien
ccagtagcagttgttgtcaatcgta

SEQ ID NO: 3340661 - DNA, 25 bp, Homo sapien
ctccacgggaaactccaaggtccag

SEQ ID NO: 3340662 - DNA, 25 bp, Homo sapien
ttgtcaatcgtaggatctgtgttgg

SEQ ID NO: 3340663 - DNA, 25 bp, Homo sapien
gacgttgagacccactttctgtaag

SEQ ID NO: 3340664 - DNA, 25 bp, Homo sapien
tatctgccgtgataaagacgttgag

SEQ ID NO: 3340665 - DNA, 25 bp, Homo sapien
gaaccttccatagtctctcctgagg

SEQ ID NO: 3340666 - DNA, 25 bp, Homo sapien
gaatttcttgaggtttcacggagcc

SEQ ID NO: 3340667 - DNA, 25 bp, Homo sapien
tttgtgctttttagtggccgcgtcc

SEQ ID NO: 3340668 - DNA, 25 bp, Homo sapien
ttagtggccgcgtcccaggatagct

SEQ ID NO: 3340669 - DNA, 25 bp, Homo sapien
gacgctcttgcggtcccagagtgga

SEQ ID NO: 3340670 - DNA, 25 bp, Homo sapien
gatagctggaaggttaggacgctct

SEQ ID NO: 3340671 - DNA, 25 bp, Homo sapien
tttctttttcgtgcgagccctcgcg

SEQ ID NO: 3340672 - DNA, 25 bp, Homo sapien
ttttctttttcgtgcgagccctcgc

SEQ ID NO: 3340673 - DNA, 25 bp, Homo sapien
cccgctggtctgacgattgtggaga

SEQ ID NO: 3340674 - DNA, 25 bp, Homo sapien
agtcatcccgctggtctgacgattg

SEQ ID NO: 3340675 - DNA, 25 bp, Homo sapien
ctgacgattgtggagaggcggtgga

SEQ ID NO: 3340676 - DNA, 25 bp, Homo sapien
catcccgctggtctgacgattgtgg

SEQ ID NO: 3340677 - DNA, 25 bp, Homo sapien
gaacaaatgtatgaggaatggcccc

SEQ ID NO: 3340678 - DNA, 25 bp, Homo sapien
gattccacgtggagagttgctgcag

SEQ ID NO: 3340679 - DNA, 25 bp, Homo sapien
tgatagccagtcttgcccttggaga

SEQ ID NO: 3340680 - DNA, 25 bp, Homo sapien
taatttggtcctacccagcaatggc

SEQ ID NO: 3340681 - DNA, 25 bp, Homo sapien
aacagctgggctgtttcggatgtca

SEQ ID NO: 3340682 - DNA, 25 bp, Homo sapien
ttcggatgtcattaacctgtgtagc

SEQ ID NO: 3340683 - DNA, 25 bp, Homo sapien
ggctgtttcggatgtcattaacctg

SEQ ID NO: 3340684 - DNA, 25 bp, Homo sapien
aacctgtgtagctgatgcttggtgg

SEQ ID NO: 3340685 - DNA, 25 bp, Homo sapien
gagttgatgccgtggataatatgcc

SEQ ID NO: 3340686 - DNA, 25 bp, Homo sapien
gaagtaagaggtacagtccaatggc

SEQ ID NO: 3340687 - DNA, 25 bp, Homo sapien
taaatcacgtctccacttagcatgt

SEQ ID NO: 3340688 - DNA, 25 bp, Homo sapien
tggcttgccatagacgcttttgacg

SEQ ID NO: 3340689 - DNA, 25 bp, Homo sapien
agcacagttattcccgcgtcagtga

SEQ ID NO: 3340690 - DNA, 25 bp, Homo sapien
gggatggaaaccgtccatcactgca

SEQ ID NO: 3340691 - DNA, 25 bp, Homo sapien
acagcacagttattcccgcgtcagt

SEQ ID NO: 3340692 - DNA, 25 bp, Homo sapien
catcactgcaagactgttcccatgg

SEQ ID NO: 3340693 - DNA, 25 bp, Homo sapien
gctgtaaaaatcagggactatttct

SEQ ID NO: 3340694 - DNA, 25 bp, Homo sapien
ctttaataatggacagaaaggccat

SEQ ID NO: 3340695 - DNA, 25 bp, Homo sapien
gactatttctttaataatggacaga

SEQ ID NO: 3340696 - DNA, 25 bp, Homo sapien
tctatgctgtaaaaatcagggacta

SEQ ID NO: 3340697 - DNA, 25 bp, Homo sapien
ccttgttgttattaacatctatgta

SEQ ID NO: 3340698 - DNA, 25 bp, Homo sapien
tgctcctcctgttccatttgactgt

SEQ ID NO: 3340699 - DNA, 25 bp, Homo sapien
tgttccatttgactgtcagctgtca

SEQ ID NO: 3340700 - DNA, 25 bp, Homo sapien
ctcctgttccatttgactgtcagct

SEQ ID NO: 3340701 - DNA, 25 bp, Homo sapien
gttccatttgactgtcagctgtcat

SEQ ID NO: 3340702 - DNA, 25 bp, Homo sapien
gggcgctggccttttgatcacaatg

SEQ ID NO: 3340703 - DNA, 25 bp, Homo sapien
gtcctcaacctctgcgctcttagtg

SEQ ID NO: 3340704 - DNA, 25 bp, Homo sapien
gatcacaatgactttggcgtatttc

SEQ ID NO: 3340705 - DNA, 25 bp, Homo sapien
tagtgttgacaggtaatgtggttct

SEQ ID NO: 3340706 - DNA, 25 bp, Homo sapien
atgaaattaggaactttataacaca

SEQ ID NO: 3340707 - DNA, 25 bp, Homo sapien
tgaaattaggaactttataacacat

SEQ ID NO: 3340708 - DNA, 25 bp, Homo sapien
cagttgcctcctggagtcgtgttca

SEQ ID NO: 3340709 - DNA, 25 bp, Homo sapien
gatcctgtcctttatcctggccatt

SEQ ID NO: 3340710 - DNA, 25 bp, Homo sapien
aagcgattggcttcgtcatggtacc

SEQ ID NO: 3340711 - DNA, 25 bp, Homo sapien
cattgaaattgtctccatctggatc

SEQ ID NO: 3340712 - DNA, 25 bp, Homo sapien
ctttgaatataggggtgaacagcat

SEQ ID NO: 3340713 - DNA, 25 bp, Homo sapien
aatggcagcttgagaattgccctca

SEQ ID NO: 3340714 - DNA, 25 bp, Homo sapien
caagatgtaaaggactggtggctct

SEQ ID NO: 3340715 - DNA, 25 bp, Homo sapien
actgcgatcttctacaccctcatga

SEQ ID NO: 3340716 - DNA, 25 bp, Homo sapien
tatgcccttggtgtgcactgcgatc

SEQ ID NO: 3340717 - DNA, 25 bp, Homo sapien
tcccagatgtttacagactgtgagt

SEQ ID NO: 3340718 - DNA, 25 bp, Homo sapien
aattgtgccccgcagttgtgccaaa

SEQ ID NO: 3340719 - DNA, 25 bp, Homo sapien
gccaaagtgcatagtctgagtaaaa

SEQ ID NO: 3340720 - DNA, 25 bp, Homo sapien
gatataagaggcagcgtgaaagcag

SEQ ID NO: 3340721 - DNA, 25 bp, Homo sapien
gggaagtcccttggagattccgtca

SEQ ID NO: 3340722 - DNA, 25 bp, Homo sapien
ggagattccgtcatcacagtcatgt

SEQ ID NO: 3340723 - DNA, 25 bp, Homo sapien
ccacaaatagccttctgtgaagtaa

SEQ ID NO: 3340724 - DNA, 25 bp, Homo sapien
cagagagcatccgtcaaggatggct

SEQ ID NO: 3340725 - DNA, 25 bp, Homo sapien
ctccttttctcaatggccacaaggg

SEQ ID NO: 3340726 - DNA, 25 bp, Homo sapien
ccttttctcaatggccacaaggggc

SEQ ID NO: 3340727 - DNA, 25 bp, Homo sapien
taaaagttattcatacctacctcca

SEQ ID NO: 3340728 - DNA, 25 bp, Homo sapien
atgaagaaataccctcagaaactcc

SEQ ID NO: 3340729 - DNA, 25 bp, Homo sapien
atggccccaactgcgaggaggacag

SEQ ID NO: 3340730 - DNA, 25 bp, Homo sapien
tcataacctattggccaggaccaca

SEQ ID NO: 3340731 - DNA, 25 bp, Homo sapien
caagatttgccgaagtaagagaaga

SEQ ID NO: 3340732 - DNA, 25 bp, Homo sapien
caaccatgtaacttagagctgtcaa

SEQ ID NO: 3340733 - DNA, 25 bp, Homo sapien
caggccaaggccttagtcatccaag

SEQ ID NO: 3340734 - DNA, 25 bp, Homo sapien
ggcatcagaggcttgtctaaagttt

SEQ ID NO: 3340735 - DNA, 25 bp, Homo sapien
gacatcagggctaggaggattctca

SEQ ID NO: 3340736 - DNA, 25 bp, Homo sapien
tataggatattatgcagagaaccgg

SEQ ID NO: 3340737 - DNA, 25 bp, Homo sapien
gaaggtaaaactatacatagttcaa

SEQ ID NO: 3340738 - DNA, 25 bp, Homo sapien
caatatagtaaagagggccgggcac

SEQ ID NO: 3340739 - DNA, 25 bp, Homo sapien
tacatagttcaatatagtaaagagg

SEQ ID NO: 3340740 - DNA, 25 bp, Homo sapien
atccaagctacttggcagggaaggc

SEQ ID NO: 3340741 - DNA, 25 bp, Homo sapien
tcctaacatataggcaagcagtagt

SEQ ID NO: 3340742 - DNA, 25 bp, Homo sapien
cagcttgactccctatcttgagaca

SEQ ID NO: 3340743 - DNA, 25 bp, Homo sapien
cagcaatatgctgtaaaggcagggt

SEQ ID NO: 3340744 - DNA, 25 bp, Homo sapien
caactatgaaagcatgtccatgtca

SEQ ID NO: 3340745 - DNA, 25 bp, Homo sapien
gaaagatagcactctacaaacctag

SEQ ID NO: 3340746 - DNA, 25 bp, Homo sapien
tgtattgagatgttcctcgctgcca

SEQ ID NO: 3340747 - DNA, 25 bp, Homo sapien
tttaaagcagtaccacagtgcaggc

SEQ ID NO: 3340748 - DNA, 25 bp, Homo sapien
cttgccatgtgggatgtctcagata

SEQ ID NO: 3340749 - DNA, 25 bp, Homo sapien
gctgaaagccaggtacaactactgc

SEQ ID NO: 3340750 - DNA, 25 bp, Homo sapien
taatgctccggaattatcagaaagc

SEQ ID NO: 3340751 - DNA, 25 bp, Homo sapien
catcagtgctattaaaggtggcagc

SEQ ID NO: 3340752 - DNA, 25 bp, Homo sapien
aattgctaatcacaaccccactggg

SEQ ID NO: 3340753 - DNA, 25 bp, Homo sapien
gaaaggtatcccgtgctcatggatc

SEQ ID NO: 3340754 - DNA, 25 bp, Homo sapien
gaataaatttaacaccaaggcagta

SEQ ID NO: 3340755 - DNA, 25 bp, Homo sapien
tcatatgtaacgataaaagaccctg

SEQ ID NO: 3340756 - DNA, 25 bp, Homo sapien
catttctccgaagacgacacacaga

SEQ ID NO: 3340757 - DNA, 25 bp, Homo sapien
taggtcaaaggattcaaggtagcag

SEQ ID NO: 3340758 - DNA, 25 bp, Homo sapien
taacaagaacgggtagtctggagca

SEQ ID NO: 3340759 - DNA, 25 bp, Homo sapien
tggtaaatgagtagatgtcagctgc

SEQ ID NO: 3340760 - DNA, 25 bp, Homo sapien
gtgacttacaaagagcacgcagtgt

SEQ ID NO: 3340761 - DNA, 25 bp, Homo sapien
cataaccctcagtcttcagtggaag

SEQ ID NO: 3340762 - DNA, 25 bp, Homo sapien
tcagtggaagcctttcagtgtttcc

SEQ ID NO: 3340763 - DNA, 25 bp, Homo sapien
aaatccctattctgtaaaatcgagc

SEQ ID NO: 3340764 - DNA, 25 bp, Homo sapien
tcctgaagatgtattccctaactcc

SEQ ID NO: 3340765 - DNA, 25 bp, Homo sapien
tatatacccccactaattaagacaa

SEQ ID NO: 3340766 - DNA, 25 bp, Homo sapien
aaaatatttgaccattacaaggaat

SEQ ID NO: 3340767 - DNA, 25 bp, Homo sapien
tgaccattacaaggaatttttatat

SEQ ID NO: 3340768 - DNA, 25 bp, Homo sapien
ttatatacccccactaattaagaca

SEQ ID NO: 3340769 - DNA, 25 bp, Homo sapien
tgggattatctaaaacaactgcagc

SEQ ID NO: 3340770 - DNA, 25 bp, Homo sapien
cacttgaagtatccaacctaatctc

SEQ ID NO: 3340771 - DNA, 25 bp, Homo sapien
tccagtgggaggcttcacttgaagt

SEQ ID NO: 3340772 - DNA, 25 bp, Homo sapien
gctgaatgctgagtacaagttcctc

SEQ ID NO: 3340773 - DNA, 25 bp, Homo sapien
tatacagggcaatgaggataggtcc

SEQ ID NO: 3340774 - DNA, 25 bp, Homo sapien
gaggtgttcaaatacggagtcatta

SEQ ID NO: 3340775 - DNA, 25 bp, Homo sapien
taagagttccactggcttgcttaaa

SEQ ID NO: 3340776 - DNA, 25 bp, Homo sapien
tggcttgcttaaaggtatacagggc

SEQ ID NO: 3340777 - DNA, 25 bp, Homo sapien
ttcccacatcaagctaaggctggct

SEQ ID NO: 3340778 - DNA, 25 bp, Homo sapien
ttgtggtcagggattgctttgtact

SEQ ID NO: 3340779 - DNA, 25 bp, Homo sapien
caatagtacttgacagaatgctttt

SEQ ID NO: 3340780 - DNA, 25 bp, Homo sapien
tgtggtcagggctcaagtttttcac

SEQ ID NO: 3340781 - DNA, 25 bp, Homo sapien
gttctctagagttcagttcccagcc

SEQ ID NO: 3340782 - DNA, 25 bp, Homo sapien
ttacccaattgctcagtgaccacag

SEQ ID NO: 3340783 - DNA, 25 bp, Homo sapien
ggccttaaataccagctacatgctg

SEQ ID NO: 3340784 - DNA, 25 bp, Homo sapien
aaaggagtcctctttcatagcccac

SEQ ID NO: 3340785 - DNA, 25 bp, Homo sapien
tgtttcctacccctttcagagcaaa

SEQ ID NO: 3340786 - DNA, 25 bp, Homo sapien
gccacagtccttacaaatggccaga

SEQ ID NO: 3340787 - DNA, 25 bp, Homo sapien
gatactccaatcgtgatcttgcctc

SEQ ID NO: 3340788 - DNA, 25 bp, Homo sapien
cagaaggtcaacatctggcccctaa

SEQ ID NO: 3340789 - DNA, 25 bp, Homo sapien
tccagctaaactttagtcactgtgt

SEQ ID NO: 3340790 - DNA, 25 bp, Homo sapien
gactaaagagagagcgatggtagac

SEQ ID NO: 3340791 - DNA, 25 bp, Homo sapien
tagactgttcaacagcatcctggtt

SEQ ID NO: 3340792 - DNA, 25 bp, Homo sapien
cttggttattgtaacctctaggttg

SEQ ID NO: 3340793 - DNA, 25 bp, Homo sapien
cttgcctccagattgtagtaaacac

SEQ ID NO: 3340794 - DNA, 25 bp, Homo sapien
taggagtgtctgtgattccacaagc

SEQ ID NO: 3340795 - DNA, 25 bp, Homo sapien
tatatttaatccaagagtacgttct

SEQ ID NO: 3340796 - DNA, 25 bp, Homo sapien
tgtgattccacaagcaacccaaaca

SEQ ID NO: 3340797 - DNA, 25 bp, Homo sapien
tattgctaggccgtggaagctgtgc

SEQ ID NO: 3340798 - DNA, 25 bp, Homo sapien
aagctaagggctgttaagtcaaggc

SEQ ID NO: 3340799 - DNA, 25 bp, Homo sapien
tggaggtggaggatactttaaacca

SEQ ID NO: 3340800 - DNA, 25 bp, Homo sapien
ccacatgtgggcttccctgagagtg

SEQ ID NO: 3340801 - DNA, 25 bp, Homo sapien
tatcatatgtacatttcacagtatg

SEQ ID NO: 3340802 - DNA, 25 bp, Homo sapien
ctaggcaggtgaactttatattatc

SEQ ID NO: 3340803 - DNA, 25 bp, Homo sapien
gaatttctagaacaggatactaggc

SEQ ID NO: 3340804 - DNA, 25 bp, Homo sapien
cacagtatgtttttactcctaagtt

SEQ ID NO: 3340805 - DNA, 25 bp, Homo sapien
tagcgagggcactacaaagttcagc

SEQ ID NO: 3340806 - DNA, 25 bp, Homo sapien
gattggcttcagatatgaggtccag

SEQ ID NO: 3340807 - DNA, 25 bp, Homo sapien
tatggtttaacctgcccaagtgtgc

SEQ ID NO: 3340808 - DNA, 25 bp, Homo sapien
gaagccttcggacacatctaacacg

SEQ ID NO: 3340809 - DNA, 25 bp, Homo sapien
aacaggaataccaatcttatcaggc

SEQ ID NO: 3340810 - DNA, 25 bp, Homo sapien
ccataatagcatctagtatgccttc

SEQ ID NO: 3340811 - DNA, 25 bp, Homo sapien
cctcactaggacttgtggataaact

SEQ ID NO: 3340812 - DNA, 25 bp, Homo sapien
tcatcaagctggagcacaaaccaaa

SEQ ID NO: 3340813 - DNA, 25 bp, Homo sapien
taagccggactctgaaatttcacat

SEQ ID NO: 3340814 - DNA, 25 bp, Homo sapien
gtatctacagaagaataagccggac

SEQ ID NO: 3340815 - DNA, 25 bp, Homo sapien
taatttcaaagcactctgtcaaagc

SEQ ID NO: 3340816 - DNA, 25 bp, Homo sapien
tcctccaggaactcgactcatcttt

SEQ ID NO: 3340817 - DNA, 25 bp, Homo sapien
catataaaaccactaactataaagg

SEQ ID NO: 3340818 - DNA, 25 bp, Homo sapien
gtaacatatctaatactgagtccag

SEQ ID NO: 3340819 - DNA, 25 bp, Homo sapien
tcttaaacataactacataatacac

SEQ ID NO: 3340820 - DNA, 25 bp, Homo sapien
aaagtaaaaagcaagcaactaagat

SEQ ID NO: 3340821 - DNA, 25 bp, Homo sapien
gccatatggtaaaaagtccaccttc

SEQ ID NO: 3340822 - DNA, 25 bp, Homo sapien
tgagtaggttatattcatcatgcct

SEQ ID NO: 3340823 - DNA, 25 bp, Homo sapien
gcgcccagccagacaatttcttgct

SEQ ID NO: 3340824 - DNA, 25 bp, Homo sapien
ttgtcaaaacttcaagccatatggt

SEQ ID NO: 3340825 - DNA, 25 bp, Homo sapien
gatgtcttcttatctctgcacattc

SEQ ID NO: 3340826 - DNA, 25 bp, Homo sapien
cattctactgccatcccaaatataa

SEQ ID NO: 3340827 - DNA, 25 bp, Homo sapien
gccatcccaaatataacagcacttg

SEQ ID NO: 3340828 - DNA, 25 bp, Homo sapien
tgctggtataactttcccatacttt

SEQ ID NO: 3340829 - DNA, 25 bp, Homo sapien
aataaacctgcatcgacagtttctg

SEQ ID NO: 3340830 - DNA, 25 bp, Homo sapien
aaacctgcatcgacagtttctgtta

SEQ ID NO: 3340831 - DNA, 25 bp, Homo sapien
cctgcatcgacagtttctgttacaa

SEQ ID NO: 3340832 - DNA, 25 bp, Homo sapien
caaataaacctgcatcgacagtttc

SEQ ID NO: 3340833 - DNA, 25 bp, Homo sapien
gtggaacaagacaactgaggacagt

SEQ ID NO: 3340834 - DNA, 25 bp, Homo sapien
tcacccttgtgatatggatcggagt

SEQ ID NO: 3340835 - DNA, 25 bp, Homo sapien
tgataagtccattgaatctgaactg

SEQ ID NO: 3340836 - DNA, 25 bp, Homo sapien
gggcccatgccaaaatatactgaca

SEQ ID NO: 3340837 - DNA, 25 bp, Homo sapien
aactatcttatcctatatccatatc

SEQ ID NO: 3340838 - DNA, 25 bp, Homo sapien
cattttgtttggactaaaagctaga

SEQ ID NO: 3340839 - DNA, 25 bp, Homo sapien
tgtttggactaaaagctagaaatat

SEQ ID NO: 3340840 - DNA, 25 bp, Homo sapien
aataaactatcttatcctatatcca

SEQ ID NO: 3340841 - DNA, 25 bp, Homo sapien
tgtcaagtgacttcgtatgtaagag

SEQ ID NO: 3340842 - DNA, 25 bp, Homo sapien
tttggaatctctatgtcaagtgact

SEQ ID NO: 3340843 - DNA, 25 bp, Homo sapien
gagtttgatccctgcttccatcttg

SEQ ID NO: 3340844 - DNA, 25 bp, Homo sapien
tgctgccacgacatcacaggcaagt

SEQ ID NO: 3340845 - DNA, 25 bp, Homo sapien
tacacggaatgtgctccagcttttt

SEQ ID NO: 3340846 - DNA, 25 bp, Homo sapien
caggcatacacggaatgtgctccag

SEQ ID NO: 3340847 - DNA, 25 bp, Homo sapien
ctcacaggcatacacggaatgtgct

SEQ ID NO: 3340848 - DNA, 25 bp, Homo sapien
ggtcttggataactcacaggcatac

SEQ ID NO: 3340849 - DNA, 25 bp, Homo sapien
caccaaccagtttgcaacacgataa

SEQ ID NO: 3340850 - DNA, 25 bp, Homo sapien
gaaatcagggtttagcttcactgct

SEQ ID NO: 3340851 - DNA, 25 bp, Homo sapien
cattaagcatgataaagtgccagcg

SEQ ID NO: 3340852 - DNA, 25 bp, Homo sapien
gctttatgaaaatacccagctgctt

SEQ ID NO: 3340853 - DNA, 25 bp, Homo sapien
ggagggttctcactatcctaactga

SEQ ID NO: 3340854 - DNA, 25 bp, Homo sapien
tgtcactttcaaacttggcagaacc

SEQ ID NO: 3340855 - DNA, 25 bp, Homo sapien
cacgcacatgtactagtatgcagag

SEQ ID NO: 3340856 - DNA, 25 bp, Homo sapien
gaaaggcctgattacaaaactgtcc

SEQ ID NO: 3340857 - DNA, 25 bp, Homo sapien
cacagtaatacacaagagccatgac

SEQ ID NO: 3340858 - DNA, 25 bp, Homo sapien
catggtgaggcctgtgagcccttcc

SEQ ID NO: 3340859 - DNA, 25 bp, Homo sapien
gtggttccaagactcccaacatgta

SEQ ID NO: 3340860 - DNA, 25 bp, Homo sapien
aatcagcaaatctgggagtggttcc

SEQ ID NO: 3340861 - DNA, 25 bp, Homo sapien
tgtatccgactgagagcatcaagct

SEQ ID NO: 3340862 - DNA, 25 bp, Homo sapien
tcttcagcccatctgaaaagtgtgt

SEQ ID NO: 3340863 - DNA, 25 bp, Homo sapien
gagatgctcccccatactattgcaa

SEQ ID NO: 3340864 - DNA, 25 bp, Homo sapien
gaaacagttccaaggcctgctcata

SEQ ID NO: 3340865 - DNA, 25 bp, Homo sapien
gaggacgttggatctgccagcaagt

SEQ ID NO: 3340866 - DNA, 25 bp, Homo sapien
cgttggatctgccagcaagtgagaa

SEQ ID NO: 3340867 - DNA, 25 bp, Homo sapien
gacgttggatctgccagcaagtgag

SEQ ID NO: 3340868 - DNA, 25 bp, Homo sapien
acgaggacgttggatctgccagcaa

SEQ ID NO: 3340869 - DNA, 25 bp, Homo sapien
tgcaaggaccgcgacaccagctcgt

SEQ ID NO: 3340870 - DNA, 25 bp, Homo sapien
agacagtgctctgcgctctgcaagg

SEQ ID NO: 3340871 - DNA, 25 bp, Homo sapien
ataggcagtgccgaagtcctggacg

SEQ ID NO: 3340872 - DNA, 25 bp, Homo sapien
ttcacgtcgtgtttcagctccggcg

SEQ ID NO: 3340873 - DNA, 25 bp, Homo sapien
cgtaattagaaaactctctcgatgc

SEQ ID NO: 3340874 - DNA, 25 bp, Homo sapien
agtcaccacttgtatggccaaaggg

SEQ ID NO: 3340875 - DNA, 25 bp, Homo sapien
tctcgatgctacacttccagggacc

SEQ ID NO: 3340876 - DNA, 25 bp, Homo sapien
ccagacaactgctcaaaaaacagca

SEQ ID NO: 3340877 - DNA, 25 bp, Homo sapien
cactcacaaaggtgtcagcctgcag

SEQ ID NO: 3340878 - DNA, 25 bp, Homo sapien
tgctaggttcctgctcaaaatctac

SEQ ID NO: 3340879 - DNA, 25 bp, Homo sapien
gagaaagcagctttacacagtctgc

SEQ ID NO: 3340880 - DNA, 25 bp, Homo sapien
cacatttcacttatgtacccgggaa

SEQ ID NO: 3340881 - DNA, 25 bp, Homo sapien
taagtagatagtattggccttttgc

SEQ ID NO: 3340882 - DNA, 25 bp, Homo sapien
gcagctaggttcttttacttagtat

SEQ ID NO: 3340883 - DNA, 25 bp, Homo sapien
ttcaccgttattgtgccgtagcacg

SEQ ID NO: 3340884 - DNA, 25 bp, Homo sapien
attgttttcggccaggctcggcggc

SEQ ID NO: 3340885 - DNA, 25 bp, Homo sapien
acttcagagttatgtcgcccgcctg

SEQ ID NO: 3340886 - DNA, 25 bp, Homo sapien
tgtgcgagttcgttcccagctcggg

SEQ ID NO: 3340887 - DNA, 25 bp, Homo sapien
tgtaaggcttcgatctcaagcggag

SEQ ID NO: 3340888 - DNA, 25 bp, Homo sapien
ggtgaaaaccacacgttacctggca

SEQ ID NO: 3340889 - DNA, 25 bp, Homo sapien
ggagccgactgtgagtcaccccggc

SEQ ID NO: 3340890 - DNA, 25 bp, Homo sapien
ggcgaaattctagccccaggacgcc

SEQ ID NO: 3340891 - DNA, 25 bp, Homo sapien
gggttccgtgcagcggggagccgac

SEQ ID NO: 3340892 - DNA, 25 bp, Homo sapien
caggacgcctcggaaggaagaggag

SEQ ID NO: 3340893 - DNA, 25 bp, Homo sapien
cgccgcaggactcggctctacggga

SEQ ID NO: 3340894 - DNA, 25 bp, Homo sapien
tacgggacatgtccgtgccgcgctc

SEQ ID NO: 3340895 - DNA, 25 bp, Homo sapien
cgggcctgctagctcctctgtgctc

SEQ ID NO: 3340896 - DNA, 25 bp, Homo sapien
gcagctagcgctggtctcggtggca

SEQ ID NO: 3340897 - DNA, 25 bp, Homo sapien
gaggatccgcgctcacgaagcggaa

SEQ ID NO: 3340898 - DNA, 25 bp, Homo sapien
tcatcgctgcgacgaaaagtaagcg

SEQ ID NO: 3340899 - DNA, 25 bp, Homo sapien
taaggacgggaagaacctcatcgct

SEQ ID NO: 3340900 - DNA, 25 bp, Homo sapien
gcggaactcgagaggaccaacaagt

SEQ ID NO: 3340901 - DNA, 25 bp, Homo sapien
gattctttgaaaccctgcgggagtg

SEQ ID NO: 3340902 - DNA, 25 bp, Homo sapien
tctcttacaaaaccgaggcatctgt

SEQ ID NO: 3340903 - DNA, 25 bp, Homo sapien
tgagttttccagagtccccttaagc

SEQ ID NO: 3340904 - DNA, 25 bp, Homo sapien
tggcccggagtcaggtttcattgct

SEQ ID NO: 3340905 - DNA, 25 bp, Homo sapien
gcatattagctttcctgccatcagg

SEQ ID NO: 3340906 - DNA, 25 bp, Homo sapien
tgccatcaggacacatgcgttaggt

SEQ ID NO: 3340907 - DNA, 25 bp, Homo sapien
tagtagttccctctggagctagaga

SEQ ID NO: 3340908 - DNA, 25 bp, Homo sapien
ttggccactggtagaaagctatttc

SEQ ID NO: 3340909 - DNA, 25 bp, Homo sapien
cacttgtgtttcagagactgtgccc

SEQ ID NO: 3340910 - DNA, 25 bp, Homo sapien
gactgtgcccagtgttttcacagga

SEQ ID NO: 3340911 - DNA, 25 bp, Homo sapien
tcaagtgatgtgcctacctccggcc

SEQ ID NO: 3340912 - DNA, 25 bp, Homo sapien
ttgctttttttggagcacttgtgtt

SEQ ID NO: 3340913 - DNA, 25 bp, Homo sapien
tctgcaaagcttactttcgggaaat

SEQ ID NO: 3340914 - DNA, 25 bp, Homo sapien
tatcaagtgatagaaacttccttta

SEQ ID NO: 3340915 - DNA, 25 bp, Homo sapien
cctggccaagcctttagtattatag

SEQ ID NO: 3340916 - DNA, 25 bp, Homo sapien
gaagagcatgcattattgtcattga

SEQ ID NO: 3340917 - DNA, 25 bp, Homo sapien
gcattgacaacttccatccgttcat

SEQ ID NO: 3340918 - DNA, 25 bp, Homo sapien
tgacaacttccatccgttcatagcc

SEQ ID NO: 3340919 - DNA, 25 bp, Homo sapien
gctgtagcattgacaacttccatcc

SEQ ID NO: 3340920 - DNA, 25 bp, Homo sapien
ttccatccgttcatagcctctgctt

SEQ ID NO: 3340921 - DNA, 25 bp, Homo sapien
ggcactaagtgactttgaaggtgat

SEQ ID NO: 3340922 - DNA, 25 bp, Homo sapien
gaaggtgattttaaagacggcatta

SEQ ID NO: 3340923 - DNA, 25 bp, Homo sapien
tttgtgctgattggcactaagtgac

SEQ ID NO: 3340924 - DNA, 25 bp, Homo sapien
aagattttgtgctgattggcactaa

SEQ ID NO: 3340925 - DNA, 25 bp, Homo sapien
cctgaggttccacaaaaccctcttg

SEQ ID NO: 3340926 - DNA, 25 bp, Homo sapien
ggttccacaaaaccctcttgaatca

SEQ ID NO: 3340927 - DNA, 25 bp, Homo sapien
tccacaaaaccctcttgaatcatca

SEQ ID NO: 3340928 - DNA, 25 bp, Homo sapien
tcttgaatcatcagagatgacattc

SEQ ID NO: 3340929 - DNA, 25 bp, Homo sapien
cattgggagcttagtgcactgggac

SEQ ID NO: 3340930 - DNA, 25 bp, Homo sapien
tctgtcctacgagagagcgtgtctt

SEQ ID NO: 3340931 - DNA, 25 bp, Homo sapien
tgggacttgtatcgcagcatggact

SEQ ID NO: 3340932 - DNA, 25 bp, Homo sapien
tgcagttcgtccagatgctgtgaag

SEQ ID NO: 3340933 - DNA, 25 bp, Homo sapien
tgacatgagccgctttctcacagtc

SEQ ID NO: 3340934 - DNA, 25 bp, Homo sapien
tgccatgacatgagccgctttctca

SEQ ID NO: 3340935 - DNA, 25 bp, Homo sapien
ccgctttctcacagtcctgttggag

SEQ ID NO: 3340936 - DNA, 25 bp, Homo sapien
tgagccgctttctcacagtcctgtt

SEQ ID NO: 3340937 - DNA, 25 bp, Homo sapien
cagagctggtcccgtgtctggatca

SEQ ID NO: 3340938 - DNA, 25 bp, Homo sapien
ctggatcagggccgaggctcagcat

SEQ ID NO: 3340939 - DNA, 25 bp, Homo sapien
ctggtcccgtgtctggatcagggcc

SEQ ID NO: 3340940 - DNA, 25 bp, Homo sapien
ccgtgtctggatcagggccgaggct

SEQ ID NO: 3340941 - DNA, 25 bp, Homo sapien
cataagtgaaagctgtattgtgccc

SEQ ID NO: 3340942 - DNA, 25 bp, Homo sapien
tctctggtcccggatttgacatgta

SEQ ID NO: 3340943 - DNA, 25 bp, Homo sapien
cccagttgctttcaaaaggtgcctt

SEQ ID NO: 3340944 - DNA, 25 bp, Homo sapien
gacatgtattggtacagattcccag

SEQ ID NO: 3340945 - DNA, 25 bp, Homo sapien
ggtgccatgaccagtgaccactgaa

SEQ ID NO: 3340946 - DNA, 25 bp, Homo sapien
cacctggtgccatgaccagtgacca

SEQ ID NO: 3340947 - DNA, 25 bp, Homo sapien
ccactgaatcctgtcgccttgtgtg

SEQ ID NO: 3340948 - DNA, 25 bp, Homo sapien
cagtgaccactgaatcctgtcgcct

SEQ ID NO: 3340949 - DNA, 25 bp, Homo sapien
aagacagcagcagcgtgactggagt

SEQ ID NO: 3340950 - DNA, 25 bp, Homo sapien
cagcagcagcgtgactggagttaat

SEQ ID NO: 3340951 - DNA, 25 bp, Homo sapien
ctggagttaatgtgaggcacccgac

SEQ ID NO: 3340952 - DNA, 25 bp, Homo sapien
cgtgactggagttaatgtgaggcac

SEQ ID NO: 3340953 - DNA, 25 bp, Homo sapien
aataacagcaaactgtacatattct

SEQ ID NO: 3340954 - DNA, 25 bp, Homo sapien
tatgagtaatgtaaggtatattgtt

SEQ ID NO: 3340955 - DNA, 25 bp, Homo sapien
cagcaaactgtacatattctttact

SEQ ID NO: 3340956 - DNA, 25 bp, Homo sapien
tatgagtttatgagtaatgtaaggt

SEQ ID NO: 3340957 - DNA, 25 bp, Homo sapien
tatgtcttctattgcactcctgtga

SEQ ID NO: 3340958 - DNA, 25 bp, Homo sapien
cgttcctatgcaacacgggctggtg

SEQ ID NO: 3340959 - DNA, 25 bp, Homo sapien
caagtgatagatgcccaacaagtcg

SEQ ID NO: 3340960 - DNA, 25 bp, Homo sapien
ggtgatttctctcagatctagggca

SEQ ID NO: 3340961 - DNA, 25 bp, Homo sapien
gagctgcttaggttccatgccctga

SEQ ID NO: 3340962 - DNA, 25 bp, Homo sapien
gaccatccgatatctctagccttgt

SEQ ID NO: 3340963 - DNA, 25 bp, Homo sapien
agaagctctgcgcagcttgccagca

SEQ ID NO: 3340964 - DNA, 25 bp, Homo sapien
ggagaacaccgtccctctgtttcag

SEQ ID NO: 3340965 - DNA, 25 bp, Homo sapien
gagccaccactgaggaaccgaggtg

SEQ ID NO: 3340966 - DNA, 25 bp, Homo sapien
tggcactttgccagcgttggtgctg

SEQ ID NO: 3340967 - DNA, 25 bp, Homo sapien
tgtgctggccgttcacttgtgctct

SEQ ID NO: 3340968 - DNA, 25 bp, Homo sapien
ctgacaggtgtctgccaggcaccct

SEQ ID NO: 3340969 - DNA, 25 bp, Homo sapien
tgtgaggatgaagttgaattctcat

SEQ ID NO: 3340970 - DNA, 25 bp, Homo sapien
tctgtgaggatgaagttgaattctc

SEQ ID NO: 3340971 - DNA, 25 bp, Homo sapien
ctgtgaggatgaagttgaattctca

SEQ ID NO: 3340972 - DNA, 25 bp, Homo sapien
taatctctttgcctaacaggaagga

SEQ ID NO: 3340973 - DNA, 25 bp, Homo sapien
gtgtgctctcattgatactcaagaa

SEQ ID NO: 3340974 - DNA, 25 bp, Homo sapien
aagaacagcgtgtggtcccatgtgg

SEQ ID NO: 3340975 - DNA, 25 bp, Homo sapien
taattgagggcttttagatgacctg

SEQ ID NO: 3340976 - DNA, 25 bp, Homo sapien
gataatacacgtaatattcccattg

SEQ ID NO: 3340977 - DNA, 25 bp, Homo sapien
tatagttactagaggccatagtgca

SEQ ID NO: 3340978 - DNA, 25 bp, Homo sapien
tctcaaggaaggcaaccatgtgcaa

SEQ ID NO: 3340979 - DNA, 25 bp, Homo sapien
aaagggcagacacagatagccatga

SEQ ID NO: 3340980 - DNA, 25 bp, Homo sapien
tcattaggaatgtagtgagatagct

SEQ ID NO: 3340981 - DNA, 25 bp, Homo sapien
gatagctttgtgacagactcacagc

SEQ ID NO: 3340982 - DNA, 25 bp, Homo sapien
cactgacaagctggtcagggtatgt

SEQ ID NO: 3340983 - DNA, 25 bp, Homo sapien
ttcctctcagtgctagttgatcctg

SEQ ID NO: 3340984 - DNA, 25 bp, Homo sapien
cactgggactcgctcatttttatgg

SEQ ID NO: 3340985 - DNA, 25 bp, Homo sapien
cagtcaggcctctatgatttgcgtg

SEQ ID NO: 3340986 - DNA, 25 bp, Homo sapien
ggcttgtttgtagttcacaccaggc

SEQ ID NO: 3340987 - DNA, 25 bp, Homo sapien
ttggttggacaagaccactgggact

SEQ ID NO: 3340988 - DNA, 25 bp, Homo sapien
gagagggtattcttagttgtcttcc

SEQ ID NO: 3340989 - DNA, 25 bp, Homo sapien
aggcagttattctcctcgaggccag

SEQ ID NO: 3340990 - DNA, 25 bp, Homo sapien
tgccttcctccatccggtgatgaga

SEQ ID NO: 3340991 - DNA, 25 bp, Homo sapien
taaggcagctatccgctggatttcc

SEQ ID NO: 3340992 - DNA, 25 bp, Homo sapien
tatttggcatagtcgaagggcatgg

SEQ ID NO: 3340993 - DNA, 25 bp, Homo sapien
cagggtggacagcatcatttggtga

SEQ ID NO: 3340994 - DNA, 25 bp, Homo sapien
tggtgaggtggaataggcaaaaccc

SEQ ID NO: 3340995 - DNA, 25 bp, Homo sapien
caatcctgggacaatatgggtgtca

SEQ ID NO: 3340996 - DNA, 25 bp, Homo sapien
aagggcccttgaagattctgaagag

SEQ ID NO: 3340997 - DNA, 25 bp, Homo sapien
ctaagggcccttgaagattctgaag

SEQ ID NO: 3340998 - DNA, 25 bp, Homo sapien
taagggcccttgaagattctgaaga

SEQ ID NO: 3340999 - DNA, 25 bp, Homo sapien
agggcccttgaagattctgaagagc

SEQ ID NO: 3341000 - DNA, 25 bp, Homo sapien
tctctttgccacgatcagtagaatg

SEQ ID NO: 3341001 - DNA, 25 bp, Homo sapien
cagtctcaacttgctgctgtcccag

SEQ ID NO: 3341002 - DNA, 25 bp, Homo sapien
ggtgctcctaggttcattggtgtaa

SEQ ID NO: 3341003 - DNA, 25 bp, Homo sapien
gtttttgatgaggagtatccactgc

SEQ ID NO: 3341004 - DNA, 25 bp, Homo sapien
tgtctccagggtgacgtacacccca

SEQ ID NO: 3341005 - DNA, 25 bp, Homo sapien
tctaggatcttcagacagtgtcagg

SEQ ID NO: 3341006 - DNA, 25 bp, Homo sapien
agggtgacgtacaccccacagccaa

SEQ ID NO: 3341007 - DNA, 25 bp, Homo sapien
cagccaagacagtctctctaggatc

SEQ ID NO: 3341008 - DNA, 25 bp, Homo sapien
ccctcctcagtctgtagtgccctgt

SEQ ID NO: 3341009 - DNA, 25 bp, Homo sapien
atttccttcaggcgacagcccagca

SEQ ID NO: 3341010 - DNA, 25 bp, Homo sapien
ctgtagtgccctgtagtcatttggt

SEQ ID NO: 3341011 - DNA, 25 bp, Homo sapien
agaactgctcactgtggacatgaac

SEQ ID NO: 3341012 - DNA, 25 bp, Homo sapien
cttttaactgccgtagtgaggaact

SEQ ID NO: 3341013 - DNA, 25 bp, Homo sapien
gtgaggaacttaggagcagggaaga

SEQ ID NO: 3341014 - DNA, 25 bp, Homo sapien
taactgccgtagtgaggaacttagg

SEQ ID NO: 3341015 - DNA, 25 bp, Homo sapien
tttaactgccgtagtgaggaactta

SEQ ID NO: 3341016 - DNA, 25 bp, Homo sapien
tggacctgactttgacccttctcag

SEQ ID NO: 3341017 - DNA, 25 bp, Homo sapien
gattgggttttggacctgactttga

SEQ ID NO: 3341018 - DNA, 25 bp, Homo sapien
catgacattttggtccagccaagca

SEQ ID NO: 3341019 - DNA, 25 bp, Homo sapien
tagattacaacttctaggtagatga

SEQ ID NO: 3341020 - DNA, 25 bp, Homo sapien
atgtcctgggtaacattaggaggaa

SEQ ID NO: 3341021 - DNA, 25 bp, Homo sapien
aatgtcctgggtaacattaggagga

SEQ ID NO: 3341022 - DNA, 25 bp, Homo sapien
tctgctctatctggttgtaaaaaca

SEQ ID NO: 3341023 - DNA, 25 bp, Homo sapien
cattgacaggtttctctcggtagga

SEQ ID NO: 3341024 - DNA, 25 bp, Homo sapien
tagaggcagtgtaaatgatctgctc

SEQ ID NO: 3341025 - DNA, 25 bp, Homo sapien
tctgcttgggaaaaggattagaggc

SEQ ID NO: 3341026 - DNA, 25 bp, Homo sapien
agagcctagtgccttcttgtggaag

SEQ ID NO: 3341027 - DNA, 25 bp, Homo sapien
agtgggttacactgagatctctagg

SEQ ID NO: 3341028 - DNA, 25 bp, Homo sapien
tgaagaatgaattggcagccagtac

SEQ ID NO: 3341029 - DNA, 25 bp, Homo sapien
ttcttgtggaaggatgtggtctctg

SEQ ID NO: 3341030 - DNA, 25 bp, Homo sapien
ggcctaattcgtgccttcctttgct

SEQ ID NO: 3341031 - DNA, 25 bp, Homo sapien
tacttggcacttgcgtgtggcctaa

SEQ ID NO: 3341032 - DNA, 25 bp, Homo sapien
ggtatctgcgttgtgtacttggcac

SEQ ID NO: 3341033 - DNA, 25 bp, Homo sapien
cgatacacatccattgtggcttgct

SEQ ID NO: 3341034 - DNA, 25 bp, Homo sapien
ttctgagcggagtatctgtgtccct

SEQ ID NO: 3341035 - DNA, 25 bp, Homo sapien
cggagtatctgtgtccctttagagc

SEQ ID NO: 3341036 - DNA, 25 bp, Homo sapien
ttacaacaagtaacccataaatctc

SEQ ID NO: 3341037 - DNA, 25 bp, Homo sapien
tgtccctttagagctgtgcttggcc

SEQ ID NO: 3341038 - DNA, 25 bp, Homo sapien
ctggggggcactcgtaagtcattcg

SEQ ID NO: 3341039 - DNA, 25 bp, Homo sapien
tggggggcactcgtaagtcattcgc

SEQ ID NO: 3341040 - DNA, 25 bp, Homo sapien
gggggcactcgtaagtcattcgctt

SEQ ID NO: 3341041 - DNA, 25 bp, Homo sapien
agtcattcgcttccttctcagcata

SEQ ID NO: 3341042 - DNA, 25 bp, Homo sapien
gcttttagtgaaacactcttgtttc

SEQ ID NO: 3341043 - DNA, 25 bp, Homo sapien
gtgcttttagtgaaacactcttgtt

SEQ ID NO: 3341044 - DNA, 25 bp, Homo sapien
gcaatttgaaatcttcatgtgcttt

SEQ ID NO: 3341045 - DNA, 25 bp, Homo sapien
ttcaggaacgtgtttccaagttagc

SEQ ID NO: 3341046 - DNA, 25 bp, Homo sapien
caaaccttgtttggctgcacaggtc

SEQ ID NO: 3341047 - DNA, 25 bp, Homo sapien
gaatattccagcttacagtgtgtct

SEQ ID NO: 3341048 - DNA, 25 bp, Homo sapien
tcaaaggagttacctagtagaggct

SEQ ID NO: 3341049 - DNA, 25 bp, Homo sapien
gttgccccgtcttgtgaatattcca

SEQ ID NO: 3341050 - DNA, 25 bp, Homo sapien
cgttcctgattagtaagacaacatt

SEQ ID NO: 3341051 - DNA, 25 bp, Homo sapien
gtaagacaacattcagcgttccttt

SEQ ID NO: 3341052 - DNA, 25 bp, Homo sapien
taagacaacattcagcgttcctttt

SEQ ID NO: 3341053 - DNA, 25 bp, Homo sapien
tcctttccgttcctgattagtaaga

SEQ ID NO: 3341054 - DNA, 25 bp, Homo sapien
cctgctactgtagcggacaagccac

SEQ ID NO: 3341055 - DNA, 25 bp, Homo sapien
cacaacaagctccaactcagctgtg

SEQ ID NO: 3341056 - DNA, 25 bp, Homo sapien
caggccagacccgatcgtctatggt

SEQ ID NO: 3341057 - DNA, 25 bp, Homo sapien
tctatggtccagtggcttaacccac

SEQ ID NO: 3341058 - DNA, 25 bp, Homo sapien
cctaatagaccaactgaagtgcttg

SEQ ID NO: 3341059 - DNA, 25 bp, Homo sapien
gataaacatgtcctgtggttctaac

SEQ ID NO: 3341060 - DNA, 25 bp, Homo sapien
tggccgtgtgtctccaggtgcgtgt

SEQ ID NO: 3341061 - DNA, 25 bp, Homo sapien
caactgaagtgcttggagataaaca

SEQ ID NO: 3341062 - DNA, 25 bp, Homo sapien
caagggtgtagcttttgaggattta

SEQ ID NO: 3341063 - DNA, 25 bp, Homo sapien
ctttgcatattgaaacaagggtgta

SEQ ID NO: 3341064 - DNA, 25 bp, Homo sapien
gaggatttaatattcatacacaagc

SEQ ID NO: 3341065 - DNA, 25 bp, Homo sapien
ccagattcgggtattgactttgcat

SEQ ID NO: 3341066 - DNA, 25 bp, Homo sapien
gacagcctggtaggcgtctgaccca

SEQ ID NO: 3341067 - DNA, 25 bp, Homo sapien
cctggtaggcgtctgacccaggaga

SEQ ID NO: 3341068 - DNA, 25 bp, Homo sapien
gaatgagggtcagtgcctaaagcca

SEQ ID NO: 3341069 - DNA, 25 bp, Homo sapien
gtgcctaaagccaatgcagatctgc

SEQ ID NO: 3341070 - DNA, 25 bp, Homo sapien
caggtctaaagtcccgagatgattt

SEQ ID NO: 3341071 - DNA, 25 bp, Homo sapien
ctaaagtcccgagatgatttggagt

SEQ ID NO: 3341072 - DNA, 25 bp, Homo sapien
gttctccaggtctaaagtcccgaga

SEQ ID NO: 3341073 - DNA, 25 bp, Homo sapien
tccaggtctaaagtcccgagatgat

SEQ ID NO: 3341074 - DNA, 25 bp, Homo sapien
agagggctgtgtttgtaaggtctca

SEQ ID NO: 3341075 - DNA, 25 bp, Homo sapien
cagggcagtgacgttcctgtgatgg

SEQ ID NO: 3341076 - DNA, 25 bp, Homo sapien
ggcagtgacgttcctgtgatggcca

SEQ ID NO: 3341077 - DNA, 25 bp, Homo sapien
agtgacgttcctgtgatggccagag

SEQ ID NO: 3341078 - DNA, 25 bp, Homo sapien
tagatgggcagtggttgcctcctca

SEQ ID NO: 3341079 - DNA, 25 bp, Homo sapien
ctggaaataggttttgctggtgacc

SEQ ID NO: 3341080 - DNA, 25 bp, Homo sapien
caggtgcgctccagttagatgggca

SEQ ID NO: 3341081 - DNA, 25 bp, Homo sapien
cagcagcgggactgctttcctggct

SEQ ID NO: 3341082 - DNA, 25 bp, Homo sapien
ttgttccctgttgtggtctaaaggc

SEQ ID NO: 3341083 - DNA, 25 bp, Homo sapien
tgcaggcatagggagggtgcgtggg

SEQ ID NO: 3341084 - DNA, 25 bp, Homo sapien
gggtgcgtgggaaatgacagacact

SEQ ID NO: 3341085 - DNA, 25 bp, Homo sapien
tctaaaggctgtgaggacaccgtgg

SEQ ID NO: 3341086 - DNA, 25 bp, Homo sapien
ttatccagcatatagaatgagaggg

SEQ ID NO: 3341087 - DNA, 25 bp, Homo sapien
ctgtggcagcctagcttggagaagc

SEQ ID NO: 3341088 - DNA, 25 bp, Homo sapien
cctgctgctgcgattttaaagggaa

SEQ ID NO: 3341089 - DNA, 25 bp, Homo sapien
gaactgtactactcgcagtgatagg

SEQ ID NO: 3341090 - DNA, 25 bp, Homo sapien
cagaaaacgtgctggagtcccacaa

SEQ ID NO: 3341091 - DNA, 25 bp, Homo sapien
tataccagtgatgcagaagaccgtg

SEQ ID NO: 3341092 - DNA, 25 bp, Homo sapien
cagacaatttggactgggacaggca

SEQ ID NO: 3341093 - DNA, 25 bp, Homo sapien
cagtgtgtcattccccgatggagca

SEQ ID NO: 3341094 - DNA, 25 bp, Homo sapien
aagtagagcggcttggcgttccccg

SEQ ID NO: 3341095 - DNA, 25 bp, Homo sapien
ggaactctaccttcagcgcatggga

SEQ ID NO: 3341096 - DNA, 25 bp, Homo sapien
tccaccagcattgcggggaactcta

SEQ ID NO: 3341097 - DNA, 25 bp, Homo sapien
agctggtcgctgatgatctccacca

SEQ ID NO: 3341098 - DNA, 25 bp, Homo sapien
tccgaccctggatccctctgccttc

SEQ ID NO: 3341099 - DNA, 25 bp, Homo sapien
cctttccgaccctggatccctctgc

SEQ ID NO: 3341100 - DNA, 25 bp, Homo sapien
ttccgaccctggatccctctgcctt

SEQ ID NO: 3341101 - DNA, 25 bp, Homo sapien
tttccgaccctggatccctctgcct

SEQ ID NO: 3341102 - DNA, 25 bp, Homo sapien
tttggtgggaactcaaatgacaaca

SEQ ID NO: 3341103 - DNA, 25 bp, Homo sapien
ttggtgggaactcaaatgacaacat

SEQ ID NO: 3341104 - DNA, 25 bp, Homo sapien
ctttggtgggaactcaaatgacaac

SEQ ID NO: 3341105 - DNA, 25 bp, Homo sapien
tgagacagtgaaatacatcaaggac

SEQ ID NO: 3341106 - DNA, 25 bp, Homo sapien
agctgtggtgttcccctaactgggc

SEQ ID NO: 3341107 - DNA, 25 bp, Homo sapien
tggaggctggcaatacggccaaata

SEQ ID NO: 3341108 - DNA, 25 bp, Homo sapien
gggtctaagcaccacagatgcccag

SEQ ID NO: 3341109 - DNA, 25 bp, Homo sapien
cagagaaagcagctcatccccagtc

SEQ ID NO: 3341110 - DNA, 25 bp, Homo sapien
acagagaaagcagctcatccccagt

SEQ ID NO: 3341111 - DNA, 25 bp, Homo sapien
ctctgttccgtgttccacagacaga

SEQ ID NO: 3341112 - DNA, 25 bp, Homo sapien
cacatgacttcaatagcgtgctcat

SEQ ID NO: 3341113 - DNA, 25 bp, Homo sapien
tccctgctcgcaaaggaaggcttct

SEQ ID NO: 3341114 - DNA, 25 bp, Homo sapien
cctctctaaagtaggtcccacatga

SEQ ID NO: 3341115 - DNA, 25 bp, Homo sapien
gcctgaatgatacagcctctctaaa

SEQ ID NO: 3341116 - DNA, 25 bp, Homo sapien
cataagagaaagacgatcttggcac

SEQ ID NO: 3341117 - DNA, 25 bp, Homo sapien
tcttggcaccaaaacaaacgaagtg

SEQ ID NO: 3341118 - DNA, 25 bp, Homo sapien
cacgaggagctggtgatcataagaa

SEQ ID NO: 3341119 - DNA, 25 bp, Homo sapien
caaatctcgcagtcaggtgggaatg

SEQ ID NO: 3341120 - DNA, 25 bp, Homo sapien
ccacgaaagctatgatcaagcacga

SEQ ID NO: 3341121 - DNA, 25 bp, Homo sapien
caagcacgaaagactgaagaagata

SEQ ID NO: 3341122 - DNA, 25 bp, Homo sapien
tatgatcaagcacgaaagactgaag

SEQ ID NO: 3341123 - DNA, 25 bp, Homo sapien
cacgaaagactgaagaagatagagg

SEQ ID NO: 3341124 - DNA, 25 bp, Homo sapien
cacctccccatttgaccacagtgtt

SEQ ID NO: 3341125 - DNA, 25 bp, Homo sapien
ttttctggcttgtcctgaatgtccc

SEQ ID NO: 3341126 - DNA, 25 bp, Homo sapien
tcaggcccctcgttggcaaaatggg

SEQ ID NO: 3341127 - DNA, 25 bp, Homo sapien
gggcagttccatccactcccagctt

SEQ ID NO: 3341128 - DNA, 25 bp, Homo sapien
ctgcagcagcaggctgccttcctca

SEQ ID NO: 3341129 - DNA, 25 bp, Homo sapien
tgcagcagcaggctgccttcctcac

SEQ ID NO: 3341130 - DNA, 25 bp, Homo sapien
atggctctcttggatacaaggacat

SEQ ID NO: 3341131 - DNA, 25 bp, Homo sapien
tggatacaaggacattctctatttc

SEQ ID NO: 3341132 - DNA, 25 bp, Homo sapien
tcttggatacaaggacattctctat

SEQ ID NO: 3341133 - DNA, 25 bp, Homo sapien
tggctctcttggatacaaggacatt

SEQ ID NO: 3341134 - DNA, 25 bp, Homo sapien
gaagaaagcagcataacaccgctaa

SEQ ID NO: 3341135 - DNA, 25 bp, Homo sapien
ttacagacatagaagcaagtagcct

SEQ ID NO: 3341136 - DNA, 25 bp, Homo sapien
tacttagagccttcttagtcatggc

SEQ ID NO: 3341137 - DNA, 25 bp, Homo sapien
tgtggctttgaatctcgatctctcg

SEQ ID NO: 3341138 - DNA, 25 bp, Homo sapien
cttgcccctcttggagcagggaagc

SEQ ID NO: 3341139 - DNA, 25 bp, Homo sapien
gcccctcttggagcagggaagccat

SEQ ID NO: 3341140 - DNA, 25 bp, Homo sapien
ttgcccctcttggagcagggaagcc

SEQ ID NO: 3341141 - DNA, 25 bp, Homo sapien
tgcccctcttggagcagggaagcca

SEQ ID NO: 3341142 - DNA, 25 bp, Homo sapien
ttcctttggtcagcagtgtgtatgt

SEQ ID NO: 3341143 - DNA, 25 bp, Homo sapien
gatccttcacttaggaaccaaggag

SEQ ID NO: 3341144 - DNA, 25 bp, Homo sapien
gctgatccttcacttaggaaccaag

SEQ ID NO: 3341145 - DNA, 25 bp, Homo sapien
cagtgtgtatgtggttgctgatcct

SEQ ID NO: 3341146 - DNA, 25 bp, Homo sapien
tggtcagttggtagaacctctgcca

SEQ ID NO: 3341147 - DNA, 25 bp, Homo sapien
gtcatgcatggagtccagcagcttg

SEQ ID NO: 3341148 - DNA, 25 bp, Homo sapien
tcagttggtagaacctctgccagct

SEQ ID NO: 3341149 - DNA, 25 bp, Homo sapien
tgcatggagtccagcagcttggtca

SEQ ID NO: 3341150 - DNA, 25 bp, Homo sapien
tgcccagaattgttgggacacttag

SEQ ID NO: 3341151 - DNA, 25 bp, Homo sapien
gacacttagttaccatcttcctcag

SEQ ID NO: 3341152 - DNA, 25 bp, Homo sapien
gttgggacacttagttaccatcttc

SEQ ID NO: 3341153 - DNA, 25 bp, Homo sapien
ctgcccagaattgttgggacactta

SEQ ID NO: 3341154 - DNA, 25 bp, Homo sapien
agacatgtaaatttccaggatggaa

SEQ ID NO: 3341155 - DNA, 25 bp, Homo sapien
cagacatgtaaatttccaggatgga

SEQ ID NO: 3341156 - DNA, 25 bp, Homo sapien
cagcagagctgctggaaatcatcca

SEQ ID NO: 3341157 - DNA, 25 bp, Homo sapien
gcagagctgctggaaatcatccaaa

SEQ ID NO: 3341158 - DNA, 25 bp, Homo sapien
agagctgctggaaatcatccaaaat

SEQ ID NO: 3341159 - DNA, 25 bp, Homo sapien
ttaaatgcagcagagctgctggaaa

SEQ ID NO: 3341160 - DNA, 25 bp, Homo sapien
tctgctatggagtctgcgattttgc

SEQ ID NO: 3341161 - DNA, 25 bp, Homo sapien
tgctatggagtctgcgattttgcct

SEQ ID NO: 3341162 - DNA, 25 bp, Homo sapien
caggactgccggtttgccccctctg

SEQ ID NO: 3341163 - DNA, 25 bp, Homo sapien
tatggagtctgcgattttgcctttt

SEQ ID NO: 3341164 - DNA, 25 bp, Homo sapien
tgtgtgccacctgccattgcctgcc

SEQ ID NO: 3341165 - DNA, 25 bp, Homo sapien
cctgccattgcctgcctttcagcct

SEQ ID NO: 3341166 - DNA, 25 bp, Homo sapien
gcctttcagcctcttggtgactgct

SEQ ID NO: 3341167 - DNA, 25 bp, Homo sapien
tgtgccacctgccattgcctgcctt

SEQ ID NO: 3341168 - DNA, 25 bp, Homo sapien
tgggtctcgccctcatctgatggga

SEQ ID NO: 3341169 - DNA, 25 bp, Homo sapien
cctctgttggaaaatgcctgtgctg

SEQ ID NO: 3341170 - DNA, 25 bp, Homo sapien
tttgcaagtccctggcatgctggca

SEQ ID NO: 3341171 - DNA, 25 bp, Homo sapien
tcagtggccatttcatacggctcag

SEQ ID NO: 3341172 - DNA, 25 bp, Homo sapien
ctcgtggcttccaataccgtacact

SEQ ID NO: 3341173 - DNA, 25 bp, Homo sapien
gtggcttccaataccgtacactctc

SEQ ID NO: 3341174 - DNA, 25 bp, Homo sapien
caataccgtacactctcccagtttc

SEQ ID NO: 3341175 - DNA, 25 bp, Homo sapien
ttccaataccgtacactctcccagt

SEQ ID NO: 3341176 - DNA, 25 bp, Homo sapien
ttcaaaggtgagctgcagtcgaacg

SEQ ID NO: 3341177 - DNA, 25 bp, Homo sapien
ttgtgcttagtagcagcaaaacttt

SEQ ID NO: 3341178 - DNA, 25 bp, Homo sapien
gtcgaacgaactgaaggctgatttg

SEQ ID NO: 3341179 - DNA, 25 bp, Homo sapien
gctgatttggtgcatcccctggcat

SEQ ID NO: 3341180 - DNA, 25 bp, Homo sapien
gctttgtacaaagaactggagggtg

SEQ ID NO: 3341181 - DNA, 25 bp, Homo sapien
ctttgtacaaagaactggagggtgg

SEQ ID NO: 3341182 - DNA, 25 bp, Homo sapien
tttgtacaaagaactggagggtggc

SEQ ID NO: 3341183 - DNA, 25 bp, Homo sapien
ttgtacaaagaactggagggtggca

SEQ ID NO: 3341184 - DNA, 25 bp, Homo sapien
gagacactcagagaatccacagagg

SEQ ID NO: 3341185 - DNA, 25 bp, Homo sapien
tagtgcttcagacgcaagatggtgt

SEQ ID NO: 3341186 - DNA, 25 bp, Homo sapien
cacagaggcatgtgaagtgccacta

SEQ ID NO: 3341187 - DNA, 25 bp, Homo sapien
tggagctgccctcacacaactagtg

SEQ ID NO: 3341188 - DNA, 25 bp, Homo sapien
ttttatgaaggctaattaataggta

SEQ ID NO: 3341189 - DNA, 25 bp, Homo sapien
tttatgaaggctaattaataggtac

SEQ ID NO: 3341190 - DNA, 25 bp, Homo sapien
actctgcagtttattttatgaaggc

SEQ ID NO: 3341191 - DNA, 25 bp, Homo sapien
taacgcataactctgcagtttattt

SEQ ID NO: 3341192 - DNA, 25 bp, Homo sapien
gcaaatgatgatagacacatccaag

SEQ ID NO: 3341193 - DNA, 25 bp, Homo sapien
aaattggctgttcgtatgtttgtac

SEQ ID NO: 3341194 - DNA, 25 bp, Homo sapien
gactaggtctggtgcaaaatagaga

SEQ ID NO: 3341195 - DNA, 25 bp, Homo sapien
tacgatctccagctcaaggcaaatg

SEQ ID NO: 3341196 - DNA, 25 bp, Homo sapien
tcaggttcaatgttttcaaggacca

SEQ ID NO: 3341197 - DNA, 25 bp, Homo sapien
cgtggagagcagattttcggctgta

SEQ ID NO: 3341198 - DNA, 25 bp, Homo sapien
cacttcacgacttggatcatctgtt

SEQ ID NO: 3341199 - DNA, 25 bp, Homo sapien
ctggttttgagctgtcatagcctgc

SEQ ID NO: 3341200 - DNA, 25 bp, Homo sapien
tgtgagcgctcgtgagattgtggag

SEQ ID NO: 3341201 - DNA, 25 bp, Homo sapien
tcgtgagattgtggagagctgagga

SEQ ID NO: 3341202 - DNA, 25 bp, Homo sapien
gctgaggaaccagtgctgtgttgac

SEQ ID NO: 3341203 - DNA, 25 bp, Homo sapien
accagtgctgtgttgaccgagggtt

SEQ ID NO: 3341204 - DNA, 25 bp, Homo sapien
ttttgcaggagcgatgtacgttgtc

SEQ ID NO: 3341205 - DNA, 25 bp, Homo sapien
tgcaggagcgatgtacgttgtccct

SEQ ID NO: 3341206 - DNA, 25 bp, Homo sapien
cgatgtacgttgtcccttcctctgg

SEQ ID NO: 3341207 - DNA, 25 bp, Homo sapien
gagcgatgtacgttgtcccttcctc

SEQ ID NO: 3341208 - DNA, 25 bp, Homo sapien
gctgtggctgctcctcgtgaatccc

SEQ ID NO: 3341209 - DNA, 25 bp, Homo sapien
cttttgacaagccactgttgtggcc

SEQ ID NO: 3341210 - DNA, 25 bp, Homo sapien
cgaatgatggctgactaggactttc

SEQ ID NO: 3341211 - DNA, 25 bp, Homo sapien
ctttcaccacgtaaagattctttag

SEQ ID NO: 3341212 - DNA, 25 bp, Homo sapien
ctgttgtggccgaatgatggctgac

SEQ ID NO: 3341213 - DNA, 25 bp, Homo sapien
cagaaatacgtttccaaaatatgca

SEQ ID NO: 3341214 - DNA, 25 bp, Homo sapien
atatgtgtggtaaaagataatttca

SEQ ID NO: 3341215 - DNA, 25 bp, Homo sapien
aatatgcacaaagggcagactgtga

SEQ ID NO: 3341216 - DNA, 25 bp, Homo sapien
aaccaaacacctaacgtcctctgtg

SEQ ID NO: 3341217 - DNA, 25 bp, Homo sapien
ggcatgtacacggagactcaccatt

SEQ ID NO: 3341218 - DNA, 25 bp, Homo sapien
tgagagccttctagacccagaaagg

SEQ ID NO: 3341219 - DNA, 25 bp, Homo sapien
ccagaactgttatgtaggagggact

SEQ ID NO: 3341220 - DNA, 25 bp, Homo sapien
cagtggcctgttagcggtgtcagca

SEQ ID NO: 3341221 - DNA, 25 bp, Homo sapien
cccaagcgtcgacttcctgctgaca

SEQ ID NO: 3341222 - DNA, 25 bp, Homo sapien
gctactggtccccaagcgtcgactt

SEQ ID NO: 3341223 - DNA, 25 bp, Homo sapien
tgtgttgctgctactggtccccaag

SEQ ID NO: 3341224 - DNA, 25 bp, Homo sapien
ttcagctgtgttgctgctactggtc

SEQ ID NO: 3341225 - DNA, 25 bp, Homo sapien
ccactgtgtaaaggttgatctctga

SEQ ID NO: 3341226 - DNA, 25 bp, Homo sapien
gagatttattagcacagcgggggaa

SEQ ID NO: 3341227 - DNA, 25 bp, Homo sapien
gaggtgatgagttgattacagagat

SEQ ID NO: 3341228 - DNA, 25 bp, Homo sapien
tgatctctgaggagtacacttaacc

SEQ ID NO: 3341229 - DNA, 25 bp, Homo sapien
gaaattataactgaggtggtctgca

SEQ ID NO: 3341230 - DNA, 25 bp, Homo sapien
tgcaagcatcagtagatagcacagg

SEQ ID NO: 3341231 - DNA, 25 bp, Homo sapien
ggagcatctgggatgaacccaccaa

SEQ ID NO: 3341232 - DNA, 25 bp, Homo sapien
acccaccaatgtagtgagggacaca

SEQ ID NO: 3341233 - DNA, 25 bp, Homo sapien
taagcagcaaatgaagtgctcagca

SEQ ID NO: 3341234 - DNA, 25 bp, Homo sapien
tctctgtcaaactgtaaatcatcat

SEQ ID NO: 3341235 - DNA, 25 bp, Homo sapien
cggcttttaagaacctctctgtcaa

SEQ ID NO: 3341236 - DNA, 25 bp, Homo sapien
tcatgacctaaatcagaaactgcct

SEQ ID NO: 3341237 - DNA, 25 bp, Homo sapien
tgtggatgtattctaatataagtgt

SEQ ID NO: 3341238 - DNA, 25 bp, Homo sapien
ttaatattgcattatgtggatgtat

SEQ ID NO: 3341239 - DNA, 25 bp, Homo sapien
tattctaatataagtgttttcccca

SEQ ID NO: 3341240 - DNA, 25 bp, Homo sapien
tgcattatgtggatgtattctaata

SEQ ID NO: 3341241 - DNA, 25 bp, Homo sapien
agagcatctgttttagtgaatgatt

SEQ ID NO: 3341242 - DNA, 25 bp, Homo sapien
catctgttttagtgaatgattccca

SEQ ID NO: 3341243 - DNA, 25 bp, Homo sapien
cattgttatcagtaatgtacaagag

SEQ ID NO: 3341244 - DNA, 25 bp, Homo sapien
ttgttatcagtaatgtacaagagca

SEQ ID NO: 3341245 - DNA, 25 bp, Homo sapien
tcctgtgtcttagatccttctcgct

SEQ ID NO: 3341246 - DNA, 25 bp, Homo sapien
cgcttttcctgtgacgtgtcccact

SEQ ID NO: 3341247 - DNA, 25 bp, Homo sapien
tagttgccttctctccaaccctcaa

SEQ ID NO: 3341248 - DNA, 25 bp, Homo sapien
cttctcgcttttcctgtgacgtgtc

SEQ ID NO: 3341249 - DNA, 25 bp, Homo sapien
tgccaaacctcacttatagataact

SEQ ID NO: 3341250 - DNA, 25 bp, Homo sapien
cgtgccaaacctcacttatagataa

SEQ ID NO: 3341251 - DNA, 25 bp, Homo sapien
cttatagataactgcagatgccagc

SEQ ID NO: 3341252 - DNA, 25 bp, Homo sapien
gataactgcagatgccagctaaaca

SEQ ID NO: 3341253 - DNA, 25 bp, Homo sapien
tccatactctcatcaaacagtgtca

SEQ ID NO: 3341254 - DNA, 25 bp, Homo sapien
tgaattctcaggtctctcatataaa

SEQ ID NO: 3341255 - DNA, 25 bp, Homo sapien
aggaaaacttatcccctgctctgag

SEQ ID NO: 3341256 - DNA, 25 bp, Homo sapien
tattctcccacctgaaatgcaggag

SEQ ID NO: 3341257 - DNA, 25 bp, Homo sapien
tcttccagatttaagccaggaggat

SEQ ID NO: 3341258 - DNA, 25 bp, Homo sapien
tattagggtgatgaattagggaggg

SEQ ID NO: 3341259 - DNA, 25 bp, Homo sapien
ccatttcagtctttttagttaccat

SEQ ID NO: 3341260 - DNA, 25 bp, Homo sapien
gtgcatcggcgatatcagtctgtag

SEQ ID NO: 3341261 - DNA, 25 bp, Homo sapien
tgaagtctcctgcaagaccggggaa

SEQ ID NO: 3341262 - DNA, 25 bp, Homo sapien
tttagtgatagcttggtggtggcaa

SEQ ID NO: 3341263 - DNA, 25 bp, Homo sapien
tagcagttcttttagtgatagcttg

SEQ ID NO: 3341264 - DNA, 25 bp, Homo sapien
ttcttttagtgatagcttggtggtg

SEQ ID NO: 3341265 - DNA, 25 bp, Homo sapien
tccagcttgaagacatttctgaagt

SEQ ID NO: 3341266 - DNA, 25 bp, Homo sapien
gcaggacaattctttcgtcgaatct

SEQ ID NO: 3341267 - DNA, 25 bp, Homo sapien
caagcaggacaattctttcgtcgaa

SEQ ID NO: 3341268 - DNA, 25 bp, Homo sapien
ctgcaagcaggacaattctttcgtc

SEQ ID NO: 3341269 - DNA, 25 bp, Homo sapien
ttctttcgtcgaatcttatcaatga

SEQ ID NO: 3341270 - DNA, 25 bp, Homo sapien
caggatgattttctcccgaaaacaa

SEQ ID NO: 3341271 - DNA, 25 bp, Homo sapien
caatatttcatcttccacatatagg

SEQ ID NO: 3341272 - DNA, 25 bp, Homo sapien
tgttactgtaacaacccaggatgat

SEQ ID NO: 3341273 - DNA, 25 bp, Homo sapien
ccacatataggataggagagttgta

SEQ ID NO: 3341274 - DNA, 25 bp, Homo sapien
catccgtgtactcgagttcagtgta

SEQ ID NO: 3341275 - DNA, 25 bp, Homo sapien
atccgtgtactcgagttcagtgtac

SEQ ID NO: 3341276 - DNA, 25 bp, Homo sapien
ctcctgcttgaggttggggcagctt

SEQ ID NO: 3341277 - DNA, 25 bp, Homo sapien
tcctgcttgaggttggggcagcttt

SEQ ID NO: 3341278 - DNA, 25 bp, Homo sapien
cctgcttgaggttggggcagctttt

SEQ ID NO: 3341279 - DNA, 25 bp, Homo sapien
gcagaagcaaaggtgagcctgggag

SEQ ID NO: 3341280 - DNA, 25 bp, Homo sapien
agaagcaaaggtgagcctgggagac

SEQ ID NO: 3341281 - DNA, 25 bp, Homo sapien
gggcagaagcaaaggtgagcctggg

SEQ ID NO: 3341282 - DNA, 25 bp, Homo sapien
cagaagcaaaggtgagcctgggaga

SEQ ID NO: 3341283 - DNA, 25 bp, Homo sapien
ctccataggaaactgcggcctctat

SEQ ID NO: 3341284 - DNA, 25 bp, Homo sapien
cgtcagtggtgtagggggcactcca

SEQ ID NO: 3341285 - DNA, 25 bp, Homo sapien
gaaactgcggcctctatggcaggca

SEQ ID NO: 3341286 - DNA, 25 bp, Homo sapien
ctctatggcaggcacttagggccct

SEQ ID NO: 3341287 - DNA, 25 bp, Homo sapien
tcaggaggagtgacttacatttctc

SEQ ID NO: 3341288 - DNA, 25 bp, Homo sapien
gaaacacttattatggtgcgcagta

SEQ ID NO: 3341289 - DNA, 25 bp, Homo sapien
ctaatacgttattcagggcagtgga

SEQ ID NO: 3341290 - DNA, 25 bp, Homo sapien
gctagcttagctgggattcatactt

SEQ ID NO: 3341291 - DNA, 25 bp, Homo sapien
tctgtaaatcactaacttgctgggt

SEQ ID NO: 3341292 - DNA, 25 bp, Homo sapien
agattaatctctattgccctgtgtg

SEQ ID NO: 3341293 - DNA, 25 bp, Homo sapien
tgaggaacctgtcctatattgctgg

SEQ ID NO: 3341294 - DNA, 25 bp, Homo sapien
cctgaaaagaggaatggttgacgaa

SEQ ID NO: 3341295 - DNA, 25 bp, Homo sapien
aaaggctatggtctttcacatgtac

SEQ ID NO: 3341296 - DNA, 25 bp, Homo sapien
gaattgaatacgtttatcccatatg

SEQ ID NO: 3341297 - DNA, 25 bp, Homo sapien
taaagacaatcataccagcaaaccc

SEQ ID NO: 3341298 - DNA, 25 bp, Homo sapien
tctaaggaatgtcaaacaaaaggtg

SEQ ID NO: 3341299 - DNA, 25 bp, Homo sapien
aatcttcttcaatggggcatgcaac

SEQ ID NO: 3341300 - DNA, 25 bp, Homo sapien
aatggggcatgcaacgttctcagaa

SEQ ID NO: 3341301 - DNA, 25 bp, Homo sapien
tcttcaatggggcatgcaacgttct

SEQ ID NO: 3341302 - DNA, 25 bp, Homo sapien
aaatcttcttcaatggggcatgcaa

SEQ ID NO: 3341303 - DNA, 25 bp, Homo sapien
tgactgctgggcaagctaacagaag

SEQ ID NO: 3341304 - DNA, 25 bp, Homo sapien
taacagaagctgatccgggctttcc

SEQ ID NO: 3341305 - DNA, 25 bp, Homo sapien
taaatgcccttgaggcgtttatcca

SEQ ID NO: 3341306 - DNA, 25 bp, Homo sapien
tgctgaggataaacagtatggagag

SEQ ID NO: 3341307 - DNA, 25 bp, Homo sapien
ctgtggataaacagtatggagaagg

SEQ ID NO: 3341308 - DNA, 25 bp, Homo sapien
atggagaaggtggaggtaattcatt

SEQ ID NO: 3341309 - DNA, 25 bp, Homo sapien
gagaaggtggaggtaattcattaaa

SEQ ID NO: 3341310 - DNA, 25 bp, Homo sapien
tgtggataaacagtatggagaaggt

SEQ ID NO: 3341311 - DNA, 25 bp, Homo sapien
atgccacacgtgaccaaggatatgc

SEQ ID NO: 3341312 - DNA, 25 bp, Homo sapien
gccacacgtgaccaaggatatgcat

SEQ ID NO: 3341313 - DNA, 25 bp, Homo sapien
ccacacgtgaccaaggatatgcatt

SEQ ID NO: 3341314 - DNA, 25 bp, Homo sapien
tgccacacgtgaccaaggatatgca

SEQ ID NO: 3341315 - DNA, 25 bp, Homo sapien
atgaagcttctgttgacctcccttg

SEQ ID NO: 3341316 - DNA, 25 bp, Homo sapien
tgttgacctcccttgccagacctaa

SEQ ID NO: 3341317 - DNA, 25 bp, Homo sapien
catatgaagcttctgttgacctccc

SEQ ID NO: 3341318 - DNA, 25 bp, Homo sapien
ctgttgacctcccttgccagaccta

SEQ ID NO: 3341319 - DNA, 25 bp, Homo sapien
tcccatattcacctagtggttttat

SEQ ID NO: 3341320 - DNA, 25 bp, Homo sapien
atcccatattcacctagtggtttta

SEQ ID NO: 3341321 - DNA, 25 bp, Homo sapien
aatcccatattcacctagtggtttt

SEQ ID NO: 3341322 - DNA, 25 bp, Homo sapien
ccatattcacctagtggttttattg

SEQ ID NO: 3341323 - DNA, 25 bp, Homo sapien
tttcatttaagctttcatgctcagt

SEQ ID NO: 3341324 - DNA, 25 bp, Homo sapien
ttcatttaagctttcatgctcagtt

SEQ ID NO: 3341325 - DNA, 25 bp, Homo sapien
taatgatgatatttcacaacgaacc

SEQ ID NO: 3341326 - DNA, 25 bp, Homo sapien
tgcatgtaaggacctagattctagg

SEQ ID NO: 3341327 - DNA, 25 bp, Homo sapien
gggataaaattctctaatgcatgta

SEQ ID NO: 3341328 - DNA, 25 bp, Homo sapien
tcaattcggcctttttgctataacc

SEQ ID NO: 3341329 - DNA, 25 bp, Homo sapien
ggtgaatagtagtgatagaatttcc

SEQ ID NO: 3341330 - DNA, 25 bp, Homo sapien
tactggttctgacagtttattccat

SEQ ID NO: 3341331 - DNA, 25 bp, Homo sapien
aatacatggtatgaagctaaaatgg

SEQ ID NO: 3341332 - DNA, 25 bp, Homo sapien
ctcagaaacgagaaatatatatgct

SEQ ID NO: 3341333 - DNA, 25 bp, Homo sapien
aatagggaccattggaggcttctgc

SEQ ID NO: 3341334 - DNA, 25 bp, Homo sapien
gccagaattaaatagggaccattgg

SEQ ID NO: 3341335 - DNA, 25 bp, Homo sapien
ttgaagagtatctgcccctctgcct

SEQ ID NO: 3341336 - DNA, 25 bp, Homo sapien
gacagtaatgccagaattaaatagg

SEQ ID NO: 3341337 - DNA, 25 bp, Homo sapien
aactataaaggatgaaaatcattcc

SEQ ID NO: 3341338 - DNA, 25 bp, Homo sapien
gatttcctgttaggatgaggtgcca

SEQ ID NO: 3341339 - DNA, 25 bp, Homo sapien
gcctttgtaatctttctcactgcct

SEQ ID NO: 3341340 - DNA, 25 bp, Homo sapien
tgaggtgccatacttctctggaact

SEQ ID NO: 3341341 - DNA, 25 bp, Homo sapien
tcaggcaatcctctcctgttggcct

SEQ ID NO: 3341342 - DNA, 25 bp, Homo sapien
ctaggattatgggtgtgtgctacca

SEQ ID NO: 3341343 - DNA, 25 bp, Homo sapien
aggcaatcctctcctgttggcctcc

SEQ ID NO: 3341344 - DNA, 25 bp, Homo sapien
gccttgaacctcttggctcaagaaa

SEQ ID NO: 3341345 - DNA, 25 bp, Homo sapien
tatagagcatttggcacccatgaaa

SEQ ID NO: 3341346 - DNA, 25 bp, Homo sapien
tagagcatttggcacccatgaaaag

SEQ ID NO: 3341347 - DNA, 25 bp, Homo sapien
tagtatagagcatttggcacccatg

SEQ ID NO: 3341348 - DNA, 25 bp, Homo sapien
catagtatagagcatttggcaccca

SEQ ID NO: 3341349 - DNA, 25 bp, Homo sapien
tcaaatagggccaacctgagggcaa

SEQ ID NO: 3341350 - DNA, 25 bp, Homo sapien
tcgaatgtcggtgatttaatgaagc

SEQ ID NO: 3341351 - DNA, 25 bp, Homo sapien
cacacaggaaggtgacgcttttgta

SEQ ID NO: 3341352 - DNA, 25 bp, Homo sapien
tgttaattagcaagacagcacacac

SEQ ID NO: 3341353 - DNA, 25 bp, Homo sapien
tgtacaagtaaactacacactagga

SEQ ID NO: 3341354 - DNA, 25 bp, Homo sapien
tctgtgtgtgcctagtaaaacttct

SEQ ID NO: 3341355 - DNA, 25 bp, Homo sapien
tttatacagaaacccagaaaaggca

SEQ ID NO: 3341356 - DNA, 25 bp, Homo sapien
tccaggtggtttttatacaaggcac

SEQ ID NO: 3341357 - DNA, 25 bp, Homo sapien
ctgccacaggtgactaccccataat

SEQ ID NO: 3341358 - DNA, 25 bp, Homo sapien
tgactaccccataatggcatcctga

SEQ ID NO: 3341359 - DNA, 25 bp, Homo sapien
atttttgaaggtcttgaagatccag

SEQ ID NO: 3341360 - DNA, 25 bp, Homo sapien
gatccagtagaaacacttcgtaaag

SEQ ID NO: 3341361 - DNA, 25 bp, Homo sapien
actatggtaagcactatggtgcagg

SEQ ID NO: 3341362 - DNA, 25 bp, Homo sapien
gctatggtgcgctatggtcagtgta

SEQ ID NO: 3341363 - DNA, 25 bp, Homo sapien
aaaacacttcccgaaatgtgacagc

SEQ ID NO: 3341364 - DNA, 25 bp, Homo sapien
gctaacctgagttttgaagcatgac

SEQ ID NO: 3341365 - DNA, 25 bp, Homo sapien
cagggagtccgtgcttgggctaaaa

SEQ ID NO: 3341366 - DNA, 25 bp, Homo sapien
ggtggaccccaatctaataggactg

SEQ ID NO: 3341367 - DNA, 25 bp, Homo sapien
ggaaattggaacatagacacctgca

SEQ ID NO: 3341368 - DNA, 25 bp, Homo sapien
aaaagcatggacttgtctctgaccc

SEQ ID NO: 3341369 - DNA, 25 bp, Homo sapien
gatataagcacccacacagaagaag

SEQ ID NO: 3341370 - DNA, 25 bp, Homo sapien
agtacaagcactatctccatgggca

SEQ ID NO: 3341371 - DNA, 25 bp, Homo sapien
tactcaaggccttctagacaccaag

SEQ ID NO: 3341372 - DNA, 25 bp, Homo sapien
tccatgggcaaaaggagctaggttc

SEQ ID NO: 3341373 - DNA, 25 bp, Homo sapien
tccaaagcgtcatggaatcagagcc

SEQ ID NO: 3341374 - DNA, 25 bp, Homo sapien
ctcagggccttgtctgggtgtgcct

SEQ ID NO: 3341375 - DNA, 25 bp, Homo sapien
ggaggaagataagggaacctgctca

SEQ ID NO: 3341376 - DNA, 25 bp, Homo sapien
aggcctcgggatttaccccagcttg

SEQ ID NO: 3341377 - DNA, 25 bp, Homo sapien
gattttccagaagccgtcagtcacc

SEQ ID NO: 3341378 - DNA, 25 bp, Homo sapien
agaagccgtcagtcacccctttctt

SEQ ID NO: 3341379 - DNA, 25 bp, Homo sapien
cccgattttccagaagccgtcagtc

SEQ ID NO: 3341380 - DNA, 25 bp, Homo sapien
cagaagccgtcagtcacccctttct

SEQ ID NO: 3341381 - DNA, 25 bp, Homo sapien
gaaagactatacatccttaactgga

SEQ ID NO: 3341382 - DNA, 25 bp, Homo sapien
gcagctggtgagaccatcatctacc

SEQ ID NO: 3341383 - DNA, 25 bp, Homo sapien
caatcccaagcttttctaagcctta

SEQ ID NO: 3341384 - DNA, 25 bp, Homo sapien
tatatgctccatgattaaccagaga

SEQ ID NO: 3341385 - DNA, 25 bp, Homo sapien
gcagtgaactggagacatgagcccc

SEQ ID NO: 3341386 - DNA, 25 bp, Homo sapien
ccttggtcacggcacaaaggagcaa

SEQ ID NO: 3341387 - DNA, 25 bp, Homo sapien
gctgaatggcaacaaacccttggtc

SEQ ID NO: 3341388 - DNA, 25 bp, Homo sapien
ggaacagggtaagcccattgctgaa

SEQ ID NO: 3341389 - DNA, 25 bp, Homo sapien
ttgtactcagagaaagaaggactta

SEQ ID NO: 3341390 - DNA, 25 bp, Homo sapien
ttataaccttctgcagggtagcccc

SEQ ID NO: 3341391 - DNA, 25 bp, Homo sapien
tatgtctcttgtactataacctggg

SEQ ID NO: 3341392 - DNA, 25 bp, Homo sapien
tggactgacgactaagcaaaccttc

SEQ ID NO: 3341393 - DNA, 25 bp, Homo sapien
gcttcagcagaacctgtcatagctc

SEQ ID NO: 3341394 - DNA, 25 bp, Homo sapien
tcagcagaacctgtcatagctctac

SEQ ID NO: 3341395 - DNA, 25 bp, Homo sapien
gaacctgtcatagctctaccaagca

SEQ ID NO: 3341396 - DNA, 25 bp, Homo sapien
taccaagcataccaaggtaccccat

SEQ ID NO: 3341397 - DNA, 25 bp, Homo sapien
gacatcctattatccttattctaga

SEQ ID NO: 3341398 - DNA, 25 bp, Homo sapien
tcagttaataggatatatctgtgaa

SEQ ID NO: 3341399 - DNA, 25 bp, Homo sapien
tttaaactcagttaataggatatat

SEQ ID NO: 3341400 - DNA, 25 bp, Homo sapien
gaaacagacatcctattatccttat

SEQ ID NO: 3341401 - DNA, 25 bp, Homo sapien
tccacggcacttgcactcactgagg

SEQ ID NO: 3341402 - DNA, 25 bp, Homo sapien
taaagcagtgattcggaactctctc

SEQ ID NO: 3341403 - DNA, 25 bp, Homo sapien
cactataggaaaccaagtgtctctg

SEQ ID NO: 3341404 - DNA, 25 bp, Homo sapien
gaactctctcttagggcatttgcac

SEQ ID NO: 3341405 - DNA, 25 bp, Homo sapien
aatttatttgtaatatttgcctctg

SEQ ID NO: 3341406 - DNA, 25 bp, Homo sapien
tttatttgtaatatttgcctctgag

SEQ ID NO: 3341407 - DNA, 25 bp, Homo sapien
tatttgtaatatttgcctctgagaa

SEQ ID NO: 3341408 - DNA, 25 bp, Homo sapien
acaatttatttgtaatatttgcctc

SEQ ID NO: 3341409 - DNA, 25 bp, Homo sapien
taatagatgttacaacaaatggccc

SEQ ID NO: 3341410 - DNA, 25 bp, Homo sapien
aaagaatctagaagcaggcaaaaac

SEQ ID NO: 3341411 - DNA, 25 bp, Homo sapien
tgttacaacaaatggccccataact

SEQ ID NO: 3341412 - DNA, 25 bp, Homo sapien
gccccataactttaaagaatctaga

SEQ ID NO: 3341413 - DNA, 25 bp, Homo sapien
catctacacactctttaaccctcat

SEQ ID NO: 3341414 - DNA, 25 bp, Homo sapien
ctgccaacatctacacactctttaa

SEQ ID NO: 3341415 - DNA, 25 bp, Homo sapien
caacatctacacactctttaaccct

SEQ ID NO: 3341416 - DNA, 25 bp, Homo sapien
tgccaacatctacacactctttaac

SEQ ID NO: 3341417 - DNA, 25 bp, Homo sapien
caatggtcctcttcctgctacgtag

SEQ ID NO: 3341418 - DNA, 25 bp, Homo sapien
ggaagggcccacgaatcttctgaag

SEQ ID NO: 3341419 - DNA, 25 bp, Homo sapien
caagtatgtatagcgtcctggtgag

SEQ ID NO: 3341420 - DNA, 25 bp, Homo sapien
ttgcatcgagaatggcacaggccct

SEQ ID NO: 3341421 - DNA, 25 bp, Homo sapien
cagatcaatcagaatctgtcgagaa

SEQ ID NO: 3341422 - DNA, 25 bp, Homo sapien
cccaagccagatcaatcagaatctg

SEQ ID NO: 3341423 - DNA, 25 bp, Homo sapien
tgagcacacaagcaacacccctact

SEQ ID NO: 3341424 - DNA, 25 bp, Homo sapien
gaatctgtcgagaaaggttattcct

SEQ ID NO: 3341425 - DNA, 25 bp, Homo sapien
aatgtacaagtaacaggccagatga

SEQ ID NO: 3341426 - DNA, 25 bp, Homo sapien
ctcaggaggcttacatgctaactag

SEQ ID NO: 3341427 - DNA, 25 bp, Homo sapien
cctggcactgtttcaggtatggaaa

SEQ ID NO: 3341428 - DNA, 25 bp, Homo sapien
tttactgaacatgaacaacagacct

SEQ ID NO: 3341429 - DNA, 25 bp, Homo sapien
tttgcagggctagacacagaggatc

SEQ ID NO: 3341430 - DNA, 25 bp, Homo sapien
tgatagggcttttaacaacggcgcg

SEQ ID NO: 3341431 - DNA, 25 bp, Homo sapien
tgtactggacaatattaagctggcc

SEQ ID NO: 3341432 - DNA, 25 bp, Homo sapien
ttcagagggctgcaaacagacgggc

SEQ ID NO: 3341433 - DNA, 25 bp, Homo sapien
gcctccggattacgcagccacttct

SEQ ID NO: 3341434 - DNA, 25 bp, Homo sapien
tccggattacgcagccacttctccc

SEQ ID NO: 3341435 - DNA, 25 bp, Homo sapien
gtgcctccggattacgcagccactt

SEQ ID NO: 3341436 - DNA, 25 bp, Homo sapien
gcaaagtgcacgctcccgcgccgcg

SEQ ID NO: 3341437 - DNA, 25 bp, Homo sapien
ccgagcacggcaagcggtgccccgc

SEQ ID NO: 3341438 - DNA, 25 bp, Homo sapien
gccgagcacggcaagcggtgccccg

SEQ ID NO: 3341439 - DNA, 25 bp, Homo sapien
accgccacgaaacccctgctgcgga

SEQ ID NO: 3341440 - DNA, 25 bp, Homo sapien
gtctacctgttgcagcgcttgccac

SEQ ID NO: 3341441 - DNA, 25 bp, Homo sapien
gggtccgtctctcgccgtctacctg

SEQ ID NO: 3341442 - DNA, 25 bp, Homo sapien
atccaggccagcgagtgccgctctc

SEQ ID NO: 3341443 - DNA, 25 bp, Homo sapien
ctctgagcagcctgaagttggctcc

SEQ ID NO: 3341444 - DNA, 25 bp, Homo sapien
gaggcagcaacgctcttgcacccag

SEQ ID NO: 3341445 - DNA, 25 bp, Homo sapien
aggtgactgactgcacgggcttcct

SEQ ID NO: 3341446 - DNA, 25 bp, Homo sapien
gagagcccgaggcagcaacgctctt

SEQ ID NO: 3341447 - DNA, 25 bp, Homo sapien
cagccctccaaagtccggccctgac

SEQ ID NO: 3341448 - DNA, 25 bp, Homo sapien
caaagtccggccctgacctcgcgcc

SEQ ID NO: 3341449 - DNA, 25 bp, Homo sapien
ctccaaagtccggccctgacctcgc

SEQ ID NO: 3341450 - DNA, 25 bp, Homo sapien
gcagccctccaaagtccggccctga

SEQ ID NO: 3341451 - DNA, 25 bp, Homo sapien
agtaaggtaaactctgaactcacag

SEQ ID NO: 3341452 - DNA, 25 bp, Homo sapien
cataataattggttcataacagctg

SEQ ID NO: 3341453 - DNA, 25 bp, Homo sapien
tcaagctgcccctctgtatagaaag

SEQ ID NO: 3341454 - DNA, 25 bp, Homo sapien
cctagactcagagctgtttgaaaac

SEQ ID NO: 3341455 - DNA, 25 bp, Homo sapien
cctgctcgtcttggttcatcctgtg

SEQ ID NO: 3341456 - DNA, 25 bp, Homo sapien
agggacatctgaccttgaataacat

SEQ ID NO: 3341457 - DNA, 25 bp, Homo sapien
gacatctgaccttgaataacatcag

SEQ ID NO: 3341458 - DNA, 25 bp, Homo sapien
atcagcacctgctcgtcttggttca

SEQ ID NO: 3341459 - DNA, 25 bp, Homo sapien
gaagtgcagctgctgattgacaaga

SEQ ID NO: 3341460 - DNA, 25 bp, Homo sapien
tagggtatggagagttgccactggg

SEQ ID NO: 3341461 - DNA, 25 bp, Homo sapien
aagtgcagctgctgattgacaagac

SEQ ID NO: 3341462 - DNA, 25 bp, Homo sapien
ggttttcaattcttcccagaagtgc

SEQ ID NO: 3341463 - DNA, 25 bp, Homo sapien
gatgaaactgaggttcgttttgaca

SEQ ID NO: 3341464 - DNA, 25 bp, Homo sapien
gaaactgaggttcgttttgacactc

SEQ ID NO: 3341465 - DNA, 25 bp, Homo sapien
tgaaactgaggttcgttttgacact

SEQ ID NO: 3341466 - DNA, 25 bp, Homo sapien
gtgatgaaactgaggttcgttttga

SEQ ID NO: 3341467 - DNA, 25 bp, Homo sapien
gggtctcccaaatgttctcagccat

SEQ ID NO: 3341468 - DNA, 25 bp, Homo sapien
gaagccatcatgtgactcgtactag

SEQ ID NO: 3341469 - DNA, 25 bp, Homo sapien
actaggaaagtccacctgtgatgat

SEQ ID NO: 3341470 - DNA, 25 bp, Homo sapien
gaccagtgagggctaaacaccaggg

SEQ ID NO: 3341471 - DNA, 25 bp, Homo sapien
tagggctgttggtgggcaaactctt

SEQ ID NO: 3341472 - DNA, 25 bp, Homo sapien
tctgaggcctccagacgttctggtt

SEQ ID NO: 3341473 - DNA, 25 bp, Homo sapien
ctgaggcctccagacgttctggttt

SEQ ID NO: 3341474 - DNA, 25 bp, Homo sapien
ctgttggtgggcaaactcttctgtt

SEQ ID NO: 3341475 - DNA, 25 bp, Homo sapien
aacaattagtgcctgtacttggggg

SEQ ID NO: 3341476 - DNA, 25 bp, Homo sapien
atttctcacaacaattagtgcctgt

SEQ ID NO: 3341477 - DNA, 25 bp, Homo sapien
caattagtgcctgtacttgggggat

SEQ ID NO: 3341478 - DNA, 25 bp, Homo sapien
aaatttctcacaacaattagtgcct

SEQ ID NO: 3341479 - DNA, 25 bp, Homo sapien
aatcaccctgcatgttcatgctcac

SEQ ID NO: 3341480 - DNA, 25 bp, Homo sapien
aacccggtggaatcaattggctcat

SEQ ID NO: 3341481 - DNA, 25 bp, Homo sapien
ttgatgaacccggtggaatcaattg

SEQ ID NO: 3341482 - DNA, 25 bp, Homo sapien
agatgatattccttcagcttgaggg

SEQ ID NO: 3341483 - DNA, 25 bp, Homo sapien
cagctccttgttgtagagagacagt

SEQ ID NO: 3341484 - DNA, 25 bp, Homo sapien
ctccttgttgtagagagacagtggg

SEQ ID NO: 3341485 - DNA, 25 bp, Homo sapien
agctccttgttgtagagagacagtg

SEQ ID NO: 3341486 - DNA, 25 bp, Homo sapien
ccttgttgtagagagacagtgggga

SEQ ID NO: 3341487 - DNA, 25 bp, Homo sapien
cccttgaggacagacacctgtactt

SEQ ID NO: 3341488 - DNA, 25 bp, Homo sapien
gacttggcgatgcagtggtgggcaa

SEQ ID NO: 3341489 - DNA, 25 bp, Homo sapien
ctcccggctaaggatgtacacctgg

SEQ ID NO: 3341490 - DNA, 25 bp, Homo sapien
ttggcgatgcagtggtgggcaaatt

SEQ ID NO: 3341491 - DNA, 25 bp, Homo sapien
ggtgaagaccttgatatctaaatag

SEQ ID NO: 3341492 - DNA, 25 bp, Homo sapien
gtgacttgactcaggtacacgaaga

SEQ ID NO: 3341493 - DNA, 25 bp, Homo sapien
gcttgcccgtgacttgactcaggta

SEQ ID NO: 3341494 - DNA, 25 bp, Homo sapien
tatctaaataggtgtggtaaaggat

SEQ ID NO: 3341495 - DNA, 25 bp, Homo sapien
gttggttcttggtattttgatgggc

SEQ ID NO: 3341496 - DNA, 25 bp, Homo sapien
gcggttggttcttggtattttgatg

SEQ ID NO: 3341497 - DNA, 25 bp, Homo sapien
gttcttggtattttgatgggcttca

SEQ ID NO: 3341498 - DNA, 25 bp, Homo sapien
ggttcttggtattttgatgggcttc

SEQ ID NO: 3341499 - DNA, 25 bp, Homo sapien
tttctctgagagtaaagttatacag

SEQ ID NO: 3341500 - DNA, 25 bp, Homo sapien
ctctgagagtaaagttatacagact

SEQ ID NO: 3341501 - DNA, 25 bp, Homo sapien
ctaagaggagatattgtaggtgaaa

SEQ ID NO: 3341502 - DNA, 25 bp, Homo sapien
cttttctctgagagtaaagttatac

SEQ ID NO: 3341503 - DNA, 25 bp, Homo sapien
gaggcagtgtgtcatgccacagaca

SEQ ID NO: 3341504 - DNA, 25 bp, Homo sapien
cctctagctgatgtggtgtgctgat

SEQ ID NO: 3341505 - DNA, 25 bp, Homo sapien
ttttttggtgtcttgcctctagctg

SEQ ID NO: 3341506 - DNA, 25 bp, Homo sapien
gatgaatattggtgtttgaaaagca

SEQ ID NO: 3341507 - DNA, 25 bp, Homo sapien
cagttccacagcttctatcttaatc

SEQ ID NO: 3341508 - DNA, 25 bp, Homo sapien
tatcttaatcagactccatggctta

SEQ ID NO: 3341509 - DNA, 25 bp, Homo sapien
tctccaatccatctagagcaattgt

SEQ ID NO: 3341510 - DNA, 25 bp, Homo sapien
tatttatctgcttcacatcttcccc

SEQ ID NO: 3341511 - DNA, 25 bp, Homo sapien
ctttgaactagccatgttcttgttc

SEQ ID NO: 3341512 - DNA, 25 bp, Homo sapien
gaactagccatgttcttgttcatct

SEQ ID NO: 3341513 - DNA, 25 bp, Homo sapien
gattctttgaactagccatgttctt

SEQ ID NO: 3341514 - DNA, 25 bp, Homo sapien
ttgattctttgaactagccatgttc

SEQ ID NO: 3341515 - DNA, 25 bp, Homo sapien
tcacttgagtgctccctgcgttctt

SEQ ID NO: 3341516 - DNA, 25 bp, Homo sapien
tgagtgctccctgcgttcttcttct

SEQ ID NO: 3341517 - DNA, 25 bp, Homo sapien
tccctgcgttcttcttctgtatgga

SEQ ID NO: 3341518 - DNA, 25 bp, Homo sapien
tccagcccttttcacttgagtgctc

SEQ ID NO: 3341519 - DNA, 25 bp, Homo sapien
cgcatgctcgaaatgggatgctgtc

SEQ ID NO: 3341520 - DNA, 25 bp, Homo sapien
tgagtctgagacgtacaaatctggt

SEQ ID NO: 3341521 - DNA, 25 bp, Homo sapien
aggtcagaggcgcatgctcgaaatg

SEQ ID NO: 3341522 - DNA, 25 bp, Homo sapien
gacgtacaaatctggtccactccat

SEQ ID NO: 3341523 - DNA, 25 bp, Homo sapien
tccacgtggatgtgacaacattctt

SEQ ID NO: 3341524 - DNA, 25 bp, Homo sapien
ggatgtgacaacattctttaggaca

SEQ ID NO: 3341525 - DNA, 25 bp, Homo sapien
tggttccacgtggatgtgacaacat

SEQ ID NO: 3341526 - DNA, 25 bp, Homo sapien
tgacaacattctttaggacattggt

SEQ ID NO: 3341527 - DNA, 25 bp, Homo sapien
tcttgtataccaatccttctcagtt

SEQ ID NO: 3341528 - DNA, 25 bp, Homo sapien
cttgtataccaatccttctcagttt

SEQ ID NO: 3341529 - DNA, 25 bp, Homo sapien
caaatcaaagtagcctctgacccca

SEQ ID NO: 3341530 - DNA, 25 bp, Homo sapien
tgtttcccgatttcccacaaatcaa

SEQ ID NO: 3341531 - DNA, 25 bp, Homo sapien
cccgatttcccacaaatcaaagtag

SEQ ID NO: 3341532 - DNA, 25 bp, Homo sapien
ttcccacaaatcaaagtagcctctg

SEQ ID NO: 3341533 - DNA, 25 bp, Homo sapien
gattcttctacattcaggactcttc

SEQ ID NO: 3341534 - DNA, 25 bp, Homo sapien
attcttctacattcaggactcttca

SEQ ID NO: 3341535 - DNA, 25 bp, Homo sapien
ttcttctacattcaggactcttcat

SEQ ID NO: 3341536 - DNA, 25 bp, Homo sapien
tgagccaaggtacaaatggagtctg

SEQ ID NO: 3341537 - DNA, 25 bp, Homo sapien
gcagctttatgggatgccagatcct

SEQ ID NO: 3341538 - DNA, 25 bp, Homo sapien
ccaggtaatatagccagggtgacca

SEQ ID NO: 3341539 - DNA, 25 bp, Homo sapien
caccagcgacggctatgagccaagg

SEQ ID NO: 3341540 - DNA, 25 bp, Homo sapien
gacaatgtatagttgccctctgctt

SEQ ID NO: 3341541 - DNA, 25 bp, Homo sapien
ttaatccgtgatgacagtctttgtc

SEQ ID NO: 3341542 - DNA, 25 bp, Homo sapien
gatgggagggatgttgaattcttca

SEQ ID NO: 3341543 - DNA, 25 bp, Homo sapien
tccccttggatgagtcaatatagtt

SEQ ID NO: 3341544 - DNA, 25 bp, Homo sapien
ctgaacacttaactgtgcttgctct

SEQ ID NO: 3341545 - DNA, 25 bp, Homo sapien
tgaacacttaactgtgcttgctctg

SEQ ID NO: 3341546 - DNA, 25 bp, Homo sapien
ttggaacactgaacacttaactgtg

SEQ ID NO: 3341547 - DNA, 25 bp, Homo sapien
gaatctgagtctctggacaataaga

SEQ ID NO: 3341548 - DNA, 25 bp, Homo sapien
tcagcaagaggtcatggtcattgct

SEQ ID NO: 3341549 - DNA, 25 bp, Homo sapien
tcttttagaatctgagtctctggac

SEQ ID NO: 3341550 - DNA, 25 bp, Homo sapien
cattgctgacattttctcggttgta

SEQ ID NO: 3341551 - DNA, 25 bp, Homo sapien
aggtttaaaccagatttaggtgctg

SEQ ID NO: 3341552 - DNA, 25 bp, Homo sapien
ggtgctgtgctaatggttgtgtcca

SEQ ID NO: 3341553 - DNA, 25 bp, Homo sapien
caatcgaaggacagtagaggtttaa

SEQ ID NO: 3341554 - DNA, 25 bp, Homo sapien
atggtgactgagcaatcgaaggaca

SEQ ID NO: 3341555 - DNA, 25 bp, Homo sapien
agttgggggcaagtacaacaggatt

SEQ ID NO: 3341556 - DNA, 25 bp, Homo sapien
tgggggcaagtacaacaggattggc

SEQ ID NO: 3341557 - DNA, 25 bp, Homo sapien
ttgggggcaagtacaacaggattgg

SEQ ID NO: 3341558 - DNA, 25 bp, Homo sapien
gagttgggggcaagtacaacaggat

SEQ ID NO: 3341559 - DNA, 25 bp, Homo sapien
ccttggcaggtaccgaggaatgagt

SEQ ID NO: 3341560 - DNA, 25 bp, Homo sapien
gaacataagttactccaccggcaat

SEQ ID NO: 3341561 - DNA, 25 bp, Homo sapien
cagtgttcctgatgacagtgttaaa

SEQ ID NO: 3341562 - DNA, 25 bp, Homo sapien
gactatttatgatcactgacttggg

SEQ ID NO: 3341563 - DNA, 25 bp, Homo sapien
taggtaagctctctaagccctcggt

SEQ ID NO: 3341564 - DNA, 25 bp, Homo sapien
tttataaaactaggtaagctctcta

SEQ ID NO: 3341565 - DNA, 25 bp, Homo sapien
taagctctctaagccctcggtctca

SEQ ID NO: 3341566 - DNA, 25 bp, Homo sapien
ggaaaaaccaacatggtgcaaatct

SEQ ID NO: 3341567 - DNA, 25 bp, Homo sapien
aaacattatagccaatgatgacaca

SEQ ID NO: 3341568 - DNA, 25 bp, Homo sapien
ttaaacattatagccaatgatgaca

SEQ ID NO: 3341569 - DNA, 25 bp, Homo sapien
aacattatagccaatgatgacacac

SEQ ID NO: 3341570 - DNA, 25 bp, Homo sapien
taaacattatagccaatgatgacac

SEQ ID NO: 3341571 - DNA, 25 bp, Homo sapien
tctccaatataaaagcacatccata

SEQ ID NO: 3341572 - DNA, 25 bp, Homo sapien
gatctctccaatataaaagcacatc

SEQ ID NO: 3341573 - DNA, 25 bp, Homo sapien
tgatctctccaatataaaagcacat

SEQ ID NO: 3341574 - DNA, 25 bp, Homo sapien
tctctccaatataaaagcacatcca

SEQ ID NO: 3341575 - DNA, 25 bp, Homo sapien
attttttaaggcgctgaatagttct

SEQ ID NO: 3341576 - DNA, 25 bp, Homo sapien
taggtatattagcagggggtggagg

SEQ ID NO: 3341577 - DNA, 25 bp, Homo sapien
aactaacaatttgagcactactatt

SEQ ID NO: 3341578 - DNA, 25 bp, Homo sapien
ctaacaatttgagcactactatttt

SEQ ID NO: 3341579 - DNA, 25 bp, Homo sapien
cattcaccagtgttgaggccttcac

SEQ ID NO: 3341580 - DNA, 25 bp, Homo sapien
ttcaccagtgttgaggccttcacta

SEQ ID NO: 3341581 - DNA, 25 bp, Homo sapien
caccagtgttgaggccttcactaca

SEQ ID NO: 3341582 - DNA, 25 bp, Homo sapien
gcattcaccagtgttgaggccttca

SEQ ID NO: 3341583 - DNA, 25 bp, Homo sapien
aaatctggactttgcattatcaccc

SEQ ID NO: 3341584 - DNA, 25 bp, Homo sapien
tagggttctctcagggatccatact

SEQ ID NO: 3341585 - DNA, 25 bp, Homo sapien
gagttatatctgtacctgcgtgcaa

SEQ ID NO: 3341586 - DNA, 25 bp, Homo sapien
cacctcctatagtctgagagttata

SEQ ID NO: 3341587 - DNA, 25 bp, Homo sapien
cacagtcatttggtgtttcattgtc

SEQ ID NO: 3341588 - DNA, 25 bp, Homo sapien
ttgtctttcttcatgcggatttctc

SEQ ID NO: 3341589 - DNA, 25 bp, Homo sapien
caacacagtcatttggtgtttcatt

SEQ ID NO: 3341590 - DNA, 25 bp, Homo sapien
ttcatgcggatttctctggctgaag

SEQ ID NO: 3341591 - DNA, 25 bp, Homo sapien
taaaggccagatgggtgccgcttca

SEQ ID NO: 3341592 - DNA, 25 bp, Homo sapien
cacgaaagggtttatattggctggc

SEQ ID NO: 3341593 - DNA, 25 bp, Homo sapien
tggctatggctgcactccagagagt

SEQ ID NO: 3341594 - DNA, 25 bp, Homo sapien
tttagtgccagtctataaaggccag

SEQ ID NO: 3341595 - DNA, 25 bp, Homo sapien
tcggtgagaaagctccaacataaag

SEQ ID NO: 3341596 - DNA, 25 bp, Homo sapien
taattcgttgccagagcacgctgct

SEQ ID NO: 3341597 - DNA, 25 bp, Homo sapien
tgaacaccatgtcggttgttcggtg

SEQ ID NO: 3341598 - DNA, 25 bp, Homo sapien
ccaacataaaggagcagtaattcgt

SEQ ID NO: 3341599 - DNA, 25 bp, Homo sapien
caatggtgatggctcaggttgtcca

SEQ ID NO: 3341600 - DNA, 25 bp, Homo sapien
tgctgccactgcagtagcagagact

SEQ ID NO: 3341601 - DNA, 25 bp, Homo sapien
catctggcgaactgcttaatctggg

SEQ ID NO: 3341602 - DNA, 25 bp, Homo sapien
actagaacaagcagccacgggctgg

SEQ ID NO: 3341603 - DNA, 25 bp, Homo sapien
gcaccagttctggtttatgagcatg

SEQ ID NO: 3341604 - DNA, 25 bp, Homo sapien
tggtttatgagcatggccctgactg

SEQ ID NO: 3341605 - DNA, 25 bp, Homo sapien
gactgttgccatgtagatgatggat

SEQ ID NO: 3341606 - DNA, 25 bp, Homo sapien
gccctgactgttgccatgtagatga

SEQ ID NO: 3341607 - DNA, 25 bp, Homo sapien
tgaatctccgtttgcctctgctctc

SEQ ID NO: 3341608 - DNA, 25 bp, Homo sapien
tctctcctctcactagacagcattg

SEQ ID NO: 3341609 - DNA, 25 bp, Homo sapien
cccctctgtgtgaatctccgtttgc

SEQ ID NO: 3341610 - DNA, 25 bp, Homo sapien
tcactagacagcattgacggctcct

SEQ ID NO: 3341611 - DNA, 25 bp, Homo sapien
gcagctttcagtgcatcccgattct

SEQ ID NO: 3341612 - DNA, 25 bp, Homo sapien
ttaagacacgtagagccaagaaaat

SEQ ID NO: 3341613 - DNA, 25 bp, Homo sapien
agctttcagtgcatcccgattctca

SEQ ID NO: 3341614 - DNA, 25 bp, Homo sapien
gctttcagtgcatcccgattctcac

SEQ ID NO: 3341615 - DNA, 25 bp, Homo sapien
tccacagtgatctggtgcgagctgg

SEQ ID NO: 3341616 - DNA, 25 bp, Homo sapien
cttctctctgagaccccttgatgca

SEQ ID NO: 3341617 - DNA, 25 bp, Homo sapien
gggtcgggacattgaggtggcagct

SEQ ID NO: 3341618 - DNA, 25 bp, Homo sapien
tctgagaccccttgatgcaccgtaa

SEQ ID NO: 3341619 - DNA, 25 bp, Homo sapien
gccacctgcatatgacttggcaaaa

SEQ ID NO: 3341620 - DNA, 25 bp, Homo sapien
tgacttggcaaaatgtgagcctctg

SEQ ID NO: 3341621 - DNA, 25 bp, Homo sapien
tggcaaaatgtgagcctctgtaatc

SEQ ID NO: 3341622 - DNA, 25 bp, Homo sapien
tcagccacctgcatatgacttggca

SEQ ID NO: 3341623 - DNA, 25 bp, Homo sapien
ttcagagcagtttccttggattctt

SEQ ID NO: 3341624 - DNA, 25 bp, Homo sapien
ccatagacttggattgataaaacca

SEQ ID NO: 3341625 - DNA, 25 bp, Homo sapien
gattcttgattctgtattatgtcca

SEQ ID NO: 3341626 - DNA, 25 bp, Homo sapien
cagagcagtttccttggattcttga

SEQ ID NO: 3341627 - DNA, 25 bp, Homo sapien
tctctcttatactgcctctgtgctt

SEQ ID NO: 3341628 - DNA, 25 bp, Homo sapien
ctctcttatactgcctctgtgcttt

SEQ ID NO: 3341629 - DNA, 25 bp, Homo sapien
ttctctcttatactgcctctgtgct

SEQ ID NO: 3341630 - DNA, 25 bp, Homo sapien
gacagggaagatttgaaggaatacc

SEQ ID NO: 3341631 - DNA, 25 bp, Homo sapien
caaagacagggaagatttgaaggaa

SEQ ID NO: 3341632 - DNA, 25 bp, Homo sapien
gattgaatcaaagacagggaagatt

SEQ ID NO: 3341633 - DNA, 25 bp, Homo sapien
ggaagatttgaaggaataccactct

SEQ ID NO: 3341634 - DNA, 25 bp, Homo sapien
tgtctcttataaacaggaatgtaac

SEQ ID NO: 3341635 - DNA, 25 bp, Homo sapien
taatacagcatacaataccagctcc

SEQ ID NO: 3341636 - DNA, 25 bp, Homo sapien
tccatgagggattttgctttctatt

SEQ ID NO: 3341637 - DNA, 25 bp, Homo sapien
caaaattgtagatgctcaaacattc

SEQ ID NO: 3341638 - DNA, 25 bp, Homo sapien
atctgttatcaaggtggtgataggc

SEQ ID NO: 3341639 - DNA, 25 bp, Homo sapien
ctgttatcaaggtggtgataggctt

SEQ ID NO: 3341640 - DNA, 25 bp, Homo sapien
taatgtcatctgttatcaaggtggt

SEQ ID NO: 3341641 - DNA, 25 bp, Homo sapien
ttaatgtcatctgttatcaaggtgg

SEQ ID NO: 3341642 - DNA, 25 bp, Homo sapien
acagccgatcccctctcttatcacc

SEQ ID NO: 3341643 - DNA, 25 bp, Homo sapien
caagaatgcctattcttattcaggg

SEQ ID NO: 3341644 - DNA, 25 bp, Homo sapien
gcctattcttattcagggctgtggg

SEQ ID NO: 3341645 - DNA, 25 bp, Homo sapien
ctctcaacattcaaacgttccttct

SEQ ID NO: 3341646 - DNA, 25 bp, Homo sapien
ctggggtctgggtttgtcttggcat

SEQ ID NO: 3341647 - DNA, 25 bp, Homo sapien
ctcctctgtttccagggcctggggt

SEQ ID NO: 3341648 - DNA, 25 bp, Homo sapien
cagggcctggggtctgggtttgtct

SEQ ID NO: 3341649 - DNA, 25 bp, Homo sapien
ctgcccctcctctgtttccagggcc

SEQ ID NO: 3341650 - DNA, 25 bp, Homo sapien
atccgagctggctttccctttaact

SEQ ID NO: 3341651 - DNA, 25 bp, Homo sapien
cttgctcctcttttttcgtacctgg

SEQ ID NO: 3341652 - DNA, 25 bp, Homo sapien
ccaaatgcagatgaataacactggg

SEQ ID NO: 3341653 - DNA, 25 bp, Homo sapien
gaccaagttgcagctatttttctct

SEQ ID NO: 3341654 - DNA, 25 bp, Homo sapien
tccaggcatctaatgaccaagtggg

SEQ ID NO: 3341655 - DNA, 25 bp, Homo sapien
ccaagtgggttagcagatcaattac

SEQ ID NO: 3341656 - DNA, 25 bp, Homo sapien
agttaattaacatagctggccagac

SEQ ID NO: 3341657 - DNA, 25 bp, Homo sapien
cagggatgaaattagccatggcaca

SEQ ID NO: 3341658 - DNA, 25 bp, Homo sapien
ccaggtctcccgccatgagggccat

SEQ ID NO: 3341659 - DNA, 25 bp, Homo sapien
caggtctcccgccatgagggccatg

SEQ ID NO: 3341660 - DNA, 25 bp, Homo sapien
gagcccgaaggagacccgccctctg

SEQ ID NO: 3341661 - DNA, 25 bp, Homo sapien
gtgagcccgaaggagacccgccctc

SEQ ID NO: 3341662 - DNA, 25 bp, Homo sapien
gcccgaaggagacccgccctctgct

SEQ ID NO: 3341663 - DNA, 25 bp, Homo sapien
cgaaggagacccgccctctgcttcc

SEQ ID NO: 3341664 - DNA, 25 bp, Homo sapien
ttcaagaaaccagatctcaaactga

SEQ ID NO: 3341665 - DNA, 25 bp, Homo sapien
ggcaatggcaatgcgtttcctttcc

SEQ ID NO: 3341666 - DNA, 25 bp, Homo sapien
aagatagcttggcaatggcaatgcg

SEQ ID NO: 3341667 - DNA, 25 bp, Homo sapien
ttcctggaaattcaagaaaccagat

SEQ ID NO: 3341668 - DNA, 25 bp, Homo sapien
gagaacaagtttagaagagaacagg

SEQ ID NO: 3341669 - DNA, 25 bp, Homo sapien
gagaacaggtaatataggtcaagct

SEQ ID NO: 3341670 - DNA, 25 bp, Homo sapien
taatataggtcaagctcgaggagct

SEQ ID NO: 3341671 - DNA, 25 bp, Homo sapien
ggagctcatagaacctggaaatatc

SEQ ID NO: 3341672 - DNA, 25 bp, Homo sapien
tttccaagtcttatctgtatctctc

SEQ ID NO: 3341673 - DNA, 25 bp, Homo sapien
ttccaaatttccaagtcttatctgt

SEQ ID NO: 3341674 - DNA, 25 bp, Homo sapien
cttccaaatttccaagtcttatctg

SEQ ID NO: 3341675 - DNA, 25 bp, Homo sapien
aagtcttatctgtatctctctccat

SEQ ID NO: 3341676 - DNA, 25 bp, Homo sapien
cctggactgggtattcaggctataa

SEQ ID NO: 3341677 - DNA, 25 bp, Homo sapien
ttctatgaagttgggccttcctgga

SEQ ID NO: 3341678 - DNA, 25 bp, Homo sapien
gctataatagtgctccagaggctct

SEQ ID NO: 3341679 - DNA, 25 bp, Homo sapien
gaggctctagactaatattccagaa

SEQ ID NO: 3341680 - DNA, 25 bp, Homo sapien
caatttgttctattgatttggagag

SEQ ID NO: 3341681 - DNA, 25 bp, Homo sapien
tgttgaatctaaaccgataataccc

SEQ ID NO: 3341682 - DNA, 25 bp, Homo sapien
aaatgcaattgctgaggcctcaatt

SEQ ID NO: 3341683 - DNA, 25 bp, Homo sapien
cctagggtctgcacatttataaaca

SEQ ID NO: 3341684 - DNA, 25 bp, Homo sapien
gctcgcccacacaaggatggagttg

SEQ ID NO: 3341685 - DNA, 25 bp, Homo sapien
gactgcagcaacaggcatcgaagcc

SEQ ID NO: 3341686 - DNA, 25 bp, Homo sapien
tcgaagccagacgacacaggtggtc

SEQ ID NO: 3341687 - DNA, 25 bp, Homo sapien
tagggtggaatacatctgaaggcat

SEQ ID NO: 3341688 - DNA, 25 bp, Homo sapien
tcattttacaaggttttgtgccaaa

SEQ ID NO: 3341689 - DNA, 25 bp, Homo sapien
aaatcttggaacacccatgcgtctc

SEQ ID NO: 3341690 - DNA, 25 bp, Homo sapien
catgcgtctccagtcaagcagggag

SEQ ID NO: 3341691 - DNA, 25 bp, Homo sapien
ggacagaggagggtatccaaataga

SEQ ID NO: 3341692 - DNA, 25 bp, Homo sapien
caaggcctacttagcctggaacact

SEQ ID NO: 3341693 - DNA, 25 bp, Homo sapien
tgaagtcccagtagagcaatgctct

SEQ ID NO: 3341694 - DNA, 25 bp, Homo sapien
aaaactctggggaggtcatcatgac

SEQ ID NO: 3341695 - DNA, 25 bp, Homo sapien
tccctcaggttcagaattgaagtcc

SEQ ID NO: 3341696 - DNA, 25 bp, Homo sapien
agatgatacacagctgtcttattgc

SEQ ID NO: 3341697 - DNA, 25 bp, Homo sapien
tagatgatacacagctgtcttattg

SEQ ID NO: 3341698 - DNA, 25 bp, Homo sapien
gggatgcacagatgtcatctaccca

SEQ ID NO: 3341699 - DNA, 25 bp, Homo sapien
tacccatgcactgactgatcttctg

SEQ ID NO: 3341700 - DNA, 25 bp, Homo sapien
gatgcacagatgtcatctacccatg

SEQ ID NO: 3341701 - DNA, 25 bp, Homo sapien
tcatctacccatgcactgactgatc

SEQ ID NO: 3341702 - DNA, 25 bp, Homo sapien
gatgtttataatcgctcctgggctt

SEQ ID NO: 3341703 - DNA, 25 bp, Homo sapien
tcctgggcttcattaagcaacgttt

SEQ ID NO: 3341704 - DNA, 25 bp, Homo sapien
tattggacagtttcaacccattggt

SEQ ID NO: 3341705 - DNA, 25 bp, Homo sapien
ccattggttcttatcatgggatgaa

SEQ ID NO: 3341706 - DNA, 25 bp, Homo sapien
cttgctattttggatcttggttgtt

SEQ ID NO: 3341707 - DNA, 25 bp, Homo sapien
tcttgctattttggatcttggttgt

SEQ ID NO: 3341708 - DNA, 25 bp, Homo sapien
ttgctattttggatcttggttgttt

SEQ ID NO: 3341709 - DNA, 25 bp, Homo sapien
gagtacaggaccattcttctcagag

SEQ ID NO: 3341710 - DNA, 25 bp, Homo sapien
ttaaaactcaaactcgagtacagga

SEQ ID NO: 3341711 - DNA, 25 bp, Homo sapien
tcaaactcgagtacaggaccattct

SEQ ID NO: 3341712 - DNA, 25 bp, Homo sapien
aactcgagtacaggaccattcttct

SEQ ID NO: 3341713 - DNA, 25 bp, Homo sapien
aagacatagccaagaattgcttcag

SEQ ID NO: 3341714 - DNA, 25 bp, Homo sapien
tgaagacatagccaagaattgcttc

SEQ ID NO: 3341715 - DNA, 25 bp, Homo sapien
cagtgatattccttcataaatctgc

SEQ ID NO: 3341716 - DNA, 25 bp, Homo sapien
tcagtgatattccttcataaatctg

SEQ ID NO: 3341717 - DNA, 25 bp, Homo sapien
tgaaaagctaatgcaaggatttggg

SEQ ID NO: 3341718 - DNA, 25 bp, Homo sapien
ttttgaaaagctaatgcaaggattt

SEQ ID NO: 3341719 - DNA, 25 bp, Homo sapien
aagctaatgcaaggatttggggaat

SEQ ID NO: 3341720 - DNA, 25 bp, Homo sapien
ttgaaaagctaatgcaaggatttgg

SEQ ID NO: 3341721 - DNA, 25 bp, Homo sapien
cacctgaaaggtgaaatccattaga

SEQ ID NO: 3341722 - DNA, 25 bp, Homo sapien
gatttgcgaatcctggaatgttgag

SEQ ID NO: 3341723 - DNA, 25 bp, Homo sapien
aacagagaaggtttttcaccctcat

SEQ ID NO: 3341724 - DNA, 25 bp, Homo sapien
gaatgttgagataggagcacctcga

SEQ ID NO: 3341725 - DNA, 25 bp, Homo sapien
ttcttacgtactgtttgttcttggc

SEQ ID NO: 3341726 - DNA, 25 bp, Homo sapien
tcttacgtactgtttgttcttggct

SEQ ID NO: 3341727 - DNA, 25 bp, Homo sapien
attattcttacgtactgtttgttct

SEQ ID NO: 3341728 - DNA, 25 bp, Homo sapien
catcactgctatccagagatcagaa

SEQ ID NO: 3341729 - DNA, 25 bp, Homo sapien
tgccccacttgctcccatacccatg

SEQ ID NO: 3341730 - DNA, 25 bp, Homo sapien
cactgctatccagagatcagaaact

SEQ ID NO: 3341731 - DNA, 25 bp, Homo sapien
cccacttgctcccatacccatgaag

SEQ ID NO: 3341732 - DNA, 25 bp, Homo sapien
atttacaaacagattctagccacag

SEQ ID NO: 3341733 - DNA, 25 bp, Homo sapien
gctgaacagtgtggacttggggaaa

SEQ ID NO: 3341734 - DNA, 25 bp, Homo sapien
tcaagctccagctatatttacaaac

SEQ ID NO: 3341735 - DNA, 25 bp, Homo sapien
ttagttcaagctccagctatattta

SEQ ID NO: 3341736 - DNA, 25 bp, Homo sapien
ttgatttctgcccaaataaagcagg

SEQ ID NO: 3341737 - DNA, 25 bp, Homo sapien
tttgatttctgcccaaataaagcag

SEQ ID NO: 3341738 - DNA, 25 bp, Homo sapien
agaaaaatagtctctaactctgtgt

SEQ ID NO: 3341739 - DNA, 25 bp, Homo sapien
gctctgagttataccttctgtctga

SEQ ID NO: 3341740 - DNA, 25 bp, Homo sapien
aaatagtctctaactctgtgtagcc

SEQ ID NO: 3341741 - DNA, 25 bp, Homo sapien
tctgagctctgagttataccttctg

SEQ ID NO: 3341742 - DNA, 25 bp, Homo sapien
ctaagtggctgctaagtccttccca

SEQ ID NO: 3341743 - DNA, 25 bp, Homo sapien
tgtaaatactttcgcagagtctggt

SEQ ID NO: 3341744 - DNA, 25 bp, Homo sapien
gctgtgctctggatgcaatagcgca

SEQ ID NO: 3341745 - DNA, 25 bp, Homo sapien
gcaaatatgaactcttgagacctct

SEQ ID NO: 3341746 - DNA, 25 bp, Homo sapien
ttacatttctgagctgattggctct

SEQ ID NO: 3341747 - DNA, 25 bp, Homo sapien
tctgagctgattggctcttctctta

SEQ ID NO: 3341748 - DNA, 25 bp, Homo sapien
tcagatttcatctccactttgaact

SEQ ID NO: 3341749 - DNA, 25 bp, Homo sapien
ttctcttagggccattgaataaact

SEQ ID NO: 3341750 - DNA, 25 bp, Homo sapien
acaaaccagtgagtctaaattataa

SEQ ID NO: 3341751 - DNA, 25 bp, Homo sapien
caaaccagtgagtctaaattataaa

SEQ ID NO: 3341752 - DNA, 25 bp, Homo sapien
catttggctagtcgcatgaaacagg

SEQ ID NO: 3341753 - DNA, 25 bp, Homo sapien
tctgatacatttggctagtcgcatg

SEQ ID NO: 3341754 - DNA, 25 bp, Homo sapien
gcagctcctttggtgatgtgaccca

SEQ ID NO: 3341755 - DNA, 25 bp, Homo sapien
tcctttggtgatgtgacccagaccc

SEQ ID NO: 3341756 - DNA, 25 bp, Homo sapien
ctttggtgatgtgacccagaccctc

SEQ ID NO: 3341757 - DNA, 25 bp, Homo sapien
gctcctttggtgatgtgacccagac

SEQ ID NO: 3341758 - DNA, 25 bp, Homo sapien
tgttgtaggtcatgcaggtcagcag

SEQ ID NO: 3341759 - DNA, 25 bp, Homo sapien
gctaggtgcatgttgtaggtcatgc

SEQ ID NO: 3341760 - DNA, 25 bp, Homo sapien
aatacataaatgattgctaggtgca

SEQ ID NO: 3341761 - DNA, 25 bp, Homo sapien
gattgctaggtgcatgttgtaggtc

SEQ ID NO: 3341762 - DNA, 25 bp, Homo sapien
gaatccaggcatgtagtactcccca

SEQ ID NO: 3341763 - DNA, 25 bp, Homo sapien
tggtgcaaattgactccatgtgtgc

SEQ ID NO: 3341764 - DNA, 25 bp, Homo sapien
ggagtacatagtggcagatcctgag

SEQ ID NO: 3341765 - DNA, 25 bp, Homo sapien
accttaacgctatgtgttggcctgg

SEQ ID NO: 3341766 - DNA, 25 bp, Homo sapien
aatccttagccattttctgggctgc

SEQ ID NO: 3341767 - DNA, 25 bp, Homo sapien
agaatccttagccattttctgggct

SEQ ID NO: 3341768 - DNA, 25 bp, Homo sapien
attttctgggctgcctttcatatcg

SEQ ID NO: 3341769 - DNA, 25 bp, Homo sapien
ttctgggctgcctttcatatcgtac

SEQ ID NO: 3341770 - DNA, 25 bp, Homo sapien
caacttctatagcttcctgtttgcg

SEQ ID NO: 3341771 - DNA, 25 bp, Homo sapien
cacacacaacttctatagcttcctg

SEQ ID NO: 3341772 - DNA, 25 bp, Homo sapien
tttgcgccaaaccatgattacagaa

SEQ ID NO: 3341773 - DNA, 25 bp, Homo sapien
tatagcttcctgtttgcgccaaacc

SEQ ID NO: 3341774 - DNA, 25 bp, Homo sapien
gaataagtgattatggctgggatcc

SEQ ID NO: 3341775 - DNA, 25 bp, Homo sapien
gtttttctgcagtgatatggattgt

SEQ ID NO: 3341776 - DNA, 25 bp, Homo sapien
gattgtggaataagtgattatggct

SEQ ID NO: 3341777 - DNA, 25 bp, Homo sapien
tacacatcaagttgcaaaacacaag

SEQ ID NO: 3341778 - DNA, 25 bp, Homo sapien
tggccatttccctggcactgaatac

SEQ ID NO: 3341779 - DNA, 25 bp, Homo sapien
ggccatttccctggcactgaatact

SEQ ID NO: 3341780 - DNA, 25 bp, Homo sapien
tgagcataacacactcagcaagtgt

SEQ ID NO: 3341781 - DNA, 25 bp, Homo sapien
gatgaacatattcaaggagtttaca

SEQ ID NO: 3341782 - DNA, 25 bp, Homo sapien
taatcctggaggttcttgggaactg

SEQ ID NO: 3341783 - DNA, 25 bp, Homo sapien
tgatgatggtgatcaacataatagg

SEQ ID NO: 3341784 - DNA, 25 bp, Homo sapien
tgttctcaccagataccctgaacag

SEQ ID NO: 3341785 - DNA, 25 bp, Homo sapien
tttatatagccttttatgggaccag

SEQ ID NO: 3341786 - DNA, 25 bp, Homo sapien
tgggaccagagctgtcaatgtttct

SEQ ID NO: 3341787 - DNA, 25 bp, Homo sapien
tacctgctggatatccttgaagtgg

SEQ ID NO: 3341788 - DNA, 25 bp, Homo sapien
gcagcagattgtccaatccccatgg

SEQ ID NO: 3341789 - DNA, 25 bp, Homo sapien
tacagggcctgtctgtttttccact

SEQ ID NO: 3341790 - DNA, 25 bp, Homo sapien
ctccataatcaaagttggcagtgca

SEQ ID NO: 3341791 - DNA, 25 bp, Homo sapien
tgagggaaagtaatggcagcagatt

SEQ ID NO: 3341792 - DNA, 25 bp, Homo sapien
aaagtatttatctctgtgtaccatg

SEQ ID NO: 3341793 - DNA, 25 bp, Homo sapien
cccagagcaggaacatagcaagcaa

SEQ ID NO: 3341794 - DNA, 25 bp, Homo sapien
gaacttcttgggaatcatgtaatca

SEQ ID NO: 3341795 - DNA, 25 bp, Homo sapien
gtcacctttcaaaaacaatgtcttg

SEQ ID NO: 3341796 - DNA, 25 bp, Homo sapien
cttccacttcgtttaagctgctgtt

SEQ ID NO: 3341797 - DNA, 25 bp, Homo sapien
gagtgtctaacaacatatggcacca

SEQ ID NO: 3341798 - DNA, 25 bp, Homo sapien
actgacggattccactcctcttgaa

SEQ ID NO: 3341799 - DNA, 25 bp, Homo sapien
tatggcaccatatcagccccaaact

SEQ ID NO: 3341800 - DNA, 25 bp, Homo sapien
ttctagcttcttactcatccagtgg

SEQ ID NO: 3341801 - DNA, 25 bp, Homo sapien
tttggctccatgaatttcttctagc

SEQ ID NO: 3341802 - DNA, 25 bp, Homo sapien
tgatgttgtacttgatttggctcca

SEQ ID NO: 3341803 - DNA, 25 bp, Homo sapien
tcaaggttgaaggactctctacatc

SEQ ID NO: 3341804 - DNA, 25 bp, Homo sapien
ggctgctgcgataaagccccacaaa

SEQ ID NO: 3341805 - DNA, 25 bp, Homo sapien
tttctttacgtcaataccaccctgc

SEQ ID NO: 3341806 - DNA, 25 bp, Homo sapien
acttggtggcttaaggtgacagaaa

SEQ ID NO: 3341807 - DNA, 25 bp, Homo sapien
tggacatctggaatcaacacacaaa

SEQ ID NO: 3341808 - DNA, 25 bp, Homo sapien
ttttcatacgctgagctacaatgtc

SEQ ID NO: 3341809 - DNA, 25 bp, Homo sapien
tacgctgagctacaatgtcaaactc

SEQ ID NO: 3341810 - DNA, 25 bp, Homo sapien
tcatacgctgagctacaatgtcaaa

SEQ ID NO: 3341811 - DNA, 25 bp, Homo sapien
gctgagctacaatgtcaaactctaa

SEQ ID NO: 3341812 - DNA, 25 bp, Homo sapien
tgttcagttcactgaaagggtactg

SEQ ID NO: 3341813 - DNA, 25 bp, Homo sapien
gagcacagctttttgttgaaaatga

SEQ ID NO: 3341814 - DNA, 25 bp, Homo sapien
ggtactgtgcctcaagatcttcatt

SEQ ID NO: 3341815 - DNA, 25 bp, Homo sapien
cctgatgagcacagctttttgttga

SEQ ID NO: 3341816 - DNA, 25 bp, Homo sapien
ctcttccagcttctgctttttttag

SEQ ID NO: 3341817 - DNA, 25 bp, Homo sapien
ggctcttccagcttctgcttttttt

SEQ ID NO: 3341818 - DNA, 25 bp, Homo sapien
cttggctcttccagcttctgctttt

SEQ ID NO: 3341819 - DNA, 25 bp, Homo sapien
ttggctcttccagcttctgcttttt

SEQ ID NO: 3341820 - DNA, 25 bp, Homo sapien
ctaattcacgctcatttgctttgga

SEQ ID NO: 3341821 - DNA, 25 bp, Homo sapien
ttgtggcagcatctaattcacgctc

SEQ ID NO: 3341822 - DNA, 25 bp, Homo sapien
gtgacacctgagtaatttcacatac

SEQ ID NO: 3341823 - DNA, 25 bp, Homo sapien
cagccagctgtgacacctgagtaat

SEQ ID NO: 3341824 - DNA, 25 bp, Homo sapien
tcttcatcagcaatccaatcgaaaa

SEQ ID NO: 3341825 - DNA, 25 bp, Homo sapien
tcacacactcgtcttcatcagcaat

SEQ ID NO: 3341826 - DNA, 25 bp, Homo sapien
caatccaatcgaaaaagggcctggt

SEQ ID NO: 3341827 - DNA, 25 bp, Homo sapien
tcagcaatccaatcgaaaaagggcc

SEQ ID NO: 3341828 - DNA, 25 bp, Homo sapien
catcagggatgtatgtggtagaagt

SEQ ID NO: 3341829 - DNA, 25 bp, Homo sapien
tagaagtcaccatacttgatgtttc

SEQ ID NO: 3341830 - DNA, 25 bp, Homo sapien
tatgtggtagaagtcaccatacttg

SEQ ID NO: 3341831 - DNA, 25 bp, Homo sapien
gatgctgttgccgtacatcagggat

SEQ ID NO: 3341832 - DNA, 25 bp, Homo sapien
tgtgttctgtagaagttttgaaaac

SEQ ID NO: 3341833 - DNA, 25 bp, Homo sapien
ttcatctgtgttctgtagaagtttt

SEQ ID NO: 3341834 - DNA, 25 bp, Homo sapien
tttggtaggggtcacaaggagacat

SEQ ID NO: 3341835 - DNA, 25 bp, Homo sapien
ttttggtaggggtcacaaggagaca

SEQ ID NO: 3341836 - DNA, 25 bp, Homo sapien
aaaacagcagacaacttatgggggc

SEQ ID NO: 3341837 - DNA, 25 bp, Homo sapien
ttgtggactgaagatatcaaggcta

SEQ ID NO: 3341838 - DNA, 25 bp, Homo sapien
tgaagatatcaaggctatgcccggg

SEQ ID NO: 3341839 - DNA, 25 bp, Homo sapien
ttggcagttgtggactgaagatatc

SEQ ID NO: 3341840 - DNA, 25 bp, Homo sapien
tgagtgtgtgatgacactcctctct

SEQ ID NO: 3341841 - DNA, 25 bp, Homo sapien
tgtgatgacactcctctctcaggcc

SEQ ID NO: 3341842 - DNA, 25 bp, Homo sapien
gtgtgtgatgacactcctctctcag

SEQ ID NO: 3341843 - DNA, 25 bp, Homo sapien
gacagtgagtgtgtgatgacactcc

SEQ ID NO: 3341844 - DNA, 25 bp, Homo sapien
ggtggctccaatctggctatatagg

SEQ ID NO: 3341845 - DNA, 25 bp, Homo sapien
ccctactggttgtagtgcaagtgct

SEQ ID NO: 3341846 - DNA, 25 bp, Homo sapien
tccgttctgattgtggttaacccta

SEQ ID NO: 3341847 - DNA, 25 bp, Homo sapien
tgtgtttccatgtctggtctccagg

SEQ ID NO: 3341848 - DNA, 25 bp, Homo sapien
gaataatgtcttcccaaatattgtc

SEQ ID NO: 3341849 - DNA, 25 bp, Homo sapien
ggcaccaagccaatgatctctccat

SEQ ID NO: 3341850 - DNA, 25 bp, Homo sapien
ggctatgaccccacaccagcaatgg

SEQ ID NO: 3341851 - DNA, 25 bp, Homo sapien
acagctgttcattcccagattggct

SEQ ID NO: 3341852 - DNA, 25 bp, Homo sapien
cctaactggatcatgcccgtgtgca

SEQ ID NO: 3341853 - DNA, 25 bp, Homo sapien
ttcaaagtatgttatcccttccctc

SEQ ID NO: 3341854 - DNA, 25 bp, Homo sapien
ccctctcaattttcatagcctttag

SEQ ID NO: 3341855 - DNA, 25 bp, Homo sapien
tagcctttagattggccctaactgg

SEQ ID NO: 3341856 - DNA, 25 bp, Homo sapien
taacatcgaaggagtgagttcttgc

SEQ ID NO: 3341857 - DNA, 25 bp, Homo sapien
tctcaggttcccaatgataacatcg

SEQ ID NO: 3341858 - DNA, 25 bp, Homo sapien
tagagttctgcatctgccgtgacca

SEQ ID NO: 3341859 - DNA, 25 bp, Homo sapien
gccgtgaccacaataacaatgtctg

SEQ ID NO: 3341860 - DNA, 25 bp, Homo sapien
aaactagaaacaggcagaatttcca

SEQ ID NO: 3341861 - DNA, 25 bp, Homo sapien
gaagcaagtaattccaaaactagaa

SEQ ID NO: 3341862 - DNA, 25 bp, Homo sapien
ctggaagcaagtaattccaaaacta

SEQ ID NO: 3341863 - DNA, 25 bp, Homo sapien
aactagaaacaggcagaatttccat

SEQ ID NO: 3341864 - DNA, 25 bp, Homo sapien
ctgggtggttagcaagagtactttt

SEQ ID NO: 3341865 - DNA, 25 bp, Homo sapien
agtgaatctgggtggttagcaagag

SEQ ID NO: 3341866 - DNA, 25 bp, Homo sapien
tggttagcaagagtactttttcttc

SEQ ID NO: 3341867 - DNA, 25 bp, Homo sapien
gaatctgggtggttagcaagagtac

SEQ ID NO: 3341868 - DNA, 25 bp, Homo sapien
cagttcctaggaagtaagacatttg

SEQ ID NO: 3341869 - DNA, 25 bp, Homo sapien
ctctgaaaattgagcatctgtgatc

SEQ ID NO: 3341870 - DNA, 25 bp, Homo sapien
tgtggataactctaccccaacggca

SEQ ID NO: 3341871 - DNA, 25 bp, Homo sapien
ttctgatcctttctgcgaatgagca

SEQ ID NO: 3341872 - DNA, 25 bp, Homo sapien
gctcgtttgagtgctggatgtccat

SEQ ID NO: 3341873 - DNA, 25 bp, Homo sapien
tacatgacttataatgttgtctcat

SEQ ID NO: 3341874 - DNA, 25 bp, Homo sapien
tcctttctcttatggatcgggccac

SEQ ID NO: 3341875 - DNA, 25 bp, Homo sapien
tccaacaacccggatgttagctcgt

SEQ ID NO: 3341876 - DNA, 25 bp, Homo sapien
cttcctgagcttcagagtgacagca

SEQ ID NO: 3341877 - DNA, 25 bp, Homo sapien
gcttcctgagcttcagagtgacagc

SEQ ID NO: 3341878 - DNA, 25 bp, Homo sapien
gtgggtccaggaatatggaattcca

SEQ ID NO: 3341879 - DNA, 25 bp, Homo sapien
gggtgggtccaggaatatggaattc

SEQ ID NO: 3341880 - DNA, 25 bp, Homo sapien
tagggtgggtccaggaatatggaat

SEQ ID NO: 3341881 - DNA, 25 bp, Homo sapien
ctgaagtagggtgggtccaggaata

SEQ ID NO: 3341882 - DNA, 25 bp, Homo sapien
taaggagagctactgatactgctga

SEQ ID NO: 3341883 - DNA, 25 bp, Homo sapien
gctactgatactgctgagtttccca

SEQ ID NO: 3341884 - DNA, 25 bp, Homo sapien
ggagagctactgatactgctgagtt

SEQ ID NO: 3341885 - DNA, 25 bp, Homo sapien
cccaaggggtatgggaattctgaga

SEQ ID NO: 3341886 - DNA, 25 bp, Homo sapien
ctagcaagaactgatatggacctcg

SEQ ID NO: 3341887 - DNA, 25 bp, Homo sapien
tggacctcggattttgcgatgaaaa

SEQ ID NO: 3341888 - DNA, 25 bp, Homo sapien
gattgtgttggtatcactagcaaga

SEQ ID NO: 3341889 - DNA, 25 bp, Homo sapien
gaaatatgacctaactgtccctgat

SEQ ID NO: 3341890 - DNA, 25 bp, Homo sapien
catctgatatttctgctcttgtcgt

SEQ ID NO: 3341891 - DNA, 25 bp, Homo sapien
atatttctgctcttgtcgtctttcc

SEQ ID NO: 3341892 - DNA, 25 bp, Homo sapien
aggccatctgatatttctgctcttg

SEQ ID NO: 3341893 - DNA, 25 bp, Homo sapien
tgatatttctgctcttgtcgtcttt

SEQ ID NO: 3341894 - DNA, 25 bp, Homo sapien
gtagttggcagaagtattttctctt

SEQ ID NO: 3341895 - DNA, 25 bp, Homo sapien
aatagactctaaacaacaaacacaa

SEQ ID NO: 3341896 - DNA, 25 bp, Homo sapien
ccaagtcgacttgagtagtgtactg

SEQ ID NO: 3341897 - DNA, 25 bp, Homo sapien
tcaggaggatagagtgtaaataaca

SEQ ID NO: 3341898 - DNA, 25 bp, Homo sapien
tagtgtactgtcaggcacatgtgca

SEQ ID NO: 3341899 - DNA, 25 bp, Homo sapien
catttactatgggtctcaaccaagt

SEQ ID NO: 3341900 - DNA, 25 bp, Homo sapien
aagagacattttggtgacaatcagc

SEQ ID NO: 3341901 - DNA, 25 bp, Homo sapien
tgaacaatataacctgtggacaggc

SEQ ID NO: 3341902 - DNA, 25 bp, Homo sapien
tttaaccctgaagcatgatcaagag

SEQ ID NO: 3341903 - DNA, 25 bp, Homo sapien
cactgtgactggatcatagttacaa

SEQ ID NO: 3341904 - DNA, 25 bp, Homo sapien
ctggcacccagactctgcagtaagt

SEQ ID NO: 3341905 - DNA, 25 bp, Homo sapien
cagactctgcagtaagtatttcatt

SEQ ID NO: 3341906 - DNA, 25 bp, Homo sapien
ggcacccagactctgcagtaagtat

SEQ ID NO: 3341907 - DNA, 25 bp, Homo sapien
gactctgcagtaagtatttcattgc

SEQ ID NO: 3341908 - DNA, 25 bp, Homo sapien
ccacttgggacccattagttatcat

SEQ ID NO: 3341909 - DNA, 25 bp, Homo sapien
tccacttgggacccattagttatca

SEQ ID NO: 3341910 - DNA, 25 bp, Homo sapien
ttccacttgggacccattagttatc

SEQ ID NO: 3341911 - DNA, 25 bp, Homo sapien
aaattcagaattaccatggaaacca

SEQ ID NO: 3341912 - DNA, 25 bp, Homo sapien
caaaattcagaattaccatggaaac

SEQ ID NO: 3341913 - DNA, 25 bp, Homo sapien
catagctgggcagctatacgctgca

SEQ ID NO: 3341914 - DNA, 25 bp, Homo sapien
cagtctgttaatgtctcttaacctt

SEQ ID NO: 3341915 - DNA, 25 bp, Homo sapien
tagttagctcatgtgagtcaggtgg

SEQ ID NO: 3341916 - DNA, 25 bp, Homo sapien
ttaaccttcttggagcttgtgatgg

SEQ ID NO: 3341917 - DNA, 25 bp, Homo sapien
ttccctcttagcaaacattatttca

SEQ ID NO: 3341918 - DNA, 25 bp, Homo sapien
atcttccctcttagcaaacattatt

SEQ ID NO: 3341919 - DNA, 25 bp, Homo sapien
cttgatggaccaggtcccaagtatc

SEQ ID NO: 3341920 - DNA, 25 bp, Homo sapien
gaccaggtcccaagtatcatcaact

SEQ ID NO: 3341921 - DNA, 25 bp, Homo sapien
tctgccatacatgttaataactgct

SEQ ID NO: 3341922 - DNA, 25 bp, Homo sapien
tcatatctggtccatgatccaaagc

SEQ ID NO: 3341923 - DNA, 25 bp, Homo sapien
ttgtcctccaaagaccacgtcgata

SEQ ID NO: 3341924 - DNA, 25 bp, Homo sapien
aacacggtggattagtctgccatac

SEQ ID NO: 3341925 - DNA, 25 bp, Homo sapien
aagatttctatgtgtggtccaattc

SEQ ID NO: 3341926 - DNA, 25 bp, Homo sapien
ttctttctcggaacacttggaagat

SEQ ID NO: 3341927 - DNA, 25 bp, Homo sapien
gcaatcttttccgttcaagccatcc

SEQ ID NO: 3341928 - DNA, 25 bp, Homo sapien
tgtgcctgcatgacggtgaccattc

SEQ ID NO: 3341929 - DNA, 25 bp, Homo sapien
aatactgctgagtgggtacataaac

SEQ ID NO: 3341930 - DNA, 25 bp, Homo sapien
ccgcaaagcttgtgggtatgtgtaa

SEQ ID NO: 3341931 - DNA, 25 bp, Homo sapien
ctgtaaagggttcccgcaaagcttg

SEQ ID NO: 3341932 - DNA, 25 bp, Homo sapien
agtcctatttgccaactgtaaaggg

SEQ ID NO: 3341933 - DNA, 25 bp, Homo sapien
cttgataggttgtcgctccttttta

SEQ ID NO: 3341934 - DNA, 25 bp, Homo sapien
ctggcttgataggttgtcgctcctt

SEQ ID NO: 3341935 - DNA, 25 bp, Homo sapien
gataggttgtcgctcctttttaata

SEQ ID NO: 3341936 - DNA, 25 bp, Homo sapien
ggcttgataggttgtcgctcctttt

SEQ ID NO: 3341937 - DNA, 25 bp, Homo sapien
gccaaacggaaagaccttgtcagca

SEQ ID NO: 3341938 - DNA, 25 bp, Homo sapien
tcccgaaatattgatgatgattgag

SEQ ID NO: 3341939 - DNA, 25 bp, Homo sapien
taactcgacgggagtcacaagccaa

SEQ ID NO: 3341940 - DNA, 25 bp, Homo sapien
ttgtcagcacaaatcctctccagtc

SEQ ID NO: 3341941 - DNA, 25 bp, Homo sapien
tagaaatatcaatgcaggttaaaac

SEQ ID NO: 3341942 - DNA, 25 bp, Homo sapien
tgttagaaatatcaatgcaggttaa

SEQ ID NO: 3341943 - DNA, 25 bp, Homo sapien
taaaacaatatctatccaggaaaag

SEQ ID NO: 3341944 - DNA, 25 bp, Homo sapien
ggaaaagtacacactgattatattg

SEQ ID NO: 3341945 - DNA, 25 bp, Homo sapien
tgttttgctgcttgcataaccacag

SEQ ID NO: 3341946 - DNA, 25 bp, Homo sapien
ttgcgggcaatggactgcaaactcc

SEQ ID NO: 3341947 - DNA, 25 bp, Homo sapien
aggaagcactctgccaaacgcagtt

SEQ ID NO: 3341948 - DNA, 25 bp, Homo sapien
ccagcaggattgggactgtgtcccg

SEQ ID NO: 3341949 - DNA, 25 bp, Homo sapien
tcaggggatgactttccatgatatc

SEQ ID NO: 3341950 - DNA, 25 bp, Homo sapien
atgatatcttcacatataagctcca

SEQ ID NO: 3341951 - DNA, 25 bp, Homo sapien
tcccagcattgggaaatctagaact

SEQ ID NO: 3341952 - DNA, 25 bp, Homo sapien
aaatctagaactgagaatgactggg

SEQ ID NO: 3341953 - DNA, 25 bp, Homo sapien
ttactcataacggatcaacagtttg

SEQ ID NO: 3341954 - DNA, 25 bp, Homo sapien
tggactttctaagggtgcagggctg

SEQ ID NO: 3341955 - DNA, 25 bp, Homo sapien
caacagtttgtgcaatggactttct

SEQ ID NO: 3341956 - DNA, 25 bp, Homo sapien
cggatcaacagtttgtgcaatggac

SEQ ID NO: 3341957 - DNA, 25 bp, Homo sapien
caagttagaggtcccaggttgtaag

SEQ ID NO: 3341958 - DNA, 25 bp, Homo sapien
aggtcccaggttgtaagtaaagatg

SEQ ID NO: 3341959 - DNA, 25 bp, Homo sapien
tcagaagttccaagttagaggtccc

SEQ ID NO: 3341960 - DNA, 25 bp, Homo sapien
cccaggttgtaagtaaagatggaca

SEQ ID NO: 3341961 - DNA, 25 bp, Homo sapien
aagtgctgttgctttgctgtctcca

SEQ ID NO: 3341962 - DNA, 25 bp, Homo sapien
tactcactggttcaataatagtcat

SEQ ID NO: 3341963 - DNA, 25 bp, Homo sapien
ctcctcaaagtgctgttgctttgct

SEQ ID NO: 3341964 - DNA, 25 bp, Homo sapien
ttttactcactggttcaataatagt

SEQ ID NO: 3341965 - DNA, 25 bp, Homo sapien
tactgtgattagtctgtttactcgg

SEQ ID NO: 3341966 - DNA, 25 bp, Homo sapien
tttactcggagaagcaactttccca

SEQ ID NO: 3341967 - DNA, 25 bp, Homo sapien
tagtctgtttactcggagaagcaac

SEQ ID NO: 3341968 - DNA, 25 bp, Homo sapien
tgtaaagtactgtgattagtctgtt

SEQ ID NO: 3341969 - DNA, 25 bp, Homo sapien
gaattgaatacatgagcagggaaca

SEQ ID NO: 3341970 - DNA, 25 bp, Homo sapien
agcagggaacaggttcactacatac

SEQ ID NO: 3341971 - DNA, 25 bp, Homo sapien
tctgaatacacttggaattgaatac

SEQ ID NO: 3341972 - DNA, 25 bp, Homo sapien
tacatgagcagggaacaggttcact

SEQ ID NO: 3341973 - DNA, 25 bp, Homo sapien
gactcccttttcaagagttatgtgg

SEQ ID NO: 3341974 - DNA, 25 bp, Homo sapien
tacctacaatgtgacaggcagtctg

SEQ ID NO: 3341975 - DNA, 25 bp, Homo sapien
cgaggaatgaaatgtacccttcagc

SEQ ID NO: 3341976 - DNA, 25 bp, Homo sapien
tgaggtaataaatgcagactccctt

SEQ ID NO: 3341977 - DNA, 25 bp, Homo sapien
tggctattaataagtttccagtgag

SEQ ID NO: 3341978 - DNA, 25 bp, Homo sapien
tctaaaaccatagacaagattttgg

SEQ ID NO: 3341979 - DNA, 25 bp, Homo sapien
tttccagtgagttcgccatgaagac

SEQ ID NO: 3341980 - DNA, 25 bp, Homo sapien
ccatagacaagattttgggtggcta

SEQ ID NO: 3341981 - DNA, 25 bp, Homo sapien
ttgctcaggcttactgggctctagt

SEQ ID NO: 3341982 - DNA, 25 bp, Homo sapien
ctcaggcttactgggctctagtcca

SEQ ID NO: 3341983 - DNA, 25 bp, Homo sapien
ctacagtccaatacctttatcaaat

SEQ ID NO: 3341984 - DNA, 25 bp, Homo sapien
cagtccaatacctttatcaaatctg

SEQ ID NO: 3341985 - DNA, 25 bp, Homo sapien
taaggatatcatcagggacactgta

SEQ ID NO: 3341986 - DNA, 25 bp, Homo sapien
ctaaggatatcatcagggacactgt

SEQ ID NO: 3341987 - DNA, 25 bp, Homo sapien
cactaaggatatcatcagggacact

SEQ ID NO: 3341988 - DNA, 25 bp, Homo sapien
ccactaaggatatcatcagggacac

SEQ ID NO: 3341989 - DNA, 25 bp, Homo sapien
ctggagaatataggagacttagtca

SEQ ID NO: 3341990 - DNA, 25 bp, Homo sapien
tggagaatataggagacttagtcat

SEQ ID NO: 3341991 - DNA, 25 bp, Homo sapien
gtgattaggattgatctctttatcc

SEQ ID NO: 3341992 - DNA, 25 bp, Homo sapien
tgttttgcaccggacagtgattagg

SEQ ID NO: 3341993 - DNA, 25 bp, Homo sapien
tgcaccggacagtgattaggattga

SEQ ID NO: 3341994 - DNA, 25 bp, Homo sapien
aacagctgttttgcaccggacagtg

SEQ ID NO: 3341995 - DNA, 25 bp, Homo sapien
attcagggctatcgtccatggctgc

SEQ ID NO: 3341996 - DNA, 25 bp, Homo sapien
agggctatcgtccatggctgcttta

SEQ ID NO: 3341997 - DNA, 25 bp, Homo sapien
gctatcgtccatggctgctttagca

SEQ ID NO: 3341998 - DNA, 25 bp, Homo sapien
tcaaaaacagaattcagggctatcg

SEQ ID NO: 3341999 - DNA, 25 bp, Homo sapien
gatgttcttgcaccacatcacgtgt

SEQ ID NO: 3342000 - DNA, 25 bp, Homo sapien
gcaaatccttctgagtgcggcccga

SEQ ID NO: 3342001 - DNA, 25 bp, Homo sapien
cctgaagatgctcgcttttggaaag

SEQ ID NO: 3342002 - DNA, 25 bp, Homo sapien
tttgtaattagatctatgggcctgc

SEQ ID NO: 3342003 - DNA, 25 bp, Homo sapien
gggcaatgagagtttttgcttcttg

SEQ ID NO: 3342004 - DNA, 25 bp, Homo sapien
tctcataatgttgggcaatgagagt

SEQ ID NO: 3342005 - DNA, 25 bp, Homo sapien
ggcaatgagagtttttgcttcttga

SEQ ID NO: 3342006 - DNA, 25 bp, Homo sapien
ttattttctcataatgttgggcaat

SEQ ID NO: 3342007 - DNA, 25 bp, Homo sapien
ttttcaggcatagcctcttcagtag

SEQ ID NO: 3342008 - DNA, 25 bp, Homo sapien
tcagtagtcatgaggggcagttaga

SEQ ID NO: 3342009 - DNA, 25 bp, Homo sapien
caggcatagcctcttcagtagtcat

SEQ ID NO: 3342010 - DNA, 25 bp, Homo sapien
tgctttttcaggcatagcctcttca

SEQ ID NO: 3342011 - DNA, 25 bp, Homo sapien
ctggggttggtgagacaagactatc

SEQ ID NO: 3342012 - DNA, 25 bp, Homo sapien
gggctggggttggtgagacaagact

SEQ ID NO: 3342013 - DNA, 25 bp, Homo sapien
gagacaagactatcattcatagtgg

SEQ ID NO: 3342014 - DNA, 25 bp, Homo sapien
tgagacaagactatcattcatagtg

SEQ ID NO: 3342015 - DNA, 25 bp, Homo sapien
gaatgctgtattgtctcattagcac

SEQ ID NO: 3342016 - DNA, 25 bp, Homo sapien
aaatgaatacactatgacactgaag

SEQ ID NO: 3342017 - DNA, 25 bp, Homo sapien
tatccccaaccaatatgcattgcga

SEQ ID NO: 3342018 - DNA, 25 bp, Homo sapien
gagggaagttaacagatacgaagag

SEQ ID NO: 3342019 - DNA, 25 bp, Homo sapien
cataaaagtatgtcctgggaagctt

SEQ ID NO: 3342020 - DNA, 25 bp, Homo sapien
gaagctttcctaactttggctcaag

SEQ ID NO: 3342021 - DNA, 25 bp, Homo sapien
taaaaattccacaggctagacacca

SEQ ID NO: 3342022 - DNA, 25 bp, Homo sapien
gatgtacagccaatcactaccaatg

SEQ ID NO: 3342023 - DNA, 25 bp, Homo sapien
tggtatggaacgtcattaaagcttt

SEQ ID NO: 3342024 - DNA, 25 bp, Homo sapien
ttctgagacatagatcgtgttcaag

SEQ ID NO: 3342025 - DNA, 25 bp, Homo sapien
catgttatgtgccatcataaggaca

SEQ ID NO: 3342026 - DNA, 25 bp, Homo sapien
cataaggacaattcccatgtaatat

SEQ ID NO: 3342027 - DNA, 25 bp, Homo sapien
tcattccaaggtcatttgttcttct

SEQ ID NO: 3342028 - DNA, 25 bp, Homo sapien
agtttttcattccaaggtcatttgt

SEQ ID NO: 3342029 - DNA, 25 bp, Homo sapien
ttttcattccaaggtcatttgttct

SEQ ID NO: 3342030 - DNA, 25 bp, Homo sapien
aagtttttcattccaaggtcatttg

SEQ ID NO: 3342031 - DNA, 25 bp, Homo sapien
taaatcctgccaatcttctgattgc

SEQ ID NO: 3342032 - DNA, 25 bp, Homo sapien
gcttcacagcatagaaaccttgtat

SEQ ID NO: 3342033 - DNA, 25 bp, Homo sapien
ctagaaacaaattcactgccccaaa

SEQ ID NO: 3342034 - DNA, 25 bp, Homo sapien
aattcactgccccaaaatcataata

SEQ ID NO: 3342035 - DNA, 25 bp, Homo sapien
cagcttgactttgttgggttcccaa

SEQ ID NO: 3342036 - DNA, 25 bp, Homo sapien
agcagaacaaaaattgaaccagcag

SEQ ID NO: 3342037 - DNA, 25 bp, Homo sapien
ctaaactagaaaagtcaggacagct

SEQ ID NO: 3342038 - DNA, 25 bp, Homo sapien
tacagcttgcaatccttctatttca

SEQ ID NO: 3342039 - DNA, 25 bp, Homo sapien
tagactggttagctctaaggccttt

SEQ ID NO: 3342040 - DNA, 25 bp, Homo sapien
taaggcctttgtaggcctgtggcct

SEQ ID NO: 3342041 - DNA, 25 bp, Homo sapien
ccaggactaccagaaaatggacgcg

SEQ ID NO: 3342042 - DNA, 25 bp, Homo sapien
aaatggacgcgaggaatccaggtaa

SEQ ID NO: 3342043 - DNA, 25 bp, Homo sapien
cccatactctgcatgacctctatat

SEQ ID NO: 3342044 - DNA, 25 bp, Homo sapien
acatttgccccatactctgcatgac

SEQ ID NO: 3342045 - DNA, 25 bp, Homo sapien
tgccccatactctgcatgacctcta

SEQ ID NO: 3342046 - DNA, 25 bp, Homo sapien
taatttttggcgaattaacatttgc

SEQ ID NO: 3342047 - DNA, 25 bp, Homo sapien
tactggatttgataactaaggaacc

SEQ ID NO: 3342048 - DNA, 25 bp, Homo sapien
ctactggatttgataactaaggaac

SEQ ID NO: 3342049 - DNA, 25 bp, Homo sapien
actggatttgataactaaggaacca

SEQ ID NO: 3342050 - DNA, 25 bp, Homo sapien
ctgacccttttctgagaagaggatt

SEQ ID NO: 3342051 - DNA, 25 bp, Homo sapien
ttgccaggaagaatctgagtgagcc

SEQ ID NO: 3342052 - DNA, 25 bp, Homo sapien
cttttctgagaagaggattaggtag

SEQ ID NO: 3342053 - DNA, 25 bp, Homo sapien
ggattaggtagggaagttgccagga

SEQ ID NO: 3342054 - DNA, 25 bp, Homo sapien
gaggtcaccttgtcacaagcataag

SEQ ID NO: 3342055 - DNA, 25 bp, Homo sapien
caagcataaggaggaagatccctaa

SEQ ID NO: 3342056 - DNA, 25 bp, Homo sapien
ccctaaccataggcagaagagttat

SEQ ID NO: 3342057 - DNA, 25 bp, Homo sapien
tttatttagcattagcatgtcttcc

SEQ ID NO: 3342058 - DNA, 25 bp, Homo sapien
acctgaatccagcaacgaccttcat

SEQ ID NO: 3342059 - DNA, 25 bp, Homo sapien
caccagatatcagaatgtagtactc

SEQ ID NO: 3342060 - DNA, 25 bp, Homo sapien
aataaatataaccaccactctatga

SEQ ID NO: 3342061 - DNA, 25 bp, Homo sapien
catataagaccttactgatggaagt

SEQ ID NO: 3342062 - DNA, 25 bp, Homo sapien
taggcctggtgatatagtatcgaca

SEQ ID NO: 3342063 - DNA, 25 bp, Homo sapien
ttgatgcatttgggcagcagaggca

SEQ ID NO: 3342064 - DNA, 25 bp, Homo sapien
gtccacttatggtgggagcagagca

SEQ ID NO: 3342065 - DNA, 25 bp, Homo sapien
aagtccacttatggtgggagcagag

SEQ ID NO: 3342066 - DNA, 25 bp, Homo sapien
agaggatggttgtccttgatgcatt

SEQ ID NO: 3342067 - DNA, 25 bp, Homo sapien
ttctaactgtgctatctgagttgct

SEQ ID NO: 3342068 - DNA, 25 bp, Homo sapien
ttccatatgattatctctagctttg

SEQ ID NO: 3342069 - DNA, 25 bp, Homo sapien
tccatatgattatctctagctttgt

SEQ ID NO: 3342070 - DNA, 25 bp, Homo sapien
ttgtttctaactgtgctatctgagt

SEQ ID NO: 3342071 - DNA, 25 bp, Homo sapien
ctaacccaactatcttctgggaaca

SEQ ID NO: 3342072 - DNA, 25 bp, Homo sapien
tcttctgggaacaataccaggatcc

SEQ ID NO: 3342073 - DNA, 25 bp, Homo sapien
tccttccgaacattcacttctgtaa

SEQ ID NO: 3342074 - DNA, 25 bp, Homo sapien
caggatccttccgaacattcacttc

SEQ ID NO: 3342075 - DNA, 25 bp, Homo sapien
ttcctactggtttcacaacaccagc

SEQ ID NO: 3342076 - DNA, 25 bp, Homo sapien
tcatctcctcggagtcctgagggcc

SEQ ID NO: 3342077 - DNA, 25 bp, Homo sapien
gggccttcctactggtttcacaaca

SEQ ID NO: 3342078 - DNA, 25 bp, Homo sapien
cctgagggccttcctactggtttca

SEQ ID NO: 3342079 - DNA, 25 bp, Homo sapien
caccagctccacaataatctaagga

SEQ ID NO: 3342080 - DNA, 25 bp, Homo sapien
tacttaaagctttactaccaccagc

SEQ ID NO: 3342081 - DNA, 25 bp, Homo sapien
tcagacattgaatactttacttaaa

SEQ ID NO: 3342082 - DNA, 25 bp, Homo sapien
cagacattgaatactttacttaaag

SEQ ID NO: 3342083 - DNA, 25 bp, Homo sapien
gtgttcactgtctacgcccacactc

SEQ ID NO: 3342084 - DNA, 25 bp, Homo sapien
acacaggagacagcacagtggcagt

SEQ ID NO: 3342085 - DNA, 25 bp, Homo sapien
agtgtctccaggaacatgaggctga

SEQ ID NO: 3342086 - DNA, 25 bp, Homo sapien
tgtctccaggaacatgaggctgacc

SEQ ID NO: 3342087 - DNA, 25 bp, Homo sapien
tgctttgaattaaagcccaggtggg

SEQ ID NO: 3342088 - DNA, 25 bp, Homo sapien
catgctttgaattaaagcccaggtg

SEQ ID NO: 3342089 - DNA, 25 bp, Homo sapien
atgctttgaattaaagcccaggtgg

SEQ ID NO: 3342090 - DNA, 25 bp, Homo sapien
gctttgaattaaagcccaggtgggc

SEQ ID NO: 3342091 - DNA, 25 bp, Homo sapien
gcctgacacatggtacgctctcgat

SEQ ID NO: 3342092 - DNA, 25 bp, Homo sapien
aatgctgggcttcggatttctgcgg

SEQ ID NO: 3342093 - DNA, 25 bp, Homo sapien
aatggtgtgccccaagtcaatgctg

SEQ ID NO: 3342094 - DNA, 25 bp, Homo sapien
gatgggtgctcacaaatgataggcc

SEQ ID NO: 3342095 - DNA, 25 bp, Homo sapien
agaccagggttctgggaatattcat

SEQ ID NO: 3342096 - DNA, 25 bp, Homo sapien
ccattgaatgtatctaagcaggtca

SEQ ID NO: 3342097 - DNA, 25 bp, Homo sapien
tcttcagagagttcccattgaatgt

SEQ ID NO: 3342098 - DNA, 25 bp, Homo sapien
tatcaacatctctacaagaccaggg

SEQ ID NO: 3342099 - DNA, 25 bp, Homo sapien
caattaatgtgctgtgagtgtcctg

SEQ ID NO: 3342100 - DNA, 25 bp, Homo sapien
ttacttgcaccttggcttttgttgc

SEQ ID NO: 3342101 - DNA, 25 bp, Homo sapien
tgaactgctggcaattaatgtgctg

SEQ ID NO: 3342102 - DNA, 25 bp, Homo sapien
gcttttgttgccttgtgaactgctg

SEQ ID NO: 3342103 - DNA, 25 bp, Homo sapien
cattgcagatcccaccattgctatg

SEQ ID NO: 3342104 - DNA, 25 bp, Homo sapien
agtagtgggccaccattgaaggatc

SEQ ID NO: 3342105 - DNA, 25 bp, Homo sapien
catgaaagtccatggagtagtgggc

SEQ ID NO: 3342106 - DNA, 25 bp, Homo sapien
tattggtctaagcaaaggcatagaa

SEQ ID NO: 3342107 - DNA, 25 bp, Homo sapien
aatacgtttgtcactctttctcttc

SEQ ID NO: 3342108 - DNA, 25 bp, Homo sapien
catccttaatctttcgagtaatacg

SEQ ID NO: 3342109 - DNA, 25 bp, Homo sapien
taatctttcgagtaatacgtttgtc

SEQ ID NO: 3342110 - DNA, 25 bp, Homo sapien
tcataagggctcctcatccttaatc

SEQ ID NO: 3342111 - DNA, 25 bp, Homo sapien
cagtgaccatggaaacgtggcctca

SEQ ID NO: 3342112 - DNA, 25 bp, Homo sapien
aaatgtgtctggcagtgaccatgga

SEQ ID NO: 3342113 - DNA, 25 bp, Homo sapien
ccatggaaacgtggcctcagggagt

SEQ ID NO: 3342114 - DNA, 25 bp, Homo sapien
aatgtgtctggcagtgaccatggaa

SEQ ID NO: 3342115 - DNA, 25 bp, Homo sapien
aggacagacaccacatcaaagggag

SEQ ID NO: 3342116 - DNA, 25 bp, Homo sapien
tatattgtgccctccggaaggacag

SEQ ID NO: 3342117 - DNA, 25 bp, Homo sapien
gagtgccattcacatcctagacatg

SEQ ID NO: 3342118 - DNA, 25 bp, Homo sapien
gtagagatttcaggcttcacagttg

SEQ ID NO: 3342119 - DNA, 25 bp, Homo sapien
tgttgcttcaaggttgtatcttgta

SEQ ID NO: 3342120 - DNA, 25 bp, Homo sapien
aaccttactgctaggggcttatggc

SEQ ID NO: 3342121 - DNA, 25 bp, Homo sapien
tcccaggattggtcagacctcagca

SEQ ID NO: 3342122 - DNA, 25 bp, Homo sapien
ggttgtatcttgtaaccttactgct

SEQ ID NO: 3342123 - DNA, 25 bp, Homo sapien
ttctgaccttattgtgactttcttc

SEQ ID NO: 3342124 - DNA, 25 bp, Homo sapien
tctgaccttattgtgactttcttca

SEQ ID NO: 3342125 - DNA, 25 bp, Homo sapien
ctgaccttattgtgactttcttcat

SEQ ID NO: 3342126 - DNA, 25 bp, Homo sapien
gccgactcgacaggatagtctctga

SEQ ID NO: 3342127 - DNA, 25 bp, Homo sapien
tgactttctgaggatccaaggatct

SEQ ID NO: 3342128 - DNA, 25 bp, Homo sapien
taaaggctcctaaggaattctgagg

SEQ ID NO: 3342129 - DNA, 25 bp, Homo sapien
gggatgcaaaaaaccagccgactcg

SEQ ID NO: 3342130 - DNA, 25 bp, Homo sapien
ttgaagtgctgagcctacccacaag

SEQ ID NO: 3342131 - DNA, 25 bp, Homo sapien
tcctttgaagtgctgagcctaccca

SEQ ID NO: 3342132 - DNA, 25 bp, Homo sapien
aagtgctgagcctacccacaaggat

SEQ ID NO: 3342133 - DNA, 25 bp, Homo sapien
gtgctgagcctacccacaaggatgt

SEQ ID NO: 3342134 - DNA, 25 bp, Homo sapien
ttctgccctctttgatgtacgtagc

SEQ ID NO: 3342135 - DNA, 25 bp, Homo sapien
ccctactgagtagccatgcggcatc

SEQ ID NO: 3342136 - DNA, 25 bp, Homo sapien
tgtacgtagcacttcccctactgag

SEQ ID NO: 3342137 - DNA, 25 bp, Homo sapien
ttgtcagcattgatattcccaaggt

SEQ ID NO: 3342138 - DNA, 25 bp, Homo sapien
tagaatatgtcttgattcctgtagc

SEQ ID NO: 3342139 - DNA, 25 bp, Homo sapien
tgtagaatatgtcttgattcctgta

SEQ ID NO: 3342140 - DNA, 25 bp, Homo sapien
gaatatgtcttgattcctgtagctc

SEQ ID NO: 3342141 - DNA, 25 bp, Homo sapien
aatatgtcttgattcctgtagctca

SEQ ID NO: 3342142 - DNA, 25 bp, Homo sapien
tcagaacacggctctagataaggag

SEQ ID NO: 3342143 - DNA, 25 bp, Homo sapien
gagaagacgacagacatccagtgtg

SEQ ID NO: 3342144 - DNA, 25 bp, Homo sapien
cctgggcccgggtaatgtgttgtct

SEQ ID NO: 3342145 - DNA, 25 bp, Homo sapien
gaaaccattactctcctgtgaggct

SEQ ID NO: 3342146 - DNA, 25 bp, Homo sapien
tgcgcctgagttcgcgggtcctccg

SEQ ID NO: 3342147 - DNA, 25 bp, Homo sapien
gcctgggaaccggagcctggcgtgc

SEQ ID NO: 3342148 - DNA, 25 bp, Homo sapien
tcaaaggctgcatccgttctgccaa

SEQ ID NO: 3342149 - DNA, 25 bp, Homo sapien
cagctgttcggagagactcgttcca

SEQ ID NO: 3342150 - DNA, 25 bp, Homo sapien
cattgcgaggagtggttggatgcct

SEQ ID NO: 3342151 - DNA, 25 bp, Homo sapien
ttcctgccaggtatgaggaagggac

SEQ ID NO: 3342152 - DNA, 25 bp, Homo sapien
ccagcaccatcaggcgggctgagtc

SEQ ID NO: 3342153 - DNA, 25 bp, Homo sapien
ctgtgttgaggctgaagttagttcc

SEQ ID NO: 3342154 - DNA, 25 bp, Homo sapien
caaattgcttgcctaaaggccaaac

SEQ ID NO: 3342155 - DNA, 25 bp, Homo sapien
aaaccacccttcatttcatgagaga

SEQ ID NO: 3342156 - DNA, 25 bp, Homo sapien
tctgagcagtctgcggttctggttc

SEQ ID NO: 3342157 - DNA, 25 bp, Homo sapien
gaaaaatgtgatgtgccttgctctg

SEQ ID NO: 3342158 - DNA, 25 bp, Homo sapien
aaaggcatttccaacaattcaatta

SEQ ID NO: 3342159 - DNA, 25 bp, Homo sapien
gagaagagctgagtgtgtaggaaaa

SEQ ID NO: 3342160 - DNA, 25 bp, Homo sapien
taatgatgtttaaaatttaggagca

SEQ ID NO: 3342161 - DNA, 25 bp, Homo sapien
aaagagggaccacttgaagtctgtt

SEQ ID NO: 3342162 - DNA, 25 bp, Homo sapien
cctcattgtccaggcacaggcaaac

SEQ ID NO: 3342163 - DNA, 25 bp, Homo sapien
tctcaagcttgtagatgcatgggaa

SEQ ID NO: 3342164 - DNA, 25 bp, Homo sapien
aaaccgcagtagtgagctttggtac

SEQ ID NO: 3342165 - DNA, 25 bp, Homo sapien
ctgaatacagcacccggtagcctct

SEQ ID NO: 3342166 - DNA, 25 bp, Homo sapien
tggtattcatgatgccaccggttaa

SEQ ID NO: 3342167 - DNA, 25 bp, Homo sapien
tagcgggtttggtattcatgatgcc

SEQ ID NO: 3342168 - DNA, 25 bp, Homo sapien
tcagtagcgggtttggtattcatga

SEQ ID NO: 3342169 - DNA, 25 bp, Homo sapien
gatgccaccggttaaagtcgttgta

SEQ ID NO: 3342170 - DNA, 25 bp, Homo sapien
gcctctggggagttcgaattgggtg

SEQ ID NO: 3342171 - DNA, 25 bp, Homo sapien
gtggggggaggagcgtccgccattg

SEQ ID NO: 3342172 - DNA, 25 bp, Homo sapien
ctctggggagttcgaattgggtgga

SEQ ID NO: 3342173 - DNA, 25 bp, Homo sapien
aggagcgtccgccattggtgaggct

SEQ ID NO: 3342174 - DNA, 25 bp, Homo sapien
cacccaatacaggagcacccagatt

SEQ ID NO: 3342175 - DNA, 25 bp, Homo sapien
atacaggagcacccagattcataaa

SEQ ID NO: 3342176 - DNA, 25 bp, Homo sapien
ccaatacaggagcacccagattcat

SEQ ID NO: 3342177 - DNA, 25 bp, Homo sapien
acaagacctatcctaaatatatatg

SEQ ID NO: 3342178 - DNA, 25 bp, Homo sapien
tcctggataggcaaagagctgcttg

SEQ ID NO: 3342179 - DNA, 25 bp, Homo sapien
tctcctcctgtgagcaggtactgcc

SEQ ID NO: 3342180 - DNA, 25 bp, Homo sapien
tctggtcgtaagacagcgccatggc

SEQ ID NO: 3342181 - DNA, 25 bp, Homo sapien
gattccagcgtcacatcctggatag

SEQ ID NO: 3342182 - DNA, 25 bp, Homo sapien
gcggtgccatttcgggtagacccag

SEQ ID NO: 3342183 - DNA, 25 bp, Homo sapien
ggaccttgagaaactagcctctgaa

SEQ ID NO: 3342184 - DNA, 25 bp, Homo sapien
gctattcagatgtaaagagaatcca

SEQ ID NO: 3342185 - DNA, 25 bp, Homo sapien
tcatatcataatttgaagcccagct

SEQ ID NO: 3342186 - DNA, 25 bp, Homo sapien
tgaatgctgaagagtccccagggca

SEQ ID NO: 3342187 - DNA, 25 bp, Homo sapien
tccccacttgacacacgttgaggta

SEQ ID NO: 3342188 - DNA, 25 bp, Homo sapien
gaaaagaggccctcggcaatccaaa

SEQ ID NO: 3342189 - DNA, 25 bp, Homo sapien
cgttgaggtaaaagtcgtgaatgct

SEQ ID NO: 3342190 - DNA, 25 bp, Homo sapien
cactgaatgtacagaagaggccgtt

SEQ ID NO: 3342191 - DNA, 25 bp, Homo sapien
tcatagaatatgacacaatgaccct

SEQ ID NO: 3342192 - DNA, 25 bp, Homo sapien
catctgtttccatcgtggcctggag

SEQ ID NO: 3342193 - DNA, 25 bp, Homo sapien
aggcagttttcaggaccctccaagg

SEQ ID NO: 3342194 - DNA, 25 bp, Homo sapien
gctccgcacacaccgcagcacatgt

SEQ ID NO: 3342195 - DNA, 25 bp, Homo sapien
cctcatagtcatggccggtcaaaat

SEQ ID NO: 3342196 - DNA, 25 bp, Homo sapien
cggtcaaaatggcccgaggagcagc

SEQ ID NO: 3342197 - DNA, 25 bp, Homo sapien
ttgtgaaccactcaacaccaggcct

SEQ ID NO: 3342198 - DNA, 25 bp, Homo sapien
ttgttttcttgggagcatggtggaa

SEQ ID NO: 3342199 - DNA, 25 bp, Homo sapien
taagttaccatttcatggatggtga

SEQ ID NO: 3342200 - DNA, 25 bp, Homo sapien
gacaaagtaaacaaaggacagatag

SEQ ID NO: 3342201 - DNA, 25 bp, Homo sapien
cagaggatgatgtcacttaagaaca

SEQ ID NO: 3342202 - DNA, 25 bp, Homo sapien
cacgtgaccctgagagaatgtagca

SEQ ID NO: 3342203 - DNA, 25 bp, Homo sapien
caataccacagcaaaagagttgcat

SEQ ID NO: 3342204 - DNA, 25 bp, Homo sapien
tatgactcagaacgagcaaggcaag

SEQ ID NO: 3342205 - DNA, 25 bp, Homo sapien
gggttatctccaatcccactgcatt

SEQ ID NO: 3342206 - DNA, 25 bp, Homo sapien
tctgaagtgatgacaaagcactggg

SEQ ID NO: 3342207 - DNA, 25 bp, Homo sapien
gcactgggaatgcacttgaatactt

SEQ ID NO: 3342208 - DNA, 25 bp, Homo sapien
ccacagacgagaatatagcggttgt

SEQ ID NO: 3342209 - DNA, 25 bp, Homo sapien
gaatagactctgaaacttttatccc

SEQ ID NO: 3342210 - DNA, 25 bp, Homo sapien
gacatagagcaacaccgagcacatg

SEQ ID NO: 3342211 - DNA, 25 bp, Homo sapien
gagacacattcccagataagagtac

SEQ ID NO: 3342212 - DNA, 25 bp, Homo sapien
tcgactgtgccattatcagaaacgg

SEQ ID NO: 3342213 - DNA, 25 bp, Homo sapien
gtgtgtttcaaagtgctacggtgca

SEQ ID NO: 3342214 - DNA, 25 bp, Homo sapien
gactgatggatctgttgccctcatg

SEQ ID NO: 3342215 - DNA, 25 bp, Homo sapien
ggattaatgggctagaaagtgacag

SEQ ID NO: 3342216 - DNA, 25 bp, Homo sapien
tgaaaagggcagaatcctagttggg

SEQ ID NO: 3342217 - DNA, 25 bp, Homo sapien
catagtgttactacagagagacagt

SEQ ID NO: 3342218 - DNA, 25 bp, Homo sapien
gatgaaataccagcatagccacagc

SEQ ID NO: 3342219 - DNA, 25 bp, Homo sapien
aattttcagtgacacgcgtcctagg

SEQ ID NO: 3342220 - DNA, 25 bp, Homo sapien
tcagggccaccatacagagcttaat

SEQ ID NO: 3342221 - DNA, 25 bp, Homo sapien
ggagctccatcacattaccggtgca

SEQ ID NO: 3342222 - DNA, 25 bp, Homo sapien
tatggctggtcttgtacagcacctt

SEQ ID NO: 3342223 - DNA, 25 bp, Homo sapien
aggatcgatttccactggcagctgg

SEQ ID NO: 3342224 - DNA, 25 bp, Homo sapien
gctggtatggctggtcttgtacagc

SEQ ID NO: 3342225 - DNA, 25 bp, Homo sapien
ggtatggctggtcttgtacagcacc

SEQ ID NO: 3342226 - DNA, 25 bp, Homo sapien
atcacagcgggagttgccaaaccag

SEQ ID NO: 3342227 - DNA, 25 bp, Homo sapien
agttggagggaaacttgaggaccat

SEQ ID NO: 3342228 - DNA, 25 bp, Homo sapien
ggaccatgataacatcctgctgggc

SEQ ID NO: 3342229 - DNA, 25 bp, Homo sapien
tgttggctgccacgtgagtaacagg

SEQ ID NO: 3342230 - DNA, 25 bp, Homo sapien
cttgcatggcagaacctctgggagg

SEQ ID NO: 3342231 - DNA, 25 bp, Homo sapien
tgcatggcagaacctctgggaggat

SEQ ID NO: 3342232 - DNA, 25 bp, Homo sapien
atggcagaacctctgggaggatggg

SEQ ID NO: 3342233 - DNA, 25 bp, Homo sapien
cacttgcatggcagaacctctggga

SEQ ID NO: 3342234 - DNA, 25 bp, Homo sapien
caaaacttcggatttgagcttcaac

SEQ ID NO: 3342235 - DNA, 25 bp, Homo sapien
aacttcggatttgagcttcaacagc

SEQ ID NO: 3342236 - DNA, 25 bp, Homo sapien
tccaaaacttcggatttgagcttca

SEQ ID NO: 3342237 - DNA, 25 bp, Homo sapien
tctgtccaaaacttcggatttgagc

SEQ ID NO: 3342238 - DNA, 25 bp, Homo sapien
ggagtgtggtggtgcaaccttgtct

SEQ ID NO: 3342239 - DNA, 25 bp, Homo sapien
tgcaacctccgtctccgaggttcaa

SEQ ID NO: 3342240 - DNA, 25 bp, Homo sapien
tccgaggttcaagtgattctcctgc

SEQ ID NO: 3342241 - DNA, 25 bp, Homo sapien
gtgtggtggtgcaaccttgtctcac

SEQ ID NO: 3342242 - DNA, 25 bp, Homo sapien
tagctgtccatctactacagcataa

SEQ ID NO: 3342243 - DNA, 25 bp, Homo sapien
ttgtagctgtccatctactacagca

SEQ ID NO: 3342244 - DNA, 25 bp, Homo sapien
tccatctactacagcataatcccag

SEQ ID NO: 3342245 - DNA, 25 bp, Homo sapien
tgtccatctactacagcataatccc

SEQ ID NO: 3342246 - DNA, 25 bp, Homo sapien
gggtcatgtaaacttaaacactgct

SEQ ID NO: 3342247 - DNA, 25 bp, Homo sapien
aaacagacctcagagtgattacgca

SEQ ID NO: 3342248 - DNA, 25 bp, Homo sapien
cagacctcagagtgattacgcatag

SEQ ID NO: 3342249 - DNA, 25 bp, Homo sapien
ccttggataagatatctgatttgct

SEQ ID NO: 3342250 - DNA, 25 bp, Homo sapien
tgccgccttgcaaagaaggatatgt

SEQ ID NO: 3342251 - DNA, 25 bp, Homo sapien
acatcgtgagaaggaccccgtcgga

SEQ ID NO: 3342252 - DNA, 25 bp, Homo sapien
ttttataacgggcatcctccttcgc

SEQ ID NO: 3342253 - DNA, 25 bp, Homo sapien
tatgataatacggtttggctgcgtc

SEQ ID NO: 3342254 - DNA, 25 bp, Homo sapien
taatcttagataatctagtggacac

SEQ ID NO: 3342255 - DNA, 25 bp, Homo sapien
gttttctcatactgcaccaacatta

SEQ ID NO: 3342256 - DNA, 25 bp, Homo sapien
tacagattgctataaagattcaacc

SEQ ID NO: 3342257 - DNA, 25 bp, Homo sapien
aggatgaactacttctcttactggg

SEQ ID NO: 3342258 - DNA, 25 bp, Homo sapien
tctctcaacacaggatcagttattg

SEQ ID NO: 3342259 - DNA, 25 bp, Homo sapien
cacattgagggctcggacagcttct

SEQ ID NO: 3342260 - DNA, 25 bp, Homo sapien
tattgaattcagattgacagctcct

SEQ ID NO: 3342261 - DNA, 25 bp, Homo sapien
gagatcaatccattggtgaagctgg

SEQ ID NO: 3342262 - DNA, 25 bp, Homo sapien
taccactacttccactcccaggctt

SEQ ID NO: 3342263 - DNA, 25 bp, Homo sapien
caggcttctagaaggcccaaggtac

SEQ ID NO: 3342264 - DNA, 25 bp, Homo sapien
cccaaggtacaaaggttctgagata

SEQ ID NO: 3342265 - DNA, 25 bp, Homo sapien
ctgtaccactacttccactcccagg

SEQ ID NO: 3342266 - DNA, 25 bp, Homo sapien
tatatgatataaagtcctttcaact

SEQ ID NO: 3342267 - DNA, 25 bp, Homo sapien
tttcagcctaattagaactgtttca

SEQ ID NO: 3342268 - DNA, 25 bp, Homo sapien
atatgatataaagtcctttcaactt

SEQ ID NO: 3342269 - DNA, 25 bp, Homo sapien
gatttatcgtacaatctgcctccag

SEQ ID NO: 3342270 - DNA, 25 bp, Homo sapien
aaaagtccatactatttacgaggca

SEQ ID NO: 3342271 - DNA, 25 bp, Homo sapien
ctttccctaaagcagtggatctcca

SEQ ID NO: 3342272 - DNA, 25 bp, Homo sapien
caatccacagtctctgtttcagtag

SEQ ID NO: 3342273 - DNA, 25 bp, Homo sapien
tgagttaatgttcctcggcacaccc

SEQ ID NO: 3342274 - DNA, 25 bp, Homo sapien
ccgaaactcggatttatttgacagc

SEQ ID NO: 3342275 - DNA, 25 bp, Homo sapien
caaaaacaggttcacaagctgccca

SEQ ID NO: 3342276 - DNA, 25 bp, Homo sapien
tagcaaatgtttatgccgaaactcg

SEQ ID NO: 3342277 - DNA, 25 bp, Homo sapien
cgcgcctggccgcaagctactattt

SEQ ID NO: 3342278 - DNA, 25 bp, Homo sapien
cgcctggccgcaagctactatttat

SEQ ID NO: 3342279 - DNA, 25 bp, Homo sapien
gcctggccgcaagctactatttatc

SEQ ID NO: 3342280 - DNA, 25 bp, Homo sapien
gcgcctggccgcaagctactattta

SEQ ID NO: 3342281 - DNA, 25 bp, Homo sapien
tctgagactattatctgctccagat

SEQ ID NO: 3342282 - DNA, 25 bp, Homo sapien
aaatatgctatgtactggttttcag

SEQ ID NO: 3342283 - DNA, 25 bp, Homo sapien
gctccagattctgctacctaaaaag

SEQ ID NO: 3342284 - DNA, 25 bp, Homo sapien
aaaagccacgttcacccactctgta

SEQ ID NO: 3342285 - DNA, 25 bp, Homo sapien
gagatgagaattactgactaaaaaa

SEQ ID NO: 3342286 - DNA, 25 bp, Homo sapien
atcacctagggagttattccagggc

SEQ ID NO: 3342287 - DNA, 25 bp, Homo sapien
tgtagaatgcacacattagcaatat

SEQ ID NO: 3342288 - DNA, 25 bp, Homo sapien
ggaaaagaagatgtctacttattat

SEQ ID NO: 3342289 - DNA, 25 bp, Homo sapien
ggtaaataccacaatgagagttctt

SEQ ID NO: 3342290 - DNA, 25 bp, Homo sapien
accctgttggcctaagagttgctca

SEQ ID NO: 3342291 - DNA, 25 bp, Homo sapien
aaggttcaaagttatgtcataaggc

SEQ ID NO: 3342292 - DNA, 25 bp, Homo sapien
tgttatgaaaaaagatcctactcct

SEQ ID NO: 3342293 - DNA, 25 bp, Homo sapien
gagacaatccattgtgaatacagag

SEQ ID NO: 3342294 - DNA, 25 bp, Homo sapien
acataatgtcagtgttgtcggcaac

SEQ ID NO: 3342295 - DNA, 25 bp, Homo sapien
atgaatggattcaccaacaaattcc

SEQ ID NO: 3342296 - DNA, 25 bp, Homo sapien
tagtggcaggatcaataatgaatgg

SEQ ID NO: 3342297 - DNA, 25 bp, Homo sapien
gaaggaacggagtatctgcaactaa

SEQ ID NO: 3342298 - DNA, 25 bp, Homo sapien
tgataactgccagaagtctacagca

SEQ ID NO: 3342299 - DNA, 25 bp, Homo sapien
gagtgaccctaccactaactgtgaa

SEQ ID NO: 3342300 - DNA, 25 bp, Homo sapien
gaatacacttttccagcctaagcca

SEQ ID NO: 3342301 - DNA, 25 bp, Homo sapien
cctctttccaaagggctaaaatgtg

SEQ ID NO: 3342302 - DNA, 25 bp, Homo sapien
tgatgtgcccaacttcctagtcaca

SEQ ID NO: 3342303 - DNA, 25 bp, Homo sapien
ggaacccgggtcctttgatgacatc

SEQ ID NO: 3342304 - DNA, 25 bp, Homo sapien
gacatcatggattcaatttgctcta

SEQ ID NO: 3342305 - DNA, 25 bp, Homo sapien
caatatttatgattgctgtgacaag

SEQ ID NO: 3342306 - DNA, 25 bp, Homo sapien
caatgtacgatacaaaaaggtattc

SEQ ID NO: 3342307 - DNA, 25 bp, Homo sapien
tattcttaaaataggtatggtctca

SEQ ID NO: 3342308 - DNA, 25 bp, Homo sapien
ataatgtagagtataacaacacagg

SEQ ID NO: 3342309 - DNA, 25 bp, Homo sapien
catgtagatggaactaccggcatgt

SEQ ID NO: 3342310 - DNA, 25 bp, Homo sapien
cccatgtagatggaactaccggcat

SEQ ID NO: 3342311 - DNA, 25 bp, Homo sapien
tccatcctatactgccaaatataaa

SEQ ID NO: 3342312 - DNA, 25 bp, Homo sapien
tgaaaattccatcctatactgccaa

SEQ ID NO: 3342313 - DNA, 25 bp, Homo sapien
gcagagccgctgcttttcagataga

SEQ ID NO: 3342314 - DNA, 25 bp, Homo sapien
gagttgcatgaaagcatccagaggc

SEQ ID NO: 3342315 - DNA, 25 bp, Homo sapien
tatagaaaggaatcaaccggaccac

SEQ ID NO: 3342316 - DNA, 25 bp, Homo sapien
taagcagtcatttatcgggtaaccc

SEQ ID NO: 3342317 - DNA, 25 bp, Homo sapien
tatatccctgttcaacctgaggacc

SEQ ID NO: 3342318 - DNA, 25 bp, Homo sapien
cctgccaacagagggctgaaaacag

SEQ ID NO: 3342319 - DNA, 25 bp, Homo sapien
gatcccctgctaccaaccgagtatt

SEQ ID NO: 3342320 - DNA, 25 bp, Homo sapien
gaaaacagggattgtgctgtctggc

SEQ ID NO: 3342321 - DNA, 25 bp, Homo sapien
taaaactcaagcagtaggaatcact

SEQ ID NO: 3342322 - DNA, 25 bp, Homo sapien
taaagcaattacgtaaaccacaatc

SEQ ID NO: 3342323 - DNA, 25 bp, Homo sapien
tacaatcatgcccaagtttagagcg

SEQ ID NO: 3342324 - DNA, 25 bp, Homo sapien
taacaaatgcacagttaatactgca

SEQ ID NO: 3342325 - DNA, 25 bp, Homo sapien
aggaagttcgacatcagacactact

SEQ ID NO: 3342326 - DNA, 25 bp, Homo sapien
aattcttctgaggttttggcccaag

SEQ ID NO: 3342327 - DNA, 25 bp, Homo sapien
aggaggaagttcgacatcagacact

SEQ ID NO: 3342328 - DNA, 25 bp, Homo sapien
attcttctgaggttttggcccaagg

SEQ ID NO: 3342329 - DNA, 25 bp, Homo sapien
ttataattattgaagttgacaaaca

SEQ ID NO: 3342330 - DNA, 25 bp, Homo sapien
tataattattgaagttgacaaacat

SEQ ID NO: 3342331 - DNA, 25 bp, Homo sapien
cactccaagattataattattgaag

SEQ ID NO: 3342332 - DNA, 25 bp, Homo sapien
caagattataattattgaagttgac

SEQ ID NO: 3342333 - DNA, 25 bp, Homo sapien
gataataaaattcagggatcaactc

SEQ ID NO: 3342334 - DNA, 25 bp, Homo sapien
ctcagggagataataaaattcaggg

SEQ ID NO: 3342335 - DNA, 25 bp, Homo sapien
gggagataataaaattcagggatca

SEQ ID NO: 3342336 - DNA, 25 bp, Homo sapien
tcagggagataataaaattcaggga

SEQ ID NO: 3342337 - DNA, 25 bp, Homo sapien
tcacatttcaaaacggtcaagttta

SEQ ID NO: 3342338 - DNA, 25 bp, Homo sapien
ctcacatttcaaaacggtcaagttt

SEQ ID NO: 3342339 - DNA, 25 bp, Homo sapien
tcacgtcactgtcctagcttcatct

SEQ ID NO: 3342340 - DNA, 25 bp, Homo sapien
cacgtcactgtcctagcttcatcta

SEQ ID NO: 3342341 - DNA, 25 bp, Homo sapien
ggagtttctccatagcccttgattc

SEQ ID NO: 3342342 - DNA, 25 bp, Homo sapien
aggagtttctccatagcccttgatt

SEQ ID NO: 3342343 - DNA, 25 bp, Homo sapien
ctgttgccaacaacttgaaggagtt

SEQ ID NO: 3342344 - DNA, 25 bp, Homo sapien
ttgccaacaacttgaaggagtttct

SEQ ID NO: 3342345 - DNA, 25 bp, Homo sapien
acatatcaacagcaatagtcacaaa

SEQ ID NO: 3342346 - DNA, 25 bp, Homo sapien
tatcaacagcaatagtcacaaatac

SEQ ID NO: 3342347 - DNA, 25 bp, Homo sapien
acagcaatagtcacaaatacattga

SEQ ID NO: 3342348 - DNA, 25 bp, Homo sapien
atcaacagcaatagtcacaaataca

SEQ ID NO: 3342349 - DNA, 25 bp, Homo sapien
caccaggtgagcctctggaacccac

SEQ ID NO: 3342350 - DNA, 25 bp, Homo sapien
ccaccaggtgagcctctggaaccca

SEQ ID NO: 3342351 - DNA, 25 bp, Homo sapien
gcatgtgctgcggtttgccctggaa

SEQ ID NO: 3342352 - DNA, 25 bp, Homo sapien
ctgcatgtgctgcggtttgccctgg

SEQ ID NO: 3342353 - DNA, 25 bp, Homo sapien
catgtgctgcggtttgccctggaac

SEQ ID NO: 3342354 - DNA, 25 bp, Homo sapien
atgtgctgcggtttgccctggaact

SEQ ID NO: 3342355 - DNA, 25 bp, Homo sapien
ggaagagctccaaggcatctgacaa

SEQ ID NO: 3342356 - DNA, 25 bp, Homo sapien
caaggcatctgacaattataaagtg

SEQ ID NO: 3342357 - DNA, 25 bp, Homo sapien
taccaccaccaaagtacaggaccaa

SEQ ID NO: 3342358 - DNA, 25 bp, Homo sapien
tataaagtgccaggaagctaccacc

SEQ ID NO: 3342359 - DNA, 25 bp, Homo sapien
tttcttggctctggagaagtcgttc

SEQ ID NO: 3342360 - DNA, 25 bp, Homo sapien
cttggctctggagaagtcgttcacc

SEQ ID NO: 3342361 - DNA, 25 bp, Homo sapien
tggctctggagaagtcgttcaccca

SEQ ID NO: 3342362 - DNA, 25 bp, Homo sapien
cttcttgttggctttcttggctctg

SEQ ID NO: 3342363 - DNA, 25 bp, Homo sapien
gtgagctgttgccagcgggccccat

SEQ ID NO: 3342364 - DNA, 25 bp, Homo sapien
cgggcctgctttgagtccacagtcc

SEQ ID NO: 3342365 - DNA, 25 bp, Homo sapien
ctcccgggcctgctttgagtccaca

SEQ ID NO: 3342366 - DNA, 25 bp, Homo sapien
ggctctggcggtgagctgttgccag

SEQ ID NO: 3342367 - DNA, 25 bp, Homo sapien
taatttctttccatggacctgggtg

SEQ ID NO: 3342368 - DNA, 25 bp, Homo sapien
tcatctggatcaaatctaaggaata

SEQ ID NO: 3342369 - DNA, 25 bp, Homo sapien
cttcatctggatcaaatctaaggaa

SEQ ID NO: 3342370 - DNA, 25 bp, Homo sapien
ttcttcatctggatcaaatctaagg

SEQ ID NO: 3342371 - DNA, 25 bp, Homo sapien
catattttcccttcaacaaaaagat

SEQ ID NO: 3342372 - DNA, 25 bp, Homo sapien
aaattgatgaaaaagttcgatctgc

SEQ ID NO: 3342373 - DNA, 25 bp, Homo sapien
cgctgactgtttcgccaagctctgg

SEQ ID NO: 3342374 - DNA, 25 bp, Homo sapien
gaaaaagttcgatctgcatgatcaa

SEQ ID NO: 3342375 - DNA, 25 bp, Homo sapien
ttaatatcagaggtatcacgctgac

SEQ ID NO: 3342376 - DNA, 25 bp, Homo sapien
tcttagcagccatgcaagaacaaaa

SEQ ID NO: 3342377 - DNA, 25 bp, Homo sapien
tgcagttgagtaatgagtaccatag

SEQ ID NO: 3342378 - DNA, 25 bp, Homo sapien
tcccatgattcataacgctcagcga

SEQ ID NO: 3342379 - DNA, 25 bp, Homo sapien
taacgctcagcgaagaatgctgctc

SEQ ID NO: 3342380 - DNA, 25 bp, Homo sapien
tttaatttgtgtaaggtaagctaca

SEQ ID NO: 3342381 - DNA, 25 bp, Homo sapien
caccacaaccaacctcaaaaatttg

SEQ ID NO: 3342382 - DNA, 25 bp, Homo sapien
taaggtaagctacatggtcaatttg

SEQ ID NO: 3342383 - DNA, 25 bp, Homo sapien
caatttgttatattagtgaaactgc

SEQ ID NO: 3342384 - DNA, 25 bp, Homo sapien
gatgacccaaggaaacactggatac

SEQ ID NO: 3342385 - DNA, 25 bp, Homo sapien
tggtgggcaaggtaagatccagttc

SEQ ID NO: 3342386 - DNA, 25 bp, Homo sapien
agttcttctgattcataattagtga

SEQ ID NO: 3342387 - DNA, 25 bp, Homo sapien
gattcataattagtgatgacccaag

SEQ ID NO: 3342388 - DNA, 25 bp, Homo sapien
tctctgtgttgccatcgctgggtca

SEQ ID NO: 3342389 - DNA, 25 bp, Homo sapien
ctgctatcgtgttgagaaacatcaa

SEQ ID NO: 3342390 - DNA, 25 bp, Homo sapien
gccttaaaaagctgacgtggactag

SEQ ID NO: 3342391 - DNA, 25 bp, Homo sapien
cgctgggtcatattagaagccttaa

SEQ ID NO: 3342392 - DNA, 25 bp, Homo sapien
tgccaccaatgacaagattccatgt

SEQ ID NO: 3342393 - DNA, 25 bp, Homo sapien
caatgtactgatatcctttcgtgtg

SEQ ID NO: 3342394 - DNA, 25 bp, Homo sapien
gatagatgcccagtagtgggaactc

SEQ ID NO: 3342395 - DNA, 25 bp, Homo sapien
tctggatcacatgggagcactattt

SEQ ID NO: 3342396 - DNA, 25 bp, Homo sapien
gtttgaggcaatccaaaacttgttc

SEQ ID NO: 3342397 - DNA, 25 bp, Homo sapien
cgaggtagatagttaaccactttct

SEQ ID NO: 3342398 - DNA, 25 bp, Homo sapien
caaaacttgttccaacgccaacacg

SEQ ID NO: 3342399 - DNA, 25 bp, Homo sapien
tccaacgccaacacgaggtagatag

SEQ ID NO: 3342400 - DNA, 25 bp, Homo sapien
tttgccataaagatctccagggctg

SEQ ID NO: 3342401 - DNA, 25 bp, Homo sapien
gattgatcgtatctctgtgaacagc

SEQ ID NO: 3342402 - DNA, 25 bp, Homo sapien
ttgcaaaagataacgacgagaaaag

SEQ ID NO: 3342403 - DNA, 25 bp, Homo sapien
gataacgacgagaaaagattgatcg

SEQ ID NO: 3342404 - DNA, 25 bp, Homo sapien
tctattccttactagagagttaaaa

SEQ ID NO: 3342405 - DNA, 25 bp, Homo sapien
catctttgatgggtatcaaaagccc

SEQ ID NO: 3342406 - DNA, 25 bp, Homo sapien
cccatattgattctctatagtcata

SEQ ID NO: 3342407 - DNA, 25 bp, Homo sapien
caaaattacagttagacagtaataa

SEQ ID NO: 3342408 - DNA, 25 bp, Homo sapien
atcagcctaaaggctgatctttcag

SEQ ID NO: 3342409 - DNA, 25 bp, Homo sapien
tcagcctaaaggctgatctttcagc

SEQ ID NO: 3342410 - DNA, 25 bp, Homo sapien
catcagcctaaaggctgatctttca

SEQ ID NO: 3342411 - DNA, 25 bp, Homo sapien
tagactcccacacaacaataataat

SEQ ID NO: 3342412 - DNA, 25 bp, Homo sapien
caccaatgagaacaaagacacgaca

SEQ ID NO: 3342413 - DNA, 25 bp, Homo sapien
cacacaacaataataatgggagact

SEQ ID NO: 3342414 - DNA, 25 bp, Homo sapien
agaaactcaatcaaaaccgctcaac

SEQ ID NO: 3342415 - DNA, 25 bp, Homo sapien
gtctcaggatataaaatcaatggca

SEQ ID NO: 3342416 - DNA, 25 bp, Homo sapien
ggcaatccgtcaggagaaagaaaga

SEQ ID NO: 3342417 - DNA, 25 bp, Homo sapien
tcaggatataaaatcaatggcaaaa

SEQ ID NO: 3342418 - DNA, 25 bp, Homo sapien
ccagggcaatccgtcaggagaaaga

SEQ ID NO: 3342419 - DNA, 25 bp, Homo sapien
gatttcatcccgaatcactgcttct

SEQ ID NO: 3342420 - DNA, 25 bp, Homo sapien
cactgcttctattgttgccaaagca

SEQ ID NO: 3342421 - DNA, 25 bp, Homo sapien
tctattgttgccaaagcacgctggg

SEQ ID NO: 3342422 - DNA, 25 bp, Homo sapien
gaattcttagccttcttagtttaca

SEQ ID NO: 3342423 - DNA, 25 bp, Homo sapien
gacactgctgtttcataggataggt

SEQ ID NO: 3342424 - DNA, 25 bp, Homo sapien
taacaggtgtggaacttgatgactt

SEQ ID NO: 3342425 - DNA, 25 bp, Homo sapien
tacacatcctagctaacatttggtg

SEQ ID NO: 3342426 - DNA, 25 bp, Homo sapien
gaaaggttgctcacatctcttcact

SEQ ID NO: 3342427 - DNA, 25 bp, Homo sapien
caaatgttgggacttgaaaaggcca

SEQ ID NO: 3342428 - DNA, 25 bp, Homo sapien
ccccaattaacgatcctgccaaatg

SEQ ID NO: 3342429 - DNA, 25 bp, Homo sapien
gaaaaggccacagctttatacacaa

SEQ ID NO: 3342430 - DNA, 25 bp, Homo sapien
cagctttatacacaattaacagtca

SEQ ID NO: 3342431 - DNA, 25 bp, Homo sapien
ttctgatgcaacagctaattcagaa

SEQ ID NO: 3342432 - DNA, 25 bp, Homo sapien
aataattcgcaacttaactctgtgg

SEQ ID NO: 3342433 - DNA, 25 bp, Homo sapien
ggtttatatgtactgaatactggct

SEQ ID NO: 3342434 - DNA, 25 bp, Homo sapien
tttcctatccatttgggctacatga

SEQ ID NO: 3342435 - DNA, 25 bp, Homo sapien
cttttgggacactaagcctgcattt

SEQ ID NO: 3342436 - DNA, 25 bp, Homo sapien
gcctgcatttaccataatacggatt

SEQ ID NO: 3342437 - DNA, 25 bp, Homo sapien
actggatttttattagcgctgcccc

SEQ ID NO: 3342438 - DNA, 25 bp, Homo sapien
tccactctgcaaagcccttttggga

SEQ ID NO: 3342439 - DNA, 25 bp, Homo sapien
attttctccgctttccctcacattc

SEQ ID NO: 3342440 - DNA, 25 bp, Homo sapien
aattttctccgctttccctcacatt

SEQ ID NO: 3342441 - DNA, 25 bp, Homo sapien
ttttctccgctttccctcacattcc

SEQ ID NO: 3342442 - DNA, 25 bp, Homo sapien
taaagagtactgaccagggcatttg

SEQ ID NO: 3342443 - DNA, 25 bp, Homo sapien
ccttaattacctggttgaagtagca

SEQ ID NO: 3342444 - DNA, 25 bp, Homo sapien
agctacatgctatcaacgtgttttg

SEQ ID NO: 3342445 - DNA, 25 bp, Homo sapien
gaggtatagtgccatccgcatcaca

SEQ ID NO: 3342446 - DNA, 25 bp, Homo sapien
caatcccgttactggataaatcatt

SEQ ID NO: 3342447 - DNA, 25 bp, Homo sapien
tatgtttattgtagctatgtacaat

SEQ ID NO: 3342448 - DNA, 25 bp, Homo sapien
aaaactttctcagcacatgtgattc

SEQ ID NO: 3342449 - DNA, 25 bp, Homo sapien
gtaagtgacaaaacagagagcatat

SEQ ID NO: 3342450 - DNA, 25 bp, Homo sapien
caaaatttgtggttaaatgccttag

SEQ ID NO: 3342451 - DNA, 25 bp, Homo sapien
tctgtgcagtgcaatgtaggtgccc

SEQ ID NO: 3342452 - DNA, 25 bp, Homo sapien
gatgatactacagacaaactctggt

SEQ ID NO: 3342453 - DNA, 25 bp, Homo sapien
gaaagtgattcatttggccaagcag

SEQ ID NO: 3342454 - DNA, 25 bp, Homo sapien
gcaacgtgttcaggagagattacag

SEQ ID NO: 3342455 - DNA, 25 bp, Homo sapien
gccaagcagggtactctacagctag

SEQ ID NO: 3342456 - DNA, 25 bp, Homo sapien
tgaatatggactagctgaacacacc

SEQ ID NO: 3342457 - DNA, 25 bp, Homo sapien
taggcttgcctgtagaaacctgacc

SEQ ID NO: 3342458 - DNA, 25 bp, Homo sapien
gcactttcacgccaacaagggtgtt

SEQ ID NO: 3342459 - DNA, 25 bp, Homo sapien
caattaggctttgactaggcttgcc

SEQ ID NO: 3342460 - DNA, 25 bp, Homo sapien
tgcctcaattcactctctccaaaag

SEQ ID NO: 3342461 - DNA, 25 bp, Homo sapien
tatttcctaccaagctactctgata

SEQ ID NO: 3342462 - DNA, 25 bp, Homo sapien
cacagtaggaacttggtaatatcat

SEQ ID NO: 3342463 - DNA, 25 bp, Homo sapien
tctccaaaagtatccacaagcttag

SEQ ID NO: 3342464 - DNA, 25 bp, Homo sapien
gacgaagcgaccacctcgagagtgg

SEQ ID NO: 3342465 - DNA, 25 bp, Homo sapien
gggccgggccattcgcgaaccagac

SEQ ID NO: 3342466 - DNA, 25 bp, Homo sapien
agacgcaacgacgaagcgaccacct

SEQ ID NO: 3342467 - DNA, 25 bp, Homo sapien
attcgcgaaccagacgcaacgacga

SEQ ID NO: 3342468 - DNA, 25 bp, Homo sapien
gacagctcggatagcgattgtagga

SEQ ID NO: 3342469 - DNA, 25 bp, Homo sapien
taccgttcgccaagcgtgcctgtct

SEQ ID NO: 3342470 - DNA, 25 bp, Homo sapien
ttctctctcggattggctaaagcac

SEQ ID NO: 3342471 - DNA, 25 bp, Homo sapien
gattgtaggaactgaagctccaccc

SEQ ID NO: 3342472 - DNA, 25 bp, Homo sapien
aagtgcacggcggactgagttgtac

SEQ ID NO: 3342473 - DNA, 25 bp, Homo sapien
actgagttgtacttcgcagctctct

SEQ ID NO: 3342474 - DNA, 25 bp, Homo sapien
acggcggactgagttgtacttcgca

SEQ ID NO: 3342475 - DNA, 25 bp, Homo sapien
ctccaagtgcacggcggactgagtt

SEQ ID NO: 3342476 - DNA, 25 bp, Homo sapien
aaggagtgctactcgctgaccggca

SEQ ID NO: 3342477 - DNA, 25 bp, Homo sapien
taccacatgaagacgctgctgctgt

SEQ ID NO: 3342478 - DNA, 25 bp, Homo sapien
tgctgtacgagtgcgagaaacaccc

SEQ ID NO: 3342479 - DNA, 25 bp, Homo sapien
tgggcggctgccgaaacaagtgcct

SEQ ID NO: 3342480 - DNA, 25 bp, Homo sapien
tttacattgtaattgactgtttgtg

SEQ ID NO: 3342481 - DNA, 25 bp, Homo sapien
tgtaattgactgtttgtggattgtt

SEQ ID NO: 3342482 - DNA, 25 bp, Homo sapien
cattgtaattgactgtttgtggatt

SEQ ID NO: 3342483 - DNA, 25 bp, Homo sapien
ttacattgtaattgactgtttgtgg

SEQ ID NO: 3342484 - DNA, 25 bp, Homo sapien
tttgaagttaggatcctcttcatcc

SEQ ID NO: 3342485 - DNA, 25 bp, Homo sapien
gctggtgtgctcaggctaacaggac

SEQ ID NO: 3342486 - DNA, 25 bp, Homo sapien
gaggaggtgacagaaagagtgccct

SEQ ID NO: 3342487 - DNA, 25 bp, Homo sapien
gagtgccctttactacaacagaggg

SEQ ID NO: 3342488 - DNA, 25 bp, Homo sapien
tccaggaggatctcgttttctgagt

SEQ ID NO: 3342489 - DNA, 25 bp, Homo sapien
gacagagtatcatcatcgccttcca

SEQ ID NO: 3342490 - DNA, 25 bp, Homo sapien
tcatcgccttccaggaggatctcgt

SEQ ID NO: 3342491 - DNA, 25 bp, Homo sapien
ctcatccacggatgacagagtatca

SEQ ID NO: 3342492 - DNA, 25 bp, Homo sapien
aaagcagtcaatttgcagtaacacg

SEQ ID NO: 3342493 - DNA, 25 bp, Homo sapien
tattgcgaattcaccatgtatacca

SEQ ID NO: 3342494 - DNA, 25 bp, Homo sapien
gctacacacatatgatggtctggac

SEQ ID NO: 3342495 - DNA, 25 bp, Homo sapien
cacaggctgcattgtaagctacaca

SEQ ID NO: 3342496 - DNA, 25 bp, Homo sapien
taatgtgaacttgggaagggcaatt

SEQ ID NO: 3342497 - DNA, 25 bp, Homo sapien
gttaatgtgaacttgggaagggcaa

SEQ ID NO: 3342498 - DNA, 25 bp, Homo sapien
cttgggaagggcaattaaattgtca

SEQ ID NO: 3342499 - DNA, 25 bp, Homo sapien
tgtgaacttgggaagggcaattaaa

SEQ ID NO: 3342500 - DNA, 25 bp, Homo sapien
ttctctctcaatttaaaaatgcaca

SEQ ID NO: 3342501 - DNA, 25 bp, Homo sapien
tttgctgttctctctcaatttaaaa

SEQ ID NO: 3342502 - DNA, 25 bp, Homo sapien
tgttctctctcaatttaaaaatgca

SEQ ID NO: 3342503 - DNA, 25 bp, Homo sapien
gctgttctctctcaatttaaaaatg

SEQ ID NO: 3342504 - DNA, 25 bp, Homo sapien
ttggcaaggaatggtttatacactg

SEQ ID NO: 3342505 - DNA, 25 bp, Homo sapien
ggcaaggaatggtttatacactgac

SEQ ID NO: 3342506 - DNA, 25 bp, Homo sapien
tggcaaggaatggtttatacactga

SEQ ID NO: 3342507 - DNA, 25 bp, Homo sapien
tttagtgtcgcttcaggatgtgtcg

SEQ ID NO: 3342508 - DNA, 25 bp, Homo sapien
ggttacgcacaaatcgtcgccggcg

SEQ ID NO: 3342509 - DNA, 25 bp, Homo sapien
gatgtgtcgatcctagagggttacg

SEQ ID NO: 3342510 - DNA, 25 bp, Homo sapien
ttcccagtagtcaaggcgccagaac

SEQ ID NO: 3342511 - DNA, 25 bp, Homo sapien
taggtatgtccttgaaaataacaat

SEQ ID NO: 3342512 - DNA, 25 bp, Homo sapien
cttggaaggtgaaatgagcactaaa

SEQ ID NO: 3342513 - DNA, 25 bp, Homo sapien
cctttctgcaatctttaacttaggt

SEQ ID NO: 3342514 - DNA, 25 bp, Homo sapien
tgacagtgtgatcagtttccccaca

SEQ ID NO: 3342515 - DNA, 25 bp, Homo sapien
gcatttataaaccagaatagggaaa

SEQ ID NO: 3342516 - DNA, 25 bp, Homo sapien
agccaggatgcagtcgtgaatcaca

SEQ ID NO: 3342517 - DNA, 25 bp, Homo sapien
cagtcgtgaatcacaggctgctcct

SEQ ID NO: 3342518 - DNA, 25 bp, Homo sapien
tcaggggaatgatacaatgagggtc

SEQ ID NO: 3342519 - DNA, 25 bp, Homo sapien
tcgccttcaggggaatgatacaatg

SEQ ID NO: 3342520 - DNA, 25 bp, Homo sapien
tttgactgttcactgatttggccag

SEQ ID NO: 3342521 - DNA, 25 bp, Homo sapien
ttgaggaggtactttggaactatgc

SEQ ID NO: 3342522 - DNA, 25 bp, Homo sapien
ggaactatgcaaattttctgatctt

SEQ ID NO: 3342523 - DNA, 25 bp, Homo sapien
tgggattcttttcaagctgattctt

SEQ ID NO: 3342524 - DNA, 25 bp, Homo sapien
atgccaataatatgtctagaaggga

SEQ ID NO: 3342525 - DNA, 25 bp, Homo sapien
cttcttttcatcttacgtgtattta

SEQ ID NO: 3342526 - DNA, 25 bp, Homo sapien
tgtctagaagggactagactaaaac

SEQ ID NO: 3342527 - DNA, 25 bp, Homo sapien
ttatataataaatacctgtaggaag

SEQ ID NO: 3342528 - DNA, 25 bp, Homo sapien
ggctattactgcctctcatgaataa

SEQ ID NO: 3342529 - DNA, 25 bp, Homo sapien
tagcccttcaatgtttaagttcaag

SEQ ID NO: 3342530 - DNA, 25 bp, Homo sapien
gttcaagtggaactatctaaacatc

SEQ ID NO: 3342531 - DNA, 25 bp, Homo sapien
gggttatgaggtcaaaatgcaagac

SEQ ID NO: 3342532 - DNA, 25 bp, Homo sapien
tgacaggcaacagtaactatgaacc

SEQ ID NO: 3342533 - DNA, 25 bp, Homo sapien
cagatgatgggaaatgtccagattc

SEQ ID NO: 3342534 - DNA, 25 bp, Homo sapien
taatgtaacggtatgctaaaaggca

SEQ ID NO: 3342535 - DNA, 25 bp, Homo sapien
taacatcccatgtccatagatggac

SEQ ID NO: 3342536 - DNA, 25 bp, Homo sapien
tggattaggaatgtttgagcggtaa

SEQ ID NO: 3342537 - DNA, 25 bp, Homo sapien
cattggagcatttcggacttttgga

SEQ ID NO: 3342538 - DNA, 25 bp, Homo sapien
tactcactataggttgcacatacca

SEQ ID NO: 3342539 - DNA, 25 bp, Homo sapien
gcaagataaccaaagtgttagcaga

SEQ ID NO: 3342540 - DNA, 25 bp, Homo sapien
aagcataagcaactgtgtccggcca

SEQ ID NO: 3342541 - DNA, 25 bp, Homo sapien
ggcaagaagaccatggaagtgctct

SEQ ID NO: 3342542 - DNA, 25 bp, Homo sapien
catttggtgaatatgatgtctgcca

SEQ ID NO: 3342543 - DNA, 25 bp, Homo sapien
ctcagtgcatcacatcaggtggtat

SEQ ID NO: 3342544 - DNA, 25 bp, Homo sapien
ttagaaatgcatcaacggaaggaag

SEQ ID NO: 3342545 - DNA, 25 bp, Homo sapien
taaattctaagctacgtgaggacag

SEQ ID NO: 3342546 - DNA, 25 bp, Homo sapien
cacacaatgctataggactggttta

SEQ ID NO: 3342547 - DNA, 25 bp, Homo sapien
gaaaagacccttggaatgacgaaca

SEQ ID NO: 3342548 - DNA, 25 bp, Homo sapien
tactacagagacttaaaagttcaag

SEQ ID NO: 3342549 - DNA, 25 bp, Homo sapien
tctactcagaacttaattgtcaaag

SEQ ID NO: 3342550 - DNA, 25 bp, Homo sapien
acaacttctagttatctgctgaatc

SEQ ID NO: 3342551 - DNA, 25 bp, Homo sapien
cccaagtctgtattatctatagtac

SEQ ID NO: 3342552 - DNA, 25 bp, Homo sapien
gccaatcaatacagaggcatactgt

SEQ ID NO: 3342553 - DNA, 25 bp, Homo sapien
tagtttcgatttcacaaggccaatc

SEQ ID NO: 3342554 - DNA, 25 bp, Homo sapien
ttttataacactccaaccttacagc

SEQ ID NO: 3342555 - DNA, 25 bp, Homo sapien
ctccaaccttacagcattcatcttt

SEQ ID NO: 3342556 - DNA, 25 bp, Homo sapien
tttagatgttgcaagataaggcacc

SEQ ID NO: 3342557 - DNA, 25 bp, Homo sapien
cagagatcactgacccatgaataga

SEQ ID NO: 3342558 - DNA, 25 bp, Homo sapien
cctcgccatgggcttttagatgttg

SEQ ID NO: 3342559 - DNA, 25 bp, Homo sapien
tgacccatgaatagatgttatttcc

SEQ ID NO: 3342560 - DNA, 25 bp, Homo sapien
gtaataaatatcacacgctacattt

SEQ ID NO: 3342561 - DNA, 25 bp, Homo sapien
gaatatcaaaaattaggtacccaga

SEQ ID NO: 3342562 - DNA, 25 bp, Homo sapien
ctttatacaaatagctttcaatgca

SEQ ID NO: 3342563 - DNA, 25 bp, Homo sapien
gtccttttgatctcaagaccttgac

SEQ ID NO: 3342564 - DNA, 25 bp, Homo sapien
tctggattagttgagttgctgtcac

SEQ ID NO: 3342565 - DNA, 25 bp, Homo sapien
tttgctgctcttatcaaatgatcac

SEQ ID NO: 3342566 - DNA, 25 bp, Homo sapien
ccatgcttgtctgtgagaatgttga

SEQ ID NO: 3342567 - DNA, 25 bp, Homo sapien
cacgtggtcacgatattttgctgct

SEQ ID NO: 3342568 - DNA, 25 bp, Homo sapien
ctgcagaatactgggcacacagtga

SEQ ID NO: 3342569 - DNA, 25 bp, Homo sapien
gatacactcagaagtggtaaacatt

SEQ ID NO: 3342570 - DNA, 25 bp, Homo sapien
tgagatacactcagaagtggtaaac

SEQ ID NO: 3342571 - DNA, 25 bp, Homo sapien
tcatgagatacactcagaagtggta

SEQ ID NO: 3342572 - DNA, 25 bp, Homo sapien
gtcaatcatgagatacactcagaag

SEQ ID NO: 3342573 - DNA, 25 bp, Homo sapien
ttggagagctaaactggcttctgca

SEQ ID NO: 3342574 - DNA, 25 bp, Homo sapien
ggagagctaaactggcttctgcagc

SEQ ID NO: 3342575 - DNA, 25 bp, Homo sapien
gagagctaaactggcttctgcagca

SEQ ID NO: 3342576 - DNA, 25 bp, Homo sapien
tggagagctaaactggcttctgcag

SEQ ID NO: 3342577 - DNA, 25 bp, Homo sapien
cctatccagggtcaagataatgaat

SEQ ID NO: 3342578 - DNA, 25 bp, Homo sapien
ggcctatccagggtcaagataatga

SEQ ID NO: 3342579 - DNA, 25 bp, Homo sapien
tacactgtgcctgatctataaacct

SEQ ID NO: 3342580 - DNA, 25 bp, Homo sapien
aggcctatccagggtcaagataatg

SEQ ID NO: 3342581 - DNA, 25 bp, Homo sapien
cactattacgagaacatcatggaag

SEQ ID NO: 3342582 - DNA, 25 bp, Homo sapien
cattgggcagatctcacggacaaaa

SEQ ID NO: 3342583 - DNA, 25 bp, Homo sapien
tctgtactacagaacaagtggatct

SEQ ID NO: 3342584 - DNA, 25 bp, Homo sapien
aaaccatatcatgcacccaacactg

SEQ ID NO: 3342585 - DNA, 25 bp, Homo sapien
aatatccatattaaacaaagtaatc

SEQ ID NO: 3342586 - DNA, 25 bp, Homo sapien
tgtgaagataaggaggtggactgct

SEQ ID NO: 3342587 - DNA, 25 bp, Homo sapien
caatctgaacatgaattcaaaaaag

SEQ ID NO: 3342588 - DNA, 25 bp, Homo sapien
tctgaacatgaattcaaaaaagtaa

SEQ ID NO: 3342589 - DNA, 25 bp, Homo sapien
tatcacttagtcctctcctatgaga

SEQ ID NO: 3342590 - DNA, 25 bp, Homo sapien
caactactgagataagcaatggtcc

SEQ ID NO: 3342591 - DNA, 25 bp, Homo sapien
tatacatgttcaggcacaactactg

SEQ ID NO: 3342592 - DNA, 25 bp, Homo sapien
caatggtcccaggatgagtttatca

SEQ ID NO: 3342593 - DNA, 25 bp, Homo sapien
cgcacaccaaccatatgtgtaacct

SEQ ID NO: 3342594 - DNA, 25 bp, Homo sapien
ccgcacaccaaccatatgtgtaacc

SEQ ID NO: 3342595 - DNA, 25 bp, Homo sapien
tccgcacaccaaccatatgtgtaac

SEQ ID NO: 3342596 - DNA, 25 bp, Homo sapien
ctcaaattccgcatgtctgtgaata

SEQ ID NO: 3342597 - DNA, 25 bp, Homo sapien
tttgctactcttactagatgatcct

SEQ ID NO: 3342598 - DNA, 25 bp, Homo sapien
tgcctgctcaggataaattcagctt

SEQ ID NO: 3342599 - DNA, 25 bp, Homo sapien
tcaggataaattcagcttcatttgc

SEQ ID NO: 3342600 - DNA, 25 bp, Homo sapien
aaaacaatgtgccaaaatctgtgga

SEQ ID NO: 3342601 - DNA, 25 bp, Homo sapien
tggaaattaggaaacgtttgcagta

SEQ ID NO: 3342602 - DNA, 25 bp, Homo sapien
cttaaaccaatgcttagagggaaat

SEQ ID NO: 3342603 - DNA, 25 bp, Homo sapien
taatattgttaacacagcagtcgct

SEQ ID NO: 3342604 - DNA, 25 bp, Homo sapien
ttccggtgcccttcactggaaactc

SEQ ID NO: 3342605 - DNA, 25 bp, Homo sapien
cttccttcattgacaagttcgataa

SEQ ID NO: 3342606 - DNA, 25 bp, Homo sapien
gacaagctgatatcacaccgagcaa

SEQ ID NO: 3342607 - DNA, 25 bp, Homo sapien
gcagcagtccagatttgctaaggag

SEQ ID NO: 3342608 - DNA, 25 bp, Homo sapien
ggctgcaataaactgaaaggtgggc

SEQ ID NO: 3342609 - DNA, 25 bp, Homo sapien
ggcagctgagcttcttgtgacaagc

SEQ ID NO: 3342610 - DNA, 25 bp, Homo sapien
agtgttattggaatgtatgtcagac

SEQ ID NO: 3342611 - DNA, 25 bp, Homo sapien
agactgaattaggactagcaacaca

SEQ ID NO: 3342612 - DNA, 25 bp, Homo sapien
tgatgcacttcacaatgcacagtca

SEQ ID NO: 3342613 - DNA, 25 bp, Homo sapien
caacacaacgcttttataaagtggc

SEQ ID NO: 3342614 - DNA, 25 bp, Homo sapien
tgcaaatataaaatcccccatgaaa

SEQ ID NO: 3342615 - DNA, 25 bp, Homo sapien
gcaaatataaaatcccccatgaaaa

SEQ ID NO: 3342616 - DNA, 25 bp, Homo sapien
ttccacaactgaactactcgacttc

SEQ ID NO: 3342617 - DNA, 25 bp, Homo sapien
gtagcataaccaattccacaactga

SEQ ID NO: 3342618 - DNA, 25 bp, Homo sapien
ctgagaacacagtagcataaccaat

SEQ ID NO: 3342619 - DNA, 25 bp, Homo sapien
aactactcgacttcatgcaaaccag

SEQ ID NO: 3342620 - DNA, 25 bp, Homo sapien
aataaggtacactatagttagttca

SEQ ID NO: 3342621 - DNA, 25 bp, Homo sapien
taatcacatgatcaaataaggtaca

SEQ ID NO: 3342622 - DNA, 25 bp, Homo sapien
catgatcaaataaggtacactatag

SEQ ID NO: 3342623 - DNA, 25 bp, Homo sapien
gcacatttaatcacatgatcaaata

SEQ ID NO: 3342624 - DNA, 25 bp, Homo sapien
tccttctataagcagttcttgtcca

SEQ ID NO: 3342625 - DNA, 25 bp, Homo sapien
catggctacccaaaagtgtccgaga

SEQ ID NO: 3342626 - DNA, 25 bp, Homo sapien
ccacaaaaatctcacgaaggagagg

SEQ ID NO: 3342627 - DNA, 25 bp, Homo sapien
aaaatctcacgaaggagaggagctg

SEQ ID NO: 3342628 - DNA, 25 bp, Homo sapien
gacactaagtctccagtggtggaaa

SEQ ID NO: 3342629 - DNA, 25 bp, Homo sapien
tcatactaccaagaagacagttgct

SEQ ID NO: 3342630 - DNA, 25 bp, Homo sapien
caaatactagctatactcgaagcac

SEQ ID NO: 3342631 - DNA, 25 bp, Homo sapien
catagaacttgttatccctgaagag

SEQ ID NO: 3342632 - DNA, 25 bp, Homo sapien
tatttgaaaccggatcttgtgaaac

SEQ ID NO: 3342633 - DNA, 25 bp, Homo sapien
atttgaaaccggatcttgtgaaact

SEQ ID NO: 3342634 - DNA, 25 bp, Homo sapien
catatttgaaaccggatcttgtgaa

SEQ ID NO: 3342635 - DNA, 25 bp, Homo sapien
ctcatatttgaaaccggatcttgtg

SEQ ID NO: 3342636 - DNA, 25 bp, Homo sapien
caaggcttgtctgggcaatagaaca

SEQ ID NO: 3342637 - DNA, 25 bp, Homo sapien
tcaaggcttgtctgggcaatagaac

SEQ ID NO: 3342638 - DNA, 25 bp, Homo sapien
tgaggcttgggctgaatctactgag

SEQ ID NO: 3342639 - DNA, 25 bp, Homo sapien
gacagcattggtaggtatgcttgta

SEQ ID NO: 3342640 - DNA, 25 bp, Homo sapien
ttgtattaaaggtggaaggtgagac

SEQ ID NO: 3342641 - DNA, 25 bp, Homo sapien
tactgaggaaaccacactgacagca

SEQ ID NO: 3342642 - DNA, 25 bp, Homo sapien
attgaagttggctccataaacatgc

SEQ ID NO: 3342643 - DNA, 25 bp, Homo sapien
tggtgttaaccataagcccaaagtc

SEQ ID NO: 3342644 - DNA, 25 bp, Homo sapien
gacagctgatatataatgcactccc

SEQ ID NO: 3342645 - DNA, 25 bp, Homo sapien
gcagaaaattcaacgtttccacaag

SEQ ID NO: 3342646 - DNA, 25 bp, Homo sapien
gaaagagtagatagcacctcgctga

SEQ ID NO: 3342647 - DNA, 25 bp, Homo sapien
gagtccctccttcgagcagatgatg

SEQ ID NO: 3342648 - DNA, 25 bp, Homo sapien
tgaaactgaaactgacggtgtagcc

SEQ ID NO: 3342649 - DNA, 25 bp, Homo sapien
cacagatagatcaccaagggctcca

SEQ ID NO: 3342650 - DNA, 25 bp, Homo sapien
taaagtaatgggtagcaacacaagg

SEQ ID NO: 3342651 - DNA, 25 bp, Homo sapien
gggtgcacctattatcaagacagat

SEQ ID NO: 3342652 - DNA, 25 bp, Homo sapien
tcattggcctgtaagaaaaagtcta

SEQ ID NO: 3342653 - DNA, 25 bp, Homo sapien
cagaatgtactgagtgggtgcacct

SEQ ID NO: 3342654 - DNA, 25 bp, Homo sapien
gataaagtatactactgccaaggct

SEQ ID NO: 3342655 - DNA, 25 bp, Homo sapien
gactggctatgcctttcattttggg

SEQ ID NO: 3342656 - DNA, 25 bp, Homo sapien
aaaattgagcttgtttgctatcctc

SEQ ID NO: 3342657 - DNA, 25 bp, Homo sapien
actgccagtttctgtacatgactgg

SEQ ID NO: 3342658 - DNA, 25 bp, Homo sapien
ctccttgcacctcgggtggaattca

SEQ ID NO: 3342659 - DNA, 25 bp, Homo sapien
tgagacaatcacgtagtttttgtcg

SEQ ID NO: 3342660 - DNA, 25 bp, Homo sapien
gagacaatcacgtagtttttgtcgt

SEQ ID NO: 3342661 - DNA, 25 bp, Homo sapien
cttgcacctcgggtggaattcagct

SEQ ID NO: 3342662 - DNA, 25 bp, Homo sapien
gatcttcctccatctctttattttc

SEQ ID NO: 3342663 - DNA, 25 bp, Homo sapien
tcttcctccatctctttattttcag

SEQ ID NO: 3342664 - DNA, 25 bp, Homo sapien
cttcctccatctctttattttcagc

SEQ ID NO: 3342665 - DNA, 25 bp, Homo sapien
atcttcctccatctctttattttca

SEQ ID NO: 3342666 - DNA, 25 bp, Homo sapien
gatgacagatcagcatgacagataa

SEQ ID NO: 3342667 - DNA, 25 bp, Homo sapien
tggatagactagttcaacacagagt

SEQ ID NO: 3342668 - DNA, 25 bp, Homo sapien
tccagtaatcggcaacatgcaatag

SEQ ID NO: 3342669 - DNA, 25 bp, Homo sapien
gatccgtgatctgacaaaatctatg

SEQ ID NO: 3342670 - DNA, 25 bp, Homo sapien
ttcatcataggttccttttgttccc

SEQ ID NO: 3342671 - DNA, 25 bp, Homo sapien
cctttttcatcataggttccttttg

SEQ ID NO: 3342672 - DNA, 25 bp, Homo sapien
tgttccctaaagagactaaactcta

SEQ ID NO: 3342673 - DNA, 25 bp, Homo sapien
accgcacccacccagtgatttcctt

SEQ ID NO: 3342674 - DNA, 25 bp, Homo sapien
gaatcagattccctaagtcctaaac

SEQ ID NO: 3342675 - DNA, 25 bp, Homo sapien
gagagtctaatgctcctgcccatct

SEQ ID NO: 3342676 - DNA, 25 bp, Homo sapien
cagcctaagtgcaggtcagtggtct

SEQ ID NO: 3342677 - DNA, 25 bp, Homo sapien
caagggactagtttcatagaagaca

SEQ ID NO: 3342678 - DNA, 25 bp, Homo sapien
cacattagtgtacctttgaggaaaa

SEQ ID NO: 3342679 - DNA, 25 bp, Homo sapien
gagagcaacatttcatcatgcacct

SEQ ID NO: 3342680 - DNA, 25 bp, Homo sapien
caattttagaattaagactgctggg

SEQ ID NO: 3342681 - DNA, 25 bp, Homo sapien
tagaaacaccaaactgagagcaaca

SEQ ID NO: 3342682 - DNA, 25 bp, Homo sapien
tatccatgtcctgtagaagcctgtc

SEQ ID NO: 3342683 - DNA, 25 bp, Homo sapien
gagatataccgccagtcacaatgtc

SEQ ID NO: 3342684 - DNA, 25 bp, Homo sapien
tctgaaaacaactgccctaagccga

SEQ ID NO: 3342685 - DNA, 25 bp, Homo sapien
gaagcctgtcaagatctcttactgg

SEQ ID NO: 3342686 - DNA, 25 bp, Homo sapien
tatgcattggtttcaaggctttatc

SEQ ID NO: 3342687 - DNA, 25 bp, Homo sapien
agttgtgaatgctgttgacactcca

SEQ ID NO: 3342688 - DNA, 25 bp, Homo sapien
ctaaaggaataaggctatgcattgg

SEQ ID NO: 3342689 - DNA, 25 bp, Homo sapien
ctttatctcccctagttttcagttg

SEQ ID NO: 3342690 - DNA, 25 bp, Homo sapien
tagtcggagacactgccgcaaaatt

SEQ ID NO: 3342691 - DNA, 25 bp, Homo sapien
aaatataagcacatccacaaggcta

SEQ ID NO: 3342692 - DNA, 25 bp, Homo sapien
gaaaggccttgagtaggttcaatat

SEQ ID NO: 3342693 - DNA, 25 bp, Homo sapien
aaaaatgtcacagaggcttctattg

SEQ ID NO: 3342694 - DNA, 25 bp, Homo sapien
tgtagccgatgtagcagctgaaagc

SEQ ID NO: 3342695 - DNA, 25 bp, Homo sapien
tgtccatcacttgagagatgagatg

SEQ ID NO: 3342696 - DNA, 25 bp, Homo sapien
gatgagatgaattgtgttgtgtaca

SEQ ID NO: 3342697 - DNA, 25 bp, Homo sapien
gacattatcactgctattcacgaag

SEQ ID NO: 3342698 - DNA, 25 bp, Homo sapien
ctgtccaaagataaatgatatttac

SEQ ID NO: 3342699 - DNA, 25 bp, Homo sapien
aagataaatgatatttactgataaa

SEQ ID NO: 3342700 - DNA, 25 bp, Homo sapien
agataaatgatatttactgataaag

SEQ ID NO: 3342701 - DNA, 25 bp, Homo sapien
tccaaagataaatgatatttactga

SEQ ID NO: 3342702 - DNA, 25 bp, Homo sapien
gtttctattgaaaataatagatcag

SEQ ID NO: 3342703 - DNA, 25 bp, Homo sapien
tctgagaccagttgaactcaggaat

SEQ ID NO: 3342704 - DNA, 25 bp, Homo sapien
tcagtgagcaaacgttgatgcatct

SEQ ID NO: 3342705 - DNA, 25 bp, Homo sapien
ttgatgcatctgagaccagttgaac

SEQ ID NO: 3342706 - DNA, 25 bp, Homo sapien
gaatccctcctttgtccattaactg

SEQ ID NO: 3342707 - DNA, 25 bp, Homo sapien
tgtccattaactgcatctggtgcta

SEQ ID NO: 3342708 - DNA, 25 bp, Homo sapien
ctggaatccctcctttgtccattaa

SEQ ID NO: 3342709 - DNA, 25 bp, Homo sapien
tcctttgtccattaactgcatctgg

SEQ ID NO: 3342710 - DNA, 25 bp, Homo sapien
tccagcctctcagtatctgtagcaa

SEQ ID NO: 3342711 - DNA, 25 bp, Homo sapien
ttccacgttgggactggccttcaac

SEQ ID NO: 3342712 - DNA, 25 bp, Homo sapien
cagtatctgtagcaacattggaaac

SEQ ID NO: 3342713 - DNA, 25 bp, Homo sapien
tggaaacatccaacttcgcaatctt

SEQ ID NO: 3342714 - DNA, 25 bp, Homo sapien
tgaccaaggtctgattctacagcta

SEQ ID NO: 3342715 - DNA, 25 bp, Homo sapien
gaaacagtagtttctggtgacatag

SEQ ID NO: 3342716 - DNA, 25 bp, Homo sapien
attaatttggtttctctagtgaggt

SEQ ID NO: 3342717 - DNA, 25 bp, Homo sapien
tagtgaggttagttgctttcttccc

SEQ ID NO: 3342718 - DNA, 25 bp, Homo sapien
tatagatttatccaagaattctggc

SEQ ID NO: 3342719 - DNA, 25 bp, Homo sapien
gtttttcaccggcttcagatgcagc

SEQ ID NO: 3342720 - DNA, 25 bp, Homo sapien
gattagcttcctcagtaggactgcc

SEQ ID NO: 3342721 - DNA, 25 bp, Homo sapien
gacaaactgttatcttggagctctg

SEQ ID NO: 3342722 - DNA, 25 bp, Homo sapien
aggagaatccttcgtatctggttgc

SEQ ID NO: 3342723 - DNA, 25 bp, Homo sapien
tgctgggatcctactgaaacattaa

SEQ ID NO: 3342724 - DNA, 25 bp, Homo sapien
atagccacagcttctattatgtcag

SEQ ID NO: 3342725 - DNA, 25 bp, Homo sapien
ttagatgcagattctagtgaacttg

SEQ ID NO: 3342726 - DNA, 25 bp, Homo sapien
caattaaataaggtgcaaagtgctg

SEQ ID NO: 3342727 - DNA, 25 bp, Homo sapien
tgaaatttcttcaaacaagtcgctt

SEQ ID NO: 3342728 - DNA, 25 bp, Homo sapien
cttcagcatcccgtattcaagtgat

SEQ ID NO: 3342729 - DNA, 25 bp, Homo sapien
gctgataatccatgaaatgcggaca

SEQ ID NO: 3342730 - DNA, 25 bp, Homo sapien
gaaagcatccattcttgccacacag

SEQ ID NO: 3342731 - DNA, 25 bp, Homo sapien
caggattctgaatatggcgtatacc

SEQ ID NO: 3342732 - DNA, 25 bp, Homo sapien
tgagtgattgataaagtgtctaccc

SEQ ID NO: 3342733 - DNA, 25 bp, Homo sapien
tatttgactgcatggtaaagcagga

SEQ ID NO: 3342734 - DNA, 25 bp, Homo sapien
ggagaatttcgaagtagggtcgcaa

SEQ ID NO: 3342735 - DNA, 25 bp, Homo sapien
aaggctctgcgaacctccatgctct

SEQ ID NO: 3342736 - DNA, 25 bp, Homo sapien
gaaagaaaggctctgcgaacctcca

SEQ ID NO: 3342737 - DNA, 25 bp, Homo sapien
gaatttcgaagtagggtcgcaatta

SEQ ID NO: 3342738 - DNA, 25 bp, Homo sapien
tatgtatcacctgagtaccaatctg

SEQ ID NO: 3342739 - DNA, 25 bp, Homo sapien
tgtttatgtatcacctgagtaccaa

SEQ ID NO: 3342740 - DNA, 25 bp, Homo sapien
agggttttgtatcttcactgaagaa

SEQ ID NO: 3342741 - DNA, 25 bp, Homo sapien
aggatctggatgctgtttatgtatc

SEQ ID NO: 3342742 - DNA, 25 bp, Homo sapien
aaacaatccatgtccaagcatgact

SEQ ID NO: 3342743 - DNA, 25 bp, Homo sapien
ttaaatttgtctgaagcatgagcct

SEQ ID NO: 3342744 - DNA, 25 bp, Homo sapien
ctcaaacagcacattatatgtggtc

SEQ ID NO: 3342745 - DNA, 25 bp, Homo sapien
catgagcctttcagctagcaatgaa

SEQ ID NO: 3342746 - DNA, 25 bp, Homo sapien
taagagcttgtaccctgattccttc

SEQ ID NO: 3342747 - DNA, 25 bp, Homo sapien
ctgattccttcacttttcgatgcca

SEQ ID NO: 3342748 - DNA, 25 bp, Homo sapien
taacccattgccttaagagcttgta

SEQ ID NO: 3342749 - DNA, 25 bp, Homo sapien
cgatgccagaagtttgtagataaca

SEQ ID NO: 3342750 - DNA, 25 bp, Homo sapien
caaatagtaacacagcctctataat

SEQ ID NO: 3342751 - DNA, 25 bp, Homo sapien
tcatatgtaagtttaaataatcctt

SEQ ID NO: 3342752 - DNA, 25 bp, Homo sapien
taaatgggtcttaaatcttaactca

SEQ ID NO: 3342753 - DNA, 25 bp, Homo sapien
tttcatgctataaactcatttcata

SEQ ID NO: 3342754 - DNA, 25 bp, Homo sapien
gctgtaggacatccattagattgtc

SEQ ID NO: 3342755 - DNA, 25 bp, Homo sapien
acaagcagctgtaggacatccatta

SEQ ID NO: 3342756 - DNA, 25 bp, Homo sapien
catagagttagggtgttctgacatt

SEQ ID NO: 3342757 - DNA, 25 bp, Homo sapien
agcaggaatcatagagttagggtgt

SEQ ID NO: 3342758 - DNA, 25 bp, Homo sapien
tagacatatgtgtgatatatactta

SEQ ID NO: 3342759 - DNA, 25 bp, Homo sapien
agttgaataatgaatacttctgaaa

SEQ ID NO: 3342760 - DNA, 25 bp, Homo sapien
gaataatgaatacttctgaaataga

SEQ ID NO: 3342761 - DNA, 25 bp, Homo sapien
gaaatataagtagacatatgtgtga

SEQ ID NO: 3342762 - DNA, 25 bp, Homo sapien
tagtcagtaggtaattaagaatggc

SEQ ID NO: 3342763 - DNA, 25 bp, Homo sapien
ctcatgcatagtcagtaggtaatta

SEQ ID NO: 3342764 - DNA, 25 bp, Homo sapien
cagtaggtaattaagaatggcctgt

SEQ ID NO: 3342765 - DNA, 25 bp, Homo sapien
gcatagtcagtaggtaattaagaat

SEQ ID NO: 3342766 - DNA, 25 bp, Homo sapien
acaagaatgctcgtagagaaagcat

SEQ ID NO: 3342767 - DNA, 25 bp, Homo sapien
caacaagaatgctcgtagagaaagc

SEQ ID NO: 3342768 - DNA, 25 bp, Homo sapien
aagaatgctcgtagagaaagcattt

SEQ ID NO: 3342769 - DNA, 25 bp, Homo sapien
aacaagaatgctcgtagagaaagca

SEQ ID NO: 3342770 - DNA, 25 bp, Homo sapien
ttccgtggacagataagtatagagc

SEQ ID NO: 3342771 - DNA, 25 bp, Homo sapien
gtagtagtacttcagcgtgtgcatg

SEQ ID NO: 3342772 - DNA, 25 bp, Homo sapien
ggtgataccacttcgatcctgagga

SEQ ID NO: 3342773 - DNA, 25 bp, Homo sapien
gactgtaccaatgaattccgtggac

SEQ ID NO: 3342774 - DNA, 25 bp, Homo sapien
gaacgtgatcacacaattgcttgag

SEQ ID NO: 3342775 - DNA, 25 bp, Homo sapien
ggctggggtatgaatccatatggca

SEQ ID NO: 3342776 - DNA, 25 bp, Homo sapien
tggcaggattaagaagaacgtgatc

SEQ ID NO: 3342777 - DNA, 25 bp, Homo sapien
tgcagattactcagatattttgaaa

SEQ ID NO: 3342778 - DNA, 25 bp, Homo sapien
gcatagcaattgagttcttcaacaa

SEQ ID NO: 3342779 - DNA, 25 bp, Homo sapien
cttttcaaggctatatcctattacc

SEQ ID NO: 3342780 - DNA, 25 bp, Homo sapien
tgttcctgcatagcaattgagttct

SEQ ID NO: 3342781 - DNA, 25 bp, Homo sapien
caagaagcccttacaggcaagcatc

SEQ ID NO: 3342782 - DNA, 25 bp, Homo sapien
cactttggatggaatgtgttaaaac

SEQ ID NO: 3342783 - DNA, 25 bp, Homo sapien
gcaaaaagtggaaatagtacttgta

SEQ ID NO: 3342784 - DNA, 25 bp, Homo sapien
gcctgtaatccaactgtgcaaaaag

SEQ ID NO: 3342785 - DNA, 25 bp, Homo sapien
tgtactcctccaattgaatgcattg

SEQ ID NO: 3342786 - DNA, 25 bp, Homo sapien
gattgtacgtgaatgcaatggcact

SEQ ID NO: 3342787 - DNA, 25 bp, Homo sapien
taaaagtttgtgatgctcagcaagg

SEQ ID NO: 3342788 - DNA, 25 bp, Homo sapien
catctgtagcccgtggattgtacgt

SEQ ID NO: 3342789 - DNA, 25 bp, Homo sapien
cactagagagtttcccatcgtacaa

SEQ ID NO: 3342790 - DNA, 25 bp, Homo sapien
tcactgaaaaggtaaactgcagtca

SEQ ID NO: 3342791 - DNA, 25 bp, Homo sapien
tatcccaggcccaactgataaatag

SEQ ID NO: 3342792 - DNA, 25 bp, Homo sapien
cccaggcccaactgataaatagcaa

SEQ ID NO: 3342793 - DNA, 25 bp, Homo sapien
gagctgcatttagagcttcactgaa

SEQ ID NO: 3342794 - DNA, 25 bp, Homo sapien
gacaaaccatgttatctctccatag

SEQ ID NO: 3342795 - DNA, 25 bp, Homo sapien
gctcaccattcacataacatcgaag

SEQ ID NO: 3342796 - DNA, 25 bp, Homo sapien
tcttccatcggttatagatgtgtac

SEQ ID NO: 3342797 - DNA, 25 bp, Homo sapien
tagatgtgtactatggtaaccatat

SEQ ID NO: 3342798 - DNA, 25 bp, Homo sapien
aatgagcagaatagccaagaccttt

SEQ ID NO: 3342799 - DNA, 25 bp, Homo sapien
caaatttcacacagtgttgaaagcc

SEQ ID NO: 3342800 - DNA, 25 bp, Homo sapien
gatgttacaatcaaacagcctccaa

SEQ ID NO: 3342801 - DNA, 25 bp, Homo sapien
cttttgtggcttgaaatcaaatttc

SEQ ID NO: 3342802 - DNA, 25 bp, Homo sapien
gccatttggctataggaggtaatgc

SEQ ID NO: 3342803 - DNA, 25 bp, Homo sapien
tgtaaaaccattctggtatggccat

SEQ ID NO: 3342804 - DNA, 25 bp, Homo sapien
caaatatggtttatccttatctaca

SEQ ID NO: 3342805 - DNA, 25 bp, Homo sapien
tatttacaggatccattctaagcca

SEQ ID NO: 3342806 - DNA, 25 bp, Homo sapien
tcaggaccatacttctgaggcatat

SEQ ID NO: 3342807 - DNA, 25 bp, Homo sapien
gttaaaaaaggcatcaggaccatac

SEQ ID NO: 3342808 - DNA, 25 bp, Homo sapien
ggaccatacttctgaggcatatgct

SEQ ID NO: 3342809 - DNA, 25 bp, Homo sapien
gaggcatatgctttaacacagacag

SEQ ID NO: 3342810 - DNA, 25 bp, Homo sapien
gaaacagtttgataaggcacctggg

SEQ ID NO: 3342811 - DNA, 25 bp, Homo sapien
gggtagatccaattaactgcagagg

SEQ ID NO: 3342812 - DNA, 25 bp, Homo sapien
ggcaatgatctctaaagggcactaa

SEQ ID NO: 3342813 - DNA, 25 bp, Homo sapien
cctaagttgcatctcaagagggtag

SEQ ID NO: 3342814 - DNA, 25 bp, Homo sapien
tatggcacgagtagccacagggatc

SEQ ID NO: 3342815 - DNA, 25 bp, Homo sapien
gttactttacaagctacgaatgtgt

SEQ ID NO: 3342816 - DNA, 25 bp, Homo sapien
gacaattatcccatgtataataata

SEQ ID NO: 3342817 - DNA, 25 bp, Homo sapien
tgtgtttgggaggagcatactttaa

SEQ ID NO: 3342818 - DNA, 25 bp, Homo sapien
gtcaaattatagctagccagcactc

SEQ ID NO: 3342819 - DNA, 25 bp, Homo sapien
gaaaagctttagctcgcgaactgtc

SEQ ID NO: 3342820 - DNA, 25 bp, Homo sapien
agcactcccaacatgtcaaccaaaa

SEQ ID NO: 3342821 - DNA, 25 bp, Homo sapien
tagctcgcgaactgtcaaattatag

SEQ ID NO: 3342822 - DNA, 25 bp, Homo sapien
aggcctacttcagtgcagacttgaa

SEQ ID NO: 3342823 - DNA, 25 bp, Homo sapien
tctgcttggcacgtaatgtcacatt

SEQ ID NO: 3342824 - DNA, 25 bp, Homo sapien
tttttccagtaggtccaccatgcag

SEQ ID NO: 3342825 - DNA, 25 bp, Homo sapien
gcagttaatactctcaccttcttgg

SEQ ID NO: 3342826 - DNA, 25 bp, Homo sapien
aaaagaatactagaatcattaaaca

SEQ ID NO: 3342827 - DNA, 25 bp, Homo sapien
aaactgtatggtactagacagaaaa

SEQ ID NO: 3342828 - DNA, 25 bp, Homo sapien
agtgattctaatttctatctgggaa

SEQ ID NO: 3342829 - DNA, 25 bp, Homo sapien
ctggatgggaatattaaatcagttc

SEQ ID NO: 3342830 - DNA, 25 bp, Homo sapien
ctgagagactctcgtgcagcctgtg

SEQ ID NO: 3342831 - DNA, 25 bp, Homo sapien
gaaagtcttgaagatctaatcttgc

SEQ ID NO: 3342832 - DNA, 25 bp, Homo sapien
ttcaatggggctttatctgagagac

SEQ ID NO: 3342833 - DNA, 25 bp, Homo sapien
tttcagtgtatctactgactcctca

SEQ ID NO: 3342834 - DNA, 25 bp, Homo sapien
ttctaaatccattacataacttcag

SEQ ID NO: 3342835 - DNA, 25 bp, Homo sapien
ggtggagagggtttctgtacctatc

SEQ ID NO: 3342836 - DNA, 25 bp, Homo sapien
tcctgaccgtctataaggccgtctg

SEQ ID NO: 3342837 - DNA, 25 bp, Homo sapien
gcatgaatgtcttcctcccggagca

SEQ ID NO: 3342838 - DNA, 25 bp, Homo sapien
ctctggttcttggtatctgcatatc

SEQ ID NO: 3342839 - DNA, 25 bp, Homo sapien
cactgggcctgacctaggttttctt

SEQ ID NO: 3342840 - DNA, 25 bp, Homo sapien
gtcatatatttgacagaccagaaac

SEQ ID NO: 3342841 - DNA, 25 bp, Homo sapien
aaagaggtcatagagagagatttca

SEQ ID NO: 3342842 - DNA, 25 bp, Homo sapien
taccatcccacaggtactggatgag

SEQ ID NO: 3342843 - DNA, 25 bp, Homo sapien
tagggctgaaacaagacagctttgg

SEQ ID NO: 3342844 - DNA, 25 bp, Homo sapien
tcttcctcagtgtcgtgtcatcagg

SEQ ID NO: 3342845 - DNA, 25 bp, Homo sapien
cccggccgctagttcattcttaatt

SEQ ID NO: 3342846 - DNA, 25 bp, Homo sapien
accaagaaggtaaacagtgctagtt

SEQ ID NO: 3342847 - DNA, 25 bp, Homo sapien
gcctcttgtgccaaaatccaagtgt

SEQ ID NO: 3342848 - DNA, 25 bp, Homo sapien
caaaggttgaaataggccaaaagct

SEQ ID NO: 3342849 - DNA, 25 bp, Homo sapien
ttaagcacagaaaggcctacgtcaa

SEQ ID NO: 3342850 - DNA, 25 bp, Homo sapien
gcccggccgcacatctctcatttta

SEQ ID NO: 3342851 - DNA, 25 bp, Homo sapien
ttttaagccaactgttgagactcac

SEQ ID NO: 3342852 - DNA, 25 bp, Homo sapien
ttaacataacatccattttgcagcc

SEQ ID NO: 3342853 - DNA, 25 bp, Homo sapien
cacagcacagtgtactgaatatttt

SEQ ID NO: 3342854 - DNA, 25 bp, Homo sapien
ggatgactgcatatctgttcacagc

SEQ ID NO: 3342855 - DNA, 25 bp, Homo sapien
taatcagtctagttatcaagtccaa

SEQ ID NO: 3342856 - DNA, 25 bp, Homo sapien
gaaaccaactcatgaccagacatgg

SEQ ID NO: 3342857 - DNA, 25 bp, Homo sapien
tgccagttaggctattgattctgtt

SEQ ID NO: 3342858 - DNA, 25 bp, Homo sapien
aaacttgagcatcagcagtgcagta

SEQ ID NO: 3342859 - DNA, 25 bp, Homo sapien
gagtatttggatgaatactaaactg

SEQ ID NO: 3342860 - DNA, 25 bp, Homo sapien
aaattgctctagaaatcttagtagt

SEQ ID NO: 3342861 - DNA, 25 bp, Homo sapien
ctctagaaatcttagtagtggtccc

SEQ ID NO: 3342862 - DNA, 25 bp, Homo sapien
cttagtagtggtccctttgagtatt

SEQ ID NO: 3342863 - DNA, 25 bp, Homo sapien
ccacttagtccagtcaggagctcga

SEQ ID NO: 3342864 - DNA, 25 bp, Homo sapien
gaaattgtgctaatgccttaaaggt

SEQ ID NO: 3342865 - DNA, 25 bp, Homo sapien
gaaaggataaaagtgccagtcagca

SEQ ID NO: 3342866 - DNA, 25 bp, Homo sapien
ttctcaaagccaatacagtaagtac

SEQ ID NO: 3342867 - DNA, 25 bp, Homo sapien
cccagccatcagattttatgaacag

SEQ ID NO: 3342868 - DNA, 25 bp, Homo sapien
ttatgaacagtatatcaaactcacc

SEQ ID NO: 3342869 - DNA, 25 bp, Homo sapien
attggctgtttataaattgggggtg

SEQ ID NO: 3342870 - DNA, 25 bp, Homo sapien
agtatatcaaactcaccaaaatgag

SEQ ID NO: 3342871 - DNA, 25 bp, Homo sapien
tgttatgctaaatgtagaacttggc

SEQ ID NO: 3342872 - DNA, 25 bp, Homo sapien
gacgtgactgttctcacacagtgca

SEQ ID NO: 3342873 - DNA, 25 bp, Homo sapien
gagcagtccctacaaatagaaatga

SEQ ID NO: 3342874 - DNA, 25 bp, Homo sapien
tattcaagtgactaccaaatggtca

SEQ ID NO: 3342875 - DNA, 25 bp, Homo sapien
ttataaagacttaagacgatcctgc

SEQ ID NO: 3342876 - DNA, 25 bp, Homo sapien
gacttaagacgatcctgcaagaaag

SEQ ID NO: 3342877 - DNA, 25 bp, Homo sapien
taaagacttaagacgatcctgcaag

SEQ ID NO: 3342878 - DNA, 25 bp, Homo sapien
taagacgatcctgcaagaaagatgc

SEQ ID NO: 3342879 - DNA, 25 bp, Homo sapien
cgttataccttagacttccagcaga

SEQ ID NO: 3342880 - DNA, 25 bp, Homo sapien
tacaaggttgctttctaagataaca

SEQ ID NO: 3342881 - DNA, 25 bp, Homo sapien
ggcataatcatagttcgctacagtc

SEQ ID NO: 3342882 - DNA, 25 bp, Homo sapien
tggctatcacacattcatcacttcg

SEQ ID NO: 3342883 - DNA, 25 bp, Homo sapien
tgaggctccaggcaaacttaatcca

SEQ ID NO: 3342884 - DNA, 25 bp, Homo sapien
gtatacattgcaagacccctagtgg

SEQ ID NO: 3342885 - DNA, 25 bp, Homo sapien
gaaacataaacagtagtccctcttg

SEQ ID NO: 3342886 - DNA, 25 bp, Homo sapien
ggcatgaacaacaaaccccagaatg

SEQ ID NO: 3342887 - DNA, 25 bp, Homo sapien
cagagcgcataaccagactgggcaa

SEQ ID NO: 3342888 - DNA, 25 bp, Homo sapien
ggaggtgtcacactacttgacaaga

SEQ ID NO: 3342889 - DNA, 25 bp, Homo sapien
cctgggtgaaagcatgagattcggt

SEQ ID NO: 3342890 - DNA, 25 bp, Homo sapien
tatgtgtatctatagccaactgctg

SEQ ID NO: 3342891 - DNA, 25 bp, Homo sapien
ttttcctgccctacctgacaagcga

SEQ ID NO: 3342892 - DNA, 25 bp, Homo sapien
gagtggccaaaaccccagataatcc

SEQ ID NO: 3342893 - DNA, 25 bp, Homo sapien
cctgacaagcgaatgatattgaaga

SEQ ID NO: 3342894 - DNA, 25 bp, Homo sapien
ccagataatccatgaaagagcatga

SEQ ID NO: 3342895 - DNA, 25 bp, Homo sapien
taaagggaaacgcagacttaggcat

SEQ ID NO: 3342896 - DNA, 25 bp, Homo sapien
caggtgaccagaccattagagaagg

SEQ ID NO: 3342897 - DNA, 25 bp, Homo sapien
ttatcctctaacacaggtgggtagg

SEQ ID NO: 3342898 - DNA, 25 bp, Homo sapien
gggtacaagcaagcgcatccagcta

SEQ ID NO: 3342899 - DNA, 25 bp, Homo sapien
aagtcaccatcagtgtgagtaaacc

SEQ ID NO: 3342900 - DNA, 25 bp, Homo sapien
ccatcagtgtgagtaaaccacatgg

SEQ ID NO: 3342901 - DNA, 25 bp, Homo sapien
ctatacacgaaaaaagtcaccatca

SEQ ID NO: 3342902 - DNA, 25 bp, Homo sapien
cagctttaagatcttgttccccaac

SEQ ID NO: 3342903 - DNA, 25 bp, Homo sapien
tgaaaagagtatatgcttataaaat

SEQ ID NO: 3342904 - DNA, 25 bp, Homo sapien
gaaaagagtatatgcttataaaata

SEQ ID NO: 3342905 - DNA, 25 bp, Homo sapien
aaaagagtatatgcttataaaatat

SEQ ID NO: 3342906 - DNA, 25 bp, Homo sapien
ctgaaaagagtatatgcttataaaa

SEQ ID NO: 3342907 - DNA, 25 bp, Homo sapien
gacagtttctacaatatccctattg

SEQ ID NO: 3342908 - DNA, 25 bp, Homo sapien
tcaaccaaaccggtcaacacggcaa

SEQ ID NO: 3342909 - DNA, 25 bp, Homo sapien
cctggtttcagagacaatgcacccc

SEQ ID NO: 3342910 - DNA, 25 bp, Homo sapien
ggacacgattgtcttcgctagccat

SEQ ID NO: 3342911 - DNA, 25 bp, Homo sapien
gatgtggaaagtccttggcgtcgcc

SEQ ID NO: 3342912 - DNA, 25 bp, Homo sapien
cgcaatgcaaaacgaaagggtccct

SEQ ID NO: 3342913 - DNA, 25 bp, Homo sapien
ggtaatgagcacaacacacgcaatg

SEQ ID NO: 3342914 - DNA, 25 bp, Homo sapien
tgctagctcacgataaaggacaact

SEQ ID NO: 3342915 - DNA, 25 bp, Homo sapien
cagatactccggactcgtcctcacc

SEQ ID NO: 3342916 - DNA, 25 bp, Homo sapien
ccaggagcagcgagaccgaggtggc

SEQ ID NO: 3342917 - DNA, 25 bp, Homo sapien
ccagatactccggactcgtcctcac

SEQ ID NO: 3342918 - DNA, 25 bp, Homo sapien
ggagcagcgagaccgaggtggcggc

SEQ ID NO: 3342919 - DNA, 25 bp, Homo sapien
tgctgcgagtggtgaggatgctact

SEQ ID NO: 3342920 - DNA, 25 bp, Homo sapien
gtcgcagcctccaagtttccctagt

SEQ ID NO: 3342921 - DNA, 25 bp, Homo sapien
tggtgaggatgctactgccacagct

SEQ ID NO: 3342922 - DNA, 25 bp, Homo sapien
gctgtcgtgtgcccactgaagctgc

SEQ ID NO: 3342923 - DNA, 25 bp, Homo sapien
tttgtgtctttacttgggcaggcca

SEQ ID NO: 3342924 - DNA, 25 bp, Homo sapien
atttgtgtctttacttgggcaggcc

SEQ ID NO: 3342925 - DNA, 25 bp, Homo sapien
ttgtgtctttacttgggcaggccaa

SEQ ID NO: 3342926 - DNA, 25 bp, Homo sapien
gatttgtgtctttacttgggcaggc

SEQ ID NO: 3342927 - DNA, 25 bp, Homo sapien
ggtcggtctcaagcaaagccctgtt

SEQ ID NO: 3342928 - DNA, 25 bp, Homo sapien
tattacgcatgaggaaacaagcgtg

SEQ ID NO: 3342929 - DNA, 25 bp, Homo sapien
gaacgtcgctagcatctctggagtg

SEQ ID NO: 3342930 - DNA, 25 bp, Homo sapien
gaaaccacaggtaaccagacgcctg

SEQ ID NO: 3342931 - DNA, 25 bp, Homo sapien
tcaaaaaatggcaggtgagacccaa

SEQ ID NO: 3342932 - DNA, 25 bp, Homo sapien
tttcttgccgttgttgagtgctaac

SEQ ID NO: 3342933 - DNA, 25 bp, Homo sapien
caaagttccttagagtggttgtgct

SEQ ID NO: 3342934 - DNA, 25 bp, Homo sapien
tatgggtgtttgaccaaggatagca

SEQ ID NO: 3342935 - DNA, 25 bp, Homo sapien
cctgttaaatctgacggtatctttt

SEQ ID NO: 3342936 - DNA, 25 bp, Homo sapien
gaacttgagggataaatggataacg

SEQ ID NO: 3342937 - DNA, 25 bp, Homo sapien
tgagggataaatggataacgtaaaa

SEQ ID NO: 3342938 - DNA, 25 bp, Homo sapien
aaacctgttaaatctgacggtatct

SEQ ID NO: 3342939 - DNA, 25 bp, Homo sapien
cacaacacaaccttgagtattggat

SEQ ID NO: 3342940 - DNA, 25 bp, Homo sapien
tcacacaacacaaccttgagtattg

SEQ ID NO: 3342941 - DNA, 25 bp, Homo sapien
cacaaccttgagtattggattattc

SEQ ID NO: 3342942 - DNA, 25 bp, Homo sapien
caacacaaccttgagtattggatta

SEQ ID NO: 3342943 - DNA, 25 bp, Homo sapien
aatgctgaagaagcccaagtttgaa

SEQ ID NO: 3342944 - DNA, 25 bp, Homo sapien
agtaaaaatgctgaagaagcccaag

SEQ ID NO: 3342945 - DNA, 25 bp, Homo sapien
taaaaatgctgaagaagcccaagtt

SEQ ID NO: 3342946 - DNA, 25 bp, Homo sapien
ttcgttagaaaagtaaaaatgctga

SEQ ID NO: 3342947 - DNA, 25 bp, Homo sapien
ccactggatggattgtgctaagaca

SEQ ID NO: 3342948 - DNA, 25 bp, Homo sapien
gacagcttggtggattagacagtaa

SEQ ID NO: 3342949 - DNA, 25 bp, Homo sapien
aatactagtataccctcccagagca

SEQ ID NO: 3342950 - DNA, 25 bp, Homo sapien
taaaggtcaagtgcgtagctcatgc

SEQ ID NO: 3342951 - DNA, 25 bp, Homo sapien
ttccagatcctcgactcaagctttt

SEQ ID NO: 3342952 - DNA, 25 bp, Homo sapien
cagtggtccattcttttactagagg

SEQ ID NO: 3342953 - DNA, 25 bp, Homo sapien
gctgcagttaggctttcctcccaac

SEQ ID NO: 3342954 - DNA, 25 bp, Homo sapien
tacttgacctctgttagtgacttgc

SEQ ID NO: 3342955 - DNA, 25 bp, Homo sapien
cagtctttagattgatggctctcta

SEQ ID NO: 3342956 - DNA, 25 bp, Homo sapien
tgcccaccaccagtctttagattga

SEQ ID NO: 3342957 - DNA, 25 bp, Homo sapien
aagtaactatgtttaatgcccacca

SEQ ID NO: 3342958 - DNA, 25 bp, Homo sapien
gatggctctctagttattttggttg

SEQ ID NO: 3342959 - DNA, 25 bp, Homo sapien
ctgcctcctgggttcatgccattct

SEQ ID NO: 3342960 - DNA, 25 bp, Homo sapien
caccgtgcccagcctttctgttttt

SEQ ID NO: 3342961 - DNA, 25 bp, Homo sapien
ccaccgtgcccagcctttctgtttt

SEQ ID NO: 3342962 - DNA, 25 bp, Homo sapien
tgcctcctgggttcatgccattctc

SEQ ID NO: 3342963 - DNA, 25 bp, Homo sapien
ttatgtttctccttaaacatgctca

SEQ ID NO: 3342964 - DNA, 25 bp, Homo sapien
tgagtaggtaataagtggcaagcac

SEQ ID NO: 3342965 - DNA, 25 bp, Homo sapien
ttgaggctgaatggtgcaaaggact

SEQ ID NO: 3342966 - DNA, 25 bp, Homo sapien
gagagcccatatgttacctttttgc

SEQ ID NO: 3342967 - DNA, 25 bp, Homo sapien
aataaggtaccacaggccaggtgca

SEQ ID NO: 3342968 - DNA, 25 bp, Homo sapien
gcaaagatatatacctcatgttcca

SEQ ID NO: 3342969 - DNA, 25 bp, Homo sapien
tgacagaaggccaaaactgaagatt

SEQ ID NO: 3342970 - DNA, 25 bp, Homo sapien
caaaacgtattagaagtccccatag

SEQ ID NO: 3342971 - DNA, 25 bp, Homo sapien
tattgcacttatcattctgctgaca

SEQ ID NO: 3342972 - DNA, 25 bp, Homo sapien
tgcagaactccaggttgtagtcacg

SEQ ID NO: 3342973 - DNA, 25 bp, Homo sapien
tgtagtcacgtaaaagtgtggccac

SEQ ID NO: 3342974 - DNA, 25 bp, Homo sapien
tgagattgctaaccatgtcctgata

SEQ ID NO: 3342975 - DNA, 25 bp, Homo sapien
taatcccactagatgttttcctcgg

SEQ ID NO: 3342976 - DNA, 25 bp, Homo sapien
taaatagtggcctacctagggcagc

SEQ ID NO: 3342977 - DNA, 25 bp, Homo sapien
catttgcttgtaagcctctatccct

SEQ ID NO: 3342978 - DNA, 25 bp, Homo sapien
tgctgcactttgattttccctctta

SEQ ID NO: 3342979 - DNA, 25 bp, Homo sapien
caatgatctatacctaatgatgcca

SEQ ID NO: 3342980 - DNA, 25 bp, Homo sapien
taaggcttttctttatggaaaatga

SEQ ID NO: 3342981 - DNA, 25 bp, Homo sapien
ttgatttaaggcttttctttatgga

SEQ ID NO: 3342982 - DNA, 25 bp, Homo sapien
tgatttaaggcttttctttatggaa

SEQ ID NO: 3342983 - DNA, 25 bp, Homo sapien
ggtctggtccaaacctacataccat

SEQ ID NO: 3342984 - DNA, 25 bp, Homo sapien
agtttcctgagggctaggactattt

SEQ ID NO: 3342985 - DNA, 25 bp, Homo sapien
tctggtccaaacctacataccatgt

SEQ ID NO: 3342986 - DNA, 25 bp, Homo sapien
taatttaatagttaactgaagctat

SEQ ID NO: 3342987 - DNA, 25 bp, Homo sapien
tgactctcaaggactaaggcaacag

SEQ ID NO: 3342988 - DNA, 25 bp, Homo sapien
tgaaagcagtgcagaatcccttaac

SEQ ID NO: 3342989 - DNA, 25 bp, Homo sapien
cggatggatcgccttgagctcatga

SEQ ID NO: 3342990 - DNA, 25 bp, Homo sapien
gataaacgggatacattttgagcca

SEQ ID NO: 3342991 - DNA, 25 bp, Homo sapien
cttaccccgacaaaggctgcacata

SEQ ID NO: 3342992 - DNA, 25 bp, Homo sapien
agttagcaactttatggtgacatat

SEQ ID NO: 3342993 - DNA, 25 bp, Homo sapien
gacatatttcagtcaaggcatcccc

SEQ ID NO: 3342994 - DNA, 25 bp, Homo sapien
ttcagaataaagtaaaaccccatca

SEQ ID NO: 3342995 - DNA, 25 bp, Homo sapien
ccagttgtggattagggaaatagaa

SEQ ID NO: 3342996 - DNA, 25 bp, Homo sapien
tgttgcagacaagtgaaaaccctgt

SEQ ID NO: 3342997 - DNA, 25 bp, Homo sapien
tcttctagcactgttcccaaagtgc

SEQ ID NO: 3342998 - DNA, 25 bp, Homo sapien
gacagcagtgactactaaaaccacc

SEQ ID NO: 3342999 - DNA, 25 bp, Homo sapien
tctcccctcggaaatcatataaggc

SEQ ID NO: 3343000 - DNA, 25 bp, Homo sapien
attctcccctcggaaatcatataag

SEQ ID NO: 3343001 - DNA, 25 bp, Homo sapien
tcccctcggaaatcatataaggctt

SEQ ID NO: 3343002 - DNA, 25 bp, Homo sapien
cttcattctcccctcggaaatcata

SEQ ID NO: 3343003 - DNA, 25 bp, Homo sapien
tactatggccaacatactttttgcc

SEQ ID NO: 3343004 - DNA, 25 bp, Homo sapien
tatggccaacatactttttgcctca

SEQ ID NO: 3343005 - DNA, 25 bp, Homo sapien
atggccaacatactttttgcctcag

SEQ ID NO: 3343006 - DNA, 25 bp, Homo sapien
cttcggtactatggccaacatactt

SEQ ID NO: 3343007 - DNA, 25 bp, Homo sapien
cctgcaccagtcagaatccagacgt

SEQ ID NO: 3343008 - DNA, 25 bp, Homo sapien
cttgaatgataagtcatcactggtc

SEQ ID NO: 3343009 - DNA, 25 bp, Homo sapien
aatctggatccggtctcccctcttg

SEQ ID NO: 3343010 - DNA, 25 bp, Homo sapien
aatccagacgttccagaatctggat

SEQ ID NO: 3343011 - DNA, 25 bp, Homo sapien
tgagagtttgagccagaatcttctt

SEQ ID NO: 3343012 - DNA, 25 bp, Homo sapien
gggaaaatcccagttctgcctcgaa

SEQ ID NO: 3343013 - DNA, 25 bp, Homo sapien
ggtgggataatcctcaacaggctcc

SEQ ID NO: 3343014 - DNA, 25 bp, Homo sapien
ttaaaacatttgcaccagaggtggg

SEQ ID NO: 3343015 - DNA, 25 bp, Homo sapien
caaaccgagcaacacatcttgagcc

SEQ ID NO: 3343016 - DNA, 25 bp, Homo sapien
catagacaggtttacagtcttcagc

SEQ ID NO: 3343017 - DNA, 25 bp, Homo sapien
ctattcatagacaggtttacagtct

SEQ ID NO: 3343018 - DNA, 25 bp, Homo sapien
tcagcaggtaatgaattctattaat

SEQ ID NO: 3343019 - DNA, 25 bp, Homo sapien
tcttcagcaggtaatgaattctatt

SEQ ID NO: 3343020 - DNA, 25 bp, Homo sapien
taacacaatgagatgaaacacattc

SEQ ID NO: 3343021 - DNA, 25 bp, Homo sapien
catttcctccttctgggatatcaat

SEQ ID NO: 3343022 - DNA, 25 bp, Homo sapien
acaatgagatgaaacacattctctt

SEQ ID NO: 3343023 - DNA, 25 bp, Homo sapien
gatgaaacacattctcttttcccat

SEQ ID NO: 3343024 - DNA, 25 bp, Homo sapien
tacaaatgtgtgagggcagtctgat

SEQ ID NO: 3343025 - DNA, 25 bp, Homo sapien
gaagtggtaccataacctcagagaa

SEQ ID NO: 3343026 - DNA, 25 bp, Homo sapien
tgctttcacaagttaggccgtgagg

SEQ ID NO: 3343027 - DNA, 25 bp, Homo sapien
cagggaccgagtcatcctattccaa

SEQ ID NO: 3343028 - DNA, 25 bp, Homo sapien
tctgtaccaatctgtatctatcttc

SEQ ID NO: 3343029 - DNA, 25 bp, Homo sapien
tctacagttccctctgtaccaatct

SEQ ID NO: 3343030 - DNA, 25 bp, Homo sapien
atgccaatctggtttctacagttcc

SEQ ID NO: 3343031 - DNA, 25 bp, Homo sapien
gccaatctggtttctacagttccct

SEQ ID NO: 3343032 - DNA, 25 bp, Homo sapien
aatggctggtacaatcaacccttct

SEQ ID NO: 3343033 - DNA, 25 bp, Homo sapien
caacccttcttgaagtggagtcctg

SEQ ID NO: 3343034 - DNA, 25 bp, Homo sapien
caaaggcaagggtatacaactaagc

SEQ ID NO: 3343035 - DNA, 25 bp, Homo sapien
gggtatacaactaagctttctggaa

SEQ ID NO: 3343036 - DNA, 25 bp, Homo sapien
ctgctgggaaatcatgaagaacgac

SEQ ID NO: 3343037 - DNA, 25 bp, Homo sapien
tgaggagcaccactgtcaacaggct

SEQ ID NO: 3343038 - DNA, 25 bp, Homo sapien
tcaacaggcttctgagcgtggcttg

SEQ ID NO: 3343039 - DNA, 25 bp, Homo sapien
tgaagaacgacagcatgaggagcac

SEQ ID NO: 3343040 - DNA, 25 bp, Homo sapien
aaagcaatgctacctcccatgcctg

SEQ ID NO: 3343041 - DNA, 25 bp, Homo sapien
tctatccatctagccaaatgccgag

SEQ ID NO: 3343042 - DNA, 25 bp, Homo sapien
ccgagattggccagaggataaggca

SEQ ID NO: 3343043 - DNA, 25 bp, Homo sapien
gagcgacctcttcttattgactagc

SEQ ID NO: 3343044 - DNA, 25 bp, Homo sapien
aaccctgcagcacctttgctgagat

SEQ ID NO: 3343045 - DNA, 25 bp, Homo sapien
aataactcttgtccccttagagacg

SEQ ID NO: 3343046 - DNA, 25 bp, Homo sapien
gatgcaccaggctgattgcagcgca

SEQ ID NO: 3343047 - DNA, 25 bp, Homo sapien
cattctctcaagttaggtaaactga

SEQ ID NO: 3343048 - DNA, 25 bp, Homo sapien
gcctaaacataaaccagtccttgga

SEQ ID NO: 3343049 - DNA, 25 bp, Homo sapien
gaacaggctagacagggttgccaac

SEQ ID NO: 3343050 - DNA, 25 bp, Homo sapien
gaaatctccaaatggaccagaggcc

SEQ ID NO: 3343051 - DNA, 25 bp, Homo sapien
gggataatttgtgcctcccagtcac

SEQ ID NO: 3343052 - DNA, 25 bp, Homo sapien
agtaattattttccgtctgcttcag

SEQ ID NO: 3343053 - DNA, 25 bp, Homo sapien
tctaagatgttcatcaagtggagtg

SEQ ID NO: 3343054 - DNA, 25 bp, Homo sapien
gacaggtgaactctgccagtgtctt

SEQ ID NO: 3343055 - DNA, 25 bp, Homo sapien
tgcttcagcatcacaagtacatccc

SEQ ID NO: 3343056 - DNA, 25 bp, Homo sapien
attggcaattccatgaggcacagac

SEQ ID NO: 3343057 - DNA, 25 bp, Homo sapien
agagacaatatcttcattggcaatt

SEQ ID NO: 3343058 - DNA, 25 bp, Homo sapien
gacaatatcttcattggcaattcca

SEQ ID NO: 3343059 - DNA, 25 bp, Homo sapien
cattggcaattccatgaggcacaga

SEQ ID NO: 3343060 - DNA, 25 bp, Homo sapien
tgaccacaaacatttttaaaagcta

SEQ ID NO: 3343061 - DNA, 25 bp, Homo sapien
gagggggtagcaccggatcttgatt

SEQ ID NO: 3343062 - DNA, 25 bp, Homo sapien
tgggacgagggggtagcaccggatc

SEQ ID NO: 3343063 - DNA, 25 bp, Homo sapien
gacgagggggtagcaccggatcttg

SEQ ID NO: 3343064 - DNA, 25 bp, Homo sapien
gggtagcaccggatcttgattttta

SEQ ID NO: 3343065 - DNA, 25 bp, Homo sapien
aaggcagtttcttattagatcttct

SEQ ID NO: 3343066 - DNA, 25 bp, Homo sapien
tcagggggcaccttggttggaggct

SEQ ID NO: 3343067 - DNA, 25 bp, Homo sapien
cagggggcaccttggttggaggctg

SEQ ID NO: 3343068 - DNA, 25 bp, Homo sapien
gcagtttcttattagatcttctggt

SEQ ID NO: 3343069 - DNA, 25 bp, Homo sapien
tcctgtttgacctgggtggttggat

SEQ ID NO: 3343070 - DNA, 25 bp, Homo sapien
tcgcacaaaacctcctgtttgacct

SEQ ID NO: 3343071 - DNA, 25 bp, Homo sapien
ctgtttgacctgggtggttggattc

SEQ ID NO: 3343072 - DNA, 25 bp, Homo sapien
cgcacaaaacctcctgtttgacctg

SEQ ID NO: 3343073 - DNA, 25 bp, Homo sapien
gaaaggcactgctgtatctgacata

SEQ ID NO: 3343074 - DNA, 25 bp, Homo sapien
tctttagggatgttaggcacattct

SEQ ID NO: 3343075 - DNA, 25 bp, Homo sapien
taatgtagtgaagcaagtaaccagc

SEQ ID NO: 3343076 - DNA, 25 bp, Homo sapien
tgcacagcatatgaccctaattttg

SEQ ID NO: 3343077 - DNA, 25 bp, Homo sapien
gtggcatgctctcagctcaccaaac

SEQ ID NO: 3343078 - DNA, 25 bp, Homo sapien
tggcatgctctcagctcaccaaacc

SEQ ID NO: 3343079 - DNA, 25 bp, Homo sapien
ttctcccacctcagcctgccgagta

SEQ ID NO: 3343080 - DNA, 25 bp, Homo sapien
tctcccacctcagcctgccgagtag

SEQ ID NO: 3343081 - DNA, 25 bp, Homo sapien
tttcttctccagatgattaggtggg

SEQ ID NO: 3343082 - DNA, 25 bp, Homo sapien
ttttcttctccagatgattaggtgg

SEQ ID NO: 3343083 - DNA, 25 bp, Homo sapien
ttcttctccagatgattaggtgggc

SEQ ID NO: 3343084 - DNA, 25 bp, Homo sapien
tgcagacgaatgaaactaaaccctc

SEQ ID NO: 3343085 - DNA, 25 bp, Homo sapien
aacaaatgggcttatatcaaccaaa

SEQ ID NO: 3343086 - DNA, 25 bp, Homo sapien
gaaaagacctcaggacattggtctt

SEQ ID NO: 3343087 - DNA, 25 bp, Homo sapien
ttataagactcaactcaaagaccta

SEQ ID NO: 3343088 - DNA, 25 bp, Homo sapien
ggtggactttgtggatcctcatgta

SEQ ID NO: 3343089 - DNA, 25 bp, Homo sapien
aagtttctagttctctcaacattac

SEQ ID NO: 3343090 - DNA, 25 bp, Homo sapien
caagtttctagttctctcaacatta

SEQ ID NO: 3343091 - DNA, 25 bp, Homo sapien
ggactttgtggatcctcatgtaaac

SEQ ID NO: 3343092 - DNA, 25 bp, Homo sapien
catgcctggctaaattctttttttt

SEQ ID NO: 3343093 - DNA, 25 bp, Homo sapien
taattgagcctttatttttatgtat

SEQ ID NO: 3343094 - DNA, 25 bp, Homo sapien
accatgcctggctaaattctttttt

SEQ ID NO: 3343095 - DNA, 25 bp, Homo sapien
ttaattgagcctttatttttatgta

SEQ ID NO: 3343096 - DNA, 25 bp, Homo sapien
ccacaggattggtctttgactggca

SEQ ID NO: 3343097 - DNA, 25 bp, Homo sapien
gccaaaatttctaggagtgcctacc

SEQ ID NO: 3343098 - DNA, 25 bp, Homo sapien
gactttgggacagttctcgccatcc

SEQ ID NO: 3343099 - DNA, 25 bp, Homo sapien
tgactggcatataggaacttggact

SEQ ID NO: 3343100 - DNA, 25 bp, Homo sapien
tcctggtgggtgctggttgaactgc

SEQ ID NO: 3343101 - DNA, 25 bp, Homo sapien
tggtttggctggaattcgaattaca

SEQ ID NO: 3343102 - DNA, 25 bp, Homo sapien
gctggaattcgaattacagtgggct

SEQ ID NO: 3343103 - DNA, 25 bp, Homo sapien
gaattcgaattacagtgggcttcct

SEQ ID NO: 3343104 - DNA, 25 bp, Homo sapien
ctaatgaaaaacatagtttattttg

SEQ ID NO: 3343105 - DNA, 25 bp, Homo sapien
aatgaaaaacatagtttattttgca

SEQ ID NO: 3343106 - DNA, 25 bp, Homo sapien
taatgaaaaacatagtttattttgc

SEQ ID NO: 3343107 - DNA, 25 bp, Homo sapien
atgaaaaacatagtttattttgcat

SEQ ID NO: 3343108 - DNA, 25 bp, Homo sapien
cagaatatttactcccagggccctc

SEQ ID NO: 3343109 - DNA, 25 bp, Homo sapien
gggcaactgagatgaggagaccatc

SEQ ID NO: 3343110 - DNA, 25 bp, Homo sapien
ggtgcttagcagtctccgatttagt

SEQ ID NO: 3343111 - DNA, 25 bp, Homo sapien
taatcatttcatacgtgtctgcctg

SEQ ID NO: 3343112 - DNA, 25 bp, Homo sapien
gagcagctctttgcaggatacgtga

SEQ ID NO: 3343113 - DNA, 25 bp, Homo sapien
gtccccagatggcaagctagctaaa

SEQ ID NO: 3343114 - DNA, 25 bp, Homo sapien
tattctactcagcacacaggatcgc

SEQ ID NO: 3343115 - DNA, 25 bp, Homo sapien
caataagcaccttttgctgagcagc

SEQ ID NO: 3343116 - DNA, 25 bp, Homo sapien
agataagcaattcacgaggtttatt

SEQ ID NO: 3343117 - DNA, 25 bp, Homo sapien
caataatcattcacggtgtcttatc

SEQ ID NO: 3343118 - DNA, 25 bp, Homo sapien
cggtgtcttatctttcgagtagcat

SEQ ID NO: 3343119 - DNA, 25 bp, Homo sapien
ccaataatcattcacggtgtcttat

SEQ ID NO: 3343120 - DNA, 25 bp, Homo sapien
tcttatctttcgagtagcatttctt

SEQ ID NO: 3343121 - DNA, 25 bp, Homo sapien
ttaaaattttagtcaatgatgcttt

SEQ ID NO: 3343122 - DNA, 25 bp, Homo sapien
atcaataccctgttggttattagtt

SEQ ID NO: 3343123 - DNA, 25 bp, Homo sapien
gagtggtctgtttaatgatctcccc

SEQ ID NO: 3343124 - DNA, 25 bp, Homo sapien
gaggcaaggaagtcttcgtgttcca

SEQ ID NO: 3343125 - DNA, 25 bp, Homo sapien
tattctactatacatgtctccggga

SEQ ID NO: 3343126 - DNA, 25 bp, Homo sapien
ctttctccatgtggcgaggcaagga

SEQ ID NO: 3343127 - DNA, 25 bp, Homo sapien
ttgtagtggcaaaaaccaacaagga

SEQ ID NO: 3343128 - DNA, 25 bp, Homo sapien
tactatgaggtatcaggcaggatac

SEQ ID NO: 3343129 - DNA, 25 bp, Homo sapien
gattaagctgagttaacacctctgc

SEQ ID NO: 3343130 - DNA, 25 bp, Homo sapien
tgtaagctttggtttggcatgccca

SEQ ID NO: 3343131 - DNA, 25 bp, Homo sapien
cacagaaggctgcatactttgttca

SEQ ID NO: 3343132 - DNA, 25 bp, Homo sapien
cttcagaagtggcaaagacgacaag

SEQ ID NO: 3343133 - DNA, 25 bp, Homo sapien
ttatcagaatctgagggtcattggg

SEQ ID NO: 3343134 - DNA, 25 bp, Homo sapien
gacgacaagagataattctcccagt

SEQ ID NO: 3343135 - DNA, 25 bp, Homo sapien
tctttcagcctaattatgcttatgt

SEQ ID NO: 3343136 - DNA, 25 bp, Homo sapien
taacccttgcaataccctaggtgag

SEQ ID NO: 3343137 - DNA, 25 bp, Homo sapien
cagtataaccccatagtccagagca

SEQ ID NO: 3343138 - DNA, 25 bp, Homo sapien
taacaaatatggtagaccctggcag

SEQ ID NO: 3343139 - DNA, 25 bp, Homo sapien
tccacaggtcaaggcattcagaggt

SEQ ID NO: 3343140 - DNA, 25 bp, Homo sapien
attaacacttcgtataaggccaggg

SEQ ID NO: 3343141 - DNA, 25 bp, Homo sapien
gctttggcttgtgatgcccctgcga

SEQ ID NO: 3343142 - DNA, 25 bp, Homo sapien
ttccctgaggaaacagtaggctttg

SEQ ID NO: 3343143 - DNA, 25 bp, Homo sapien
tgagatcgatgtccaccaagggctt

SEQ ID NO: 3343144 - DNA, 25 bp, Homo sapien
tgaggtgctagcgttgtccagcaga

SEQ ID NO: 3343145 - DNA, 25 bp, Homo sapien
gtgagaatctctgggtattggtctg

SEQ ID NO: 3343146 - DNA, 25 bp, Homo sapien
tcctacggctgctgggctgattttc

SEQ ID NO: 3343147 - DNA, 25 bp, Homo sapien
ctttgctctttaatgtgagaatctc

SEQ ID NO: 3343148 - DNA, 25 bp, Homo sapien
tcagaaatatcaaagacgattaaag

SEQ ID NO: 3343149 - DNA, 25 bp, Homo sapien
tttgttggaagattgccagacgaga

SEQ ID NO: 3343150 - DNA, 25 bp, Homo sapien
caaagacgattaaaggtgccacatt

SEQ ID NO: 3343151 - DNA, 25 bp, Homo sapien
cacatttgttggaagattgccagac

SEQ ID NO: 3343152 - DNA, 25 bp, Homo sapien
ctgctgagaaaggctgaagaggctt

SEQ ID NO: 3343153 - DNA, 25 bp, Homo sapien
agaaaggctgaagaggcttgagagg

SEQ ID NO: 3343154 - DNA, 25 bp, Homo sapien
tgagaaaggctgaagaggcttgaga

SEQ ID NO: 3343155 - DNA, 25 bp, Homo sapien
tgctgagaaaggctgaagaggcttg

SEQ ID NO: 3343156 - DNA, 25 bp, Homo sapien
tttgaggcagatcgttgtctatttc

SEQ ID NO: 3343157 - DNA, 25 bp, Homo sapien
gaaaagtcagtctgagttgcagaag

SEQ ID NO: 3343158 - DNA, 25 bp, Homo sapien
taatagtgtgccttggagtagcagc

SEQ ID NO: 3343159 - DNA, 25 bp, Homo sapien
tgtagtattaacttgaacttggttg

SEQ ID NO: 3343160 - DNA, 25 bp, Homo sapien
cagcaggaaccagctcattaggcct

SEQ ID NO: 3343161 - DNA, 25 bp, Homo sapien
caggaaccagctcattaggcctcca

SEQ ID NO: 3343162 - DNA, 25 bp, Homo sapien
gatgatgtaggaaatcccagtcctg

SEQ ID NO: 3343163 - DNA, 25 bp, Homo sapien
gcctccaagagcctgctgcagatga

SEQ ID NO: 3343164 - DNA, 25 bp, Homo sapien
ggctcagctgccacaatggtgatct

SEQ ID NO: 3343165 - DNA, 25 bp, Homo sapien
gctcagctgccacaatggtgatctc

SEQ ID NO: 3343166 - DNA, 25 bp, Homo sapien
aaaccacgaggctggcctcagtggc

SEQ ID NO: 3343167 - DNA, 25 bp, Homo sapien
ctggaaaccacgaggctggcctcag

SEQ ID NO: 3343168 - DNA, 25 bp, Homo sapien
cttctatctcgatgaagttcactct

SEQ ID NO: 3343169 - DNA, 25 bp, Homo sapien
tctatctcgatgaagttcactctga

SEQ ID NO: 3343170 - DNA, 25 bp, Homo sapien
tcactctgaatagaagtccgagaag

SEQ ID NO: 3343171 - DNA, 25 bp, Homo sapien
ttctatctcgatgaagttcactctg

SEQ ID NO: 3343172 - DNA, 25 bp, Homo sapien
ttttgctgtgtactattcatgagtg

SEQ ID NO: 3343173 - DNA, 25 bp, Homo sapien
tcaggctggtgtcgaattcctgacc

SEQ ID NO: 3343174 - DNA, 25 bp, Homo sapien
caggtgcccaccactgcgccgggtt

SEQ ID NO: 3343175 - DNA, 25 bp, Homo sapien
gtgcccaccactgcgccgggttaat

SEQ ID NO: 3343176 - DNA, 25 bp, Homo sapien
gtcaggctggtgtcgaattcctgac

SEQ ID NO: 3343177 - DNA, 25 bp, Homo sapien
tagaagagtaggctaccctagccgc

SEQ ID NO: 3343178 - DNA, 25 bp, Homo sapien
gaaactgctctctcgtgggtctcaa

SEQ ID NO: 3343179 - DNA, 25 bp, Homo sapien
tcatcctaagcatagtcagatctcc

SEQ ID NO: 3343180 - DNA, 25 bp, Homo sapien
gggtctcaattgacctcctaagtgc

SEQ ID NO: 3343181 - DNA, 25 bp, Homo sapien
gaggtagcaacgagacaagatcgcg

SEQ ID NO: 3343182 - DNA, 25 bp, Homo sapien
caacccaagggttataaggcatgaa

SEQ ID NO: 3343183 - DNA, 25 bp, Homo sapien
gaaggcatagcttgtcctcagacgt

SEQ ID NO: 3343184 - DNA, 25 bp, Homo sapien
taaattatctctctgcccgtcatcg

SEQ ID NO: 3343185 - DNA, 25 bp, Homo sapien
ctcttgattaccgctctaatggatg

SEQ ID NO: 3343186 - DNA, 25 bp, Homo sapien
tcttgattaccgctctaatggatga

SEQ ID NO: 3343187 - DNA, 25 bp, Homo sapien
atctcttgattaccgctctaatgga

SEQ ID NO: 3343188 - DNA, 25 bp, Homo sapien
cttgattaccgctctaatggatgac

SEQ ID NO: 3343189 - DNA, 25 bp, Homo sapien
aataatcttgtgagactttcccctc

SEQ ID NO: 3343190 - DNA, 25 bp, Homo sapien
cacatcaaagtacataatctatata

SEQ ID NO: 3343191 - DNA, 25 bp, Homo sapien
aatcttgtgagactttcccctctcc

SEQ ID NO: 3343192 - DNA, 25 bp, Homo sapien
gtacataatctatatagtcaatttg

SEQ ID NO: 3343193 - DNA, 25 bp, Homo sapien
gaacatatttggtagccgaaggaca

SEQ ID NO: 3343194 - DNA, 25 bp, Homo sapien
gaaataactcgcctgctgcacaggg

SEQ ID NO: 3343195 - DNA, 25 bp, Homo sapien
tggcaggtatggagttcagcagaac

SEQ ID NO: 3343196 - DNA, 25 bp, Homo sapien
tgcagaccgtgccaaagcaaaagag

SEQ ID NO: 3343197 - DNA, 25 bp, Homo sapien
agcaatcgcagcatcggtgccactg

SEQ ID NO: 3343198 - DNA, 25 bp, Homo sapien
gacaggtggaattcccatgacagga

SEQ ID NO: 3343199 - DNA, 25 bp, Homo sapien
gacacggaacaatccttggcagtgg

SEQ ID NO: 3343200 - DNA, 25 bp, Homo sapien
aggccacagtcctaacaccaaaggt

SEQ ID NO: 3343201 - DNA, 25 bp, Homo sapien
tcactggcatacctggccagtgttc

SEQ ID NO: 3343202 - DNA, 25 bp, Homo sapien
ctggcatacctggccagtgttcatc

SEQ ID NO: 3343203 - DNA, 25 bp, Homo sapien
cactggcatacctggccagtgttca

SEQ ID NO: 3343204 - DNA, 25 bp, Homo sapien
ggcatacctggccagtgttcatcag

SEQ ID NO: 3343205 - DNA, 25 bp, Homo sapien
gaaaagctccgagcatacagatttc

SEQ ID NO: 3343206 - DNA, 25 bp, Homo sapien
caagtgatctgactcctgaatggct

SEQ ID NO: 3343207 - DNA, 25 bp, Homo sapien
gctgtggattagtacaagacccctt

SEQ ID NO: 3343208 - DNA, 25 bp, Homo sapien
gcttaagagttatgcactggtgtct

SEQ ID NO: 3343209 - DNA, 25 bp, Homo sapien
tgttccaaagttaactgcctgctga

SEQ ID NO: 3343210 - DNA, 25 bp, Homo sapien
tttttccaggaattagctagtacgc

SEQ ID NO: 3343211 - DNA, 25 bp, Homo sapien
caagactgaattccgatcaacagca

SEQ ID NO: 3343212 - DNA, 25 bp, Homo sapien
cctaaggatagattgagggccacaa

SEQ ID NO: 3343213 - DNA, 25 bp, Homo sapien
gcccagctaattcccaggagtttaa

SEQ ID NO: 3343214 - DNA, 25 bp, Homo sapien
tacacttgaagctccctgtggatcc

SEQ ID NO: 3343215 - DNA, 25 bp, Homo sapien
tcctggcccattcatttgataatca

SEQ ID NO: 3343216 - DNA, 25 bp, Homo sapien
gcaaatcctatctcttagcttaaga

SEQ ID NO: 3343217 - DNA, 25 bp, Homo sapien
tgcactgcacagtcatgacttccct

SEQ ID NO: 3343218 - DNA, 25 bp, Homo sapien
tgtgttccctacctgtatttacttg

SEQ ID NO: 3343219 - DNA, 25 bp, Homo sapien
gatactaacctttgtcacctacgtg

SEQ ID NO: 3343220 - DNA, 25 bp, Homo sapien
ttgtctttttcttccgtatgcgtag

SEQ ID NO: 3343221 - DNA, 25 bp, Homo sapien
tcctacatgggatccattatcatca

SEQ ID NO: 3343222 - DNA, 25 bp, Homo sapien
gaagttttagctgccactgatgatc

SEQ ID NO: 3343223 - DNA, 25 bp, Homo sapien
ggtgaccactaggtctctccattga

SEQ ID NO: 3343224 - DNA, 25 bp, Homo sapien
actacttgatttagatggtgaccac

SEQ ID NO: 3343225 - DNA, 25 bp, Homo sapien
tctggtttatttcgttcgttgcgat

SEQ ID NO: 3343226 - DNA, 25 bp, Homo sapien
tgttctggtttatttcgttcgttgc

SEQ ID NO: 3343227 - DNA, 25 bp, Homo sapien
acgatgttctggtttatttcgttcg

SEQ ID NO: 3343228 - DNA, 25 bp, Homo sapien
cgatgttctggtttatttcgttcgt

SEQ ID NO: 3343229 - DNA, 25 bp, Homo sapien
tgcaaatactaagaccaatacagct

SEQ ID NO: 3343230 - DNA, 25 bp, Homo sapien
gacaggcataaaagcttacggtttg

SEQ ID NO: 3343231 - DNA, 25 bp, Homo sapien
ttcatcacagttcgcctgacagagg

SEQ ID NO: 3343232 - DNA, 25 bp, Homo sapien
tcaaaggtagttgtgtcttcctaag

SEQ ID NO: 3343233 - DNA, 25 bp, Homo sapien
tgtccagaacatcatttcctgtggc

SEQ ID NO: 3343234 - DNA, 25 bp, Homo sapien
gtggctgtgatcctagttacatagt

SEQ ID NO: 3343235 - DNA, 25 bp, Homo sapien
tacttaggcatgtaatagcaaattt

SEQ ID NO: 3343236 - DNA, 25 bp, Homo sapien
tggctaaagccgagctaaaactctg

SEQ ID NO: 3343237 - DNA, 25 bp, Homo sapien
gctacgcagatcctactgatgtgga

SEQ ID NO: 3343238 - DNA, 25 bp, Homo sapien
cagtttttgggtacggctacgcaga

SEQ ID NO: 3343239 - DNA, 25 bp, Homo sapien
cacttacgtagaaatgggcccctgt

SEQ ID NO: 3343240 - DNA, 25 bp, Homo sapien
gcagagctggcacaaagactattgg

SEQ ID NO: 3343241 - DNA, 25 bp, Homo sapien
tatgactctaattctgtgactacca

SEQ ID NO: 3343242 - DNA, 25 bp, Homo sapien
tctttaatgcatggctcaagaacca

SEQ ID NO: 3343243 - DNA, 25 bp, Homo sapien
taaaaggccagctattaactagttg

SEQ ID NO: 3343244 - DNA, 25 bp, Homo sapien
cagctgccgtcatgttgttaaaagg

SEQ ID NO: 3343245 - DNA, 25 bp, Homo sapien
atccccagacccattaatgcggggg

SEQ ID NO: 3343246 - DNA, 25 bp, Homo sapien
aagcaagcaagaatttctgcctgag

SEQ ID NO: 3343247 - DNA, 25 bp, Homo sapien
caggagatcccacctcgcctcccca

SEQ ID NO: 3343248 - DNA, 25 bp, Homo sapien
tcaggagatcccacctcgcctcccc

SEQ ID NO: 3343249 - DNA, 25 bp, Homo sapien
aggagatcccacctcgcctccccag

SEQ ID NO: 3343250 - DNA, 25 bp, Homo sapien
caaagtgttttacccacagtgttca

SEQ ID NO: 3343251 - DNA, 25 bp, Homo sapien
tcaaagttctctccataacacagcg

SEQ ID NO: 3343252 - DNA, 25 bp, Homo sapien
cagtgttcagaatttagtgcttaga

SEQ ID NO: 3343253 - DNA, 25 bp, Homo sapien
taagcacagctgattagaacaccag

SEQ ID NO: 3343254 - DNA, 25 bp, Homo sapien
tgactctaacatagctacccctgga

SEQ ID NO: 3343255 - DNA, 25 bp, Homo sapien
tcaattcgaagcctctacccaggag

SEQ ID NO: 3343256 - DNA, 25 bp, Homo sapien
tcttcagaggcacaatcctgagcct

SEQ ID NO: 3343257 - DNA, 25 bp, Homo sapien
gcatctcaagggtaacatggtcaga

SEQ ID NO: 3343258 - DNA, 25 bp, Homo sapien
gatgctgaccagagctgagttggat

SEQ ID NO: 3343259 - DNA, 25 bp, Homo sapien
ctccaagctcaaggcataagtttgc

SEQ ID NO: 3343260 - DNA, 25 bp, Homo sapien
gaacaactgcaaagtgaatattcct

SEQ ID NO: 3343261 - DNA, 25 bp, Homo sapien
ggtaaactcactacacatgtgggat

SEQ ID NO: 3343262 - DNA, 25 bp, Homo sapien
atatagtttggatgctgaccccact

SEQ ID NO: 3343263 - DNA, 25 bp, Homo sapien
cttggtactatcctcaaaatagtgt

SEQ ID NO: 3343264 - DNA, 25 bp, Homo sapien
tttggatgctgaccccactcaaatc

SEQ ID NO: 3343265 - DNA, 25 bp, Homo sapien
tcaggtattatgttgatatagtttg

SEQ ID NO: 3343266 - DNA, 25 bp, Homo sapien
agatgccgctatgcctcctgtgcag

SEQ ID NO: 3343267 - DNA, 25 bp, Homo sapien
tatggaaccaacctagtataagtgg

SEQ ID NO: 3343268 - DNA, 25 bp, Homo sapien
tcagtaggtttataacagcaccacc

SEQ ID NO: 3343269 - DNA, 25 bp, Homo sapien
aaagccaaggcctgatatacacgta

SEQ ID NO: 3343270 - DNA, 25 bp, Homo sapien
aacagacaatggtgtccatttgccc

SEQ ID NO: 3343271 - DNA, 25 bp, Homo sapien
gcctcagatattctttaggagactg

SEQ ID NO: 3343272 - DNA, 25 bp, Homo sapien
taggagactgttttataaggagagc

SEQ ID NO: 3343273 - DNA, 25 bp, Homo sapien
taaggagagctattcattttccaat

SEQ ID NO: 3343274 - DNA, 25 bp, Homo sapien
taatagtaattaataccaattctac

SEQ ID NO: 3343275 - DNA, 25 bp, Homo sapien
ataatagtaattaataccaattcta

SEQ ID NO: 3343276 - DNA, 25 bp, Homo sapien
ctacatggtaaatccttgtctctat

SEQ ID NO: 3343277 - DNA, 25 bp, Homo sapien
aacatataggtaggtctttgtgacc

SEQ ID NO: 3343278 - DNA, 25 bp, Homo sapien
taactcgatcataaaaagagcacag

SEQ ID NO: 3343279 - DNA, 25 bp, Homo sapien
ttttatgcttcaatggacaccatca

SEQ ID NO: 3343280 - DNA, 25 bp, Homo sapien
catcaacaaagtaaaaaggtagcct

SEQ ID NO: 3343281 - DNA, 25 bp, Homo sapien
tctctctggctctcctgcgtccctc

SEQ ID NO: 3343282 - DNA, 25 bp, Homo sapien
ctctggctctcctgcgtccctcctg

SEQ ID NO: 3343283 - DNA, 25 bp, Homo sapien
tggctctcctgcgtccctcctgtgc

SEQ ID NO: 3343284 - DNA, 25 bp, Homo sapien
gctctcctgcgtccctcctgtgcct

SEQ ID NO: 3343285 - DNA, 25 bp, Homo sapien
aacattcatttatgtagttgtctaa

SEQ ID NO: 3343286 - DNA, 25 bp, Homo sapien
tcctttatagaactcaacatagcta

SEQ ID NO: 3343287 - DNA, 25 bp, Homo sapien
tgtagttgtctaattaacatatgtc

SEQ ID NO: 3343288 - DNA, 25 bp, Homo sapien
tctcatagcactatgaagccctcct

SEQ ID NO: 3343289 - DNA, 25 bp, Homo sapien
tctgttgcaaacagccagaggtacc

SEQ ID NO: 3343290 - DNA, 25 bp, Homo sapien
gagatatagaaccttggcacagaaa

SEQ ID NO: 3343291 - DNA, 25 bp, Homo sapien
acaagtcaggacacagaatggccag

SEQ ID NO: 3343292 - DNA, 25 bp, Homo sapien
gaatcaggacctacatcagagatag

SEQ ID NO: 3343293 - DNA, 25 bp, Homo sapien
agaggaatatagagttcccctggcc

SEQ ID NO: 3343294 - DNA, 25 bp, Homo sapien
ttcagaacggtgcagtaaagctact

SEQ ID NO: 3343295 - DNA, 25 bp, Homo sapien
agtaagctgcccattcaaggtctga

SEQ ID NO: 3343296 - DNA, 25 bp, Homo sapien
gcaagaaatatactggaccagcagc

SEQ ID NO: 3343297 - DNA, 25 bp, Homo sapien
gcaatcttcccacttaagtatcctg

SEQ ID NO: 3343298 - DNA, 25 bp, Homo sapien
gaaactggcagaatcaacttttcag

SEQ ID NO: 3343299 - DNA, 25 bp, Homo sapien
caataaaaacctgatagaaactggc

SEQ ID NO: 3343300 - DNA, 25 bp, Homo sapien
gcttgtagcaactaatgaaacactg

SEQ ID NO: 3343301 - DNA, 25 bp, Homo sapien
tctctgaggatagttgggaaggcct

SEQ ID NO: 3343302 - DNA, 25 bp, Homo sapien
tcagttgtattgacaccaaacggca

SEQ ID NO: 3343303 - DNA, 25 bp, Homo sapien
gagtttgaggccttgcgaggcccct

SEQ ID NO: 3343304 - DNA, 25 bp, Homo sapien
cggcaaacatctaaagcgctcagga

SEQ ID NO: 3343305 - DNA, 25 bp, Homo sapien
ttccaataagcctccatcagctaag

SEQ ID NO: 3343306 - DNA, 25 bp, Homo sapien
catcagctaaggtgagcatgcccat

SEQ ID NO: 3343307 - DNA, 25 bp, Homo sapien
gcctccatcagctaaggtgagcatg

SEQ ID NO: 3343308 - DNA, 25 bp, Homo sapien
taagcctccatcagctaaggtgagc

SEQ ID NO: 3343309 - DNA, 25 bp, Homo sapien
tgatagtagaatttccctcatacat

SEQ ID NO: 3343310 - DNA, 25 bp, Homo sapien
tatgccctgaaactacctgacacgt

SEQ ID NO: 3343311 - DNA, 25 bp, Homo sapien
gaggagcaaggactcgttccagctg

SEQ ID NO: 3343312 - DNA, 25 bp, Homo sapien
tgccctgtgtcaagctatccaagct

SEQ ID NO: 3343313 - DNA, 25 bp, Homo sapien
aaaagcacctggactaaagcaggga

SEQ ID NO: 3343314 - DNA, 25 bp, Homo sapien
gtggcactaacacaccaatctcagt

SEQ ID NO: 3343315 - DNA, 25 bp, Homo sapien
tgactatccttgatttgcctgggac

SEQ ID NO: 3343316 - DNA, 25 bp, Homo sapien
taactaacactaacacagtggcact

SEQ ID NO: 3343317 - DNA, 25 bp, Homo sapien
cattccattacatcgtcctcacacc

SEQ ID NO: 3343318 - DNA, 25 bp, Homo sapien
tcattccattacatcgtcctcacac

SEQ ID NO: 3343319 - DNA, 25 bp, Homo sapien
tacagaaaactggtgagctcggcgg

SEQ ID NO: 3343320 - DNA, 25 bp, Homo sapien
ctacagaaaactggtgagctcggcg

SEQ ID NO: 3343321 - DNA, 25 bp, Homo sapien
cgttgtccaccgagacggccattga

SEQ ID NO: 3343322 - DNA, 25 bp, Homo sapien
taagtcatcaaccaggccacaagtc

SEQ ID NO: 3343323 - DNA, 25 bp, Homo sapien
cggcgcaggcaaacccctcggaagg

SEQ ID NO: 3343324 - DNA, 25 bp, Homo sapien
tcctggatttagtgtgcacggaaaa

SEQ ID NO: 3343325 - DNA, 25 bp, Homo sapien
cccgagtctggcctctgagagttaa

SEQ ID NO: 3343326 - DNA, 25 bp, Homo sapien
ctagcagttaaagacgggtctgaat

SEQ ID NO: 3343327 - DNA, 25 bp, Homo sapien
tgaggatggcgatggaaatgccacc

SEQ ID NO: 3343328 - DNA, 25 bp, Homo sapien
ggtctgaatttcctcgggctcggcc

SEQ ID NO: 3343329 - DNA, 25 bp, Homo sapien
gcggcgctggccaccaagttcgcgg

SEQ ID NO: 3343330 - DNA, 25 bp, Homo sapien
gccgagtggcccgagagcgcacggc

SEQ ID NO: 3343331 - DNA, 25 bp, Homo sapien
gttcgcggcgctcgcgtagctcttc

SEQ ID NO: 3343332 - DNA, 25 bp, Homo sapien
ctgcggccgagtggcccgagagcgc

SEQ ID NO: 3343333 - DNA, 25 bp, Homo sapien
gcgggatggccagcgagctgcggcc

SEQ ID NO: 3343334 - DNA, 25 bp, Homo sapien
gcgcagccgcgggatggccagcgag

SEQ ID NO: 3343335 - DNA, 25 bp, Homo sapien
gatggccagcgagctgcggccccgg

SEQ ID NO: 3343336 - DNA, 25 bp, Homo sapien
ccgcgggatggccagcgagctgcgg

SEQ ID NO: 3343337 - DNA, 25 bp, Homo sapien
aggcgtcggcggcggctgtggaaat

SEQ ID NO: 3343338 - DNA, 25 bp, Homo sapien
gtggaaatggccacctccgcgaact

SEQ ID NO: 3343339 - DNA, 25 bp, Homo sapien
ggaaggcggctcccggagaggaggc

SEQ ID NO: 3343340 - DNA, 25 bp, Homo sapien
gcggctcccggagaggaggcgtcgg

SEQ ID NO: 3343341 - DNA, 25 bp, Homo sapien
accaaaagatacccaagtagcaggc

SEQ ID NO: 3343342 - DNA, 25 bp, Homo sapien
aaaagatacccaagtagcaggcaga

SEQ ID NO: 3343343 - DNA, 25 bp, Homo sapien
caaaagatacccaagtagcaggcag

SEQ ID NO: 3343344 - DNA, 25 bp, Homo sapien
ccaaaagatacccaagtagcaggca

SEQ ID NO: 3343345 - DNA, 25 bp, Homo sapien
gaacaggcctttatctttggcgtct

SEQ ID NO: 3343346 - DNA, 25 bp, Homo sapien
taggaaattcctgagtgcgatgaac

SEQ ID NO: 3343347 - DNA, 25 bp, Homo sapien
ggcgtcttgctctatttctgagaga

SEQ ID NO: 3343348 - DNA, 25 bp, Homo sapien
tggacatgaaaccttaggaaattcc

SEQ ID NO: 3343349 - DNA, 25 bp, Homo sapien
gataagaaccacaatcgattctgtg

SEQ ID NO: 3343350 - DNA, 25 bp, Homo sapien
tgaggtcaaatccacaagttaaaac

SEQ ID NO: 3343351 - DNA, 25 bp, Homo sapien
caatcgattctgtggaattgaggtc

SEQ ID NO: 3343352 - DNA, 25 bp, Homo sapien
aaaatctttccgcttttaagcagat

SEQ ID NO: 3343353 - DNA, 25 bp, Homo sapien
cataagcgattaaataagtagacac

SEQ ID NO: 3343354 - DNA, 25 bp, Homo sapien
taagcgattaaataagtagacactt

SEQ ID NO: 3343355 - DNA, 25 bp, Homo sapien
cgattaaataagtagacacttagag

SEQ ID NO: 3343356 - DNA, 25 bp, Homo sapien
ctgcataagcgattaaataagtaga

SEQ ID NO: 3343357 - DNA, 25 bp, Homo sapien
ccattggagtcagtttctactgtca

SEQ ID NO: 3343358 - DNA, 25 bp, Homo sapien
cattaagccattggagtcagtttct

SEQ ID NO: 3343359 - DNA, 25 bp, Homo sapien
tgaccaacagtaccatttcattaag

SEQ ID NO: 3343360 - DNA, 25 bp, Homo sapien
cagtaccatttcattaagccattgg

SEQ ID NO: 3343361 - DNA, 25 bp, Homo sapien
ctaataaggaccttatattcagaac

SEQ ID NO: 3343362 - DNA, 25 bp, Homo sapien
ataaggaccttatattcagaacata

SEQ ID NO: 3343363 - DNA, 25 bp, Homo sapien
tcatatatctaataaggaccttata

SEQ ID NO: 3343364 - DNA, 25 bp, Homo sapien
tatctaataaggaccttatattcag

SEQ ID NO: 3343365 - DNA, 25 bp, Homo sapien
gctggcccctagccacaagaaactc

SEQ ID NO: 3343366 - DNA, 25 bp, Homo sapien
tgctggcccctagccacaagaaact

SEQ ID NO: 3343367 - DNA, 25 bp, Homo sapien
ctgctggcccctagccacaagaaac

SEQ ID NO: 3343368 - DNA, 25 bp, Homo sapien
caaggaattgtagcaaataagctgt

SEQ ID NO: 3343369 - DNA, 25 bp, Homo sapien
acatcagctaatgattttccaatct

SEQ ID NO: 3343370 - DNA, 25 bp, Homo sapien
actgtgtgagtcaaagattatactg

SEQ ID NO: 3343371 - DNA, 25 bp, Homo sapien
aactagttcccatcaatatccttga

SEQ ID NO: 3343372 - DNA, 25 bp, Homo sapien
ccccagattcacgtccttcctgcat

SEQ ID NO: 3343373 - DNA, 25 bp, Homo sapien
gccccagattcacgtccttcctgca

SEQ ID NO: 3343374 - DNA, 25 bp, Homo sapien
tggcagccccagattcacgtccttc

SEQ ID NO: 3343375 - DNA, 25 bp, Homo sapien
cagccccagattcacgtccttcctg

SEQ ID NO: 3343376 - DNA, 25 bp, Homo sapien
aataacccttccagtgtctgaacct

SEQ ID NO: 3343377 - DNA, 25 bp, Homo sapien
taataacccttccagtgtctgaacc

SEQ ID NO: 3343378 - DNA, 25 bp, Homo sapien
ggcgtaccacttattcttaaggcat

SEQ ID NO: 3343379 - DNA, 25 bp, Homo sapien
cttctggttccaagtaagatggtga

SEQ ID NO: 3343380 - DNA, 25 bp, Homo sapien
cctgctcatgcacgaaaaattttgg

SEQ ID NO: 3343381 - DNA, 25 bp, Homo sapien
tcatgcattacatcagagacttctg

SEQ ID NO: 3343382 - DNA, 25 bp, Homo sapien
ggagcaggaccagtagactactgga

SEQ ID NO: 3343383 - DNA, 25 bp, Homo sapien
tggtaatatctaacacgacaccttt

SEQ ID NO: 3343384 - DNA, 25 bp, Homo sapien
tacattcaaagtacagggagcagga

SEQ ID NO: 3343385 - DNA, 25 bp, Homo sapien
tatatgttgaactttgcatgcctga

SEQ ID NO: 3343386 - DNA, 25 bp, Homo sapien
gattcctacaatacaagttgccctg

SEQ ID NO: 3343387 - DNA, 25 bp, Homo sapien
tctgggtgctgattacatgggttta

SEQ ID NO: 3343388 - DNA, 25 bp, Homo sapien
tatgcagttagaagtcaggattaac

SEQ ID NO: 3343389 - DNA, 25 bp, Homo sapien
tcaactttgggtatgcagtatccag

SEQ ID NO: 3343390 - DNA, 25 bp, Homo sapien
catatttgtagagagggaactaaca

SEQ ID NO: 3343391 - DNA, 25 bp, Homo sapien
aagaatgagtctgtttcactcccag

SEQ ID NO: 3343392 - DNA, 25 bp, Homo sapien
gagacagcccctttacctttagcaa

SEQ ID NO: 3343393 - DNA, 25 bp, Homo sapien
gagagcagacagtgtcatatggcaa

SEQ ID NO: 3343394 - DNA, 25 bp, Homo sapien
gctgtgtcctcaacccctagaagcg

SEQ ID NO: 3343395 - DNA, 25 bp, Homo sapien
ttcccacgtggaagaggtaagctcc

SEQ ID NO: 3343396 - DNA, 25 bp, Homo sapien
gaagcgtgcctagcatgcaaaaggc

SEQ ID NO: 3343397 - DNA, 25 bp, Homo sapien
ggtgccttctggattgctcctagta

SEQ ID NO: 3343398 - DNA, 25 bp, Homo sapien
tccaactgttagagcaggccaaggg

SEQ ID NO: 3343399 - DNA, 25 bp, Homo sapien
cttccaactgttagagcaggccaag

SEQ ID NO: 3343400 - DNA, 25 bp, Homo sapien
gccaaggggacctgttgtgcagaac

SEQ ID NO: 3343401 - DNA, 25 bp, Homo sapien
aggggacctgttgtgcagaacttca

SEQ ID NO: 3343402 - DNA, 25 bp, Homo sapien
gagcttgtcacaggtgaaaggctga

SEQ ID NO: 3343403 - DNA, 25 bp, Homo sapien
gagagatacttgtggcaagtacccg

SEQ ID NO: 3343404 - DNA, 25 bp, Homo sapien
ttgtggcaagtacccggtgttcctg

SEQ ID NO: 3343405 - DNA, 25 bp, Homo sapien
gatgaatctggagagatacttgtgg

SEQ ID NO: 3343406 - DNA, 25 bp, Homo sapien
cgcttttgcaaactggtgtggcccc

SEQ ID NO: 3343407 - DNA, 25 bp, Homo sapien
gactgaggctcaacgcaggtttcag

SEQ ID NO: 3343408 - DNA, 25 bp, Homo sapien
gaaactgccacatccgcttttgcaa

SEQ ID NO: 3343409 - DNA, 25 bp, Homo sapien
tccaaaggagaatctgatgaggcgc

SEQ ID NO: 3343410 - DNA, 25 bp, Homo sapien
gaacgtttgcctcacttgactcagc

SEQ ID NO: 3343411 - DNA, 25 bp, Homo sapien
tgtcaggagaacaacaggcgaacgt

SEQ ID NO: 3343412 - DNA, 25 bp, Homo sapien
acttcattaatgtcggccaaggcca

SEQ ID NO: 3343413 - DNA, 25 bp, Homo sapien
ccatctcaagcgtgatagtgggaaa

SEQ ID NO: 3343414 - DNA, 25 bp, Homo sapien
agcaagaaatccgaaacgcccgtga

SEQ ID NO: 3343415 - DNA, 25 bp, Homo sapien
cctttggcgggacggtgaacgattg

SEQ ID NO: 3343416 - DNA, 25 bp, Homo sapien
agaacccgagagacgagcctttggc

SEQ ID NO: 3343417 - DNA, 25 bp, Homo sapien
ggcgttgtccgactccttccactag

SEQ ID NO: 3343418 - DNA, 25 bp, Homo sapien
tgagtaaagagtgtgtagctccggc

SEQ ID NO: 3343419 - DNA, 25 bp, Homo sapien
aagagtgtgtagctccggccaaacg

SEQ ID NO: 3343420 - DNA, 25 bp, Homo sapien
tgtgtacggcggtgtgcgtgcgtga

SEQ ID NO: 3343421 - DNA, 25 bp, Homo sapien
tgcgtgagtaaagagtgtgtagctc

SEQ ID NO: 3343422 - DNA, 25 bp, Homo sapien
gagagtcgaaatgtcccttctctgc

SEQ ID NO: 3343423 - DNA, 25 bp, Homo sapien
ctgtgctggccggagatttgcgctt

SEQ ID NO: 3343424 - DNA, 25 bp, Homo sapien
ctctgcatccgccaactgggcaggg

SEQ ID NO: 3343425 - DNA, 25 bp, Homo sapien
gacacttgtccagcgagccccactg

SEQ ID NO: 3343426 - DNA, 25 bp, Homo sapien
tgagggagcaggcattgggctgggg

SEQ ID NO: 3343427 - DNA, 25 bp, Homo sapien
gagcaggcattgggctgggggccgg

SEQ ID NO: 3343428 - DNA, 25 bp, Homo sapien
ctgagggagcaggcattgggctggg

SEQ ID NO: 3343429 - DNA, 25 bp, Homo sapien
agggagcaggcattgggctgggggc

SEQ ID NO: 3343430 - DNA, 25 bp, Homo sapien
ggcacctgaatctccatactgaaat

SEQ ID NO: 3343431 - DNA, 25 bp, Homo sapien
actgttcctagtgttgcttttcttt

SEQ ID NO: 3343432 - DNA, 25 bp, Homo sapien
tcctttaggactggagcctaactct

SEQ ID NO: 3343433 - DNA, 25 bp, Homo sapien
tcctggcacctgaatctccatactg

SEQ ID NO: 3343434 - DNA, 25 bp, Homo sapien
tacaacttgttctgacagagtagtc

SEQ ID NO: 3343435 - DNA, 25 bp, Homo sapien
gagagctgtaggcttgtcacccatt

SEQ ID NO: 3343436 - DNA, 25 bp, Homo sapien
tattcctctgagcaattggagagct

SEQ ID NO: 3343437 - DNA, 25 bp, Homo sapien
gtctaatgatgacacaggaatattc

SEQ ID NO: 3343438 - DNA, 25 bp, Homo sapien
cttaagtcattcacttcatctttgt

SEQ ID NO: 3343439 - DNA, 25 bp, Homo sapien
ttcatctttgtgcttttcatcctcc

SEQ ID NO: 3343440 - DNA, 25 bp, Homo sapien
catctttgtgcttttcatcctccat

SEQ ID NO: 3343441 - DNA, 25 bp, Homo sapien
cacttcatctttgtgcttttcatcc

SEQ ID NO: 3343442 - DNA, 25 bp, Homo sapien
caaggggatttaggatagtcaccac

SEQ ID NO: 3343443 - DNA, 25 bp, Homo sapien
gggatttaggatagtcaccaccatc

SEQ ID NO: 3343444 - DNA, 25 bp, Homo sapien
tcaaggggatttaggatagtcacca

SEQ ID NO: 3343445 - DNA, 25 bp, Homo sapien
aggggatttaggatagtcaccacca

SEQ ID NO: 3343446 - DNA, 25 bp, Homo sapien
ccctgagatgtgttgtctgtcaata

SEQ ID NO: 3343447 - DNA, 25 bp, Homo sapien
ccctgctgccacagttggttcagtt

SEQ ID NO: 3343448 - DNA, 25 bp, Homo sapien
gctgccacagttggttcagtttctt

SEQ ID NO: 3343449 - DNA, 25 bp, Homo sapien
gtcaatacacttggccaggctgcgt

SEQ ID NO: 3343450 - DNA, 25 bp, Homo sapien
gttccaggaatttgttgaaatctct

SEQ ID NO: 3343451 - DNA, 25 bp, Homo sapien
caatgagctcttttcaatagtatgg

SEQ ID NO: 3343452 - DNA, 25 bp, Homo sapien
ttcaatagtatggaattctcccatt

SEQ ID NO: 3343453 - DNA, 25 bp, Homo sapien
cctgcattagggactcaggagggac

SEQ ID NO: 3343454 - DNA, 25 bp, Homo sapien
gagggacatgcaggcggtcaggcat

SEQ ID NO: 3343455 - DNA, 25 bp, Homo sapien
tctctatcaggatcactggcatttc

SEQ ID NO: 3343456 - DNA, 25 bp, Homo sapien
gcatagtggatctctatcaggatca

SEQ ID NO: 3343457 - DNA, 25 bp, Homo sapien
cttttcttgggcatagtggatctct

SEQ ID NO: 3343458 - DNA, 25 bp, Homo sapien
tcacacaccacagagtcgcttttct

SEQ ID NO: 3343459 - DNA, 25 bp, Homo sapien
tcttgttcagacatgcattcctctt

SEQ ID NO: 3343460 - DNA, 25 bp, Homo sapien
tataaatattcttgttcagacatgc

SEQ ID NO: 3343461 - DNA, 25 bp, Homo sapien
ggtcactgagtagatgttggtcgtt

SEQ ID NO: 3343462 - DNA, 25 bp, Homo sapien
gatgttggtcgtttatttcagttcc

SEQ ID NO: 3343463 - DNA, 25 bp, Homo sapien
atggctgataggctgggtgctataa

SEQ ID NO: 3343464 - DNA, 25 bp, Homo sapien
actgatggctgataggctgggtgct

SEQ ID NO: 3343465 - DNA, 25 bp, Homo sapien
aggctgggtgctataaagccaagtc

SEQ ID NO: 3343466 - DNA, 25 bp, Homo sapien
ctgataggctgggtgctataaagcc

SEQ ID NO: 3343467 - DNA, 25 bp, Homo sapien
tgttgttgctattatctcttggatg

SEQ ID NO: 3343468 - DNA, 25 bp, Homo sapien
ttatactggtaaatgaaggcttagc

SEQ ID NO: 3343469 - DNA, 25 bp, Homo sapien
tgtaaatgtaatagcagtcagtgcc

SEQ ID NO: 3343470 - DNA, 25 bp, Homo sapien
ggataatgttcataaagatctctag

SEQ ID NO: 3343471 - DNA, 25 bp, Homo sapien
aggttgatttttaacagctgagtct

SEQ ID NO: 3343472 - DNA, 25 bp, Homo sapien
ttttaacagctgagtctggaagagg

SEQ ID NO: 3343473 - DNA, 25 bp, Homo sapien
ttgatttttaacagctgagtctgga

SEQ ID NO: 3343474 - DNA, 25 bp, Homo sapien
gctgagtctggaagagggcggtcat

SEQ ID NO: 3343475 - DNA, 25 bp, Homo sapien
gtgcattactgtcaaaggactcggc

SEQ ID NO: 3343476 - DNA, 25 bp, Homo sapien
cttgctttcgatgtcattctgtgca

SEQ ID NO: 3343477 - DNA, 25 bp, Homo sapien
gatgtcattctgtgcattactgtca

SEQ ID NO: 3343478 - DNA, 25 bp, Homo sapien
tactgtcaaaggactcggcttcctt

SEQ ID NO: 3343479 - DNA, 25 bp, Homo sapien
ctagcagcaatctgtaattcttaag

SEQ ID NO: 3343480 - DNA, 25 bp, Homo sapien
tctagcagcaatctgtaattcttaa

SEQ ID NO: 3343481 - DNA, 25 bp, Homo sapien
acacctctacgttttgttctctgtg

SEQ ID NO: 3343482 - DNA, 25 bp, Homo sapien
tcttggacacctctacgttttgttc

SEQ ID NO: 3343483 - DNA, 25 bp, Homo sapien
ggataatttccttgccagcttctct

SEQ ID NO: 3343484 - DNA, 25 bp, Homo sapien
taggataatttccttgccagcttct

SEQ ID NO: 3343485 - DNA, 25 bp, Homo sapien
cttccctcagggcctgctttttcat

SEQ ID NO: 3343486 - DNA, 25 bp, Homo sapien
ttcttccctcagggcctgctttttc

SEQ ID NO: 3343487 - DNA, 25 bp, Homo sapien
atgttcttccctcagggcctgcttt

SEQ ID NO: 3343488 - DNA, 25 bp, Homo sapien
tgttcttccctcagggcctgctttt

SEQ ID NO: 3343489 - DNA, 25 bp, Homo sapien
tgctggttctggaattgttagtctc

SEQ ID NO: 3343490 - DNA, 25 bp, Homo sapien
aatttcccatcaggaatacgtggct

SEQ ID NO: 3343491 - DNA, 25 bp, Homo sapien
catcaggaatacgtggctgtaggtg

SEQ ID NO: 3343492 - DNA, 25 bp, Homo sapien
tagtctcttgccttgagctgggatc

SEQ ID NO: 3343493 - DNA, 25 bp, Homo sapien
ttggacttggaacccactgagtcct

SEQ ID NO: 3343494 - DNA, 25 bp, Homo sapien
tggaaccaggtaatgctggtttctt

SEQ ID NO: 3343495 - DNA, 25 bp, Homo sapien
gaaccaggtaatgctggtttcttgg

SEQ ID NO: 3343496 - DNA, 25 bp, Homo sapien
ataggtgacttggacttggaaccca

SEQ ID NO: 3343497 - DNA, 25 bp, Homo sapien
tatagtcgggattcagcgttgacat

SEQ ID NO: 3343498 - DNA, 25 bp, Homo sapien
agagctaataggaacagtaattttc

SEQ ID NO: 3343499 - DNA, 25 bp, Homo sapien
gaagagctaataggaacagtaattt

SEQ ID NO: 3343500 - DNA, 25 bp, Homo sapien
ggaagagctaataggaacagtaatt

SEQ ID NO: 3343501 - DNA, 25 bp, Homo sapien
aggaagagctaataggaacagtaat

SEQ ID NO: 3343502 - DNA, 25 bp, Homo sapien
gctgccatctagctttacctcctag

SEQ ID NO: 3343503 - DNA, 25 bp, Homo sapien
tacctcctagttcaaatccccagga

SEQ ID NO: 3343504 - DNA, 25 bp, Homo sapien
aatccccaggataatttgaaaggct

SEQ ID NO: 3343505 - DNA, 25 bp, Homo sapien
gaaaggctgagctaattcatgatta

SEQ ID NO: 3343506 - DNA, 25 bp, Homo sapien
ccctgtgactagcaggttgatggtg

SEQ ID NO: 3343507 - DNA, 25 bp, Homo sapien
aatcatgtctaaggctgcccccgag

SEQ ID NO: 3343508 - DNA, 25 bp, Homo sapien
ccccgagcagtggttggcaacataa

SEQ ID NO: 3343509 - DNA, 25 bp, Homo sapien
tcattctgtcaggttccattccctg

SEQ ID NO: 3343510 - DNA, 25 bp, Homo sapien
gagttttaagccagtcctccaaaca

SEQ ID NO: 3343511 - DNA, 25 bp, Homo sapien
cctcatggccactctcattacagac

SEQ ID NO: 3343512 - DNA, 25 bp, Homo sapien
gcctcctggaggaaggttagcgtat

SEQ ID NO: 3343513 - DNA, 25 bp, Homo sapien
tagcgtatgctcctttagtactggg

SEQ ID NO: 3343514 - DNA, 25 bp, Homo sapien
cattacagacatccagaggtgccac

SEQ ID NO: 3343515 - DNA, 25 bp, Homo sapien
cagtacgccttttcggtcatcaagc

SEQ ID NO: 3343516 - DNA, 25 bp, Homo sapien
tacagtacgccttttcggtcatcaa

SEQ ID NO: 3343517 - DNA, 25 bp, Homo sapien
gtacgccttttcggtcatcaagcat

SEQ ID NO: 3343518 - DNA, 25 bp, Homo sapien
acagtacgccttttcggtcatcaag

SEQ ID NO: 3343519 - DNA, 25 bp, Homo sapien
cccaggtgccactgtttaagatcaa

SEQ ID NO: 3343520 - DNA, 25 bp, Homo sapien
tacagggatactgattaacctcacc

SEQ ID NO: 3343521 - DNA, 25 bp, Homo sapien
tgaaatatggcctgtccctcacaga

SEQ ID NO: 3343522 - DNA, 25 bp, Homo sapien
cagaccgagacctcagactctgtga

SEQ ID NO: 3343523 - DNA, 25 bp, Homo sapien
gagaactttaataactgcctgtcag

SEQ ID NO: 3343524 - DNA, 25 bp, Homo sapien
catttctgtgcgtaaaacattatgc

SEQ ID NO: 3343525 - DNA, 25 bp, Homo sapien
tgccacactatactgctgccaggga

SEQ ID NO: 3343526 - DNA, 25 bp, Homo sapien
tatgctgcgagcttcagactaaagc

SEQ ID NO: 3343527 - DNA, 25 bp, Homo sapien
tgcaccaggtgcaaagtactgccag

SEQ ID NO: 3343528 - DNA, 25 bp, Homo sapien
caggtgcaaagtactgccagactcc

SEQ ID NO: 3343529 - DNA, 25 bp, Homo sapien
agtgtgcaccaggtgcaaagtactg

SEQ ID NO: 3343530 - DNA, 25 bp, Homo sapien
caccaggtgcaaagtactgccagac

SEQ ID NO: 3343531 - DNA, 25 bp, Homo sapien
gactccgtaccattctcattcttgg

SEQ ID NO: 3343532 - DNA, 25 bp, Homo sapien
ttcttctcccaatagtgtcactctg

SEQ ID NO: 3343533 - DNA, 25 bp, Homo sapien
agtggctccacttcctacaatgttc

SEQ ID NO: 3343534 - DNA, 25 bp, Homo sapien
tacaatgttcttggtctacatgctg

SEQ ID NO: 3343535 - DNA, 25 bp, Homo sapien
ttgggaaaatctccatccagatatg

SEQ ID NO: 3343536 - DNA, 25 bp, Homo sapien
gagttggcagttgcagccaaagatg

SEQ ID NO: 3343537 - DNA, 25 bp, Homo sapien
ggaaaatctccatccagatatgttg

SEQ ID NO: 3343538 - DNA, 25 bp, Homo sapien
ggtgggagacccgtagagagttggc

SEQ ID NO: 3343539 - DNA, 25 bp, Homo sapien
atgcacatacgtattcatgatctgc

SEQ ID NO: 3343540 - DNA, 25 bp, Homo sapien
tttccttaaaggcatgtgtgctggg

SEQ ID NO: 3343541 - DNA, 25 bp, Homo sapien
gggttcatataagccgccgtggagc

SEQ ID NO: 3343542 - DNA, 25 bp, Homo sapien
ctgcatcctgcaagctcaataattc

SEQ ID NO: 3343543 - DNA, 25 bp, Homo sapien
tctggcagacttcccgttggatttt

SEQ ID NO: 3343544 - DNA, 25 bp, Homo sapien
ttggatgcttcagcaggtctctgct

SEQ ID NO: 3343545 - DNA, 25 bp, Homo sapien
tgtcatctgtgccacttcctgagga

SEQ ID NO: 3343546 - DNA, 25 bp, Homo sapien
tcttgaagttttatgcctggtttcc

SEQ ID NO: 3343547 - DNA, 25 bp, Homo sapien
tgcagaagataatccagagtcctta

SEQ ID NO: 3343548 - DNA, 25 bp, Homo sapien
gcagaagataatccagagtccttaa

SEQ ID NO: 3343549 - DNA, 25 bp, Homo sapien
ctgcagaagataatccagagtcctt

SEQ ID NO: 3343550 - DNA, 25 bp, Homo sapien
cagaagataatccagagtccttaac

SEQ ID NO: 3343551 - DNA, 25 bp, Homo sapien
agtctgatcagtgccctcatcatcc

SEQ ID NO: 3343552 - DNA, 25 bp, Homo sapien
gatgtggccccatcctgcctatgag

SEQ ID NO: 3343553 - DNA, 25 bp, Homo sapien
aaatgcagatgtaaagtctgatcag

SEQ ID NO: 3343554 - DNA, 25 bp, Homo sapien
aaagtctgatcagtgccctcatcat

SEQ ID NO: 3343555 - DNA, 25 bp, Homo sapien
cgtttcaggtgaggtaaagcaggaa

SEQ ID NO: 3343556 - DNA, 25 bp, Homo sapien
aaattttctctcaccgcacactaag

SEQ ID NO: 3343557 - DNA, 25 bp, Homo sapien
ttatccagtgccagatgatgtgcag

SEQ ID NO: 3343558 - DNA, 25 bp, Homo sapien
gaatcattctgatgggatgctcctc

SEQ ID NO: 3343559 - DNA, 25 bp, Homo sapien
aattcagacccgtttcacagtgagc

SEQ ID NO: 3343560 - DNA, 25 bp, Homo sapien
tcaaagggtcctacatagaagagtc

SEQ ID NO: 3343561 - DNA, 25 bp, Homo sapien
gatgaagaagaatgccctcctgctc

SEQ ID NO: 3343562 - DNA, 25 bp, Homo sapien
gactccgaggacatgaaggattctc

SEQ ID NO: 3343563 - DNA, 25 bp, Homo sapien
cagatcacgtcaagcagatattggg

SEQ ID NO: 3343564 - DNA, 25 bp, Homo sapien
gattgtacacctgcaactgtgcgaa

SEQ ID NO: 3343565 - DNA, 25 bp, Homo sapien
ctgtgcgaatggtcctgttgcctcc

SEQ ID NO: 3343566 - DNA, 25 bp, Homo sapien
cataagctggttgctcccttggcag

SEQ ID NO: 3343567 - DNA, 25 bp, Homo sapien
ccatcacgaaagcacatatcatctg

SEQ ID NO: 3343568 - DNA, 25 bp, Homo sapien
ctccatcacgaaagcacatatcatc

SEQ ID NO: 3343569 - DNA, 25 bp, Homo sapien
cacatatcatctgtccctttggatt

SEQ ID NO: 3343570 - DNA, 25 bp, Homo sapien
gcacatatcatctgtccctttggat

SEQ ID NO: 3343571 - DNA, 25 bp, Homo sapien
tgtaaatgcaaacaggtcacctgga

SEQ ID NO: 3343572 - DNA, 25 bp, Homo sapien
gcaggattatacttagagccacagc

SEQ ID NO: 3343573 - DNA, 25 bp, Homo sapien
gaaatgctgccttccgagtaatggg

SEQ ID NO: 3343574 - DNA, 25 bp, Homo sapien
ggttcattagaaggccccaacgtgc

SEQ ID NO: 3343575 - DNA, 25 bp, Homo sapien
gtagtttgatttacacctttctcca

SEQ ID NO: 3343576 - DNA, 25 bp, Homo sapien
tagaataccatggtcccctttgtgg

SEQ ID NO: 3343577 - DNA, 25 bp, Homo sapien
cataaaatgccaacgccacatctgt

SEQ ID NO: 3343578 - DNA, 25 bp, Homo sapien
cctttctccattatctggtggtggt

SEQ ID NO: 3343579 - DNA, 25 bp, Homo sapien
gtgtctccaaatcagcttggctgtg

SEQ ID NO: 3343580 - DNA, 25 bp, Homo sapien
cagccagtgggtactcagggtcgaa

SEQ ID NO: 3343581 - DNA, 25 bp, Homo sapien
ggccgtcatgtggactgattcccag

SEQ ID NO: 3343582 - DNA, 25 bp, Homo sapien
tactcagggtcgaaagttgtttcca

SEQ ID NO: 3343583 - DNA, 25 bp, Homo sapien
aagcaagggtcagctctatttgcaa

SEQ ID NO: 3343584 - DNA, 25 bp, Homo sapien
gaggcatggcagccacttccatgct

SEQ ID NO: 3343585 - DNA, 25 bp, Homo sapien
atttgcaaataatccatgaatatgt

SEQ ID NO: 3343586 - DNA, 25 bp, Homo sapien
ctatttgcaaataatccatgaatat

SEQ ID NO: 3343587 - DNA, 25 bp, Homo sapien
tatataccgaacaaaggtgctccgg

SEQ ID NO: 3343588 - DNA, 25 bp, Homo sapien
ttagtgtcgcaagcacaggagtgca

SEQ ID NO: 3343589 - DNA, 25 bp, Homo sapien
cgtgagtcagaggtaacaaaggcat

SEQ ID NO: 3343590 - DNA, 25 bp, Homo sapien
tgaggaactgtgcaagccaggaagc

SEQ ID NO: 3343591 - DNA, 25 bp, Homo sapien
cagtcgataggttgattaattctaa

SEQ ID NO: 3343592 - DNA, 25 bp, Homo sapien
gggagggagtttaacaggcaatatc

SEQ ID NO: 3343593 - DNA, 25 bp, Homo sapien
caccctcttgagacctccttaaaca

SEQ ID NO: 3343594 - DNA, 25 bp, Homo sapien
ggcaatatcacttctactcagtcga

SEQ ID NO: 3343595 - DNA, 25 bp, Homo sapien
tgttaacctgtgtttaggtctgaaa

SEQ ID NO: 3343596 - DNA, 25 bp, Homo sapien
tccaaattacagtctctcttgacca

SEQ ID NO: 3343597 - DNA, 25 bp, Homo sapien
tgctaatgcccatcacctacaatgg

SEQ ID NO: 3343598 - DNA, 25 bp, Homo sapien
gctggcccttaggagttgctcaaaa

SEQ ID NO: 3343599 - DNA, 25 bp, Homo sapien
gggcatcagctttcacaggatcctg

SEQ ID NO: 3343600 - DNA, 25 bp, Homo sapien
cacagggcctagagggtgagaacac

SEQ ID NO: 3343601 - DNA, 25 bp, Homo sapien
tgttactccttaaccactgctgcag

SEQ ID NO: 3343602 - DNA, 25 bp, Homo sapien
taatgccatagctgtggcttgggac

SEQ ID NO: 3343603 - DNA, 25 bp, Homo sapien
ttgagtcgctttccggaccaaccca

SEQ ID NO: 3343604 - DNA, 25 bp, Homo sapien
gggtttctgttcttcacatccatta

SEQ ID NO: 3343605 - DNA, 25 bp, Homo sapien
tctcctttatcatgactggatctgc

SEQ ID NO: 3343606 - DNA, 25 bp, Homo sapien
actggatctgctcggctttgagtcg

SEQ ID NO: 3343607 - DNA, 25 bp, Homo sapien
tccacaatttatgaatacttttccc

SEQ ID NO: 3343608 - DNA, 25 bp, Homo sapien
gaagcatgaagctgaagttcctgta

SEQ ID NO: 3343609 - DNA, 25 bp, Homo sapien
gaagttcctgtactctccctgctct

SEQ ID NO: 3343610 - DNA, 25 bp, Homo sapien
tcccacctcttagaagcatgaagct

SEQ ID NO: 3343611 - DNA, 25 bp, Homo sapien
cttggatttcgtgagcttgctgaca

SEQ ID NO: 3343612 - DNA, 25 bp, Homo sapien
ttttaaactacacctccatggagag

SEQ ID NO: 3343613 - DNA, 25 bp, Homo sapien
aatgccaaccctgggagagggcgac

SEQ ID NO: 3343614 - DNA, 25 bp, Homo sapien
tagcgctaaccacaacagattcgaa

SEQ ID NO: 3343615 - DNA, 25 bp, Homo sapien
agccattcttaggaagagcctctgg

SEQ ID NO: 3343616 - DNA, 25 bp, Homo sapien
gaaactgggtcagccattcttagga

SEQ ID NO: 3343617 - DNA, 25 bp, Homo sapien
gggaattattgatgaaactgggtca

SEQ ID NO: 3343618 - DNA, 25 bp, Homo sapien
ccacagggagcgatggcgaggctct

SEQ ID NO: 3343619 - DNA, 25 bp, Homo sapien
ttgaggatgggcctccatcacagag

SEQ ID NO: 3343620 - DNA, 25 bp, Homo sapien
aacaatctgccctggagtcttgcct

SEQ ID NO: 3343621 - DNA, 25 bp, Homo sapien
ggtcctgcatcagttcaagctgctt

SEQ ID NO: 3343622 - DNA, 25 bp, Homo sapien
ggcctccatcacagagtggcagagc

SEQ ID NO: 3343623 - DNA, 25 bp, Homo sapien
cagcctgcaggaggtaaccacggta

SEQ ID NO: 3343624 - DNA, 25 bp, Homo sapien
agagccggacccaaatcagactagg

SEQ ID NO: 3343625 - DNA, 25 bp, Homo sapien
gaagtctccctcagcataaggtgtg

SEQ ID NO: 3343626 - DNA, 25 bp, Homo sapien
ggatctgtctcatggccgccgaatt

SEQ ID NO: 3343627 - DNA, 25 bp, Homo sapien
ttccctgttaccttggtggccgaga

SEQ ID NO: 3343628 - DNA, 25 bp, Homo sapien
cacctccgtccagtccacagtcatg

SEQ ID NO: 3343629 - DNA, 25 bp, Homo sapien
ctgttaccttggtggccgagaacgg

SEQ ID NO: 3343630 - DNA, 25 bp, Homo sapien
ttggtggccgagaacgggccaacca

SEQ ID NO: 3343631 - DNA, 25 bp, Homo sapien
caattcagcagatatgtacgtggcc

SEQ ID NO: 3343632 - DNA, 25 bp, Homo sapien
gcttatcagtggagtgctgccagca

SEQ ID NO: 3343633 - DNA, 25 bp, Homo sapien
tactgggtaatgcaagctgggaact

SEQ ID NO: 3343634 - DNA, 25 bp, Homo sapien
gcagtgccgctagagaaacatcatt

SEQ ID NO: 3343635 - DNA, 25 bp, Homo sapien
agctgctgatgaagaaattgttctg

SEQ ID NO: 3343636 - DNA, 25 bp, Homo sapien
tcaagaagctcagcgagtgcagagg

SEQ ID NO: 3343637 - DNA, 25 bp, Homo sapien
cagcaggtcaagaagctcagcgagt

SEQ ID NO: 3343638 - DNA, 25 bp, Homo sapien
caggtcaagaagctcagcgagtgca

SEQ ID NO: 3343639 - DNA, 25 bp, Homo sapien
ctgtccagcaggtcaagaagctcag

SEQ ID NO: 3343640 - DNA, 25 bp, Homo sapien
catttacattgcacactgtcagggc

SEQ ID NO: 3343641 - DNA, 25 bp, Homo sapien
cacatttacattgcacactgtcagg

SEQ ID NO: 3343642 - DNA, 25 bp, Homo sapien
aacacatttacattgcacactgtca

SEQ ID NO: 3343643 - DNA, 25 bp, Homo sapien
atttacattgcacactgtcagggca

SEQ ID NO: 3343644 - DNA, 25 bp, Homo sapien
atggctgttcggaatcagaacactt

SEQ ID NO: 3343645 - DNA, 25 bp, Homo sapien
gaatggctgttcggaatcagaacac

SEQ ID NO: 3343646 - DNA, 25 bp, Homo sapien
tggctgttcggaatcagaacacttg

SEQ ID NO: 3343647 - DNA, 25 bp, Homo sapien
aatggctgttcggaatcagaacact

SEQ ID NO: 3343648 - DNA, 25 bp, Homo sapien
gagcagacaacgctgatgcttctac

SEQ ID NO: 3343649 - DNA, 25 bp, Homo sapien
gacaacgctgatgcttctacaacca

SEQ ID NO: 3343650 - DNA, 25 bp, Homo sapien
atgagagcagacaacgctgatgctt

SEQ ID NO: 3343651 - DNA, 25 bp, Homo sapien
cagagctcattcaggatcacagctc

SEQ ID NO: 3343652 - DNA, 25 bp, Homo sapien
tgccagttcatgccaggtggctccg

SEQ ID NO: 3343653 - DNA, 25 bp, Homo sapien
ccagttcatgccaggtggctccggt

SEQ ID NO: 3343654 - DNA, 25 bp, Homo sapien
ttcatgccaggtggctccggtgtcc

SEQ ID NO: 3343655 - DNA, 25 bp, Homo sapien
cagttcatgccaggtggctccggtg

SEQ ID NO: 3343656 - DNA, 25 bp, Homo sapien
ctagccgtgaggaggatgcccaggg

SEQ ID NO: 3343657 - DNA, 25 bp, Homo sapien
tgctgcctcaggtcctgtttctctc

SEQ ID NO: 3343658 - DNA, 25 bp, Homo sapien
tgccgctgctgcctcaggtcctgtt

SEQ ID NO: 3343659 - DNA, 25 bp, Homo sapien
gaggatgcccagggctgccgctgct

SEQ ID NO: 3343660 - DNA, 25 bp, Homo sapien
cattccagttctttgctgttcctgc

SEQ ID NO: 3343661 - DNA, 25 bp, Homo sapien
attccagttctttgctgttcctgca

SEQ ID NO: 3343662 - DNA, 25 bp, Homo sapien
ttccagttctttgctgttcctgcac

SEQ ID NO: 3343663 - DNA, 25 bp, Homo sapien
tcattccagttctttgctgttcctg

SEQ ID NO: 3343664 - DNA, 25 bp, Homo sapien
gggctccaggtaggcactgccctct

SEQ ID NO: 3343665 - DNA, 25 bp, Homo sapien
ctgggctccaggtaggcactgccct

SEQ ID NO: 3343666 - DNA, 25 bp, Homo sapien
aggtaggcactgccctctccctcac

SEQ ID NO: 3343667 - DNA, 25 bp, Homo sapien
ccaggtaggcactgccctctccctc

SEQ ID NO: 3343668 - DNA, 25 bp, Homo sapien
actctggtagagctgtatcccatcc

SEQ ID NO: 3343669 - DNA, 25 bp, Homo sapien
ataaactcttcagcacggctcctgc

SEQ ID NO: 3343670 - DNA, 25 bp, Homo sapien
atccataaactcttcagcacggctc

SEQ ID NO: 3343671 - DNA, 25 bp, Homo sapien
atcctgttgagccttgaagactctg

SEQ ID NO: 3343672 - DNA, 25 bp, Homo sapien
gacagcgaggttctgttgctttaaa

SEQ ID NO: 3343673 - DNA, 25 bp, Homo sapien
ggctctgccctagtttcttttatca

SEQ ID NO: 3343674 - DNA, 25 bp, Homo sapien
agaactccagtaggccgacttcgtt

SEQ ID NO: 3343675 - DNA, 25 bp, Homo sapien
tgttgaggacccaactagtcacctt

SEQ ID NO: 3343676 - DNA, 25 bp, Homo sapien
atgtttggcctgactttaatgcccc

SEQ ID NO: 3343677 - DNA, 25 bp, Homo sapien
ctttaatgcccctgttctttccagg

SEQ ID NO: 3343678 - DNA, 25 bp, Homo sapien
aactgggcctaaaatgtttggcctg

SEQ ID NO: 3343679 - DNA, 25 bp, Homo sapien
gcctgactttaatgcccctgttctt

SEQ ID NO: 3343680 - DNA, 25 bp, Homo sapien
gaagctgacgataggccaggaacga

SEQ ID NO: 3343681 - DNA, 25 bp, Homo sapien
cttgttctaagtcacacaccctgtg

SEQ ID NO: 3343682 - DNA, 25 bp, Homo sapien
tccagttggaataggatgaaggctg

SEQ ID NO: 3343683 - DNA, 25 bp, Homo sapien
gatttctcaactgcatttcttgttc

SEQ ID NO: 3343684 - DNA, 25 bp, Homo sapien
gccatactgggctccggggatggag

SEQ ID NO: 3343685 - DNA, 25 bp, Homo sapien
gatggagggcggccagagctcctct

SEQ ID NO: 3343686 - DNA, 25 bp, Homo sapien
ggaaggaagacagctgcacgcccac

SEQ ID NO: 3343687 - DNA, 25 bp, Homo sapien
aggaagacagctgcacgcccactgc

SEQ ID NO: 3343688 - DNA, 25 bp, Homo sapien
tctaattcctctaatagggtaagtc

SEQ ID NO: 3343689 - DNA, 25 bp, Homo sapien
tgactatacaaaggctctacatctg

SEQ ID NO: 3343690 - DNA, 25 bp, Homo sapien
tctacatctgcagacggaaccacag

SEQ ID NO: 3343691 - DNA, 25 bp, Homo sapien
tacctaattgagcaggtcatgcctg

SEQ ID NO: 3343692 - DNA, 25 bp, Homo sapien
ttagcgcgttgcttggtgtcaacac

SEQ ID NO: 3343693 - DNA, 25 bp, Homo sapien
cctggcgacatattcttgggagtct

SEQ ID NO: 3343694 - DNA, 25 bp, Homo sapien
gggagtctgcttggctatatttagg

SEQ ID NO: 3343695 - DNA, 25 bp, Homo sapien
gtgtcaacactcttctccctggcga

SEQ ID NO: 3343696 - DNA, 25 bp, Homo sapien
agggcagtctggcatcttaaaaatc

SEQ ID NO: 3343697 - DNA, 25 bp, Homo sapien
ggaacttcccaacgattcagacagg

SEQ ID NO: 3343698 - DNA, 25 bp, Homo sapien
ttgtgctgtacaaaacgctagtggc

SEQ ID NO: 3343699 - DNA, 25 bp, Homo sapien
taaataaagctgcagaggacggctt

SEQ ID NO: 3343700 - DNA, 25 bp, Homo sapien
taaaatatagactcactcatctgcc

SEQ ID NO: 3343701 - DNA, 25 bp, Homo sapien
caaacacctatttaaggcctactag

SEQ ID NO: 3343702 - DNA, 25 bp, Homo sapien
tgaaggtaggtttccctatacaggc

SEQ ID NO: 3343703 - DNA, 25 bp, Homo sapien
cctagcaaacacctatttaaggcct

SEQ ID NO: 3343704 - DNA, 25 bp, Homo sapien
ccgggatcctcttggcatccgatcg

SEQ ID NO: 3343705 - DNA, 25 bp, Homo sapien
ctcttggcatccgatcgatacctac

SEQ ID NO: 3343706 - DNA, 25 bp, Homo sapien
tctgaagggcactgccccatctgct

SEQ ID NO: 3343707 - DNA, 25 bp, Homo sapien
ggatcctcttggcatccgatcgata

SEQ ID NO: 3343708 - DNA, 25 bp, Homo sapien
gttggacaagcttctctcgggtcac

SEQ ID NO: 3343709 - DNA, 25 bp, Homo sapien
ggagctccgggagtgtctcccgaat

SEQ ID NO: 3343710 - DNA, 25 bp, Homo sapien
cgaatctggtcaatattgatcactt

SEQ ID NO: 3343711 - DNA, 25 bp, Homo sapien
tctggtcaatattgatcacttgctg

SEQ ID NO: 3343712 - DNA, 25 bp, Homo sapien
cagagatgtggcgtcgtagagcacc

SEQ ID NO: 3343713 - DNA, 25 bp, Homo sapien
ggcagagatgtggcgtcgtagagca

SEQ ID NO: 3343714 - DNA, 25 bp, Homo sapien
gatgtggcgtcgtagagcaccaggg

SEQ ID NO: 3343715 - DNA, 25 bp, Homo sapien
agagatgtggcgtcgtagagcacca

SEQ ID NO: 3343716 - DNA, 25 bp, Homo sapien
tggcacattaacaggagactctggg

SEQ ID NO: 3343717 - DNA, 25 bp, Homo sapien
ggaatggattcgaagcacacgctac

SEQ ID NO: 3343718 - DNA, 25 bp, Homo sapien
acagggcatgcagtggaacttctca

SEQ ID NO: 3343719 - DNA, 25 bp, Homo sapien
gactctagccaataaggaagtgtga

SEQ ID NO: 3343720 - DNA, 25 bp, Homo sapien
tgagggcaagaggaaacccagggga

SEQ ID NO: 3343721 - DNA, 25 bp, Homo sapien
cagatctcttctgtgagttagtctg

SEQ ID NO: 3343722 - DNA, 25 bp, Homo sapien
acactcaggggaaggcgcaccaaca

SEQ ID NO: 3343723 - DNA, 25 bp, Homo sapien
aaagccggactccacactcagggga

SEQ ID NO: 3343724 - DNA, 25 bp, Homo sapien
gggagggagcaacactcaggaataa

SEQ ID NO: 3343725 - DNA, 25 bp, Homo sapien
aagccacgggcggatggaaagccgg

SEQ ID NO: 3343726 - DNA, 25 bp, Homo sapien
acagactcacccgggaagttcacgg

SEQ ID NO: 3343727 - DNA, 25 bp, Homo sapien
agaacagactcacccgggaagttca

SEQ ID NO: 3343728 - DNA, 25 bp, Homo sapien
tgggagaacagactcacccgggaag

SEQ ID NO: 3343729 - DNA, 25 bp, Homo sapien
gagaacagactcacccgggaagttc

SEQ ID NO: 3343730 - DNA, 25 bp, Homo sapien
tccttctttgtctctcattgacatg

SEQ ID NO: 3343731 - DNA, 25 bp, Homo sapien
cttctttgtctctcattgacatggt

SEQ ID NO: 3343732 - DNA, 25 bp, Homo sapien
tctttgtctctcattgacatggtgc

SEQ ID NO: 3343733 - DNA, 25 bp, Homo sapien
tttgtctctcattgacatggtgcac

SEQ ID NO: 3343734 - DNA, 25 bp, Homo sapien
aataaggcatctctacaaccaggtc

SEQ ID NO: 3343735 - DNA, 25 bp, Homo sapien
cagccagctcaaactcggcttttga

SEQ ID NO: 3343736 - DNA, 25 bp, Homo sapien
tgggtcacttcaagcctcctggcag

SEQ ID NO: 3343737 - DNA, 25 bp, Homo sapien
gcagccctagggtatattatatccc

SEQ ID NO: 3343738 - DNA, 25 bp, Homo sapien
tcacctccattctcaagttcattga

SEQ ID NO: 3343739 - DNA, 25 bp, Homo sapien
tgtttcgttcagaatttcacctcca

SEQ ID NO: 3343740 - DNA, 25 bp, Homo sapien
cttgtgatgaaatgagcgtgtttcg

SEQ ID NO: 3343741 - DNA, 25 bp, Homo sapien
gaaatgagcgtgtttcgttcagaat

SEQ ID NO: 3343742 - DNA, 25 bp, Homo sapien
tgacacgagatgatggctaaatggc

SEQ ID NO: 3343743 - DNA, 25 bp, Homo sapien
ggttgacacgagatgatggctaaat

SEQ ID NO: 3343744 - DNA, 25 bp, Homo sapien
ttggttgacacgagatgatggctaa

SEQ ID NO: 3343745 - DNA, 25 bp, Homo sapien
ctttggttgacacgagatgatggct

SEQ ID NO: 3343746 - DNA, 25 bp, Homo sapien
ttgagattcttcacttccgttcgaa

SEQ ID NO: 3343747 - DNA, 25 bp, Homo sapien
ctccccagggtgatgcacggatata

SEQ ID NO: 3343748 - DNA, 25 bp, Homo sapien
gatatattggcatccactctcaact

SEQ ID NO: 3343749 - DNA, 25 bp, Homo sapien
gattcttcacttccgttcgaacgcc

SEQ ID NO: 3343750 - DNA, 25 bp, Homo sapien
caagggcaagaactgaaatctgggc

SEQ ID NO: 3343751 - DNA, 25 bp, Homo sapien
cactgctctccattggaatgtggat

SEQ ID NO: 3343752 - DNA, 25 bp, Homo sapien
ccttcctgactgctctaacgatttg

SEQ ID NO: 3343753 - DNA, 25 bp, Homo sapien
tgagaatttgcagctcaagggcaag

SEQ ID NO: 3343754 - DNA, 25 bp, Homo sapien
aactattaatactttgggcatctcc

SEQ ID NO: 3343755 - DNA, 25 bp, Homo sapien
cacaacaggggcaaaaggctgtcca

SEQ ID NO: 3343756 - DNA, 25 bp, Homo sapien
caaactattaatactttgggcatct

SEQ ID NO: 3343757 - DNA, 25 bp, Homo sapien
tttgggcatctccacaacaggggca

SEQ ID NO: 3343758 - DNA, 25 bp, Homo sapien
ccagaagcaattaggcttcattcca

SEQ ID NO: 3343759 - DNA, 25 bp, Homo sapien
tcagtgtcacctcttcagggtggcc

SEQ ID NO: 3343760 - DNA, 25 bp, Homo sapien
gggtgtccactagtcttcagtgtca

SEQ ID NO: 3343761 - DNA, 25 bp, Homo sapien
aagcaattaggcttcattccacagc

SEQ ID NO: 3343762 - DNA, 25 bp, Homo sapien
gtgaccattgtacagtgctatggaa

SEQ ID NO: 3343763 - DNA, 25 bp, Homo sapien
aaagtacaattgtagattcagaacc

SEQ ID NO: 3343764 - DNA, 25 bp, Homo sapien
gtacaattgtagattcagaacctat

SEQ ID NO: 3343765 - DNA, 25 bp, Homo sapien
tgctgtgaccattgtacagtgctat

SEQ ID NO: 3343766 - DNA, 25 bp, Homo sapien
cacaggacatgtcgggctccaggac

SEQ ID NO: 3343767 - DNA, 25 bp, Homo sapien
tccacaggacatgtcgggctccagg

SEQ ID NO: 3343768 - DNA, 25 bp, Homo sapien
agctccctgacagctgttgccgcct

SEQ ID NO: 3343769 - DNA, 25 bp, Homo sapien
ttctccacaggacatgtcgggctcc

SEQ ID NO: 3343770 - DNA, 25 bp, Homo sapien
cagaaaaattaggcctaagtttcag

SEQ ID NO: 3343771 - DNA, 25 bp, Homo sapien
caccaacagaaaaattaggcctaag

SEQ ID NO: 3343772 - DNA, 25 bp, Homo sapien
gcagagtcagcctcactgcagctct

SEQ ID NO: 3343773 - DNA, 25 bp, Homo sapien
tgcagctctccaatttcaccaacag

SEQ ID NO: 3343774 - DNA, 25 bp, Homo sapien
tgcacagacgccatatatcaagctc

SEQ ID NO: 3343775 - DNA, 25 bp, Homo sapien
tctgcttgatcctcaccgtcttggg

SEQ ID NO: 3343776 - DNA, 25 bp, Homo sapien
cctctgctgggtaatttggtagcct

SEQ ID NO: 3343777 - DNA, 25 bp, Homo sapien
tcaatgagcgtctgagacctcaggt

SEQ ID NO: 3343778 - DNA, 25 bp, Homo sapien
gcttcctgtcaaacaaggacttctt

SEQ ID NO: 3343779 - DNA, 25 bp, Homo sapien
cttcttgtttatgtggcagttcaga

SEQ ID NO: 3343780 - DNA, 25 bp, Homo sapien
tcttgtttatgtggcagttcagagc

SEQ ID NO: 3343781 - DNA, 25 bp, Homo sapien
ggaggtctgcatagaagtagtgctt

SEQ ID NO: 3343782 - DNA, 25 bp, Homo sapien
gcttctacacacctcctgttgagaa

SEQ ID NO: 3343783 - DNA, 25 bp, Homo sapien
cgcttctacacacctcctgttgaga

SEQ ID NO: 3343784 - DNA, 25 bp, Homo sapien
gccgcttctacacacctcctgttga

SEQ ID NO: 3343785 - DNA, 25 bp, Homo sapien
accgccgcttctacacacctcctgt

SEQ ID NO: 3343786 - DNA, 25 bp, Homo sapien
tgagaggcggcaaacagaacttctg

SEQ ID NO: 3343787 - DNA, 25 bp, Homo sapien
aaacatagctggtggagaatcccgc

SEQ ID NO: 3343788 - DNA, 25 bp, Homo sapien
tctcaagggctaggaaatgtggcac

SEQ ID NO: 3343789 - DNA, 25 bp, Homo sapien
tgaacttctgaaaacgacagggccg

SEQ ID NO: 3343790 - DNA, 25 bp, Homo sapien
gagttgaggaccatcacagactctc

SEQ ID NO: 3343791 - DNA, 25 bp, Homo sapien
agaagagttgaggaccatcacagac

SEQ ID NO: 3343792 - DNA, 25 bp, Homo sapien
cacacaagcgcacgggcacttcata

SEQ ID NO: 3343793 - DNA, 25 bp, Homo sapien
actctcactgtgtccgtgtgcacac

SEQ ID NO: 3343794 - DNA, 25 bp, Homo sapien
gagtgtcagttagaagaatgccaag

SEQ ID NO: 3343795 - DNA, 25 bp, Homo sapien
tcaaggtcagaattataagcatcag

SEQ ID NO: 3343796 - DNA, 25 bp, Homo sapien
tcacacgttacagatgcacagaggg

SEQ ID NO: 3343797 - DNA, 25 bp, Homo sapien
gagggcccagtaaacagagagtgtc

SEQ ID NO: 3343798 - DNA, 25 bp, Homo sapien
gccctcaatgaatccgcagtggtga

SEQ ID NO: 3343799 - DNA, 25 bp, Homo sapien
gaagtccctcaatggcccctgatgt

SEQ ID NO: 3343800 - DNA, 25 bp, Homo sapien
tcaaaatcctagtgggacgtcacca

SEQ ID NO: 3343801 - DNA, 25 bp, Homo sapien
caattgcacatttcatgaggacggg

SEQ ID NO: 3343802 - DNA, 25 bp, Homo sapien
taaggcagcataaacaactcagagt

SEQ ID NO: 3343803 - DNA, 25 bp, Homo sapien
tatcaagactactaacagcaggcca

SEQ ID NO: 3343804 - DNA, 25 bp, Homo sapien
tctggaagtgccctgaagtgacaac

SEQ ID NO: 3343805 - DNA, 25 bp, Homo sapien
tacaaaggatctcagggttagccat

SEQ ID NO: 3343806 - DNA, 25 bp, Homo sapien
gagacatccggttaactaagttata

SEQ ID NO: 3343807 - DNA, 25 bp, Homo sapien
tgagtcactgagttcatgggagaca

SEQ ID NO: 3343808 - DNA, 25 bp, Homo sapien
tataaggcaggtttagaccatcagc

SEQ ID NO: 3343809 - DNA, 25 bp, Homo sapien
tcattgtcatgagtcactgagttca

SEQ ID NO: 3343810 - DNA, 25 bp, Homo sapien
catttgctatgtgacaatccttcct

SEQ ID NO: 3343811 - DNA, 25 bp, Homo sapien
tgctatgtgacaatccttccttaat

SEQ ID NO: 3343812 - DNA, 25 bp, Homo sapien
gccaaggctcctggccatttgctat

SEQ ID NO: 3343813 - DNA, 25 bp, Homo sapien
gccatttgctatgtgacaatccttc

SEQ ID NO: 3343814 - DNA, 25 bp, Homo sapien
ctacttaaaccataagcgttgtagg

SEQ ID NO: 3343815 - DNA, 25 bp, Homo sapien
acttaaaccataagcgttgtaggct

SEQ ID NO: 3343816 - DNA, 25 bp, Homo sapien
tacttaaaccataagcgttgtaggc

SEQ ID NO: 3343817 - DNA, 25 bp, Homo sapien
aaaaacctaggatgaactcagagct

SEQ ID NO: 3343818 - DNA, 25 bp, Homo sapien
gcttatgcctaatctcttgataatt

SEQ ID NO: 3343819 - DNA, 25 bp, Homo sapien
ggcctgatagccatcacattcacag

SEQ ID NO: 3343820 - DNA, 25 bp, Homo sapien
taaagtgaactgtaataagtatggc

SEQ ID NO: 3343821 - DNA, 25 bp, Homo sapien
acagttgatattataggtcctggac

SEQ ID NO: 3343822 - DNA, 25 bp, Homo sapien
taggtcctggacagaccatatgcta

SEQ ID NO: 3343823 - DNA, 25 bp, Homo sapien
ttgcagtttactattagtagagatg

SEQ ID NO: 3343824 - DNA, 25 bp, Homo sapien
tggaatttacccatgacaatgtctg

SEQ ID NO: 3343825 - DNA, 25 bp, Homo sapien
gctgatgagtatactgggcccagtc

SEQ ID NO: 3343826 - DNA, 25 bp, Homo sapien
ggcccagtcattccataggatcaag

SEQ ID NO: 3343827 - DNA, 25 bp, Homo sapien
catgtaatatacactgcttgctttg

SEQ ID NO: 3343828 - DNA, 25 bp, Homo sapien
gttaactcactgcatattatggctg

SEQ ID NO: 3343829 - DNA, 25 bp, Homo sapien
tgaatttccaaacctaccacagcag

SEQ ID NO: 3343830 - DNA, 25 bp, Homo sapien
gcaaagttccaggtagagatgcatc

SEQ ID NO: 3343831 - DNA, 25 bp, Homo sapien
aagttccaggtagagatgcatcaaa

SEQ ID NO: 3343832 - DNA, 25 bp, Homo sapien
gaatttccaaacctaccacagcagc

SEQ ID NO: 3343833 - DNA, 25 bp, Homo sapien
agttaggtgggcagaaatgtatgaa

SEQ ID NO: 3343834 - DNA, 25 bp, Homo sapien
ttaggtgggcagaaatgtatgaaac

SEQ ID NO: 3343835 - DNA, 25 bp, Homo sapien
cacagttaggtgggcagaaatgtat

SEQ ID NO: 3343836 - DNA, 25 bp, Homo sapien
cagttaggtgggcagaaatgtatga

SEQ ID NO: 3343837 - DNA, 25 bp, Homo sapien
cctaatctggttggatgtggaccca

SEQ ID NO: 3343838 - DNA, 25 bp, Homo sapien
tcttcggtggcaagaaccaccgtca

SEQ ID NO: 3343839 - DNA, 25 bp, Homo sapien
aagcccaacgtcttccacggcagcc

SEQ ID NO: 3343840 - DNA, 25 bp, Homo sapien
agtcggagcccctcttcggtggcaa

SEQ ID NO: 3343841 - DNA, 25 bp, Homo sapien
gactcagcctcactatgccgcgagg

SEQ ID NO: 3343842 - DNA, 25 bp, Homo sapien
ggtgactcagcctcactatgccgcg

SEQ ID NO: 3343843 - DNA, 25 bp, Homo sapien
tcagcctcactatgccgcgaggctc

SEQ ID NO: 3343844 - DNA, 25 bp, Homo sapien
cagcctcactatgccgcgaggctcc

SEQ ID NO: 3343845 - DNA, 25 bp, Homo sapien
tggtaatcagcatccttaaaaggcg

SEQ ID NO: 3343846 - DNA, 25 bp, Homo sapien
gcatccttaaaaggcgattcactcc

SEQ ID NO: 3343847 - DNA, 25 bp, Homo sapien
aaggcgattcactccatcaaatgga

SEQ ID NO: 3343848 - DNA, 25 bp, Homo sapien
ctccatcaaatggaagattgggaat

SEQ ID NO: 3343849 - DNA, 25 bp, Homo sapien
tctccagctgcgagagctattttgg

SEQ ID NO: 3343850 - DNA, 25 bp, Homo sapien
gccaaatctgatatctgtcagaact

SEQ ID NO: 3343851 - DNA, 25 bp, Homo sapien
ggttgcaccgacaaggtggctgtca

SEQ ID NO: 3343852 - DNA, 25 bp, Homo sapien
tattgctgatagacagctctccagc

SEQ ID NO: 3343853 - DNA, 25 bp, Homo sapien
ttgtccttcacgctgtgtaccccca

SEQ ID NO: 3343854 - DNA, 25 bp, Homo sapien
tgtccgccttcctaatgcactggag

SEQ ID NO: 3343855 - DNA, 25 bp, Homo sapien
tccgccttcctaatgcactggagtg

SEQ ID NO: 3343856 - DNA, 25 bp, Homo sapien
gccttcctaatgcactggagtgaaa

SEQ ID NO: 3343857 - DNA, 25 bp, Homo sapien
tgagaacatttgaagatgttctggt

SEQ ID NO: 3343858 - DNA, 25 bp, Homo sapien
gaagatgttctggtgtcagggctct

SEQ ID NO: 3343859 - DNA, 25 bp, Homo sapien
gtgagaacatttgaagatgttctgg

SEQ ID NO: 3343860 - DNA, 25 bp, Homo sapien
gcagctacaccctccaaccacttct

SEQ ID NO: 3343861 - DNA, 25 bp, Homo sapien
tgcagctacaccctccaaccacttc

SEQ ID NO: 3343862 - DNA, 25 bp, Homo sapien
ttttgctggctgtatgattgttctg

SEQ ID NO: 3343863 - DNA, 25 bp, Homo sapien
ggctgtatgattgttctggctctat

SEQ ID NO: 3343864 - DNA, 25 bp, Homo sapien
gctggctgtatgattgttctggctc

SEQ ID NO: 3343865 - DNA, 25 bp, Homo sapien
tgctggctgtatgattgttctggct

SEQ ID NO: 3343866 - DNA, 25 bp, Homo sapien
ggcgttcccactaaagctcagcagt

SEQ ID NO: 3343867 - DNA, 25 bp, Homo sapien
tgccagggcacgagaacatgattct

SEQ ID NO: 3343868 - DNA, 25 bp, Homo sapien
aaactgaactttgtgctgccactgc

SEQ ID NO: 3343869 - DNA, 25 bp, Homo sapien
tttgccctgggcacatatatagcat

SEQ ID NO: 3343870 - DNA, 25 bp, Homo sapien
gaatgatttctagcttcctgtagac

SEQ ID NO: 3343871 - DNA, 25 bp, Homo sapien
ccattagctaaattgcagtatctgc

SEQ ID NO: 3343872 - DNA, 25 bp, Homo sapien
tcagtatcacagcatgtcaaaggaa

SEQ ID NO: 3343873 - DNA, 25 bp, Homo sapien
tctcttatcgtctttgccagggtca

SEQ ID NO: 3343874 - DNA, 25 bp, Homo sapien
gatttcttggcctttatagtcccca

SEQ ID NO: 3343875 - DNA, 25 bp, Homo sapien
tctctacaccctgatttcttggcct

SEQ ID NO: 3343876 - DNA, 25 bp, Homo sapien
gcctttatagtccccagctccctac

SEQ ID NO: 3343877 - DNA, 25 bp, Homo sapien
tcttggcctttatagtccccagctc

SEQ ID NO: 3343878 - DNA, 25 bp, Homo sapien
tcattactggcggtgtgccagcctt

SEQ ID NO: 3343879 - DNA, 25 bp, Homo sapien
attactggcggtgtgccagccttta

SEQ ID NO: 3343880 - DNA, 25 bp, Homo sapien
gccctcattactggcggtgtgccag

SEQ ID NO: 3343881 - DNA, 25 bp, Homo sapien
cctggccctcattactggcggtgtg

SEQ ID NO: 3343882 - DNA, 25 bp, Homo sapien
tgtgctaaccccatgtctgaggtca

SEQ ID NO: 3343883 - DNA, 25 bp, Homo sapien
ctgtctgtgctaaccccatgtctga

SEQ ID NO: 3343884 - DNA, 25 bp, Homo sapien
taaccccatgtctgaggtcacactc

SEQ ID NO: 3343885 - DNA, 25 bp, Homo sapien
catgtctgaggtcacactcatttaa

SEQ ID NO: 3343886 - DNA, 25 bp, Homo sapien
tcttttcttaagctctctgttccct

SEQ ID NO: 3343887 - DNA, 25 bp, Homo sapien
ttcaatttgaaagggatgtaagtgc

SEQ ID NO: 3343888 - DNA, 25 bp, Homo sapien
tcccctcttttcttaagctctctgt

SEQ ID NO: 3343889 - DNA, 25 bp, Homo sapien
tctctgttcccttcaatttgaaagg

SEQ ID NO: 3343890 - DNA, 25 bp, Homo sapien
actggatctgtaaggcattatttgc

SEQ ID NO: 3343891 - DNA, 25 bp, Homo sapien
tctgggactggatctgtaaggcatt

SEQ ID NO: 3343892 - DNA, 25 bp, Homo sapien
tttctgggactggatctgtaaggca

SEQ ID NO: 3343893 - DNA, 25 bp, Homo sapien
gggactggatctgtaaggcattatt

SEQ ID NO: 3343894 - DNA, 25 bp, Homo sapien
gaaagtttgatgtgggctcagttgt

SEQ ID NO: 3343895 - DNA, 25 bp, Homo sapien
gaaggcacagaagtgtaacgttcag

SEQ ID NO: 3343896 - DNA, 25 bp, Homo sapien
gccaaataatgctttgttccacttg

SEQ ID NO: 3343897 - DNA, 25 bp, Homo sapien
aggttatgcctgcaaaaaagcagcg

SEQ ID NO: 3343898 - DNA, 25 bp, Homo sapien
aaggcctaattgcacagcacagtgt

SEQ ID NO: 3343899 - DNA, 25 bp, Homo sapien
tatgtccagaaagtagtgctgtcag

SEQ ID NO: 3343900 - DNA, 25 bp, Homo sapien
gcaagaacacccagatgctgagtaa

SEQ ID NO: 3343901 - DNA, 25 bp, Homo sapien
cagtgtatcagtttcgacaggtgcc

SEQ ID NO: 3343902 - DNA, 25 bp, Homo sapien
ctagtgcccaattgtccctctgcag

SEQ ID NO: 3343903 - DNA, 25 bp, Homo sapien
cagatgtggctgagactagtgccca

SEQ ID NO: 3343904 - DNA, 25 bp, Homo sapien
gagaggtctgttggccagatgtggc

SEQ ID NO: 3343905 - DNA, 25 bp, Homo sapien
tctctgagtgggcaaatctcataga

SEQ ID NO: 3343906 - DNA, 25 bp, Homo sapien
ccgatgatgtgcagtgagacgcttg

SEQ ID NO: 3343907 - DNA, 25 bp, Homo sapien
cagaatgaaacacgtggaggaggcc

SEQ ID NO: 3343908 - DNA, 25 bp, Homo sapien
caggacaagaacaagagcagttgct

SEQ ID NO: 3343909 - DNA, 25 bp, Homo sapien
cctgtgcggctggatttacgctcct

SEQ ID NO: 3343910 - DNA, 25 bp, Homo sapien
ctgtcgttgccatgcagcaagagct

SEQ ID NO: 3343911 - DNA, 25 bp, Homo sapien
ctgattgatgcagaatccaaagcct

SEQ ID NO: 3343912 - DNA, 25 bp, Homo sapien
tgtcgttgccatgcagcaagagctg

SEQ ID NO: 3343913 - DNA, 25 bp, Homo sapien
aagagctgattgatgcagaatccaa

SEQ ID NO: 3343914 - DNA, 25 bp, Homo sapien
tctcgccctcatggattgtgctcca

SEQ ID NO: 3343915 - DNA, 25 bp, Homo sapien
cctttgttgtgtcctccacttataa

SEQ ID NO: 3343916 - DNA, 25 bp, Homo sapien
acactctcgccctcatggattgtgc

SEQ ID NO: 3343917 - DNA, 25 bp, Homo sapien
tcgccctcatggattgtgctccagc

SEQ ID NO: 3343918 - DNA, 25 bp, Homo sapien
caggcctgaggatatagcccccagg

SEQ ID NO: 3343919 - DNA, 25 bp, Homo sapien
ggcctgaggatatagcccccaggaa

SEQ ID NO: 3343920 - DNA, 25 bp, Homo sapien
cagcaggcctgaggatatagccccc

SEQ ID NO: 3343921 - DNA, 25 bp, Homo sapien
cctgaggatatagcccccaggaagc

SEQ ID NO: 3343922 - DNA, 25 bp, Homo sapien
ctgaggaagaggagcaatggcttca

SEQ ID NO: 3343923 - DNA, 25 bp, Homo sapien
gaggaagaggagcaatggcttcagt

SEQ ID NO: 3343924 - DNA, 25 bp, Homo sapien
tgaggaagaggagcaatggcttcag

SEQ ID NO: 3343925 - DNA, 25 bp, Homo sapien
aggaagaggagcaatggcttcagtt

SEQ ID NO: 3343926 - DNA, 25 bp, Homo sapien
accgaggaagaagcccaaagctctc

SEQ ID NO: 3343927 - DNA, 25 bp, Homo sapien
ggaagaagcccaaagctctcagtga

SEQ ID NO: 3343928 - DNA, 25 bp, Homo sapien
ggaccgaggaagaagcccaaagctc

SEQ ID NO: 3343929 - DNA, 25 bp, Homo sapien
gaggaagaagcccaaagctctcagt

SEQ ID NO: 3343930 - DNA, 25 bp, Homo sapien
ggcctttggactgccaggcactgga

SEQ ID NO: 3343931 - DNA, 25 bp, Homo sapien
tcctctatgccacgaggggcctttg

SEQ ID NO: 3343932 - DNA, 25 bp, Homo sapien
caggcactggaactcttttgctact

SEQ ID NO: 3343933 - DNA, 25 bp, Homo sapien
tttctcctctatgccacgaggggcc

SEQ ID NO: 3343934 - DNA, 25 bp, Homo sapien
tgctatcgcaccttttctgtgcatg

SEQ ID NO: 3343935 - DNA, 25 bp, Homo sapien
gcctccctcagtgctatcgcacctt

SEQ ID NO: 3343936 - DNA, 25 bp, Homo sapien
agggagaatattccagaccccacct

SEQ ID NO: 3343937 - DNA, 25 bp, Homo sapien
ggagaatattccagaccccacctct

SEQ ID NO: 3343938 - DNA, 25 bp, Homo sapien
cttcccacaactgaaagtaagagtg

SEQ ID NO: 3343939 - DNA, 25 bp, Homo sapien
cccacaactgaaagtaagagtgaca

SEQ ID NO: 3343940 - DNA, 25 bp, Homo sapien
tcctggcctcagaggctagcacctg

SEQ ID NO: 3343941 - DNA, 25 bp, Homo sapien
cacaactgaaagtaagagtgacact

SEQ ID NO: 3343942 - DNA, 25 bp, Homo sapien
tgtgacaattgctcgtgtaatctgt

SEQ ID NO: 3343943 - DNA, 25 bp, Homo sapien
ttatgtgacaattgctcgtgtaatc

SEQ ID NO: 3343944 - DNA, 25 bp, Homo sapien
gacaattgctcgtgtaatctgtgac

SEQ ID NO: 3343945 - DNA, 25 bp, Homo sapien
tgacaattgctcgtgtaatctgtga

SEQ ID NO: 3343946 - DNA, 25 bp, Homo sapien
gactgtgggttgtaagcaggatagc

SEQ ID NO: 3343947 - DNA, 25 bp, Homo sapien
gagggactgtgggttgtaagcagga

SEQ ID NO: 3343948 - DNA, 25 bp, Homo sapien
agggagggactgtgggttgtaagca

SEQ ID NO: 3343949 - DNA, 25 bp, Homo sapien
ctgtgggttgtaagcaggatagcac

SEQ ID NO: 3343950 - DNA, 25 bp, Homo sapien
ttctttcagcgtgtgcctgatctca

SEQ ID NO: 3343951 - DNA, 25 bp, Homo sapien
tctttcagcgtgtgcctgatctcac

SEQ ID NO: 3343952 - DNA, 25 bp, Homo sapien
agccccacatggtgtttgtttctgc

SEQ ID NO: 3343953 - DNA, 25 bp, Homo sapien
gccccacatggtgtttgtttctgca

SEQ ID NO: 3343954 - DNA, 25 bp, Homo sapien
ccccacatggtgtttgtttctgcaa

SEQ ID NO: 3343955 - DNA, 25 bp, Homo sapien
tcagactcggatgaaggtttaacag

SEQ ID NO: 3343956 - DNA, 25 bp, Homo sapien
tccgtttgtctctaaggctggttgg

SEQ ID NO: 3343957 - DNA, 25 bp, Homo sapien
gctggttggttgtttgcatctgcct

SEQ ID NO: 3343958 - DNA, 25 bp, Homo sapien
tagttcgttcatgggagtcagactc

SEQ ID NO: 3343959 - DNA, 25 bp, Homo sapien
gggttatgctccttagctacctcac

SEQ ID NO: 3343960 - DNA, 25 bp, Homo sapien
tgggttatgctccttagctacctca

SEQ ID NO: 3343961 - DNA, 25 bp, Homo sapien
ctgggttatgctccttagctacctc

SEQ ID NO: 3343962 - DNA, 25 bp, Homo sapien
cttcatgtggaaactgtacaggccc

SEQ ID NO: 3343963 - DNA, 25 bp, Homo sapien
caggcccctttctccaagacacggg

SEQ ID NO: 3343964 - DNA, 25 bp, Homo sapien
actgtacaggcccctttctccaaga

SEQ ID NO: 3343965 - DNA, 25 bp, Homo sapien
ttcatgtggaaactgtacaggcccc

SEQ ID NO: 3343966 - DNA, 25 bp, Homo sapien
ccgctcatgatgctgcctagggctg

SEQ ID NO: 3343967 - DNA, 25 bp, Homo sapien
gctcatgatgctgcctagggctgac

SEQ ID NO: 3343968 - DNA, 25 bp, Homo sapien
accccgctcatgatgctgcctaggg

SEQ ID NO: 3343969 - DNA, 25 bp, Homo sapien
attaccccgctcatgatgctgccta

SEQ ID NO: 3343970 - DNA, 25 bp, Homo sapien
caaaattccttgcatgcatggagct

SEQ ID NO: 3343971 - DNA, 25 bp, Homo sapien
ctaggtctcctaggcaaggctgcaa

SEQ ID NO: 3343972 - DNA, 25 bp, Homo sapien
acataagttttgatcccggagtctc

SEQ ID NO: 3343973 - DNA, 25 bp, Homo sapien
catgctttgtagaatcagtccctcc

SEQ ID NO: 3343974 - DNA, 25 bp, Homo sapien
agtcctccaatatgtgcagtacagg

SEQ ID NO: 3343975 - DNA, 25 bp, Homo sapien
ggagtacaaccagcctagttctgct

SEQ ID NO: 3343976 - DNA, 25 bp, Homo sapien
gcaagtcggtgactgagtcctccaa

SEQ ID NO: 3343977 - DNA, 25 bp, Homo sapien
aggcgactcatagcaaccacaggca

SEQ ID NO: 3343978 - DNA, 25 bp, Homo sapien
tagatgataccgctgtttttccccg

SEQ ID NO: 3343979 - DNA, 25 bp, Homo sapien
gagagtgagggagcctccaggagag

SEQ ID NO: 3343980 - DNA, 25 bp, Homo sapien
agaagagagtgagggagcctccagg

SEQ ID NO: 3343981 - DNA, 25 bp, Homo sapien
agcagggatatagatgataccgctg

SEQ ID NO: 3343982 - DNA, 25 bp, Homo sapien
tagctgtccatgatcagtttctcaa

SEQ ID NO: 3343983 - DNA, 25 bp, Homo sapien
caggttgtgaattggccagccacgt

SEQ ID NO: 3343984 - DNA, 25 bp, Homo sapien
agacaggttgtgaattggccagcca

SEQ ID NO: 3343985 - DNA, 25 bp, Homo sapien
aatgggaatacattagagacaggtt

SEQ ID NO: 3343986 - DNA, 25 bp, Homo sapien
tggccacaaaaacaatacgcaggat

SEQ ID NO: 3343987 - DNA, 25 bp, Homo sapien
ctttcatgtaaagccccatggccgg

SEQ ID NO: 3343988 - DNA, 25 bp, Homo sapien
catggccggaagacagctctcaagt

SEQ ID NO: 3343989 - DNA, 25 bp, Homo sapien
taagcaatgcagtttttggccacaa

SEQ ID NO: 3343990 - DNA, 25 bp, Homo sapien
cccaaggggctcagcaaagcaggag

SEQ ID NO: 3343991 - DNA, 25 bp, Homo sapien
ccaaggggctcagcaaagcaggaga

SEQ ID NO: 3343992 - DNA, 25 bp, Homo sapien
cagacatgcagacgtggtccttgtt

SEQ ID NO: 3343993 - DNA, 25 bp, Homo sapien
acatgcagacgtggtccttgtttgc

SEQ ID NO: 3343994 - DNA, 25 bp, Homo sapien
ggcagacatgcagacgtggtccttg

SEQ ID NO: 3343995 - DNA, 25 bp, Homo sapien
gacatgcagacgtggtccttgtttg

SEQ ID NO: 3343996 - DNA, 25 bp, Homo sapien
gatgcttgtcagaacgtggttcccc

SEQ ID NO: 3343997 - DNA, 25 bp, Homo sapien
cgatgcttgtcagaacgtggttccc

SEQ ID NO: 3343998 - DNA, 25 bp, Homo sapien
ctcgatgcttgtcagaacgtggttc

SEQ ID NO: 3343999 - DNA, 25 bp, Homo sapien
tcgatgcttgtcagaacgtggttcc

SEQ ID NO: 3344000 - DNA, 25 bp, Homo sapien
cggaagcttcctgctcatccgtttg

SEQ ID NO: 3344001 - DNA, 25 bp, Homo sapien
tcctgctcatccgtttgaggaccca

SEQ ID NO: 3344002 - DNA, 25 bp, Homo sapien
ttgaggacccattacttcaatgggc

SEQ ID NO: 3344003 - DNA, 25 bp, Homo sapien
tccgtttgaggacccattacttcaa

SEQ ID NO: 3344004 - DNA, 25 bp, Homo sapien
gtacaagagggaatagggtgcaaaa

SEQ ID NO: 3344005 - DNA, 25 bp, Homo sapien
aataggtgtgatttgtgtatcctgt

SEQ ID NO: 3344006 - DNA, 25 bp, Homo sapien
ataggtgtgatttgtgtatcctgtt

SEQ ID NO: 3344007 - DNA, 25 bp, Homo sapien
gaagtacaagagggaatagggtgca

SEQ ID NO: 3344008 - DNA, 25 bp, Homo sapien
tctcaaattttcaggctaagcgaag

SEQ ID NO: 3344009 - DNA, 25 bp, Homo sapien
cacaactggatctctatgcctggtt

SEQ ID NO: 3344010 - DNA, 25 bp, Homo sapien
ttgaagattaaccaccttgaggcaa

SEQ ID NO: 3344011 - DNA, 25 bp, Homo sapien
tgttgtccacctgtagaatgaactg

SEQ ID NO: 3344012 - DNA, 25 bp, Homo sapien
cctctgaagtttcgataatttgagt

SEQ ID NO: 3344013 - DNA, 25 bp, Homo sapien
gctggggtggcaactaggttcttct

SEQ ID NO: 3344014 - DNA, 25 bp, Homo sapien
ggcaactaggttcttctctcaagct

SEQ ID NO: 3344015 - DNA, 25 bp, Homo sapien
tcttctctcaagctgattctggtgt

SEQ ID NO: 3344016 - DNA, 25 bp, Homo sapien
ctgtgcccatgtgtaggatgggtct

SEQ ID NO: 3344017 - DNA, 25 bp, Homo sapien
gtagggcccatcacaaccaagggca

SEQ ID NO: 3344018 - DNA, 25 bp, Homo sapien
aggtagggcccatcacaaccaaggg

SEQ ID NO: 3344019 - DNA, 25 bp, Homo sapien
gtctttggtgcttcccctcctaagc

SEQ ID NO: 3344020 - DNA, 25 bp, Homo sapien
ttattcagagaagtggggagaagaa

SEQ ID NO: 3344021 - DNA, 25 bp, Homo sapien
taaactttattcagagaagtgggga

SEQ ID NO: 3344022 - DNA, 25 bp, Homo sapien
aaactttattcagagaagtggggag

SEQ ID NO: 3344023 - DNA, 25 bp, Homo sapien
ttcagagaagtggggagaagaagcc

SEQ ID NO: 3344024 - DNA, 25 bp, Homo sapien
cagtggaatgatgaaaggtcagcat

SEQ ID NO: 3344025 - DNA, 25 bp, Homo sapien
ttttaggccacataacgtcagtgga

SEQ ID NO: 3344026 - DNA, 25 bp, Homo sapien
tatcctgcagacagaggacttgagg

SEQ ID NO: 3344027 - DNA, 25 bp, Homo sapien
gaaaggtcagcatcctagtatcctg

SEQ ID NO: 3344028 - DNA, 25 bp, Homo sapien
agcattgaagggaaggctgatggcc

SEQ ID NO: 3344029 - DNA, 25 bp, Homo sapien
catctgcccaaggactgatgcgcgc

SEQ ID NO: 3344030 - DNA, 25 bp, Homo sapien
agcatctgcccaaggactgatgcgc

SEQ ID NO: 3344031 - DNA, 25 bp, Homo sapien
tgcccaaggactgatgcgcgcctgg

SEQ ID NO: 3344032 - DNA, 25 bp, Homo sapien
gaaaggaggagtgtgatgttttaac

SEQ ID NO: 3344033 - DNA, 25 bp, Homo sapien
agggcacacagaaccacgctccctt

SEQ ID NO: 3344034 - DNA, 25 bp, Homo sapien
cacaagaagtgcttgctttgctctc

SEQ ID NO: 3344035 - DNA, 25 bp, Homo sapien
agccatgaagaggaacagggcacac

SEQ ID NO: 3344036 - DNA, 25 bp, Homo sapien
ccagggaagagctgtccccagtgct

SEQ ID NO: 3344037 - DNA, 25 bp, Homo sapien
ccccagggaagagctgtccccagtg

SEQ ID NO: 3344038 - DNA, 25 bp, Homo sapien
agggaagagctgtccccagtgctgc

SEQ ID NO: 3344039 - DNA, 25 bp, Homo sapien
ctgtgccccagggaagagctgtccc

SEQ ID NO: 3344040 - DNA, 25 bp, Homo sapien
tctcagggggctgacatgagtccct

SEQ ID NO: 3344041 - DNA, 25 bp, Homo sapien
caggttctggctcctcaggcatgtc

SEQ ID NO: 3344042 - DNA, 25 bp, Homo sapien
aggttctggctcctcaggcatgtct

SEQ ID NO: 3344043 - DNA, 25 bp, Homo sapien
ctctcagggggctgacatgagtccc

SEQ ID NO: 3344044 - DNA, 25 bp, Homo sapien
ctgccagtcatcttgagggactctg

SEQ ID NO: 3344045 - DNA, 25 bp, Homo sapien
gcaccagtgttgaccacaccgaaga

SEQ ID NO: 3344046 - DNA, 25 bp, Homo sapien
cacaccgaagatatctgactgccag

SEQ ID NO: 3344047 - DNA, 25 bp, Homo sapien
cctggatggcagtgtgccgcagcag

SEQ ID NO: 3344048 - DNA, 25 bp, Homo sapien
acctgggccattgggacactggagt

SEQ ID NO: 3344049 - DNA, 25 bp, Homo sapien
ctctgtcatggcaaatcctgagggt

SEQ ID NO: 3344050 - DNA, 25 bp, Homo sapien
caaatcctgagggtagaatgagcat

SEQ ID NO: 3344051 - DNA, 25 bp, Homo sapien
tgcatggacctgggccattgggaca

SEQ ID NO: 3344052 - DNA, 25 bp, Homo sapien
tctgcattccaaacacctaaatgaa

SEQ ID NO: 3344053 - DNA, 25 bp, Homo sapien
aaaattgcaggcagccttcagggtt

SEQ ID NO: 3344054 - DNA, 25 bp, Homo sapien
caaggctaacgatatctgcattcca

SEQ ID NO: 3344055 - DNA, 25 bp, Homo sapien
caggaaagttggaaatgcaaggcta

SEQ ID NO: 3344056 - DNA, 25 bp, Homo sapien
gttctcttcagtgtcattaacccct

SEQ ID NO: 3344057 - DNA, 25 bp, Homo sapien
ttctcttcagtgtcattaacccctg

SEQ ID NO: 3344058 - DNA, 25 bp, Homo sapien
tcaccaggtcagcattaagggaagg

SEQ ID NO: 3344059 - DNA, 25 bp, Homo sapien
tgctgactctgccagtggggacagc

SEQ ID NO: 3344060 - DNA, 25 bp, Homo sapien
gaggttcgtaacttcagagccccac

SEQ ID NO: 3344061 - DNA, 25 bp, Homo sapien
tgcttccttctacgcttgcctgagg

SEQ ID NO: 3344062 - DNA, 25 bp, Homo sapien
ttcctgagccgcctcagactggtcc

SEQ ID NO: 3344063 - DNA, 25 bp, Homo sapien
agactggtccaaactaaagtcaagt

SEQ ID NO: 3344064 - DNA, 25 bp, Homo sapien
ctgagccgcctcagactggtccaaa

SEQ ID NO: 3344065 - DNA, 25 bp, Homo sapien
ctggtccaaactaaagtcaagtcac

SEQ ID NO: 3344066 - DNA, 25 bp, Homo sapien
gctgaatatgctccaactgtgttct

SEQ ID NO: 3344067 - DNA, 25 bp, Homo sapien
ggtcctgctgaatatgctccaactg

SEQ ID NO: 3344068 - DNA, 25 bp, Homo sapien
cctgctgaatatgctccaactgtgt

SEQ ID NO: 3344069 - DNA, 25 bp, Homo sapien
caggtcctgctgaatatgctccaac

SEQ ID NO: 3344070 - DNA, 25 bp, Homo sapien
atttgtctgctggatgctgtttggc

SEQ ID NO: 3344071 - DNA, 25 bp, Homo sapien
gtctgctggatgctgtttggcactc

SEQ ID NO: 3344072 - DNA, 25 bp, Homo sapien
cactcagaatggagggtcaccatgg

SEQ ID NO: 3344073 - DNA, 25 bp, Homo sapien
tcttttcgttctgtttcacttggta

SEQ ID NO: 3344074 - DNA, 25 bp, Homo sapien
aaattgtttagtggagaggactggt

SEQ ID NO: 3344075 - DNA, 25 bp, Homo sapien
tggtacagaaaggaggcgtctacac

SEQ ID NO: 3344076 - DNA, 25 bp, Homo sapien
gaggcgtctacacgggagaggtttc

SEQ ID NO: 3344077 - DNA, 25 bp, Homo sapien
ttgtttagtggagaggactggtaca

SEQ ID NO: 3344078 - DNA, 25 bp, Homo sapien
ggtttctagcctggctgcaaccagg

SEQ ID NO: 3344079 - DNA, 25 bp, Homo sapien
ccaggtttcctctccttactcccat

SEQ ID NO: 3344080 - DNA, 25 bp, Homo sapien
tggtttctagcctggctgcaaccag

SEQ ID NO: 3344081 - DNA, 25 bp, Homo sapien
ttctagcctggctgcaaccaggttt

SEQ ID NO: 3344082 - DNA, 25 bp, Homo sapien
gttttgtcgaatccaagtactaata

SEQ ID NO: 3344083 - DNA, 25 bp, Homo sapien
agccttctaaaaccgggcctcatgg

SEQ ID NO: 3344084 - DNA, 25 bp, Homo sapien
tcgaatccaagtactaataaggcct

SEQ ID NO: 3344085 - DNA, 25 bp, Homo sapien
tcagactagatggagtgtgatcagg

SEQ ID NO: 3344086 - DNA, 25 bp, Homo sapien
gcaaattaactctcaagaaatgaaa

SEQ ID NO: 3344087 - DNA, 25 bp, Homo sapien
gaagcaaattaactctcaagaaatg

SEQ ID NO: 3344088 - DNA, 25 bp, Homo sapien
ttacacaataaccaattgcttcccc

SEQ ID NO: 3344089 - DNA, 25 bp, Homo sapien
ttgcttccccaaagaggattgtgac

SEQ ID NO: 3344090 - DNA, 25 bp, Homo sapien
agtccctctggacgctttcacagca

SEQ ID NO: 3344091 - DNA, 25 bp, Homo sapien
ggcacacctggtacttgccaattct

SEQ ID NO: 3344092 - DNA, 25 bp, Homo sapien
tagtttagtccctctggacgctttc

SEQ ID NO: 3344093 - DNA, 25 bp, Homo sapien
aatcttccttcatgcacccggatta

SEQ ID NO: 3344094 - DNA, 25 bp, Homo sapien
gaagctaatgccaccattgttctga

SEQ ID NO: 3344095 - DNA, 25 bp, Homo sapien
ttgagaagctaatgccaccattgtt

SEQ ID NO: 3344096 - DNA, 25 bp, Homo sapien
cagttaacaatagggctcttgttcc

SEQ ID NO: 3344097 - DNA, 25 bp, Homo sapien
tcctggtccctgtaggccagcagtc

SEQ ID NO: 3344098 - DNA, 25 bp, Homo sapien
caggtatctggagtattaaactgcc

SEQ ID NO: 3344099 - DNA, 25 bp, Homo sapien
ctgaactggtacaatagaccaggta

SEQ ID NO: 3344100 - DNA, 25 bp, Homo sapien
tggagtattaaactgccagtgccat

SEQ ID NO: 3344101 - DNA, 25 bp, Homo sapien
gaagggcagctttgatatctagccc

SEQ ID NO: 3344102 - DNA, 25 bp, Homo sapien
ccactttatcagagaaactgtgggt

SEQ ID NO: 3344103 - DNA, 25 bp, Homo sapien
gagaaactgtgggttcgggacctca

SEQ ID NO: 3344104 - DNA, 25 bp, Homo sapien
ctttatcagagaaactgtgggttcg

SEQ ID NO: 3344105 - DNA, 25 bp, Homo sapien
tcagagaaactgtgggttcgggacc

SEQ ID NO: 3344106 - DNA, 25 bp, Homo sapien
caagatgaagccttagaaacagcca

SEQ ID NO: 3344107 - DNA, 25 bp, Homo sapien
gacagtctgctctatagcattggga

SEQ ID NO: 3344108 - DNA, 25 bp, Homo sapien
gactgcctgaagtaaggacggtaaa

SEQ ID NO: 3344109 - DNA, 25 bp, Homo sapien
tggctttctgccctgtatcgtgaca

SEQ ID NO: 3344110 - DNA, 25 bp, Homo sapien
cccacaggatgaacttgcagctact

SEQ ID NO: 3344111 - DNA, 25 bp, Homo sapien
aaactcacttaacacccacaggatg

SEQ ID NO: 3344112 - DNA, 25 bp, Homo sapien
acttaacacccacaggatgaacttg

SEQ ID NO: 3344113 - DNA, 25 bp, Homo sapien
tatgagcaaactcacttaacaccca

SEQ ID NO: 3344114 - DNA, 25 bp, Homo sapien
gatgtatcgatctggctcccaatag

SEQ ID NO: 3344115 - DNA, 25 bp, Homo sapien
tatcgatctggctcccaatagcctg

SEQ ID NO: 3344116 - DNA, 25 bp, Homo sapien
cgatctggctcccaatagcctgctt

SEQ ID NO: 3344117 - DNA, 25 bp, Homo sapien
cccttcgatgtatcgatctggctcc

SEQ ID NO: 3344118 - DNA, 25 bp, Homo sapien
gcctggtttcagacctcaacttcag

SEQ ID NO: 3344119 - DNA, 25 bp, Homo sapien
aactcctgacaatctgcctggtttc

SEQ ID NO: 3344120 - DNA, 25 bp, Homo sapien
ccaggtctgaccatgttgggttttg

SEQ ID NO: 3344121 - DNA, 25 bp, Homo sapien
tgctagaggactgcccatgaagctg

SEQ ID NO: 3344122 - DNA, 25 bp, Homo sapien
aagctgatcagacggtgtctccccg

SEQ ID NO: 3344123 - DNA, 25 bp, Homo sapien
cctcagaaccatgcaactggacaga

SEQ ID NO: 3344124 - DNA, 25 bp, Homo sapien
gtgcattgatagcagtaaggttccc

SEQ ID NO: 3344125 - DNA, 25 bp, Homo sapien
agaaccatgcaactggacagaggga

SEQ ID NO: 3344126 - DNA, 25 bp, Homo sapien
cagctcatcaggcaaagcggggaag

SEQ ID NO: 3344127 - DNA, 25 bp, Homo sapien
cttcagctcatcaggcaaagcgggg

SEQ ID NO: 3344128 - DNA, 25 bp, Homo sapien
agctcatcaggcaaagcggggaaga

SEQ ID NO: 3344129 - DNA, 25 bp, Homo sapien
ttcagctcatcaggcaaagcgggga

SEQ ID NO: 3344130 - DNA, 25 bp, Homo sapien
tgaaggagctggagttccacatgtg

SEQ ID NO: 3344131 - DNA, 25 bp, Homo sapien
ggaatcagtgatcagctttctggtg

SEQ ID NO: 3344132 - DNA, 25 bp, Homo sapien
gaggtgggctgtcctttcgcctctc

SEQ ID NO: 3344133 - DNA, 25 bp, Homo sapien
gtatatgcgtttgcaacaggctgct

SEQ ID NO: 3344134 - DNA, 25 bp, Homo sapien
tctcggtgctcatatccagtgacct

SEQ ID NO: 3344135 - DNA, 25 bp, Homo sapien
ctatacttgagttttgtgccccgta

SEQ ID NO: 3344136 - DNA, 25 bp, Homo sapien
ggtgaccattccaagcattctagca

SEQ ID NO: 3344137 - DNA, 25 bp, Homo sapien
taggccaggccactacaagttcatg

SEQ ID NO: 3344138 - DNA, 25 bp, Homo sapien
gctgcctggatgtttgccttgtttg

SEQ ID NO: 3344139 - DNA, 25 bp, Homo sapien
cagctgcctggatgtttgccttgtt

SEQ ID NO: 3344140 - DNA, 25 bp, Homo sapien
ttgccttgtttgcaggccttaccat

SEQ ID NO: 3344141 - DNA, 25 bp, Homo sapien
cacagctgcctggatgtttgccttg

SEQ ID NO: 3344142 - DNA, 25 bp, Homo sapien
ggctccccgggactgtgactttcta

SEQ ID NO: 3344143 - DNA, 25 bp, Homo sapien
ccgggactgtgactttctattctct

SEQ ID NO: 3344144 - DNA, 25 bp, Homo sapien
tccccgggactgtgactttctattc

SEQ ID NO: 3344145 - DNA, 25 bp, Homo sapien
gctccccgggactgtgactttctat

SEQ ID NO: 3344146 - DNA, 25 bp, Homo sapien
tttagcaggcttggactcccgcgcg

SEQ ID NO: 3344147 - DNA, 25 bp, Homo sapien
ggctttagcaggcttggactcccgc

SEQ ID NO: 3344148 - DNA, 25 bp, Homo sapien
tagcaggcttggactcccgcgcgga

SEQ ID NO: 3344149 - DNA, 25 bp, Homo sapien
cagagggacaggaacgttcaatagg

SEQ ID NO: 3344150 - DNA, 25 bp, Homo sapien
tcctgtgacataatgaggcccaagg

SEQ ID NO: 3344151 - DNA, 25 bp, Homo sapien
ggatctcgagtgacttgtcagcaga

SEQ ID NO: 3344152 - DNA, 25 bp, Homo sapien
gcccaaggagggatctcgagtgact

SEQ ID NO: 3344153 - DNA, 25 bp, Homo sapien
tatagatagccagggcgtgtctcgg

SEQ ID NO: 3344154 - DNA, 25 bp, Homo sapien
gctctctctgaaaatattttcttct

SEQ ID NO: 3344155 - DNA, 25 bp, Homo sapien
ctttgctctctctgaaaatattttc

SEQ ID NO: 3344156 - DNA, 25 bp, Homo sapien
ctctctgaaaatattttcttctcac

SEQ ID NO: 3344157 - DNA, 25 bp, Homo sapien
tgctctctctgaaaatattttcttc

SEQ ID NO: 3344158 - DNA, 25 bp, Homo sapien
ttttaggaactgtgaatgtagttga

SEQ ID NO: 3344159 - DNA, 25 bp, Homo sapien
ctatgtgagtaaactggtcacagtc

SEQ ID NO: 3344160 - DNA, 25 bp, Homo sapien
tttatttgcaggtcaactctgcagc

SEQ ID NO: 3344161 - DNA, 25 bp, Homo sapien
actggtcacagtcatttttaggaac

SEQ ID NO: 3344162 - DNA, 25 bp, Homo sapien
tctaaatcaagcccaacattcaaaa

SEQ ID NO: 3344163 - DNA, 25 bp, Homo sapien
tgcctctgtaccctgtacctctgaa

SEQ ID NO: 3344164 - DNA, 25 bp, Homo sapien
ctctgtaccctgtacctctgaactt

SEQ ID NO: 3344165 - DNA, 25 bp, Homo sapien
gcctctttgcctctgtaccctgtac

SEQ ID NO: 3344166 - DNA, 25 bp, Homo sapien
tctttgcctctgtaccctgtacctc

SEQ ID NO: 3344167 - DNA, 25 bp, Homo sapien
ctaatccttcgtgcataaccaggga

SEQ ID NO: 3344168 - DNA, 25 bp, Homo sapien
cagggatccatgaattccgataaga

SEQ ID NO: 3344169 - DNA, 25 bp, Homo sapien
tgagaaccatcacctttaataggca

SEQ ID NO: 3344170 - DNA, 25 bp, Homo sapien
gctgggtccacaatgagaaccatca

SEQ ID NO: 3344171 - DNA, 25 bp, Homo sapien
tgcactgttggcaatacctcccttc

SEQ ID NO: 3344172 - DNA, 25 bp, Homo sapien
gaaaaggaaggtccttgcactgttg

SEQ ID NO: 3344173 - DNA, 25 bp, Homo sapien
ttgcactgttggcaatacctccctt

SEQ ID NO: 3344174 - DNA, 25 bp, Homo sapien
cttgcactgttggcaatacctccct

SEQ ID NO: 3344175 - DNA, 25 bp, Homo sapien
tgcccattctgtgcagttctgtctg

SEQ ID NO: 3344176 - DNA, 25 bp, Homo sapien
gggatttaaggccagtgcccattct

SEQ ID NO: 3344177 - DNA, 25 bp, Homo sapien
gatgctgtaccagatgagtgttaaa

SEQ ID NO: 3344178 - DNA, 25 bp, Homo sapien
gttaaaatatcataaatggtccttc

SEQ ID NO: 3344179 - DNA, 25 bp, Homo sapien
tgcctccattgccataatcagatgc

SEQ ID NO: 3344180 - DNA, 25 bp, Homo sapien
gcaattaggaaacagccatgattca

SEQ ID NO: 3344181 - DNA, 25 bp, Homo sapien
ctgtgatcatgaaaccacggcagaa

SEQ ID NO: 3344182 - DNA, 25 bp, Homo sapien
tcagatgccagcgtgctcagaaagc

SEQ ID NO: 3344183 - DNA, 25 bp, Homo sapien
cgatcagccaaatgactctgtaggg

SEQ ID NO: 3344184 - DNA, 25 bp, Homo sapien
cagccaaatgactctgtagggagag

SEQ ID NO: 3344185 - DNA, 25 bp, Homo sapien
ttaaatgtattcgatcagccaaatg

SEQ ID NO: 3344186 - DNA, 25 bp, Homo sapien
tgtattcgatcagccaaatgactct

SEQ ID NO: 3344187 - DNA, 25 bp, Homo sapien
caagcctccactccagtcactcccg

SEQ ID NO: 3344188 - DNA, 25 bp, Homo sapien
gcctccactccagtcactcccgtga

SEQ ID NO: 3344189 - DNA, 25 bp, Homo sapien
ctccactccagtcactcccgtgacc

SEQ ID NO: 3344190 - DNA, 25 bp, Homo sapien
agcctccactccagtcactcccgtg

SEQ ID NO: 3344191 - DNA, 25 bp, Homo sapien
ttgggcagcctttcagacagcgtct

SEQ ID NO: 3344192 - DNA, 25 bp, Homo sapien
tcccctgtctcaagtcgaggaatgc

SEQ ID NO: 3344193 - DNA, 25 bp, Homo sapien
ttgatgatgacagcccgtgagcgtg

SEQ ID NO: 3344194 - DNA, 25 bp, Homo sapien
acagggttactgagcgttgggacaa

SEQ ID NO: 3344195 - DNA, 25 bp, Homo sapien
aacctccagctctcgcctgccccat

SEQ ID NO: 3344196 - DNA, 25 bp, Homo sapien
ctggtaacctccagctctcgcctgc

SEQ ID NO: 3344197 - DNA, 25 bp, Homo sapien
ctgatcctggtaacctccagctctc

SEQ ID NO: 3344198 - DNA, 25 bp, Homo sapien
tgatcctggtaacctccagctctcg

SEQ ID NO: 3344199 - DNA, 25 bp, Homo sapien
tcctgacttactgaagcagcggata

SEQ ID NO: 3344200 - DNA, 25 bp, Homo sapien
aatcctccggttgcagatttcttct

SEQ ID NO: 3344201 - DNA, 25 bp, Homo sapien
tcatagcaatcctccggttgcagat

SEQ ID NO: 3344202 - DNA, 25 bp, Homo sapien
tatgatttttagatctgactgctct

SEQ ID NO: 3344203 - DNA, 25 bp, Homo sapien
tgcggtggaggttgatgctgggtaa

SEQ ID NO: 3344204 - DNA, 25 bp, Homo sapien
tggaggttgatgctgggtaaggcca

SEQ ID NO: 3344205 - DNA, 25 bp, Homo sapien
gtggtgggtcccaagttactgctgc

SEQ ID NO: 3344206 - DNA, 25 bp, Homo sapien
gttactgctgctccccatgaggaga

SEQ ID NO: 3344207 - DNA, 25 bp, Homo sapien
gctgagaggctctctttttcacaca

SEQ ID NO: 3344208 - DNA, 25 bp, Homo sapien
agctgagaggctctctttttcacac

SEQ ID NO: 3344209 - DNA, 25 bp, Homo sapien
tctaaggctgctggttttccaattt

SEQ ID NO: 3344210 - DNA, 25 bp, Homo sapien
ccaatttgcttttcctgttccctga

SEQ ID NO: 3344211 - DNA, 25 bp, Homo sapien
ctctaaggctgctggttttccaatt

SEQ ID NO: 3344212 - DNA, 25 bp, Homo sapien
tgcttttcctgttccctgaagttct

SEQ ID NO: 3344213 - DNA, 25 bp, Homo sapien
tttctaatgttttgtcagattctgg

SEQ ID NO: 3344214 - DNA, 25 bp, Homo sapien
ggatccaataccttgcagtcatgca

SEQ ID NO: 3344215 - DNA, 25 bp, Homo sapien
gatccaataccttgcagtcatgcat

SEQ ID NO: 3344216 - DNA, 25 bp, Homo sapien
ttgtcagattctggatccaatacct

SEQ ID NO: 3344217 - DNA, 25 bp, Homo sapien
gaagttctgcctgacggtagcttag

SEQ ID NO: 3344218 - DNA, 25 bp, Homo sapien
gaaggagatgctgccgttttcagaa

SEQ ID NO: 3344219 - DNA, 25 bp, Homo sapien
tgaacttgcttttgtggaggctggc

SEQ ID NO: 3344220 - DNA, 25 bp, Homo sapien
ccatgactgtaatgggtttgcacca

SEQ ID NO: 3344221 - DNA, 25 bp, Homo sapien
acacactgggtcagcatcatggggg

SEQ ID NO: 3344222 - DNA, 25 bp, Homo sapien
ggtcagcatcatggggggagcgtgt

SEQ ID NO: 3344223 - DNA, 25 bp, Homo sapien
gcatcatggggggagcgtgtgttgg

SEQ ID NO: 3344224 - DNA, 25 bp, Homo sapien
ctgggtcagcatcatggggggagcg

SEQ ID NO: 3344225 - DNA, 25 bp, Homo sapien
gagcctactaatgtgcggacaccca

SEQ ID NO: 3344226 - DNA, 25 bp, Homo sapien
cccagagcctactaatgtgcggaca

SEQ ID NO: 3344227 - DNA, 25 bp, Homo sapien
tctccataacagagatgcagccagg

SEQ ID NO: 3344228 - DNA, 25 bp, Homo sapien
gaggcccagagcctactaatgtgcg

SEQ ID NO: 3344229 - DNA, 25 bp, Homo sapien
gagcttgaatcatcccgacgatcct

SEQ ID NO: 3344230 - DNA, 25 bp, Homo sapien
gtgtctgtgacgctgcatccattct

SEQ ID NO: 3344231 - DNA, 25 bp, Homo sapien
tctgtgacgctgcatccattctgac

SEQ ID NO: 3344232 - DNA, 25 bp, Homo sapien
tcagtcagagcttgaatcatcccga

SEQ ID NO: 3344233 - DNA, 25 bp, Homo sapien
tggaaatataaagccagaaggtcaa

SEQ ID NO: 3344234 - DNA, 25 bp, Homo sapien
tccttggaaatataaagccagaagg

SEQ ID NO: 3344235 - DNA, 25 bp, Homo sapien
tcctccttggaaatataaagccaga

SEQ ID NO: 3344236 - DNA, 25 bp, Homo sapien
tctcctccttggaaatataaagcca

SEQ ID NO: 3344237 - DNA, 25 bp, Homo sapien
agcccctggcatccagaaagggtgg

SEQ ID NO: 3344238 - DNA, 25 bp, Homo sapien
gaggttgattccagacagcccgggg

SEQ ID NO: 3344239 - DNA, 25 bp, Homo sapien
ttaggatgaggagcccctggcatcc

SEQ ID NO: 3344240 - DNA, 25 bp, Homo sapien
ggtggagatccagaggttgattcca

SEQ ID NO: 3344241 - DNA, 25 bp, Homo sapien
ctggggtggtgggtcgtcagggtca

SEQ ID NO: 3344242 - DNA, 25 bp, Homo sapien
tcaggtgatggagaacagctggggt

SEQ ID NO: 3344243 - DNA, 25 bp, Homo sapien
acagctggggtggtgggtcgtcagg

SEQ ID NO: 3344244 - DNA, 25 bp, Homo sapien
gaacagctggggtggtgggtcgtca

SEQ ID NO: 3344245 - DNA, 25 bp, Homo sapien
tctttaccacatctctccgatatca

SEQ ID NO: 3344246 - DNA, 25 bp, Homo sapien
gcaagttctctctttaccacatctc

SEQ ID NO: 3344247 - DNA, 25 bp, Homo sapien
ccccaagatccaaccaattgcaagt

SEQ ID NO: 3344248 - DNA, 25 bp, Homo sapien
gatccaaccaattgcaagttctctc

SEQ ID NO: 3344249 - DNA, 25 bp, Homo sapien
tctgctatagagagcccaggaagtc

SEQ ID NO: 3344250 - DNA, 25 bp, Homo sapien
ggtggtctttgccttgccaacaggt

SEQ ID NO: 3344251 - DNA, 25 bp, Homo sapien
tatcatccgatggagccgaaatgga

SEQ ID NO: 3344252 - DNA, 25 bp, Homo sapien
gaaagccataatttgcggctcggca

SEQ ID NO: 3344253 - DNA, 25 bp, Homo sapien
aataaccatcttgctgaatctgctg

SEQ ID NO: 3344254 - DNA, 25 bp, Homo sapien
ctgcaatgctctctactctccagtg

SEQ ID NO: 3344255 - DNA, 25 bp, Homo sapien
aatgatcttctgcaatgctctctac

SEQ ID NO: 3344256 - DNA, 25 bp, Homo sapien
ctaatttgtgttaagaataaccatc

SEQ ID NO: 3344257 - DNA, 25 bp, Homo sapien
gctgcctcataggagcaggggccat

SEQ ID NO: 3344258 - DNA, 25 bp, Homo sapien
tcataatacatctactaccaagcac

SEQ ID NO: 3344259 - DNA, 25 bp, Homo sapien
gattccaactcatgccctccacttg

SEQ ID NO: 3344260 - DNA, 25 bp, Homo sapien
ctggggctgcctcataggagcaggg

SEQ ID NO: 3344261 - DNA, 25 bp, Homo sapien
cttgggactgatttgagaaagagct

SEQ ID NO: 3344262 - DNA, 25 bp, Homo sapien
aagagctcggaggtcagcgatatct

SEQ ID NO: 3344263 - DNA, 25 bp, Homo sapien
agagctcggaggtcagcgatatcta

SEQ ID NO: 3344264 - DNA, 25 bp, Homo sapien
ctccttgactatgagattgcttggg

SEQ ID NO: 3344265 - DNA, 25 bp, Homo sapien
ggatcggctgcatcatgaccacaaa

SEQ ID NO: 3344266 - DNA, 25 bp, Homo sapien
ctctaagcagatcaactccggagag

SEQ ID NO: 3344267 - DNA, 25 bp, Homo sapien
tcaactccggagagcatgatgaagc

SEQ ID NO: 3344268 - DNA, 25 bp, Homo sapien
caggaggatcggctgcatcatgacc

SEQ ID NO: 3344269 - DNA, 25 bp, Homo sapien
gttcatgcaagatgcagacaggcaa

SEQ ID NO: 3344270 - DNA, 25 bp, Homo sapien
tcatgcaagatgcagacaggcaaag

SEQ ID NO: 3344271 - DNA, 25 bp, Homo sapien
ctgttcatgcaagatgcagacaggc

SEQ ID NO: 3344272 - DNA, 25 bp, Homo sapien
catgcaagatgcagacaggcaaaga

SEQ ID NO: 3344273 - DNA, 25 bp, Homo sapien
ccaacacaggcagggacaacccctg

SEQ ID NO: 3344274 - DNA, 25 bp, Homo sapien
ttctcttccacagggggatttgttc

SEQ ID NO: 3344275 - DNA, 25 bp, Homo sapien
cccctgcaagttgtccatagaaatg

SEQ ID NO: 3344276 - DNA, 25 bp, Homo sapien
cctgcccctgcaagttgtccataga

SEQ ID NO: 3344277 - DNA, 25 bp, Homo sapien
acaatactcccagcgcacacaggag

SEQ ID NO: 3344278 - DNA, 25 bp, Homo sapien
gccaattgccactcattgacaatac

SEQ ID NO: 3344279 - DNA, 25 bp, Homo sapien
attgacaatactcccagcgcacaca

SEQ ID NO: 3344280 - DNA, 25 bp, Homo sapien
caattgccactcattgacaatactc

SEQ ID NO: 3344281 - DNA, 25 bp, Homo sapien
aaaacatctttttcctgcccaacag

SEQ ID NO: 3344282 - DNA, 25 bp, Homo sapien
acatctttttcctgcccaacagcac

SEQ ID NO: 3344283 - DNA, 25 bp, Homo sapien
tggaaaaacatctttttcctgccca

SEQ ID NO: 3344284 - DNA, 25 bp, Homo sapien
aaacatctttttcctgcccaacagc

SEQ ID NO: 3344285 - DNA, 25 bp, Homo sapien
caaaaactcctgaaggtggtataca

SEQ ID NO: 3344286 - DNA, 25 bp, Homo sapien
gattccactgtgtttggaagaggca

SEQ ID NO: 3344287 - DNA, 25 bp, Homo sapien
gctttaagacttcaagaccacctcc

SEQ ID NO: 3344288 - DNA, 25 bp, Homo sapien
tctttgccagctttaagacttcaag

SEQ ID NO: 3344289 - DNA, 25 bp, Homo sapien
ttcaaatgagagatatcagtaagtt

SEQ ID NO: 3344290 - DNA, 25 bp, Homo sapien
aaatcttatctaatgcatagttatc

SEQ ID NO: 3344291 - DNA, 25 bp, Homo sapien
tttattcaaatgagagatatcagta

SEQ ID NO: 3344292 - DNA, 25 bp, Homo sapien
tcttatctaatgcatagttatccag

SEQ ID NO: 3344293 - DNA, 25 bp, Homo sapien
gctgaggcaagaacacggctgtttc

SEQ ID NO: 3344294 - DNA, 25 bp, Homo sapien
aaatgtctcactaaatcaaaggaaa

SEQ ID NO: 3344295 - DNA, 25 bp, Homo sapien
tatgtagatgacctttctggatccc

SEQ ID NO: 3344296 - DNA, 25 bp, Homo sapien
tgatggggctcatgagatgccacag

SEQ ID NO: 3344297 - DNA, 25 bp, Homo sapien
tgtctgtgtcgacagaagctgccca

SEQ ID NO: 3344298 - DNA, 25 bp, Homo sapien
tttgctccatacttcagggtagtgt

SEQ ID NO: 3344299 - DNA, 25 bp, Homo sapien
aactgtgtctgtgtcgacagaagct

SEQ ID NO: 3344300 - DNA, 25 bp, Homo sapien
ttcagggtagtgtagacataagaac

SEQ ID NO: 3344301 - DNA, 25 bp, Homo sapien
tccagctttgcctgtcaagagccag

SEQ ID NO: 3344302 - DNA, 25 bp, Homo sapien
tgtcaagagccagaggcctccaggg

SEQ ID NO: 3344303 - DNA, 25 bp, Homo sapien
ccagacatgacagcattccagcttt

SEQ ID NO: 3344304 - DNA, 25 bp, Homo sapien
cagccagacatgacagcattccagc

SEQ ID NO: 3344305 - DNA, 25 bp, Homo sapien
tcctgttgctgagcagtgcttcatc

SEQ ID NO: 3344306 - DNA, 25 bp, Homo sapien
tctgtcctgttgctgagcagtgctt

SEQ ID NO: 3344307 - DNA, 25 bp, Homo sapien
ccttctgtcctgttgctgagcagtg

SEQ ID NO: 3344308 - DNA, 25 bp, Homo sapien
tgtcctgttgctgagcagtgcttca

SEQ ID NO: 3344309 - DNA, 25 bp, Homo sapien
cggaataaagccctgagtgaaagta

SEQ ID NO: 3344310 - DNA, 25 bp, Homo sapien
cccgcccctcagggaaagagagtgc

SEQ ID NO: 3344311 - DNA, 25 bp, Homo sapien
gggaaagagagtgcactcggaataa

SEQ ID NO: 3344312 - DNA, 25 bp, Homo sapien
gagtgaaagtaaagggcacacggtc

SEQ ID NO: 3344313 - DNA, 25 bp, Homo sapien
taaacatctcgtaggatagaacctc

SEQ ID NO: 3344314 - DNA, 25 bp, Homo sapien
ccttttagctccctggtttcagaca

SEQ ID NO: 3344315 - DNA, 25 bp, Homo sapien
tgagcagctcagatctagaaatggg

SEQ ID NO: 3344316 - DNA, 25 bp, Homo sapien
tggtaagagagattccagccattgc

SEQ ID NO: 3344317 - DNA, 25 bp, Homo sapien
caaggcgtccatagcagtgccaaag

SEQ ID NO: 3344318 - DNA, 25 bp, Homo sapien
ggctgtgtctcatgtttccccaagt

SEQ ID NO: 3344319 - DNA, 25 bp, Homo sapien
ggaaaccacctcaaggcaattggat

SEQ ID NO: 3344320 - DNA, 25 bp, Homo sapien
tctccaattcggaggaaggaaacca

SEQ ID NO: 3344321 - DNA, 25 bp, Homo sapien
agctgatgcttctggcaaccaaaag

SEQ ID NO: 3344322 - DNA, 25 bp, Homo sapien
aggccccctggctttgaaatctctg

SEQ ID NO: 3344323 - DNA, 25 bp, Homo sapien
tgcatcaccccagatatttcccagg

SEQ ID NO: 3344324 - DNA, 25 bp, Homo sapien
ggcagcccttcctactgatgggcct

SEQ ID NO: 3344325 - DNA, 25 bp, Homo sapien
cctctgctccgcatctccttgaact

SEQ ID NO: 3344326 - DNA, 25 bp, Homo sapien
ccctctgctccgcatctccttgaac

SEQ ID NO: 3344327 - DNA, 25 bp, Homo sapien
cccctctgctccgcatctccttgaa

SEQ ID NO: 3344328 - DNA, 25 bp, Homo sapien
tcccctctgctccgcatctccttga

SEQ ID NO: 3344329 - DNA, 25 bp, Homo sapien
tattcataaggaatgctccacttcc

SEQ ID NO: 3344330 - DNA, 25 bp, Homo sapien
gatgtctgcctctgataaggatacc

SEQ ID NO: 3344331 - DNA, 25 bp, Homo sapien
gtaagcgtgcttttagaaatccaaa

SEQ ID NO: 3344332 - DNA, 25 bp, Homo sapien
caaaatgtacttgcagtaagcgtgc

SEQ ID NO: 3344333 - DNA, 25 bp, Homo sapien
agacagatgactgcttgtcagagca

SEQ ID NO: 3344334 - DNA, 25 bp, Homo sapien
tcacagggacaaacatcgagtggct

SEQ ID NO: 3344335 - DNA, 25 bp, Homo sapien
ggaaagagatgacccagactggcct

SEQ ID NO: 3344336 - DNA, 25 bp, Homo sapien
gatggtgctgggttacatccccaaa

SEQ ID NO: 3344337 - DNA, 25 bp, Homo sapien
tttacataaggaaggtgacccatac

SEQ ID NO: 3344338 - DNA, 25 bp, Homo sapien
atttacataaggaaggtgacccata

SEQ ID NO: 3344339 - DNA, 25 bp, Homo sapien
tagagaaccgcaggaacagtgatgt

SEQ ID NO: 3344340 - DNA, 25 bp, Homo sapien
gcaaagagagctaataccaaggtga

SEQ ID NO: 3344341 - DNA, 25 bp, Homo sapien
gaagctgaagaggtatgctggacca

SEQ ID NO: 3344342 - DNA, 25 bp, Homo sapien
ggacgtctcctgactagcaactgga

SEQ ID NO: 3344343 - DNA, 25 bp, Homo sapien
ccctgattggcggtgttggtccctg

SEQ ID NO: 3344344 - DNA, 25 bp, Homo sapien
cctgattggcggtgttggtccctgg

SEQ ID NO: 3344345 - DNA, 25 bp, Homo sapien
ttccctgattggcggtgttggtccc

SEQ ID NO: 3344346 - DNA, 25 bp, Homo sapien
tcttccctgattggcggtgttggtc

SEQ ID NO: 3344347 - DNA, 25 bp, Homo sapien
gtgggcttgccaggtatctgcatcc

SEQ ID NO: 3344348 - DNA, 25 bp, Homo sapien
gatcttcactactgcctccaaggct

SEQ ID NO: 3344349 - DNA, 25 bp, Homo sapien
ccaggtatctgcatccctcttcatg

SEQ ID NO: 3344350 - DNA, 25 bp, Homo sapien
gcttgccaggtatctgcatccctct

SEQ ID NO: 3344351 - DNA, 25 bp, Homo sapien
ctaagactgtcttttgcacgttttc

SEQ ID NO: 3344352 - DNA, 25 bp, Homo sapien
ctcttggccttgtgtggtcaactaa

SEQ ID NO: 3344353 - DNA, 25 bp, Homo sapien
tgctattccctttcgcagcatcaaa

SEQ ID NO: 3344354 - DNA, 25 bp, Homo sapien
ccctttcgcagcatcaaaagcaggg

SEQ ID NO: 3344355 - DNA, 25 bp, Homo sapien
tgtgtcagtgggtgattgtccccag

SEQ ID NO: 3344356 - DNA, 25 bp, Homo sapien
cctggttcctgtactgcctcctgat

SEQ ID NO: 3344357 - DNA, 25 bp, Homo sapien
aactgggaatccagaagggctatgg

SEQ ID NO: 3344358 - DNA, 25 bp, Homo sapien
cacatagaactagcatgggtcctgt

SEQ ID NO: 3344359 - DNA, 25 bp, Homo sapien
tgggaaagaaagtgtgagattcttc

SEQ ID NO: 3344360 - DNA, 25 bp, Homo sapien
ctgggaaagaaagtgtgagattctt

SEQ ID NO: 3344361 - DNA, 25 bp, Homo sapien
gaaagaaagtgtgagattcttctgc

SEQ ID NO: 3344362 - DNA, 25 bp, Homo sapien
ggaaagaaagtgtgagattcttctg

SEQ ID NO: 3344363 - DNA, 25 bp, Homo sapien
ccccttggaattgcttcagtattat

SEQ ID NO: 3344364 - DNA, 25 bp, Homo sapien
ccttctcgagcatgtatctgttttg

SEQ ID NO: 3344365 - DNA, 25 bp, Homo sapien
gcatcccaaattataccccttggaa

SEQ ID NO: 3344366 - DNA, 25 bp, Homo sapien
aaatgtattctcttaccaccacctt

SEQ ID NO: 3344367 - DNA, 25 bp, Homo sapien
tgcaatcatctctgaaagatggtgt

SEQ ID NO: 3344368 - DNA, 25 bp, Homo sapien
gaaagcacggctgggtgctcacaac

SEQ ID NO: 3344369 - DNA, 25 bp, Homo sapien
gatggtgttcgatccttttccggag

SEQ ID NO: 3344370 - DNA, 25 bp, Homo sapien
gggtgcacaccagaagcggcacccg

SEQ ID NO: 3344371 - DNA, 25 bp, Homo sapien
tgccgggtcagctcactgcgcactg

SEQ ID NO: 3344372 - DNA, 25 bp, Homo sapien
cactgctgacgatgcggagcttctc

SEQ ID NO: 3344373 - DNA, 25 bp, Homo sapien
ttctctgatcttgtgaacgagataa

SEQ ID NO: 3344374 - DNA, 25 bp, Homo sapien
tctgatcttgtgaacgagataagaa

SEQ ID NO: 3344375 - DNA, 25 bp, Homo sapien
gagattggggctccagtagcaactg

SEQ ID NO: 3344376 - DNA, 25 bp, Homo sapien
gttcagtgtcgcctacaaaggccat

SEQ ID NO: 3344377 - DNA, 25 bp, Homo sapien
tgcagctggaatcccgtgtagatgt

SEQ ID NO: 3344378 - DNA, 25 bp, Homo sapien
gggctccagtagcaactgccttcct

SEQ ID NO: 3344379 - DNA, 25 bp, Homo sapien
gtttgatgcttgactcaatgtggac

SEQ ID NO: 3344380 - DNA, 25 bp, Homo sapien
gaagtcaccatgtttgatgcttgac

SEQ ID NO: 3344381 - DNA, 25 bp, Homo sapien
tagtagctattcatagccgcaatcc

SEQ ID NO: 3344382 - DNA, 25 bp, Homo sapien
gacacttgatctgcataacgcacta

SEQ ID NO: 3344383 - DNA, 25 bp, Homo sapien
gaccaaaatagacctggggttcatc

SEQ ID NO: 3344384 - DNA, 25 bp, Homo sapien
gaaacatgcaaagtaaagaccaaaa

SEQ ID NO: 3344385 - DNA, 25 bp, Homo sapien
ggttcatctggtataccctttccat

SEQ ID NO: 3344386 - DNA, 25 bp, Homo sapien
ccaaacagatggtgcaaattcccaa

SEQ ID NO: 3344387 - DNA, 25 bp, Homo sapien
ggtagtcaatatagaacccactgtg

SEQ ID NO: 3344388 - DNA, 25 bp, Homo sapien
taagcacaaagggtatcagaagtcc

SEQ ID NO: 3344389 - DNA, 25 bp, Homo sapien
tacatggagtacaattcaggatccc

SEQ ID NO: 3344390 - DNA, 25 bp, Homo sapien
gggtgtccattcaagctaagcacaa

SEQ ID NO: 3344391 - DNA, 25 bp, Homo sapien
ttgctccctgcattgtcctcctgaa

SEQ ID NO: 3344392 - DNA, 25 bp, Homo sapien
gacctcagtctcctgttgtcatcaa

SEQ ID NO: 3344393 - DNA, 25 bp, Homo sapien
gtttcagtggctgccttaggcccct

SEQ ID NO: 3344394 - DNA, 25 bp, Homo sapien
gaatccacactcctggtttcagtgg

SEQ ID NO: 3344395 - DNA, 25 bp, Homo sapien
gtcctgtctacactgagctctcact

SEQ ID NO: 3344396 - DNA, 25 bp, Homo sapien
ctggtcctgtctacactgagctctc

SEQ ID NO: 3344397 - DNA, 25 bp, Homo sapien
ctgtctacactgagctctcactcct

SEQ ID NO: 3344398 - DNA, 25 bp, Homo sapien
gtctacactgagctctcactccttt

SEQ ID NO: 3344399 - DNA, 25 bp, Homo sapien
aagttccaaggaccagagtctcctc

SEQ ID NO: 3344400 - DNA, 25 bp, Homo sapien
agttccaaggaccagagtctcctct

SEQ ID NO: 3344401 - DNA, 25 bp, Homo sapien
caagttccaaggaccagagtctcct

SEQ ID NO: 3344402 - DNA, 25 bp, Homo sapien
gttccaaggaccagagtctcctctg

SEQ ID NO: 3344403 - DNA, 25 bp, Homo sapien
gcctcctcccttccgtctgactgcc

SEQ ID NO: 3344404 - DNA, 25 bp, Homo sapien
cctcctcccttccgtctgactgccc

SEQ ID NO: 3344405 - DNA, 25 bp, Homo sapien
ccccacatccgatacgccctgggca

SEQ ID NO: 3344406 - DNA, 25 bp, Homo sapien
tctcttcggagggtatgggcgggcc

SEQ ID NO: 3344407 - DNA, 25 bp, Homo sapien
catccgatacgccctgggcaggagg

SEQ ID NO: 3344408 - DNA, 25 bp, Homo sapien
agggtgggtctcttcggagggtatg

SEQ ID NO: 3344409 - DNA, 25 bp, Homo sapien
tcccctggggcatcgcctccaactg

SEQ ID NO: 3344410 - DNA, 25 bp, Homo sapien
tgtcccctggggcatcgcctccaac

SEQ ID NO: 3344411 - DNA, 25 bp, Homo sapien
cccctggggcatcgcctccaactgc

SEQ ID NO: 3344412 - DNA, 25 bp, Homo sapien
ctggggcatcgcctccaactgcagc

SEQ ID NO: 3344413 - DNA, 25 bp, Homo sapien
gccctaggctcagcccctgccagaa

SEQ ID NO: 3344414 - DNA, 25 bp, Homo sapien
gccccagccctaggctcagcccctg

SEQ ID NO: 3344415 - DNA, 25 bp, Homo sapien
cccctgccagaacagtctttagcat

SEQ ID NO: 3344416 - DNA, 25 bp, Homo sapien
ctggggaaggacacacaggaccagg

SEQ ID NO: 3344417 - DNA, 25 bp, Homo sapien
aacgatcagcattgtgccccttggg

SEQ ID NO: 3344418 - DNA, 25 bp, Homo sapien
ccttctctgaggtggactctcttca

SEQ ID NO: 3344419 - DNA, 25 bp, Homo sapien
tctcctacacaacgatcagcattgt

SEQ ID NO: 3344420 - DNA, 25 bp, Homo sapien
tcattgacacagtcatctcctacac

SEQ ID NO: 3344421 - DNA, 25 bp, Homo sapien
ccatcgtagagcttctggacaatca

SEQ ID NO: 3344422 - DNA, 25 bp, Homo sapien
gcccaggcccactgagacacggggt

SEQ ID NO: 3344423 - DNA, 25 bp, Homo sapien
acctgtctccatcgtagagcttctg

SEQ ID NO: 3344424 - DNA, 25 bp, Homo sapien
gacaatcaatgttatctctgctcct

SEQ ID NO: 3344425 - DNA, 25 bp, Homo sapien
tgaagagtctattcccagcattgag

SEQ ID NO: 3344426 - DNA, 25 bp, Homo sapien
cagcattgagactgttaacggaaag

SEQ ID NO: 3344427 - DNA, 25 bp, Homo sapien
caggcttgggaaactggatggattc

SEQ ID NO: 3344428 - DNA, 25 bp, Homo sapien
ggattcccagattcacccgagtcaa

SEQ ID NO: 3344429 - DNA, 25 bp, Homo sapien
ggcttccaacatcgtttggacaaaa

SEQ ID NO: 3344430 - DNA, 25 bp, Homo sapien
gggcgggtgtgtgcggcactccttc

SEQ ID NO: 3344431 - DNA, 25 bp, Homo sapien
gtgtgcggcactccttccatgtcca

SEQ ID NO: 3344432 - DNA, 25 bp, Homo sapien
ggtgtcttcaacttggatattgttc

SEQ ID NO: 3344433 - DNA, 25 bp, Homo sapien
tgcaagcttgttctgggtcttcaag

SEQ ID NO: 3344434 - DNA, 25 bp, Homo sapien
tgtatctcattatcccaccaattgc

SEQ ID NO: 3344435 - DNA, 25 bp, Homo sapien
gagaacttgtacctcccctgcctta

SEQ ID NO: 3344436 - DNA, 25 bp, Homo sapien
aagaaggtgccagaacaagtgctgc

SEQ ID NO: 3344437 - DNA, 25 bp, Homo sapien
tcttggcctgtttccattgccacag

SEQ ID NO: 3344438 - DNA, 25 bp, Homo sapien
ctgtatgcaaggcccctcttggcct

SEQ ID NO: 3344439 - DNA, 25 bp, Homo sapien
gaacgtttggtgtctctgtatgcaa

SEQ ID NO: 3344440 - DNA, 25 bp, Homo sapien
gacagtcctcttgaggaacccttgg

SEQ ID NO: 3344441 - DNA, 25 bp, Homo sapien
aaattaaaagccatgatctggcagg

SEQ ID NO: 3344442 - DNA, 25 bp, Homo sapien
tttcctagttcaggtacaaggcatg

SEQ ID NO: 3344443 - DNA, 25 bp, Homo sapien
taaacagacttctaaaggagagtgg

SEQ ID NO: 3344444 - DNA, 25 bp, Homo sapien
tgggagattgaacacttaggcagtc

SEQ ID NO: 3344445 - DNA, 25 bp, Homo sapien
taatgctttcagcactccccaagga

SEQ ID NO: 3344446 - DNA, 25 bp, Homo sapien
gacgttgggtcagattactcagaag

SEQ ID NO: 3344447 - DNA, 25 bp, Homo sapien
ctcagaagtggattgtaaacggaca

SEQ ID NO: 3344448 - DNA, 25 bp, Homo sapien
gtagccaatgtaggctggcccagtg

SEQ ID NO: 3344449 - DNA, 25 bp, Homo sapien
gtggacatggtacatctgtagtagg

SEQ ID NO: 3344450 - DNA, 25 bp, Homo sapien
acatctgtagtaggaacttgggcca

SEQ ID NO: 3344451 - DNA, 25 bp, Homo sapien
aaaagtggacatggtacatctgtag

SEQ ID NO: 3344452 - DNA, 25 bp, Homo sapien
catctgtagtaggaacttgggccaa

SEQ ID NO: 3344453 - DNA, 25 bp, Homo sapien
ggtgaaaggtgcattctgaatcctt

SEQ ID NO: 3344454 - DNA, 25 bp, Homo sapien
cgctctggtgaaaggtgcattctga

SEQ ID NO: 3344455 - DNA, 25 bp, Homo sapien
gaatcctttcagcttctgatgcttt

SEQ ID NO: 3344456 - DNA, 25 bp, Homo sapien
tcacgctctggtgaaaggtgcattc

SEQ ID NO: 3344457 - DNA, 25 bp, Homo sapien
tattggctgatgaacctgaaggagt

SEQ ID NO: 3344458 - DNA, 25 bp, Homo sapien
tggcactgcaaaataggaggttctc

SEQ ID NO: 3344459 - DNA, 25 bp, Homo sapien
tctgctatgcaaagcaacggagctt

SEQ ID NO: 3344460 - DNA, 25 bp, Homo sapien
gagtaggcgcctctgagatgtcttc

SEQ ID NO: 3344461 - DNA, 25 bp, Homo sapien
tgataaaggtcccagtaactagacc

SEQ ID NO: 3344462 - DNA, 25 bp, Homo sapien
tcttaaatgaggaaacacgaggtca

SEQ ID NO: 3344463 - DNA, 25 bp, Homo sapien
taaatgccatcggtatgcaatgtgc

SEQ ID NO: 3344464 - DNA, 25 bp, Homo sapien
taaccttaggagatgggtatcctct

SEQ ID NO: 3344465 - DNA, 25 bp, Homo sapien
tagtgcctacttctcagggatagtg

SEQ ID NO: 3344466 - DNA, 25 bp, Homo sapien
gattctttgagggaaccagatttca

SEQ ID NO: 3344467 - DNA, 25 bp, Homo sapien
aacagaaagtatcgagggtaagcac

SEQ ID NO: 3344468 - DNA, 25 bp, Homo sapien
tgaacaaaacggctacagaacagtc

SEQ ID NO: 3344469 - DNA, 25 bp, Homo sapien
tcagtctgggactaaaacgtcacag

SEQ ID NO: 3344470 - DNA, 25 bp, Homo sapien
gcaagtaatagctctgttccaagga

SEQ ID NO: 3344471 - DNA, 25 bp, Homo sapien
gctcttggagaatgaggcaaaccat

SEQ ID NO: 3344472 - DNA, 25 bp, Homo sapien
cataaataagtttggccactgggag

SEQ ID NO: 3344473 - DNA, 25 bp, Homo sapien
tgcaccactgagaacaagggatttt

SEQ ID NO: 3344474 - DNA, 25 bp, Homo sapien
tcagtggtaaaagaacaggctagca

SEQ ID NO: 3344475 - DNA, 25 bp, Homo sapien
gaaagtctcattttgcaaagctgcc

SEQ ID NO: 3344476 - DNA, 25 bp, Homo sapien
taacactgcccaatgaccactggag

SEQ ID NO: 3344477 - DNA, 25 bp, Homo sapien
agtcccattccgactcccaactgca

SEQ ID NO: 3344478 - DNA, 25 bp, Homo sapien
tgaggctctgatccgccacacaact

SEQ ID NO: 3344479 - DNA, 25 bp, Homo sapien
gtgtttgaggctctgatccgccaca

SEQ ID NO: 3344480 - DNA, 25 bp, Homo sapien
tcttcagtcccattccgactcccaa

SEQ ID NO: 3344481 - DNA, 25 bp, Homo sapien
ccaatgtgactaggtttcgaataaa

SEQ ID NO: 3344482 - DNA, 25 bp, Homo sapien
tctccaatgtgactaggtttcgaat

SEQ ID NO: 3344483 - DNA, 25 bp, Homo sapien
ttttacagttccatcatctgagctg

SEQ ID NO: 3344484 - DNA, 25 bp, Homo sapien
attcacccgttttcaagtcccatag

SEQ ID NO: 3344485 - DNA, 25 bp, Homo sapien
gaaacccatgtcctcagtattttag

SEQ ID NO: 3344486 - DNA, 25 bp, Homo sapien
ggttagctaccagacaaacatctta

SEQ ID NO: 3344487 - DNA, 25 bp, Homo sapien
tattttaggatcagcatggatgtaa

SEQ ID NO: 3344488 - DNA, 25 bp, Homo sapien
tgaacgacagcattccttggtgagg

SEQ ID NO: 3344489 - DNA, 25 bp, Homo sapien
actgtcctgttttgatatcccagat

SEQ ID NO: 3344490 - DNA, 25 bp, Homo sapien
cattccacttgttaacgactggtgc

SEQ ID NO: 3344491 - DNA, 25 bp, Homo sapien
cgactggtgccctgttaacgtgtga

SEQ ID NO: 3344492 - DNA, 25 bp, Homo sapien
taacgtgtgaatgcaattccctgtc

SEQ ID NO: 3344493 - DNA, 25 bp, Homo sapien
cctgggacagtagagtgctttatgc

SEQ ID NO: 3344494 - DNA, 25 bp, Homo sapien
tcccactaggaagctgagactaatg

SEQ ID NO: 3344495 - DNA, 25 bp, Homo sapien
tatcagcacctaaggcatgaaaagg

SEQ ID NO: 3344496 - DNA, 25 bp, Homo sapien
tatcatggatgactgagagaattgc

SEQ ID NO: 3344497 - DNA, 25 bp, Homo sapien
tcatgccaattttaacgtatataaa

SEQ ID NO: 3344498 - DNA, 25 bp, Homo sapien
ttttggactgtactggatcagcaat

SEQ ID NO: 3344499 - DNA, 25 bp, Homo sapien
aacaaccttatgattcatcaggaga

SEQ ID NO: 3344500 - DNA, 25 bp, Homo sapien
ttaagggagagataagagatcttac

SEQ ID NO: 3344501 - DNA, 25 bp, Homo sapien
tgaatagactctattagtatgcccc

SEQ ID NO: 3344502 - DNA, 25 bp, Homo sapien
gactctattagtatgcccctgcaac

SEQ ID NO: 3344503 - DNA, 25 bp, Homo sapien
tagtatgcccctgcaacgtgtgtag

SEQ ID NO: 3344504 - DNA, 25 bp, Homo sapien
ccctgcaacgtgtgtagacaggttt

SEQ ID NO: 3344505 - DNA, 25 bp, Homo sapien
actggcctgtctcaatatcccaaac

SEQ ID NO: 3344506 - DNA, 25 bp, Homo sapien
taagagtggcatctcgagaaccgct

SEQ ID NO: 3344507 - DNA, 25 bp, Homo sapien
tgccatcatattgaacacagcggac

SEQ ID NO: 3344508 - DNA, 25 bp, Homo sapien
tgcaacatgacccatcaaaacatgt

SEQ ID NO: 3344509 - DNA, 25 bp, Homo sapien
atgagaaaacatggtagatttagtc

SEQ ID NO: 3344510 - DNA, 25 bp, Homo sapien
catggtagatttagtcaaggttttt

SEQ ID NO: 3344511 - DNA, 25 bp, Homo sapien
gaaaacatggtagatttagtcaagg

SEQ ID NO: 3344512 - DNA, 25 bp, Homo sapien
taataatatgagaaaacatggtaga

SEQ ID NO: 3344513 - DNA, 25 bp, Homo sapien
tgggaagcctagaatgctgcatgct

SEQ ID NO: 3344514 - DNA, 25 bp, Homo sapien
cagaagctgcctctaaatatataca

SEQ ID NO: 3344515 - DNA, 25 bp, Homo sapien
gcaccttaaggttctgtgggactga

SEQ ID NO: 3344516 - DNA, 25 bp, Homo sapien
tgttaatgggagaactctaggtggt

SEQ ID NO: 3344517 - DNA, 25 bp, Homo sapien
cactttgagtgtccgatctgtagat

SEQ ID NO: 3344518 - DNA, 25 bp, Homo sapien
cgcacagtggaagtatgcccatata

SEQ ID NO: 3344519 - DNA, 25 bp, Homo sapien
tgaagatgcatacaacgcacagtgg

SEQ ID NO: 3344520 - DNA, 25 bp, Homo sapien
tgtatgtcccactaatgttctcaga

SEQ ID NO: 3344521 - DNA, 25 bp, Homo sapien
aattgcaactgggtttcttccatgg

SEQ ID NO: 3344522 - DNA, 25 bp, Homo sapien
gaaagcagttatgatagctctggcc

SEQ ID NO: 3344523 - DNA, 25 bp, Homo sapien
tctgccccagggcagtagttaggag

SEQ ID NO: 3344524 - DNA, 25 bp, Homo sapien
cagtattgggtgtggctacatacca

SEQ ID NO: 3344525 - DNA, 25 bp, Homo sapien
gttttcatactctcttctgttattt

SEQ ID NO: 3344526 - DNA, 25 bp, Homo sapien
tgttttcatactctcttctgttatt

SEQ ID NO: 3344527 - DNA, 25 bp, Homo sapien
ttcatactctcttctgttatttttt

SEQ ID NO: 3344528 - DNA, 25 bp, Homo sapien
ttttcatactctcttctgttatttt

SEQ ID NO: 3344529 - DNA, 25 bp, Homo sapien
gtgatcacatgatcatcatgtcctt

SEQ ID NO: 3344530 - DNA, 25 bp, Homo sapien
tgtcatcagaaccactaactattcg

SEQ ID NO: 3344531 - DNA, 25 bp, Homo sapien
ttcggttaccacaaaactgtaagca

SEQ ID NO: 3344532 - DNA, 25 bp, Homo sapien
caaaactgtaagcatgtgatcacat

SEQ ID NO: 3344533 - DNA, 25 bp, Homo sapien
gatgtatgcacttttccatggactg

SEQ ID NO: 3344534 - DNA, 25 bp, Homo sapien
catggactgtgtatgaaacctggtt

SEQ ID NO: 3344535 - DNA, 25 bp, Homo sapien
tcttctcttgatgtgcaatggttca

SEQ ID NO: 3344536 - DNA, 25 bp, Homo sapien
agttctcctcgcctccagttagtat

SEQ ID NO: 3344537 - DNA, 25 bp, Homo sapien
tcagccaaaattctccagtagcgac

SEQ ID NO: 3344538 - DNA, 25 bp, Homo sapien
ggaatgaaagcacatagagtgccaa

SEQ ID NO: 3344539 - DNA, 25 bp, Homo sapien
tccagtagcgacatgtctgagctgc

SEQ ID NO: 3344540 - DNA, 25 bp, Homo sapien
ttctctctccagagaaggttgtctt

SEQ ID NO: 3344541 - DNA, 25 bp, Homo sapien
caatcaaagcctaggcaagttcgct

SEQ ID NO: 3344542 - DNA, 25 bp, Homo sapien
tccagagcagcttagatttcaaaag

SEQ ID NO: 3344543 - DNA, 25 bp, Homo sapien
caagttcgctttgtgtcagtatagc

SEQ ID NO: 3344544 - DNA, 25 bp, Homo sapien
catctagtccagtgcattaaagaga

SEQ ID NO: 3344545 - DNA, 25 bp, Homo sapien
tcacttgcatcatatgttttacttg

SEQ ID NO: 3344546 - DNA, 25 bp, Homo sapien
ggttcacaactatcaatgagttcat

SEQ ID NO: 3344547 - DNA, 25 bp, Homo sapien
caagcaatttctctggtccactcca

SEQ ID NO: 3344548 - DNA, 25 bp, Homo sapien
gaaatgaagtctcgttgaaactggg

SEQ ID NO: 3344549 - DNA, 25 bp, Homo sapien
cacacgtgaccaattaaaagcagtt

SEQ ID NO: 3344550 - DNA, 25 bp, Homo sapien
tgtacacacgtgaccaattaaaagc

SEQ ID NO: 3344551 - DNA, 25 bp, Homo sapien
tacacacgtgaccaattaaaagcag

SEQ ID NO: 3344552 - DNA, 25 bp, Homo sapien
tatatgtacacacgtgaccaattaa

SEQ ID NO: 3344553 - DNA, 25 bp, Homo sapien
ctctttgacataactgatagtgatc

SEQ ID NO: 3344554 - DNA, 25 bp, Homo sapien
tctacatcatagacaatgcatggac

SEQ ID NO: 3344555 - DNA, 25 bp, Homo sapien
tattgattcacatccctcacaggat

SEQ ID NO: 3344556 - DNA, 25 bp, Homo sapien
catgctcatttggagtgatggataa

SEQ ID NO: 3344557 - DNA, 25 bp, Homo sapien
cttgattaaaatgtagcttaggcca

SEQ ID NO: 3344558 - DNA, 25 bp, Homo sapien
tgagtctgagtctcagagaacccac

SEQ ID NO: 3344559 - DNA, 25 bp, Homo sapien
aatgagtctgagtctcagagaaccc

SEQ ID NO: 3344560 - DNA, 25 bp, Homo sapien
taatgagtctgagtctcagagaacc

SEQ ID NO: 3344561 - DNA, 25 bp, Homo sapien
ttaatgagtctgagtctcagagaac

SEQ ID NO: 3344562 - DNA, 25 bp, Homo sapien
caaatgccgatcaaggacagcaaga

SEQ ID NO: 3344563 - DNA, 25 bp, Homo sapien
tggttcccaaatgccgatcaaggac

SEQ ID NO: 3344564 - DNA, 25 bp, Homo sapien
acagtgagaggcttggtccaggcca

SEQ ID NO: 3344565 - DNA, 25 bp, Homo sapien
caaggacagcaagaattactgagtt

SEQ ID NO: 3344566 - DNA, 25 bp, Homo sapien
aattcggcgtcgttgttgcccttgg

SEQ ID NO: 3344567 - DNA, 25 bp, Homo sapien
cctgtaggtggctggacagatgtaa

SEQ ID NO: 3344568 - DNA, 25 bp, Homo sapien
acatttttagccattcctggaggcc

SEQ ID NO: 3344569 - DNA, 25 bp, Homo sapien
tgaacatggtacaagcccagtggta

SEQ ID NO: 3344570 - DNA, 25 bp, Homo sapien
cagaaccatggtccaactttctttt

SEQ ID NO: 3344571 - DNA, 25 bp, Homo sapien
gaaaaagagcggacctcagaaccat

SEQ ID NO: 3344572 - DNA, 25 bp, Homo sapien
tcccaaagaaaaagagcggacctca

SEQ ID NO: 3344573 - DNA, 25 bp, Homo sapien
aaagagcggacctcagaaccatggt

SEQ ID NO: 3344574 - DNA, 25 bp, Homo sapien
acagaataccagacatccagccacc

SEQ ID NO: 3344575 - DNA, 25 bp, Homo sapien
ttagaggatactgcagccatctctg

SEQ ID NO: 3344576 - DNA, 25 bp, Homo sapien
catgatataaaacagaataccagac

SEQ ID NO: 3344577 - DNA, 25 bp, Homo sapien
ccaccaaaattagaggatactgcag

SEQ ID NO: 3344578 - DNA, 25 bp, Homo sapien
ccccgtgtgtccggctgcttggcag

SEQ ID NO: 3344579 - DNA, 25 bp, Homo sapien
ttttaatgtgccgtagaaacccata

SEQ ID NO: 3344580 - DNA, 25 bp, Homo sapien
tgtgccgtagaaacccatattttct

SEQ ID NO: 3344581 - DNA, 25 bp, Homo sapien
tcagtgattctgtgcccccgtgtgt

SEQ ID NO: 3344582 - DNA, 25 bp, Homo sapien
gagcagaaccggcaacaaaactcca

SEQ ID NO: 3344583 - DNA, 25 bp, Homo sapien
gcaaatgcagctcagtatcaaaccg

SEQ ID NO: 3344584 - DNA, 25 bp, Homo sapien
gctcaggcacgtcagaaaaggaaga

SEQ ID NO: 3344585 - DNA, 25 bp, Homo sapien
tatcaaaccgcttctcgggacacac

SEQ ID NO: 3344586 - DNA, 25 bp, Homo sapien
acatacatgcagcttgactgagaag

SEQ ID NO: 3344587 - DNA, 25 bp, Homo sapien
atacatgcagcttgactgagaagaa

SEQ ID NO: 3344588 - DNA, 25 bp, Homo sapien
catacatgcagcttgactgagaaga

SEQ ID NO: 3344589 - DNA, 25 bp, Homo sapien
gactgaacagattcctccctcagca

SEQ ID NO: 3344590 - DNA, 25 bp, Homo sapien
cagagggatcagattacatcttccc

SEQ ID NO: 3344591 - DNA, 25 bp, Homo sapien
aacggagaagattattggaggagac

SEQ ID NO: 3344592 - DNA, 25 bp, Homo sapien
tgtcaaagccttgactgaacagatt

SEQ ID NO: 3344593 - DNA, 25 bp, Homo sapien
aagatgccaaagtttgccagaaggc

SEQ ID NO: 3344594 - DNA, 25 bp, Homo sapien
taaataatctcacttcgaagggaag

SEQ ID NO: 3344595 - DNA, 25 bp, Homo sapien
tctctgctatggtggtaaatggctt

SEQ ID NO: 3344596 - DNA, 25 bp, Homo sapien
ttccttgagctagaaaagcccatta

SEQ ID NO: 3344597 - DNA, 25 bp, Homo sapien
ttaagagttctatttatgccagcca

SEQ ID NO: 3344598 - DNA, 25 bp, Homo sapien
gattgggccaaattagtcatctgat

SEQ ID NO: 3344599 - DNA, 25 bp, Homo sapien
catacccaatagtgcaagttaagag

SEQ ID NO: 3344600 - DNA, 25 bp, Homo sapien
gtgtgacacactaatcaactgcagt

SEQ ID NO: 3344601 - DNA, 25 bp, Homo sapien
taatagctatatactttgggagagg

SEQ ID NO: 3344602 - DNA, 25 bp, Homo sapien
gctcctgctagcatgagaagtactc

SEQ ID NO: 3344603 - DNA, 25 bp, Homo sapien
taacagtgctataggaaacaggcaa

SEQ ID NO: 3344604 - DNA, 25 bp, Homo sapien
gagaggttgtcacttatactgtaaa

SEQ ID NO: 3344605 - DNA, 25 bp, Homo sapien
gtttaataagcctagcagaccttgc

SEQ ID NO: 3344606 - DNA, 25 bp, Homo sapien
taccaacagagcttatgatggtcgg

SEQ ID NO: 3344607 - DNA, 25 bp, Homo sapien
tatgcataacgatgttcaaagcagg

SEQ ID NO: 3344608 - DNA, 25 bp, Homo sapien
gccattgaactcagactttggagga

SEQ ID NO: 3344609 - DNA, 25 bp, Homo sapien
aaattgttacataatctgtgagata

SEQ ID NO: 3344610 - DNA, 25 bp, Homo sapien
ttgttacataatctgtgagataact

SEQ ID NO: 3344611 - DNA, 25 bp, Homo sapien
taaaattgttacataatctgtgaga

SEQ ID NO: 3344612 - DNA, 25 bp, Homo sapien
gactaaaattgttacataatctgtg

SEQ ID NO: 3344613 - DNA, 25 bp, Homo sapien
cacagtttgatgtggtagaggctct

SEQ ID NO: 3344614 - DNA, 25 bp, Homo sapien
ccaagccatggtttagagtaggttt

SEQ ID NO: 3344615 - DNA, 25 bp, Homo sapien
ttttaagatcaacaggaaccaagcc

SEQ ID NO: 3344616 - DNA, 25 bp, Homo sapien
gggcaatgatgctaatgctaaatat

SEQ ID NO: 3344617 - DNA, 25 bp, Homo sapien
taaaactcctcttggttgacgaata

SEQ ID NO: 3344618 - DNA, 25 bp, Homo sapien
aactcctcttggttgacgaatactc

SEQ ID NO: 3344619 - DNA, 25 bp, Homo sapien
aaactcctcttggttgacgaatact

SEQ ID NO: 3344620 - DNA, 25 bp, Homo sapien
actcctcttggttgacgaatactct

SEQ ID NO: 3344621 - DNA, 25 bp, Homo sapien
ttcccctaccaaatgtcctgacctg

SEQ ID NO: 3344622 - DNA, 25 bp, Homo sapien
ctacatgtaatacaggcacattact

SEQ ID NO: 3344623 - DNA, 25 bp, Homo sapien
taaaaggctgagaacccaaggcctg

SEQ ID NO: 3344624 - DNA, 25 bp, Homo sapien
aatacaggcacattactaaaagctc

SEQ ID NO: 3344625 - DNA, 25 bp, Homo sapien
gcttaactcttacaggctgagctgg

SEQ ID NO: 3344626 - DNA, 25 bp, Homo sapien
gacacagtaattacaggtatttcag

SEQ ID NO: 3344627 - DNA, 25 bp, Homo sapien
cagaaatgcccagtatgaagtcttc

SEQ ID NO: 3344628 - DNA, 25 bp, Homo sapien
gttaaaatggccttacacagctgct

SEQ ID NO: 3344629 - DNA, 25 bp, Homo sapien
taccactggccttttacgctgtcaa

SEQ ID NO: 3344630 - DNA, 25 bp, Homo sapien
gcagaaggctcaaccaaattgacag

SEQ ID NO: 3344631 - DNA, 25 bp, Homo sapien
aacttaattcttggacgggctgaca

SEQ ID NO: 3344632 - DNA, 25 bp, Homo sapien
aaaaaatctgaaggagtgctggtgc

SEQ ID NO: 3344633 - DNA, 25 bp, Homo sapien
catggaaaccaaccaagtaatgcat

SEQ ID NO: 3344634 - DNA, 25 bp, Homo sapien
tcctcaaattcaccagtaccttctt

SEQ ID NO: 3344635 - DNA, 25 bp, Homo sapien
tcatacttccattcctcatttgcat

SEQ ID NO: 3344636 - DNA, 25 bp, Homo sapien
ttcaataaccaaaaactgccatgga

SEQ ID NO: 3344637 - DNA, 25 bp, Homo sapien
ttgtcccattatcagtatttctact

SEQ ID NO: 3344638 - DNA, 25 bp, Homo sapien
gtcccattatcagtatttctacttg

SEQ ID NO: 3344639 - DNA, 25 bp, Homo sapien
agattgtcccattatcagtatttct

SEQ ID NO: 3344640 - DNA, 25 bp, Homo sapien
cccattatcagtatttctacttgta

SEQ ID NO: 3344641 - DNA, 25 bp, Homo sapien
actgtgaggaaagtttcattacaat

SEQ ID NO: 3344642 - DNA, 25 bp, Homo sapien
ttagtaatacaaagactgtgaggaa

SEQ ID NO: 3344643 - DNA, 25 bp, Homo sapien
gtgaggaaagtttcattacaattaa

SEQ ID NO: 3344644 - DNA, 25 bp, Homo sapien
ttttagtaatacaaagactgtgagg

SEQ ID NO: 3344645 - DNA, 25 bp, Homo sapien
caggtccacaatactactggagttc

SEQ ID NO: 3344646 - DNA, 25 bp, Homo sapien
tactggagttcgtgacactgttagt

SEQ ID NO: 3344647 - DNA, 25 bp, Homo sapien
gagagttggtgaacgggcaggtcca

SEQ ID NO: 3344648 - DNA, 25 bp, Homo sapien
tgacactgttagtatgtgtatgttc

SEQ ID NO: 3344649 - DNA, 25 bp, Homo sapien
gatcaaaatcgtcactctcctggtc

SEQ ID NO: 3344650 - DNA, 25 bp, Homo sapien
gactgatcaaaatcgtcactctcct

SEQ ID NO: 3344651 - DNA, 25 bp, Homo sapien
tatcatcagactgatcaaaatcgtc

SEQ ID NO: 3344652 - DNA, 25 bp, Homo sapien
tcagactgatcaaaatcgtcactct

SEQ ID NO: 3344653 - DNA, 25 bp, Homo sapien
ttggtttcctgaggagtcctcatct

SEQ ID NO: 3344654 - DNA, 25 bp, Homo sapien
tggtttcctgaggagtcctcatcta

SEQ ID NO: 3344655 - DNA, 25 bp, Homo sapien
ggtttcctgaggagtcctcatctac

SEQ ID NO: 3344656 - DNA, 25 bp, Homo sapien
tcatctacctggcttgaggaagggt

SEQ ID NO: 3344657 - DNA, 25 bp, Homo sapien
aggaagggttacctctcagagagcc

SEQ ID NO: 3344658 - DNA, 25 bp, Homo sapien
ccttgctgggaatcattttggcctc

SEQ ID NO: 3344659 - DNA, 25 bp, Homo sapien
agttcgtcgtcttttgctgcccaca

SEQ ID NO: 3344660 - DNA, 25 bp, Homo sapien
ttcttggaccttggctagactatca

SEQ ID NO: 3344661 - DNA, 25 bp, Homo sapien
cttgctacttcttggaccttggcta

SEQ ID NO: 3344662 - DNA, 25 bp, Homo sapien
caaaagccagcttgctacttcttgg

SEQ ID NO: 3344663 - DNA, 25 bp, Homo sapien
cagcttgctacttcttggaccttgg

SEQ ID NO: 3344664 - DNA, 25 bp, Homo sapien
taactccacttctggcaatctatcc

SEQ ID NO: 3344665 - DNA, 25 bp, Homo sapien
ccacttctggcaatctatcctaagg

SEQ ID NO: 3344666 - DNA, 25 bp, Homo sapien
acccagtaactccacttctggcaat

SEQ ID NO: 3344667 - DNA, 25 bp, Homo sapien
cagtaactccacttctggcaatcta

SEQ ID NO: 3344668 - DNA, 25 bp, Homo sapien
aatttatacagaggatgctcactgc

SEQ ID NO: 3344669 - DNA, 25 bp, Homo sapien
aaaaatttatacagaggatgctcac

SEQ ID NO: 3344670 - DNA, 25 bp, Homo sapien
tgctcactgcagtttatccacgaaa

SEQ ID NO: 3344671 - DNA, 25 bp, Homo sapien
aaaaaaatttatacagaggatgctc

SEQ ID NO: 3344672 - DNA, 25 bp, Homo sapien
atcagagataaaccacataaatgat

SEQ ID NO: 3344673 - DNA, 25 bp, Homo sapien
ggtgcctatcagtggtaccaccata

SEQ ID NO: 3344674 - DNA, 25 bp, Homo sapien
ccatacctctaatgtccatcagaga

SEQ ID NO: 3344675 - DNA, 25 bp, Homo sapien
agaatgacaaactgcagctaacaat

SEQ ID NO: 3344676 - DNA, 25 bp, Homo sapien
ccagcagatgaaaacgggtaggtcg

SEQ ID NO: 3344677 - DNA, 25 bp, Homo sapien
ggtaggtcgtttgcccactcggata

SEQ ID NO: 3344678 - DNA, 25 bp, Homo sapien
aaataaccggccgcccagcagatga

SEQ ID NO: 3344679 - DNA, 25 bp, Homo sapien
acagacaagtgtagtgggccctcag

SEQ ID NO: 3344680 - DNA, 25 bp, Homo sapien
ttcttatctaaaaccattagctcac

SEQ ID NO: 3344681 - DNA, 25 bp, Homo sapien
gtttatctttgaccacaatactgtg

SEQ ID NO: 3344682 - DNA, 25 bp, Homo sapien
ccacaatactgtgtatttccactgt

SEQ ID NO: 3344683 - DNA, 25 bp, Homo sapien
tggtttatctttgaccacaatactg

SEQ ID NO: 3344684 - DNA, 25 bp, Homo sapien
tctttgaccacaatactgtgtattt

SEQ ID NO: 3344685 - DNA, 25 bp, Homo sapien
cttgttttctcttgatacagcaaga

SEQ ID NO: 3344686 - DNA, 25 bp, Homo sapien
tgttttctcttgatacagcaagata

SEQ ID NO: 3344687 - DNA, 25 bp, Homo sapien
tctcttgatacagcaagatactaag

SEQ ID NO: 3344688 - DNA, 25 bp, Homo sapien
agatactaagtatgctggaagccat

SEQ ID NO: 3344689 - DNA, 25 bp, Homo sapien
aaccatctggtcaagctgtgagtac

SEQ ID NO: 3344690 - DNA, 25 bp, Homo sapien
gataaaaactacaccctggatcaga

SEQ ID NO: 3344691 - DNA, 25 bp, Homo sapien
ggctttaaactgctaggcattccac

SEQ ID NO: 3344692 - DNA, 25 bp, Homo sapien
gagcttaagcaatacatgatgacct

SEQ ID NO: 3344693 - DNA, 25 bp, Homo sapien
ttttcagggcccgattttgcagagc

SEQ ID NO: 3344694 - DNA, 25 bp, Homo sapien
aaagtaactgcctgtactatggtta

SEQ ID NO: 3344695 - DNA, 25 bp, Homo sapien
tatttaaagaagtccacggtggctc

SEQ ID NO: 3344696 - DNA, 25 bp, Homo sapien
tactggtttcgttactacagagatt

SEQ ID NO: 3344697 - DNA, 25 bp, Homo sapien
gaaagcagtacatactgtccctggt

SEQ ID NO: 3344698 - DNA, 25 bp, Homo sapien
ttagcttgcagcacaacacctttga

SEQ ID NO: 3344699 - DNA, 25 bp, Homo sapien
ggatacatttcttcactaagcagaa

SEQ ID NO: 3344700 - DNA, 25 bp, Homo sapien
gtccctggttagagaggatacattt

SEQ ID NO: 3344701 - DNA, 25 bp, Homo sapien
gaaattcagacacatccttgaccga

SEQ ID NO: 3344702 - DNA, 25 bp, Homo sapien
tatcctcatcagtatcccttagaag

SEQ ID NO: 3344703 - DNA, 25 bp, Homo sapien
ggtgccttacccatgaaaccactaa

SEQ ID NO: 3344704 - DNA, 25 bp, Homo sapien
ggtgtctctatcatggcaagaacag

SEQ ID NO: 3344705 - DNA, 25 bp, Homo sapien
tctacgaatgtgaggaatattccac

SEQ ID NO: 3344706 - DNA, 25 bp, Homo sapien
ccataaagttactgaggctactcac

SEQ ID NO: 3344707 - DNA, 25 bp, Homo sapien
tccattagagtgctccacagctcag

SEQ ID NO: 3344708 - DNA, 25 bp, Homo sapien
taagtggccggcagtctcacataaa

SEQ ID NO: 3344709 - DNA, 25 bp, Homo sapien
ggacattcgatggataatctctgca

SEQ ID NO: 3344710 - DNA, 25 bp, Homo sapien
tgcctgggacattcgatggataatc

SEQ ID NO: 3344711 - DNA, 25 bp, Homo sapien
ttcgatggataatctctgcaactgg

SEQ ID NO: 3344712 - DNA, 25 bp, Homo sapien
ctttggttgcctgggacattcgatg

SEQ ID NO: 3344713 - DNA, 25 bp, Homo sapien
tttccaggacaagggagggtcgcat

SEQ ID NO: 3344714 - DNA, 25 bp, Homo sapien
gagaacaaatcggagcagcaggtcg

SEQ ID NO: 3344715 - DNA, 25 bp, Homo sapien
gctatataggtaggtactgaccaca

SEQ ID NO: 3344716 - DNA, 25 bp, Homo sapien
taaagctaaaaagatccagcactgc

SEQ ID NO: 3344717 - DNA, 25 bp, Homo sapien
gcatgccagccacgttagcgaaaaa

SEQ ID NO: 3344718 - DNA, 25 bp, Homo sapien
tgtactcctagcaaatgggtaagct

SEQ ID NO: 3344719 - DNA, 25 bp, Homo sapien
gcgaaaaatgtcctagtgctgctat

SEQ ID NO: 3344720 - DNA, 25 bp, Homo sapien
gaactgggtattgccaagaactctg

SEQ ID NO: 3344721 - DNA, 25 bp, Homo sapien
caatatagcatcagacataggagct

SEQ ID NO: 3344722 - DNA, 25 bp, Homo sapien
taaacactgactttcaacttggcaa

SEQ ID NO: 3344723 - DNA, 25 bp, Homo sapien
cataggagctcttctaacttcagag

SEQ ID NO: 3344724 - DNA, 25 bp, Homo sapien
taacagggtgcaatagctctgaaag

SEQ ID NO: 3344725 - DNA, 25 bp, Homo sapien
tctaggctctaggtcagacatgtct

SEQ ID NO: 3344726 - DNA, 25 bp, Homo sapien
tcatgctggattgttaccacagtcc

SEQ ID NO: 3344727 - DNA, 25 bp, Homo sapien
tctatgggccacaggaaagtttcac

SEQ ID NO: 3344728 - DNA, 25 bp, Homo sapien
tattaagaagccaacacatctaggc

SEQ ID NO: 3344729 - DNA, 25 bp, Homo sapien
ttcctcctgtagatggtacttgcca

SEQ ID NO: 3344730 - DNA, 25 bp, Homo sapien
ttttgcttcaagtcacaggtacttg

SEQ ID NO: 3344731 - DNA, 25 bp, Homo sapien
tggtggctggctggtgaaaatttcc

SEQ ID NO: 3344732 - DNA, 25 bp, Homo sapien
tagaaatgcttgcaatggtggctgg

SEQ ID NO: 3344733 - DNA, 25 bp, Homo sapien
tcttgtctggtatattacttgtatc

SEQ ID NO: 3344734 - DNA, 25 bp, Homo sapien
tgtcaccagaaacttcgttgtaagt

SEQ ID NO: 3344735 - DNA, 25 bp, Homo sapien
tacttgtatcattataaagaatgtt

SEQ ID NO: 3344736 - DNA, 25 bp, Homo sapien
tgtgaaaactaggaaacatgtcacc

SEQ ID NO: 3344737 - DNA, 25 bp, Homo sapien
tgtattattggtcagcagagcagca

SEQ ID NO: 3344738 - DNA, 25 bp, Homo sapien
gaataatccaagtccagttgagcct

SEQ ID NO: 3344739 - DNA, 25 bp, Homo sapien
tataaacaattggaggtagctctca

SEQ ID NO: 3344740 - DNA, 25 bp, Homo sapien
gacatgacctgagaagctgtgctac

SEQ ID NO: 3344741 - DNA, 25 bp, Homo sapien
tttccattgctaaatttccatgaat

SEQ ID NO: 3344742 - DNA, 25 bp, Homo sapien
aatttaacaacatcattaataagtt

SEQ ID NO: 3344743 - DNA, 25 bp, Homo sapien
ttttccattgctaaatttccatgaa

SEQ ID NO: 3344744 - DNA, 25 bp, Homo sapien
gaaaatttaacaacatcattaataa

SEQ ID NO: 3344745 - DNA, 25 bp, Homo sapien
ggattggaataggtttaaggagaca

SEQ ID NO: 3344746 - DNA, 25 bp, Homo sapien
gaatctctggacacaacataaagaa

SEQ ID NO: 3344747 - DNA, 25 bp, Homo sapien
caagagagaaaaggattggaatagg

SEQ ID NO: 3344748 - DNA, 25 bp, Homo sapien
gacacaacataaagaacaagagaga

SEQ ID NO: 3344749 - DNA, 25 bp, Homo sapien
aaaatcctgctggtggttgagattc

SEQ ID NO: 3344750 - DNA, 25 bp, Homo sapien
ttagatagcctttttaaaatcctgc

SEQ ID NO: 3344751 - DNA, 25 bp, Homo sapien
ttttaaaatcctgctggtggttgag

SEQ ID NO: 3344752 - DNA, 25 bp, Homo sapien
ttaaaatcctgctggtggttgagat

SEQ ID NO: 3344753 - DNA, 25 bp, Homo sapien
cctcacggagattaagtcatctgct

SEQ ID NO: 3344754 - DNA, 25 bp, Homo sapien
cctttgcatcaagtcgagtccaatt

SEQ ID NO: 3344755 - DNA, 25 bp, Homo sapien
taaactaccagtatgactcctcaaa

SEQ ID NO: 3344756 - DNA, 25 bp, Homo sapien
tttaatcacctcatgcctcacggag

SEQ ID NO: 3344757 - DNA, 25 bp, Homo sapien
ccttcagggttgagagagcaatcca

SEQ ID NO: 3344758 - DNA, 25 bp, Homo sapien
gatgatagtgaatgtccttccaagc

SEQ ID NO: 3344759 - DNA, 25 bp, Homo sapien
gaagacagttacacataagctgagc

SEQ ID NO: 3344760 - DNA, 25 bp, Homo sapien
tggagacgaacctcctaagagatgc

SEQ ID NO: 3344761 - DNA, 25 bp, Homo sapien
gacacccagtaatgcatccatgatg

SEQ ID NO: 3344762 - DNA, 25 bp, Homo sapien
aaaggatacacagtcatgcgtcaca

SEQ ID NO: 3344763 - DNA, 25 bp, Homo sapien
tgtactgaatactgcctggtaactg

SEQ ID NO: 3344764 - DNA, 25 bp, Homo sapien
taactgtaacatggtgcgtctgaga

SEQ ID NO: 3344765 - DNA, 25 bp, Homo sapien
aacccaagcctacacaggattagga

SEQ ID NO: 3344766 - DNA, 25 bp, Homo sapien
aaatatacacaataacccaagccta

SEQ ID NO: 3344767 - DNA, 25 bp, Homo sapien
cacaataacccaagcctacacagga

SEQ ID NO: 3344768 - DNA, 25 bp, Homo sapien
ccaagcctacacaggattaggatca

SEQ ID NO: 3344769 - DNA, 25 bp, Homo sapien
tgtggagtgcatgaccatggacaat

SEQ ID NO: 3344770 - DNA, 25 bp, Homo sapien
tatgggtaatcaaatttcaggtgga

SEQ ID NO: 3344771 - DNA, 25 bp, Homo sapien
ccttttgctcataacatgcagtatg

SEQ ID NO: 3344772 - DNA, 25 bp, Homo sapien
ttctccaaaaagttggcgacttctc

SEQ ID NO: 3344773 - DNA, 25 bp, Homo sapien
ttttgttcacattatatgaaactaa

SEQ ID NO: 3344774 - DNA, 25 bp, Homo sapien
caatgatttgaatgagttcctatgt

SEQ ID NO: 3344775 - DNA, 25 bp, Homo sapien
aagttaaccagaaaatcaatgattt

SEQ ID NO: 3344776 - DNA, 25 bp, Homo sapien
tatgtgtgtgtaagacattctggaa

SEQ ID NO: 3344777 - DNA, 25 bp, Homo sapien
aactaatgagcacttacttgaaatg

SEQ ID NO: 3344778 - DNA, 25 bp, Homo sapien
tctacactgtccactaaggtagtca

SEQ ID NO: 3344779 - DNA, 25 bp, Homo sapien
taaggtagtcactaactaatgagca

SEQ ID NO: 3344780 - DNA, 25 bp, Homo sapien
cactgtccactaaggtagtcactaa

SEQ ID NO: 3344781 - DNA, 25 bp, Homo sapien
cctagtgagaacctgaggaaagacc

SEQ ID NO: 3344782 - DNA, 25 bp, Homo sapien
catgcaaggcatctaggttaggtgc

SEQ ID NO: 3344783 - DNA, 25 bp, Homo sapien
tgaactcttcccacaaccggtgagc

SEQ ID NO: 3344784 - DNA, 25 bp, Homo sapien
tcacaagtcagcaagataagcggta

SEQ ID NO: 3344785 - DNA, 25 bp, Homo sapien
agagagagagctccaaggtttcccc

SEQ ID NO: 3344786 - DNA, 25 bp, Homo sapien
gaagcctatccatgtctgtgactca

SEQ ID NO: 3344787 - DNA, 25 bp, Homo sapien
gactttatgaatacacactacggca

SEQ ID NO: 3344788 - DNA, 25 bp, Homo sapien
taaagagcccttgacttggtgagta

SEQ ID NO: 3344789 - DNA, 25 bp, Homo sapien
atgtaaaggttaagactgctagggt

SEQ ID NO: 3344790 - DNA, 25 bp, Homo sapien
agtatgtaaaggttaagactgctag

SEQ ID NO: 3344791 - DNA, 25 bp, Homo sapien
tatgtaaaggttaagactgctaggg

SEQ ID NO: 3344792 - DNA, 25 bp, Homo sapien
aaagtatgtaaaggttaagactgct

SEQ ID NO: 3344793 - DNA, 25 bp, Homo sapien
gcaaagatcaccaatgtctcagcat

SEQ ID NO: 3344794 - DNA, 25 bp, Homo sapien
caccctcacagaaataacaataact

SEQ ID NO: 3344795 - DNA, 25 bp, Homo sapien
tattccaaatagtaacacgttcagg

SEQ ID NO: 3344796 - DNA, 25 bp, Homo sapien
tcaattcctggcatagtaggtgttc

SEQ ID NO: 3344797 - DNA, 25 bp, Homo sapien
atgctcttataatttgactcatatt

SEQ ID NO: 3344798 - DNA, 25 bp, Homo sapien
tagatagcagtatcaaactttaatg

SEQ ID NO: 3344799 - DNA, 25 bp, Homo sapien
tattcaaaccaaccatagacacttc

SEQ ID NO: 3344800 - DNA, 25 bp, Homo sapien
gcagtatcaaactttaatgctctta

SEQ ID NO: 3344801 - DNA, 25 bp, Homo sapien
caggagtccaaaaacttcggcctat

SEQ ID NO: 3344802 - DNA, 25 bp, Homo sapien
tagataagaaatgcaggtagtccct

SEQ ID NO: 3344803 - DNA, 25 bp, Homo sapien
cctatgggccaattggagcacggca

SEQ ID NO: 3344804 - DNA, 25 bp, Homo sapien
cagaaggtttcaaaagtatgcccac

SEQ ID NO: 3344805 - DNA, 25 bp, Homo sapien
taaaacatctattttaggtagtgtc

SEQ ID NO: 3344806 - DNA, 25 bp, Homo sapien
gtatattacctgctaaactattttg

SEQ ID NO: 3344807 - DNA, 25 bp, Homo sapien
aaatacccacttttcagctcttcac

SEQ ID NO: 3344808 - DNA, 25 bp, Homo sapien
ttccatcagtactctgggaaaccta

SEQ ID NO: 3344809 - DNA, 25 bp, Homo sapien
tgaagcggcagctgcggaaggctcc

SEQ ID NO: 3344810 - DNA, 25 bp, Homo sapien
agccgcggcgccgagaaagtgggtt

SEQ ID NO: 3344811 - DNA, 25 bp, Homo sapien
cttcctccttcggactgaagcggca

SEQ ID NO: 3344812 - DNA, 25 bp, Homo sapien
gcagctgcggaaggctccggcgcgg

SEQ ID NO: 3344813 - DNA, 25 bp, Homo sapien
gcggtgctcgtgtcgctaaaccagg

SEQ ID NO: 3344814 - DNA, 25 bp, Homo sapien
gaagaagcggtgctcgtgtcgctaa

SEQ ID NO: 3344815 - DNA, 25 bp, Homo sapien
gaagcggtgctcgtgtcgctaaacc

SEQ ID NO: 3344816 - DNA, 25 bp, Homo sapien
gctcgtgtcgctaaaccaggcggca

SEQ ID NO: 3344817 - DNA, 25 bp, Homo sapien
ctgccaggggaggggaggcggcggc

SEQ ID NO: 3344818 - DNA, 25 bp, Homo sapien
gtcttttcaggctgcggcttctgcc

SEQ ID NO: 3344819 - DNA, 25 bp, Homo sapien
tcctgggtcttttcaggctgcggct

SEQ ID NO: 3344820 - DNA, 25 bp, Homo sapien
tcttcctgggtcttttcaggctgcg

SEQ ID NO: 3344821 - DNA, 25 bp, Homo sapien
tgggtcttttcaggctgcggcttct

SEQ ID NO: 3344822 - DNA, 25 bp, Homo sapien
acggcggcgtcggtcctgttctctc

SEQ ID NO: 3344823 - DNA, 25 bp, Homo sapien
ggttcatacactccggggcaagatg

SEQ ID NO: 3344824 - DNA, 25 bp, Homo sapien
tcccggagtccagccaaggagccgg

SEQ ID NO: 3344825 - DNA, 25 bp, Homo sapien
gggcaagatgctacggccccgggcg

SEQ ID NO: 3344826 - DNA, 25 bp, Homo sapien
gagagcttggtctgtagcggtttcc

SEQ ID NO: 3344827 - DNA, 25 bp, Homo sapien
gcctggagagcttggtctgtagcgg

SEQ ID NO: 3344828 - DNA, 25 bp, Homo sapien
gagcttggtctgtagcggtttcctt

SEQ ID NO: 3344829 - DNA, 25 bp, Homo sapien
gcttggtctgtagcggtttccttcg

SEQ ID NO: 3344830 - DNA, 25 bp, Homo sapien
ttagtaaaagcagtacagaatagac

SEQ ID NO: 3344831 - DNA, 25 bp, Homo sapien
gaataaatagattggtaagccttat

SEQ ID NO: 3344832 - DNA, 25 bp, Homo sapien
aataaatagattggtaagccttatc

SEQ ID NO: 3344833 - DNA, 25 bp, Homo sapien
agaataaatagattggtaagcctta

SEQ ID NO: 3344834 - DNA, 25 bp, Homo sapien
ttcataattttgcagatcagcaaga

SEQ ID NO: 3344835 - DNA, 25 bp, Homo sapien
aattttgcagatcagcaagactcat

SEQ ID NO: 3344836 - DNA, 25 bp, Homo sapien
taattttgcagatcagcaagactca

SEQ ID NO: 3344837 - DNA, 25 bp, Homo sapien
cataattttgcagatcagcaagact

SEQ ID NO: 3344838 - DNA, 25 bp, Homo sapien
tccttcagtgctggtgactagtgtc

SEQ ID NO: 3344839 - DNA, 25 bp, Homo sapien
tggttccttcagtgctggtgactag

SEQ ID NO: 3344840 - DNA, 25 bp, Homo sapien
caattttggttccttcagtgctggt

SEQ ID NO: 3344841 - DNA, 25 bp, Homo sapien
tttggttccttcagtgctggtgact

SEQ ID NO: 3344842 - DNA, 25 bp, Homo sapien
tttcagacatggacttgcaaactcc

SEQ ID NO: 3344843 - DNA, 25 bp, Homo sapien
cagacatggacttgcaaactccagg

SEQ ID NO: 3344844 - DNA, 25 bp, Homo sapien
acatggacttgcaaactccaggtcc

SEQ ID NO: 3344845 - DNA, 25 bp, Homo sapien
tcagacatggacttgcaaactccag

SEQ ID NO: 3344846 - DNA, 25 bp, Homo sapien
ttccagcaatttaacaattgactct

SEQ ID NO: 3344847 - DNA, 25 bp, Homo sapien
tttaacaattgactctaatagaatc

SEQ ID NO: 3344848 - DNA, 25 bp, Homo sapien
gactctaatagaatcttatgaataa

SEQ ID NO: 3344849 - DNA, 25 bp, Homo sapien
ctttgttggggacatttccagcaat

SEQ ID NO: 3344850 - DNA, 25 bp, Homo sapien
ggctgcgatctaccaagaccactgg

SEQ ID NO: 3344851 - DNA, 25 bp, Homo sapien
tatgtgtccctaaaagccaggctgc

SEQ ID NO: 3344852 - DNA, 25 bp, Homo sapien
gatctgtactagcaactagctggaa

SEQ ID NO: 3344853 - DNA, 25 bp, Homo sapien
ttatcaccttcactccaaggcagtg

SEQ ID NO: 3344854 - DNA, 25 bp, Homo sapien
ccataatggcccttcctgtcagtgt

SEQ ID NO: 3344855 - DNA, 25 bp, Homo sapien
tgcggattgttctcggaaccgcagg

SEQ ID NO: 3344856 - DNA, 25 bp, Homo sapien
tgacaactgtaaccattccagatgg

SEQ ID NO: 3344857 - DNA, 25 bp, Homo sapien
ggtgagaacatcagtgaccataatg

SEQ ID NO: 3344858 - DNA, 25 bp, Homo sapien
tactctcatttgaggtacaaccctc

SEQ ID NO: 3344859 - DNA, 25 bp, Homo sapien
catttgaggtacaaccctcaaagaa

SEQ ID NO: 3344860 - DNA, 25 bp, Homo sapien
ctaatcaactgaagaacgagaggag

SEQ ID NO: 3344861 - DNA, 25 bp, Homo sapien
gaacgagaggagcatactctcattt

SEQ ID NO: 3344862 - DNA, 25 bp, Homo sapien
ttgcagctgcccctatgtttacagc

SEQ ID NO: 3344863 - DNA, 25 bp, Homo sapien
tattcgctttcccagagtgtcagtg

SEQ ID NO: 3344864 - DNA, 25 bp, Homo sapien
ccctgaagggtctgatcgacactgt

SEQ ID NO: 3344865 - DNA, 25 bp, Homo sapien
gagagaggctgtcaattgctccagc

SEQ ID NO: 3344866 - DNA, 25 bp, Homo sapien
agtggatcagagttttcggagagtt

SEQ ID NO: 3344867 - DNA, 25 bp, Homo sapien
cagtgagttgtaagtggatcagagt

SEQ ID NO: 3344868 - DNA, 25 bp, Homo sapien
ttgtaagtggatcagagttttcgga

SEQ ID NO: 3344869 - DNA, 25 bp, Homo sapien
ttggccagtgagttgtaagtggatc

SEQ ID NO: 3344870 - DNA, 25 bp, Homo sapien
tcctgggcagccgacatggcagtgt

SEQ ID NO: 3344871 - DNA, 25 bp, Homo sapien
gaggattcatcctgtcagctttcat

SEQ ID NO: 3344872 - DNA, 25 bp, Homo sapien
gctttcatcttcatcctggcagcca

SEQ ID NO: 3344873 - DNA, 25 bp, Homo sapien
gcagtgtgtggtgaggattcatcct

SEQ ID NO: 3344874 - DNA, 25 bp, Homo sapien
caggtagttcccttgccagaaacat

SEQ ID NO: 3344875 - DNA, 25 bp, Homo sapien
ggaaggaccatttctgtgcactgtc

SEQ ID NO: 3344876 - DNA, 25 bp, Homo sapien
cttggaaggaccatttctgtgcact

SEQ ID NO: 3344877 - DNA, 25 bp, Homo sapien
tggaaggaccatttctgtgcactgt

SEQ ID NO: 3344878 - DNA, 25 bp, Homo sapien
aaggaccatttctgtgcactgtctc

SEQ ID NO: 3344879 - DNA, 25 bp, Homo sapien
tctggaactgggctttctaacctaa

SEQ ID NO: 3344880 - DNA, 25 bp, Homo sapien
catgtcactggctctggataaggcc

SEQ ID NO: 3344881 - DNA, 25 bp, Homo sapien
cggttgacccagttagctcctagca

SEQ ID NO: 3344882 - DNA, 25 bp, Homo sapien
tcttatgggagtcagcatgtgtgcc

SEQ ID NO: 3344883 - DNA, 25 bp, Homo sapien
cattttaatgatcagttaggctcca

SEQ ID NO: 3344884 - DNA, 25 bp, Homo sapien
gcttgttagttcaattatgatcgtt

SEQ ID NO: 3344885 - DNA, 25 bp, Homo sapien
ttggaaagagctgcttcgagcattt

SEQ ID NO: 3344886 - DNA, 25 bp, Homo sapien
tagttcaattatgatcgttctctgc

SEQ ID NO: 3344887 - DNA, 25 bp, Homo sapien
ttattatggagcgtgcagtagcgcc

SEQ ID NO: 3344888 - DNA, 25 bp, Homo sapien
tgcaattaaaccaggaaacttggga

SEQ ID NO: 3344889 - DNA, 25 bp, Homo sapien
gactgattaggtacttaaggaaaga

SEQ ID NO: 3344890 - DNA, 25 bp, Homo sapien
gaaagatgatatgtaactcctagct

SEQ ID NO: 3344891 - DNA, 25 bp, Homo sapien
tattctcagtatgcaaagtaggaga

SEQ ID NO: 3344892 - DNA, 25 bp, Homo sapien
gaaagatgcataattcacctctact

SEQ ID NO: 3344893 - DNA, 25 bp, Homo sapien
tatggatcaaaagagggcaattaag

SEQ ID NO: 3344894 - DNA, 25 bp, Homo sapien
caatctatcactgccaaatgagcaa

SEQ ID NO: 3344895 - DNA, 25 bp, Homo sapien
gagttttcacatgttcctggcatta

SEQ ID NO: 3344896 - DNA, 25 bp, Homo sapien
taatttgaggtgtttcaccgacatc

SEQ ID NO: 3344897 - DNA, 25 bp, Homo sapien
tagtcctttacatgcagaccaaaga

SEQ ID NO: 3344898 - DNA, 25 bp, Homo sapien
gctgggaccacttctaatatgaggc

SEQ ID NO: 3344899 - DNA, 25 bp, Homo sapien
tactaaaggccaatgataaggtgat

SEQ ID NO: 3344900 - DNA, 25 bp, Homo sapien
tctgtacctgaagtccaattgtaaa

SEQ ID NO: 3344901 - DNA, 25 bp, Homo sapien
gaactgaggagtaccattacccaag

SEQ ID NO: 3344902 - DNA, 25 bp, Homo sapien
gcccatccacctttgtcttaaacag

SEQ ID NO: 3344903 - DNA, 25 bp, Homo sapien
caaggtccaggtacaaataattcca

SEQ ID NO: 3344904 - DNA, 25 bp, Homo sapien
taattgtatatactgctatctcagg

SEQ ID NO: 3344905 - DNA, 25 bp, Homo sapien
tatttagaaaagatagtagggcaaa

SEQ ID NO: 3344906 - DNA, 25 bp, Homo sapien
aaattagccagtcctagtagtgcac

SEQ ID NO: 3344907 - DNA, 25 bp, Homo sapien
attggtactaattctgacagaagct

SEQ ID NO: 3344908 - DNA, 25 bp, Homo sapien
catgttctcccacaaggaggatttc

SEQ ID NO: 3344909 - DNA, 25 bp, Homo sapien
cactccaccagattcagaattggta

SEQ ID NO: 3344910 - DNA, 25 bp, Homo sapien
tgtgaattaatagtttaaaccacca

SEQ ID NO: 3344911 - DNA, 25 bp, Homo sapien
cagtcccaggatagcgtgatagcag

SEQ ID NO: 3344912 - DNA, 25 bp, Homo sapien
tgatcagaagtgagcacatcacccg

SEQ ID NO: 3344913 - DNA, 25 bp, Homo sapien
aattatccacgtagttcagaaggca

SEQ ID NO: 3344914 - DNA, 25 bp, Homo sapien
tggctgagaggaggcaacacatgtt

SEQ ID NO: 3344915 - DNA, 25 bp, Homo sapien
gatcaagcatgacacgctccctgtg

SEQ ID NO: 3344916 - DNA, 25 bp, Homo sapien
aaatgttagtcagttgtcccaagac

SEQ ID NO: 3344917 - DNA, 25 bp, Homo sapien
tacatggttgagtctttcatcagga

SEQ ID NO: 3344918 - DNA, 25 bp, Homo sapien
cagtatacctctccattcgtttaag

SEQ ID NO: 3344919 - DNA, 25 bp, Homo sapien
aaagatttaactgagcagacaggcc

SEQ ID NO: 3344920 - DNA, 25 bp, Homo sapien
cactgtaagtcaagaaggatctata

SEQ ID NO: 3344921 - DNA, 25 bp, Homo sapien
tcctgtattagcctcatggtggctg

SEQ ID NO: 3344922 - DNA, 25 bp, Homo sapien
tacaatgtgtctctctggacctaac

SEQ ID NO: 3344923 - DNA, 25 bp, Homo sapien
caaggtaggtaaacattcaaagtcg

SEQ ID NO: 3344924 - DNA, 25 bp, Homo sapien
ttccttcaaggtaggtaaacattca

SEQ ID NO: 3344925 - DNA, 25 bp, Homo sapien
tctcttccttcaaggtaggtaaaca

SEQ ID NO: 3344926 - DNA, 25 bp, Homo sapien
cttcaaggtaggtaaacattcaaag

SEQ ID NO: 3344927 - DNA, 25 bp, Homo sapien
catagttctctgatctgcgtggtta

SEQ ID NO: 3344928 - DNA, 25 bp, Homo sapien
gatttccatcagattgcacggtagg

SEQ ID NO: 3344929 - DNA, 25 bp, Homo sapien
cagtggaataagatggcttcgcctg

SEQ ID NO: 3344930 - DNA, 25 bp, Homo sapien
cgcctgaggttccaacgtgtctgca

SEQ ID NO: 3344931 - DNA, 25 bp, Homo sapien
ccagatctaatgtgggattgggttc

SEQ ID NO: 3344932 - DNA, 25 bp, Homo sapien
tctaatgtgggattgggttcttctg

SEQ ID NO: 3344933 - DNA, 25 bp, Homo sapien
taatgtgggattgggttcttctgtc

SEQ ID NO: 3344934 - DNA, 25 bp, Homo sapien
gatctaatgtgggattgggttcttc

SEQ ID NO: 3344935 - DNA, 25 bp, Homo sapien
ttcaatttccataacagagggtgta

SEQ ID NO: 3344936 - DNA, 25 bp, Homo sapien
caatttccataacagagggtgtatc

SEQ ID NO: 3344937 - DNA, 25 bp, Homo sapien
agggtgtatcttcctcaaaaatagg

SEQ ID NO: 3344938 - DNA, 25 bp, Homo sapien
aatttccataacagagggtgtatct

SEQ ID NO: 3344939 - DNA, 25 bp, Homo sapien
agagagcaaaagacttgttagaaag

SEQ ID NO: 3344940 - DNA, 25 bp, Homo sapien
aaagatgcctaatttcatttggaaa

SEQ ID NO: 3344941 - DNA, 25 bp, Homo sapien
gagcaaaagacttgttagaaagaaa

SEQ ID NO: 3344942 - DNA, 25 bp, Homo sapien
gagactagaatgctgatcctgagga

SEQ ID NO: 3344943 - DNA, 25 bp, Homo sapien
ttcacgttttcacttcccagttcat

SEQ ID NO: 3344944 - DNA, 25 bp, Homo sapien
tttcacgttttcacttcccagttca

SEQ ID NO: 3344945 - DNA, 25 bp, Homo sapien
ttcccaggggacatagtgtgcaggt

SEQ ID NO: 3344946 - DNA, 25 bp, Homo sapien
gagctttccaagcaaaacgctggta

SEQ ID NO: 3344947 - DNA, 25 bp, Homo sapien
agaccaggctctacccaagtgcagt

SEQ ID NO: 3344948 - DNA, 25 bp, Homo sapien
tatgtctgcttctaacttcccaggg

SEQ ID NO: 3344949 - DNA, 25 bp, Homo sapien
cggattgatgttagtaatctttaga

SEQ ID NO: 3344950 - DNA, 25 bp, Homo sapien
tctataattggttttcggattgatg

SEQ ID NO: 3344951 - DNA, 25 bp, Homo sapien
ctctgactgagggaattttctataa

SEQ ID NO: 3344952 - DNA, 25 bp, Homo sapien
ctgaatactctcaaagtgggtctct

SEQ ID NO: 3344953 - DNA, 25 bp, Homo sapien
aagcactctgagatccttggctaga

SEQ ID NO: 3344954 - DNA, 25 bp, Homo sapien
gattttcatccggagcaaagttggt

SEQ ID NO: 3344955 - DNA, 25 bp, Homo sapien
tatgttgcaaggaataccacggata

SEQ ID NO: 3344956 - DNA, 25 bp, Homo sapien
cacggataaaagtaagaggaccaat

SEQ ID NO: 3344957 - DNA, 25 bp, Homo sapien
ttgatggtcactgcagcaaatgtgc

SEQ ID NO: 3344958 - DNA, 25 bp, Homo sapien
agaagagctgactagcagcaagacc

SEQ ID NO: 3344959 - DNA, 25 bp, Homo sapien
cagaagagctgactagcagcaagac

SEQ ID NO: 3344960 - DNA, 25 bp, Homo sapien
gaagagctgactagcagcaagaccc

SEQ ID NO: 3344961 - DNA, 25 bp, Homo sapien
gaacactaaactcaatttaaccaga

SEQ ID NO: 3344962 - DNA, 25 bp, Homo sapien
actcaatttaaccagacatcttttc

SEQ ID NO: 3344963 - DNA, 25 bp, Homo sapien
ttaaccagacatcttttcagctgga

SEQ ID NO: 3344964 - DNA, 25 bp, Homo sapien
aacccactctgaacactaaactcaa

SEQ ID NO: 3344965 - DNA, 25 bp, Homo sapien
cattagtaacaatcaatgcaaaaaa

SEQ ID NO: 3344966 - DNA, 25 bp, Homo sapien
gcttttgcgatcctccttcccagga

SEQ ID NO: 3344967 - DNA, 25 bp, Homo sapien
caggagtaggaagtggaggcggctt

SEQ ID NO: 3344968 - DNA, 25 bp, Homo sapien
cctccttcccaggagtaggaagtgg

SEQ ID NO: 3344969 - DNA, 25 bp, Homo sapien
cagcttttgcgatcctccttcccag

SEQ ID NO: 3344970 - DNA, 25 bp, Homo sapien
gaacgagcgcgatcaccagggcgaa

SEQ ID NO: 3344971 - DNA, 25 bp, Homo sapien
tcaccagggcgaagactagggctgc

SEQ ID NO: 3344972 - DNA, 25 bp, Homo sapien
ccgacgggaacgagcgcgatcacca

SEQ ID NO: 3344973 - DNA, 25 bp, Homo sapien
gcgcgatcaccagggcgaagactag

SEQ ID NO: 3344974 - DNA, 25 bp, Homo sapien
gtcagaccagcaaggattgcaaaag

SEQ ID NO: 3344975 - DNA, 25 bp, Homo sapien
tgatgtaattctgcaggagcctgtc

SEQ ID NO: 3344976 - DNA, 25 bp, Homo sapien
ggaagtgatgtaattctgcaggagc

SEQ ID NO: 3344977 - DNA, 25 bp, Homo sapien
ctgcttgtttgggtcggtgctgact

SEQ ID NO: 3344978 - DNA, 25 bp, Homo sapien
tgaatttgactttcccgattcacag

SEQ ID NO: 3344979 - DNA, 25 bp, Homo sapien
tcacagttgatagtgcccttgcgaa

SEQ ID NO: 3344980 - DNA, 25 bp, Homo sapien
gactttcccgattcacagttgatag

SEQ ID NO: 3344981 - DNA, 25 bp, Homo sapien
gtgcccttgcgaactaaatcttcaa

SEQ ID NO: 3344982 - DNA, 25 bp, Homo sapien
ttcattggaatgagcccggtacaca

SEQ ID NO: 3344983 - DNA, 25 bp, Homo sapien
ggtacacacaccctgcctacattct

SEQ ID NO: 3344984 - DNA, 25 bp, Homo sapien
gattaactcctgaacctttgcaagg

SEQ ID NO: 3344985 - DNA, 25 bp, Homo sapien
tgtctccctgccaggagattaactc

SEQ ID NO: 3344986 - DNA, 25 bp, Homo sapien
ccatgatgggcaaggtccatttcag

SEQ ID NO: 3344987 - DNA, 25 bp, Homo sapien
tccaaatggatagaccccaaatgtc

SEQ ID NO: 3344988 - DNA, 25 bp, Homo sapien
cccaaatgtcccttgtttccatgat

SEQ ID NO: 3344989 - DNA, 25 bp, Homo sapien
cagccttccactggttctggaaaga

SEQ ID NO: 3344990 - DNA, 25 bp, Homo sapien
tgggattatcacaagacccagattc

SEQ ID NO: 3344991 - DNA, 25 bp, Homo sapien
gattatcacaagacccagattccca

SEQ ID NO: 3344992 - DNA, 25 bp, Homo sapien
attatcacaagacccagattcccac

SEQ ID NO: 3344993 - DNA, 25 bp, Homo sapien
ttatcacaagacccagattcccacc

SEQ ID NO: 3344994 - DNA, 25 bp, Homo sapien
tcaggagtgtgagacatttcaatta

SEQ ID NO: 3344995 - DNA, 25 bp, Homo sapien
aaaggggccgatgatgtcaatcaca

SEQ ID NO: 3344996 - DNA, 25 bp, Homo sapien
tgatgtcaatcacactggctggtcc

SEQ ID NO: 3344997 - DNA, 25 bp, Homo sapien
actttctggactgattagattatga

SEQ ID NO: 3344998 - DNA, 25 bp, Homo sapien
tctggactgattagattatgatgtg

SEQ ID NO: 3344999 - DNA, 25 bp, Homo sapien
gaactttctggactgattagattat

SEQ ID NO: 3345000 - DNA, 25 bp, Homo sapien
tggactgattagattatgatgtgag

SEQ ID NO: 3345001 - DNA, 25 bp, Homo sapien
aatgagaggttctgagaggcaggct

SEQ ID NO: 3345002 - DNA, 25 bp, Homo sapien
gagaggttctgagaggcaggctagt

SEQ ID NO: 3345003 - DNA, 25 bp, Homo sapien
ttctgagaggcaggctagtggcttg

SEQ ID NO: 3345004 - DNA, 25 bp, Homo sapien
gaggttctgagaggcaggctagtgg

SEQ ID NO: 3345005 - DNA, 25 bp, Homo sapien
tgttcaggcttgagactctctgcat

SEQ ID NO: 3345006 - DNA, 25 bp, Homo sapien
ccctctacctttatcggtctcaaag

SEQ ID NO: 3345007 - DNA, 25 bp, Homo sapien
gccttactctgagtttaataggaga

SEQ ID NO: 3345008 - DNA, 25 bp, Homo sapien
tccaagtatgtctcgagtttcagtg

SEQ ID NO: 3345009 - DNA, 25 bp, Homo sapien
cacaggtagcattcaaaggcttaac

SEQ ID NO: 3345010 - DNA, 25 bp, Homo sapien
ttttatgtttaagtggtgtggtaca

SEQ ID NO: 3345011 - DNA, 25 bp, Homo sapien
aagctattactctttagatgtacaa

SEQ ID NO: 3345012 - DNA, 25 bp, Homo sapien
aaaagctattactctttagatgtac

SEQ ID NO: 3345013 - DNA, 25 bp, Homo sapien
agtggtgtggtacaactcctttaca

SEQ ID NO: 3345014 - DNA, 25 bp, Homo sapien
gcttttagacgtaacatcggaccat

SEQ ID NO: 3345015 - DNA, 25 bp, Homo sapien
taggtaacattcgataaagcagccc

SEQ ID NO: 3345016 - DNA, 25 bp, Homo sapien
taccagacagtcgaagggtctactg

SEQ ID NO: 3345017 - DNA, 25 bp, Homo sapien
tacaggcagagttgaggcatccaca

SEQ ID NO: 3345018 - DNA, 25 bp, Homo sapien
tataaaacctgtccagtcctgctga

SEQ ID NO: 3345019 - DNA, 25 bp, Homo sapien
cagccagtgcttatgtagagattac

SEQ ID NO: 3345020 - DNA, 25 bp, Homo sapien
tagtaccttgtatagctcagtttat

SEQ ID NO: 3345021 - DNA, 25 bp, Homo sapien
catgcacacattcaacctcctatta

SEQ ID NO: 3345022 - DNA, 25 bp, Homo sapien
atgcccggcctatatcaaggatttt

SEQ ID NO: 3345023 - DNA, 25 bp, Homo sapien
atatcaaggattttatcccaaaaga

SEQ ID NO: 3345024 - DNA, 25 bp, Homo sapien
tatcaaggattttatcccaaaagaa

SEQ ID NO: 3345025 - DNA, 25 bp, Homo sapien
tcaaggattttatcccaaaagaata

SEQ ID NO: 3345026 - DNA, 25 bp, Homo sapien
tgcttccaggcgcaatcagattgtt

SEQ ID NO: 3345027 - DNA, 25 bp, Homo sapien
tggctgttggcagggactactctca

SEQ ID NO: 3345028 - DNA, 25 bp, Homo sapien
ccttgctgttgtaggactatggtcc

SEQ ID NO: 3345029 - DNA, 25 bp, Homo sapien
tccaggtgggctcaactgggtcctc

SEQ ID NO: 3345030 - DNA, 25 bp, Homo sapien
tgtaccattaccctaagtagcagga

SEQ ID NO: 3345031 - DNA, 25 bp, Homo sapien
tgaacttgcctggtatgcagcagac

SEQ ID NO: 3345032 - DNA, 25 bp, Homo sapien
gaggctcatggttattcctacacag

SEQ ID NO: 3345033 - DNA, 25 bp, Homo sapien
ttccagcaaaccatagggtgtcagt

SEQ ID NO: 3345034 - DNA, 25 bp, Homo sapien
tatagccttgcacagcgtaatactg

SEQ ID NO: 3345035 - DNA, 25 bp, Homo sapien
cattcagggctactagagttcccca

SEQ ID NO: 3345036 - DNA, 25 bp, Homo sapien
gagtatgccacaaatgccattcagg

SEQ ID NO: 3345037 - DNA, 25 bp, Homo sapien
tcatttgcaagattgaggccagatc

SEQ ID NO: 3345038 - DNA, 25 bp, Homo sapien
tgaacttcaggtctatctagcgcca

SEQ ID NO: 3345039 - DNA, 25 bp, Homo sapien
caaaggaaaagcagtccagcagttc

SEQ ID NO: 3345040 - DNA, 25 bp, Homo sapien
tactgtgagagagcgagcaaaaagc

SEQ ID NO: 3345041 - DNA, 25 bp, Homo sapien
gaaagcagagctcggtcatccggaa

SEQ ID NO: 3345042 - DNA, 25 bp, Homo sapien
agaccttcgacctctcaagaccagg

SEQ ID NO: 3345043 - DNA, 25 bp, Homo sapien
gaggtgaggtacatctacctccacc

SEQ ID NO: 3345044 - DNA, 25 bp, Homo sapien
gggtcctcctaacgtgtgaggctag

SEQ ID NO: 3345045 - DNA, 25 bp, Homo sapien
tcttctgtggtagcgtggaggtgag

SEQ ID NO: 3345046 - DNA, 25 bp, Homo sapien
caaagttgtatacagcgggaatgac

SEQ ID NO: 3345047 - DNA, 25 bp, Homo sapien
tcagtgacagtctttagtaataaca

SEQ ID NO: 3345048 - DNA, 25 bp, Homo sapien
gacagtctttagtaataacacccaa

SEQ ID NO: 3345049 - DNA, 25 bp, Homo sapien
cgggaatgacggattcttctttaca

SEQ ID NO: 3345050 - DNA, 25 bp, Homo sapien
tctttcctgtttgaataacttaatg

SEQ ID NO: 3345051 - DNA, 25 bp, Homo sapien
tccctcattctcttttcgtttctgt

SEQ ID NO: 3345052 - DNA, 25 bp, Homo sapien
gcttctgtttctccctgggcacata

SEQ ID NO: 3345053 - DNA, 25 bp, Homo sapien
tcctgtttgaataacttaatgcttc

SEQ ID NO: 3345054 - DNA, 25 bp, Homo sapien
tctctctgtcctgctgataggcagg

SEQ ID NO: 3345055 - DNA, 25 bp, Homo sapien
gattgtctctctgtcctgctgatag

SEQ ID NO: 3345056 - DNA, 25 bp, Homo sapien
tcgagattgtctctctgtcctgctg

SEQ ID NO: 3345057 - DNA, 25 bp, Homo sapien
tgtctctctgtcctgctgataggca

SEQ ID NO: 3345058 - DNA, 25 bp, Homo sapien
ctcagcatggcgctgtttatgatta

SEQ ID NO: 3345059 - DNA, 25 bp, Homo sapien
gcgctgtttatgattaagcttagcc

SEQ ID NO: 3345060 - DNA, 25 bp, Homo sapien
attcttgagcttctcgactttcctt

SEQ ID NO: 3345061 - DNA, 25 bp, Homo sapien
tcatggtaatccaaatggtatagca

SEQ ID NO: 3345062 - DNA, 25 bp, Homo sapien
ggagacagtgaaccttctcacacac

SEQ ID NO: 3345063 - DNA, 25 bp, Homo sapien
gaaagtgcacactactggggaacaa

SEQ ID NO: 3345064 - DNA, 25 bp, Homo sapien
ttgcagtattgcatttacccacctg

SEQ ID NO: 3345065 - DNA, 25 bp, Homo sapien
gggacctctgcccaccattgcagta

SEQ ID NO: 3345066 - DNA, 25 bp, Homo sapien
agttctttgatacctgttttgcaag

SEQ ID NO: 3345067 - DNA, 25 bp, Homo sapien
tagaatcaagttctttgatacctgt

SEQ ID NO: 3345068 - DNA, 25 bp, Homo sapien
tctagaatcaagttctttgatacct

SEQ ID NO: 3345069 - DNA, 25 bp, Homo sapien
ccatggaatggagcactatgtatga

SEQ ID NO: 3345070 - DNA, 25 bp, Homo sapien
cagatatgtgccttctcagatacag

SEQ ID NO: 3345071 - DNA, 25 bp, Homo sapien
tgtacttgttaagccacatttgagg

SEQ ID NO: 3345072 - DNA, 25 bp, Homo sapien
taatttgggacagtgtggtggtacc

SEQ ID NO: 3345073 - DNA, 25 bp, Homo sapien
tcttccagcagaattactacttgtg

SEQ ID NO: 3345074 - DNA, 25 bp, Homo sapien
tccccagaatgtgcctctagtgtga

SEQ ID NO: 3345075 - DNA, 25 bp, Homo sapien
gagaggcatccctcacctgttcatt

SEQ ID NO: 3345076 - DNA, 25 bp, Homo sapien
cctgtatatttgtactcagagagcc

SEQ ID NO: 3345077 - DNA, 25 bp, Homo sapien
gaagaaagaactcaatccatccctc

SEQ ID NO: 3345078 - DNA, 25 bp, Homo sapien
ctaaaagaagtggaggatcaaagcc

SEQ ID NO: 3345079 - DNA, 25 bp, Homo sapien
cttcccaaactgtgtcaaagctgga

SEQ ID NO: 3345080 - DNA, 25 bp, Homo sapien
catctctttggcgtagccctaaaag

SEQ ID NO: 3345081 - DNA, 25 bp, Homo sapien
catggcagctaggtcagtgaagatg

SEQ ID NO: 3345082 - DNA, 25 bp, Homo sapien
atggcagctaggtcagtgaagatgg

SEQ ID NO: 3345083 - DNA, 25 bp, Homo sapien
tgtggactccccatttaacaaggtc

SEQ ID NO: 3345084 - DNA, 25 bp, Homo sapien
ccccaggagttatacaagcttcagg

SEQ ID NO: 3345085 - DNA, 25 bp, Homo sapien
caaaaggcgtcaggcattaggctgg

SEQ ID NO: 3345086 - DNA, 25 bp, Homo sapien
gaaatgggctattggcaggcacagt

SEQ ID NO: 3345087 - DNA, 25 bp, Homo sapien
tcaaaggtagcgatgacttcatccc

SEQ ID NO: 3345088 - DNA, 25 bp, Homo sapien
ttgcccgggatgttttctttgacta

SEQ ID NO: 3345089 - DNA, 25 bp, Homo sapien
tctttgactacttgcttctcactgg

SEQ ID NO: 3345090 - DNA, 25 bp, Homo sapien
tggattttcggtcagccggtttgcc

SEQ ID NO: 3345091 - DNA, 25 bp, Homo sapien
tggacccgcgtctggagaacgagct

SEQ ID NO: 3345092 - DNA, 25 bp, Homo sapien
gaagttcggattgcaagttgcgccc

SEQ ID NO: 3345093 - DNA, 25 bp, Homo sapien
cacctgggcggttgactattagtcg

SEQ ID NO: 3345094 - DNA, 25 bp, Homo sapien
agaacgagctgcatcgccaaggctg

SEQ ID NO: 3345095 - DNA, 25 bp, Homo sapien
cgtgggctttccagcgtgggcccct

SEQ ID NO: 3345096 - DNA, 25 bp, Homo sapien
aacttctgggcgcagcgtgctaaac

SEQ ID NO: 3345097 - DNA, 25 bp, Homo sapien
ttctgcccggcgctgataaggacgc

SEQ ID NO: 3345098 - DNA, 25 bp, Homo sapien
tgtgggcgtcgatctcagcgcgcac

SEQ ID NO: 3345099 - DNA, 25 bp, Homo sapien
tgagagtagtgataacttaccccaa

SEQ ID NO: 3345100 - DNA, 25 bp, Homo sapien
gctgtagtcgtagctttaacctggg

SEQ ID NO: 3345101 - DNA, 25 bp, Homo sapien
caatgtttggcctatggtgagctct

SEQ ID NO: 3345102 - DNA, 25 bp, Homo sapien
ggagctgactccataaagtgcttat

SEQ ID NO: 3345103 - DNA, 25 bp, Homo sapien
gtccctctgctgaccgggagctgct

SEQ ID NO: 3345104 - DNA, 25 bp, Homo sapien
cggcagccctgaggagcccaataag

SEQ ID NO: 3345105 - DNA, 25 bp, Homo sapien
gagcccaataagttccacagcctgc

SEQ ID NO: 3345106 - DNA, 25 bp, Homo sapien
tgaccttcttggagagctccaccgg

SEQ ID NO: 3345107 - DNA, 25 bp, Homo sapien
tccctgaagattgtctggcttgccc

SEQ ID NO: 3345108 - DNA, 25 bp, Homo sapien
cccataagccttgggtatcctgtga

SEQ ID NO: 3345109 - DNA, 25 bp, Homo sapien
cgttgctggcaactggacttcccca

SEQ ID NO: 3345110 - DNA, 25 bp, Homo sapien
cacttctccgtgcatgactctgggt

SEQ ID NO: 3345111 - DNA, 25 bp, Homo sapien
tccacgtggttgacgttagaacctc

SEQ ID NO: 3345112 - DNA, 25 bp, Homo sapien
aacagccctgagtaggtatttccag

SEQ ID NO: 3345113 - DNA, 25 bp, Homo sapien
ttcaaagcataaggtccatggtggt

SEQ ID NO: 3345114 - DNA, 25 bp, Homo sapien
gactgttgcctgtcatctaagcgaa

SEQ ID NO: 3345115 - DNA, 25 bp, Homo sapien
gccctgtggacaacttctctatgca

SEQ ID NO: 3345116 - DNA, 25 bp, Homo sapien
tccacctctgtgagtccaagtcagg

SEQ ID NO: 3345117 - DNA, 25 bp, Homo sapien
tcaggtcaatcagcaaggacccatc

SEQ ID NO: 3345118 - DNA, 25 bp, Homo sapien
taaagcaaaagcctcacctcaaggg

SEQ ID NO: 3345119 - DNA, 25 bp, Homo sapien
ccctgtctgagtaccccagtaagaa

SEQ ID NO: 3345120 - DNA, 25 bp, Homo sapien
gctttccacagccttcacgaggatc

SEQ ID NO: 3345121 - DNA, 25 bp, Homo sapien
gacttcatgggtgttggagctttcc

SEQ ID NO: 3345122 - DNA, 25 bp, Homo sapien
tgggagccccatctagcagctttgg

SEQ ID NO: 3345123 - DNA, 25 bp, Homo sapien
tcagggacggtcttgctagcctagg

SEQ ID NO: 3345124 - DNA, 25 bp, Homo sapien
cactcccgtgctgtcaatggctgct

SEQ ID NO: 3345125 - DNA, 25 bp, Homo sapien
gattctttccaaagtggccagcata

SEQ ID NO: 3345126 - DNA, 25 bp, Homo sapien
gacaggctcccaccctattttagga

SEQ ID NO: 3345127 - DNA, 25 bp, Homo sapien
tgcactggtgtgtcctccacccaca

SEQ ID NO: 3345128 - DNA, 25 bp, Homo sapien
aggcaccacctgcactggtgtgtcc

SEQ ID NO: 3345129 - DNA, 25 bp, Homo sapien
tcctccacccacattgatgctgcca

SEQ ID NO: 3345130 - DNA, 25 bp, Homo sapien
ctgcttcccaggcaccacctgcact

SEQ ID NO: 3345131 - DNA, 25 bp, Homo sapien
caatgacgtcatttcctccagccag

SEQ ID NO: 3345132 - DNA, 25 bp, Homo sapien
atgacgtcatttcctccagccagca

SEQ ID NO: 3345133 - DNA, 25 bp, Homo sapien
cagccagcatgcactcccattagag

SEQ ID NO: 3345134 - DNA, 25 bp, Homo sapien
ttagagccgtcatttcctccaggtt

SEQ ID NO: 3345135 - DNA, 25 bp, Homo sapien
aggtgagtcaatgagctcatctgag

SEQ ID NO: 3345136 - DNA, 25 bp, Homo sapien
ggtgagtcaatgagctcatctgagg

SEQ ID NO: 3345137 - DNA, 25 bp, Homo sapien
ccaggtgagtcaatgagctcatctg

SEQ ID NO: 3345138 - DNA, 25 bp, Homo sapien
caggtgagtcaatgagctcatctga

SEQ ID NO: 3345139 - DNA, 25 bp, Homo sapien
gctgaattctgtcaggagggcagcg

SEQ ID NO: 3345140 - DNA, 25 bp, Homo sapien
tgaattctgtcaggagggcagcggt

SEQ ID NO: 3345141 - DNA, 25 bp, Homo sapien
agaagaagtgctggttaactcgggc

SEQ ID NO: 3345142 - DNA, 25 bp, Homo sapien
tgctggttaactcgggcagcattga

SEQ ID NO: 3345143 - DNA, 25 bp, Homo sapien
tggaaacctaaacgcagcctctgaa

SEQ ID NO: 3345144 - DNA, 25 bp, Homo sapien
cctaaacgcagcctctgaaattagt

SEQ ID NO: 3345145 - DNA, 25 bp, Homo sapien
cagcctctgaaattagtagggccat

SEQ ID NO: 3345146 - DNA, 25 bp, Homo sapien
aaacgcagcctctgaaattagtagg

SEQ ID NO: 3345147 - DNA, 25 bp, Homo sapien
cattcaccaaactggactttcaggc

SEQ ID NO: 3345148 - DNA, 25 bp, Homo sapien
ctttctgcttacttcaacgttgact

SEQ ID NO: 3345149 - DNA, 25 bp, Homo sapien
ttctgcttacttcaacgttgacttt

SEQ ID NO: 3345150 - DNA, 25 bp, Homo sapien
tttctgcttacttcaacgttgactt

SEQ ID NO: 3345151 - DNA, 25 bp, Homo sapien
taagagtccagggtactaaggagga

SEQ ID NO: 3345152 - DNA, 25 bp, Homo sapien
tcagggccccattgcctaagcacaa

SEQ ID NO: 3345153 - DNA, 25 bp, Homo sapien
gaattcacactcattgcttgcaccc

SEQ ID NO: 3345154 - DNA, 25 bp, Homo sapien
gcttgcacccactattgctcttggg

SEQ ID NO: 3345155 - DNA, 25 bp, Homo sapien
gcttccatgtcaggatctagcttgg

SEQ ID NO: 3345156 - DNA, 25 bp, Homo sapien
gctgtgctgtatgatctcgaattcc

SEQ ID NO: 3345157 - DNA, 25 bp, Homo sapien
cactggacgattatatctctttgcc

SEQ ID NO: 3345158 - DNA, 25 bp, Homo sapien
ctcttgttggcctctaccagctggc

SEQ ID NO: 3345159 - DNA, 25 bp, Homo sapien
cactgagcgtggtgagtattttgga

SEQ ID NO: 3345160 - DNA, 25 bp, Homo sapien
gctgctttaaccacctgtttatccg

SEQ ID NO: 3345161 - DNA, 25 bp, Homo sapien
tgtttatccgccctttcactgagcg

SEQ ID NO: 3345162 - DNA, 25 bp, Homo sapien
ctgctgctttaaccacctgtttatc

SEQ ID NO: 3345163 - DNA, 25 bp, Homo sapien
taaagtacgtggagtgtcaaatgca

SEQ ID NO: 3345164 - DNA, 25 bp, Homo sapien
cattcattcactaggtaaagtacgt

SEQ ID NO: 3345165 - DNA, 25 bp, Homo sapien
taggtaaagtacgtggagtgtcaaa

SEQ ID NO: 3345166 - DNA, 25 bp, Homo sapien
cattcactaggtaaagtacgtggag

SEQ ID NO: 3345167 - DNA, 25 bp, Homo sapien
ctggtcctgtggctctccgtggagc

SEQ ID NO: 3345168 - DNA, 25 bp, Homo sapien
gaagaatacagcggcacagggccag

SEQ ID NO: 3345169 - DNA, 25 bp, Homo sapien
tgaagaatacagcggcacagggcca

SEQ ID NO: 3345170 - DNA, 25 bp, Homo sapien
aagtttcttcgctcatgcagacgag

SEQ ID NO: 3345171 - DNA, 25 bp, Homo sapien
cggcaccaggaagaagcgcgttcat

SEQ ID NO: 3345172 - DNA, 25 bp, Homo sapien
tgaactgcccgtttctgagaagtgc

SEQ ID NO: 3345173 - DNA, 25 bp, Homo sapien
gactatttatttcagaccaggcaag

SEQ ID NO: 3345174 - DNA, 25 bp, Homo sapien
ggtgccatcggagtgtcccagatga

SEQ ID NO: 3345175 - DNA, 25 bp, Homo sapien
cagggaacttcggatgagaggttta

SEQ ID NO: 3345176 - DNA, 25 bp, Homo sapien
caatgagagattttctccccaaagg

SEQ ID NO: 3345177 - DNA, 25 bp, Homo sapien
gatgatgattcacatctcagggaac

SEQ ID NO: 3345178 - DNA, 25 bp, Homo sapien
ccgcatgcaggtgtgccgggaaagc

SEQ ID NO: 3345179 - DNA, 25 bp, Homo sapien
gcacccgcatgcaggtgtgccggga

SEQ ID NO: 3345180 - DNA, 25 bp, Homo sapien
cacccgcatgcaggtgtgccgggaa

SEQ ID NO: 3345181 - DNA, 25 bp, Homo sapien
acccgcatgcaggtgtgccgggaaa

SEQ ID NO: 3345182 - DNA, 25 bp, Homo sapien
ctgtggtggcccaaaaggcgtcatc

SEQ ID NO: 3345183 - DNA, 25 bp, Homo sapien
gtggtggcccaaaaggcgtcatcag

SEQ ID NO: 3345184 - DNA, 25 bp, Homo sapien
tgtggtggcccaaaaggcgtcatca

SEQ ID NO: 3345185 - DNA, 25 bp, Homo sapien
accccgtggagcatagccccttctc

SEQ ID NO: 3345186 - DNA, 25 bp, Homo sapien
gcggggtcccaggagaggtcctata

SEQ ID NO: 3345187 - DNA, 25 bp, Homo sapien
ggagcatagccccttctcaccacac

SEQ ID NO: 3345188 - DNA, 25 bp, Homo sapien
ggtcctatagcttccatccagctgt

SEQ ID NO: 3345189 - DNA, 25 bp, Homo sapien
caccagactctggacgtcatcactg

SEQ ID NO: 3345190 - DNA, 25 bp, Homo sapien
cctagaacctgtgcacaccagactc

SEQ ID NO: 3345191 - DNA, 25 bp, Homo sapien
agaacctgtgcacaccagactctgg

SEQ ID NO: 3345192 - DNA, 25 bp, Homo sapien
acaccagactctggacgtcatcact

SEQ ID NO: 3345193 - DNA, 25 bp, Homo sapien
accacacacatcagggggtctggca

SEQ ID NO: 3345194 - DNA, 25 bp, Homo sapien
tgaacaaccccgatccagtgtgagc

SEQ ID NO: 3345195 - DNA, 25 bp, Homo sapien
agctcaggctggcattggttgaaaa

SEQ ID NO: 3345196 - DNA, 25 bp, Homo sapien
agaaagcacccaaggacctcattgg

SEQ ID NO: 3345197 - DNA, 25 bp, Homo sapien
ttaagagaaagcatgagacaagtgc

SEQ ID NO: 3345198 - DNA, 25 bp, Homo sapien
caactttcccacttctgcaaggagt

SEQ ID NO: 3345199 - DNA, 25 bp, Homo sapien
gagatttccgactgagggtgcccaa

SEQ ID NO: 3345200 - DNA, 25 bp, Homo sapien
aagcaaagtgtgaatctccaaaccc

SEQ ID NO: 3345201 - DNA, 25 bp, Homo sapien
aggctgtagctgctccaaaattcac

SEQ ID NO: 3345202 - DNA, 25 bp, Homo sapien
gaaaaaggctgtagctgctccaaaa

SEQ ID NO: 3345203 - DNA, 25 bp, Homo sapien
aaaaggctgtagctgctccaaaatt

SEQ ID NO: 3345204 - DNA, 25 bp, Homo sapien
tggaaaaaggctgtagctgctccaa

SEQ ID NO: 3345205 - DNA, 25 bp, Homo sapien
gcctctgatttggtagtgccagtct

SEQ ID NO: 3345206 - DNA, 25 bp, Homo sapien
tgcctctgatttggtagtgccagtc

SEQ ID NO: 3345207 - DNA, 25 bp, Homo sapien
aaaagccccggcaaatgtcctcctg

SEQ ID NO: 3345208 - DNA, 25 bp, Homo sapien
gtcctcctggcttgttgcctctgat

SEQ ID NO: 3345209 - DNA, 25 bp, Homo sapien
aagaagactgtctcccaagatggtt

SEQ ID NO: 3345210 - DNA, 25 bp, Homo sapien
tatgcctactatttgatgccacgag

SEQ ID NO: 3345211 - DNA, 25 bp, Homo sapien
ggtcagcattgtgttatctccagcc

SEQ ID NO: 3345212 - DNA, 25 bp, Homo sapien
cctttctgaagagctaacagtagct

SEQ ID NO: 3345213 - DNA, 25 bp, Homo sapien
atcatgagcaagatcatatagcaca

SEQ ID NO: 3345214 - DNA, 25 bp, Homo sapien
atgagcaagatcatatagcacaaac

SEQ ID NO: 3345215 - DNA, 25 bp, Homo sapien
catatagcacaaacacggccttggg

SEQ ID NO: 3345216 - DNA, 25 bp, Homo sapien
cacaaacacggccttgggggccatc

SEQ ID NO: 3345217 - DNA, 25 bp, Homo sapien
gcaaagggctcccaggccattgctt

SEQ ID NO: 3345218 - DNA, 25 bp, Homo sapien
gggctcccaggccattgcttggtcc

SEQ ID NO: 3345219 - DNA, 25 bp, Homo sapien
aaagggctcccaggccattgcttgg

SEQ ID NO: 3345220 - DNA, 25 bp, Homo sapien
gagcaaagggctcccaggccattgc

SEQ ID NO: 3345221 - DNA, 25 bp, Homo sapien
tctcatccatgggtaccagttgaaa

SEQ ID NO: 3345222 - DNA, 25 bp, Homo sapien
ctgagggagtcagtgcaagaattgc

SEQ ID NO: 3345223 - DNA, 25 bp, Homo sapien
tttaattttacagcataggaggaag

SEQ ID NO: 3345224 - DNA, 25 bp, Homo sapien
ccagttgaaattcgtcaggaacagg

SEQ ID NO: 3345225 - DNA, 25 bp, Homo sapien
cctgatgtcgtgagctagggcacct

SEQ ID NO: 3345226 - DNA, 25 bp, Homo sapien
ggcaaggtccggtggccggagcgtg

SEQ ID NO: 3345227 - DNA, 25 bp, Homo sapien
tctcgtagtaagtcgtggctcgggc

SEQ ID NO: 3345228 - DNA, 25 bp, Homo sapien
ctgttcccgcgaagcgagtcgccgt

SEQ ID NO: 3345229 - DNA, 25 bp, Homo sapien
gggcgctgcggggctggcagccggc

SEQ ID NO: 3345230 - DNA, 25 bp, Homo sapien
ccggacgggcgctgcggggctggca

SEQ ID NO: 3345231 - DNA, 25 bp, Homo sapien
acgggcgctgcggggctggcagccg

SEQ ID NO: 3345232 - DNA, 25 bp, Homo sapien
ttccggacgggcgctgcggggctgg

SEQ ID NO: 3345233 - DNA, 25 bp, Homo sapien
ttgaaggcttaaccccactgtgacg

SEQ ID NO: 3345234 - DNA, 25 bp, Homo sapien
gcttaaatgtcctgtgattgggtca

SEQ ID NO: 3345235 - DNA, 25 bp, Homo sapien
taagggctctctattatggactgaa

SEQ ID NO: 3345236 - DNA, 25 bp, Homo sapien
gacagactgtcttgtacagaaacct

SEQ ID NO: 3345237 - DNA, 25 bp, Homo sapien
gaactcctgctgttcgaccttggtg

SEQ ID NO: 3345238 - DNA, 25 bp, Homo sapien
aaattgtaaagaaactcaggcagcc

SEQ ID NO: 3345239 - DNA, 25 bp, Homo sapien
tctctgctatcttgggaactcctgc

SEQ ID NO: 3345240 - DNA, 25 bp, Homo sapien
tgtctgttgtggaacaggctcgaca

SEQ ID NO: 3345241 - DNA, 25 bp, Homo sapien
ctatgaaaggatgacagtcttctgc

SEQ ID NO: 3345242 - DNA, 25 bp, Homo sapien
cttcctgcttcattactggtggaga

SEQ ID NO: 3345243 - DNA, 25 bp, Homo sapien
ctgcttcattactggtggagaggcc

SEQ ID NO: 3345244 - DNA, 25 bp, Homo sapien
tcctgcttcattactggtggagagg

SEQ ID NO: 3345245 - DNA, 25 bp, Homo sapien
cagggcaaagacgaagagcagtgcc

SEQ ID NO: 3345246 - DNA, 25 bp, Homo sapien
gccaggttccttgactgtgggcttt

SEQ ID NO: 3345247 - DNA, 25 bp, Homo sapien
tgccatgtggcagggcaaagacgaa

SEQ ID NO: 3345248 - DNA, 25 bp, Homo sapien
cttttcgttgagagagtaccagtgc

SEQ ID NO: 3345249 - DNA, 25 bp, Homo sapien
gaccctctgagatggttcttgctgc

SEQ ID NO: 3345250 - DNA, 25 bp, Homo sapien
tctagggggcttgtgaccctctgag

SEQ ID NO: 3345251 - DNA, 25 bp, Homo sapien
aaatctagggggcttgtgaccctct

SEQ ID NO: 3345252 - DNA, 25 bp, Homo sapien
ctctgagatggttcttgctgcacgt

SEQ ID NO: 3345253 - DNA, 25 bp, Homo sapien
gatagtgactatctgtggctcctaa

SEQ ID NO: 3345254 - DNA, 25 bp, Homo sapien
cattggccctaaggtcatggatggc

SEQ ID NO: 3345255 - DNA, 25 bp, Homo sapien
cattatcaaggaagagtcagggtgc

SEQ ID NO: 3345256 - DNA, 25 bp, Homo sapien
tgtacattccttaaggatagtgact

SEQ ID NO: 3345257 - DNA, 25 bp, Homo sapien
cttgacttctattcttccgcccttg

SEQ ID NO: 3345258 - DNA, 25 bp, Homo sapien
tgcttgacttctattcttccgccct

SEQ ID NO: 3345259 - DNA, 25 bp, Homo sapien
tgacttctattcttccgcccttgct

SEQ ID NO: 3345260 - DNA, 25 bp, Homo sapien
ctgaccgtgcacacattccatctgc

SEQ ID NO: 3345261 - DNA, 25 bp, Homo sapien
tagtgccaggcaggttgcttaggaa

SEQ ID NO: 3345262 - DNA, 25 bp, Homo sapien
gccaggcaggttgcttaggaaaata

SEQ ID NO: 3345263 - DNA, 25 bp, Homo sapien
gttgtagtgccaggcaggttgctta

SEQ ID NO: 3345264 - DNA, 25 bp, Homo sapien
cctgagttgtagtgccaggcaggtt

SEQ ID NO: 3345265 - DNA, 25 bp, Homo sapien
catcggcttagaaccctccagggtt

SEQ ID NO: 3345266 - DNA, 25 bp, Homo sapien
gtttcaaagcatggaaacccaagca

SEQ ID NO: 3345267 - DNA, 25 bp, Homo sapien
catgttactcggagaaagtcccacc

SEQ ID NO: 3345268 - DNA, 25 bp, Homo sapien
ggtgcccaggctcctacttcagtgt

SEQ ID NO: 3345269 - DNA, 25 bp, Homo sapien
tgaaggagtagacatgttattactt

SEQ ID NO: 3345270 - DNA, 25 bp, Homo sapien
ttaataatcagtgcatggcagagcc

SEQ ID NO: 3345271 - DNA, 25 bp, Homo sapien
gagtagacatgttattacttgggca

SEQ ID NO: 3345272 - DNA, 25 bp, Homo sapien
atttaataatcagtgcatggcagag

SEQ ID NO: 3345273 - DNA, 25 bp, Homo sapien
ggctactgccagtagagaggaaggg

SEQ ID NO: 3345274 - DNA, 25 bp, Homo sapien
ccactcaatcaaactgactacagag

SEQ ID NO: 3345275 - DNA, 25 bp, Homo sapien
gggtccaaaccaaaccactcaatca

SEQ ID NO: 3345276 - DNA, 25 bp, Homo sapien
cctggagtgctgaactgtgaaatcc

SEQ ID NO: 3345277 - DNA, 25 bp, Homo sapien
catattgaggtaccatatgcccagt

SEQ ID NO: 3345278 - DNA, 25 bp, Homo sapien
ctctttctaacgagcaagtgtgtgc

SEQ ID NO: 3345279 - DNA, 25 bp, Homo sapien
catctaaggaaatcagtcgtctctc

SEQ ID NO: 3345280 - DNA, 25 bp, Homo sapien
gaatctattctcactgcgttcaccg

SEQ ID NO: 3345281 - DNA, 25 bp, Homo sapien
ccaacttgaagtgttagcagaaacg

SEQ ID NO: 3345282 - DNA, 25 bp, Homo sapien
tgaactggcacatcactacttagag

SEQ ID NO: 3345283 - DNA, 25 bp, Homo sapien
ttggattgccgcgtagctgcagcga

SEQ ID NO: 3345284 - DNA, 25 bp, Homo sapien
cactgcatggtagggaattttaacc

SEQ ID NO: 3345285 - DNA, 25 bp, Homo sapien
gcctttttctttaatctctggtgcc

SEQ ID NO: 3345286 - DNA, 25 bp, Homo sapien
ctgtgatagcctttttctttaatct

SEQ ID NO: 3345287 - DNA, 25 bp, Homo sapien
tagcctttttctttaatctctggtg

SEQ ID NO: 3345288 - DNA, 25 bp, Homo sapien
ctttttctttaatctctggtgccat

SEQ ID NO: 3345289 - DNA, 25 bp, Homo sapien
aaaagcattcgagcttctttacagg

SEQ ID NO: 3345290 - DNA, 25 bp, Homo sapien
ttctttacaggcgaagtccacccca

SEQ ID NO: 3345291 - DNA, 25 bp, Homo sapien
caatgtgtctgatgttagttcctac

SEQ ID NO: 3345292 - DNA, 25 bp, Homo sapien
tagttcctacatccaaaagcattcg

SEQ ID NO: 3345293 - DNA, 25 bp, Homo sapien
gatcggttacctgtaaacaccactg

SEQ ID NO: 3345294 - DNA, 25 bp, Homo sapien
gttgtgatcggttacctgtaaacac

SEQ ID NO: 3345295 - DNA, 25 bp, Homo sapien
gtgatcggttacctgtaaacaccac

SEQ ID NO: 3345296 - DNA, 25 bp, Homo sapien
aactggttgtgatcggttacctgta

SEQ ID NO: 3345297 - DNA, 25 bp, Homo sapien
gaatttgaagctatgtgaatccctg

SEQ ID NO: 3345298 - DNA, 25 bp, Homo sapien
taactgttagaagctcaggaggacc

SEQ ID NO: 3345299 - DNA, 25 bp, Homo sapien
caggaggacctgtgggtaccatcaa

SEQ ID NO: 3345300 - DNA, 25 bp, Homo sapien
cagcattgtgtagcgtctaaggaca

SEQ ID NO: 3345301 - DNA, 25 bp, Homo sapien
agcctcataatcttgggttcaattg

SEQ ID NO: 3345302 - DNA, 25 bp, Homo sapien
cctcataatcttgggttcaattgat

SEQ ID NO: 3345303 - DNA, 25 bp, Homo sapien
taatcttgggttcaattgatattcc

SEQ ID NO: 3345304 - DNA, 25 bp, Homo sapien
tcataatcttgggttcaattgatat

SEQ ID NO: 3345305 - DNA, 25 bp, Homo sapien
gtcatcctcacaggaacagccacag

SEQ ID NO: 3345306 - DNA, 25 bp, Homo sapien
tgctagtcacaagcgggttttctag

SEQ ID NO: 3345307 - DNA, 25 bp, Homo sapien
tgctaacgtcatcctcacaggaaca

SEQ ID NO: 3345308 - DNA, 25 bp, Homo sapien
aacagccacagggactgctagtcac

SEQ ID NO: 3345309 - DNA, 25 bp, Homo sapien
gacgctcgtgctgtgtcggacttca

SEQ ID NO: 3345310 - DNA, 25 bp, Homo sapien
ctgtgtcggacttcagccatctcca

SEQ ID NO: 3345311 - DNA, 25 bp, Homo sapien
cgtgctgtgtcggacttcagccatc

SEQ ID NO: 3345312 - DNA, 25 bp, Homo sapien
tctggacgctcgtgctgtgtcggac

SEQ ID NO: 3345313 - DNA, 25 bp, Homo sapien
agtacagggacttgctatactttct

SEQ ID NO: 3345314 - DNA, 25 bp, Homo sapien
ccttagtgtcttgctggatgtaata

SEQ ID NO: 3345315 - DNA, 25 bp, Homo sapien
ttgctggatgtaatagtacagggac

SEQ ID NO: 3345316 - DNA, 25 bp, Homo sapien
agggacttgctatactttctcttga

SEQ ID NO: 3345317 - DNA, 25 bp, Homo sapien
agtccccatgcccattatggagtcg

SEQ ID NO: 3345318 - DNA, 25 bp, Homo sapien
ggaccttatcttgagtccccatgcc

SEQ ID NO: 3345319 - DNA, 25 bp, Homo sapien
atcaggaccttatcttgagtcccca

SEQ ID NO: 3345320 - DNA, 25 bp, Homo sapien
ccccatgcccattatggagtcgtac

SEQ ID NO: 3345321 - DNA, 25 bp, Homo sapien
ctggaccaggttcaggaaagaattt

SEQ ID NO: 3345322 - DNA, 25 bp, Homo sapien
ccggtcagcgaaatacaggggcttg

SEQ ID NO: 3345323 - DNA, 25 bp, Homo sapien
agccggtcagcgaaatacaggggct

SEQ ID NO: 3345324 - DNA, 25 bp, Homo sapien
gggcttgttctgaatacactggacc

SEQ ID NO: 3345325 - DNA, 25 bp, Homo sapien
atctcaatgagggagtccttgttgg

SEQ ID NO: 3345326 - DNA, 25 bp, Homo sapien
tgagggagtccttgttggttcccag

SEQ ID NO: 3345327 - DNA, 25 bp, Homo sapien
caatgagggagtccttgttggttcc

SEQ ID NO: 3345328 - DNA, 25 bp, Homo sapien
gagggagtccttgttggttcccagc

SEQ ID NO: 3345329 - DNA, 25 bp, Homo sapien
atggaagattttagctcagaagcat

SEQ ID NO: 3345330 - DNA, 25 bp, Homo sapien
agattttagctcagaagcatcatac

SEQ ID NO: 3345331 - DNA, 25 bp, Homo sapien
cttcatggaagattttagctcagaa

SEQ ID NO: 3345332 - DNA, 25 bp, Homo sapien
tcatggaagattttagctcagaagc

SEQ ID NO: 3345333 - DNA, 25 bp, Homo sapien
ggtgtctttaataggcccaaagcca

SEQ ID NO: 3345334 - DNA, 25 bp, Homo sapien
caggtgtctttaataggcccaaagc

SEQ ID NO: 3345335 - DNA, 25 bp, Homo sapien
agcaggtgtctttaataggcccaaa

SEQ ID NO: 3345336 - DNA, 25 bp, Homo sapien
tgagcaggtgtctttaataggccca

SEQ ID NO: 3345337 - DNA, 25 bp, Homo sapien
ctaggtggccagataaggctgactt

SEQ ID NO: 3345338 - DNA, 25 bp, Homo sapien
tggccagataaggctgacttaagtg

SEQ ID NO: 3345339 - DNA, 25 bp, Homo sapien
ggtggccagataaggctgacttaag

SEQ ID NO: 3345340 - DNA, 25 bp, Homo sapien
ccagataaggctgacttaagtgctg

SEQ ID NO: 3345341 - DNA, 25 bp, Homo sapien
aaatgcacttgggagtgtagagtgt

SEQ ID NO: 3345342 - DNA, 25 bp, Homo sapien
gcacaggatttcatgaacagcagat

SEQ ID NO: 3345343 - DNA, 25 bp, Homo sapien
tcctgctcagcatcaaatttggtgt

SEQ ID NO: 3345344 - DNA, 25 bp, Homo sapien
ttgactgacccaaatgcacttggga

SEQ ID NO: 3345345 - DNA, 25 bp, Homo sapien
gcgtccccagatgctgagctgaaaa

SEQ ID NO: 3345346 - DNA, 25 bp, Homo sapien
tatattattttatgcccctctcccc

SEQ ID NO: 3345347 - DNA, 25 bp, Homo sapien
cagatgctgagctgaaaatatatta

SEQ ID NO: 3345348 - DNA, 25 bp, Homo sapien
cccacctctgcaaactaccaccttt

SEQ ID NO: 3345349 - DNA, 25 bp, Homo sapien
ttggctcagtttcatcttgttgcat

SEQ ID NO: 3345350 - DNA, 25 bp, Homo sapien
acttggctcagtttcatcttgttgc

SEQ ID NO: 3345351 - DNA, 25 bp, Homo sapien
cttggctcagtttcatcttgttgca

SEQ ID NO: 3345352 - DNA, 25 bp, Homo sapien
ttattgatcccctatttcagtctaa

SEQ ID NO: 3345353 - DNA, 25 bp, Homo sapien
tttattgatcccctatttcagtcta

SEQ ID NO: 3345354 - DNA, 25 bp, Homo sapien
ccggccagcattaatttcatattaa

SEQ ID NO: 3345355 - DNA, 25 bp, Homo sapien
cccggccagcattaatttcatatta

SEQ ID NO: 3345356 - DNA, 25 bp, Homo sapien
aagtgttagtactttttcctcatat

SEQ ID NO: 3345357 - DNA, 25 bp, Homo sapien
actgaaaaaacgtgtgcttatttct

SEQ ID NO: 3345358 - DNA, 25 bp, Homo sapien
ttttcctcatattttccctcctcca

SEQ ID NO: 3345359 - DNA, 25 bp, Homo sapien
aaacgtgtgcttatttctgtaaaga

SEQ ID NO: 3345360 - DNA, 25 bp, Homo sapien
caagtaagactagatttggcatcct

SEQ ID NO: 3345361 - DNA, 25 bp, Homo sapien
gcccaggaaaacatattgactcaga

SEQ ID NO: 3345362 - DNA, 25 bp, Homo sapien
gagtcatttggattatgcccaggaa

SEQ ID NO: 3345363 - DNA, 25 bp, Homo sapien
tcaggaaagggctatcatcaaggtg

SEQ ID NO: 3345364 - DNA, 25 bp, Homo sapien
ggacagagagccataagtagccctt

SEQ ID NO: 3345365 - DNA, 25 bp, Homo sapien
ggacaccagtatcctaggacagaga

SEQ ID NO: 3345366 - DNA, 25 bp, Homo sapien
tcagcacatgtagtaggacaccagt

SEQ ID NO: 3345367 - DNA, 25 bp, Homo sapien
gatggtgtcaaccaaaggcatgtga

SEQ ID NO: 3345368 - DNA, 25 bp, Homo sapien
gaaagcaccttagaactgtactata

SEQ ID NO: 3345369 - DNA, 25 bp, Homo sapien
tttagaagggaaatctagctacttc

SEQ ID NO: 3345370 - DNA, 25 bp, Homo sapien
cgttcatctgtcattggtactgtaa

SEQ ID NO: 3345371 - DNA, 25 bp, Homo sapien
tttctactcagttctaccaaatagg

SEQ ID NO: 3345372 - DNA, 25 bp, Homo sapien
tactccagatccatgcagctagaac

SEQ ID NO: 3345373 - DNA, 25 bp, Homo sapien
gaatgaacgctgtgcatcaaagtgt

SEQ ID NO: 3345374 - DNA, 25 bp, Homo sapien
gaacactaagtcttgcactctctga

SEQ ID NO: 3345375 - DNA, 25 bp, Homo sapien
tctgtgaatccttagcactgacggg

SEQ ID NO: 3345376 - DNA, 25 bp, Homo sapien
gatttgaaattcattccgttgtttc

SEQ ID NO: 3345377 - DNA, 25 bp, Homo sapien
tcaagccatgaagtagcgtattttt

SEQ ID NO: 3345378 - DNA, 25 bp, Homo sapien
ttgatttgaaattcattccgttgtt

SEQ ID NO: 3345379 - DNA, 25 bp, Homo sapien
tgaagtagcgtatttttgaccatgt

SEQ ID NO: 3345380 - DNA, 25 bp, Homo sapien
cgtagtcggcgccaaaatcaaacgc

SEQ ID NO: 3345381 - DNA, 25 bp, Homo sapien
gccaaaatcaaacgcgtcctggcct

SEQ ID NO: 3345382 - DNA, 25 bp, Homo sapien
ggcgccaaaatcaaacgcgtcctgg

SEQ ID NO: 3345383 - DNA, 25 bp, Homo sapien
cccgcggcgtagtcggcgccaaaat

SEQ ID NO: 3345384 - DNA, 25 bp, Homo sapien
gctagtgcagcgacacactgaaatt

SEQ ID NO: 3345385 - DNA, 25 bp, Homo sapien
gctgacaaaagtagggttctcaacc

SEQ ID NO: 3345386 - DNA, 25 bp, Homo sapien
ccttgacatggccttcagattctgg

SEQ ID NO: 3345387 - DNA, 25 bp, Homo sapien
tctgggctgacaaaagtagggttct

SEQ ID NO: 3345388 - DNA, 25 bp, Homo sapien
tatctatgggagtatggtaggtgtt

SEQ ID NO: 3345389 - DNA, 25 bp, Homo sapien
tgttatatctatgggagtatggtag

SEQ ID NO: 3345390 - DNA, 25 bp, Homo sapien
ctgttatatctatgggagtatggta

SEQ ID NO: 3345391 - DNA, 25 bp, Homo sapien
tatatctatgggagtatggtaggtg

SEQ ID NO: 3345392 - DNA, 25 bp, Homo sapien
cctgttccgtttcctaccagggctg

SEQ ID NO: 3345393 - DNA, 25 bp, Homo sapien
ggccttaagcgctccttagcctcct

SEQ ID NO: 3345394 - DNA, 25 bp, Homo sapien
tcctggccttaagcgctccttagcc

SEQ ID NO: 3345395 - DNA, 25 bp, Homo sapien
tggccttaagcgctccttagcctcc

SEQ ID NO: 3345396 - DNA, 25 bp, Homo sapien
gatggagactactgaataggctaac

SEQ ID NO: 3345397 - DNA, 25 bp, Homo sapien
tctatgtagatctgttgggaggttc

SEQ ID NO: 3345398 - DNA, 25 bp, Homo sapien
caatggtggacaatcttaattctca

SEQ ID NO: 3345399 - DNA, 25 bp, Homo sapien
acaacttgagtgacatgatggagac

SEQ ID NO: 3345400 - DNA, 25 bp, Homo sapien
cagaaatcgaattggtagtgcatgt

SEQ ID NO: 3345401 - DNA, 25 bp, Homo sapien
gaatggcaaggtctgagtccgaaag

SEQ ID NO: 3345402 - DNA, 25 bp, Homo sapien
taatcggtcttggtgcagaaacaga

SEQ ID NO: 3345403 - DNA, 25 bp, Homo sapien
tactttataccattcacaaagagga

SEQ ID NO: 3345404 - DNA, 25 bp, Homo sapien
ctgtaataaagattttcagaggata

SEQ ID NO: 3345405 - DNA, 25 bp, Homo sapien
aacagcgggaggcacaacctcctct

SEQ ID NO: 3345406 - DNA, 25 bp, Homo sapien
aaatggggacccgtagctccagaga

SEQ ID NO: 3345407 - DNA, 25 bp, Homo sapien
tgaaattcctctgtgagtagccaga

SEQ ID NO: 3345408 - DNA, 25 bp, Homo sapien
tttcgaaaagccaccgttgaggtga

SEQ ID NO: 3345409 - DNA, 25 bp, Homo sapien
accaaacacttaggatgtactaggg

SEQ ID NO: 3345410 - DNA, 25 bp, Homo sapien
ttggggatacaaagtaagtgagata

SEQ ID NO: 3345411 - DNA, 25 bp, Homo sapien
tgagatagaaaaagggtgatcaagt

SEQ ID NO: 3345412 - DNA, 25 bp, Homo sapien
ggatacaaagtaagtgagatagaaa

SEQ ID NO: 3345413 - DNA, 25 bp, Homo sapien
gaaaatactctcatctcacaaccag

SEQ ID NO: 3345414 - DNA, 25 bp, Homo sapien
tcacaaccagctagagcagacctct

SEQ ID NO: 3345415 - DNA, 25 bp, Homo sapien
gagagttccaacgttctggcttggg

SEQ ID NO: 3345416 - DNA, 25 bp, Homo sapien
cctccttgaagttatgtgggagaaa

SEQ ID NO: 3345417 - DNA, 25 bp, Homo sapien
gagaagattccatcaacctcctgct

SEQ ID NO: 3345418 - DNA, 25 bp, Homo sapien
taacatattctcgatggcaggttgc

SEQ ID NO: 3345419 - DNA, 25 bp, Homo sapien
ggcaggttgctagtgacatttggtc

SEQ ID NO: 3345420 - DNA, 25 bp, Homo sapien
cctcagacactgtgggaccagggac

SEQ ID NO: 3345421 - DNA, 25 bp, Homo sapien
gagttccgacgtctcagcagggctg

SEQ ID NO: 3345422 - DNA, 25 bp, Homo sapien
gaggactgtgattcgcatggaacca

SEQ ID NO: 3345423 - DNA, 25 bp, Homo sapien
ggctgcgtcctgctgtttccgagaa

SEQ ID NO: 3345424 - DNA, 25 bp, Homo sapien
cagggccactgcatgaggttcacac

SEQ ID NO: 3345425 - DNA, 25 bp, Homo sapien
ccgtatccactactgagcatgacat

SEQ ID NO: 3345426 - DNA, 25 bp, Homo sapien
gaaaagtcccgtatccactactgag

SEQ ID NO: 3345427 - DNA, 25 bp, Homo sapien
gtcccgtatccactactgagcatga

SEQ ID NO: 3345428 - DNA, 25 bp, Homo sapien
ctagacagaaaagtcccgtatccac

SEQ ID NO: 3345429 - DNA, 25 bp, Homo sapien
tgtccacagagggtgccgggcgcac

SEQ ID NO: 3345430 - DNA, 25 bp, Homo sapien
ccgggcgcactaccgccacgcggcg

SEQ ID NO: 3345431 - DNA, 25 bp, Homo sapien
ggacagtgtccacagagggtgccgg

SEQ ID NO: 3345432 - DNA, 25 bp, Homo sapien
tccacagagggtgccgggcgcacta

SEQ ID NO: 3345433 - DNA, 25 bp, Homo sapien
attctaaattacagactttgcagcc

SEQ ID NO: 3345434 - DNA, 25 bp, Homo sapien
tattctaaattacagactttgcagc

SEQ ID NO: 3345435 - DNA, 25 bp, Homo sapien
cggatatcctcgctgcataactggc

SEQ ID NO: 3345436 - DNA, 25 bp, Homo sapien
ggatatcctcgctgcataactggca

SEQ ID NO: 3345437 - DNA, 25 bp, Homo sapien
cagtgtcctgcatacagtagacatt

SEQ ID NO: 3345438 - DNA, 25 bp, Homo sapien
gggctgctaagggttggtgccctgc

SEQ ID NO: 3345439 - DNA, 25 bp, Homo sapien
ggctgctaagggttggtgccctgct

SEQ ID NO: 3345440 - DNA, 25 bp, Homo sapien
agtgtcctgcatacagtagacattc

SEQ ID NO: 3345441 - DNA, 25 bp, Homo sapien
cagcattttccctcggacattttaa

SEQ ID NO: 3345442 - DNA, 25 bp, Homo sapien
ttgaagagcttggtgtgcatctgac

SEQ ID NO: 3345443 - DNA, 25 bp, Homo sapien
aattggagcccaggtgcttgccgca

SEQ ID NO: 3345444 - DNA, 25 bp, Homo sapien
cctgtgtgggacagtgctgtatgct

SEQ ID NO: 3345445 - DNA, 25 bp, Homo sapien
ctgaagtgatgacattgagtgctgg

SEQ ID NO: 3345446 - DNA, 25 bp, Homo sapien
cagggactgaagtgatgacattgag

SEQ ID NO: 3345447 - DNA, 25 bp, Homo sapien
agcagggactgaagtgatgacattg

SEQ ID NO: 3345448 - DNA, 25 bp, Homo sapien
ggactgaagtgatgacattgagtgc

SEQ ID NO: 3345449 - DNA, 25 bp, Homo sapien
gcgtttgtcttctaatacagccggg

SEQ ID NO: 3345450 - DNA, 25 bp, Homo sapien
cacagagtgcgatggtgcaccggat

SEQ ID NO: 3345451 - DNA, 25 bp, Homo sapien
ggagactggtctttgctgcacagag

SEQ ID NO: 3345452 - DNA, 25 bp, Homo sapien
taaggagtgaatgatatgaggagac

SEQ ID NO: 3345453 - DNA, 25 bp, Homo sapien
acattttgtcttcccgaaagaagtg

SEQ ID NO: 3345454 - DNA, 25 bp, Homo sapien
tgttcacgtagcatataattcaccc

SEQ ID NO: 3345455 - DNA, 25 bp, Homo sapien
ccaagaattagctctgtaagtgtaa

SEQ ID NO: 3345456 - DNA, 25 bp, Homo sapien
aagaagtgccttaccctttagccat

SEQ ID NO: 3345457 - DNA, 25 bp, Homo sapien
cactactaactttggacttgagaaa

SEQ ID NO: 3345458 - DNA, 25 bp, Homo sapien
agaggagtcactactaactttggac

SEQ ID NO: 3345459 - DNA, 25 bp, Homo sapien
agtcttagcatgttccccaaatgta

SEQ ID NO: 3345460 - DNA, 25 bp, Homo sapien
tgtaagacagtcttagcatgttccc

SEQ ID NO: 3345461 - DNA, 25 bp, Homo sapien
tatagaaggaagttgaacatggatc

SEQ ID NO: 3345462 - DNA, 25 bp, Homo sapien
ctatatagaaggaagttgaacatgg

SEQ ID NO: 3345463 - DNA, 25 bp, Homo sapien
agaaggaagttgaacatggatcata

SEQ ID NO: 3345464 - DNA, 25 bp, Homo sapien
tagaaggaagttgaacatggatcat

SEQ ID NO: 3345465 - DNA, 25 bp, Homo sapien
gtcctgaactgagcttctgggcctc

SEQ ID NO: 3345466 - DNA, 25 bp, Homo sapien
gaacagccttttatggactgcagta

SEQ ID NO: 3345467 - DNA, 25 bp, Homo sapien
cacgaggtgtggttgagtcttcatg

SEQ ID NO: 3345468 - DNA, 25 bp, Homo sapien
cttgcaggtgccacaaaattactgt

SEQ ID NO: 3345469 - DNA, 25 bp, Homo sapien
tgccaaaacacttttctcttcccca

SEQ ID NO: 3345470 - DNA, 25 bp, Homo sapien
aaacacttttctcttccccagccat

SEQ ID NO: 3345471 - DNA, 25 bp, Homo sapien
tgggctctctttttttgccaaaaca

SEQ ID NO: 3345472 - DNA, 25 bp, Homo sapien
tgcccacactgttctctaactcaag

SEQ ID NO: 3345473 - DNA, 25 bp, Homo sapien
tttggttcctcctagataacatgtt

SEQ ID NO: 3345474 - DNA, 25 bp, Homo sapien
tgagccatcgtgtccagtccctaaa

SEQ ID NO: 3345475 - DNA, 25 bp, Homo sapien
aggctggagttcaattgtgctgtca

SEQ ID NO: 3345476 - DNA, 25 bp, Homo sapien
aaggcctccgaatgccaagctagcc

SEQ ID NO: 3345477 - DNA, 25 bp, Homo sapien
cttaaaggggcggatgtcagccctg

SEQ ID NO: 3345478 - DNA, 25 bp, Homo sapien
aagctagcccctctcgagggcggcg

SEQ ID NO: 3345479 - DNA, 25 bp, Homo sapien
tggattcctagagtgccaacaaggc

SEQ ID NO: 3345480 - DNA, 25 bp, Homo sapien
tattctccacattgtgagtcctcat

SEQ ID NO: 3345481 - DNA, 25 bp, Homo sapien
cgtgttcacatttgtattattctcc

SEQ ID NO: 3345482 - DNA, 25 bp, Homo sapien
gagtctggaacatcgtgttcacatt

SEQ ID NO: 3345483 - DNA, 25 bp, Homo sapien
catttgtattattctccacattgtg

SEQ ID NO: 3345484 - DNA, 25 bp, Homo sapien
ttcctggttctatcctaacggtgcc

SEQ ID NO: 3345485 - DNA, 25 bp, Homo sapien
tccttcggtgatatcgaaactgact

SEQ ID NO: 3345486 - DNA, 25 bp, Homo sapien
tactccatgtcagtgcaggcattga

SEQ ID NO: 3345487 - DNA, 25 bp, Homo sapien
cattgcacttgtgactccgggggac

SEQ ID NO: 3345488 - DNA, 25 bp, Homo sapien
tctgctttttcaatcaacgtctttg

SEQ ID NO: 3345489 - DNA, 25 bp, Homo sapien
gctttttcaatcaacgtctttggat

SEQ ID NO: 3345490 - DNA, 25 bp, Homo sapien
tttcaatcaacgtctttggatcctt

SEQ ID NO: 3345491 - DNA, 25 bp, Homo sapien
tcccaggggtaattgtagcttctgc

SEQ ID NO: 3345492 - DNA, 25 bp, Homo sapien
gaatttccttgtcctgcggaaaggc

SEQ ID NO: 3345493 - DNA, 25 bp, Homo sapien
tttccttgtcctgcggaaaggcatt

SEQ ID NO: 3345494 - DNA, 25 bp, Homo sapien
tgtcctgcggaaaggcattgcctgc

SEQ ID NO: 3345495 - DNA, 25 bp, Homo sapien
ccttgtcctgcggaaaggcattgcc

SEQ ID NO: 3345496 - DNA, 25 bp, Homo sapien
agtttatagttcatatttgtgtcaa

SEQ ID NO: 3345497 - DNA, 25 bp, Homo sapien
tatttcaaatctaagtagtttatag

SEQ ID NO: 3345498 - DNA, 25 bp, Homo sapien
ttgcagcctctaaaattcttgccat

SEQ ID NO: 3345499 - DNA, 25 bp, Homo sapien
tttcacgagacctcacacatgcttt

SEQ ID NO: 3345500 - DNA, 25 bp, Homo sapien
tgctccttctagcacctcttttctt

SEQ ID NO: 3345501 - DNA, 25 bp, Homo sapien
catggaggtccttgtacgtccctgc

SEQ ID NO: 3345502 - DNA, 25 bp, Homo sapien
tgtggccacatcagtctggaatacc

SEQ ID NO: 3345503 - DNA, 25 bp, Homo sapien
ggaggtccttgtacgtccctgcagg

SEQ ID NO: 3345504 - DNA, 25 bp, Homo sapien
gagatatttgctcatattgggactt

SEQ ID NO: 3345505 - DNA, 25 bp, Homo sapien
tctttgtatttgtctgaagatcatt

SEQ ID NO: 3345506 - DNA, 25 bp, Homo sapien
catgttagtattgtgctcgactgta

SEQ ID NO: 3345507 - DNA, 25 bp, Homo sapien
catattgtctgggtattctgagaga

SEQ ID NO: 3345508 - DNA, 25 bp, Homo sapien
aggccagcttgtgagtgcactttct

SEQ ID NO: 3345509 - DNA, 25 bp, Homo sapien
tgttcagtgtccctccgtggtagct

SEQ ID NO: 3345510 - DNA, 25 bp, Homo sapien
tggtagctgctcattgaggcccact

SEQ ID NO: 3345511 - DNA, 25 bp, Homo sapien
tctctgggttttgatcgtgggcata

SEQ ID NO: 3345512 - DNA, 25 bp, Homo sapien
cgtgggcatatgaggcagtccagcc

SEQ ID NO: 3345513 - DNA, 25 bp, Homo sapien
gagttcatgctattgcgctccaacg

SEQ ID NO: 3345514 - DNA, 25 bp, Homo sapien
gggcttttaattccagaggtcgata

SEQ ID NO: 3345515 - DNA, 25 bp, Homo sapien
gcatgtgtaagtactctccagatca

SEQ ID NO: 3345516 - DNA, 25 bp, Homo sapien
tctttgaagttagagacactctggc

SEQ ID NO: 3345517 - DNA, 25 bp, Homo sapien
agccctcacgatcactgtctaattt

SEQ ID NO: 3345518 - DNA, 25 bp, Homo sapien
atgccacattttgcataaccattca

SEQ ID NO: 3345519 - DNA, 25 bp, Homo sapien
cctcacgatcactgtctaattttag

SEQ ID NO: 3345520 - DNA, 25 bp, Homo sapien
ttgtgcagccctcacgatcactgtc

SEQ ID NO: 3345521 - DNA, 25 bp, Homo sapien
ttgttgacctctcatctgtggcccc

SEQ ID NO: 3345522 - DNA, 25 bp, Homo sapien
tgagtgttccagtaaatgatagggc

SEQ ID NO: 3345523 - DNA, 25 bp, Homo sapien
cacagtgtccctactcttgtggtgt

SEQ ID NO: 3345524 - DNA, 25 bp, Homo sapien
taagtcactttctaaggctgctcct

SEQ ID NO: 3345525 - DNA, 25 bp, Homo sapien
cagtttggaggtgctagaactcccc

SEQ ID NO: 3345526 - DNA, 25 bp, Homo sapien
ttaaaatgcctctcgctaatagaag

SEQ ID NO: 3345527 - DNA, 25 bp, Homo sapien
gggattctgaaatatgtcctacaac

SEQ ID NO: 3345528 - DNA, 25 bp, Homo sapien
tccgtccagagatttactaagaatg

SEQ ID NO: 3345529 - DNA, 25 bp, Homo sapien
taaccgattagctcatggaccttgg

SEQ ID NO: 3345530 - DNA, 25 bp, Homo sapien
tagacatttttgaagcgtgctggcc

SEQ ID NO: 3345531 - DNA, 25 bp, Homo sapien
gcacctgctccacagatggtatgaa

SEQ ID NO: 3345532 - DNA, 25 bp, Homo sapien
tgtgatttgatggaactacctggct

SEQ ID NO: 3345533 - DNA, 25 bp, Homo sapien
ctcatctctgctaagaataagagaa

SEQ ID NO: 3345534 - DNA, 25 bp, Homo sapien
cctcatctctgctaagaataagaga

SEQ ID NO: 3345535 - DNA, 25 bp, Homo sapien
catgcgtgagaactggatcagcctc

SEQ ID NO: 3345536 - DNA, 25 bp, Homo sapien
gcagcaccagcacgactactgagga

SEQ ID NO: 3345537 - DNA, 25 bp, Homo sapien
tcaaggaacgggagctctgtccact

SEQ ID NO: 3345538 - DNA, 25 bp, Homo sapien
gatcagcctcagatatgcaagtggc

SEQ ID NO: 3345539 - DNA, 25 bp, Homo sapien
cacttacggcaagggctgttcctct

SEQ ID NO: 3345540 - DNA, 25 bp, Homo sapien
taggagttgagcaagaaatggctgc

SEQ ID NO: 3345541 - DNA, 25 bp, Homo sapien
cctgaacaagggagacttctaagaa

SEQ ID NO: 3345542 - DNA, 25 bp, Homo sapien
aaaatgaagttgctcagccgttgag

SEQ ID NO: 3345543 - DNA, 25 bp, Homo sapien
tcctctgcgcttccagcgataaggg

SEQ ID NO: 3345544 - DNA, 25 bp, Homo sapien
tcaaggatacccaccttaaccgctg

SEQ ID NO: 3345545 - DNA, 25 bp, Homo sapien
gataagggcaccatccatatctttg

SEQ ID NO: 3345546 - DNA, 25 bp, Homo sapien
atatctttgctctcaaggataccca

SEQ ID NO: 3345547 - DNA, 25 bp, Homo sapien
cctatgattgggcagtacgtggact

SEQ ID NO: 3345548 - DNA, 25 bp, Homo sapien
gtgtagatgggaccttccacaaata

SEQ ID NO: 3345549 - DNA, 25 bp, Homo sapien
gcttgcatctgctccttcggtcgca

SEQ ID NO: 3345550 - DNA, 25 bp, Homo sapien
gagcctggcgaggttcactgtgcct

SEQ ID NO: 3345551 - DNA, 25 bp, Homo sapien
tgtcctttagagcaggagtccccaa

SEQ ID NO: 3345552 - DNA, 25 bp, Homo sapien
caggaatcagtggacataaccttgg

SEQ ID NO: 3345553 - DNA, 25 bp, Homo sapien
caatccagaagctgatttgtggcag

SEQ ID NO: 3345554 - DNA, 25 bp, Homo sapien
ttggatctgaggcacgtgggccaca

SEQ ID NO: 3345555 - DNA, 25 bp, Homo sapien
tgccttttggtgtcggagtgccaca

SEQ ID NO: 3345556 - DNA, 25 bp, Homo sapien
cgtgtgtggccaacaggttcaggac

SEQ ID NO: 3345557 - DNA, 25 bp, Homo sapien
cacagcccgtggtacatgaaaatga

SEQ ID NO: 3345558 - DNA, 25 bp, Homo sapien
caaagttcttatcggttggccagca

SEQ ID NO: 3345559 - DNA, 25 bp, Homo sapien
atgtacagaatgctggtgtgacagt

SEQ ID NO: 3345560 - DNA, 25 bp, Homo sapien
catgcttctagtaattacagttcat

SEQ ID NO: 3345561 - DNA, 25 bp, Homo sapien
ggtgtgacagttcacaattgtttgc

SEQ ID NO: 3345562 - DNA, 25 bp, Homo sapien
tagatatgtcaatgtacagaatgct

SEQ ID NO: 3345563 - DNA, 25 bp, Homo sapien
aggttcaggatgtccgcctctcggt

SEQ ID NO: 3345564 - DNA, 25 bp, Homo sapien
caaagtcttgattgattggccagca

SEQ ID NO: 3345565 - DNA, 25 bp, Homo sapien
taaggagcaacttgactcatttcac

SEQ ID NO: 3345566 - DNA, 25 bp, Homo sapien
tccatcccatgtgcgtggccagcag

SEQ ID NO: 3345567 - DNA, 25 bp, Homo sapien
acagctgttgcatgggtttgagcac

SEQ ID NO: 3345568 - DNA, 25 bp, Homo sapien
ccattgagaaggtgtggcacctgct

SEQ ID NO: 3345569 - DNA, 25 bp, Homo sapien
tacctgtggcccattgagaaggtgt

SEQ ID NO: 3345570 - DNA, 25 bp, Homo sapien
cagaggctttgggagtaacccactt

SEQ ID NO: 3345571 - DNA, 25 bp, Homo sapien
tgcttgacaacaaagtttacttagt

SEQ ID NO: 3345572 - DNA, 25 bp, Homo sapien
taatattaaatgttggaccaaggat

SEQ ID NO: 3345573 - DNA, 25 bp, Homo sapien
taaacacttgggatcatctctaaaa

SEQ ID NO: 3345574 - DNA, 25 bp, Homo sapien
gatttcaaccatgcagtatgttgct

SEQ ID NO: 3345575 - DNA, 25 bp, Homo sapien
tattcctatcaccacaggttgccag

SEQ ID NO: 3345576 - DNA, 25 bp, Homo sapien
caccaaataacgaagccaatccagg

SEQ ID NO: 3345577 - DNA, 25 bp, Homo sapien
taatgccttgaactattcctatcac

SEQ ID NO: 3345578 - DNA, 25 bp, Homo sapien
gccctagtgaatagataatgccttg

SEQ ID NO: 3345579 - DNA, 25 bp, Homo sapien
ggatcatcacacacttttagccttg

SEQ ID NO: 3345580 - DNA, 25 bp, Homo sapien
ggaattccaggacagtggatgaaca

SEQ ID NO: 3345581 - DNA, 25 bp, Homo sapien
gaccctttgttaaagtatcacttga

SEQ ID NO: 3345582 - DNA, 25 bp, Homo sapien
tctggacttggtatcctcattttag

SEQ ID NO: 3345583 - DNA, 25 bp, Homo sapien
ttgagacccaaagatccactgatgt

SEQ ID NO: 3345584 - DNA, 25 bp, Homo sapien
aatggtatgggccttgagacccaaa

SEQ ID NO: 3345585 - DNA, 25 bp, Homo sapien
ccaaagatccactgatgttgcctcc

SEQ ID NO: 3345586 - DNA, 25 bp, Homo sapien
cagagggtggtctcttgcaatggta

SEQ ID NO: 3345587 - DNA, 25 bp, Homo sapien
ctgcagtgcccagagatgagggcat

SEQ ID NO: 3345588 - DNA, 25 bp, Homo sapien
tgatgtctatacaaatctcagtggc

SEQ ID NO: 3345589 - DNA, 25 bp, Homo sapien
tcctgcgaccttaatgtgacttgaa

SEQ ID NO: 3345590 - DNA, 25 bp, Homo sapien
gctgccagtagccattgttaaacca

SEQ ID NO: 3345591 - DNA, 25 bp, Homo sapien
tcactagtgtttggcctaagaagag

SEQ ID NO: 3345592 - DNA, 25 bp, Homo sapien
ttgcagtgtctcatcacatttccac

SEQ ID NO: 3345593 - DNA, 25 bp, Homo sapien
tacagcccttaatgtggaaaatata

SEQ ID NO: 3345594 - DNA, 25 bp, Homo sapien
gaaaatatagaacataaagagtgga

SEQ ID NO: 3345595 - DNA, 25 bp, Homo sapien
catttccactacagcccttaatgtg

SEQ ID NO: 3345596 - DNA, 25 bp, Homo sapien
aagataatctcttataacctttttg

SEQ ID NO: 3345597 - DNA, 25 bp, Homo sapien
caagataatctcttataaccttttt

SEQ ID NO: 3345598 - DNA, 25 bp, Homo sapien
tcaagataatctcttataacctttt

SEQ ID NO: 3345599 - DNA, 25 bp, Homo sapien
agataatctcttataacctttttgt

SEQ ID NO: 3345600 - DNA, 25 bp, Homo sapien
caacgatacaccaacctcggatgca

SEQ ID NO: 3345601 - DNA, 25 bp, Homo sapien
aagtctgctttttcccaacgataca

SEQ ID NO: 3345602 - DNA, 25 bp, Homo sapien
ccaacctcggatgcagaattcatga

SEQ ID NO: 3345603 - DNA, 25 bp, Homo sapien
tctttgcagtaagggcaagtctgct

SEQ ID NO: 3345604 - DNA, 25 bp, Homo sapien
ggcatggaatggtcccatcttcagg

SEQ ID NO: 3345605 - DNA, 25 bp, Homo sapien
tcttcagggtctagtggtggagtca

SEQ ID NO: 3345606 - DNA, 25 bp, Homo sapien
gcaatgtctggttcatgatggcatg

SEQ ID NO: 3345607 - DNA, 25 bp, Homo sapien
ggaggcttctagatatgaaaaggca

SEQ ID NO: 3345608 - DNA, 25 bp, Homo sapien
caccttgttattgtgcgtttctcag

SEQ ID NO: 3345609 - DNA, 25 bp, Homo sapien
catgtaatcagacttgtcttaggca

SEQ ID NO: 3345610 - DNA, 25 bp, Homo sapien
gatgtcttccataagtgtattgtta

SEQ ID NO: 3345611 - DNA, 25 bp, Homo sapien
tttctcaggcatttaccgtagcatt

SEQ ID NO: 3345612 - DNA, 25 bp, Homo sapien
catttgtatacgtctcctggtccag

SEQ ID NO: 3345613 - DNA, 25 bp, Homo sapien
ccagggacttactctagtgtagcag

SEQ ID NO: 3345614 - DNA, 25 bp, Homo sapien
ttggaggtgtagcaagtcaaggcca

SEQ ID NO: 3345615 - DNA, 25 bp, Homo sapien
cagcaacgatgtagaagttccctcc

SEQ ID NO: 3345616 - DNA, 25 bp, Homo sapien
aatatgactcatgctaaaatgggcc

SEQ ID NO: 3345617 - DNA, 25 bp, Homo sapien
aaaacttgcacactggcagaacttc

SEQ ID NO: 3345618 - DNA, 25 bp, Homo sapien
gggccattgagtcagcacagaaatg

SEQ ID NO: 3345619 - DNA, 25 bp, Homo sapien
tatgactcatatttgcccatttctc

SEQ ID NO: 3345620 - DNA, 25 bp, Homo sapien
aactaactgggtacatagcgatgac

SEQ ID NO: 3345621 - DNA, 25 bp, Homo sapien
ggacaccgaggtatgactgactaaa

SEQ ID NO: 3345622 - DNA, 25 bp, Homo sapien
catgtacaacaatccctaagggctt

SEQ ID NO: 3345623 - DNA, 25 bp, Homo sapien
gatgattggccaacctaagcctaac

SEQ ID NO: 3345624 - DNA, 25 bp, Homo sapien
tggaggagcccatggtccaagaaca

SEQ ID NO: 3345625 - DNA, 25 bp, Homo sapien
tgtaatccaaggtgtcttgctgcct

SEQ ID NO: 3345626 - DNA, 25 bp, Homo sapien
tacctatcatatgaagatccctcag

SEQ ID NO: 3345627 - DNA, 25 bp, Homo sapien
ggatagctatttgggatagaaccca

SEQ ID NO: 3345628 - DNA, 25 bp, Homo sapien
tgttgccacaggtaggttcctagga

SEQ ID NO: 3345629 - DNA, 25 bp, Homo sapien
caaacaggaagactcgactgggctg

SEQ ID NO: 3345630 - DNA, 25 bp, Homo sapien
gatctgctaagattcagaccttggg

SEQ ID NO: 3345631 - DNA, 25 bp, Homo sapien
gaggttcaccttaattagcagttca

SEQ ID NO: 3345632 - DNA, 25 bp, Homo sapien
aggtgttttcaatgagcccttcttc

SEQ ID NO: 3345633 - DNA, 25 bp, Homo sapien
gataagctccttgtaggcaaccggc

SEQ ID NO: 3345634 - DNA, 25 bp, Homo sapien
cacagactgcacagatattgtccga

SEQ ID NO: 3345635 - DNA, 25 bp, Homo sapien
tcttcatcaagctccacaatgatct

SEQ ID NO: 3345636 - DNA, 25 bp, Homo sapien
tcagtcacaagcacatgcacaagtg

SEQ ID NO: 3345637 - DNA, 25 bp, Homo sapien
cagtcacaagcacatgcacaagtgt

SEQ ID NO: 3345638 - DNA, 25 bp, Homo sapien
ctcagtcacaagcacatgcacaagt

SEQ ID NO: 3345639 - DNA, 25 bp, Homo sapien
tgttaagaactggtcgggttggatc

SEQ ID NO: 3345640 - DNA, 25 bp, Homo sapien
cgctggaataaacagacaggatgac

SEQ ID NO: 3345641 - DNA, 25 bp, Homo sapien
tcaggtgagaagtttcccaaaagct

SEQ ID NO: 3345642 - DNA, 25 bp, Homo sapien
tgtcttgccaggtaaagtctcttct

SEQ ID NO: 3345643 - DNA, 25 bp, Homo sapien
tctccccattactccatagtagagg

SEQ ID NO: 3345644 - DNA, 25 bp, Homo sapien
tagtggaagccatgtagtctgagca

SEQ ID NO: 3345645 - DNA, 25 bp, Homo sapien
tctgagcagatctcggcaaagtctc

SEQ ID NO: 3345646 - DNA, 25 bp, Homo sapien
tagtagaggccgtagaacaaagaca

SEQ ID NO: 3345647 - DNA, 25 bp, Homo sapien
gcaatagttcttagccctaaacata

SEQ ID NO: 3345648 - DNA, 25 bp, Homo sapien
gcacattaacatatgggcccaccac

SEQ ID NO: 3345649 - DNA, 25 bp, Homo sapien
gattctttaacacagcaaggattga

SEQ ID NO: 3345650 - DNA, 25 bp, Homo sapien
gagtatgtctgctgtagaatttaga

SEQ ID NO: 3345651 - DNA, 25 bp, Homo sapien
gaaaaacagattgaatccacacatt

SEQ ID NO: 3345652 - DNA, 25 bp, Homo sapien
acccacaacaccaaatgcatagctg

SEQ ID NO: 3345653 - DNA, 25 bp, Homo sapien
cacattgtaaacatgatcgccaagt

SEQ ID NO: 3345654 - DNA, 25 bp, Homo sapien
tgcatagctgagtttgtagatcaaa

SEQ ID NO: 3345655 - DNA, 25 bp, Homo sapien
tgtgaccttccaaggcctttccttg

SEQ ID NO: 3345656 - DNA, 25 bp, Homo sapien
tctgtgaccttccaaggcctttcct

SEQ ID NO: 3345657 - DNA, 25 bp, Homo sapien
ctgtgaccttccaaggcctttcctt

SEQ ID NO: 3345658 - DNA, 25 bp, Homo sapien
cctctgtgaccttccaaggcctttc

SEQ ID NO: 3345659 - DNA, 25 bp, Homo sapien
gggacaacccacatctgcaacaagg

SEQ ID NO: 3345660 - DNA, 25 bp, Homo sapien
taactggtaataacggagaacatcc

SEQ ID NO: 3345661 - DNA, 25 bp, Homo sapien
gccaccagtataattttatcgtgaa

SEQ ID NO: 3345662 - DNA, 25 bp, Homo sapien
gagaacatcccccacatagacagaa

SEQ ID NO: 3345663 - DNA, 25 bp, Homo sapien
tttcaatgaccaagtgcctgaatgg

SEQ ID NO: 3345664 - DNA, 25 bp, Homo sapien
tgaacaggaagtatctttcaatgac

SEQ ID NO: 3345665 - DNA, 25 bp, Homo sapien
caggaagtatctttcaatgaccaag

SEQ ID NO: 3345666 - DNA, 25 bp, Homo sapien
tatctttcaatgaccaagtgcctga

SEQ ID NO: 3345667 - DNA, 25 bp, Homo sapien
aactgtaagcttccctagacaggcc

SEQ ID NO: 3345668 - DNA, 25 bp, Homo sapien
ctgtaagcttccctagacaggccag

SEQ ID NO: 3345669 - DNA, 25 bp, Homo sapien
tgtaagcttccctagacaggccagg

SEQ ID NO: 3345670 - DNA, 25 bp, Homo sapien
aaactgtaagcttccctagacaggc

SEQ ID NO: 3345671 - DNA, 25 bp, Homo sapien
caaatttgtgtgcacagaattgttt

SEQ ID NO: 3345672 - DNA, 25 bp, Homo sapien
ttgtgtgcacagaattgtttgtagc

SEQ ID NO: 3345673 - DNA, 25 bp, Homo sapien
ccatgggattagtaatgatgatctc

SEQ ID NO: 3345674 - DNA, 25 bp, Homo sapien
tctttttatgtccatgggattagta

SEQ ID NO: 3345675 - DNA, 25 bp, Homo sapien
ggtttatcagatttattgatctttt

SEQ ID NO: 3345676 - DNA, 25 bp, Homo sapien
tctggctagaggtttatcagattta

SEQ ID NO: 3345677 - DNA, 25 bp, Homo sapien
ttcttggttagtctggctagaggtt

SEQ ID NO: 3345678 - DNA, 25 bp, Homo sapien
ctagaggtttatcagatttattgat

SEQ ID NO: 3345679 - DNA, 25 bp, Homo sapien
tcatgagaggcaggataacaggcgc

SEQ ID NO: 3345680 - DNA, 25 bp, Homo sapien
tggctttgtcaaagtgctagacagg

SEQ ID NO: 3345681 - DNA, 25 bp, Homo sapien
ggtgatccttaggactacagagccc

SEQ ID NO: 3345682 - DNA, 25 bp, Homo sapien
actgggtagccataaaacataggag

SEQ ID NO: 3345683 - DNA, 25 bp, Homo sapien
tgtgtgacagagggacatagacata

SEQ ID NO: 3345684 - DNA, 25 bp, Homo sapien
ctgtgtgacagagggacatagacat

SEQ ID NO: 3345685 - DNA, 25 bp, Homo sapien
gtgtgacagagggacatagacatag

SEQ ID NO: 3345686 - DNA, 25 bp, Homo sapien
ggcagtcaaaagcaagtccctggag

SEQ ID NO: 3345687 - DNA, 25 bp, Homo sapien
ggaggtggcagtcaaaagcaagtcc

SEQ ID NO: 3345688 - DNA, 25 bp, Homo sapien
tcaaaagcaagtccctggagaggca

SEQ ID NO: 3345689 - DNA, 25 bp, Homo sapien
ctaaaggagtcagggggaggtggca

SEQ ID NO: 3345690 - DNA, 25 bp, Homo sapien
tggccccggtgcatcttgtacatcc

SEQ ID NO: 3345691 - DNA, 25 bp, Homo sapien
caatgaccagaacgcagaggaagat

SEQ ID NO: 3345692 - DNA, 25 bp, Homo sapien
tgtaggatcggccatgcctctgtct

SEQ ID NO: 3345693 - DNA, 25 bp, Homo sapien
acgtgcatggaatcgtggccccggt

SEQ ID NO: 3345694 - DNA, 25 bp, Homo sapien
ttccatgtgtcttctgcagaaagct

SEQ ID NO: 3345695 - DNA, 25 bp, Homo sapien
ctgcagaaagctttgtatgagagag

SEQ ID NO: 3345696 - DNA, 25 bp, Homo sapien
atgtgtcttctgcagaaagctttgt

SEQ ID NO: 3345697 - DNA, 25 bp, Homo sapien
gtcttctgcagaaagctttgtatga

SEQ ID NO: 3345698 - DNA, 25 bp, Homo sapien
gaatctgtaggtggccagcgctggc

SEQ ID NO: 3345699 - DNA, 25 bp, Homo sapien
aatctgtaggtggccagcgctggcc

SEQ ID NO: 3345700 - DNA, 25 bp, Homo sapien
ctgaatctgtaggtggccagcgctg

SEQ ID NO: 3345701 - DNA, 25 bp, Homo sapien
tgaatctgtaggtggccagcgctgg

SEQ ID NO: 3345702 - DNA, 25 bp, Homo sapien
ggggcctccagcaccggcgctgcct

SEQ ID NO: 3345703 - DNA, 25 bp, Homo sapien
ggggggcctccagcaccggcgctgc

SEQ ID NO: 3345704 - DNA, 25 bp, Homo sapien
caccggcgctgccttccgcgccgcc

SEQ ID NO: 3345705 - DNA, 25 bp, Homo sapien
gggggcctccagcaccggcgctgcc

SEQ ID NO: 3345706 - DNA, 25 bp, Homo sapien
tgccggggagggtcccgcagagtcc

SEQ ID NO: 3345707 - DNA, 25 bp, Homo sapien
cctgccggggagggtcccgcagagt

SEQ ID NO: 3345708 - DNA, 25 bp, Homo sapien
cgggagccgagggtgagagccggat

SEQ ID NO: 3345709 - DNA, 25 bp, Homo sapien
ggagggtcccgcagagtccgcagaa

SEQ ID NO: 3345710 - DNA, 25 bp, Homo sapien
cattcagccagccattgtcgccgat

SEQ ID NO: 3345711 - DNA, 25 bp, Homo sapien
gcgggagatgggagcctcccggcac

SEQ ID NO: 3345712 - DNA, 25 bp, Homo sapien
tcttgagccctaccgggtgcgtgtg

SEQ ID NO: 3345713 - DNA, 25 bp, Homo sapien
cattgtcgccgataaagcgtcttga

SEQ ID NO: 3345714 - DNA, 25 bp, Homo sapien
ttccagtttgtgatggctcgtattt

SEQ ID NO: 3345715 - DNA, 25 bp, Homo sapien
tgtgatggctcgtatttgtcaacac

SEQ ID NO: 3345716 - DNA, 25 bp, Homo sapien
tccagtttgtgatggctcgtatttg

SEQ ID NO: 3345717 - DNA, 25 bp, Homo sapien
agtttgtgatggctcgtatttgtca

SEQ ID NO: 3345718 - DNA, 25 bp, Homo sapien
cagtggctccctccagccttcctac

SEQ ID NO: 3345719 - DNA, 25 bp, Homo sapien
ttccgcagtggctccctccagcctt

SEQ ID NO: 3345720 - DNA, 25 bp, Homo sapien
ttgttccgcagtggctccctccagc

SEQ ID NO: 3345721 - DNA, 25 bp, Homo sapien
gcagtggctccctccagccttccta

SEQ ID NO: 3345722 - DNA, 25 bp, Homo sapien
ctagaccactcagcaattttcccca

SEQ ID NO: 3345723 - DNA, 25 bp, Homo sapien
tagaccactcagcaattttccccat

SEQ ID NO: 3345724 - DNA, 25 bp, Homo sapien
cctagaccactcagcaattttcccc

SEQ ID NO: 3345725 - DNA, 25 bp, Homo sapien
ttacaggtaagctacaatgggttta

SEQ ID NO: 3345726 - DNA, 25 bp, Homo sapien
ggtaaactactatgtatattacagg

SEQ ID NO: 3345727 - DNA, 25 bp, Homo sapien
tatttacagtgttggttaaagcaat

SEQ ID NO: 3345728 - DNA, 25 bp, Homo sapien
agaataggtaaaacaggatgtaaag

SEQ ID NO: 3345729 - DNA, 25 bp, Homo sapien
caaggcttaaagtactcaagtcaat

SEQ ID NO: 3345730 - DNA, 25 bp, Homo sapien
aacaaggcttaaagtactcaagtca

SEQ ID NO: 3345731 - DNA, 25 bp, Homo sapien
acaaggcttaaagtactcaagtcaa

SEQ ID NO: 3345732 - DNA, 25 bp, Homo sapien
gccagctttatctcaacagggtttg

SEQ ID NO: 3345733 - DNA, 25 bp, Homo sapien
gaagatgttgagataacagccagct

SEQ ID NO: 3345734 - DNA, 25 bp, Homo sapien
cagacccaagtcacagttgcaccta

SEQ ID NO: 3345735 - DNA, 25 bp, Homo sapien
tttgcatgttatgacaacctcagtg

SEQ ID NO: 3345736 - DNA, 25 bp, Homo sapien
cactcctgtggccttataactcagg

SEQ ID NO: 3345737 - DNA, 25 bp, Homo sapien
agatcccggagcagaaatggtcagc

SEQ ID NO: 3345738 - DNA, 25 bp, Homo sapien
tcctttaggtgaaaacagctatcca

SEQ ID NO: 3345739 - DNA, 25 bp, Homo sapien
tatttctacaagattcgggtgggct

SEQ ID NO: 3345740 - DNA, 25 bp, Homo sapien
agatgcgcttgaactctctctgccc

SEQ ID NO: 3345741 - DNA, 25 bp, Homo sapien
cggatgctgcgggagatgcgcttga

SEQ ID NO: 3345742 - DNA, 25 bp, Homo sapien
tgccaccgcttcaccgaggtgatca

SEQ ID NO: 3345743 - DNA, 25 bp, Homo sapien
tagcactgcagcttgcggatgctgc

SEQ ID NO: 3345744 - DNA, 25 bp, Homo sapien
tctcggttgatgtaggttatctcct

SEQ ID NO: 3345745 - DNA, 25 bp, Homo sapien
tgtcccatgaccagatagggcgcgt

SEQ ID NO: 3345746 - DNA, 25 bp, Homo sapien
gatttcttcaggtccctttcggaca

SEQ ID NO: 3345747 - DNA, 25 bp, Homo sapien
gacacaccgttcagcttgtaaatgg

SEQ ID NO: 3345748 - DNA, 25 bp, Homo sapien
ttggatagacctcaccatggtggga

SEQ ID NO: 3345749 - DNA, 25 bp, Homo sapien
gattttcagctaggcccaaacagag

SEQ ID NO: 3345750 - DNA, 25 bp, Homo sapien
gattacactttacctgggagccttg

SEQ ID NO: 3345751 - DNA, 25 bp, Homo sapien
gagactcaagtcgtggaataagcca

SEQ ID NO: 3345752 - DNA, 25 bp, Homo sapien
aagcgtttccattatgtcgttgtca

SEQ ID NO: 3345753 - DNA, 25 bp, Homo sapien
cgtttccattatgtcgttgtcatca

SEQ ID NO: 3345754 - DNA, 25 bp, Homo sapien
tttacaaagcgtttccattatgtcg

SEQ ID NO: 3345755 - DNA, 25 bp, Homo sapien
tacaaagcgtttccattatgtcgtt

SEQ ID NO: 3345756 - DNA, 25 bp, Homo sapien
tctcgtctaggtcatcgaggcagac

SEQ ID NO: 3345757 - DNA, 25 bp, Homo sapien
tctggtattcgatgccgtggcacag

SEQ ID NO: 3345758 - DNA, 25 bp, Homo sapien
gaaacggtcgcactcaagcatgtcg

SEQ ID NO: 3345759 - DNA, 25 bp, Homo sapien
tgcttcatgaccagcgggatccaag

SEQ ID NO: 3345760 - DNA, 25 bp, Homo sapien
agcagcgagccagggccctgcagca

SEQ ID NO: 3345761 - DNA, 25 bp, Homo sapien
aagagcagcagcagcgagccagggc

SEQ ID NO: 3345762 - DNA, 25 bp, Homo sapien
agcagcagcgagccagggccctgca

SEQ ID NO: 3345763 - DNA, 25 bp, Homo sapien
gcagcagcagcgagccagggccctg

SEQ ID NO: 3345764 - DNA, 25 bp, Homo sapien
gccggagttcgagcttgtcccgggc

SEQ ID NO: 3345765 - DNA, 25 bp, Homo sapien
gcggccggagttcgagcttgtcccg

SEQ ID NO: 3345766 - DNA, 25 bp, Homo sapien
agttcgagcttgtcccgggcccgct

SEQ ID NO: 3345767 - DNA, 25 bp, Homo sapien
gaggcggccggagttcgagcttgtc

SEQ ID NO: 3345768 - DNA, 25 bp, Homo sapien
accgggaggacagcgcgggcgaggc

SEQ ID NO: 3345769 - DNA, 25 bp, Homo sapien
aggcgctgcaagcccgcgcgcagct

SEQ ID NO: 3345770 - DNA, 25 bp, Homo sapien
actcggggccccgaaaagctggcag

SEQ ID NO: 3345771 - DNA, 25 bp, Homo sapien
gcggagaagcgggacaccgggagga

SEQ ID NO: 3345772 - DNA, 25 bp, Homo sapien
tcgaaggcatcacgggctctaacac

SEQ ID NO: 3345773 - DNA, 25 bp, Homo sapien
ccgcccttgcagctgtgcgctctgg

SEQ ID NO: 3345774 - DNA, 25 bp, Homo sapien
ctgtgcgctctggaaagctggagta

SEQ ID NO: 3345775 - DNA, 25 bp, Homo sapien
tctggaaagctggagtatgggcccc

SEQ ID NO: 3345776 - DNA, 25 bp, Homo sapien
caaaagacgggcacaaaagatgggc

SEQ ID NO: 3345777 - DNA, 25 bp, Homo sapien
gtggccggcacaaaagacgggcaca

SEQ ID NO: 3345778 - DNA, 25 bp, Homo sapien
cggcacaaaagacgggcacaaaaga

SEQ ID NO: 3345779 - DNA, 25 bp, Homo sapien
ctggtggccggcacaaaagacgggc

SEQ ID NO: 3345780 - DNA, 25 bp, Homo sapien
tgggagtcgcgcctgagtctccatc

SEQ ID NO: 3345781 - DNA, 25 bp, Homo sapien
ccgcgcgccggctgcattgttttgg

SEQ ID NO: 3345782 - DNA, 25 bp, Homo sapien
gtctccatccctgccgtgcgcagtg

SEQ ID NO: 3345783 - DNA, 25 bp, Homo sapien
gctgcccggcttgccgccaggaggt

SEQ ID NO: 3345784 - DNA, 25 bp, Homo sapien
ggccagcttgtttgcccggcccgcg

SEQ ID NO: 3345785 - DNA, 25 bp, Homo sapien
tctggccagcttgtttgcccggccc

SEQ ID NO: 3345786 - DNA, 25 bp, Homo sapien
ctctggccagcttgtttgcccggcc

SEQ ID NO: 3345787 - DNA, 25 bp, Homo sapien
ggcccgcggcgtcccctgcggccca

SEQ ID NO: 3345788 - DNA, 25 bp, Homo sapien
ccactcccttctgcttttgggctaa

SEQ ID NO: 3345789 - DNA, 25 bp, Homo sapien
gaacccacgccacttagtctggtcc

SEQ ID NO: 3345790 - DNA, 25 bp, Homo sapien
gggctaagaccggtccaattgatca

SEQ ID NO: 3345791 - DNA, 25 bp, Homo sapien
gcctttcccacctcaagtcgctctc

SEQ ID NO: 3345792 - DNA, 25 bp, Homo sapien
aatgctgcaggtctacggaagagcc

SEQ ID NO: 3345793 - DNA, 25 bp, Homo sapien
tccaccgggcatcttgcttaaaggg

SEQ ID NO: 3345794 - DNA, 25 bp, Homo sapien
aagagtttctggacaggcaagacct

SEQ ID NO: 3345795 - DNA, 25 bp, Homo sapien
gattctgtcctgtcagggagtccgc

SEQ ID NO: 3345796 - DNA, 25 bp, Homo sapien
tagtaaaatcaaagcggatggaccc

SEQ ID NO: 3345797 - DNA, 25 bp, Homo sapien
cccactctcaagtagtaaaatcaaa

SEQ ID NO: 3345798 - DNA, 25 bp, Homo sapien
caagtagtaaaatcaaagcggatgg

SEQ ID NO: 3345799 - DNA, 25 bp, Homo sapien
ctctcaagtagtaaaatcaaagcgg

SEQ ID NO: 3345800 - DNA, 25 bp, Homo sapien
cgtctggagagcctttgcccctcat

SEQ ID NO: 3345801 - DNA, 25 bp, Homo sapien
gaccccatcggttcagacgcggatt

SEQ ID NO: 3345802 - DNA, 25 bp, Homo sapien
gtgcacctccgtgtacgcttctgct

SEQ ID NO: 3345803 - DNA, 25 bp, Homo sapien
tttccgagaacgagaccagagtctg

SEQ ID NO: 3345804 - DNA, 25 bp, Homo sapien
gagaacaaaagatctgtggcacatt

SEQ ID NO: 3345805 - DNA, 25 bp, Homo sapien
cagagaacaaaagatctgtggcaca

SEQ ID NO: 3345806 - DNA, 25 bp, Homo sapien
aattctctcacagatcacatattct

SEQ ID NO: 3345807 - DNA, 25 bp, Homo sapien
aacaaaagatctgtggcacattgtc

SEQ ID NO: 3345808 - DNA, 25 bp, Homo sapien
tcacaaggagctgtagggtttccct

SEQ ID NO: 3345809 - DNA, 25 bp, Homo sapien
tgatcctagcatcccttcatggctg

SEQ ID NO: 3345810 - DNA, 25 bp, Homo sapien
taggcacttctctacccagtacagt

SEQ ID NO: 3345811 - DNA, 25 bp, Homo sapien
gaagaacatggtcagtgctcacaat

SEQ ID NO: 3345812 - DNA, 25 bp, Homo sapien
tctgtagacctttaagccaggtgga

SEQ ID NO: 3345813 - DNA, 25 bp, Homo sapien
aagtggatctgtagacctttaagcc

SEQ ID NO: 3345814 - DNA, 25 bp, Homo sapien
tgtagacctttaagccaggtggaaa

SEQ ID NO: 3345815 - DNA, 25 bp, Homo sapien
tggatctgtagacctttaagccagg

SEQ ID NO: 3345816 - DNA, 25 bp, Homo sapien
tggtaggagccaatctgtgctttaa

SEQ ID NO: 3345817 - DNA, 25 bp, Homo sapien
ttttctctcgtttggtaggagccaa

SEQ ID NO: 3345818 - DNA, 25 bp, Homo sapien
aagacagtcctcagtcctttttctc

SEQ ID NO: 3345819 - DNA, 25 bp, Homo sapien
tctgacggtagagacagggcgacat

SEQ ID NO: 3345820 - DNA, 25 bp, Homo sapien
aaaagtagggcaaagatgatggcag

SEQ ID NO: 3345821 - DNA, 25 bp, Homo sapien
gatggcagcagtaagacagcatgcg

SEQ ID NO: 3345822 - DNA, 25 bp, Homo sapien
tgtccaaaaagtagggcaaagatga

SEQ ID NO: 3345823 - DNA, 25 bp, Homo sapien
ttgtgtccaaaaagtagggcaaaga

SEQ ID NO: 3345824 - DNA, 25 bp, Homo sapien
ctctgggctcctgggagcagtttcc

SEQ ID NO: 3345825 - DNA, 25 bp, Homo sapien
tctgggctcctgggagcagtttcca

SEQ ID NO: 3345826 - DNA, 25 bp, Homo sapien
taataatactaactccgagagccta

SEQ ID NO: 3345827 - DNA, 25 bp, Homo sapien
tagaaatatagcgtatccacatcaa

SEQ ID NO: 3345828 - DNA, 25 bp, Homo sapien
catcaatttcaaatagttggaaggg

SEQ ID NO: 3345829 - DNA, 25 bp, Homo sapien
gaatatgaggttcttcactgggttc

SEQ ID NO: 3345830 - DNA, 25 bp, Homo sapien
tccttcctgaaaattggatgtgggg

SEQ ID NO: 3345831 - DNA, 25 bp, Homo sapien
tcttccttcctgaaaattggatgtg

SEQ ID NO: 3345832 - DNA, 25 bp, Homo sapien
cttcttccttcctgaaaattggatg

SEQ ID NO: 3345833 - DNA, 25 bp, Homo sapien
tgtggggtctggaagtgcagaggcc

SEQ ID NO: 3345834 - DNA, 25 bp, Homo sapien
ccacagcttgagagaactagtttct

SEQ ID NO: 3345835 - DNA, 25 bp, Homo sapien
gtaggatgcagaaaaccatggcaaa

SEQ ID NO: 3345836 - DNA, 25 bp, Homo sapien
gccacagcttgagagaactagtttc

SEQ ID NO: 3345837 - DNA, 25 bp, Homo sapien
acagcttgagagaactagtttctga

SEQ ID NO: 3345838 - DNA, 25 bp, Homo sapien
cagcgggatcatcagggatgcctct

SEQ ID NO: 3345839 - DNA, 25 bp, Homo sapien
ttacagcgggatcatcagggatgcc

SEQ ID NO: 3345840 - DNA, 25 bp, Homo sapien
gcgggatcatcagggatgcctctgc

SEQ ID NO: 3345841 - DNA, 25 bp, Homo sapien
tacagcgggatcatcagggatgcct

SEQ ID NO: 3345842 - DNA, 25 bp, Homo sapien
gaagtttgtcagctcactccaggta

SEQ ID NO: 3345843 - DNA, 25 bp, Homo sapien
tactggagtggagctcatagagatt

SEQ ID NO: 3345844 - DNA, 25 bp, Homo sapien
tccaggtactggagtggagctcata

SEQ ID NO: 3345845 - DNA, 25 bp, Homo sapien
ctgagccacagaagtttgtcagctc

SEQ ID NO: 3345846 - DNA, 25 bp, Homo sapien
tactctgacatcacatgctgtggat

SEQ ID NO: 3345847 - DNA, 25 bp, Homo sapien
cttactctgacatcacatgctgtgg

SEQ ID NO: 3345848 - DNA, 25 bp, Homo sapien
ttgtggtcttactctgacatcacat

SEQ ID NO: 3345849 - DNA, 25 bp, Homo sapien
ggtcttactctgacatcacatgctg

SEQ ID NO: 3345850 - DNA, 25 bp, Homo sapien
atttccaaattgatgacatgacagc

SEQ ID NO: 3345851 - DNA, 25 bp, Homo sapien
ctcctaatttcagacttgtcactgg

SEQ ID NO: 3345852 - DNA, 25 bp, Homo sapien
cagctgaggcaaaatgtgtgtaaaa

SEQ ID NO: 3345853 - DNA, 25 bp, Homo sapien
ccaaactcctaatttcagacttgtc

SEQ ID NO: 3345854 - DNA, 25 bp, Homo sapien
tgaagattgagggtatggcggaagc

SEQ ID NO: 3345855 - DNA, 25 bp, Homo sapien
gaagaagcgcagcacacagcagtgg

SEQ ID NO: 3345856 - DNA, 25 bp, Homo sapien
ggaagaagggccagtgggtgctcct

SEQ ID NO: 3345857 - DNA, 25 bp, Homo sapien
tatggcggaagctgagttaacgaag

SEQ ID NO: 3345858 - DNA, 25 bp, Homo sapien
tataggatgagtgaggcaaggcact

SEQ ID NO: 3345859 - DNA, 25 bp, Homo sapien
ggaatctgtctgaagagttactata

SEQ ID NO: 3345860 - DNA, 25 bp, Homo sapien
ggaggaaggcatgcatggaattaat

SEQ ID NO: 3345861 - DNA, 25 bp, Homo sapien
caaggcacttgagttgggaggaagg

SEQ ID NO: 3345862 - DNA, 25 bp, Homo sapien
cctagagattctcatgggcctaaga

SEQ ID NO: 3345863 - DNA, 25 bp, Homo sapien
gccagagggcataagcaaggtccgt

SEQ ID NO: 3345864 - DNA, 25 bp, Homo sapien
gagctgaaatatgggcattccatgc

SEQ ID NO: 3345865 - DNA, 25 bp, Homo sapien
tccgtcttcaccatgggagctgaaa

SEQ ID NO: 3345866 - DNA, 25 bp, Homo sapien
tttctcctgctaatactgatttcat

SEQ ID NO: 3345867 - DNA, 25 bp, Homo sapien
ccttttctcctgctaatactgattt

SEQ ID NO: 3345868 - DNA, 25 bp, Homo sapien
ttttctcctgctaatactgatttca

SEQ ID NO: 3345869 - DNA, 25 bp, Homo sapien
cttttctcctgctaatactgatttc

SEQ ID NO: 3345870 - DNA, 25 bp, Homo sapien
gtggttccataggattgaaattgct

SEQ ID NO: 3345871 - DNA, 25 bp, Homo sapien
tggttccataggattgaaattgctt

SEQ ID NO: 3345872 - DNA, 25 bp, Homo sapien
taactgtagtagaggctccagtgcc

SEQ ID NO: 3345873 - DNA, 25 bp, Homo sapien
caaaggtggcatggttctgtgtcca

SEQ ID NO: 3345874 - DNA, 25 bp, Homo sapien
cattttgctggagtggattgtgaca

SEQ ID NO: 3345875 - DNA, 25 bp, Homo sapien
tattcctggcttcatggctattggg

SEQ ID NO: 3345876 - DNA, 25 bp, Homo sapien
ttacagcattttggtcgtggcagag

SEQ ID NO: 3345877 - DNA, 25 bp, Homo sapien
cagcattttggtcgtggcagaggta

SEQ ID NO: 3345878 - DNA, 25 bp, Homo sapien
cattttggtcgtggcagaggtattg

SEQ ID NO: 3345879 - DNA, 25 bp, Homo sapien
tacagcattttggtcgtggcagagg

SEQ ID NO: 3345880 - DNA, 25 bp, Homo sapien
cgctttggggacaagaatatgtgag

SEQ ID NO: 3345881 - DNA, 25 bp, Homo sapien
tcagaaccttctgcgtgtgtcttat

SEQ ID NO: 3345882 - DNA, 25 bp, Homo sapien
ccagaaaaggatcccaatgacacca

SEQ ID NO: 3345883 - DNA, 25 bp, Homo sapien
tcaagcctgcttggtatcagaacct

SEQ ID NO: 3345884 - DNA, 25 bp, Homo sapien
ggggtatggagacgcatgaagatta

SEQ ID NO: 3345885 - DNA, 25 bp, Homo sapien
tatggagacgcatgaagattagatt

SEQ ID NO: 3345886 - DNA, 25 bp, Homo sapien
ctggggtatggagacgcatgaagat

SEQ ID NO: 3345887 - DNA, 25 bp, Homo sapien
ggtatggagacgcatgaagattaga

SEQ ID NO: 3345888 - DNA, 25 bp, Homo sapien
aaggccgtggatcttggttgatgcc

SEQ ID NO: 3345889 - DNA, 25 bp, Homo sapien
gatgccaacagatgccgtgtcgtga

SEQ ID NO: 3345890 - DNA, 25 bp, Homo sapien
cactgttccccagatcctagctggc

SEQ ID NO: 3345891 - DNA, 25 bp, Homo sapien
tgtagatgtctgaatgccatgaagt

SEQ ID NO: 3345892 - DNA, 25 bp, Homo sapien
ctgggttacacatgtccatccagtc

SEQ ID NO: 3345893 - DNA, 25 bp, Homo sapien
ggtgagatatactgaggtcctctgg

SEQ ID NO: 3345894 - DNA, 25 bp, Homo sapien
taatcttccacagaaacgtctgggt

SEQ ID NO: 3345895 - DNA, 25 bp, Homo sapien
gcttaatggagcacgcaattgttgg

SEQ ID NO: 3345896 - DNA, 25 bp, Homo sapien
ccatgtttatcggagagttcactct

SEQ ID NO: 3345897 - DNA, 25 bp, Homo sapien
taggtatcccatgtttatcggagag

SEQ ID NO: 3345898 - DNA, 25 bp, Homo sapien
ttgtgtttgagcttgtgattgaagg

SEQ ID NO: 3345899 - DNA, 25 bp, Homo sapien
ctgtggtctctgacattgtaggtat

SEQ ID NO: 3345900 - DNA, 25 bp, Homo sapien
tgtctttcaacctactattattctc

SEQ ID NO: 3345901 - DNA, 25 bp, Homo sapien
tgaatggttcccttgtctttcaacc

SEQ ID NO: 3345902 - DNA, 25 bp, Homo sapien
attctctgatgtcgttttctccatc

SEQ ID NO: 3345903 - DNA, 25 bp, Homo sapien
aatctgctgaatggttcccttgtct

SEQ ID NO: 3345904 - DNA, 25 bp, Homo sapien
catccagtcgttttggtaagagacc

SEQ ID NO: 3345905 - DNA, 25 bp, Homo sapien
ataatgtagccccttaagtgaacag

SEQ ID NO: 3345906 - DNA, 25 bp, Homo sapien
ttaagtgaacagtatcatccagtcg

SEQ ID NO: 3345907 - DNA, 25 bp, Homo sapien
tactcatctaactgaggtttgtgtt

SEQ ID NO: 3345908 - DNA, 25 bp, Homo sapien
cacacattggcttgagtgtgctcat

SEQ ID NO: 3345909 - DNA, 25 bp, Homo sapien
tcatgcactccaggcaaggctcctc

SEQ ID NO: 3345910 - DNA, 25 bp, Homo sapien
cattggcttgagtgtgctcatgcac

SEQ ID NO: 3345911 - DNA, 25 bp, Homo sapien
ggcttgagtgtgctcatgcactcca

SEQ ID NO: 3345912 - DNA, 25 bp, Homo sapien
ctattgcttggggactttggtgttg

SEQ ID NO: 3345913 - DNA, 25 bp, Homo sapien
ggtggtattagatctgtgtttcctg

SEQ ID NO: 3345914 - DNA, 25 bp, Homo sapien
tagggccatagcctcctcatactca

SEQ ID NO: 3345915 - DNA, 25 bp, Homo sapien
ttcctggacatagggccatagcctc

SEQ ID NO: 3345916 - DNA, 25 bp, Homo sapien
cacttgaaggtgaactaaatggttc

SEQ ID NO: 3345917 - DNA, 25 bp, Homo sapien
tcctgtgatttaagtgtgtgacatt

SEQ ID NO: 3345918 - DNA, 25 bp, Homo sapien
ctggactggagagctgtaaattgac

SEQ ID NO: 3345919 - DNA, 25 bp, Homo sapien
gacatttcagtgttaagtcctggac

SEQ ID NO: 3345920 - DNA, 25 bp, Homo sapien
tcacttaaagcaaggtgggcccctg

SEQ ID NO: 3345921 - DNA, 25 bp, Homo sapien
gaaagtgtgtgaacagtaaagcgcc

SEQ ID NO: 3345922 - DNA, 25 bp, Homo sapien
acagtaaagcgccaggactccaact

SEQ ID NO: 3345923 - DNA, 25 bp, Homo sapien
agtgtgtgaacagtaaagcgccagg

SEQ ID NO: 3345924 - DNA, 25 bp, Homo sapien
tgtgaacagtaaagcgccaggactc

SEQ ID NO: 3345925 - DNA, 25 bp, Homo sapien
gcctgctcagggctctaagttcctc

SEQ ID NO: 3345926 - DNA, 25 bp, Homo sapien
tgctcagggctctaagttcctcttg

SEQ ID NO: 3345927 - DNA, 25 bp, Homo sapien
cagggctctaagttcctcttgcaaa

SEQ ID NO: 3345928 - DNA, 25 bp, Homo sapien
aaatggggatcttgatttctccacc

SEQ ID NO: 3345929 - DNA, 25 bp, Homo sapien
aacacaacgtggaagctagggggct

SEQ ID NO: 3345930 - DNA, 25 bp, Homo sapien
gatgttggcattgtcgccaacacaa

SEQ ID NO: 3345931 - DNA, 25 bp, Homo sapien
gcattgtcgccaacacaacgtggaa

SEQ ID NO: 3345932 - DNA, 25 bp, Homo sapien
taggagtgccgctcctttccttcca

SEQ ID NO: 3345933 - DNA, 25 bp, Homo sapien
gttataacagtatggcaaaggacat

SEQ ID NO: 3345934 - DNA, 25 bp, Homo sapien
ctctgtactgtgttgctgccttggg

SEQ ID NO: 3345935 - DNA, 25 bp, Homo sapien
tggcccgggcatggacaacatgtgt

SEQ ID NO: 3345936 - DNA, 25 bp, Homo sapien
cagagatgcctgatgtaaatatagt

SEQ ID NO: 3345937 - DNA, 25 bp, Homo sapien
tggttttcaaaaaatataaggcata

SEQ ID NO: 3345938 - DNA, 25 bp, Homo sapien
aacacgtagccttcggtcaagtcac

SEQ ID NO: 3345939 - DNA, 25 bp, Homo sapien
ttcggtcaagtcactacatacagca

SEQ ID NO: 3345940 - DNA, 25 bp, Homo sapien
gacaaaacacgtagccttcggtcaa

SEQ ID NO: 3345941 - DNA, 25 bp, Homo sapien
ctttaggcgacaaaacacgtagcct

SEQ ID NO: 3345942 - DNA, 25 bp, Homo sapien
ggcttgatgtgtcctgcatcgtact

SEQ ID NO: 3345943 - DNA, 25 bp, Homo sapien
tggttgtggcttgatgtgtcctgca

SEQ ID NO: 3345944 - DNA, 25 bp, Homo sapien
tcctgcatcgtactttttgactttt

SEQ ID NO: 3345945 - DNA, 25 bp, Homo sapien
ccaagtggttgtggcttgatgtgtc

SEQ ID NO: 3345946 - DNA, 25 bp, Homo sapien
cgctgacttttaaacgtgtgataaa

SEQ ID NO: 3345947 - DNA, 25 bp, Homo sapien
tcgctgacttttaaacgtgtgataa

SEQ ID NO: 3345948 - DNA, 25 bp, Homo sapien
actctcttcttctccccaaggtaag

SEQ ID NO: 3345949 - DNA, 25 bp, Homo sapien
tctcttcttctccccaaggtaagta

SEQ ID NO: 3345950 - DNA, 25 bp, Homo sapien
aagtaactgctttttcttcttccat

SEQ ID NO: 3345951 - DNA, 25 bp, Homo sapien
cttctccccaaggtaagtaactgct

SEQ ID NO: 3345952 - DNA, 25 bp, Homo sapien
tcaagtctattcagacaaagagcag

SEQ ID NO: 3345953 - DNA, 25 bp, Homo sapien
tcctgggccgtcatgtcattttgca

SEQ ID NO: 3345954 - DNA, 25 bp, Homo sapien
gatgacaagcatatgacacgtccaa

SEQ ID NO: 3345955 - DNA, 25 bp, Homo sapien
tgagaaagcaagttcaaggagacga

SEQ ID NO: 3345956 - DNA, 25 bp, Homo sapien
atttgtctgggacacccggccatgg

SEQ ID NO: 3345957 - DNA, 25 bp, Homo sapien
ctgctgatgatgcagggctgatagc

SEQ ID NO: 3345958 - DNA, 25 bp, Homo sapien
gatggtctcctgagtattcctccaa

SEQ ID NO: 3345959 - DNA, 25 bp, Homo sapien
tgtggtttttccctccgatggtctc

SEQ ID NO: 3345960 - DNA, 25 bp, Homo sapien
cttcataagccggataattgggagc

SEQ ID NO: 3345961 - DNA, 25 bp, Homo sapien
ttacgatgacccctgactgtttggg

SEQ ID NO: 3345962 - DNA, 25 bp, Homo sapien
ctggatcttgccttcataagccgga

SEQ ID NO: 3345963 - DNA, 25 bp, Homo sapien
tggatccaggcaaccccaattgtta

SEQ ID NO: 3345964 - DNA, 25 bp, Homo sapien
tctctccatggaactaagaaacaga

SEQ ID NO: 3345965 - DNA, 25 bp, Homo sapien
gaaagtgctccagtgtcttcggcat

SEQ ID NO: 3345966 - DNA, 25 bp, Homo sapien
cagccccctggaaagtgctccagtg

SEQ ID NO: 3345967 - DNA, 25 bp, Homo sapien
tggaaagtgctccagtgtcttcggc

SEQ ID NO: 3345968 - DNA, 25 bp, Homo sapien
tggactagcacattggagcccagtg

SEQ ID NO: 3345969 - DNA, 25 bp, Homo sapien
agtgctctgggtgttagcaaaagct

SEQ ID NO: 3345970 - DNA, 25 bp, Homo sapien
tttcacacagcaaacttggactagc

SEQ ID NO: 3345971 - DNA, 25 bp, Homo sapien
tcgctgtcagtcattgctccaaact

SEQ ID NO: 3345972 - DNA, 25 bp, Homo sapien
tactggacctggatgtacgtctctc

SEQ ID NO: 3345973 - DNA, 25 bp, Homo sapien
tgaggttctttaagcttactggacc

SEQ ID NO: 3345974 - DNA, 25 bp, Homo sapien
tggtattccataaatcctataggct

SEQ ID NO: 3345975 - DNA, 25 bp, Homo sapien
cagagaggacctatctaaattgaat

SEQ ID NO: 3345976 - DNA, 25 bp, Homo sapien
gggtggcagaaccataactctcaag

SEQ ID NO: 3345977 - DNA, 25 bp, Homo sapien
gataagtaatcagctaaatcaggga

SEQ ID NO: 3345978 - DNA, 25 bp, Homo sapien
cagggacaatccaaggactccatat

SEQ ID NO: 3345979 - DNA, 25 bp, Homo sapien
attttggctttttccgatatgccca

SEQ ID NO: 3345980 - DNA, 25 bp, Homo sapien
tgtaccagcaagtagtggagcaccc

SEQ ID NO: 3345981 - DNA, 25 bp, Homo sapien
taattcagagcttgggtgactgtac

SEQ ID NO: 3345982 - DNA, 25 bp, Homo sapien
ctaattcagagcttgggtgactgta

SEQ ID NO: 3345983 - DNA, 25 bp, Homo sapien
taccagcaagtagtggagcacccag

SEQ ID NO: 3345984 - DNA, 25 bp, Homo sapien
cagctgagtgctggccattaggctt

SEQ ID NO: 3345985 - DNA, 25 bp, Homo sapien
tgcaccacttaggtgctcctacctg

SEQ ID NO: 3345986 - DNA, 25 bp, Homo sapien
tcaaaccactgtactatggagcttg

SEQ ID NO: 3345987 - DNA, 25 bp, Homo sapien
catcgcatttccctggaccttcagg

SEQ ID NO: 3345988 - DNA, 25 bp, Homo sapien
caaacaggcttggagaatggttcct

SEQ ID NO: 3345989 - DNA, 25 bp, Homo sapien
ctctgggcaacagccccgttctgat

SEQ ID NO: 3345990 - DNA, 25 bp, Homo sapien
atgagttgagttgggcaaacaggct

SEQ ID NO: 3345991 - DNA, 25 bp, Homo sapien
aacagccccgttctgatgagttgag

SEQ ID NO: 3345992 - DNA, 25 bp, Homo sapien
tgtaggtcttgctgcctgccaatct

SEQ ID NO: 3345993 - DNA, 25 bp, Homo sapien
ggtcttgctgcctgccaatctcaca

SEQ ID NO: 3345994 - DNA, 25 bp, Homo sapien
tgctgcctgccaatctcacaatatt

SEQ ID NO: 3345995 - DNA, 25 bp, Homo sapien
ctgtaggtcttgctgcctgccaatc

SEQ ID NO: 3345996 - DNA, 25 bp, Homo sapien
caatgactgtagttagggggccagc

SEQ ID NO: 3345997 - DNA, 25 bp, Homo sapien
ctggggttggggcttgtgtagcact

SEQ ID NO: 3345998 - DNA, 25 bp, Homo sapien
gggttggggcttgtgtagcactgag

SEQ ID NO: 3345999 - DNA, 25 bp, Homo sapien
tgcatacaataagagcacaatgact

SEQ ID NO: 3346000 - DNA, 25 bp, Homo sapien
tcagaatgtgccagctctcatcatc

SEQ ID NO: 3346001 - DNA, 25 bp, Homo sapien
cagaatgtgccagctctcatcatct

SEQ ID NO: 3346002 - DNA, 25 bp, Homo sapien
tgtcccagaaagtcgtgaaacagac

SEQ ID NO: 3346003 - DNA, 25 bp, Homo sapien
gaaagtcgtgaaacagacaatttca

SEQ ID NO: 3346004 - DNA, 25 bp, Homo sapien
gggtgtcccagaaagtcgtgaaaca

SEQ ID NO: 3346005 - DNA, 25 bp, Homo sapien
ccagaaagtcgtgaaacagacaatt

SEQ ID NO: 3346006 - DNA, 25 bp, Homo sapien
tcaatcccatgaactgtcctgtacc

SEQ ID NO: 3346007 - DNA, 25 bp, Homo sapien
atgaactgtcctgtaccccattcca

SEQ ID NO: 3346008 - DNA, 25 bp, Homo sapien
gagtttcaatcccatgaactgtcct

SEQ ID NO: 3346009 - DNA, 25 bp, Homo sapien
tgaactgtcctgtaccccattccat

SEQ ID NO: 3346010 - DNA, 25 bp, Homo sapien
ctcattagtgaggaagcctgcgtca

SEQ ID NO: 3346011 - DNA, 25 bp, Homo sapien
ccgaggtggcaggtcaattgagacc

SEQ ID NO: 3346012 - DNA, 25 bp, Homo sapien
taactgttccttgcatgatgagatg

SEQ ID NO: 3346013 - DNA, 25 bp, Homo sapien
tttgtcctcaacgtgctgtgctagc

SEQ ID NO: 3346014 - DNA, 25 bp, Homo sapien
aggaggacacggtgtctctaccaaa

SEQ ID NO: 3346015 - DNA, 25 bp, Homo sapien
gaggaggacacggtgtctctaccaa

SEQ ID NO: 3346016 - DNA, 25 bp, Homo sapien
tataacctcctctaggaatcccttg

SEQ ID NO: 3346017 - DNA, 25 bp, Homo sapien
agtataacctcctctaggaatccct

SEQ ID NO: 3346018 - DNA, 25 bp, Homo sapien
aacctcctctaggaatcccttgtgg

SEQ ID NO: 3346019 - DNA, 25 bp, Homo sapien
ctaggaatcccttgtggggtgatga

SEQ ID NO: 3346020 - DNA, 25 bp, Homo sapien
cagctctttcatgtgaaggtaggag

SEQ ID NO: 3346021 - DNA, 25 bp, Homo sapien
gccctagcaaagtaactgcctttcc

SEQ ID NO: 3346022 - DNA, 25 bp, Homo sapien
ccaagccctagcaaagtaactgcct

SEQ ID NO: 3346023 - DNA, 25 bp, Homo sapien
tttgctaaaggggagcgacgcagct

SEQ ID NO: 3346024 - DNA, 25 bp, Homo sapien
ccagttctgcattcacttttctcaa

SEQ ID NO: 3346025 - DNA, 25 bp, Homo sapien
aagcaatttcagattccagttctgc

SEQ ID NO: 3346026 - DNA, 25 bp, Homo sapien
tcacttttctcaaggttggattcat

SEQ ID NO: 3346027 - DNA, 25 bp, Homo sapien
taagcaatttcagattccagttctg

SEQ ID NO: 3346028 - DNA, 25 bp, Homo sapien
ttttccaatgcgatgccaatacatc

SEQ ID NO: 3346029 - DNA, 25 bp, Homo sapien
gatgccaatacatctctcaggcctt

SEQ ID NO: 3346030 - DNA, 25 bp, Homo sapien
caaccgccacacagagatgcatttt

SEQ ID NO: 3346031 - DNA, 25 bp, Homo sapien
tctttctcccaaccgccacacagag

SEQ ID NO: 3346032 - DNA, 25 bp, Homo sapien
gagaaacatagagtgtgtttctgcc

SEQ ID NO: 3346033 - DNA, 25 bp, Homo sapien
ctaagagaaacatagagtgtgtttc

SEQ ID NO: 3346034 - DNA, 25 bp, Homo sapien
atcctaagagaaacatagagtgtgt

SEQ ID NO: 3346035 - DNA, 25 bp, Homo sapien
agagaaacatagagtgtgtttctgc

SEQ ID NO: 3346036 - DNA, 25 bp, Homo sapien
gattcatgctgctagagaagcactg

SEQ ID NO: 3346037 - DNA, 25 bp, Homo sapien
gaccaagtcactggtaaaaagctag

SEQ ID NO: 3346038 - DNA, 25 bp, Homo sapien
ttctgactggcttcacgtgtgttgc

SEQ ID NO: 3346039 - DNA, 25 bp, Homo sapien
taaccaggagaaatggccccttcag

SEQ ID NO: 3346040 - DNA, 25 bp, Homo sapien
ttcaagccgggagtgggcaaacctc

SEQ ID NO: 3346041 - DNA, 25 bp, Homo sapien
ggcattcaagccgggagtgggcaaa

SEQ ID NO: 3346042 - DNA, 25 bp, Homo sapien
atcatctatcatctgagagcatggg

SEQ ID NO: 3346043 - DNA, 25 bp, Homo sapien
cattcaagccgggagtgggcaaacc

SEQ ID NO: 3346044 - DNA, 25 bp, Homo sapien
tgttgacatgtacaacctaaggcac

SEQ ID NO: 3346045 - DNA, 25 bp, Homo sapien
tagtgcaagcctattgagaactgta

SEQ ID NO: 3346046 - DNA, 25 bp, Homo sapien
ttcgttttcaggactagcaggttcc

SEQ ID NO: 3346047 - DNA, 25 bp, Homo sapien
tccaaactaagggagctgaaacagt

SEQ ID NO: 3346048 - DNA, 25 bp, Homo sapien
tctgaaattcatggaaggtacctac

SEQ ID NO: 3346049 - DNA, 25 bp, Homo sapien
tatttggaaaagcatcaccgagaga

SEQ ID NO: 3346050 - DNA, 25 bp, Homo sapien
tctaaaggagactactgaccatgtg

SEQ ID NO: 3346051 - DNA, 25 bp, Homo sapien
tgaattaaacgcaagccactgccat

SEQ ID NO: 3346052 - DNA, 25 bp, Homo sapien
gaggtgcctgcttcacttgggataa

SEQ ID NO: 3346053 - DNA, 25 bp, Homo sapien
tcaaatggagaaagacgagctatag

SEQ ID NO: 3346054 - DNA, 25 bp, Homo sapien
tcatatgctaaaacagggaggtgcc

SEQ ID NO: 3346055 - DNA, 25 bp, Homo sapien
caaatgcctacaattgcaagtgagt

SEQ ID NO: 3346056 - DNA, 25 bp, Homo sapien
cacaagcttatggataatgatagta

SEQ ID NO: 3346057 - DNA, 25 bp, Homo sapien
ggtttcagtcccttgaggctctgaa

SEQ ID NO: 3346058 - DNA, 25 bp, Homo sapien
tgtttcacaaaaccacaggtttcag

SEQ ID NO: 3346059 - DNA, 25 bp, Homo sapien
agtaaacaaggaagctgacacatga

SEQ ID NO: 3346060 - DNA, 25 bp, Homo sapien
acctggggagggtcatagctgctgc

SEQ ID NO: 3346061 - DNA, 25 bp, Homo sapien
ttagatttctgagcattccagaacc

SEQ ID NO: 3346062 - DNA, 25 bp, Homo sapien
ccagaacctggggagggtcatagct

SEQ ID NO: 3346063 - DNA, 25 bp, Homo sapien
tagatttctgagcattccagaacct

SEQ ID NO: 3346064 - DNA, 25 bp, Homo sapien
aaactgaatgacagaaacaagaaag

SEQ ID NO: 3346065 - DNA, 25 bp, Homo sapien
tgaaactgaatgacagaaacaagaa

SEQ ID NO: 3346066 - DNA, 25 bp, Homo sapien
ctgaaactgaatgacagaaacaaga

SEQ ID NO: 3346067 - DNA, 25 bp, Homo sapien
ctgaatgacagaaacaagaaagaaa

SEQ ID NO: 3346068 - DNA, 25 bp, Homo sapien
cctatgaacaatccaagttttttct

SEQ ID NO: 3346069 - DNA, 25 bp, Homo sapien
ttatttcctatgaacaatccaagtt

SEQ ID NO: 3346070 - DNA, 25 bp, Homo sapien
tgtggtcagggccagacatgtttct

SEQ ID NO: 3346071 - DNA, 25 bp, Homo sapien
tcaggaagctgtgccctgtggtcag

SEQ ID NO: 3346072 - DNA, 25 bp, Homo sapien
gctgctgggaattttgtcccacctt

SEQ ID NO: 3346073 - DNA, 25 bp, Homo sapien
tgtagatgtgcgttactgagtttat

SEQ ID NO: 3346074 - DNA, 25 bp, Homo sapien
gtccgcctagaattgcccccaccag

SEQ ID NO: 3346075 - DNA, 25 bp, Homo sapien
acctttatgtagatgtgcgttactg

SEQ ID NO: 3346076 - DNA, 25 bp, Homo sapien
ctgagttcccggactcttcctcctc

SEQ ID NO: 3346077 - DNA, 25 bp, Homo sapien
ctgcataggaaaggatgtgagctct

SEQ ID NO: 3346078 - DNA, 25 bp, Homo sapien
ggatgtgagctctgagttcccggac

SEQ ID NO: 3346079 - DNA, 25 bp, Homo sapien
taggaaaggatgtgagctctgagtt

SEQ ID NO: 3346080 - DNA, 25 bp, Homo sapien
aagggtctctgcacacagattagca

SEQ ID NO: 3346081 - DNA, 25 bp, Homo sapien
cagattagcatattccaatcggtgg

SEQ ID NO: 3346082 - DNA, 25 bp, Homo sapien
tgttgcacacggaaccaagggtctc

SEQ ID NO: 3346083 - DNA, 25 bp, Homo sapien
ttcccagtcccacatagtcatcagt

SEQ ID NO: 3346084 - DNA, 25 bp, Homo sapien
tcctttatatctaggacttctctcc

SEQ ID NO: 3346085 - DNA, 25 bp, Homo sapien
cctttatatctaggacttctctcca

SEQ ID NO: 3346086 - DNA, 25 bp, Homo sapien
tctcctttatatctaggacttctct

SEQ ID NO: 3346087 - DNA, 25 bp, Homo sapien
ttctctcctttatatctaggacttc

SEQ ID NO: 3346088 - DNA, 25 bp, Homo sapien
ttattgcaaacacttaaccagcgtg

SEQ ID NO: 3346089 - DNA, 25 bp, Homo sapien
ctagttgaaagagctgacatacgat

SEQ ID NO: 3346090 - DNA, 25 bp, Homo sapien
gtaacccagaacatatgaggcaagt

SEQ ID NO: 3346091 - DNA, 25 bp, Homo sapien
gcatagatcagcaaagtaacccaga

SEQ ID NO: 3346092 - DNA, 25 bp, Homo sapien
gaagaggacttctgaaccaccatcg

SEQ ID NO: 3346093 - DNA, 25 bp, Homo sapien
aaccaccatcgtcaggatgctgtcc

SEQ ID NO: 3346094 - DNA, 25 bp, Homo sapien
tcatgctgaccacaggaagaggact

SEQ ID NO: 3346095 - DNA, 25 bp, Homo sapien
cacaggaagaggacttctgaaccac

SEQ ID NO: 3346096 - DNA, 25 bp, Homo sapien
taaaaatgagcccaatctcgagttg

SEQ ID NO: 3346097 - DNA, 25 bp, Homo sapien
aaattacatcacttgcttttagata

SEQ ID NO: 3346098 - DNA, 25 bp, Homo sapien
cattcatgaccaatggtgagcaggt

SEQ ID NO: 3346099 - DNA, 25 bp, Homo sapien
aatctcgagttgctggcttgaaaac

SEQ ID NO: 3346100 - DNA, 25 bp, Homo sapien
catggcatgtaccactgatgtgtgt

SEQ ID NO: 3346101 - DNA, 25 bp, Homo sapien
gtgtgttcctaataattctccttct

SEQ ID NO: 3346102 - DNA, 25 bp, Homo sapien
tcttctgctttaagttcatggcatg

SEQ ID NO: 3346103 - DNA, 25 bp, Homo sapien
gtaccactgatgtgtgttcctaata

SEQ ID NO: 3346104 - DNA, 25 bp, Homo sapien
gagagcgtgggtgtttcggaggcac

SEQ ID NO: 3346105 - DNA, 25 bp, Homo sapien
tggagaaaaattgggagtcatgcct

SEQ ID NO: 3346106 - DNA, 25 bp, Homo sapien
gtcatgccttctggcagagaaccaa

SEQ ID NO: 3346107 - DNA, 25 bp, Homo sapien
caggaggctgcatcgtcaataggga

SEQ ID NO: 3346108 - DNA, 25 bp, Homo sapien
ttaatcccaggctgggctactgctg

SEQ ID NO: 3346109 - DNA, 25 bp, Homo sapien
ctcttttggaatgccaggcatatgc

SEQ ID NO: 3346110 - DNA, 25 bp, Homo sapien
tcttggtgggactgctttaatccca

SEQ ID NO: 3346111 - DNA, 25 bp, Homo sapien
gtttactgccggcattcttggtggg

SEQ ID NO: 3346112 - DNA, 25 bp, Homo sapien
gagctgcacaccttacttcctgatc

SEQ ID NO: 3346113 - DNA, 25 bp, Homo sapien
tcgtctgagttgaaagagctgcaca

SEQ ID NO: 3346114 - DNA, 25 bp, Homo sapien
gactcttttctaacgtcagccagga

SEQ ID NO: 3346115 - DNA, 25 bp, Homo sapien
tcctgatcacctgaaataaagacag

SEQ ID NO: 3346116 - DNA, 25 bp, Homo sapien
gggtcactctcaagtccgcatctaa

SEQ ID NO: 3346117 - DNA, 25 bp, Homo sapien
taaactcaaccattccggagtggca

SEQ ID NO: 3346118 - DNA, 25 bp, Homo sapien
ggactcgtggtcactcagagctgag

SEQ ID NO: 3346119 - DNA, 25 bp, Homo sapien
agctggtctgagtccctcgggatac

SEQ ID NO: 3346120 - DNA, 25 bp, Homo sapien
tgctggcgaacactgccaagggtgt

SEQ ID NO: 3346121 - DNA, 25 bp, Homo sapien
tagcatgaatatcccctgtcaaagg

SEQ ID NO: 3346122 - DNA, 25 bp, Homo sapien
gaccactaaggaggcagttgcatca

SEQ ID NO: 3346123 - DNA, 25 bp, Homo sapien
ggaactcaatggagggcagccactg

SEQ ID NO: 3346124 - DNA, 25 bp, Homo sapien
caacatatgtgttttcacgggtcca

SEQ ID NO: 3346125 - DNA, 25 bp, Homo sapien
ggcttccacaagaaattgagttgtt

SEQ ID NO: 3346126 - DNA, 25 bp, Homo sapien
tccagaagtaatacgggactgatag

SEQ ID NO: 3346127 - DNA, 25 bp, Homo sapien
tcaggatttccaccatcactggctt

SEQ ID NO: 3346128 - DNA, 25 bp, Homo sapien
acgggactgatagtaaatattgtgc

SEQ ID NO: 3346129 - DNA, 25 bp, Homo sapien
tcttaggatcaatggagaattcctt

SEQ ID NO: 3346130 - DNA, 25 bp, Homo sapien
gagtcagcactgaataccccacagg

SEQ ID NO: 3346131 - DNA, 25 bp, Homo sapien
accccacaggtattgattcaggaac

SEQ ID NO: 3346132 - DNA, 25 bp, Homo sapien
gaagaggatagaattctgtaagaaa

SEQ ID NO: 3346133 - DNA, 25 bp, Homo sapien
gatagaaatcttgagaaaacactgg

SEQ ID NO: 3346134 - DNA, 25 bp, Homo sapien
tttggatgagcagctcatattcagt

SEQ ID NO: 3346135 - DNA, 25 bp, Homo sapien
tccctctgtgtagtgcactgaatca

SEQ ID NO: 3346136 - DNA, 25 bp, Homo sapien
cagcacacggactacaagtgctccc

SEQ ID NO: 3346137 - DNA, 25 bp, Homo sapien
cactccagtgttctgatcaatagca

SEQ ID NO: 3346138 - DNA, 25 bp, Homo sapien
tctgatcaatagcaaacttggttcc

SEQ ID NO: 3346139 - DNA, 25 bp, Homo sapien
caaatccacatcatgaactgacaca

SEQ ID NO: 3346140 - DNA, 25 bp, Homo sapien
tgagtcacaattacaccaggcaaag

SEQ ID NO: 3346141 - DNA, 25 bp, Homo sapien
gtattagaaagcctgggcatccctt

SEQ ID NO: 3346142 - DNA, 25 bp, Homo sapien
tgattacagtcgtattagaaagcct

SEQ ID NO: 3346143 - DNA, 25 bp, Homo sapien
tgtcatttatatcagtcacctgtac

SEQ ID NO: 3346144 - DNA, 25 bp, Homo sapien
gtcacctgtaccttgattacagtcg

SEQ ID NO: 3346145 - DNA, 25 bp, Homo sapien
tggagccaatggatctgaaccctgg

SEQ ID NO: 3346146 - DNA, 25 bp, Homo sapien
gagccaatggatctgaaccctggac

SEQ ID NO: 3346147 - DNA, 25 bp, Homo sapien
caatggatctgaaccctggaccaac

SEQ ID NO: 3346148 - DNA, 25 bp, Homo sapien
aaatggagccaatggatctgaaccc

SEQ ID NO: 3346149 - DNA, 25 bp, Homo sapien
ttggttgccagacagaatagaatac

SEQ ID NO: 3346150 - DNA, 25 bp, Homo sapien
ttttgttgttatcacaccactcagt

SEQ ID NO: 3346151 - DNA, 25 bp, Homo sapien
tggtgagctcgtaatctagaatcgc

SEQ ID NO: 3346152 - DNA, 25 bp, Homo sapien
tcaatcaggccgttcaaaccactgt

SEQ ID NO: 3346153 - DNA, 25 bp, Homo sapien
gatgtatcagaaagacagtgcccag

SEQ ID NO: 3346154 - DNA, 25 bp, Homo sapien
ggtgtcccttcaccgaagattcaaa

SEQ ID NO: 3346155 - DNA, 25 bp, Homo sapien
tgagagaagcaaggcagttcaccac

SEQ ID NO: 3346156 - DNA, 25 bp, Homo sapien
cagtgaatacaagagcctgagtggc

SEQ ID NO: 3346157 - DNA, 25 bp, Homo sapien
tgcaataggctctatgcccactact

SEQ ID NO: 3346158 - DNA, 25 bp, Homo sapien
cagctaaaacgatgagttgaacctc

SEQ ID NO: 3346159 - DNA, 25 bp, Homo sapien
tcagacactgatgcctggtaaatgc

SEQ ID NO: 3346160 - DNA, 25 bp, Homo sapien
tcaagactgctactttgcaataggc

SEQ ID NO: 3346161 - DNA, 25 bp, Homo sapien
ctgaattgagtcaggagcaaaagct

SEQ ID NO: 3346162 - DNA, 25 bp, Homo sapien
gagtcaggagcaaaagctttaacag

SEQ ID NO: 3346163 - DNA, 25 bp, Homo sapien
catgctgtcctgaattgagtcagga

SEQ ID NO: 3346164 - DNA, 25 bp, Homo sapien
tttcatgctgtcctgaattgagtca

SEQ ID NO: 3346165 - DNA, 25 bp, Homo sapien
ctgctgctgggtgcacagtaacaga

SEQ ID NO: 3346166 - DNA, 25 bp, Homo sapien
aagtatgcacactgtcctgattggg

SEQ ID NO: 3346167 - DNA, 25 bp, Homo sapien
taacagaggccatgtataagacagt

SEQ ID NO: 3346168 - DNA, 25 bp, Homo sapien
ctataggagtctaccctgctgctgg

SEQ ID NO: 3346169 - DNA, 25 bp, Homo sapien
catgtgaatgaccaagagacccgtg

SEQ ID NO: 3346170 - DNA, 25 bp, Homo sapien
tcccggtccaaagcacgagtggttg

SEQ ID NO: 3346171 - DNA, 25 bp, Homo sapien
aaattgctgatttgctcccggtcca

SEQ ID NO: 3346172 - DNA, 25 bp, Homo sapien
aatactcagtttgcccattcaggcc

SEQ ID NO: 3346173 - DNA, 25 bp, Homo sapien
gcgtgatcgttttcatcttcaacag

SEQ ID NO: 3346174 - DNA, 25 bp, Homo sapien
aacaataaactctggtgcgtgatcg

SEQ ID NO: 3346175 - DNA, 25 bp, Homo sapien
tatcagaggctaaaaccgtatagac

SEQ ID NO: 3346176 - DNA, 25 bp, Homo sapien
gtgctggacaatgaagggaatcccc

SEQ ID NO: 3346177 - DNA, 25 bp, Homo sapien
ggtggttgtcactacctctccagtg

SEQ ID NO: 3346178 - DNA, 25 bp, Homo sapien
gtgtcagaatttatctcgaataatt

SEQ ID NO: 3346179 - DNA, 25 bp, Homo sapien
tatctcgaataattcaaatgaagca

SEQ ID NO: 3346180 - DNA, 25 bp, Homo sapien
ttctctgtcaagtatggtggttgtc

SEQ ID NO: 3346181 - DNA, 25 bp, Homo sapien
tttcaaactgaagcttggaattgac

SEQ ID NO: 3346182 - DNA, 25 bp, Homo sapien
tcaaactgaagcttggaattgactc

SEQ ID NO: 3346183 - DNA, 25 bp, Homo sapien
gatttcaaactgaagcttggaattg

SEQ ID NO: 3346184 - DNA, 25 bp, Homo sapien
ttcaaactgaagcttggaattgact

SEQ ID NO: 3346185 - DNA, 25 bp, Homo sapien
cactgaggcttcatacaggtgctgc

SEQ ID NO: 3346186 - DNA, 25 bp, Homo sapien
ggtgtgccatcatccagtgccagaa

SEQ ID NO: 3346187 - DNA, 25 bp, Homo sapien
tctctgtccagagcttcaaccctgg

SEQ ID NO: 3346188 - DNA, 25 bp, Homo sapien
gaacagtaactgtcaaagtctggga

SEQ ID NO: 3346189 - DNA, 25 bp, Homo sapien
cgtgagcagttatgtggtggaccaa

SEQ ID NO: 3346190 - DNA, 25 bp, Homo sapien
catacaccagggttcctatgggaac

SEQ ID NO: 3346191 - DNA, 25 bp, Homo sapien
tcagtgatctcagtcgccggtctgt

SEQ ID NO: 3346192 - DNA, 25 bp, Homo sapien
catcgatactaaggaagactgtgct

SEQ ID NO: 3346193 - DNA, 25 bp, Homo sapien
gaatattaacaactgcctgtccttg

SEQ ID NO: 3346194 - DNA, 25 bp, Homo sapien
cctggtcagtggcaatgacactcat

SEQ ID NO: 3346195 - DNA, 25 bp, Homo sapien
tattgtggttgttcttatttcacca

SEQ ID NO: 3346196 - DNA, 25 bp, Homo sapien
taggaaggtctataatcatacgaaa

SEQ ID NO: 3346197 - DNA, 25 bp, Homo sapien
gatttgctgttgcatctccaacgtg

SEQ ID NO: 3346198 - DNA, 25 bp, Homo sapien
tccaacgtgtagcataatatgttcc

SEQ ID NO: 3346199 - DNA, 25 bp, Homo sapien
aaactttcacgagtccatcacctag

SEQ ID NO: 3346200 - DNA, 25 bp, Homo sapien
tccttaaattgggaggcagatctag

SEQ ID NO: 3346201 - DNA, 25 bp, Homo sapien
tgtttgttttttgcacgactgcttc

SEQ ID NO: 3346202 - DNA, 25 bp, Homo sapien
ttgttttttgcacgactgcttccca

SEQ ID NO: 3346203 - DNA, 25 bp, Homo sapien
gtttgttttttgcacgactgcttcc

SEQ ID NO: 3346204 - DNA, 25 bp, Homo sapien
tgttttttgcacgactgcttcccaa

SEQ ID NO: 3346205 - DNA, 25 bp, Homo sapien
tgcaaacacagttgtaaccaacata

SEQ ID NO: 3346206 - DNA, 25 bp, Homo sapien
aagatactgagtatgtaacttctgc

SEQ ID NO: 3346207 - DNA, 25 bp, Homo sapien
tatttactggttgaccttccagaac

SEQ ID NO: 3346208 - DNA, 25 bp, Homo sapien
gatactgagtatgtaacttctgcat

SEQ ID NO: 3346209 - DNA, 25 bp, Homo sapien
tcagtaactgagacgtaaaccgcca

SEQ ID NO: 3346210 - DNA, 25 bp, Homo sapien
gatccagtgccacccaattgattaa

SEQ ID NO: 3346211 - DNA, 25 bp, Homo sapien
ttcacgtgtaactcctttccaggga

SEQ ID NO: 3346212 - DNA, 25 bp, Homo sapien
gaagaagggcctgttatcattgatg

SEQ ID NO: 3346213 - DNA, 25 bp, Homo sapien
cagagtacagagcagaacaagacac

SEQ ID NO: 3346214 - DNA, 25 bp, Homo sapien
tgcagagtacagagcagaacaagac

SEQ ID NO: 3346215 - DNA, 25 bp, Homo sapien
ctgcagagtacagagcagaacaaga

SEQ ID NO: 3346216 - DNA, 25 bp, Homo sapien
gagtacagagcagaacaagacacag

SEQ ID NO: 3346217 - DNA, 25 bp, Homo sapien
gcaccatctgcccaggttatgacat

SEQ ID NO: 3346218 - DNA, 25 bp, Homo sapien
aagtctgtcccactaaaggcagcag

SEQ ID NO: 3346219 - DNA, 25 bp, Homo sapien
gaacaaaggcttgaagttcatcaga

SEQ ID NO: 3346220 - DNA, 25 bp, Homo sapien
ccaggttatgacatagatggtgcct

SEQ ID NO: 3346221 - DNA, 25 bp, Homo sapien
aagacgagtgtgatagtactgaacc

SEQ ID NO: 3346222 - DNA, 25 bp, Homo sapien
taaaggaataggtggaaactatgaa

SEQ ID NO: 3346223 - DNA, 25 bp, Homo sapien
agacgagtgtgatagtactgaaccc

SEQ ID NO: 3346224 - DNA, 25 bp, Homo sapien
ttaaaggaataggtggaaactatga

SEQ ID NO: 3346225 - DNA, 25 bp, Homo sapien
aaatgttcgaaagtccaggatgggc

SEQ ID NO: 3346226 - DNA, 25 bp, Homo sapien
tagcagagtctacgctgggttccag

SEQ ID NO: 3346227 - DNA, 25 bp, Homo sapien
caaataaatccagcccgtgtaaggg

SEQ ID NO: 3346228 - DNA, 25 bp, Homo sapien
gttccagcgagtacctaagaggcga

SEQ ID NO: 3346229 - DNA, 25 bp, Homo sapien
ccaggctgccgttgaggaacagcac

SEQ ID NO: 3346230 - DNA, 25 bp, Homo sapien
cgcgcccaggctgccgttgaggaac

SEQ ID NO: 3346231 - DNA, 25 bp, Homo sapien
ctgagagtcagcgtgagctcccgct

SEQ ID NO: 3346232 - DNA, 25 bp, Homo sapien
agtcagcgtgagctcccgctgctcg

SEQ ID NO: 3346233 - DNA, 25 bp, Homo sapien
ttccgcacgtgcgaggtacaaggct

SEQ ID NO: 3346234 - DNA, 25 bp, Homo sapien
aactttccgccgagatcaccagaag

SEQ ID NO: 3346235 - DNA, 25 bp, Homo sapien
tctgtcgatggcaaagacgcctggc

SEQ ID NO: 3346236 - DNA, 25 bp, Homo sapien
gccgcgggtgaatggagaactttcc

SEQ ID NO: 3346237 - DNA, 25 bp, Homo sapien
caccaccgtcttgagcagagaccat

SEQ ID NO: 3346238 - DNA, 25 bp, Homo sapien
tccaatgggactatcttcaggcaca

SEQ ID NO: 3346239 - DNA, 25 bp, Homo sapien
gcattaatgacagctgtgagcccac

SEQ ID NO: 3346240 - DNA, 25 bp, Homo sapien
tcttgctttcactgttccaatggga

SEQ ID NO: 3346241 - DNA, 25 bp, Homo sapien
ggtagattccaaatgactaagaggt

SEQ ID NO: 3346242 - DNA, 25 bp, Homo sapien
gaaagtgtggtagattccaaatgac

SEQ ID NO: 3346243 - DNA, 25 bp, Homo sapien
caacgaaagtgtggtagattccaaa

SEQ ID NO: 3346244 - DNA, 25 bp, Homo sapien
caaatgactaagaggtaatgttaag

SEQ ID NO: 3346245 - DNA, 25 bp, Homo sapien
caccaagaatcttagctagatttgc

SEQ ID NO: 3346246 - DNA, 25 bp, Homo sapien
catcttgcacttttaggtaatggag

SEQ ID NO: 3346247 - DNA, 25 bp, Homo sapien
tagatttgctacataccttgctgca

SEQ ID NO: 3346248 - DNA, 25 bp, Homo sapien
ttaggtaatggagatggcgtcttcc

SEQ ID NO: 3346249 - DNA, 25 bp, Homo sapien
ctttgtaaatgttcccaatttctgg

SEQ ID NO: 3346250 - DNA, 25 bp, Homo sapien
tcccaatttctggtaaatgcagagg

SEQ ID NO: 3346251 - DNA, 25 bp, Homo sapien
aaatgcagagggttcctcttgggcc

SEQ ID NO: 3346252 - DNA, 25 bp, Homo sapien
tgtcttctttgtaaatgttcccaat

SEQ ID NO: 3346253 - DNA, 25 bp, Homo sapien
gaccagcattccagtaacactgtca

SEQ ID NO: 3346254 - DNA, 25 bp, Homo sapien
ccagcattccagtaacactgtcaca

SEQ ID NO: 3346255 - DNA, 25 bp, Homo sapien
aggaccagcattccagtaacactgt

SEQ ID NO: 3346256 - DNA, 25 bp, Homo sapien
gcattccagtaacactgtcacatac

SEQ ID NO: 3346257 - DNA, 25 bp, Homo sapien
agtgccttagcagaggtaaaaacat

SEQ ID NO: 3346258 - DNA, 25 bp, Homo sapien
tctgctgaaaagttgacagcactca

SEQ ID NO: 3346259 - DNA, 25 bp, Homo sapien
aaagttgacagcactcagaatttct

SEQ ID NO: 3346260 - DNA, 25 bp, Homo sapien
gccttagcagaggtaaaaacatctc

SEQ ID NO: 3346261 - DNA, 25 bp, Homo sapien
tcccattgtcaaggccagacaggta

SEQ ID NO: 3346262 - DNA, 25 bp, Homo sapien
aattcccattgtcaaggccagacag

SEQ ID NO: 3346263 - DNA, 25 bp, Homo sapien
acaattcccattgtcaaggccagac

SEQ ID NO: 3346264 - DNA, 25 bp, Homo sapien
ctagcttgaacaattcccattgtca

SEQ ID NO: 3346265 - DNA, 25 bp, Homo sapien
tcggccatatgatgggagcaagaaa

SEQ ID NO: 3346266 - DNA, 25 bp, Homo sapien
cagcctctgtagagatcggccatat

SEQ ID NO: 3346267 - DNA, 25 bp, Homo sapien
gcaagaaagtccagctttatgtaga

SEQ ID NO: 3346268 - DNA, 25 bp, Homo sapien
ttaggactgtgtttacactggcagc

SEQ ID NO: 3346269 - DNA, 25 bp, Homo sapien
ttgtgctatagtcgctgccaggaag

SEQ ID NO: 3346270 - DNA, 25 bp, Homo sapien
atttgtgctatagtcgctgccagga

SEQ ID NO: 3346271 - DNA, 25 bp, Homo sapien
gaagggaagcatgagtctggcttcg

SEQ ID NO: 3346272 - DNA, 25 bp, Homo sapien
gtctggcttcggccaggacagcaag

SEQ ID NO: 3346273 - DNA, 25 bp, Homo sapien
gagtcaatggtaaaaagggacgaca

SEQ ID NO: 3346274 - DNA, 25 bp, Homo sapien
tcatcactgatgctcgtcacatagg

SEQ ID NO: 3346275 - DNA, 25 bp, Homo sapien
ctccaggtccacacgaacaaaggct

SEQ ID NO: 3346276 - DNA, 25 bp, Homo sapien
ggttgatgggttaaacacaggatga

SEQ ID NO: 3346277 - DNA, 25 bp, Homo sapien
caccagggctaaatgtgtcattctc

SEQ ID NO: 3346278 - DNA, 25 bp, Homo sapien
gggctaaatgtgtcattctctgctc

SEQ ID NO: 3346279 - DNA, 25 bp, Homo sapien
cagggctaaatgtgtcattctctgc

SEQ ID NO: 3346280 - DNA, 25 bp, Homo sapien
tcaccagggctaaatgtgtcattct

SEQ ID NO: 3346281 - DNA, 25 bp, Homo sapien
gaggtgcttcatagctcaggaatcc

SEQ ID NO: 3346282 - DNA, 25 bp, Homo sapien
tcgatccggaatgcctgaggtgctt

SEQ ID NO: 3346283 - DNA, 25 bp, Homo sapien
tgcccatcatgagggtcgatccgga

SEQ ID NO: 3346284 - DNA, 25 bp, Homo sapien
tcataggtagctggatccctttccc

SEQ ID NO: 3346285 - DNA, 25 bp, Homo sapien
atccccctcatcaggataatagggc

SEQ ID NO: 3346286 - DNA, 25 bp, Homo sapien
cccctcatcaggataatagggcttc

SEQ ID NO: 3346287 - DNA, 25 bp, Homo sapien
tcatcaggataatagggcttcctcc

SEQ ID NO: 3346288 - DNA, 25 bp, Homo sapien
atcaggataatagggcttcctcccc

SEQ ID NO: 3346289 - DNA, 25 bp, Homo sapien
aacactatagcaccccagagctcag

SEQ ID NO: 3346290 - DNA, 25 bp, Homo sapien
ccttcactggttttgcgttctcttc

SEQ ID NO: 3346291 - DNA, 25 bp, Homo sapien
tcttcctggcttctgaacactatag

SEQ ID NO: 3346292 - DNA, 25 bp, Homo sapien
tcagtctcgggactacctcttttca

SEQ ID NO: 3346293 - DNA, 25 bp, Homo sapien
tacacctcatatacacaggcatcag

SEQ ID NO: 3346294 - DNA, 25 bp, Homo sapien
ttcacaatggaatttattttcacat

SEQ ID NO: 3346295 - DNA, 25 bp, Homo sapien
tgatttcgttatctcatccagtctc

SEQ ID NO: 3346296 - DNA, 25 bp, Homo sapien
catacacctcatatacacaggcatc

SEQ ID NO: 3346297 - DNA, 25 bp, Homo sapien
catctctgtgttgggtagagtaaac

SEQ ID NO: 3346298 - DNA, 25 bp, Homo sapien
tcatctctgtgttgggtagagtaaa

SEQ ID NO: 3346299 - DNA, 25 bp, Homo sapien
ccatgtcagctctcttcccaactgc

SEQ ID NO: 3346300 - DNA, 25 bp, Homo sapien
ctagcactggatgaactctggcttc

SEQ ID NO: 3346301 - DNA, 25 bp, Homo sapien
agcactggatgaactctggcttctc

SEQ ID NO: 3346302 - DNA, 25 bp, Homo sapien
tcccaactgcatctgttctctgctg

SEQ ID NO: 3346303 - DNA, 25 bp, Homo sapien
tatgcacagcccaggcctaggccat

SEQ ID NO: 3346304 - DNA, 25 bp, Homo sapien
cacagcccaggcctaggccatggtc

SEQ ID NO: 3346305 - DNA, 25 bp, Homo sapien
ctgggccagcatatgcacagcccag

SEQ ID NO: 3346306 - DNA, 25 bp, Homo sapien
atgcacagcccaggcctaggccatg

SEQ ID NO: 3346307 - DNA, 25 bp, Homo sapien
caaatcttgggactgagacataagt

SEQ ID NO: 3346308 - DNA, 25 bp, Homo sapien
ggcatctgactgtatatcccacagt

SEQ ID NO: 3346309 - DNA, 25 bp, Homo sapien
aacattgtcaatttcccaatggcat

SEQ ID NO: 3346310 - DNA, 25 bp, Homo sapien
tttgctattgtgttggacaacattg

SEQ ID NO: 3346311 - DNA, 25 bp, Homo sapien
gcgttggaaaggaagttatcagcat

SEQ ID NO: 3346312 - DNA, 25 bp, Homo sapien
ctgcgttggaaaggaagttatcagc

SEQ ID NO: 3346313 - DNA, 25 bp, Homo sapien
tgcgttggaaaggaagttatcagca

SEQ ID NO: 3346314 - DNA, 25 bp, Homo sapien
tgttattaaatcttcaggctccctg

SEQ ID NO: 3346315 - DNA, 25 bp, Homo sapien
cacccgacgaggaatacgtcttcct

SEQ ID NO: 3346316 - DNA, 25 bp, Homo sapien
acctcgcatcccaggatcattagca

SEQ ID NO: 3346317 - DNA, 25 bp, Homo sapien
cattagcagctgacagcgcagggag

SEQ ID NO: 3346318 - DNA, 25 bp, Homo sapien
gccccatccgaagaacaggtagctc

SEQ ID NO: 3346319 - DNA, 25 bp, Homo sapien
tgacagcagcagataaacaggatcg

SEQ ID NO: 3346320 - DNA, 25 bp, Homo sapien
ggaagtcatcccaaagtcacagctg

SEQ ID NO: 3346321 - DNA, 25 bp, Homo sapien
gctgagggatcacggccaaataaca

SEQ ID NO: 3346322 - DNA, 25 bp, Homo sapien
tttgcagtctttagattgggaggca

SEQ ID NO: 3346323 - DNA, 25 bp, Homo sapien
ctttagattgggaggcattccattc

SEQ ID NO: 3346324 - DNA, 25 bp, Homo sapien
agattgggaggcattccattcatca

SEQ ID NO: 3346325 - DNA, 25 bp, Homo sapien
cagtctttagattgggaggcattcc

SEQ ID NO: 3346326 - DNA, 25 bp, Homo sapien
taaagtattaacaagtgataccagc

SEQ ID NO: 3346327 - DNA, 25 bp, Homo sapien
tgataccagctcatagtacagttgc

SEQ ID NO: 3346328 - DNA, 25 bp, Homo sapien
acagagctaaccctgtgacctggat

SEQ ID NO: 3346329 - DNA, 25 bp, Homo sapien
aaggctataaacgaggctccccaga

SEQ ID NO: 3346330 - DNA, 25 bp, Homo sapien
tgctggactccctcacttttggctg

SEQ ID NO: 3346331 - DNA, 25 bp, Homo sapien
gctgaacaggatttgcaatatcctc

SEQ ID NO: 3346332 - DNA, 25 bp, Homo sapien
tgaggctgaacaggatttgcaatat

SEQ ID NO: 3346333 - DNA, 25 bp, Homo sapien
gaggctgaacaggatttgcaatatc

SEQ ID NO: 3346334 - DNA, 25 bp, Homo sapien
ctgccatacagtatagaatttcatt

SEQ ID NO: 3346335 - DNA, 25 bp, Homo sapien
ccatacagtatagaatttcatttgc

SEQ ID NO: 3346336 - DNA, 25 bp, Homo sapien
tgccatacagtatagaatttcattt

SEQ ID NO: 3346337 - DNA, 25 bp, Homo sapien
gccatacagtatagaatttcatttg

SEQ ID NO: 3346338 - DNA, 25 bp, Homo sapien
ttaattaacatgacagcaaagcttc

SEQ ID NO: 3346339 - DNA, 25 bp, Homo sapien
cccttgacaatgattgtaattttct

SEQ ID NO: 3346340 - DNA, 25 bp, Homo sapien
tccccttgacaatgattgtaatttt

SEQ ID NO: 3346341 - DNA, 25 bp, Homo sapien
taattaacatgacagcaaagcttca

SEQ ID NO: 3346342 - DNA, 25 bp, Homo sapien
ggttggcccacaggcctgatgcact

SEQ ID NO: 3346343 - DNA, 25 bp, Homo sapien
cttcccaagccttcaggttggccca

SEQ ID NO: 3346344 - DNA, 25 bp, Homo sapien
tttcctaggccaactcacaaccctc

SEQ ID NO: 3346345 - DNA, 25 bp, Homo sapien
tcacaatttcctaggccaactcaca

SEQ ID NO: 3346346 - DNA, 25 bp, Homo sapien
caccgctttcggaatcaatggcaaa

SEQ ID NO: 3346347 - DNA, 25 bp, Homo sapien
gtcctgctcaaagaccggcgggttg

SEQ ID NO: 3346348 - DNA, 25 bp, Homo sapien
tagtaactcatacagatcgcggctc

SEQ ID NO: 3346349 - DNA, 25 bp, Homo sapien
cacgtgaattgctggccggttgtca

SEQ ID NO: 3346350 - DNA, 25 bp, Homo sapien
tgaacaactgggcagaggagcccga

SEQ ID NO: 3346351 - DNA, 25 bp, Homo sapien
cggaaagggtgaggttgaacaactg

SEQ ID NO: 3346352 - DNA, 25 bp, Homo sapien
agccacacgtgcaccaagagccaga

SEQ ID NO: 3346353 - DNA, 25 bp, Homo sapien
cccgaggccgcccacagccacacgt

SEQ ID NO: 3346354 - DNA, 25 bp, Homo sapien
tgcctgaccgcccatggggtgtatc

SEQ ID NO: 3346355 - DNA, 25 bp, Homo sapien
ctcctcccggggagcagaaggagct

SEQ ID NO: 3346356 - DNA, 25 bp, Homo sapien
ggagcccgccgctgctgacgccctt

SEQ ID NO: 3346357 - DNA, 25 bp, Homo sapien
cgccgctgctgacgcccttcgccca

SEQ ID NO: 3346358 - DNA, 25 bp, Homo sapien
tgggaaggctctcgggtaactgcca

SEQ ID NO: 3346359 - DNA, 25 bp, Homo sapien
cttgtggcaggatcgcagaaaaatc

SEQ ID NO: 3346360 - DNA, 25 bp, Homo sapien
ctcacgcagacagggaagtaagctc

SEQ ID NO: 3346361 - DNA, 25 bp, Homo sapien
catctgcaactggtgaaagcgtcct

SEQ ID NO: 3346362 - DNA, 25 bp, Homo sapien
aagtaagctctagctgcctctgccg

SEQ ID NO: 3346363 - DNA, 25 bp, Homo sapien
cagctgtttagttggaaaatgcctg

SEQ ID NO: 3346364 - DNA, 25 bp, Homo sapien
cacagctgtttagttggaaaatgcc

SEQ ID NO: 3346365 - DNA, 25 bp, Homo sapien
ccacagctgtttagttggaaaatgc

SEQ ID NO: 3346366 - DNA, 25 bp, Homo sapien
ctggattctccccaagccacagctg

SEQ ID NO: 3346367 - DNA, 25 bp, Homo sapien
cagtccttccaaggcgtcgtcccct

SEQ ID NO: 3346368 - DNA, 25 bp, Homo sapien
ttggattaatccaaacaagtgtttc

SEQ ID NO: 3346369 - DNA, 25 bp, Homo sapien
ccttcgcacccagtccttccaaggc

SEQ ID NO: 3346370 - DNA, 25 bp, Homo sapien
gcacccagtccttccaaggcgtcgt

SEQ ID NO: 3346371 - DNA, 25 bp, Homo sapien
aaattgggaaatagtataggtcttg

SEQ ID NO: 3346372 - DNA, 25 bp, Homo sapien
ttccagtcatgcaccaagcacacac

SEQ ID NO: 3346373 - DNA, 25 bp, Homo sapien
taggtcttgtacagcattccagtca

SEQ ID NO: 3346374 - DNA, 25 bp, Homo sapien
cacacaccaagggttgtttagtagg

SEQ ID NO: 3346375 - DNA, 25 bp, Homo sapien
tcacagggagagtaagaatgcacac

SEQ ID NO: 3346376 - DNA, 25 bp, Homo sapien
gtgtgaacagtttccctctacacgg

SEQ ID NO: 3346377 - DNA, 25 bp, Homo sapien
tgaacagtttccctctacacggagg

SEQ ID NO: 3346378 - DNA, 25 bp, Homo sapien
tgtgaacagtttccctctacacgga

SEQ ID NO: 3346379 - DNA, 25 bp, Homo sapien
tgtgtgaacagtttccctctacacg

SEQ ID NO: 3346380 - DNA, 25 bp, Homo sapien
taaggctttcagactatcccatatc

SEQ ID NO: 3346381 - DNA, 25 bp, Homo sapien
catgattgtcccaaagttcttgtcc

SEQ ID NO: 3346382 - DNA, 25 bp, Homo sapien
tttattgttactgacctgctgctcc

SEQ ID NO: 3346383 - DNA, 25 bp, Homo sapien
tgtgctggccaactaatggaaacta

SEQ ID NO: 3346384 - DNA, 25 bp, Homo sapien
cataggccattttagtaaggtgctc

SEQ ID NO: 3346385 - DNA, 25 bp, Homo sapien
tctcttgaggatctcccacataggc

SEQ ID NO: 3346386 - DNA, 25 bp, Homo sapien
tcatcaagattgagagtaaaaccat

SEQ ID NO: 3346387 - DNA, 25 bp, Homo sapien
gaaaaactgtttggaggtcatcaag

SEQ ID NO: 3346388 - DNA, 25 bp, Homo sapien
tgctccgggtcctccagtctcagtg

SEQ ID NO: 3346389 - DNA, 25 bp, Homo sapien
cggtaccagtcccatgggggcttct

SEQ ID NO: 3346390 - DNA, 25 bp, Homo sapien
aggctgcgcggtaccagtcccatgg

SEQ ID NO: 3346391 - DNA, 25 bp, Homo sapien
tgcttggaacgcagttggaggctgc

SEQ ID NO: 3346392 - DNA, 25 bp, Homo sapien
acactgtgtctaccctcagtgttct

SEQ ID NO: 3346393 - DNA, 25 bp, Homo sapien
caagttctgcaagtatgagcatgga

SEQ ID NO: 3346394 - DNA, 25 bp, Homo sapien
gctgtcagcggcagcaaagacttca

SEQ ID NO: 3346395 - DNA, 25 bp, Homo sapien
aagacttcagcatcaaggattggga

SEQ ID NO: 3346396 - DNA, 25 bp, Homo sapien
cctctccccgcaaggactctgtgtt

SEQ ID NO: 3346397 - DNA, 25 bp, Homo sapien
ctctccccgcaaggactctgtgttt

SEQ ID NO: 3346398 - DNA, 25 bp, Homo sapien
cagcttgtgagataacacaggagcc

SEQ ID NO: 3346399 - DNA, 25 bp, Homo sapien
cccctggacctgaaagcgttgctga

SEQ ID NO: 3346400 - DNA, 25 bp, Homo sapien
cacaggagccttctgtagtatgttg

SEQ ID NO: 3346401 - DNA, 25 bp, Homo sapien
gcgttgctgagtagattggacttaa

SEQ ID NO: 3346402 - DNA, 25 bp, Homo sapien
gcctgaaggaggctggatgctggga

SEQ ID NO: 3346403 - DNA, 25 bp, Homo sapien
ctgaaggaggctggatgctgggatc

SEQ ID NO: 3346404 - DNA, 25 bp, Homo sapien
cgtctcgcagcctgaaggaggctgg

SEQ ID NO: 3346405 - DNA, 25 bp, Homo sapien
tctcgcagcctgaaggaggctggat

SEQ ID NO: 3346406 - DNA, 25 bp, Homo sapien
tgtcagatcattcccattaggcagt

SEQ ID NO: 3346407 - DNA, 25 bp, Homo sapien
cacctatggcatacaagatgggtaa

SEQ ID NO: 3346408 - DNA, 25 bp, Homo sapien
tagtcccattattcgacagtagcag

SEQ ID NO: 3346409 - DNA, 25 bp, Homo sapien
tatgtaaagccacccatgaaagttc

SEQ ID NO: 3346410 - DNA, 25 bp, Homo sapien
gaatagttatgttcaataaacctgc

SEQ ID NO: 3346411 - DNA, 25 bp, Homo sapien
gatatctgcatcttcctagtatcac

SEQ ID NO: 3346412 - DNA, 25 bp, Homo sapien
aaaaactactgctccttcaaatgtc

SEQ ID NO: 3346413 - DNA, 25 bp, Homo sapien
caaatgtcctaattatcggtttcat

SEQ ID NO: 3346414 - DNA, 25 bp, Homo sapien
tgattgaagcaagtgaatttctcct

SEQ ID NO: 3346415 - DNA, 25 bp, Homo sapien
aatatgaagcagcaatgattgaagc

SEQ ID NO: 3346416 - DNA, 25 bp, Homo sapien
agcagcaatgattgaagcaagtgaa

SEQ ID NO: 3346417 - DNA, 25 bp, Homo sapien
aaaatatgaagcagcaatgattgaa

SEQ ID NO: 3346418 - DNA, 25 bp, Homo sapien
cagctgactggatgagtttcttctg

SEQ ID NO: 3346419 - DNA, 25 bp, Homo sapien
tggtttccagctgactggatgagtt

SEQ ID NO: 3346420 - DNA, 25 bp, Homo sapien
tttccagctgactggatgagtttct

SEQ ID NO: 3346421 - DNA, 25 bp, Homo sapien
tttctcttgataatttctggtttcc

SEQ ID NO: 3346422 - DNA, 25 bp, Homo sapien
ggatattctactaacaccaaagctt

SEQ ID NO: 3346423 - DNA, 25 bp, Homo sapien
tcttggtgcaacatttcccagcaac

SEQ ID NO: 3346424 - DNA, 25 bp, Homo sapien
taaatggacactattcaagaagaca

SEQ ID NO: 3346425 - DNA, 25 bp, Homo sapien
tcccagcaactataacaaaggaagt

SEQ ID NO: 3346426 - DNA, 25 bp, Homo sapien
taacgaatgtgaaacacagaactta

SEQ ID NO: 3346427 - DNA, 25 bp, Homo sapien
aacgaatgtgaaacacagaacttac

SEQ ID NO: 3346428 - DNA, 25 bp, Homo sapien
ttaacgaatgtgaaacacagaactt

SEQ ID NO: 3346429 - DNA, 25 bp, Homo sapien
tccagtcccaaagatgcatggtgcc

SEQ ID NO: 3346430 - DNA, 25 bp, Homo sapien
gaaaattgtagccagttctccagtc

SEQ ID NO: 3346431 - DNA, 25 bp, Homo sapien
gacccaggttgcacagctgcgtgaa

SEQ ID NO: 3346432 - DNA, 25 bp, Homo sapien
gctgcgtgaactctctgaaaattgt

SEQ ID NO: 3346433 - DNA, 25 bp, Homo sapien
gtatcccctcagcagtacagcttga

SEQ ID NO: 3346434 - DNA, 25 bp, Homo sapien
aatctagttacacctggtatcccct

SEQ ID NO: 3346435 - DNA, 25 bp, Homo sapien
tggtatcccctcagcagtacagctt

SEQ ID NO: 3346436 - DNA, 25 bp, Homo sapien
tacacctggtatcccctcagcagta

SEQ ID NO: 3346437 - DNA, 25 bp, Homo sapien
tatgccctaaccaggcaagtgctgc

SEQ ID NO: 3346438 - DNA, 25 bp, Homo sapien
gatgggaactcaaagaggactaagc

SEQ ID NO: 3346439 - DNA, 25 bp, Homo sapien
gcaattcccagcataaatccctgag

SEQ ID NO: 3346440 - DNA, 25 bp, Homo sapien
tacttaagtgtgacagcttagaagc

SEQ ID NO: 3346441 - DNA, 25 bp, Homo sapien
gttaataatagcattatgaccggaa

SEQ ID NO: 3346442 - DNA, 25 bp, Homo sapien
ccatcagaatttaccgtcaatgtgt

SEQ ID NO: 3346443 - DNA, 25 bp, Homo sapien
taccgtcaatgtgttaataatagca

SEQ ID NO: 3346444 - DNA, 25 bp, Homo sapien
gcattatgaccggaaagattttgaa

SEQ ID NO: 3346445 - DNA, 25 bp, Homo sapien
tggagaaccagatgcaaatgtgtaa

SEQ ID NO: 3346446 - DNA, 25 bp, Homo sapien
ctggagaaccagatgcaaatgtgta

SEQ ID NO: 3346447 - DNA, 25 bp, Homo sapien
ttcagcattatcttaagaactgaag

SEQ ID NO: 3346448 - DNA, 25 bp, Homo sapien
atttcagcattatcttaagaactga

SEQ ID NO: 3346449 - DNA, 25 bp, Homo sapien
cagcattatcttaagaactgaagaa

SEQ ID NO: 3346450 - DNA, 25 bp, Homo sapien
agcattatcttaagaactgaagaaa

SEQ ID NO: 3346451 - DNA, 25 bp, Homo sapien
aatcgaattgtagtatcatggcttc

SEQ ID NO: 3346452 - DNA, 25 bp, Homo sapien
tgtaaaaccacagccctaactgatt

SEQ ID NO: 3346453 - DNA, 25 bp, Homo sapien
gatttgttaatgtcactcttgtttt

SEQ ID NO: 3346454 - DNA, 25 bp, Homo sapien
cagccaccagatcccataatcgaat

SEQ ID NO: 3346455 - DNA, 25 bp, Homo sapien
actgcatttgtatgtccagataatg

SEQ ID NO: 3346456 - DNA, 25 bp, Homo sapien
tgtgtgtacactggctttagttctc

SEQ ID NO: 3346457 - DNA, 25 bp, Homo sapien
ggttctgcagcctgacatctcactg

SEQ ID NO: 3346458 - DNA, 25 bp, Homo sapien
tggctttagttctcacatcccaaat

SEQ ID NO: 3346459 - DNA, 25 bp, Homo sapien
tacaaactggaggacgaatataaat

SEQ ID NO: 3346460 - DNA, 25 bp, Homo sapien
gataactggatcaattcaaggctga

SEQ ID NO: 3346461 - DNA, 25 bp, Homo sapien
tataaataggagacaacttgcaaga

SEQ ID NO: 3346462 - DNA, 25 bp, Homo sapien
caaggctgaaaatttactacataac

SEQ ID NO: 3346463 - DNA, 25 bp, Homo sapien
catacactgcacttaaatgtccatg

SEQ ID NO: 3346464 - DNA, 25 bp, Homo sapien
aatgtccatgataatgccgtataac

SEQ ID NO: 3346465 - DNA, 25 bp, Homo sapien
tcgattgtcgggtgcaaatccaaac

SEQ ID NO: 3346466 - DNA, 25 bp, Homo sapien
gaatctcgactacaggttaccaaca

SEQ ID NO: 3346467 - DNA, 25 bp, Homo sapien
tactaatatgcccagtcaatgacag

SEQ ID NO: 3346468 - DNA, 25 bp, Homo sapien
cagatatgggctccttgtgcttact

SEQ ID NO: 3346469 - DNA, 25 bp, Homo sapien
tcacgccccgcacagtactaatatg

SEQ ID NO: 3346470 - DNA, 25 bp, Homo sapien
cagttttaatttgccactagccaag

SEQ ID NO: 3346471 - DNA, 25 bp, Homo sapien
agatgacaaaaggttaaccttcttg

SEQ ID NO: 3346472 - DNA, 25 bp, Homo sapien
caagtatcgattcacccatttggaa

SEQ ID NO: 3346473 - DNA, 25 bp, Homo sapien
aaaaactggcatgctcaaactggaa

SEQ ID NO: 3346474 - DNA, 25 bp, Homo sapien
aactgaggctggcaacaacttaaag

SEQ ID NO: 3346475 - DNA, 25 bp, Homo sapien
cacagcaatacatcgaacccagcca

SEQ ID NO: 3346476 - DNA, 25 bp, Homo sapien
cagcaatacatcgaacccagccaag

SEQ ID NO: 3346477 - DNA, 25 bp, Homo sapien
acagcaatacatcgaacccagccaa

SEQ ID NO: 3346478 - DNA, 25 bp, Homo sapien
cagatccagtaacaaaccactgatt

SEQ ID NO: 3346479 - DNA, 25 bp, Homo sapien
cacgaatctgtgttatccttgtgga

SEQ ID NO: 3346480 - DNA, 25 bp, Homo sapien
cgaatctgtgttatccttgtggaag

SEQ ID NO: 3346481 - DNA, 25 bp, Homo sapien
cacttcacgaatctgtgttatcctt

SEQ ID NO: 3346482 - DNA, 25 bp, Homo sapien
atctgtgttatccttgtggaagggc

SEQ ID NO: 3346483 - DNA, 25 bp, Homo sapien
ttttttagccatcagtgcagagttc

SEQ ID NO: 3346484 - DNA, 25 bp, Homo sapien
gagttcttggtattgccagtctcca

SEQ ID NO: 3346485 - DNA, 25 bp, Homo sapien
ctgtagagtttccacggtgggtgcc

SEQ ID NO: 3346486 - DNA, 25 bp, Homo sapien
tagccatcagtgcagagttcttggt

SEQ ID NO: 3346487 - DNA, 25 bp, Homo sapien
taagactagttgtatagcccatgaa

SEQ ID NO: 3346488 - DNA, 25 bp, Homo sapien
gacgtgctctgaatggaataaagga

SEQ ID NO: 3346489 - DNA, 25 bp, Homo sapien
taaataagcccataaagttcctgcc

SEQ ID NO: 3346490 - DNA, 25 bp, Homo sapien
tcaattgcataatgagctgagaagc

SEQ ID NO: 3346491 - DNA, 25 bp, Homo sapien
gatgtcggtattcacttccactagg

SEQ ID NO: 3346492 - DNA, 25 bp, Homo sapien
aggctgtggacggtcagaagcccca

SEQ ID NO: 3346493 - DNA, 25 bp, Homo sapien
taggggcagtacgatttgcatcagc

SEQ ID NO: 3346494 - DNA, 25 bp, Homo sapien
ttccactaggggcagtacgatttgc

SEQ ID NO: 3346495 - DNA, 25 bp, Homo sapien
aattgttataaagtcctgataaagg

SEQ ID NO: 3346496 - DNA, 25 bp, Homo sapien
taaattgttataaagtcctgataaa

SEQ ID NO: 3346497 - DNA, 25 bp, Homo sapien
tttaaattgttataaagtcctgata

SEQ ID NO: 3346498 - DNA, 25 bp, Homo sapien
tgtattctgcaaaactaacccttta

SEQ ID NO: 3346499 - DNA, 25 bp, Homo sapien
ttggtctgcaaaggtaatgccaccg

SEQ ID NO: 3346500 - DNA, 25 bp, Homo sapien
cttagtatctgctgtcaaagcaacc

SEQ ID NO: 3346501 - DNA, 25 bp, Homo sapien
cacttggcattctctggatcttagt

SEQ ID NO: 3346502 - DNA, 25 bp, Homo sapien
caccgctaaggactgtgcagctgat

SEQ ID NO: 3346503 - DNA, 25 bp, Homo sapien
ggtcctggtgggtatggatgtgtac

SEQ ID NO: 3346504 - DNA, 25 bp, Homo sapien
caggtcctggtgggtatggatgtgt

SEQ ID NO: 3346505 - DNA, 25 bp, Homo sapien
aggtcctggtgggtatggatgtgta

SEQ ID NO: 3346506 - DNA, 25 bp, Homo sapien
gccacaaagtattcaacttcttgtc

SEQ ID NO: 3346507 - DNA, 25 bp, Homo sapien
catactcattacgaagcttgattgc

SEQ ID NO: 3346508 - DNA, 25 bp, Homo sapien
tgaagtaggcatatgcaacacagga

SEQ ID NO: 3346509 - DNA, 25 bp, Homo sapien
gaatccgttgcattctgaggaccct

SEQ ID NO: 3346510 - DNA, 25 bp, Homo sapien
tactgtttatgaacatatgaatccg

SEQ ID NO: 3346511 - DNA, 25 bp, Homo sapien
catgggtcctcttcaacgacctgaa

SEQ ID NO: 3346512 - DNA, 25 bp, Homo sapien
aaggcacaggttttccattatcagc

SEQ ID NO: 3346513 - DNA, 25 bp, Homo sapien
gaacacaagggtgtgtacagaatgt

SEQ ID NO: 3346514 - DNA, 25 bp, Homo sapien
ttatcagctacaaacatgtcatggg

SEQ ID NO: 3346515 - DNA, 25 bp, Homo sapien
tagctacttgttgcaagctacagga

SEQ ID NO: 3346516 - DNA, 25 bp, Homo sapien
catagctacttgttgcaagctacag

SEQ ID NO: 3346517 - DNA, 25 bp, Homo sapien
gctacttgttgcaagctacaggagt

SEQ ID NO: 3346518 - DNA, 25 bp, Homo sapien
tacttgttgcaagctacaggagtca

SEQ ID NO: 3346519 - DNA, 25 bp, Homo sapien
gactaccaatcttttagggcacaga

SEQ ID NO: 3346520 - DNA, 25 bp, Homo sapien
aattatctcaggcttcgcgcccagg

SEQ ID NO: 3346521 - DNA, 25 bp, Homo sapien
tgaaataagagacgacctgaacgca

SEQ ID NO: 3346522 - DNA, 25 bp, Homo sapien
gatggacaagaccagctaacagcgt

SEQ ID NO: 3346523 - DNA, 25 bp, Homo sapien
cgtgtatcccacctccggcagggaa

SEQ ID NO: 3346524 - DNA, 25 bp, Homo sapien
agtacccgccgccacagctgtgcag

SEQ ID NO: 3346525 - DNA, 25 bp, Homo sapien
agcaccttccggaattgggcgccca

SEQ ID NO: 3346526 - DNA, 25 bp, Homo sapien
actctaatcactaacgcagtacccg

SEQ ID NO: 3346527 - DNA, 25 bp, Homo sapien
tacttctagcaatacaggattacaa

SEQ ID NO: 3346528 - DNA, 25 bp, Homo sapien
tgaaatggaattgttaacctctgac

SEQ ID NO: 3346529 - DNA, 25 bp, Homo sapien
caaggtgtcaacgacaatgaggagg

SEQ ID NO: 3346530 - DNA, 25 bp, Homo sapien
tttctagttaagtcccaaggtgtca

SEQ ID NO: 3346531 - DNA, 25 bp, Homo sapien
tacaagtagccgagctccagagtac

SEQ ID NO: 3346532 - DNA, 25 bp, Homo sapien
caagtactgttctgagggtaccata

SEQ ID NO: 3346533 - DNA, 25 bp, Homo sapien
tgtaagtcaaccctacggtcaagac

SEQ ID NO: 3346534 - DNA, 25 bp, Homo sapien
tccagagtacattatgagggtcaaa

SEQ ID NO: 3346535 - DNA, 25 bp, Homo sapien
gtttcttgcagtggtggctctctca

SEQ ID NO: 3346536 - DNA, 25 bp, Homo sapien
ggtttcttcagtgcccgtggtcatc

SEQ ID NO: 3346537 - DNA, 25 bp, Homo sapien
ggaatctaacaatccaagtggcttg

SEQ ID NO: 3346538 - DNA, 25 bp, Homo sapien
ggtcatcgaccccttgacaagaaga

SEQ ID NO: 3346539 - DNA, 25 bp, Homo sapien
gcattcatacgcttttgggcacctt

SEQ ID NO: 3346540 - DNA, 25 bp, Homo sapien
gttagactgccacgagaatgcatgg

SEQ ID NO: 3346541 - DNA, 25 bp, Homo sapien
caagaggctttgctacaacaggaaa

SEQ ID NO: 3346542 - DNA, 25 bp, Homo sapien
tacaggatgtcagttgcaagaggct

SEQ ID NO: 3346543 - DNA, 25 bp, Homo sapien
tagccagcttaccaggatgggaccc

SEQ ID NO: 3346544 - DNA, 25 bp, Homo sapien
gatgggacccacagaacttttgata

SEQ ID NO: 3346545 - DNA, 25 bp, Homo sapien
taccaggtaacgaacaggcatgcaa

SEQ ID NO: 3346546 - DNA, 25 bp, Homo sapien
tacagaggaacagccggtaatgccc

SEQ ID NO: 3346547 - DNA, 25 bp, Homo sapien
tccttgtcgtaggaaaaccatgacg

SEQ ID NO: 3346548 - DNA, 25 bp, Homo sapien
taaaactctcaagcagacgtgagtg

SEQ ID NO: 3346549 - DNA, 25 bp, Homo sapien
gaagatgagtatgaagatcaggccc

SEQ ID NO: 3346550 - DNA, 25 bp, Homo sapien
cacctgggacatggcaaagcatggc

SEQ ID NO: 3346551 - DNA, 25 bp, Homo sapien
ttgattccaacagggatggcgcctt

SEQ ID NO: 3346552 - DNA, 25 bp, Homo sapien
tgcctgttgcccatagaaacgaggt

SEQ ID NO: 3346553 - DNA, 25 bp, Homo sapien
taaaatctgactctaggacgggcac

SEQ ID NO: 3346554 - DNA, 25 bp, Homo sapien
tgggctggacaggaccgctactatt

SEQ ID NO: 3346555 - DNA, 25 bp, Homo sapien
catacacccatgatatcactggcac

SEQ ID NO: 3346556 - DNA, 25 bp, Homo sapien
aacatatacgatttcatgattttgg

SEQ ID NO: 3346557 - DNA, 25 bp, Homo sapien
ctgtcatacaaagtgtttaacatat

SEQ ID NO: 3346558 - DNA, 25 bp, Homo sapien
gtgtttaacatatacgatttcatga

SEQ ID NO: 3346559 - DNA, 25 bp, Homo sapien
gatgtaaaacggtgcagctaccatg

SEQ ID NO: 3346560 - DNA, 25 bp, Homo sapien
acacagtatcctttcgcactgttgt

SEQ ID NO: 3346561 - DNA, 25 bp, Homo sapien
gtgcagctaccatgggaagaaatgt

SEQ ID NO: 3346562 - DNA, 25 bp, Homo sapien
cctttcgcactgttgtggggatgta

SEQ ID NO: 3346563 - DNA, 25 bp, Homo sapien
catgcaaccttgaggtcacagacct

SEQ ID NO: 3346564 - DNA, 25 bp, Homo sapien
gatactttagtgcagtattgcaaca

SEQ ID NO: 3346565 - DNA, 25 bp, Homo sapien
tattgcaacagcttatgtagacatg

SEQ ID NO: 3346566 - DNA, 25 bp, Homo sapien
tctcctagcttcaccctttgtttgt

SEQ ID NO: 3346567 - DNA, 25 bp, Homo sapien
tgcaccccaagcatcagctaactaa

SEQ ID NO: 3346568 - DNA, 25 bp, Homo sapien
ggctacaagaaatttcaatgtggct

SEQ ID NO: 3346569 - DNA, 25 bp, Homo sapien
tcccaagctgtttcccaagcaagta

SEQ ID NO: 3346570 - DNA, 25 bp, Homo sapien
catgtgcttacattgacaccttggc

SEQ ID NO: 3346571 - DNA, 25 bp, Homo sapien
cactgtataaggaaggagccaacct

SEQ ID NO: 3346572 - DNA, 25 bp, Homo sapien
agaattcctaaaatgcagagaccac

SEQ ID NO: 3346573 - DNA, 25 bp, Homo sapien
ctcttccaccctaggtaacaacaga

SEQ ID NO: 3346574 - DNA, 25 bp, Homo sapien
gatataacagtcataaactttcatg

SEQ ID NO: 3346575 - DNA, 25 bp, Homo sapien
gaagctatggtgattgtcagatcaa

SEQ ID NO: 3346576 - DNA, 25 bp, Homo sapien
caagactggtaattgcagacttcct

SEQ ID NO: 3346577 - DNA, 25 bp, Homo sapien
tcttctaggtagtttgtgaaaaggc

SEQ ID NO: 3346578 - DNA, 25 bp, Homo sapien
taaggccactgattgtagttgaagc

SEQ ID NO: 3346579 - DNA, 25 bp, Homo sapien
ccttcttccagattgccagaggaca

SEQ ID NO: 3346580 - DNA, 25 bp, Homo sapien
cttcttccagattgccagaggacat

SEQ ID NO: 3346581 - DNA, 25 bp, Homo sapien
ttcttccagattgccagaggacatg

SEQ ID NO: 3346582 - DNA, 25 bp, Homo sapien
ctccttcttccagattgccagagga

SEQ ID NO: 3346583 - DNA, 25 bp, Homo sapien
tgatgtctgaaagaagtgaagcttc

SEQ ID NO: 3346584 - DNA, 25 bp, Homo sapien
tgaatggcccttcccgttcataatc

SEQ ID NO: 3346585 - DNA, 25 bp, Homo sapien
tctgtcaaggcaatacgtgtgagtg

SEQ ID NO: 3346586 - DNA, 25 bp, Homo sapien
tgatcctgctaatattggctaccat

SEQ ID NO: 3346587 - DNA, 25 bp, Homo sapien
gaccaccaggattaaagatgcaact

SEQ ID NO: 3346588 - DNA, 25 bp, Homo sapien
aaatgggttgaattttgaatatagc

SEQ ID NO: 3346589 - DNA, 25 bp, Homo sapien
gaatatagcatagatcatacttagt

SEQ ID NO: 3346590 - DNA, 25 bp, Homo sapien
caaatattgaccaaagtaaatgggt

SEQ ID NO: 3346591 - DNA, 25 bp, Homo sapien
caaaggtcagctatggttagattca

SEQ ID NO: 3346592 - DNA, 25 bp, Homo sapien
tcctgatgtactgaatggcccttgg

SEQ ID NO: 3346593 - DNA, 25 bp, Homo sapien
agaagacagagtgctcccattccca

SEQ ID NO: 3346594 - DNA, 25 bp, Homo sapien
tgtgcattacaacgtctagtggaag

SEQ ID NO: 3346595 - DNA, 25 bp, Homo sapien
ttattccttgggtcataggagcccc

SEQ ID NO: 3346596 - DNA, 25 bp, Homo sapien
taattttcatgcgaacagccctgag

SEQ ID NO: 3346597 - DNA, 25 bp, Homo sapien
gccaggtccggttaaaattcagtga

SEQ ID NO: 3346598 - DNA, 25 bp, Homo sapien
cacccgcagtgccttcataggagga

SEQ ID NO: 3346599 - DNA, 25 bp, Homo sapien
ggatgtgtttggaggacatcatcac

SEQ ID NO: 3346600 - DNA, 25 bp, Homo sapien
aaggatgtgtttggaggacatcatc

SEQ ID NO: 3346601 - DNA, 25 bp, Homo sapien
ctgaaggatgtgtttggaggacatc

SEQ ID NO: 3346602 - DNA, 25 bp, Homo sapien
atgtgtttggaggacatcatcacag

SEQ ID NO: 3346603 - DNA, 25 bp, Homo sapien
taaccagtacaggtagctaagcatc

SEQ ID NO: 3346604 - DNA, 25 bp, Homo sapien
cagttgggtgacaattctaatagca

SEQ ID NO: 3346605 - DNA, 25 bp, Homo sapien
tagggaaaggatgcacttacagtgg

SEQ ID NO: 3346606 - DNA, 25 bp, Homo sapien
tacaaagataggcacggctcagatt

SEQ ID NO: 3346607 - DNA, 25 bp, Homo sapien
tgtagtttcaatgacgtgtaacaga

SEQ ID NO: 3346608 - DNA, 25 bp, Homo sapien
gtactgttaggcatttgggaataca

SEQ ID NO: 3346609 - DNA, 25 bp, Homo sapien
cgtgtaacagagagttaagaaggaa

SEQ ID NO: 3346610 - DNA, 25 bp, Homo sapien
aaaaagtgtagtttcaatgacgtgt

SEQ ID NO: 3346611 - DNA, 25 bp, Homo sapien
gcttccccaaaggagaagtgtggat

SEQ ID NO: 3346612 - DNA, 25 bp, Homo sapien
ggcttccccaaaggagaagtgtgga

SEQ ID NO: 3346613 - DNA, 25 bp, Homo sapien
aaggcttccccaaaggagaagtgtg

SEQ ID NO: 3346614 - DNA, 25 bp, Homo sapien
ttccccaaaggagaagtgtggatac

SEQ ID NO: 3346615 - DNA, 25 bp, Homo sapien
ctgacagggcgagatttagcatggc

SEQ ID NO: 3346616 - DNA, 25 bp, Homo sapien
gcctctcttggtgctatgtgttcct

SEQ ID NO: 3346617 - DNA, 25 bp, Homo sapien
gtgttccttcatgatcggcttcact

SEQ ID NO: 3346618 - DNA, 25 bp, Homo sapien
tcatgatcggcttcacttccggcct

SEQ ID NO: 3346619 - DNA, 25 bp, Homo sapien
cttgctttcaaatgtggagtctcct

SEQ ID NO: 3346620 - DNA, 25 bp, Homo sapien
ctactagtaaattgtttgctgtaac

SEQ ID NO: 3346621 - DNA, 25 bp, Homo sapien
gagtctcctctgttgtaactcgtgc

SEQ ID NO: 3346622 - DNA, 25 bp, Homo sapien
tgtaactcgtgctactagtaaattg

SEQ ID NO: 3346623 - DNA, 25 bp, Homo sapien
gaagggaattcagctatcccagggt

SEQ ID NO: 3346624 - DNA, 25 bp, Homo sapien
cccagggtgatgagaactggattcc

SEQ ID NO: 3346625 - DNA, 25 bp, Homo sapien
gatgccagattctgagcccctagac

SEQ ID NO: 3346626 - DNA, 25 bp, Homo sapien
cagtgtcgaagaaggcagcttcatc

SEQ ID NO: 3346627 - DNA, 25 bp, Homo sapien
ctatggcggaacccatccagagtac

SEQ ID NO: 3346628 - DNA, 25 bp, Homo sapien
gccagacaatgtgcctaaatccatt

SEQ ID NO: 3346629 - DNA, 25 bp, Homo sapien
taaatccattgcctcgggacagtca

SEQ ID NO: 3346630 - DNA, 25 bp, Homo sapien
ctatgccagacaatgtgcctaaatc

SEQ ID NO: 3346631 - DNA, 25 bp, Homo sapien
gcctcgggacagtcagaaccatctt

SEQ ID NO: 3346632 - DNA, 25 bp, Homo sapien
ggttgtgctaccagaggtgaccttc

SEQ ID NO: 3346633 - DNA, 25 bp, Homo sapien
cagtcttagtaacggttttagagca

SEQ ID NO: 3346634 - DNA, 25 bp, Homo sapien
tgaccttctctttaccagtcctgag

SEQ ID NO: 3346635 - DNA, 25 bp, Homo sapien
ttttagagcatgaacgacgcgtggt

SEQ ID NO: 3346636 - DNA, 25 bp, Homo sapien
gagcctgggctatctggcctaaaac

SEQ ID NO: 3346637 - DNA, 25 bp, Homo sapien
tctgatccggttccataagaggtgg

SEQ ID NO: 3346638 - DNA, 25 bp, Homo sapien
cccagtctgggttgttaggcctcgc

SEQ ID NO: 3346639 - DNA, 25 bp, Homo sapien
gagtgccattgtccagtactaccag

SEQ ID NO: 3346640 - DNA, 25 bp, Homo sapien
cagtggtaagtgttgcctatctcta

SEQ ID NO: 3346641 - DNA, 25 bp, Homo sapien
ccaagtctggaactggtttcatttt

SEQ ID NO: 3346642 - DNA, 25 bp, Homo sapien
tgaagctggctcttaaaatttccgg

SEQ ID NO: 3346643 - DNA, 25 bp, Homo sapien
ccactctgggggtaccttctgaagc

SEQ ID NO: 3346644 - DNA, 25 bp, Homo sapien
ctgcatgaccctcgacaagatcgga

SEQ ID NO: 3346645 - DNA, 25 bp, Homo sapien
gatcttcatagtccttcagatctac

SEQ ID NO: 3346646 - DNA, 25 bp, Homo sapien
gaccctcgacaagatcggatcttaa

SEQ ID NO: 3346647 - DNA, 25 bp, Homo sapien
tctacttcacgagctaaagccctac

SEQ ID NO: 3346648 - DNA, 25 bp, Homo sapien
ctccagtcgtttcatatcaaccaac

SEQ ID NO: 3346649 - DNA, 25 bp, Homo sapien
ttcatatcaaccaactgagctctaa

SEQ ID NO: 3346650 - DNA, 25 bp, Homo sapien
gtttcatatcaaccaactgagctct

SEQ ID NO: 3346651 - DNA, 25 bp, Homo sapien
agtcgtttcatatcaaccaactgag

SEQ ID NO: 3346652 - DNA, 25 bp, Homo sapien
tatgactttgcgcttcaggacttca

SEQ ID NO: 3346653 - DNA, 25 bp, Homo sapien
cactcggttgtaggtattatcacgg

SEQ ID NO: 3346654 - DNA, 25 bp, Homo sapien
tttctatgactttgcgcttcaggac

SEQ ID NO: 3346655 - DNA, 25 bp, Homo sapien
tctcagatcctctgacactcggttg

SEQ ID NO: 3346656 - DNA, 25 bp, Homo sapien
tgttcttctgatattcaaatagtga

SEQ ID NO: 3346657 - DNA, 25 bp, Homo sapien
aatcgcctctcaaaatttccattat

SEQ ID NO: 3346658 - DNA, 25 bp, Homo sapien
tagtggtcaacgaatgagaatcctt

SEQ ID NO: 3346659 - DNA, 25 bp, Homo sapien
ttcatcaatcaaccctttcatcctg

SEQ ID NO: 3346660 - DNA, 25 bp, Homo sapien
ggcagattgatgtctttccacaacc

SEQ ID NO: 3346661 - DNA, 25 bp, Homo sapien
gccagtctgaatctttgcaggcaga

SEQ ID NO: 3346662 - DNA, 25 bp, Homo sapien
ttccacaacccttgggccacgcacg

SEQ ID NO: 3346663 - DNA, 25 bp, Homo sapien
aagggccagtctgaatctttgcagg

SEQ ID NO: 3346664 - DNA, 25 bp, Homo sapien
tagaaagtcaccttcaccactatct

SEQ ID NO: 3346665 - DNA, 25 bp, Homo sapien
tcagctagaaagtcaccttcaccac

SEQ ID NO: 3346666 - DNA, 25 bp, Homo sapien
cttcagctagaaagtcaccttcacc

SEQ ID NO: 3346667 - DNA, 25 bp, Homo sapien
agtcaccttcaccactatctgcagt

SEQ ID NO: 3346668 - DNA, 25 bp, Homo sapien
aggcagacgatcctcatggaaaaca

SEQ ID NO: 3346669 - DNA, 25 bp, Homo sapien
gaccaggcagacgatcctcatggaa

SEQ ID NO: 3346670 - DNA, 25 bp, Homo sapien
accacacttaggaccaggcagacga

SEQ ID NO: 3346671 - DNA, 25 bp, Homo sapien
tgtgcccaccacacttaggaccagg

SEQ ID NO: 3346672 - DNA, 25 bp, Homo sapien
ggggctggctcctgaggagcactcc

SEQ ID NO: 3346673 - DNA, 25 bp, Homo sapien
gggctggctcctgaggagcactcca

SEQ ID NO: 3346674 - DNA, 25 bp, Homo sapien
ctggctcctgaggagcactccagct

SEQ ID NO: 3346675 - DNA, 25 bp, Homo sapien
gctcctgaggagcactccagctgaa

SEQ ID NO: 3346676 - DNA, 25 bp, Homo sapien
tgacaccagaaattaaatgcattga

SEQ ID NO: 3346677 - DNA, 25 bp, Homo sapien
ctgggctgacaccagaaattaaatg

SEQ ID NO: 3346678 - DNA, 25 bp, Homo sapien
attgatttctgagagcagctcactc

SEQ ID NO: 3346679 - DNA, 25 bp, Homo sapien
tgatttctgagagcagctcactcat

SEQ ID NO: 3346680 - DNA, 25 bp, Homo sapien
attggtaaattggcaaaaagtggtg

SEQ ID NO: 3346681 - DNA, 25 bp, Homo sapien
tttaatggtcaataaaggtaccatg

SEQ ID NO: 3346682 - DNA, 25 bp, Homo sapien
caaaaggtttattgaaatgcatgta

SEQ ID NO: 3346683 - DNA, 25 bp, Homo sapien
ccattgtccaataggaaaaatatta

SEQ ID NO: 3346684 - DNA, 25 bp, Homo sapien
caacatggggtcttttgctcttaaa

SEQ ID NO: 3346685 - DNA, 25 bp, Homo sapien
actgttatggagttttcaacatggg

SEQ ID NO: 3346686 - DNA, 25 bp, Homo sapien
agctttgcaagtccattgtccaata

SEQ ID NO: 3346687 - DNA, 25 bp, Homo sapien
caaaataaatgacaagtggtcataa

SEQ ID NO: 3346688 - DNA, 25 bp, Homo sapien
ttacgaagacaaaataaatgacaag

SEQ ID NO: 3346689 - DNA, 25 bp, Homo sapien
tattaagtacatactaaaatatttg

SEQ ID NO: 3346690 - DNA, 25 bp, Homo sapien
aaaagaagaattaaataggaatgat

SEQ ID NO: 3346691 - DNA, 25 bp, Homo sapien
tggaaatacagtcctaaatgagttt

SEQ ID NO: 3346692 - DNA, 25 bp, Homo sapien
ctgaaactttgtgggtcaatagaag

SEQ ID NO: 3346693 - DNA, 25 bp, Homo sapien
tttaatttccattgaaggctaaatg

SEQ ID NO: 3346694 - DNA, 25 bp, Homo sapien
aaatgtccttaatagaagacttgaa

SEQ ID NO: 3346695 - DNA, 25 bp, Homo sapien
caaatcatcctcagggtaaagtgag

SEQ ID NO: 3346696 - DNA, 25 bp, Homo sapien
ctacaaatcatcctcagggtaaagt

SEQ ID NO: 3346697 - DNA, 25 bp, Homo sapien
atcatcctcagggtaaagtgagtca

SEQ ID NO: 3346698 - DNA, 25 bp, Homo sapien
tacaaatcatcctcagggtaaagtg

SEQ ID NO: 3346699 - DNA, 25 bp, Homo sapien
tttggctccccccaggtggtgttgc

SEQ ID NO: 3346700 - DNA, 25 bp, Homo sapien
tcatggaataccaccgggttttcca

SEQ ID NO: 3346701 - DNA, 25 bp, Homo sapien
gaatgggattatcttcatagtggtt

SEQ ID NO: 3346702 - DNA, 25 bp, Homo sapien
gccattatcataaccattaggagta

SEQ ID NO: 3346703 - DNA, 25 bp, Homo sapien
caagcccggagtggtttggaacact

SEQ ID NO: 3346704 - DNA, 25 bp, Homo sapien
tgtctattacgaagtgcattgccag

SEQ ID NO: 3346705 - DNA, 25 bp, Homo sapien
gactatggtttgctacaagcccgga

SEQ ID NO: 3346706 - DNA, 25 bp, Homo sapien
tgtcctagggaagcagatctcatgt

SEQ ID NO: 3346707 - DNA, 25 bp, Homo sapien
gttgaaataaagaacatgataaaat

SEQ ID NO: 3346708 - DNA, 25 bp, Homo sapien
agttgaaataaagaacatgataaaa

SEQ ID NO: 3346709 - DNA, 25 bp, Homo sapien
ttgttcatccaccaaccagatccat

SEQ ID NO: 3346710 - DNA, 25 bp, Homo sapien
gatccatcctgttcagcacagttgc

SEQ ID NO: 3346711 - DNA, 25 bp, Homo sapien
ctccattgagatggccagcgtgaca

SEQ ID NO: 3346712 - DNA, 25 bp, Homo sapien
cagcgtgacacttgttcatccacca

SEQ ID NO: 3346713 - DNA, 25 bp, Homo sapien
attgtcccaggtactgaactgcatg

SEQ ID NO: 3346714 - DNA, 25 bp, Homo sapien
gaaaaacttgtcactaggatcatcg

SEQ ID NO: 3346715 - DNA, 25 bp, Homo sapien
tccccaccagcgaagtaggcatatg

SEQ ID NO: 3346716 - DNA, 25 bp, Homo sapien
aggcatatgttaggcggtacttgtc

SEQ ID NO: 3346717 - DNA, 25 bp, Homo sapien
tcaggtcccaccttgaacatggcat

SEQ ID NO: 3346718 - DNA, 25 bp, Homo sapien
cagaagttccctctttcgtaggatg

SEQ ID NO: 3346719 - DNA, 25 bp, Homo sapien
aaggctgaaatttgctcattgagtg

SEQ ID NO: 3346720 - DNA, 25 bp, Homo sapien
ccctcctcagggatctcagaagttc

SEQ ID NO: 3346721 - DNA, 25 bp, Homo sapien
ctttcgtaggatgcttccttggaat

SEQ ID NO: 3346722 - DNA, 25 bp, Homo sapien
tgacagaataaatggccatcaaggc

SEQ ID NO: 3346723 - DNA, 25 bp, Homo sapien
gctattactctgaatggttccaggg

SEQ ID NO: 3346724 - DNA, 25 bp, Homo sapien
gaaagtgcacattccaggcaatctt

SEQ ID NO: 3346725 - DNA, 25 bp, Homo sapien
caagaaccaaacagactcctggaga

SEQ ID NO: 3346726 - DNA, 25 bp, Homo sapien
tggcagactgtgtgcttatcaaatg

SEQ ID NO: 3346727 - DNA, 25 bp, Homo sapien
taggagacagatgtccaaatccttc

SEQ ID NO: 3346728 - DNA, 25 bp, Homo sapien
ggttctgccattccagtcttccagt

SEQ ID NO: 3346729 - DNA, 25 bp, Homo sapien
caaaattctgttgtgccagtaggag

SEQ ID NO: 3346730 - DNA, 25 bp, Homo sapien
aggagaaaatagactatcaatgcat

SEQ ID NO: 3346731 - DNA, 25 bp, Homo sapien
aaatagactatcaatgcatgtaaag

SEQ ID NO: 3346732 - DNA, 25 bp, Homo sapien
gaaaatagactatcaatgcatgtaa

SEQ ID NO: 3346733 - DNA, 25 bp, Homo sapien
gagaaaatagactatcaatgcatgt

SEQ ID NO: 3346734 - DNA, 25 bp, Homo sapien
gaatctacaaagtcagtgccagtac

SEQ ID NO: 3346735 - DNA, 25 bp, Homo sapien
gccagtacaatatagagtcaagtca

SEQ ID NO: 3346736 - DNA, 25 bp, Homo sapien
taggagtaacagaagtaccttcctc

SEQ ID NO: 3346737 - DNA, 25 bp, Homo sapien
aactctgaaactatactgcctaggt

SEQ ID NO: 3346738 - DNA, 25 bp, Homo sapien
taaagcccgctctgtttagctccct

SEQ ID NO: 3346739 - DNA, 25 bp, Homo sapien
tccatttccagacccatcgatttca

SEQ ID NO: 3346740 - DNA, 25 bp, Homo sapien
tcacagtagactaagaattgctggt

SEQ ID NO: 3346741 - DNA, 25 bp, Homo sapien
tgctggttagctttcagaggtttaa

SEQ ID NO: 3346742 - DNA, 25 bp, Homo sapien
tattcaagaaaggtctagacaactg

SEQ ID NO: 3346743 - DNA, 25 bp, Homo sapien
gaaatgcaggtaagactgtgccagc

SEQ ID NO: 3346744 - DNA, 25 bp, Homo sapien
ttcttagacttaatgggtagccact

SEQ ID NO: 3346745 - DNA, 25 bp, Homo sapien
gaaggagaatcgacttttactgtgg

SEQ ID NO: 3346746 - DNA, 25 bp, Homo sapien
gcactgtgcttcaagctgggctacc

SEQ ID NO: 3346747 - DNA, 25 bp, Homo sapien
tctctttcaggttaacaatcttttg

SEQ ID NO: 3346748 - DNA, 25 bp, Homo sapien
gatatcatggatttgcaccgtgtct

SEQ ID NO: 3346749 - DNA, 25 bp, Homo sapien
tcaagctgggctaccttctctttca

SEQ ID NO: 3346750 - DNA, 25 bp, Homo sapien
ggaatacaatgtggacctgaatctt

SEQ ID NO: 3346751 - DNA, 25 bp, Homo sapien
tctttggaaactgctaagtattttc

SEQ ID NO: 3346752 - DNA, 25 bp, Homo sapien
tgtggacctgaatctttttacttag

SEQ ID NO: 3346753 - DNA, 25 bp, Homo sapien
ctttggaaactgctaagtattttct

SEQ ID NO: 3346754 - DNA, 25 bp, Homo sapien
gctttaacagagacattcacttcca

SEQ ID NO: 3346755 - DNA, 25 bp, Homo sapien
cataatcaggcataatgtcactggg

SEQ ID NO: 3346756 - DNA, 25 bp, Homo sapien
tatgagtccctgagaagctttaaca

SEQ ID NO: 3346757 - DNA, 25 bp, Homo sapien
gaagagactatgcaggttcattctg

SEQ ID NO: 3346758 - DNA, 25 bp, Homo sapien
cattttcctggacttcaaagtagca

SEQ ID NO: 3346759 - DNA, 25 bp, Homo sapien
cgaatacttgagtcatgtgttaaaa

SEQ ID NO: 3346760 - DNA, 25 bp, Homo sapien
catgtgttaaaatcgatgcttcata

SEQ ID NO: 3346761 - DNA, 25 bp, Homo sapien
gacttcaaagtagcagcgtctatca

SEQ ID NO: 3346762 - DNA, 25 bp, Homo sapien
tggtcagtagtctttattttctcac

SEQ ID NO: 3346763 - DNA, 25 bp, Homo sapien
aatagaacaactaaaacaacagcaa

SEQ ID NO: 3346764 - DNA, 25 bp, Homo sapien
aaatccttaagcaaatagaacaact

SEQ ID NO: 3346765 - DNA, 25 bp, Homo sapien
cagcaaaagaacttcacagattatt

SEQ ID NO: 3346766 - DNA, 25 bp, Homo sapien
tatcagctgtttgacttctgatgtt

SEQ ID NO: 3346767 - DNA, 25 bp, Homo sapien
agtgagttggattgcttttatcagc

SEQ ID NO: 3346768 - DNA, 25 bp, Homo sapien
catcaggattataagtgagttggat

SEQ ID NO: 3346769 - DNA, 25 bp, Homo sapien
ttcaacttgatgtaagatgtcttcc

SEQ ID NO: 3346770 - DNA, 25 bp, Homo sapien
ctactttggtttgataagtagacag

SEQ ID NO: 3346771 - DNA, 25 bp, Homo sapien
tactttggtttgataagtagacagg

SEQ ID NO: 3346772 - DNA, 25 bp, Homo sapien
ttggtttgataagtagacaggaaat

SEQ ID NO: 3346773 - DNA, 25 bp, Homo sapien
ctttggtttgataagtagacaggaa

SEQ ID NO: 3346774 - DNA, 25 bp, Homo sapien
cacaggtagttggacaataactacc

SEQ ID NO: 3346775 - DNA, 25 bp, Homo sapien
gccacaggtagttggacaataacta

SEQ ID NO: 3346776 - DNA, 25 bp, Homo sapien
tgccacaggtagttggacaataact

SEQ ID NO: 3346777 - DNA, 25 bp, Homo sapien
atgccacaggtagttggacaataac

SEQ ID NO: 3346778 - DNA, 25 bp, Homo sapien
aatgtagacagatgctactcttaaa

SEQ ID NO: 3346779 - DNA, 25 bp, Homo sapien
tagacagatgctactcttaaaatct

SEQ ID NO: 3346780 - DNA, 25 bp, Homo sapien
gtgccagatgatatttatgagggaa

SEQ ID NO: 3346781 - DNA, 25 bp, Homo sapien
aaaagttacaagtgccagatgatat

SEQ ID NO: 3346782 - DNA, 25 bp, Homo sapien
aatctttcatctaagatgcagcagt

SEQ ID NO: 3346783 - DNA, 25 bp, Homo sapien
atctttcatctaagatgcagcagtt

SEQ ID NO: 3346784 - DNA, 25 bp, Homo sapien
gaatctttcatctaagatgcagcag

SEQ ID NO: 3346785 - DNA, 25 bp, Homo sapien
agaaatttcactagtttattatctg

SEQ ID NO: 3346786 - DNA, 25 bp, Homo sapien
aacgttttgtgaagagcacacttac

SEQ ID NO: 3346787 - DNA, 25 bp, Homo sapien
tttaaacaacgttttgtgaagagca

SEQ ID NO: 3346788 - DNA, 25 bp, Homo sapien
acaacgttttgtgaagagcacactt

SEQ ID NO: 3346789 - DNA, 25 bp, Homo sapien
ctacacatgttgaagagagaaataa

SEQ ID NO: 3346790 - DNA, 25 bp, Homo sapien
gctacacatgttgaagagagaaata

SEQ ID NO: 3346791 - DNA, 25 bp, Homo sapien
tacacatgttgaagagagaaataaa

SEQ ID NO: 3346792 - DNA, 25 bp, Homo sapien
tagagaattaaattccgggggtgca

SEQ ID NO: 3346793 - DNA, 25 bp, Homo sapien
cctttatgtaagctcctgggatagc

SEQ ID NO: 3346794 - DNA, 25 bp, Homo sapien
aggctccaattgtccctttatgtaa

SEQ ID NO: 3346795 - DNA, 25 bp, Homo sapien
ctccgagccttgtagtgtcagcact

SEQ ID NO: 3346796 - DNA, 25 bp, Homo sapien
gatagccaggactgcaaatggctgg

SEQ ID NO: 3346797 - DNA, 25 bp, Homo sapien
cagaagggtgggcaggtctttcccg

SEQ ID NO: 3346798 - DNA, 25 bp, Homo sapien
cattatccattgctgtgaggaggag

SEQ ID NO: 3346799 - DNA, 25 bp, Homo sapien
cagattttgcacacaggttgaagct

SEQ ID NO: 3346800 - DNA, 25 bp, Homo sapien
aggctagtgaagcattatccattgc

SEQ ID NO: 3346801 - DNA, 25 bp, Homo sapien
tggcccccaacctatactgtcaggt

SEQ ID NO: 3346802 - DNA, 25 bp, Homo sapien
gctgtggacatgaggaactccctgc

SEQ ID NO: 3346803 - DNA, 25 bp, Homo sapien
cgggtgccaactccttgctcaactt

SEQ ID NO: 3346804 - DNA, 25 bp, Homo sapien
tctgcaccttcgctttgctagcttg

SEQ ID NO: 3346805 - DNA, 25 bp, Homo sapien
tcttttcgctagcttatctacctcc

SEQ ID NO: 3346806 - DNA, 25 bp, Homo sapien
tccacagttggagtgagacagagtc

SEQ ID NO: 3346807 - DNA, 25 bp, Homo sapien
ggctccatcccttgtagagaatgac

SEQ ID NO: 3346808 - DNA, 25 bp, Homo sapien
tatccttgaaccttaatggcttggc

SEQ ID NO: 3346809 - DNA, 25 bp, Homo sapien
ttcctttagggagggcatagtgcag

SEQ ID NO: 3346810 - DNA, 25 bp, Homo sapien
tctcagagaccactctaaggattag

SEQ ID NO: 3346811 - DNA, 25 bp, Homo sapien
cagacattttcattaggacacaacc

SEQ ID NO: 3346812 - DNA, 25 bp, Homo sapien
tgtattccatatggcctgtctccca

SEQ ID NO: 3346813 - DNA, 25 bp, Homo sapien
ttgactgtatcagtcatccccaggg

SEQ ID NO: 3346814 - DNA, 25 bp, Homo sapien
catttggttctaactgatggatttt

SEQ ID NO: 3346815 - DNA, 25 bp, Homo sapien
tcatttggttctaactgatggattt

SEQ ID NO: 3346816 - DNA, 25 bp, Homo sapien
catcatttggttctaactgatggat

SEQ ID NO: 3346817 - DNA, 25 bp, Homo sapien
atttggttctaactgatggattttg

SEQ ID NO: 3346818 - DNA, 25 bp, Homo sapien
atttgaaacactttgcagtttccat

SEQ ID NO: 3346819 - DNA, 25 bp, Homo sapien
tatacctactgacctggcgtctcac

SEQ ID NO: 3346820 - DNA, 25 bp, Homo sapien
tcaccggagcttctgaatcacaacc

SEQ ID NO: 3346821 - DNA, 25 bp, Homo sapien
gagcatctgcggtctcagtgtggag

SEQ ID NO: 3346822 - DNA, 25 bp, Homo sapien
ggctcccacactttatacctactga

SEQ ID NO: 3346823 - DNA, 25 bp, Homo sapien
caaaatcatccacccctgttgaaga

SEQ ID NO: 3346824 - DNA, 25 bp, Homo sapien
ctcaaaatcatccacccctgttgaa

SEQ ID NO: 3346825 - DNA, 25 bp, Homo sapien
ccacccctgttgaagacatgtccat

SEQ ID NO: 3346826 - DNA, 25 bp, Homo sapien
tcatccacccctgttgaagacatgt

SEQ ID NO: 3346827 - DNA, 25 bp, Homo sapien
ttacatccaactgtttggtgtctgg

SEQ ID NO: 3346828 - DNA, 25 bp, Homo sapien
atgttacatccaactgtttggtgtc

SEQ ID NO: 3346829 - DNA, 25 bp, Homo sapien
caactgtttggtgtctggagagctc

SEQ ID NO: 3346830 - DNA, 25 bp, Homo sapien
tccaactgtttggtgtctggagagc

SEQ ID NO: 3346831 - DNA, 25 bp, Homo sapien
ctgaatgtgggtatagtctcttcca

SEQ ID NO: 3346832 - DNA, 25 bp, Homo sapien
tcactaaccccagggacacctatct

SEQ ID NO: 3346833 - DNA, 25 bp, Homo sapien
agacctaaattctagctcctcttca

SEQ ID NO: 3346834 - DNA, 25 bp, Homo sapien
gttgctatggccctagaagacctaa

SEQ ID NO: 3346835 - DNA, 25 bp, Homo sapien
tagtactatgtagcaaaaattgcac

SEQ ID NO: 3346836 - DNA, 25 bp, Homo sapien
cagaaagatgatgaagctgtcttct

SEQ ID NO: 3346837 - DNA, 25 bp, Homo sapien
tatgatacaatatatgctctgtgaa

SEQ ID NO: 3346838 - DNA, 25 bp, Homo sapien
gctgtcttctgccaatcttaatgct

SEQ ID NO: 3346839 - DNA, 25 bp, Homo sapien
tcaggactataccatcgatctcact

SEQ ID NO: 3346840 - DNA, 25 bp, Homo sapien
cttcaggactataccatcgatctca

SEQ ID NO: 3346841 - DNA, 25 bp, Homo sapien
ttcaggactataccatcgatctcac

SEQ ID NO: 3346842 - DNA, 25 bp, Homo sapien
aggactataccatcgatctcactgg

SEQ ID NO: 3346843 - DNA, 25 bp, Homo sapien
tgcattgaacgtacacaccgaggtc

SEQ ID NO: 3346844 - DNA, 25 bp, Homo sapien
cacaagaggcttcggtattggcgct

SEQ ID NO: 3346845 - DNA, 25 bp, Homo sapien
tgaaacctattagcgccgactgggc

SEQ ID NO: 3346846 - DNA, 25 bp, Homo sapien
ttcaagaaactatggacactccgcg

SEQ ID NO: 3346847 - DNA, 25 bp, Homo sapien
cagcaatatcaagttatggcaatgg

SEQ ID NO: 3346848 - DNA, 25 bp, Homo sapien
ccagcaatatcaagttatggcaatg

SEQ ID NO: 3346849 - DNA, 25 bp, Homo sapien
tccagcaatatcaagttatggcaat

SEQ ID NO: 3346850 - DNA, 25 bp, Homo sapien
tgcattgtgaaagtttggagaggaa

SEQ ID NO: 3346851 - DNA, 25 bp, Homo sapien
cccgtgagtattaggaccatgtgat

SEQ ID NO: 3346852 - DNA, 25 bp, Homo sapien
ctttgcaactgggtcccgtgagtat

SEQ ID NO: 3346853 - DNA, 25 bp, Homo sapien
gaggactttgcattgtgaaagtttg

SEQ ID NO: 3346854 - DNA, 25 bp, Homo sapien
ttttccatgcaaggtgaacagatgc

SEQ ID NO: 3346855 - DNA, 25 bp, Homo sapien
tcaggtgccttagctctcaaggact

SEQ ID NO: 3346856 - DNA, 25 bp, Homo sapien
cctatcatgtctaggctcaggtgcc

SEQ ID NO: 3346857 - DNA, 25 bp, Homo sapien
aacagatgcaacgtgcagagtgagc

SEQ ID NO: 3346858 - DNA, 25 bp, Homo sapien
ccagaggatctgtagggttccacat

SEQ ID NO: 3346859 - DNA, 25 bp, Homo sapien
ggttccacatttgtagccttaagca

SEQ ID NO: 3346860 - DNA, 25 bp, Homo sapien
tagaatcaaggagttcttccaagaa

SEQ ID NO: 3346861 - DNA, 25 bp, Homo sapien
cacatttgtagccttaagcattaac

SEQ ID NO: 3346862 - DNA, 25 bp, Homo sapien
ctggctctccacgagtgggcaatgg

SEQ ID NO: 3346863 - DNA, 25 bp, Homo sapien
ctctccacgagtgggcaatggtgca

SEQ ID NO: 3346864 - DNA, 25 bp, Homo sapien
atggcaaatggaccaccctggctct

SEQ ID NO: 3346865 - DNA, 25 bp, Homo sapien
ggcctccaggcctattgcaatgaca

SEQ ID NO: 3346866 - DNA, 25 bp, Homo sapien
tccattggactgatctgacccagct

SEQ ID NO: 3346867 - DNA, 25 bp, Homo sapien
tacccactccattggactgatctga

SEQ ID NO: 3346868 - DNA, 25 bp, Homo sapien
ttctgggtggcaccatgagccctgg

SEQ ID NO: 3346869 - DNA, 25 bp, Homo sapien
ttggaaattccagtaatggccagac

SEQ ID NO: 3346870 - DNA, 25 bp, Homo sapien
taaagcaatcagtttatgaagagaa

SEQ ID NO: 3346871 - DNA, 25 bp, Homo sapien
tttaaagcaatcagtttatgaagag

SEQ ID NO: 3346872 - DNA, 25 bp, Homo sapien
cttttaaagcaatcagtttatgaag

SEQ ID NO: 3346873 - DNA, 25 bp, Homo sapien
aagcaatcagtttatgaagagaaag

SEQ ID NO: 3346874 - DNA, 25 bp, Homo sapien
agaagctgaccgcccctgtggtcat

SEQ ID NO: 3346875 - DNA, 25 bp, Homo sapien
gtgagaagctgaccgcccctgtggt

SEQ ID NO: 3346876 - DNA, 25 bp, Homo sapien
cagtgtccaccccataggtgagaag

SEQ ID NO: 3346877 - DNA, 25 bp, Homo sapien
acagtgtccaccccataggtgagaa

SEQ ID NO: 3346878 - DNA, 25 bp, Homo sapien
cctatctggttagccaggggcttct

SEQ ID NO: 3346879 - DNA, 25 bp, Homo sapien
cagcttgcggatgtgtttcaggaga

SEQ ID NO: 3346880 - DNA, 25 bp, Homo sapien
tgggggcctatctggttagccaggg

SEQ ID NO: 3346881 - DNA, 25 bp, Homo sapien
gcttgcggatgtgtttcaggagaat

SEQ ID NO: 3346882 - DNA, 25 bp, Homo sapien
ctggtcctcaaccacttcatggcaa

SEQ ID NO: 3346883 - DNA, 25 bp, Homo sapien
ccagaggactttgccagatcttcac

SEQ ID NO: 3346884 - DNA, 25 bp, Homo sapien
ggtcctcaaccacttcatggcaata

SEQ ID NO: 3346885 - DNA, 25 bp, Homo sapien
tggcaatacccagaggactttgcca

SEQ ID NO: 3346886 - DNA, 25 bp, Homo sapien
tactgacaactctcttagtctgcag

SEQ ID NO: 3346887 - DNA, 25 bp, Homo sapien
tcagaaagcctctaccaatgacctt

SEQ ID NO: 3346888 - DNA, 25 bp, Homo sapien
caatgaccttggctagacctgggca

SEQ ID NO: 3346889 - DNA, 25 bp, Homo sapien
gacctgggcacctagaggtgaaaaa

SEQ ID NO: 3346890 - DNA, 25 bp, Homo sapien
ttcatcagttttaatccacctaggc

SEQ ID NO: 3346891 - DNA, 25 bp, Homo sapien
atccacctaggcagtgtttagtggc

SEQ ID NO: 3346892 - DNA, 25 bp, Homo sapien
tgtaggggtatattcatcagtttta

SEQ ID NO: 3346893 - DNA, 25 bp, Homo sapien
ccttcatcagaaatggtgtgatgta

SEQ ID NO: 3346894 - DNA, 25 bp, Homo sapien
aacttccgataattacaaatgacca

SEQ ID NO: 3346895 - DNA, 25 bp, Homo sapien
ctgtgggtggctactgacatctatt

SEQ ID NO: 3346896 - DNA, 25 bp, Homo sapien
gacatctattctaaacttccgataa

SEQ ID NO: 3346897 - DNA, 25 bp, Homo sapien
gggtggctactgacatctattctaa

SEQ ID NO: 3346898 - DNA, 25 bp, Homo sapien
cattcctttgttctcttgtttacct

SEQ ID NO: 3346899 - DNA, 25 bp, Homo sapien
attgcattcctttgttctcttgttt

SEQ ID NO: 3346900 - DNA, 25 bp, Homo sapien
tcattgcattcctttgttctcttgt

SEQ ID NO: 3346901 - DNA, 25 bp, Homo sapien
tgcattcctttgttctcttgtttac

SEQ ID NO: 3346902 - DNA, 25 bp, Homo sapien
attccaaaataccttcccattctct

SEQ ID NO: 3346903 - DNA, 25 bp, Homo sapien
tcccattctcttctactcctacatt

SEQ ID NO: 3346904 - DNA, 25 bp, Homo sapien
attctcttctactcctacattttcc

SEQ ID NO: 3346905 - DNA, 25 bp, Homo sapien
ctgattccaaaataccttcccattc

SEQ ID NO: 3346906 - DNA, 25 bp, Homo sapien
tcttgtgactgccatcattgcaact

SEQ ID NO: 3346907 - DNA, 25 bp, Homo sapien
ctacttcttgtgactgccatcattg

SEQ ID NO: 3346908 - DNA, 25 bp, Homo sapien
cttcttgtgactgccatcattgcaa

SEQ ID NO: 3346909 - DNA, 25 bp, Homo sapien
ttgtgactgccatcattgcaactct

SEQ ID NO: 3346910 - DNA, 25 bp, Homo sapien
cacagctgtagcacttggagtggtg

SEQ ID NO: 3346911 - DNA, 25 bp, Homo sapien
gtggataacttttccacctcattcc

SEQ ID NO: 3346912 - DNA, 25 bp, Homo sapien
gtggtggataacttttccacctcat

SEQ ID NO: 3346913 - DNA, 25 bp, Homo sapien
tagcacttggagtggtggataactt

SEQ ID NO: 3346914 - DNA, 25 bp, Homo sapien
tgtgtatccactgaccatgctcagg

SEQ ID NO: 3346915 - DNA, 25 bp, Homo sapien
aaataatttgagacaacaccctggt

SEQ ID NO: 3346916 - DNA, 25 bp, Homo sapien
tctgaggctgctagagaactgtagt

SEQ ID NO: 3346917 - DNA, 25 bp, Homo sapien
ttctcactgatgttgaagcagcggt

SEQ ID NO: 3346918 - DNA, 25 bp, Homo sapien
ttcttttcaagacagtttctggcac

SEQ ID NO: 3346919 - DNA, 25 bp, Homo sapien
ccctcttggcagctagaatttcact

SEQ ID NO: 3346920 - DNA, 25 bp, Homo sapien
tttcaagacagtttctggcaccatc

SEQ ID NO: 3346921 - DNA, 25 bp, Homo sapien
ttcagggaccattttgcaacaagtt

SEQ ID NO: 3346922 - DNA, 25 bp, Homo sapien
agggaagcagtaggtactcagagta

SEQ ID NO: 3346923 - DNA, 25 bp, Homo sapien
cagactcacagtgtcaatgaaggct

SEQ ID NO: 3346924 - DNA, 25 bp, Homo sapien
gaagcagtaggtactcagagtagta

SEQ ID NO: 3346925 - DNA, 25 bp, Homo sapien
tgttgtgaaaatgaggaccgcagac

SEQ ID NO: 3346926 - DNA, 25 bp, Homo sapien
ttgtgtagtacccatgtagtttgga

SEQ ID NO: 3346927 - DNA, 25 bp, Homo sapien
aactcttcttgccatacttctggta

SEQ ID NO: 3346928 - DNA, 25 bp, Homo sapien
ttgatttaaatcaagcaggctatcc

SEQ ID NO: 3346929 - DNA, 25 bp, Homo sapien
cactgcaaggtatgcccctagccat

SEQ ID NO: 3346930 - DNA, 25 bp, Homo sapien
ttggggctcgcagttgtccttgtta

SEQ ID NO: 3346931 - DNA, 25 bp, Homo sapien
tggggctcgcagttgtccttgttat

SEQ ID NO: 3346932 - DNA, 25 bp, Homo sapien
ttagtccacactgaagctctttgcc

SEQ ID NO: 3346933 - DNA, 25 bp, Homo sapien
aatatagctgctaagatggaccacc

SEQ ID NO: 3346934 - DNA, 25 bp, Homo sapien
tatcatgtaaaccttggcaaacagc

SEQ ID NO: 3346935 - DNA, 25 bp, Homo sapien
cactgtgaaccgtgctagatagcat

SEQ ID NO: 3346936 - DNA, 25 bp, Homo sapien
cagcatgttccgtgtagtactcagc

SEQ ID NO: 3346937 - DNA, 25 bp, Homo sapien
catccgggtcacctttgtggtctga

SEQ ID NO: 3346938 - DNA, 25 bp, Homo sapien
tgccaatcttgacatccgggtcacc

SEQ ID NO: 3346939 - DNA, 25 bp, Homo sapien
tccgggtcacctttgtggtctgact

SEQ ID NO: 3346940 - DNA, 25 bp, Homo sapien
gtcacctttgtggtctgacttgatc

SEQ ID NO: 3346941 - DNA, 25 bp, Homo sapien
caagtcaatattgcccctcacaagt

SEQ ID NO: 3346942 - DNA, 25 bp, Homo sapien
tcttggtgcatattgtccattgcta

SEQ ID NO: 3346943 - DNA, 25 bp, Homo sapien
ttgctatcttgaaaaacccgatgtg

SEQ ID NO: 3346944 - DNA, 25 bp, Homo sapien
caagtgtcatgaccagcagtccaaa

SEQ ID NO: 3346945 - DNA, 25 bp, Homo sapien
ctgagaatcccagcatggtgaactg

SEQ ID NO: 3346946 - DNA, 25 bp, Homo sapien
agaggatgcaggtttgaaaacagtt

SEQ ID NO: 3346947 - DNA, 25 bp, Homo sapien
ggcgaggaacttgagcccagaggat

SEQ ID NO: 3346948 - DNA, 25 bp, Homo sapien
gaggatgcaggtttgaaaacagttt

SEQ ID NO: 3346949 - DNA, 25 bp, Homo sapien
ccttggaggacaacgggcacctctt

SEQ ID NO: 3346950 - DNA, 25 bp, Homo sapien
aacgggcacctcttgctgcacattt

SEQ ID NO: 3346951 - DNA, 25 bp, Homo sapien
gcctgtcaaactaatgtttagctcc

SEQ ID NO: 3346952 - DNA, 25 bp, Homo sapien
gaaatctaattttgcctgtcaaact

SEQ ID NO: 3346953 - DNA, 25 bp, Homo sapien
aaacatttttgccacatggccagaa

SEQ ID NO: 3346954 - DNA, 25 bp, Homo sapien
tctagctgatgagaatagcatgcgg

SEQ ID NO: 3346955 - DNA, 25 bp, Homo sapien
tcctcaggaagcacacgatctagct

SEQ ID NO: 3346956 - DNA, 25 bp, Homo sapien
cccagggagcactgcggaggcattt

SEQ ID NO: 3346957 - DNA, 25 bp, Homo sapien
gcaaatctgcattatggtgggaaga

SEQ ID NO: 3346958 - DNA, 25 bp, Homo sapien
gaaagtcacaggaagcatttctggc

SEQ ID NO: 3346959 - DNA, 25 bp, Homo sapien
tgggaagatccattggaaagtcaca

SEQ ID NO: 3346960 - DNA, 25 bp, Homo sapien
tctatatgtgacatagacctgcaaa

SEQ ID NO: 3346961 - DNA, 25 bp, Homo sapien
ggtttgtttgaaagctgctggctgc

SEQ ID NO: 3346962 - DNA, 25 bp, Homo sapien
tcagggtttgtttgaaagctgctgg

SEQ ID NO: 3346963 - DNA, 25 bp, Homo sapien
agggtttgtttgaaagctgctggct

SEQ ID NO: 3346964 - DNA, 25 bp, Homo sapien
cagggtttgtttgaaagctgctggc

SEQ ID NO: 3346965 - DNA, 25 bp, Homo sapien
ctgtttcatttgccttaggaatttt

SEQ ID NO: 3346966 - DNA, 25 bp, Homo sapien
agttttggacagctatctttcccag

SEQ ID NO: 3346967 - DNA, 25 bp, Homo sapien
tacgtccagaccactattgcctatg

SEQ ID NO: 3346968 - DNA, 25 bp, Homo sapien
tatggcaaggatgctttcctcccgg

SEQ ID NO: 3346969 - DNA, 25 bp, Homo sapien
ggtggtgttgctgtacaaatccatg

SEQ ID NO: 3346970 - DNA, 25 bp, Homo sapien
gagaaatcttcatgcaggcccttca

SEQ ID NO: 3346971 - DNA, 25 bp, Homo sapien
tctgagcatttctcgctgagaaatc

SEQ ID NO: 3346972 - DNA, 25 bp, Homo sapien
ctctttctgagcatttctcgctgag

SEQ ID NO: 3346973 - DNA, 25 bp, Homo sapien
tttctcgctgagaaatcttcatgca

SEQ ID NO: 3346974 - DNA, 25 bp, Homo sapien
gcaaatctggtctttacactgtgtg

SEQ ID NO: 3346975 - DNA, 25 bp, Homo sapien
tggaggactaaacacagttggagca

SEQ ID NO: 3346976 - DNA, 25 bp, Homo sapien
gaagtccagtcccaatttccaggtg

SEQ ID NO: 3346977 - DNA, 25 bp, Homo sapien
caggttcaaggcagccccaaatgct

SEQ ID NO: 3346978 - DNA, 25 bp, Homo sapien
agcccatggggctctgctcttccca

SEQ ID NO: 3346979 - DNA, 25 bp, Homo sapien
cagcccatggggctctgctcttccc

SEQ ID NO: 3346980 - DNA, 25 bp, Homo sapien
ccagcatgtagtgggaatttactgc

SEQ ID NO: 3346981 - DNA, 25 bp, Homo sapien
caaggttgaattattagagcagcac

SEQ ID NO: 3346982 - DNA, 25 bp, Homo sapien
taagcatccctgtgagttaggtgac

SEQ ID NO: 3346983 - DNA, 25 bp, Homo sapien
ccatgtatttgcaatccagagtcca

SEQ ID NO: 3346984 - DNA, 25 bp, Homo sapien
gaatctcaagcaccaaactgtccat

SEQ ID NO: 3346985 - DNA, 25 bp, Homo sapien
gcacaatcaccacactgaaacaggt

SEQ ID NO: 3346986 - DNA, 25 bp, Homo sapien
tcttggagccataacacagctgcat

SEQ ID NO: 3346987 - DNA, 25 bp, Homo sapien
ggattgactggttgtagcaagcaca

SEQ ID NO: 3346988 - DNA, 25 bp, Homo sapien
ttcccttgttagtgaacatctttta

SEQ ID NO: 3346989 - DNA, 25 bp, Homo sapien
ttcgctcttatttaggagtttattc

SEQ ID NO: 3346990 - DNA, 25 bp, Homo sapien
gtaaaagattctgagtgatagtaaa

SEQ ID NO: 3346991 - DNA, 25 bp, Homo sapien
gctcttatttaggagtttattccac

SEQ ID NO: 3346992 - DNA, 25 bp, Homo sapien
tgaagggtcaagtgcagcaagagaa

SEQ ID NO: 3346993 - DNA, 25 bp, Homo sapien
aaatgaagcaaggattggttatgac

SEQ ID NO: 3346994 - DNA, 25 bp, Homo sapien
gggatgaagggtcaagtgcagcaag

SEQ ID NO: 3346995 - DNA, 25 bp, Homo sapien
gatgaagggtcaagtgcagcaagag

SEQ ID NO: 3346996 - DNA, 25 bp, Homo sapien
catgtatgtacttccaatattgcaa

SEQ ID NO: 3346997 - DNA, 25 bp, Homo sapien
gtatgtacttccaatattgcaaggc

SEQ ID NO: 3346998 - DNA, 25 bp, Homo sapien
aaacatttgtatgaccagggttggg

SEQ ID NO: 3346999 - DNA, 25 bp, Homo sapien
acatttgtatgaccagggttgggac

SEQ ID NO: 3347000 - DNA, 25 bp, Homo sapien
atgatttgcaggtcatgcatcattg

SEQ ID NO: 3347001 - DNA, 25 bp, Homo sapien
tgatttgcaggtcatgcatcattgc

SEQ ID NO: 3347002 - DNA, 25 bp, Homo sapien
ttaaatttctggctgacttatattt

SEQ ID NO: 3347003 - DNA, 25 bp, Homo sapien
atttctggctgacttatattttctc

SEQ ID NO: 3347004 - DNA, 25 bp, Homo sapien
aaatttctggctgacttatattttc

SEQ ID NO: 3347005 - DNA, 25 bp, Homo sapien
ttctggctgacttatattttctcct

SEQ ID NO: 3347006 - DNA, 25 bp, Homo sapien
gagagtgtgtcctgtgaccactttc

SEQ ID NO: 3347007 - DNA, 25 bp, Homo sapien
gtgtcctgtgaccactttccttatt

SEQ ID NO: 3347008 - DNA, 25 bp, Homo sapien
gtgtgtcctgtgaccactttcctta

SEQ ID NO: 3347009 - DNA, 25 bp, Homo sapien
actttccttattcctgtcctcacac

SEQ ID NO: 3347010 - DNA, 25 bp, Homo sapien
acagtggttctaagtcactcactcc

SEQ ID NO: 3347011 - DNA, 25 bp, Homo sapien
tcactccatcataatgcactatgag

SEQ ID NO: 3347012 - DNA, 25 bp, Homo sapien
tccccacaacagtggttctaagtca

SEQ ID NO: 3347013 - DNA, 25 bp, Homo sapien
cacttttccccacaacagtggttct

SEQ ID NO: 3347014 - DNA, 25 bp, Homo sapien
ccccacggtctctacactttgcaga

SEQ ID NO: 3347015 - DNA, 25 bp, Homo sapien
actttagccccacggtctctacact

SEQ ID NO: 3347016 - DNA, 25 bp, Homo sapien
ttagccccacggtctctacactttg

SEQ ID NO: 3347017 - DNA, 25 bp, Homo sapien
cacggtctctacactttgcagaaaa

SEQ ID NO: 3347018 - DNA, 25 bp, Homo sapien
gccttctttctgtcaggataagatg

SEQ ID NO: 3347019 - DNA, 25 bp, Homo sapien
gaaagccttctttctgtcaggataa

SEQ ID NO: 3347020 - DNA, 25 bp, Homo sapien
cagtgaaagccttctttctgtcagg

SEQ ID NO: 3347021 - DNA, 25 bp, Homo sapien
agtgaaagccttctttctgtcagga

SEQ ID NO: 3347022 - DNA, 25 bp, Homo sapien
tatattgagaagaatggaacctgtc

SEQ ID NO: 3347023 - DNA, 25 bp, Homo sapien
gctgctaatacgcttctgaaaggca

SEQ ID NO: 3347024 - DNA, 25 bp, Homo sapien
tgctctaaaagacaacactcatctg

SEQ ID NO: 3347025 - DNA, 25 bp, Homo sapien
cacacgtctataagagagtgaggca

SEQ ID NO: 3347026 - DNA, 25 bp, Homo sapien
gaatcccgaggaaatagacgctgct

SEQ ID NO: 3347027 - DNA, 25 bp, Homo sapien
cacgagtggcttgggtcaggatcaa

SEQ ID NO: 3347028 - DNA, 25 bp, Homo sapien
taatgtgtgcaaagcctccgaagag

SEQ ID NO: 3347029 - DNA, 25 bp, Homo sapien
taggcatgcgctcctagtggcacga

SEQ ID NO: 3347030 - DNA, 25 bp, Homo sapien
ttttccggggttctgcgcggatcca

SEQ ID NO: 3347031 - DNA, 25 bp, Homo sapien
tcggtgcaatcctgctggcgctttt

SEQ ID NO: 3347032 - DNA, 25 bp, Homo sapien
gcgagggtgcggaggatttgttctc

SEQ ID NO: 3347033 - DNA, 25 bp, Homo sapien
agggaccgcccagctagaggagcac

SEQ ID NO: 3347034 - DNA, 25 bp, Homo sapien
ggtgaagtcggcctcaagtccagga

SEQ ID NO: 3347035 - DNA, 25 bp, Homo sapien
ccgcagctgggtctgtccgccccgc

SEQ ID NO: 3347036 - DNA, 25 bp, Homo sapien
ttgctagggaccgcagtccctcagc

SEQ ID NO: 3347037 - DNA, 25 bp, Homo sapien
gcggatttggtgaagtcggcctcaa

SEQ ID NO: 3347038 - DNA, 25 bp, Homo sapien
cctctccaggtcggctggctaatca

SEQ ID NO: 3347039 - DNA, 25 bp, Homo sapien
ctctccaggtcggctggctaatcat

SEQ ID NO: 3347040 - DNA, 25 bp, Homo sapien
agagactgccaaataaaagcctttg

SEQ ID NO: 3347041 - DNA, 25 bp, Homo sapien
gtgagtttggttactatgataggca

SEQ ID NO: 3347042 - DNA, 25 bp, Homo sapien
cagtcaataggaagatggtacatga

SEQ ID NO: 3347043 - DNA, 25 bp, Homo sapien
gctcctttaaccctgcaatggcaat

SEQ ID NO: 3347044 - DNA, 25 bp, Homo sapien
ctgagcaataatcagaaggttttga

SEQ ID NO: 3347045 - DNA, 25 bp, Homo sapien
gcaataatcagaaggttttgacctg

SEQ ID NO: 3347046 - DNA, 25 bp, Homo sapien
cagaaggttttgacctgtagatatt

SEQ ID NO: 3347047 - DNA, 25 bp, Homo sapien
taatcagaaggttttgacctgtaga

SEQ ID NO: 3347048 - DNA, 25 bp, Homo sapien
gttctggattccattttctctgagc

SEQ ID NO: 3347049 - DNA, 25 bp, Homo sapien
ctgcgttctggattccattttctct

SEQ ID NO: 3347050 - DNA, 25 bp, Homo sapien
tgcgttctggattccattttctctg

SEQ ID NO: 3347051 - DNA, 25 bp, Homo sapien
ctggattccattttctctgagccat

SEQ ID NO: 3347052 - DNA, 25 bp, Homo sapien
cccaggtctgcatgaaatccaatac

SEQ ID NO: 3347053 - DNA, 25 bp, Homo sapien
ccaggtctgcatgaaatccaatact

SEQ ID NO: 3347054 - DNA, 25 bp, Homo sapien
caggtctgcatgaaatccaatactt

SEQ ID NO: 3347055 - DNA, 25 bp, Homo sapien
tctcgtctggagttacccatgagct

SEQ ID NO: 3347056 - DNA, 25 bp, Homo sapien
cctttccaattgtctcgtctggagt

SEQ ID NO: 3347057 - DNA, 25 bp, Homo sapien
ttcactgtaaagagcaaggaaagcc

SEQ ID NO: 3347058 - DNA, 25 bp, Homo sapien
tgagctatttaagtgaagggttagg

SEQ ID NO: 3347059 - DNA, 25 bp, Homo sapien
atattgaacaccagaaggacttggt

SEQ ID NO: 3347060 - DNA, 25 bp, Homo sapien
aatcttcaaaatgtggcttccagat

SEQ ID NO: 3347061 - DNA, 25 bp, Homo sapien
tcttcaaaatgtggcttccagatat

SEQ ID NO: 3347062 - DNA, 25 bp, Homo sapien
aagaaccatgcctttataagaatat

SEQ ID NO: 3347063 - DNA, 25 bp, Homo sapien
ttaccttatagagattttttatctc

SEQ ID NO: 3347064 - DNA, 25 bp, Homo sapien
catgagcatgggatgacattccatt

SEQ ID NO: 3347065 - DNA, 25 bp, Homo sapien
ttctgccaaactttaaagtcactcc

SEQ ID NO: 3347066 - DNA, 25 bp, Homo sapien
tgggctttgttgcagttttatcctc

SEQ ID NO: 3347067 - DNA, 25 bp, Homo sapien
tttcagcctccactgtctactgagt

SEQ ID NO: 3347068 - DNA, 25 bp, Homo sapien
cagttttatcctctgagtgctctaa

SEQ ID NO: 3347069 - DNA, 25 bp, Homo sapien
gttctatagtgcctgcaaagctggg

SEQ ID NO: 3347070 - DNA, 25 bp, Homo sapien
aatggcctcggtaagctatagctga

SEQ ID NO: 3347071 - DNA, 25 bp, Homo sapien
gcctcggtaagctatagctgaatcc

SEQ ID NO: 3347072 - DNA, 25 bp, Homo sapien
ctgttcaaaggaatggcctcggtaa

SEQ ID NO: 3347073 - DNA, 25 bp, Homo sapien
caaaggaatggcctcggtaagctat

SEQ ID NO: 3347074 - DNA, 25 bp, Homo sapien
aggtagtatatagacctatacctct

SEQ ID NO: 3347075 - DNA, 25 bp, Homo sapien
atacctctggctattcaccgagtca

SEQ ID NO: 3347076 - DNA, 25 bp, Homo sapien
tacctctggctattcaccgagtcat

SEQ ID NO: 3347077 - DNA, 25 bp, Homo sapien
tagtatatagacctatacctctggc

SEQ ID NO: 3347078 - DNA, 25 bp, Homo sapien
tcatgaatacccaatcctactggta

SEQ ID NO: 3347079 - DNA, 25 bp, Homo sapien
ctggtatttacactctggacatata

SEQ ID NO: 3347080 - DNA, 25 bp, Homo sapien
ccaatcctactggtatttacactct

SEQ ID NO: 3347081 - DNA, 25 bp, Homo sapien
tttacactctggacatatacttcag

SEQ ID NO: 3347082 - DNA, 25 bp, Homo sapien
aacctcagacacatcctgttctttc

SEQ ID NO: 3347083 - DNA, 25 bp, Homo sapien
cgaaaacctcagacacatcctgttc

SEQ ID NO: 3347084 - DNA, 25 bp, Homo sapien
ttccaacctctctttctttgttcat

SEQ ID NO: 3347085 - DNA, 25 bp, Homo sapien
aaaacctcagacacatcctgttctt

SEQ ID NO: 3347086 - DNA, 25 bp, Homo sapien
cagctgttcccacccacatttgtct

SEQ ID NO: 3347087 - DNA, 25 bp, Homo sapien
ttcacagctgttcccacccacattt

SEQ ID NO: 3347088 - DNA, 25 bp, Homo sapien
tgttcccacccacatttgtctcttc

SEQ ID NO: 3347089 - DNA, 25 bp, Homo sapien
atgaagccttcacagctgttcccac

SEQ ID NO: 3347090 - DNA, 25 bp, Homo sapien
tgctgcagctatgagcctactgagg

SEQ ID NO: 3347091 - DNA, 25 bp, Homo sapien
ctatatttcggatgctctgttctgc

SEQ ID NO: 3347092 - DNA, 25 bp, Homo sapien
tcatggagatagtgctgtggctgct

SEQ ID NO: 3347093 - DNA, 25 bp, Homo sapien
ctgaggctttgagccttacttgtca

SEQ ID NO: 3347094 - DNA, 25 bp, Homo sapien
tagaaagatgtgagatccttagggc

SEQ ID NO: 3347095 - DNA, 25 bp, Homo sapien
tgggagtagaaagatgtgagatcct

SEQ ID NO: 3347096 - DNA, 25 bp, Homo sapien
aaagatgtgagatccttagggcacc

SEQ ID NO: 3347097 - DNA, 25 bp, Homo sapien
ctgctcgaatgggagtagaaagatg

SEQ ID NO: 3347098 - DNA, 25 bp, Homo sapien
tagcctcactatcctctcacccttc

SEQ ID NO: 3347099 - DNA, 25 bp, Homo sapien
tgcttttagcctcactatcctctca

SEQ ID NO: 3347100 - DNA, 25 bp, Homo sapien
attcttgacagagtgcatctgaaaa

SEQ ID NO: 3347101 - DNA, 25 bp, Homo sapien
cttgacagagtgcatctgaaaagta

SEQ ID NO: 3347102 - DNA, 25 bp, Homo sapien
gttcgagtcactgatgtgatgctgc

SEQ ID NO: 3347103 - DNA, 25 bp, Homo sapien
cgagtcactgatgtgatgctgccac

SEQ ID NO: 3347104 - DNA, 25 bp, Homo sapien
actgatgtgatgctgccacaaacct

SEQ ID NO: 3347105 - DNA, 25 bp, Homo sapien
ctgatgtgatgctgccacaaacctc

SEQ ID NO: 3347106 - DNA, 25 bp, Homo sapien
ccaagaggatcagggttgaagtaag

SEQ ID NO: 3347107 - DNA, 25 bp, Homo sapien
ttttaggcagtagaagagagcagaa

SEQ ID NO: 3347108 - DNA, 25 bp, Homo sapien
cctgggaattacattcaggcaaagc

SEQ ID NO: 3347109 - DNA, 25 bp, Homo sapien
tataggactaaaggagagtgcagtc

SEQ ID NO: 3347110 - DNA, 25 bp, Homo sapien
tgaagcaaatacaaaccactggaat

SEQ ID NO: 3347111 - DNA, 25 bp, Homo sapien
cattacaaagtgacccgtgacatct

SEQ ID NO: 3347112 - DNA, 25 bp, Homo sapien
aactgggacccctgatactgagatc

SEQ ID NO: 3347113 - DNA, 25 bp, Homo sapien
aatcctgtatgtgaaaacctctgag

SEQ ID NO: 3347114 - DNA, 25 bp, Homo sapien
aaatagcattaccactttcttcatt

SEQ ID NO: 3347115 - DNA, 25 bp, Homo sapien
aatagcattaccactttcttcatta

SEQ ID NO: 3347116 - DNA, 25 bp, Homo sapien
taaatagcattaccactttcttcat

SEQ ID NO: 3347117 - DNA, 25 bp, Homo sapien
atagcattaccactttcttcattat

SEQ ID NO: 3347118 - DNA, 25 bp, Homo sapien
aacttttatatgaaagtctatatac

SEQ ID NO: 3347119 - DNA, 25 bp, Homo sapien
taatgttcgcacactcatgaatggg

SEQ ID NO: 3347120 - DNA, 25 bp, Homo sapien
tatgtaagatgaagccggtaacacc

SEQ ID NO: 3347121 - DNA, 25 bp, Homo sapien
gactaatgcatttcagctccgtgag

SEQ ID NO: 3347122 - DNA, 25 bp, Homo sapien
gaccagttactacgaggacatgcag

SEQ ID NO: 3347123 - DNA, 25 bp, Homo sapien
gatcatgaatcactccaccataaga

SEQ ID NO: 3347124 - DNA, 25 bp, Homo sapien
tattggcaaaccgataaataaccaa

SEQ ID NO: 3347125 - DNA, 25 bp, Homo sapien
gattattaggtctttgtttgaggca

SEQ ID NO: 3347126 - DNA, 25 bp, Homo sapien
tcattgtcagcaggagtgtctggca

SEQ ID NO: 3347127 - DNA, 25 bp, Homo sapien
tcttctgttttcgttcaattctttc

SEQ ID NO: 3347128 - DNA, 25 bp, Homo sapien
gggctccacggaggaagtgcctcac

SEQ ID NO: 3347129 - DNA, 25 bp, Homo sapien
ctgcttggagggctccacggaggaa

SEQ ID NO: 3347130 - DNA, 25 bp, Homo sapien
tggagggctccacggaggaagtgcc

SEQ ID NO: 3347131 - DNA, 25 bp, Homo sapien
ctgatctttggctattaactttccc

SEQ ID NO: 3347132 - DNA, 25 bp, Homo sapien
ttaatagcttgtttatctttatctt

SEQ ID NO: 3347133 - DNA, 25 bp, Homo sapien
tattcattaatagcttgtttatctt

SEQ ID NO: 3347134 - DNA, 25 bp, Homo sapien
tttcatattcattaatagcttgttt

SEQ ID NO: 3347135 - DNA, 25 bp, Homo sapien
ccatttttcatattcattaatagct

SEQ ID NO: 3347136 - DNA, 25 bp, Homo sapien
tctcaacagcagttaaattatcttt

SEQ ID NO: 3347137 - DNA, 25 bp, Homo sapien
aatatggttaatcattaatttggat

SEQ ID NO: 3347138 - DNA, 25 bp, Homo sapien
ttgtagtgcttctccttttcttgca

SEQ ID NO: 3347139 - DNA, 25 bp, Homo sapien
ctgttcattttggatccttaagttt

SEQ ID NO: 3347140 - DNA, 25 bp, Homo sapien
cattttggatccttaagttttcact

SEQ ID NO: 3347141 - DNA, 25 bp, Homo sapien
ctgtgcatttcatgtaaatacacat

SEQ ID NO: 3347142 - DNA, 25 bp, Homo sapien
ctttttattctgtgcatttcatgta

SEQ ID NO: 3347143 - DNA, 25 bp, Homo sapien
tctgtgaaggtttttggtccaagac

SEQ ID NO: 3347144 - DNA, 25 bp, Homo sapien
gaggtagttgtcgatggagttctcc

SEQ ID NO: 3347145 - DNA, 25 bp, Homo sapien
taaagtccctaaatagtgagaagag

SEQ ID NO: 3347146 - DNA, 25 bp, Homo sapien
gcccttatgttatctgctctatcag

SEQ ID NO: 3347147 - DNA, 25 bp, Homo sapien
gatgctctattatttgttgactttt

SEQ ID NO: 3347148 - DNA, 25 bp, Homo sapien
ctttatatttctatcttcaattgtt

SEQ ID NO: 3347149 - DNA, 25 bp, Homo sapien
catccataatcagttccgcttttgc

SEQ ID NO: 3347150 - DNA, 25 bp, Homo sapien
ttagatagtagtggatcaactgttc

SEQ ID NO: 3347151 - DNA, 25 bp, Homo sapien
gatattaagatactctgagatttag

SEQ ID NO: 3347152 - DNA, 25 bp, Homo sapien
gcactggtagatattaagatactct

SEQ ID NO: 3347153 - DNA, 25 bp, Homo sapien
gtagtcacatggtctgctgaaaatg

SEQ ID NO: 3347154 - DNA, 25 bp, Homo sapien
ttctcaactgcagtagtcacatggt

SEQ ID NO: 3347155 - DNA, 25 bp, Homo sapien
ttcaaggaattatggttttcagtga

SEQ ID NO: 3347156 - DNA, 25 bp, Homo sapien
tcaactgcagtagtcacatggtctg

SEQ ID NO: 3347157 - DNA, 25 bp, Homo sapien
gatgctagacttgttaagcatgaat

SEQ ID NO: 3347158 - DNA, 25 bp, Homo sapien
tttccagatgcgtttccctcagatc

SEQ ID NO: 3347159 - DNA, 25 bp, Homo sapien
tcagatcctggtgaaaaagaatctc

SEQ ID NO: 3347160 - DNA, 25 bp, Homo sapien
gatgatgatgctagacttgttaagc

SEQ ID NO: 3347161 - DNA, 25 bp, Homo sapien
gagagcagatccttaagcaccaaca

SEQ ID NO: 3347162 - DNA, 25 bp, Homo sapien
tcccagagagcagatccttaagcac

SEQ ID NO: 3347163 - DNA, 25 bp, Homo sapien
ccagagagcagatccttaagcacca

SEQ ID NO: 3347164 - DNA, 25 bp, Homo sapien
cagagagcagatccttaagcaccaa

SEQ ID NO: 3347165 - DNA, 25 bp, Homo sapien
cagttttagactcggtggaatacag

SEQ ID NO: 3347166 - DNA, 25 bp, Homo sapien
gctacgtcttacaattgatgcagtt

SEQ ID NO: 3347167 - DNA, 25 bp, Homo sapien
taaactctacaatcactggtgtgtt

SEQ ID NO: 3347168 - DNA, 25 bp, Homo sapien
agaacacaattcaacagtttagtgg

SEQ ID NO: 3347169 - DNA, 25 bp, Homo sapien
ttaaagtgatcatctgtgtcaaggc

SEQ ID NO: 3347170 - DNA, 25 bp, Homo sapien
cagcttctaattgtatgccattcgg

SEQ ID NO: 3347171 - DNA, 25 bp, Homo sapien
tttttcaacatactccttggccgag

SEQ ID NO: 3347172 - DNA, 25 bp, Homo sapien
gcagtttctttatcttctagtccat

SEQ ID NO: 3347173 - DNA, 25 bp, Homo sapien
tgaggatactgaagcttaacttatt

SEQ ID NO: 3347174 - DNA, 25 bp, Homo sapien
tatacatccacctgtctcagacaaa

SEQ ID NO: 3347175 - DNA, 25 bp, Homo sapien
taacgaagttcaattatgttcctct

SEQ ID NO: 3347176 - DNA, 25 bp, Homo sapien
gatttcactcactatacttagaagg

SEQ ID NO: 3347177 - DNA, 25 bp, Homo sapien
gcaattacagtaatcctaacaaatt

SEQ ID NO: 3347178 - DNA, 25 bp, Homo sapien
atgcaattacagtaatcctaacaaa

SEQ ID NO: 3347179 - DNA, 25 bp, Homo sapien
tgggactgattatcttaaaataaac

SEQ ID NO: 3347180 - DNA, 25 bp, Homo sapien
tataaaaattttgggactgattatc

SEQ ID NO: 3347181 - DNA, 25 bp, Homo sapien
ctgaagatgtgcttttaattgaaag

SEQ ID NO: 3347182 - DNA, 25 bp, Homo sapien
gaagatgtgcttttaattgaaagaa

SEQ ID NO: 3347183 - DNA, 25 bp, Homo sapien
tgcttttaattgaaagaattctggg

SEQ ID NO: 3347184 - DNA, 25 bp, Homo sapien
tgtgcttttaattgaaagaattctg

SEQ ID NO: 3347185 - DNA, 25 bp, Homo sapien
ttcatttttgatggcacacactggc

SEQ ID NO: 3347186 - DNA, 25 bp, Homo sapien
tacaacaatgtcttcacacccatca

SEQ ID NO: 3347187 - DNA, 25 bp, Homo sapien
tcttcacacccatcaggtgccattt

SEQ ID NO: 3347188 - DNA, 25 bp, Homo sapien
catttttgatggcacacactggctc

SEQ ID NO: 3347189 - DNA, 25 bp, Homo sapien
ttcatcatctgatatatgaaagtca

SEQ ID NO: 3347190 - DNA, 25 bp, Homo sapien
tcatcatctgatatatgaaagtcat

SEQ ID NO: 3347191 - DNA, 25 bp, Homo sapien
tcttcatcatctgatatatgaaagt

SEQ ID NO: 3347192 - DNA, 25 bp, Homo sapien
atcatctgatatatgaaagtcattc

SEQ ID NO: 3347193 - DNA, 25 bp, Homo sapien
ttttattaactgaattttcatctgc

SEQ ID NO: 3347194 - DNA, 25 bp, Homo sapien
gaattttcatctgctgaagtgtcag

SEQ ID NO: 3347195 - DNA, 25 bp, Homo sapien
attttcatctgctgaagtgtcagaa

SEQ ID NO: 3347196 - DNA, 25 bp, Homo sapien
ttcatctgctgaagtgtcagaaaaa

SEQ ID NO: 3347197 - DNA, 25 bp, Homo sapien
gtggttggggggctggctaaataca

SEQ ID NO: 3347198 - DNA, 25 bp, Homo sapien
gatgggtggttggggggctggctaa

SEQ ID NO: 3347199 - DNA, 25 bp, Homo sapien
tggttggggggctggctaaatacaa

SEQ ID NO: 3347200 - DNA, 25 bp, Homo sapien
ggatgggtggttggggggctggcta

SEQ ID NO: 3347201 - DNA, 25 bp, Homo sapien
caaagtcatctgagtattcagaact

SEQ ID NO: 3347202 - DNA, 25 bp, Homo sapien
ctgtaattgctcttattagctcatc

SEQ ID NO: 3347203 - DNA, 25 bp, Homo sapien
tatatgccaaagtggtgctaaaaac

SEQ ID NO: 3347204 - DNA, 25 bp, Homo sapien
tggtaacttttggactctttgtata

SEQ ID NO: 3347205 - DNA, 25 bp, Homo sapien
tatgccaaagtggtgctaaaaactt

SEQ ID NO: 3347206 - DNA, 25 bp, Homo sapien
ttgtatatgccaaagtggtgctaaa

SEQ ID NO: 3347207 - DNA, 25 bp, Homo sapien
tctcgttacctttataaaatagcta

SEQ ID NO: 3347208 - DNA, 25 bp, Homo sapien
attattagaattcaacttctgatag

SEQ ID NO: 3347209 - DNA, 25 bp, Homo sapien
cctttataaaatagctaattattag

SEQ ID NO: 3347210 - DNA, 25 bp, Homo sapien
attagaattcaacttctgatagtag

SEQ ID NO: 3347211 - DNA, 25 bp, Homo sapien
cagccagcgagatgtattgcaagcc

SEQ ID NO: 3347212 - DNA, 25 bp, Homo sapien
ttaaagagagccagacaaaacgacg

SEQ ID NO: 3347213 - DNA, 25 bp, Homo sapien
gaaaaagatcgtaatgctaacccgc

SEQ ID NO: 3347214 - DNA, 25 bp, Homo sapien
ccatcaaaaggatcgtcggcgtaaa

SEQ ID NO: 3347215 - DNA, 25 bp, Homo sapien
aggccaggtgacgtccgggtgctcg

SEQ ID NO: 3347216 - DNA, 25 bp, Homo sapien
caggccaggtgacgtccgggtgctc

SEQ ID NO: 3347217 - DNA, 25 bp, Homo sapien
ccaggtgacgtccgggtgctcgccg

SEQ ID NO: 3347218 - DNA, 25 bp, Homo sapien
ggccaggtgacgtccgggtgctcgc

SEQ ID NO: 3347219 - DNA, 25 bp, Homo sapien
cgtatgctgagcaccagcgaacgcc

SEQ ID NO: 3347220 - DNA, 25 bp, Homo sapien
aggcccgtgcacgtccaagcgcggt

SEQ ID NO: 3347221 - DNA, 25 bp, Homo sapien
aagcgcggtctctgtccggatcccc

SEQ ID NO: 3347222 - DNA, 25 bp, Homo sapien
gacgcccgcggccagttctccgcga

SEQ ID NO: 3347223 - DNA, 25 bp, Homo sapien
caagcatcgggtaggagctgctcac

SEQ ID NO: 3347224 - DNA, 25 bp, Homo sapien
gaatcaagagccaagcatcgggtag

SEQ ID NO: 3347225 - DNA, 25 bp, Homo sapien
caagagccaagcatcgggtaggagc

SEQ ID NO: 3347226 - DNA, 25 bp, Homo sapien
tgagaatcaagagccaagcatcggg

SEQ ID NO: 3347227 - DNA, 25 bp, Homo sapien
cctggcggcgcccgcagagccggtc

SEQ ID NO: 3347228 - DNA, 25 bp, Homo sapien
gcctggcggcgcccgcagagccggt

SEQ ID NO: 3347229 - DNA, 25 bp, Homo sapien
ggcctggcggcgcccgcagagccgg

SEQ ID NO: 3347230 - DNA, 25 bp, Homo sapien
gaaacagcgtcttcgggaggaagtg

SEQ ID NO: 3347231 - DNA, 25 bp, Homo sapien
ctaataacagaggcggagggcggtt

SEQ ID NO: 3347232 - DNA, 25 bp, Homo sapien
ggcggagggcggttgctaggaaaca

SEQ ID NO: 3347233 - DNA, 25 bp, Homo sapien
tcttcgggaggaagtgacttcccca

SEQ ID NO: 3347234 - DNA, 25 bp, Homo sapien
tgtcgctggggcaaccacccagacg

SEQ ID NO: 3347235 - DNA, 25 bp, Homo sapien
gtctctcgggtacccaacaccgctc

SEQ ID NO: 3347236 - DNA, 25 bp, Homo sapien
ctcttcggcccaacgtgtcgctggg

SEQ ID NO: 3347237 - DNA, 25 bp, Homo sapien
cacccagacgaaggaagtgacatca

SEQ ID NO: 3347238 - DNA, 25 bp, Homo sapien
gtcgcttgtgtgcatgtgctgttgc

SEQ ID NO: 3347239 - DNA, 25 bp, Homo sapien
tattggtcgcttgtgtgcatgtgct

SEQ ID NO: 3347240 - DNA, 25 bp, Homo sapien
tggtcgcttgtgtgcatgtgctgtt

SEQ ID NO: 3347241 - DNA, 25 bp, Homo sapien
attggtcgcttgtgtgcatgtgctg

SEQ ID NO: 3347242 - DNA, 25 bp, Homo sapien
ggtgtgcgcctttccatgctctcct

SEQ ID NO: 3347243 - DNA, 25 bp, Homo sapien
actgctgactcgagtggcacaccga

SEQ ID NO: 3347244 - DNA, 25 bp, Homo sapien
gggtgcttccacttgtaattgtgac

SEQ ID NO: 3347245 - DNA, 25 bp, Homo sapien
gctgactcgagtggcacaccgacgg

SEQ ID NO: 3347246 - DNA, 25 bp, Homo sapien
catagaacaaataaagggcctctcc

SEQ ID NO: 3347247 - DNA, 25 bp, Homo sapien
tttggcaaaacactctccatttaga

SEQ ID NO: 3347248 - DNA, 25 bp, Homo sapien
cttgatctggctttatcagcataga

SEQ ID NO: 3347249 - DNA, 25 bp, Homo sapien
tgggtgccactcttgtctgcttgcc

SEQ ID NO: 3347250 - DNA, 25 bp, Homo sapien
gggcaaggagccagtttcatgtcct

SEQ ID NO: 3347251 - DNA, 25 bp, Homo sapien
cgaggtttgccactcaagcagcaag

SEQ ID NO: 3347252 - DNA, 25 bp, Homo sapien
gatggtagcgtacaggtagagcccc

SEQ ID NO: 3347253 - DNA, 25 bp, Homo sapien
aggaagcaacagatggtagcgtaca

SEQ ID NO: 3347254 - DNA, 25 bp, Homo sapien
ctctgaagtgtcttctccttgggcc

SEQ ID NO: 3347255 - DNA, 25 bp, Homo sapien
cttctctgaagtgtcttctccttgg

SEQ ID NO: 3347256 - DNA, 25 bp, Homo sapien
cttgggccatcagctgcccccatgc

SEQ ID NO: 3347257 - DNA, 25 bp, Homo sapien
tccttgggccatcagctgcccccat

SEQ ID NO: 3347258 - DNA, 25 bp, Homo sapien
gttgtctttgcttgctagggctgtc

SEQ ID NO: 3347259 - DNA, 25 bp, Homo sapien
ttgtctttgcttgctagggctgtca

SEQ ID NO: 3347260 - DNA, 25 bp, Homo sapien
agggcaccccgttcacagctaggga

SEQ ID NO: 3347261 - DNA, 25 bp, Homo sapien
tctgccacctctacttggaatgttc

SEQ ID NO: 3347262 - DNA, 25 bp, Homo sapien
acgtgcagcagtgtgctcccacctt

SEQ ID NO: 3347263 - DNA, 25 bp, Homo sapien
ggctctgccacctctacttggaatg

SEQ ID NO: 3347264 - DNA, 25 bp, Homo sapien
agcccccagatcacaaagccaacca

SEQ ID NO: 3347265 - DNA, 25 bp, Homo sapien
cagcccccagatcacaaagccaacc

SEQ ID NO: 3347266 - DNA, 25 bp, Homo sapien
gcccccagatcacaaagccaaccat

SEQ ID NO: 3347267 - DNA, 25 bp, Homo sapien
ggagtggaggctacactgccaggat

SEQ ID NO: 3347268 - DNA, 25 bp, Homo sapien
gatggccggatctcttccttttcca

SEQ ID NO: 3347269 - DNA, 25 bp, Homo sapien
tacactgccaggatggccggatctc

SEQ ID NO: 3347270 - DNA, 25 bp, Homo sapien
tggaggctacactgccaggatggcc

SEQ ID NO: 3347271 - DNA, 25 bp, Homo sapien
aatcagccatagatagcagaactgg

SEQ ID NO: 3347272 - DNA, 25 bp, Homo sapien
gctaaagcttgttggttatgatttg

SEQ ID NO: 3347273 - DNA, 25 bp, Homo sapien
catatcgtaggggacagatattgct

SEQ ID NO: 3347274 - DNA, 25 bp, Homo sapien
cagatattgctaaagcttgttggtt

SEQ ID NO: 3347275 - DNA, 25 bp, Homo sapien
aggagcaggataagtatgcagcata

SEQ ID NO: 3347276 - DNA, 25 bp, Homo sapien
ggacagcctggaaaattaacctcca

SEQ ID NO: 3347277 - DNA, 25 bp, Homo sapien
gacagcctggaaaattaacctccaa

SEQ ID NO: 3347278 - DNA, 25 bp, Homo sapien
cttcaacaacaaggcaaatagtatg

SEQ ID NO: 3347279 - DNA, 25 bp, Homo sapien
aacacttcaacaacaaggcaaatag

SEQ ID NO: 3347280 - DNA, 25 bp, Homo sapien
acttcaacaacaaggcaaatagtat

SEQ ID NO: 3347281 - DNA, 25 bp, Homo sapien
cacttcaacaacaaggcaaatagta

SEQ ID NO: 3347282 - DNA, 25 bp, Homo sapien
taacacataatctgtacatgtgaga

SEQ ID NO: 3347283 - DNA, 25 bp, Homo sapien
aacacataatctgtacatgtgagac

SEQ ID NO: 3347284 - DNA, 25 bp, Homo sapien
ctaacacataatctgtacatgtgag

SEQ ID NO: 3347285 - DNA, 25 bp, Homo sapien
acacataatctgtacatgtgagaca

SEQ ID NO: 3347286 - DNA, 25 bp, Homo sapien
taatacggttggtgatgaggaatcc

SEQ ID NO: 3347287 - DNA, 25 bp, Homo sapien
gaggaatccggcgaatatgctgcca

SEQ ID NO: 3347288 - DNA, 25 bp, Homo sapien
cagccagagtcatgaagcaaggttg

SEQ ID NO: 3347289 - DNA, 25 bp, Homo sapien
tatgctgccaactgttaggcgctta

SEQ ID NO: 3347290 - DNA, 25 bp, Homo sapien
gcacagataactgtgaataaggtag

SEQ ID NO: 3347291 - DNA, 25 bp, Homo sapien
taaagggtagaagcggataagcaag

SEQ ID NO: 3347292 - DNA, 25 bp, Homo sapien
catcattgaggctatggatgatgaa

SEQ ID NO: 3347293 - DNA, 25 bp, Homo sapien
ggatgatgaaccctgaacatataaa

SEQ ID NO: 3347294 - DNA, 25 bp, Homo sapien
accaatggataactccaatccttta

SEQ ID NO: 3347295 - DNA, 25 bp, Homo sapien
gaccaatggataactccaatccttt

SEQ ID NO: 3347296 - DNA, 25 bp, Homo sapien
taagaccaatggataactccaatcc

SEQ ID NO: 3347297 - DNA, 25 bp, Homo sapien
cctaagaccaatggataactccaat

SEQ ID NO: 3347298 - DNA, 25 bp, Homo sapien
catgttgttaaacatgggggcatga

SEQ ID NO: 3347299 - DNA, 25 bp, Homo sapien
ccatgttgttaaacatgggggcatg

SEQ ID NO: 3347300 - DNA, 25 bp, Homo sapien
tgttgttaaacatgggggcatgagt

SEQ ID NO: 3347301 - DNA, 25 bp, Homo sapien
agccatgttgttaaacatgggggca

SEQ ID NO: 3347302 - DNA, 25 bp, Homo sapien
tggtaggtaagaagttgcaggcttt

SEQ ID NO: 3347303 - DNA, 25 bp, Homo sapien
agttgcaggcttttattgttagatc

SEQ ID NO: 3347304 - DNA, 25 bp, Homo sapien
caggcttttattgttagatccacga

SEQ ID NO: 3347305 - DNA, 25 bp, Homo sapien
tgcaggcttttattgttagatccac

SEQ ID NO: 3347306 - DNA, 25 bp, Homo sapien
tggtaaatgtggtctatcataatct

SEQ ID NO: 3347307 - DNA, 25 bp, Homo sapien
aatctaatgagtcaaaatcatttat

SEQ ID NO: 3347308 - DNA, 25 bp, Homo sapien
tcataatctaatgagtcaaaatcat

SEQ ID NO: 3347309 - DNA, 25 bp, Homo sapien
tttggtaaatgtggtctatcataat

SEQ ID NO: 3347310 - DNA, 25 bp, Homo sapien
tctttcggataatatcaaaactaat

SEQ ID NO: 3347311 - DNA, 25 bp, Homo sapien
tactctctttcggataatatcaaaa

SEQ ID NO: 3347312 - DNA, 25 bp, Homo sapien
ttactctctttcggataatatcaaa

SEQ ID NO: 3347313 - DNA, 25 bp, Homo sapien
ctctctttcggataatatcaaaact

SEQ ID NO: 3347314 - DNA, 25 bp, Homo sapien
cctgaataagggctacggcgaattc

SEQ ID NO: 3347315 - DNA, 25 bp, Homo sapien
ggtaaaggcttacaagtagtgcaaa

SEQ ID NO: 3347316 - DNA, 25 bp, Homo sapien
gtgcaaagacataggcctgaataag

SEQ ID NO: 3347317 - DNA, 25 bp, Homo sapien
gctacggcgaattcaaggatgctca

SEQ ID NO: 3347318 - DNA, 25 bp, Homo sapien
agtttaatgctagatagttttacag

SEQ ID NO: 3347319 - DNA, 25 bp, Homo sapien
gcagagaggtgtagatccgctcagt

SEQ ID NO: 3347320 - DNA, 25 bp, Homo sapien
cttaaaagtttaatgctagatagtt

SEQ ID NO: 3347321 - DNA, 25 bp, Homo sapien
agaggtgtagatccgctcagtcttt

SEQ ID NO: 3347322 - DNA, 25 bp, Homo sapien
gtagttcttccataataaggaatgt

SEQ ID NO: 3347323 - DNA, 25 bp, Homo sapien
gtgagtagttcttccataataagga

SEQ ID NO: 3347324 - DNA, 25 bp, Homo sapien
tccataataaggaatgtagtgtctt

SEQ ID NO: 3347325 - DNA, 25 bp, Homo sapien
ccataataaggaatgtagtgtcttg

SEQ ID NO: 3347326 - DNA, 25 bp, Homo sapien
ttaagacatataggatttaacctat

SEQ ID NO: 3347327 - DNA, 25 bp, Homo sapien
gttatggaataattttactaatatc

SEQ ID NO: 3347328 - DNA, 25 bp, Homo sapien
agacatataggatttaacctataaa

SEQ ID NO: 3347329 - DNA, 25 bp, Homo sapien
catataggatttaacctataaacta

SEQ ID NO: 3347330 - DNA, 25 bp, Homo sapien
ttagtataggaaggatataaccaac

SEQ ID NO: 3347331 - DNA, 25 bp, Homo sapien
ataaccaacatttttggtgtatggg

SEQ ID NO: 3347332 - DNA, 25 bp, Homo sapien
catttttggtgtatgggcccaatag

SEQ ID NO: 3347333 - DNA, 25 bp, Homo sapien
ccaacatttttggtgtatgggccca

SEQ ID NO: 3347334 - DNA, 25 bp, Homo sapien
aaagtaattcttttgtctgacatat

SEQ ID NO: 3347335 - DNA, 25 bp, Homo sapien
aattagaggattttaacctctattg

SEQ ID NO: 3347336 - DNA, 25 bp, Homo sapien
gtaattcttttgtctgacatatttc

SEQ ID NO: 3347337 - DNA, 25 bp, Homo sapien
acctctattgtttactctatcaaag

SEQ ID NO: 3347338 - DNA, 25 bp, Homo sapien
cttctgctagatcaaaaggtgctcg

SEQ ID NO: 3347339 - DNA, 25 bp, Homo sapien
ctagatcaaaaggtgctcggttagt

SEQ ID NO: 3347340 - DNA, 25 bp, Homo sapien
tctgctagatcaaaaggtgctcggt

SEQ ID NO: 3347341 - DNA, 25 bp, Homo sapien
tctccttctgctagatcaaaaggtg

SEQ ID NO: 3347342 - DNA, 25 bp, Homo sapien
ttaagttttatgcaattaccaggct

SEQ ID NO: 3347343 - DNA, 25 bp, Homo sapien
tttatgcaattaccaggctctgcca

SEQ ID NO: 3347344 - DNA, 25 bp, Homo sapien
attttaagttttatgcaattaccag

SEQ ID NO: 3347345 - DNA, 25 bp, Homo sapien
agttttatgcaattaccaggctctg

SEQ ID NO: 3347346 - DNA, 25 bp, Homo sapien
atcttccaggtgtaagctggatgct

SEQ ID NO: 3347347 - DNA, 25 bp, Homo sapien
taagctggatgctttggtttaagct

SEQ ID NO: 3347348 - DNA, 25 bp, Homo sapien
ctcaaagtgatcaggtcacaatgaa

SEQ ID NO: 3347349 - DNA, 25 bp, Homo sapien
tcaggtcacaatgaaatcttccagg

SEQ ID NO: 3347350 - DNA, 25 bp, Homo sapien
tccaaccttcatgagagagctaaaa

SEQ ID NO: 3347351 - DNA, 25 bp, Homo sapien
ctccaaccttcatgagagagctaaa

SEQ ID NO: 3347352 - DNA, 25 bp, Homo sapien
tgtcagcaccactttgcaagaattc

SEQ ID NO: 3347353 - DNA, 25 bp, Homo sapien
acaatgtatatgcaacagcactggc

SEQ ID NO: 3347354 - DNA, 25 bp, Homo sapien
cagcactggctcagttgtgttcatt

SEQ ID NO: 3347355 - DNA, 25 bp, Homo sapien
tgtgttcattactgactccccttca

SEQ ID NO: 3347356 - DNA, 25 bp, Homo sapien
tttctagctggccttgtgatgagca

SEQ ID NO: 3347357 - DNA, 25 bp, Homo sapien
ctgacagggcgaaggataacagtct

SEQ ID NO: 3347358 - DNA, 25 bp, Homo sapien
tgctcccacagctggtaattgaatg

SEQ ID NO: 3347359 - DNA, 25 bp, Homo sapien
cacagctggtaattgaatgtttcta

SEQ ID NO: 3347360 - DNA, 25 bp, Homo sapien
gcagccaaacgatgctgagagctgg

SEQ ID NO: 3347361 - DNA, 25 bp, Homo sapien
ctgcagccaaacgatgctgagagct

SEQ ID NO: 3347362 - DNA, 25 bp, Homo sapien
tgcagccaaacgatgctgagagctg

SEQ ID NO: 3347363 - DNA, 25 bp, Homo sapien
agagctggaaacacaaccatcagct

SEQ ID NO: 3347364 - DNA, 25 bp, Homo sapien
gctttcttcttccatagattttctc

SEQ ID NO: 3347365 - DNA, 25 bp, Homo sapien
ttcatcatcataaatgctttcttct

SEQ ID NO: 3347366 - DNA, 25 bp, Homo sapien
cttccatagattttctctgcatatc

SEQ ID NO: 3347367 - DNA, 25 bp, Homo sapien
ctaatggttttcatcatcataaatg

SEQ ID NO: 3347368 - DNA, 25 bp, Homo sapien
gatcttgctaaagtcatcctttctc

SEQ ID NO: 3347369 - DNA, 25 bp, Homo sapien
gaggtctcttttagtctggattctg

SEQ ID NO: 3347370 - DNA, 25 bp, Homo sapien
aggtctcttttagtctggattctga

SEQ ID NO: 3347371 - DNA, 25 bp, Homo sapien
tgaggtctcttttagtctggattct

SEQ ID NO: 3347372 - DNA, 25 bp, Homo sapien
ggtctcttttagtctggattctgag

SEQ ID NO: 3347373 - DNA, 25 bp, Homo sapien
ttgcaaccaaagggtagtttcctca

SEQ ID NO: 3347374 - DNA, 25 bp, Homo sapien
cagcgacttgcaaccaaagggtagt

SEQ ID NO: 3347375 - DNA, 25 bp, Homo sapien
agcgacttgcaaccaaagggtagtt

SEQ ID NO: 3347376 - DNA, 25 bp, Homo sapien
agcagcgacttgcaaccaaagggta

SEQ ID NO: 3347377 - DNA, 25 bp, Homo sapien
tagagtaatgttacctacaggcaca

SEQ ID NO: 3347378 - DNA, 25 bp, Homo sapien
gcaagaacaaataacatgagatcta

SEQ ID NO: 3347379 - DNA, 25 bp, Homo sapien
gattggaaagtgatctaagttctga

SEQ ID NO: 3347380 - DNA, 25 bp, Homo sapien
tacataatgttctacaggtatctgt

SEQ ID NO: 3347381 - DNA, 25 bp, Homo sapien
ccattgcaatgtctttatttatagc

SEQ ID NO: 3347382 - DNA, 25 bp, Homo sapien
tagcttcccacacctccaagatttt

SEQ ID NO: 3347383 - DNA, 25 bp, Homo sapien
atgtctttatttatagcttcccaca

SEQ ID NO: 3347384 - DNA, 25 bp, Homo sapien
ctcctgttccattgcaatgtcttta

SEQ ID NO: 3347385 - DNA, 25 bp, Homo sapien
ctccatctcctatcttatatccatt

SEQ ID NO: 3347386 - DNA, 25 bp, Homo sapien
ccatctcctatcttatatccattct

SEQ ID NO: 3347387 - DNA, 25 bp, Homo sapien
tccatctcctatcttatatccattc

SEQ ID NO: 3347388 - DNA, 25 bp, Homo sapien
attgaaaacacaggacaattcacac

SEQ ID NO: 3347389 - DNA, 25 bp, Homo sapien
atattgaaaacacaggacaattcac

SEQ ID NO: 3347390 - DNA, 25 bp, Homo sapien
actgaaatattgaaaacacaggaca

SEQ ID NO: 3347391 - DNA, 25 bp, Homo sapien
gaaatattgaaaacacaggacaatt

SEQ ID NO: 3347392 - DNA, 25 bp, Homo sapien
ggttagtgtataaactctggacaga

SEQ ID NO: 3347393 - DNA, 25 bp, Homo sapien
gagtatatacagcatgttcccacaa

SEQ ID NO: 3347394 - DNA, 25 bp, Homo sapien
ctggacagaaatgctcgagtgtggt

SEQ ID NO: 3347395 - DNA, 25 bp, Homo sapien
ggctgctcgtatctgtgagtatata

SEQ ID NO: 3347396 - DNA, 25 bp, Homo sapien
tgaaagcaggattaaacagcagggc

SEQ ID NO: 3347397 - DNA, 25 bp, Homo sapien
caatgtgggactggcgttgaaagca

SEQ ID NO: 3347398 - DNA, 25 bp, Homo sapien
tagactcaggaacaaagcctcagat

SEQ ID NO: 3347399 - DNA, 25 bp, Homo sapien
tagattcgcatctctgagacactgg

SEQ ID NO: 3347400 - DNA, 25 bp, Homo sapien
atactcataatgccttctaccaaaa

SEQ ID NO: 3347401 - DNA, 25 bp, Homo sapien
tatcgacatactcattaaagtcaag

SEQ ID NO: 3347402 - DNA, 25 bp, Homo sapien
aaactatacattaattttgatatgg

SEQ ID NO: 3347403 - DNA, 25 bp, Homo sapien
taattgttattatcactatcgacat

SEQ ID NO: 3347404 - DNA, 25 bp, Homo sapien
ttgtagatctatgtccagctccctt

SEQ ID NO: 3347405 - DNA, 25 bp, Homo sapien
ttggtattgtagatctatgtccagc

SEQ ID NO: 3347406 - DNA, 25 bp, Homo sapien
cttttggtattgtagatctatgtcc

SEQ ID NO: 3347407 - DNA, 25 bp, Homo sapien
tgggacttttggtattgtagatcta

SEQ ID NO: 3347408 - DNA, 25 bp, Homo sapien
cagcatccagtagccagcgctggct

SEQ ID NO: 3347409 - DNA, 25 bp, Homo sapien
gaggaatgactgagcggtgcatctc

SEQ ID NO: 3347410 - DNA, 25 bp, Homo sapien
ggtgcatctcacaagcctcaacact

SEQ ID NO: 3347411 - DNA, 25 bp, Homo sapien
gtggattagcaaaacctggaggaat

SEQ ID NO: 3347412 - DNA, 25 bp, Homo sapien
atttaagtggaatgaccacacatgt

SEQ ID NO: 3347413 - DNA, 25 bp, Homo sapien
agatttaagtggaatgaccacacat

SEQ ID NO: 3347414 - DNA, 25 bp, Homo sapien
tagatttaagtggaatgaccacaca

SEQ ID NO: 3347415 - DNA, 25 bp, Homo sapien
gatttaagtggaatgaccacacatg

SEQ ID NO: 3347416 - DNA, 25 bp, Homo sapien
tcctttgaccaaaagcatcctgcat

SEQ ID NO: 3347417 - DNA, 25 bp, Homo sapien
atgtggtgtcctttgaccaaaagca

SEQ ID NO: 3347418 - DNA, 25 bp, Homo sapien
atttctgttgattttatgtggtgtc

SEQ ID NO: 3347419 - DNA, 25 bp, Homo sapien
tctgttgattttatgtggtgtcctt

SEQ ID NO: 3347420 - DNA, 25 bp, Homo sapien
ttggattcagaatttatgtcagatt

SEQ ID NO: 3347421 - DNA, 25 bp, Homo sapien
tttggattcagaatttatgtcagat

SEQ ID NO: 3347422 - DNA, 25 bp, Homo sapien
gaacaggagaagcactgttctcctc

SEQ ID NO: 3347423 - DNA, 25 bp, Homo sapien
aatttggattcagaatttatgtcag

SEQ ID NO: 3347424 - DNA, 25 bp, Homo sapien
ctagccctccaactgcgttctttca

SEQ ID NO: 3347425 - DNA, 25 bp, Homo sapien
tagccctccaactgcgttctttcat

SEQ ID NO: 3347426 - DNA, 25 bp, Homo sapien
ctgcctagccctccaactgcgttct

SEQ ID NO: 3347427 - DNA, 25 bp, Homo sapien
gcctagccctccaactgcgttcttt

SEQ ID NO: 3347428 - DNA, 25 bp, Homo sapien
aagcctgcaacacgtgacaactgcg

SEQ ID NO: 3347429 - DNA, 25 bp, Homo sapien
gacaactgcggatcaggcatctgaa

SEQ ID NO: 3347430 - DNA, 25 bp, Homo sapien
gaataacagtgtcatgcctttccaa

SEQ ID NO: 3347431 - DNA, 25 bp, Homo sapien
tctaccagatggtattactccttgt

SEQ ID NO: 3347432 - DNA, 25 bp, Homo sapien
ccataaaactgcatctgcaaatgag

SEQ ID NO: 3347433 - DNA, 25 bp, Homo sapien
taaaactgcatctgcaaatgagtag

SEQ ID NO: 3347434 - DNA, 25 bp, Homo sapien
gcaaatgagtagattggcttcaaat

SEQ ID NO: 3347435 - DNA, 25 bp, Homo sapien
tgcatctgcaaatgagtagattggc

SEQ ID NO: 3347436 - DNA, 25 bp, Homo sapien
tctttttcagtctttcggtgcggag

SEQ ID NO: 3347437 - DNA, 25 bp, Homo sapien
gccacgcgggcgatacagtttccga

SEQ ID NO: 3347438 - DNA, 25 bp, Homo sapien
atgagcgacccaagcgtaagtgccg

SEQ ID NO: 3347439 - DNA, 25 bp, Homo sapien
cagaggtctgaaaaaatcgaatgcc

SEQ ID NO: 3347440 - DNA, 25 bp, Homo sapien
ctagagatccggaagcacagccccg

SEQ ID NO: 3347441 - DNA, 25 bp, Homo sapien
ccgaggtgtgcgaagccaccaagta

SEQ ID NO: 3347442 - DNA, 25 bp, Homo sapien
cacagccccgaggtgtgcgaagcca

SEQ ID NO: 3347443 - DNA, 25 bp, Homo sapien
gtgtgcgaagccaccaagtaagtgg

SEQ ID NO: 3347444 - DNA, 25 bp, Homo sapien
ctgagaaaccttcggtacgctccca

SEQ ID NO: 3347445 - DNA, 25 bp, Homo sapien
gggttcttcagacaggcggtccctc

SEQ ID NO: 3347446 - DNA, 25 bp, Homo sapien
gggaagccagcatcgggttcccacg

SEQ ID NO: 3347447 - DNA, 25 bp, Homo sapien
cagacaggcggtccctcttccggga

SEQ ID NO: 3347448 - DNA, 25 bp, Homo sapien
cacagcaaaagctgcgatcgctggg

SEQ ID NO: 3347449 - DNA, 25 bp, Homo sapien
gccggctgcggcgtgggtaagaggc

SEQ ID NO: 3347450 - DNA, 25 bp, Homo sapien
cgtgggtaagaggcgcgtcctcctc

SEQ ID NO: 3347451 - DNA, 25 bp, Homo sapien
tgcggcgtgggtaagaggcgcgtcc

SEQ ID NO: 3347452 - DNA, 25 bp, Homo sapien
tgtcccagtgttatgacaaaagttc

SEQ ID NO: 3347453 - DNA, 25 bp, Homo sapien
ctgattccagcataagcatcaagga

SEQ ID NO: 3347454 - DNA, 25 bp, Homo sapien
tgagtttgtgttggaatttgccacg

SEQ ID NO: 3347455 - DNA, 25 bp, Homo sapien
acgtcttttgctaacctgattccag

SEQ ID NO: 3347456 - DNA, 25 bp, Homo sapien
cttcccatcaaggatgaattgacct

SEQ ID NO: 3347457 - DNA, 25 bp, Homo sapien
ttccttcccatcaaggatgaattga

SEQ ID NO: 3347458 - DNA, 25 bp, Homo sapien
gatgaattgaccttggtatctcctc

SEQ ID NO: 3347459 - DNA, 25 bp, Homo sapien
tgaattgaccttggtatctcctcat

SEQ ID NO: 3347460 - DNA, 25 bp, Homo sapien
taaagtgaacatgccaattagtgtc

SEQ ID NO: 3347461 - DNA, 25 bp, Homo sapien
cttactttaactggactctgggtga

SEQ ID NO: 3347462 - DNA, 25 bp, Homo sapien
ctctgggtgacctatcttgtttgca

SEQ ID NO: 3347463 - DNA, 25 bp, Homo sapien
acaggtcaatcccagagtcacttca

SEQ ID NO: 3347464 - DNA, 25 bp, Homo sapien
cagagcatatggtcagactgggcta

SEQ ID NO: 3347465 - DNA, 25 bp, Homo sapien
ccaacagtacttctacgacagagca

SEQ ID NO: 3347466 - DNA, 25 bp, Homo sapien
taaagtgactaagcctctgcaagga

SEQ ID NO: 3347467 - DNA, 25 bp, Homo sapien
tatttccctagcgatagatgtgcct

SEQ ID NO: 3347468 - DNA, 25 bp, Homo sapien
tgaatttagcttccttgtttgtccc

SEQ ID NO: 3347469 - DNA, 25 bp, Homo sapien
tacaggctgttgcttatgggaacat

SEQ ID NO: 3347470 - DNA, 25 bp, Homo sapien
tattagatgacttacatgtgacaat

SEQ ID NO: 3347471 - DNA, 25 bp, Homo sapien
aatttagcttccttgtttgtcccag

SEQ ID NO: 3347472 - DNA, 25 bp, Homo sapien
tttctgacaacaggacaatgctcat

SEQ ID NO: 3347473 - DNA, 25 bp, Homo sapien
gaggaccacaacatgttgacatata

SEQ ID NO: 3347474 - DNA, 25 bp, Homo sapien
gatctcatgtatttcagcagaggac

SEQ ID NO: 3347475 - DNA, 25 bp, Homo sapien
aaatataattcaggatctcatgtat

SEQ ID NO: 3347476 - DNA, 25 bp, Homo sapien
ggaatataggaaagataacagagaa

SEQ ID NO: 3347477 - DNA, 25 bp, Homo sapien
taacagagaattggagcattgatgc

SEQ ID NO: 3347478 - DNA, 25 bp, Homo sapien
gaatctcttatttgtaggacaagtc

SEQ ID NO: 3347479 - DNA, 25 bp, Homo sapien
cagtaatttgcggaaaaatggtgtc

SEQ ID NO: 3347480 - DNA, 25 bp, Homo sapien
tgtcattaccgtatttagtaggaaa

SEQ ID NO: 3347481 - DNA, 25 bp, Homo sapien
tataattgtcattaccgtatttagt

SEQ ID NO: 3347482 - DNA, 25 bp, Homo sapien
attgtcattaccgtatttagtagga

SEQ ID NO: 3347483 - DNA, 25 bp, Homo sapien
ggagattataattgtcattaccgta

SEQ ID NO: 3347484 - DNA, 25 bp, Homo sapien
tctgcagacagtctcccaaatacag

SEQ ID NO: 3347485 - DNA, 25 bp, Homo sapien
ttacacgctctgacacaatggatcc

SEQ ID NO: 3347486 - DNA, 25 bp, Homo sapien
gcttctccacaactcatcaataaga

SEQ ID NO: 3347487 - DNA, 25 bp, Homo sapien
ccaaatacagatgcatgttcagcag

SEQ ID NO: 3347488 - DNA, 25 bp, Homo sapien
gagtagaagaccatggtctgtttgg

SEQ ID NO: 3347489 - DNA, 25 bp, Homo sapien
accatggtctgtttgggtaaatata

SEQ ID NO: 3347490 - DNA, 25 bp, Homo sapien
tagtgagtagaagaccatggtctgt

SEQ ID NO: 3347491 - DNA, 25 bp, Homo sapien
gaagaccatggtctgtttgggtaaa

SEQ ID NO: 3347492 - DNA, 25 bp, Homo sapien
cacgtgcaggcacacttggaacaat

SEQ ID NO: 3347493 - DNA, 25 bp, Homo sapien
ggaacaatatggacccacttcagca

SEQ ID NO: 3347494 - DNA, 25 bp, Homo sapien
tttagctggaagcaacatgggagta

SEQ ID NO: 3347495 - DNA, 25 bp, Homo sapien
catgggagtaaagtaatcatccagg

SEQ ID NO: 3347496 - DNA, 25 bp, Homo sapien
accactcagcctattattggaaagt

SEQ ID NO: 3347497 - DNA, 25 bp, Homo sapien
aaaccactcagcctattattggaaa

SEQ ID NO: 3347498 - DNA, 25 bp, Homo sapien
aaccactcagcctattattggaaag

SEQ ID NO: 3347499 - DNA, 25 bp, Homo sapien
ataaaccactcagcctattattgga

SEQ ID NO: 3347500 - DNA, 25 bp, Homo sapien
aggcaagcacagagttatactgaac

SEQ ID NO: 3347501 - DNA, 25 bp, Homo sapien
tatatcgatctagactttgtaggaa

SEQ ID NO: 3347502 - DNA, 25 bp, Homo sapien
ttccattcatggcttcttgtcctgt

SEQ ID NO: 3347503 - DNA, 25 bp, Homo sapien
gttgttttttgtgtcgagtacacta

SEQ ID NO: 3347504 - DNA, 25 bp, Homo sapien
tatgtgtgtcatgtaaaggtgtgcc

SEQ ID NO: 3347505 - DNA, 25 bp, Homo sapien
caaagactattagaaacagcatggt

SEQ ID NO: 3347506 - DNA, 25 bp, Homo sapien
tgacacagctttacatgaccttaag

SEQ ID NO: 3347507 - DNA, 25 bp, Homo sapien
ggacaaaagaccatctgggcaaaaa

SEQ ID NO: 3347508 - DNA, 25 bp, Homo sapien
tcaatgtggcaagccatctgagcct

SEQ ID NO: 3347509 - DNA, 25 bp, Homo sapien
tccatggattgtgtccatcaattac

SEQ ID NO: 3347510 - DNA, 25 bp, Homo sapien
catcaattactgagcctggtgaatc

SEQ ID NO: 3347511 - DNA, 25 bp, Homo sapien
cctcttcgtgctcccaaatcaagaa

SEQ ID NO: 3347512 - DNA, 25 bp, Homo sapien
ccataactttgtggattgttagata

SEQ ID NO: 3347513 - DNA, 25 bp, Homo sapien
gaccatggacatatttagggaggca

SEQ ID NO: 3347514 - DNA, 25 bp, Homo sapien
taagcatgtgaattcataatttcct

SEQ ID NO: 3347515 - DNA, 25 bp, Homo sapien
cggatggcaagctctactaatagct

SEQ ID NO: 3347516 - DNA, 25 bp, Homo sapien
tacaccacagggttacatctgggac

SEQ ID NO: 3347517 - DNA, 25 bp, Homo sapien
taccagaagatgaatgatagaattg

SEQ ID NO: 3347518 - DNA, 25 bp, Homo sapien
gaaatagtagctaagccagaagatg

SEQ ID NO: 3347519 - DNA, 25 bp, Homo sapien
gaatctgtgccaggaaatagtagct

SEQ ID NO: 3347520 - DNA, 25 bp, Homo sapien
gcattgatactcaagtgtaagcact

SEQ ID NO: 3347521 - DNA, 25 bp, Homo sapien
catagtggttttactgcattgatac

SEQ ID NO: 3347522 - DNA, 25 bp, Homo sapien
tgtaagcactatgttcagtgtaatt

SEQ ID NO: 3347523 - DNA, 25 bp, Homo sapien
taatttatgataagtaacagtattg

SEQ ID NO: 3347524 - DNA, 25 bp, Homo sapien
ttccatgtgccccttcacttctctt

SEQ ID NO: 3347525 - DNA, 25 bp, Homo sapien
catcttctccggattgtttttccct

SEQ ID NO: 3347526 - DNA, 25 bp, Homo sapien
tgactcatcttctccggattgtttt

SEQ ID NO: 3347527 - DNA, 25 bp, Homo sapien
ctcatcttctccggattgtttttcc

SEQ ID NO: 3347528 - DNA, 25 bp, Homo sapien
tttcacggatggctctttcaatgct

SEQ ID NO: 3347529 - DNA, 25 bp, Homo sapien
gtttcacggatggctctttcaatgc

SEQ ID NO: 3347530 - DNA, 25 bp, Homo sapien
ggtttcacggatggctctttcaatg

SEQ ID NO: 3347531 - DNA, 25 bp, Homo sapien
ttcacggatggctctttcaatgctc

SEQ ID NO: 3347532 - DNA, 25 bp, Homo sapien
caggatgaactgcttccgtctacac

SEQ ID NO: 3347533 - DNA, 25 bp, Homo sapien
ggatgaactgcttccgtctacacat

SEQ ID NO: 3347534 - DNA, 25 bp, Homo sapien
cccaggatgaactgcttccgtctac

SEQ ID NO: 3347535 - DNA, 25 bp, Homo sapien
gatgaactgcttccgtctacacatt

SEQ ID NO: 3347536 - DNA, 25 bp, Homo sapien
tggaaaggttaattcatgttgggaa

SEQ ID NO: 3347537 - DNA, 25 bp, Homo sapien
caaatgtaacgaaaacatggaaagg

SEQ ID NO: 3347538 - DNA, 25 bp, Homo sapien
atggaaaggttaattcatgttggga

SEQ ID NO: 3347539 - DNA, 25 bp, Homo sapien
ctgatgttcaaatgtaacgaaaaca

SEQ ID NO: 3347540 - DNA, 25 bp, Homo sapien
tatataagcagcaccagtattgcca

SEQ ID NO: 3347541 - DNA, 25 bp, Homo sapien
aagcagcaccagtattgccattttc

SEQ ID NO: 3347542 - DNA, 25 bp, Homo sapien
cttatatataagcagcaccagtatt

SEQ ID NO: 3347543 - DNA, 25 bp, Homo sapien
tataagcagcaccagtattgccatt

SEQ ID NO: 3347544 - DNA, 25 bp, Homo sapien
tcaactagtctcattgactagaagt

SEQ ID NO: 3347545 - DNA, 25 bp, Homo sapien
caatattaccagctttaaatttgcc

SEQ ID NO: 3347546 - DNA, 25 bp, Homo sapien
actgttgtgggaccaagccacagag

SEQ ID NO: 3347547 - DNA, 25 bp, Homo sapien
gaattcatgcaaggagcacggctgg

SEQ ID NO: 3347548 - DNA, 25 bp, Homo sapien
ccactgtcattgttatggcctcaaa

SEQ ID NO: 3347549 - DNA, 25 bp, Homo sapien
cagcagcattgagagcatccgaatt

SEQ ID NO: 3347550 - DNA, 25 bp, Homo sapien
tacatttagtgggtccacaagagct

SEQ ID NO: 3347551 - DNA, 25 bp, Homo sapien
cgagggcgagaaccgcggaaaggag

SEQ ID NO: 3347552 - DNA, 25 bp, Homo sapien
gagggcgagaaccgcggaaaggagc

SEQ ID NO: 3347553 - DNA, 25 bp, Homo sapien
ctgcgagggcgagaaccgcggaaag

SEQ ID NO: 3347554 - DNA, 25 bp, Homo sapien
tgcgagggcgagaaccgcggaaagg

SEQ ID NO: 3347555 - DNA, 25 bp, Homo sapien
tgagggcattaaagctgctccttgg

SEQ ID NO: 3347556 - DNA, 25 bp, Homo sapien
tggtttagtgtctgggctagagaac

SEQ ID NO: 3347557 - DNA, 25 bp, Homo sapien
tgctccttggtttccaacccaatac

SEQ ID NO: 3347558 - DNA, 25 bp, Homo sapien
gaacatggttgaactctctgcactg

SEQ ID NO: 3347559 - DNA, 25 bp, Homo sapien
agtaacagattccagacagcagaca

SEQ ID NO: 3347560 - DNA, 25 bp, Homo sapien
tttgcttcactaggaaatggccatc

SEQ ID NO: 3347561 - DNA, 25 bp, Homo sapien
gaaatggccatccatccttcatgag

SEQ ID NO: 3347562 - DNA, 25 bp, Homo sapien
ccctaagtaacagattccagacagc

SEQ ID NO: 3347563 - DNA, 25 bp, Homo sapien
ccagaaacttcctcagtacaaataa

SEQ ID NO: 3347564 - DNA, 25 bp, Homo sapien
gaaacttcctcagtacaaataaaca

SEQ ID NO: 3347565 - DNA, 25 bp, Homo sapien
aacttcctcagtacaaataaacaca

SEQ ID NO: 3347566 - DNA, 25 bp, Homo sapien
ttcctcagtacaaataaacacatta

SEQ ID NO: 3347567 - DNA, 25 bp, Homo sapien
gaactggatgcccaagtgtatactc

SEQ ID NO: 3347568 - DNA, 25 bp, Homo sapien
tgaagttatcttttgcagctggaac

SEQ ID NO: 3347569 - DNA, 25 bp, Homo sapien
ccagaacctggaccatgtctgtgag

SEQ ID NO: 3347570 - DNA, 25 bp, Homo sapien
gctctttgcatagggctcttccaga

SEQ ID NO: 3347571 - DNA, 25 bp, Homo sapien
aacatttactaagcattgttatgat

SEQ ID NO: 3347572 - DNA, 25 bp, Homo sapien
tctccagaataaggggctctagcaa

SEQ ID NO: 3347573 - DNA, 25 bp, Homo sapien
tctttaatgtgttggaaaactatag

SEQ ID NO: 3347574 - DNA, 25 bp, Homo sapien
gaaaactatagttatgggttgatgc

SEQ ID NO: 3347575 - DNA, 25 bp, Homo sapien
agacgtgagtacttgcagctttttc

SEQ ID NO: 3347576 - DNA, 25 bp, Homo sapien
agctcagcagacgtgagtacttgca

SEQ ID NO: 3347577 - DNA, 25 bp, Homo sapien
tggctagatccgagggtgacagctc

SEQ ID NO: 3347578 - DNA, 25 bp, Homo sapien
ggctagatccgagggtgacagctca

SEQ ID NO: 3347579 - DNA, 25 bp, Homo sapien
caaaacataaggtatccatatccgt

SEQ ID NO: 3347580 - DNA, 25 bp, Homo sapien
tctgtttttacatagaagtgtaaga

SEQ ID NO: 3347581 - DNA, 25 bp, Homo sapien
tatttatcccattcctaagaatttg

SEQ ID NO: 3347582 - DNA, 25 bp, Homo sapien
catatccgtcaaactatttatccca

SEQ ID NO: 3347583 - DNA, 25 bp, Homo sapien
tgatagcacagcttctgaaggagag

SEQ ID NO: 3347584 - DNA, 25 bp, Homo sapien
tggcagctgtgatagcacagcttct

SEQ ID NO: 3347585 - DNA, 25 bp, Homo sapien
cacagatatagtcatgagtggcagc

SEQ ID NO: 3347586 - DNA, 25 bp, Homo sapien
gagcatacacagatatagtcatgag

SEQ ID NO: 3347587 - DNA, 25 bp, Homo sapien
catccaagctccatgtatttttgtg

SEQ ID NO: 3347588 - DNA, 25 bp, Homo sapien
cttggcaatgtacagggattccgat

SEQ ID NO: 3347589 - DNA, 25 bp, Homo sapien
gagtaagaggttgacatccaagctc

SEQ ID NO: 3347590 - DNA, 25 bp, Homo sapien
ccgatgaattggattgagagtaaga

SEQ ID NO: 3347591 - DNA, 25 bp, Homo sapien
aacatgaaactgagatctaccacag

SEQ ID NO: 3347592 - DNA, 25 bp, Homo sapien
gagaattattgatacttaatgtaac

SEQ ID NO: 3347593 - DNA, 25 bp, Homo sapien
gtgtcaagaaaacggtagttattca

SEQ ID NO: 3347594 - DNA, 25 bp, Homo sapien
tttgtagtcacaagttatattaact

SEQ ID NO: 3347595 - DNA, 25 bp, Homo sapien
gccaagaatctggttatgatacaat

SEQ ID NO: 3347596 - DNA, 25 bp, Homo sapien
tgtaaaatagatctcaatgctggag

SEQ ID NO: 3347597 - DNA, 25 bp, Homo sapien
tgatacaatcttgcgtgtcctgggc

SEQ ID NO: 3347598 - DNA, 25 bp, Homo sapien
gaaatcctccaaatgtttgggaaga

SEQ ID NO: 3347599 - DNA, 25 bp, Homo sapien
tggaatcgtagtcacctttttctaa

SEQ ID NO: 3347600 - DNA, 25 bp, Homo sapien
tcttgcttctgaaatggaatcgtag

SEQ ID NO: 3347601 - DNA, 25 bp, Homo sapien
tcagctgtacaagagtgtcttgctt

SEQ ID NO: 3347602 - DNA, 25 bp, Homo sapien
tgtacaagagtgtcttgcttctgaa

SEQ ID NO: 3347603 - DNA, 25 bp, Homo sapien
gatgtcagtgcaatactagctgaac

SEQ ID NO: 3347604 - DNA, 25 bp, Homo sapien
tatttctaaactggctgctttcagc

SEQ ID NO: 3347605 - DNA, 25 bp, Homo sapien
gcaatactagctgaaccgaagccca

SEQ ID NO: 3347606 - DNA, 25 bp, Homo sapien
gaagcccagttttgagggaatgtaa

SEQ ID NO: 3347607 - DNA, 25 bp, Homo sapien
tggtgtcaaaaaaagctgccacttc

SEQ ID NO: 3347608 - DNA, 25 bp, Homo sapien
agttttcatactgcattatcattcc

SEQ ID NO: 3347609 - DNA, 25 bp, Homo sapien
tttcatactgcattatcattcccat

SEQ ID NO: 3347610 - DNA, 25 bp, Homo sapien
ttttcataggacactctatttcccc

SEQ ID NO: 3347611 - DNA, 25 bp, Homo sapien
tttccccagccacagtagttttcat

SEQ ID NO: 3347612 - DNA, 25 bp, Homo sapien
tttctcatcatctagggtttgatgt

SEQ ID NO: 3347613 - DNA, 25 bp, Homo sapien
ttctcatcatctagggtttgatgtt

SEQ ID NO: 3347614 - DNA, 25 bp, Homo sapien
gtttctcatcatctagggtttgatg

SEQ ID NO: 3347615 - DNA, 25 bp, Homo sapien
tattgctcaaatgtggacacccgcg

SEQ ID NO: 3347616 - DNA, 25 bp, Homo sapien
tcaccgtagtttcctcccagtaatc

SEQ ID NO: 3347617 - DNA, 25 bp, Homo sapien
taatgctgtaagtgtcctgttagag

SEQ ID NO: 3347618 - DNA, 25 bp, Homo sapien
gagctgcttaatcctcatcatgcag

SEQ ID NO: 3347619 - DNA, 25 bp, Homo sapien
gattctcacattaagtttatcaggt

SEQ ID NO: 3347620 - DNA, 25 bp, Homo sapien
gacttctcgagggattctcacatta

SEQ ID NO: 3347621 - DNA, 25 bp, Homo sapien
tcaaaagcactgttttgacttctcg

SEQ ID NO: 3347622 - DNA, 25 bp, Homo sapien
gcactgttttgacttctcgagggat

SEQ ID NO: 3347623 - DNA, 25 bp, Homo sapien
ctgctttaaggtgatggcaggacag

SEQ ID NO: 3347624 - DNA, 25 bp, Homo sapien
tgcttagtgggtagttgatggttcc

SEQ ID NO: 3347625 - DNA, 25 bp, Homo sapien
tggttccattacacgtggtggagga

SEQ ID NO: 3347626 - DNA, 25 bp, Homo sapien
gcataataacgcacaggccaaaggg

SEQ ID NO: 3347627 - DNA, 25 bp, Homo sapien
taaggcaggcatgggtgaaatcagc

SEQ ID NO: 3347628 - DNA, 25 bp, Homo sapien
tattgttctggacaacaacagtacc

SEQ ID NO: 3347629 - DNA, 25 bp, Homo sapien
tgaaatcagcgactgagtcctctgc

SEQ ID NO: 3347630 - DNA, 25 bp, Homo sapien
gtacctaaatctgacactgtgacta

SEQ ID NO: 3347631 - DNA, 25 bp, Homo sapien
tgtagatttcaaattgatctgacaa

SEQ ID NO: 3347632 - DNA, 25 bp, Homo sapien
tgacaaaaaaccctagtggtctgtc

SEQ ID NO: 3347633 - DNA, 25 bp, Homo sapien
tcaaattgatctgacaaaaaaccct

SEQ ID NO: 3347634 - DNA, 25 bp, Homo sapien
ttgatctgacaaaaaaccctagtgg

SEQ ID NO: 3347635 - DNA, 25 bp, Homo sapien
tggcgtacatctggtgggcgtttta

SEQ ID NO: 3347636 - DNA, 25 bp, Homo sapien
tagcaaaataagcaagcggctggca

SEQ ID NO: 3347637 - DNA, 25 bp, Homo sapien
aagcggctggcaagtggcgtacatc

SEQ ID NO: 3347638 - DNA, 25 bp, Homo sapien
gtgggcgttttaacaccagatgagt

SEQ ID NO: 3347639 - DNA, 25 bp, Homo sapien
ttggggactgatgaactccaacagc

SEQ ID NO: 3347640 - DNA, 25 bp, Homo sapien
tgaactccaacagcaaaccctgatg

SEQ ID NO: 3347641 - DNA, 25 bp, Homo sapien
tgatacccagattggttctagagtt

SEQ ID NO: 3347642 - DNA, 25 bp, Homo sapien
tacccagattggttctagagttttc

SEQ ID NO: 3347643 - DNA, 25 bp, Homo sapien
tccactcattggctccagtagccag

SEQ ID NO: 3347644 - DNA, 25 bp, Homo sapien
gtacaacttgtaaagtatctgtgtt

SEQ ID NO: 3347645 - DNA, 25 bp, Homo sapien
gaattgtcaggtatccttcctccaa

SEQ ID NO: 3347646 - DNA, 25 bp, Homo sapien
gaagaagaatgtcgtttgtacaact

SEQ ID NO: 3347647 - DNA, 25 bp, Homo sapien
tattgtggttgagcatttactaatg

SEQ ID NO: 3347648 - DNA, 25 bp, Homo sapien
cacatgtgtaataaagatataagtg

SEQ ID NO: 3347649 - DNA, 25 bp, Homo sapien
tactaatgaaatggtgttctgaggg

SEQ ID NO: 3347650 - DNA, 25 bp, Homo sapien
taaagatataagtgttctgttaatg

SEQ ID NO: 3347651 - DNA, 25 bp, Homo sapien
tggataagaattcaaaaatccccat

SEQ ID NO: 3347652 - DNA, 25 bp, Homo sapien
gcaatctgaccacctcatttaagaa

SEQ ID NO: 3347653 - DNA, 25 bp, Homo sapien
tcctttctggccgtaactgcaatct

SEQ ID NO: 3347654 - DNA, 25 bp, Homo sapien
agctctttcttaatttgtggtaggg

SEQ ID NO: 3347655 - DNA, 25 bp, Homo sapien
acacatcttcattctaggattattg

SEQ ID NO: 3347656 - DNA, 25 bp, Homo sapien
ttggcattcaatctccatggatatg

SEQ ID NO: 3347657 - DNA, 25 bp, Homo sapien
ctaggattattgtctactcctttca

SEQ ID NO: 3347658 - DNA, 25 bp, Homo sapien
caatctccatggatatgacatcaac

SEQ ID NO: 3347659 - DNA, 25 bp, Homo sapien
tcctgctactatggtagttaccaga

SEQ ID NO: 3347660 - DNA, 25 bp, Homo sapien
taacatgcatttcctgctactatgg

SEQ ID NO: 3347661 - DNA, 25 bp, Homo sapien
aaccttccggcacagattttctata

SEQ ID NO: 3347662 - DNA, 25 bp, Homo sapien
gaggcttatgaaacttcaggttcca

SEQ ID NO: 3347663 - DNA, 25 bp, Homo sapien
gggtgaatcgccagtgataaatgga

SEQ ID NO: 3347664 - DNA, 25 bp, Homo sapien
tctgtgggtgaatcgccagtgataa

SEQ ID NO: 3347665 - DNA, 25 bp, Homo sapien
atattctgtgggtgaatcgccagtg

SEQ ID NO: 3347666 - DNA, 25 bp, Homo sapien
gaatatgatcaacataacttgaggg

SEQ ID NO: 3347667 - DNA, 25 bp, Homo sapien
tccagccagtcctccattagccaca

SEQ ID NO: 3347668 - DNA, 25 bp, Homo sapien
ccagccagtcctccattagccacat

SEQ ID NO: 3347669 - DNA, 25 bp, Homo sapien
gggccagcatttccagccagtcctc

SEQ ID NO: 3347670 - DNA, 25 bp, Homo sapien
cagaggcactgggccagcatttcca

SEQ ID NO: 3347671 - DNA, 25 bp, Homo sapien
ggtgttcctgctccactatccctca

SEQ ID NO: 3347672 - DNA, 25 bp, Homo sapien
gtgttcctgctccactatccctcat

SEQ ID NO: 3347673 - DNA, 25 bp, Homo sapien
tttcaagatagtacagatttaactt

SEQ ID NO: 3347674 - DNA, 25 bp, Homo sapien
tattctgagacaccgaaagtacatc

SEQ ID NO: 3347675 - DNA, 25 bp, Homo sapien
aagtacatctattacccgagtggga

SEQ ID NO: 3347676 - DNA, 25 bp, Homo sapien
tcctctctggactaaatatgtaaat

SEQ ID NO: 3347677 - DNA, 25 bp, Homo sapien
tttccactacaccaatattcattca

SEQ ID NO: 3347678 - DNA, 25 bp, Homo sapien
atgtctcttttccactacaccaata

SEQ ID NO: 3347679 - DNA, 25 bp, Homo sapien
gagatgtctattacataatcttgac

SEQ ID NO: 3347680 - DNA, 25 bp, Homo sapien
tatgagatgtctattacataatctt

SEQ ID NO: 3347681 - DNA, 25 bp, Homo sapien
tctcaaaactatagaaaagtgacgt

SEQ ID NO: 3347682 - DNA, 25 bp, Homo sapien
gaagagatacatatctttaatggct

SEQ ID NO: 3347683 - DNA, 25 bp, Homo sapien
tggcttttatcgaactctcaaaact

SEQ ID NO: 3347684 - DNA, 25 bp, Homo sapien
tagtcaagataaatctgaaggtatc

SEQ ID NO: 3347685 - DNA, 25 bp, Homo sapien
ggagtccactgggtcatttcagata

SEQ ID NO: 3347686 - DNA, 25 bp, Homo sapien
aacactcctctatcctatttttatt

SEQ ID NO: 3347687 - DNA, 25 bp, Homo sapien
cagatgattctgaggtggaggagtc

SEQ ID NO: 3347688 - DNA, 25 bp, Homo sapien
actgggtcatttcagatatcttcag

SEQ ID NO: 3347689 - DNA, 25 bp, Homo sapien
tttctatgatcgtgatcagactggc

SEQ ID NO: 3347690 - DNA, 25 bp, Homo sapien
ataatttctatgatcgtgatcagac

SEQ ID NO: 3347691 - DNA, 25 bp, Homo sapien
gatcgtgatcagactggccccacaa

SEQ ID NO: 3347692 - DNA, 25 bp, Homo sapien
tatgatcgtgatcagactggcccca

SEQ ID NO: 3347693 - DNA, 25 bp, Homo sapien
ggtaatatcaaagtggtattcatac

SEQ ID NO: 3347694 - DNA, 25 bp, Homo sapien
gattccaaacatataactctaagac

SEQ ID NO: 3347695 - DNA, 25 bp, Homo sapien
tttgatatgaataaggtaatagcaa

SEQ ID NO: 3347696 - DNA, 25 bp, Homo sapien
taaggtaatagcaattggtaatatc

SEQ ID NO: 3347697 - DNA, 25 bp, Homo sapien
aatggtaaagtttgatgtgagtgtg

SEQ ID NO: 3347698 - DNA, 25 bp, Homo sapien
gtccatgtgaggttgtacagtgttt

SEQ ID NO: 3347699 - DNA, 25 bp, Homo sapien
atggtaaagtttgatgtgagtgtga

SEQ ID NO: 3347700 - DNA, 25 bp, Homo sapien
ataaaagtccatgtgaggttgtaca

SEQ ID NO: 3347701 - DNA, 25 bp, Homo sapien
ccttttgctgctgggttatcttata

SEQ ID NO: 3347702 - DNA, 25 bp, Homo sapien
tgggttatcttatagtttaggtcac

SEQ ID NO: 3347703 - DNA, 25 bp, Homo sapien
tatagtttaggtcactatagttaat

SEQ ID NO: 3347704 - DNA, 25 bp, Homo sapien
gctgctgggttatcttatagtttag

SEQ ID NO: 3347705 - DNA, 25 bp, Homo sapien
gcacaacattcataatcatatccaa

SEQ ID NO: 3347706 - DNA, 25 bp, Homo sapien
tcatatccaagcattatccacctgt

SEQ ID NO: 3347707 - DNA, 25 bp, Homo sapien
tattgtttaatttcccaagcacaac

SEQ ID NO: 3347708 - DNA, 25 bp, Homo sapien
tccacctgtgattttgagagaagat

SEQ ID NO: 3347709 - DNA, 25 bp, Homo sapien
cccatgaggccgtggattgaccatg

SEQ ID NO: 3347710 - DNA, 25 bp, Homo sapien
caagggtaaactccacactgcctgc

SEQ ID NO: 3347711 - DNA, 25 bp, Homo sapien
gattgaccatgaagtagcatttatt

SEQ ID NO: 3347712 - DNA, 25 bp, Homo sapien
ttatcttcaagggtaaactccacac

SEQ ID NO: 3347713 - DNA, 25 bp, Homo sapien
aatagtggccgggtattctatttct

SEQ ID NO: 3347714 - DNA, 25 bp, Homo sapien
gtatttccggctttgattcaacttc

SEQ ID NO: 3347715 - DNA, 25 bp, Homo sapien
gggcagctagagttatgtgttccta

SEQ ID NO: 3347716 - DNA, 25 bp, Homo sapien
tcttcacaagaaacggggcagctag

SEQ ID NO: 3347717 - DNA, 25 bp, Homo sapien
ttggctccttcagagcaaccaggct

SEQ ID NO: 3347718 - DNA, 25 bp, Homo sapien
caggctgtccatgcaaatgcatact

SEQ ID NO: 3347719 - DNA, 25 bp, Homo sapien
tgttcagtgatctctcttggctcct

SEQ ID NO: 3347720 - DNA, 25 bp, Homo sapien
tccttatttctgttggcccagtcac

SEQ ID NO: 3347721 - DNA, 25 bp, Homo sapien
ccctggagatatttccacaatgggt

SEQ ID NO: 3347722 - DNA, 25 bp, Homo sapien
gaaaagcaagttgcatagaagggta

SEQ ID NO: 3347723 - DNA, 25 bp, Homo sapien
gacttcacgtgataaatatggagat

SEQ ID NO: 3347724 - DNA, 25 bp, Homo sapien
gaagggtatatattgggattctgtt

SEQ ID NO: 3347725 - DNA, 25 bp, Homo sapien
aaaaagatcttctcttatatactat

SEQ ID NO: 3347726 - DNA, 25 bp, Homo sapien
ttctgtttaatttctgggctatcca

SEQ ID NO: 3347727 - DNA, 25 bp, Homo sapien
tctgtttaatttctgggctatccat

SEQ ID NO: 3347728 - DNA, 25 bp, Homo sapien
attctgtttaatttctgggctatcc

SEQ ID NO: 3347729 - DNA, 25 bp, Homo sapien
caagtacaggagaaacacagctgaa

SEQ ID NO: 3347730 - DNA, 25 bp, Homo sapien
aagtacaggagaaacacagctgaag

SEQ ID NO: 3347731 - DNA, 25 bp, Homo sapien
gggccccaccctgatatcgcaattt

SEQ ID NO: 3347732 - DNA, 25 bp, Homo sapien
ttgcaaattgtatgaaaaggaggcc

SEQ ID NO: 3347733 - DNA, 25 bp, Homo sapien
gctgttttagatatttgagaccatc

SEQ ID NO: 3347734 - DNA, 25 bp, Homo sapien
ggtaagacatatccatgatctaatt

SEQ ID NO: 3347735 - DNA, 25 bp, Homo sapien
ccccaagggtattcttgatgaactg

SEQ ID NO: 3347736 - DNA, 25 bp, Homo sapien
tgatgttaggattgcattctcccca

SEQ ID NO: 3347737 - DNA, 25 bp, Homo sapien
gaaaaggcacacatccacattgctt

SEQ ID NO: 3347738 - DNA, 25 bp, Homo sapien
ttccttcaagcaaccagaagtgctg

SEQ ID NO: 3347739 - DNA, 25 bp, Homo sapien
tgcgtgcattcccacaggtgacaac

SEQ ID NO: 3347740 - DNA, 25 bp, Homo sapien
caaactgtggcaccttctttggtga

SEQ ID NO: 3347741 - DNA, 25 bp, Homo sapien
tcacttggcggatggttacccttgc

SEQ ID NO: 3347742 - DNA, 25 bp, Homo sapien
gcatcaacgaaaccaagggctgggt

SEQ ID NO: 3347743 - DNA, 25 bp, Homo sapien
gatatggcccaatagtctgatcaag

SEQ ID NO: 3347744 - DNA, 25 bp, Homo sapien
ggaactatctgatatggcccaatag

SEQ ID NO: 3347745 - DNA, 25 bp, Homo sapien
tatccaatgtgtgggaactatctga

SEQ ID NO: 3347746 - DNA, 25 bp, Homo sapien
ctgaaataatatccaatgtgtggga

SEQ ID NO: 3347747 - DNA, 25 bp, Homo sapien
gattcacattgaagagtaagctcaa

SEQ ID NO: 3347748 - DNA, 25 bp, Homo sapien
cattgaagagtaagctcaaacctct

SEQ ID NO: 3347749 - DNA, 25 bp, Homo sapien
cacattgaagagtaagctcaaacct

SEQ ID NO: 3347750 - DNA, 25 bp, Homo sapien
ctgattcacattgaagagtaagctc

SEQ ID NO: 3347751 - DNA, 25 bp, Homo sapien
ctttgcttggagagtttcaccatga

SEQ ID NO: 3347752 - DNA, 25 bp, Homo sapien
agtaaaacaatttccatattcagtg

SEQ ID NO: 3347753 - DNA, 25 bp, Homo sapien
gagtttcaccatgattaaaagtaaa

SEQ ID NO: 3347754 - DNA, 25 bp, Homo sapien
catattcagtgaagacatgtgcaaa

SEQ ID NO: 3347755 - DNA, 25 bp, Homo sapien
caaatacctaacaagactgcagaaa

SEQ ID NO: 3347756 - DNA, 25 bp, Homo sapien
tttaaagcacaaatacctaacaaga

SEQ ID NO: 3347757 - DNA, 25 bp, Homo sapien
gcacaaatacctaacaagactgcag

SEQ ID NO: 3347758 - DNA, 25 bp, Homo sapien
cctaacaagactgcagaaatatcag

SEQ ID NO: 3347759 - DNA, 25 bp, Homo sapien
tgttcctgataaattccacaatgct

SEQ ID NO: 3347760 - DNA, 25 bp, Homo sapien
aaaactcacagtccaacaaagtgct

SEQ ID NO: 3347761 - DNA, 25 bp, Homo sapien
gacttgcagcaaaatcagtagcctc

SEQ ID NO: 3347762 - DNA, 25 bp, Homo sapien
ccacaatgctgaagttttggtgact

SEQ ID NO: 3347763 - DNA, 25 bp, Homo sapien
tatcttgccgggcaattttgttctg

SEQ ID NO: 3347764 - DNA, 25 bp, Homo sapien
attctcttatcttgccgggcaattt

SEQ ID NO: 3347765 - DNA, 25 bp, Homo sapien
tgccgggcaattttgttctgcattc

SEQ ID NO: 3347766 - DNA, 25 bp, Homo sapien
catatggttcttcatttgcatgcct

SEQ ID NO: 3347767 - DNA, 25 bp, Homo sapien
gaatttctgccaattgtattcttag

SEQ ID NO: 3347768 - DNA, 25 bp, Homo sapien
attgataccaaagaaccaagtcaca

SEQ ID NO: 3347769 - DNA, 25 bp, Homo sapien
tttctgccaattgtattcttaggag

SEQ ID NO: 3347770 - DNA, 25 bp, Homo sapien
agaattgataccaaagaaccaagtc

SEQ ID NO: 3347771 - DNA, 25 bp, Homo sapien
aagtagctcatcatatgtacaccag

SEQ ID NO: 3347772 - DNA, 25 bp, Homo sapien
tccacttagaaagctgtaatcatct

SEQ ID NO: 3347773 - DNA, 25 bp, Homo sapien
cccagatttccataacacccaagat

SEQ ID NO: 3347774 - DNA, 25 bp, Homo sapien
cccaagatggagactattaatctgt

SEQ ID NO: 3347775 - DNA, 25 bp, Homo sapien
cctcaatggacgttgtggttggcca

SEQ ID NO: 3347776 - DNA, 25 bp, Homo sapien
caagcgaatgtagatctgccatgtc

SEQ ID NO: 3347777 - DNA, 25 bp, Homo sapien
ccatgtgaagtagttgagcaagcga

SEQ ID NO: 3347778 - DNA, 25 bp, Homo sapien
tcaaacttctttcgctcagtgggag

SEQ ID NO: 3347779 - DNA, 25 bp, Homo sapien
ctttgaaaggcaaagctttatcttt

SEQ ID NO: 3347780 - DNA, 25 bp, Homo sapien
agtaattaggaaaccttaatgctat

SEQ ID NO: 3347781 - DNA, 25 bp, Homo sapien
taatgctatccgtaaaaaaacacaa

SEQ ID NO: 3347782 - DNA, 25 bp, Homo sapien
taggaaaccttaatgctatccgtaa

SEQ ID NO: 3347783 - DNA, 25 bp, Homo sapien
aattaggaaaccttaatgctatccg

SEQ ID NO: 3347784 - DNA, 25 bp, Homo sapien
cgttctcagcatatacttttgattt

SEQ ID NO: 3347785 - DNA, 25 bp, Homo sapien
tcctcagggtaacccaattttcatc

SEQ ID NO: 3347786 - DNA, 25 bp, Homo sapien
tgatttcagttaagcaagagtcctc

SEQ ID NO: 3347787 - DNA, 25 bp, Homo sapien
ttgtgatttcagttaagcaagagtc

SEQ ID NO: 3347788 - DNA, 25 bp, Homo sapien
ttcagttaagcaagagtcctcaggg

SEQ ID NO: 3347789 - DNA, 25 bp, Homo sapien
gaaagtacttcattctcacttctac

SEQ ID NO: 3347790 - DNA, 25 bp, Homo sapien
tctctgttgagttaggaaatctcct

SEQ ID NO: 3347791 - DNA, 25 bp, Homo sapien
tctgttgagttaggaaatctccttc

SEQ ID NO: 3347792 - DNA, 25 bp, Homo sapien
atcttctctgttgagttaggaaatc

SEQ ID NO: 3347793 - DNA, 25 bp, Homo sapien
tgagttaggaaatctccttccattt

SEQ ID NO: 3347794 - DNA, 25 bp, Homo sapien
cattttttgtacatgaccgtagcta

SEQ ID NO: 3347795 - DNA, 25 bp, Homo sapien
tttactttcatgtactgattgcatg

SEQ ID NO: 3347796 - DNA, 25 bp, Homo sapien
tacatgaccgtagctagcaagatgt

SEQ ID NO: 3347797 - DNA, 25 bp, Homo sapien
catgtactgattgcatgaaatgttc

SEQ ID NO: 3347798 - DNA, 25 bp, Homo sapien
aaaattatacagtctgctgtaaatg

SEQ ID NO: 3347799 - DNA, 25 bp, Homo sapien
caatgtaacatgctagcatcagaat

SEQ ID NO: 3347800 - DNA, 25 bp, Homo sapien
taataagtttgggtagtatgcagat

SEQ ID NO: 3347801 - DNA, 25 bp, Homo sapien
gtgtttgtgtgggaagtcatgggaa

SEQ ID NO: 3347802 - DNA, 25 bp, Homo sapien
tcacccatatcattagttaactgtg

SEQ ID NO: 3347803 - DNA, 25 bp, Homo sapien
tttcaccatgagtgggtgcccattt

SEQ ID NO: 3347804 - DNA, 25 bp, Homo sapien
gaagtatcaggtgtgagcattttaa

SEQ ID NO: 3347805 - DNA, 25 bp, Homo sapien
tttaaggagcattgaaaactgtcac

SEQ ID NO: 3347806 - DNA, 25 bp, Homo sapien
gaactacctgcatgtaagtggcagg

SEQ ID NO: 3347807 - DNA, 25 bp, Homo sapien
gcaaaggaggtcttatctatgggaa

SEQ ID NO: 3347808 - DNA, 25 bp, Homo sapien
gggaactacctgcatgtaagtggca

SEQ ID NO: 3347809 - DNA, 25 bp, Homo sapien
ggaggtcttatctatgggaactacc

SEQ ID NO: 3347810 - DNA, 25 bp, Homo sapien
ttagttataacatgtaggcagtggt

SEQ ID NO: 3347811 - DNA, 25 bp, Homo sapien
tgtgcatcaagcatttagcccgagg

SEQ ID NO: 3347812 - DNA, 25 bp, Homo sapien
tagcccgaggtatagcacataataa

SEQ ID NO: 3347813 - DNA, 25 bp, Homo sapien
tgctctcacttacagagttcctagg

SEQ ID NO: 3347814 - DNA, 25 bp, Homo sapien
ttttgcaggtgaaagacggctgtca

SEQ ID NO: 3347815 - DNA, 25 bp, Homo sapien
aagcaaatccgaagagagactgaag

SEQ ID NO: 3347816 - DNA, 25 bp, Homo sapien
gataacatgtccagtataaagccta

SEQ ID NO: 3347817 - DNA, 25 bp, Homo sapien
gcacttcagggagcattgatgatat

SEQ ID NO: 3347818 - DNA, 25 bp, Homo sapien
gatagctcctacttcagcagtgatg

SEQ ID NO: 3347819 - DNA, 25 bp, Homo sapien
gcaccacgatgctctgatttaattc

SEQ ID NO: 3347820 - DNA, 25 bp, Homo sapien
taaaatcgtctgcaaaatctatgaa

SEQ ID NO: 3347821 - DNA, 25 bp, Homo sapien
tacagcagaatactgtgatagctcc

SEQ ID NO: 3347822 - DNA, 25 bp, Homo sapien
ttcaactgaagccaataataaggtc

SEQ ID NO: 3347823 - DNA, 25 bp, Homo sapien
tcctttgtacaactggaagtgcacc

SEQ ID NO: 3347824 - DNA, 25 bp, Homo sapien
tacatctaacacaatacagctatcc

SEQ ID NO: 3347825 - DNA, 25 bp, Homo sapien
gaaatcacacataatcttcaactga

SEQ ID NO: 3347826 - DNA, 25 bp, Homo sapien
taaggcattgggagcccttgaacgg

SEQ ID NO: 3347827 - DNA, 25 bp, Homo sapien
tcacatggtatcataaggcattggg

SEQ ID NO: 3347828 - DNA, 25 bp, Homo sapien
ccttgaacggttgtgaacagagaaa

SEQ ID NO: 3347829 - DNA, 25 bp, Homo sapien
tagagaggggcttcttcgtgaaaac

SEQ ID NO: 3347830 - DNA, 25 bp, Homo sapien
tgtaagccatacacttaagaagagg

SEQ ID NO: 3347831 - DNA, 25 bp, Homo sapien
tgacgaatggagtttcggaaacact

SEQ ID NO: 3347832 - DNA, 25 bp, Homo sapien
gaaacactgaggttaaagtgcctat

SEQ ID NO: 3347833 - DNA, 25 bp, Homo sapien
taccgtgttgacaaaatgtaagcca

SEQ ID NO: 3347834 - DNA, 25 bp, Homo sapien
tatcacatagaaagtcagcgaatac

SEQ ID NO: 3347835 - DNA, 25 bp, Homo sapien
cagaaacatattaatcagtttgaaa

SEQ ID NO: 3347836 - DNA, 25 bp, Homo sapien
cacatagaaagtcagcgaatacaaa

SEQ ID NO: 3347837 - DNA, 25 bp, Homo sapien
ttacaaatgcatctatatcacatag

SEQ ID NO: 3347838 - DNA, 25 bp, Homo sapien
ctagacaagcaggacatagttcttt

SEQ ID NO: 3347839 - DNA, 25 bp, Homo sapien
taactccaaacctgagtcaacacac

SEQ ID NO: 3347840 - DNA, 25 bp, Homo sapien
atttatcaattaaaaggtcaatatc

SEQ ID NO: 3347841 - DNA, 25 bp, Homo sapien
tctgactggcgtaagaagagaaata

SEQ ID NO: 3347842 - DNA, 25 bp, Homo sapien
tacgtggtcactctgctgttcaaag

SEQ ID NO: 3347843 - DNA, 25 bp, Homo sapien
cacagtttgtttgatacccagggtt

SEQ ID NO: 3347844 - DNA, 25 bp, Homo sapien
cgatcactgtgtggacgcaggctaa

SEQ ID NO: 3347845 - DNA, 25 bp, Homo sapien
cacaggaatcaagactgggagccaa

SEQ ID NO: 3347846 - DNA, 25 bp, Homo sapien
tattccataggcttcctcgcaggct

SEQ ID NO: 3347847 - DNA, 25 bp, Homo sapien
tctaaagctagtagttacaccccac

SEQ ID NO: 3347848 - DNA, 25 bp, Homo sapien
tcgtctcaggacaggaaactattcc

SEQ ID NO: 3347849 - DNA, 25 bp, Homo sapien
gctggagtttgtcccactgactttg

SEQ ID NO: 3347850 - DNA, 25 bp, Homo sapien
acaaatatagaagaaacggaatctg

SEQ ID NO: 3347851 - DNA, 25 bp, Homo sapien
atagaagaaacggaatctgcaatac

SEQ ID NO: 3347852 - DNA, 25 bp, Homo sapien
aatatagaagaaacggaatctgcaa

SEQ ID NO: 3347853 - DNA, 25 bp, Homo sapien
tcacacaaatatagaagaaacggaa

SEQ ID NO: 3347854 - DNA, 25 bp, Homo sapien
cgcacaatccaatatggagtgcttc

SEQ ID NO: 3347855 - DNA, 25 bp, Homo sapien
cattacttcccattttgacatgggc

SEQ ID NO: 3347856 - DNA, 25 bp, Homo sapien
caggaattccgcacaatccaatatg

SEQ ID NO: 3347857 - DNA, 25 bp, Homo sapien
ggcataaccatctactccccaagaa

SEQ ID NO: 3347858 - DNA, 25 bp, Homo sapien
gatttgcttctccactagagcagtg

SEQ ID NO: 3347859 - DNA, 25 bp, Homo sapien
cagtgatgctgtataatgcctccca

SEQ ID NO: 3347860 - DNA, 25 bp, Homo sapien
tctactatgactaccaaagggccaa

SEQ ID NO: 3347861 - DNA, 25 bp, Homo sapien
tgccagctcactgcatctactatga

SEQ ID NO: 3347862 - DNA, 25 bp, Homo sapien
aatgagatgttgaccacggtactca

SEQ ID NO: 3347863 - DNA, 25 bp, Homo sapien
tataaatcctacatggtctgccagc

SEQ ID NO: 3347864 - DNA, 25 bp, Homo sapien
taaggctgtctggtgtatggttcct

SEQ ID NO: 3347865 - DNA, 25 bp, Homo sapien
ggtactcagtgaccctgcacatttt

SEQ ID NO: 3347866 - DNA, 25 bp, Homo sapien
gatattctgaatctttcaccagttt

SEQ ID NO: 3347867 - DNA, 25 bp, Homo sapien
tttgtgctttaaaaggatattctga

SEQ ID NO: 3347868 - DNA, 25 bp, Homo sapien
cagaataacctttgattgaaaatcc

SEQ ID NO: 3347869 - DNA, 25 bp, Homo sapien
ctgaagtcatatgcagaataacctt

SEQ ID NO: 3347870 - DNA, 25 bp, Homo sapien
ggatagtctagacatttggagtcaa

SEQ ID NO: 3347871 - DNA, 25 bp, Homo sapien
ttaaatctttaggtgcttgttctgg

SEQ ID NO: 3347872 - DNA, 25 bp, Homo sapien
catctttctcctgacggtgctatag

SEQ ID NO: 3347873 - DNA, 25 bp, Homo sapien
tacagcatccttttgtagatcctcc

SEQ ID NO: 3347874 - DNA, 25 bp, Homo sapien
gccataattattatacgaacagtca

SEQ ID NO: 3347875 - DNA, 25 bp, Homo sapien
caaagcattgagagtagagcctcca

SEQ ID NO: 3347876 - DNA, 25 bp, Homo sapien
tgtttaaccagttcaaagcattgag

SEQ ID NO: 3347877 - DNA, 25 bp, Homo sapien
agagcctccattgcagccataatta

SEQ ID NO: 3347878 - DNA, 25 bp, Homo sapien
tttattgcataagcagattccactg

SEQ ID NO: 3347879 - DNA, 25 bp, Homo sapien
cctttattgcataagcagattccac

SEQ ID NO: 3347880 - DNA, 25 bp, Homo sapien
tcccctttattgcataagcagattc

SEQ ID NO: 3347881 - DNA, 25 bp, Homo sapien
ccctttattgcataagcagattcca

SEQ ID NO: 3347882 - DNA, 25 bp, Homo sapien
tgggctaactgatgatcttctaaaa

SEQ ID NO: 3347883 - DNA, 25 bp, Homo sapien
gcttttttaaggacactctgcttcc

SEQ ID NO: 3347884 - DNA, 25 bp, Homo sapien
tcttctaaaagaccattcagttcac

SEQ ID NO: 3347885 - DNA, 25 bp, Homo sapien
ctggagagtgtgtgccgactcccgc

SEQ ID NO: 3347886 - DNA, 25 bp, Homo sapien
tttaaggcccacagattcaaaggta

SEQ ID NO: 3347887 - DNA, 25 bp, Homo sapien
gagattcggccacactgttggtaaa

SEQ ID NO: 3347888 - DNA, 25 bp, Homo sapien
tatgcgtcacgttatggctgaactg

SEQ ID NO: 3347889 - DNA, 25 bp, Homo sapien
gactaagctcgtaggtagtgtaacc

SEQ ID NO: 3347890 - DNA, 25 bp, Homo sapien
tcagggctttgacatttgactctca

SEQ ID NO: 3347891 - DNA, 25 bp, Homo sapien
gagtacacagcaaggaaggtttatc

SEQ ID NO: 3347892 - DNA, 25 bp, Homo sapien
ctctcattcctccagagattctctt

SEQ ID NO: 3347893 - DNA, 25 bp, Homo sapien
ggtggcaatggcaattagtaagagt

SEQ ID NO: 3347894 - DNA, 25 bp, Homo sapien
atcttaacggcaaagacacattggg

SEQ ID NO: 3347895 - DNA, 25 bp, Homo sapien
ttgtgtcacaacctgcttgtccctc

SEQ ID NO: 3347896 - DNA, 25 bp, Homo sapien
tccagtcaaatcttaacggcaaaga

SEQ ID NO: 3347897 - DNA, 25 bp, Homo sapien
acttgtgtcacaacctgcttgtccc

SEQ ID NO: 3347898 - DNA, 25 bp, Homo sapien
tgagtatctgggaaacttggaaggt

SEQ ID NO: 3347899 - DNA, 25 bp, Homo sapien
ttctgctgagtatctgggaaacttg

SEQ ID NO: 3347900 - DNA, 25 bp, Homo sapien
gctgagtatctgggaaacttggaag

SEQ ID NO: 3347901 - DNA, 25 bp, Homo sapien
atctgggaaacttggaaggtttgct

SEQ ID NO: 3347902 - DNA, 25 bp, Homo sapien
catagaaggcggtggagttttcact

SEQ ID NO: 3347903 - DNA, 25 bp, Homo sapien
ttattccatagaaggcggtggagtt

SEQ ID NO: 3347904 - DNA, 25 bp, Homo sapien
gaattcaagtatcgatgtctattaa

SEQ ID NO: 3347905 - DNA, 25 bp, Homo sapien
aagaattcaagtatcgatgtctatt

SEQ ID NO: 3347906 - DNA, 25 bp, Homo sapien
accacagtcttagataatgctccgg

SEQ ID NO: 3347907 - DNA, 25 bp, Homo sapien
gctgtgggtaaccacagtcttagat

SEQ ID NO: 3347908 - DNA, 25 bp, Homo sapien
tgggtaaccacagtcttagataatg

SEQ ID NO: 3347909 - DNA, 25 bp, Homo sapien
taaccacagtcttagataatgctcc

SEQ ID NO: 3347910 - DNA, 25 bp, Homo sapien
tctagaacatagtgaggcgaacact

SEQ ID NO: 3347911 - DNA, 25 bp, Homo sapien
gcgaacactaaatcggcatcccttg

SEQ ID NO: 3347912 - DNA, 25 bp, Homo sapien
tatttgtgctcagctaactggtccc

SEQ ID NO: 3347913 - DNA, 25 bp, Homo sapien
tggtcccttccagagttttcatgct

SEQ ID NO: 3347914 - DNA, 25 bp, Homo sapien
ttcaactcagtctccgccaaggcag

SEQ ID NO: 3347915 - DNA, 25 bp, Homo sapien
caggaagaacttttaaagtggtgcg

SEQ ID NO: 3347916 - DNA, 25 bp, Homo sapien
tagtttaaggagaatcataaaccat

SEQ ID NO: 3347917 - DNA, 25 bp, Homo sapien
tggtgcgttagtttaaggagaatca

SEQ ID NO: 3347918 - DNA, 25 bp, Homo sapien
ttctgatcactagcgccctcctcgg

SEQ ID NO: 3347919 - DNA, 25 bp, Homo sapien
tcactagcgccctcctcgggaaaaa

SEQ ID NO: 3347920 - DNA, 25 bp, Homo sapien
tgatcactagcgccctcctcgggaa

SEQ ID NO: 3347921 - DNA, 25 bp, Homo sapien
taacttctgatcactagcgccctcc

SEQ ID NO: 3347922 - DNA, 25 bp, Homo sapien
gacactttggacgtatctatggatt

SEQ ID NO: 3347923 - DNA, 25 bp, Homo sapien
tatttgggtgcgtcccaaaaatcca

SEQ ID NO: 3347924 - DNA, 25 bp, Homo sapien
aatccatagcgacaaatctcttctg

SEQ ID NO: 3347925 - DNA, 25 bp, Homo sapien
cttcccaccaaggacactttggacg

SEQ ID NO: 3347926 - DNA, 25 bp, Homo sapien
gcccagacccgggacaggaagtgag

SEQ ID NO: 3347927 - DNA, 25 bp, Homo sapien
cgcagcccagacccgggacaggaag

SEQ ID NO: 3347928 - DNA, 25 bp, Homo sapien
cagcccagacccgggacaggaagtg

SEQ ID NO: 3347929 - DNA, 25 bp, Homo sapien
tccgcagcccagacccgggacagga

SEQ ID NO: 3347930 - DNA, 25 bp, Homo sapien
aaggcggcggcttcacgctcgcggc

SEQ ID NO: 3347931 - DNA, 25 bp, Homo sapien
agggggcgcgggagtccgcatcgcc

SEQ ID NO: 3347932 - DNA, 25 bp, Homo sapien
gtgaagggggcgcgggagtccgcat

SEQ ID NO: 3347933 - DNA, 25 bp, Homo sapien
gcggcttcacgctcgcggctccgcg

SEQ ID NO: 3347934 - DNA, 25 bp, Homo sapien
ctctgccgcccgcgcggcctgtttt

SEQ ID NO: 3347935 - DNA, 25 bp, Homo sapien
cgcccgcgcggcctgttttctcttt

SEQ ID NO: 3347936 - DNA, 25 bp, Homo sapien
ccgcgcggcctgttttctctttcgg

SEQ ID NO: 3347937 - DNA, 25 bp, Homo sapien
tctgccgcccgcgcggcctgttttc

SEQ ID NO: 3347938 - DNA, 25 bp, Homo sapien
ggagcccaaggagggcgtcccatgg

SEQ ID NO: 3347939 - DNA, 25 bp, Homo sapien
cacacatgtgctcaaggacagggtc

SEQ ID NO: 3347940 - DNA, 25 bp, Homo sapien
caaggagggcgtcccatggaccaca

SEQ ID NO: 3347941 - DNA, 25 bp, Homo sapien
gaagaaggctggacggccagtcagt

SEQ ID NO: 3347942 - DNA, 25 bp, Homo sapien
gtagactgctgttcaaggtaagctc

SEQ ID NO: 3347943 - DNA, 25 bp, Homo sapien
ttgtagactgctgttcaaggtaagc

SEQ ID NO: 3347944 - DNA, 25 bp, Homo sapien
tgtagactgctgttcaaggtaagct

SEQ ID NO: 3347945 - DNA, 25 bp, Homo sapien
cctatgtaaagtgactgcctttgtt

SEQ ID NO: 3347946 - DNA, 25 bp, Homo sapien
ccaaatcttctaatatctggagaat

SEQ ID NO: 3347947 - DNA, 25 bp, Homo sapien
gagatctgaatttgagaccctgcag

SEQ ID NO: 3347948 - DNA, 25 bp, Homo sapien
gaccctgcagggtgatctgattcca

SEQ ID NO: 3347949 - DNA, 25 bp, Homo sapien
taatatctggagaatttgagatctg

SEQ ID NO: 3347950 - DNA, 25 bp, Homo sapien
tccaagaaactccgctacttcattg

SEQ ID NO: 3347951 - DNA, 25 bp, Homo sapien
agaaactccgctacttcattgggaa

SEQ ID NO: 3347952 - DNA, 25 bp, Homo sapien
gaaactccgctacttcattgggaag

SEQ ID NO: 3347953 - DNA, 25 bp, Homo sapien
cttccaagaaactccgctacttcat

SEQ ID NO: 3347954 - DNA, 25 bp, Homo sapien
tgagggtcatagtgccatagtccca

SEQ ID NO: 3347955 - DNA, 25 bp, Homo sapien
gactgttgagggtcatagtgccata

SEQ ID NO: 3347956 - DNA, 25 bp, Homo sapien
tgttgagggtcatagtgccatagtc

SEQ ID NO: 3347957 - DNA, 25 bp, Homo sapien
ccacttgactgttgagggtcatagt

SEQ ID NO: 3347958 - DNA, 25 bp, Homo sapien
ccaagtctacttgtccatgtcttac

SEQ ID NO: 3347959 - DNA, 25 bp, Homo sapien
cctccaagtctacttgtccatgtct

SEQ ID NO: 3347960 - DNA, 25 bp, Homo sapien
cacctccaagtctacttgtccatgt

SEQ ID NO: 3347961 - DNA, 25 bp, Homo sapien
tacacctccaagtctacttgtccat

SEQ ID NO: 3347962 - DNA, 25 bp, Homo sapien
tgcagaaccaacgaggtggccaatc

SEQ ID NO: 3347963 - DNA, 25 bp, Homo sapien
tgaccgcgatgatgtagcttagaat

SEQ ID NO: 3347964 - DNA, 25 bp, Homo sapien
ggtggccaatcttccttcaagatat

SEQ ID NO: 3347965 - DNA, 25 bp, Homo sapien
ggcacatgccaagggaactgatgaa

SEQ ID NO: 3347966 - DNA, 25 bp, Homo sapien
gttaaaaccagtgccatgtttggtg

SEQ ID NO: 3347967 - DNA, 25 bp, Homo sapien
taaaaccagtgccatgtttggtgtt

SEQ ID NO: 3347968 - DNA, 25 bp, Homo sapien
cttgttaaaaccagtgccatgtttg

SEQ ID NO: 3347969 - DNA, 25 bp, Homo sapien
aaaccagtgccatgtttggtgtttt

SEQ ID NO: 3347970 - DNA, 25 bp, Homo sapien
agcactataggaggccatcacactg

SEQ ID NO: 3347971 - DNA, 25 bp, Homo sapien
tcgtatgactgttggaataaacaca

SEQ ID NO: 3347972 - DNA, 25 bp, Homo sapien
tatctggctgattgttctcgtatga

SEQ ID NO: 3347973 - DNA, 25 bp, Homo sapien
actataggaggccatcacactggct

SEQ ID NO: 3347974 - DNA, 25 bp, Homo sapien
aattttatcctagccacactagcag

SEQ ID NO: 3347975 - DNA, 25 bp, Homo sapien
gtctttccaagttccgctgcccaat

SEQ ID NO: 3347976 - DNA, 25 bp, Homo sapien
agtcctaaactaggccatctgtaag

SEQ ID NO: 3347977 - DNA, 25 bp, Homo sapien
tagacggacaggatcactaggtgaa

SEQ ID NO: 3347978 - DNA, 25 bp, Homo sapien
ttagctttaggcctaatcttctcta

SEQ ID NO: 3347979 - DNA, 25 bp, Homo sapien
agtcatcacattggtagaatttgtc

SEQ ID NO: 3347980 - DNA, 25 bp, Homo sapien
tgacaggtaagtacttgtctgactc

SEQ ID NO: 3347981 - DNA, 25 bp, Homo sapien
ggctttcttggtaccatgctctgtc

SEQ ID NO: 3347982 - DNA, 25 bp, Homo sapien
ggcaccacagttggatgctgggcat

SEQ ID NO: 3347983 - DNA, 25 bp, Homo sapien
gcatcatcatgcaaaatagatacca

SEQ ID NO: 3347984 - DNA, 25 bp, Homo sapien
tcttctttcttagtgggaaggtcac

SEQ ID NO: 3347985 - DNA, 25 bp, Homo sapien
gaattgcaccaataaaaggctgctg

SEQ ID NO: 3347986 - DNA, 25 bp, Homo sapien
caaatcaaccctctggtgctgttgt

SEQ ID NO: 3347987 - DNA, 25 bp, Homo sapien
aaatcaaccctctggtgctgttgtt

SEQ ID NO: 3347988 - DNA, 25 bp, Homo sapien
aatcaaccctctggtgctgttgttg

SEQ ID NO: 3347989 - DNA, 25 bp, Homo sapien
cattttcaaatcaaccctctggtgc

SEQ ID NO: 3347990 - DNA, 25 bp, Homo sapien
cagcatgccagaagctattttgggc

SEQ ID NO: 3347991 - DNA, 25 bp, Homo sapien
tatgagtttctgtgctgaagacagc

SEQ ID NO: 3347992 - DNA, 25 bp, Homo sapien
aaagccaatactcctcttgccgagg

SEQ ID NO: 3347993 - DNA, 25 bp, Homo sapien
cagcagctgggtgaactgagcacaa

SEQ ID NO: 3347994 - DNA, 25 bp, Homo sapien
aaacgttcatgcgtcaaagaagccg

SEQ ID NO: 3347995 - DNA, 25 bp, Homo sapien
ccaaaacgttcatgcgtcaaagaag

SEQ ID NO: 3347996 - DNA, 25 bp, Homo sapien
ttcatgcgtcaaagaagccgtaatc

SEQ ID NO: 3347997 - DNA, 25 bp, Homo sapien
tcctcataaattccaaaacgttcat

SEQ ID NO: 3347998 - DNA, 25 bp, Homo sapien
tttggctgctgtgatcctgtagcca

SEQ ID NO: 3347999 - DNA, 25 bp, Homo sapien
ggaacacctagaggtatttttgcag

SEQ ID NO: 3348000 - DNA, 25 bp, Homo sapien
tgttaactttcctgtccttgttctg

SEQ ID NO: 3348001 - DNA, 25 bp, Homo sapien
ccttgttctgtttacggcaatgttc

SEQ ID NO: 3348002 - DNA, 25 bp, Homo sapien
ctataggcacatagtgtccggaaca

SEQ ID NO: 3348003 - DNA, 25 bp, Homo sapien
cacaggagttaggactctgcgatca

SEQ ID NO: 3348004 - DNA, 25 bp, Homo sapien
acattcacaggagttaggactctgc

SEQ ID NO: 3348005 - DNA, 25 bp, Homo sapien
gagttaggactctgcgatcaattga

SEQ ID NO: 3348006 - DNA, 25 bp, Homo sapien
gactctgcgatcaattgatataata

SEQ ID NO: 3348007 - DNA, 25 bp, Homo sapien
ttattctcagccctccatgcagaca

SEQ ID NO: 3348008 - DNA, 25 bp, Homo sapien
tctgaaatattattctcagccctcc

SEQ ID NO: 3348009 - DNA, 25 bp, Homo sapien
atattattctcagccctccatgcag

SEQ ID NO: 3348010 - DNA, 25 bp, Homo sapien
gaaatattattctcagccctccatg

SEQ ID NO: 3348011 - DNA, 25 bp, Homo sapien
gcatgctgactgaaacgtactgcag

SEQ ID NO: 3348012 - DNA, 25 bp, Homo sapien
ttattctgcatgctgactgaaacgt

SEQ ID NO: 3348013 - DNA, 25 bp, Homo sapien
gctgactgaaacgtactgcagaaca

SEQ ID NO: 3348014 - DNA, 25 bp, Homo sapien
tctgcatgctgactgaaacgtactg

SEQ ID NO: 3348015 - DNA, 25 bp, Homo sapien
aggacgtgtctatgctgggagccca

SEQ ID NO: 3348016 - DNA, 25 bp, Homo sapien
agtctgctctggtggcactactcca

SEQ ID NO: 3348017 - DNA, 25 bp, Homo sapien
ccaaatggagcaagagattgctgag

SEQ ID NO: 3348018 - DNA, 25 bp, Homo sapien
gtgggtgctctcctctaacatctga

SEQ ID NO: 3348019 - DNA, 25 bp, Homo sapien
atctggaacgtagccagatatttca

SEQ ID NO: 3348020 - DNA, 25 bp, Homo sapien
tatctactttgtgtatctggaacgt

SEQ ID NO: 3348021 - DNA, 25 bp, Homo sapien
tttcctgttatctactttgtgtatc

SEQ ID NO: 3348022 - DNA, 25 bp, Homo sapien
tttgtgtatctggaacgtagccaga

SEQ ID NO: 3348023 - DNA, 25 bp, Homo sapien
tactgttcatggtatgtgggaaatt

SEQ ID NO: 3348024 - DNA, 25 bp, Homo sapien
ctggagctccagtgatgaacacaga

SEQ ID NO: 3348025 - DNA, 25 bp, Homo sapien
ctggtgactagaatgagcctgaggt

SEQ ID NO: 3348026 - DNA, 25 bp, Homo sapien
agagagctggtgactagaatgagcc

SEQ ID NO: 3348027 - DNA, 25 bp, Homo sapien
tacaaggccaactaagacgtgcagg

SEQ ID NO: 3348028 - DNA, 25 bp, Homo sapien
tagatgtaatgcatgcccaaaggcc

SEQ ID NO: 3348029 - DNA, 25 bp, Homo sapien
gctgtgacttgtggccattgccaga

SEQ ID NO: 3348030 - DNA, 25 bp, Homo sapien
ccatgaggagttaggtacaaggcca

SEQ ID NO: 3348031 - DNA, 25 bp, Homo sapien
catcacaaatagagccttggtttag

SEQ ID NO: 3348032 - DNA, 25 bp, Homo sapien
aatagagccttggtttagcagaaaa

SEQ ID NO: 3348033 - DNA, 25 bp, Homo sapien
tcagtctatcatcacaaatagagcc

SEQ ID NO: 3348034 - DNA, 25 bp, Homo sapien
aacctcatactcagtctatcatcac

SEQ ID NO: 3348035 - DNA, 25 bp, Homo sapien
taaaatgaatctgtgtagttctcca

SEQ ID NO: 3348036 - DNA, 25 bp, Homo sapien
tgtagttctccattgttgcacagga

SEQ ID NO: 3348037 - DNA, 25 bp, Homo sapien
gcacaggagattgattatgtgtctg

SEQ ID NO: 3348038 - DNA, 25 bp, Homo sapien
gacagtaggaatctcatccgacaag

SEQ ID NO: 3348039 - DNA, 25 bp, Homo sapien
aacacacactcatcatccatgagaa

SEQ ID NO: 3348040 - DNA, 25 bp, Homo sapien
gatcacaagtgctcctcttactgag

SEQ ID NO: 3348041 - DNA, 25 bp, Homo sapien
ccatgagaacctgagagatcacaag

SEQ ID NO: 3348042 - DNA, 25 bp, Homo sapien
catacaagtctaagtgataaaacac

SEQ ID NO: 3348043 - DNA, 25 bp, Homo sapien
tggaaaggtggtggcaagaaccagc

SEQ ID NO: 3348044 - DNA, 25 bp, Homo sapien
gaaaggtggtggcaagaaccagcat

SEQ ID NO: 3348045 - DNA, 25 bp, Homo sapien
ctctggaaaggtggtggcaagaacc

SEQ ID NO: 3348046 - DNA, 25 bp, Homo sapien
tcttcctctggaaaggtggtggcaa

SEQ ID NO: 3348047 - DNA, 25 bp, Homo sapien
ccaggagacttatggaactcgtaca

SEQ ID NO: 3348048 - DNA, 25 bp, Homo sapien
ggcataagcacagcgaatttggtct

SEQ ID NO: 3348049 - DNA, 25 bp, Homo sapien
gcagattagtacataggaagacaca

SEQ ID NO: 3348050 - DNA, 25 bp, Homo sapien
tattataacttaggcaatccaggag

SEQ ID NO: 3348051 - DNA, 25 bp, Homo sapien
tagttgcttggatctaacatttcta

SEQ ID NO: 3348052 - DNA, 25 bp, Homo sapien
tatagttgcttggatctaacatttc

SEQ ID NO: 3348053 - DNA, 25 bp, Homo sapien
ggagttatagttgcttggatctaac

SEQ ID NO: 3348054 - DNA, 25 bp, Homo sapien
gttatagttgcttggatctaacatt

SEQ ID NO: 3348055 - DNA, 25 bp, Homo sapien
ggaagccacactatttcggtgttgg

SEQ ID NO: 3348056 - DNA, 25 bp, Homo sapien
cacactatttcggtgttggctgcca

SEQ ID NO: 3348057 - DNA, 25 bp, Homo sapien
tgatgcttatgtcttagaggaagcc

SEQ ID NO: 3348058 - DNA, 25 bp, Homo sapien
gtcttagaggaagccacactatttc

SEQ ID NO: 3348059 - DNA, 25 bp, Homo sapien
tcttcaaatccgctctcaaatttac

SEQ ID NO: 3348060 - DNA, 25 bp, Homo sapien
ttgtcttcaaatccgctctcaaatt

SEQ ID NO: 3348061 - DNA, 25 bp, Homo sapien
cattgtcttcaaatccgctctcaaa

SEQ ID NO: 3348062 - DNA, 25 bp, Homo sapien
agacattgtcttcaaatccgctctc

SEQ ID NO: 3348063 - DNA, 25 bp, Homo sapien
acaaataatctctcctaattcattg

SEQ ID NO: 3348064 - DNA, 25 bp, Homo sapien
aaataatctctcctaattcattgct

SEQ ID NO: 3348065 - DNA, 25 bp, Homo sapien
ctttgcacaaataatctctcctaat

SEQ ID NO: 3348066 - DNA, 25 bp, Homo sapien
tgcacaaataatctctcctaattca

SEQ ID NO: 3348067 - DNA, 25 bp, Homo sapien
tgccgattcctcgaacacctagagg

SEQ ID NO: 3348068 - DNA, 25 bp, Homo sapien
ggcagaaataccctttgacccggca

SEQ ID NO: 3348069 - DNA, 25 bp, Homo sapien
caggtggttggacattcttagtcgc

SEQ ID NO: 3348070 - DNA, 25 bp, Homo sapien
atagtggtgaacaacacggactggg

SEQ ID NO: 3348071 - DNA, 25 bp, Homo sapien
ccagggcaatcataagtaatgggcc

SEQ ID NO: 3348072 - DNA, 25 bp, Homo sapien
tgtctacacgctcatagggtttccc

SEQ ID NO: 3348073 - DNA, 25 bp, Homo sapien
tggtcataacccaaagtcttgctga

SEQ ID NO: 3348074 - DNA, 25 bp, Homo sapien
cagtagtgcagaaagatgaatgagc

SEQ ID NO: 3348075 - DNA, 25 bp, Homo sapien
catctagagtctcaggaacaacaca

SEQ ID NO: 3348076 - DNA, 25 bp, Homo sapien
aggaacgggtctgcatctagagtct

SEQ ID NO: 3348077 - DNA, 25 bp, Homo sapien
tgtcttgagccaaagcagaaaatac

SEQ ID NO: 3348078 - DNA, 25 bp, Homo sapien
cagaaaatactacgctaacattttg

SEQ ID NO: 3348079 - DNA, 25 bp, Homo sapien
gctttgtaaacctctccaattctct

SEQ ID NO: 3348080 - DNA, 25 bp, Homo sapien
caattctctcaattccctctgtcat

SEQ ID NO: 3348081 - DNA, 25 bp, Homo sapien
tgtaaacctctccaattctctcaat

SEQ ID NO: 3348082 - DNA, 25 bp, Homo sapien
ccaattctctcaattccctctgtca

SEQ ID NO: 3348083 - DNA, 25 bp, Homo sapien
aaatgcctggatgctacgttttgca

SEQ ID NO: 3348084 - DNA, 25 bp, Homo sapien
tgctacgttttgcatcttctttaga

SEQ ID NO: 3348085 - DNA, 25 bp, Homo sapien
cagcagcgcggaccgcaagtggagc

SEQ ID NO: 3348086 - DNA, 25 bp, Homo sapien
gagcccggcaattggaaagttgcaa

SEQ ID NO: 3348087 - DNA, 25 bp, Homo sapien
cttcagtagcatgcttaatgaaaaa

SEQ ID NO: 3348088 - DNA, 25 bp, Homo sapien
tcagtagcatgcttaatgaaaaata

SEQ ID NO: 3348089 - DNA, 25 bp, Homo sapien
gttgagtcagtttgaggaactctga

SEQ ID NO: 3348090 - DNA, 25 bp, Homo sapien
cagtttgaggaactctgaatactgc

SEQ ID NO: 3348091 - DNA, 25 bp, Homo sapien
tcccagaagagcctactggtgcttc

SEQ ID NO: 3348092 - DNA, 25 bp, Homo sapien
tctttgctatttgcgatgctgtaca

SEQ ID NO: 3348093 - DNA, 25 bp, Homo sapien
aaattgatcctagaactgataactt

SEQ ID NO: 3348094 - DNA, 25 bp, Homo sapien
ttgatcctagaactgataactttcc

SEQ ID NO: 3348095 - DNA, 25 bp, Homo sapien
aaatcttccctaattgttgccaaca

SEQ ID NO: 3348096 - DNA, 25 bp, Homo sapien
tcttccctaattgttgccaacacag

SEQ ID NO: 3348097 - DNA, 25 bp, Homo sapien
ctaattgttgccaacacagcagctg

SEQ ID NO: 3348098 - DNA, 25 bp, Homo sapien
tccctaattgttgccaacacagcag

SEQ ID NO: 3348099 - DNA, 25 bp, Homo sapien
aactgcaggaatccttggagaaatt

SEQ ID NO: 3348100 - DNA, 25 bp, Homo sapien
cctcttcgtatgttcaaaggagaac

SEQ ID NO: 3348101 - DNA, 25 bp, Homo sapien
tgttccctcttcgtatgttcaaagg

SEQ ID NO: 3348102 - DNA, 25 bp, Homo sapien
ttccctcttcgtatgttcaaaggag

SEQ ID NO: 3348103 - DNA, 25 bp, Homo sapien
ccttaattctgttatggttctctgc

SEQ ID NO: 3348104 - DNA, 25 bp, Homo sapien
taattctgttatggttctctgctca

SEQ ID NO: 3348105 - DNA, 25 bp, Homo sapien
ttaattctgttatggttctctgctc

SEQ ID NO: 3348106 - DNA, 25 bp, Homo sapien
attctgttatggttctctgctcagg

SEQ ID NO: 3348107 - DNA, 25 bp, Homo sapien
tgttccggagatcaataaaactcaa

SEQ ID NO: 3348108 - DNA, 25 bp, Homo sapien
gttccggagatcaataaaactcaac

SEQ ID NO: 3348109 - DNA, 25 bp, Homo sapien
tccggagatcaataaaactcaacat

SEQ ID NO: 3348110 - DNA, 25 bp, Homo sapien
ctgttccggagatcaataaaactca

SEQ ID NO: 3348111 - DNA, 25 bp, Homo sapien
tgttttctatgtcctgaagcccaag

SEQ ID NO: 3348112 - DNA, 25 bp, Homo sapien
ttggtgatactttccagcataacta

SEQ ID NO: 3348113 - DNA, 25 bp, Homo sapien
tgttgcctattcaggattgctcccg

SEQ ID NO: 3348114 - DNA, 25 bp, Homo sapien
taagacaatcacttggcaataatga

SEQ ID NO: 3348115 - DNA, 25 bp, Homo sapien
atggaaagccgaccacagtcaggaa

SEQ ID NO: 3348116 - DNA, 25 bp, Homo sapien
ccacagtcaggaaatgcatcatacc

SEQ ID NO: 3348117 - DNA, 25 bp, Homo sapien
ctgtttcacccatggaaagccgacc

SEQ ID NO: 3348118 - DNA, 25 bp, Homo sapien
taggaaagcagttggtgaggatatt

SEQ ID NO: 3348119 - DNA, 25 bp, Homo sapien
aacttggcggagagtctacaactac

SEQ ID NO: 3348120 - DNA, 25 bp, Homo sapien
tttaaaacttggcggagagtctaca

SEQ ID NO: 3348121 - DNA, 25 bp, Homo sapien
ggcggagagtctacaactaccaatt

SEQ ID NO: 3348122 - DNA, 25 bp, Homo sapien
cggagagtctacaactaccaattgt

SEQ ID NO: 3348123 - DNA, 25 bp, Homo sapien
caaatggtaacatcaccatctgcaa

SEQ ID NO: 3348124 - DNA, 25 bp, Homo sapien
atcaccatctgcaacagtgttctac

SEQ ID NO: 3348125 - DNA, 25 bp, Homo sapien
taacatcaccatctgcaacagtgtt

SEQ ID NO: 3348126 - DNA, 25 bp, Homo sapien
tttcaaatggtaacatcaccatctg

SEQ ID NO: 3348127 - DNA, 25 bp, Homo sapien
cttttactgatacctccccaccagc

SEQ ID NO: 3348128 - DNA, 25 bp, Homo sapien
caccagcagccgctacagcagcagc

SEQ ID NO: 3348129 - DNA, 25 bp, Homo sapien
cccagggccattaatctcagtgata

SEQ ID NO: 3348130 - DNA, 25 bp, Homo sapien
gcaacccagggccattaatctcagt

SEQ ID NO: 3348131 - DNA, 25 bp, Homo sapien
tctcagtgatatattcttcatccgg

SEQ ID NO: 3348132 - DNA, 25 bp, Homo sapien
gatatattcttcatccggatgcatc

SEQ ID NO: 3348133 - DNA, 25 bp, Homo sapien
tgtgtcttctggtaggactatttga

SEQ ID NO: 3348134 - DNA, 25 bp, Homo sapien
attttcctagactctgagtttctct

SEQ ID NO: 3348135 - DNA, 25 bp, Homo sapien
gactatttgaggaatgttcctagac

SEQ ID NO: 3348136 - DNA, 25 bp, Homo sapien
gaatgttcctagacattcattttcc

SEQ ID NO: 3348137 - DNA, 25 bp, Homo sapien
gtgagacttaagacagactttgatc

SEQ ID NO: 3348138 - DNA, 25 bp, Homo sapien
gatctggatgttgatatcacattgg

SEQ ID NO: 3348139 - DNA, 25 bp, Homo sapien
ccacaattatgttgtaaccttggta

SEQ ID NO: 3348140 - DNA, 25 bp, Homo sapien
gacatcggttcaaaactctgtatga

SEQ ID NO: 3348141 - DNA, 25 bp, Homo sapien
tgaagacttggcatcccaaggaaga

SEQ ID NO: 3348142 - DNA, 25 bp, Homo sapien
ttggcatcccaaggaagactctttt

SEQ ID NO: 3348143 - DNA, 25 bp, Homo sapien
tttgaagtcaatttccctgaccctg

SEQ ID NO: 3348144 - DNA, 25 bp, Homo sapien
cagatgtcacactgaaactttgctg

SEQ ID NO: 3348145 - DNA, 25 bp, Homo sapien
ctacacctgcaaaattggagtctaa

SEQ ID NO: 3348146 - DNA, 25 bp, Homo sapien
tcccaacttgcaaaggactctttag

SEQ ID NO: 3348147 - DNA, 25 bp, Homo sapien
gactctttagccaacttctccacct

SEQ ID NO: 3348148 - DNA, 25 bp, Homo sapien
aattggagtctaaagcctcatccca

SEQ ID NO: 3348149 - DNA, 25 bp, Homo sapien
cacagggaatgtctctaaacaaccg

SEQ ID NO: 3348150 - DNA, 25 bp, Homo sapien
ctctggcagccaccataactgtgtc

SEQ ID NO: 3348151 - DNA, 25 bp, Homo sapien
aaggaggccctttgaaaggtgcagc

SEQ ID NO: 3348152 - DNA, 25 bp, Homo sapien
gaaaggtgcagcttctatagcagga

SEQ ID NO: 3348153 - DNA, 25 bp, Homo sapien
taaaggaaatgagggcatacaagtt

SEQ ID NO: 3348154 - DNA, 25 bp, Homo sapien
ctttaaaggaaatgagggcatacaa

SEQ ID NO: 3348155 - DNA, 25 bp, Homo sapien
aggaaatgagggcatacaagtttcc

SEQ ID NO: 3348156 - DNA, 25 bp, Homo sapien
ttaaaggaaatgagggcatacaagt

SEQ ID NO: 3348157 - DNA, 25 bp, Homo sapien
ggttttcttcagccggcagtccacc

SEQ ID NO: 3348158 - DNA, 25 bp, Homo sapien
ccaaagtttaatgccagtggccctg

SEQ ID NO: 3348159 - DNA, 25 bp, Homo sapien
gaatctcgccaaagtttaatgccag

SEQ ID NO: 3348160 - DNA, 25 bp, Homo sapien
tacttcaatcagcagaatctcgcca

SEQ ID NO: 3348161 - DNA, 25 bp, Homo sapien
gggaatgaggatctctacacccata

SEQ ID NO: 3348162 - DNA, 25 bp, Homo sapien
atttttggggaatgaggatctctac

SEQ ID NO: 3348163 - DNA, 25 bp, Homo sapien
gaatgaggatctctacacccataga

SEQ ID NO: 3348164 - DNA, 25 bp, Homo sapien
ttggggaatgaggatctctacaccc

SEQ ID NO: 3348165 - DNA, 25 bp, Homo sapien
gttggctgacgttcttcactttttc

SEQ ID NO: 3348166 - DNA, 25 bp, Homo sapien
ttggctgacgttcttcactttttca

SEQ ID NO: 3348167 - DNA, 25 bp, Homo sapien
atggtttggttagactcagactcaa

SEQ ID NO: 3348168 - DNA, 25 bp, Homo sapien
tggtttggttagactcagactcaaa

SEQ ID NO: 3348169 - DNA, 25 bp, Homo sapien
tgcactggttgctcaccatttgtgt

SEQ ID NO: 3348170 - DNA, 25 bp, Homo sapien
ggtagacagcctgcactggttgctc

SEQ ID NO: 3348171 - DNA, 25 bp, Homo sapien
ttatcatccatgaagagctgcatgt

SEQ ID NO: 3348172 - DNA, 25 bp, Homo sapien
gagctgcatgtatgggtagacagcc

SEQ ID NO: 3348173 - DNA, 25 bp, Homo sapien
tttgtcaaaacacatctctggcctg

SEQ ID NO: 3348174 - DNA, 25 bp, Homo sapien
ttcttaggccatctttgtcaaaaca

SEQ ID NO: 3348175 - DNA, 25 bp, Homo sapien
gccatctttgtcaaaacacatctct

SEQ ID NO: 3348176 - DNA, 25 bp, Homo sapien
tctttgtcaaaacacatctctggcc

SEQ ID NO: 3348177 - DNA, 25 bp, Homo sapien
cacaaaacggtgtgtggtcaataca

SEQ ID NO: 3348178 - DNA, 25 bp, Homo sapien
caaaacagcccatgtctcaaggaca

SEQ ID NO: 3348179 - DNA, 25 bp, Homo sapien
gtaaacatcactgggcaaaacagcc

SEQ ID NO: 3348180 - DNA, 25 bp, Homo sapien
tcaccgactggcaactgaggactgc

SEQ ID NO: 3348181 - DNA, 25 bp, Homo sapien
caagaaataaatcttgagcacacac

SEQ ID NO: 3348182 - DNA, 25 bp, Homo sapien
ttctcagagtccaagaaataaatct

SEQ ID NO: 3348183 - DNA, 25 bp, Homo sapien
gaaataaatcttgagcacacacaca

SEQ ID NO: 3348184 - DNA, 25 bp, Homo sapien
cattttctcagagtccaagaaataa

SEQ ID NO: 3348185 - DNA, 25 bp, Homo sapien
tagtaatggctggatctgaatgtct

SEQ ID NO: 3348186 - DNA, 25 bp, Homo sapien
gatgtgttcctactgcacagcacag

SEQ ID NO: 3348187 - DNA, 25 bp, Homo sapien
cagcacagcacgctttatcaggaag

SEQ ID NO: 3348188 - DNA, 25 bp, Homo sapien
tagtcaccacataacctaggcacga

SEQ ID NO: 3348189 - DNA, 25 bp, Homo sapien
ttaagcaaggcaacggaatcaggtg

SEQ ID NO: 3348190 - DNA, 25 bp, Homo sapien
ccctaagccgtatcgaaagaactga

SEQ ID NO: 3348191 - DNA, 25 bp, Homo sapien
tttatacgattttaggcccaggaca

SEQ ID NO: 3348192 - DNA, 25 bp, Homo sapien
ctgaaatacagaacccagctagtgg

SEQ ID NO: 3348193 - DNA, 25 bp, Homo sapien
gctgttgcacaactcctaattctgt

SEQ ID NO: 3348194 - DNA, 25 bp, Homo sapien
tacgttctctaatagaatcagccac

SEQ ID NO: 3348195 - DNA, 25 bp, Homo sapien
ggatggagataacgcatacgttctc

SEQ ID NO: 3348196 - DNA, 25 bp, Homo sapien
atgaaaggtccttgaagcaaacaac

SEQ ID NO: 3348197 - DNA, 25 bp, Homo sapien
caatcccctgacaccggtctttggt

SEQ ID NO: 3348198 - DNA, 25 bp, Homo sapien
ccagggccacgtcggtgagtgattt

SEQ ID NO: 3348199 - DNA, 25 bp, Homo sapien
gccacgtcggtgagtgatttgtgca

SEQ ID NO: 3348200 - DNA, 25 bp, Homo sapien
ccctgacaccggtctttggtctcaa

SEQ ID NO: 3348201 - DNA, 25 bp, Homo sapien
gattatgaacaaaggccagagcaca

SEQ ID NO: 3348202 - DNA, 25 bp, Homo sapien
aaacagagaatgcatacctcactgg

SEQ ID NO: 3348203 - DNA, 25 bp, Homo sapien
tccaaaaaggcacaagtcaagtctt

SEQ ID NO: 3348204 - DNA, 25 bp, Homo sapien
tcctgcagctggatcctactgtgca

SEQ ID NO: 3348205 - DNA, 25 bp, Homo sapien
taggcacgagggctaagcaatttgc

SEQ ID NO: 3348206 - DNA, 25 bp, Homo sapien
taggttcaaaactgggatgtctagc

SEQ ID NO: 3348207 - DNA, 25 bp, Homo sapien
tcatgctaggactggtaggacacca

SEQ ID NO: 3348208 - DNA, 25 bp, Homo sapien
ttgaagccctacagatgcactgagg

SEQ ID NO: 3348209 - DNA, 25 bp, Homo sapien
attgtggagacaacaggcacagttc

SEQ ID NO: 3348210 - DNA, 25 bp, Homo sapien
gcttgggacacattgacattcattg

SEQ ID NO: 3348211 - DNA, 25 bp, Homo sapien
caccacagcgtttaaccaggagaca

SEQ ID NO: 3348212 - DNA, 25 bp, Homo sapien
gccagaaaatggtatcggttctctt

SEQ ID NO: 3348213 - DNA, 25 bp, Homo sapien
ctcctctgttagaaggttcagatcc

SEQ ID NO: 3348214 - DNA, 25 bp, Homo sapien
tacgaggtgtgcagctgtataatct

SEQ ID NO: 3348215 - DNA, 25 bp, Homo sapien
ctgagaagttacgaggtgtgcagct

SEQ ID NO: 3348216 - DNA, 25 bp, Homo sapien
tgtataatcttacctcctctgttag

SEQ ID NO: 3348217 - DNA, 25 bp, Homo sapien
ccttgccaagaagttgccaagttgg

SEQ ID NO: 3348218 - DNA, 25 bp, Homo sapien
ccaaggtactaaaggcagttatagc

SEQ ID NO: 3348219 - DNA, 25 bp, Homo sapien
tatcgaataaggtcttccaaggtac

SEQ ID NO: 3348220 - DNA, 25 bp, Homo sapien
gcattattaagcaggtccagtggca

SEQ ID NO: 3348221 - DNA, 25 bp, Homo sapien
tgaagggggtagcactgaaggactc

SEQ ID NO: 3348222 - DNA, 25 bp, Homo sapien
ctgaagggggtagcactgaaggact

SEQ ID NO: 3348223 - DNA, 25 bp, Homo sapien
cactgaaggactcacagcttctgtg

SEQ ID NO: 3348224 - DNA, 25 bp, Homo sapien
gcactgaaggactcacagcttctgt

SEQ ID NO: 3348225 - DNA, 25 bp, Homo sapien
tgaaagtaaaatgaatcctgtgtta

SEQ ID NO: 3348226 - DNA, 25 bp, Homo sapien
ctgaaagtaaaatgaatcctgtgtt

SEQ ID NO: 3348227 - DNA, 25 bp, Homo sapien
gaaagtaaaatgaatcctgtgttaa

SEQ ID NO: 3348228 - DNA, 25 bp, Homo sapien
caagattaagagatcggagggacac

SEQ ID NO: 3348229 - DNA, 25 bp, Homo sapien
tggtagttatgcaaattagtgtcac

SEQ ID NO: 3348230 - DNA, 25 bp, Homo sapien
agggacactggagaacacactgaca

SEQ ID NO: 3348231 - DNA, 25 bp, Homo sapien
cacagatgagatgggcaagaatttt

SEQ ID NO: 3348232 - DNA, 25 bp, Homo sapien
tccccccgttgatccacatcataaa

SEQ ID NO: 3348233 - DNA, 25 bp, Homo sapien
ccccgttgatccacatcataaatct

SEQ ID NO: 3348234 - DNA, 25 bp, Homo sapien
acatgcaaaaactctccccccgttg

SEQ ID NO: 3348235 - DNA, 25 bp, Homo sapien
atgcaaaaactctccccccgttgat

SEQ ID NO: 3348236 - DNA, 25 bp, Homo sapien
gaagctgcccagtaaactaggaaaa

SEQ ID NO: 3348237 - DNA, 25 bp, Homo sapien
agctgcccagtaaactaggaaaagg

SEQ ID NO: 3348238 - DNA, 25 bp, Homo sapien
ggacaggcacaaccctcgtggggct

SEQ ID NO: 3348239 - DNA, 25 bp, Homo sapien
tctggacaggcacaaccctcgtggg

SEQ ID NO: 3348240 - DNA, 25 bp, Homo sapien
tcggcagaaatgaacgtggcagcct

SEQ ID NO: 3348241 - DNA, 25 bp, Homo sapien
tcttacagggtataatcggcagaaa

SEQ ID NO: 3348242 - DNA, 25 bp, Homo sapien
aacgtggcagccttgggccaacaat

SEQ ID NO: 3348243 - DNA, 25 bp, Homo sapien
agccttgggccaacaatgatttcat

SEQ ID NO: 3348244 - DNA, 25 bp, Homo sapien
gaatgacaatgtctggcctccttcc

SEQ ID NO: 3348245 - DNA, 25 bp, Homo sapien
caataatgtcaaggatctggctaaa

SEQ ID NO: 3348246 - DNA, 25 bp, Homo sapien
acaaagatacgcaaagatacatgga

SEQ ID NO: 3348247 - DNA, 25 bp, Homo sapien
ttgagtaactacagtgttccagggc

SEQ ID NO: 3348248 - DNA, 25 bp, Homo sapien
aactgctacggactcacttttcccg

SEQ ID NO: 3348249 - DNA, 25 bp, Homo sapien
tgaaacaactgctacggactcactt

SEQ ID NO: 3348250 - DNA, 25 bp, Homo sapien
tttcccgtcatcatgaaactggaga

SEQ ID NO: 3348251 - DNA, 25 bp, Homo sapien
ggactcacttttcccgtcatcatga

SEQ ID NO: 3348252 - DNA, 25 bp, Homo sapien
cacagtggaactcaatggaagggct

SEQ ID NO: 3348253 - DNA, 25 bp, Homo sapien
gcataggcagagactaaggacaccc

SEQ ID NO: 3348254 - DNA, 25 bp, Homo sapien
tgtatcactcaaccaccattaaggg

SEQ ID NO: 3348255 - DNA, 25 bp, Homo sapien
tccaggaggcttccactagtgagac

SEQ ID NO: 3348256 - DNA, 25 bp, Homo sapien
ggtacagctattgtgatgccatact

SEQ ID NO: 3348257 - DNA, 25 bp, Homo sapien
tgaaggtgccaatgattcctcaggc

SEQ ID NO: 3348258 - DNA, 25 bp, Homo sapien
ttcatatggagcttagggctgcggc

SEQ ID NO: 3348259 - DNA, 25 bp, Homo sapien
gcattttacatcctacattggcatc

SEQ ID NO: 3348260 - DNA, 25 bp, Homo sapien
cacctgcgagcggttgaagtacggc

SEQ ID NO: 3348261 - DNA, 25 bp, Homo sapien
caagcttggagttggtcacctgcga

SEQ ID NO: 3348262 - DNA, 25 bp, Homo sapien
ttaaaatacttgaggagaccaggcg

SEQ ID NO: 3348263 - DNA, 25 bp, Homo sapien
gagactgggctactccttacaagag

SEQ ID NO: 3348264 - DNA, 25 bp, Homo sapien
cagggttggcatcctagtggataca

SEQ ID NO: 3348265 - DNA, 25 bp, Homo sapien
tccccagttactcttgcagatagca

SEQ ID NO: 3348266 - DNA, 25 bp, Homo sapien
tcatttggtgacacttgccacgtta

SEQ ID NO: 3348267 - DNA, 25 bp, Homo sapien
gccacgttattatgaatgaagcagg

SEQ ID NO: 3348268 - DNA, 25 bp, Homo sapien
gttaatgaaattgccagatacccca

SEQ ID NO: 3348269 - DNA, 25 bp, Homo sapien
ttaatgaaattgccagataccccaa

SEQ ID NO: 3348270 - DNA, 25 bp, Homo sapien
ttaagtctgctgtccaggaggcaca

SEQ ID NO: 3348271 - DNA, 25 bp, Homo sapien
tctgctgtccaggaggcacactttc

SEQ ID NO: 3348272 - DNA, 25 bp, Homo sapien
cacactttcttgctttaggctttca

SEQ ID NO: 3348273 - DNA, 25 bp, Homo sapien
gaggcacactttcttgctttaggct

SEQ ID NO: 3348274 - DNA, 25 bp, Homo sapien
ttctcatgtgtaagaggagaaaaat

SEQ ID NO: 3348275 - DNA, 25 bp, Homo sapien
aatgaaatcccagctaggtttgttt

SEQ ID NO: 3348276 - DNA, 25 bp, Homo sapien
ttttctgattctcatgtgtaagagg

SEQ ID NO: 3348277 - DNA, 25 bp, Homo sapien
tctgattctcatgtgtaagaggaga

SEQ ID NO: 3348278 - DNA, 25 bp, Homo sapien
gatgcagaaccctggttcagaagga

SEQ ID NO: 3348279 - DNA, 25 bp, Homo sapien
tgttgtagtggatgcagaaccctgg

SEQ ID NO: 3348280 - DNA, 25 bp, Homo sapien
tggtacagtaccagaaccacaccag

SEQ ID NO: 3348281 - DNA, 25 bp, Homo sapien
cagcgccctaatatagttccatcac

SEQ ID NO: 3348282 - DNA, 25 bp, Homo sapien
tagacaaaattttcgttctcatgtg

SEQ ID NO: 3348283 - DNA, 25 bp, Homo sapien
caaaattttcgttctcatgtgggaa

SEQ ID NO: 3348284 - DNA, 25 bp, Homo sapien
tgtgaggccatgaggacgtctttct

SEQ ID NO: 3348285 - DNA, 25 bp, Homo sapien
acaaacaagtctggtgttgtagaca

SEQ ID NO: 3348286 - DNA, 25 bp, Homo sapien
taggctgctgctcaaaccctgggct

SEQ ID NO: 3348287 - DNA, 25 bp, Homo sapien
ctaggctgctgctcaaaccctgggc

SEQ ID NO: 3348288 - DNA, 25 bp, Homo sapien
gactccagaggcagaattagctaaa

SEQ ID NO: 3348289 - DNA, 25 bp, Homo sapien
aaatcaatcttcactagagaatggg

SEQ ID NO: 3348290 - DNA, 25 bp, Homo sapien
tatatttaacgtacagatagaacag

SEQ ID NO: 3348291 - DNA, 25 bp, Homo sapien
tggaaatttagtgaagtacagacat

SEQ ID NO: 3348292 - DNA, 25 bp, Homo sapien
ggacactagactgtatttcgagtaa

SEQ ID NO: 3348293 - DNA, 25 bp, Homo sapien
tttattacacacaccccatcctata

SEQ ID NO: 3348294 - DNA, 25 bp, Homo sapien
acttgctgggttttaattccatggt

SEQ ID NO: 3348295 - DNA, 25 bp, Homo sapien
tatacagtttatgcaacttgctggg

SEQ ID NO: 3348296 - DNA, 25 bp, Homo sapien
tcaagaggtgacagagcataagagt

SEQ ID NO: 3348297 - DNA, 25 bp, Homo sapien
aagagactggcggttttttgctcct

SEQ ID NO: 3348298 - DNA, 25 bp, Homo sapien
gtgatatgcacaatgaggtcgaggc

SEQ ID NO: 3348299 - DNA, 25 bp, Homo sapien
gttttttgctcctgccctagagatg

SEQ ID NO: 3348300 - DNA, 25 bp, Homo sapien
tccccacacgtcatgggagtgaccg

SEQ ID NO: 3348301 - DNA, 25 bp, Homo sapien
cccacacgtcatgggagtgaccgga

SEQ ID NO: 3348302 - DNA, 25 bp, Homo sapien
cacacgtcatgggagtgaccggatg

SEQ ID NO: 3348303 - DNA, 25 bp, Homo sapien
gagtgaccggatgggaggtaattgg

SEQ ID NO: 3348304 - DNA, 25 bp, Homo sapien
gctactaatctccataccaagaccg

SEQ ID NO: 3348305 - DNA, 25 bp, Homo sapien
tcttggataagtatgaggaaacctt

SEQ ID NO: 3348306 - DNA, 25 bp, Homo sapien
ctctcatgctgaggatcttgtactc

SEQ ID NO: 3348307 - DNA, 25 bp, Homo sapien
tgaatacttccattagtagacacag

SEQ ID NO: 3348308 - DNA, 25 bp, Homo sapien
cactgtttatgtgagtgtaatcccc

SEQ ID NO: 3348309 - DNA, 25 bp, Homo sapien
gaccttcgagcaagtgaacagacat

SEQ ID NO: 3348310 - DNA, 25 bp, Homo sapien
tgtaatcccctacccagcaaatgga

SEQ ID NO: 3348311 - DNA, 25 bp, Homo sapien
caaatggaccggctgcattcacgac

SEQ ID NO: 3348312 - DNA, 25 bp, Homo sapien
agtactcccattatgaaaggaaggc

SEQ ID NO: 3348313 - DNA, 25 bp, Homo sapien
cccattatgaaaggaaggcattcac

SEQ ID NO: 3348314 - DNA, 25 bp, Homo sapien
agaaagtactcccattatgaaagga

SEQ ID NO: 3348315 - DNA, 25 bp, Homo sapien
tactcccattatgaaaggaaggcat

SEQ ID NO: 3348316 - DNA, 25 bp, Homo sapien
agtccagatgcttggatatagttcc

SEQ ID NO: 3348317 - DNA, 25 bp, Homo sapien
cagtccagatgcttggatatagttc

SEQ ID NO: 3348318 - DNA, 25 bp, Homo sapien
tcacttgaagtcaaccctgccctag

SEQ ID NO: 3348319 - DNA, 25 bp, Homo sapien
ttagaaatcactaggtccaactctg

SEQ ID NO: 3348320 - DNA, 25 bp, Homo sapien
tatattagtctaaactgagtgcttt

SEQ ID NO: 3348321 - DNA, 25 bp, Homo sapien
gccctagctgtagtaccatttctaa

SEQ ID NO: 3348322 - DNA, 25 bp, Homo sapien
tttcagaatgaatgtcgtaacctag

SEQ ID NO: 3348323 - DNA, 25 bp, Homo sapien
gaatgaatgtcgtaacctaggcaga

SEQ ID NO: 3348324 - DNA, 25 bp, Homo sapien
tgtttctggtgttagacatttcaga

SEQ ID NO: 3348325 - DNA, 25 bp, Homo sapien
taacctaggcagaaatagaatatgg

SEQ ID NO: 3348326 - DNA, 25 bp, Homo sapien
caaggttagtgctcttaattgccat

SEQ ID NO: 3348327 - DNA, 25 bp, Homo sapien
cttcaaggttagtgctcttaattgc

SEQ ID NO: 3348328 - DNA, 25 bp, Homo sapien
ttcaaggttagtgctcttaattgcc

SEQ ID NO: 3348329 - DNA, 25 bp, Homo sapien
tcaaggttagtgctcttaattgcca

SEQ ID NO: 3348330 - DNA, 25 bp, Homo sapien
tcaggagattataagaacagggtaa

SEQ ID NO: 3348331 - DNA, 25 bp, Homo sapien
gcctctacacgcacaagatttttgg

SEQ ID NO: 3348332 - DNA, 25 bp, Homo sapien
tttggcatcgctgaggacattatcc

SEQ ID NO: 3348333 - DNA, 25 bp, Homo sapien
cattaagtacagattcagctgaaca

SEQ ID NO: 3348334 - DNA, 25 bp, Homo sapien
tcttactctgttgaccaggacggtc

SEQ ID NO: 3348335 - DNA, 25 bp, Homo sapien
tatgcaaggacaattactgctcaga

SEQ ID NO: 3348336 - DNA, 25 bp, Homo sapien
aatgcagtgggcaatcacacactgc

SEQ ID NO: 3348337 - DNA, 25 bp, Homo sapien
cagattggtctgttagtatgcttca

SEQ ID NO: 3348338 - DNA, 25 bp, Homo sapien
cctggcgtgcactggcacaaacaca

SEQ ID NO: 3348339 - DNA, 25 bp, Homo sapien
agcctggcgtgcactggcacaaaca

SEQ ID NO: 3348340 - DNA, 25 bp, Homo sapien
gcctggcgtgcactggcacaaacac

SEQ ID NO: 3348341 - DNA, 25 bp, Homo sapien
ggagcaagcacatgtaaacgtcaga

SEQ ID NO: 3348342 - DNA, 25 bp, Homo sapien
tgaggagtcatgagaagtttctcag

SEQ ID NO: 3348343 - DNA, 25 bp, Homo sapien
tcagattggcttttaacgaagctcc

SEQ ID NO: 3348344 - DNA, 25 bp, Homo sapien
gagaagtttctcagcaaggagcaag

SEQ ID NO: 3348345 - DNA, 25 bp, Homo sapien
tcctgaggagctcggtgtaccacca

SEQ ID NO: 3348346 - DNA, 25 bp, Homo sapien
tccaaaaacctagcaggctacacag

SEQ ID NO: 3348347 - DNA, 25 bp, Homo sapien
gctacattgacagcgatgccaggat

SEQ ID NO: 3348348 - DNA, 25 bp, Homo sapien
gaaatctgacattcagaggagcagg

SEQ ID NO: 3348349 - DNA, 25 bp, Homo sapien
gtaaaacgagtaattctgtagaatc

SEQ ID NO: 3348350 - DNA, 25 bp, Homo sapien
caattagtgtgtcttcccaaatacc

SEQ ID NO: 3348351 - DNA, 25 bp, Homo sapien
caacaatccatttctgtaaaacgag

SEQ ID NO: 3348352 - DNA, 25 bp, Homo sapien
aatccaagtgtgcaattagtgtgtc

SEQ ID NO: 3348353 - DNA, 25 bp, Homo sapien
ctgggatgaagtggccctaacctct

SEQ ID NO: 3348354 - DNA, 25 bp, Homo sapien
agcctccatgctggctagggcttgt

SEQ ID NO: 3348355 - DNA, 25 bp, Homo sapien
tccatgctggctagggcttgtgtcc

SEQ ID NO: 3348356 - DNA, 25 bp, Homo sapien
taacctcttggattgagcctccatg

SEQ ID NO: 3348357 - DNA, 25 bp, Homo sapien
ggctcccatccacctaattggctga

SEQ ID NO: 3348358 - DNA, 25 bp, Homo sapien
cagggaactctaaggtggtcatcag

SEQ ID NO: 3348359 - DNA, 25 bp, Homo sapien
catagccttttaactcagggaactc

SEQ ID NO: 3348360 - DNA, 25 bp, Homo sapien
tacaaagcgttagggtttcaaatca

SEQ ID NO: 3348361 - DNA, 25 bp, Homo sapien
ggaacaacacactctgtttgtgttc

SEQ ID NO: 3348362 - DNA, 25 bp, Homo sapien
tattcactttatgtagttaaaggaa

SEQ ID NO: 3348363 - DNA, 25 bp, Homo sapien
ctctgtttgtgttcaaagagtgaag

SEQ ID NO: 3348364 - DNA, 25 bp, Homo sapien
tcaaagagtgaagtaaggccatttt

SEQ ID NO: 3348365 - DNA, 25 bp, Homo sapien
tcttcataagttcctggatgatcta

SEQ ID NO: 3348366 - DNA, 25 bp, Homo sapien
taagataccatatattcgttgaagg

SEQ ID NO: 3348367 - DNA, 25 bp, Homo sapien
gcaagaagagcctgttaataaagta

SEQ ID NO: 3348368 - DNA, 25 bp, Homo sapien
tctgagagtcctgagatatgtgatc

SEQ ID NO: 3348369 - DNA, 25 bp, Homo sapien
ctgctgcggccgctttgactatatc

SEQ ID NO: 3348370 - DNA, 25 bp, Homo sapien
ttgtgatggctctcctgcaccgact

SEQ ID NO: 3348371 - DNA, 25 bp, Homo sapien
tgcggccgctttgactatatccaca

SEQ ID NO: 3348372 - DNA, 25 bp, Homo sapien
ataattgttgtgatggctctcctgc

SEQ ID NO: 3348373 - DNA, 25 bp, Homo sapien
cccattctagttggtcattaaaaag

SEQ ID NO: 3348374 - DNA, 25 bp, Homo sapien
tgaagggttaagaggttacacagca

SEQ ID NO: 3348375 - DNA, 25 bp, Homo sapien
cacactgtctgtgctgcaatatttc

SEQ ID NO: 3348376 - DNA, 25 bp, Homo sapien
aagtgtgtattactagaatgacttt

SEQ ID NO: 3348377 - DNA, 25 bp, Homo sapien
aatgctgtcccagcctctagcttct

SEQ ID NO: 3348378 - DNA, 25 bp, Homo sapien
catctgaacggctgcaaatgccttc

SEQ ID NO: 3348379 - DNA, 25 bp, Homo sapien
ttcaaaatgctgtcccagcctctag

SEQ ID NO: 3348380 - DNA, 25 bp, Homo sapien
tgtctggcatctgaacggctgcaaa

SEQ ID NO: 3348381 - DNA, 25 bp, Homo sapien
ttctgcacgtgcaaatgatgctcat

SEQ ID NO: 3348382 - DNA, 25 bp, Homo sapien
attctgcacgtgcaaatgatgctca

SEQ ID NO: 3348383 - DNA, 25 bp, Homo sapien
gcctgagacagaactagaggtcgta

SEQ ID NO: 3348384 - DNA, 25 bp, Homo sapien
ccacaaagggtgcaaaagtttatag

SEQ ID NO: 3348385 - DNA, 25 bp, Homo sapien
tagacaaagctaaggcttccgtgcc

SEQ ID NO: 3348386 - DNA, 25 bp, Homo sapien
caaacgatatattagtccctgaggc

SEQ ID NO: 3348387 - DNA, 25 bp, Homo sapien
taagaccaaccgtagcgaagagcgg

SEQ ID NO: 3348388 - DNA, 25 bp, Homo sapien
cgaagagcggcatattccaaatcaa

SEQ ID NO: 3348389 - DNA, 25 bp, Homo sapien
acaagataccggcaaaagggcacga

SEQ ID NO: 3348390 - DNA, 25 bp, Homo sapien
gatacgcatgctcttaatctatgag

SEQ ID NO: 3348391 - DNA, 25 bp, Homo sapien
aagaggcattcctccaccaacaact

SEQ ID NO: 3348392 - DNA, 25 bp, Homo sapien
ccaacaactttgtcattgacatctc

SEQ ID NO: 3348393 - DNA, 25 bp, Homo sapien
caactttgtcattgacatctctttg

SEQ ID NO: 3348394 - DNA, 25 bp, Homo sapien
agaagaggcattcctccaccaacaa

SEQ ID NO: 3348395 - DNA, 25 bp, Homo sapien
atgcaacagacaaagtaggttttgt

SEQ ID NO: 3348396 - DNA, 25 bp, Homo sapien
tgtatgcaacagacaaagtaggttt

SEQ ID NO: 3348397 - DNA, 25 bp, Homo sapien
tatgcaacagacaaagtaggttttg

SEQ ID NO: 3348398 - DNA, 25 bp, Homo sapien
ctgtatgcaacagacaaagtaggtt

SEQ ID NO: 3348399 - DNA, 25 bp, Homo sapien
tcaggttggattccgcctgagtccc

SEQ ID NO: 3348400 - DNA, 25 bp, Homo sapien
atttactactcaggttggattccgc

SEQ ID NO: 3348401 - DNA, 25 bp, Homo sapien
tcccctgtctctggccggccagggc

SEQ ID NO: 3348402 - DNA, 25 bp, Homo sapien
tggaaaactggaatttactactcag

SEQ ID NO: 3348403 - DNA, 25 bp, Homo sapien
taaacaaatcctgagctgtggcgaa

SEQ ID NO: 3348404 - DNA, 25 bp, Homo sapien
cagagaatcgcagggtagtttccac

SEQ ID NO: 3348405 - DNA, 25 bp, Homo sapien
ggcgaaaactcaagggttgcccgca

SEQ ID NO: 3348406 - DNA, 25 bp, Homo sapien
taacaaagctgccaatagatgcggc

SEQ ID NO: 3348407 - DNA, 25 bp, Homo sapien
aacctcggggctacgcgcggcgtct

SEQ ID NO: 3348408 - DNA, 25 bp, Homo sapien
gggctccgcgctaacctcggggcta

SEQ ID NO: 3348409 - DNA, 25 bp, Homo sapien
tctccgcacggggtgaagagggaag

SEQ ID NO: 3348410 - DNA, 25 bp, Homo sapien
caaagcctggggcaattcggccgct

SEQ ID NO: 3348411 - DNA, 25 bp, Homo sapien
ggcggagcgcgcgcctggcgagcgg

SEQ ID NO: 3348412 - DNA, 25 bp, Homo sapien
cgggcggagcgcgcgcctggcgagc

SEQ ID NO: 3348413 - DNA, 25 bp, Homo sapien
gggcggagcgcgcgcctggcgagcg

SEQ ID NO: 3348414 - DNA, 25 bp, Homo sapien
gcaggcggccgatggggcgggcggg

SEQ ID NO: 3348415 - DNA, 25 bp, Homo sapien
caggcggccgatggggcgggcgggg

SEQ ID NO: 3348416 - DNA, 25 bp, Homo sapien
ctgtgggcaagaccccggtggccca

SEQ ID NO: 3348417 - DNA, 25 bp, Homo sapien
gggtgctgcgggactcgctgtgggc

SEQ ID NO: 3348418 - DNA, 25 bp, Homo sapien
gctgtcaacaggtgctgcgcagaca

SEQ ID NO: 3348419 - DNA, 25 bp, Homo sapien
tgtcaacaggtgctgcgcagacagg

SEQ ID NO: 3348420 - DNA, 25 bp, Homo sapien
ctcatcatctaaatcttctttgaat

SEQ ID NO: 3348421 - DNA, 25 bp, Homo sapien
ttccctcatcctctgtaccaccttc

SEQ ID NO: 3348422 - DNA, 25 bp, Homo sapien
caatttccctttgtgtttccctcat

SEQ ID NO: 3348423 - DNA, 25 bp, Homo sapien
tttgtttttatcagcacaatttccc

SEQ ID NO: 3348424 - DNA, 25 bp, Homo sapien
catggccccatgactctctaatgag

SEQ ID NO: 3348425 - DNA, 25 bp, Homo sapien
catttcactgaatccgttccaagct

SEQ ID NO: 3348426 - DNA, 25 bp, Homo sapien
gaggacagcagttatgaggacccca

SEQ ID NO: 3348427 - DNA, 25 bp, Homo sapien
tcacttaggagacttcccctgaact

SEQ ID NO: 3348428 - DNA, 25 bp, Homo sapien
tgtttgtggatcatcagcaggccca

SEQ ID NO: 3348429 - DNA, 25 bp, Homo sapien
ggctggccacgtgtaaatctttgtt

SEQ ID NO: 3348430 - DNA, 25 bp, Homo sapien
aaatctttgtttgtggatcatcagc

SEQ ID NO: 3348431 - DNA, 25 bp, Homo sapien
ggtcccatggctggccacgtgtaaa

SEQ ID NO: 3348432 - DNA, 25 bp, Homo sapien
cttgtagcaattccttctctgaccc

SEQ ID NO: 3348433 - DNA, 25 bp, Homo sapien
tcagtttccagacatggggacttcc

SEQ ID NO: 3348434 - DNA, 25 bp, Homo sapien
cagacatggggacttccttctaggg

SEQ ID NO: 3348435 - DNA, 25 bp, Homo sapien
ccttctaggggtgaaacttgtagca

SEQ ID NO: 3348436 - DNA, 25 bp, Homo sapien
ggttagcttatgtttggacaggaaa

SEQ ID NO: 3348437 - DNA, 25 bp, Homo sapien
aaaggttagcttatgtttggacagg

SEQ ID NO: 3348438 - DNA, 25 bp, Homo sapien
cttactgagtcaccagcaaaggtta

SEQ ID NO: 3348439 - DNA, 25 bp, Homo sapien
tgagtcaccagcaaaggttagctta

SEQ ID NO: 3348440 - DNA, 25 bp, Homo sapien
gctgccctaggatgaggaaagggtg

SEQ ID NO: 3348441 - DNA, 25 bp, Homo sapien
aggacaagttcttaagggactggtg

SEQ ID NO: 3348442 - DNA, 25 bp, Homo sapien
tcttgcaatatggaatatgggcctt

SEQ ID NO: 3348443 - DNA, 25 bp, Homo sapien
ggactggtgctcttgcaatatggaa

SEQ ID NO: 3348444 - DNA, 25 bp, Homo sapien
tcttttagtatcatttagaaaaggc

SEQ ID NO: 3348445 - DNA, 25 bp, Homo sapien
ctggagaaaaacggagccagagtgt

SEQ ID NO: 3348446 - DNA, 25 bp, Homo sapien
gagaaaaacggagccagagtgttag

SEQ ID NO: 3348447 - DNA, 25 bp, Homo sapien
aaaacggagccagagtgttaggttg

SEQ ID NO: 3348448 - DNA, 25 bp, Homo sapien
aaacggagccagagtgttaggttga

SEQ ID NO: 3348449 - DNA, 25 bp, Homo sapien
agccaagttgggactatgatttgag

SEQ ID NO: 3348450 - DNA, 25 bp, Homo sapien
atgaatggtgacagttggcttaagt

SEQ ID NO: 3348451 - DNA, 25 bp, Homo sapien
aatggtgacagttggcttaagtggc

SEQ ID NO: 3348452 - DNA, 25 bp, Homo sapien
ttgtaaataactgagctggatttgg

SEQ ID NO: 3348453 - DNA, 25 bp, Homo sapien
gtttctcgttgtatggtcccagtga

SEQ ID NO: 3348454 - DNA, 25 bp, Homo sapien
cagtgaaacccgtttctcgttgtat

SEQ ID NO: 3348455 - DNA, 25 bp, Homo sapien
agtgaaacccgtttctcgttgtatg

SEQ ID NO: 3348456 - DNA, 25 bp, Homo sapien
cccgtttctcgttgtatggtcccag

SEQ ID NO: 3348457 - DNA, 25 bp, Homo sapien
agtcgttttttacatgatcagccct

SEQ ID NO: 3348458 - DNA, 25 bp, Homo sapien
tcagtcgttttttacatgatcagcc

SEQ ID NO: 3348459 - DNA, 25 bp, Homo sapien
cagtcgttttttacatgatcagccc

SEQ ID NO: 3348460 - DNA, 25 bp, Homo sapien
agctgtgatgggttgcatgcatttt

SEQ ID NO: 3348461 - DNA, 25 bp, Homo sapien
gctgtgatgggttgcatgcattttg

SEQ ID NO: 3348462 - DNA, 25 bp, Homo sapien
cagctgtgatgggttgcatgcattt

SEQ ID NO: 3348463 - DNA, 25 bp, Homo sapien
ccagctgtgatgggttgcatgcatt

SEQ ID NO: 3348464 - DNA, 25 bp, Homo sapien
gtaaataagtacatgccttttcaaa

SEQ ID NO: 3348465 - DNA, 25 bp, Homo sapien
gggccagaactgcccttcataagct

SEQ ID NO: 3348466 - DNA, 25 bp, Homo sapien
gcctttggtgtattactgtggtctc

SEQ ID NO: 3348467 - DNA, 25 bp, Homo sapien
ctcgtaaaaatcgagtgaccacggg

SEQ ID NO: 3348468 - DNA, 25 bp, Homo sapien
tcatgcctcctatctaaaggataag

SEQ ID NO: 3348469 - DNA, 25 bp, Homo sapien
atctctccattcaacctgccattta

SEQ ID NO: 3348470 - DNA, 25 bp, Homo sapien
cattcaacctgccatttatagccat

SEQ ID NO: 3348471 - DNA, 25 bp, Homo sapien
aaggataaggtagcattttcatctc

SEQ ID NO: 3348472 - DNA, 25 bp, Homo sapien
gaagaggacatgttgtcacgaacac

SEQ ID NO: 3348473 - DNA, 25 bp, Homo sapien
cgaacacttaggacttgaaatcctg

SEQ ID NO: 3348474 - DNA, 25 bp, Homo sapien
cctggcttgtggaggatagcatgac

SEQ ID NO: 3348475 - DNA, 25 bp, Homo sapien
caataacttcgctctgacttggtaa

SEQ ID NO: 3348476 - DNA, 25 bp, Homo sapien
tgtgaagttgccagaggagaacctt

SEQ ID NO: 3348477 - DNA, 25 bp, Homo sapien
aagggagcgtccaatgttgtgaagt

SEQ ID NO: 3348478 - DNA, 25 bp, Homo sapien
gttgctgttggtctgatgagccccc

SEQ ID NO: 3348479 - DNA, 25 bp, Homo sapien
gatgagccccctctgttgtcttcaa

SEQ ID NO: 3348480 - DNA, 25 bp, Homo sapien
tatacctgttaagcccacatctcaa

SEQ ID NO: 3348481 - DNA, 25 bp, Homo sapien
taaaaagtggatgtaccttggagag

SEQ ID NO: 3348482 - DNA, 25 bp, Homo sapien
ttctgaagatggcaacagcaaatct

SEQ ID NO: 3348483 - DNA, 25 bp, Homo sapien
gtggaagacccaacatatacctgtt

SEQ ID NO: 3348484 - DNA, 25 bp, Homo sapien
ttcttgattgtcacttagcctttga

SEQ ID NO: 3348485 - DNA, 25 bp, Homo sapien
ttgattgtcacttagcctttgaata

SEQ ID NO: 3348486 - DNA, 25 bp, Homo sapien
tcttgattgtcacttagcctttgaa

SEQ ID NO: 3348487 - DNA, 25 bp, Homo sapien
tcttcttgattgtcacttagccttt

SEQ ID NO: 3348488 - DNA, 25 bp, Homo sapien
gaagcccacagtgtggactgcagaa

SEQ ID NO: 3348489 - DNA, 25 bp, Homo sapien
caacataggaactttgcctaaaagg

SEQ ID NO: 3348490 - DNA, 25 bp, Homo sapien
tggaagcactggcttggagctcaca

SEQ ID NO: 3348491 - DNA, 25 bp, Homo sapien
cagacagcatgagggcaaggacaag

SEQ ID NO: 3348492 - DNA, 25 bp, Homo sapien
tgggaaatctcaggctaagaacaac

SEQ ID NO: 3348493 - DNA, 25 bp, Homo sapien
caattatgactgctatggaaaaccc

SEQ ID NO: 3348494 - DNA, 25 bp, Homo sapien
cattgaagttaacaacggacttggg

SEQ ID NO: 3348495 - DNA, 25 bp, Homo sapien
caacagcagcaaagcgaattgatct

SEQ ID NO: 3348496 - DNA, 25 bp, Homo sapien
tccaatccaaaagtaagcactaagt

SEQ ID NO: 3348497 - DNA, 25 bp, Homo sapien
aatcgaatcctttgtagtccttcag

SEQ ID NO: 3348498 - DNA, 25 bp, Homo sapien
gccatatgtaattcagtgctattca

SEQ ID NO: 3348499 - DNA, 25 bp, Homo sapien
gagttttgttgcagctacgagtttg

SEQ ID NO: 3348500 - DNA, 25 bp, Homo sapien
tccgcatgtcgtccttgcgcaaggg

SEQ ID NO: 3348501 - DNA, 25 bp, Homo sapien
gaacgcttcaggagtccgcatgtcg

SEQ ID NO: 3348502 - DNA, 25 bp, Homo sapien
atatagaacgcttcaggagtccgca

SEQ ID NO: 3348503 - DNA, 25 bp, Homo sapien
tcaggagtccgcatgtcgtccttgc

SEQ ID NO: 3348504 - DNA, 25 bp, Homo sapien
ggctctgcgattgacatcttcctta

SEQ ID NO: 3348505 - DNA, 25 bp, Homo sapien
tctgtgttatttgaatcatgcctct

SEQ ID NO: 3348506 - DNA, 25 bp, Homo sapien
taagactcagtggaaaggggaattc

SEQ ID NO: 3348507 - DNA, 25 bp, Homo sapien
tcagtaactcaaacctggtgaaggc

SEQ ID NO: 3348508 - DNA, 25 bp, Homo sapien
tcaaagagggacagctgtttgggtc

SEQ ID NO: 3348509 - DNA, 25 bp, Homo sapien
ctgtcaaagagggacagctgtttgg

SEQ ID NO: 3348510 - DNA, 25 bp, Homo sapien
tggcacaggtacatgaggacctcaa

SEQ ID NO: 3348511 - DNA, 25 bp, Homo sapien
catgaggacctcaatcttgtcctgg

SEQ ID NO: 3348512 - DNA, 25 bp, Homo sapien
tttaggattcaacttggtcatggtc

SEQ ID NO: 3348513 - DNA, 25 bp, Homo sapien
gtatttgctaaatcgctgtcagtgt

SEQ ID NO: 3348514 - DNA, 25 bp, Homo sapien
aaaagtttctgattcctctgcagta

SEQ ID NO: 3348515 - DNA, 25 bp, Homo sapien
tttcttttccttcgcactgccatgt

SEQ ID NO: 3348516 - DNA, 25 bp, Homo sapien
gagttccattgccttggccgtgagc

SEQ ID NO: 3348517 - DNA, 25 bp, Homo sapien
agagttccattgccttggccgtgag

SEQ ID NO: 3348518 - DNA, 25 bp, Homo sapien
cagagttccattgccttggccgtga

SEQ ID NO: 3348519 - DNA, 25 bp, Homo sapien
tgctgccggcgcttttctttgccca

SEQ ID NO: 3348520 - DNA, 25 bp, Homo sapien
cggatgcgagacaggggcagccaga

SEQ ID NO: 3348521 - DNA, 25 bp, Homo sapien
cggctgctgccggcgcttttctttg

SEQ ID NO: 3348522 - DNA, 25 bp, Homo sapien
ctgccggcgcttttctttgcccatg

SEQ ID NO: 3348523 - DNA, 25 bp, Homo sapien
tcctccacgattcttcagttctcat

SEQ ID NO: 3348524 - DNA, 25 bp, Homo sapien
tcatcccctcatcaatgtctgacat

SEQ ID NO: 3348525 - DNA, 25 bp, Homo sapien
agttctcatcccctcatcaatgtct

SEQ ID NO: 3348526 - DNA, 25 bp, Homo sapien
ttcctccacgattcttcagttctca

SEQ ID NO: 3348527 - DNA, 25 bp, Homo sapien
gccgcgcacgcgacgcgtccacggt

SEQ ID NO: 3348528 - DNA, 25 bp, Homo sapien
cgcgacgcgtccacggtggtgcggg

SEQ ID NO: 3348529 - DNA, 25 bp, Homo sapien
tcctgccgcgagtcgcgcacgcgcg

SEQ ID NO: 3348530 - DNA, 25 bp, Homo sapien
gcctcctgccgcgagtcgcgcacgc

SEQ ID NO: 3348531 - DNA, 25 bp, Homo sapien
tatttggctgtaagttgggatgcac

SEQ ID NO: 3348532 - DNA, 25 bp, Homo sapien
taaactcctttgaggtgtctaagca

SEQ ID NO: 3348533 - DNA, 25 bp, Homo sapien
caattcaaattcatggtggcacagc

SEQ ID NO: 3348534 - DNA, 25 bp, Homo sapien
gatgtgtgctgtatgtacctgtgcc

SEQ ID NO: 3348535 - DNA, 25 bp, Homo sapien
aaagagcctggatttgtacctagaa

SEQ ID NO: 3348536 - DNA, 25 bp, Homo sapien
ttttagtggtaagcccaactgttgc

SEQ ID NO: 3348537 - DNA, 25 bp, Homo sapien
gatagtagtctcgttcctcagtggg

SEQ ID NO: 3348538 - DNA, 25 bp, Homo sapien
tgagcccattgtagacgctaaggat

SEQ ID NO: 3348539 - DNA, 25 bp, Homo sapien
catctggatatctagaaggacttgg

SEQ ID NO: 3348540 - DNA, 25 bp, Homo sapien
cttggtatctagaaggatgaactct

SEQ ID NO: 3348541 - DNA, 25 bp, Homo sapien
aactctaagatgtgtagaaagcgac

SEQ ID NO: 3348542 - DNA, 25 bp, Homo sapien
gaaagcgacatgattttgtaatggg

SEQ ID NO: 3348543 - DNA, 25 bp, Homo sapien
atccttaatgactttaatcaggttt

SEQ ID NO: 3348544 - DNA, 25 bp, Homo sapien
gaaatgacacctctgggcttgagaa

SEQ ID NO: 3348545 - DNA, 25 bp, Homo sapien
gacaagtcatttatccatacacctg

SEQ ID NO: 3348546 - DNA, 25 bp, Homo sapien
tggttgttacccttactgagctccc

SEQ ID NO: 3348547 - DNA, 25 bp, Homo sapien
tggctactggagtgaagtggacaaa

SEQ ID NO: 3348548 - DNA, 25 bp, Homo sapien
aggaaggtgtatgtccccttgttga

SEQ ID NO: 3348549 - DNA, 25 bp, Homo sapien
ggtgatccaatgctaaggaaggtgt

SEQ ID NO: 3348550 - DNA, 25 bp, Homo sapien
taagtattctttgccaatgtcaatg

SEQ ID NO: 3348551 - DNA, 25 bp, Homo sapien
gaatcatgtgtttttggtgatccaa

SEQ ID NO: 3348552 - DNA, 25 bp, Homo sapien
tgccatggtaataaacatggtccca

SEQ ID NO: 3348553 - DNA, 25 bp, Homo sapien
aagggatttatactgatactacaag

SEQ ID NO: 3348554 - DNA, 25 bp, Homo sapien
tgggattttcctgggtactctttga

SEQ ID NO: 3348555 - DNA, 25 bp, Homo sapien
gggatttatactgatactacaaggg

SEQ ID NO: 3348556 - DNA, 25 bp, Homo sapien
caaagggatttatactgatactaca

SEQ ID NO: 3348557 - DNA, 25 bp, Homo sapien
cttaagcttttcactaagtactgcg

SEQ ID NO: 3348558 - DNA, 25 bp, Homo sapien
taagtactgcgatgctcctttcccc

SEQ ID NO: 3348559 - DNA, 25 bp, Homo sapien
tgtaggatttaagccatagtaaccc

SEQ ID NO: 3348560 - DNA, 25 bp, Homo sapien
caaatgtgatctttgccattggaat

SEQ ID NO: 3348561 - DNA, 25 bp, Homo sapien
gagcaagtcaatgaggagggctcca

SEQ ID NO: 3348562 - DNA, 25 bp, Homo sapien
agtacgaaaaggagattccctatct

SEQ ID NO: 3348563 - DNA, 25 bp, Homo sapien
gcaagtcaatgaggagggctccact

SEQ ID NO: 3348564 - DNA, 25 bp, Homo sapien
gggctccacttttctgcccggtcat

SEQ ID NO: 3348565 - DNA, 25 bp, Homo sapien
cagatatgcaattacaactttgccc

SEQ ID NO: 3348566 - DNA, 25 bp, Homo sapien
tctctgtcctaaagtgaggcaataa

SEQ ID NO: 3348567 - DNA, 25 bp, Homo sapien
tcaaactaggtatattagaatgacc

SEQ ID NO: 3348568 - DNA, 25 bp, Homo sapien
gaatgacctaaagtaatatacacct

SEQ ID NO: 3348569 - DNA, 25 bp, Homo sapien
gatggttgaccgtattctgtttcac

SEQ ID NO: 3348570 - DNA, 25 bp, Homo sapien
tgtgcaggcatctgatggttgaccg

SEQ ID NO: 3348571 - DNA, 25 bp, Homo sapien
gtgatcctgtccgttttctggtatt

SEQ ID NO: 3348572 - DNA, 25 bp, Homo sapien
tcatgtgtgatgtggcctctatcat

SEQ ID NO: 3348573 - DNA, 25 bp, Homo sapien
aggaatccaacttacgagggatgtg

SEQ ID NO: 3348574 - DNA, 25 bp, Homo sapien
ccaacttacgagggatgtgaaggac

SEQ ID NO: 3348575 - DNA, 25 bp, Homo sapien
ctcttcaaggagaactacaaaccac

SEQ ID NO: 3348576 - DNA, 25 bp, Homo sapien
cctaggaatccaacttacgagggat

SEQ ID NO: 3348577 - DNA, 25 bp, Homo sapien
attcaggtttgccataagtgttctt

SEQ ID NO: 3348578 - DNA, 25 bp, Homo sapien
cataagtgttcttgctgcgaatggg

SEQ ID NO: 3348579 - DNA, 25 bp, Homo sapien
tgttcttgctgcgaatgggatgaga

SEQ ID NO: 3348580 - DNA, 25 bp, Homo sapien
gtttgccataagtgttcttgctgcg

SEQ ID NO: 3348581 - DNA, 25 bp, Homo sapien
cccaaattgctagtagtttctgtaa

SEQ ID NO: 3348582 - DNA, 25 bp, Homo sapien
ccagcagtttcccaaattgctagta

SEQ ID NO: 3348583 - DNA, 25 bp, Homo sapien
caggagggattgttgccagcagttt

SEQ ID NO: 3348584 - DNA, 25 bp, Homo sapien
gctagtagtttctgtaagtttcgga

SEQ ID NO: 3348585 - DNA, 25 bp, Homo sapien
tatcaaaagtcataacagacagccc

SEQ ID NO: 3348586 - DNA, 25 bp, Homo sapien
agggataggccttctctagttagta

SEQ ID NO: 3348587 - DNA, 25 bp, Homo sapien
gaagggctgcctgatgatgactcag

SEQ ID NO: 3348588 - DNA, 25 bp, Homo sapien
ctggctgagcagttctgcgatttga

SEQ ID NO: 3348589 - DNA, 25 bp, Homo sapien
caaattagagcacggtgtgaaagtc

SEQ ID NO: 3348590 - DNA, 25 bp, Homo sapien
catgggtcgctcaaatggagaccaa

SEQ ID NO: 3348591 - DNA, 25 bp, Homo sapien
tttacacttgatgggcatgggtcgc

SEQ ID NO: 3348592 - DNA, 25 bp, Homo sapien
gtagtttaaccacctatcagccgtg

SEQ ID NO: 3348593 - DNA, 25 bp, Homo sapien
tacgcataatgaataccacagccaa

SEQ ID NO: 3348594 - DNA, 25 bp, Homo sapien
catggcagatagagattacttacac

SEQ ID NO: 3348595 - DNA, 25 bp, Homo sapien
gggaaatccctatgactatacctaa

SEQ ID NO: 3348596 - DNA, 25 bp, Homo sapien
caacagcccattatattcaggatgc

SEQ ID NO: 3348597 - DNA, 25 bp, Homo sapien
tctggactatcattggcatttgatg

SEQ ID NO: 3348598 - DNA, 25 bp, Homo sapien
atgcacatatctggactatcattgg

SEQ ID NO: 3348599 - DNA, 25 bp, Homo sapien
gcatttgatgtatacgagtcccctc

SEQ ID NO: 3348600 - DNA, 25 bp, Homo sapien
gatgtatacgagtcccctcgtcggg

SEQ ID NO: 3348601 - DNA, 25 bp, Homo sapien
actggttccccgttttctatgatga

SEQ ID NO: 3348602 - DNA, 25 bp, Homo sapien
tccgtgtcttaagtctaggccctca

SEQ ID NO: 3348603 - DNA, 25 bp, Homo sapien
ttaaccctggcaaccgtatcactga

SEQ ID NO: 3348604 - DNA, 25 bp, Homo sapien
cacacttctatacgtttggcaatgc

SEQ ID NO: 3348605 - DNA, 25 bp, Homo sapien
tcctcactatggatattgacgaggc

SEQ ID NO: 3348606 - DNA, 25 bp, Homo sapien
gaagtggatgcttagagctctgcta

SEQ ID NO: 3348607 - DNA, 25 bp, Homo sapien
aaattataccatgcctaataccagg

SEQ ID NO: 3348608 - DNA, 25 bp, Homo sapien
gacgaggcaatttgcatagagacaa

SEQ ID NO: 3348609 - DNA, 25 bp, Homo sapien
tatgttcccctttagcttatagctt

SEQ ID NO: 3348610 - DNA, 25 bp, Homo sapien
tatggtcaagccaaaagatctttgc

SEQ ID NO: 3348611 - DNA, 25 bp, Homo sapien
gggtatataccttatagtgagaaag

SEQ ID NO: 3348612 - DNA, 25 bp, Homo sapien
agctacaccagctactccattatgg

SEQ ID NO: 3348613 - DNA, 25 bp, Homo sapien
tcaactatgtagaaagccccaaaca

SEQ ID NO: 3348614 - DNA, 25 bp, Homo sapien
agaaccgattcaagatctcaaagcc

SEQ ID NO: 3348615 - DNA, 25 bp, Homo sapien
gaggatagctacaattgagagacag

SEQ ID NO: 3348616 - DNA, 25 bp, Homo sapien
gcacttcactaataggacaaccagg

SEQ ID NO: 3348617 - DNA, 25 bp, Homo sapien
tatgtaatcataactgtccctgagc

SEQ ID NO: 3348618 - DNA, 25 bp, Homo sapien
caaaacaccgttagcgatctgatca

SEQ ID NO: 3348619 - DNA, 25 bp, Homo sapien
tcagtgtgggatgtacagacccatg

SEQ ID NO: 3348620 - DNA, 25 bp, Homo sapien
ggcacagtactgctagcctgcgctc

SEQ ID NO: 3348621 - DNA, 25 bp, Homo sapien
tctgactgtttatgaaggctagtga

SEQ ID NO: 3348622 - DNA, 25 bp, Homo sapien
cataaattaatttggagagatttga

SEQ ID NO: 3348623 - DNA, 25 bp, Homo sapien
gaccagttcttgttaagattattac

SEQ ID NO: 3348624 - DNA, 25 bp, Homo sapien
gatacattcagtctacttttgtgct

SEQ ID NO: 3348625 - DNA, 25 bp, Homo sapien
attcatatgaccactgaaacctcag

SEQ ID NO: 3348626 - DNA, 25 bp, Homo sapien
tgatttcatttacgttccttcttga

SEQ ID NO: 3348627 - DNA, 25 bp, Homo sapien
gttagaagctctttggataatacac

SEQ ID NO: 3348628 - DNA, 25 bp, Homo sapien
gttagctacagtaatttgtgcacca

SEQ ID NO: 3348629 - DNA, 25 bp, Homo sapien
taaagccactagtattctcagagaa

SEQ ID NO: 3348630 - DNA, 25 bp, Homo sapien
tttaccaacactggagaatcaccca

SEQ ID NO: 3348631 - DNA, 25 bp, Homo sapien
tgcaatggaatgaaactttaccaac

SEQ ID NO: 3348632 - DNA, 25 bp, Homo sapien
gaatcacccatcagcaatgtaatga

SEQ ID NO: 3348633 - DNA, 25 bp, Homo sapien
tcacataagccctgtcattttcgtg

SEQ ID NO: 3348634 - DNA, 25 bp, Homo sapien
tcattttcgtgaggccatttccaag

SEQ ID NO: 3348635 - DNA, 25 bp, Homo sapien
ggctgtggtcgtattgtcaggaaaa

SEQ ID NO: 3348636 - DNA, 25 bp, Homo sapien
ccaagaagaaggctgtggtcgtatt

SEQ ID NO: 3348637 - DNA, 25 bp, Homo sapien
cagatcacccaatgtgatgaacaac

SEQ ID NO: 3348638 - DNA, 25 bp, Homo sapien
gaacaactgtccactaagaataata

SEQ ID NO: 3348639 - DNA, 25 bp, Homo sapien
gtgatgaacaactgtccactaagaa

SEQ ID NO: 3348640 - DNA, 25 bp, Homo sapien
atatgagaccgcagatcacccaatg

SEQ ID NO: 3348641 - DNA, 25 bp, Homo sapien
ttagttgtaaacatcactgcctcag

SEQ ID NO: 3348642 - DNA, 25 bp, Homo sapien
tgtaaacatcactgcctcagaccag

SEQ ID NO: 3348643 - DNA, 25 bp, Homo sapien
gtaaacatcactgcctcagaccagc

SEQ ID NO: 3348644 - DNA, 25 bp, Homo sapien
gttgtaaacatcactgcctcagacc

SEQ ID NO: 3348645 - DNA, 25 bp, Homo sapien
tacagaagcttggagtaattggacc

SEQ ID NO: 3348646 - DNA, 25 bp, Homo sapien
cagaagcttggagtaattggaccat

SEQ ID NO: 3348647 - DNA, 25 bp, Homo sapien
attacagaagcttggagtaattgga

SEQ ID NO: 3348648 - DNA, 25 bp, Homo sapien
aaattacagaagcttggagtaattg

SEQ ID NO: 3348649 - DNA, 25 bp, Homo sapien
tctggagacggtaatagagtttcga

SEQ ID NO: 3348650 - DNA, 25 bp, Homo sapien
tagagtttcgagtcctttgtctcac

SEQ ID NO: 3348651 - DNA, 25 bp, Homo sapien
cggtaatagagtttcgagtcctttg

SEQ ID NO: 3348652 - DNA, 25 bp, Homo sapien
aggccactctggagacggtaataga

SEQ ID NO: 3348653 - DNA, 25 bp, Homo sapien
ctgcttatcaaaatcctttttatcc

SEQ ID NO: 3348654 - DNA, 25 bp, Homo sapien
gcttatcaaaatcctttttatccat

SEQ ID NO: 3348655 - DNA, 25 bp, Homo sapien
tgcttatcaaaatcctttttatcca

SEQ ID NO: 3348656 - DNA, 25 bp, Homo sapien
tctaagaatgcatatacactacaaa

SEQ ID NO: 3348657 - DNA, 25 bp, Homo sapien
taatgcaacatattagacttttctg

SEQ ID NO: 3348658 - DNA, 25 bp, Homo sapien
aagatgacaagcctccttctagacc

SEQ ID NO: 3348659 - DNA, 25 bp, Homo sapien
tccttctagaccaattatgtaactc

SEQ ID NO: 3348660 - DNA, 25 bp, Homo sapien
ctttggaaatatcataatggaaatc

SEQ ID NO: 3348661 - DNA, 25 bp, Homo sapien
tggaaatatcataatggaaatctaa

SEQ ID NO: 3348662 - DNA, 25 bp, Homo sapien
tttggaaatatcataatggaaatct

SEQ ID NO: 3348663 - DNA, 25 bp, Homo sapien
gaaatatcataatggaaatctaaag

SEQ ID NO: 3348664 - DNA, 25 bp, Homo sapien
tcacaggatgaaattgtgagtgcag

SEQ ID NO: 3348665 - DNA, 25 bp, Homo sapien
tttatcacaggatgaaattgtgagt

SEQ ID NO: 3348666 - DNA, 25 bp, Homo sapien
ttgtgagtgcagacaaagctgccaa

SEQ ID NO: 3348667 - DNA, 25 bp, Homo sapien
tgtgagtgcagacaaagctgccaag

SEQ ID NO: 3348668 - DNA, 25 bp, Homo sapien
tactgggctagaccaagaatccctc

SEQ ID NO: 3348669 - DNA, 25 bp, Homo sapien
tgatgactaggtcacacattagggt

SEQ ID NO: 3348670 - DNA, 25 bp, Homo sapien
ggtatctgaagatggaaacctgctg

SEQ ID NO: 3348671 - DNA, 25 bp, Homo sapien
cctccaggcagtggtaatatgcatc

SEQ ID NO: 3348672 - DNA, 25 bp, Homo sapien
ttctccattgagtttgtccattctt

SEQ ID NO: 3348673 - DNA, 25 bp, Homo sapien
ccattcttctccattaggccaaaat

SEQ ID NO: 3348674 - DNA, 25 bp, Homo sapien
acatctgtggttcttaatactatct

SEQ ID NO: 3348675 - DNA, 25 bp, Homo sapien
tcttctccattaggccaaaatacac

SEQ ID NO: 3348676 - DNA, 25 bp, Homo sapien
ggacaatacgactggcggccagaag

SEQ ID NO: 3348677 - DNA, 25 bp, Homo sapien
acgactggcggccagaagaccagga

SEQ ID NO: 3348678 - DNA, 25 bp, Homo sapien
agagggacaatacgactggcggcca

SEQ ID NO: 3348679 - DNA, 25 bp, Homo sapien
tcacagagggacaatacgactggcg

SEQ ID NO: 3348680 - DNA, 25 bp, Homo sapien
gatacctacacattgagctctaata

SEQ ID NO: 3348681 - DNA, 25 bp, Homo sapien
gctctaataacaatggtgtatgtga

SEQ ID NO: 3348682 - DNA, 25 bp, Homo sapien
gaaatggataactctctctatctat

SEQ ID NO: 3348683 - DNA, 25 bp, Homo sapien
gcattccaggttccagaaatggata

SEQ ID NO: 3348684 - DNA, 25 bp, Homo sapien
acttcgccagcatgttttgcagcag

SEQ ID NO: 3348685 - DNA, 25 bp, Homo sapien
atgggacttcgccagcatgttttgc

SEQ ID NO: 3348686 - DNA, 25 bp, Homo sapien
tgctgaggtgccgtctgcactctga

SEQ ID NO: 3348687 - DNA, 25 bp, Homo sapien
gaggtgccgtctgcactctgagacc

SEQ ID NO: 3348688 - DNA, 25 bp, Homo sapien
tacaacttcatgcagctcatagtct

SEQ ID NO: 3348689 - DNA, 25 bp, Homo sapien
ctgtacaacttcatgcagctcatag

SEQ ID NO: 3348690 - DNA, 25 bp, Homo sapien
caacttcatgcagctcatagtctga

SEQ ID NO: 3348691 - DNA, 25 bp, Homo sapien
tgtacaacttcatgcagctcatagt

SEQ ID NO: 3348692 - DNA, 25 bp, Homo sapien
gagtccccaggtagcttaactgttg

SEQ ID NO: 3348693 - DNA, 25 bp, Homo sapien
ggctcagagtcaatgatgtgggtta

SEQ ID NO: 3348694 - DNA, 25 bp, Homo sapien
ctgctgctgagtcttagaggctcag

SEQ ID NO: 3348695 - DNA, 25 bp, Homo sapien
tcaatgatgtgggttattgagtccc

SEQ ID NO: 3348696 - DNA, 25 bp, Homo sapien
cactccttagttgatgggcacgtaa

SEQ ID NO: 3348697 - DNA, 25 bp, Homo sapien
tttgagtccgttaaggaatctccat

SEQ ID NO: 3348698 - DNA, 25 bp, Homo sapien
ccatttaatggttgagtagtatctc

SEQ ID NO: 3348699 - DNA, 25 bp, Homo sapien
tgcactaattcgtattcccaccagc

SEQ ID NO: 3348700 - DNA, 25 bp, Homo sapien
ttattgatttagtcctcacctcgcc

SEQ ID NO: 3348701 - DNA, 25 bp, Homo sapien
ggaattgacatctacacattcagtg

SEQ ID NO: 3348702 - DNA, 25 bp, Homo sapien
gcgccgggcctaaattttatccata

SEQ ID NO: 3348703 - DNA, 25 bp, Homo sapien
tatcttcttaaactctccacttgga

SEQ ID NO: 3348704 - DNA, 25 bp, Homo sapien
tgtaatctcttaatatagatttgga

SEQ ID NO: 3348705 - DNA, 25 bp, Homo sapien
taatctcttaatatagatttggaaa

SEQ ID NO: 3348706 - DNA, 25 bp, Homo sapien
gtaatctcttaatatagatttggaa

SEQ ID NO: 3348707 - DNA, 25 bp, Homo sapien
ttagatgcagacattttctgtgtaa

SEQ ID NO: 3348708 - DNA, 25 bp, Homo sapien
ctgtaaggccaccatatgtctctcg

SEQ ID NO: 3348709 - DNA, 25 bp, Homo sapien
taaggccaccatatgtctctcgcct

SEQ ID NO: 3348710 - DNA, 25 bp, Homo sapien
agtcactgcttcagggatgatctca

SEQ ID NO: 3348711 - DNA, 25 bp, Homo sapien
cactgcttcagggatgatctcactc

SEQ ID NO: 3348712 - DNA, 25 bp, Homo sapien
tgaagcacatcttcctcaatcggca

SEQ ID NO: 3348713 - DNA, 25 bp, Homo sapien
aaatactgaagcacatcttcctcaa

SEQ ID NO: 3348714 - DNA, 25 bp, Homo sapien
tactgaagcacatcttcctcaatcg

SEQ ID NO: 3348715 - DNA, 25 bp, Homo sapien
gaagcacatcttcctcaatcggcat

SEQ ID NO: 3348716 - DNA, 25 bp, Homo sapien
tcatgtctctctagaattcacagcc

SEQ ID NO: 3348717 - DNA, 25 bp, Homo sapien
acttggcccattaacacagacttgt

SEQ ID NO: 3348718 - DNA, 25 bp, Homo sapien
tagtgcaaaagtggtcatagacaac

SEQ ID NO: 3348719 - DNA, 25 bp, Homo sapien
tctgtgtatagcatgagacaaaact

SEQ ID NO: 3348720 - DNA, 25 bp, Homo sapien
tctactctcttcctgaagataaact

SEQ ID NO: 3348721 - DNA, 25 bp, Homo sapien
cctgaagataaactgttggggccat

SEQ ID NO: 3348722 - DNA, 25 bp, Homo sapien
tctcttcctgaagataaactgttgg

SEQ ID NO: 3348723 - DNA, 25 bp, Homo sapien
ttcctgaagataaactgttggggcc

SEQ ID NO: 3348724 - DNA, 25 bp, Homo sapien
ctaggttggaagcttctctttcctt

SEQ ID NO: 3348725 - DNA, 25 bp, Homo sapien
tagctatgattaagagacacccaga

SEQ ID NO: 3348726 - DNA, 25 bp, Homo sapien
tacttgacagtgatatgcagagcct

SEQ ID NO: 3348727 - DNA, 25 bp, Homo sapien
aagcatgggcttgagaatctctgca

SEQ ID NO: 3348728 - DNA, 25 bp, Homo sapien
catagtcaaaggcagtcaagcctcg

SEQ ID NO: 3348729 - DNA, 25 bp, Homo sapien
tttcctctcgccttcactttccgct

SEQ ID NO: 3348730 - DNA, 25 bp, Homo sapien
tctcgccttcactttccgctatggt

SEQ ID NO: 3348731 - DNA, 25 bp, Homo sapien
cttcactttccgctatggtaacaaa

SEQ ID NO: 3348732 - DNA, 25 bp, Homo sapien
cactttccgctatggtaacaaaggc

SEQ ID NO: 3348733 - DNA, 25 bp, Homo sapien
actggttttgtaaccatagcaagga

SEQ ID NO: 3348734 - DNA, 25 bp, Homo sapien
tttaatcctggatttatcggctgag

SEQ ID NO: 3348735 - DNA, 25 bp, Homo sapien
tgtaaccatagcaaggacctccttc

SEQ ID NO: 3348736 - DNA, 25 bp, Homo sapien
cactattctggtcactaccaactgg

SEQ ID NO: 3348737 - DNA, 25 bp, Homo sapien
gggcattttagccttgaggtcactt

SEQ ID NO: 3348738 - DNA, 25 bp, Homo sapien
tttagccttgaggtcacttttttca

SEQ ID NO: 3348739 - DNA, 25 bp, Homo sapien
aggcttgtttataaataagctattt

SEQ ID NO: 3348740 - DNA, 25 bp, Homo sapien
cattttagccttgaggtcacttttt

SEQ ID NO: 3348741 - DNA, 25 bp, Homo sapien
caaatcacttggcagtcagggtcac

SEQ ID NO: 3348742 - DNA, 25 bp, Homo sapien
cactggctcttgaagcttgcagacc

SEQ ID NO: 3348743 - DNA, 25 bp, Homo sapien
cataattcccttcggcaaatcactt

SEQ ID NO: 3348744 - DNA, 25 bp, Homo sapien
cagaccaacactgcctgagaaaaag

SEQ ID NO: 3348745 - DNA, 25 bp, Homo sapien
ctactctgcagttgggtagttgttc

SEQ ID NO: 3348746 - DNA, 25 bp, Homo sapien
tactctgcagttgggtagttgttct

SEQ ID NO: 3348747 - DNA, 25 bp, Homo sapien
ctctgcagttgggtagttgttctcc

SEQ ID NO: 3348748 - DNA, 25 bp, Homo sapien
ctgcagttgggtagttgttctccag

SEQ ID NO: 3348749 - DNA, 25 bp, Homo sapien
ttggtcctgctgaatatagaagagg

SEQ ID NO: 3348750 - DNA, 25 bp, Homo sapien
tctttgctttgaacaaatgacacat

SEQ ID NO: 3348751 - DNA, 25 bp, Homo sapien
cctgctgaatatagaagaggctatc

SEQ ID NO: 3348752 - DNA, 25 bp, Homo sapien
tatctttgctttgaacaaatgacac

SEQ ID NO: 3348753 - DNA, 25 bp, Homo sapien
gacttcagattaggacctgatgcaa

SEQ ID NO: 3348754 - DNA, 25 bp, Homo sapien
gattaggacctgatgcaagaatagc

SEQ ID NO: 3348755 - DNA, 25 bp, Homo sapien
gtattcttgtagacttcagattagg

SEQ ID NO: 3348756 - DNA, 25 bp, Homo sapien
tcttgtagacttcagattaggacct

SEQ ID NO: 3348757 - DNA, 25 bp, Homo sapien
gagactactttcctaacactcagag

SEQ ID NO: 3348758 - DNA, 25 bp, Homo sapien
tacaattttccaacgctgacaagag

SEQ ID NO: 3348759 - DNA, 25 bp, Homo sapien
gttagaaatacagaaagcattcctg

SEQ ID NO: 3348760 - DNA, 25 bp, Homo sapien
gattataggtacaagggctcatgac

SEQ ID NO: 3348761 - DNA, 25 bp, Homo sapien
agcaaagtcatgaaaccaactctaa

SEQ ID NO: 3348762 - DNA, 25 bp, Homo sapien
caaagtcatgaaaccaactctaatg

SEQ ID NO: 3348763 - DNA, 25 bp, Homo sapien
gcaaagtcatgaaaccaactctaat

SEQ ID NO: 3348764 - DNA, 25 bp, Homo sapien
tcatgcagatattcactttaatctc

SEQ ID NO: 3348765 - DNA, 25 bp, Homo sapien
tgagaaccaattccaattactgtct

SEQ ID NO: 3348766 - DNA, 25 bp, Homo sapien
tttcatgcagatattcactttaatc

SEQ ID NO: 3348767 - DNA, 25 bp, Homo sapien
ttcatgcagatattcactttaatct

SEQ ID NO: 3348768 - DNA, 25 bp, Homo sapien
aagggagattatcatcactatttct

SEQ ID NO: 3348769 - DNA, 25 bp, Homo sapien
ttccttctgccacatccggtgctgt

SEQ ID NO: 3348770 - DNA, 25 bp, Homo sapien
tcatcaatgtgcctgaaaagggaga

SEQ ID NO: 3348771 - DNA, 25 bp, Homo sapien
gccaaagggaagataccagggctct

SEQ ID NO: 3348772 - DNA, 25 bp, Homo sapien
tcctatcaagttcaggcaggcaaat

SEQ ID NO: 3348773 - DNA, 25 bp, Homo sapien
caggaggtcgcttctatcactggtc

SEQ ID NO: 3348774 - DNA, 25 bp, Homo sapien
aatgctctgaaagctgaccttgggc

SEQ ID NO: 3348775 - DNA, 25 bp, Homo sapien
tcctgacagagatttaagagttcca

SEQ ID NO: 3348776 - DNA, 25 bp, Homo sapien
tgtaagcttcaaaaagtcaagaacc

SEQ ID NO: 3348777 - DNA, 25 bp, Homo sapien
cactacttcttattgggcctggaat

SEQ ID NO: 3348778 - DNA, 25 bp, Homo sapien
gagacatctttcgtccaggtgctta

SEQ ID NO: 3348779 - DNA, 25 bp, Homo sapien
tgatcactaggctaacatcagctga

SEQ ID NO: 3348780 - DNA, 25 bp, Homo sapien
gaagtccagccgatttggatctgaa

SEQ ID NO: 3348781 - DNA, 25 bp, Homo sapien
cgtggctcagcggtcataagcgtaa

SEQ ID NO: 3348782 - DNA, 25 bp, Homo sapien
tgtgaatcatcaagcccaaacgtat

SEQ ID NO: 3348783 - DNA, 25 bp, Homo sapien
cgtatggcccaacgtgataaccctt

SEQ ID NO: 3348784 - DNA, 25 bp, Homo sapien
tgttctcaccatatgcaggacttaa

SEQ ID NO: 3348785 - DNA, 25 bp, Homo sapien
aataatgattaccagagcactggga

SEQ ID NO: 3348786 - DNA, 25 bp, Homo sapien
ccagctcacatagaagaaatcatgg

SEQ ID NO: 3348787 - DNA, 25 bp, Homo sapien
tcacatcagatcttccttgggtatc

SEQ ID NO: 3348788 - DNA, 25 bp, Homo sapien
ataattttcagatgaatgctctaaa

SEQ ID NO: 3348789 - DNA, 25 bp, Homo sapien
taattttcagatgaatgctctaaat

SEQ ID NO: 3348790 - DNA, 25 bp, Homo sapien
aaacaggctatgattacaagtccaa

SEQ ID NO: 3348791 - DNA, 25 bp, Homo sapien
cgctaaaggtagcaaacattcctct

SEQ ID NO: 3348792 - DNA, 25 bp, Homo sapien
ttttcaccgctaaaggtagcaaaca

SEQ ID NO: 3348793 - DNA, 25 bp, Homo sapien
taaggtaaagtatatttaatggcac

SEQ ID NO: 3348794 - DNA, 25 bp, Homo sapien
caacagcattgtagcttgagactca

SEQ ID NO: 3348795 - DNA, 25 bp, Homo sapien
tacatgaatgtgagcctagaaaagc

SEQ ID NO: 3348796 - DNA, 25 bp, Homo sapien
aaatatgccaccttggtaagacagg

SEQ ID NO: 3348797 - DNA, 25 bp, Homo sapien
gaataaaaccacagcataatcggag

SEQ ID NO: 3348798 - DNA, 25 bp, Homo sapien
ttgaaactccatgtgaatatctacc

SEQ ID NO: 3348799 - DNA, 25 bp, Homo sapien
tttcagcaataacagacgtaaccgt

SEQ ID NO: 3348800 - DNA, 25 bp, Homo sapien
gacataaagatgcaacacatgaacc

SEQ ID NO: 3348801 - DNA, 25 bp, Homo sapien
cagatattgagttaaccttgaccag

SEQ ID NO: 3348802 - DNA, 25 bp, Homo sapien
tgcctcagggtagtgtagagactgc

SEQ ID NO: 3348803 - DNA, 25 bp, Homo sapien
cagtgttccaatgtagagttgcctc

SEQ ID NO: 3348804 - DNA, 25 bp, Homo sapien
tgatgctcttgcaggctgtaagcct

SEQ ID NO: 3348805 - DNA, 25 bp, Homo sapien
gaggaaaattgatcagacgcaggtt

SEQ ID NO: 3348806 - DNA, 25 bp, Homo sapien
taagtatgcatacagtgctaagtcc

SEQ ID NO: 3348807 - DNA, 25 bp, Homo sapien
taaatatatctaacaccctagccag

SEQ ID NO: 3348808 - DNA, 25 bp, Homo sapien
tgcctcattgctaaacgggcttgag

SEQ ID NO: 3348809 - DNA, 25 bp, Homo sapien
tcagatgttcagactgacacatagc

SEQ ID NO: 3348810 - DNA, 25 bp, Homo sapien
gactttcccaatacactttatcaag

SEQ ID NO: 3348811 - DNA, 25 bp, Homo sapien
tactttgaccccgtgtgcattgata

SEQ ID NO: 3348812 - DNA, 25 bp, Homo sapien
tgaagaagtttctgccgtaagtgct

SEQ ID NO: 3348813 - DNA, 25 bp, Homo sapien
tctgtgttctattacatcgataagc

SEQ ID NO: 3348814 - DNA, 25 bp, Homo sapien
tcgctggataatgtgtgctagagcc

SEQ ID NO: 3348815 - DNA, 25 bp, Homo sapien
ggcatcttccttgcgaggtctgaat

SEQ ID NO: 3348816 - DNA, 25 bp, Homo sapien
gctagagccgcagaaccttggtcat

SEQ ID NO: 3348817 - DNA, 25 bp, Homo sapien
ccttgggtcatgctttcgctggata

SEQ ID NO: 3348818 - DNA, 25 bp, Homo sapien
aatggaaaacacaaaatccaagatg

SEQ ID NO: 3348819 - DNA, 25 bp, Homo sapien
taaatggaaaacacaaaatccaaga

SEQ ID NO: 3348820 - DNA, 25 bp, Homo sapien
ctgtaaatggaaaacacaaaatcca

SEQ ID NO: 3348821 - DNA, 25 bp, Homo sapien
tgtaaatggaaaacacaaaatccaa

SEQ ID NO: 3348822 - DNA, 25 bp, Homo sapien
gaatagctgacttgccagaatctaa

SEQ ID NO: 3348823 - DNA, 25 bp, Homo sapien
ttgccagaatctaagagggccaggc

SEQ ID NO: 3348824 - DNA, 25 bp, Homo sapien
tttctgaatagctgacttgccagaa

SEQ ID NO: 3348825 - DNA, 25 bp, Homo sapien
gattttcaaagatcagtgctttctg

SEQ ID NO: 3348826 - DNA, 25 bp, Homo sapien
catgaaaaatttgcgataaatttaa

SEQ ID NO: 3348827 - DNA, 25 bp, Homo sapien
tattctctaatgcagaatcttcatg

SEQ ID NO: 3348828 - DNA, 25 bp, Homo sapien
cttcatgaaaaatttgcgataaatt

SEQ ID NO: 3348829 - DNA, 25 bp, Homo sapien
tttattattctctaatgcagaatct

SEQ ID NO: 3348830 - DNA, 25 bp, Homo sapien
ccagccttcagtggttgtaagaact

SEQ ID NO: 3348831 - DNA, 25 bp, Homo sapien
ggatatatacaaccctcctagattg

SEQ ID NO: 3348832 - DNA, 25 bp, Homo sapien
tggccaactgaccattgaaacacag

SEQ ID NO: 3348833 - DNA, 25 bp, Homo sapien
gaagacactttaccatcaacagatc

SEQ ID NO: 3348834 - DNA, 25 bp, Homo sapien
caactgctgataagttccccaggtg

SEQ ID NO: 3348835 - DNA, 25 bp, Homo sapien
gtatttcagtacaacccgattcagg

SEQ ID NO: 3348836 - DNA, 25 bp, Homo sapien
ttcagcaactgctgataagttcccc

SEQ ID NO: 3348837 - DNA, 25 bp, Homo sapien
tgggtactcggccattctgccagca

SEQ ID NO: 3348838 - DNA, 25 bp, Homo sapien
taacagaagaatgggtgtcattact

SEQ ID NO: 3348839 - DNA, 25 bp, Homo sapien
ttaacagaagaatgggtgtcattac

SEQ ID NO: 3348840 - DNA, 25 bp, Homo sapien
acagaagaatgggtgtcattacttg

SEQ ID NO: 3348841 - DNA, 25 bp, Homo sapien
aacagaagaatgggtgtcattactt

SEQ ID NO: 3348842 - DNA, 25 bp, Homo sapien
ctgaagataaagatgcatcccaaag

SEQ ID NO: 3348843 - DNA, 25 bp, Homo sapien
agaatgatggggcatgggcggccat

SEQ ID NO: 3348844 - DNA, 25 bp, Homo sapien
tgaagataaagatgcatcccaaaga

SEQ ID NO: 3348845 - DNA, 25 bp, Homo sapien
atcccaaagaatgatggggcatggg

SEQ ID NO: 3348846 - DNA, 25 bp, Homo sapien
tgcagtactggactctctagagaaa

SEQ ID NO: 3348847 - DNA, 25 bp, Homo sapien
tgatgcagtactggactctctagag

SEQ ID NO: 3348848 - DNA, 25 bp, Homo sapien
tactggactctctagagaaatctca

SEQ ID NO: 3348849 - DNA, 25 bp, Homo sapien
gactctctagagaaatctcaacaag

SEQ ID NO: 3348850 - DNA, 25 bp, Homo sapien
ggaactctcatatcctcccaggctg

SEQ ID NO: 3348851 - DNA, 25 bp, Homo sapien
tacagcatttccctggaactctcat

SEQ ID NO: 3348852 - DNA, 25 bp, Homo sapien
ccaagcgcatggaaagacacgctgc

SEQ ID NO: 3348853 - DNA, 25 bp, Homo sapien
gaatgccaagcgcatggaaagacac

SEQ ID NO: 3348854 - DNA, 25 bp, Homo sapien
ttcctgctcacagacggcagggtcc

SEQ ID NO: 3348855 - DNA, 25 bp, Homo sapien
gacggcagggtcctgttgagcccca

SEQ ID NO: 3348856 - DNA, 25 bp, Homo sapien
caggatcctgtctaggtggaaggca

SEQ ID NO: 3348857 - DNA, 25 bp, Homo sapien
cccaggatcctgtctaggtggaagg

SEQ ID NO: 3348858 - DNA, 25 bp, Homo sapien
cgcattcttcggatgtcatctttgc

SEQ ID NO: 3348859 - DNA, 25 bp, Homo sapien
ctagaggacacaggccggagccctg

SEQ ID NO: 3348860 - DNA, 25 bp, Homo sapien
tgccactgcgctgtccgccaagagt

SEQ ID NO: 3348861 - DNA, 25 bp, Homo sapien
agcaaacgggctccgctcctagagg

SEQ ID NO: 3348862 - DNA, 25 bp, Homo sapien
gcaccaacctccagggtcgctctcc

SEQ ID NO: 3348863 - DNA, 25 bp, Homo sapien
ccccgcaccaacctccagggtcgct

SEQ ID NO: 3348864 - DNA, 25 bp, Homo sapien
ccggctcgcactcccggaccccgca

SEQ ID NO: 3348865 - DNA, 25 bp, Homo sapien
ctgcaggaagtctgggcccccggct

SEQ ID NO: 3348866 - DNA, 25 bp, Homo sapien
gatattggccggcttgctgcgcttg

SEQ ID NO: 3348867 - DNA, 25 bp, Homo sapien
tggagcgtagggtaatgtacaccac

SEQ ID NO: 3348868 - DNA, 25 bp, Homo sapien
tgaaccagtttatgagctgccccgg

SEQ ID NO: 3348869 - DNA, 25 bp, Homo sapien
gaagcccaagtagatggcacacgca

SEQ ID NO: 3348870 - DNA, 25 bp, Homo sapien
ttaaattatcagtctccccaaggag

SEQ ID NO: 3348871 - DNA, 25 bp, Homo sapien
cagttggctcctgctaatgtgatgc

SEQ ID NO: 3348872 - DNA, 25 bp, Homo sapien
tccgcttcgggatataagtggtctc

SEQ ID NO: 3348873 - DNA, 25 bp, Homo sapien
gatgcatggtttcctgacttcagct

SEQ ID NO: 3348874 - DNA, 25 bp, Homo sapien
gaatgtaatccttgactctaatgca

SEQ ID NO: 3348875 - DNA, 25 bp, Homo sapien
catatttcatggtcaagagtgttcc

SEQ ID NO: 3348876 - DNA, 25 bp, Homo sapien
gcttggctccaggaagaatgtaatc

SEQ ID NO: 3348877 - DNA, 25 bp, Homo sapien
gagccctctagtgtcctgttcgcaa

SEQ ID NO: 3348878 - DNA, 25 bp, Homo sapien
catcttggccgtttcatttgtcttc

SEQ ID NO: 3348879 - DNA, 25 bp, Homo sapien
accatcttggccgtttcatttgtct

SEQ ID NO: 3348880 - DNA, 25 bp, Homo sapien
tttatagtgtgcaattgcacggtgc

SEQ ID NO: 3348881 - DNA, 25 bp, Homo sapien
gaaagacatttatagtgtgcaattg

SEQ ID NO: 3348882 - DNA, 25 bp, Homo sapien
tgctgtctgcgcaagctgccttctc

SEQ ID NO: 3348883 - DNA, 25 bp, Homo sapien
ggaagtcgcctctatccaaaggcct

SEQ ID NO: 3348884 - DNA, 25 bp, Homo sapien
tcttgcagctcacgagcctgggaag

SEQ ID NO: 3348885 - DNA, 25 bp, Homo sapien
gactgcgtgcccgatttccgggctc

SEQ ID NO: 3348886 - DNA, 25 bp, Homo sapien
caaggtggtaggctgccagtggcca

SEQ ID NO: 3348887 - DNA, 25 bp, Homo sapien
accaaggtggtaggctgccagtggc

SEQ ID NO: 3348888 - DNA, 25 bp, Homo sapien
ctgcccacgggagcatgaccaaggt

SEQ ID NO: 3348889 - DNA, 25 bp, Homo sapien
gaccaaggtggtaggctgccagtgg

SEQ ID NO: 3348890 - DNA, 25 bp, Homo sapien
catttcttctagtaatagaccccat

SEQ ID NO: 3348891 - DNA, 25 bp, Homo sapien
ccatgggcacatgggaatagggctt

SEQ ID NO: 3348892 - DNA, 25 bp, Homo sapien
gcaccacagtgagaagtaacttcct

SEQ ID NO: 3348893 - DNA, 25 bp, Homo sapien
aatagggcttccaccaagagtcccg

SEQ ID NO: 3348894 - DNA, 25 bp, Homo sapien
cagagcatgagtagaacgacttcaa

SEQ ID NO: 3348895 - DNA, 25 bp, Homo sapien
tcttttccttagagattgcgcagcc

SEQ ID NO: 3348896 - DNA, 25 bp, Homo sapien
tccttagagattgcgcagcctcaga

SEQ ID NO: 3348897 - DNA, 25 bp, Homo sapien
aacctcttttccttagagattgcgc

SEQ ID NO: 3348898 - DNA, 25 bp, Homo sapien
tagagattgcgcagcctcagatgtt

SEQ ID NO: 3348899 - DNA, 25 bp, Homo sapien
tggtatccgcgccatgatgcaatct

SEQ ID NO: 3348900 - DNA, 25 bp, Homo sapien
tgcaatctgcttacagcctaaatca

SEQ ID NO: 3348901 - DNA, 25 bp, Homo sapien
catgatgcaatctgcttacagccta

SEQ ID NO: 3348902 - DNA, 25 bp, Homo sapien
gcgccatgatgcaatctgcttacag

SEQ ID NO: 3348903 - DNA, 25 bp, Homo sapien
tttcctaacggaatagcctcatacc

SEQ ID NO: 3348904 - DNA, 25 bp, Homo sapien
gcttttttgatttaggatacttctg

SEQ ID NO: 3348905 - DNA, 25 bp, Homo sapien
caatgaagtggtattggagcattat

SEQ ID NO: 3348906 - DNA, 25 bp, Homo sapien
gaactgaactagtgaggtgtgctca

SEQ ID NO: 3348907 - DNA, 25 bp, Homo sapien
cattctgtgtccgtgtgggtcctac

SEQ ID NO: 3348908 - DNA, 25 bp, Homo sapien
tgacttctatctccatgcggcgagg

SEQ ID NO: 3348909 - DNA, 25 bp, Homo sapien
caccaccgcatagtgtaaggagagg

SEQ ID NO: 3348910 - DNA, 25 bp, Homo sapien
gaattttaggtacagatgcccttga

SEQ ID NO: 3348911 - DNA, 25 bp, Homo sapien
ttggaattggtgagggagtaggtcc

SEQ ID NO: 3348912 - DNA, 25 bp, Homo sapien
gcgcttggtgcttgttatctgggaa

SEQ ID NO: 3348913 - DNA, 25 bp, Homo sapien
attttagtcactttatccaaggaca

SEQ ID NO: 3348914 - DNA, 25 bp, Homo sapien
gagggagtaggtccctattgctacc

SEQ ID NO: 3348915 - DNA, 25 bp, Homo sapien
gagggtcacttagcccaagagtgca

SEQ ID NO: 3348916 - DNA, 25 bp, Homo sapien
gtcaggcccctcattaacaaaatgg

SEQ ID NO: 3348917 - DNA, 25 bp, Homo sapien
gcagggtggcgcactactataatcc

SEQ ID NO: 3348918 - DNA, 25 bp, Homo sapien
agtcaatgtgcatgggttaaatccc

SEQ ID NO: 3348919 - DNA, 25 bp, Homo sapien
tcctatcagttaaccaagcaccatt

SEQ ID NO: 3348920 - DNA, 25 bp, Homo sapien
gtcaccccaatctaaagtacagtgg

SEQ ID NO: 3348921 - DNA, 25 bp, Homo sapien
taggtacttgaatcagtttctggac

SEQ ID NO: 3348922 - DNA, 25 bp, Homo sapien
gacaggttttgatcacactctcgag

SEQ ID NO: 3348923 - DNA, 25 bp, Homo sapien
tcaacctggcacattcactataaca

SEQ ID NO: 3348924 - DNA, 25 bp, Homo sapien
tgctcttggcatataggcattatgg

SEQ ID NO: 3348925 - DNA, 25 bp, Homo sapien
tatagctaataaagcccggagccag

SEQ ID NO: 3348926 - DNA, 25 bp, Homo sapien
gctcttacccatgtattgctcttgg

SEQ ID NO: 3348927 - DNA, 25 bp, Homo sapien
agagctcccaactgaataggcttca

SEQ ID NO: 3348928 - DNA, 25 bp, Homo sapien
ccactgtcagtacttaaggttcaaa

SEQ ID NO: 3348929 - DNA, 25 bp, Homo sapien
cctcccactgtcagtacttaaggtt

SEQ ID NO: 3348930 - DNA, 25 bp, Homo sapien
agtacttaaggttcaaatgcctcag

SEQ ID NO: 3348931 - DNA, 25 bp, Homo sapien
gggcgccagttttaggagaggcgcc

SEQ ID NO: 3348932 - DNA, 25 bp, Homo sapien
gcgccagttttaggagaggcgccaa

SEQ ID NO: 3348933 - DNA, 25 bp, Homo sapien
tgcagctctggggcgccagttttag

SEQ ID NO: 3348934 - DNA, 25 bp, Homo sapien
tctggggcgccagttttaggagagg

SEQ ID NO: 3348935 - DNA, 25 bp, Homo sapien
gccggtggaggcgatagatgagtat

SEQ ID NO: 3348936 - DNA, 25 bp, Homo sapien
agaggcccaagctcaacacaataat

SEQ ID NO: 3348937 - DNA, 25 bp, Homo sapien
aggcccaagctcaacacaataattc

SEQ ID NO: 3348938 - DNA, 25 bp, Homo sapien
gtatcagatattagcaagacatcta

SEQ ID NO: 3348939 - DNA, 25 bp, Homo sapien
tgtttcggcactttatctcatcctc

SEQ ID NO: 3348940 - DNA, 25 bp, Homo sapien
tcttttcatgtttcggcactttatc

SEQ ID NO: 3348941 - DNA, 25 bp, Homo sapien
ttcatcgccacagaaccttgtcttc

SEQ ID NO: 3348942 - DNA, 25 bp, Homo sapien
caaaagtggccccatgcaaagttgc

SEQ ID NO: 3348943 - DNA, 25 bp, Homo sapien
tgggtgcttaatgggactccactga

SEQ ID NO: 3348944 - DNA, 25 bp, Homo sapien
aaggtgccaattgcagggccactgg

SEQ ID NO: 3348945 - DNA, 25 bp, Homo sapien
ccactgggtgcttaatgggactcca

SEQ ID NO: 3348946 - DNA, 25 bp, Homo sapien
gtgatgagtgaaggtgccaattgca

SEQ ID NO: 3348947 - DNA, 25 bp, Homo sapien
tgttgtgttgttaggtgtttccagc

SEQ ID NO: 3348948 - DNA, 25 bp, Homo sapien
cagtgcctgcaatttttgttgtgtt

SEQ ID NO: 3348949 - DNA, 25 bp, Homo sapien
aggagccacttccaatcactggcac

SEQ ID NO: 3348950 - DNA, 25 bp, Homo sapien
gctcccttagggctatgtccaatag

SEQ ID NO: 3348951 - DNA, 25 bp, Homo sapien
tacatgtgaccaggtcacacttgac

SEQ ID NO: 3348952 - DNA, 25 bp, Homo sapien
cacaggcttctgagttcagtacatg

SEQ ID NO: 3348953 - DNA, 25 bp, Homo sapien
agcagggttggatgtctgatgcaaa

SEQ ID NO: 3348954 - DNA, 25 bp, Homo sapien
gcaaaggaagcccatccatagagtg

SEQ ID NO: 3348955 - DNA, 25 bp, Homo sapien
cacaaggtgtctaggttcaagactg

SEQ ID NO: 3348956 - DNA, 25 bp, Homo sapien
gcctccagtaccaagattcaaattg

SEQ ID NO: 3348957 - DNA, 25 bp, Homo sapien
caaattggctaacctgttatgggag

SEQ ID NO: 3348958 - DNA, 25 bp, Homo sapien
tagcctagcatgacctttgagattc

SEQ ID NO: 3348959 - DNA, 25 bp, Homo sapien
gactgttgacagttggctccacacc

SEQ ID NO: 3348960 - DNA, 25 bp, Homo sapien
cattagaggcaaagaccaagcgggc

SEQ ID NO: 3348961 - DNA, 25 bp, Homo sapien
tcataggagagttatagattccggg

SEQ ID NO: 3348962 - DNA, 25 bp, Homo sapien
attctgtggccggagccttcacctc

SEQ ID NO: 3348963 - DNA, 25 bp, Homo sapien
cattgctgagacttgtagaccgggg

SEQ ID NO: 3348964 - DNA, 25 bp, Homo sapien
ttccacagccccattgctgagactt

SEQ ID NO: 3348965 - DNA, 25 bp, Homo sapien
gaccggggaagatttcacctgtgtg

SEQ ID NO: 3348966 - DNA, 25 bp, Homo sapien
ccttcactcctgctcggtgggaggc

SEQ ID NO: 3348967 - DNA, 25 bp, Homo sapien
tctctctaggcaggtcagagagaaa

SEQ ID NO: 3348968 - DNA, 25 bp, Homo sapien
atctctctaggcaggtcagagagaa

SEQ ID NO: 3348969 - DNA, 25 bp, Homo sapien
ctctctaggcaggtcagagagaaag

SEQ ID NO: 3348970 - DNA, 25 bp, Homo sapien
catctctctaggcaggtcagagaga

SEQ ID NO: 3348971 - DNA, 25 bp, Homo sapien
tagaaagacatcaccatatcgggct

SEQ ID NO: 3348972 - DNA, 25 bp, Homo sapien
aaaggacttagaaagacatcaccat

SEQ ID NO: 3348973 - DNA, 25 bp, Homo sapien
gacttagaaagacatcaccatatcg

SEQ ID NO: 3348974 - DNA, 25 bp, Homo sapien
acatcaccatatcgggcttccagga

SEQ ID NO: 3348975 - DNA, 25 bp, Homo sapien
aaatatggttgcaaccattgttcca

SEQ ID NO: 3348976 - DNA, 25 bp, Homo sapien
tatggttgcaaccattgttccagtc

SEQ ID NO: 3348977 - DNA, 25 bp, Homo sapien
tggttgcaaccattgttccagtctc

SEQ ID NO: 3348978 - DNA, 25 bp, Homo sapien
ggttgcaaccattgttccagtctct

SEQ ID NO: 3348979 - DNA, 25 bp, Homo sapien
ccagggcagctcaggctgaaaaaca

SEQ ID NO: 3348980 - DNA, 25 bp, Homo sapien
cagggcagctcaggctgaaaaacag

SEQ ID NO: 3348981 - DNA, 25 bp, Homo sapien
gcagctcaggctgaaaaacagcagc

SEQ ID NO: 3348982 - DNA, 25 bp, Homo sapien
gggcagctcaggctgaaaaacagca

SEQ ID NO: 3348983 - DNA, 25 bp, Homo sapien
tccccgaaggcttagccattgccag

SEQ ID NO: 3348984 - DNA, 25 bp, Homo sapien
caaatccccgaaggcttagccattg

SEQ ID NO: 3348985 - DNA, 25 bp, Homo sapien
atccaaatccccgaaggcttagcca

SEQ ID NO: 3348986 - DNA, 25 bp, Homo sapien
aatccccgaaggcttagccattgcc

SEQ ID NO: 3348987 - DNA, 25 bp, Homo sapien
ctgctgaaggagtgcatgttccaga

SEQ ID NO: 3348988 - DNA, 25 bp, Homo sapien
gcaagccttgtactggtgtatggga

SEQ ID NO: 3348989 - DNA, 25 bp, Homo sapien
tttaagagcgagaactctatagcag

SEQ ID NO: 3348990 - DNA, 25 bp, Homo sapien
gggttcaggtatgctgagatattca

SEQ ID NO: 3348991 - DNA, 25 bp, Homo sapien
cagtgccgttcaactcctgtgtcaa

SEQ ID NO: 3348992 - DNA, 25 bp, Homo sapien
gggcaatcccaaaatggaagaagta

SEQ ID NO: 3348993 - DNA, 25 bp, Homo sapien
catcattgggttgaaagctacagga

SEQ ID NO: 3348994 - DNA, 25 bp, Homo sapien
tatcatcattgggttgaaagctaca

SEQ ID NO: 3348995 - DNA, 25 bp, Homo sapien
gctacaggaattagagtctcaagtg

SEQ ID NO: 3348996 - DNA, 25 bp, Homo sapien
gatcaagtacccactttcctgccag

SEQ ID NO: 3348997 - DNA, 25 bp, Homo sapien
tttgccccacaaaaatgaggcctgg

SEQ ID NO: 3348998 - DNA, 25 bp, Homo sapien
tatctgattcactggattggcattc

SEQ ID NO: 3348999 - DNA, 25 bp, Homo sapien
tatcttctgatctaagtgtagtagg

SEQ ID NO: 3349000 - DNA, 25 bp, Homo sapien
aagcaagatgtgctccaatatccca

SEQ ID NO: 3349001 - DNA, 25 bp, Homo sapien
gatgtgctccaatatcccatgccct

SEQ ID NO: 3349002 - DNA, 25 bp, Homo sapien
tgaaagcaagatgtgctccaatatc

SEQ ID NO: 3349003 - DNA, 25 bp, Homo sapien
gcaagatgtgctccaatatcccatg

SEQ ID NO: 3349004 - DNA, 25 bp, Homo sapien
atgagaaggagaatatacagggtca

SEQ ID NO: 3349005 - DNA, 25 bp, Homo sapien
gagaaggagaatatacagggtcatt

SEQ ID NO: 3349006 - DNA, 25 bp, Homo sapien
gaaggagaatatacagggtcattca

SEQ ID NO: 3349007 - DNA, 25 bp, Homo sapien
aagaatgagaaggagaatatacagg

SEQ ID NO: 3349008 - DNA, 25 bp, Homo sapien
ctttctccaacttgtgacctgacgc

SEQ ID NO: 3349009 - DNA, 25 bp, Homo sapien
caagctctctggtcacttgtgccat

SEQ ID NO: 3349010 - DNA, 25 bp, Homo sapien
caccaagctctctggtcacttgtgc

SEQ ID NO: 3349011 - DNA, 25 bp, Homo sapien
ttctccaacttgtgacctgacgctc

SEQ ID NO: 3349012 - DNA, 25 bp, Homo sapien
tacagcatatcactgcgtgttcaaa

SEQ ID NO: 3349013 - DNA, 25 bp, Homo sapien
cagcatatcactgcgtgttcaaagc

SEQ ID NO: 3349014 - DNA, 25 bp, Homo sapien
tctacagcatatcactgcgtgttca

SEQ ID NO: 3349015 - DNA, 25 bp, Homo sapien
agcatatcactgcgtgttcaaagca

SEQ ID NO: 3349016 - DNA, 25 bp, Homo sapien
taatataataggtataaactcactc

SEQ ID NO: 3349017 - DNA, 25 bp, Homo sapien
tctaaatcctgtagcaggaagattc

SEQ ID NO: 3349018 - DNA, 25 bp, Homo sapien
tcttcattctttatcatgatctctt

SEQ ID NO: 3349019 - DNA, 25 bp, Homo sapien
ggtataaactcactctaaatcctgt

SEQ ID NO: 3349020 - DNA, 25 bp, Homo sapien
gttgttcctgatattcagtgcagca

SEQ ID NO: 3349021 - DNA, 25 bp, Homo sapien
tattctctgctaacttaacaaccca

SEQ ID NO: 3349022 - DNA, 25 bp, Homo sapien
ttggtcagctcccaatcctcagatt

SEQ ID NO: 3349023 - DNA, 25 bp, Homo sapien
gattctgctaacttcataatatagg

SEQ ID NO: 3349024 - DNA, 25 bp, Homo sapien
ttataaaaacaaaggtcaccatgct

SEQ ID NO: 3349025 - DNA, 25 bp, Homo sapien
aaaacaaaggtcaccatgctttata

SEQ ID NO: 3349026 - DNA, 25 bp, Homo sapien
cattatttcagatccacctcaaatg

SEQ ID NO: 3349027 - DNA, 25 bp, Homo sapien
tcagatccacctcaaatgccagttc

SEQ ID NO: 3349028 - DNA, 25 bp, Homo sapien
ttcagcttgggtgacggtatgcgat

SEQ ID NO: 3349029 - DNA, 25 bp, Homo sapien
gtgacggtatgcgatcctgtctcaa

SEQ ID NO: 3349030 - DNA, 25 bp, Homo sapien
tgggaagactgcatagctcagtcgg

SEQ ID NO: 3349031 - DNA, 25 bp, Homo sapien
tagctcagtcggtctaggctgcagt

SEQ ID NO: 3349032 - DNA, 25 bp, Homo sapien
cacttgatgatgaggatatgttctg

SEQ ID NO: 3349033 - DNA, 25 bp, Homo sapien
tgatcaacaaatgcatatacagtca

SEQ ID NO: 3349034 - DNA, 25 bp, Homo sapien
tagttataccaatattgttgctaat

SEQ ID NO: 3349035 - DNA, 25 bp, Homo sapien
tctacacaaatctacgtgaaatatc

SEQ ID NO: 3349036 - DNA, 25 bp, Homo sapien
tagccaagcgtagtgccgcagagtc

SEQ ID NO: 3349037 - DNA, 25 bp, Homo sapien
ccacacttgcaggtgggcgagacca

SEQ ID NO: 3349038 - DNA, 25 bp, Homo sapien
gcagagagagtcagagcatagccaa

SEQ ID NO: 3349039 - DNA, 25 bp, Homo sapien
ccagtcagcaccgaaaccagtttaa

SEQ ID NO: 3349040 - DNA, 25 bp, Homo sapien
tcaaatgtcttcaccttaaaatgat

SEQ ID NO: 3349041 - DNA, 25 bp, Homo sapien
tctcaaatgtcttcaccttaaaatg

SEQ ID NO: 3349042 - DNA, 25 bp, Homo sapien
caaatgtcttcaccttaaaatgatc

SEQ ID NO: 3349043 - DNA, 25 bp, Homo sapien
aaatgtcttcaccttaaaatgatct

SEQ ID NO: 3349044 - DNA, 25 bp, Homo sapien
agaagaatttcggagttccactggg

SEQ ID NO: 3349045 - DNA, 25 bp, Homo sapien
attgagttctaaagccatttggtgg

SEQ ID NO: 3349046 - DNA, 25 bp, Homo sapien
ttgagtgtgacagagtagtggtcca

SEQ ID NO: 3349047 - DNA, 25 bp, Homo sapien
tgagaagggcatccttagagggggc

SEQ ID NO: 3349048 - DNA, 25 bp, Homo sapien
gaaggcaaatgagctatctttattc

SEQ ID NO: 3349049 - DNA, 25 bp, Homo sapien
gctcttgggtaaggatggaaatgaa

SEQ ID NO: 3349050 - DNA, 25 bp, Homo sapien
aatgagctatctttattcttgcacc

SEQ ID NO: 3349051 - DNA, 25 bp, Homo sapien
tggtgaagctcttgggtaaggatgg

SEQ ID NO: 3349052 - DNA, 25 bp, Homo sapien
cccagagagtctcagtggtggcact

SEQ ID NO: 3349053 - DNA, 25 bp, Homo sapien
tcccccagagagtctcagtggtggc

SEQ ID NO: 3349054 - DNA, 25 bp, Homo sapien
tttcccccagagagtctcagtggtg

SEQ ID NO: 3349055 - DNA, 25 bp, Homo sapien
agagagtctcagtggtggcactgcc

SEQ ID NO: 3349056 - DNA, 25 bp, Homo sapien
gtgggaacatcacaaagtgcttgcc

SEQ ID NO: 3349057 - DNA, 25 bp, Homo sapien
aagtgctcccttggctatttcccct

SEQ ID NO: 3349058 - DNA, 25 bp, Homo sapien
acgactgcgggaatcaggccgatga

SEQ ID NO: 3349059 - DNA, 25 bp, Homo sapien
cactgtaacggtgtggacgactgcg

SEQ ID NO: 3349060 - DNA, 25 bp, Homo sapien
ctgtggtgccaggacattgtgtggg

SEQ ID NO: 3349061 - DNA, 25 bp, Homo sapien
tgtgtgggggttctggttgcctgtt

SEQ ID NO: 3349062 - DNA, 25 bp, Homo sapien
gcctgttgtcagctgatgatggcag

SEQ ID NO: 3349063 - DNA, 25 bp, Homo sapien
cctgttgtcagctgatgatggcagc

SEQ ID NO: 3349064 - DNA, 25 bp, Homo sapien
gactgacaacggagacagctgctgc

SEQ ID NO: 3349065 - DNA, 25 bp, Homo sapien
caaagttgacatccatgctgttgga

SEQ ID NO: 3349066 - DNA, 25 bp, Homo sapien
ctggaagagtgggtgtaaacaaagt

SEQ ID NO: 3349067 - DNA, 25 bp, Homo sapien
gctgttggatccatcatggctgcga

SEQ ID NO: 3349068 - DNA, 25 bp, Homo sapien
tggtccctcactgtcatcatgcctt

SEQ ID NO: 3349069 - DNA, 25 bp, Homo sapien
gtccctcactgtcatcatgccttac

SEQ ID NO: 3349070 - DNA, 25 bp, Homo sapien
tcttcctggtccctcactgtcatca

SEQ ID NO: 3349071 - DNA, 25 bp, Homo sapien
ttcctggtccctcactgtcatcatg

SEQ ID NO: 3349072 - DNA, 25 bp, Homo sapien
tcggttctgtgccagtgcaatgtct

SEQ ID NO: 3349073 - DNA, 25 bp, Homo sapien
gccaaggtctggagcttgactgtga

SEQ ID NO: 3349074 - DNA, 25 bp, Homo sapien
gagctgttccatcggtttcttcaaa

SEQ ID NO: 3349075 - DNA, 25 bp, Homo sapien
gatgaaaccaatttacgagctgttc

SEQ ID NO: 3349076 - DNA, 25 bp, Homo sapien
tgtgacaagacgaaggaaagcagtt

SEQ ID NO: 3349077 - DNA, 25 bp, Homo sapien
tatgcaacgtacatcacacaggaga

SEQ ID NO: 3349078 - DNA, 25 bp, Homo sapien
gaatctggcccttacatagtaactg

SEQ ID NO: 3349079 - DNA, 25 bp, Homo sapien
caagtagtggcttacaactctggac

SEQ ID NO: 3349080 - DNA, 25 bp, Homo sapien
cccttggtccttaagatgaaacgca

SEQ ID NO: 3349081 - DNA, 25 bp, Homo sapien
gacaacttagcctaacggagctgga

SEQ ID NO: 3349082 - DNA, 25 bp, Homo sapien
tagttggcttaatcgttgacacaca

SEQ ID NO: 3349083 - DNA, 25 bp, Homo sapien
ctggtccgcaacaaaaatagcatcg

SEQ ID NO: 3349084 - DNA, 25 bp, Homo sapien
gccttctttcaagaggtcccgccac

SEQ ID NO: 3349085 - DNA, 25 bp, Homo sapien
tcaaagaatcatagccttctttcaa

SEQ ID NO: 3349086 - DNA, 25 bp, Homo sapien
tcagtcatcaggtttcaaagaatca

SEQ ID NO: 3349087 - DNA, 25 bp, Homo sapien
agtcatcaggtttcaaagaatcata

SEQ ID NO: 3349088 - DNA, 25 bp, Homo sapien
ggcttcaagaagtttggttaatgaa

SEQ ID NO: 3349089 - DNA, 25 bp, Homo sapien
tgtacatttgaaggcaagttcttcc

SEQ ID NO: 3349090 - DNA, 25 bp, Homo sapien
ttccacttgagctgatactgcagat

SEQ ID NO: 3349091 - DNA, 25 bp, Homo sapien
ttctgtacatttgaaggcaagttct

SEQ ID NO: 3349092 - DNA, 25 bp, Homo sapien
tacagcactggctctttcacggaac

SEQ ID NO: 3349093 - DNA, 25 bp, Homo sapien
tctttcaaagtaatcagttttcaaa

SEQ ID NO: 3349094 - DNA, 25 bp, Homo sapien
ctggctctttcacggaacctaagaa

SEQ ID NO: 3349095 - DNA, 25 bp, Homo sapien
aaactacagcactggctctttcacg

SEQ ID NO: 3349096 - DNA, 25 bp, Homo sapien
ccagctggtccaccgttgggccgct

SEQ ID NO: 3349097 - DNA, 25 bp, Homo sapien
gctggtccaccgttgggccgctgct

SEQ ID NO: 3349098 - DNA, 25 bp, Homo sapien
cctccagctggtccaccgttgggcc

SEQ ID NO: 3349099 - DNA, 25 bp, Homo sapien
agctggtccaccgttgggccgctgc

SEQ ID NO: 3349100 - DNA, 25 bp, Homo sapien
tcactgggccgcccggggaagatgc

SEQ ID NO: 3349101 - DNA, 25 bp, Homo sapien
tgggccgcccggggaagatgctgca

SEQ ID NO: 3349102 - DNA, 25 bp, Homo sapien
actgggccgcccggggaagatgctg

SEQ ID NO: 3349103 - DNA, 25 bp, Homo sapien
actcactgggccgcccggggaagat

SEQ ID NO: 3349104 - DNA, 25 bp, Homo sapien
gggcggcgaagaaacctgcaactcc

SEQ ID NO: 3349105 - DNA, 25 bp, Homo sapien
gaagaaacctgcaactcctcagggt

SEQ ID NO: 3349106 - DNA, 25 bp, Homo sapien
ggcgaagaaacctgcaactcctcag

SEQ ID NO: 3349107 - DNA, 25 bp, Homo sapien
gaaacctgcaactcctcagggtcgg

SEQ ID NO: 3349108 - DNA, 25 bp, Homo sapien
gacgtttcatttttcgggacagcca

SEQ ID NO: 3349109 - DNA, 25 bp, Homo sapien
tgggaccgcggaatccgacccgaga

SEQ ID NO: 3349110 - DNA, 25 bp, Homo sapien
gaagccgaaccgacaccaactgtct

SEQ ID NO: 3349111 - DNA, 25 bp, Homo sapien
tgtcttttaaccactcgcgcccaaa

SEQ ID NO: 3349112 - DNA, 25 bp, Homo sapien
caatcgatctcgaagggcactcgta

SEQ ID NO: 3349113 - DNA, 25 bp, Homo sapien
tttcactgcgcgtgcgtcgtgctgt

SEQ ID NO: 3349114 - DNA, 25 bp, Homo sapien
tcgtgctgtgggattcgcggacccc

SEQ ID NO: 3349115 - DNA, 25 bp, Homo sapien
ggcactcgtagagaaaactacacct

SEQ ID NO: 3349116 - DNA, 25 bp, Homo sapien
tgacccggaagcctcggctggccgt

SEQ ID NO: 3349117 - DNA, 25 bp, Homo sapien
cccggaagcctcggctggccgttgc

SEQ ID NO: 3349118 - DNA, 25 bp, Homo sapien
cctcggctggccgttgcgtcatcca

SEQ ID NO: 3349119 - DNA, 25 bp, Homo sapien
ctcggctggccgttgcgtcatccat

SEQ ID NO: 3349120 - DNA, 25 bp, Homo sapien
taagaaattcctgtgtaaagtatac

SEQ ID NO: 3349121 - DNA, 25 bp, Homo sapien
gctgggttatgtgtatttcaattga

SEQ ID NO: 3349122 - DNA, 25 bp, Homo sapien
tctccaatcaaagacaataggtaag

SEQ ID NO: 3349123 - DNA, 25 bp, Homo sapien
actaactagtgaaaatctccaatca

SEQ ID NO: 3349124 - DNA, 25 bp, Homo sapien
tgtcccacctagttagaaactatta

SEQ ID NO: 3349125 - DNA, 25 bp, Homo sapien
aaccagtggtgtcccacctagttag

SEQ ID NO: 3349126 - DNA, 25 bp, Homo sapien
aaagaaccagtggtgtcccacctag

SEQ ID NO: 3349127 - DNA, 25 bp, Homo sapien
tggtgtcccacctagttagaaacta

SEQ ID NO: 3349128 - DNA, 25 bp, Homo sapien
tctctttattcaataagatgtgtct

SEQ ID NO: 3349129 - DNA, 25 bp, Homo sapien
tatgaataatgcacataaccatttt

SEQ ID NO: 3349130 - DNA, 25 bp, Homo sapien
caacgtgacgtgaccaatatggtga

SEQ ID NO: 3349131 - DNA, 25 bp, Homo sapien
gttcaagaccaacgtgacgtgacca

SEQ ID NO: 3349132 - DNA, 25 bp, Homo sapien
cagtaaggaactaaggtgtcaaaag

SEQ ID NO: 3349133 - DNA, 25 bp, Homo sapien
ttattaagcatgaacccctatcagt

SEQ ID NO: 3349134 - DNA, 25 bp, Homo sapien
tatcagtactcctaaactgtaaaca

SEQ ID NO: 3349135 - DNA, 25 bp, Homo sapien
cacattagggatcatattcatagac

SEQ ID NO: 3349136 - DNA, 25 bp, Homo sapien
gcatatactgccttctctttatctt

SEQ ID NO: 3349137 - DNA, 25 bp, Homo sapien
tgcatatactgccttctctttatct

SEQ ID NO: 3349138 - DNA, 25 bp, Homo sapien
taagccctagtaacagaaaatctga

SEQ ID NO: 3349139 - DNA, 25 bp, Homo sapien
ggatgtcaactgagagaactcaagt

SEQ ID NO: 3349140 - DNA, 25 bp, Homo sapien
gaactcaagtacatcaagatttgcc

SEQ ID NO: 3349141 - DNA, 25 bp, Homo sapien
tgtaatacccagatctagtgtcact

SEQ ID NO: 3349142 - DNA, 25 bp, Homo sapien
tcttctggtgctatcccctgagctt

SEQ ID NO: 3349143 - DNA, 25 bp, Homo sapien
cttctggtgctatcccctgagcttt

SEQ ID NO: 3349144 - DNA, 25 bp, Homo sapien
ttatcttctggtgctatcccctgag

SEQ ID NO: 3349145 - DNA, 25 bp, Homo sapien
tatcttctggtgctatcccctgagc

SEQ ID NO: 3349146 - DNA, 25 bp, Homo sapien
ttggtatttgatgggtctagttcaa

SEQ ID NO: 3349147 - DNA, 25 bp, Homo sapien
tctgcggtacaatgctttggtattt

SEQ ID NO: 3349148 - DNA, 25 bp, Homo sapien
gagctctgcggtacaatgctttggt

SEQ ID NO: 3349149 - DNA, 25 bp, Homo sapien
tatttgatgggtctagttcaagagc

SEQ ID NO: 3349150 - DNA, 25 bp, Homo sapien
cacagcttaaagctataggttgcag

SEQ ID NO: 3349151 - DNA, 25 bp, Homo sapien
caagcaccaatattcagtacacagc

SEQ ID NO: 3349152 - DNA, 25 bp, Homo sapien
aataacagcctttgaactgtccacg

SEQ ID NO: 3349153 - DNA, 25 bp, Homo sapien
taaacaactgtcaattgctccctgc

SEQ ID NO: 3349154 - DNA, 25 bp, Homo sapien
ccacataaacaggaattactcttct

SEQ ID NO: 3349155 - DNA, 25 bp, Homo sapien
tgaaagaccacataaacaggaatta

SEQ ID NO: 3349156 - DNA, 25 bp, Homo sapien
gaccacataaacaggaattactctt

SEQ ID NO: 3349157 - DNA, 25 bp, Homo sapien
aagaccacataaacaggaattactc

SEQ ID NO: 3349158 - DNA, 25 bp, Homo sapien
tgttttaacggtattgaacttatgc

SEQ ID NO: 3349159 - DNA, 25 bp, Homo sapien
gcccagcctaaatatggattgatat

SEQ ID NO: 3349160 - DNA, 25 bp, Homo sapien
attgaacttatgcagaatgtctttg

SEQ ID NO: 3349161 - DNA, 25 bp, Homo sapien
taacggtattgaacttatgcagaat

SEQ ID NO: 3349162 - DNA, 25 bp, Homo sapien
aaaacttctgcatattttttaatag

SEQ ID NO: 3349163 - DNA, 25 bp, Homo sapien
cagttctgggatttgaaaaaagtat

SEQ ID NO: 3349164 - DNA, 25 bp, Homo sapien
tattttttaatagccatctcccagt

SEQ ID NO: 3349165 - DNA, 25 bp, Homo sapien
caatgttttttaagtcttctgttat

SEQ ID NO: 3349166 - DNA, 25 bp, Homo sapien
ttttaaatctatatccgcatcctca

SEQ ID NO: 3349167 - DNA, 25 bp, Homo sapien
ttaaatctatatccgcatcctcagg

SEQ ID NO: 3349168 - DNA, 25 bp, Homo sapien
atcttttaaatctatatccgcatcc

SEQ ID NO: 3349169 - DNA, 25 bp, Homo sapien
tcttttaaatctatatccgcatcct

SEQ ID NO: 3349170 - DNA, 25 bp, Homo sapien
gtcacttaggctgggtagtattatg

SEQ ID NO: 3349171 - DNA, 25 bp, Homo sapien
tgagtgacagcctacctcctacaag

SEQ ID NO: 3349172 - DNA, 25 bp, Homo sapien
gggcatgagcttccggtttactact

SEQ ID NO: 3349173 - DNA, 25 bp, Homo sapien
tactattcttgtcatacactgagtg

SEQ ID NO: 3349174 - DNA, 25 bp, Homo sapien
cggcctgcatttgccatgctcagta

SEQ ID NO: 3349175 - DNA, 25 bp, Homo sapien
atgctcagtaaaccctcccgatcat

SEQ ID NO: 3349176 - DNA, 25 bp, Homo sapien
gaggagttggaactgttgtgataaa

SEQ ID NO: 3349177 - DNA, 25 bp, Homo sapien
gaaccgtttgtgttgcggcctgcat

SEQ ID NO: 3349178 - DNA, 25 bp, Homo sapien
tcaccataaatactttctccacctg

SEQ ID NO: 3349179 - DNA, 25 bp, Homo sapien
acctgtcccattctgatttgagaag

SEQ ID NO: 3349180 - DNA, 25 bp, Homo sapien
gatttgagaagtctccaccctgaat

SEQ ID NO: 3349181 - DNA, 25 bp, Homo sapien
tcccattctgatttgagaagtctcc

SEQ ID NO: 3349182 - DNA, 25 bp, Homo sapien
cgcaactccaaacgcttcaggcttt

SEQ ID NO: 3349183 - DNA, 25 bp, Homo sapien
tccaaacgcttcaggcttttcacca

SEQ ID NO: 3349184 - DNA, 25 bp, Homo sapien
tctcctgtttgtcgctccccacccg

SEQ ID NO: 3349185 - DNA, 25 bp, Homo sapien
acccgtctccgcaactccaaacgct

SEQ ID NO: 3349186 - DNA, 25 bp, Homo sapien
tacacagtgcacgaaaattttccgc

SEQ ID NO: 3349187 - DNA, 25 bp, Homo sapien
cagttttgggtacgatatctgcaaa

SEQ ID NO: 3349188 - DNA, 25 bp, Homo sapien
ggtttcccagtcgtgtgtccaatgc

SEQ ID NO: 3349189 - DNA, 25 bp, Homo sapien
caaacaattctaagacaattcgacc

SEQ ID NO: 3349190 - DNA, 25 bp, Homo sapien
gggcttttccgcgagcgtcagactc

SEQ ID NO: 3349191 - DNA, 25 bp, Homo sapien
tgctccggcggaccagcctaggcag

SEQ ID NO: 3349192 - DNA, 25 bp, Homo sapien
cggagccgcattccgcccttggaat

SEQ ID NO: 3349193 - DNA, 25 bp, Homo sapien
ctccgcgaaactgagcagtcaccgg

SEQ ID NO: 3349194 - DNA, 25 bp, Homo sapien
tccacgtcaaagaagactcgagggt

SEQ ID NO: 3349195 - DNA, 25 bp, Homo sapien
caaagaagactcgagggttactggg

SEQ ID NO: 3349196 - DNA, 25 bp, Homo sapien
cgtcaaagaagactcgagggttact

SEQ ID NO: 3349197 - DNA, 25 bp, Homo sapien
gctcccctccgatgtccacgtcaaa

SEQ ID NO: 3349198 - DNA, 25 bp, Homo sapien
cagacgtgtttagtacggaatatca

SEQ ID NO: 3349199 - DNA, 25 bp, Homo sapien
gcagacgtgtttagtacggaatatc

SEQ ID NO: 3349200 - DNA, 25 bp, Homo sapien
acgtgtttagtacggaatatcagag

SEQ ID NO: 3349201 - DNA, 25 bp, Homo sapien
tgtttagtacggaatatcagagtac

SEQ ID NO: 3349202 - DNA, 25 bp, Homo sapien
taatgaagttgcgatcccagttctc

SEQ ID NO: 3349203 - DNA, 25 bp, Homo sapien
agcctgagcgactccgtgcagcgaa

SEQ ID NO: 3349204 - DNA, 25 bp, Homo sapien
tccgacgcaagaaccggaagccatg

SEQ ID NO: 3349205 - DNA, 25 bp, Homo sapien
ggaagccatggcctgacttccggca

SEQ ID NO: 3349206 - DNA, 25 bp, Homo sapien
tgggtttgtgaaatccaggagcaga

SEQ ID NO: 3349207 - DNA, 25 bp, Homo sapien
ccaaacctccatagatgggtttgtg

SEQ ID NO: 3349208 - DNA, 25 bp, Homo sapien
tcacatacctgggaagccaccaaac

SEQ ID NO: 3349209 - DNA, 25 bp, Homo sapien
cagagggacgtgttccttgattcct

SEQ ID NO: 3349210 - DNA, 25 bp, Homo sapien
catgaatagatgctccagcggtgaa

SEQ ID NO: 3349211 - DNA, 25 bp, Homo sapien
ttaagaatgacaccccaaacacttg

SEQ ID NO: 3349212 - DNA, 25 bp, Homo sapien
tgaagttctctgtatggagtactga

SEQ ID NO: 3349213 - DNA, 25 bp, Homo sapien
cttggattacccttcatatttaaga

SEQ ID NO: 3349214 - DNA, 25 bp, Homo sapien
tgttgacactttaaggatctctgag

SEQ ID NO: 3349215 - DNA, 25 bp, Homo sapien
ttttgagcctacacacctgacctat

SEQ ID NO: 3349216 - DNA, 25 bp, Homo sapien
tgacctatcctttagtgacacctcc

SEQ ID NO: 3349217 - DNA, 25 bp, Homo sapien
tctgagggcaactggcccctatctt

SEQ ID NO: 3349218 - DNA, 25 bp, Homo sapien
ctgcgtacaagaacagccagctggt

SEQ ID NO: 3349219 - DNA, 25 bp, Homo sapien
tgctcctcttgacagctgcgtacaa

SEQ ID NO: 3349220 - DNA, 25 bp, Homo sapien
gcattcaggatattgtcttattccc

SEQ ID NO: 3349221 - DNA, 25 bp, Homo sapien
tattttccaagatagggtgagtggg

SEQ ID NO: 3349222 - DNA, 25 bp, Homo sapien
ggaggtgtggccagaaccaggatga

SEQ ID NO: 3349223 - DNA, 25 bp, Homo sapien
aaccaggatgaggaagaatgtgatg

SEQ ID NO: 3349224 - DNA, 25 bp, Homo sapien
cagaaccaggatgaggaagaatgtg

SEQ ID NO: 3349225 - DNA, 25 bp, Homo sapien
aaatccaaaggaggaggtgtggcca

SEQ ID NO: 3349226 - DNA, 25 bp, Homo sapien
gctttgagtctggtaacgtgtccta

SEQ ID NO: 3349227 - DNA, 25 bp, Homo sapien
cgtgtcctacactggctgtttagag

SEQ ID NO: 3349228 - DNA, 25 bp, Homo sapien
gaagcccaacgctctaaaacataga

SEQ ID NO: 3349229 - DNA, 25 bp, Homo sapien
ttcccatcatcggaaaaattcgtga

SEQ ID NO: 3349230 - DNA, 25 bp, Homo sapien
tacgccttctgtgaacgggctcttg

SEQ ID NO: 3349231 - DNA, 25 bp, Homo sapien
gaacgggctcttgtacctgaacaaa

SEQ ID NO: 3349232 - DNA, 25 bp, Homo sapien
cctgaacaaagcgaggacccaagtt

SEQ ID NO: 3349233 - DNA, 25 bp, Homo sapien
ctagcatacgccttctgtgaacggg

SEQ ID NO: 3349234 - DNA, 25 bp, Homo sapien
gaacaaagatcggcctagctgcatg

SEQ ID NO: 3349235 - DNA, 25 bp, Homo sapien
aacaaagatcggcctagctgcatgc

SEQ ID NO: 3349236 - DNA, 25 bp, Homo sapien
agaacaaagatcggcctagctgcat

SEQ ID NO: 3349237 - DNA, 25 bp, Homo sapien
gctgagccgccggccccccgagcgc

SEQ ID NO: 3349238 - DNA, 25 bp, Homo sapien
ccccccgagcgccacggccggagct

SEQ ID NO: 3349239 - DNA, 25 bp, Homo sapien
ctgcggcggcggcatcatggccccg

SEQ ID NO: 3349240 - DNA, 25 bp, Homo sapien
cgcgctgagccgccggccccccgag

SEQ ID NO: 3349241 - DNA, 25 bp, Homo sapien
cttggctgtggcgaccggagattct

SEQ ID NO: 3349242 - DNA, 25 bp, Homo sapien
agtgtggctccggaccctccgtgac

SEQ ID NO: 3349243 - DNA, 25 bp, Homo sapien
gcttgtcagcgtggacgcgcctgat

SEQ ID NO: 3349244 - DNA, 25 bp, Homo sapien
gactgtccaggacggcgctgcctat

SEQ ID NO: 3349245 - DNA, 25 bp, Homo sapien
tttcatagctttgaggaaacaggtt

SEQ ID NO: 3349246 - DNA, 25 bp, Homo sapien
ttcatagctttgaggaaacaggttg

SEQ ID NO: 3349247 - DNA, 25 bp, Homo sapien
gacacttttgtaaccagtgcttgaa

SEQ ID NO: 3349248 - DNA, 25 bp, Homo sapien
acacagacacttttgtaaccagtgc

SEQ ID NO: 3349249 - DNA, 25 bp, Homo sapien
ttgtaaccagtgcttgaatgggagg

SEQ ID NO: 3349250 - DNA, 25 bp, Homo sapien
gctggcaccccacttgtgttcagcc

SEQ ID NO: 3349251 - DNA, 25 bp, Homo sapien
tagtacatgtgctgccaaagtgagc

SEQ ID NO: 3349252 - DNA, 25 bp, Homo sapien
gtacatgtgctgccaaagtgagcac

SEQ ID NO: 3349253 - DNA, 25 bp, Homo sapien
tcatccttgtgcagaggccctgcta

SEQ ID NO: 3349254 - DNA, 25 bp, Homo sapien
atcttctctgtttcgttccaatttt

SEQ ID NO: 3349255 - DNA, 25 bp, Homo sapien
gctcagggattcctaactgacatct

SEQ ID NO: 3349256 - DNA, 25 bp, Homo sapien
cagggattcctaactgacatctaca

SEQ ID NO: 3349257 - DNA, 25 bp, Homo sapien
ggctcagggattcctaactgacatc

SEQ ID NO: 3349258 - DNA, 25 bp, Homo sapien
gattcctaactgacatctacattct

SEQ ID NO: 3349259 - DNA, 25 bp, Homo sapien
gtttagatatgaagtagttacaaac

SEQ ID NO: 3349260 - DNA, 25 bp, Homo sapien
ttctgggccgctgtttcgtttatca

SEQ ID NO: 3349261 - DNA, 25 bp, Homo sapien
cctggtcagatagcctttcggtagc

SEQ ID NO: 3349262 - DNA, 25 bp, Homo sapien
gctttattgtagctcttctgggccg

SEQ ID NO: 3349263 - DNA, 25 bp, Homo sapien
tctttctggggaccgtgcttcgaag

SEQ ID NO: 3349264 - DNA, 25 bp, Homo sapien
gggaccgtgcttcgaagtctctggt

SEQ ID NO: 3349265 - DNA, 25 bp, Homo sapien
aagtctctggtagaaagatttgtga

SEQ ID NO: 3349266 - DNA, 25 bp, Homo sapien
gcttcgaagtctctggtagaaagat

SEQ ID NO: 3349267 - DNA, 25 bp, Homo sapien
tgatccatgagtcccgaagttagag

SEQ ID NO: 3349268 - DNA, 25 bp, Homo sapien
tgaaccgaattcctagaggtagagc

SEQ ID NO: 3349269 - DNA, 25 bp, Homo sapien
gggtaattctaacaatgagccaaac

SEQ ID NO: 3349270 - DNA, 25 bp, Homo sapien
acaggtagtgtctgaagtcccttcc

SEQ ID NO: 3349271 - DNA, 25 bp, Homo sapien
tctgacaagggttttgcagaggaca

SEQ ID NO: 3349272 - DNA, 25 bp, Homo sapien
tgacaacaagaaggccaacttcagg

SEQ ID NO: 3349273 - DNA, 25 bp, Homo sapien
gcagaaacgacatggcagcagatat

SEQ ID NO: 3349274 - DNA, 25 bp, Homo sapien
gcctcgtggctggtgcgaatatccc

SEQ ID NO: 3349275 - DNA, 25 bp, Homo sapien
acaagtatatgaccagagttagagc

SEQ ID NO: 3349276 - DNA, 25 bp, Homo sapien
cattattccgaatttactgctccat

SEQ ID NO: 3349277 - DNA, 25 bp, Homo sapien
ctgaaataatagcttgttgaagaag

SEQ ID NO: 3349278 - DNA, 25 bp, Homo sapien
tactgctccataaagcctagtgaat

SEQ ID NO: 3349279 - DNA, 25 bp, Homo sapien
gcagggcagggtcatcaagaccaaa

SEQ ID NO: 3349280 - DNA, 25 bp, Homo sapien
gtcaatggccttgtcaatcccaggg

SEQ ID NO: 3349281 - DNA, 25 bp, Homo sapien
aaaacaactatgctccagggcttca

SEQ ID NO: 3349282 - DNA, 25 bp, Homo sapien
aagttctcctaactagtcaatggcc

SEQ ID NO: 3349283 - DNA, 25 bp, Homo sapien
tctaaaagcaggttgagttatgctg

SEQ ID NO: 3349284 - DNA, 25 bp, Homo sapien
gggcaatatgagaagcacttgtgga

SEQ ID NO: 3349285 - DNA, 25 bp, Homo sapien
taagctgaagcgtactcttgcaaga

SEQ ID NO: 3349286 - DNA, 25 bp, Homo sapien
tatacagtagtaggcagtttctcct

SEQ ID NO: 3349287 - DNA, 25 bp, Homo sapien
tcttctgcttgattgatccagctat

SEQ ID NO: 3349288 - DNA, 25 bp, Homo sapien
gggacattctcctggataataacct

SEQ ID NO: 3349289 - DNA, 25 bp, Homo sapien
tttcattttttctgtaatcttgtct

SEQ ID NO: 3349290 - DNA, 25 bp, Homo sapien
cattctcctggataataacctgaag

SEQ ID NO: 3349291 - DNA, 25 bp, Homo sapien
tctgtcaattcatcaaactcaattc

SEQ ID NO: 3349292 - DNA, 25 bp, Homo sapien
gagtttaccttgtttcagatgcagc

SEQ ID NO: 3349293 - DNA, 25 bp, Homo sapien
cagatgcagccatgggtaggtcaga

SEQ ID NO: 3349294 - DNA, 25 bp, Homo sapien
tttggtaggaggaaacataagcact

SEQ ID NO: 3349295 - DNA, 25 bp, Homo sapien
gaagagtgctttagggacccactgt

SEQ ID NO: 3349296 - DNA, 25 bp, Homo sapien
tacgtgtaaataaactgtcagagct

SEQ ID NO: 3349297 - DNA, 25 bp, Homo sapien
gggacactgagctttaaatcgttga

SEQ ID NO: 3349298 - DNA, 25 bp, Homo sapien
aaatagaccaagaatgttgctgctc

SEQ ID NO: 3349299 - DNA, 25 bp, Homo sapien
ggaaaactacaggtgggtcacatgt

SEQ ID NO: 3349300 - DNA, 25 bp, Homo sapien
gatgtcacgtagtctctgaatatgt

SEQ ID NO: 3349301 - DNA, 25 bp, Homo sapien
cccataaaggctgacatagatgtca

SEQ ID NO: 3349302 - DNA, 25 bp, Homo sapien
tcataaacagtaccaacttaagagt

SEQ ID NO: 3349303 - DNA, 25 bp, Homo sapien
gaatatgtgttgcaaagaattggaa

SEQ ID NO: 3349304 - DNA, 25 bp, Homo sapien
tgccaggcaaaagaagcgcgactct

SEQ ID NO: 3349305 - DNA, 25 bp, Homo sapien
tgcctaacaagaatagcccatttgg

SEQ ID NO: 3349306 - DNA, 25 bp, Homo sapien
ttccttttttggtagcttcggcagc

SEQ ID NO: 3349307 - DNA, 25 bp, Homo sapien
tctctgatcagtgtcctcgaaagca

SEQ ID NO: 3349308 - DNA, 25 bp, Homo sapien
ttctcacagtggtaccgatttctgc

SEQ ID NO: 3349309 - DNA, 25 bp, Homo sapien
tgacttaaaagcacgacctgtttcc

SEQ ID NO: 3349310 - DNA, 25 bp, Homo sapien
caaacttgtgaagaggaccggtgcc

SEQ ID NO: 3349311 - DNA, 25 bp, Homo sapien
gaccggtgccatatctgtgccgtga

SEQ ID NO: 3349312 - DNA, 25 bp, Homo sapien
ggaaaatcgaggttctacttctgag

SEQ ID NO: 3349313 - DNA, 25 bp, Homo sapien
atcgaggttctacttctgagtggtg

SEQ ID NO: 3349314 - DNA, 25 bp, Homo sapien
gggaaaatcgaggttctacttctga

SEQ ID NO: 3349315 - DNA, 25 bp, Homo sapien
aaatcgaggttctacttctgagtgg

SEQ ID NO: 3349316 - DNA, 25 bp, Homo sapien
gacattgctggttgcccttatgggc

SEQ ID NO: 3349317 - DNA, 25 bp, Homo sapien
tcgctaatttgccagattgccttcc

SEQ ID NO: 3349318 - DNA, 25 bp, Homo sapien
tagtgacgtcaccaggacattgctg

SEQ ID NO: 3349319 - DNA, 25 bp, Homo sapien
tccagctgggcttctagttacacca

SEQ ID NO: 3349320 - DNA, 25 bp, Homo sapien
catccttgaattttaatgagttagc

SEQ ID NO: 3349321 - DNA, 25 bp, Homo sapien
catgtaattcatccttgaattttaa

SEQ ID NO: 3349322 - DNA, 25 bp, Homo sapien
tgaattttaatgagttagcctttag

SEQ ID NO: 3349323 - DNA, 25 bp, Homo sapien
ttttaatgagttagcctttaggctg

SEQ ID NO: 3349324 - DNA, 25 bp, Homo sapien
catctaccaacaatgacagtccaca

SEQ ID NO: 3349325 - DNA, 25 bp, Homo sapien
ccaacaatgacagtccacaggaact

SEQ ID NO: 3349326 - DNA, 25 bp, Homo sapien
aggaacttgcagtgttccgtaagtg

SEQ ID NO: 3349327 - DNA, 25 bp, Homo sapien
tgttccgtaagtgttccttaagaca

SEQ ID NO: 3349328 - DNA, 25 bp, Homo sapien
taaggaagtcctcatcacttgaact

SEQ ID NO: 3349329 - DNA, 25 bp, Homo sapien
tttgatatctgtgggttattgaatc

SEQ ID NO: 3349330 - DNA, 25 bp, Homo sapien
tgggttattgaatcaagagaagctt

SEQ ID NO: 3349331 - DNA, 25 bp, Homo sapien
gagaagcttgacttagttcttcata

SEQ ID NO: 3349332 - DNA, 25 bp, Homo sapien
caagagaagcttgacttagttcttc

SEQ ID NO: 3349333 - DNA, 25 bp, Homo sapien
cagagggtacacatcagtgatacac

SEQ ID NO: 3349334 - DNA, 25 bp, Homo sapien
ggcttcccattccaaacgcattact

SEQ ID NO: 3349335 - DNA, 25 bp, Homo sapien
gctttgaacacggtacagagggtac

SEQ ID NO: 3349336 - DNA, 25 bp, Homo sapien
agcatcgctggctaccaacaggctt

SEQ ID NO: 3349337 - DNA, 25 bp, Homo sapien
aaccaatttcactgacgtactcatg

SEQ ID NO: 3349338 - DNA, 25 bp, Homo sapien
cctacataggaggtgtgctgatgaa

SEQ ID NO: 3349339 - DNA, 25 bp, Homo sapien
taacgccagatgctgttctcctaca

SEQ ID NO: 3349340 - DNA, 25 bp, Homo sapien
caagcttctatttgaggcaggcctc

SEQ ID NO: 3349341 - DNA, 25 bp, Homo sapien
accagcgagatgaggcagcctatgg

SEQ ID NO: 3349342 - DNA, 25 bp, Homo sapien
tgcaccagcgagatgaggcagccta

SEQ ID NO: 3349343 - DNA, 25 bp, Homo sapien
tgggtcttggtgcaccagcgagatg

SEQ ID NO: 3349344 - DNA, 25 bp, Homo sapien
ggtcttggtgcaccagcgagatgag

SEQ ID NO: 3349345 - DNA, 25 bp, Homo sapien
gctaaagtgggagtctaactgggct

SEQ ID NO: 3349346 - DNA, 25 bp, Homo sapien
ttctgctagaaagcaaatctctgtc

SEQ ID NO: 3349347 - DNA, 25 bp, Homo sapien
cgtgcttgccagctaaaaaaggcta

SEQ ID NO: 3349348 - DNA, 25 bp, Homo sapien
aatgcattccgtttcagttgtgtga

SEQ ID NO: 3349349 - DNA, 25 bp, Homo sapien
gatagctacttagcttgtaaatgga

SEQ ID NO: 3349350 - DNA, 25 bp, Homo sapien
tgatagctacttagcttgtaaatgg

SEQ ID NO: 3349351 - DNA, 25 bp, Homo sapien
ggtgatagctacttagcttgtaaat

SEQ ID NO: 3349352 - DNA, 25 bp, Homo sapien
tttatgaaaagaggatggtgatagc

SEQ ID NO: 3349353 - DNA, 25 bp, Homo sapien
acagtagtagatgttggcttttggt

SEQ ID NO: 3349354 - DNA, 25 bp, Homo sapien
gttttcccacagtagtagatgttgg

SEQ ID NO: 3349355 - DNA, 25 bp, Homo sapien
gtagtagatgttggcttttggtatg

SEQ ID NO: 3349356 - DNA, 25 bp, Homo sapien
ttgttttcccacagtagtagatgtt

SEQ ID NO: 3349357 - DNA, 25 bp, Homo sapien
tcttaaccgtgctactggattttct

SEQ ID NO: 3349358 - DNA, 25 bp, Homo sapien
gtcttaaccgtgctactggattttc

SEQ ID NO: 3349359 - DNA, 25 bp, Homo sapien
atcagttaagctgcaccagaaagaa

SEQ ID NO: 3349360 - DNA, 25 bp, Homo sapien
tcttcaaatcagttaagctgcacca

SEQ ID NO: 3349361 - DNA, 25 bp, Homo sapien
gatgatgtggtgaggcagggtttcc

SEQ ID NO: 3349362 - DNA, 25 bp, Homo sapien
ccttgaggcagcgatgtttgaactg

SEQ ID NO: 3349363 - DNA, 25 bp, Homo sapien
atgtttgaactgtgttgtagagaat

SEQ ID NO: 3349364 - DNA, 25 bp, Homo sapien
agggtttccttgaggcagcgatgtt

SEQ ID NO: 3349365 - DNA, 25 bp, Homo sapien
gctttatctgttgagtcatagtcac

SEQ ID NO: 3349366 - DNA, 25 bp, Homo sapien
tgtcaacacatattctctggccctg

SEQ ID NO: 3349367 - DNA, 25 bp, Homo sapien
aaaggtgcccgttagtgtcaacaca

SEQ ID NO: 3349368 - DNA, 25 bp, Homo sapien
taaaaggtgcccgttagtgtcaaca

SEQ ID NO: 3349369 - DNA, 25 bp, Homo sapien
aggtgcccgttagtgtcaacacata

SEQ ID NO: 3349370 - DNA, 25 bp, Homo sapien
tggccccagtcctgtatttttgttc

SEQ ID NO: 3349371 - DNA, 25 bp, Homo sapien
ttcagacccaatgcctacagtcctc

SEQ ID NO: 3349372 - DNA, 25 bp, Homo sapien
caccttcagacccaatgcctacagt

SEQ ID NO: 3349373 - DNA, 25 bp, Homo sapien
agacccaatgcctacagtcctcagc

SEQ ID NO: 3349374 - DNA, 25 bp, Homo sapien
ccttcagacccaatgcctacagtcc

SEQ ID NO: 3349375 - DNA, 25 bp, Homo sapien
acataactcatcaccttcagactag

SEQ ID NO: 3349376 - DNA, 25 bp, Homo sapien
aatcagttgacataactcatcacct

SEQ ID NO: 3349377 - DNA, 25 bp, Homo sapien
gaacaaggagtttgactatgaacaa

SEQ ID NO: 3349378 - DNA, 25 bp, Homo sapien
tgacataactcatcaccttcagact

SEQ ID NO: 3349379 - DNA, 25 bp, Homo sapien
aatcctgggttgcaggttggaattt

SEQ ID NO: 3349380 - DNA, 25 bp, Homo sapien
caaggtcctgctaggaacctaacta

SEQ ID NO: 3349381 - DNA, 25 bp, Homo sapien
aacaacagggagctagagttctttg

SEQ ID NO: 3349382 - DNA, 25 bp, Homo sapien
gagttctttggttcagctgcctggg

SEQ ID NO: 3349383 - DNA, 25 bp, Homo sapien
tagtcagaggcactgttacagctat

SEQ ID NO: 3349384 - DNA, 25 bp, Homo sapien
tagtgagtactggagaatgaatgct

SEQ ID NO: 3349385 - DNA, 25 bp, Homo sapien
tacatttaggttataaagtcagccc

SEQ ID NO: 3349386 - DNA, 25 bp, Homo sapien
cagtcccacggattagccaactatc

SEQ ID NO: 3349387 - DNA, 25 bp, Homo sapien
aatagacctcagatgctgcatgatg

SEQ ID NO: 3349388 - DNA, 25 bp, Homo sapien
tgctgatgtgggcaaacactggaat

SEQ ID NO: 3349389 - DNA, 25 bp, Homo sapien
tgcccatcaggatggattgggtagt

SEQ ID NO: 3349390 - DNA, 25 bp, Homo sapien
aaaaggtttctctgaggatatgagt

SEQ ID NO: 3349391 - DNA, 25 bp, Homo sapien
tgaatgaccagtgaacagtcaggaa

SEQ ID NO: 3349392 - DNA, 25 bp, Homo sapien
tttgatagccagaacattacagtga

SEQ ID NO: 3349393 - DNA, 25 bp, Homo sapien
tacagtgaatgaccagtgaacagtc

SEQ ID NO: 3349394 - DNA, 25 bp, Homo sapien
tatgcgtgcatttgatagccagaac

SEQ ID NO: 3349395 - DNA, 25 bp, Homo sapien
gagccttggaacgaggtggtttgaa

SEQ ID NO: 3349396 - DNA, 25 bp, Homo sapien
agtgtggggagccttggaacgaggt

SEQ ID NO: 3349397 - DNA, 25 bp, Homo sapien
tcatcatgtggaaagggtacaagag

SEQ ID NO: 3349398 - DNA, 25 bp, Homo sapien
gtcatcatgtggaaagggtacaaga

SEQ ID NO: 3349399 - DNA, 25 bp, Homo sapien
ttcagtgtagaggtgccccagatgc

SEQ ID NO: 3349400 - DNA, 25 bp, Homo sapien
gaggggtgacattagagtcaggaca

SEQ ID NO: 3349401 - DNA, 25 bp, Homo sapien
tcagtgtagaggtgccccagatgct

SEQ ID NO: 3349402 - DNA, 25 bp, Homo sapien
ggtgacattagagtcaggacagcct

SEQ ID NO: 3349403 - DNA, 25 bp, Homo sapien
tattagtaacagctggctaagtcag

SEQ ID NO: 3349404 - DNA, 25 bp, Homo sapien
gctggctaagtcagcactaacttat

SEQ ID NO: 3349405 - DNA, 25 bp, Homo sapien
caaaggagtattagtaacagctggc

SEQ ID NO: 3349406 - DNA, 25 bp, Homo sapien
taaagtatcaaaggagtattagtaa

SEQ ID NO: 3349407 - DNA, 25 bp, Homo sapien
tacatcctggatagtataaagtgac

SEQ ID NO: 3349408 - DNA, 25 bp, Homo sapien
tgtcttttgaatgtgatactgtgcg

SEQ ID NO: 3349409 - DNA, 25 bp, Homo sapien
caatagccctcgatgatgattcctg

SEQ ID NO: 3349410 - DNA, 25 bp, Homo sapien
gatactgtgcggtattacatcctgg

SEQ ID NO: 3349411 - DNA, 25 bp, Homo sapien
aaatgcagttaacgtacctagccta

SEQ ID NO: 3349412 - DNA, 25 bp, Homo sapien
ggtgattcatttgcacatcagggcc

SEQ ID NO: 3349413 - DNA, 25 bp, Homo sapien
catgtcaaattgttgtgccattggg

SEQ ID NO: 3349414 - DNA, 25 bp, Homo sapien
tcagggcctgagaactactagatag

SEQ ID NO: 3349415 - DNA, 25 bp, Homo sapien
tgggacctgctggtatatccttctt

SEQ ID NO: 3349416 - DNA, 25 bp, Homo sapien
gtatatccttctttctggttccgtg

SEQ ID NO: 3349417 - DNA, 25 bp, Homo sapien
tcttttcagccctgatgatattggg

SEQ ID NO: 3349418 - DNA, 25 bp, Homo sapien
gttccgtgttcatcaaggaatccat

SEQ ID NO: 3349419 - DNA, 25 bp, Homo sapien
tagacattctgtaatagattatcca

SEQ ID NO: 3349420 - DNA, 25 bp, Homo sapien
tccaagaagcaggtattgtatagac

SEQ ID NO: 3349421 - DNA, 25 bp, Homo sapien
tcttccaagaagcaggtattgtata

SEQ ID NO: 3349422 - DNA, 25 bp, Homo sapien
gaagcaggtattgtatagacattct

SEQ ID NO: 3349423 - DNA, 25 bp, Homo sapien
tgaggtcctcgtggtacttcactaa

SEQ ID NO: 3349424 - DNA, 25 bp, Homo sapien
tgagccatgcgagctgcgcttaagg

SEQ ID NO: 3349425 - DNA, 25 bp, Homo sapien
tcagctatgcttgaggaaccttaga

SEQ ID NO: 3349426 - DNA, 25 bp, Homo sapien
gaagcatgttatgacgctgcaccga

SEQ ID NO: 3349427 - DNA, 25 bp, Homo sapien
ggcgggaatctgacttagaagtgaa

SEQ ID NO: 3349428 - DNA, 25 bp, Homo sapien
ttccacaggagctctcgaaatttag

SEQ ID NO: 3349429 - DNA, 25 bp, Homo sapien
ggagctctcgaaatttagcagtggg

SEQ ID NO: 3349430 - DNA, 25 bp, Homo sapien
agtgaaactgctgctagtaacccat

SEQ ID NO: 3349431 - DNA, 25 bp, Homo sapien
tcattagagtgtcatggcagagtca

SEQ ID NO: 3349432 - DNA, 25 bp, Homo sapien
ggatgcttgctgtcacgttgtgcct

SEQ ID NO: 3349433 - DNA, 25 bp, Homo sapien
tacatggtttgtttgcctcctagaa

SEQ ID NO: 3349434 - DNA, 25 bp, Homo sapien
gggtttaaatgtgggcatctgcccc

SEQ ID NO: 3349435 - DNA, 25 bp, Homo sapien
tagcctgggcagttaaggaagaccc

SEQ ID NO: 3349436 - DNA, 25 bp, Homo sapien
tatgattgtgtctctacactctagc

SEQ ID NO: 3349437 - DNA, 25 bp, Homo sapien
aaaacagtgtttgcagtggctcaca

SEQ ID NO: 3349438 - DNA, 25 bp, Homo sapien
acatagagagacccttttattatct

SEQ ID NO: 3349439 - DNA, 25 bp, Homo sapien
tgagagactgcctagagaaggaccc

SEQ ID NO: 3349440 - DNA, 25 bp, Homo sapien
tggattccgaagacgacgacgatga

SEQ ID NO: 3349441 - DNA, 25 bp, Homo sapien
aaagcgaggctggtgatatggacct

SEQ ID NO: 3349442 - DNA, 25 bp, Homo sapien
gaaggacccaattgaccggacagat

SEQ ID NO: 3349443 - DNA, 25 bp, Homo sapien
gcagcaatcttcgagctcccactgt

SEQ ID NO: 3349444 - DNA, 25 bp, Homo sapien
tcacattctgaggacggtggaccag

SEQ ID NO: 3349445 - DNA, 25 bp, Homo sapien
acaagtttctgctgtttgaggcaca

SEQ ID NO: 3349446 - DNA, 25 bp, Homo sapien
caagaagacgtcctgagcattggag

SEQ ID NO: 3349447 - DNA, 25 bp, Homo sapien
caaatatgccggacagggtgtggcc

SEQ ID NO: 3349448 - DNA, 25 bp, Homo sapien
tgtctgagccttatggaggcaggac

SEQ ID NO: 3349449 - DNA, 25 bp, Homo sapien
ccaagaagacgggaagacctggctt

SEQ ID NO: 3349450 - DNA, 25 bp, Homo sapien
cgcgaagtgccctatcctggaagta

SEQ ID NO: 3349451 - DNA, 25 bp, Homo sapien
tagaacataggactgctaatctcag

SEQ ID NO: 3349452 - DNA, 25 bp, Homo sapien
gacagaaatctagctctaccacaag

SEQ ID NO: 3349453 - DNA, 25 bp, Homo sapien
aatctcagttcgctctgtgatgtca

SEQ ID NO: 3349454 - DNA, 25 bp, Homo sapien
tatataggctatggacctcatgtgc

SEQ ID NO: 3349455 - DNA, 25 bp, Homo sapien
gccattggctagagagatctgtgaa

SEQ ID NO: 3349456 - DNA, 25 bp, Homo sapien
ccccaggagacataaccgctgtgta

SEQ ID NO: 3349457 - DNA, 25 bp, Homo sapien
gtgtgcacgctggaccgctagtgac

SEQ ID NO: 3349458 - DNA, 25 bp, Homo sapien
acataaccgctgtgtactggtgtgc

SEQ ID NO: 3349459 - DNA, 25 bp, Homo sapien
gaagcaaaaactatgacactgtctg

SEQ ID NO: 3349460 - DNA, 25 bp, Homo sapien
cctaaattagtttggcagttgaagc

SEQ ID NO: 3349461 - DNA, 25 bp, Homo sapien
gggaaatgaaggcaatatcagataa

SEQ ID NO: 3349462 - DNA, 25 bp, Homo sapien
gaataactagaaactgttcccagga

SEQ ID NO: 3349463 - DNA, 25 bp, Homo sapien
cacatcgttacccacaatacagagg

SEQ ID NO: 3349464 - DNA, 25 bp, Homo sapien
caaggagtccacatcgttacccaca

SEQ ID NO: 3349465 - DNA, 25 bp, Homo sapien
gagtccacatcgttacccacaatac

SEQ ID NO: 3349466 - DNA, 25 bp, Homo sapien
ttacaaggagtccacatcgttaccc

SEQ ID NO: 3349467 - DNA, 25 bp, Homo sapien
attttttggtgtcactgaaggattt

SEQ ID NO: 3349468 - DNA, 25 bp, Homo sapien
ttaattttttggtgtcactgaagga

SEQ ID NO: 3349469 - DNA, 25 bp, Homo sapien
taattttttggtgtcactgaaggat

SEQ ID NO: 3349470 - DNA, 25 bp, Homo sapien
ttttggtgtcactgaaggattttgt

SEQ ID NO: 3349471 - DNA, 25 bp, Homo sapien
gattcttcgcaggaagagttggtga

SEQ ID NO: 3349472 - DNA, 25 bp, Homo sapien
ttcttcgcaggaagagttggtgatg

SEQ ID NO: 3349473 - DNA, 25 bp, Homo sapien
ttaatttagattcttcgcaggaaga

SEQ ID NO: 3349474 - DNA, 25 bp, Homo sapien
ttagattcttcgcaggaagagttgg

SEQ ID NO: 3349475 - DNA, 25 bp, Homo sapien
cactgaaagatgaacgtagatgtaa

SEQ ID NO: 3349476 - DNA, 25 bp, Homo sapien
tacactgaaagatgaacgtagatgt

SEQ ID NO: 3349477 - DNA, 25 bp, Homo sapien
atgcatttgtttggggaggttaaag

SEQ ID NO: 3349478 - DNA, 25 bp, Homo sapien
attttacactgaaagatgaacgtag

SEQ ID NO: 3349479 - DNA, 25 bp, Homo sapien
tccgaggacaagcttggagtgcagc

SEQ ID NO: 3349480 - DNA, 25 bp, Homo sapien
gagtgcagctaagcctttggagatg

SEQ ID NO: 3349481 - DNA, 25 bp, Homo sapien
actgttctgatcctgggaggtgcat

SEQ ID NO: 3349482 - DNA, 25 bp, Homo sapien
gtgcatttctgaggcggacagtcag

SEQ ID NO: 3349483 - DNA, 25 bp, Homo sapien
tggatatctgatcttcttagggtcc

SEQ ID NO: 3349484 - DNA, 25 bp, Homo sapien
aggcattgacggtcaccatctgcag

SEQ ID NO: 3349485 - DNA, 25 bp, Homo sapien
caccagtccatggatatctgatctt

SEQ ID NO: 3349486 - DNA, 25 bp, Homo sapien
taggcattgacggtcaccatctgca

SEQ ID NO: 3349487 - DNA, 25 bp, Homo sapien
ctgcaggtcagggaagttttcagca

SEQ ID NO: 3349488 - DNA, 25 bp, Homo sapien
tgcaggtcagggaagttttcagcat

SEQ ID NO: 3349489 - DNA, 25 bp, Homo sapien
aattactaatggggtaggagtccat

SEQ ID NO: 3349490 - DNA, 25 bp, Homo sapien
gcaattactaatggggtaggagtcc

SEQ ID NO: 3349491 - DNA, 25 bp, Homo sapien
tgcaattactaatggggtaggagtc

SEQ ID NO: 3349492 - DNA, 25 bp, Homo sapien
ctgcaattactaatggggtaggagt

SEQ ID NO: 3349493 - DNA, 25 bp, Homo sapien
cttacaagtagaagttggtcagcag

SEQ ID NO: 3349494 - DNA, 25 bp, Homo sapien
aaatagcgttgagtagaatggatgc

SEQ ID NO: 3349495 - DNA, 25 bp, Homo sapien
cagtgtagtcgctatgcagggttcc

SEQ ID NO: 3349496 - DNA, 25 bp, Homo sapien
gcacttccgtgacagggctgcagtg

SEQ ID NO: 3349497 - DNA, 25 bp, Homo sapien
tatgcagggttcctaaatagcgttg

SEQ ID NO: 3349498 - DNA, 25 bp, Homo sapien
tcacccagtattctaaatgacacca

SEQ ID NO: 3349499 - DNA, 25 bp, Homo sapien
gactaatggctctttgtggcagcca

SEQ ID NO: 3349500 - DNA, 25 bp, Homo sapien
caagtcagatattgaatcacccagt

SEQ ID NO: 3349501 - DNA, 25 bp, Homo sapien
ttttggagggcgtgccatgcgatac

SEQ ID NO: 3349502 - DNA, 25 bp, Homo sapien
catgggtcctgcttgatgctgcctc

SEQ ID NO: 3349503 - DNA, 25 bp, Homo sapien
aaggtgcttgatgatgtgaggtgaa

SEQ ID NO: 3349504 - DNA, 25 bp, Homo sapien
gcaggggtcacccaataaccagaaa

SEQ ID NO: 3349505 - DNA, 25 bp, Homo sapien
gatatgaggcttgtcggttctcagc

SEQ ID NO: 3349506 - DNA, 25 bp, Homo sapien
ggaaacactccggtgcgaggtctca

SEQ ID NO: 3349507 - DNA, 25 bp, Homo sapien
ccagaaaacagatatgaggcttgtc

SEQ ID NO: 3349508 - DNA, 25 bp, Homo sapien
tgtctggtgccttttggataaggtg

SEQ ID NO: 3349509 - DNA, 25 bp, Homo sapien
atggaaaatccgctttcctttggct

SEQ ID NO: 3349510 - DNA, 25 bp, Homo sapien
tctcaattgcaccagcatggaaaat

SEQ ID NO: 3349511 - DNA, 25 bp, Homo sapien
ggaatgtctggtgccttttggataa

SEQ ID NO: 3349512 - DNA, 25 bp, Homo sapien
gcttggtgggcactgccaagtgcat

SEQ ID NO: 3349513 - DNA, 25 bp, Homo sapien
cctgctgcttggtgggcactgccaa

SEQ ID NO: 3349514 - DNA, 25 bp, Homo sapien
ctgcttggtgggcactgccaagtgc

SEQ ID NO: 3349515 - DNA, 25 bp, Homo sapien
ctcctgctgcttggtgggcactgcc

SEQ ID NO: 3349516 - DNA, 25 bp, Homo sapien
gaaattgttgtaataggcagcagaa

SEQ ID NO: 3349517 - DNA, 25 bp, Homo sapien
ggaaattgttgtaataggcagcaga

SEQ ID NO: 3349518 - DNA, 25 bp, Homo sapien
tggaaattgttgtaataggcagcag

SEQ ID NO: 3349519 - DNA, 25 bp, Homo sapien
ctggaaattgttgtaataggcagca

SEQ ID NO: 3349520 - DNA, 25 bp, Homo sapien
tgatgtcggcgaataccttgctcat

SEQ ID NO: 3349521 - DNA, 25 bp, Homo sapien
tctcagtttgatgtcggcgaatacc

SEQ ID NO: 3349522 - DNA, 25 bp, Homo sapien
gatacgggactcattatcattattg

SEQ ID NO: 3349523 - DNA, 25 bp, Homo sapien
aataattctttgttgatacgggact

SEQ ID NO: 3349524 - DNA, 25 bp, Homo sapien
gagaaaaacaatcctcaatgccaaa

SEQ ID NO: 3349525 - DNA, 25 bp, Homo sapien
cctcttactttgccggaggaagaga

SEQ ID NO: 3349526 - DNA, 25 bp, Homo sapien
gcgaagcaacactaagagctggcct

SEQ ID NO: 3349527 - DNA, 25 bp, Homo sapien
atgccaaatggcacctgcagcgaag

SEQ ID NO: 3349528 - DNA, 25 bp, Homo sapien
gaaacttctctagggatggactata

SEQ ID NO: 3349529 - DNA, 25 bp, Homo sapien
tctctagggatggactatagaagtg

SEQ ID NO: 3349530 - DNA, 25 bp, Homo sapien
gagaaacttctctagggatggacta

SEQ ID NO: 3349531 - DNA, 25 bp, Homo sapien
gatggactatagaagtgatccctga

SEQ ID NO: 3349532 - DNA, 25 bp, Homo sapien
tcctggaggctcttgttgaagtgtg

SEQ ID NO: 3349533 - DNA, 25 bp, Homo sapien
cattggtgcaaggtctcctggaggc

SEQ ID NO: 3349534 - DNA, 25 bp, Homo sapien
ctgccctgggtctaaactcatcctg

SEQ ID NO: 3349535 - DNA, 25 bp, Homo sapien
tcctgctttatcttggcatcctctt

SEQ ID NO: 3349536 - DNA, 25 bp, Homo sapien
taccgctaagactgcacaggactct

SEQ ID NO: 3349537 - DNA, 25 bp, Homo sapien
ttttctacctttctagataccgcta

SEQ ID NO: 3349538 - DNA, 25 bp, Homo sapien
taagactgcacaggactctcttctc

SEQ ID NO: 3349539 - DNA, 25 bp, Homo sapien
tctagataccgctaagactgcacag

SEQ ID NO: 3349540 - DNA, 25 bp, Homo sapien
cagcacagttagcactagatttcct

SEQ ID NO: 3349541 - DNA, 25 bp, Homo sapien
gcacagttagcactagatttccttc

SEQ ID NO: 3349542 - DNA, 25 bp, Homo sapien
cttcagcacagttagcactagattt

SEQ ID NO: 3349543 - DNA, 25 bp, Homo sapien
tcagcacagttagcactagatttcc

SEQ ID NO: 3349544 - DNA, 25 bp, Homo sapien
ttgaagttacttagcctgtcccctc

SEQ ID NO: 3349545 - DNA, 25 bp, Homo sapien
gctgctgcttttatgcggagaatat

SEQ ID NO: 3349546 - DNA, 25 bp, Homo sapien
ggtagttgactattgtatgcgcatg

SEQ ID NO: 3349547 - DNA, 25 bp, Homo sapien
gtatttaccgtgattacagtcttgg

SEQ ID NO: 3349548 - DNA, 25 bp, Homo sapien
tctcgggacatcaactgccctgttt

SEQ ID NO: 3349549 - DNA, 25 bp, Homo sapien
cttgtgagttccttctcgggacatc

SEQ ID NO: 3349550 - DNA, 25 bp, Homo sapien
cattttggtataagggaagaacttg

SEQ ID NO: 3349551 - DNA, 25 bp, Homo sapien
tgaaatgagtagtaagcttgtgagt

SEQ ID NO: 3349552 - DNA, 25 bp, Homo sapien
gagaggatatctatacaggtttatg

SEQ ID NO: 3349553 - DNA, 25 bp, Homo sapien
tctatacaggtttatgatattcttt

SEQ ID NO: 3349554 - DNA, 25 bp, Homo sapien
ctaaagagtgtgagaggatatctat

SEQ ID NO: 3349555 - DNA, 25 bp, Homo sapien
gagtgtgagaggatatctatacagg

SEQ ID NO: 3349556 - DNA, 25 bp, Homo sapien
tctttctgcccatcccattttcccc

SEQ ID NO: 3349557 - DNA, 25 bp, Homo sapien
gagccctggttgtatgggcacccga

SEQ ID NO: 3349558 - DNA, 25 bp, Homo sapien
ggcactactgggttatgaaggaaaa

SEQ ID NO: 3349559 - DNA, 25 bp, Homo sapien
ctgggatctgctgagttagacccct

SEQ ID NO: 3349560 - DNA, 25 bp, Homo sapien
aaaagtgtaatgtctgggccggtgt

SEQ ID NO: 3349561 - DNA, 25 bp, Homo sapien
atttgtcagggcagtgtacttgttc

SEQ ID NO: 3349562 - DNA, 25 bp, Homo sapien
tttcagagaatcatgcaccctttgc

SEQ ID NO: 3349563 - DNA, 25 bp, Homo sapien
gaagtttgaacttccaaagctgtct

SEQ ID NO: 3349564 - DNA, 25 bp, Homo sapien
tctcttttttctcggactccttatg

SEQ ID NO: 3349565 - DNA, 25 bp, Homo sapien
tagccttgccttattcagggaatac

SEQ ID NO: 3349566 - DNA, 25 bp, Homo sapien
gggaatactggaatataaacatctt

SEQ ID NO: 3349567 - DNA, 25 bp, Homo sapien
gttttccaagcttttctggcttcat

SEQ ID NO: 3349568 - DNA, 25 bp, Homo sapien
cagggaatactggaatataaacatc

SEQ ID NO: 3349569 - DNA, 25 bp, Homo sapien
actgtatgcttcagaaaaagtcaaa

SEQ ID NO: 3349570 - DNA, 25 bp, Homo sapien
ttaactttataacagtgccccacta

SEQ ID NO: 3349571 - DNA, 25 bp, Homo sapien
aaagtcaaatcatatcttgaatgct

SEQ ID NO: 3349572 - DNA, 25 bp, Homo sapien
aaaagtcaaatcatatcttgaatgc

SEQ ID NO: 3349573 - DNA, 25 bp, Homo sapien
gttgacatttcaatttgccagcttc

SEQ ID NO: 3349574 - DNA, 25 bp, Homo sapien
cctttcttgttctattggctacaga

SEQ ID NO: 3349575 - DNA, 25 bp, Homo sapien
tagggttttatatgcgtctgttgac

SEQ ID NO: 3349576 - DNA, 25 bp, Homo sapien
gccttgctagtctactcctttcttg

SEQ ID NO: 3349577 - DNA, 25 bp, Homo sapien
ctcttattgcccaacctgtgtgcac

SEQ ID NO: 3349578 - DNA, 25 bp, Homo sapien
tctcttattgcccaacctgtgtgca

SEQ ID NO: 3349579 - DNA, 25 bp, Homo sapien
attctcttattgcccaacctgtgtg

SEQ ID NO: 3349580 - DNA, 25 bp, Homo sapien
tcttattgcccaacctgtgtgcaca

SEQ ID NO: 3349581 - DNA, 25 bp, Homo sapien
agcagccgtcttcttgccagagcca

SEQ ID NO: 3349582 - DNA, 25 bp, Homo sapien
agccaagccacaccagcgaggcctg

SEQ ID NO: 3349583 - DNA, 25 bp, Homo sapien
tgagctgctagtctgggaatgacca

SEQ ID NO: 3349584 - DNA, 25 bp, Homo sapien
ctctggcgtccaggcatagacacag

SEQ ID NO: 3349585 - DNA, 25 bp, Homo sapien
catatttatctcatagtgctcttac

SEQ ID NO: 3349586 - DNA, 25 bp, Homo sapien
catagtgctcttaccgctgttttct

SEQ ID NO: 3349587 - DNA, 25 bp, Homo sapien
tctcatagtgctcttaccgctgttt

SEQ ID NO: 3349588 - DNA, 25 bp, Homo sapien
ttatctcatagtgctcttaccgctg

SEQ ID NO: 3349589 - DNA, 25 bp, Homo sapien
tccagatggatggttaagaactgca

SEQ ID NO: 3349590 - DNA, 25 bp, Homo sapien
tctaggaagttcttgattaaaggat

SEQ ID NO: 3349591 - DNA, 25 bp, Homo sapien
gatggttaagaactgcaaagcagag

SEQ ID NO: 3349592 - DNA, 25 bp, Homo sapien
gatggatggttaagaactgcaaagc

SEQ ID NO: 3349593 - DNA, 25 bp, Homo sapien
cagtaaaatcttgtacaaatcgaat

SEQ ID NO: 3349594 - DNA, 25 bp, Homo sapien
agtaaaatcttgtacaaatcgaatt

SEQ ID NO: 3349595 - DNA, 25 bp, Homo sapien
cagtggttgatgcctctgtttttct

SEQ ID NO: 3349596 - DNA, 25 bp, Homo sapien
tctccacttatttagtactctgcta

SEQ ID NO: 3349597 - DNA, 25 bp, Homo sapien
ttcagacgtggcaagctgtaatgag

SEQ ID NO: 3349598 - DNA, 25 bp, Homo sapien
taatgagaaaggatgcagtggttga

SEQ ID NO: 3349599 - DNA, 25 bp, Homo sapien
taacacattgaacatcttgaggtat

SEQ ID NO: 3349600 - DNA, 25 bp, Homo sapien
ttaacacattgaacatcttgaggta

SEQ ID NO: 3349601 - DNA, 25 bp, Homo sapien
gcttaactccttcaatagctattac

SEQ ID NO: 3349602 - DNA, 25 bp, Homo sapien
ctgcttaactccttcaatagctatt

SEQ ID NO: 3349603 - DNA, 25 bp, Homo sapien
cttaactccttcaatagctattacc

SEQ ID NO: 3349604 - DNA, 25 bp, Homo sapien
tgcttaactccttcaatagctatta

SEQ ID NO: 3349605 - DNA, 25 bp, Homo sapien
gattcttgtgagatggacttcttca

SEQ ID NO: 3349606 - DNA, 25 bp, Homo sapien
tccttctcgatattgattcttgtga

SEQ ID NO: 3349607 - DNA, 25 bp, Homo sapien
tcttcaattagaactccttttgcct

SEQ ID NO: 3349608 - DNA, 25 bp, Homo sapien
tggacttcttcaattagaactcctt

SEQ ID NO: 3349609 - DNA, 25 bp, Homo sapien
tctcgaggagggcattacacagctt

SEQ ID NO: 3349610 - DNA, 25 bp, Homo sapien
aaatcactcggtattctagacagtc

SEQ ID NO: 3349611 - DNA, 25 bp, Homo sapien
caacttgtgagcttctctcgaggag

SEQ ID NO: 3349612 - DNA, 25 bp, Homo sapien
tatgcccaaattgttgctacagtcc

SEQ ID NO: 3349613 - DNA, 25 bp, Homo sapien
tacagcatgaatagttggagaacct

SEQ ID NO: 3349614 - DNA, 25 bp, Homo sapien
caaacttggacaggacactatcagt

SEQ ID NO: 3349615 - DNA, 25 bp, Homo sapien
cgaataatctgagtagagcaaaggc

SEQ ID NO: 3349616 - DNA, 25 bp, Homo sapien
tagtggacagtaatgatggagcaat

SEQ ID NO: 3349617 - DNA, 25 bp, Homo sapien
gcttgggttacttgaggagaccacc

SEQ ID NO: 3349618 - DNA, 25 bp, Homo sapien
tgggttacttgaggagaccacctgg

SEQ ID NO: 3349619 - DNA, 25 bp, Homo sapien
tctgtttcgggtttttccactctga

SEQ ID NO: 3349620 - DNA, 25 bp, Homo sapien
gaaagcgtgcacaggcattggtctt

SEQ ID NO: 3349621 - DNA, 25 bp, Homo sapien
catatttttgtactcggctggagag

SEQ ID NO: 3349622 - DNA, 25 bp, Homo sapien
tgtcactgaggttgctactggctac

SEQ ID NO: 3349623 - DNA, 25 bp, Homo sapien
ttgcagagcaacaaacagtgcggtg

SEQ ID NO: 3349624 - DNA, 25 bp, Homo sapien
aaagtactgctattctcaaggcctt

SEQ ID NO: 3349625 - DNA, 25 bp, Homo sapien
gaccttttcccagcatagtaccacg

SEQ ID NO: 3349626 - DNA, 25 bp, Homo sapien
ggcatggctgcgagggaaagtactg

SEQ ID NO: 3349627 - DNA, 25 bp, Homo sapien
tccttagaacgggaaataggcatgg

SEQ ID NO: 3349628 - DNA, 25 bp, Homo sapien
ctggaagttgacttttgttccggtg

SEQ ID NO: 3349629 - DNA, 25 bp, Homo sapien
ggttggagggcaaaaggaaattgca

SEQ ID NO: 3349630 - DNA, 25 bp, Homo sapien
tgggaagtaggccaaacacgatcat

SEQ ID NO: 3349631 - DNA, 25 bp, Homo sapien
tgttccggtgaggttggagggcaaa

SEQ ID NO: 3349632 - DNA, 25 bp, Homo sapien
aaggttcagaccatgctttgttttg

SEQ ID NO: 3349633 - DNA, 25 bp, Homo sapien
tagatgaaggttcagaccatgcttt

SEQ ID NO: 3349634 - DNA, 25 bp, Homo sapien
gatgaaggttcagaccatgctttgt

SEQ ID NO: 3349635 - DNA, 25 bp, Homo sapien
aattagatgaaggttcagaccatgc

SEQ ID NO: 3349636 - DNA, 25 bp, Homo sapien
catgctagcgatgctggccctgtct

SEQ ID NO: 3349637 - DNA, 25 bp, Homo sapien
gagttagagatgttggaactgcatc

SEQ ID NO: 3349638 - DNA, 25 bp, Homo sapien
agaggctccaccatgctagcgatgc

SEQ ID NO: 3349639 - DNA, 25 bp, Homo sapien
gaactgcatcaagctgcctcaggca

SEQ ID NO: 3349640 - DNA, 25 bp, Homo sapien
tcttggttgtgagaggtatacctca

SEQ ID NO: 3349641 - DNA, 25 bp, Homo sapien
cttaattttgggcaaccaactctct

SEQ ID NO: 3349642 - DNA, 25 bp, Homo sapien
ctctcttgaccatgattggccttaa

SEQ ID NO: 3349643 - DNA, 25 bp, Homo sapien
ctctcttggttgtgagaggtatacc
